United States Patent Application Publication US 2015/0141320 A1 - sequence listing, part 37

SEQ ID NO: 1407614 - DNA, 15 bp, Homo sapiens
ccctttatgtcataa

SEQ ID NO: 1407615 - DNA, 15 bp, Homo sapiens
tccctttatgtcata

SEQ ID NO: 1407616 - DNA, 15 bp, Homo sapiens
ttccctttatgtcat

SEQ ID NO: 1407617 - DNA, 15 bp, Homo sapiens
tttccctttatgtca

SEQ ID NO: 1407618 - DNA, 15 bp, Homo sapiens
atttccctttatgtc

SEQ ID NO: 1407619 - DNA, 15 bp, Homo sapiens
aatttccctttatgt

SEQ ID NO: 1407620 - DNA, 15 bp, Homo sapiens
aaatttccctttatg

SEQ ID NO: 1407621 - DNA, 15 bp, Homo sapiens
taaatttccctttat

SEQ ID NO: 1407622 - DNA, 15 bp, Homo sapiens
ataaatttcccttta

SEQ ID NO: 1407623 - DNA, 15 bp, Homo sapiens
cataaatttcccttt

SEQ ID NO: 1407624 - DNA, 15 bp, Homo sapiens
tcataaatttccctt

SEQ ID NO: 1407625 - DNA, 15 bp, Homo sapiens
ttcataaatttccct

SEQ ID NO: 1407626 - DNA, 15 bp, Homo sapiens
cttcataaatttccc

SEQ ID NO: 1407627 - DNA, 15 bp, Homo sapiens
ccttcataaatttcc

SEQ ID NO: 1407628 - DNA, 15 bp, Homo sapiens
accttcataaatttc

SEQ ID NO: 1407629 - DNA, 15 bp, Homo sapiens
caccttcataaattt

SEQ ID NO: 1407630 - DNA, 15 bp, Homo sapiens
ccaccttcataaatt

SEQ ID NO: 1407631 - DNA, 15 bp, Homo sapiens
gccaccttcataaat

SEQ ID NO: 1407632 - DNA, 15 bp, Homo sapiens
tgccaccttcataaa

SEQ ID NO: 1407633 - DNA, 15 bp, Homo sapiens
gtgccaccttcataa

SEQ ID NO: 1407634 - DNA, 15 bp, Homo sapiens
tgtgccaccttcata

SEQ ID NO: 1407635 - DNA, 15 bp, Homo sapiens
ttgtgccaccttcat

SEQ ID NO: 1407636 - DNA, 15 bp, Homo sapiens
tttgtgccaccttca

SEQ ID NO: 1407637 - DNA, 15 bp, Homo sapiens
ctttgtgccaccttc

SEQ ID NO: 1407638 - DNA, 15 bp, Homo sapiens
cctttgtgccacctt

SEQ ID NO: 1407639 - DNA, 15 bp, Homo sapiens
tcctttgtgccacct

SEQ ID NO: 1407640 - DNA, 15 bp, Homo sapiens
gtcctttgtgccacc

SEQ ID NO: 1407641 - DNA, 15 bp, Homo sapiens
tgtcctttgtgccac

SEQ ID NO: 1407642 - DNA, 15 bp, Homo sapiens
atgtcctttgtgcca

SEQ ID NO: 1407643 - DNA, 15 bp, Homo sapiens
gatgtcctttgtgcc

SEQ ID NO: 1407644 - DNA, 15 bp, Homo sapiens
tgatgtcctttgtgc

SEQ ID NO: 1407645 - DNA, 15 bp, Homo sapiens
ctgatgtcctttgtg

SEQ ID NO: 1407646 - DNA, 15 bp, Homo sapiens
actgatgtcctttgt

SEQ ID NO: 1407647 - DNA, 15 bp, Homo sapiens
aactgatgtcctttg

SEQ ID NO: 1407648 - DNA, 15 bp, Homo sapiens
aaactgatgtccttt

SEQ ID NO: 1407649 - DNA, 15 bp, Homo sapiens
aaaactgatgtcctt

SEQ ID NO: 1407650 - DNA, 15 bp, Homo sapiens
taaaactgatgtcct

SEQ ID NO: 1407651 - DNA, 15 bp, Homo sapiens
ttaaaactgatgtcc

SEQ ID NO: 1407652 - DNA, 15 bp, Homo sapiens
tttaaaactgatgtc

SEQ ID NO: 1407653 - DNA, 15 bp, Homo sapiens
ttttaaaactgatgt

SEQ ID NO: 1407654 - DNA, 15 bp, Homo sapiens
cttttaaaactgatg

SEQ ID NO: 1407655 - DNA, 15 bp, Homo sapiens
tcttttaaaactgat

SEQ ID NO: 1407656 - DNA, 15 bp, Homo sapiens
atcttttaaaactga

SEQ ID NO: 1407657 - DNA, 15 bp, Homo sapiens
aatcttttaaaactg

SEQ ID NO: 1407658 - DNA, 15 bp, Homo sapiens
taatcttttaaaact

SEQ ID NO: 1407659 - DNA, 15 bp, Homo sapiens
ttaatcttttaaaac

SEQ ID NO: 1407660 - DNA, 15 bp, Homo sapiens
cttaatcttttaaaa

SEQ ID NO: 1407661 - DNA, 15 bp, Homo sapiens
tcttaatcttttaaa

SEQ ID NO: 1407662 - DNA, 15 bp, Homo sapiens
ttcttaatcttttaa

SEQ ID NO: 1407663 - DNA, 15 bp, Homo sapiens
attcttaatctttta

SEQ ID NO: 1407664 - DNA, 15 bp, Homo sapiens
tattcttaatctttt

SEQ ID NO: 1407665 - DNA, 15 bp, Homo sapiens
atattcttaatcttt

SEQ ID NO: 1407666 - DNA, 15 bp, Homo sapiens
tatattcttaatctt

SEQ ID NO: 1407667 - DNA, 15 bp, Homo sapiens
atatattcttaatct

SEQ ID NO: 1407668 - DNA, 15 bp, Homo sapiens
gatatattcttaatc

SEQ ID NO: 1407669 - DNA, 15 bp, Homo sapiens
ggatatattcttaat

SEQ ID NO: 1407670 - DNA, 15 bp, Homo sapiens
tggatatattcttaa

SEQ ID NO: 1407671 - DNA, 15 bp, Homo sapiens
atggatatattctta

SEQ ID NO: 1407672 - DNA, 15 bp, Homo sapiens
aatggatatattctt

SEQ ID NO: 1407673 - DNA, 15 bp, Homo sapiens
taatggatatattct

SEQ ID NO: 1407674 - DNA, 15 bp, Homo sapiens
ctaatggatatattc

SEQ ID NO: 1407675 - DNA, 15 bp, Homo sapiens
tctaatggatatatt

SEQ ID NO: 1407676 - DNA, 15 bp, Homo sapiens
ttctaatggatatat

SEQ ID NO: 1407677 - DNA, 15 bp, Homo sapiens
gttctaatggatata

SEQ ID NO: 1407678 - DNA, 15 bp, Homo sapiens
ggttctaatggatat

SEQ ID NO: 1407679 - DNA, 15 bp, Homo sapiens
gggttctaatggata

SEQ ID NO: 1407680 - DNA, 15 bp, Homo sapiens
tgggttctaatggat

SEQ ID NO: 1407681 - DNA, 15 bp, Homo sapiens
ttgggttctaatgga

SEQ ID NO: 1407682 - DNA, 15 bp, Homo sapiens
tttgggttctaatgg

SEQ ID NO: 1407683 - DNA, 15 bp, Homo sapiens
atttgggttctaatg

SEQ ID NO: 1407684 - DNA, 15 bp, Homo sapiens
tatttgggttctaat

SEQ ID NO: 1407685 - DNA, 15 bp, Homo sapiens
atatttgggttctaa

SEQ ID NO: 1407686 - DNA, 15 bp, Homo sapiens
aatatttgggttcta

SEQ ID NO: 1407687 - DNA, 15 bp, Homo sapiens
gaatatttgggttct

SEQ ID NO: 1407688 - DNA, 15 bp, Homo sapiens
tgaatatttgggttc

SEQ ID NO: 1407689 - DNA, 15 bp, Homo sapiens
atgaatatttgggtt

SEQ ID NO: 1407690 - DNA, 15 bp, Homo sapiens
catgaatatttgggt

SEQ ID NO: 1407691 - DNA, 15 bp, Homo sapiens
acatgaatatttggg

SEQ ID NO: 1407692 - DNA, 15 bp, Homo sapiens
tacatgaatatttgg

SEQ ID NO: 1407693 - DNA, 15 bp, Homo sapiens
atacatgaatatttg

SEQ ID NO: 1407694 - DNA, 15 bp, Homo sapiens
catacatgaatattt

SEQ ID NO: 1407695 - DNA, 15 bp, Homo sapiens
tcatacatgaatatt

SEQ ID NO: 1407696 - DNA, 15 bp, Homo sapiens
ctcatacatgaatat

SEQ ID NO: 1407697 - DNA, 15 bp, Homo sapiens
actcatacatgaata

SEQ ID NO: 1407698 - DNA, 15 bp, Homo sapiens
aactcatacatgaat

SEQ ID NO: 1407699 - DNA, 15 bp, Homo sapiens
taactcatacatgaa

SEQ ID NO: 1407700 - DNA, 15 bp, Homo sapiens
ttaactcatacatga

SEQ ID NO: 1407701 - DNA, 15 bp, Homo sapiens
tttaactcatacatg

SEQ ID NO: 1407702 - DNA, 15 bp, Homo sapiens
gtttaactcatacat

SEQ ID NO: 1407703 - DNA, 15 bp, Homo sapiens
agtttaactcataca

SEQ ID NO: 1407704 - DNA, 15 bp, Homo sapiens
cagtttaactcatac

SEQ ID NO: 1407705 - DNA, 15 bp, Homo sapiens
tcagtttaactcata

SEQ ID NO: 1407706 - DNA, 15 bp, Homo sapiens
atcagtttaactcat

SEQ ID NO: 1407707 - DNA, 15 bp, Homo sapiens
catcagtttaactca

SEQ ID NO: 1407708 - DNA, 15 bp, Homo sapiens
tcatcagtttaactc

SEQ ID NO: 1407709 - DNA, 15 bp, Homo sapiens
ttcatcagtttaact

SEQ ID NO: 1407710 - DNA, 15 bp, Homo sapiens
gttcatcagtttaac

SEQ ID NO: 1407711 - DNA, 15 bp, Homo sapiens
agttcatcagtttaa

SEQ ID NO: 1407712 - DNA, 15 bp, Homo sapiens
tagttcatcagttta

SEQ ID NO: 1407713 - DNA, 15 bp, Homo sapiens
ctagttcatcagttt

SEQ ID NO: 1407714 - DNA, 15 bp, Homo sapiens
gctagttcatcagtt

SEQ ID NO: 1407715 - DNA, 15 bp, Homo sapiens
agctagttcatcagt

SEQ ID NO: 1407716 - DNA, 15 bp, Homo sapiens
tagctagttcatcag

SEQ ID NO: 1407717 - DNA, 15 bp, Homo sapiens
ttagctagttcatca

SEQ ID NO: 1407718 - DNA, 15 bp, Homo sapiens
gttagctagttcatc

SEQ ID NO: 1407719 - DNA, 15 bp, Homo sapiens
agttagctagttcat

SEQ ID NO: 1407720 - DNA, 15 bp, Homo sapiens
gagttagctagttca

SEQ ID NO: 1407721 - DNA, 15 bp, Homo sapiens
ggagttagctagttc

SEQ ID NO: 1407722 - DNA, 15 bp, Homo sapiens
aggagttagctagtt

SEQ ID NO: 1407723 - DNA, 15 bp, Homo sapiens
aaggagttagctagt

SEQ ID NO: 1407724 - DNA, 15 bp, Homo sapiens
gaaggagttagctag

SEQ ID NO: 1407725 - DNA, 15 bp, Homo sapiens
agaaggagttagcta

SEQ ID NO: 1407726 - DNA, 15 bp, Homo sapiens
cagaaggagttagct

SEQ ID NO: 1407727 - DNA, 15 bp, Homo sapiens
tcagaaggagttagc

SEQ ID NO: 1407728 - DNA, 15 bp, Homo sapiens
atcagaaggagttag

SEQ ID NO: 1407729 - DNA, 15 bp, Homo sapiens
catcagaaggagtta

SEQ ID NO: 1407730 - DNA, 15 bp, Homo sapiens
acatcagaaggagtt

SEQ ID NO: 1407731 - DNA, 15 bp, Homo sapiens
gacatcagaaggagt

SEQ ID NO: 1407732 - DNA, 15 bp, Homo sapiens
agacatcagaaggag

SEQ ID NO: 1407733 - DNA, 15 bp, Homo sapiens
tagacatcagaagga

SEQ ID NO: 1407734 - DNA, 15 bp, Homo sapiens
atagacatcagaagg

SEQ ID NO: 1407735 - DNA, 15 bp, Homo sapiens
catagacatcagaag

SEQ ID NO: 1407736 - DNA, 15 bp, Homo sapiens
acatagacatcagaa

SEQ ID NO: 1407737 - DNA, 15 bp, Homo sapiens
aacatagacatcaga

SEQ ID NO: 1407738 - DNA, 15 bp, Homo sapiens
caacatagacatcag

SEQ ID NO: 1407739 - DNA, 15 bp, Homo sapiens
ccaacatagacatca

SEQ ID NO: 1407740 - DNA, 15 bp, Homo sapiens
accaacatagacatc

SEQ ID NO: 1407741 - DNA, 15 bp, Homo sapiens
aaccaacatagacat

SEQ ID NO: 1407742 - DNA, 15 bp, Homo sapiens
aaaccaacatagaca

SEQ ID NO: 1407743 - DNA, 15 bp, Homo sapiens
aaaaccaacatagac

SEQ ID NO: 1407744 - DNA, 15 bp, Homo sapiens
taaaaccaacataga

SEQ ID NO: 1407745 - DNA, 15 bp, Homo sapiens
ttaaaaccaacatag

SEQ ID NO: 1407746 - DNA, 15 bp, Homo sapiens
attaaaaccaacata

SEQ ID NO: 1407747 - DNA, 15 bp, Homo sapiens
gattaaaaccaacat

SEQ ID NO: 1407748 - DNA, 15 bp, Homo sapiens
ggattaaaaccaaca

SEQ ID NO: 1407749 - DNA, 15 bp, Homo sapiens
aggattaaaaccaac

SEQ ID NO: 1407750 - DNA, 15 bp, Homo sapiens
caggattaaaaccaa

SEQ ID NO: 1407751 - DNA, 15 bp, Homo sapiens
acaggattaaaacca

SEQ ID NO: 1407752 - DNA, 15 bp, Homo sapiens
tacaggattaaaacc

SEQ ID NO: 1407753 - DNA, 15 bp, Homo sapiens
gtacaggattaaaac

SEQ ID NO: 1407754 - DNA, 15 bp, Homo sapiens
ggtacaggattaaaa

SEQ ID NO: 1407755 - DNA, 15 bp, Homo sapiens
tggtacaggattaaa

SEQ ID NO: 1407756 - DNA, 15 bp, Homo sapiens
gtggtacaggattaa

SEQ ID NO: 1407757 - DNA, 15 bp, Homo sapiens
ggtggtacaggatta

SEQ ID NO: 1407758 - DNA, 15 bp, Homo sapiens
aggtggtacaggatt

SEQ ID NO: 1407759 - DNA, 15 bp, Homo sapiens
gaggtggtacaggat

SEQ ID NO: 1407760 - DNA, 15 bp, Homo sapiens
agaggtggtacagga

SEQ ID NO: 1407761 - DNA, 15 bp, Homo sapiens
aagaggtggtacagg

SEQ ID NO: 1407762 - DNA, 15 bp, Homo sapiens
taagaggtggtacag

SEQ ID NO: 1407763 - DNA, 15 bp, Homo sapiens
ttaagaggtggtaca

SEQ ID NO: 1407764 - DNA, 15 bp, Homo sapiens
cttaagaggtggtac

SEQ ID NO: 1407765 - DNA, 15 bp, Homo sapiens
acttaagaggtggta

SEQ ID NO: 1407766 - DNA, 15 bp, Homo sapiens
tacttaagaggtggt

SEQ ID NO: 1407767 - DNA, 15 bp, Homo sapiens
atacttaagaggtgg

SEQ ID NO: 1407768 - DNA, 15 bp, Homo sapiens
catacttaagaggtg

SEQ ID NO: 1407769 - DNA, 15 bp, Homo sapiens
tcatacttaagaggt

SEQ ID NO: 1407770 - DNA, 15 bp, Homo sapiens
atcatacttaagagg

SEQ ID NO: 1407771 - DNA, 15 bp, Homo sapiens
aatcatacttaagag

SEQ ID NO: 1407772 - DNA, 15 bp, Homo sapiens
gaatcatacttaaga

SEQ ID NO: 1407773 - DNA, 15 bp, Homo sapiens
cgaatcatacttaag

SEQ ID NO: 1407774 - DNA, 15 bp, Homo sapiens
ccgaatcatacttaa

SEQ ID NO: 1407775 - DNA, 15 bp, Homo sapiens
gccgaatcatactta

SEQ ID NO: 1407776 - DNA, 15 bp, Homo sapiens
ggccgaatcatactt

SEQ ID NO: 1407777 - DNA, 15 bp, Homo sapiens
aggccgaatcatact

SEQ ID NO: 1407778 - DNA, 15 bp, Homo sapiens
aaggccgaatcatac

SEQ ID NO: 1407779 - DNA, 15 bp, Homo sapiens
gaaggccgaatcata

SEQ ID NO: 1407780 - DNA, 15 bp, Homo sapiens
agaaggccgaatcat

SEQ ID NO: 1407781 - DNA, 15 bp, Homo sapiens
cagaaggccgaatca

SEQ ID NO: 1407782 - DNA, 15 bp, Homo sapiens
tcagaaggccgaatc

SEQ ID NO: 1407783 - DNA, 15 bp, Homo sapiens
ttcagaaggccgaat

SEQ ID NO: 1407784 - DNA, 15 bp, Homo sapiens
tttcagaaggccgaa

SEQ ID NO: 1407785 - DNA, 15 bp, Homo sapiens
ttttcagaaggccga

SEQ ID NO: 1407786 - DNA, 15 bp, Homo sapiens
cttttcagaaggccg

SEQ ID NO: 1407787 - DNA, 15 bp, Homo sapiens
acttttcagaaggcc

SEQ ID NO: 1407788 - DNA, 15 bp, Homo sapiens
tacttttcagaaggc

SEQ ID NO: 1407789 - DNA, 15 bp, Homo sapiens
ttacttttcagaagg

SEQ ID NO: 1407790 - DNA, 15 bp, Homo sapiens
gttacttttcagaag

SEQ ID NO: 1407791 - DNA, 15 bp, Homo sapiens
tgttacttttcagaa

SEQ ID NO: 1407792 - DNA, 15 bp, Homo sapiens
atgttacttttcaga

SEQ ID NO: 1407793 - DNA, 15 bp, Homo sapiens
aatgttacttttcag

SEQ ID NO: 1407794 - DNA, 15 bp, Homo sapiens
caatgttacttttca

SEQ ID NO: 1407795 - DNA, 15 bp, Homo sapiens
gcaatgttacttttc

SEQ ID NO: 1407796 - DNA, 15 bp, Homo sapiens
agcaatgttactttt

SEQ ID NO: 1407797 - DNA, 15 bp, Homo sapiens
cagcaatgttacttt

SEQ ID NO: 1407798 - DNA, 15 bp, Homo sapiens
tcagcaatgttactt

SEQ ID NO: 1407799 - DNA, 15 bp, Homo sapiens
ttcagcaatgttact

SEQ ID NO: 1407800 - DNA, 15 bp, Homo sapiens
tttcagcaatgttac

SEQ ID NO: 1407801 - DNA, 15 bp, Homo sapiens
gtttcagcaatgtta

SEQ ID NO: 1407802 - DNA, 15 bp, Homo sapiens
agtttcagcaatgtt

SEQ ID NO: 1407803 - DNA, 15 bp, Homo sapiens
gagtttcagcaatgt

SEQ ID NO: 1407804 - DNA, 15 bp, Homo sapiens
agagtttcagcaatg

SEQ ID NO: 1407805 - DNA, 15 bp, Homo sapiens
cagagtttcagcaat

SEQ ID NO: 1407806 - DNA, 15 bp, Homo sapiens
gcagagtttcagcaa

SEQ ID NO: 1407807 - DNA, 15 bp, Homo sapiens
tgcagagtttcagca

SEQ ID NO: 1407808 - DNA, 15 bp, Homo sapiens
atgcagagtttcagc

SEQ ID NO: 1407809 - DNA, 15 bp, Homo sapiens
aatgcagagtttcag

SEQ ID NO: 1407810 - DNA, 15 bp, Homo sapiens
taatgcagagtttca

SEQ ID NO: 1407811 - DNA, 15 bp, Homo sapiens
ataatgcagagtttc

SEQ ID NO: 1407812 - DNA, 15 bp, Homo sapiens
cataatgcagagttt

SEQ ID NO: 1407813 - DNA, 15 bp, Homo sapiens
acataatgcagagtt

SEQ ID NO: 1407814 - DNA, 15 bp, Homo sapiens
aacataatgcagagt

SEQ ID NO: 1407815 - DNA, 15 bp, Homo sapiens
gaacataatgcagag

SEQ ID NO: 1407816 - DNA, 15 bp, Homo sapiens
agaacataatgcaga

SEQ ID NO: 1407817 - DNA, 15 bp, Homo sapiens
tagaacataatgcag

SEQ ID NO: 1407818 - DNA, 15 bp, Homo sapiens
ttagaacataatgca

SEQ ID NO: 1407819 - DNA, 15 bp, Homo sapiens
gttagaacataatgc

SEQ ID NO: 1407820 - DNA, 15 bp, Homo sapiens
agttagaacataatg

SEQ ID NO: 1407821 - DNA, 15 bp, Homo sapiens
gagttagaacataat

SEQ ID NO: 1407822 - DNA, 15 bp, Homo sapiens
tgagttagaacataa

SEQ ID NO: 1407823 - DNA, 15 bp, Homo sapiens
ttgagttagaacata

SEQ ID NO: 1407824 - DNA, 15 bp, Homo sapiens
attgagttagaacat

SEQ ID NO: 1407825 - DNA, 15 bp, Homo sapiens
gattgagttagaaca

SEQ ID NO: 1407826 - DNA, 15 bp, Homo sapiens
agattgagttagaac

SEQ ID NO: 1407827 - DNA, 15 bp, Homo sapiens
cagattgagttagaa

SEQ ID NO: 1407828 - DNA, 15 bp, Homo sapiens
tcagattgagttaga

SEQ ID NO: 1407829 - DNA, 15 bp, Homo sapiens
atcagattgagttag

SEQ ID NO: 1407830 - DNA, 15 bp, Homo sapiens
catcagattgagtta

SEQ ID NO: 1407831 - DNA, 15 bp, Homo sapiens
tcatcagattgagtt

SEQ ID NO: 1407832 - DNA, 15 bp, Homo sapiens
gtcatcagattgagt

SEQ ID NO: 1407833 - DNA, 15 bp, Homo sapiens
tgtcatcagattgag

SEQ ID NO: 1407834 - DNA, 15 bp, Homo sapiens
ttgtcatcagattga

SEQ ID NO: 1407835 - DNA, 15 bp, Homo sapiens
gttgtcatcagattg

SEQ ID NO: 1407836 - DNA, 15 bp, Homo sapiens
ggttgtcatcagatt

SEQ ID NO: 1407837 - DNA, 15 bp, Homo sapiens
tggttgtcatcagat

SEQ ID NO: 1407838 - DNA, 15 bp, Homo sapiens
ctggttgtcatcaga

SEQ ID NO: 1407839 - DNA, 15 bp, Homo sapiens
tctggttgtcatcag

SEQ ID NO: 1407840 - DNA, 15 bp, Homo sapiens
gtctggttgtcatca

SEQ ID NO: 1407841 - DNA, 15 bp, Homo sapiens
agtctggttgtcatc

SEQ ID NO: 1407842 - DNA, 15 bp, Homo sapiens
gagtctggttgtcat

SEQ ID NO: 1407843 - DNA, 15 bp, Homo sapiens
tgagtctggttgtca

SEQ ID NO: 1407844 - DNA, 15 bp, Homo sapiens
ctgagtctggttgtc

SEQ ID NO: 1407845 - DNA, 15 bp, Homo sapiens
tctgagtctggttgt

SEQ ID NO: 1407846 - DNA, 15 bp, Homo sapiens
atctgagtctggttg

SEQ ID NO: 1407847 - DNA, 15 bp, Homo sapiens
aatctgagtctggtt

SEQ ID NO: 1407848 - DNA, 15 bp, Homo sapiens
taatctgagtctggt

SEQ ID NO: 1407849 - DNA, 15 bp, Homo sapiens
gtaatctgagtctgg

SEQ ID NO: 1407850 - DNA, 15 bp, Homo sapiens
agtaatctgagtctg

SEQ ID NO: 1407851 - DNA, 15 bp, Homo sapiens
aagtaatctgagtct

SEQ ID NO: 1407852 - DNA, 15 bp, Homo sapiens
taagtaatctgagtc

SEQ ID NO: 1407853 - DNA, 15 bp, Homo sapiens
ttaagtaatctgagt

SEQ ID NO: 1407854 - DNA, 15 bp, Homo sapiens
cttaagtaatctgag

SEQ ID NO: 1407855 - DNA, 15 bp, Homo sapiens
tcttaagtaatctga

SEQ ID NO: 1407856 - DNA, 15 bp, Homo sapiens
ctcttaagtaatctg

SEQ ID NO: 1407857 - DNA, 15 bp, Homo sapiens
gctcttaagtaatct

SEQ ID NO: 1407858 - DNA, 15 bp, Homo sapiens
tgctcttaagtaatc

SEQ ID NO: 1407859 - DNA, 15 bp, Homo sapiens
atgctcttaagtaat

SEQ ID NO: 1407860 - DNA, 15 bp, Homo sapiens
tatgctcttaagtaa

SEQ ID NO: 1407861 - DNA, 15 bp, Homo sapiens
ctatgctcttaagta

SEQ ID NO: 1407862 - DNA, 15 bp, Homo sapiens
gctatgctcttaagt

SEQ ID NO: 1407863 - DNA, 15 bp, Homo sapiens
agctatgctcttaag

SEQ ID NO: 1407864 - DNA, 15 bp, Homo sapiens
cagctatgctcttaa

SEQ ID NO: 1407865 - DNA, 15 bp, Homo sapiens
acagctatgctctta

SEQ ID NO: 1407866 - DNA, 15 bp, Homo sapiens
cacagctatgctctt

SEQ ID NO: 1407867 - DNA, 15 bp, Homo sapiens
gcacagctatgctct

SEQ ID NO: 1407868 - DNA, 15 bp, Homo sapiens
agcacagctatgctc

SEQ ID NO: 1407869 - DNA, 15 bp, Homo sapiens
gagcacagctatgct

SEQ ID NO: 1407870 - DNA, 15 bp, Homo sapiens
ggagcacagctatgc

SEQ ID NO: 1407871 - DNA, 15 bp, Homo sapiens
aggagcacagctatg

SEQ ID NO: 1407872 - DNA, 15 bp, Homo sapiens
taggagcacagctat

SEQ ID NO: 1407873 - DNA, 15 bp, Homo sapiens
ttaggagcacagcta

SEQ ID NO: 1407874 - DNA, 15 bp, Homo sapiens
gttaggagcacagct

SEQ ID NO: 1407875 - DNA, 15 bp, Homo sapiens
tgttaggagcacagc

SEQ ID NO: 1407876 - DNA, 15 bp, Homo sapiens
ttgttaggagcacag

SEQ ID NO: 1407877 - DNA, 15 bp, Homo sapiens
tttgttaggagcaca

SEQ ID NO: 1407878 - DNA, 15 bp, Homo sapiens
ttttgttaggagcac

SEQ ID NO: 1407879 - DNA, 15 bp, Homo sapiens
attttgttaggagca

SEQ ID NO: 1407880 - DNA, 15 bp, Homo sapiens
tattttgttaggagc

SEQ ID NO: 1407881 - DNA, 15 bp, Homo sapiens
atattttgttaggag

SEQ ID NO: 1407882 - DNA, 15 bp, Homo sapiens
aatattttgttagga

SEQ ID NO: 1407883 - DNA, 15 bp, Homo sapiens
taatattttgttagg

SEQ ID NO: 1407884 - DNA, 15 bp, Homo sapiens
gtaatattttgttag

SEQ ID NO: 1407885 - DNA, 15 bp, Homo sapiens
agtaatattttgtta

SEQ ID NO: 1407886 - DNA, 15 bp, Homo sapiens
tagtaatattttgtt

SEQ ID NO: 1407887 - DNA, 15 bp, Homo sapiens
gtagtaatattttgt

SEQ ID NO: 1407888 - DNA, 15 bp, Homo sapiens
tgtagtaatattttg

SEQ ID NO: 1407889 - DNA, 15 bp, Homo sapiens
ctgtagtaatatttt

SEQ ID NO: 1407890 - DNA, 15 bp, Homo sapiens
gctgtagtaatattt

SEQ ID NO: 1407891 - DNA, 15 bp, Homo sapiens
agctgtagtaatatt

SEQ ID NO: 1407892 - DNA, 15 bp, Homo sapiens
cagctgtagtaatat

SEQ ID NO: 1407893 - DNA, 15 bp, Homo sapiens
gcagctgtagtaata

SEQ ID NO: 1407894 - DNA, 15 bp, Homo sapiens
ggcagctgtagtaat

SEQ ID NO: 1407895 - DNA, 15 bp, Homo sapiens
tggcagctgtagtaa

SEQ ID NO: 1407896 - DNA, 15 bp, Homo sapiens
atggcagctgtagta

SEQ ID NO: 1407897 - DNA, 15 bp, Homo sapiens
catggcagctgtagt

SEQ ID NO: 1407898 - DNA, 15 bp, Homo sapiens
ccatggcagctgtag

SEQ ID NO: 1407899 - DNA, 15 bp, Homo sapiens
cccatggcagctgta

SEQ ID NO: 1407900 - DNA, 15 bp, Homo sapiens
acccatggcagctgt

SEQ ID NO: 1407901 - DNA, 15 bp, Homo sapiens
aacccatggcagctg

SEQ ID NO: 1407902 - DNA, 15 bp, Homo sapiens
aaacccatggcagct

SEQ ID NO: 1407903 - DNA, 15 bp, Homo sapiens
caaacccatggcagc

SEQ ID NO: 1407904 - DNA, 15 bp, Homo sapiens
acaaacccatggcag

SEQ ID NO: 1407905 - DNA, 15 bp, Homo sapiens
gacaaacccatggca

SEQ ID NO: 1407906 - DNA, 15 bp, Homo sapiens
agacaaacccatggc

SEQ ID NO: 1407907 - DNA, 15 bp, Homo sapiens
aagacaaacccatgg

SEQ ID NO: 1407908 - DNA, 15 bp, Homo sapiens
caagacaaacccatg

SEQ ID NO: 1407909 - DNA, 15 bp, Homo sapiens
ccaagacaaacccat

SEQ ID NO: 1407910 - DNA, 15 bp, Homo sapiens
gccaagacaaaccca

SEQ ID NO: 1407911 - DNA, 15 bp, Homo sapiens
agccaagacaaaccc

SEQ ID NO: 1407912 - DNA, 15 bp, Homo sapiens
tagccaagacaaacc

SEQ ID NO: 1407913 - DNA, 15 bp, Homo sapiens
ttagccaagacaaac

SEQ ID NO: 1407914 - DNA, 15 bp, Homo sapiens
cttagccaagacaaa

SEQ ID NO: 1407915 - DNA, 15 bp, Homo sapiens
ccttagccaagacaa

SEQ ID NO: 1407916 - DNA, 15 bp, Homo sapiens
gccttagccaagaca

SEQ ID NO: 1407917 - DNA, 15 bp, Homo sapiens
tgccttagccaagac

SEQ ID NO: 1407918 - DNA, 15 bp, Homo sapiens
gtgccttagccaaga

SEQ ID NO: 1407919 - DNA, 15 bp, Homo sapiens
agtgccttagccaag

SEQ ID NO: 1407920 - DNA, 15 bp, Homo sapiens
tagtgccttagccaa

SEQ ID NO: 1407921 - DNA, 15 bp, Homo sapiens
atagtgccttagcca

SEQ ID NO: 1407922 - DNA, 15 bp, Homo sapiens
catagtgccttagcc

SEQ ID NO: 1407923 - DNA, 15 bp, Homo sapiens
tcatagtgccttagc

SEQ ID NO: 1407924 - DNA, 15 bp, Homo sapiens
ttcatagtgccttag

SEQ ID NO: 1407925 - DNA, 15 bp, Homo sapiens
attcatagtgcctta

SEQ ID NO: 1407926 - DNA, 15 bp, Homo sapiens
aattcatagtgcctt

SEQ ID NO: 1407927 - DNA, 15 bp, Homo sapiens
gaattcatagtgcct

SEQ ID NO: 1407928 - DNA, 15 bp, Homo sapiens
agaattcatagtgcc

SEQ ID NO: 1407929 - DNA, 15 bp, Homo sapiens
cagaattcatagtgc

SEQ ID NO: 1407930 - DNA, 15 bp, Homo sapiens
gcagaattcatagtg

SEQ ID NO: 1407931 - DNA, 15 bp, Homo sapiens
tgcagaattcatagt

SEQ ID NO: 1407932 - DNA, 15 bp, Homo sapiens
ctgcagaattcatag

SEQ ID NO: 1407933 - DNA, 15 bp, Homo sapiens
actgcagaattcata

SEQ ID NO: 1407934 - DNA, 15 bp, Homo sapiens
cactgcagaattcat

SEQ ID NO: 1407935 - DNA, 15 bp, Homo sapiens
gcactgcagaattca

SEQ ID NO: 1407936 - DNA, 15 bp, Homo sapiens
tgcactgcagaattc

SEQ ID NO: 1407937 - DNA, 15 bp, Homo sapiens
ttgcactgcagaatt

SEQ ID NO: 1407938 - DNA, 15 bp, Homo sapiens
attgcactgcagaat

SEQ ID NO: 1407939 - DNA, 15 bp, Homo sapiens
tattgcactgcagaa

SEQ ID NO: 1407940 - DNA, 15 bp, Homo sapiens
gtattgcactgcaga

SEQ ID NO: 1407941 - DNA, 15 bp, Homo sapiens
ggtattgcactgcag

SEQ ID NO: 1407942 - DNA, 15 bp, Homo sapiens
tggtattgcactgca

SEQ ID NO: 1407943 - DNA, 15 bp, Homo sapiens
ttggtattgcactgc

SEQ ID NO: 1407944 - DNA, 15 bp, Homo sapiens
tttggtattgcactg

SEQ ID NO: 1407945 - DNA, 15 bp, Homo sapiens
ctttggtattgcact

SEQ ID NO: 1407946 - DNA, 15 bp, Homo sapiens
tctttggtattgcac

SEQ ID NO: 1407947 - DNA, 15 bp, Homo sapiens
ttctttggtattgca

SEQ ID NO: 1407948 - DNA, 15 bp, Homo sapiens
attctttggtattgc

SEQ ID NO: 1407949 - DNA, 15 bp, Homo sapiens
aattctttggtattg

SEQ ID NO: 1407950 - DNA, 15 bp, Homo sapiens
caattctttggtatt

SEQ ID NO: 1407951 - DNA, 15 bp, Homo sapiens
ccaattctttggtat

SEQ ID NO: 1407952 - DNA, 15 bp, Homo sapiens
tccaattctttggta

SEQ ID NO: 1407953 - DNA, 15 bp, Homo sapiens
ttccaattctttggt

SEQ ID NO: 1407954 - DNA, 15 bp, Homo sapiens
cttccaattctttgg

SEQ ID NO: 1407955 - DNA, 15 bp, Homo sapiens
ttcttccaattcttt

SEQ ID NO: 1407956 - DNA, 15 bp, Homo sapiens
tttcttccaattctt

SEQ ID NO: 1407957 - DNA, 15 bp, Homo sapiens
ttttcttccaattct

SEQ ID NO: 1407958 - DNA, 15 bp, Homo sapiens
attttcttccaattc

SEQ ID NO: 1407959 - DNA, 15 bp, Homo sapiens
cattttcttccaatt

SEQ ID NO: 1407960 - DNA, 15 bp, Homo sapiens
acattttcttccaat

SEQ ID NO: 1407961 - DNA, 15 bp, Homo sapiens
gacattttcttccaa

SEQ ID NO: 1407962 - DNA, 15 bp, Homo sapiens
tgacattttcttcca

SEQ ID NO: 1407963 - DNA, 15 bp, Homo sapiens
ctgacattttcttcc

SEQ ID NO: 1407964 - DNA, 15 bp, Homo sapiens
actgacattttcttc

SEQ ID NO: 1407965 - DNA, 15 bp, Homo sapiens
gactgacattttctt

SEQ ID NO: 1407966 - DNA, 15 bp, Homo sapiens
agactgacattttct

SEQ ID NO: 1407967 - DNA, 15 bp, Homo sapiens
cagactgacattttc

SEQ ID NO: 1407968 - DNA, 15 bp, Homo sapiens
acagactgacatttt

SEQ ID NO: 1407969 - DNA, 15 bp, Homo sapiens
cacagactgacattt

SEQ ID NO: 1407970 - DNA, 15 bp, Homo sapiens
tcacagactgacatt

SEQ ID NO: 1407971 - DNA, 15 bp, Homo sapiens
ttcacagactgacat

SEQ ID NO: 1407972 - DNA, 15 bp, Homo sapiens
attcacagactgaca

SEQ ID NO: 1407973 - DNA, 15 bp, Homo sapiens
aattcacagactgac

SEQ ID NO: 1407974 - DNA, 15 bp, Homo sapiens
gaattcacagactga

SEQ ID NO: 1407975 - DNA, 15 bp, Homo sapiens
ggaattcacagactg

SEQ ID NO: 1407976 - DNA, 15 bp, Homo sapiens
gggaattcacagact

SEQ ID NO: 1407977 - DNA, 15 bp, Homo sapiens
cgggaattcacagac

SEQ ID NO: 1407978 - DNA, 15 bp, Homo sapiens
acgggaattcacaga

SEQ ID NO: 1407979 - DNA, 15 bp, Homo sapiens
aacgggaattcacag

SEQ ID NO: 1407980 - DNA, 15 bp, Homo sapiens
caacgggaattcaca

SEQ ID NO: 1407981 - DNA, 15 bp, Homo sapiens
acaacgggaattcac

SEQ ID NO: 1407982 - DNA, 15 bp, Homo sapiens
cacaacgggaattca

SEQ ID NO: 1407983 - DNA, 15 bp, Homo sapiens
tcacaacgggaattc

SEQ ID NO: 1407984 - DNA, 15 bp, Homo sapiens
gtcacaacgggaatt

SEQ ID NO: 1407985 - DNA, 15 bp, Homo sapiens
agtcacaacgggaat

SEQ ID NO: 1407986 - DNA, 15 bp, Homo sapiens
aagtcacaacgggaa

SEQ ID NO: 1407987 - DNA, 15 bp, Homo sapiens
aaagtcacaacggga

SEQ ID NO: 1407988 - DNA, 15 bp, Homo sapiens
caaagtcacaacggg

SEQ ID NO: 1407989 - DNA, 15 bp, Homo sapiens
acaaagtcacaacgg

SEQ ID NO: 1407990 - DNA, 15 bp, Homo sapiens
cacaaagtcacaacg

SEQ ID NO: 1407991 - DNA, 15 bp, Homo sapiens
tcacaaagtcacaac

SEQ ID NO: 1407992 - DNA, 15 bp, Homo sapiens
atcacaaagtcacaa

SEQ ID NO: 1407993 - DNA, 15 bp, Homo sapiens
tatcacaaagtcaca

SEQ ID NO: 1407994 - DNA, 15 bp, Homo sapiens
ttatcacaaagtcac

SEQ ID NO: 1407995 - DNA, 15 bp, Homo sapiens
cttatcacaaagtca

SEQ ID NO: 1407996 - DNA, 15 bp, Homo sapiens
acttatcacaaagtc

SEQ ID NO: 1407997 - DNA, 15 bp, Homo sapiens
cacttatcacaaagt

SEQ ID NO: 1407998 - DNA, 15 bp, Homo sapiens
acacttatcacaaag

SEQ ID NO: 1407999 - DNA, 15 bp, Homo sapiens
aacacttatcacaaa

SEQ ID NO: 1408000 - DNA, 15 bp, Homo sapiens
aaacacttatcacaa

SEQ ID NO: 1408001 - DNA, 15 bp, Homo sapiens
gaaacacttatcaca

SEQ ID NO: 1408002 - DNA, 15 bp, Homo sapiens
tgaaacacttatcac

SEQ ID NO: 1408003 - DNA, 15 bp, Homo sapiens
atgaaacacttatca

SEQ ID NO: 1408004 - DNA, 15 bp, Homo sapiens
aatgaaacacttatc

SEQ ID NO: 1408005 - DNA, 15 bp, Homo sapiens
caatgaaacacttat

SEQ ID NO: 1408006 - DNA, 15 bp, Homo sapiens
tcaatgaaacactta

SEQ ID NO: 1408007 - DNA, 15 bp, Homo sapiens
ctcaatgaaacactt

SEQ ID NO: 1408008 - DNA, 15 bp, Homo sapiens
cctcaatgaaacact

SEQ ID NO: 1408009 - DNA, 15 bp, Homo sapiens
acctcaatgaaacac

SEQ ID NO: 1408010 - DNA, 15 bp, Homo sapiens
cacctcaatgaaaca

SEQ ID NO: 1408011 - DNA, 15 bp, Homo sapiens
ccacctcaatgaaac

SEQ ID NO: 1408012 - DNA, 15 bp, Homo sapiens
tccacctcaatgaaa

SEQ ID NO: 1408013 - DNA, 15 bp, Homo sapiens
ttccacctcaatgaa

SEQ ID NO: 1408014 - DNA, 15 bp, Homo sapiens
tttccacctcaatga

SEQ ID NO: 1408015 - DNA, 15 bp, Homo sapiens
ttttccacctcaatg

SEQ ID NO: 1408016 - DNA, 15 bp, Homo sapiens
tttttccacctcaat

SEQ ID NO: 1408017 - DNA, 15 bp, Homo sapiens
ctttttccacctcaa

SEQ ID NO: 1408018 - DNA, 15 bp, Homo sapiens
tctttttccacctca

SEQ ID NO: 1408019 - DNA, 15 bp, Homo sapiens
ttctttttccacctc

SEQ ID NO: 1408020 - DNA, 15 bp, Homo sapiens
cttctttttccacct

SEQ ID NO: 1408021 - DNA, 15 bp, Homo sapiens
acttctttttccacc

SEQ ID NO: 1408022 - DNA, 15 bp, Homo sapiens
gacttctttttccac

SEQ ID NO: 1408023 - DNA, 15 bp, Homo sapiens
tgacttctttttcca

SEQ ID NO: 1408024 - DNA, 15 bp, Homo sapiens
atgacttctttttcc

SEQ ID NO: 1408025 - DNA, 15 bp, Homo sapiens
aatgacttctttttc

SEQ ID NO: 1408026 - DNA, 15 bp, Homo sapiens
gaatgacttcttttt

SEQ ID NO: 1408027 - DNA, 15 bp, Homo sapiens
agaatgacttctttt

SEQ ID NO: 1408028 - DNA, 15 bp, Homo sapiens
gagaatgacttcttt

SEQ ID NO: 1408029 - DNA, 15 bp, Homo sapiens
agagaatgacttctt

SEQ ID NO: 1408030 - DNA, 15 bp, Homo sapiens
gagagaatgacttct

SEQ ID NO: 1408031 - DNA, 15 bp, Homo sapiens
tgagagaatgacttc

SEQ ID NO: 1408032 - DNA, 15 bp, Homo sapiens
ttgagagaatgactt

SEQ ID NO: 1408033 - DNA, 15 bp, Homo sapiens
tttgagagaatgact

SEQ ID NO: 1408034 - DNA, 15 bp, Homo sapiens
gtttgagagaatgac

SEQ ID NO: 1408035 - DNA, 15 bp, Homo sapiens
tgtttgagagaatga

SEQ ID NO: 1408036 - DNA, 15 bp, Homo sapiens
ttgtttgagagaatg

SEQ ID NO: 1408037 - DNA, 15 bp, Homo sapiens
attgtttgagagaat

SEQ ID NO: 1408038 - DNA, 15 bp, Homo sapiens
tattgtttgagagaa

SEQ ID NO: 1408039 - DNA, 15 bp, Homo sapiens
atattgtttgagaga

SEQ ID NO: 1408040 - DNA, 15 bp, Homo sapiens
tatattgtttgagag

SEQ ID NO: 1408041 - DNA, 15 bp, Homo sapiens
ttatattgtttgaga

SEQ ID NO: 1408042 - DNA, 15 bp, Homo sapiens
attatattgtttgag

SEQ ID NO: 1408043 - DNA, 15 bp, Homo sapiens
gattatattgtttga

SEQ ID NO: 1408044 - DNA, 15 bp, Homo sapiens
tgattatattgtttg

SEQ ID NO: 1408045 - DNA, 15 bp, Homo sapiens
gtgattatattgttt

SEQ ID NO: 1408046 - DNA, 15 bp, Homo sapiens
agtgattatattgtt

SEQ ID NO: 1408047 - DNA, 15 bp, Homo sapiens
aagtgattatattgt

SEQ ID NO: 1408048 - DNA, 15 bp, Homo sapiens
taagtgattatattg

SEQ ID NO: 1408049 - DNA, 15 bp, Homo sapiens
ttaagtgattatatt

SEQ ID NO: 1408050 - DNA, 15 bp, Homo sapiens
gttaagtgattatat

SEQ ID NO: 1408051 - DNA, 15 bp, Homo sapiens
agttaagtgattata

SEQ ID NO: 1408052 - DNA, 15 bp, Homo sapiens
tagttaagtgattat

SEQ ID NO: 1408053 - DNA, 15 bp, Homo sapiens
ctagttaagtgatta

SEQ ID NO: 1408054 - DNA, 15 bp, Homo sapiens
cctagttaagtgatt

SEQ ID NO: 1408055 - DNA, 15 bp, Homo sapiens
ccctagttaagtgat

SEQ ID NO: 1408056 - DNA, 15 bp, Homo sapiens
accctagttaagtga

SEQ ID NO: 1408057 - DNA, 15 bp, Homo sapiens
aaccctagttaagtg

SEQ ID NO: 1408058 - DNA, 15 bp, Homo sapiens
aaaccctagttaagt

SEQ ID NO: 1408059 - DNA, 15 bp, Homo sapiens
gaaaccctagttaag

SEQ ID NO: 1408060 - DNA, 15 bp, Homo sapiens
ggaaaccctagttaa

SEQ ID NO: 1408061 - DNA, 15 bp, Homo sapiens
tggaaaccctagtta

SEQ ID NO: 1408062 - DNA, 15 bp, Homo sapiens
ctggaaaccctagtt

SEQ ID NO: 1408063 - DNA, 15 bp, Homo sapiens
tctggaaaccctagt

SEQ ID NO: 1408064 - DNA, 15 bp, Homo sapiens
ttctggaaaccctag

SEQ ID NO: 1408065 - DNA, 15 bp, Homo sapiens
gttctggaaacccta

SEQ ID NO: 1408066 - DNA, 15 bp, Homo sapiens
agttctggaaaccct

SEQ ID NO: 1408067 - DNA, 15 bp, Homo sapiens
cagttctggaaaccc

SEQ ID NO: 1408068 - DNA, 15 bp, Homo sapiens
gcagttctggaaacc

SEQ ID NO: 1408069 - DNA, 15 bp, Homo sapiens
agcagttctggaaac

SEQ ID NO: 1408070 - DNA, 15 bp, Homo sapiens
aagcagttctggaaa

SEQ ID NO: 1408071 - DNA, 15 bp, Homo sapiens
aaagcagttctggaa

SEQ ID NO: 1408072 - DNA, 15 bp, Homo sapiens
aaaagcagttctgga

SEQ ID NO: 1408073 - DNA, 15 bp, Homo sapiens
aaaaagcagttctgg

SEQ ID NO: 1408074 - DNA, 15 bp, Homo sapiens
aaaaaagcagttctg

SEQ ID NO: 1408075 - DNA, 15 bp, Homo sapiens
taaaaaagcagttct

SEQ ID NO: 1408076 - DNA, 15 bp, Homo sapiens
ttaaaaaagcagttc

SEQ ID NO: 1408077 - DNA, 15 bp, Homo sapiens
gttaaaaaagcagtt

SEQ ID NO: 1408078 - DNA, 15 bp, Homo sapiens
ggttaaaaaagcagt

SEQ ID NO: 1408079 - DNA, 15 bp, Homo sapiens
aggttaaaaaagcag

SEQ ID NO: 1408080 - DNA, 15 bp, Homo sapiens
aaggttaaaaaagca

SEQ ID NO: 1408081 - DNA, 15 bp, Homo sapiens
taaggttaaaaaagc

SEQ ID NO: 1408082 - DNA, 15 bp, Homo sapiens
ttaaggttaaaaaag

SEQ ID NO: 1408083 - DNA, 15 bp, Homo sapiens
tttaaggttaaaaaa

SEQ ID NO: 1408084 - DNA, 15 bp, Homo sapiens
ttttaaggttaaaaa

SEQ ID NO: 1408085 - DNA, 15 bp, Homo sapiens
gttttaaggttaaaa

SEQ ID NO: 1408086 - DNA, 15 bp, Homo sapiens
tgttttaaggttaaa

SEQ ID NO: 1408087 - DNA, 15 bp, Homo sapiens
ttgttttaaggttaa

SEQ ID NO: 1408088 - DNA, 15 bp, Homo sapiens
tttgttttaaggtta

SEQ ID NO: 1408089 - DNA, 15 bp, Homo sapiens
atttgttttaaggtt

SEQ ID NO: 1408090 - DNA, 15 bp, Homo sapiens
aatttgttttaaggt

SEQ ID NO: 1408091 - DNA, 15 bp, Homo sapiens
aaatttgttttaagg

SEQ ID NO: 1408092 - DNA, 15 bp, Homo sapiens
taaatttgttttaag

SEQ ID NO: 1408093 - DNA, 15 bp, Homo sapiens
ttaaatttgttttaa

SEQ ID NO: 1408094 - DNA, 15 bp, Homo sapiens
attaaatttgtttta

SEQ ID NO: 1408095 - DNA, 15 bp, Homo sapiens
gattaaatttgtttt

SEQ ID NO: 1408096 - DNA, 15 bp, Homo sapiens
agattaaatttgttt

SEQ ID NO: 1408097 - DNA, 15 bp, Homo sapiens
gagattaaatttgtt

SEQ ID NO: 1408098 - DNA, 15 bp, Homo sapiens
ggagattaaatttgt

SEQ ID NO: 1408099 - DNA, 15 bp, Homo sapiens
tggagattaaatttg

SEQ ID NO: 1408100 - DNA, 15 bp, Homo sapiens
ttggagattaaattt

SEQ ID NO: 1408101 - DNA, 15 bp, Homo sapiens
cttggagattaaatt

SEQ ID NO: 1408102 - DNA, 15 bp, Homo sapiens
gcttggagattaaat

SEQ ID NO: 1408103 - DNA, 15 bp, Homo sapiens
ggcttggagattaaa

SEQ ID NO: 1408104 - DNA, 15 bp, Homo sapiens
gggcttggagattaa

SEQ ID NO: 1408105 - DNA, 15 bp, Homo sapiens
agggcttggagatta

SEQ ID NO: 1408106 - DNA, 15 bp, Homo sapiens
aagggcttggagatt

SEQ ID NO: 1408107 - DNA, 15 bp, Homo sapiens
caagggcttggagat

SEQ ID NO: 1408108 - DNA, 15 bp, Homo sapiens
gcaagggcttggaga

SEQ ID NO: 1408109 - DNA, 15 bp, Homo sapiens
tgcaagggcttggag

SEQ ID NO: 1408110 - DNA, 15 bp, Homo sapiens
ttgcaagggcttgga

SEQ ID NO: 1408111 - DNA, 15 bp, Homo sapiens
cttgcaagggcttgg

SEQ ID NO: 1408112 - DNA, 15 bp, Homo sapiens
acttgcaagggcttg

SEQ ID NO: 1408113 - DNA, 15 bp, Homo sapiens
aacttgcaagggctt

SEQ ID NO: 1408114 - DNA, 15 bp, Homo sapiens
caacttgcaagggct

SEQ ID NO: 1408115 - DNA, 15 bp, Homo sapiens
acaacttgcaagggc

SEQ ID NO: 1408116 - DNA, 15 bp, Homo sapiens
tacaacttgcaaggg

SEQ ID NO: 1408117 - DNA, 15 bp, Homo sapiens
ctacaacttgcaagg

SEQ ID NO: 1408118 - DNA, 15 bp, Homo sapiens
actacaacttgcaag

SEQ ID NO: 1408119 - DNA, 15 bp, Homo sapiens
tactacaacttgcaa

SEQ ID NO: 1408120 - DNA, 15 bp, Homo sapiens
atactacaacttgca

SEQ ID NO: 1408121 - DNA, 15 bp, Homo sapiens
catactacaacttgc

SEQ ID NO: 1408122 - DNA, 15 bp, Homo sapiens
tcatactacaacttg

SEQ ID NO: 1408123 - DNA, 15 bp, Homo sapiens
gtcatactacaactt

SEQ ID NO: 1408124 - DNA, 15 bp, Homo sapiens
agtcatactacaact

SEQ ID NO: 1408125 - DNA, 15 bp, Homo sapiens
aagtcatactacaac

SEQ ID NO: 1408126 - DNA, 15 bp, Homo sapiens
caagtcatactacaa

SEQ ID NO: 1408127 - DNA, 15 bp, Homo sapiens
acaagtcatactaca

SEQ ID NO: 1408128 - DNA, 15 bp, Homo sapiens
aacaagtcatactac

SEQ ID NO: 1408129 - DNA, 15 bp, Homo sapiens
taacaagtcatacta

SEQ ID NO: 1408130 - DNA, 15 bp, Homo sapiens
gtaacaagtcatact

SEQ ID NO: 1408131 - DNA, 15 bp, Homo sapiens
ggtaacaagtcatac

SEQ ID NO: 1408132 - DNA, 15 bp, Homo sapiens
tggtaacaagtcata

SEQ ID NO: 1408133 - DNA, 15 bp, Homo sapiens
ctggtaacaagtcat

SEQ ID NO: 1408134 - DNA, 15 bp, Homo sapiens
gctggtaacaagtca

SEQ ID NO: 1408135 - DNA, 15 bp, Homo sapiens
tgctggtaacaagtc

SEQ ID NO: 1408136 - DNA, 15 bp, Homo sapiens
atgctggtaacaagt

SEQ ID NO: 1408137 - DNA, 15 bp, Homo sapiens
tatgctggtaacaag

SEQ ID NO: 1408138 - DNA, 15 bp, Homo sapiens
ctatgctggtaacaa

SEQ ID NO: 1408139 - DNA, 15 bp, Homo sapiens
actatgctggtaaca

SEQ ID NO: 1408140 - DNA, 15 bp, Homo sapiens
tactatgctggtaac

SEQ ID NO: 1408141 - DNA, 15 bp, Homo sapiens
atactatgctggtaa

SEQ ID NO: 1408142 - DNA, 15 bp, Homo sapiens
tatactatgctggta

SEQ ID NO: 1408143 - DNA, 15 bp, Homo sapiens
atatactatgctggt

SEQ ID NO: 1408144 - DNA, 15 bp, Homo sapiens
catatactatgctgg

SEQ ID NO: 1408145 - DNA, 15 bp, Homo sapiens
tcatatactatgctg

SEQ ID NO: 1408146 - DNA, 15 bp, Homo sapiens
ttcatatactatgct

SEQ ID NO: 1408147 - DNA, 15 bp, Homo sapiens
cttcatatactatgc

SEQ ID NO: 1408148 - DNA, 15 bp, Homo sapiens
tcttcatatactatg

SEQ ID NO: 1408149 - DNA, 15 bp, Homo sapiens
ctcttcatatactat

SEQ ID NO: 1408150 - DNA, 15 bp, Homo sapiens
tctcttcatatacta

SEQ ID NO: 1408151 - DNA, 15 bp, Homo sapiens
gtctcttcatatact

SEQ ID NO: 1408152 - DNA, 15 bp, Homo sapiens
ggtctcttcatatac

SEQ ID NO: 1408153 - DNA, 15 bp, Homo sapiens
tggtctcttcatata

SEQ ID NO: 1408154 - DNA, 15 bp, Homo sapiens
gtggtctcttcatat

SEQ ID NO: 1408155 - DNA, 15 bp, Homo sapiens
tgtggtctcttcata

SEQ ID NO: 1408156 - DNA, 15 bp, Homo sapiens
ctgtggtctcttcat

SEQ ID NO: 1408157 - DNA, 15 bp, Homo sapiens
tctgtggtctcttca

SEQ ID NO: 1408158 - DNA, 15 bp, Homo sapiens
ctctgtggtctcttc

SEQ ID NO: 1408159 - DNA, 15 bp, Homo sapiens
tctctgtggtctctt

SEQ ID NO: 1408160 - DNA, 15 bp, Homo sapiens
ttctctgtggtctct

SEQ ID NO: 1408161 - DNA, 15 bp, Homo sapiens
tttctctgtggtctc

SEQ ID NO: 1408162 - DNA, 15 bp, Homo sapiens
gctttctctgtggtc

SEQ ID NO: 1408163 - DNA, 15 bp, Homo sapiens
agctttctctgtggt

SEQ ID NO: 1408164 - DNA, 15 bp, Homo sapiens
aagctttctctgtgg

SEQ ID NO: 1408165 - DNA, 15 bp, Homo sapiens
gaagctttctctgtg

SEQ ID NO: 1408166 - DNA, 15 bp, Homo sapiens
tgaagctttctctgt

SEQ ID NO: 1408167 - DNA, 15 bp, Homo sapiens
ttgaagctttctctg

SEQ ID NO: 1408168 - DNA, 15 bp, Homo sapiens
tttgaagctttctct

SEQ ID NO: 1408169 - DNA, 15 bp, Homo sapiens
ctttgaagctttctc

SEQ ID NO: 1408170 - DNA, 15 bp, Homo sapiens
actttgaagctttct

SEQ ID NO: 1408171 - DNA, 15 bp, Homo sapiens
gactttgaagctttc

SEQ ID NO: 1408172 - DNA, 15 bp, Homo sapiens
ggactttgaagcttt

SEQ ID NO: 1408173 - DNA, 15 bp, Homo sapiens
aggactttgaagctt

SEQ ID NO: 1408174 - DNA, 15 bp, Homo sapiens
gaggactttgaagct

SEQ ID NO: 1408175 - DNA, 15 bp, Homo sapiens
agaggactttgaagc

SEQ ID NO: 1408176 - DNA, 15 bp, Homo sapiens
tagaggactttgaag

SEQ ID NO: 1408177 - DNA, 15 bp, Homo sapiens
atagaggactttgaa

SEQ ID NO: 1408178 - DNA, 15 bp, Homo sapiens
tatagaggactttga

SEQ ID NO: 1408179 - DNA, 15 bp, Homo sapiens
gtatagaggactttg

SEQ ID NO: 1408180 - DNA, 15 bp, Homo sapiens
ggtatagaggacttt

SEQ ID NO: 1408181 - DNA, 15 bp, Homo sapiens
gggtatagaggactt

SEQ ID NO: 1408182 - DNA, 15 bp, Homo sapiens
agggtatagaggact

SEQ ID NO: 1408183 - DNA, 15 bp, Homo sapiens
gagggtatagaggac

SEQ ID NO: 1408184 - DNA, 15 bp, Homo sapiens
ggagggtatagagga

SEQ ID NO: 1408185 - DNA, 15 bp, Homo sapiens
tggagggtatagagg

SEQ ID NO: 1408186 - DNA, 15 bp, Homo sapiens
gtggagggtatagag

SEQ ID NO: 1408187 - DNA, 15 bp, Homo sapiens
tgtggagggtataga

SEQ ID NO: 1408188 - DNA, 15 bp, Homo sapiens
gtgtggagggtatag

SEQ ID NO: 1408189 - DNA, 15 bp, Homo sapiens
tgtgtggagggtata

SEQ ID NO: 1408190 - DNA, 15 bp, Homo sapiens
ttgtgtggagggtat

SEQ ID NO: 1408191 - DNA, 15 bp, Homo sapiens
gttgtgtggagggta

SEQ ID NO: 1408192 - DNA, 15 bp, Homo sapiens
agttgtgtggagggt

SEQ ID NO: 1408193 - DNA, 15 bp, Homo sapiens
aagttgtgtggaggg

SEQ ID NO: 1408194 - DNA, 15 bp, Homo sapiens
gaagttgtgtggagg

SEQ ID NO: 1408195 - DNA, 15 bp, Homo sapiens
tgaagttgtgtggag

SEQ ID NO: 1408196 - DNA, 15 bp, Homo sapiens
gtgaagttgtgtgga

SEQ ID NO: 1408197 - DNA, 15 bp, Homo sapiens
ggtgaagttgtgtgg

SEQ ID NO: 1408198 - DNA, 15 bp, Homo sapiens
tggtgaagttgtgtg

SEQ ID NO: 1408199 - DNA, 15 bp, Homo sapiens
ttggtgaagttgtgt

SEQ ID NO: 1408200 - DNA, 15 bp, Homo sapiens
gttggtgaagttgtg

SEQ ID NO: 1408201 - DNA, 15 bp, Homo sapiens
agttggtgaagttgt

SEQ ID NO: 1408202 - DNA, 15 bp, Homo sapiens
tagttggtgaagttg

SEQ ID NO: 1408203 - DNA, 15 bp, Homo sapiens
ctagttggtgaagtt

SEQ ID NO: 1408204 - DNA, 15 bp, Homo sapiens
gctagttggtgaagt

SEQ ID NO: 1408205 - DNA, 15 bp, Homo sapiens
tgctagttggtgaag

SEQ ID NO: 1408206 - DNA, 15 bp, Homo sapiens
atgctagttggtgaa

SEQ ID NO: 1408207 - DNA, 15 bp, Homo sapiens
tatgctagttggtga

SEQ ID NO: 1408208 - DNA, 15 bp, Homo sapiens
atatgctagttggtg

SEQ ID NO: 1408209 - DNA, 15 bp, Homo sapiens
aatatgctagttggt

SEQ ID NO: 1408210 - DNA, 15 bp, Homo sapiens
taatatgctagttgg

SEQ ID NO: 1408211 - DNA, 15 bp, Homo sapiens
ctaatatgctagttg

SEQ ID NO: 1408212 - DNA, 15 bp, Homo sapiens
gctaatatgctagtt

SEQ ID NO: 1408213 - DNA, 15 bp, Homo sapiens
tgctaatatgctagt

SEQ ID NO: 1408214 - DNA, 15 bp, Homo sapiens
ttgctaatatgctag

SEQ ID NO: 1408215 - DNA, 15 bp, Homo sapiens
attgctaatatgcta

SEQ ID NO: 1408216 - DNA, 15 bp, Homo sapiens
tattgctaatatgct

SEQ ID NO: 1408217 - DNA, 15 bp, Homo sapiens
gtattgctaatatgc

SEQ ID NO: 1408218 - DNA, 15 bp, Homo sapiens
agtattgctaatatg

SEQ ID NO: 1408219 - DNA, 15 bp, Homo sapiens
tagtattgctaatat

SEQ ID NO: 1408220 - DNA, 15 bp, Homo sapiens
ttagtattgctaata

SEQ ID NO: 1408221 - DNA, 15 bp, Homo sapiens
tttagtattgctaat

SEQ ID NO: 1408222 - DNA, 15 bp, Homo sapiens
ttttagtattgctaa

SEQ ID NO: 1408223 - DNA, 15 bp, Homo sapiens
tttttagtattgcta

SEQ ID NO: 1408224 - DNA, 15 bp, Homo sapiens
atttttagtattgct

SEQ ID NO: 1408225 - DNA, 15 bp, Homo sapiens
aatttttagtattgc

SEQ ID NO: 1408226 - DNA, 15 bp, Homo sapiens
aaatttttagtattg

SEQ ID NO: 1408227 - DNA, 15 bp, Homo sapiens
gaaatttttagtatt

SEQ ID NO: 1408228 - DNA, 15 bp, Homo sapiens
agaaatttttagtat

SEQ ID NO: 1408229 - DNA, 15 bp, Homo sapiens
aagaaatttttagta

SEQ ID NO: 1408230 - DNA, 15 bp, Homo sapiens
aaagaaatttttagt

SEQ ID NO: 1408231 - DNA, 15 bp, Homo sapiens
taaagaaatttttag

SEQ ID NO: 1408232 - DNA, 15 bp, Homo sapiens
ctaaagaaattttta

SEQ ID NO: 1408233 - DNA, 15 bp, Homo sapiens
cctaaagaaattttt

SEQ ID NO: 1408234 - DNA, 15 bp, Homo sapiens
acctaaagaaatttt

SEQ ID NO: 1408235 - DNA, 15 bp, Homo sapiens
tacctaaagaaattt

SEQ ID NO: 1408236 - DNA, 15 bp, Homo sapiens
ctacctaaagaaatt

SEQ ID NO: 1408237 - DNA, 15 bp, Homo sapiens
gctacctaaagaaat

SEQ ID NO: 1408238 - DNA, 15 bp, Homo sapiens
tgctacctaaagaaa

SEQ ID NO: 1408239 - DNA, 15 bp, Homo sapiens
ctgctacctaaagaa

SEQ ID NO: 1408240 - DNA, 15 bp, Homo sapiens
tctgctacctaaaga

SEQ ID NO: 1408241 - DNA, 15 bp, Homo sapiens
gtctgctacctaaag

SEQ ID NO: 1408242 - DNA, 15 bp, Homo sapiens
tgtctgctacctaaa

SEQ ID NO: 1408243 - DNA, 15 bp, Homo sapiens
gtgtctgctacctaa

SEQ ID NO: 1408244 - DNA, 15 bp, Homo sapiens
tgtgtctgctaccta

SEQ ID NO: 1408245 - DNA, 15 bp, Homo sapiens
ttgtgtctgctacct

SEQ ID NO: 1408246 - DNA, 15 bp, Homo sapiens
gttgtgtctgctacc

SEQ ID NO: 1408247 - DNA, 15 bp, Homo sapiens
agttgtgtctgctac

SEQ ID NO: 1408248 - DNA, 15 bp, Homo sapiens
aagttgtgtctgcta

SEQ ID NO: 1408249 - DNA, 15 bp, Homo sapiens
taagttgtgtctgct

SEQ ID NO: 1408250 - DNA, 15 bp, Homo sapiens
ataagttgtgtctgc

SEQ ID NO: 1408251 - DNA, 15 bp, Homo sapiens
gataagttgtgtctg

SEQ ID NO: 1408252 - DNA, 15 bp, Homo sapiens
agataagttgtgtct

SEQ ID NO: 1408253 - DNA, 15 bp, Homo sapiens
aagataagttgtgtc

SEQ ID NO: 1408254 - DNA, 15 bp, Homo sapiens
gaagataagttgtgt

SEQ ID NO: 1408255 - DNA, 15 bp, Homo sapiens
tgaagataagttgtg

SEQ ID NO: 1408256 - DNA, 15 bp, Homo sapiens
atgaagataagttgt

SEQ ID NO: 1408257 - DNA, 15 bp, Homo sapiens
tatgaagataagttg

SEQ ID NO: 1408258 - DNA, 15 bp, Homo sapiens
ttatgaagataagtt

SEQ ID NO: 1408259 - DNA, 15 bp, Homo sapiens
tttatgaagataagt

SEQ ID NO: 1408260 - DNA, 15 bp, Homo sapiens
ttttatgaagataag

SEQ ID NO: 1408261 - DNA, 15 bp, Homo sapiens
attttatgaagataa

SEQ ID NO: 1408262 - DNA, 15 bp, Homo sapiens
gattttatgaagata

SEQ ID NO: 1408263 - DNA, 15 bp, Homo sapiens
ggattttatgaagat

SEQ ID NO: 1408264 - DNA, 15 bp, Homo sapiens
aggattttatgaaga

SEQ ID NO: 1408265 - DNA, 15 bp, Homo sapiens
gaggattttatgaag

SEQ ID NO: 1408266 - DNA, 15 bp, Homo sapiens
agaggattttatgaa

SEQ ID NO: 1408267 - DNA, 15 bp, Homo sapiens
gagaggattttatga

SEQ ID NO: 1408268 - DNA, 15 bp, Homo sapiens
agagaggattttatg

SEQ ID NO: 1408269 - DNA, 15 bp, Homo sapiens
gagagaggattttat

SEQ ID NO: 1408270 - DNA, 15 bp, Homo sapiens
agagagaggatttta

SEQ ID NO: 1408271 - DNA, 15 bp, Homo sapiens
gagagagaggatttt

SEQ ID NO: 1408272 - DNA, 15 bp, Homo sapiens
agagagagaggattt

SEQ ID NO: 1408273 - DNA, 15 bp, Homo sapiens
gagagagagaggatt

SEQ ID NO: 1408274 - DNA, 15 bp, Homo sapiens
agagagagagaggat

SEQ ID NO: 1408275 - DNA, 15 bp, Homo sapiens
tgagagagagagaga

SEQ ID NO: 1408276 - DNA, 15 bp, Homo sapiens
gtgagagagagagag

SEQ ID NO: 1408277 - DNA, 15 bp, Homo sapiens
agtgagagagagaga

SEQ ID NO: 1408278 - DNA, 15 bp, Homo sapiens
gagtgagagagagag

SEQ ID NO: 1408279 - DNA, 15 bp, Homo sapiens
tgagtgagagagaga

SEQ ID NO: 1408280 - DNA, 15 bp, Homo sapiens
ctgagtgagagagag

SEQ ID NO: 1408281 - DNA, 15 bp, Homo sapiens
tctgagtgagagaga

SEQ ID NO: 1408282 - DNA, 15 bp, Homo sapiens
atctgagtgagagag

SEQ ID NO: 1408283 - DNA, 15 bp, Homo sapiens
aatctgagtgagaga

SEQ ID NO: 1408284 - DNA, 15 bp, Homo sapiens
aaatctgagtgagag

SEQ ID NO: 1408285 - DNA, 15 bp, Homo sapiens
aaaatctgagtgaga

SEQ ID NO: 1408286 - DNA, 15 bp, Homo sapiens
aaaaatctgagtgag

SEQ ID NO: 1408287 - DNA, 15 bp, Homo sapiens
aaaaaatctgagtga

SEQ ID NO: 1408288 - DNA, 15 bp, Homo sapiens
gaaaaaatctgagtg

SEQ ID NO: 1408289 - DNA, 15 bp, Homo sapiens
ggaaaaaatctgagt

SEQ ID NO: 1408290 - DNA, 15 bp, Homo sapiens
aggaaaaaatctgag

SEQ ID NO: 1408291 - DNA, 15 bp, Homo sapiens
aaggaaaaaatctga

SEQ ID NO: 1408292 - DNA, 15 bp, Homo sapiens
gaaggaaaaaatctg

SEQ ID NO: 1408293 - DNA, 15 bp, Homo sapiens
agaaggaaaaaatct

SEQ ID NO: 1408294 - DNA, 15 bp, Homo sapiens
aagaaggaaaaaatc

SEQ ID NO: 1408295 - DNA, 15 bp, Homo sapiens
aaagaaggaaaaaat

SEQ ID NO: 1408296 - DNA, 15 bp, Homo sapiens
aaaagaaggaaaaaa

SEQ ID NO: 1408297 - DNA, 15 bp, Homo sapiens
caaaagaaggaaaaa

SEQ ID NO: 1408298 - DNA, 15 bp, Homo sapiens
atcaaaagaaggaaa

SEQ ID NO: 1408299 - DNA, 15 bp, Homo sapiens
aatcaaaagaaggaa

SEQ ID NO: 1408300 - DNA, 15 bp, Homo sapiens
caatcaaaagaagga

SEQ ID NO: 1408301 - DNA, 15 bp, Homo sapiens
gcaatcaaaagaagg

SEQ ID NO: 1408302 - DNA, 15 bp, Homo sapiens
tgcaatcaaaagaag

SEQ ID NO: 1408303 - DNA, 15 bp, Homo sapiens
gtgcaatcaaaagaa

SEQ ID NO: 1408304 - DNA, 15 bp, Homo sapiens
agtgcaatcaaaaga

SEQ ID NO: 1408305 - DNA, 15 bp, Homo sapiens
aagtgcaatcaaaag

SEQ ID NO: 1408306 - DNA, 15 bp, Homo sapiens
aaagtgcaatcaaaa

SEQ ID NO: 1408307 - DNA, 15 bp, Homo sapiens
aaaagtgcaatcaaa

SEQ ID NO: 1408308 - DNA, 15 bp, Homo sapiens
taaaagtgcaatcaa

SEQ ID NO: 1408309 - DNA, 15 bp, Homo sapiens
ttaaaagtgcaatca

SEQ ID NO: 1408310 - DNA, 15 bp, Homo sapiens
attaaaagtgcaatc

SEQ ID NO: 1408311 - DNA, 15 bp, Homo sapiens
gattaaaagtgcaat

SEQ ID NO: 1408312 - DNA, 15 bp, Homo sapiens
tgattaaaagtgcaa

SEQ ID NO: 1408313 - DNA, 15 bp, Homo sapiens
gtgattaaaagtgca

SEQ ID NO: 1408314 - DNA, 15 bp, Homo sapiens
tgtgattaaaagtgc

SEQ ID NO: 1408315 - DNA, 15 bp, Homo sapiens
atgtgattaaaagtg

SEQ ID NO: 1408316 - DNA, 15 bp, Homo sapiens
tatgtgattaaaagt

SEQ ID NO: 1408317 - DNA, 15 bp, Homo sapiens
gtatgtgattaaaag

SEQ ID NO: 1408318 - DNA, 15 bp, Homo sapiens
ggtatgtgattaaaa

SEQ ID NO: 1408319 - DNA, 15 bp, Homo sapiens
tggtatgtgattaaa

SEQ ID NO: 1408320 - DNA, 15 bp, Homo sapiens
ctggtatgtgattaa

SEQ ID NO: 1408321 - DNA, 15 bp, Homo sapiens
gctggtatgtgatta

SEQ ID NO: 1408322 - DNA, 15 bp, Homo sapiens
tgctggtatgtgatt

SEQ ID NO: 1408323 - DNA, 15 bp, Homo sapiens
ttgctggtatgtgat

SEQ ID NO: 1408324 - DNA, 15 bp, Homo sapiens
tttgctggtatgtga

SEQ ID NO: 1408325 - DNA, 15 bp, Homo sapiens
ctttgctggtatgtg

SEQ ID NO: 1408326 - DNA, 15 bp, Homo sapiens
tctttgctggtatgt

SEQ ID NO: 1408327 - DNA, 15 bp, Homo sapiens
atctttgctggtatg

SEQ ID NO: 1408328 - DNA, 15 bp, Homo sapiens
tatctttgctggtat

SEQ ID NO: 1408329 - DNA, 15 bp, Homo sapiens
ttatctttgctggta

SEQ ID NO: 1408330 - DNA, 15 bp, Homo sapiens
attatctttgctggt

SEQ ID NO: 1408331 - DNA, 15 bp, Homo sapiens
gattatctttgctgg

SEQ ID NO: 1408332 - DNA, 15 bp, Homo sapiens
agattatctttgctg

SEQ ID NO: 1408333 - DNA, 15 bp, Homo sapiens
gagattatctttgct

SEQ ID NO: 1408334 - DNA, 15 bp, Homo sapiens
ggagattatctttgc

SEQ ID NO: 1408335 - DNA, 15 bp, Homo sapiens
tggagattatctttg

SEQ ID NO: 1408336 - DNA, 15 bp, Homo sapiens
ctggagattatcttt

SEQ ID NO: 1408337 - DNA, 15 bp, Homo sapiens
gctggagattatctt

SEQ ID NO: 1408338 - DNA, 15 bp, Homo sapiens
tgctggagattatct

SEQ ID NO: 1408339 - DNA, 15 bp, Homo sapiens
ttgctggagattatc

SEQ ID NO: 1408340 - DNA, 15 bp, Homo sapiens
gttgctggagattat

SEQ ID NO: 1408341 - DNA, 15 bp, Homo sapiens
agttgctggagatta

SEQ ID NO: 1408342 - DNA, 15 bp, Homo sapiens
tagttgctggagatt

SEQ ID NO: 1408343 - DNA, 15 bp, Homo sapiens
gtagttgctggagat

SEQ ID NO: 1408344 - DNA, 15 bp, Homo sapiens
tgtagttgctggaga

SEQ ID NO: 1408345 - DNA, 15 bp, Homo sapiens
atgtagttgctggag

SEQ ID NO: 1408346 - DNA, 15 bp, Homo sapiens
catgtagttgctgga

SEQ ID NO: 1408347 - DNA, 15 bp, Homo sapiens
acatgtagttgctgg

SEQ ID NO: 1408348 - DNA, 15 bp, Homo sapiens
aacatgtagttgctg

SEQ ID NO: 1408349 - DNA, 15 bp, Homo sapiens
gaacatgtagttgct

SEQ ID NO: 1408350 - DNA, 15 bp, Homo sapiens
tgaacatgtagttgc

SEQ ID NO: 1408351 - DNA, 15 bp, Homo sapiens
gtgaacatgtagttg

SEQ ID NO: 1408352 - DNA, 15 bp, Homo sapiens
tgtgaacatgtagtt

SEQ ID NO: 1408353 - DNA, 15 bp, Homo sapiens
ttgtgaacatgtagt

SEQ ID NO: 1408354 - DNA, 15 bp, Homo sapiens
tttgtgaacatgtag

SEQ ID NO: 1408355 - DNA, 15 bp, Homo sapiens
ttttgtgaacatgta

SEQ ID NO: 1408356 - DNA, 15 bp, Homo sapiens
attttgtgaacatgt

SEQ ID NO: 1408357 - DNA, 15 bp, Homo sapiens
gattttgtgaacatg

SEQ ID NO: 1408358 - DNA, 15 bp, Homo sapiens
ggattttgtgaacat

SEQ ID NO: 1408359 - DNA, 15 bp, Homo sapiens
gggattttgtgaaca

SEQ ID NO: 1408360 - DNA, 15 bp, Homo sapiens
agggattttgtgaac

SEQ ID NO: 1408361 - DNA, 15 bp, Homo sapiens
tagggattttgtgaa

SEQ ID NO: 1408362 - DNA, 15 bp, Homo sapiens
atagggattttgtga

SEQ ID NO: 1408363 - DNA, 15 bp, Homo sapiens
aatagggattttgtg

SEQ ID NO: 1408364 - DNA, 15 bp, Homo sapiens
aaatagggattttgt

SEQ ID NO: 1408365 - DNA, 15 bp, Homo sapiens
gaaatagggattttg

SEQ ID NO: 1408366 - DNA, 15 bp, Homo sapiens
agaaatagggatttt

SEQ ID NO: 1408367 - DNA, 15 bp, Homo sapiens
tagaaatagggattt

SEQ ID NO: 1408368 - DNA, 15 bp, Homo sapiens
atagaaatagggatt

SEQ ID NO: 1408369 - DNA, 15 bp, Homo sapiens
tatagaaatagggat

SEQ ID NO: 1408370 - DNA, 15 bp, Homo sapiens
ctatagaaataggga

SEQ ID NO: 1408371 - DNA, 15 bp, Homo sapiens
actatagaaataggg

SEQ ID NO: 1408372 - DNA, 15 bp, Homo sapiens
aactatagaaatagg

SEQ ID NO: 1408373 - DNA, 15 bp, Homo sapiens
taactatagaaatag

SEQ ID NO: 1408374 - DNA, 15 bp, Homo sapiens
gtaactatagaaata

SEQ ID NO: 1408375 - DNA, 15 bp, Homo sapiens
tgtaactatagaaat

SEQ ID NO: 1408376 - DNA, 15 bp, Homo sapiens
ctgtaactatagaaa

SEQ ID NO: 1408377 - DNA, 15 bp, Homo sapiens
tctgtaactatagaa

SEQ ID NO: 1408378 - DNA, 15 bp, Homo sapiens
ttctgtaactataga

SEQ ID NO: 1408379 - DNA, 15 bp, Homo sapiens
cttctgtaactatag

SEQ ID NO: 1408380 - DNA, 15 bp, Homo sapiens
ccttctgtaactata

SEQ ID NO: 1408381 - DNA, 15 bp, Homo sapiens
tccttctgtaactat

SEQ ID NO: 1408382 - DNA, 15 bp, Homo sapiens
ctccttctgtaacta

SEQ ID NO: 1408383 - DNA, 15 bp, Homo sapiens
tctccttctgtaact

SEQ ID NO: 1408384 - DNA, 15 bp, Homo sapiens
ttctccttctgtaac

SEQ ID NO: 1408385 - DNA, 15 bp, Homo sapiens
tttctccttctgtaa

SEQ ID NO: 1408386 - DNA, 15 bp, Homo sapiens
ttttctccttctgta

SEQ ID NO: 1408387 - DNA, 15 bp, Homo sapiens
gttttctccttctgt

SEQ ID NO: 1408388 - DNA, 15 bp, Homo sapiens
ggttttctccttctg

SEQ ID NO: 1408389 - DNA, 15 bp, Homo sapiens
gggttttctccttct

SEQ ID NO: 1408390 - DNA, 15 bp, Homo sapiens
ggggttttctccttc

SEQ ID NO: 1408391 - DNA, 15 bp, Homo sapiens
tggggttttctcctt

SEQ ID NO: 1408392 - DNA, 15 bp, Homo sapiens
ctggggttttctcct

SEQ ID NO: 1408393 - DNA, 15 bp, Homo sapiens
actggggttttctcc

SEQ ID NO: 1408394 - DNA, 15 bp, Homo sapiens
tactggggttttctc

SEQ ID NO: 1408395 - DNA, 15 bp, Homo sapiens
atactggggttttct

SEQ ID NO: 1408396 - DNA, 15 bp, Homo sapiens
aatactggggttttc

SEQ ID NO: 1408397 - DNA, 15 bp, Homo sapiens
taatactggggtttt

SEQ ID NO: 1408398 - DNA, 15 bp, Homo sapiens
ttaatactggggttt

SEQ ID NO: 1408399 - DNA, 15 bp, Homo sapiens
attaatactggggtt

SEQ ID NO: 1408400 - DNA, 15 bp, Homo sapiens
tattaatactggggt

SEQ ID NO: 1408401 - DNA, 15 bp, Homo sapiens
atattaatactgggg

SEQ ID NO: 1408402 - DNA, 15 bp, Homo sapiens
gatattaatactggg

SEQ ID NO: 1408403 - DNA, 15 bp, Homo sapiens
tgatattaatactgg

SEQ ID NO: 1408404 - DNA, 15 bp, Homo sapiens
ctgatattaatactg

SEQ ID NO: 1408405 - DNA, 15 bp, Homo sapiens
actgatattaatact

SEQ ID NO: 1408406 - DNA, 15 bp, Homo sapiens
gactgatattaatac

SEQ ID NO: 1408407 - DNA, 15 bp, Homo sapiens
ggactgatattaata

SEQ ID NO: 1408408 - DNA, 15 bp, Homo sapiens
aggactgatattaat

SEQ ID NO: 1408409 - DNA, 15 bp, Homo sapiens
gaggactgatattaa

SEQ ID NO: 1408410 - DNA, 15 bp, Homo sapiens
tgaggactgatatta

SEQ ID NO: 1408411 - DNA, 15 bp, Homo sapiens
gtgaggactgatatt

SEQ ID NO: 1408412 - DNA, 15 bp, Homo sapiens
tgtgaggactgatat

SEQ ID NO: 1408413 - DNA, 15 bp, Homo sapiens
ttgtgaggactgata

SEQ ID NO: 1408414 - DNA, 15 bp, Homo sapiens
tttgtgaggactgat

SEQ ID NO: 1408415 - DNA, 15 bp, Homo sapiens
ttttgtgaggactga

SEQ ID NO: 1408416 - DNA, 15 bp, Homo sapiens
cttttgtgaggactg

SEQ ID NO: 1408417 - DNA, 15 bp, Homo sapiens
gcttttgtgaggact

SEQ ID NO: 1408418 - DNA, 15 bp, Homo sapiens
ggcttttgtgaggac

SEQ ID NO: 1408419 - DNA, 15 bp, Homo sapiens
tggcttttgtgagga

SEQ ID NO: 1408420 - DNA, 15 bp, Homo sapiens
ctggcttttgtgagg

SEQ ID NO: 1408421 - DNA, 15 bp, Homo sapiens
tctggcttttgtgag

SEQ ID NO: 1408422 - DNA, 15 bp, Homo sapiens
atctggcttttgtga

SEQ ID NO: 1408423 - DNA, 15 bp, Homo sapiens
gatctggcttttgtg

SEQ ID NO: 1408424 - DNA, 15 bp, Homo sapiens
agatctggcttttgt

SEQ ID NO: 1408425 - DNA, 15 bp, Homo sapiens
gagatctggcttttg

SEQ ID NO: 1408426 - DNA, 15 bp, Homo sapiens
agagatctggctttt

SEQ ID NO: 1408427 - DNA, 15 bp, Homo sapiens
aagagatctggcttt

SEQ ID NO: 1408428 - DNA, 15 bp, Homo sapiens
aaagagatctggctt

SEQ ID NO: 1408429 - DNA, 15 bp, Homo sapiens
caaagagatctggct

SEQ ID NO: 1408430 - DNA, 15 bp, Homo sapiens
acaaagagatctggc

SEQ ID NO: 1408431 - DNA, 15 bp, Homo sapiens
tacaaagagatctgg

SEQ ID NO: 1408432 - DNA, 15 bp, Homo sapiens
atacaaagagatctg

SEQ ID NO: 1408433 - DNA, 15 bp, Homo sapiens
gatacaaagagatct

SEQ ID NO: 1408434 - DNA, 15 bp, Homo sapiens
agatacaaagagatc

SEQ ID NO: 1408435 - DNA, 15 bp, Homo sapiens
cagatacaaagagat

SEQ ID NO: 1408436 - DNA, 15 bp, Homo sapiens
gcagatacaaagaga

SEQ ID NO: 1408437 - DNA, 15 bp, Homo sapiens
agcagatacaaagag

SEQ ID NO: 1408438 - DNA, 15 bp, Homo sapiens
cagcagatacaaaga

SEQ ID NO: 1408439 - DNA, 15 bp, Homo sapiens
acagcagatacaaag

SEQ ID NO: 1408440 - DNA, 15 bp, Homo sapiens
gacagcagatacaaa

SEQ ID NO: 1408441 - DNA, 15 bp, Homo sapiens
ggacagcagatacaa

SEQ ID NO: 1408442 - DNA, 15 bp, Homo sapiens
tggacagcagataca

SEQ ID NO: 1408443 - DNA, 15 bp, Homo sapiens
gtggacagcagatac

SEQ ID NO: 1408444 - DNA, 15 bp, Homo sapiens
agtggacagcagata

SEQ ID NO: 1408445 - DNA, 15 bp, Homo sapiens
tagtggacagcagat

SEQ ID NO: 1408446 - DNA, 15 bp, Homo sapiens
gtagtggacagcaga

SEQ ID NO: 1408447 - DNA, 15 bp, Homo sapiens
agtagtggacagcag

SEQ ID NO: 1408448 - DNA, 15 bp, Homo sapiens
cagtagtggacagca

SEQ ID NO: 1408449 - DNA, 15 bp, Homo sapiens
ccagtagtggacagc

SEQ ID NO: 1408450 - DNA, 15 bp, Homo sapiens
cccagtagtggacag

SEQ ID NO: 1408451 - DNA, 15 bp, Homo sapiens
gcccagtagtggaca

SEQ ID NO: 1408452 - DNA, 15 bp, Homo sapiens
ggcccagtagtggac

SEQ ID NO: 1408453 - DNA, 15 bp, Homo sapiens
gggcccagtagtgga

SEQ ID NO: 1408454 - DNA, 15 bp, Homo sapiens
tgggcccagtagtgg

SEQ ID NO: 1408455 - DNA, 15 bp, Homo sapiens
gtgggcccagtagtg

SEQ ID NO: 1408456 - DNA, 15 bp, Homo sapiens
ggtgggcccagtagt

SEQ ID NO: 1408457 - DNA, 15 bp, Homo sapiens
tggtgggcccagtag

SEQ ID NO: 1408458 - DNA, 15 bp, Homo sapiens
ctggtgggcccagta

SEQ ID NO: 1408459 - DNA, 15 bp, Homo sapiens
actggtgggcccagt

SEQ ID NO: 1408460 - DNA, 15 bp, Homo sapiens
tactggtgggcccag

SEQ ID NO: 1408461 - DNA, 15 bp, Homo sapiens
atactggtgggccca

SEQ ID NO: 1408462 - DNA, 15 bp, Homo sapiens
catactggtgggccc

SEQ ID NO: 1408463 - DNA, 15 bp, Homo sapiens
ccatactggtgggcc

SEQ ID NO: 1408464 - DNA, 15 bp, Homo sapiens
gccatactggtgggc

SEQ ID NO: 1408465 - DNA, 15 bp, Homo sapiens
agccatactggtggg

SEQ ID NO: 1408466 - DNA, 15 bp, Homo sapiens
gagccatactggtgg

SEQ ID NO: 1408467 - DNA, 15 bp, Homo sapiens
tgagccatactggtg

SEQ ID NO: 1408468 - DNA, 15 bp, Homo sapiens
ctgagccatactggt

SEQ ID NO: 1408469 - DNA, 15 bp, Homo sapiens
tctgagccatactgg

SEQ ID NO: 1408470 - DNA, 15 bp, Homo sapiens
ctctgagccatactg

SEQ ID NO: 1408471 - DNA, 15 bp, Homo sapiens
cctctgagccatact

SEQ ID NO: 1408472 - DNA, 15 bp, Homo sapiens
tcctctgagccatac

SEQ ID NO: 1408473 - DNA, 15 bp, Homo sapiens
atcctctgagccata

SEQ ID NO: 1408474 - DNA, 15 bp, Homo sapiens
tatcctctgagccat

SEQ ID NO: 1408475 - DNA, 15 bp, Homo sapiens
ctatcctctgagcca

SEQ ID NO: 1408476 - DNA, 15 bp, Homo sapiens
actatcctctgagcc

SEQ ID NO: 1408477 - DNA, 15 bp, Homo sapiens
tactatcctctgagc

SEQ ID NO: 1408478 - DNA, 15 bp, Homo sapiens
ttactatcctctgag

SEQ ID NO: 1408479 - DNA, 15 bp, Homo sapiens
tttactatcctctga

SEQ ID NO: 1408480 - DNA, 15 bp, Homo sapiens
gtttactatcctctg

SEQ ID NO: 1408481 - DNA, 15 bp, Homo sapiens
agtttactatcctct

SEQ ID NO: 1408482 - DNA, 15 bp, Homo sapiens
gagtttactatcctc

SEQ ID NO: 1408483 - DNA, 15 bp, Homo sapiens
agagtttactatcct

SEQ ID NO: 1408484 - DNA, 15 bp, Homo sapiens
aagagtttactatcc

SEQ ID NO: 1408485 - DNA, 15 bp, Homo sapiens
aaagagtttactatc

SEQ ID NO: 1408486 - DNA, 15 bp, Homo sapiens
caaagagtttactat

SEQ ID NO: 1408487 - DNA, 15 bp, Homo sapiens
ccaaagagtttacta

SEQ ID NO: 1408488 - DNA, 15 bp, Homo sapiens
cccaaagagtttact

SEQ ID NO: 1408489 - DNA, 15 bp, Homo sapiens
ccccaaagagtttac

SEQ ID NO: 1408490 - DNA, 15 bp, Homo sapiens
gccccaaagagttta

SEQ ID NO: 1408491 - DNA, 15 bp, Homo sapiens
ggccccaaagagttt

SEQ ID NO: 1408492 - DNA, 15 bp, Homo sapiens
tggccccaaagagtt

SEQ ID NO: 1408493 - DNA, 15 bp, Homo sapiens
ctggccccaaagagt

SEQ ID NO: 1408494 - DNA, 15 bp, Homo sapiens
tctggccccaaagag

SEQ ID NO: 1408495 - DNA, 15 bp, Homo sapiens
gtctggccccaaaga

SEQ ID NO: 1408496 - DNA, 15 bp, Homo sapiens
ggtctggccccaaag

SEQ ID NO: 1408497 - DNA, 15 bp, Homo sapiens
aggtctggccccaaa

SEQ ID NO: 1408498 - DNA, 15 bp, Homo sapiens
taggtctggccccaa

SEQ ID NO: 1408499 - DNA, 15 bp, Homo sapiens
ataggtctggcccca

SEQ ID NO: 1408500 - DNA, 15 bp, Homo sapiens
tataggtctggcccc

SEQ ID NO: 1408501 - DNA, 15 bp, Homo sapiens
ctataggtctggccc

SEQ ID NO: 1408502 - DNA, 15 bp, Homo sapiens
gctataggtctggcc

SEQ ID NO: 1408503 - DNA, 15 bp, Homo sapiens
tgctataggtctggc

SEQ ID NO: 1408504 - DNA, 15 bp, Homo sapiens
atgctataggtctgg

SEQ ID NO: 1408505 - DNA, 15 bp, Homo sapiens
catgctataggtctg

SEQ ID NO: 1408506 - DNA, 15 bp, Homo sapiens
ccatgctataggtct

SEQ ID NO: 1408507 - DNA, 15 bp, Homo sapiens
gccatgctataggtc

SEQ ID NO: 1408508 - DNA, 15 bp, Homo sapiens
tgccatgctataggt

SEQ ID NO: 1408509 - DNA, 15 bp, Homo sapiens
atgccatgctatagg

SEQ ID NO: 1408510 - DNA, 15 bp, Homo sapiens
aatgccatgctatag

SEQ ID NO: 1408511 - DNA, 15 bp, Homo sapiens
taatgccatgctata

SEQ ID NO: 1408512 - DNA, 15 bp, Homo sapiens
gtaatgccatgctat

SEQ ID NO: 1408513 - DNA, 15 bp, Homo sapiens
tgtaatgccatgcta

SEQ ID NO: 1408514 - DNA, 15 bp, Homo sapiens
atgtaatgccatgct

SEQ ID NO: 1408515 - DNA, 15 bp, Homo sapiens
catgtaatgccatgc

SEQ ID NO: 1408516 - DNA, 15 bp, Homo sapiens
gcatgtaatgccatg

SEQ ID NO: 1408517 - DNA, 15 bp, Homo sapiens
ggcatgtaatgccat

SEQ ID NO: 1408518 - DNA, 15 bp, Homo sapiens
gggcatgtaatgcca

SEQ ID NO: 1408519 - DNA, 15 bp, Homo sapiens
cgggcatgtaatgcc

SEQ ID NO: 1408520 - DNA, 15 bp, Homo sapiens
gcgggcatgtaatgc

SEQ ID NO: 1408521 - DNA, 15 bp, Homo sapiens
agcgggcatgtaatg

SEQ ID NO: 1408522 - DNA, 15 bp, Homo sapiens
aagcgggcatgtaat

SEQ ID NO: 1408523 - DNA, 15 bp, Homo sapiens
gaagcgggcatgtaa

SEQ ID NO: 1408524 - DNA, 15 bp, Homo sapiens
agaagcgggcatgta

SEQ ID NO: 1408525 - DNA, 15 bp, Homo sapiens
cagaagcgggcatgt

SEQ ID NO: 1408526 - DNA, 15 bp, Homo sapiens
acagaagcgggcatg

SEQ ID NO: 1408527 - DNA, 15 bp, Homo sapiens
tacagaagcgggcat

SEQ ID NO: 1408528 - DNA, 15 bp, Homo sapiens
ttacagaagcgggca

SEQ ID NO: 1408529 - DNA, 15 bp, Homo sapiens
attacagaagcgggc

SEQ ID NO: 1408530 - DNA, 15 bp, Homo sapiens
cattacagaagcggg

SEQ ID NO: 1408531 - DNA, 15 bp, Homo sapiens
tcattacagaagcgg

SEQ ID NO: 1408532 - DNA, 15 bp, Homo sapiens
atcattacagaagcg

SEQ ID NO: 1408533 - DNA, 15 bp, Homo sapiens
catcattacagaagc

SEQ ID NO: 1408534 - DNA, 15 bp, Homo sapiens
ccatcattacagaag

SEQ ID NO: 1408535 - DNA, 15 bp, Homo sapiens
tccatcattacagaa

SEQ ID NO: 1408536 - DNA, 15 bp, Homo sapiens
ctccatcattacaga

SEQ ID NO: 1408537 - DNA, 15 bp, Homo sapiens
cctccatcattacag

SEQ ID NO: 1408538 - DNA, 15 bp, Homo sapiens
gcctccatcattaca

SEQ ID NO: 1408539 - DNA, 15 bp, Homo sapiens
tgcctccatcattac

SEQ ID NO: 1408540 - DNA, 15 bp, Homo sapiens
ctgcctccatcatta

SEQ ID NO: 1408541 - DNA, 15 bp, Homo sapiens
cctgcctccatcatt

SEQ ID NO: 1408542 - DNA, 15 bp, Homo sapiens
ccctgcctccatcat

SEQ ID NO: 1408543 - DNA, 15 bp, Homo sapiens
gccctgcctccatca

SEQ ID NO: 1408544 - DNA, 15 bp, Homo sapiens
tgccctgcctccatc

SEQ ID NO: 1408545 - DNA, 15 bp, Homo sapiens
atgccctgcctccat

SEQ ID NO: 1408546 - DNA, 15 bp, Homo sapiens
catgccctgcctcca

SEQ ID NO: 1408547 - DNA, 15 bp, Homo sapiens
acatgccctgcctcc

SEQ ID NO: 1408548 - DNA, 15 bp, Homo sapiens
cacatgccctgcctc

SEQ ID NO: 1408549 - DNA, 15 bp, Homo sapiens
tcacatgccctgcct

SEQ ID NO: 1408550 - DNA, 15 bp, Homo sapiens
atcacatgccctgcc

SEQ ID NO: 1408551 - DNA, 15 bp, Homo sapiens
aatcacatgccctgc

SEQ ID NO: 1408552 - DNA, 15 bp, Homo sapiens
taatcacatgccctg

SEQ ID NO: 1408553 - DNA, 15 bp, Homo sapiens
ataatcacatgccct

SEQ ID NO: 1408554 - DNA, 15 bp, Homo sapiens
gataatcacatgccc

SEQ ID NO: 1408555 - DNA, 15 bp, Homo sapiens
agataatcacatgcc

SEQ ID NO: 1408556 - DNA, 15 bp, Homo sapiens
cagataatcacatgc

SEQ ID NO: 1408557 - DNA, 15 bp, Homo sapiens
gcagataatcacatg

SEQ ID NO: 1408558 - DNA, 15 bp, Homo sapiens
ggcagataatcacat

SEQ ID NO: 1408559 - DNA, 15 bp, Homo sapiens
tggcagataatcaca

SEQ ID NO: 1408560 - DNA, 15 bp, Homo sapiens
gtggcagataatcac

SEQ ID NO: 1408561 - DNA, 15 bp, Homo sapiens
tgtggcagataatca

SEQ ID NO: 1408562 - DNA, 15 bp, Homo sapiens
gtgtggcagataatc

SEQ ID NO: 1408563 - DNA, 15 bp, Homo sapiens
agtgtggcagataat

SEQ ID NO: 1408564 - DNA, 15 bp, Homo sapiens
tagtgtggcagataa

SEQ ID NO: 1408565 - DNA, 15 bp, Homo sapiens
ttagtgtggcagata

SEQ ID NO: 1408566 - DNA, 15 bp, Homo sapiens
cttagtgtggcagat

SEQ ID NO: 1408567 - DNA, 15 bp, Homo sapiens
acttagtgtggcaga

SEQ ID NO: 1408568 - DNA, 15 bp, Homo sapiens
cacttagtgtggcag

SEQ ID NO: 1408569 - DNA, 15 bp, Homo sapiens
ccacttagtgtggca

SEQ ID NO: 1408570 - DNA, 15 bp, Homo sapiens
tccacttagtgtggc

SEQ ID NO: 1408571 - DNA, 15 bp, Homo sapiens
ttccacttagtgtgg

SEQ ID NO: 1408572 - DNA, 15 bp, Homo sapiens
cttccacttagtgtg

SEQ ID NO: 1408573 - DNA, 15 bp, Homo sapiens
acttccacttagtgt

SEQ ID NO: 1408574 - DNA, 15 bp, Homo sapiens
gacttccacttagtg

SEQ ID NO: 1408575 - DNA, 15 bp, Homo sapiens
tgacttccacttagt

SEQ ID NO: 1408576 - DNA, 15 bp, Homo sapiens
ctgacttccacttag

SEQ ID NO: 1408577 - DNA, 15 bp, Homo sapiens
tctgacttccactta

SEQ ID NO: 1408578 - DNA, 15 bp, Homo sapiens
atctgacttccactt

SEQ ID NO: 1408579 - DNA, 15 bp, Homo sapiens
tatctgacttccact

SEQ ID NO: 1408580 - DNA, 15 bp, Homo sapiens
ttatctgacttccac

SEQ ID NO: 1408581 - DNA, 15 bp, Homo sapiens
attatctgacttcca

SEQ ID NO: 1408582 - DNA, 15 bp, Homo sapiens
aattatctgacttcc

SEQ ID NO: 1408583 - DNA, 15 bp, Homo sapiens
gaattatctgacttc

SEQ ID NO: 1408584 - DNA, 15 bp, Homo sapiens
ggaattatctgactt

SEQ ID NO: 1408585 - DNA, 15 bp, Homo sapiens
aggaattatctgact

SEQ ID NO: 1408586 - DNA, 15 bp, Homo sapiens
gaggaattatctgac

SEQ ID NO: 1408587 - DNA, 15 bp, Homo sapiens
tgaggaattatctga

SEQ ID NO: 1408588 - DNA, 15 bp, Homo sapiens
ttgaggaattatctg

SEQ ID NO: 1408589 - DNA, 15 bp, Homo sapiens
tttgaggaattatct

SEQ ID NO: 1408590 - DNA, 15 bp, Homo sapiens
ctttgaggaattatc

SEQ ID NO: 1408591 - DNA, 15 bp, Homo sapiens
cctttgaggaattat

SEQ ID NO: 1408592 - DNA, 15 bp, Homo sapiens
acctttgaggaatta

SEQ ID NO: 1408593 - DNA, 15 bp, Homo sapiens
gacctttgaggaatt

SEQ ID NO: 1408594 - DNA, 15 bp, Homo sapiens
tgacctttgaggaat

SEQ ID NO: 1408595 - DNA, 15 bp, Homo sapiens
ttgacctttgaggaa

SEQ ID NO: 1408596 - DNA, 15 bp, Homo sapiens
gttgacctttgagga

SEQ ID NO: 1408597 - DNA, 15 bp, Homo sapiens
agttgacctttgagg

SEQ ID NO: 1408598 - DNA, 15 bp, Homo sapiens
cagttgacctttgag

SEQ ID NO: 1408599 - DNA, 15 bp, Homo sapiens
ccagttgacctttga

SEQ ID NO: 1408600 - DNA, 15 bp, Homo sapiens
accagttgacctttg

SEQ ID NO: 1408601 - DNA, 15 bp, Homo sapiens
caccagttgaccttt

SEQ ID NO: 1408602 - DNA, 15 bp, Homo sapiens
acaccagttgacctt

SEQ ID NO: 1408603 - DNA, 15 bp, Homo sapiens
tacaccagttgacct

SEQ ID NO: 1408604 - DNA, 15 bp, Homo sapiens
atacaccagttgacc

SEQ ID NO: 1408605 - DNA, 15 bp, Homo sapiens
catacaccagttgac

SEQ ID NO: 1408606 - DNA, 15 bp, Homo sapiens
acatacaccagttga

SEQ ID NO: 1408607 - DNA, 15 bp, Homo sapiens
tacatacaccagttg

SEQ ID NO: 1408608 - DNA, 15 bp, Homo sapiens
ttacatacaccagtt

SEQ ID NO: 1408609 - DNA, 15 bp, Homo sapiens
tttacatacaccagt

SEQ ID NO: 1408610 - DNA, 15 bp, Homo sapiens
ctttacatacaccag

SEQ ID NO: 1408611 - DNA, 15 bp, Homo sapiens
tctttacatacacca

SEQ ID NO: 1408612 - DNA, 15 bp, Homo sapiens
ttctttacatacacc

SEQ ID NO: 1408613 - DNA, 15 bp, Homo sapiens
gttctttacatacac

SEQ ID NO: 1408614 - DNA, 15 bp, Homo sapiens
tgttctttacataca

SEQ ID NO: 1408615 - DNA, 15 bp, Homo sapiens
ctgttctttacatac

SEQ ID NO: 1408616 - DNA, 15 bp, Homo sapiens
tctgttctttacata

SEQ ID NO: 1408617 - DNA, 15 bp, Homo sapiens
ttctgttctttacat

SEQ ID NO: 1408618 - DNA, 15 bp, Homo sapiens
cttctgttctttaca

SEQ ID NO: 1408619 - DNA, 15 bp, Homo sapiens
tcttctgttctttac

SEQ ID NO: 1408620 - DNA, 15 bp, Homo sapiens
ttcttctgttcttta

SEQ ID NO: 1408621 - DNA, 15 bp, Homo sapiens
cttcttctgttcttt

SEQ ID NO: 1408622 - DNA, 15 bp, Homo sapiens
ccttcttctgttctt

SEQ ID NO: 1408623 - DNA, 15 bp, Homo sapiens
cccttcttctgttct

SEQ ID NO: 1408624 - DNA, 15 bp, Homo sapiens
tcccttcttctgttc

SEQ ID NO: 1408625 - DNA, 15 bp, Homo sapiens
atcccttcttctgtt

SEQ ID NO: 1408626 - DNA, 15 bp, Homo sapiens
catcccttcttctgt

SEQ ID NO: 1408627 - DNA, 15 bp, Homo sapiens
gcatcccttcttctg

SEQ ID NO: 1408628 - DNA, 15 bp, Homo sapiens
agcatcccttcttct

SEQ ID NO: 1408629 - DNA, 15 bp, Homo sapiens
cagcatcccttcttc

SEQ ID NO: 1408630 - DNA, 15 bp, Homo sapiens
ccagcatcccttctt

SEQ ID NO: 1408631 - DNA, 15 bp, Homo sapiens
cccagcatcccttct

SEQ ID NO: 1408632 - DNA, 15 bp, Homo sapiens
gcccagcatcccttc

SEQ ID NO: 1408633 - DNA, 15 bp, Homo sapiens
tgcccagcatccctt

SEQ ID NO: 1408634 - DNA, 15 bp, Homo sapiens
ttgcccagcatccct

SEQ ID NO: 1408635 - DNA, 15 bp, Homo sapiens
cttgcccagcatccc

SEQ ID NO: 1408636 - DNA, 15 bp, Homo sapiens
acttgcccagcatcc

SEQ ID NO: 1408637 - DNA, 15 bp, Homo sapiens
tacttgcccagcatc

SEQ ID NO: 1408638 - DNA, 15 bp, Homo sapiens
ttacttgcccagcat

SEQ ID NO: 1408639 - DNA, 15 bp, Homo sapiens
cttacttgcccagca

SEQ ID NO: 1408640 - DNA, 15 bp, Homo sapiens
tcttacttgcccagc

SEQ ID NO: 1408641 - DNA, 15 bp, Homo sapiens
ttcttacttgcccag

SEQ ID NO: 1408642 - DNA, 15 bp, Homo sapiens
gttcttacttgccca

SEQ ID NO: 1408643 - DNA, 15 bp, Homo sapiens
tgttcttacttgccc

SEQ ID NO: 1408644 - DNA, 15 bp, Homo sapiens
ctgttcttacttgcc

SEQ ID NO: 1408645 - DNA, 15 bp, Homo sapiens
gctgttcttacttgc

SEQ ID NO: 1408646 - DNA, 15 bp, Homo sapiens
tgctgttcttacttg

SEQ ID NO: 1408647 - DNA, 15 bp, Homo sapiens
ctgctgttcttactt

SEQ ID NO: 1408648 - DNA, 15 bp, Homo sapiens
tctgctgttcttact

SEQ ID NO: 1408649 - DNA, 15 bp, Homo sapiens
atctgctgttcttac

SEQ ID NO: 1408650 - DNA, 15 bp, Homo sapiens
catctgctgttctta

SEQ ID NO: 1408651 - DNA, 15 bp, Homo sapiens
acatctgctgttctt

SEQ ID NO: 1408652 - DNA, 15 bp, Homo sapiens
gacatctgctgttct

SEQ ID NO: 1408653 - DNA, 15 bp, Homo sapiens
ggacatctgctgttc

SEQ ID NO: 1408654 - DNA, 15 bp, Homo sapiens
tggacatctgctgtt

SEQ ID NO: 1408655 - DNA, 15 bp, Homo sapiens
gtggacatctgctgt

SEQ ID NO: 1408656 - DNA, 15 bp, Homo sapiens
agtggacatctgctg

SEQ ID NO: 1408657 - DNA, 15 bp, Homo sapiens
tagtggacatctgct

SEQ ID NO: 1408658 - DNA, 15 bp, Homo sapiens
gtagtggacatctgc

SEQ ID NO: 1408659 - DNA, 15 bp, Homo sapiens
agtagtggacatctg

SEQ ID NO: 1408660 - DNA, 15 bp, Homo sapiens
cagtagtggacatct

SEQ ID NO: 1408661 - DNA, 15 bp, Homo sapiens
ccagtagtggacatc

SEQ ID NO: 1408662 - DNA, 15 bp, Homo sapiens
tccagtagtggacat

SEQ ID NO: 1408663 - DNA, 15 bp, Homo sapiens
ttccagtagtggaca

SEQ ID NO: 1408664 - DNA, 15 bp, Homo sapiens
tttccagtagtggac

SEQ ID NO: 1408665 - DNA, 15 bp, Homo sapiens
atttccagtagtgga

SEQ ID NO: 1408666 - DNA, 15 bp, Homo sapiens
catttccagtagtgg

SEQ ID NO: 1408667 - DNA, 15 bp, Homo sapiens
acatttccagtagtg

SEQ ID NO: 1408668 - DNA, 15 bp, Homo sapiens
cacatttccagtagt

SEQ ID NO: 1408669 - DNA, 15 bp, Homo sapiens
tcacatttccagtag

SEQ ID NO: 1408670 - DNA, 15 bp, Homo sapiens
ttcacatttccagta

SEQ ID NO: 1408671 - DNA, 15 bp, Homo sapiens
tttcacatttccagt

SEQ ID NO: 1408672 - DNA, 15 bp, Homo sapiens
ttttcacatttccag

SEQ ID NO: 1408673 - DNA, 15 bp, Homo sapiens
tttttcacatttcca

SEQ ID NO: 1408674 - DNA, 15 bp, Homo sapiens
ttttttcacatttcc

SEQ ID NO: 1408675 - DNA, 15 bp, Homo sapiens
tttttttcacatttc

SEQ ID NO: 1408676 - DNA, 15 bp, Homo sapiens
ttttttttcacattt

SEQ ID NO: 1408677 - DNA, 15 bp, Homo sapiens
tttttttttcacatt

SEQ ID NO: 1408678 - DNA, 15 bp, Homo sapiens
ttttttttttcacat

SEQ ID NO: 1408679 - DNA, 15 bp, Homo sapiens
gttttttttttcaca

SEQ ID NO: 1408680 - DNA, 15 bp, Homo sapiens
agttttttttttcac

SEQ ID NO: 1408681 - DNA, 15 bp, Homo sapiens
gagttttttttttca

SEQ ID NO: 1408682 - DNA, 15 bp, Homo sapiens
tgagttttttttttc

SEQ ID NO: 1408683 - DNA, 15 bp, Homo sapiens
gtgagtttttttttt

SEQ ID NO: 1408684 - DNA, 15 bp, Homo sapiens
cgtgagttttttttt

SEQ ID NO: 1408685 - DNA, 15 bp, Homo sapiens
gcgtgagtttttttt

SEQ ID NO: 1408686 - DNA, 15 bp, Homo sapiens
ggcgtgagttttttt

SEQ ID NO: 1408687 - DNA, 15 bp, Homo sapiens
tggcgtgagtttttt

SEQ ID NO: 1408688 - DNA, 15 bp, Homo sapiens
ctggcgtgagttttt

SEQ ID NO: 1408689 - DNA, 15 bp, Homo sapiens
tctggcgtgagtttt

SEQ ID NO: 1408690 - DNA, 15 bp, Homo sapiens
ctctggcgtgagttt

SEQ ID NO: 1408691 - DNA, 15 bp, Homo sapiens
actctggcgtgagtt

SEQ ID NO: 1408692 - DNA, 15 bp, Homo sapiens
gactctggcgtgagt

SEQ ID NO: 1408693 - DNA, 15 bp, Homo sapiens
agactctggcgtgag

SEQ ID NO: 1408694 - DNA, 15 bp, Homo sapiens
aagactctggcgtga

SEQ ID NO: 1408695 - DNA, 15 bp, Homo sapiens
caagactctggcgtg

SEQ ID NO: 1408696 - DNA, 15 bp, Homo sapiens
acaagactctggcgt

SEQ ID NO: 1408697 - DNA, 15 bp, Homo sapiens
gacaagactctggcg

SEQ ID NO: 1408698 - DNA, 15 bp, Homo sapiens
ggacaagactctggc

SEQ ID NO: 1408699 - DNA, 15 bp, Homo sapiens
gggacaagactctgg

SEQ ID NO: 1408700 - DNA, 15 bp, Homo sapiens
tgggacaagactctg

SEQ ID NO: 1408701 - DNA, 15 bp, Homo sapiens
ttgggacaagactct

SEQ ID NO: 1408702 - DNA, 15 bp, Homo sapiens
tttgggacaagactc

SEQ ID NO: 1408703 - DNA, 15 bp, Homo sapiens
ttttgggacaagact

SEQ ID NO: 1408704 - DNA, 15 bp, Homo sapiens
attttgggacaagac

SEQ ID NO: 1408705 - DNA, 15 bp, Homo sapiens
gattttgggacaaga

SEQ ID NO: 1408706 - DNA, 15 bp, Homo sapiens
agattttgggacaag

SEQ ID NO: 1408707 - DNA, 15 bp, Homo sapiens
aagattttgggacaa

SEQ ID NO: 1408708 - DNA, 15 bp, Homo sapiens
gaagattttgggaca

SEQ ID NO: 1408709 - DNA, 15 bp, Homo sapiens
agaagattttgggac

SEQ ID NO: 1408710 - DNA, 15 bp, Homo sapiens
gagaagattttggga

SEQ ID NO: 1408711 - DNA, 15 bp, Homo sapiens
ggagaagattttggg

SEQ ID NO: 1408712 - DNA, 15 bp, Homo sapiens
gggagaagattttgg

SEQ ID NO: 1408713 - DNA, 15 bp, Homo sapiens
tgggagaagattttg

SEQ ID NO: 1408714 - DNA, 15 bp, Homo sapiens
ctgggagaagatttt

SEQ ID NO: 1408715 - DNA, 15 bp, Homo sapiens
tctgggagaagattt

SEQ ID NO: 1408716 - DNA, 15 bp, Homo sapiens
atctgggagaagatt

SEQ ID NO: 1408717 - DNA, 15 bp, Homo sapiens
aatctgggagaagat

SEQ ID NO: 1408718 - DNA, 15 bp, Homo sapiens
aaatctgggagaaga

SEQ ID NO: 1408719 - DNA, 15 bp, Homo sapiens
aaaatctgggagaag

SEQ ID NO: 1408720 - DNA, 15 bp, Homo sapiens
caaaatctgggagaa

SEQ ID NO: 1408721 - DNA, 15 bp, Homo sapiens
ccaaaatctgggaga

SEQ ID NO: 1408722 - DNA, 15 bp, Homo sapiens
accaaaatctgggag

SEQ ID NO: 1408723 - DNA, 15 bp, Homo sapiens
aaccaaaatctggga

SEQ ID NO: 1408724 - DNA, 15 bp, Homo sapiens
caaccaaaatctggg

SEQ ID NO: 1408725 - DNA, 15 bp, Homo sapiens
tcaaccaaaatctgg

SEQ ID NO: 1408726 - DNA, 15 bp, Homo sapiens
ttcaaccaaaatctg

SEQ ID NO: 1408727 - DNA, 15 bp, Homo sapiens
cttcaaccaaaatct

SEQ ID NO: 1408728 - DNA, 15 bp, Homo sapiens
ccttcaaccaaaatc

SEQ ID NO: 1408729 - DNA, 15 bp, Homo sapiens
accttcaaccaaaat

SEQ ID NO: 1408730 - DNA, 15 bp, Homo sapiens
gaccttcaaccaaaa

SEQ ID NO: 1408731 - DNA, 15 bp, Homo sapiens
ggaccttcaaccaaa

SEQ ID NO: 1408732 - DNA, 15 bp, Homo sapiens
gggaccttcaaccaa

SEQ ID NO: 1408733 - DNA, 15 bp, Homo sapiens
tgggaccttcaacca

SEQ ID NO: 1408734 - DNA, 15 bp, Homo sapiens
gtgggaccttcaacc

SEQ ID NO: 1408735 - DNA, 15 bp, Homo sapiens
tgtgggaccttcaac

SEQ ID NO: 1408736 - DNA, 15 bp, Homo sapiens
atgtgggaccttcaa

SEQ ID NO: 1408737 - DNA, 15 bp, Homo sapiens
tatgtgggaccttca

SEQ ID NO: 1408738 - DNA, 15 bp, Homo sapiens
atatgtgggaccttc

SEQ ID NO: 1408739 - DNA, 15 bp, Homo sapiens
tatatgtgggacctt

SEQ ID NO: 1408740 - DNA, 15 bp, Homo sapiens
atatatgtgggacct

SEQ ID NO: 1408741 - DNA, 15 bp, Homo sapiens
catatatgtgggacc

SEQ ID NO: 1408742 - DNA, 15 bp, Homo sapiens
ccatatatgtgggac

SEQ ID NO: 1408743 - DNA, 15 bp, Homo sapiens
cccatatatgtggga

SEQ ID NO: 1408744 - DNA, 15 bp, Homo sapiens
tcccatatatgtggg

SEQ ID NO: 1408745 - DNA, 15 bp, Homo sapiens
ttcccatatatgtgg

SEQ ID NO: 1408746 - DNA, 15 bp, Homo sapiens
cttcccatatatgtg

SEQ ID NO: 1408747 - DNA, 15 bp, Homo sapiens
ccttcccatatatgt

SEQ ID NO: 1408748 - DNA, 15 bp, Homo sapiens
tccttcccatatatg

SEQ ID NO: 1408749 - DNA, 15 bp, Homo sapiens
ttccttcccatatat

SEQ ID NO: 1408750 - DNA, 15 bp, Homo sapiens
tttccttcccatata

SEQ ID NO: 1408751 - DNA, 15 bp, Homo sapiens
ctttccttcccatat

SEQ ID NO: 1408752 - DNA, 15 bp, Homo sapiens
gctttccttcccata

SEQ ID NO: 1408753 - DNA, 15 bp, Homo sapiens
tgctttccttcccat

SEQ ID NO: 1408754 - DNA, 15 bp, Homo sapiens
ttgctttccttccca

SEQ ID NO: 1408755 - DNA, 15 bp, Homo sapiens
cttgctttccttccc

SEQ ID NO: 1408756 - DNA, 15 bp, Homo sapiens
acttgctttccttcc

SEQ ID NO: 1408757 - DNA, 15 bp, Homo sapiens
tacttgctttccttc

SEQ ID NO: 1408758 - DNA, 15 bp, Homo sapiens
atacttgctttcctt

SEQ ID NO: 1408759 - DNA, 15 bp, Homo sapiens
aatacttgctttcct

SEQ ID NO: 1408760 - DNA, 15 bp, Homo sapiens
taatacttgctttcc

SEQ ID NO: 1408761 - DNA, 15 bp, Homo sapiens
gtaatacttgctttc

SEQ ID NO: 1408762 - DNA, 15 bp, Homo sapiens
agtaatacttgcttt

SEQ ID NO: 1408763 - DNA, 15 bp, Homo sapiens
cagtaatacttgctt

SEQ ID NO: 1408764 - DNA, 15 bp, Homo sapiens
tcagtaatacttgct

SEQ ID NO: 1408765 - DNA, 15 bp, Homo sapiens
ttcagtaatacttgc

SEQ ID NO: 1408766 - DNA, 15 bp, Homo sapiens
tttcagtaatacttg

SEQ ID NO: 1408767 - DNA, 15 bp, Homo sapiens
ctttcagtaatactt

SEQ ID NO: 1408768 - DNA, 15 bp, Homo sapiens
gctttcagtaatact

SEQ ID NO: 1408769 - DNA, 15 bp, Homo sapiens
cgctttcagtaatac

SEQ ID NO: 1408770 - DNA, 15 bp, Homo sapiens
acgctttcagtaata

SEQ ID NO: 1408771 - DNA, 15 bp, Homo sapiens
tacgctttcagtaat

SEQ ID NO: 1408772 - DNA, 15 bp, Homo sapiens
ttacgctttcagtaa

SEQ ID NO: 1408773 - DNA, 15 bp, Homo sapiens
tttacgctttcagta

SEQ ID NO: 1408774 - DNA, 15 bp, Homo sapiens
ttttacgctttcagt

SEQ ID NO: 1408775 - DNA, 15 bp, Homo sapiens
cttttacgctttcag

SEQ ID NO: 1408776 - DNA, 15 bp, Homo sapiens
tcttttacgctttca

SEQ ID NO: 1408777 - DNA, 15 bp, Homo sapiens
ctcttttacgctttc

SEQ ID NO: 1408778 - DNA, 15 bp, Homo sapiens
gctcttttacgcttt

SEQ ID NO: 1408779 - DNA, 15 bp, Homo sapiens
cgctcttttacgctt

SEQ ID NO: 1408780 - DNA, 15 bp, Homo sapiens
tcgctcttttacgct

SEQ ID NO: 1408781 - DNA, 15 bp, Homo sapiens
ttcgctcttttacgc

SEQ ID NO: 1408782 - DNA, 15 bp, Homo sapiens
tttcgctcttttacg

SEQ ID NO: 1408783 - DNA, 15 bp, Homo sapiens
ctttcgctcttttac

SEQ ID NO: 1408784 - DNA, 15 bp, Homo sapiens
tctttcgctctttta

SEQ ID NO: 1408785 - DNA, 15 bp, Homo sapiens
ttctttcgctctttt

SEQ ID NO: 1408786 - DNA, 15 bp, Homo sapiens
gttctttcgctcttt

SEQ ID NO: 1408787 - DNA, 15 bp, Homo sapiens
ggttctttcgctctt

SEQ ID NO: 1408788 - DNA, 15 bp, Homo sapiens
tggttctttcgctct

SEQ ID NO: 1408789 - DNA, 15 bp, Homo sapiens
ctggttctttcgctc

SEQ ID NO: 1408790 - DNA, 15 bp, Homo sapiens
actggttctttcgct

SEQ ID NO: 1408791 - DNA, 15 bp, Homo sapiens
cactggttctttcgc

SEQ ID NO: 1408792 - DNA, 15 bp, Homo sapiens
gcactggttctttcg

SEQ ID NO: 1408793 - DNA, 15 bp, Homo sapiens
agcactggttctttc

SEQ ID NO: 1408794 - DNA, 15 bp, Homo sapiens
gagcactggttcttt

SEQ ID NO: 1408795 - DNA, 15 bp, Homo sapiens
tgagcactggttctt

SEQ ID NO: 1408796 - DNA, 15 bp, Homo sapiens
ttgagcactggttct

SEQ ID NO: 1408797 - DNA, 15 bp, Homo sapiens
tttgagcactggttc

SEQ ID NO: 1408798 - DNA, 15 bp, Homo sapiens
ttttgagcactggtt

SEQ ID NO: 1408799 - DNA, 15 bp, Homo sapiens
attttgagcactggt

SEQ ID NO: 1408800 - DNA, 15 bp, Homo sapiens
aattttgagcactgg

SEQ ID NO: 1408801 - DNA, 15 bp, Homo sapiens
aaattttgagcactg

SEQ ID NO: 1408802 - DNA, 15 bp, Homo sapiens
taaattttgagcact

SEQ ID NO: 1408803 - DNA, 15 bp, Homo sapiens
gtaaattttgagcac

SEQ ID NO: 1408804 - DNA, 15 bp, Homo sapiens
agtaaattttgagca

SEQ ID NO: 1408805 - DNA, 15 bp, Homo sapiens
aagtaaattttgagc

SEQ ID NO: 1408806 - DNA, 15 bp, Homo sapiens
aaagtaaattttgag

SEQ ID NO: 1408807 - DNA, 15 bp, Homo sapiens
caaagtaaattttga

SEQ ID NO: 1408808 - DNA, 15 bp, Homo sapiens
gcaaagtaaattttg

SEQ ID NO: 1408809 - DNA, 15 bp, Homo sapiens
tgcaaagtaaatttt

SEQ ID NO: 1408810 - DNA, 15 bp, Homo sapiens
ttgcaaagtaaattt

SEQ ID NO: 1408811 - DNA, 15 bp, Homo sapiens
attgcaaagtaaatt

SEQ ID NO: 1408812 - DNA, 15 bp, Homo sapiens
aattgcaaagtaaat

SEQ ID NO: 1408813 - DNA, 15 bp, Homo sapiens
aaattgcaaagtaaa

SEQ ID NO: 1408814 - DNA, 15 bp, Homo sapiens
aaaattgcaaagtaa

SEQ ID NO: 1408815 - DNA, 15 bp, Homo sapiens
aaaaattgcaaagta

SEQ ID NO: 1408816 - DNA, 15 bp, Homo sapiens
taaaaattgcaaagt

SEQ ID NO: 1408817 - DNA, 15 bp, Homo sapiens
gtaaaaattgcaaag

SEQ ID NO: 1408818 - DNA, 15 bp, Homo sapiens
tgtaaaaattgcaaa

SEQ ID NO: 1408819 - DNA, 15 bp, Homo sapiens
atgtaaaaattgcaa

SEQ ID NO: 1408820 - DNA, 15 bp, Homo sapiens
catgtaaaaattgca

SEQ ID NO: 1408821 - DNA, 15 bp, Homo sapiens
gcatgtaaaaattgc

SEQ ID NO: 1408822 - DNA, 15 bp, Homo sapiens
tgcatgtaaaaattg

SEQ ID NO: 1408823 - DNA, 15 bp, Homo sapiens
atgcatgtaaaaatt

SEQ ID NO: 1408824 - DNA, 15 bp, Homo sapiens
catgcatgtaaaaat

SEQ ID NO: 1408825 - DNA, 15 bp, Homo sapiens
tcatgcatgtaaaaa

SEQ ID NO: 1408826 - DNA, 15 bp, Homo sapiens
ctcatgcatgtaaaa

SEQ ID NO: 1408827 - DNA, 15 bp, Homo sapiens
actcatgcatgtaaa

SEQ ID NO: 1408828 - DNA, 15 bp, Homo sapiens
gactcatgcatgtaa

SEQ ID NO: 1408829 - DNA, 15 bp, Homo sapiens
tgactcatgcatgta

SEQ ID NO: 1408830 - DNA, 15 bp, Homo sapiens
gtgactcatgcatgt

SEQ ID NO: 1408831 - DNA, 15 bp, Homo sapiens
agtgactcatgcatg

SEQ ID NO: 1408832 - DNA, 15 bp, Homo sapiens
gagtgactcatgcat

SEQ ID NO: 1408833 - DNA, 15 bp, Homo sapiens
tgagtgactcatgca

SEQ ID NO: 1408834 - DNA, 15 bp, Homo sapiens
ctgagtgactcatgc

SEQ ID NO: 1408835 - DNA, 15 bp, Homo sapiens
actgagtgactcatg

SEQ ID NO: 1408836 - DNA, 15 bp, Homo sapiens
tactgagtgactcat

SEQ ID NO: 1408837 - DNA, 15 bp, Homo sapiens
ttactgagtgactca

SEQ ID NO: 1408838 - DNA, 15 bp, Homo sapiens
attactgagtgactc

SEQ ID NO: 1408839 - DNA, 15 bp, Homo sapiens
gattactgagtgact

SEQ ID NO: 1408840 - DNA, 15 bp, Homo sapiens
agattactgagtgac

SEQ ID NO: 1408841 - DNA, 15 bp, Homo sapiens
gagattactgagtga

SEQ ID NO: 1408842 - DNA, 15 bp, Homo sapiens
tgagattactgagtg

SEQ ID NO: 1408843 - DNA, 15 bp, Homo sapiens
atgagattactgagt

SEQ ID NO: 1408844 - DNA, 15 bp, Homo sapiens
tatgagattactgag

SEQ ID NO: 1408845 - DNA, 15 bp, Homo sapiens
gtatgagattactga

SEQ ID NO: 1408846 - DNA, 15 bp, Homo sapiens
tgtatgagattactg

SEQ ID NO: 1408847 - DNA, 15 bp, Homo sapiens
ttgtatgagattact

SEQ ID NO: 1408848 - DNA, 15 bp, Homo sapiens
attgtatgagattac

SEQ ID NO: 1408849 - DNA, 15 bp, Homo sapiens
aattgtatgagatta

SEQ ID NO: 1408850 - DNA, 15 bp, Homo sapiens
aaattgtatgagatt

SEQ ID NO: 1408851 - DNA, 15 bp, Homo sapiens
taaattgtatgagat

SEQ ID NO: 1408852 - DNA, 15 bp, Homo sapiens
ttaaattgtatgaga

SEQ ID NO: 1408853 - DNA, 15 bp, Homo sapiens
tttaaattgtatgag

SEQ ID NO: 1408854 - DNA, 15 bp, Homo sapiens
ttttaaattgtatga

SEQ ID NO: 1408855 - DNA, 15 bp, Homo sapiens
cttttaaattgtatg

SEQ ID NO: 1408856 - DNA, 15 bp, Homo sapiens
ccttttaaattgtat

SEQ ID NO: 1408857 - DNA, 15 bp, Homo sapiens
tccttttaaattgta

SEQ ID NO: 1408858 - DNA, 15 bp, Homo sapiens
ctccttttaaattgt

SEQ ID NO: 1408859 - DNA, 15 bp, Homo sapiens
cctccttttaaattg

SEQ ID NO: 1408860 - DNA, 15 bp, Homo sapiens
ccctccttttaaatt

SEQ ID NO: 1408861 - DNA, 15 bp, Homo sapiens
tccctccttttaaat

SEQ ID NO: 1408862 - DNA, 15 bp, Homo sapiens
ttccctccttttaaa

SEQ ID NO: 1408863 - DNA, 15 bp, Homo sapiens
tttccctccttttaa

SEQ ID NO: 1408864 - DNA, 15 bp, Homo sapiens
ttttccctcctttta

SEQ ID NO: 1408865 - DNA, 15 bp, Homo sapiens
cttttccctcctttt

SEQ ID NO: 1408866 - DNA, 15 bp, Homo sapiens
gcttttccctccttt

SEQ ID NO: 1408867 - DNA, 15 bp, Homo sapiens
tgcttttccctcctt

SEQ ID NO: 1408868 - DNA, 15 bp, Homo sapiens
atgcttttccctcct

SEQ ID NO: 1408869 - DNA, 15 bp, Homo sapiens
aatgcttttccctcc

SEQ ID NO: 1408870 - DNA, 15 bp, Homo sapiens
aaatgcttttccctc

SEQ ID NO: 1408871 - DNA, 15 bp, Homo sapiens
gaaatgcttttccct

SEQ ID NO: 1408872 - DNA, 15 bp, Homo sapiens
ggaaatgcttttccc

SEQ ID NO: 1408873 - DNA, 15 bp, Homo sapiens
cggaaatgcttttcc

SEQ ID NO: 1408874 - DNA, 15 bp, Homo sapiens
tcggaaatgcttttc

SEQ ID NO: 1408875 - DNA, 15 bp, Homo sapiens
atcggaaatgctttt

SEQ ID NO: 1408876 - DNA, 15 bp, Homo sapiens
aatcggaaatgcttt

SEQ ID NO: 1408877 - DNA, 15 bp, Homo sapiens
aaatcggaaatgctt

SEQ ID NO: 1408878 - DNA, 15 bp, Homo sapiens
aaaatcggaaatgct

SEQ ID NO: 1408879 - DNA, 15 bp, Homo sapiens
gaaaatcggaaatgc

SEQ ID NO: 1408880 - DNA, 15 bp, Homo sapiens
tgaaaatcggaaatg

SEQ ID NO: 1408881 - DNA, 15 bp, Homo sapiens
gtgaaaatcggaaat

SEQ ID NO: 1408882 - DNA, 15 bp, Homo sapiens
agtgaaaatcggaaa

SEQ ID NO: 1408883 - DNA, 15 bp, Homo sapiens
tagtgaaaatcggaa

SEQ ID NO: 1408884 - DNA, 15 bp, Homo sapiens
ttagtgaaaatcgga

SEQ ID NO: 1408885 - DNA, 15 bp, Homo sapiens
cttagtgaaaatcgg

SEQ ID NO: 1408886 - DNA, 15 bp, Homo sapiens
acttagtgaaaatcg

SEQ ID NO: 1408887 - DNA, 15 bp, Homo sapiens
cacttagtgaaaatc

SEQ ID NO: 1408888 - DNA, 15 bp, Homo sapiens
tcacttagtgaaaat

SEQ ID NO: 1408889 - DNA, 15 bp, Homo sapiens
ttcacttagtgaaaa

SEQ ID NO: 1408890 - DNA, 15 bp, Homo sapiens
tttcacttagtgaaa

SEQ ID NO: 1408891 - DNA, 15 bp, Homo sapiens
ctttcacttagtgaa

SEQ ID NO: 1408892 - DNA, 15 bp, Homo sapiens
tctttcacttagtga

SEQ ID NO: 1408893 - DNA, 15 bp, Homo sapiens
atctttcacttagtg

SEQ ID NO: 1408894 - DNA, 15 bp, Homo sapiens
catctttcacttagt

SEQ ID NO: 1408895 - DNA, 15 bp, Homo sapiens
gcatctttcacttag

SEQ ID NO: 1408896 - DNA, 15 bp, Homo sapiens
tgcatctttcactta

SEQ ID NO: 1408897 - DNA, 15 bp, Homo sapiens
ctgcatctttcactt

SEQ ID NO: 1408898 - DNA, 15 bp, Homo sapiens
cctgcatctttcact

SEQ ID NO: 1408899 - DNA, 15 bp, Homo sapiens
tcctgcatctttcac

SEQ ID NO: 1408900 - DNA, 15 bp, Homo sapiens
ttcctgcatctttca

SEQ ID NO: 1408901 - DNA, 15 bp, Homo sapiens
attcctgcatctttc

SEQ ID NO: 1408902 - DNA, 15 bp, Homo sapiens
tattcctgcatcttt

SEQ ID NO: 1408903 - DNA, 15 bp, Homo sapiens
atattcctgcatctt

SEQ ID NO: 1408904 - DNA, 15 bp, Homo sapiens
aatattcctgcatct

SEQ ID NO: 1408905 - DNA, 15 bp, Homo sapiens
aaatattcctgcatc

SEQ ID NO: 1408906 - DNA, 15 bp, Homo sapiens
aaaatattcctgcat

SEQ ID NO: 1408907 - DNA, 15 bp, Homo sapiens
aaaaatattcctgca

SEQ ID NO: 1408908 - DNA, 15 bp, Homo sapiens
taaaaatattcctgc

SEQ ID NO: 1408909 - DNA, 15 bp, Homo sapiens
ataaaaatattcctg

SEQ ID NO: 1408910 - DNA, 15 bp, Homo sapiens
aataaaaatattcct

SEQ ID NO: 1408911 - DNA, 15 bp, Homo sapiens
aaataaaaatattcc

SEQ ID NO: 1408912 - DNA, 15 bp, Homo sapiens
aaaataaaaatattc

SEQ ID NO: 1408913 - DNA, 15 bp, Homo sapiens
ctaaaataaaaatat

SEQ ID NO: 1408914 - DNA, 15 bp, Homo sapiens
gctaaaataaaaata

SEQ ID NO: 1408915 - DNA, 15 bp, Homo sapiens
tgctaaaataaaaat

SEQ ID NO: 1408916 - DNA, 15 bp, Homo sapiens
ctgctaaaataaaaa

SEQ ID NO: 1408917 - DNA, 15 bp, Homo sapiens
tctgctaaaataaaa

SEQ ID NO: 1408918 - DNA, 15 bp, Homo sapiens
ttctgctaaaataaa

SEQ ID NO: 1408919 - DNA, 15 bp, Homo sapiens
cttctgctaaaataa

SEQ ID NO: 1408920 - DNA, 15 bp, Homo sapiens
tcttctgctaaaata

SEQ ID NO: 1408921 - DNA, 15 bp, Homo sapiens
gtcttctgctaaaat

SEQ ID NO: 1408922 - DNA, 15 bp, Homo sapiens
tgtcttctgctaaaa

SEQ ID NO: 1408923 - DNA, 15 bp, Homo sapiens
ttgtcttctgctaaa

SEQ ID NO: 1408924 - DNA, 15 bp, Homo sapiens
cttgtcttctgctaa

SEQ ID NO: 1408925 - DNA, 15 bp, Homo sapiens
cttcttgtcttctgc

SEQ ID NO: 1408926 - DNA, 15 bp, Homo sapiens
acttcttgtcttctg

SEQ ID NO: 1408927 - DNA, 15 bp, Homo sapiens
aacttcttgtcttct

SEQ ID NO: 1408928 - DNA, 15 bp, Homo sapiens
gaacttcttgtcttc

SEQ ID NO: 1408929 - DNA, 15 bp, Homo sapiens
ggaacttcttgtctt

SEQ ID NO: 1408930 - DNA, 15 bp, Homo sapiens
gggaacttcttgtct

SEQ ID NO: 1408931 - DNA, 15 bp, Homo sapiens
agggaacttcttgtc

SEQ ID NO: 1408932 - DNA, 15 bp, Homo sapiens
aagggaacttcttgt

SEQ ID NO: 1408933 - DNA, 15 bp, Homo sapiens
taagggaacttcttg

SEQ ID NO: 1408934 - DNA, 15 bp, Homo sapiens
ctaagggaacttctt

SEQ ID NO: 1408935 - DNA, 15 bp, Homo sapiens
tctaagggaacttct

SEQ ID NO: 1408936 - DNA, 15 bp, Homo sapiens
ttctaagggaacttc

SEQ ID NO: 1408937 - DNA, 15 bp, Homo sapiens
tttctaagggaactt

SEQ ID NO: 1408938 - DNA, 15 bp, Homo sapiens
ttttctaagggaact

SEQ ID NO: 1408939 - DNA, 15 bp, Homo sapiens
tttttctaagggaac

SEQ ID NO: 1408940 - DNA, 15 bp, Homo sapiens
ctttttctaagggaa

SEQ ID NO: 1408941 - DNA, 15 bp, Homo sapiens
tctttttctaaggga

SEQ ID NO: 1408942 - DNA, 15 bp, Homo sapiens
atctttttctaaggg

SEQ ID NO: 1408943 - DNA, 15 bp, Homo sapiens
tatctttttctaagg

SEQ ID NO: 1408944 - DNA, 15 bp, Homo sapiens
ctatctttttctaag

SEQ ID NO: 1408945 - DNA, 15 bp, Homo sapiens
actatctttttctaa

SEQ ID NO: 1408946 - DNA, 15 bp, Homo sapiens
tactatctttttcta

SEQ ID NO: 1408947 - DNA, 15 bp, Homo sapiens
ctactatctttttct

SEQ ID NO: 1408948 - DNA, 15 bp, Homo sapiens
cctactatctttttc

SEQ ID NO: 1408949 - DNA, 15 bp, Homo sapiens
ccctactatcttttt

SEQ ID NO: 1408950 - DNA, 15 bp, Homo sapiens
cccctactatctttt

SEQ ID NO: 1408951 - DNA, 15 bp, Homo sapiens
ccccctactatcttt

SEQ ID NO: 1408952 - DNA, 15 bp, Homo sapiens
gccccctactatctt

SEQ ID NO: 1408953 - DNA, 15 bp, Homo sapiens
tgccccctactatct

SEQ ID NO: 1408954 - DNA, 15 bp, Homo sapiens
ttgccccctactatc

SEQ ID NO: 1408955 - DNA, 15 bp, Homo sapiens
gttgccccctactat

SEQ ID NO: 1408956 - DNA, 15 bp, Homo sapiens
agttgccccctacta

SEQ ID NO: 1408957 - DNA, 15 bp, Homo sapiens
cagttgccccctact

SEQ ID NO: 1408958 - DNA, 15 bp, Homo sapiens
tcagttgccccctac

SEQ ID NO: 1408959 - DNA, 15 bp, Homo sapiens
atcagttgcccccta

SEQ ID NO: 1408960 - DNA, 15 bp, Homo sapiens
tatcagttgccccct

SEQ ID NO: 1408961 - DNA, 15 bp, Homo sapiens
atatcagttgccccc

SEQ ID NO: 1408962 - DNA, 15 bp, Homo sapiens
tatatcagttgcccc

SEQ ID NO: 1408963 - DNA, 15 bp, Homo sapiens
ttatatcagttgccc

SEQ ID NO: 1408964 - DNA, 15 bp, Homo sapiens
attatatcagttgcc

SEQ ID NO: 1408965 - DNA, 15 bp, Homo sapiens
tattatatcagttgc

SEQ ID NO: 1408966 - DNA, 15 bp, Homo sapiens
ttattatatcagttg

SEQ ID NO: 1408967 - DNA, 15 bp, Homo sapiens
cttattatatcagtt

SEQ ID NO: 1408968 - DNA, 15 bp, Homo sapiens
tcttattatatcagt

SEQ ID NO: 1408969 - DNA, 15 bp, Homo sapiens
ctcttattatatcag

SEQ ID NO: 1408970 - DNA, 15 bp, Homo sapiens
actcttattatatca

SEQ ID NO: 1408971 - DNA, 15 bp, Homo sapiens
aactcttattatatc

SEQ ID NO: 1408972 - DNA, 15 bp, Homo sapiens
aaactcttattatat

SEQ ID NO: 1408973 - DNA, 15 bp, Homo sapiens
taaactcttattata

SEQ ID NO: 1408974 - DNA, 15 bp, Homo sapiens
ataaactcttattat

SEQ ID NO: 1408975 - DNA, 15 bp, Homo sapiens
tataaactcttatta

SEQ ID NO: 1408976 - DNA, 15 bp, Homo sapiens
ctataaactcttatt

SEQ ID NO: 1408977 - DNA, 15 bp, Homo sapiens
cctataaactcttat

SEQ ID NO: 1408978 - DNA, 15 bp, Homo sapiens
tcctataaactctta

SEQ ID NO: 1408979 - DNA, 15 bp, Homo sapiens
ttcctataaactctt

SEQ ID NO: 1408980 - DNA, 15 bp, Homo sapiens
tttcctataaactct

SEQ ID NO: 1408981 - DNA, 15 bp, Homo sapiens
gtttcctataaactc

SEQ ID NO: 1408982 - DNA, 15 bp, Homo sapiens
tgtttcctataaact

SEQ ID NO: 1408983 - DNA, 15 bp, Homo sapiens
ttgtttcctataaac

SEQ ID NO: 1408984 - DNA, 15 bp, Homo sapiens
tttgtttcctataaa

SEQ ID NO: 1408985 - DNA, 15 bp, Homo sapiens
ttttgtttcctataa

SEQ ID NO: 1408986 - DNA, 15 bp, Homo sapiens
tttttgtttcctata

SEQ ID NO: 1408987 - DNA, 15 bp, Homo sapiens
gtttttgtttcctat

SEQ ID NO: 1408988 - DNA, 15 bp, Homo sapiens
agtttttgtttccta

SEQ ID NO: 1408989 - DNA, 15 bp, Homo sapiens
tagtttttgtttcct

SEQ ID NO: 1408990 - DNA, 15 bp, Homo sapiens
ctagtttttgtttcc

SEQ ID NO: 1408991 - DNA, 15 bp, Homo sapiens
actagtttttgtttc

SEQ ID NO: 1408992 - DNA, 15 bp, Homo sapiens
aactagtttttgttt

SEQ ID NO: 1408993 - DNA, 15 bp, Homo sapiens
aaactagtttttgtt

SEQ ID NO: 1408994 - DNA, 15 bp, Homo sapiens
taaactagtttttgt

SEQ ID NO: 1408995 - DNA, 15 bp, Homo sapiens
ttaaactagtttttg

SEQ ID NO: 1408996 - DNA, 15 bp, Homo sapiens
cttaaactagttttt

SEQ ID NO: 1408997 - DNA, 15 bp, Homo sapiens
tcttaaactagtttt

SEQ ID NO: 1408998 - DNA, 15 bp, Homo sapiens
ctcttaaactagttt

SEQ ID NO: 1408999 - DNA, 15 bp, Homo sapiens
tctcttaaactagtt

SEQ ID NO: 1409000 - DNA, 15 bp, Homo sapiens
ttctcttaaactagt

SEQ ID NO: 1409001 - DNA, 15 bp, Homo sapiens
tttctcttaaactag

SEQ ID NO: 1409002 - DNA, 15 bp, Homo sapiens
ctttctcttaaacta

SEQ ID NO: 1409003 - DNA, 15 bp, Homo sapiens
cctttctcttaaact

SEQ ID NO: 1409004 - DNA, 15 bp, Homo sapiens
tcctttctcttaaac

SEQ ID NO: 1409005 - DNA, 15 bp, Homo sapiens
ttcctttctcttaaa

SEQ ID NO: 1409006 - DNA, 15 bp, Homo sapiens
cttcctttctcttaa

SEQ ID NO: 1409007 - DNA, 15 bp, Homo sapiens
ccttcctttctctta

SEQ ID NO: 1409008 - DNA, 15 bp, Homo sapiens
cccttcctttctctt

SEQ ID NO: 1409009 - DNA, 15 bp, Homo sapiens
tcccttcctttctct

SEQ ID NO: 1409010 - DNA, 15 bp, Homo sapiens
ctcccttcctttctc

SEQ ID NO: 1409011 - DNA, 15 bp, Homo sapiens
actcccttcctttct

SEQ ID NO: 1409012 - DNA, 15 bp, Homo sapiens
cactcccttcctttc

SEQ ID NO: 1409013 - DNA, 15 bp, Homo sapiens
tcactcccttccttt

SEQ ID NO: 1409014 - DNA, 15 bp, Homo sapiens
atcactcccttcctt

SEQ ID NO: 1409015 - DNA, 15 bp, Homo sapiens
tatcactcccttcct

SEQ ID NO: 1409016 - DNA, 15 bp, Homo sapiens
ttatcactcccttcc

SEQ ID NO: 1409017 - DNA, 15 bp, Homo sapiens
attatcactcccttc

SEQ ID NO: 1409018 - DNA, 15 bp, Homo sapiens
tattatcactccctt

SEQ ID NO: 1409019 - DNA, 15 bp, Homo sapiens
atattatcactccct

SEQ ID NO: 1409020 - DNA, 15 bp, Homo sapiens
catattatcactccc

SEQ ID NO: 1409021 - DNA, 15 bp, Homo sapiens
acatattatcactcc

SEQ ID NO: 1409022 - DNA, 15 bp, Homo sapiens
cacatattatcactc

SEQ ID NO: 1409023 - DNA, 15 bp, Homo sapiens
tcacatattatcact

SEQ ID NO: 1409024 - DNA, 15 bp, Homo sapiens
ctcacatattatcac

SEQ ID NO: 1409025 - DNA, 15 bp, Homo sapiens
cctcacatattatca

SEQ ID NO: 1409026 - DNA, 15 bp, Homo sapiens
tcctcacatattatc

SEQ ID NO: 1409027 - DNA, 15 bp, Homo sapiens
ttcctcacatattat

SEQ ID NO: 1409028 - DNA, 15 bp, Homo sapiens
attcctcacatatta

SEQ ID NO: 1409029 - DNA, 15 bp, Homo sapiens
gattcctcacatatt

SEQ ID NO: 1409030 - DNA, 15 bp, Homo sapiens
tgattcctcacatat

SEQ ID NO: 1409031 - DNA, 15 bp, Homo sapiens
atgattcctcacata

SEQ ID NO: 1409032 - DNA, 15 bp, Homo sapiens
aatgattcctcacat

SEQ ID NO: 1409033 - DNA, 15 bp, Homo sapiens
gaatgattcctcaca

SEQ ID NO: 1409034 - DNA, 15 bp, Homo sapiens
tgaatgattcctcac

SEQ ID NO: 1409035 - DNA, 15 bp, Homo sapiens
ctgaatgattcctca

SEQ ID NO: 1409036 - DNA, 15 bp, Homo sapiens
tctgaatgattcctc

SEQ ID NO: 1409037 - DNA, 15 bp, Homo sapiens
ttctgaatgattcct

SEQ ID NO: 1409038 - DNA, 15 bp, Homo sapiens
attctgaatgattcc

SEQ ID NO: 1409039 - DNA, 15 bp, Homo sapiens
aattctgaatgattc

SEQ ID NO: 1409040 - DNA, 15 bp, Homo sapiens
aaattctgaatgatt

SEQ ID NO: 1409041 - DNA, 15 bp, Homo sapiens
aaaattctgaatgat

SEQ ID NO: 1409042 - DNA, 15 bp, Homo sapiens
taaaattctgaatga

SEQ ID NO: 1409043 - DNA, 15 bp, Homo sapiens
ttaaaattctgaatg

SEQ ID NO: 1409044 - DNA, 15 bp, Homo sapiens
tttaaaattctgaat

SEQ ID NO: 1409045 - DNA, 15 bp, Homo sapiens
ttttaaaattctgaa

SEQ ID NO: 1409046 - DNA, 15 bp, Homo sapiens
gttttaaaattctga

SEQ ID NO: 1409047 - DNA, 15 bp, Homo sapiens
agttttaaaattctg

SEQ ID NO: 1409048 - DNA, 15 bp, Homo sapiens
gagttttaaaattct

SEQ ID NO: 1409049 - DNA, 15 bp, Homo sapiens
agagttttaaaattc

SEQ ID NO: 1409050 - DNA, 15 bp, Homo sapiens
tagagttttaaaatt

SEQ ID NO: 1409051 - DNA, 15 bp, Homo sapiens
ttagagttttaaaat

SEQ ID NO: 1409052 - DNA, 15 bp, Homo sapiens
attagagttttaaaa

SEQ ID NO: 1409053 - DNA, 15 bp, Homo sapiens
aattagagttttaaa

SEQ ID NO: 1409054 - DNA, 15 bp, Homo sapiens
aaattagagttttaa

SEQ ID NO: 1409055 - DNA, 15 bp, Homo sapiens
taaattagagtttta

SEQ ID NO: 1409056 - DNA, 15 bp, Homo sapiens
ttaaattagagtttt

SEQ ID NO: 1409057 - DNA, 15 bp, Homo sapiens
cttaaattagagttt

SEQ ID NO: 1409058 - DNA, 15 bp, Homo sapiens
gcttaaattagagtt

SEQ ID NO: 1409059 - DNA, 15 bp, Homo sapiens
tgcttaaattagagt

SEQ ID NO: 1409060 - DNA, 15 bp, Homo sapiens
ttgcttaaattagag

SEQ ID NO: 1409061 - DNA, 15 bp, Homo sapiens
gttgcttaaattaga

SEQ ID NO: 1409062 - DNA, 15 bp, Homo sapiens
ggttgcttaaattag

SEQ ID NO: 1409063 - DNA, 15 bp, Homo sapiens
tggttgcttaaatta

SEQ ID NO: 1409064 - DNA, 15 bp, Homo sapiens
atggttgcttaaatt

SEQ ID NO: 1409065 - DNA, 15 bp, Homo sapiens
aatggttgcttaaat

SEQ ID NO: 1409066 - DNA, 15 bp, Homo sapiens
taatggttgcttaaa

SEQ ID NO: 1409067 - DNA, 15 bp, Homo sapiens
gtaatggttgcttaa

SEQ ID NO: 1409068 - DNA, 15 bp, Homo sapiens
agtaatggttgctta

SEQ ID NO: 1409069 - DNA, 15 bp, Homo sapiens
tagtaatggttgctt

SEQ ID NO: 1409070 - DNA, 15 bp, Homo sapiens
atagtaatggttgct

SEQ ID NO: 1409071 - DNA, 15 bp, Homo sapiens
aatagtaatggttgc

SEQ ID NO: 1409072 - DNA, 15 bp, Homo sapiens
gaatagtaatggttg

SEQ ID NO: 1409073 - DNA, 15 bp, Homo sapiens
tgaatagtaatggtt

SEQ ID NO: 1409074 - DNA, 15 bp, Homo sapiens
atgaatagtaatggt

SEQ ID NO: 1409075 - DNA, 15 bp, Homo sapiens
catgaatagtaatgg

SEQ ID NO: 1409076 - DNA, 15 bp, Homo sapiens
tcatgaatagtaatg

SEQ ID NO: 1409077 - DNA, 15 bp, Homo sapiens
ctcatgaatagtaat

SEQ ID NO: 1409078 - DNA, 15 bp, Homo sapiens
tctcatgaatagtaa

SEQ ID NO: 1409079 - DNA, 15 bp, Homo sapiens
atctcatgaatagta

SEQ ID NO: 1409080 - DNA, 15 bp, Homo sapiens
tatctcatgaatagt

SEQ ID NO: 1409081 - DNA, 15 bp, Homo sapiens
gtatctcatgaatag

SEQ ID NO: 1409082 - DNA, 15 bp, Homo sapiens
agtatctcatgaata

SEQ ID NO: 1409083 - DNA, 15 bp, Homo sapiens
tagtatctcatgaat

SEQ ID NO: 1409084 - DNA, 15 bp, Homo sapiens
ttagtatctcatgaa

SEQ ID NO: 1409085 - DNA, 15 bp, Homo sapiens
cttagtatctcatga

SEQ ID NO: 1409086 - DNA, 15 bp, Homo sapiens
ccttagtatctcatg

SEQ ID NO: 1409087 - DNA, 15 bp, Homo sapiens
tccttagtatctcat

SEQ ID NO: 1409088 - DNA, 15 bp, Homo sapiens
ttccttagtatctca

SEQ ID NO: 1409089 - DNA, 15 bp, Homo sapiens
attccttagtatctc

SEQ ID NO: 1409090 - DNA, 15 bp, Homo sapiens
aattccttagtatct

SEQ ID NO: 1409091 - DNA, 15 bp, Homo sapiens
aaattccttagtatc

SEQ ID NO: 1409092 - DNA, 15 bp, Homo sapiens
gaaattccttagtat

SEQ ID NO: 1409093 - DNA, 15 bp, Homo sapiens
agaaattccttagta

SEQ ID NO: 1409094 - DNA, 15 bp, Homo sapiens
gagaaattccttagt

SEQ ID NO: 1409095 - DNA, 15 bp, Homo sapiens
agagaaattccttag

SEQ ID NO: 1409096 - DNA, 15 bp, Homo sapiens
cagagaaattcctta

SEQ ID NO: 1409097 - DNA, 15 bp, Homo sapiens
gcagagaaattcctt

SEQ ID NO: 1409098 - DNA, 15 bp, Homo sapiens
tgcagagaaattcct

SEQ ID NO: 1409099 - DNA, 15 bp, Homo sapiens
atgcagagaaattcc

SEQ ID NO: 1409100 - DNA, 15 bp, Homo sapiens
aatgcagagaaattc

SEQ ID NO: 1409101 - DNA, 15 bp, Homo sapiens
aaatgcagagaaatt

SEQ ID NO: 1409102 - DNA, 15 bp, Homo sapiens
aaaatgcagagaaat

SEQ ID NO: 1409103 - DNA, 15 bp, Homo sapiens
aaaaatgcagagaaa

SEQ ID NO: 1409104 - DNA, 15 bp, Homo sapiens
gaaaaatgcagagaa

SEQ ID NO: 1409105 - DNA, 15 bp, Homo sapiens
agaaaaatgcagaga

SEQ ID NO: 1409106 - DNA, 15 bp, Homo sapiens
aagaaaaatgcagag

SEQ ID NO: 1409107 - DNA, 15 bp, Homo sapiens
taagaaaaatgcaga

SEQ ID NO: 1409108 - DNA, 15 bp, Homo sapiens
ttaagaaaaatgcag

SEQ ID NO: 1409109 - DNA, 15 bp, Homo sapiens
cttaagaaaaatgca

SEQ ID NO: 1409110 - DNA, 15 bp, Homo sapiens
ccttaagaaaaatgc

SEQ ID NO: 1409111 - DNA, 15 bp, Homo sapiens
gccttaagaaaaatg

SEQ ID NO: 1409112 - DNA, 15 bp, Homo sapiens
agccttaagaaaaat

SEQ ID NO: 1409113 - DNA, 15 bp, Homo sapiens
cagccttaagaaaaa

SEQ ID NO: 1409114 - DNA, 15 bp, Homo sapiens
acagccttaagaaaa

SEQ ID NO: 1409115 - DNA, 15 bp, Homo sapiens
aacagccttaagaaa

SEQ ID NO: 1409116 - DNA, 15 bp, Homo sapiens
caacagccttaagaa

SEQ ID NO: 1409117 - DNA, 15 bp, Homo sapiens
acaacagccttaaga

SEQ ID NO: 1409118 - DNA, 15 bp, Homo sapiens
gacaacagccttaag

SEQ ID NO: 1409119 - DNA, 15 bp, Homo sapiens
ggacaacagccttaa

SEQ ID NO: 1409120 - DNA, 15 bp, Homo sapiens
gggacaacagcctta

SEQ ID NO: 1409121 - DNA, 15 bp, Homo sapiens
agggacaacagcctt

SEQ ID NO: 1409122 - DNA, 15 bp, Homo sapiens
aagggacaacagcct

SEQ ID NO: 1409123 - DNA, 15 bp, Homo sapiens
caagggacaacagcc

SEQ ID NO: 1409124 - DNA, 15 bp, Homo sapiens
gcaagggacaacagc

SEQ ID NO: 1409125 - DNA, 15 bp, Homo sapiens
cgcaagggacaacag

SEQ ID NO: 1409126 - DNA, 15 bp, Homo sapiens
acgcaagggacaaca

SEQ ID NO: 1409127 - DNA, 15 bp, Homo sapiens
aacgcaagggacaac

SEQ ID NO: 1409128 - DNA, 15 bp, Homo sapiens
caacgcaagggacaa

SEQ ID NO: 1409129 - DNA, 15 bp, Homo sapiens
tcaacgcaagggaca

SEQ ID NO: 1409130 - DNA, 15 bp, Homo sapiens
ctcaacgcaagggac

SEQ ID NO: 1409131 - DNA, 15 bp, Homo sapiens
actcaacgcaaggga

SEQ ID NO: 1409132 - DNA, 15 bp, Homo sapiens
tactcaacgcaaggg

SEQ ID NO: 1409133 - DNA, 15 bp, Homo sapiens
ctactcaacgcaagg

SEQ ID NO: 1409134 - DNA, 15 bp, Homo sapiens
actactcaacgcaag

SEQ ID NO: 1409135 - DNA, 15 bp, Homo sapiens
tactactcaacgcaa

SEQ ID NO: 1409136 - DNA, 15 bp, Homo sapiens
gtactactcaacgca

SEQ ID NO: 1409137 - DNA, 15 bp, Homo sapiens
ggtactactcaacgc

SEQ ID NO: 1409138 - DNA, 15 bp, Homo sapiens
aggtactactcaacg

SEQ ID NO: 1409139 - DNA, 15 bp, Homo sapiens
taggtactactcaac

SEQ ID NO: 1409140 - DNA, 15 bp, Homo sapiens
ataggtactactcaa

SEQ ID NO: 1409141 - DNA, 15 bp, Homo sapiens
aataggtactactca

SEQ ID NO: 1409142 - DNA, 15 bp, Homo sapiens
aaataggtactactc

SEQ ID NO: 1409143 - DNA, 15 bp, Homo sapiens
caaataggtactact

SEQ ID NO: 1409144 - DNA, 15 bp, Homo sapiens
ccaaataggtactac

SEQ ID NO: 1409145 - DNA, 15 bp, Homo sapiens
accaaataggtacta

SEQ ID NO: 1409146 - DNA, 15 bp, Homo sapiens
gaccaaataggtact

SEQ ID NO: 1409147 - DNA, 15 bp, Homo sapiens
agaccaaataggtac

SEQ ID NO: 1409148 - DNA, 15 bp, Homo sapiens
tagaccaaataggta

SEQ ID NO: 1409149 - DNA, 15 bp, Homo sapiens
ctagaccaaataggt

SEQ ID NO: 1409150 - DNA, 15 bp, Homo sapiens
gctagaccaaatagg

SEQ ID NO: 1409151 - DNA, 15 bp, Homo sapiens
tgctagaccaaatag

SEQ ID NO: 1409152 - DNA, 15 bp, Homo sapiens
gtgctagaccaaata

SEQ ID NO: 1409153 - DNA, 15 bp, Homo sapiens
tgtgctagaccaaat

SEQ ID NO: 1409154 - DNA, 15 bp, Homo sapiens
ctgtgctagaccaaa

SEQ ID NO: 1409155 - DNA, 15 bp, Homo sapiens
tctgtgctagaccaa

SEQ ID NO: 1409156 - DNA, 15 bp, Homo sapiens
atctgtgctagacca

SEQ ID NO: 1409157 - DNA, 15 bp, Homo sapiens
aatctgtgctagacc

SEQ ID NO: 1409158 - DNA, 15 bp, Homo sapiens
gaatctgtgctagac

SEQ ID NO: 1409159 - DNA, 15 bp, Homo sapiens
tgaatctgtgctaga

SEQ ID NO: 1409160 - DNA, 15 bp, Homo sapiens
ttgaatctgtgctag

SEQ ID NO: 1409161 - DNA, 15 bp, Homo sapiens
attgaatctgtgcta

SEQ ID NO: 1409162 - DNA, 15 bp, Homo sapiens
aattgaatctgtgct

SEQ ID NO: 1409163 - DNA, 15 bp, Homo sapiens
caattgaatctgtgc

SEQ ID NO: 1409164 - DNA, 15 bp, Homo sapiens
gcaattgaatctgtg

SEQ ID NO: 1409165 - DNA, 15 bp, Homo sapiens
ggcaattgaatctgt

SEQ ID NO: 1409166 - DNA, 15 bp, Homo sapiens
gggcaattgaatctg

SEQ ID NO: 1409167 - DNA, 15 bp, Homo sapiens
agggcaattgaatct

SEQ ID NO: 1409168 - DNA, 15 bp, Homo sapiens
cagggcaattgaatc

SEQ ID NO: 1409169 - DNA, 15 bp, Homo sapiens
acagggcaattgaat

SEQ ID NO: 1409170 - DNA, 15 bp, Homo sapiens
aacagggcaattgaa

SEQ ID NO: 1409171 - DNA, 15 bp, Homo sapiens
taacagggcaattga

SEQ ID NO: 1409172 - DNA, 15 bp, Homo sapiens
gtaacagggcaattg

SEQ ID NO: 1409173 - DNA, 15 bp, Homo sapiens
ggtaacagggcaatt

SEQ ID NO: 1409174 - DNA, 15 bp, Homo sapiens
aggtaacagggcaat

SEQ ID NO: 1409175 - DNA, 15 bp, Homo sapiens
caggtaacagggcaa

SEQ ID NO: 1409176 - DNA, 15 bp, Homo sapiens
gcaggtaacagggca

SEQ ID NO: 1409177 - DNA, 15 bp, Homo sapiens
agcaggtaacagggc

SEQ ID NO: 1409178 - DNA, 15 bp, Homo sapiens
aagcaggtaacaggg

SEQ ID NO: 1409179 - DNA, 15 bp, Homo sapiens
taagcaggtaacagg

SEQ ID NO: 1409180 - DNA, 15 bp, Homo sapiens
ataagcaggtaacag

SEQ ID NO: 1409181 - DNA, 15 bp, Homo sapiens
aataagcaggtaaca

SEQ ID NO: 1409182 - DNA, 15 bp, Homo sapiens
aaataagcaggtaac

SEQ ID NO: 1409183 - DNA, 15 bp, Homo sapiens
aaaataagcaggtaa

SEQ ID NO: 1409184 - DNA, 15 bp, Homo sapiens
caaaataagcaggta

SEQ ID NO: 1409185 - DNA, 15 bp, Homo sapiens
ccaaaataagcaggt

SEQ ID NO: 1409186 - DNA, 15 bp, Homo sapiens
tccaaaataagcagg

SEQ ID NO: 1409187 - DNA, 15 bp, Homo sapiens
ctccaaaataagcag

SEQ ID NO: 1409188 - DNA, 15 bp, Homo sapiens
actccaaaataagca

SEQ ID NO: 1409189 - DNA, 15 bp, Homo sapiens
tactccaaaataagc

SEQ ID NO: 1409190 - DNA, 15 bp, Homo sapiens
ttactccaaaataag

SEQ ID NO: 1409191 - DNA, 15 bp, Homo sapiens
tttactccaaaataa

SEQ ID NO: 1409192 - DNA, 15 bp, Homo sapiens
atttactccaaaata

SEQ ID NO: 1409193 - DNA, 15 bp, Homo sapiens
gatttactccaaaat

SEQ ID NO: 1409194 - DNA, 15 bp, Homo sapiens
tgatttactccaaaa

SEQ ID NO: 1409195 - DNA, 15 bp, Homo sapiens
ttgatttactccaaa

SEQ ID NO: 1409196 - DNA, 15 bp, Homo sapiens
gttgatttactccaa

SEQ ID NO: 1409197 - DNA, 15 bp, Homo sapiens
agttgatttactcca

SEQ ID NO: 1409198 - DNA, 15 bp, Homo sapiens
aagttgatttactcc

SEQ ID NO: 1409199 - DNA, 15 bp, Homo sapiens
aaagttgatttactc

SEQ ID NO: 1409200 - DNA, 15 bp, Homo sapiens
taaagttgatttact

SEQ ID NO: 1409201 - DNA, 15 bp, Homo sapiens
ttaaagttgatttac

SEQ ID NO: 1409202 - DNA, 15 bp, Homo sapiens
cttaaagttgattta

SEQ ID NO: 1409203 - DNA, 15 bp, Homo sapiens
ccttaaagttgattt

SEQ ID NO: 1409204 - DNA, 15 bp, Homo sapiens
tccttaaagttgatt

SEQ ID NO: 1409205 - DNA, 15 bp, Homo sapiens
ctccttaaagttgat

SEQ ID NO: 1409206 - DNA, 15 bp, Homo sapiens
gctccttaaagttga

SEQ ID NO: 1409207 - DNA, 15 bp, Homo sapiens
tgctccttaaagttg

SEQ ID NO: 1409208 - DNA, 15 bp, Homo sapiens
atgctccttaaagtt

SEQ ID NO: 1409209 - DNA, 15 bp, Homo sapiens
catgctccttaaagt

SEQ ID NO: 1409210 - DNA, 15 bp, Homo sapiens
tcatgctccttaaag

SEQ ID NO: 1409211 - DNA, 15 bp, Homo sapiens
ttcatgctccttaaa

SEQ ID NO: 1409212 - DNA, 15 bp, Homo sapiens
cttcatgctccttaa

SEQ ID NO: 1409213 - DNA, 15 bp, Homo sapiens
tcttcatgctcctta

SEQ ID NO: 1409214 - DNA, 15 bp, Homo sapiens
ttcttcatgctcctt

SEQ ID NO: 1409215 - DNA, 15 bp, Homo sapiens
cttcttcatgctcct

SEQ ID NO: 1409216 - DNA, 15 bp, Homo sapiens
tcttcttcatgctcc

SEQ ID NO: 1409217 - DNA, 15 bp, Homo sapiens
atcttcttcatgctc

SEQ ID NO: 1409218 - DNA, 15 bp, Homo sapiens
catcttcttcatgct

SEQ ID NO: 1409219 - DNA, 15 bp, Homo sapiens
tcatcttcttcatgc

SEQ ID NO: 1409220 - DNA, 15 bp, Homo sapiens
ttcatcttcttcatg

SEQ ID NO: 1409221 - DNA, 15 bp, Homo sapiens
cttcatcttcttcat

SEQ ID NO: 1409222 - DNA, 15 bp, Homo sapiens
ccttcatcttcttca

SEQ ID NO: 1409223 - DNA, 15 bp, Homo sapiens
tccttcatcttcttc

SEQ ID NO: 1409224 - DNA, 15 bp, Homo sapiens
ttccttcatcttctt

SEQ ID NO: 1409225 - DNA, 15 bp, Homo sapiens
attccttcatcttct

SEQ ID NO: 1409226 - DNA, 15 bp, Homo sapiens
cattccttcatcttc

SEQ ID NO: 1409227 - DNA, 15 bp, Homo sapiens
tcattccttcatctt

SEQ ID NO: 1409228 - DNA, 15 bp, Homo sapiens
ttcattccttcatct

SEQ ID NO: 1409229 - DNA, 15 bp, Homo sapiens
attcattccttcatc

SEQ ID NO: 1409230 - DNA, 15 bp, Homo sapiens
aattcattccttcat

SEQ ID NO: 1409231 - DNA, 15 bp, Homo sapiens
gaattcattccttca

SEQ ID NO: 1409232 - DNA, 15 bp, Homo sapiens
agaattcattccttc

SEQ ID NO: 1409233 - DNA, 15 bp, Homo sapiens
gagaattcattcctt

SEQ ID NO: 1409234 - DNA, 15 bp, Homo sapiens
ggagaattcattcct

SEQ ID NO: 1409235 - DNA, 15 bp, Homo sapiens
aggagaattcattcc

SEQ ID NO: 1409236 - DNA, 15 bp, Homo sapiens
aaggagaattcattc

SEQ ID NO: 1409237 - DNA, 15 bp, Homo sapiens
gaaggagaattcatt

SEQ ID NO: 1409238 - DNA, 15 bp, Homo sapiens
agaaggagaattcat

SEQ ID NO: 1409239 - DNA, 15 bp, Homo sapiens
gagaaggagaattca

SEQ ID NO: 1409240 - DNA, 15 bp, Homo sapiens
ggagaaggagaattc

SEQ ID NO: 1409241 - DNA, 15 bp, Homo sapiens
gggagaaggagaatt

SEQ ID NO: 1409242 - DNA, 15 bp, Homo sapiens
agggagaaggagaat

SEQ ID NO: 1409243 - DNA, 15 bp, Homo sapiens
tagggagaaggagaa

SEQ ID NO: 1409244 - DNA, 15 bp, Homo sapiens
gtagggagaaggaga

SEQ ID NO: 1409245 - DNA, 15 bp, Homo sapiens
ggtagggagaaggag

SEQ ID NO: 1409246 - DNA, 15 bp, Homo sapiens
aggtagggagaagga

SEQ ID NO: 1409247 - DNA, 15 bp, Homo sapiens
gaggtagggagaagg

SEQ ID NO: 1409248 - DNA, 15 bp, Homo sapiens
agaggtagggagaag

SEQ ID NO: 1409249 - DNA, 15 bp, Homo sapiens
aagaggtagggagaa

SEQ ID NO: 1409250 - DNA, 15 bp, Homo sapiens
taagaggtagggaga

SEQ ID NO: 1409251 - DNA, 15 bp, Homo sapiens
ctaagaggtagggag

SEQ ID NO: 1409252 - DNA, 15 bp, Homo sapiens
actaagaggtaggga

SEQ ID NO: 1409253 - DNA, 15 bp, Homo sapiens
aactaagaggtaggg

SEQ ID NO: 1409254 - DNA, 15 bp, Homo sapiens
aaactaagaggtagg

SEQ ID NO: 1409255 - DNA, 15 bp, Homo sapiens
aaaactaagaggtag

SEQ ID NO: 1409256 - DNA, 15 bp, Homo sapiens
aaaaactaagaggta

SEQ ID NO: 1409257 - DNA, 15 bp, Homo sapiens
aaaaaactaagaggt

SEQ ID NO: 1409258 - DNA, 15 bp, Homo sapiens
aaaaaaactaagagg

SEQ ID NO: 1409259 - DNA, 15 bp, Homo sapiens
gaaaaaaactaagag

SEQ ID NO: 1409260 - DNA, 15 bp, Homo sapiens
agaaaaaaactaaga

SEQ ID NO: 1409261 - DNA, 15 bp, Homo sapiens
cagaaaaaaactaag

SEQ ID NO: 1409262 - DNA, 15 bp, Homo sapiens
tcagaaaaaaactaa

SEQ ID NO: 1409263 - DNA, 15 bp, Homo sapiens
gtcagaaaaaaacta

SEQ ID NO: 1409264 - DNA, 15 bp, Homo sapiens
tgtcagaaaaaaact

SEQ ID NO: 1409265 - DNA, 15 bp, Homo sapiens
atgtcagaaaaaaac

SEQ ID NO: 1409266 - DNA, 15 bp, Homo sapiens
gatgtcagaaaaaaa

SEQ ID NO: 1409267 - DNA, 15 bp, Homo sapiens
tgatgtcagaaaaaa

SEQ ID NO: 1409268 - DNA, 15 bp, Homo sapiens
atgatgtcagaaaaa

SEQ ID NO: 1409269 - DNA, 15 bp, Homo sapiens
tatgatgtcagaaaa

SEQ ID NO: 1409270 - DNA, 15 bp, Homo sapiens
ttatgatgtcagaaa

SEQ ID NO: 1409271 - DNA, 15 bp, Homo sapiens
gttatgatgtcagaa

SEQ ID NO: 1409272 - DNA, 15 bp, Homo sapiens
tgttatgatgtcaga

SEQ ID NO: 1409273 - DNA, 15 bp, Homo sapiens
atgttatgatgtcag

SEQ ID NO: 1409274 - DNA, 15 bp, Homo sapiens
aatgttatgatgtca

SEQ ID NO: 1409275 - DNA, 15 bp, Homo sapiens
aaatgttatgatgtc

SEQ ID NO: 1409276 - DNA, 15 bp, Homo sapiens
taaatgttatgatgt

SEQ ID NO: 1409277 - DNA, 15 bp, Homo sapiens
ttaaatgttatgatg

SEQ ID NO: 1409278 - DNA, 15 bp, Homo sapiens
cttaaatgttatgat

SEQ ID NO: 1409279 - DNA, 15 bp, Homo sapiens
tcttaaatgttatga

SEQ ID NO: 1409280 - DNA, 15 bp, Homo sapiens
ttcttaaatgttatg

SEQ ID NO: 1409281 - DNA, 15 bp, Homo sapiens
tttcttaaatgttat

SEQ ID NO: 1409282 - DNA, 15 bp, Homo sapiens
ctttcttaaatgtta

SEQ ID NO: 1409283 - DNA, 15 bp, Homo sapiens
actttcttaaatgtt

SEQ ID NO: 1409284 - DNA, 15 bp, Homo sapiens
cactttcttaaatgt

SEQ ID NO: 1409285 - DNA, 15 bp, Homo sapiens
tcactttcttaaatg

SEQ ID NO: 1409286 - DNA, 15 bp, Homo sapiens
ctcactttcttaaat

SEQ ID NO: 1409287 - DNA, 15 bp, Homo sapiens
actcactttcttaaa

SEQ ID NO: 1409288 - DNA, 15 bp, Homo sapiens
gactcactttcttaa

SEQ ID NO: 1409289 - DNA, 15 bp, Homo sapiens
ggactcactttctta

SEQ ID NO: 1409290 - DNA, 15 bp, Homo sapiens
aggactcactttctt

SEQ ID NO: 1409291 - DNA, 15 bp, Homo sapiens
gaggactcactttct

SEQ ID NO: 1409292 - DNA, 15 bp, Homo sapiens
ggaggactcactttc

SEQ ID NO: 1409293 - DNA, 15 bp, Homo sapiens
aggaggactcacttt

SEQ ID NO: 1409294 - DNA, 15 bp, Homo sapiens
aaggaggactcactt

SEQ ID NO: 1409295 - DNA, 15 bp, Homo sapiens
caaggaggactcact

SEQ ID NO: 1409296 - DNA, 15 bp, Homo sapiens
ccaaggaggactcac

SEQ ID NO: 1409297 - DNA, 15 bp, Homo sapiens
tccaaggaggactca

SEQ ID NO: 1409298 - DNA, 15 bp, Homo sapiens
gtccaaggaggactc

SEQ ID NO: 1409299 - DNA, 15 bp, Homo sapiens
ggtccaaggaggact

SEQ ID NO: 1409300 - DNA, 15 bp, Homo sapiens
tggtccaaggaggac

SEQ ID NO: 1409301 - DNA, 15 bp, Homo sapiens
atggtccaaggagga

SEQ ID NO: 1409302 - DNA, 15 bp, Homo sapiens
gatggtccaaggagg

SEQ ID NO: 1409303 - DNA, 15 bp, Homo sapiens
ggatggtccaaggag

SEQ ID NO: 1409304 - DNA, 15 bp, Homo sapiens
tggatggtccaagga

SEQ ID NO: 1409305 - DNA, 15 bp, Homo sapiens
ctggatggtccaagg

SEQ ID NO: 1409306 - DNA, 15 bp, Homo sapiens
actggatggtccaag

SEQ ID NO: 1409307 - DNA, 15 bp, Homo sapiens
cactggatggtccaa

SEQ ID NO: 1409308 - DNA, 15 bp, Homo sapiens
tcactggatggtcca

SEQ ID NO: 1409309 - DNA, 15 bp, Homo sapiens
atcactggatggtcc

SEQ ID NO: 1409310 - DNA, 15 bp, Homo sapiens
tatcactggatggtc

SEQ ID NO: 1409311 - DNA, 15 bp, Homo sapiens
atatcactggatggt

SEQ ID NO: 1409312 - DNA, 15 bp, Homo sapiens
aatatcactggatgg

SEQ ID NO: 1409313 - DNA, 15 bp, Homo sapiens
aaatatcactggatg

SEQ ID NO: 1409314 - DNA, 15 bp, Homo sapiens
gaaatatcactggat

SEQ ID NO: 1409315 - DNA, 15 bp, Homo sapiens
agaaatatcactgga

SEQ ID NO: 1409316 - DNA, 15 bp, Homo sapiens
aagaaatatcactgg

SEQ ID NO: 1409317 - DNA, 15 bp, Homo sapiens
taagaaatatcactg

SEQ ID NO: 1409318 - DNA, 15 bp, Homo sapiens
ataagaaatatcact

SEQ ID NO: 1409319 - DNA, 15 bp, Homo sapiens
gataagaaatatcac

SEQ ID NO: 1409320 - DNA, 15 bp, Homo sapiens
tgataagaaatatca

SEQ ID NO: 1409321 - DNA, 15 bp, Homo sapiens
gtgataagaaatatc

SEQ ID NO: 1409322 - DNA, 15 bp, Homo sapiens
tgtgataagaaatat

SEQ ID NO: 1409323 - DNA, 15 bp, Homo sapiens
ctgtgataagaaata

SEQ ID NO: 1409324 - DNA, 15 bp, Homo sapiens
tctgtgataagaaat

SEQ ID NO: 1409325 - DNA, 15 bp, Homo sapiens
atctgtgataagaaa

SEQ ID NO: 1409326 - DNA, 15 bp, Homo sapiens
tatctgtgataagaa

SEQ ID NO: 1409327 - DNA, 15 bp, Homo sapiens
ttatctgtgataaga

SEQ ID NO: 1409328 - DNA, 15 bp, Homo sapiens
tttatctgtgataag

SEQ ID NO: 1409329 - DNA, 15 bp, Homo sapiens
atttatctgtgataa

SEQ ID NO: 1409330 - DNA, 15 bp, Homo sapiens
gatttatctgtgata

SEQ ID NO: 1409331 - DNA, 15 bp, Homo sapiens
tgatttatctgtgat

SEQ ID NO: 1409332 - DNA, 15 bp, Homo sapiens
ttgatttatctgtga

SEQ ID NO: 1409333 - DNA, 15 bp, Homo sapiens
gttgatttatctgtg

SEQ ID NO: 1409334 - DNA, 15 bp, Homo sapiens
tgttgatttatctgt

SEQ ID NO: 1409335 - DNA, 15 bp, Homo sapiens
ctgttgatttatctg

SEQ ID NO: 1409336 - DNA, 15 bp, Homo sapiens
tctgttgatttatct

SEQ ID NO: 1409337 - DNA, 15 bp, Homo sapiens
ttctgttgatttatc

SEQ ID NO: 1409338 - DNA, 15 bp, Homo sapiens
tttctgttgatttat

SEQ ID NO: 1409339 - DNA, 15 bp, Homo sapiens
ctttctgttgattta

SEQ ID NO: 1409340 - DNA, 15 bp, Homo sapiens
gctttctgttgattt

SEQ ID NO: 1409341 - DNA, 15 bp, Homo sapiens
tgctttctgttgatt

SEQ ID NO: 1409342 - DNA, 15 bp, Homo sapiens
atgctttctgttgat

SEQ ID NO: 1409343 - DNA, 15 bp, Homo sapiens
aatgctttctgttga

SEQ ID NO: 1409344 - DNA, 15 bp, Homo sapiens
taatgctttctgttg

SEQ ID NO: 1409345 - DNA, 15 bp, Homo sapiens
gtaatgctttctgtt

SEQ ID NO: 1409346 - DNA, 15 bp, Homo sapiens
agtaatgctttctgt

SEQ ID NO: 1409347 - DNA, 15 bp, Homo sapiens
aagtaatgctttctg

SEQ ID NO: 1409348 - DNA, 15 bp, Homo sapiens
taagtaatgctttct

SEQ ID NO: 1409349 - DNA, 15 bp, Homo sapiens
gtaagtaatgctttc

SEQ ID NO: 1409350 - DNA, 15 bp, Homo sapiens
ggtaagtaatgcttt

SEQ ID NO: 1409351 - DNA, 15 bp, Homo sapiens
gggtaagtaatgctt

SEQ ID NO: 1409352 - DNA, 15 bp, Homo sapiens
ggggtaagtaatgct

SEQ ID NO: 1409353 - DNA, 15 bp, Homo sapiens
tggggtaagtaatgc

SEQ ID NO: 1409354 - DNA, 15 bp, Homo sapiens
gtggggtaagtaatg

SEQ ID NO: 1409355 - DNA, 15 bp, Homo sapiens
ggtggggtaagtaat

SEQ ID NO: 1409356 - DNA, 15 bp, Homo sapiens
aggtggggtaagtaa

SEQ ID NO: 1409357 - DNA, 15 bp, Homo sapiens
taggtggggtaagta

SEQ ID NO: 1409358 - DNA, 15 bp, Homo sapiens
gtaggtggggtaagt

SEQ ID NO: 1409359 - DNA, 15 bp, Homo sapiens
ggtaggtggggtaag

SEQ ID NO: 1409360 - DNA, 15 bp, Homo sapiens
tggtaggtggggtaa

SEQ ID NO: 1409361 - DNA, 15 bp, Homo sapiens
atggtaggtggggta

SEQ ID NO: 1409362 - DNA, 15 bp, Homo sapiens
gatggtaggtggggt

SEQ ID NO: 1409363 - DNA, 15 bp, Homo sapiens
agatggtaggtgggg

SEQ ID NO: 1409364 - DNA, 15 bp, Homo sapiens
cagatggtaggtggg

SEQ ID NO: 1409365 - DNA, 15 bp, Homo sapiens
gcagatggtaggtgg

SEQ ID NO: 1409366 - DNA, 15 bp, Homo sapiens
tgcagatggtaggtg

SEQ ID NO: 1409367 - DNA, 15 bp, Homo sapiens
ttgcagatggtaggt

SEQ ID NO: 1409368 - DNA, 15 bp, Homo sapiens
gttgcagatggtagg

SEQ ID NO: 1409369 - DNA, 15 bp, Homo sapiens
tgttgcagatggtag

SEQ ID NO: 1409370 - DNA, 15 bp, Homo sapiens
gtgttgcagatggta

SEQ ID NO: 1409371 - DNA, 15 bp, Homo sapiens
agtgttgcagatggt

SEQ ID NO: 1409372 - DNA, 15 bp, Homo sapiens
cagtgttgcagatgg

SEQ ID NO: 1409373 - DNA, 15 bp, Homo sapiens
acagtgttgcagatg

SEQ ID NO: 1409374 - DNA, 15 bp, Homo sapiens
cacagtgttgcagat

SEQ ID NO: 1409375 - DNA, 15 bp, Homo sapiens
ccacagtgttgcaga

SEQ ID NO: 1409376 - DNA, 15 bp, Homo sapiens
accacagtgttgcag

SEQ ID NO: 1409377 - DNA, 15 bp, Homo sapiens
aaccacagtgttgca

SEQ ID NO: 1409378 - DNA, 15 bp, Homo sapiens
taaccacagtgttgc

SEQ ID NO: 1409379 - DNA, 15 bp, Homo sapiens
ataaccacagtgttg

SEQ ID NO: 1409380 - DNA, 15 bp, Homo sapiens
aataaccacagtgtt

SEQ ID NO: 1409381 - DNA, 15 bp, Homo sapiens
aaataaccacagtgt

SEQ ID NO: 1409382 - DNA, 15 bp, Homo sapiens
gaaataaccacagtg

SEQ ID NO: 1409383 - DNA, 15 bp, Homo sapiens
tgaaataaccacagt

SEQ ID NO: 1409384 - DNA, 15 bp, Homo sapiens
ttgaaataaccacag

SEQ ID NO: 1409385 - DNA, 15 bp, Homo sapiens
gttgaaataaccaca

SEQ ID NO: 1409386 - DNA, 15 bp, Homo sapiens
tgttgaaataaccac

SEQ ID NO: 1409387 - DNA, 15 bp, Homo sapiens
gtgttgaaataacca

SEQ ID NO: 1409388 - DNA, 15 bp, Homo sapiens
ggtgttgaaataacc

SEQ ID NO: 1409389 - DNA, 15 bp, Homo sapiens
aggtgttgaaataac

SEQ ID NO: 1409390 - DNA, 15 bp, Homo sapiens
gaggtgttgaaataa

SEQ ID NO: 1409391 - DNA, 15 bp, Homo sapiens
tgaggtgttgaaata

SEQ ID NO: 1409392 - DNA, 15 bp, Homo sapiens
atgaggtgttgaaat

SEQ ID NO: 1409393 - DNA, 15 bp, Homo sapiens
gatgaggtgttgaaa

SEQ ID NO: 1409394 - DNA, 15 bp, Homo sapiens
tgatgaggtgttgaa

SEQ ID NO: 1409395 - DNA, 15 bp, Homo sapiens
atgatgaggtgttga

SEQ ID NO: 1409396 - DNA, 15 bp, Homo sapiens
gatgatgaggtgttg

SEQ ID NO: 1409397 - DNA, 15 bp, Homo sapiens
ggatgatgaggtgtt

SEQ ID NO: 1409398 - DNA, 15 bp, Homo sapiens
tggatgatgaggtgt

SEQ ID NO: 1409399 - DNA, 15 bp, Homo sapiens
atggatgatgaggtg

SEQ ID NO: 1409400 - DNA, 15 bp, Homo sapiens
catggatgatgaggt

SEQ ID NO: 1409401 - DNA, 15 bp, Homo sapiens
acatggatgatgagg

SEQ ID NO: 1409402 - DNA, 15 bp, Homo sapiens
cacatggatgatgag

SEQ ID NO: 1409403 - DNA, 15 bp, Homo sapiens
tcacatggatgatga

SEQ ID NO: 1409404 - DNA, 15 bp, Homo sapiens
atcacatggatgatg

SEQ ID NO: 1409405 - DNA, 15 bp, Homo sapiens
tatcacatggatgat

SEQ ID NO: 1409406 - DNA, 15 bp, Homo sapiens
ttatcacatggatga

SEQ ID NO: 1409407 - DNA, 15 bp, Homo sapiens
gttatcacatggatg

SEQ ID NO: 1409408 - DNA, 15 bp, Homo sapiens
ggttatcacatggat

SEQ ID NO: 1409409 - DNA, 15 bp, Homo sapiens
aggttatcacatgga

SEQ ID NO: 1409410 - DNA, 15 bp, Homo sapiens
gaggttatcacatgg

SEQ ID NO: 1409411 - DNA, 15 bp, Homo sapiens
tgaggttatcacatg

SEQ ID NO: 1409412 - DNA, 15 bp, Homo sapiens
atgaggttatcacat

SEQ ID NO: 1409413 - DNA, 15 bp, Homo sapiens
catgaggttatcaca

SEQ ID NO: 1409414 - DNA, 15 bp, Homo sapiens
acatgaggttatcac

SEQ ID NO: 1409415 - DNA, 15 bp, Homo sapiens
tacatgaggttatca

SEQ ID NO: 1409416 - DNA, 15 bp, Homo sapiens
ttacatgaggttatc

SEQ ID NO: 1409417 - DNA, 15 bp, Homo sapiens
cttacatgaggttat

SEQ ID NO: 1409418 - DNA, 15 bp, Homo sapiens
ccttacatgaggtta

SEQ ID NO: 1409419 - DNA, 15 bp, Homo sapiens
accttacatgaggtt

SEQ ID NO: 1409420 - DNA, 15 bp, Homo sapiens
gaccttacatgaggt

SEQ ID NO: 1409421 - DNA, 15 bp, Homo sapiens
agaccttacatgagg

SEQ ID NO: 1409422 - DNA, 15 bp, Homo sapiens
cagaccttacatgag

SEQ ID NO: 1409423 - DNA, 15 bp, Homo sapiens
gcagaccttacatga

SEQ ID NO: 1409424 - DNA, 15 bp, Homo sapiens
ggcagaccttacatg

SEQ ID NO: 1409425 - DNA, 15 bp, Homo sapiens
gggcagaccttacat

SEQ ID NO: 1409426 - DNA, 15 bp, Homo sapiens
tgggcagaccttaca

SEQ ID NO: 1409427 - DNA, 15 bp, Homo sapiens
ttgggcagaccttac

SEQ ID NO: 1409428 - DNA, 15 bp, Homo sapiens
tttgggcagacctta

SEQ ID NO: 1409429 - DNA, 15 bp, Homo sapiens
gtttgggcagacctt

SEQ ID NO: 1409430 - DNA, 15 bp, Homo sapiens
ggtttgggcagacct

SEQ ID NO: 1409431 - DNA, 15 bp, Homo sapiens
gggtttgggcagacc

SEQ ID NO: 1409432 - DNA, 15 bp, Homo sapiens
tgggtttgggcagac

SEQ ID NO: 1409433 - DNA, 15 bp, Homo sapiens
atgggtttgggcaga

SEQ ID NO: 1409434 - DNA, 15 bp, Homo sapiens
gatgggtttgggcag

SEQ ID NO: 1409435 - DNA, 15 bp, Homo sapiens
tgatgggtttgggca

SEQ ID NO: 1409436 - DNA, 15 bp, Homo sapiens
ctgatgggtttgggc

SEQ ID NO: 1409437 - DNA, 15 bp, Homo sapiens
gctgatgggtttggg

SEQ ID NO: 1409438 - DNA, 15 bp, Homo sapiens
ggctgatgggtttgg

SEQ ID NO: 1409439 - DNA, 15 bp, Homo sapiens
aggctgatgggtttg

SEQ ID NO: 1409440 - DNA, 15 bp, Homo sapiens
gaggctgatgggttt

SEQ ID NO: 1409441 - DNA, 15 bp, Homo sapiens
ggaggctgatgggtt

SEQ ID NO: 1409442 - DNA, 15 bp, Homo sapiens
aggaggctgatgggt

SEQ ID NO: 1409443 - DNA, 15 bp, Homo sapiens
gaggaggctgatggg

SEQ ID NO: 1409444 - DNA, 15 bp, Homo sapiens
agaggaggctgatgg

SEQ ID NO: 1409445 - DNA, 15 bp, Homo sapiens
tagaggaggctgatg

SEQ ID NO: 1409446 - DNA, 15 bp, Homo sapiens
ctagaggaggctgat

SEQ ID NO: 1409447 - DNA, 15 bp, Homo sapiens
actagaggaggctga

SEQ ID NO: 1409448 - DNA, 15 bp, Homo sapiens
aactagaggaggctg

SEQ ID NO: 1409449 - DNA, 15 bp, Homo sapiens
caactagaggaggct

SEQ ID NO: 1409450 - DNA, 15 bp, Homo sapiens
ccaactagaggaggc

SEQ ID NO: 1409451 - DNA, 15 bp, Homo sapiens
tccaactagaggagg

SEQ ID NO: 1409452 - DNA, 15 bp, Homo sapiens
gtccaactagaggag

SEQ ID NO: 1409453 - DNA, 15 bp, Homo sapiens
tgtccaactagagga

SEQ ID NO: 1409454 - DNA, 15 bp, Homo sapiens
ttgtccaactagagg

SEQ ID NO: 1409455 - DNA, 15 bp, Homo sapiens
attgtccaactagag

SEQ ID NO: 1409456 - DNA, 15 bp, Homo sapiens
gattgtccaactaga

SEQ ID NO: 1409457 - DNA, 15 bp, Homo sapiens
tgattgtccaactag

SEQ ID NO: 1409458 - DNA, 15 bp, Homo sapiens
atgattgtccaacta

SEQ ID NO: 1409459 - DNA, 15 bp, Homo sapiens
gatgattgtccaact

SEQ ID NO: 1409460 - DNA, 15 bp, Homo sapiens
tgatgattgtccaac

SEQ ID NO: 1409461 - DNA, 15 bp, Homo sapiens
ttgatgattgtccaa

SEQ ID NO: 1409462 - DNA, 15 bp, Homo sapiens
tttgatgattgtcca

SEQ ID NO: 1409463 - DNA, 15 bp, Homo sapiens
atttgatgattgtcc

SEQ ID NO: 1409464 - DNA, 15 bp, Homo sapiens
gatttgatgattgtc

SEQ ID NO: 1409465 - DNA, 15 bp, Homo sapiens
agatttgatgattgt

SEQ ID NO: 1409466 - DNA, 15 bp, Homo sapiens
gagatttgatgattg

SEQ ID NO: 1409467 - DNA, 15 bp, Homo sapiens
tgagatttgatgatt

SEQ ID NO: 1409468 - DNA, 15 bp, Homo sapiens
ttgagatttgatgat

SEQ ID NO: 1409469 - DNA, 15 bp, Homo sapiens
gttgagatttgatga

SEQ ID NO: 1409470 - DNA, 15 bp, Homo sapiens
ggttgagatttgatg

SEQ ID NO: 1409471 - DNA, 15 bp, Homo sapiens
gggttgagatttgat

SEQ ID NO: 1409472 - DNA, 15 bp, Homo sapiens
agggttgagatttga

SEQ ID NO: 1409473 - DNA, 15 bp, Homo sapiens
aagggttgagatttg

SEQ ID NO: 1409474 - DNA, 15 bp, Homo sapiens
aaagggttgagattt

SEQ ID NO: 1409475 - DNA, 15 bp, Homo sapiens
aaaagggttgagatt

SEQ ID NO: 1409476 - DNA, 15 bp, Homo sapiens
taaaagggttgagat

SEQ ID NO: 1409477 - DNA, 15 bp, Homo sapiens
gtaaaagggttgaga

SEQ ID NO: 1409478 - DNA, 15 bp, Homo sapiens
agtaaaagggttgag

SEQ ID NO: 1409479 - DNA, 15 bp, Homo sapiens
aagtaaaagggttga

SEQ ID NO: 1409480 - DNA, 15 bp, Homo sapiens
caagtaaaagggttg

SEQ ID NO: 1409481 - DNA, 15 bp, Homo sapiens
gcaagtaaaagggtt

SEQ ID NO: 1409482 - DNA, 15 bp, Homo sapiens
agcaagtaaaagggt

SEQ ID NO: 1409483 - DNA, 15 bp, Homo sapiens
cagcaagtaaaaggg

SEQ ID NO: 1409484 - DNA, 15 bp, Homo sapiens
gcagcaagtaaaagg

SEQ ID NO: 1409485 - DNA, 15 bp, Homo sapiens
tgcagcaagtaaaag

SEQ ID NO: 1409486 - DNA, 15 bp, Homo sapiens
atgcagcaagtaaaa

SEQ ID NO: 1409487 - DNA, 15 bp, Homo sapiens
aatgcagcaagtaaa

SEQ ID NO: 1409488 - DNA, 15 bp, Homo sapiens
taatgcagcaagtaa

SEQ ID NO: 1409489 - DNA, 15 bp, Homo sapiens
ttaatgcagcaagta

SEQ ID NO: 1409490 - DNA, 15 bp, Homo sapiens
tttaatgcagcaagt

SEQ ID NO: 1409491 - DNA, 15 bp, Homo sapiens
ttttaatgcagcaag

SEQ ID NO: 1409492 - DNA, 15 bp, Homo sapiens
attttaatgcagcaa

SEQ ID NO: 1409493 - DNA, 15 bp, Homo sapiens
aattttaatgcagca

SEQ ID NO: 1409494 - DNA, 15 bp, Homo sapiens
gaattttaatgcagc

SEQ ID NO: 1409495 - DNA, 15 bp, Homo sapiens
agaattttaatgcag

SEQ ID NO: 1409496 - DNA, 15 bp, Homo sapiens
tagaattttaatgca

SEQ ID NO: 1409497 - DNA, 15 bp, Homo sapiens
ctagaattttaatgc

SEQ ID NO: 1409498 - DNA, 15 bp, Homo sapiens
gctagaattttaatg

SEQ ID NO: 1409499 - DNA, 15 bp, Homo sapiens
tgctagaattttaat

SEQ ID NO: 1409500 - DNA, 15 bp, Homo sapiens
ctgctagaattttaa

SEQ ID NO: 1409501 - DNA, 15 bp, Homo sapiens
actgctagaatttta

SEQ ID NO: 1409502 - DNA, 15 bp, Homo sapiens
aactgctagaatttt

SEQ ID NO: 1409503 - DNA, 15 bp, Homo sapiens
aaactgctagaattt

SEQ ID NO: 1409504 - DNA, 15 bp, Homo sapiens
gaaactgctagaatt

SEQ ID NO: 1409505 - DNA, 15 bp, Homo sapiens
agaaactgctagaat

SEQ ID NO: 1409506 - DNA, 15 bp, Homo sapiens
tagaaactgctagaa

SEQ ID NO: 1409507 - DNA, 15 bp, Homo sapiens
gtagaaactgctaga

SEQ ID NO: 1409508 - DNA, 15 bp, Homo sapiens
ggtagaaactgctag

SEQ ID NO: 1409509 - DNA, 15 bp, Homo sapiens
tggtagaaactgcta

SEQ ID NO: 1409510 - DNA, 15 bp, Homo sapiens
ctggtagaaactgct

SEQ ID NO: 1409511 - DNA, 15 bp, Homo sapiens
cctggtagaaactgc

SEQ ID NO: 1409512 - DNA, 15 bp, Homo sapiens
gcctggtagaaactg

SEQ ID NO: 1409513 - DNA, 15 bp, Homo sapiens
tgcctggtagaaact

SEQ ID NO: 1409514 - DNA, 15 bp, Homo sapiens
ctgcctggtagaaac

SEQ ID NO: 1409515 - DNA, 15 bp, Homo sapiens
gctgcctggtagaaa

SEQ ID NO: 1409516 - DNA, 15 bp, Homo sapiens
agctgcctggtagaa

SEQ ID NO: 1409517 - DNA, 15 bp, Homo sapiens
cagctgcctggtaga

SEQ ID NO: 1409518 - DNA, 15 bp, Homo sapiens
gcagctgcctggtag

SEQ ID NO: 1409519 - DNA, 15 bp, Homo sapiens
tgcagctgcctggta

SEQ ID NO: 1409520 - DNA, 15 bp, Homo sapiens
ttgcagctgcctggt

SEQ ID NO: 1409521 - DNA, 15 bp, Homo sapiens
tttgcagctgcctgg

SEQ ID NO: 1409522 - DNA, 15 bp, Homo sapiens
gtttgcagctgcctg

SEQ ID NO: 1409523 - DNA, 15 bp, Homo sapiens
ggtttgcagctgcct

SEQ ID NO: 1409524 - DNA, 15 bp, Homo sapiens
gggtttgcagctgcc

SEQ ID NO: 1409525 - DNA, 15 bp, Homo sapiens
agggtttgcagctgc

SEQ ID NO: 1409526 - DNA, 15 bp, Homo sapiens
cagggtttgcagctg

SEQ ID NO: 1409527 - DNA, 15 bp, Homo sapiens
tcagggtttgcagct

SEQ ID NO: 1409528 - DNA, 15 bp, Homo sapiens
gtcagggtttgcagc

SEQ ID NO: 1409529 - DNA, 15 bp, Homo sapiens
tgtcagggtttgcag

SEQ ID NO: 1409530 - DNA, 15 bp, Homo sapiens
gtgtcagggtttgca

SEQ ID NO: 1409531 - DNA, 15 bp, Homo sapiens
agtgtcagggtttgc

SEQ ID NO: 1409532 - DNA, 15 bp, Homo sapiens
aagtgtcagggtttg

SEQ ID NO: 1409533 - DNA, 15 bp, Homo sapiens
taagtgtcagggttt

SEQ ID NO: 1409534 - DNA, 15 bp, Homo sapiens
ctaagtgtcagggtt

SEQ ID NO: 1409535 - DNA, 15 bp, Homo sapiens
actaagtgtcagggt

SEQ ID NO: 1409536 - DNA, 15 bp, Homo sapiens
aactaagtgtcaggg

SEQ ID NO: 1409537 - DNA, 15 bp, Homo sapiens
gaactaagtgtcagg

SEQ ID NO: 1409538 - DNA, 15 bp, Homo sapiens
ggaactaagtgtcag

SEQ ID NO: 1409539 - DNA, 15 bp, Homo sapiens
aggaactaagtgtca

SEQ ID NO: 1409540 - DNA, 15 bp, Homo sapiens
aaggaactaagtgtc

SEQ ID NO: 1409541 - DNA, 15 bp, Homo sapiens
gaaggaactaagtgt

SEQ ID NO: 1409542 - DNA, 15 bp, Homo sapiens
agaaggaactaagtg

SEQ ID NO: 1409543 - DNA, 15 bp, Homo sapiens
gagaaggaactaagt

SEQ ID NO: 1409544 - DNA, 15 bp, Homo sapiens
tgagaaggaactaag

SEQ ID NO: 1409545 - DNA, 15 bp, Homo sapiens
atgagaaggaactaa

SEQ ID NO: 1409546 - DNA, 15 bp, Homo sapiens
catgagaaggaacta

SEQ ID NO: 1409547 - DNA, 15 bp, Homo sapiens
ccatgagaaggaact

SEQ ID NO: 1409548 - DNA, 15 bp, Homo sapiens
accatgagaaggaac

SEQ ID NO: 1409549 - DNA, 15 bp, Homo sapiens
caccatgagaaggaa

SEQ ID NO: 1409550 - DNA, 15 bp, Homo sapiens
tcaccatgagaagga

SEQ ID NO: 1409551 - DNA, 15 bp, Homo sapiens
ctcaccatgagaagg

SEQ ID NO: 1409552 - DNA, 15 bp, Homo sapiens
gctcaccatgagaag

SEQ ID NO: 1409553 - DNA, 15 bp, Homo sapiens
tgctcaccatgagaa

SEQ ID NO: 1409554 - DNA, 15 bp, Homo sapiens
ttgctcaccatgaga

SEQ ID NO: 1409555 - DNA, 15 bp, Homo sapiens
tttgctcaccatgag

SEQ ID NO: 1409556 - DNA, 15 bp, Homo sapiens
atttgctcaccatga

SEQ ID NO: 1409557 - DNA, 15 bp, Homo sapiens
tatttgctcaccatg

SEQ ID NO: 1409558 - DNA, 15 bp, Homo sapiens
ttatttgctcaccat

SEQ ID NO: 1409559 - DNA, 15 bp, Homo sapiens
tttatttgctcacca

SEQ ID NO: 1409560 - DNA, 15 bp, Homo sapiens
ttttatttgctcacc

SEQ ID NO: 1409561 - DNA, 15 bp, Homo sapiens
attttatttgctcac

SEQ ID NO: 1409562 - DNA, 15 bp, Homo sapiens
tattttatttgctca

SEQ ID NO: 1409563 - DNA, 15 bp, Homo sapiens
ctattttatttgctc

SEQ ID NO: 1409564 - DNA, 15 bp, Homo sapiens
ggcctattttatttg

SEQ ID NO: 1409565 - DNA, 15 bp, Homo sapiens
gggcctattttattt

SEQ ID NO: 1409566 - DNA, 15 bp, Homo sapiens
agggcctattttatt

SEQ ID NO: 1409567 - DNA, 15 bp, Homo sapiens
gagggcctattttat

SEQ ID NO: 1409568 - DNA, 15 bp, Homo sapiens
ggagggcctatttta

SEQ ID NO: 1409569 - DNA, 15 bp, Homo sapiens
gggagggcctatttt

SEQ ID NO: 1409570 - DNA, 15 bp, Homo sapiens
ggggagggcctattt

SEQ ID NO: 1409571 - DNA, 15 bp, Homo sapiens
cggggagggcctatt

SEQ ID NO: 1409572 - DNA, 15 bp, Homo sapiens
acggggagggcctat

SEQ ID NO: 1409573 - DNA, 15 bp, Homo sapiens
cacggggagggccta

SEQ ID NO: 1409574 - DNA, 15 bp, Homo sapiens
gcacggggagggcct

SEQ ID NO: 1409575 - DNA, 15 bp, Homo sapiens
ggcacggggagggcc

SEQ ID NO: 1409576 - DNA, 15 bp, Homo sapiens
aggcacggggagggc

SEQ ID NO: 1409577 - DNA, 15 bp, Homo sapiens
aaggcacggggaggg

SEQ ID NO: 1409578 - DNA, 15 bp, Homo sapiens
gaaggcacggggagg

SEQ ID NO: 1409579 - DNA, 15 bp, Homo sapiens
agaaggcacggggag

SEQ ID NO: 1409580 - DNA, 15 bp, Homo sapiens
cagaaggcacgggga

SEQ ID NO: 1409581 - DNA, 15 bp, Homo sapiens
ccagaaggcacgggg

SEQ ID NO: 1409582 - DNA, 15 bp, Homo sapiens
tccagaaggcacggg

SEQ ID NO: 1409583 - DNA, 15 bp, Homo sapiens
ctccagaaggcacgg

SEQ ID NO: 1409584 - DNA, 15 bp, Homo sapiens
gctccagaaggcacg

SEQ ID NO: 1409585 - DNA, 15 bp, Homo sapiens
tgctccagaaggcac

SEQ ID NO: 1409586 - DNA, 15 bp, Homo sapiens
gtgctccagaaggca

SEQ ID NO: 1409587 - DNA, 15 bp, Homo sapiens
cgtgctccagaaggc

SEQ ID NO: 1409588 - DNA, 15 bp, Homo sapiens
ccgtgctccagaagg

SEQ ID NO: 1409589 - DNA, 15 bp, Homo sapiens
gccgtgctccagaag

SEQ ID NO: 1409590 - DNA, 15 bp, Homo sapiens
tgccgtgctccagaa

SEQ ID NO: 1409591 - DNA, 15 bp, Homo sapiens
ctgccgtgctccaga

SEQ ID NO: 1409592 - DNA, 15 bp, Homo sapiens
tctgccgtgctccag

SEQ ID NO: 1409593 - DNA, 15 bp, Homo sapiens
ttctgccgtgctcca

SEQ ID NO: 1409594 - DNA, 15 bp, Homo sapiens
cttctgccgtgctcc

SEQ ID NO: 1409595 - DNA, 15 bp, Homo sapiens
acttctgccgtgctc

SEQ ID NO: 1409596 - DNA, 15 bp, Homo sapiens
tacttctgccgtgct

SEQ ID NO: 1409597 - DNA, 15 bp, Homo sapiens
atacttctgccgtgc

SEQ ID NO: 1409598 - DNA, 15 bp, Homo sapiens
gatacttctgccgtg

SEQ ID NO: 1409599 - DNA, 15 bp, Homo sapiens
tgatacttctgccgt

SEQ ID NO: 1409600 - DNA, 15 bp, Homo sapiens
atgatacttctgccg

SEQ ID NO: 1409601 - DNA, 15 bp, Homo sapiens
aatgatacttctgcc

SEQ ID NO: 1409602 - DNA, 15 bp, Homo sapiens
aaatgatacttctgc

SEQ ID NO: 1409603 - DNA, 15 bp, Homo sapiens
aaaatgatacttctg

SEQ ID NO: 1409604 - DNA, 15 bp, Homo sapiens
caaaatgatacttct

SEQ ID NO: 1409605 - DNA, 15 bp, Homo sapiens
ccaaaatgatacttc

SEQ ID NO: 1409606 - DNA, 15 bp, Homo sapiens
tccaaaatgatactt

SEQ ID NO: 1409607 - DNA, 15 bp, Homo sapiens
ttccaaaatgatact

SEQ ID NO: 1409608 - DNA, 15 bp, Homo sapiens
gttccaaaatgatac

SEQ ID NO: 1409609 - DNA, 15 bp, Homo sapiens
tgttccaaaatgata

SEQ ID NO: 1409610 - DNA, 15 bp, Homo sapiens
ttgttccaaaatgat

SEQ ID NO: 1409611 - DNA, 15 bp, Homo sapiens
attgttccaaaatga

SEQ ID NO: 1409612 - DNA, 15 bp, Homo sapiens
aattgttccaaaatg

SEQ ID NO: 1409613 - DNA, 15 bp, Homo sapiens
caattgttccaaaat

SEQ ID NO: 1409614 - DNA, 15 bp, Homo sapiens
tcaattgttccaaaa

SEQ ID NO: 1409615 - DNA, 15 bp, Homo sapiens
gtcaattgttccaaa

SEQ ID NO: 1409616 - DNA, 15 bp, Homo sapiens
tgtcaattgttccaa

SEQ ID NO: 1409617 - DNA, 15 bp, Homo sapiens
ctgtcaattgttcca

SEQ ID NO: 1409618 - DNA, 15 bp, Homo sapiens
actgtcaattgttcc

SEQ ID NO: 1409619 - DNA, 15 bp, Homo sapiens
cactgtcaattgttc

SEQ ID NO: 1409620 - DNA, 15 bp, Homo sapiens
acactgtcaattgtt

SEQ ID NO: 1409621 - DNA, 15 bp, Homo sapiens
gacactgtcaattgt

SEQ ID NO: 1409622 - DNA, 15 bp, Homo sapiens
agacactgtcaattg

SEQ ID NO: 1409623 - DNA, 15 bp, Homo sapiens
cagacactgtcaatt

SEQ ID NO: 1409624 - DNA, 15 bp, Homo sapiens
acagacactgtcaat

SEQ ID NO: 1409625 - DNA, 15 bp, Homo sapiens
gacagacactgtcaa

SEQ ID NO: 1409626 - DNA, 15 bp, Homo sapiens
agacagacactgtca

SEQ ID NO: 1409627 - DNA, 15 bp, Homo sapiens
gagacagacactgtc

SEQ ID NO: 1409628 - DNA, 15 bp, Homo sapiens
agagacagacactgt

SEQ ID NO: 1409629 - DNA, 15 bp, Homo sapiens
tagagacagacactg

SEQ ID NO: 1409630 - DNA, 15 bp, Homo sapiens
ttagagacagacact

SEQ ID NO: 1409631 - DNA, 15 bp, Homo sapiens
gttagagacagacac

SEQ ID NO: 1409632 - DNA, 15 bp, Homo sapiens
ggttagagacagaca

SEQ ID NO: 1409633 - DNA, 15 bp, Homo sapiens
tggttagagacagac

SEQ ID NO: 1409634 - DNA, 15 bp, Homo sapiens
ttggttagagacaga

SEQ ID NO: 1409635 - DNA, 15 bp, Homo sapiens
tttggttagagacag

SEQ ID NO: 1409636 - DNA, 15 bp, Homo sapiens
ttttggttagagaca

SEQ ID NO: 1409637 - DNA, 15 bp, Homo sapiens
cttttggttagagac

SEQ ID NO: 1409638 - DNA, 15 bp, Homo sapiens
gcttttggttagaga

SEQ ID NO: 1409639 - DNA, 15 bp, Homo sapiens
tgcttttggttagag

SEQ ID NO: 1409640 - DNA, 15 bp, Homo sapiens
atgcttttggttaga

SEQ ID NO: 1409641 - DNA, 15 bp, Homo sapiens
aatgcttttggttag

SEQ ID NO: 1409642 - DNA, 15 bp, Homo sapiens
gaatgcttttggtta

SEQ ID NO: 1409643 - DNA, 15 bp, Homo sapiens
tgaatgcttttggtt

SEQ ID NO: 1409644 - DNA, 15 bp, Homo sapiens
ctgaatgcttttggt

SEQ ID NO: 1409645 - DNA, 15 bp, Homo sapiens
gctgaatgcttttgg

SEQ ID NO: 1409646 - DNA, 15 bp, Homo sapiens
agctgaatgcttttg

SEQ ID NO: 1409647 - DNA, 15 bp, Homo sapiens
cagctgaatgctttt

SEQ ID NO: 1409648 - DNA, 15 bp, Homo sapiens
gcagctgaatgcttt

SEQ ID NO: 1409649 - DNA, 15 bp, Homo sapiens
agcagctgaatgctt

SEQ ID NO: 1409650 - DNA, 15 bp, Homo sapiens
cagcagctgaatgct

SEQ ID NO: 1409651 - DNA, 15 bp, Homo sapiens
acagcagctgaatgc

SEQ ID NO: 1409652 - DNA, 15 bp, Homo sapiens
tacagcagctgaatg

SEQ ID NO: 1409653 - DNA, 15 bp, Homo sapiens
ctacagcagctgaat

SEQ ID NO: 1409654 - DNA, 15 bp, Homo sapiens
gctacagcagctgaa

SEQ ID NO: 1409655 - DNA, 15 bp, Homo sapiens
agctacagcagctga

SEQ ID NO: 1409656 - DNA, 15 bp, Homo sapiens
tagctacagcagctg

SEQ ID NO: 1409657 - DNA, 15 bp, Homo sapiens
ttagctacagcagct

SEQ ID NO: 1409658 - DNA, 15 bp, Homo sapiens
gttagctacagcagc

SEQ ID NO: 1409659 - DNA, 15 bp, Homo sapiens
tgttagctacagcag

SEQ ID NO: 1409660 - DNA, 15 bp, Homo sapiens
atgttagctacagca

SEQ ID NO: 1409661 - DNA, 15 bp, Homo sapiens
gatgttagctacagc

SEQ ID NO: 1409662 - DNA, 15 bp, Homo sapiens
agatgttagctacag

SEQ ID NO: 1409663 - DNA, 15 bp, Homo sapiens
tagatgttagctaca

SEQ ID NO: 1409664 - DNA, 15 bp, Homo sapiens
ctagatgttagctac

SEQ ID NO: 1409665 - DNA, 15 bp, Homo sapiens
gctagatgttagcta

SEQ ID NO: 1409666 - DNA, 15 bp, Homo sapiens
tgctagatgttagct

SEQ ID NO: 1409667 - DNA, 15 bp, Homo sapiens
ttgctagatgttagc

SEQ ID NO: 1409668 - DNA, 15 bp, Homo sapiens
attgctagatgttag

SEQ ID NO: 1409669 - DNA, 15 bp, Homo sapiens
tattgctagatgtta

SEQ ID NO: 1409670 - DNA, 15 bp, Homo sapiens
gtattgctagatgtt

SEQ ID NO: 1409671 - DNA, 15 bp, Homo sapiens
agtattgctagatgt

SEQ ID NO: 1409672 - DNA, 15 bp, Homo sapiens
cagtattgctagatg

SEQ ID NO: 1409673 - DNA, 15 bp, Homo sapiens
tcagtattgctagat

SEQ ID NO: 1409674 - DNA, 15 bp, Homo sapiens
ctcagtattgctaga

SEQ ID NO: 1409675 - DNA, 15 bp, Homo sapiens
tctcagtattgctag

SEQ ID NO: 1409676 - DNA, 15 bp, Homo sapiens
ttctcagtattgcta

SEQ ID NO: 1409677 - DNA, 15 bp, Homo sapiens
cttctcagtattgct

SEQ ID NO: 1409678 - DNA, 15 bp, Homo sapiens
tcttctcagtattgc

SEQ ID NO: 1409679 - DNA, 15 bp, Homo sapiens
ttcttctcagtattg

SEQ ID NO: 1409680 - DNA, 15 bp, Homo sapiens
tttcttctcagtatt

SEQ ID NO: 1409681 - DNA, 15 bp, Homo sapiens
ttttcttctcagtat

SEQ ID NO: 1409682 - DNA, 15 bp, Homo sapiens
gttttcttctcagta

SEQ ID NO: 1409683 - DNA, 15 bp, Homo sapiens
tgttttcttctcagt

SEQ ID NO: 1409684 - DNA, 15 bp, Homo sapiens
ctgttttcttctcag

SEQ ID NO: 1409685 - DNA, 15 bp, Homo sapiens
cctgttttcttctca

SEQ ID NO: 1409686 - DNA, 15 bp, Homo sapiens
ccctgttttcttctc

SEQ ID NO: 1409687 - DNA, 15 bp, Homo sapiens
tccctgttttcttct

SEQ ID NO: 1409688 - DNA, 15 bp, Homo sapiens
ctccctgttttcttc

SEQ ID NO: 1409689 - DNA, 15 bp, Homo sapiens
actccctgttttctt

SEQ ID NO: 1409690 - DNA, 15 bp, Homo sapiens
aactccctgttttct

SEQ ID NO: 1409691 - DNA, 15 bp, Homo sapiens
gaactccctgttttc

SEQ ID NO: 1409692 - DNA, 15 bp, Homo sapiens
tgaactccctgtttt

SEQ ID NO: 1409693 - DNA, 15 bp, Homo sapiens
ctgaactccctgttt

SEQ ID NO: 1409694 - DNA, 15 bp, Homo sapiens
tctgaactccctgtt

SEQ ID NO: 1409695 - DNA, 15 bp, Homo sapiens
gtctgaactccctgt

SEQ ID NO: 1409696 - DNA, 15 bp, Homo sapiens
agtctgaactccctg

SEQ ID NO: 1409697 - DNA, 15 bp, Homo sapiens
cagtctgaactccct

SEQ ID NO: 1409698 - DNA, 15 bp, Homo sapiens
ccagtctgaactccc

SEQ ID NO: 1409699 - DNA, 15 bp, Homo sapiens
cccagtctgaactcc

SEQ ID NO: 1409700 - DNA, 15 bp, Homo sapiens
ccccagtctgaactc

SEQ ID NO: 1409701 - DNA, 15 bp, Homo sapiens
tccccagtctgaact

SEQ ID NO: 1409702 - DNA, 15 bp, Homo sapiens
gtccccagtctgaac

SEQ ID NO: 1409703 - DNA, 15 bp, Homo sapiens
agtccccagtctgaa

SEQ ID NO: 1409704 - DNA, 15 bp, Homo sapiens
cagtccccagtctga

SEQ ID NO: 1409705 - DNA, 15 bp, Homo sapiens
tcagtccccagtctg

SEQ ID NO: 1409706 - DNA, 15 bp, Homo sapiens
atcagtccccagtct

SEQ ID NO: 1409707 - DNA, 15 bp, Homo sapiens
catcagtccccagtc

SEQ ID NO: 1409708 - DNA, 15 bp, Homo sapiens
acatcagtccccagt

SEQ ID NO: 1409709 - DNA, 15 bp, Homo sapiens
tacatcagtccccag

SEQ ID NO: 1409710 - DNA, 15 bp, Homo sapiens
ttacatcagtcccca

SEQ ID NO: 1409711 - DNA, 15 bp, Homo sapiens
tttacatcagtcccc

SEQ ID NO: 1409712 - DNA, 15 bp, Homo sapiens
ttttacatcagtccc

SEQ ID NO: 1409713 - DNA, 15 bp, Homo sapiens
attttacatcagtcc

SEQ ID NO: 1409714 - DNA, 15 bp, Homo sapiens
tattttacatcagtc

SEQ ID NO: 1409715 - DNA, 15 bp, Homo sapiens
ctattttacatcagt

SEQ ID NO: 1409716 - DNA, 15 bp, Homo sapiens
cctattttacatcag

SEQ ID NO: 1409717 - DNA, 15 bp, Homo sapiens
acctattttacatca

SEQ ID NO: 1409718 - DNA, 15 bp, Homo sapiens
gacctattttacatc

SEQ ID NO: 1409719 - DNA, 15 bp, Homo sapiens
ggacctattttacat

SEQ ID NO: 1409720 - DNA, 15 bp, Homo sapiens
gggacctattttaca

SEQ ID NO: 1409721 - DNA, 15 bp, Homo sapiens
agggacctattttac

SEQ ID NO: 1409722 - DNA, 15 bp, Homo sapiens
aagggacctatttta

SEQ ID NO: 1409723 - DNA, 15 bp, Homo sapiens
gaagggacctatttt

SEQ ID NO: 1409724 - DNA, 15 bp, Homo sapiens
ggaagggacctattt

SEQ ID NO: 1409725 - DNA, 15 bp, Homo sapiens
aggaagggacctatt

SEQ ID NO: 1409726 - DNA, 15 bp, Homo sapiens
aaggaagggacctat

SEQ ID NO: 1409727 - DNA, 15 bp, Homo sapiens
aaaggaagggaccta

SEQ ID NO: 1409728 - DNA, 15 bp, Homo sapiens
gaaaggaagggacct

SEQ ID NO: 1409729 - DNA, 15 bp, Homo sapiens
agaaaggaagggacc

SEQ ID NO: 1409730 - DNA, 15 bp, Homo sapiens
tagaaaggaagggac

SEQ ID NO: 1409731 - DNA, 15 bp, Homo sapiens
atagaaaggaaggga

SEQ ID NO: 1409732 - DNA, 15 bp, Homo sapiens
gatagaaaggaaggg

SEQ ID NO: 1409733 - DNA, 15 bp, Homo sapiens
tgatagaaaggaagg

SEQ ID NO: 1409734 - DNA, 15 bp, Homo sapiens
ctgatagaaaggaag

SEQ ID NO: 1409735 - DNA, 15 bp, Homo sapiens
actgatagaaaggaa

SEQ ID NO: 1409736 - DNA, 15 bp, Homo sapiens
aactgatagaaagga

SEQ ID NO: 1409737 - DNA, 15 bp, Homo sapiens
caactgatagaaagg

SEQ ID NO: 1409738 - DNA, 15 bp, Homo sapiens
acaactgatagaaag

SEQ ID NO: 1409739 - DNA, 15 bp, Homo sapiens
cacaactgatagaaa

SEQ ID NO: 1409740 - DNA, 15 bp, Homo sapiens
tcacaactgatagaa

SEQ ID NO: 1409741 - DNA, 15 bp, Homo sapiens
gtcacaactgataga

SEQ ID NO: 1409742 - DNA, 15 bp, Homo sapiens
tgtcacaactgatag

SEQ ID NO: 1409743 - DNA, 15 bp, Homo sapiens
ctgtcacaactgata

SEQ ID NO: 1409744 - DNA, 15 bp, Homo sapiens
tctgtcacaactgat

SEQ ID NO: 1409745 - DNA, 15 bp, Homo sapiens
atctgtcacaactga

SEQ ID NO: 1409746 - DNA, 15 bp, Homo sapiens
catctgtcacaactg

SEQ ID NO: 1409747 - DNA, 15 bp, Homo sapiens
gcatctgtcacaact

SEQ ID NO: 1409748 - DNA, 15 bp, Homo sapiens
tgcatctgtcacaac

SEQ ID NO: 1409749 - DNA, 15 bp, Homo sapiens
ctgcatctgtcacaa

SEQ ID NO: 1409750 - DNA, 15 bp, Homo sapiens
tctgcatctgtcaca

SEQ ID NO: 1409751 - DNA, 15 bp, Homo sapiens
ttctgcatctgtcac

SEQ ID NO: 1409752 - DNA, 15 bp, Homo sapiens
attctgcatctgtca

SEQ ID NO: 1409753 - DNA, 15 bp, Homo sapiens
aattctgcatctgtc

SEQ ID NO: 1409754 - DNA, 15 bp, Homo sapiens
aaattctgcatctgt

SEQ ID NO: 1409755 - DNA, 15 bp, Homo sapiens
caaattctgcatctg

SEQ ID NO: 1409756 - DNA, 15 bp, Homo sapiens
ccaaattctgcatct

SEQ ID NO: 1409757 - DNA, 15 bp, Homo sapiens
accaaattctgcatc

SEQ ID NO: 1409758 - DNA, 15 bp, Homo sapiens
caccaaattctgcat

SEQ ID NO: 1409759 - DNA, 15 bp, Homo sapiens
gcaccaaattctgca

SEQ ID NO: 1409760 - DNA, 15 bp, Homo sapiens
ggcaccaaattctgc

SEQ ID NO: 1409761 - DNA, 15 bp, Homo sapiens
tggcaccaaattctg

SEQ ID NO: 1409762 - DNA, 15 bp, Homo sapiens
ttggcaccaaattct

SEQ ID NO: 1409763 - DNA, 15 bp, Homo sapiens
attggcaccaaattc

SEQ ID NO: 1409764 - DNA, 15 bp, Homo sapiens
aattggcaccaaatt

SEQ ID NO: 1409765 - DNA, 15 bp, Homo sapiens
gaattggcaccaaat

SEQ ID NO: 1409766 - DNA, 15 bp, Homo sapiens
agaattggcaccaaa

SEQ ID NO: 1409767 - DNA, 15 bp, Homo sapiens
tagaattggcaccaa

SEQ ID NO: 1409768 - DNA, 15 bp, Homo sapiens
gtagaattggcacca

SEQ ID NO: 1409769 - DNA, 15 bp, Homo sapiens
tgtagaattggcacc

SEQ ID NO: 1409770 - DNA, 15 bp, Homo sapiens
atgtagaattggcac

SEQ ID NO: 1409771 - DNA, 15 bp, Homo sapiens
aatgtagaattggca

SEQ ID NO: 1409772 - DNA, 15 bp, Homo sapiens
aaatgtagaattggc

SEQ ID NO: 1409773 - DNA, 15 bp, Homo sapiens
taaatgtagaattgg

SEQ ID NO: 1409774 - DNA, 15 bp, Homo sapiens
ctaaatgtagaattg

SEQ ID NO: 1409775 - DNA, 15 bp, Homo sapiens
cctaaatgtagaatt

SEQ ID NO: 1409776 - DNA, 15 bp, Homo sapiens
acctaaatgtagaat

SEQ ID NO: 1409777 - DNA, 15 bp, Homo sapiens
gacctaaatgtagaa

SEQ ID NO: 1409778 - DNA, 15 bp, Homo sapiens
ggacctaaatgtaga

SEQ ID NO: 1409779 - DNA, 15 bp, Homo sapiens
tggacctaaatgtag

SEQ ID NO: 1409780 - DNA, 15 bp, Homo sapiens
atggacctaaatgta

SEQ ID NO: 1409781 - DNA, 15 bp, Homo sapiens
gatggacctaaatgt

SEQ ID NO: 1409782 - DNA, 15 bp, Homo sapiens
agatggacctaaatg

SEQ ID NO: 1409783 - DNA, 15 bp, Homo sapiens
gagatggacctaaat

SEQ ID NO: 1409784 - DNA, 15 bp, Homo sapiens
ggagatggacctaaa

SEQ ID NO: 1409785 - DNA, 15 bp, Homo sapiens
tggagatggacctaa

SEQ ID NO: 1409786 - DNA, 15 bp, Homo sapiens
ctggagatggaccta

SEQ ID NO: 1409787 - DNA, 15 bp, Homo sapiens
tctggagatggacct

SEQ ID NO: 1409788 - DNA, 15 bp, Homo sapiens
ttctggagatggacc

SEQ ID NO: 1409789 - DNA, 15 bp, Homo sapiens
tttctggagatggac

SEQ ID NO: 1409790 - DNA, 15 bp, Homo sapiens
ctttctggagatgga

SEQ ID NO: 1409791 - DNA, 15 bp, Homo sapiens
actttctggagatgg

SEQ ID NO: 1409792 - DNA, 15 bp, Homo sapiens
gactttctggagatg

SEQ ID NO: 1409793 - DNA, 15 bp, Homo sapiens
tgactttctggagat

SEQ ID NO: 1409794 - DNA, 15 bp, Homo sapiens
atgactttctggaga

SEQ ID NO: 1409795 - DNA, 15 bp, Homo sapiens
tatgactttctggag

SEQ ID NO: 1409796 - DNA, 15 bp, Homo sapiens
ttatgactttctgga

SEQ ID NO: 1409797 - DNA, 15 bp, Homo sapiens
attatgactttctgg

SEQ ID NO: 1409798 - DNA, 15 bp, Homo sapiens
gattatgactttctg

SEQ ID NO: 1409799 - DNA, 15 bp, Homo sapiens
tgattatgactttct

SEQ ID NO: 1409800 - DNA, 15 bp, Homo sapiens
ctgattatgactttc

SEQ ID NO: 1409801 - DNA, 15 bp, Homo sapiens
gctgattatgacttt

SEQ ID NO: 1409802 - DNA, 15 bp, Homo sapiens
agctgattatgactt

SEQ ID NO: 1409803 - DNA, 15 bp, Homo sapiens
cagctgattatgact

SEQ ID NO: 1409804 - DNA, 15 bp, Homo sapiens
acagctgattatgac

SEQ ID NO: 1409805 - DNA, 15 bp, Homo sapiens
cacagctgattatga

SEQ ID NO: 1409806 - DNA, 15 bp, Homo sapiens
tcacagctgattatg

SEQ ID NO: 1409807 - DNA, 15 bp, Homo sapiens
ttcacagctgattat

SEQ ID NO: 1409808 - DNA, 15 bp, Homo sapiens
cttcacagctgatta

SEQ ID NO: 1409809 - DNA, 15 bp, Homo sapiens
acttcacagctgatt

SEQ ID NO: 1409810 - DNA, 15 bp, Homo sapiens
aacttcacagctgat

SEQ ID NO: 1409811 - DNA, 15 bp, Homo sapiens
aaacttcacagctga

SEQ ID NO: 1409812 - DNA, 15 bp, Homo sapiens
gaaacttcacagctg

SEQ ID NO: 1409813 - DNA, 15 bp, Homo sapiens
tgaaacttcacagct

SEQ ID NO: 1409814 - DNA, 15 bp, Homo sapiens
ctgaaacttcacagc

SEQ ID NO: 1409815 - DNA, 15 bp, Homo sapiens
gctgaaacttcacag

SEQ ID NO: 1409816 - DNA, 15 bp, Homo sapiens
tgctgaaacttcaca

SEQ ID NO: 1409817 - DNA, 15 bp, Homo sapiens
atgctgaaacttcac

SEQ ID NO: 1409818 - DNA, 15 bp, Homo sapiens
aatgctgaaacttca

SEQ ID NO: 1409819 - DNA, 15 bp, Homo sapiens
gaatgctgaaacttc

SEQ ID NO: 1409820 - DNA, 15 bp, Homo sapiens
ggaatgctgaaactt

SEQ ID NO: 1409821 - DNA, 15 bp, Homo sapiens
aggaatgctgaaact

SEQ ID NO: 1409822 - DNA, 15 bp, Homo sapiens
taggaatgctgaaac

SEQ ID NO: 1409823 - DNA, 15 bp, Homo sapiens
ctaggaatgctgaaa

SEQ ID NO: 1409824 - DNA, 15 bp, Homo sapiens
tctaggaatgctgaa

SEQ ID NO: 1409825 - DNA, 15 bp, Homo sapiens
ttctaggaatgctga

SEQ ID NO: 1409826 - DNA, 15 bp, Homo sapiens
tttctaggaatgctg

SEQ ID NO: 1409827 - DNA, 15 bp, Homo sapiens
ttttctaggaatgct

SEQ ID NO: 1409828 - DNA, 15 bp, Homo sapiens
tttttctaggaatgc

SEQ ID NO: 1409829 - DNA, 15 bp, Homo sapiens
ctttttctaggaatg

SEQ ID NO: 1409830 - DNA, 15 bp, Homo sapiens
actttttctaggaat

SEQ ID NO: 1409831 - DNA, 15 bp, Homo sapiens
cactttttctaggaa

SEQ ID NO: 1409832 - DNA, 15 bp, Homo sapiens
tcactttttctagga

SEQ ID NO: 1409833 - DNA, 15 bp, Homo sapiens
ttcactttttctagg

SEQ ID NO: 1409834 - DNA, 15 bp, Homo sapiens
attcactttttctag

SEQ ID NO: 1409835 - DNA, 15 bp, Homo sapiens
cattcactttttcta

SEQ ID NO: 1409836 - DNA, 15 bp, Homo sapiens
gcattcactttttct

SEQ ID NO: 1409837 - DNA, 15 bp, Homo sapiens
agcattcactttttc

SEQ ID NO: 1409838 - DNA, 15 bp, Homo sapiens
cagcattcacttttt

SEQ ID NO: 1409839 - DNA, 15 bp, Homo sapiens
acagcattcactttt

SEQ ID NO: 1409840 - DNA, 15 bp, Homo sapiens
tacagcattcacttt

SEQ ID NO: 1409841 - DNA, 15 bp, Homo sapiens
ttacagcattcactt

SEQ ID NO: 1409842 - DNA, 15 bp, Homo sapiens
tttacagcattcact

SEQ ID NO: 1409843 - DNA, 15 bp, Homo sapiens
atttacagcattcac

SEQ ID NO: 1409844 - DNA, 15 bp, Homo sapiens
tatttacagcattca

SEQ ID NO: 1409845 - DNA, 15 bp, Homo sapiens
atatttacagcattc

SEQ ID NO: 1409846 - DNA, 15 bp, Homo sapiens
tatatttacagcatt

SEQ ID NO: 1409847 - DNA, 15 bp, Homo sapiens
ctatatttacagcat

SEQ ID NO: 1409848 - DNA, 15 bp, Homo sapiens
gctatatttacagca

SEQ ID NO: 1409849 - DNA, 15 bp, Homo sapiens
agctatatttacagc

SEQ ID NO: 1409850 - DNA, 15 bp, Homo sapiens
gagctatatttacag

SEQ ID NO: 1409851 - DNA, 15 bp, Homo sapiens
tgagctatatttaca

SEQ ID NO: 1409852 - DNA, 15 bp, Homo sapiens
ctgagctatatttac

SEQ ID NO: 1409853 - DNA, 15 bp, Homo sapiens
cctgagctatattta

SEQ ID NO: 1409854 - DNA, 15 bp, Homo sapiens
acctgagctatattt

SEQ ID NO: 1409855 - DNA, 15 bp, Homo sapiens
tacctgagctatatt

SEQ ID NO: 1409856 - DNA, 15 bp, Homo sapiens
atacctgagctatat

SEQ ID NO: 1409857 - DNA, 15 bp, Homo sapiens
gatacctgagctata

SEQ ID NO: 1409858 - DNA, 15 bp, Homo sapiens
agatacctgagctat

SEQ ID NO: 1409859 - DNA, 15 bp, Homo sapiens
cagatacctgagcta

SEQ ID NO: 1409860 - DNA, 15 bp, Homo sapiens
gcagatacctgagct

SEQ ID NO: 1409861 - DNA, 15 bp, Homo sapiens
ggcagatacctgagc

SEQ ID NO: 1409862 - DNA, 15 bp, Homo sapiens
tggcagatacctgag

SEQ ID NO: 1409863 - DNA, 15 bp, Homo sapiens
ttggcagatacctga

SEQ ID NO: 1409864 - DNA, 15 bp, Homo sapiens
gttggcagatacctg

SEQ ID NO: 1409865 - DNA, 15 bp, Homo sapiens
tgttggcagatacct

SEQ ID NO: 1409866 - DNA, 15 bp, Homo sapiens
ctgttggcagatacc

SEQ ID NO: 1409867 - DNA, 15 bp, Homo sapiens
tctgttggcagatac

SEQ ID NO: 1409868 - DNA, 15 bp, Homo sapiens
ttctgttggcagata

SEQ ID NO: 1409869 - DNA, 15 bp, Homo sapiens
tttctgttggcagat

SEQ ID NO: 1409870 - DNA, 15 bp, Homo sapiens
atttctgttggcaga

SEQ ID NO: 1409871 - DNA, 15 bp, Homo sapiens
aatttctgttggcag

SEQ ID NO: 1409872 - DNA, 15 bp, Homo sapiens
gaatttctgttggca

SEQ ID NO: 1409873 - DNA, 15 bp, Homo sapiens
ggaatttctgttggc

SEQ ID NO: 1409874 - DNA, 15 bp, Homo sapiens
tggaatttctgttgg

SEQ ID NO: 1409875 - DNA, 15 bp, Homo sapiens
ctggaatttctgttg

SEQ ID NO: 1409876 - DNA, 15 bp, Homo sapiens
cctggaatttctgtt

SEQ ID NO: 1409877 - DNA, 15 bp, Homo sapiens
tcctggaatttctgt

SEQ ID NO: 1409878 - DNA, 15 bp, Homo sapiens
ctcctggaatttctg

SEQ ID NO: 1409879 - DNA, 15 bp, Homo sapiens
gctcctggaatttct

SEQ ID NO: 1409880 - DNA, 15 bp, Homo sapiens
ggctcctggaatttc

SEQ ID NO: 1409881 - DNA, 15 bp, Homo sapiens
tggctcctggaattt

SEQ ID NO: 1409882 - DNA, 15 bp, Homo sapiens
ctggctcctggaatt

SEQ ID NO: 1409883 - DNA, 15 bp, Homo sapiens
tctggctcctggaat

SEQ ID NO: 1409884 - DNA, 15 bp, Homo sapiens
atctggctcctggaa

SEQ ID NO: 1409885 - DNA, 15 bp, Homo sapiens
gatctggctcctgga

SEQ ID NO: 1409886 - DNA, 15 bp, Homo sapiens
agatctggctcctgg

SEQ ID NO: 1409887 - DNA, 15 bp, Homo sapiens
tagatctggctcctg

SEQ ID NO: 1409888 - DNA, 15 bp, Homo sapiens
ctagatctggctcct

SEQ ID NO: 1409889 - DNA, 15 bp, Homo sapiens
cctagatctggctcc

SEQ ID NO: 1409890 - DNA, 15 bp, Homo sapiens
gcctagatctggctc

SEQ ID NO: 1409891 - DNA, 15 bp, Homo sapiens
agcctagatctggct

SEQ ID NO: 1409892 - DNA, 15 bp, Homo sapiens
cagcctagatctggc

SEQ ID NO: 1409893 - DNA, 15 bp, Homo sapiens
ccagcctagatctgg

SEQ ID NO: 1409894 - DNA, 15 bp, Homo sapiens
accagcctagatctg

SEQ ID NO: 1409895 - DNA, 15 bp, Homo sapiens
gaccagcctagatct

SEQ ID NO: 1409896 - DNA, 15 bp, Homo sapiens
tgaccagcctagatc

SEQ ID NO: 1409897 - DNA, 15 bp, Homo sapiens
ctgaccagcctagat

SEQ ID NO: 1409898 - DNA, 15 bp, Homo sapiens
actgaccagcctaga

SEQ ID NO: 1409899 - DNA, 15 bp, Homo sapiens
gactgaccagcctag

SEQ ID NO: 1409900 - DNA, 15 bp, Homo sapiens
cgactgaccagccta

SEQ ID NO: 1409901 - DNA, 15 bp, Homo sapiens
ccgactgaccagcct

SEQ ID NO: 1409902 - DNA, 15 bp, Homo sapiens
cccgactgaccagcc

SEQ ID NO: 1409903 - DNA, 15 bp, Homo sapiens
ccccgactgaccagc

SEQ ID NO: 1409904 - DNA, 15 bp, Homo sapiens
gccccgactgaccag

SEQ ID NO: 1409905 - DNA, 15 bp, Homo sapiens
ggccccgactgacca

SEQ ID NO: 1409906 - DNA, 15 bp, Homo sapiens
tggccccgactgacc

SEQ ID NO: 1409907 - DNA, 15 bp, Homo sapiens
gtggccccgactgac

SEQ ID NO: 1409908 - DNA, 15 bp, Homo sapiens
agtggccccgactga

SEQ ID NO: 1409909 - DNA, 15 bp, Homo sapiens
aagtggccccgactg

SEQ ID NO: 1409910 - DNA, 15 bp, Homo sapiens
caagtggccccgact

SEQ ID NO: 1409911 - DNA, 15 bp, Homo sapiens
acaagtggccccgac

SEQ ID NO: 1409912 - DNA, 15 bp, Homo sapiens
aacaagtggccccga

SEQ ID NO: 1409913 - DNA, 15 bp, Homo sapiens
taacaagtggccccg

SEQ ID NO: 1409914 - DNA, 15 bp, Homo sapiens
gtaacaagtggcccc

SEQ ID NO: 1409915 - DNA, 15 bp, Homo sapiens
cgtaacaagtggccc

SEQ ID NO: 1409916 - DNA, 15 bp, Homo sapiens
ccgtaacaagtggcc

SEQ ID NO: 1409917 - DNA, 15 bp, Homo sapiens
tccgtaacaagtggc

SEQ ID NO: 1409918 - DNA, 15 bp, Homo sapiens
atccgtaacaagtgg

SEQ ID NO: 1409919 - DNA, 15 bp, Homo sapiens
aatccgtaacaagtg

SEQ ID NO: 1409920 - DNA, 15 bp, Homo sapiens
caatccgtaacaagt

SEQ ID NO: 1409921 - DNA, 15 bp, Homo sapiens
ccaatccgtaacaag

SEQ ID NO: 1409922 - DNA, 15 bp, Homo sapiens
accaatccgtaacaa

SEQ ID NO: 1409923 - DNA, 15 bp, Homo sapiens
aaccaatccgtaaca

SEQ ID NO: 1409924 - DNA, 15 bp, Homo sapiens
aaaccaatccgtaac

SEQ ID NO: 1409925 - DNA, 15 bp, Homo sapiens
aaaaccaatccgtaa

SEQ ID NO: 1409926 - DNA, 15 bp, Homo sapiens
gaaaaccaatccgta

SEQ ID NO: 1409927 - DNA, 15 bp, Homo sapiens
agaaaaccaatccgt

SEQ ID NO: 1409928 - DNA, 15 bp, Homo sapiens
cagaaaaccaatccg

SEQ ID NO: 1409929 - DNA, 15 bp, Homo sapiens
gcagaaaaccaatcc

SEQ ID NO: 1409930 - DNA, 15 bp, Homo sapiens
agcagaaaaccaatc

SEQ ID NO: 1409931 - DNA, 15 bp, Homo sapiens
tagcagaaaaccaat

SEQ ID NO: 1409932 - DNA, 15 bp, Homo sapiens
ttagcagaaaaccaa

SEQ ID NO: 1409933 - DNA, 15 bp, Homo sapiens
gttagcagaaaacca

SEQ ID NO: 1409934 - DNA, 15 bp, Homo sapiens
tgttagcagaaaacc

SEQ ID NO: 1409935 - DNA, 15 bp, Homo sapiens
gtgttagcagaaaac

SEQ ID NO: 1409936 - DNA, 15 bp, Homo sapiens
agtgttagcagaaaa

SEQ ID NO: 1409937 - DNA, 15 bp, Homo sapiens
tagtgttagcagaaa

SEQ ID NO: 1409938 - DNA, 15 bp, Homo sapiens
ttagtgttagcagaa

SEQ ID NO: 1409939 - DNA, 15 bp, Homo sapiens
gttagtgttagcaga

SEQ ID NO: 1409940 - DNA, 15 bp, Homo sapiens
tgttagtgttagcag

SEQ ID NO: 1409941 - DNA, 15 bp, Homo sapiens
ctgttagtgttagca

SEQ ID NO: 1409942 - DNA, 15 bp, Homo sapiens
tctgttagtgttagc

SEQ ID NO: 1409943 - DNA, 15 bp, Homo sapiens
ctctgttagtgttag

SEQ ID NO: 1409944 - DNA, 15 bp, Homo sapiens
cctctgttagtgtta

SEQ ID NO: 1409945 - DNA, 15 bp, Homo sapiens
gcctctgttagtgtt

SEQ ID NO: 1409946 - DNA, 15 bp, Homo sapiens
agcctctgttagtgt

SEQ ID NO: 1409947 - DNA, 15 bp, Homo sapiens
aagcctctgttagtg

SEQ ID NO: 1409948 - DNA, 15 bp, Homo sapiens
aaagcctctgttagt

SEQ ID NO: 1409949 - DNA, 15 bp, Homo sapiens
gaaagcctctgttag

SEQ ID NO: 1409950 - DNA, 15 bp, Homo sapiens
ggaaagcctctgtta

SEQ ID NO: 1409951 - DNA, 15 bp, Homo sapiens
gggaaagcctctgtt

SEQ ID NO: 1409952 - DNA, 15 bp, Homo sapiens
agggaaagcctctgt

SEQ ID NO: 1409953 - DNA, 15 bp, Homo sapiens
aagggaaagcctctg

SEQ ID NO: 1409954 - DNA, 15 bp, Homo sapiens
aaagggaaagcctct

SEQ ID NO: 1409955 - DNA, 15 bp, Homo sapiens
aaaagggaaagcctc

SEQ ID NO: 1409956 - DNA, 15 bp, Homo sapiens
gaaaagggaaagcct

SEQ ID NO: 1409957 - DNA, 15 bp, Homo sapiens
ggaaaagggaaagcc

SEQ ID NO: 1409958 - DNA, 15 bp, Homo sapiens
tggaaaagggaaagc

SEQ ID NO: 1409959 - DNA, 15 bp, Homo sapiens
ttggaaaagggaaag

SEQ ID NO: 1409960 - DNA, 15 bp, Homo sapiens
attggaaaagggaaa

SEQ ID NO: 1409961 - DNA, 15 bp, Homo sapiens
aattggaaaagggaa

SEQ ID NO: 1409962 - DNA, 15 bp, Homo sapiens
gaattggaaaaggga

SEQ ID NO: 1409963 - DNA, 15 bp, Homo sapiens
agaattggaaaaggg

SEQ ID NO: 1409964 - DNA, 15 bp, Homo sapiens
gagaattggaaaagg

SEQ ID NO: 1409965 - DNA, 15 bp, Homo sapiens
tgagaattggaaaag

SEQ ID NO: 1409966 - DNA, 15 bp, Homo sapiens
ttgagaattggaaaa

SEQ ID NO: 1409967 - DNA, 15 bp, Homo sapiens
attgagaattggaaa

SEQ ID NO: 1409968 - DNA, 15 bp, Homo sapiens
aattgagaattggaa

SEQ ID NO: 1409969 - DNA, 15 bp, Homo sapiens
aaattgagaattgga

SEQ ID NO: 1409970 - DNA, 15 bp, Homo sapiens
gaaattgagaattgg

SEQ ID NO: 1409971 - DNA, 15 bp, Homo sapiens
aagaaattgagaatt

SEQ ID NO: 1409972 - DNA, 15 bp, Homo sapiens
aaagaaattgagaat

SEQ ID NO: 1409973 - DNA, 15 bp, Homo sapiens
caaagaaattgagaa

SEQ ID NO: 1409974 - DNA, 15 bp, Homo sapiens
tcaaagaaattgaga

SEQ ID NO: 1409975 - DNA, 15 bp, Homo sapiens
ttcaaagaaattgag

SEQ ID NO: 1409976 - DNA, 15 bp, Homo sapiens
tttcaaagaaattga

SEQ ID NO: 1409977 - DNA, 15 bp, Homo sapiens
ttttcaaagaaattg

SEQ ID NO: 1409978 - DNA, 15 bp, Homo sapiens
attttcaaagaaatt

SEQ ID NO: 1409979 - DNA, 15 bp, Homo sapiens
cattttcaaagaaat

SEQ ID NO: 1409980 - DNA, 15 bp, Homo sapiens
acattttcaaagaaa

SEQ ID NO: 1409981 - DNA, 15 bp, Homo sapiens
gacattttcaaagaa

SEQ ID NO: 1409982 - DNA, 15 bp, Homo sapiens
tgacattttcaaaga

SEQ ID NO: 1409983 - DNA, 15 bp, Homo sapiens
gtgacattttcaaag

SEQ ID NO: 1409984 - DNA, 15 bp, Homo sapiens
tgtgacattttcaaa

SEQ ID NO: 1409985 - DNA, 15 bp, Homo sapiens
gtgtgacattttcaa

SEQ ID NO: 1409986 - DNA, 15 bp, Homo sapiens
agtgtgacattttca

SEQ ID NO: 1409987 - DNA, 15 bp, Homo sapiens
tagtgtgacattttc

SEQ ID NO: 1409988 - DNA, 15 bp, Homo sapiens
atagtgtgacatttt

SEQ ID NO: 1409989 - DNA, 15 bp, Homo sapiens
gatagtgtgacattt

SEQ ID NO: 1409990 - DNA, 15 bp, Homo sapiens
agatagtgtgacatt

SEQ ID NO: 1409991 - DNA, 15 bp, Homo sapiens
cagatagtgtgacat

SEQ ID NO: 1409992 - DNA, 15 bp, Homo sapiens
ccagatagtgtgaca

SEQ ID NO: 1409993 - DNA, 15 bp, Homo sapiens
gccagatagtgtgac

SEQ ID NO: 1409994 - DNA, 15 bp, Homo sapiens
agccagatagtgtga

SEQ ID NO: 1409995 - DNA, 15 bp, Homo sapiens
cagccagatagtgtg

SEQ ID NO: 1409996 - DNA, 15 bp, Homo sapiens
tcagccagatagtgt

SEQ ID NO: 1409997 - DNA, 15 bp, Homo sapiens
ctcagccagatagtg

SEQ ID NO: 1409998 - DNA, 15 bp, Homo sapiens
actcagccagatagt

SEQ ID NO: 1409999 - DNA, 15 bp, Homo sapiens
tactcagccagatag

SEQ ID NO: 1410000 - DNA, 15 bp, Homo sapiens
ttactcagccagata

SEQ ID NO: 1410001 - DNA, 15 bp, Homo sapiens
tttactcagccagat

SEQ ID NO: 1410002 - DNA, 15 bp, Homo sapiens
atttactcagccaga

SEQ ID NO: 1410003 - DNA, 15 bp, Homo sapiens
tatttactcagccag

SEQ ID NO: 1410004 - DNA, 15 bp, Homo sapiens
ttatttactcagcca

SEQ ID NO: 1410005 - DNA, 15 bp, Homo sapiens
gttatttactcagcc

SEQ ID NO: 1410006 - DNA, 15 bp, Homo sapiens
ggttatttactcagc

SEQ ID NO: 1410007 - DNA, 15 bp, Homo sapiens
gggttatttactcag

SEQ ID NO: 1410008 - DNA, 15 bp, Homo sapiens
agggttatttactca

SEQ ID NO: 1410009 - DNA, 15 bp, Homo sapiens
aagggttatttactc

SEQ ID NO: 1410010 - DNA, 15 bp, Homo sapiens
aaagggttatttact

SEQ ID NO: 1410011 - DNA, 15 bp, Homo sapiens
caaagggttatttac

SEQ ID NO: 1410012 - DNA, 15 bp, Homo sapiens
tcaaagggttattta

SEQ ID NO: 1410013 - DNA, 15 bp, Homo sapiens
ttcaaagggttattt

SEQ ID NO: 1410014 - DNA, 15 bp, Homo sapiens
attcaaagggttatt

SEQ ID NO: 1410015 - DNA, 15 bp, Homo sapiens
tattcaaagggttat

SEQ ID NO: 1410016 - DNA, 15 bp, Homo sapiens
gtattcaaagggtta

SEQ ID NO: 1410017 - DNA, 15 bp, Homo sapiens
agtattcaaagggtt

SEQ ID NO: 1410018 - DNA, 15 bp, Homo sapiens
tagtattcaaagggt

SEQ ID NO: 1410019 - DNA, 15 bp, Homo sapiens
ttagtattcaaaggg

SEQ ID NO: 1410020 - DNA, 15 bp, Homo sapiens
gttagtattcaaagg

SEQ ID NO: 1410021 - DNA, 15 bp, Homo sapiens
tgttagtattcaaag

SEQ ID NO: 1410022 - DNA, 15 bp, Homo sapiens
ttgttagtattcaaa

SEQ ID NO: 1410023 - DNA, 15 bp, Homo sapiens
attgttagtattcaa

SEQ ID NO: 1410024 - DNA, 15 bp, Homo sapiens
gattgttagtattca

SEQ ID NO: 1410025 - DNA, 15 bp, Homo sapiens
ggattgttagtattc

SEQ ID NO: 1410026 - DNA, 15 bp, Homo sapiens
aggattgttagtatt

SEQ ID NO: 1410027 - DNA, 15 bp, Homo sapiens
gaggattgttagtat

SEQ ID NO: 1410028 - DNA, 15 bp, Homo sapiens
tgaggattgttagta

SEQ ID NO: 1410029 - DNA, 15 bp, Homo sapiens
ttgaggattgttagt

SEQ ID NO: 1410030 - DNA, 15 bp, Homo sapiens
cttgaggattgttag

SEQ ID NO: 1410031 - DNA, 15 bp, Homo sapiens
acttgaggattgtta

SEQ ID NO: 1410032 - DNA, 15 bp, Homo sapiens
aacttgaggattgtt

SEQ ID NO: 1410033 - DNA, 15 bp, Homo sapiens
gaacttgaggattgt

SEQ ID NO: 1410034 - DNA, 15 bp, Homo sapiens
tgaacttgaggattg

SEQ ID NO: 1410035 - DNA, 15 bp, Homo sapiens
gtgaacttgaggatt

SEQ ID NO: 1410036 - DNA, 15 bp, Homo sapiens
ggtgaacttgaggat

SEQ ID NO: 1410037 - DNA, 15 bp, Homo sapiens
aggtgaacttgagga

SEQ ID NO: 1410038 - DNA, 15 bp, Homo sapiens
caggtgaacttgagg

SEQ ID NO: 1410039 - DNA, 15 bp, Homo sapiens
ccaggtgaacttgag

SEQ ID NO: 1410040 - DNA, 15 bp, Homo sapiens
gccaggtgaacttga

SEQ ID NO: 1410041 - DNA, 15 bp, Homo sapiens
tgccaggtgaacttg

SEQ ID NO: 1410042 - DNA, 15 bp, Homo sapiens
ttgccaggtgaactt

SEQ ID NO: 1410043 - DNA, 15 bp, Homo sapiens
tttgccaggtgaact

SEQ ID NO: 1410044 - DNA, 15 bp, Homo sapiens
gtttgccaggtgaac

SEQ ID NO: 1410045 - DNA, 15 bp, Homo sapiens
tgtttgccaggtgaa

SEQ ID NO: 1410046 - DNA, 15 bp, Homo sapiens
atgtttgccaggtga

SEQ ID NO: 1410047 - DNA, 15 bp, Homo sapiens
gatgtttgccaggtg

SEQ ID NO: 1410048 - DNA, 15 bp, Homo sapiens
ggatgtttgccaggt

SEQ ID NO: 1410049 - DNA, 15 bp, Homo sapiens
tggatgtttgccagg

SEQ ID NO: 1410050 - DNA, 15 bp, Homo sapiens
ttggatgtttgccag

SEQ ID NO: 1410051 - DNA, 15 bp, Homo sapiens
cttggatgtttgcca

SEQ ID NO: 1410052 - DNA, 15 bp, Homo sapiens
tcttggatgtttgcc

SEQ ID NO: 1410053 - DNA, 15 bp, Homo sapiens
gtcttggatgtttgc

SEQ ID NO: 1410054 - DNA, 15 bp, Homo sapiens
agtcttggatgtttg

SEQ ID NO: 1410055 - DNA, 15 bp, Homo sapiens
cagtcttggatgttt

SEQ ID NO: 1410056 - DNA, 15 bp, Homo sapiens
acagtcttggatgtt

SEQ ID NO: 1410057 - DNA, 15 bp, Homo sapiens
aacagtcttggatgt

SEQ ID NO: 1410058 - DNA, 15 bp, Homo sapiens
aaacagtcttggatg

SEQ ID NO: 1410059 - DNA, 15 bp, Homo sapiens
taaacagtcttggat

SEQ ID NO: 1410060 - DNA, 15 bp, Homo sapiens
ctaaacagtcttgga

SEQ ID NO: 1410061 - DNA, 15 bp, Homo sapiens
tctaaacagtcttgg

SEQ ID NO: 1410062 - DNA, 15 bp, Homo sapiens
ttctaaacagtcttg

SEQ ID NO: 1410063 - DNA, 15 bp, Homo sapiens
cttctaaacagtctt

SEQ ID NO: 1410064 - DNA, 15 bp, Homo sapiens
tcttctaaacagtct

SEQ ID NO: 1410065 - DNA, 15 bp, Homo sapiens
atcttctaaacagtc

SEQ ID NO: 1410066 - DNA, 15 bp, Homo sapiens
aatcttctaaacagt

SEQ ID NO: 1410067 - DNA, 15 bp, Homo sapiens
aaatcttctaaacag

SEQ ID NO: 1410068 - DNA, 15 bp, Homo sapiens
gaaatcttctaaaca

SEQ ID NO: 1410069 - DNA, 15 bp, Homo sapiens
tgaaatcttctaaac

SEQ ID NO: 1410070 - DNA, 15 bp, Homo sapiens
gtgaaatcttctaaa

SEQ ID NO: 1410071 - DNA, 15 bp, Homo sapiens
agtgaaatcttctaa

SEQ ID NO: 1410072 - DNA, 15 bp, Homo sapiens
aagtgaaatcttcta

SEQ ID NO: 1410073 - DNA, 15 bp, Homo sapiens
caagtgaaatcttct

SEQ ID NO: 1410074 - DNA, 15 bp, Homo sapiens
ccaagtgaaatcttc

SEQ ID NO: 1410075 - DNA, 15 bp, Homo sapiens
accaagtgaaatctt

SEQ ID NO: 1410076 - DNA, 15 bp, Homo sapiens
taccaagtgaaatct

SEQ ID NO: 1410077 - DNA, 15 bp, Homo sapiens
ataccaagtgaaatc

SEQ ID NO: 1410078 - DNA, 15 bp, Homo sapiens
cataccaagtgaaat

SEQ ID NO: 1410079 - DNA, 15 bp, Homo sapiens
acataccaagtgaaa

SEQ ID NO: 1410080 - DNA, 15 bp, Homo sapiens
aacataccaagtgaa

SEQ ID NO: 1410081 - DNA, 15 bp, Homo sapiens
aaacataccaagtga

SEQ ID NO: 1410082 - DNA, 15 bp, Homo sapiens
caaacataccaagtg

SEQ ID NO: 1410083 - DNA, 15 bp, Homo sapiens
tcaaacataccaagt

SEQ ID NO: 1410084 - DNA, 15 bp, Homo sapiens
ctcaaacataccaag

SEQ ID NO: 1410085 - DNA, 15 bp, Homo sapiens
tctcaaacataccaa

SEQ ID NO: 1410086 - DNA, 15 bp, Homo sapiens
ttctcaaacatacca

SEQ ID NO: 1410087 - DNA, 15 bp, Homo sapiens
cttctcaaacatacc

SEQ ID NO: 1410088 - DNA, 15 bp, Homo sapiens
gcttctcaaacatac

SEQ ID NO: 1410089 - DNA, 15 bp, Homo sapiens
ggcttctcaaacata

SEQ ID NO: 1410090 - DNA, 15 bp, Homo sapiens
tggcttctcaaacat

SEQ ID NO: 1410091 - DNA, 15 bp, Homo sapiens
gtggcttctcaaaca

SEQ ID NO: 1410092 - DNA, 15 bp, Homo sapiens
tgtggcttctcaaac

SEQ ID NO: 1410093 - DNA, 15 bp, Homo sapiens
atgtggcttctcaaa

SEQ ID NO: 1410094 - DNA, 15 bp, Homo sapiens
catgtggcttctcaa

SEQ ID NO: 1410095 - DNA, 15 bp, Homo sapiens
acatgtggcttctca

SEQ ID NO: 1410096 - DNA, 15 bp, Homo sapiens
gacatgtggcttctc

SEQ ID NO: 1410097 - DNA, 15 bp, Homo sapiens
ggacatgtggcttct

SEQ ID NO: 1410098 - DNA, 15 bp, Homo sapiens
tggacatgtggcttc

SEQ ID NO: 1410099 - DNA, 15 bp, Homo sapiens
ttggacatgtggctt

SEQ ID NO: 1410100 - DNA, 15 bp, Homo sapiens
tttggacatgtggct

SEQ ID NO: 1410101 - DNA, 15 bp, Homo sapiens
atttggacatgtggc

SEQ ID NO: 1410102 - DNA, 15 bp, Homo sapiens
aatttggacatgtgg

SEQ ID NO: 1410103 - DNA, 15 bp, Homo sapiens
taatttggacatgtg

SEQ ID NO: 1410104 - DNA, 15 bp, Homo sapiens
ataatttggacatgt

SEQ ID NO: 1410105 - DNA, 15 bp, Homo sapiens
gataatttggacatg

SEQ ID NO: 1410106 - DNA, 15 bp, Homo sapiens
ggataatttggacat

SEQ ID NO: 1410107 - DNA, 15 bp, Homo sapiens
tggataatttggaca

SEQ ID NO: 1410108 - DNA, 15 bp, Homo sapiens
ttggataatttggac

SEQ ID NO: 1410109 - DNA, 15 bp, Homo sapiens
gttggataatttgga

SEQ ID NO: 1410110 - DNA, 15 bp, Homo sapiens
cgttggataatttgg

SEQ ID NO: 1410111 - DNA, 15 bp, Homo sapiens
tcgttggataatttg

SEQ ID NO: 1410112 - DNA, 15 bp, Homo sapiens
atcgttggataattt

SEQ ID NO: 1410113 - DNA, 15 bp, Homo sapiens
catcgttggataatt

SEQ ID NO: 1410114 - DNA, 15 bp, Homo sapiens
tcatcgttggataat

SEQ ID NO: 1410115 - DNA, 15 bp, Homo sapiens
ttcatcgttggataa

SEQ ID NO: 1410116 - DNA, 15 bp, Homo sapiens
tttcatcgttggata

SEQ ID NO: 1410117 - DNA, 15 bp, Homo sapiens
ttttcatcgttggat

SEQ ID NO: 1410118 - DNA, 15 bp, Homo sapiens
attttcatcgttgga

SEQ ID NO: 1410119 - DNA, 15 bp, Homo sapiens
tattttcatcgttgg

SEQ ID NO: 1410120 - DNA, 15 bp, Homo sapiens
gtattttcatcgttg

SEQ ID NO: 1410121 - DNA, 15 bp, Homo sapiens
tgtattttcatcgtt

SEQ ID NO: 1410122 - DNA, 15 bp, Homo sapiens
gtgtattttcatcgt

SEQ ID NO: 1410123 - DNA, 15 bp, Homo sapiens
tgtgtattttcatcg

SEQ ID NO: 1410124 - DNA, 15 bp, Homo sapiens
ttgtgtattttcatc

SEQ ID NO: 1410125 - DNA, 15 bp, Homo sapiens
gttgtgtattttcat

SEQ ID NO: 1410126 - DNA, 15 bp, Homo sapiens
agttgtgtattttca

SEQ ID NO: 1410127 - DNA, 15 bp, Homo sapiens
cagttgtgtattttc

SEQ ID NO: 1410128 - DNA, 15 bp, Homo sapiens
acagttgtgtatttt

SEQ ID NO: 1410129 - DNA, 15 bp, Homo sapiens
gacagttgtgtattt

SEQ ID NO: 1410130 - DNA, 15 bp, Homo sapiens
agacagttgtgtatt

SEQ ID NO: 1410131 - DNA, 15 bp, Homo sapiens
gagacagttgtgtat

SEQ ID NO: 1410132 - DNA, 15 bp, Homo sapiens
ggagacagttgtgta

SEQ ID NO: 1410133 - DNA, 15 bp, Homo sapiens
aggagacagttgtgt

SEQ ID NO: 1410134 - DNA, 15 bp, Homo sapiens
gaggagacagttgtg

SEQ ID NO: 1410135 - DNA, 15 bp, Homo sapiens
agaggagacagttgt

SEQ ID NO: 1410136 - DNA, 15 bp, Homo sapiens
gagaggagacagttg

SEQ ID NO: 1410137 - DNA, 15 bp, Homo sapiens
agagaggagacagtt

SEQ ID NO: 1410138 - DNA, 15 bp, Homo sapiens
aagagaggagacagt

SEQ ID NO: 1410139 - DNA, 15 bp, Homo sapiens
taagagaggagacag

SEQ ID NO: 1410140 - DNA, 15 bp, Homo sapiens
ttaagagaggagaca

SEQ ID NO: 1410141 - DNA, 15 bp, Homo sapiens
cttaagagaggagac

SEQ ID NO: 1410142 - DNA, 15 bp, Homo sapiens
tcttaagagaggaga

SEQ ID NO: 1410143 - DNA, 15 bp, Homo sapiens
ttcttaagagaggag

SEQ ID NO: 1410144 - DNA, 15 bp, Homo sapiens
cttcttaagagagga

SEQ ID NO: 1410145 - DNA, 15 bp, Homo sapiens
ccttcttaagagagg

SEQ ID NO: 1410146 - DNA, 15 bp, Homo sapiens
tccttcttaagagag

SEQ ID NO: 1410147 - DNA, 15 bp, Homo sapiens
ttccttcttaagaga

SEQ ID NO: 1410148 - DNA, 15 bp, Homo sapiens
cttccttcttaagag

SEQ ID NO: 1410149 - DNA, 15 bp, Homo sapiens
acttccttcttaaga

SEQ ID NO: 1410150 - DNA, 15 bp, Homo sapiens
gacttccttcttaag

SEQ ID NO: 1410151 - DNA, 15 bp, Homo sapiens
agacttccttcttaa

SEQ ID NO: 1410152 - DNA, 15 bp, Homo sapiens
aagacttccttctta

SEQ ID NO: 1410153 - DNA, 15 bp, Homo sapiens
aaagacttccttctt

SEQ ID NO: 1410154 - DNA, 15 bp, Homo sapiens
aaaagacttccttct

SEQ ID NO: 1410155 - DNA, 15 bp, Homo sapiens
taaaagacttccttc

SEQ ID NO: 1410156 - DNA, 15 bp, Homo sapiens
ttaaaagacttcctt

SEQ ID NO: 1410157 - DNA, 15 bp, Homo sapiens
attaaaagacttcct

SEQ ID NO: 1410158 - DNA, 15 bp, Homo sapiens
tattaaaagacttcc

SEQ ID NO: 1410159 - DNA, 15 bp, Homo sapiens
ctattaaaagacttc

SEQ ID NO: 1410160 - DNA, 15 bp, Homo sapiens
actattaaaagactt

SEQ ID NO: 1410161 - DNA, 15 bp, Homo sapiens
aactattaaaagact

SEQ ID NO: 1410162 - DNA, 15 bp, Homo sapiens
caactattaaaagac

SEQ ID NO: 1410163 - DNA, 15 bp, Homo sapiens
tcaactattaaaaga

SEQ ID NO: 1410164 - DNA, 15 bp, Homo sapiens
ctcaactattaaaag

SEQ ID NO: 1410165 - DNA, 15 bp, Homo sapiens
actcaactattaaaa

SEQ ID NO: 1410166 - DNA, 15 bp, Homo sapiens
tactcaactattaaa

SEQ ID NO: 1410167 - DNA, 15 bp, Homo sapiens
ctactcaactattaa

SEQ ID NO: 1410168 - DNA, 15 bp, Homo sapiens
gctactcaactatta

SEQ ID NO: 1410169 - DNA, 15 bp, Homo sapiens
ggctactcaactatt

SEQ ID NO: 1410170 - DNA, 15 bp, Homo sapiens
aggctactcaactat

SEQ ID NO: 1410171 - DNA, 15 bp, Homo sapiens
gaggctactcaacta

SEQ ID NO: 1410172 - DNA, 15 bp, Homo sapiens
tgaggctactcaact

SEQ ID NO: 1410173 - DNA, 15 bp, Homo sapiens
ttgaggctactcaac

SEQ ID NO: 1410174 - DNA, 15 bp, Homo sapiens
tttgaggctactcaa

SEQ ID NO: 1410175 - DNA, 15 bp, Homo sapiens
ttttgaggctactca

SEQ ID NO: 1410176 - DNA, 15 bp, Homo sapiens
tttttgaggctactc

SEQ ID NO: 1410177 - DNA, 15 bp, Homo sapiens
gtttttgaggctact

SEQ ID NO: 1410178 - DNA, 15 bp, Homo sapiens
agtttttgaggctac

SEQ ID NO: 1410179 - DNA, 15 bp, Homo sapiens
gagtttttgaggcta

SEQ ID NO: 1410180 - DNA, 15 bp, Homo sapiens
ggagtttttgaggct

SEQ ID NO: 1410181 - DNA, 15 bp, Homo sapiens
aggagtttttgaggc

SEQ ID NO: 1410182 - DNA, 15 bp, Homo sapiens
caggagtttttgagg

SEQ ID NO: 1410183 - DNA, 15 bp, Homo sapiens
ccaggagtttttgag

SEQ ID NO: 1410184 - DNA, 15 bp, Homo sapiens
gccaggagtttttga

SEQ ID NO: 1410185 - DNA, 15 bp, Homo sapiens
tgccaggagtttttg

SEQ ID NO: 1410186 - DNA, 15 bp, Homo sapiens
atgccaggagttttt

SEQ ID NO: 1410187 - DNA, 15 bp, Homo sapiens
aatgccaggagtttt

SEQ ID NO: 1410188 - DNA, 15 bp, Homo sapiens
taatgccaggagttt

SEQ ID NO: 1410189 - DNA, 15 bp, Homo sapiens
ttaatgccaggagtt

SEQ ID NO: 1410190 - DNA, 15 bp, Homo sapiens
gttaatgccaggagt

SEQ ID NO: 1410191 - DNA, 15 bp, Homo sapiens
ggttaatgccaggag

SEQ ID NO: 1410192 - DNA, 15 bp, Homo sapiens
tggttaatgccagga

SEQ ID NO: 1410193 - DNA, 15 bp, Homo sapiens
gtggttaatgccagg

SEQ ID NO: 1410194 - DNA, 15 bp, Homo sapiens
ggtggttaatgccag

SEQ ID NO: 1410195 - DNA, 15 bp, Homo sapiens
tggtggttaatgcca

SEQ ID NO: 1410196 - DNA, 15 bp, Homo sapiens
ttggtggttaatgcc

SEQ ID NO: 1410197 - DNA, 15 bp, Homo sapiens
tttggtggttaatgc

SEQ ID NO: 1410198 - DNA, 15 bp, Homo sapiens
ttttggtggttaatg

SEQ ID NO: 1410199 - DNA, 15 bp, Homo sapiens
attttggtggttaat

SEQ ID NO: 1410200 - DNA, 15 bp, Homo sapiens
aattttggtggttaa

SEQ ID NO: 1410201 - DNA, 15 bp, Homo sapiens
caattttggtggtta

SEQ ID NO: 1410202 - DNA, 15 bp, Homo sapiens
tcaattttggtggtt

SEQ ID NO: 1410203 - DNA, 15 bp, Homo sapiens
atcaattttggtggt

SEQ ID NO: 1410204 - DNA, 15 bp, Homo sapiens
aatcaattttggtgg

SEQ ID NO: 1410205 - DNA, 15 bp, Homo sapiens
aaatcaattttggtg

SEQ ID NO: 1410206 - DNA, 15 bp, Homo sapiens
caaatcaattttggt

SEQ ID NO: 1410207 - DNA, 15 bp, Homo sapiens
gcaaatcaattttgg

SEQ ID NO: 1410208 - DNA, 15 bp, Homo sapiens
tgcaaatcaattttg

SEQ ID NO: 1410209 - DNA, 15 bp, Homo sapiens
ttgcaaatcaatttt

SEQ ID NO: 1410210 - DNA, 15 bp, Homo sapiens
tttgcaaatcaattt

SEQ ID NO: 1410211 - DNA, 15 bp, Homo sapiens
ttttgcaaatcaatt

SEQ ID NO: 1410212 - DNA, 15 bp, Homo sapiens
tttttgcaaatcaat

SEQ ID NO: 1410213 - DNA, 15 bp, Homo sapiens
atttttgcaaatcaa

SEQ ID NO: 1410214 - DNA, 15 bp, Homo sapiens
gatttttgcaaatca

SEQ ID NO: 1410215 - DNA, 15 bp, Homo sapiens
ggatttttgcaaatc

SEQ ID NO: 1410216 - DNA, 15 bp, Homo sapiens
gggatttttgcaaat

SEQ ID NO: 1410217 - DNA, 15 bp, Homo sapiens
tgggatttttgcaaa

SEQ ID NO: 1410218 - DNA, 15 bp, Homo sapiens
atgggatttttgcaa

SEQ ID NO: 1410219 - DNA, 15 bp, Homo sapiens
catgggatttttgca

SEQ ID NO: 1410220 - DNA, 15 bp, Homo sapiens
ccatgggatttttgc

SEQ ID NO: 1410221 - DNA, 15 bp, Homo sapiens
cccatgggatttttg

SEQ ID NO: 1410222 - DNA, 15 bp, Homo sapiens
ccccatgggattttt

SEQ ID NO: 1410223 - DNA, 15 bp, Homo sapiens
tccccatgggatttt

SEQ ID NO: 1410224 - DNA, 15 bp, Homo sapiens
ttccccatgggattt

SEQ ID NO: 1410225 - DNA, 15 bp, Homo sapiens
gttccccatgggatt

SEQ ID NO: 1410226 - DNA, 15 bp, Homo sapiens
ggttccccatgggat

SEQ ID NO: 1410227 - DNA, 15 bp, Homo sapiens
cggttccccatggga

SEQ ID NO: 1410228 - DNA, 15 bp, Homo sapiens
ccggttccccatggg

SEQ ID NO: 1410229 - DNA, 15 bp, Homo sapiens
tccggttccccatgg

SEQ ID NO: 1410230 - DNA, 15 bp, Homo sapiens
ttccggttccccatg

SEQ ID NO: 1410231 - DNA, 15 bp, Homo sapiens
gttccggttccccat

SEQ ID NO: 1410232 - DNA, 15 bp, Homo sapiens
tgttccggttcccca

SEQ ID NO: 1410233 - DNA, 15 bp, Homo sapiens
ttgttccggttcccc

SEQ ID NO: 1410234 - DNA, 15 bp, Homo sapiens
tttgttccggttccc

SEQ ID NO: 1410235 - DNA, 15 bp, Homo sapiens
ctttgttccggttcc

SEQ ID NO: 1410236 - DNA, 15 bp, Homo sapiens
cctttgttccggttc

SEQ ID NO: 1410237 - DNA, 15 bp, Homo sapiens
ccctttgttccggtt

SEQ ID NO: 1410238 - DNA, 15 bp, Homo sapiens
tccctttgttccggt

SEQ ID NO: 1410239 - DNA, 15 bp, Homo sapiens
gtccctttgttccgg

SEQ ID NO: 1410240 - DNA, 15 bp, Homo sapiens
tgtccctttgttccg

SEQ ID NO: 1410241 - DNA, 15 bp, Homo sapiens
gtgtccctttgttcc

SEQ ID NO: 1410242 - DNA, 15 bp, Homo sapiens
agtgtccctttgttc

SEQ ID NO: 1410243 - DNA, 15 bp, Homo sapiens
aagtgtccctttgtt

SEQ ID NO: 1410244 - DNA, 15 bp, Homo sapiens
aaagtgtccctttgt

SEQ ID NO: 1410245 - DNA, 15 bp, Homo sapiens
caaagtgtccctttg

SEQ ID NO: 1410246 - DNA, 15 bp, Homo sapiens
gcaaagtgtcccttt

SEQ ID NO: 1410247 - DNA, 15 bp, Homo sapiens
tgcaaagtgtccctt

SEQ ID NO: 1410248 - DNA, 15 bp, Homo sapiens
ttgcaaagtgtccct

SEQ ID NO: 1410249 - DNA, 15 bp, Homo sapiens
cttgcaaagtgtccc

SEQ ID NO: 1410250 - DNA, 15 bp, Homo sapiens
tcttgcaaagtgtcc

SEQ ID NO: 1410251 - DNA, 15 bp, Homo sapiens
gtcttgcaaagtgtc

SEQ ID NO: 1410252 - DNA, 15 bp, Homo sapiens
ggtcttgcaaagtgt

SEQ ID NO: 1410253 - DNA, 15 bp, Homo sapiens
tggtcttgcaaagtg

SEQ ID NO: 1410254 - DNA, 15 bp, Homo sapiens
ctggtcttgcaaagt

SEQ ID NO: 1410255 - DNA, 15 bp, Homo sapiens
cctggtcttgcaaag

SEQ ID NO: 1410256 - DNA, 15 bp, Homo sapiens
ccctggtcttgcaaa

SEQ ID NO: 1410257 - DNA, 15 bp, Homo sapiens
tccctggtcttgcaa

SEQ ID NO: 1410258 - DNA, 15 bp, Homo sapiens
ttccctggtcttgca

SEQ ID NO: 1410259 - DNA, 15 bp, Homo sapiens
tttccctggtcttgc

SEQ ID NO: 1410260 - DNA, 15 bp, Homo sapiens
ctttccctggtcttg

SEQ ID NO: 1410261 - DNA, 15 bp, Homo sapiens
gctttccctggtctt

SEQ ID NO: 1410262 - DNA, 15 bp, Homo sapiens
ggctttccctggtct

SEQ ID NO: 1410263 - DNA, 15 bp, Homo sapiens
tggctttccctggtc

SEQ ID NO: 1410264 - DNA, 15 bp, Homo sapiens
ctggctttccctggt

SEQ ID NO: 1410265 - DNA, 15 bp, Homo sapiens
gctggctttccctgg

SEQ ID NO: 1410266 - DNA, 15 bp, Homo sapiens
tgctggctttccctg

SEQ ID NO: 1410267 - DNA, 15 bp, Homo sapiens
ttgctggctttccct

SEQ ID NO: 1410268 - DNA, 15 bp, Homo sapiens
cttgctggctttccc

SEQ ID NO: 1410269 - DNA, 15 bp, Homo sapiens
acttgctggctttcc

SEQ ID NO: 1410270 - DNA, 15 bp, Homo sapiens
aacttgctggctttc

SEQ ID NO: 1410271 - DNA, 15 bp, Homo sapiens
taacttgctggcttt

SEQ ID NO: 1410272 - DNA, 15 bp, Homo sapiens
gtaacttgctggctt

SEQ ID NO: 1410273 - DNA, 15 bp, Homo sapiens
agtaacttgctggct

SEQ ID NO: 1410274 - DNA, 15 bp, Homo sapiens
gagtaacttgctggc

SEQ ID NO: 1410275 - DNA, 15 bp, Homo sapiens
agagtaacttgctgg

SEQ ID NO: 1410276 - DNA, 15 bp, Homo sapiens
tagagtaacttgctg

SEQ ID NO: 1410277 - DNA, 15 bp, Homo sapiens
gtagagtaacttgct

SEQ ID NO: 1410278 - DNA, 15 bp, Homo sapiens
ggtagagtaacttgc

SEQ ID NO: 1410279 - DNA, 15 bp, Homo sapiens
aggtagagtaacttg

SEQ ID NO: 1410280 - DNA, 15 bp, Homo sapiens
gaggtagagtaactt

SEQ ID NO: 1410281 - DNA, 15 bp, Homo sapiens
agaggtagagtaact

SEQ ID NO: 1410282 - DNA, 15 bp, Homo sapiens
cagaggtagagtaac

SEQ ID NO: 1410283 - DNA, 15 bp, Homo sapiens
tcagaggtagagtaa

SEQ ID NO: 1410284 - DNA, 15 bp, Homo sapiens
atcagaggtagagta

SEQ ID NO: 1410285 - DNA, 15 bp, Homo sapiens
tatcagaggtagagt

SEQ ID NO: 1410286 - DNA, 15 bp, Homo sapiens
atatcagaggtagag

SEQ ID NO: 1410287 - DNA, 15 bp, Homo sapiens
gatatcagaggtaga

SEQ ID NO: 1410288 - DNA, 15 bp, Homo sapiens
tgatatcagaggtag

SEQ ID NO: 1410289 - DNA, 15 bp, Homo sapiens
gtgatatcagaggta

SEQ ID NO: 1410290 - DNA, 15 bp, Homo sapiens
agtgatatcagaggt

SEQ ID NO: 1410291 - DNA, 15 bp, Homo sapiens
cagtgatatcagagg

SEQ ID NO: 1410292 - DNA, 15 bp, Homo sapiens
acagtgatatcagag

SEQ ID NO: 1410293 - DNA, 15 bp, Homo sapiens
tacagtgatatcaga

SEQ ID NO: 1410294 - DNA, 15 bp, Homo sapiens
ctacagtgatatcag

SEQ ID NO: 1410295 - DNA, 15 bp, Homo sapiens
actacagtgatatca

SEQ ID NO: 1410296 - DNA, 15 bp, Homo sapiens
gactacagtgatatc

SEQ ID NO: 1410297 - DNA, 15 bp, Homo sapiens
ggactacagtgatat

SEQ ID NO: 1410298 - DNA, 15 bp, Homo sapiens
tggactacagtgata

SEQ ID NO: 1410299 - DNA, 15 bp, Homo sapiens
ttggactacagtgat

SEQ ID NO: 1410300 - DNA, 15 bp, Homo sapiens
cttggactacagtga

SEQ ID NO: 1410301 - DNA, 15 bp, Homo sapiens
tcttggactacagtg

SEQ ID NO: 1410302 - DNA, 15 bp, Homo sapiens
atcttggactacagt

SEQ ID NO: 1410303 - DNA, 15 bp, Homo sapiens
gatcttggactacag

SEQ ID NO: 1410304 - DNA, 15 bp, Homo sapiens
ggatcttggactaca

SEQ ID NO: 1410305 - DNA, 15 bp, Homo sapiens
gggatcttggactac

SEQ ID NO: 1410306 - DNA, 15 bp, Homo sapiens
agggatcttggacta

SEQ ID NO: 1410307 - DNA, 15 bp, Homo sapiens
cagggatcttggact

SEQ ID NO: 1410308 - DNA, 15 bp, Homo sapiens
tcagggatcttggac

SEQ ID NO: 1410309 - DNA, 15 bp, Homo sapiens
ttcagggatcttgga

SEQ ID NO: 1410310 - DNA, 15 bp, Homo sapiens
tttcagggatcttgg

SEQ ID NO: 1410311 - DNA, 15 bp, Homo sapiens
ttttcagggatcttg

SEQ ID NO: 1410312 - DNA, 15 bp, Homo sapiens
cttttcagggatctt

SEQ ID NO: 1410313 - DNA, 15 bp, Homo sapiens
gcttttcagggatct

SEQ ID NO: 1410314 - DNA, 15 bp, Homo sapiens
tgcttttcagggatc

SEQ ID NO: 1410315 - DNA, 15 bp, Homo sapiens
ctgcttttcagggat

SEQ ID NO: 1410316 - DNA, 15 bp, Homo sapiens
gctgcttttcaggga

SEQ ID NO: 1410317 - DNA, 15 bp, Homo sapiens
ggctgcttttcaggg

SEQ ID NO: 1410318 - DNA, 15 bp, Homo sapiens
tggctgcttttcagg

SEQ ID NO: 1410319 - DNA, 15 bp, Homo sapiens
gtggctgcttttcag

SEQ ID NO: 1410320 - DNA, 15 bp, Homo sapiens
agtggctgcttttca

SEQ ID NO: 1410321 - DNA, 15 bp, Homo sapiens
cagtggctgcttttc

SEQ ID NO: 1410322 - DNA, 15 bp, Homo sapiens
ccagtggctgctttt

SEQ ID NO: 1410323 - DNA, 15 bp, Homo sapiens
tccagtggctgcttt

SEQ ID NO: 1410324 - DNA, 15 bp, Homo sapiens
ttccagtggctgctt

SEQ ID NO: 1410325 - DNA, 15 bp, Homo sapiens
tttccagtggctgct

SEQ ID NO: 1410326 - DNA, 15 bp, Homo sapiens
ttttccagtggctgc

SEQ ID NO: 1410327 - DNA, 15 bp, Homo sapiens
attttccagtggctg

SEQ ID NO: 1410328 - DNA, 15 bp, Homo sapiens
aattttccagtggct

SEQ ID NO: 1410329 - DNA, 15 bp, Homo sapiens
taattttccagtggc

SEQ ID NO: 1410330 - DNA, 15 bp, Homo sapiens
ttaattttccagtgg

SEQ ID NO: 1410331 - DNA, 15 bp, Homo sapiens
tttaattttccagtg

SEQ ID NO: 1410332 - DNA, 15 bp, Homo sapiens
ttttaattttccagt

SEQ ID NO: 1410333 - DNA, 15 bp, Homo sapiens
cttttaattttccag

SEQ ID NO: 1410334 - DNA, 15 bp, Homo sapiens
gcttttaattttcca

SEQ ID NO: 1410335 - DNA, 15 bp, Homo sapiens
agcttttaattttcc

SEQ ID NO: 1410336 - DNA, 15 bp, Homo sapiens
tagcttttaattttc

SEQ ID NO: 1410337 - DNA, 15 bp, Homo sapiens
atagcttttaatttt

SEQ ID NO: 1410338 - DNA, 15 bp, Homo sapiens
gatagcttttaattt

SEQ ID NO: 1410339 - DNA, 15 bp, Homo sapiens
agatagcttttaatt

SEQ ID NO: 1410340 - DNA, 15 bp, Homo sapiens
aagatagcttttaat

SEQ ID NO: 1410341 - DNA, 15 bp, Homo sapiens
gaagatagcttttaa

SEQ ID NO: 1410342 - DNA, 15 bp, Homo sapiens
tgaagatagctttta

SEQ ID NO: 1410343 - DNA, 15 bp, Homo sapiens
atgaagatagctttt

SEQ ID NO: 1410344 - DNA, 15 bp, Homo sapiens
catgaagatagcttt

SEQ ID NO: 1410345 - DNA, 15 bp, Homo sapiens
acatgaagatagctt

SEQ ID NO: 1410346 - DNA, 15 bp, Homo sapiens
cacatgaagatagct

SEQ ID NO: 1410347 - DNA, 15 bp, Homo sapiens
ccacatgaagatagc

SEQ ID NO: 1410348 - DNA, 15 bp, Homo sapiens
accacatgaagatag

SEQ ID NO: 1410349 - DNA, 15 bp, Homo sapiens
gaccacatgaagata

SEQ ID NO: 1410350 - DNA, 15 bp, Homo sapiens
tgaccacatgaagat

SEQ ID NO: 1410351 - DNA, 15 bp, Homo sapiens
atgaccacatgaaga

SEQ ID NO: 1410352 - DNA, 15 bp, Homo sapiens
aatgaccacatgaag

SEQ ID NO: 1410353 - DNA, 15 bp, Homo sapiens
gaatgaccacatgaa

SEQ ID NO: 1410354 - DNA, 15 bp, Homo sapiens
agaatgaccacatga

SEQ ID NO: 1410355 - DNA, 15 bp, Homo sapiens
aagaatgaccacatg

SEQ ID NO: 1410356 - DNA, 15 bp, Homo sapiens
caagaatgaccacat

SEQ ID NO: 1410357 - DNA, 15 bp, Homo sapiens
gcaagaatgaccaca

SEQ ID NO: 1410358 - DNA, 15 bp, Homo sapiens
ggcaagaatgaccac

SEQ ID NO: 1410359 - DNA, 15 bp, Homo sapiens
tggcaagaatgacca

SEQ ID NO: 1410360 - DNA, 15 bp, Homo sapiens
atggcaagaatgacc

SEQ ID NO: 1410361 - DNA, 15 bp, Homo sapiens
aatggcaagaatgac

SEQ ID NO: 1410362 - DNA, 15 bp, Homo sapiens
aaatggcaagaatga

SEQ ID NO: 1410363 - DNA, 15 bp, Homo sapiens
aaaatggcaagaatg

SEQ ID NO: 1410364 - DNA, 15 bp, Homo sapiens
gaaaatggcaagaat

SEQ ID NO: 1410365 - DNA, 15 bp, Homo sapiens
tgaaaatggcaagaa

SEQ ID NO: 1410366 - DNA, 15 bp, Homo sapiens
atgaaaatggcaaga

SEQ ID NO: 1410367 - DNA, 15 bp, Homo sapiens
aatgaaaatggcaag

SEQ ID NO: 1410368 - DNA, 15 bp, Homo sapiens
aaatgaaaatggcaa

SEQ ID NO: 1410369 - DNA, 15 bp, Homo sapiens
aaaatgaaaatggca

SEQ ID NO: 1410370 - DNA, 15 bp, Homo sapiens
aaaaatgaaaatggc

SEQ ID NO: 1410371 - DNA, 15 bp, Homo sapiens
caaaaatgaaaatgg

SEQ ID NO: 1410372 - DNA, 15 bp, Homo sapiens
acaaaaatgaaaatg

SEQ ID NO: 1410373 - DNA, 15 bp, Homo sapiens
aacaaaaatgaaaat

SEQ ID NO: 1410374 - DNA, 15 bp, Homo sapiens
aaacaaaaatgaaaa

SEQ ID NO: 1410375 - DNA, 15 bp, Homo sapiens
aaaacaaaaatgaaa

SEQ ID NO: 1410376 - DNA, 15 bp, Homo sapiens
taaaacaaaaatgaa

SEQ ID NO: 1410377 - DNA, 15 bp, Homo sapiens
ataaaacaaaaatga

SEQ ID NO: 1410378 - DNA, 15 bp, Homo sapiens
cataaaacaaaaatg

SEQ ID NO: 1410379 - DNA, 15 bp, Homo sapiens
ccataaaacaaaaat

SEQ ID NO: 1410380 - DNA, 15 bp, Homo sapiens
cccataaaacaaaaa

SEQ ID NO: 1410381 - DNA, 15 bp, Homo sapiens
tcccataaaacaaaa

SEQ ID NO: 1410382 - DNA, 15 bp, Homo sapiens
ttcccataaaacaaa

SEQ ID NO: 1410383 - DNA, 15 bp, Homo sapiens
cttcccataaaacaa

SEQ ID NO: 1410384 - DNA, 15 bp, Homo sapiens
gcttcccataaaaca

SEQ ID NO: 1410385 - DNA, 15 bp, Homo sapiens
tgcttcccataaaac

SEQ ID NO: 1410386 - DNA, 15 bp, Homo sapiens
ctgcttcccataaaa

SEQ ID NO: 1410387 - DNA, 15 bp, Homo sapiens
actgcttcccataaa

SEQ ID NO: 1410388 - DNA, 15 bp, Homo sapiens
tactgcttcccataa

SEQ ID NO: 1410389 - DNA, 15 bp, Homo sapiens
ttactgcttcccata

SEQ ID NO: 1410390 - DNA, 15 bp, Homo sapiens
cttactgcttcccat

SEQ ID NO: 1410391 - DNA, 15 bp, Homo sapiens
acttactgcttccca

SEQ ID NO: 1410392 - DNA, 15 bp, Homo sapiens
gacttactgcttccc

SEQ ID NO: 1410393 - DNA, 15 bp, Homo sapiens
tgacttactgcttcc

SEQ ID NO: 1410394 - DNA, 15 bp, Homo sapiens
ttgacttactgcttc

SEQ ID NO: 1410395 - DNA, 15 bp, Homo sapiens
tttgacttactgctt

SEQ ID NO: 1410396 - DNA, 15 bp, Homo sapiens
gtttgacttactgct

SEQ ID NO: 1410397 - DNA, 15 bp, Homo sapiens
ggtttgacttactgc

SEQ ID NO: 1410398 - DNA, 15 bp, Homo sapiens
gggtttgacttactg

SEQ ID NO: 1410399 - DNA, 15 bp, Homo sapiens
tgggtttgacttact

SEQ ID NO: 1410400 - DNA, 15 bp, Homo sapiens
ctgggtttgacttac

SEQ ID NO: 1410401 - DNA, 15 bp, Homo sapiens
gctgggtttgactta

SEQ ID NO: 1410402 - DNA, 15 bp, Homo sapiens
ggctgggtttgactt

SEQ ID NO: 1410403 - DNA, 15 bp, Homo sapiens
gggctgggtttgact

SEQ ID NO: 1410404 - DNA, 15 bp, Homo sapiens
tgggctgggtttgac

SEQ ID NO: 1410405 - DNA, 15 bp, Homo sapiens
ttgggctgggtttga

SEQ ID NO: 1410406 - DNA, 15 bp, Homo sapiens
tttgggctgggtttg

SEQ ID NO: 1410407 - DNA, 15 bp, Homo sapiens
gtttgggctgggttt

SEQ ID NO: 1410408 - DNA, 15 bp, Homo sapiens
ggtttgggctgggtt

SEQ ID NO: 1410409 - DNA, 15 bp, Homo sapiens
gggtttgggctgggt

SEQ ID NO: 1410410 - DNA, 15 bp, Homo sapiens
agggtttgggctggg

SEQ ID NO: 1410411 - DNA, 15 bp, Homo sapiens
aagggtttgggctgg

SEQ ID NO: 1410412 - DNA, 15 bp, Homo sapiens
caagggtttgggctg

SEQ ID NO: 1410413 - DNA, 15 bp, Homo sapiens
gcaagggtttgggct

SEQ ID NO: 1410414 - DNA, 15 bp, Homo sapiens
tgcaagggtttgggc

SEQ ID NO: 1410415 - DNA, 15 bp, Homo sapiens
atgcaagggtttggg

SEQ ID NO: 1410416 - DNA, 15 bp, Homo sapiens
aatgcaagggtttgg

SEQ ID NO: 1410417 - DNA, 15 bp, Homo sapiens
aaatgcaagggtttg

SEQ ID NO: 1410418 - DNA, 15 bp, Homo sapiens
caaatgcaagggttt

SEQ ID NO: 1410419 - DNA, 15 bp, Homo sapiens
gcaaatgcaagggtt

SEQ ID NO: 1410420 - DNA, 15 bp, Homo sapiens
tgcaaatgcaagggt

SEQ ID NO: 1410421 - DNA, 15 bp, Homo sapiens
ctgcaaatgcaaggg

SEQ ID NO: 1410422 - DNA, 15 bp, Homo sapiens
cctgcaaatgcaagg

SEQ ID NO: 1410423 - DNA, 15 bp, Homo sapiens
gcctgcaaatgcaag

SEQ ID NO: 1410424 - DNA, 15 bp, Homo sapiens
tgcctgcaaatgcaa

SEQ ID NO: 1410425 - DNA, 15 bp, Homo sapiens
atgcctgcaaatgca

SEQ ID NO: 1410426 - DNA, 15 bp, Homo sapiens
gatgcctgcaaatgc

SEQ ID NO: 1410427 - DNA, 15 bp, Homo sapiens
tgatgcctgcaaatg

SEQ ID NO: 1410428 - DNA, 15 bp, Homo sapiens
ttgatgcctgcaaat

SEQ ID NO: 1410429 - DNA, 15 bp, Homo sapiens
tttgatgcctgcaaa

SEQ ID NO: 1410430 - DNA, 15 bp, Homo sapiens
ctttgatgcctgcaa

SEQ ID NO: 1410431 - DNA, 15 bp, Homo sapiens
gctttgatgcctgca

SEQ ID NO: 1410432 - DNA, 15 bp, Homo sapiens
tgctttgatgcctgc

SEQ ID NO: 1410433 - DNA, 15 bp, Homo sapiens
ttgctttgatgcctg

SEQ ID NO: 1410434 - DNA, 15 bp, Homo sapiens
cttgctttgatgcct

SEQ ID NO: 1410435 - DNA, 15 bp, Homo sapiens
gcttgctttgatgcc

SEQ ID NO: 1410436 - DNA, 15 bp, Homo sapiens
agcttgctttgatgc

SEQ ID NO: 1410437 - DNA, 15 bp, Homo sapiens
tagcttgctttgatg

SEQ ID NO: 1410438 - DNA, 15 bp, Homo sapiens
ttagcttgctttgat

SEQ ID NO: 1410439 - DNA, 15 bp, Homo sapiens
tttagcttgctttga

SEQ ID NO: 1410440 - DNA, 15 bp, Homo sapiens
ttttagcttgctttg

SEQ ID NO: 1410441 - DNA, 15 bp, Homo sapiens
cttttagcttgcttt

SEQ ID NO: 1410442 - DNA, 15 bp, Homo sapiens
ccttttagcttgctt

SEQ ID NO: 1410443 - DNA, 15 bp, Homo sapiens
tccttttagcttgct

SEQ ID NO: 1410444 - DNA, 15 bp, Homo sapiens
ctccttttagcttgc

SEQ ID NO: 1410445 - DNA, 15 bp, Homo sapiens
cctccttttagcttg

SEQ ID NO: 1410446 - DNA, 15 bp, Homo sapiens
tcctccttttagctt

SEQ ID NO: 1410447 - DNA, 15 bp, Homo sapiens
ctcctccttttagct

SEQ ID NO: 1410448 - DNA, 15 bp, Homo sapiens
tctcctccttttagc

SEQ ID NO: 1410449 - DNA, 15 bp, Homo sapiens
atctcctccttttag

SEQ ID NO: 1410450 - DNA, 15 bp, Homo sapiens
aatctcctcctttta

SEQ ID NO: 1410451 - DNA, 15 bp, Homo sapiens
aaatctcctcctttt

SEQ ID NO: 1410452 - DNA, 15 bp, Homo sapiens
gaaatctcctccttt

SEQ ID NO: 1410453 - DNA, 15 bp, Homo sapiens
agaaatctcctcctt

SEQ ID NO: 1410454 - DNA, 15 bp, Homo sapiens
gagaaatctcctcct

SEQ ID NO: 1410455 - DNA, 15 bp, Homo sapiens
tgagaaatctcctcc

SEQ ID NO: 1410456 - DNA, 15 bp, Homo sapiens
atgagaaatctcctc

SEQ ID NO: 1410457 - DNA, 15 bp, Homo sapiens
aatgagaaatctcct

SEQ ID NO: 1410458 - DNA, 15 bp, Homo sapiens
gaatgagaaatctcc

SEQ ID NO: 1410459 - DNA, 15 bp, Homo sapiens
tgaatgagaaatctc

SEQ ID NO: 1410460 - DNA, 15 bp, Homo sapiens
ctgaatgagaaatct

SEQ ID NO: 1410461 - DNA, 15 bp, Homo sapiens
gctgaatgagaaatc

SEQ ID NO: 1410462 - DNA, 15 bp, Homo sapiens
tgctgaatgagaaat

SEQ ID NO: 1410463 - DNA, 15 bp, Homo sapiens
ttgctgaatgagaaa

SEQ ID NO: 1410464 - DNA, 15 bp, Homo sapiens
cttgctgaatgagaa

SEQ ID NO: 1410465 - DNA, 15 bp, Homo sapiens
ccttgctgaatgaga

SEQ ID NO: 1410466 - DNA, 15 bp, Homo sapiens
cccttgctgaatgag

SEQ ID NO: 1410467 - DNA, 15 bp, Homo sapiens
tcccttgctgaatga

SEQ ID NO: 1410468 - DNA, 15 bp, Homo sapiens
gtcccttgctgaatg

SEQ ID NO: 1410469 - DNA, 15 bp, Homo sapiens
agtcccttgctgaat

SEQ ID NO: 1410470 - DNA, 15 bp, Homo sapiens
cagtcccttgctgaa

SEQ ID NO: 1410471 - DNA, 15 bp, Homo sapiens
gcagtcccttgctga

SEQ ID NO: 1410472 - DNA, 15 bp, Homo sapiens
tgcagtcccttgctg

SEQ ID NO: 1410473 - DNA, 15 bp, Homo sapiens
ctgcagtcccttgct

SEQ ID NO: 1410474 - DNA, 15 bp, Homo sapiens
tctgcagtcccttgc

SEQ ID NO: 1410475 - DNA, 15 bp, Homo sapiens
ctctgcagtcccttg

SEQ ID NO: 1410476 - DNA, 15 bp, Homo sapiens
gctctgcagtccctt

SEQ ID NO: 1410477 - DNA, 15 bp, Homo sapiens
tgctctgcagtccct

SEQ ID NO: 1410478 - DNA, 15 bp, Homo sapiens
ctgctctgcagtccc

SEQ ID NO: 1410479 - DNA, 15 bp, Homo sapiens
gctgctctgcagtcc

SEQ ID NO: 1410480 - DNA, 15 bp, Homo sapiens
ggctgctctgcagtc

SEQ ID NO: 1410481 - DNA, 15 bp, Homo sapiens
aggctgctctgcagt

SEQ ID NO: 1410482 - DNA, 15 bp, Homo sapiens
aaggctgctctgcag

SEQ ID NO: 1410483 - DNA, 15 bp, Homo sapiens
aaaggctgctctgca

SEQ ID NO: 1410484 - DNA, 15 bp, Homo sapiens
taaaggctgctctgc

SEQ ID NO: 1410485 - DNA, 15 bp, Homo sapiens
ataaaggctgctctg

SEQ ID NO: 1410486 - DNA, 15 bp, Homo sapiens
aataaaggctgctct

SEQ ID NO: 1410487 - DNA, 15 bp, Homo sapiens
taataaaggctgctc

SEQ ID NO: 1410488 - DNA, 15 bp, Homo sapiens
ttaataaaggctgct

SEQ ID NO: 1410489 - DNA, 15 bp, Homo sapiens
cttaataaaggctgc

SEQ ID NO: 1410490 - DNA, 15 bp, Homo sapiens
ccttaataaaggctg

SEQ ID NO: 1410491 - DNA, 15 bp, Homo sapiens
tccttaataaaggct

SEQ ID NO: 1410492 - DNA, 15 bp, Homo sapiens
ttccttaataaaggc

SEQ ID NO: 1410493 - DNA, 15 bp, Homo sapiens
cttccttaataaagg

SEQ ID NO: 1410494 - DNA, 15 bp, Homo sapiens
tcttccttaataaag

SEQ ID NO: 1410495 - DNA, 15 bp, Homo sapiens
gtcttccttaataaa

SEQ ID NO: 1410496 - DNA, 15 bp, Homo sapiens
agtcttccttaataa

SEQ ID NO: 1410497 - DNA, 15 bp, Homo sapiens
aagtcttccttaata

SEQ ID NO: 1410498 - DNA, 15 bp, Homo sapiens
taagtcttccttaat

SEQ ID NO: 1410499 - DNA, 15 bp, Homo sapiens
gtaagtcttccttaa

SEQ ID NO: 1410500 - DNA, 15 bp, Homo sapiens
tgtaagtcttcctta

SEQ ID NO: 1410501 - DNA, 15 bp, Homo sapiens
gtgtaagtcttcctt

SEQ ID NO: 1410502 - DNA, 15 bp, Homo sapiens
agtgtaagtcttcct

SEQ ID NO: 1410503 - DNA, 15 bp, Homo sapiens
gagtgtaagtcttcc

SEQ ID NO: 1410504 - DNA, 15 bp, Homo sapiens
ggagtgtaagtcttc

SEQ ID NO: 1410505 - DNA, 15 bp, Homo sapiens
aggagtgtaagtctt

SEQ ID NO: 1410506 - DNA, 15 bp, Homo sapiens
taggagtgtaagtct

SEQ ID NO: 1410507 - DNA, 15 bp, Homo sapiens
ttaggagtgtaagtc

SEQ ID NO: 1410508 - DNA, 15 bp, Homo sapiens
cttaggagtgtaagt

SEQ ID NO: 1410509 - DNA, 15 bp, Homo sapiens
tcttaggagtgtaag

SEQ ID NO: 1410510 - DNA, 15 bp, Homo sapiens
ttcttaggagtgtaa

SEQ ID NO: 1410511 - DNA, 15 bp, Homo sapiens
tttcttaggagtgta

SEQ ID NO: 1410512 - DNA, 15 bp, Homo sapiens
ttttcttaggagtgt

SEQ ID NO: 1410513 - DNA, 15 bp, Homo sapiens
tttttcttaggagtg

SEQ ID NO: 1410514 - DNA, 15 bp, Homo sapiens
gtttttcttaggagt

SEQ ID NO: 1410515 - DNA, 15 bp, Homo sapiens
agtttttcttaggag

SEQ ID NO: 1410516 - DNA, 15 bp, Homo sapiens
tagtttttcttagga

SEQ ID NO: 1410517 - DNA, 15 bp, Homo sapiens
ctagtttttcttagg

SEQ ID NO: 1410518 - DNA, 15 bp, Homo sapiens
actagtttttcttag

SEQ ID NO: 1410519 - DNA, 15 bp, Homo sapiens
tactagtttttctta

SEQ ID NO: 1410520 - DNA, 15 bp, Homo sapiens
ttactagtttttctt

SEQ ID NO: 1410521 - DNA, 15 bp, Homo sapiens
gttactagtttttct

SEQ ID NO: 1410522 - DNA, 15 bp, Homo sapiens
cgttactagtttttc

SEQ ID NO: 1410523 - DNA, 15 bp, Homo sapiens
acgttactagttttt

SEQ ID NO: 1410524 - DNA, 15 bp, Homo sapiens
aacgttactagtttt

SEQ ID NO: 1410525 - DNA, 15 bp, Homo sapiens
aaacgttactagttt

SEQ ID NO: 1410526 - DNA, 15 bp, Homo sapiens
aaaacgttactagtt

SEQ ID NO: 1410527 - DNA, 15 bp, Homo sapiens
caaaacgttactagt

SEQ ID NO: 1410528 - DNA, 15 bp, Homo sapiens
gcaaaacgttactag

SEQ ID NO: 1410529 - DNA, 15 bp, Homo sapiens
agcaaaacgttacta

SEQ ID NO: 1410530 - DNA, 15 bp, Homo sapiens
cagcaaaacgttact

SEQ ID NO: 1410531 - DNA, 15 bp, Homo sapiens
gcagcaaaacgttac

SEQ ID NO: 1410532 - DNA, 15 bp, Homo sapiens
agcagcaaaacgtta

SEQ ID NO: 1410533 - DNA, 15 bp, Homo sapiens
cagcagcaaaacgtt

SEQ ID NO: 1410534 - DNA, 15 bp, Homo sapiens
gcagcagcaaaacgt

SEQ ID NO: 1410535 - DNA, 15 bp, Homo sapiens
agcagcagcaaaacg

SEQ ID NO: 1410536 - DNA, 15 bp, Homo sapiens
cagcagcagcaaaac

SEQ ID NO: 1410537 - DNA, 15 bp, Homo sapiens
tcagcagcagcaaaa

SEQ ID NO: 1410538 - DNA, 15 bp, Homo sapiens
atcagcagcagcaaa

SEQ ID NO: 1410539 - DNA, 15 bp, Homo sapiens
catcagcagcagcaa

SEQ ID NO: 1410540 - DNA, 15 bp, Homo sapiens
tcatcagcagcagca

SEQ ID NO: 1410541 - DNA, 15 bp, Homo sapiens
gtcatcagcagcagc

SEQ ID NO: 1410542 - DNA, 15 bp, Homo sapiens
agtcatcagcagcag

SEQ ID NO: 1410543 - DNA, 15 bp, Homo sapiens
aagtcatcagcagca

SEQ ID NO: 1410544 - DNA, 15 bp, Homo sapiens
caagtcatcagcagc

SEQ ID NO: 1410545 - DNA, 15 bp, Homo sapiens
ccaagtcatcagcag

SEQ ID NO: 1410546 - DNA, 15 bp, Homo sapiens
tccaagtcatcagca

SEQ ID NO: 1410547 - DNA, 15 bp, Homo sapiens
atccaagtcatcagc

SEQ ID NO: 1410548 - DNA, 15 bp, Homo sapiens
aatccaagtcatcag

SEQ ID NO: 1410549 - DNA, 15 bp, Homo sapiens
caatccaagtcatca

SEQ ID NO: 1410550 - DNA, 15 bp, Homo sapiens
acaatccaagtcatc

SEQ ID NO: 1410551 - DNA, 15 bp, Homo sapiens
cacaatccaagtcat

SEQ ID NO: 1410552 - DNA, 15 bp, Homo sapiens
ccacaatccaagtca

SEQ ID NO: 1410553 - DNA, 15 bp, Homo sapiens
tccacaatccaagtc

SEQ ID NO: 1410554 - DNA, 15 bp, Homo sapiens
ctccacaatccaagt

SEQ ID NO: 1410555 - DNA, 15 bp, Homo sapiens
cctccacaatccaag

SEQ ID NO: 1410556 - DNA, 15 bp, Homo sapiens
gcctccacaatccaa

SEQ ID NO: 1410557 - DNA, 15 bp, Homo sapiens
tgcctccacaatcca

SEQ ID NO: 1410558 - DNA, 15 bp, Homo sapiens
ttgcctccacaatcc

SEQ ID NO: 1410559 - DNA, 15 bp, Homo sapiens
gttgcctccacaatc

SEQ ID NO: 1410560 - DNA, 15 bp, Homo sapiens
agttgcctccacaat

SEQ ID NO: 1410561 - DNA, 15 bp, Homo sapiens
cagttgcctccacaa

SEQ ID NO: 1410562 - DNA, 15 bp, Homo sapiens
ccagttgcctccaca

SEQ ID NO: 1410563 - DNA, 15 bp, Homo sapiens
gccagttgcctccac

SEQ ID NO: 1410564 - DNA, 15 bp, Homo sapiens
ggccagttgcctcca

SEQ ID NO: 1410565 - DNA, 15 bp, Homo sapiens
gggccagttgcctcc

SEQ ID NO: 1410566 - DNA, 15 bp, Homo sapiens
agggccagttgcctc

SEQ ID NO: 1410567 - DNA, 15 bp, Homo sapiens
aagggccagttgcct

SEQ ID NO: 1410568 - DNA, 15 bp, Homo sapiens
gaagggccagttgcc

SEQ ID NO: 1410569 - DNA, 15 bp, Homo sapiens
tgaagggccagttgc

SEQ ID NO: 1410570 - DNA, 15 bp, Homo sapiens
ttgaagggccagttg

SEQ ID NO: 1410571 - DNA, 15 bp, Homo sapiens
cttgaagggccagtt

SEQ ID NO: 1410572 - DNA, 15 bp, Homo sapiens
acttgaagggccagt

SEQ ID NO: 1410573 - DNA, 15 bp, Homo sapiens
gacttgaagggccag

SEQ ID NO: 1410574 - DNA, 15 bp, Homo sapiens
agacttgaagggcca

SEQ ID NO: 1410575 - DNA, 15 bp, Homo sapiens
tagacttgaagggcc

SEQ ID NO: 1410576 - DNA, 15 bp, Homo sapiens
atagacttgaagggc

SEQ ID NO: 1410577 - DNA, 15 bp, Homo sapiens
aatagacttgaaggg

SEQ ID NO: 1410578 - DNA, 15 bp, Homo sapiens
aaatagacttgaagg

SEQ ID NO: 1410579 - DNA, 15 bp, Homo sapiens
gaaatagacttgaag

SEQ ID NO: 1410580 - DNA, 15 bp, Homo sapiens
ggaaatagacttgaa

SEQ ID NO: 1410581 - DNA, 15 bp, Homo sapiens
gggaaatagacttga

SEQ ID NO: 1410582 - DNA, 15 bp, Homo sapiens
tgggaaatagacttg

SEQ ID NO: 1410583 - DNA, 15 bp, Homo sapiens
gtgggaaatagactt

SEQ ID NO: 1410584 - DNA, 15 bp, Homo sapiens
agtgggaaatagact

SEQ ID NO: 1410585 - DNA, 15 bp, Homo sapiens
cagtgggaaatagac

SEQ ID NO: 1410586 - DNA, 15 bp, Homo sapiens
acagtgggaaataga

SEQ ID NO: 1410587 - DNA, 15 bp, Homo sapiens
gacagtgggaaatag

SEQ ID NO: 1410588 - DNA, 15 bp, Homo sapiens
tgacagtgggaaata

SEQ ID NO: 1410589 - DNA, 15 bp, Homo sapiens
gtgacagtgggaaat

SEQ ID NO: 1410590 - DNA, 15 bp, Homo sapiens
agtgacagtgggaaa

SEQ ID NO: 1410591 - DNA, 15 bp, Homo sapiens
aagtgacagtgggaa

SEQ ID NO: 1410592 - DNA, 15 bp, Homo sapiens
aaagtgacagtggga

SEQ ID NO: 1410593 - DNA, 15 bp, Homo sapiens
taaagtgacagtggg

SEQ ID NO: 1410594 - DNA, 15 bp, Homo sapiens
ataaagtgacagtgg

SEQ ID NO: 1410595 - DNA, 15 bp, Homo sapiens
tataaagtgacagtg

SEQ ID NO: 1410596 - DNA, 15 bp, Homo sapiens
gtataaagtgacagt

SEQ ID NO: 1410597 - DNA, 15 bp, Homo sapiens
ggtataaagtgacag

SEQ ID NO: 1410598 - DNA, 15 bp, Homo sapiens
aggtataaagtgaca

SEQ ID NO: 1410599 - DNA, 15 bp, Homo sapiens
gaggtataaagtgac

SEQ ID NO: 1410600 - DNA, 15 bp, Homo sapiens
tgaggtataaagtga

SEQ ID NO: 1410601 - DNA, 15 bp, Homo sapiens
ctgaggtataaagtg

SEQ ID NO: 1410602 - DNA, 15 bp, Homo sapiens
gctgaggtataaagt

SEQ ID NO: 1410603 - DNA, 15 bp, Homo sapiens
ggctgaggtataaag

SEQ ID NO: 1410604 - DNA, 15 bp, Homo sapiens
tggctgaggtataaa

SEQ ID NO: 1410605 - DNA, 15 bp, Homo sapiens
atggctgaggtataa

SEQ ID NO: 1410606 - DNA, 15 bp, Homo sapiens
aatggctgaggtata

SEQ ID NO: 1410607 - DNA, 15 bp, Homo sapiens
gaatggctgaggtat

SEQ ID NO: 1410608 - DNA, 15 bp, Homo sapiens
ggaatggctgaggta

SEQ ID NO: 1410609 - DNA, 15 bp, Homo sapiens
tggaatggctgaggt

SEQ ID NO: 1410610 - DNA, 15 bp, Homo sapiens
ctggaatggctgagg

SEQ ID NO: 1410611 - DNA, 15 bp, Homo sapiens
actggaatggctgag

SEQ ID NO: 1410612 - DNA, 15 bp, Homo sapiens
gactggaatggctga

SEQ ID NO: 1410613 - DNA, 15 bp, Homo sapiens
tgactggaatggctg

SEQ ID NO: 1410614 - DNA, 15 bp, Homo sapiens
ttgactggaatggct

SEQ ID NO: 1410615 - DNA, 15 bp, Homo sapiens
tttgactggaatggc

SEQ ID NO: 1410616 - DNA, 15 bp, Homo sapiens
ctttgactggaatgg

SEQ ID NO: 1410617 - DNA, 15 bp, Homo sapiens
cctttgactggaatg

SEQ ID NO: 1410618 - DNA, 15 bp, Homo sapiens
gcctttgactggaat

SEQ ID NO: 1410619 - DNA, 15 bp, Homo sapiens
ggcctttgactggaa

SEQ ID NO: 1410620 - DNA, 15 bp, Homo sapiens
tggcctttgactgga

SEQ ID NO: 1410621 - DNA, 15 bp, Homo sapiens
atggcctttgactgg

SEQ ID NO: 1410622 - DNA, 15 bp, Homo sapiens
gatggcctttgactg

SEQ ID NO: 1410623 - DNA, 15 bp, Homo sapiens
ggatggcctttgact

SEQ ID NO: 1410624 - DNA, 15 bp, Homo sapiens
gggatggcctttgac

SEQ ID NO: 1410625 - DNA, 15 bp, Homo sapiens
ggggatggcctttga

SEQ ID NO: 1410626 - DNA, 15 bp, Homo sapiens
tggggatggcctttg

SEQ ID NO: 1410627 - DNA, 15 bp, Homo sapiens
ttggggatggccttt

SEQ ID NO: 1410628 - DNA, 15 bp, Homo sapiens
attggggatggcctt

SEQ ID NO: 1410629 - DNA, 15 bp, Homo sapiens
cattggggatggcct

SEQ ID NO: 1410630 - DNA, 15 bp, Homo sapiens
acattggggatggcc

SEQ ID NO: 1410631 - DNA, 15 bp, Homo sapiens
aacattggggatggc

SEQ ID NO: 1410632 - DNA, 15 bp, Homo sapiens
gaacattggggatgg

SEQ ID NO: 1410633 - DNA, 15 bp, Homo sapiens
ggaacattggggatg

SEQ ID NO: 1410634 - DNA, 15 bp, Homo sapiens
tggaacattggggat

SEQ ID NO: 1410635 - DNA, 15 bp, Homo sapiens
ttggaacattgggga

SEQ ID NO: 1410636 - DNA, 15 bp, Homo sapiens
tttggaacattgggg

SEQ ID NO: 1410637 - DNA, 15 bp, Homo sapiens
atttggaacattggg

SEQ ID NO: 1410638 - DNA, 15 bp, Homo sapiens
aatttggaacattgg

SEQ ID NO: 1410639 - DNA, 15 bp, Homo sapiens
aaatttggaacattg

SEQ ID NO: 1410640 - DNA, 15 bp, Homo sapiens
aaaatttggaacatt

SEQ ID NO: 1410641 - DNA, 15 bp, Homo sapiens
gaaaatttggaacat

SEQ ID NO: 1410642 - DNA, 15 bp, Homo sapiens
agaaaatttggaaca

SEQ ID NO: 1410643 - DNA, 15 bp, Homo sapiens
gagaaaatttggaac

SEQ ID NO: 1410644 - DNA, 15 bp, Homo sapiens
tgagaaaatttggaa

SEQ ID NO: 1410645 - DNA, 15 bp, Homo sapiens
gtgagaaaatttgga

SEQ ID NO: 1410646 - DNA, 15 bp, Homo sapiens
tgtgagaaaatttgg

SEQ ID NO: 1410647 - DNA, 15 bp, Homo sapiens
gtgtgagaaaatttg

SEQ ID NO: 1410648 - DNA, 15 bp, Homo sapiens
ggtgtgagaaaattt

SEQ ID NO: 1410649 - DNA, 15 bp, Homo sapiens
aggtgtgagaaaatt

SEQ ID NO: 1410650 - DNA, 15 bp, Homo sapiens
gaggtgtgagaaaat

SEQ ID NO: 1410651 - DNA, 15 bp, Homo sapiens
agaggtgtgagaaaa

SEQ ID NO: 1410652 - DNA, 15 bp, Homo sapiens
cagaggtgtgagaaa

SEQ ID NO: 1410653 - DNA, 15 bp, Homo sapiens
ccagaggtgtgagaa

SEQ ID NO: 1410654 - DNA, 15 bp, Homo sapiens
cccagaggtgtgaga

SEQ ID NO: 1410655 - DNA, 15 bp, Homo sapiens
gcccagaggtgtgag

SEQ ID NO: 1410656 - DNA, 15 bp, Homo sapiens
agcccagaggtgtga

SEQ ID NO: 1410657 - DNA, 15 bp, Homo sapiens
aagcccagaggtgtg

SEQ ID NO: 1410658 - DNA, 15 bp, Homo sapiens
aaagcccagaggtgt

SEQ ID NO: 1410659 - DNA, 15 bp, Homo sapiens
aaaagcccagaggtg

SEQ ID NO: 1410660 - DNA, 15 bp, Homo sapiens
caaaagcccagaggt

SEQ ID NO: 1410661 - DNA, 15 bp, Homo sapiens
gcaaaagcccagagg

SEQ ID NO: 1410662 - DNA, 15 bp, Homo sapiens
tgcaaaagcccagag

SEQ ID NO: 1410663 - DNA, 15 bp, Homo sapiens
gtgcaaaagcccaga

SEQ ID NO: 1410664 - DNA, 15 bp, Homo sapiens
agtgcaaaagcccag

SEQ ID NO: 1410665 - DNA, 15 bp, Homo sapiens
aagtgcaaaagccca

SEQ ID NO: 1410666 - DNA, 15 bp, Homo sapiens
taagtgcaaaagccc

SEQ ID NO: 1410667 - DNA, 15 bp, Homo sapiens
gtaagtgcaaaagcc

SEQ ID NO: 1410668 - DNA, 15 bp, Homo sapiens
agtaagtgcaaaagc

SEQ ID NO: 1410669 - DNA, 15 bp, Homo sapiens
cagtaagtgcaaaag

SEQ ID NO: 1410670 - DNA, 15 bp, Homo sapiens
acagtaagtgcaaaa

SEQ ID NO: 1410671 - DNA, 15 bp, Homo sapiens
aacagtaagtgcaaa

SEQ ID NO: 1410672 - DNA, 15 bp, Homo sapiens
aaacagtaagtgcaa

SEQ ID NO: 1410673 - DNA, 15 bp, Homo sapiens
gaaacagtaagtgca

SEQ ID NO: 1410674 - DNA, 15 bp, Homo sapiens
ggaaacagtaagtgc

SEQ ID NO: 1410675 - DNA, 15 bp, Homo sapiens
aggaaacagtaagtg

SEQ ID NO: 1410676 - DNA, 15 bp, Homo sapiens
gaggaaacagtaagt

SEQ ID NO: 1410677 - DNA, 15 bp, Homo sapiens
agaggaaacagtaag

SEQ ID NO: 1410678 - DNA, 15 bp, Homo sapiens
cagaggaaacagtaa

SEQ ID NO: 1410679 - DNA, 15 bp, Homo sapiens
acagaggaaacagta

SEQ ID NO: 1410680 - DNA, 15 bp, Homo sapiens
aacagaggaaacagt

SEQ ID NO: 1410681 - DNA, 15 bp, Homo sapiens
aaacagaggaaacag

SEQ ID NO: 1410682 - DNA, 15 bp, Homo sapiens
gaaacagaggaaaca

SEQ ID NO: 1410683 - DNA, 15 bp, Homo sapiens
tgaaacagaggaaac

SEQ ID NO: 1410684 - DNA, 15 bp, Homo sapiens
ttgaaacagaggaaa

SEQ ID NO: 1410685 - DNA, 15 bp, Homo sapiens
gttgaaacagaggaa

SEQ ID NO: 1410686 - DNA, 15 bp, Homo sapiens
ggttgaaacagagga

SEQ ID NO: 1410687 - DNA, 15 bp, Homo sapiens
aggttgaaacagagg

SEQ ID NO: 1410688 - DNA, 15 bp, Homo sapiens
aaggttgaaacagag

SEQ ID NO: 1410689 - DNA, 15 bp, Homo sapiens
gaaggttgaaacaga

SEQ ID NO: 1410690 - DNA, 15 bp, Homo sapiens
agaaggttgaaacag

SEQ ID NO: 1410691 - DNA, 15 bp, Homo sapiens
gagaaggttgaaaca

SEQ ID NO: 1410692 - DNA, 15 bp, Homo sapiens
agagaaggttgaaac

SEQ ID NO: 1410693 - DNA, 15 bp, Homo sapiens
cagagaaggttgaaa

SEQ ID NO: 1410694 - DNA, 15 bp, Homo sapiens
tcagagaaggttgaa

SEQ ID NO: 1410695 - DNA, 15 bp, Homo sapiens
atcagagaaggttga

SEQ ID NO: 1410696 - DNA, 15 bp, Homo sapiens
gatcagagaaggttg

SEQ ID NO: 1410697 - DNA, 15 bp, Homo sapiens
agatcagagaaggtt

SEQ ID NO: 1410698 - DNA, 15 bp, Homo sapiens
gagatcagagaaggt

SEQ ID NO: 1410699 - DNA, 15 bp, Homo sapiens
ggagatcagagaagg

SEQ ID NO: 1410700 - DNA, 15 bp, Homo sapiens
gggagatcagagaag

SEQ ID NO: 1410701 - DNA, 15 bp, Homo sapiens
agggagatcagagaa

SEQ ID NO: 1410702 - DNA, 15 bp, Homo sapiens
aagggagatcagaga

SEQ ID NO: 1410703 - DNA, 15 bp, Homo sapiens
gaagggagatcagag

SEQ ID NO: 1410704 - DNA, 15 bp, Homo sapiens
agaagggagatcaga

SEQ ID NO: 1410705 - DNA, 15 bp, Homo sapiens
gagaagggagatcag

SEQ ID NO: 1410706 - DNA, 15 bp, Homo sapiens
agagaagggagatca

SEQ ID NO: 1410707 - DNA, 15 bp, Homo sapiens
gagagaagggagatc

SEQ ID NO: 1410708 - DNA, 15 bp, Homo sapiens
ggagagaagggagat

SEQ ID NO: 1410709 - DNA, 15 bp, Homo sapiens
tggagagaagggaga

SEQ ID NO: 1410710 - DNA, 15 bp, Homo sapiens
gtggagagaagggag

SEQ ID NO: 1410711 - DNA, 15 bp, Homo sapiens
agtggagagaaggga

SEQ ID NO: 1410712 - DNA, 15 bp, Homo sapiens
aagtggagagaaggg

SEQ ID NO: 1410713 - DNA, 15 bp, Homo sapiens
caagtggagagaagg

SEQ ID NO: 1410714 - DNA, 15 bp, Homo sapiens
ccaagtggagagaag

SEQ ID NO: 1410715 - DNA, 15 bp, Homo sapiens
gccaagtggagagaa

SEQ ID NO: 1410716 - DNA, 15 bp, Homo sapiens
agccaagtggagaga

SEQ ID NO: 1410717 - DNA, 15 bp, Homo sapiens
tagccaagtggagag

SEQ ID NO: 1410718 - DNA, 15 bp, Homo sapiens
ttagccaagtggaga

SEQ ID NO: 1410719 - DNA, 15 bp, Homo sapiens
gttagccaagtggag

SEQ ID NO: 1410720 - DNA, 15 bp, Homo sapiens
agttagccaagtgga

SEQ ID NO: 1410721 - DNA, 15 bp, Homo sapiens
gagttagccaagtgg

SEQ ID NO: 1410722 - DNA, 15 bp, Homo sapiens
tgagttagccaagtg

SEQ ID NO: 1410723 - DNA, 15 bp, Homo sapiens
atgagttagccaagt

SEQ ID NO: 1410724 - DNA, 15 bp, Homo sapiens
tatgagttagccaag

SEQ ID NO: 1410725 - DNA, 15 bp, Homo sapiens
gtatgagttagccaa

SEQ ID NO: 1410726 - DNA, 15 bp, Homo sapiens
agtatgagttagcca

SEQ ID NO: 1410727 - DNA, 15 bp, Homo sapiens
gagtatgagttagcc

SEQ ID NO: 1410728 - DNA, 15 bp, Homo sapiens
tgagtatgagttagc

SEQ ID NO: 1410729 - DNA, 15 bp, Homo sapiens
atgagtatgagttag

SEQ ID NO: 1410730 - DNA, 15 bp, Homo sapiens
gatgagtatgagtta

SEQ ID NO: 1410731 - DNA, 15 bp, Homo sapiens
ggatgagtatgagtt

SEQ ID NO: 1410732 - DNA, 15 bp, Homo sapiens
aggatgagtatgagt

SEQ ID NO: 1410733 - DNA, 15 bp, Homo sapiens
aaggatgagtatgag

SEQ ID NO: 1410734 - DNA, 15 bp, Homo sapiens
aaaggatgagtatga

SEQ ID NO: 1410735 - DNA, 15 bp, Homo sapiens
taaaggatgagtatg

SEQ ID NO: 1410736 - DNA, 15 bp, Homo sapiens
ttaaaggatgagtat

SEQ ID NO: 1410737 - DNA, 15 bp, Homo sapiens
tttaaaggatgagta

SEQ ID NO: 1410738 - DNA, 15 bp, Homo sapiens
ctttaaaggatgagt

SEQ ID NO: 1410739 - DNA, 15 bp, Homo sapiens
actttaaaggatgag

SEQ ID NO: 1410740 - DNA, 15 bp, Homo sapiens
aactttaaaggatga

SEQ ID NO: 1410741 - DNA, 15 bp, Homo sapiens
aaactttaaaggatg

SEQ ID NO: 1410742 - DNA, 15 bp, Homo sapiens
taaactttaaaggat

SEQ ID NO: 1410743 - DNA, 15 bp, Homo sapiens
ctaaactttaaagga

SEQ ID NO: 1410744 - DNA, 15 bp, Homo sapiens
gctaaactttaaagg

SEQ ID NO: 1410745 - DNA, 15 bp, Homo sapiens
agctaaactttaaag

SEQ ID NO: 1410746 - DNA, 15 bp, Homo sapiens
gagctaaactttaaa

SEQ ID NO: 1410747 - DNA, 15 bp, Homo sapiens
tgagctaaactttaa

SEQ ID NO: 1410748 - DNA, 15 bp, Homo sapiens
ttgagctaaacttta

SEQ ID NO: 1410749 - DNA, 15 bp, Homo sapiens
tttgagctaaacttt

SEQ ID NO: 1410750 - DNA, 15 bp, Homo sapiens
gtttgagctaaactt

SEQ ID NO: 1410751 - DNA, 15 bp, Homo sapiens
ggtttgagctaaact

SEQ ID NO: 1410752 - DNA, 15 bp, Homo sapiens
aggtttgagctaaac

SEQ ID NO: 1410753 - DNA, 15 bp, Homo sapiens
gaggtttgagctaaa

SEQ ID NO: 1410754 - DNA, 15 bp, Homo sapiens
tgaggtttgagctaa

SEQ ID NO: 1410755 - DNA, 15 bp, Homo sapiens
gtgaggtttgagcta

SEQ ID NO: 1410756 - DNA, 15 bp, Homo sapiens
ggtgaggtttgagct

SEQ ID NO: 1410757 - DNA, 15 bp, Homo sapiens
aggtgaggtttgagc

SEQ ID NO: 1410758 - DNA, 15 bp, Homo sapiens
caggtgaggtttgag

SEQ ID NO: 1410759 - DNA, 15 bp, Homo sapiens
gcaggtgaggtttga

SEQ ID NO: 1410760 - DNA, 15 bp, Homo sapiens
tgcaggtgaggtttg

SEQ ID NO: 1410761 - DNA, 15 bp, Homo sapiens
gtgcaggtgaggttt

SEQ ID NO: 1410762 - DNA, 15 bp, Homo sapiens
ggtgcaggtgaggtt

SEQ ID NO: 1410763 - DNA, 15 bp, Homo sapiens
tggtgcaggtgaggt

SEQ ID NO: 1410764 - DNA, 15 bp, Homo sapiens
ttggtgcaggtgagg

SEQ ID NO: 1410765 - DNA, 15 bp, Homo sapiens
cttggtgcaggtgag

SEQ ID NO: 1410766 - DNA, 15 bp, Homo sapiens
tcttggtgcaggtga

SEQ ID NO: 1410767 - DNA, 15 bp, Homo sapiens
ctcttggtgcaggtg

SEQ ID NO: 1410768 - DNA, 15 bp, Homo sapiens
cctcttggtgcaggt

SEQ ID NO: 1410769 - DNA, 15 bp, Homo sapiens
acctcttggtgcagg

SEQ ID NO: 1410770 - DNA, 15 bp, Homo sapiens
cacctcttggtgcag

SEQ ID NO: 1410771 - DNA, 15 bp, Homo sapiens
tcacctcttggtgca

SEQ ID NO: 1410772 - DNA, 15 bp, Homo sapiens
atcacctcttggtgc

SEQ ID NO: 1410773 - DNA, 15 bp, Homo sapiens
aatcacctcttggtg

SEQ ID NO: 1410774 - DNA, 15 bp, Homo sapiens
gaatcacctcttggt

SEQ ID NO: 1410775 - DNA, 15 bp, Homo sapiens
ggaatcacctcttgg

SEQ ID NO: 1410776 - DNA, 15 bp, Homo sapiens
aggaatcacctcttg

SEQ ID NO: 1410777 - DNA, 15 bp, Homo sapiens
taggaatcacctctt

SEQ ID NO: 1410778 - DNA, 15 bp, Homo sapiens
ttaggaatcacctct

SEQ ID NO: 1410779 - DNA, 15 bp, Homo sapiens
gttaggaatcacctc

SEQ ID NO: 1410780 - DNA, 15 bp, Homo sapiens
ggttaggaatcacct

SEQ ID NO: 1410781 - DNA, 15 bp, Homo sapiens
aggttaggaatcacc

SEQ ID NO: 1410782 - DNA, 15 bp, Homo sapiens
gaggttaggaatcac

SEQ ID NO: 1410783 - DNA, 15 bp, Homo sapiens
ggaggttaggaatca

SEQ ID NO: 1410784 - DNA, 15 bp, Homo sapiens
aggaggttaggaatc

SEQ ID NO: 1410785 - DNA, 15 bp, Homo sapiens
caggaggttaggaat

SEQ ID NO: 1410786 - DNA, 15 bp, Homo sapiens
gcaaaacaaaacaaa

SEQ ID NO: 1410787 - DNA, 15 bp, Homo sapiens
agcaaaacaaaacaa

SEQ ID NO: 1410788 - DNA, 15 bp, Homo sapiens
aagcaaaacaaaaca

SEQ ID NO: 1410789 - DNA, 15 bp, Homo sapiens
aagaaagcaaaacaa

SEQ ID NO: 1410790 - DNA, 15 bp, Homo sapiens
caagaaagcaaaaca

SEQ ID NO: 1410791 - DNA, 15 bp, Homo sapiens
tcaagaaagcaaaac

SEQ ID NO: 1410792 - DNA, 15 bp, Homo sapiens
ctcaagaaagcaaaa

SEQ ID NO: 1410793 - DNA, 15 bp, Homo sapiens
tctcaagaaagcaaa

SEQ ID NO: 1410794 - DNA, 15 bp, Homo sapiens
atctcaagaaagcaa

SEQ ID NO: 1410795 - DNA, 15 bp, Homo sapiens
catctcaagaaagca

SEQ ID NO: 1410796 - DNA, 15 bp, Homo sapiens
ccatctcaagaaagc

SEQ ID NO: 1410797 - DNA, 15 bp, Homo sapiens
tccatctcaagaaag

SEQ ID NO: 1410798 - DNA, 15 bp, Homo sapiens
ctccatctcaagaaa

SEQ ID NO: 1410799 - DNA, 15 bp, Homo sapiens
actccatctcaagaa

SEQ ID NO: 1410800 - DNA, 15 bp, Homo sapiens
aactccatctcaaga

SEQ ID NO: 1410801 - DNA, 15 bp, Homo sapiens
aaactccatctcaag

SEQ ID NO: 1410802 - DNA, 15 bp, Homo sapiens
gagagcgaaactcca

SEQ ID NO: 1410803 - DNA, 15 bp, Homo sapiens
cgagagcgaaactcc

SEQ ID NO: 1410804 - DNA, 15 bp, Homo sapiens
acgagagcgaaactc

SEQ ID NO: 1410805 - DNA, 15 bp, Homo sapiens
aacgagagcgaaact

SEQ ID NO: 1410806 - DNA, 15 bp, Homo sapiens
caacgagagcgaaac

SEQ ID NO: 1410807 - DNA, 15 bp, Homo sapiens
gcaacgagagcgaaa

SEQ ID NO: 1410808 - DNA, 15 bp, Homo sapiens
ggcaacgagagcgaa

SEQ ID NO: 1410809 - DNA, 15 bp, Homo sapiens
gggcaacgagagcga

SEQ ID NO: 1410810 - DNA, 15 bp, Homo sapiens
tgggcaacgagagcg

SEQ ID NO: 1410811 - DNA, 15 bp, Homo sapiens
ctgggcaacgagagc

SEQ ID NO: 1410812 - DNA, 15 bp, Homo sapiens
cctgggcaacgagag

SEQ ID NO: 1410813 - DNA, 15 bp, Homo sapiens
gcctgggcaacgaga

SEQ ID NO: 1410814 - DNA, 15 bp, Homo sapiens
agcctgggcaacgag

SEQ ID NO: 1410815 - DNA, 15 bp, Homo sapiens
cagcctgggcaacga

SEQ ID NO: 1410816 - DNA, 15 bp, Homo sapiens
gccattgcactccag

SEQ ID NO: 1410817 - DNA, 15 bp, Homo sapiens
cagatcgtgccattg

SEQ ID NO: 1410818 - DNA, 15 bp, Homo sapiens
tcagatcgtgccatt

SEQ ID NO: 1410819 - DNA, 15 bp, Homo sapiens
atcagatcgtgccat

SEQ ID NO: 1410820 - DNA, 15 bp, Homo sapiens
gatcagatcgtgcca

SEQ ID NO: 1410821 - DNA, 15 bp, Homo sapiens
cgatcagatcgtgcc

SEQ ID NO: 1410822 - DNA, 15 bp, Homo sapiens
acgatcagatcgtgc

SEQ ID NO: 1410823 - DNA, 15 bp, Homo sapiens
cacgatcagatcgtg

SEQ ID NO: 1410824 - DNA, 15 bp, Homo sapiens
ccacgatcagatcgt

SEQ ID NO: 1410825 - DNA, 15 bp, Homo sapiens
gccacgatcagatcg

SEQ ID NO: 1410826 - DNA, 15 bp, Homo sapiens
agccacgatcagatc

SEQ ID NO: 1410827 - DNA, 15 bp, Homo sapiens
gagccacgatcagat

SEQ ID NO: 1410828 - DNA, 15 bp, Homo sapiens
tgagccacgatcaga

SEQ ID NO: 1410829 - DNA, 15 bp, Homo sapiens
gtgagccacgatcag

SEQ ID NO: 1410830 - DNA, 15 bp, Homo sapiens
agtgagccacgatca

SEQ ID NO: 1410831 - DNA, 15 bp, Homo sapiens
cagtgagccacgatc

SEQ ID NO: 1410832 - DNA, 15 bp, Homo sapiens
gcagtgagccacgat

SEQ ID NO: 1410833 - DNA, 15 bp, Homo sapiens
tgcagtgagccacga

SEQ ID NO: 1410834 - DNA, 15 bp, Homo sapiens
ttgcagtgagccacg

SEQ ID NO: 1410835 - DNA, 15 bp, Homo sapiens
attgcagtgagccac

SEQ ID NO: 1410836 - DNA, 15 bp, Homo sapiens
aggaggcagagattg

SEQ ID NO: 1410837 - DNA, 15 bp, Homo sapiens
caggaggcagagatt

SEQ ID NO: 1410838 - DNA, 15 bp, Homo sapiens
cgcaggagaatcact

SEQ ID NO: 1410839 - DNA, 15 bp, Homo sapiens
acgcaggagaatcac

SEQ ID NO: 1410840 - DNA, 15 bp, Homo sapiens
gacgcaggagaatca

SEQ ID NO: 1410841 - DNA, 15 bp, Homo sapiens
tgggaggctgacgca

SEQ ID NO: 1410842 - DNA, 15 bp, Homo sapiens
ttgggaggctgacgc

SEQ ID NO: 1410843 - DNA, 15 bp, Homo sapiens
cttgggaggctgacg

SEQ ID NO: 1410844 - DNA, 15 bp, Homo sapiens
acttgggaggctgac

SEQ ID NO: 1410845 - DNA, 15 bp, Homo sapiens
atacttgggaggctg

SEQ ID NO: 1410846 - DNA, 15 bp, Homo sapiens
gatacttgggaggct

SEQ ID NO: 1410847 - DNA, 15 bp, Homo sapiens
agatacttgggaggc

SEQ ID NO: 1410848 - DNA, 15 bp, Homo sapiens
cagatacttgggagg

SEQ ID NO: 1410849 - DNA, 15 bp, Homo sapiens
ccagatacttgggag

SEQ ID NO: 1410850 - DNA, 15 bp, Homo sapiens
cccagatacttggga

SEQ ID NO: 1410851 - DNA, 15 bp, Homo sapiens
tcccagatacttggg

SEQ ID NO: 1410852 - DNA, 15 bp, Homo sapiens
atcccagatacttgg

SEQ ID NO: 1410853 - DNA, 15 bp, Homo sapiens
catcccagatacttg

SEQ ID NO: 1410854 - DNA, 15 bp, Homo sapiens
tcatcccagatactt

SEQ ID NO: 1410855 - DNA, 15 bp, Homo sapiens
gtcatcccagatact

SEQ ID NO: 1410856 - DNA, 15 bp, Homo sapiens
tgtcatcccagatac

SEQ ID NO: 1410857 - DNA, 15 bp, Homo sapiens
ctgtcatcccagata

SEQ ID NO: 1410858 - DNA, 15 bp, Homo sapiens
cctgtcatcccagat

SEQ ID NO: 1410859 - DNA, 15 bp, Homo sapiens
gcctgtcatcccaga

SEQ ID NO: 1410860 - DNA, 15 bp, Homo sapiens
tgcctgtcatcccag

SEQ ID NO: 1410861 - DNA, 15 bp, Homo sapiens
atgcctgtcatccca

SEQ ID NO: 1410862 - DNA, 15 bp, Homo sapiens
catgcctgtcatccc

SEQ ID NO: 1410863 - DNA, 15 bp, Homo sapiens
gcatgcctgtcatcc

SEQ ID NO: 1410864 - DNA, 15 bp, Homo sapiens
cgcatgcctgtcatc

SEQ ID NO: 1410865 - DNA, 15 bp, Homo sapiens
gcgcatgcctgtcat

SEQ ID NO: 1410866 - DNA, 15 bp, Homo sapiens
ggcgcatgcctgtca

SEQ ID NO: 1410867 - DNA, 15 bp, Homo sapiens
tggcgcatgcctgtc

SEQ ID NO: 1410868 - DNA, 15 bp, Homo sapiens
agtggcgcatgcctg

SEQ ID NO: 1410869 - DNA, 15 bp, Homo sapiens
tagtggcgcatgcct

SEQ ID NO: 1410870 - DNA, 15 bp, Homo sapiens
atagtggcgcatgcc

SEQ ID NO: 1410871 - DNA, 15 bp, Homo sapiens
catagtggcgcatgc

SEQ ID NO: 1410872 - DNA, 15 bp, Homo sapiens
ccatagtggcgcatg

SEQ ID NO: 1410873 - DNA, 15 bp, Homo sapiens
gccatagtggcgcat

SEQ ID NO: 1410874 - DNA, 15 bp, Homo sapiens
ggccatagtggcgca

SEQ ID NO: 1410875 - DNA, 15 bp, Homo sapiens
tggccatagtggcgc

SEQ ID NO: 1410876 - DNA, 15 bp, Homo sapiens
ctggccatagtggcg

SEQ ID NO: 1410877 - DNA, 15 bp, Homo sapiens
gctggccatagtggc

SEQ ID NO: 1410878 - DNA, 15 bp, Homo sapiens
agctggccatagtgg

SEQ ID NO: 1410879 - DNA, 15 bp, Homo sapiens
tagctggccatagtg

SEQ ID NO: 1410880 - DNA, 15 bp, Homo sapiens
ttagctggccatagt

SEQ ID NO: 1410881 - DNA, 15 bp, Homo sapiens
attagctggccatag

SEQ ID NO: 1410882 - DNA, 15 bp, Homo sapiens
aattagctggccata

SEQ ID NO: 1410883 - DNA, 15 bp, Homo sapiens
aaattagctggccat

SEQ ID NO: 1410884 - DNA, 15 bp, Homo sapiens
aaaattagctggcca

SEQ ID NO: 1410885 - DNA, 15 bp, Homo sapiens
caaaattagctggcc

SEQ ID NO: 1410886 - DNA, 15 bp, Homo sapiens
acaaaattagctggc

SEQ ID NO: 1410887 - DNA, 15 bp, Homo sapiens
tacaaaattagctgg

SEQ ID NO: 1410888 - DNA, 15 bp, Homo sapiens
ctacaaaattagctg

SEQ ID NO: 1410889 - DNA, 15 bp, Homo sapiens
actacaaaattagct

SEQ ID NO: 1410890 - DNA, 15 bp, Homo sapiens
aactacaaaattagc

SEQ ID NO: 1410891 - DNA, 15 bp, Homo sapiens
aaactacaaaattag

SEQ ID NO: 1410892 - DNA, 15 bp, Homo sapiens
aaaactacaaaatta

SEQ ID NO: 1410893 - DNA, 15 bp, Homo sapiens
taaaactacaaaatt

SEQ ID NO: 1410894 - DNA, 15 bp, Homo sapiens
ctaaaactacaaaat

SEQ ID NO: 1410895 - DNA, 15 bp, Homo sapiens
atctctactaaaact

SEQ ID NO: 1410896 - DNA, 15 bp, Homo sapiens
acccatctctactaa

SEQ ID NO: 1410897 - DNA, 15 bp, Homo sapiens
aacccatctctacta

SEQ ID NO: 1410898 - DNA, 15 bp, Homo sapiens
aaacccatctctact

SEQ ID NO: 1410899 - DNA, 15 bp, Homo sapiens
gaaacccatctctac

SEQ ID NO: 1410900 - DNA, 15 bp, Homo sapiens
tgaaacccatctcta

SEQ ID NO: 1410901 - DNA, 15 bp, Homo sapiens
gtgaaacccatctct

SEQ ID NO: 1410902 - DNA, 15 bp, Homo sapiens
ggtgaaacccatctc

SEQ ID NO: 1410903 - DNA, 15 bp, Homo sapiens
tggtgaaacccatct

SEQ ID NO: 1410904 - DNA, 15 bp, Homo sapiens
atggtgaaacccatc

SEQ ID NO: 1410905 - DNA, 15 bp, Homo sapiens
catggtgaaacccat

SEQ ID NO: 1410906 - DNA, 15 bp, Homo sapiens
acatggtgaaaccca

SEQ ID NO: 1410907 - DNA, 15 bp, Homo sapiens
taccaacatggtgaa

SEQ ID NO: 1410908 - DNA, 15 bp, Homo sapiens
ttaccaacatggtga

SEQ ID NO: 1410909 - DNA, 15 bp, Homo sapiens
cttaccaacatggtg

SEQ ID NO: 1410910 - DNA, 15 bp, Homo sapiens
ccttaccaacatggt

SEQ ID NO: 1410911 - DNA, 15 bp, Homo sapiens
gccttaccaacatgg

SEQ ID NO: 1410912 - DNA, 15 bp, Homo sapiens
agccttaccaacatg

SEQ ID NO: 1410913 - DNA, 15 bp, Homo sapiens
cagccttaccaacat

SEQ ID NO: 1410914 - DNA, 15 bp, Homo sapiens
ccagccttaccaaca

SEQ ID NO: 1410915 - DNA, 15 bp, Homo sapiens
accagccttaccaac

SEQ ID NO: 1410916 - DNA, 15 bp, Homo sapiens
gaccagccttaccaa

SEQ ID NO: 1410917 - DNA, 15 bp, Homo sapiens
agaccagccttacca

SEQ ID NO: 1410918 - DNA, 15 bp, Homo sapiens
gagaccagccttacc

SEQ ID NO: 1410919 - DNA, 15 bp, Homo sapiens
cgagaccagccttac

SEQ ID NO: 1410920 - DNA, 15 bp, Homo sapiens
tcgagaccagcctta

SEQ ID NO: 1410921 - DNA, 15 bp, Homo sapiens
ttcgagaccagcctt

SEQ ID NO: 1410922 - DNA, 15 bp, Homo sapiens
agtcaggagttcgag

SEQ ID NO: 1410923 - DNA, 15 bp, Homo sapiens
aagtcaggagttcga

SEQ ID NO: 1410924 - DNA, 15 bp, Homo sapiens
gaagtcaggagttcg

SEQ ID NO: 1410925 - DNA, 15 bp, Homo sapiens
tgaagtcaggagttc

SEQ ID NO: 1410926 - DNA, 15 bp, Homo sapiens
ctgaagtcaggagtt

SEQ ID NO: 1410927 - DNA, 15 bp, Homo sapiens
cctgaagtcaggagt

SEQ ID NO: 1410928 - DNA, 15 bp, Homo sapiens
tcctgaagtcaggag

SEQ ID NO: 1410929 - DNA, 15 bp, Homo sapiens
ctcctgaagtcagga

SEQ ID NO: 1410930 - DNA, 15 bp, Homo sapiens
tctcctgaagtcagg

SEQ ID NO: 1410931 - DNA, 15 bp, Homo sapiens
atctcctgaagtcag

SEQ ID NO: 1410932 - DNA, 15 bp, Homo sapiens
gatctcctgaagtca

SEQ ID NO: 1410933 - DNA, 15 bp, Homo sapiens
agatctcctgaagtc

SEQ ID NO: 1410934 - DNA, 15 bp, Homo sapiens
tagatctcctgaagt

SEQ ID NO: 1410935 - DNA, 15 bp, Homo sapiens
gtagatctcctgaag

SEQ ID NO: 1410936 - DNA, 15 bp, Homo sapiens
ggtagatctcctgaa

SEQ ID NO: 1410937 - DNA, 15 bp, Homo sapiens
aggtagatctcctga

SEQ ID NO: 1410938 - DNA, 15 bp, Homo sapiens
caggtagatctcctg

SEQ ID NO: 1410939 - DNA, 15 bp, Homo sapiens
gcaggtagatctcct

SEQ ID NO: 1410940 - DNA, 15 bp, Homo sapiens
cgcaggtagatctcc

SEQ ID NO: 1410941 - DNA, 15 bp, Homo sapiens
acgcaggtagatctc

SEQ ID NO: 1410942 - DNA, 15 bp, Homo sapiens
gacgcaggtagatct

SEQ ID NO: 1410943 - DNA, 15 bp, Homo sapiens
tgacgcaggtagatc

SEQ ID NO: 1410944 - DNA, 15 bp, Homo sapiens
ctgacgcaggtagat

SEQ ID NO: 1410945 - DNA, 15 bp, Homo sapiens
gctgacgcaggtaga

SEQ ID NO: 1410946 - DNA, 15 bp, Homo sapiens
ggctgacgcaggtag

SEQ ID NO: 1410947 - DNA, 15 bp, Homo sapiens
aggctgacgcaggta

SEQ ID NO: 1410948 - DNA, 15 bp, Homo sapiens
gaggctgacgcaggt

SEQ ID NO: 1410949 - DNA, 15 bp, Homo sapiens
aggaggctgacgcag

SEQ ID NO: 1410950 - DNA, 15 bp, Homo sapiens
taggaggctgacgca

SEQ ID NO: 1410951 - DNA, 15 bp, Homo sapiens
ttaggaggctgacgc

SEQ ID NO: 1410952 - DNA, 15 bp, Homo sapiens
tttaggaggctgacg

SEQ ID NO: 1410953 - DNA, 15 bp, Homo sapiens
ctttaggaggctgac

SEQ ID NO: 1410954 - DNA, 15 bp, Homo sapiens
accgtaatcccagca

SEQ ID NO: 1410955 - DNA, 15 bp, Homo sapiens
caccgtaatcccagc

SEQ ID NO: 1410956 - DNA, 15 bp, Homo sapiens
ccaccgtaatcccag

SEQ ID NO: 1410957 - DNA, 15 bp, Homo sapiens
accaccgtaatccca

SEQ ID NO: 1410958 - DNA, 15 bp, Homo sapiens
caccaccgtaatccc

SEQ ID NO: 1410959 - DNA, 15 bp, Homo sapiens
tcaccaccgtaatcc

SEQ ID NO: 1410960 - DNA, 15 bp, Homo sapiens
ctcaccaccgtaatc

SEQ ID NO: 1410961 - DNA, 15 bp, Homo sapiens
gctcaccaccgtaat

SEQ ID NO: 1410962 - DNA, 15 bp, Homo sapiens
ggctcaccaccgtaa

SEQ ID NO: 1410963 - DNA, 15 bp, Homo sapiens
tggctcaccaccgta

SEQ ID NO: 1410964 - DNA, 15 bp, Homo sapiens
gtggctcaccaccgt

SEQ ID NO: 1410965 - DNA, 15 bp, Homo sapiens
ggtggctcaccaccg

SEQ ID NO: 1410966 - DNA, 15 bp, Homo sapiens
tggtggctcaccacc

SEQ ID NO: 1410967 - DNA, 15 bp, Homo sapiens
gtggtggctcaccac

SEQ ID NO: 1410968 - DNA, 15 bp, Homo sapiens
tgtggtggctcacca

SEQ ID NO: 1410969 - DNA, 15 bp, Homo sapiens
gtgtggtggctcacc

SEQ ID NO: 1410970 - DNA, 15 bp, Homo sapiens
aagccgggtgtggtg

SEQ ID NO: 1410971 - DNA, 15 bp, Homo sapiens
taagccgggtgtggt

SEQ ID NO: 1410972 - DNA, 15 bp, Homo sapiens
ttaagccgggtgtgg

SEQ ID NO: 1410973 - DNA, 15 bp, Homo sapiens
tttaagccgggtgtg

SEQ ID NO: 1410974 - DNA, 15 bp, Homo sapiens
ctttaagccgggtgt

SEQ ID NO: 1410975 - DNA, 15 bp, Homo sapiens
cctttaagccgggtg

SEQ ID NO: 1410976 - DNA, 15 bp, Homo sapiens
gcctttaagccgggt

SEQ ID NO: 1410977 - DNA, 15 bp, Homo sapiens
tgcctttaagccggg

SEQ ID NO: 1410978 - DNA, 15 bp, Homo sapiens
ctgcctttaagccgg

SEQ ID NO: 1410979 - DNA, 15 bp, Homo sapiens
tctgcctttaagccg

SEQ ID NO: 1410980 - DNA, 15 bp, Homo sapiens
atctgcctttaagcc

SEQ ID NO: 1410981 - DNA, 15 bp, Homo sapiens
gatctgcctttaagc

SEQ ID NO: 1410982 - DNA, 15 bp, Homo sapiens
agatctgcctttaag

SEQ ID NO: 1410983 - DNA, 15 bp, Homo sapiens
aagatctgcctttaa

SEQ ID NO: 1410984 - DNA, 15 bp, Homo sapiens
taagatctgccttta

SEQ ID NO: 1410985 - DNA, 15 bp, Homo sapiens
ttaagatctgccttt

SEQ ID NO: 1410986 - DNA, 15 bp, Homo sapiens
tttaagatctgcctt

SEQ ID NO: 1410987 - DNA, 15 bp, Homo sapiens
ttttaagatctgcct

SEQ ID NO: 1410988 - DNA, 15 bp, Homo sapiens
cttttaagatctgcc

SEQ ID NO: 1410989 - DNA, 15 bp, Homo sapiens
gcttttaagatctgc

SEQ ID NO: 1410990 - DNA, 15 bp, Homo sapiens
tgcttttaagatctg

SEQ ID NO: 1410991 - DNA, 15 bp, Homo sapiens
gtgcttttaagatct

SEQ ID NO: 1410992 - DNA, 15 bp, Homo sapiens
tgtgcttttaagatc

SEQ ID NO: 1410993 - DNA, 15 bp, Homo sapiens
atgtgcttttaagat

SEQ ID NO: 1410994 - DNA, 15 bp, Homo sapiens
aatgtgcttttaaga

SEQ ID NO: 1410995 - DNA, 15 bp, Homo sapiens
taatgtgcttttaag

SEQ ID NO: 1410996 - DNA, 15 bp, Homo sapiens
ttaatgtgcttttaa

SEQ ID NO: 1410997 - DNA, 15 bp, Homo sapiens
tttaatgtgctttta

SEQ ID NO: 1410998 - DNA, 15 bp, Homo sapiens
atttaatgtgctttt

SEQ ID NO: 1410999 - DNA, 15 bp, Homo sapiens
gatttaatgtgcttt

SEQ ID NO: 1411000 - DNA, 15 bp, Homo sapiens
tgatttaatgtgctt

SEQ ID NO: 1411001 - DNA, 15 bp, Homo sapiens
atgatttaatgtgct

SEQ ID NO: 1411002 - DNA, 15 bp, Homo sapiens
gatgatttaatgtgc

SEQ ID NO: 1411003 - DNA, 15 bp, Homo sapiens
agatgatttaatgtg

SEQ ID NO: 1411004 - DNA, 15 bp, Homo sapiens
cagatgatttaatgt

SEQ ID NO: 1411005 - DNA, 15 bp, Homo sapiens
gcagatgatttaatg

SEQ ID NO: 1411006 - DNA, 15 bp, Homo sapiens
agcagatgatttaat

SEQ ID NO: 1411007 - DNA, 15 bp, Homo sapiens
gagcagatgatttaa

SEQ ID NO: 1411008 - DNA, 15 bp, Homo sapiens
agagcagatgattta

SEQ ID NO: 1411009 - DNA, 15 bp, Homo sapiens
tagagcagatgattt

SEQ ID NO: 1411010 - DNA, 15 bp, Homo sapiens
ttagagcagatgatt

SEQ ID NO: 1411011 - DNA, 15 bp, Homo sapiens
gttagagcagatgat

SEQ ID NO: 1411012 - DNA, 15 bp, Homo sapiens
agttagagcagatga

SEQ ID NO: 1411013 - DNA, 15 bp, Homo sapiens
gagttagagcagatg

SEQ ID NO: 1411014 - DNA, 15 bp, Homo sapiens
ggagttagagcagat

SEQ ID NO: 1411015 - DNA, 15 bp, Homo sapiens
gggagttagagcaga

SEQ ID NO: 1411016 - DNA, 15 bp, Homo sapiens
tgggagttagagcag

SEQ ID NO: 1411017 - DNA, 15 bp, Homo sapiens
gtgggagttagagca

SEQ ID NO: 1411018 - DNA, 15 bp, Homo sapiens
tgtgggagttagagc

SEQ ID NO: 1411019 - DNA, 15 bp, Homo sapiens
atgtgggagttagag

SEQ ID NO: 1411020 - DNA, 15 bp, Homo sapiens
aatgtgggagttaga

SEQ ID NO: 1411021 - DNA, 15 bp, Homo sapiens
caatgtgggagttag

SEQ ID NO: 1411022 - DNA, 15 bp, Homo sapiens
gcaatgtgggagtta

SEQ ID NO: 1411023 - DNA, 15 bp, Homo sapiens
tgcaatgtgggagtt

SEQ ID NO: 1411024 - DNA, 15 bp, Homo sapiens
gtgcaatgtgggagt

SEQ ID NO: 1411025 - DNA, 15 bp, Homo sapiens
tgtgcaatgtgggag

SEQ ID NO: 1411026 - DNA, 15 bp, Homo sapiens
ctgtgcaatgtggga

SEQ ID NO: 1411027 - DNA, 15 bp, Homo sapiens
tctgtgcaatgtggg

SEQ ID NO: 1411028 - DNA, 15 bp, Homo sapiens
ctctgtgcaatgtgg

SEQ ID NO: 1411029 - DNA, 15 bp, Homo sapiens
tctctgtgcaatgtg

SEQ ID NO: 1411030 - DNA, 15 bp, Homo sapiens
ttctctgtgcaatgt

SEQ ID NO: 1411031 - DNA, 15 bp, Homo sapiens
tttctctgtgcaatg

SEQ ID NO: 1411032 - DNA, 15 bp, Homo sapiens
atttctctgtgcaat

SEQ ID NO: 1411033 - DNA, 15 bp, Homo sapiens
tatttctctgtgcaa

SEQ ID NO: 1411034 - DNA, 15 bp, Homo sapiens
ttatttctctgtgca

SEQ ID NO: 1411035 - DNA, 15 bp, Homo sapiens
cttatttctctgtgc

SEQ ID NO: 1411036 - DNA, 15 bp, Homo sapiens
gcttatttctctgtg

SEQ ID NO: 1411037 - DNA, 15 bp, Homo sapiens
agcttatttctctgt

SEQ ID NO: 1411038 - DNA, 15 bp, Homo sapiens
cagcttatttctctg

SEQ ID NO: 1411039 - DNA, 15 bp, Homo sapiens
tcagcttatttctct

SEQ ID NO: 1411040 - DNA, 15 bp, Homo sapiens
ctcagcttatttctc

SEQ ID NO: 1411041 - DNA, 15 bp, Homo sapiens
actcagcttatttct

SEQ ID NO: 1411042 - DNA, 15 bp, Homo sapiens
aactcagcttatttc

SEQ ID NO: 1411043 - DNA, 15 bp, Homo sapiens
gaactcagcttattt

SEQ ID NO: 1411044 - DNA, 15 bp, Homo sapiens
ggaactcagcttatt

SEQ ID NO: 1411045 - DNA, 15 bp, Homo sapiens
tggaactcagcttat

SEQ ID NO: 1411046 - DNA, 15 bp, Homo sapiens
ttggaactcagctta

SEQ ID NO: 1411047 - DNA, 15 bp, Homo sapiens
cttggaactcagctt

SEQ ID NO: 1411048 - DNA, 15 bp, Homo sapiens
ccttggaactcagct

SEQ ID NO: 1411049 - DNA, 15 bp, Homo sapiens
tccttggaactcagc

SEQ ID NO: 1411050 - DNA, 15 bp, Homo sapiens
ctccttggaactcag

SEQ ID NO: 1411051 - DNA, 15 bp, Homo sapiens
cctccttggaactca

SEQ ID NO: 1411052 - DNA, 15 bp, Homo sapiens
gcctccttggaactc

SEQ ID NO: 1411053 - DNA, 15 bp, Homo sapiens
tgcctccttggaact

SEQ ID NO: 1411054 - DNA, 15 bp, Homo sapiens
ctgcctccttggaac

SEQ ID NO: 1411055 - DNA, 15 bp, Homo sapiens
gctgcctccttggaa

SEQ ID NO: 1411056 - DNA, 15 bp, Homo sapiens
tgctgcctccttgga

SEQ ID NO: 1411057 - DNA, 15 bp, Homo sapiens
atgctgcctccttgg

SEQ ID NO: 1411058 - DNA, 15 bp, Homo sapiens
tatgctgcctccttg

SEQ ID NO: 1411059 - DNA, 15 bp, Homo sapiens
ttatgctgcctcctt

SEQ ID NO: 1411060 - DNA, 15 bp, Homo sapiens
gttatgctgcctcct

SEQ ID NO: 1411061 - DNA, 15 bp, Homo sapiens
ggttatgctgcctcc

SEQ ID NO: 1411062 - DNA, 15 bp, Homo sapiens
aggttatgctgcctc

SEQ ID NO: 1411063 - DNA, 15 bp, Homo sapiens
caggttatgctgcct

SEQ ID NO: 1411064 - DNA, 15 bp, Homo sapiens
tcaggttatgctgcc

SEQ ID NO: 1411065 - DNA, 15 bp, Homo sapiens
ctcaggttatgctgc

SEQ ID NO: 1411066 - DNA, 15 bp, Homo sapiens
tctcaggttatgctg

SEQ ID NO: 1411067 - DNA, 15 bp, Homo sapiens
gtctcaggttatgct

SEQ ID NO: 1411068 - DNA, 15 bp, Homo sapiens
agtctcaggttatgc

SEQ ID NO: 1411069 - DNA, 15 bp, Homo sapiens
tagtctcaggttatg

SEQ ID NO: 1411070 - DNA, 15 bp, Homo sapiens
ctagtctcaggttat

SEQ ID NO: 1411071 - DNA, 15 bp, Homo sapiens
tctagtctcaggtta

SEQ ID NO: 1411072 - DNA, 15 bp, Homo sapiens
ttctagtctcaggtt

SEQ ID NO: 1411073 - DNA, 15 bp, Homo sapiens
tttctagtctcaggt

SEQ ID NO: 1411074 - DNA, 15 bp, Homo sapiens
atttctagtctcagg

SEQ ID NO: 1411075 - DNA, 15 bp, Homo sapiens
catttctagtctcag

SEQ ID NO: 1411076 - DNA, 15 bp, Homo sapiens
ccatttctagtctca

SEQ ID NO: 1411077 - DNA, 15 bp, Homo sapiens
accatttctagtctc

SEQ ID NO: 1411078 - DNA, 15 bp, Homo sapiens
caccatttctagtct

SEQ ID NO: 1411079 - DNA, 15 bp, Homo sapiens
gcaccatttctagtc

SEQ ID NO: 1411080 - DNA, 15 bp, Homo sapiens
agcaccatttctagt

SEQ ID NO: 1411081 - DNA, 15 bp, Homo sapiens
aagcaccatttctag

SEQ ID NO: 1411082 - DNA, 15 bp, Homo sapiens
taagcaccatttcta

SEQ ID NO: 1411083 - DNA, 15 bp, Homo sapiens
ctaagcaccatttct

SEQ ID NO: 1411084 - DNA, 15 bp, Homo sapiens
cctaagcaccatttc

SEQ ID NO: 1411085 - DNA, 15 bp, Homo sapiens
acctaagcaccattt

SEQ ID NO: 1411086 - DNA, 15 bp, Homo sapiens
aacctaagcaccatt

SEQ ID NO: 1411087 - DNA, 15 bp, Homo sapiens
gaacctaagcaccat

SEQ ID NO: 1411088 - DNA, 15 bp, Homo sapiens
ggaacctaagcacca

SEQ ID NO: 1411089 - DNA, 15 bp, Homo sapiens
aggaacctaagcacc

SEQ ID NO: 1411090 - DNA, 15 bp, Homo sapiens
taggaacctaagcac

SEQ ID NO: 1411091 - DNA, 15 bp, Homo sapiens
ttaggaacctaagca

SEQ ID NO: 1411092 - DNA, 15 bp, Homo sapiens
cttaggaacctaagc

SEQ ID NO: 1411093 - DNA, 15 bp, Homo sapiens
gcttaggaacctaag

SEQ ID NO: 1411094 - DNA, 15 bp, Homo sapiens
ggcttaggaacctaa

SEQ ID NO: 1411095 - DNA, 15 bp, Homo sapiens
gggcttaggaaccta

SEQ ID NO: 1411096 - DNA, 15 bp, Homo sapiens
tgggcttaggaacct

SEQ ID NO: 1411097 - DNA, 15 bp, Homo sapiens
ctgggcttaggaacc

SEQ ID NO: 1411098 - DNA, 15 bp, Homo sapiens
cctgggcttaggaac

SEQ ID NO: 1411099 - DNA, 15 bp, Homo sapiens
gcctgggcttaggaa

SEQ ID NO: 1411100 - DNA, 15 bp, Homo sapiens
ggcctgggcttagga

SEQ ID NO: 1411101 - DNA, 15 bp, Homo sapiens
aggcctgggcttagg

SEQ ID NO: 1411102 - DNA, 15 bp, Homo sapiens
gaggcctgggcttag

SEQ ID NO: 1411103 - DNA, 15 bp, Homo sapiens
ggaggcctgggctta

SEQ ID NO: 1411104 - DNA, 15 bp, Homo sapiens
tggaggcctgggctt

SEQ ID NO: 1411105 - DNA, 15 bp, Homo sapiens
ttggaggcctgggct

SEQ ID NO: 1411106 - DNA, 15 bp, Homo sapiens
cttggaggcctgggc

SEQ ID NO: 1411107 - DNA, 15 bp, Homo sapiens
ccttggaggcctggg

SEQ ID NO: 1411108 - DNA, 15 bp, Homo sapiens
accttggaggcctgg

SEQ ID NO: 1411109 - DNA, 15 bp, Homo sapiens
gaccttggaggcctg

SEQ ID NO: 1411110 - DNA, 15 bp, Homo sapiens
agaccttggaggcct

SEQ ID NO: 1411111 - DNA, 15 bp, Homo sapiens
tagaccttggaggcc

SEQ ID NO: 1411112 - DNA, 15 bp, Homo sapiens
atagaccttggaggc

SEQ ID NO: 1411113 - DNA, 15 bp, Homo sapiens
aatagaccttggagg

SEQ ID NO: 1411114 - DNA, 15 bp, Homo sapiens
aaatagaccttggag

SEQ ID NO: 1411115 - DNA, 15 bp, Homo sapiens
taaatagaccttgga

SEQ ID NO: 1411116 - DNA, 15 bp, Homo sapiens
gtaaatagaccttgg

SEQ ID NO: 1411117 - DNA, 15 bp, Homo sapiens
agtaaatagaccttg

SEQ ID NO: 1411118 - DNA, 15 bp, Homo sapiens
cagtaaatagacctt

SEQ ID NO: 1411119 - DNA, 15 bp, Homo sapiens
acagtaaatagacct

SEQ ID NO: 1411120 - DNA, 15 bp, Homo sapiens
tacagtaaatagacc

SEQ ID NO: 1411121 - DNA, 15 bp, Homo sapiens
atacagtaaatagac

SEQ ID NO: 1411122 - DNA, 15 bp, Homo sapiens
tatacagtaaataga

SEQ ID NO: 1411123 - DNA, 15 bp, Homo sapiens
ttatacagtaaatag

SEQ ID NO: 1411124 - DNA, 15 bp, Homo sapiens
attatacagtaaata

SEQ ID NO: 1411125 - DNA, 15 bp, Homo sapiens
cattatacagtaaat

SEQ ID NO: 1411126 - DNA, 15 bp, Homo sapiens
acattatacagtaaa

SEQ ID NO: 1411127 - DNA, 15 bp, Homo sapiens
cacattatacagtaa

SEQ ID NO: 1411128 - DNA, 15 bp, Homo sapiens
tcacattatacagta

SEQ ID NO: 1411129 - DNA, 15 bp, Homo sapiens
ctcacattatacagt

SEQ ID NO: 1411130 - DNA, 15 bp, Homo sapiens
gctcacattatacag

SEQ ID NO: 1411131 - DNA, 15 bp, Homo sapiens
agctcacattataca

SEQ ID NO: 1411132 - DNA, 15 bp, Homo sapiens
cagctcacattatac

SEQ ID NO: 1411133 - DNA, 15 bp, Homo sapiens
tcagctcacattata

SEQ ID NO: 1411134 - DNA, 15 bp, Homo sapiens
atcagctcacattat

SEQ ID NO: 1411135 - DNA, 15 bp, Homo sapiens
catcagctcacatta

SEQ ID NO: 1411136 - DNA, 15 bp, Homo sapiens
acatcagctcacatt

SEQ ID NO: 1411137 - DNA, 15 bp, Homo sapiens
gacatcagctcacat

SEQ ID NO: 1411138 - DNA, 15 bp, Homo sapiens
agacatcagctcaca

SEQ ID NO: 1411139 - DNA, 15 bp, Homo sapiens
gagacatcagctcac

SEQ ID NO: 1411140 - DNA, 15 bp, Homo sapiens
ggagacatcagctca

SEQ ID NO: 1411141 - DNA, 15 bp, Homo sapiens
gggagacatcagctc

SEQ ID NO: 1411142 - DNA, 15 bp, Homo sapiens
tgggagacatcagct

SEQ ID NO: 1411143 - DNA, 15 bp, Homo sapiens
ttgggagacatcagc

SEQ ID NO: 1411144 - DNA, 15 bp, Homo sapiens
tttgggagacatcag

SEQ ID NO: 1411145 - DNA, 15 bp, Homo sapiens
ctttgggagacatca

SEQ ID NO: 1411146 - DNA, 15 bp, Homo sapiens
actttgggagacatc

SEQ ID NO: 1411147 - DNA, 15 bp, Homo sapiens
tactttgggagacat

SEQ ID NO: 1411148 - DNA, 15 bp, Homo sapiens
atactttgggagaca

SEQ ID NO: 1411149 - DNA, 15 bp, Homo sapiens
tatactttgggagac

SEQ ID NO: 1411150 - DNA, 15 bp, Homo sapiens
ttatactttgggaga

SEQ ID NO: 1411151 - DNA, 15 bp, Homo sapiens
tttatactttgggag

SEQ ID NO: 1411152 - DNA, 15 bp, Homo sapiens
atttatactttggga

SEQ ID NO: 1411153 - DNA, 15 bp, Homo sapiens
catttatactttggg

SEQ ID NO: 1411154 - DNA, 15 bp, Homo sapiens
acatttatactttgg

SEQ ID NO: 1411155 - DNA, 15 bp, Homo sapiens
tacatttatactttg

SEQ ID NO: 1411156 - DNA, 15 bp, Homo sapiens
ctacatttatacttt

SEQ ID NO: 1411157 - DNA, 15 bp, Homo sapiens
cctacatttatactt

SEQ ID NO: 1411158 - DNA, 15 bp, Homo sapiens
ccctacatttatact

SEQ ID NO: 1411159 - DNA, 15 bp, Homo sapiens
accctacatttatac

SEQ ID NO: 1411160 - DNA, 15 bp, Homo sapiens
gaccctacatttata

SEQ ID NO: 1411161 - DNA, 15 bp, Homo sapiens
tgaccctacatttat

SEQ ID NO: 1411162 - DNA, 15 bp, Homo sapiens
gtgaccctacattta

SEQ ID NO: 1411163 - DNA, 15 bp, Homo sapiens
ggtgaccctacattt

SEQ ID NO: 1411164 - DNA, 15 bp, Homo sapiens
aggtgaccctacatt

SEQ ID NO: 1411165 - DNA, 15 bp, Homo sapiens
caggtgaccctacat

SEQ ID NO: 1411166 - DNA, 15 bp, Homo sapiens
acaggtgaccctaca

SEQ ID NO: 1411167 - DNA, 15 bp, Homo sapiens
cacaggtgaccctac

SEQ ID NO: 1411168 - DNA, 15 bp, Homo sapiens
acacaggtgacccta

SEQ ID NO: 1411169 - DNA, 15 bp, Homo sapiens
aacacaggtgaccct

SEQ ID NO: 1411170 - DNA, 15 bp, Homo sapiens
taacacaggtgaccc

SEQ ID NO: 1411171 - DNA, 15 bp, Homo sapiens
ctaacacaggtgacc

SEQ ID NO: 1411172 - DNA, 15 bp, Homo sapiens
cctaacacaggtgac

SEQ ID NO: 1411173 - DNA, 15 bp, Homo sapiens
tcctaacacaggtga

SEQ ID NO: 1411174 - DNA, 15 bp, Homo sapiens
atcctaacacaggtg

SEQ ID NO: 1411175 - DNA, 15 bp, Homo sapiens
gatcctaacacaggt

SEQ ID NO: 1411176 - DNA, 15 bp, Homo sapiens
tgatcctaacacagg

SEQ ID NO: 1411177 - DNA, 15 bp, Homo sapiens
atgatcctaacacag

SEQ ID NO: 1411178 - DNA, 15 bp, Homo sapiens
tatgatcctaacaca

SEQ ID NO: 1411179 - DNA, 15 bp, Homo sapiens
atatgatcctaacac

SEQ ID NO: 1411180 - DNA, 15 bp, Homo sapiens
catatgatcctaaca

SEQ ID NO: 1411181 - DNA, 15 bp, Homo sapiens
tcatatgatcctaac

SEQ ID NO: 1411182 - DNA, 15 bp, Homo sapiens
ttcatatgatcctaa

SEQ ID NO: 1411183 - DNA, 15 bp, Homo sapiens
cttcatatgatccta

SEQ ID NO: 1411184 - DNA, 15 bp, Homo sapiens
ccttcatatgatcct

SEQ ID NO: 1411185 - DNA, 15 bp, Homo sapiens
cccttcatatgatcc

SEQ ID NO: 1411186 - DNA, 15 bp, Homo sapiens
gcccttcatatgatc

SEQ ID NO: 1411187 - DNA, 15 bp, Homo sapiens
agcccttcatatgat

SEQ ID NO: 1411188 - DNA, 15 bp, Homo sapiens
aagcccttcatatga

SEQ ID NO: 1411189 - DNA, 15 bp, Homo sapiens
aaagcccttcatatg

SEQ ID NO: 1411190 - DNA, 15 bp, Homo sapiens
aaaagcccttcatat

SEQ ID NO: 1411191 - DNA, 15 bp, Homo sapiens
aaaaagcccttcata

SEQ ID NO: 1411192 - DNA, 15 bp, Homo sapiens
taaaaagcccttcat

SEQ ID NO: 1411193 - DNA, 15 bp, Homo sapiens
ttaaaaagcccttca

SEQ ID NO: 1411194 - DNA, 15 bp, Homo sapiens
tttaaaaagcccttc

SEQ ID NO: 1411195 - DNA, 15 bp, Homo sapiens
ttttaaaaagccctt

SEQ ID NO: 1411196 - DNA, 15 bp, Homo sapiens
attttaaaaagccct

SEQ ID NO: 1411197 - DNA, 15 bp, Homo sapiens
cattttaaaaagccc

SEQ ID NO: 1411198 - DNA, 15 bp, Homo sapiens
gcattttaaaaagcc

SEQ ID NO: 1411199 - DNA, 15 bp, Homo sapiens
tgcattttaaaaagc

SEQ ID NO: 1411200 - DNA, 15 bp, Homo sapiens
ttgcattttaaaaag

SEQ ID NO: 1411201 - DNA, 15 bp, Homo sapiens
cttgcattttaaaaa

SEQ ID NO: 1411202 - DNA, 15 bp, Homo sapiens
acttgcattttaaaa

SEQ ID NO: 1411203 - DNA, 15 bp, Homo sapiens
aacttgcattttaaa

SEQ ID NO: 1411204 - DNA, 15 bp, Homo sapiens
gaacttgcattttaa

SEQ ID NO: 1411205 - DNA, 15 bp, Homo sapiens
agaacttgcatttta

SEQ ID NO: 1411206 - DNA, 15 bp, Homo sapiens
aagaacttgcatttt

SEQ ID NO: 1411207 - DNA, 15 bp, Homo sapiens
caagaacttgcattt

SEQ ID NO: 1411208 - DNA, 15 bp, Homo sapiens
ccaagaacttgcatt

SEQ ID NO: 1411209 - DNA, 15 bp, Homo sapiens
cccaagaacttgcat

SEQ ID NO: 1411210 - DNA, 15 bp, Homo sapiens
acccaagaacttgca

SEQ ID NO: 1411211 - DNA, 15 bp, Homo sapiens
gacccaagaacttgc

SEQ ID NO: 1411212 - DNA, 15 bp, Homo sapiens
ggacccaagaacttg

SEQ ID NO: 1411213 - DNA, 15 bp, Homo sapiens
aggacccaagaactt

SEQ ID NO: 1411214 - DNA, 15 bp, Homo sapiens
aaggacccaagaact

SEQ ID NO: 1411215 - DNA, 15 bp, Homo sapiens
aaaggacccaagaac

SEQ ID NO: 1411216 - DNA, 15 bp, Homo sapiens
taaaggacccaagaa

SEQ ID NO: 1411217 - DNA, 15 bp, Homo sapiens
gtaaaggacccaaga

SEQ ID NO: 1411218 - DNA, 15 bp, Homo sapiens
ggtaaaggacccaag

SEQ ID NO: 1411219 - DNA, 15 bp, Homo sapiens
gggtaaaggacccaa

SEQ ID NO: 1411220 - DNA, 15 bp, Homo sapiens
agggtaaaggaccca

SEQ ID NO: 1411221 - DNA, 15 bp, Homo sapiens
tagggtaaaggaccc

SEQ ID NO: 1411222 - DNA, 15 bp, Homo sapiens
ttagggtaaaggacc

SEQ ID NO: 1411223 - DNA, 15 bp, Homo sapiens
attagggtaaaggac

SEQ ID NO: 1411224 - DNA, 15 bp, Homo sapiens
aattagggtaaagga

SEQ ID NO: 1411225 - DNA, 15 bp, Homo sapiens
caattagggtaaagg

SEQ ID NO: 1411226 - DNA, 15 bp, Homo sapiens
acaattagggtaaag

SEQ ID NO: 1411227 - DNA, 15 bp, Homo sapiens
aacaattagggtaaa

SEQ ID NO: 1411228 - DNA, 15 bp, Homo sapiens
aaacaattagggtaa

SEQ ID NO: 1411229 - DNA, 15 bp, Homo sapiens
aaaacaattagggta

SEQ ID NO: 1411230 - DNA, 15 bp, Homo sapiens
taaaacaattagggt

SEQ ID NO: 1411231 - DNA, 15 bp, Homo sapiens
ataaaacaattaggg

SEQ ID NO: 1411232 - DNA, 15 bp, Homo sapiens
gataaaacaattagg

SEQ ID NO: 1411233 - DNA, 15 bp, Homo sapiens
tgataaaacaattag

SEQ ID NO: 1411234 - DNA, 15 bp, Homo sapiens
ctgataaaacaatta

SEQ ID NO: 1411235 - DNA, 15 bp, Homo sapiens
tctgataaaacaatt

SEQ ID NO: 1411236 - DNA, 15 bp, Homo sapiens
ttctgataaaacaat

SEQ ID NO: 1411237 - DNA, 15 bp, Homo sapiens
attctgataaaacaa

SEQ ID NO: 1411238 - DNA, 15 bp, Homo sapiens
gattctgataaaaca

SEQ ID NO: 1411239 - DNA, 15 bp, Homo sapiens
agattctgataaaac

SEQ ID NO: 1411240 - DNA, 15 bp, Homo sapiens
gagattctgataaaa

SEQ ID NO: 1411241 - DNA, 15 bp, Homo sapiens
agagattctgataaa

SEQ ID NO: 1411242 - DNA, 15 bp, Homo sapiens
tagagattctgataa

SEQ ID NO: 1411243 - DNA, 15 bp, Homo sapiens
ctagagattctgata

SEQ ID NO: 1411244 - DNA, 15 bp, Homo sapiens
tctagagattctgat

SEQ ID NO: 1411245 - DNA, 15 bp, Homo sapiens
ctctagagattctga

SEQ ID NO: 1411246 - DNA, 15 bp, Homo sapiens
tctctagagattctg

SEQ ID NO: 1411247 - DNA, 15 bp, Homo sapiens
atctctagagattct

SEQ ID NO: 1411248 - DNA, 15 bp, Homo sapiens
catctctagagattc

SEQ ID NO: 1411249 - DNA, 15 bp, Homo sapiens
ccatctctagagatt

SEQ ID NO: 1411250 - DNA, 15 bp, Homo sapiens
cccatctctagagat

SEQ ID NO: 1411251 - DNA, 15 bp, Homo sapiens
tcccatctctagaga

SEQ ID NO: 1411252 - DNA, 15 bp, Homo sapiens
gtcccatctctagag

SEQ ID NO: 1411253 - DNA, 15 bp, Homo sapiens
ggtcccatctctaga

SEQ ID NO: 1411254 - DNA, 15 bp, Homo sapiens
aggtcccatctctag

SEQ ID NO: 1411255 - DNA, 15 bp, Homo sapiens
caggtcccatctcta

SEQ ID NO: 1411256 - DNA, 15 bp, Homo sapiens
ccaggtcccatctct

SEQ ID NO: 1411257 - DNA, 15 bp, Homo sapiens
cccaggtcccatctc

SEQ ID NO: 1411258 - DNA, 15 bp, Homo sapiens
tcccaggtcccatct

SEQ ID NO: 1411259 - DNA, 15 bp, Homo sapiens
ttcccaggtcccatc

SEQ ID NO: 1411260 - DNA, 15 bp, Homo sapiens
attcccaggtcccat

SEQ ID NO: 1411261 - DNA, 15 bp, Homo sapiens
gattcccaggtccca

SEQ ID NO: 1411262 - DNA, 15 bp, Homo sapiens
agattcccaggtccc

SEQ ID NO: 1411263 - DNA, 15 bp, Homo sapiens
cagattcccaggtcc

SEQ ID NO: 1411264 - DNA, 15 bp, Homo sapiens
acagattcccaggtc

SEQ ID NO: 1411265 - DNA, 15 bp, Homo sapiens
tacagattcccaggt

SEQ ID NO: 1411266 - DNA, 15 bp, Homo sapiens
atacagattcccagg

SEQ ID NO: 1411267 - DNA, 15 bp, Homo sapiens
aatacagattcccag

SEQ ID NO: 1411268 - DNA, 15 bp, Homo sapiens
aaatacagattccca

SEQ ID NO: 1411269 - DNA, 15 bp, Homo sapiens
taaatacagattccc

SEQ ID NO: 1411270 - DNA, 15 bp, Homo sapiens
ttaaatacagattcc

SEQ ID NO: 1411271 - DNA, 15 bp, Homo sapiens
gttaaatacagattc

SEQ ID NO: 1411272 - DNA, 15 bp, Homo sapiens
tgttaaatacagatt

SEQ ID NO: 1411273 - DNA, 15 bp, Homo sapiens
ctgttaaatacagat

SEQ ID NO: 1411274 - DNA, 15 bp, Homo sapiens
tctgttaaatacaga

SEQ ID NO: 1411275 - DNA, 15 bp, Homo sapiens
ctctgttaaatacag

SEQ ID NO: 1411276 - DNA, 15 bp, Homo sapiens
cctctgttaaataca

SEQ ID NO: 1411277 - DNA, 15 bp, Homo sapiens
tcctctgttaaatac

SEQ ID NO: 1411278 - DNA, 15 bp, Homo sapiens
atcctctgttaaata

SEQ ID NO: 1411279 - DNA, 15 bp, Homo sapiens
gatcctctgttaaat

SEQ ID NO: 1411280 - DNA, 15 bp, Homo sapiens
tgatcctctgttaaa

SEQ ID NO: 1411281 - DNA, 15 bp, Homo sapiens
gtgatcctctgttaa

SEQ ID NO: 1411282 - DNA, 15 bp, Homo sapiens
tgtgatcctctgtta

SEQ ID NO: 1411283 - DNA, 15 bp, Homo sapiens
gtgtgatcctctgtt

SEQ ID NO: 1411284 - DNA, 15 bp, Homo sapiens
ggtgtgatcctctgt

SEQ ID NO: 1411285 - DNA, 15 bp, Homo sapiens
aggtgtgatcctctg

SEQ ID NO: 1411286 - DNA, 15 bp, Homo sapiens
caggtgtgatcctct

SEQ ID NO: 1411287 - DNA, 15 bp, Homo sapiens
tcaggtgtgatcctc

SEQ ID NO: 1411288 - DNA, 15 bp, Homo sapiens
ctcaggtgtgatcct

SEQ ID NO: 1411289 - DNA, 15 bp, Homo sapiens
actcaggtgtgatcc

SEQ ID NO: 1411290 - DNA, 15 bp, Homo sapiens
aactcaggtgtgatc

SEQ ID NO: 1411291 - DNA, 15 bp, Homo sapiens
gaactcaggtgtgat

SEQ ID NO: 1411292 - DNA, 15 bp, Homo sapiens
tgaactcaggtgtga

SEQ ID NO: 1411293 - DNA, 15 bp, Homo sapiens
ttgaactcaggtgtg

SEQ ID NO: 1411294 - DNA, 15 bp, Homo sapiens
cttgaactcaggtgt

SEQ ID NO: 1411295 - DNA, 15 bp, Homo sapiens
tcttgaactcaggtg

SEQ ID NO: 1411296 - DNA, 15 bp, Homo sapiens
ttcttgaactcaggt

SEQ ID NO: 1411297 - DNA, 15 bp, Homo sapiens
gttcttgaactcagg

SEQ ID NO: 1411298 - DNA, 15 bp, Homo sapiens
ggttcttgaactcag

SEQ ID NO: 1411299 - DNA, 15 bp, Homo sapiens
tggttcttgaactca

SEQ ID NO: 1411300 - DNA, 15 bp, Homo sapiens
gtggttcttgaactc

SEQ ID NO: 1411301 - DNA, 15 bp, Homo sapiens
agtggttcttgaact

SEQ ID NO: 1411302 - DNA, 15 bp, Homo sapiens
gagtggttcttgaac

SEQ ID NO: 1411303 - DNA, 15 bp, Homo sapiens
tgagtggttcttgaa

SEQ ID NO: 1411304 - DNA, 15 bp, Homo sapiens
atgagtggttcttga

SEQ ID NO: 1411305 - DNA, 15 bp, Homo sapiens
catgagtggttcttg

SEQ ID NO: 1411306 - DNA, 15 bp, Homo sapiens
acatgagtggttctt

SEQ ID NO: 1411307 - DNA, 15 bp, Homo sapiens
tacatgagtggttct

SEQ ID NO: 1411308 - DNA, 15 bp, Homo sapiens
ctacatgagtggttc

SEQ ID NO: 1411309 - DNA, 15 bp, Homo sapiens
actacatgagtggtt

SEQ ID NO: 1411310 - DNA, 15 bp, Homo sapiens
tactacatgagtggt

SEQ ID NO: 1411311 - DNA, 15 bp, Homo sapiens
ctactacatgagtgg

SEQ ID NO: 1411312 - DNA, 15 bp, Homo sapiens
tctactacatgagtg

SEQ ID NO: 1411313 - DNA, 15 bp, Homo sapiens
ttctactacatgagt

SEQ ID NO: 1411314 - DNA, 15 bp, Homo sapiens
gttctactacatgag

SEQ ID NO: 1411315 - DNA, 15 bp, Homo sapiens
tgttctactacatga

SEQ ID NO: 1411316 - DNA, 15 bp, Homo sapiens
ttgttctactacatg

SEQ ID NO: 1411317 - DNA, 15 bp, Homo sapiens
attgttctactacat

SEQ ID NO: 1411318 - DNA, 15 bp, Homo sapiens
aattgttctactaca

SEQ ID NO: 1411319 - DNA, 15 bp, Homo sapiens
taattgttctactac

SEQ ID NO: 1411320 - DNA, 15 bp, Homo sapiens
gtaattgttctacta

SEQ ID NO: 1411321 - DNA, 15 bp, Homo sapiens
ggtaattgttctact

SEQ ID NO: 1411322 - DNA, 15 bp, Homo sapiens
aggtaattgttctac

SEQ ID NO: 1411323 - DNA, 15 bp, Homo sapiens
gaggtaattgttcta

SEQ ID NO: 1411324 - DNA, 15 bp, Homo sapiens
tgaggtaattgttct

SEQ ID NO: 1411325 - DNA, 15 bp, Homo sapiens
ttgaggtaattgttc

SEQ ID NO: 1411326 - DNA, 15 bp, Homo sapiens
gttgaggtaattgtt

SEQ ID NO: 1411327 - DNA, 15 bp, Homo sapiens
agttgaggtaattgt

SEQ ID NO: 1411328 - DNA, 15 bp, Homo sapiens
aagttgaggtaattg

SEQ ID NO: 1411329 - DNA, 15 bp, Homo sapiens
taagttgaggtaatt

SEQ ID NO: 1411330 - DNA, 15 bp, Homo sapiens
ttaagttgaggtaat

SEQ ID NO: 1411331 - DNA, 15 bp, Homo sapiens
tttaagttgaggtaa

SEQ ID NO: 1411332 - DNA, 15 bp, Homo sapiens
ttttaagttgaggta

SEQ ID NO: 1411333 - DNA, 15 bp, Homo sapiens
attttaagttgaggt

SEQ ID NO: 1411334 - DNA, 15 bp, Homo sapiens
tattttaagttgagg

SEQ ID NO: 1411335 - DNA, 15 bp, Homo sapiens
atattttaagttgag

SEQ ID NO: 1411336 - DNA, 15 bp, Homo sapiens
catattttaagttga

SEQ ID NO: 1411337 - DNA, 15 bp, Homo sapiens
tcatattttaagttg

SEQ ID NO: 1411338 - DNA, 15 bp, Homo sapiens
ttcatattttaagtt

SEQ ID NO: 1411339 - DNA, 15 bp, Homo sapiens
tttcatattttaagt

SEQ ID NO: 1411340 - DNA, 15 bp, Homo sapiens
atttcatattttaag

SEQ ID NO: 1411341 - DNA, 15 bp, Homo sapiens
catttcatattttaa

SEQ ID NO: 1411342 - DNA, 15 bp, Homo sapiens
acatttcatatttta

SEQ ID NO: 1411343 - DNA, 15 bp, Homo sapiens
tacatttcatatttt

SEQ ID NO: 1411344 - DNA, 15 bp, Homo sapiens
atacatttcatattt

SEQ ID NO: 1411345 - DNA, 15 bp, Homo sapiens
gatacatttcatatt

SEQ ID NO: 1411346 - DNA, 15 bp, Homo sapiens
agatacatttcatat

SEQ ID NO: 1411347 - DNA, 15 bp, Homo sapiens
cagatacatttcata

SEQ ID NO: 1411348 - DNA, 15 bp, Homo sapiens
acagatacatttcat

SEQ ID NO: 1411349 - DNA, 15 bp, Homo sapiens
tacagatacatttca

SEQ ID NO: 1411350 - DNA, 15 bp, Homo sapiens
ctacagatacatttc

SEQ ID NO: 1411351 - DNA, 15 bp, Homo sapiens
gctacagatacattt

SEQ ID NO: 1411352 - DNA, 15 bp, Homo sapiens
tgctacagatacatt

SEQ ID NO: 1411353 - DNA, 15 bp, Homo sapiens
ttgctacagatacat

SEQ ID NO: 1411354 - DNA, 15 bp, Homo sapiens
cttgctacagataca

SEQ ID NO: 1411355 - DNA, 15 bp, Homo sapiens
acttgctacagatac

SEQ ID NO: 1411356 - DNA, 15 bp, Homo sapiens
cacttgctacagata

SEQ ID NO: 1411357 - DNA, 15 bp, Homo sapiens
gcacttgctacagat

SEQ ID NO: 1411358 - DNA, 15 bp, Homo sapiens
ggcacttgctacaga

SEQ ID NO: 1411359 - DNA, 15 bp, Homo sapiens
tggcacttgctacag

SEQ ID NO: 1411360 - DNA, 15 bp, Homo sapiens
gtggcacttgctaca

SEQ ID NO: 1411361 - DNA, 15 bp, Homo sapiens
ggtggcacttgctac

SEQ ID NO: 1411362 - DNA, 15 bp, Homo sapiens
aggtggcacttgcta

SEQ ID NO: 1411363 - DNA, 15 bp, Homo sapiens
caggtggcacttgct

SEQ ID NO: 1411364 - DNA, 15 bp, Homo sapiens
ccaggtggcacttgc

SEQ ID NO: 1411365 - DNA, 15 bp, Homo sapiens
accaggtggcacttg

SEQ ID NO: 1411366 - DNA, 15 bp, Homo sapiens
taccaggtggcactt

SEQ ID NO: 1411367 - DNA, 15 bp, Homo sapiens
ttaccaggtggcact

SEQ ID NO: 1411368 - DNA, 15 bp, Homo sapiens
tttaccaggtggcac

SEQ ID NO: 1411369 - DNA, 15 bp, Homo sapiens
ctttaccaggtggca

SEQ ID NO: 1411370 - DNA, 15 bp, Homo sapiens
tctttaccaggtggc

SEQ ID NO: 1411371 - DNA, 15 bp, Homo sapiens
gtctttaccaggtgg

SEQ ID NO: 1411372 - DNA, 15 bp, Homo sapiens
agtctttaccaggtg

SEQ ID NO: 1411373 - DNA, 15 bp, Homo sapiens
aagtctttaccaggt

SEQ ID NO: 1411374 - DNA, 15 bp, Homo sapiens
caagtctttaccagg

SEQ ID NO: 1411375 - DNA, 15 bp, Homo sapiens
tcaagtctttaccag

SEQ ID NO: 1411376 - DNA, 15 bp, Homo sapiens
atcaagtctttacca

SEQ ID NO: 1411377 - DNA, 15 bp, Homo sapiens
gatcaagtctttacc

SEQ ID NO: 1411378 - DNA, 15 bp, Homo sapiens
tgatcaagtctttac

SEQ ID NO: 1411379 - DNA, 15 bp, Homo sapiens
gtgatcaagtcttta

SEQ ID NO: 1411380 - DNA, 15 bp, Homo sapiens
tgtgatcaagtcttt

SEQ ID NO: 1411381 - DNA, 15 bp, Homo sapiens
ctgtgatcaagtctt

SEQ ID NO: 1411382 - DNA, 15 bp, Homo sapiens
actgtgatcaagtct

SEQ ID NO: 1411383 - DNA, 15 bp, Homo sapiens
cactgtgatcaagtc

SEQ ID NO: 1411384 - DNA, 15 bp, Homo sapiens
ccactgtgatcaagt

SEQ ID NO: 1411385 - DNA, 15 bp, Homo sapiens
tccactgtgatcaag

SEQ ID NO: 1411386 - DNA, 15 bp, Homo sapiens
atccactgtgatcaa

SEQ ID NO: 1411387 - DNA, 15 bp, Homo sapiens
aatccactgtgatca

SEQ ID NO: 1411388 - DNA, 15 bp, Homo sapiens
aaatccactgtgatc

SEQ ID NO: 1411389 - DNA, 15 bp, Homo sapiens
gaaatccactgtgat

SEQ ID NO: 1411390 - DNA, 15 bp, Homo sapiens
tgaaatccactgtga

SEQ ID NO: 1411391 - DNA, 15 bp, Homo sapiens
ttgaaatccactgtg

SEQ ID NO: 1411392 - DNA, 15 bp, Homo sapiens
tttgaaatccactgt

SEQ ID NO: 1411393 - DNA, 15 bp, Homo sapiens
gtttgaaatccactg

SEQ ID NO: 1411394 - DNA, 15 bp, Homo sapiens
tgtttgaaatccact

SEQ ID NO: 1411395 - DNA, 15 bp, Homo sapiens
ttgtttgaaatccac

SEQ ID NO: 1411396 - DNA, 15 bp, Homo sapiens
cttgtttgaaatcca

SEQ ID NO: 1411397 - DNA, 15 bp, Homo sapiens
tcttgtttgaaatcc

SEQ ID NO: 1411398 - DNA, 15 bp, Homo sapiens
gtcttgtttgaaatc

SEQ ID NO: 1411399 - DNA, 15 bp, Homo sapiens
tgtcttgtttgaaat

SEQ ID NO: 1411400 - DNA, 15 bp, Homo sapiens
ttgtcttgtttgaaa

SEQ ID NO: 1411401 - DNA, 15 bp, Homo sapiens
tttgtcttgtttgaa

SEQ ID NO: 1411402 - DNA, 15 bp, Homo sapiens
ctttgtcttgtttga

SEQ ID NO: 1411403 - DNA, 15 bp, Homo sapiens
actttgtcttgtttg

SEQ ID NO: 1411404 - DNA, 15 bp, Homo sapiens
tactttgtcttgttt

SEQ ID NO: 1411405 - DNA, 15 bp, Homo sapiens
atactttgtcttgtt

SEQ ID NO: 1411406 - DNA, 15 bp, Homo sapiens
aatactttgtcttgt

SEQ ID NO: 1411407 - DNA, 15 bp, Homo sapiens
caatactttgtcttg

SEQ ID NO: 1411408 - DNA, 15 bp, Homo sapiens
tcaatactttgtctt

SEQ ID NO: 1411409 - DNA, 15 bp, Homo sapiens
ctcaatactttgtct

SEQ ID NO: 1411410 - DNA, 15 bp, Homo sapiens
cctcaatactttgtc

SEQ ID NO: 1411411 - DNA, 15 bp, Homo sapiens
ccctcaatactttgt

SEQ ID NO: 1411412 - DNA, 15 bp, Homo sapiens
gccctcaatactttg

SEQ ID NO: 1411413 - DNA, 15 bp, Homo sapiens
agccctcaatacttt

SEQ ID NO: 1411414 - DNA, 15 bp, Homo sapiens
cagccctcaatactt

SEQ ID NO: 1411415 - DNA, 15 bp, Homo sapiens
acagccctcaatact

SEQ ID NO: 1411416 - DNA, 15 bp, Homo sapiens
aacagccctcaatac

SEQ ID NO: 1411417 - DNA, 15 bp, Homo sapiens
caacagccctcaata

SEQ ID NO: 1411418 - DNA, 15 bp, Homo sapiens
tcaacagccctcaat

SEQ ID NO: 1411419 - DNA, 15 bp, Homo sapiens
ttcaacagccctcaa

SEQ ID NO: 1411420 - DNA, 15 bp, Homo sapiens
gttcaacagccctca

SEQ ID NO: 1411421 - DNA, 15 bp, Homo sapiens
agttcaacagccctc

SEQ ID NO: 1411422 - DNA, 15 bp, Homo sapiens
cagttcaacagccct

SEQ ID NO: 1411423 - DNA, 15 bp, Homo sapiens
acagttcaacagccc

SEQ ID NO: 1411424 - DNA, 15 bp, Homo sapiens
gacagttcaacagcc

SEQ ID NO: 1411425 - DNA, 15 bp, Homo sapiens
tgacagttcaacagc

SEQ ID NO: 1411426 - DNA, 15 bp, Homo sapiens
ttgacagttcaacag

SEQ ID NO: 1411427 - DNA, 15 bp, Homo sapiens
tttgacagttcaaca

SEQ ID NO: 1411428 - DNA, 15 bp, Homo sapiens
ctttgacagttcaac

SEQ ID NO: 1411429 - DNA, 15 bp, Homo sapiens
tctttgacagttcaa

SEQ ID NO: 1411430 - DNA, 15 bp, Homo sapiens
ttctttgacagttca

SEQ ID NO: 1411431 - DNA, 15 bp, Homo sapiens
attctttgacagttc

SEQ ID NO: 1411432 - DNA, 15 bp, Homo sapiens
aattctttgacagtt

SEQ ID NO: 1411433 - DNA, 15 bp, Homo sapiens
aaattctttgacagt

SEQ ID NO: 1411434 - DNA, 15 bp, Homo sapiens
gaaattctttgacag

SEQ ID NO: 1411435 - DNA, 15 bp, Homo sapiens
tgaaattctttgaca

SEQ ID NO: 1411436 - DNA, 15 bp, Homo sapiens
ctgaaattctttgac

SEQ ID NO: 1411437 - DNA, 15 bp, Homo sapiens
gctgaaattctttga

SEQ ID NO: 1411438 - DNA, 15 bp, Homo sapiens
agctgaaattctttg

SEQ ID NO: 1411439 - DNA, 15 bp, Homo sapiens
tagctgaaattcttt

SEQ ID NO: 1411440 - DNA, 15 bp, Homo sapiens
atagctgaaattctt

SEQ ID NO: 1411441 - DNA, 15 bp, Homo sapiens
aatagctgaaattct

SEQ ID NO: 1411442 - DNA, 15 bp, Homo sapiens
taatagctgaaattc

SEQ ID NO: 1411443 - DNA, 15 bp, Homo sapiens
ataatagctgaaatt

SEQ ID NO: 1411444 - DNA, 15 bp, Homo sapiens
aataatagctgaaat

SEQ ID NO: 1411445 - DNA, 15 bp, Homo sapiens
aaataatagctgaaa

SEQ ID NO: 1411446 - DNA, 15 bp, Homo sapiens
gaaataatagctgaa

SEQ ID NO: 1411447 - DNA, 15 bp, Homo sapiens
agaaataatagctga

SEQ ID NO: 1411448 - DNA, 15 bp, Homo sapiens
tagaaataatagctg

SEQ ID NO: 1411449 - DNA, 15 bp, Homo sapiens
atagaaataatagct

SEQ ID NO: 1411450 - DNA, 15 bp, Homo sapiens
aatagaaataatagc

SEQ ID NO: 1411451 - DNA, 15 bp, Homo sapiens
taatagaaataatag

SEQ ID NO: 1411452 - DNA, 15 bp, Homo sapiens
ctaatagaaataata

SEQ ID NO: 1411453 - DNA, 15 bp, Homo sapiens
actaatagaaataat

SEQ ID NO: 1411454 - DNA, 15 bp, Homo sapiens
aactaatagaaataa

SEQ ID NO: 1411455 - DNA, 15 bp, Homo sapiens
aaactaatagaaata

SEQ ID NO: 1411456 - DNA, 15 bp, Homo sapiens
gaaactaatagaaat

SEQ ID NO: 1411457 - DNA, 15 bp, Homo sapiens
agaaactaatagaaa

SEQ ID NO: 1411458 - DNA, 15 bp, Homo sapiens
cagaaactaatagaa

SEQ ID NO: 1411459 - DNA, 15 bp, Homo sapiens
gcagaaactaataga

SEQ ID NO: 1411460 - DNA, 15 bp, Homo sapiens
ggcagaaactaatag

SEQ ID NO: 1411461 - DNA, 15 bp, Homo sapiens
aggcagaaactaata

SEQ ID NO: 1411462 - DNA, 15 bp, Homo sapiens
gaggcagaaactaat

SEQ ID NO: 1411463 - DNA, 15 bp, Homo sapiens
tgaggcagaaactaa

SEQ ID NO: 1411464 - DNA, 15 bp, Homo sapiens
gtgaggcagaaacta

SEQ ID NO: 1411465 - DNA, 15 bp, Homo sapiens
agtgaggcagaaact

SEQ ID NO: 1411466 - DNA, 15 bp, Homo sapiens
tagtgaggcagaaac

SEQ ID NO: 1411467 - DNA, 15 bp, Homo sapiens
atagtgaggcagaaa

SEQ ID NO: 1411468 - DNA, 15 bp, Homo sapiens
gatagtgaggcagaa

SEQ ID NO: 1411469 - DNA, 15 bp, Homo sapiens
ggatagtgaggcaga

SEQ ID NO: 1411470 - DNA, 15 bp, Homo sapiens
tggatagtgaggcag

SEQ ID NO: 1411471 - DNA, 15 bp, Homo sapiens
atggatagtgaggca

SEQ ID NO: 1411472 - DNA, 15 bp, Homo sapiens
gatggatagtgaggc

SEQ ID NO: 1411473 - DNA, 15 bp, Homo sapiens
cgatggatagtgagg

SEQ ID NO: 1411474 - DNA, 15 bp, Homo sapiens
tcgatggatagtgag

SEQ ID NO: 1411475 - DNA, 15 bp, Homo sapiens
ctcgatggatagtga

SEQ ID NO: 1411476 - DNA, 15 bp, Homo sapiens
actcgatggatagtg

SEQ ID NO: 1411477 - DNA, 15 bp, Homo sapiens
aactcgatggatagt

SEQ ID NO: 1411478 - DNA, 15 bp, Homo sapiens
caactcgatggatag

SEQ ID NO: 1411479 - DNA, 15 bp, Homo sapiens
acaactcgatggata

SEQ ID NO: 1411480 - DNA, 15 bp, Homo sapiens
aacaactcgatggat

SEQ ID NO: 1411481 - DNA, 15 bp, Homo sapiens
aaacaactcgatgga

SEQ ID NO: 1411482 - DNA, 15 bp, Homo sapiens
caaacaactcgatgg

SEQ ID NO: 1411483 - DNA, 15 bp, Homo sapiens
acaaacaactcgatg

SEQ ID NO: 1411484 - DNA, 15 bp, Homo sapiens
tacaaacaactcgat

SEQ ID NO: 1411485 - DNA, 15 bp, Homo sapiens
atacaaacaactcga

SEQ ID NO: 1411486 - DNA, 15 bp, Homo sapiens
catacaaacaactcg

SEQ ID NO: 1411487 - DNA, 15 bp, Homo sapiens
gcatacaaacaactc

SEQ ID NO: 1411488 - DNA, 15 bp, Homo sapiens
ggcatacaaacaact

SEQ ID NO: 1411489 - DNA, 15 bp, Homo sapiens
tggcatacaaacaac

SEQ ID NO: 1411490 - DNA, 15 bp, Homo sapiens
ctggcatacaaacaa

SEQ ID NO: 1411491 - DNA, 15 bp, Homo sapiens
cctggcatacaaaca

SEQ ID NO: 1411492 - DNA, 15 bp, Homo sapiens
tcctggcatacaaac

SEQ ID NO: 1411493 - DNA, 15 bp, Homo sapiens
atcctggcatacaaa

SEQ ID NO: 1411494 - DNA, 15 bp, Homo sapiens
tatcctggcatacaa

SEQ ID NO: 1411495 - DNA, 15 bp, Homo sapiens
ctatcctggcataca

SEQ ID NO: 1411496 - DNA, 15 bp, Homo sapiens
cctatcctggcatac

SEQ ID NO: 1411497 - DNA, 15 bp, Homo sapiens
gcctatcctggcata

SEQ ID NO: 1411498 - DNA, 15 bp, Homo sapiens
ggcctatcctggcat

SEQ ID NO: 1411499 - DNA, 15 bp, Homo sapiens
tggcctatcctggca

SEQ ID NO: 1411500 - DNA, 15 bp, Homo sapiens
ttggcctatcctggc

SEQ ID NO: 1411501 - DNA, 15 bp, Homo sapiens
cttggcctatcctgg

SEQ ID NO: 1411502 - DNA, 15 bp, Homo sapiens
acttggcctatcctg

SEQ ID NO: 1411503 - DNA, 15 bp, Homo sapiens
aacttggcctatcct

SEQ ID NO: 1411504 - DNA, 15 bp, Homo sapiens
gaacttggcctatcc

SEQ ID NO: 1411505 - DNA, 15 bp, Homo sapiens
agaacttggcctatc

SEQ ID NO: 1411506 - DNA, 15 bp, Homo sapiens
gagaacttggcctat

SEQ ID NO: 1411507 - DNA, 15 bp, Homo sapiens
agagaacttggccta

SEQ ID NO: 1411508 - DNA, 15 bp, Homo sapiens
cagagaacttggcct

SEQ ID NO: 1411509 - DNA, 15 bp, Homo sapiens
ccagagaacttggcc

SEQ ID NO: 1411510 - DNA, 15 bp, Homo sapiens
gccagagaacttggc

SEQ ID NO: 1411511 - DNA, 15 bp, Homo sapiens
agccagagaacttgg

SEQ ID NO: 1411512 - DNA, 15 bp, Homo sapiens
gagccagagaacttg

SEQ ID NO: 1411513 - DNA, 15 bp, Homo sapiens
agagccagagaactt

SEQ ID NO: 1411514 - DNA, 15 bp, Homo sapiens
aagagccagagaact

SEQ ID NO: 1411515 - DNA, 15 bp, Homo sapiens
caagagccagagaac

SEQ ID NO: 1411516 - DNA, 15 bp, Homo sapiens
acaagagccagagaa

SEQ ID NO: 1411517 - DNA, 15 bp, Homo sapiens
cacaagagccagaga

SEQ ID NO: 1411518 - DNA, 15 bp, Homo sapiens
tcacaagagccagag

SEQ ID NO: 1411519 - DNA, 15 bp, Homo sapiens
ctcacaagagccaga

SEQ ID NO: 1411520 - DNA, 15 bp, Homo sapiens
gctcacaagagccag

SEQ ID NO: 1411521 - DNA, 15 bp, Homo sapiens
agctcacaagagcca

SEQ ID NO: 1411522 - DNA, 15 bp, Homo sapiens
aagctcacaagagcc

SEQ ID NO: 1411523 - DNA, 15 bp, Homo sapiens
caagctcacaagagc

SEQ ID NO: 1411524 - DNA, 15 bp, Homo sapiens
acaagctcacaagag

SEQ ID NO: 1411525 - DNA, 15 bp, Homo sapiens
cacaagctcacaaga

SEQ ID NO: 1411526 - DNA, 15 bp, Homo sapiens
acacaagctcacaag

SEQ ID NO: 1411527 - DNA, 15 bp, Homo sapiens
tacacaagctcacaa

SEQ ID NO: 1411528 - DNA, 15 bp, Homo sapiens
ttacacaagctcaca

SEQ ID NO: 1411529 - DNA, 15 bp, Homo sapiens
cttacacaagctcac

SEQ ID NO: 1411530 - DNA, 15 bp, Homo sapiens
acttacacaagctca

SEQ ID NO: 1411531 - DNA, 15 bp, Homo sapiens
gacttacacaagctc

SEQ ID NO: 1411532 - DNA, 15 bp, Homo sapiens
tgacttacacaagct

SEQ ID NO: 1411533 - DNA, 15 bp, Homo sapiens
ctgacttacacaagc

SEQ ID NO: 1411534 - DNA, 15 bp, Homo sapiens
actgacttacacaag

SEQ ID NO: 1411535 - DNA, 15 bp, Homo sapiens
cactgacttacacaa

SEQ ID NO: 1411536 - DNA, 15 bp, Homo sapiens
acactgacttacaca

SEQ ID NO: 1411537 - DNA, 15 bp, Homo sapiens
tacactgacttacac

SEQ ID NO: 1411538 - DNA, 15 bp, Homo sapiens
ctacactgacttaca

SEQ ID NO: 1411539 - DNA, 15 bp, Homo sapiens
gctacactgacttac

SEQ ID NO: 1411540 - DNA, 15 bp, Homo sapiens
agctacactgactta

SEQ ID NO: 1411541 - DNA, 15 bp, Homo sapiens
gagctacactgactt

SEQ ID NO: 1411542 - DNA, 15 bp, Homo sapiens
agagctacactgact

SEQ ID NO: 1411543 - DNA, 15 bp, Homo sapiens
gagagctacactgac

SEQ ID NO: 1411544 - DNA, 15 bp, Homo sapiens
agagagctacactga

SEQ ID NO: 1411545 - DNA, 15 bp, Homo sapiens
cagagagctacactg

SEQ ID NO: 1411546 - DNA, 15 bp, Homo sapiens
gcagagagctacact

SEQ ID NO: 1411547 - DNA, 15 bp, Homo sapiens
agcagagagctacac

SEQ ID NO: 1411548 - DNA, 15 bp, Homo sapiens
gagcagagagctaca

SEQ ID NO: 1411549 - DNA, 15 bp, Homo sapiens
agagcagagagctac

SEQ ID NO: 1411550 - DNA, 15 bp, Homo sapiens
aagagcagagagcta

SEQ ID NO: 1411551 - DNA, 15 bp, Homo sapiens
caagagcagagagct

SEQ ID NO: 1411552 - DNA, 15 bp, Homo sapiens
tcaagagcagagagc

SEQ ID NO: 1411553 - DNA, 15 bp, Homo sapiens
ttcaagagcagagag

SEQ ID NO: 1411554 - DNA, 15 bp, Homo sapiens
tttcaagagcagaga

SEQ ID NO: 1411555 - DNA, 15 bp, Homo sapiens
ttttcaagagcagag

SEQ ID NO: 1411556 - DNA, 15 bp, Homo sapiens
tttttcaagagcaga

SEQ ID NO: 1411557 - DNA, 15 bp, Homo sapiens
ctttttcaagagcag

SEQ ID NO: 1411558 - DNA, 15 bp, Homo sapiens
gctttttcaagagca

SEQ ID NO: 1411559 - DNA, 15 bp, Homo sapiens
ggctttttcaagagc

SEQ ID NO: 1411560 - DNA, 15 bp, Homo sapiens
gggctttttcaagag

SEQ ID NO: 1411561 - DNA, 15 bp, Homo sapiens
tgggctttttcaaga

SEQ ID NO: 1411562 - DNA, 15 bp, Homo sapiens
ttgggctttttcaag

SEQ ID NO: 1411563 - DNA, 15 bp, Homo sapiens
tttgggctttttcaa

SEQ ID NO: 1411564 - DNA, 15 bp, Homo sapiens
ttttgggctttttca

SEQ ID NO: 1411565 - DNA, 15 bp, Homo sapiens
tttttgggctttttc

SEQ ID NO: 1411566 - DNA, 15 bp, Homo sapiens
ctttttgggcttttt

SEQ ID NO: 1411567 - DNA, 15 bp, Homo sapiens
actttttgggctttt

SEQ ID NO: 1411568 - DNA, 15 bp, Homo sapiens
cactttttgggcttt

SEQ ID NO: 1411569 - DNA, 15 bp, Homo sapiens
tcactttttgggctt

SEQ ID NO: 1411570 - DNA, 15 bp, Homo sapiens
ttcactttttgggct

SEQ ID NO: 1411571 - DNA, 15 bp, Homo sapiens
attcactttttgggc

SEQ ID NO: 1411572 - DNA, 15 bp, Homo sapiens
aattcactttttggg

SEQ ID NO: 1411573 - DNA, 15 bp, Homo sapiens
taattcactttttgg

SEQ ID NO: 1411574 - DNA, 15 bp, Homo sapiens
ttaattcactttttg

SEQ ID NO: 1411575 - DNA, 15 bp, Homo sapiens
gttaattcacttttt

SEQ ID NO: 1411576 - DNA, 15 bp, Homo sapiens
tgttaattcactttt

SEQ ID NO: 1411577 - DNA, 15 bp, Homo sapiens
atgttaattcacttt

SEQ ID NO: 1411578 - DNA, 15 bp, Homo sapiens
aatgttaattcactt

SEQ ID NO: 1411579 - DNA, 15 bp, Homo sapiens
aaatgttaattcact

SEQ ID NO: 1411580 - DNA, 15 bp, Homo sapiens
caaatgttaattcac

SEQ ID NO: 1411581 - DNA, 15 bp, Homo sapiens
acaaatgttaattca

SEQ ID NO: 1411582 - DNA, 15 bp, Homo sapiens
tacaaatgttaattc

SEQ ID NO: 1411583 - DNA, 15 bp, Homo sapiens
atacaaatgttaatt

SEQ ID NO: 1411584 - DNA, 15 bp, Homo sapiens
tatacaaatgttaat

SEQ ID NO: 1411585 - DNA, 15 bp, Homo sapiens
ctatacaaatgttaa

SEQ ID NO: 1411586 - DNA, 15 bp, Homo sapiens
tctatacaaatgtta

SEQ ID NO: 1411587 - DNA, 15 bp, Homo sapiens
gtctatacaaatgtt

SEQ ID NO: 1411588 - DNA, 15 bp, Homo sapiens
agtctatacaaatgt

SEQ ID NO: 1411589 - DNA, 15 bp, Homo sapiens
aagtctatacaaatg

SEQ ID NO: 1411590 - DNA, 15 bp, Homo sapiens
taagtctatacaaat

SEQ ID NO: 1411591 - DNA, 15 bp, Homo sapiens
ctaagtctatacaaa

SEQ ID NO: 1411592 - DNA, 15 bp, Homo sapiens
tctaagtctatacaa

SEQ ID NO: 1411593 - DNA, 15 bp, Homo sapiens
ttctaagtctataca

SEQ ID NO: 1411594 - DNA, 15 bp, Homo sapiens
gttctaagtctatac

SEQ ID NO: 1411595 - DNA, 15 bp, Homo sapiens
agttctaagtctata

SEQ ID NO: 1411596 - DNA, 15 bp, Homo sapiens
cagttctaagtctat

SEQ ID NO: 1411597 - DNA, 15 bp, Homo sapiens
acagttctaagtcta

SEQ ID NO: 1411598 - DNA, 15 bp, Homo sapiens
tacagttctaagtct

SEQ ID NO: 1411599 - DNA, 15 bp, Homo sapiens
ttacagttctaagtc

SEQ ID NO: 1411600 - DNA, 15 bp, Homo sapiens
gttacagttctaagt

SEQ ID NO: 1411601 - DNA, 15 bp, Homo sapiens
agttacagttctaag

SEQ ID NO: 1411602 - DNA, 15 bp, Homo sapiens
tagttacagttctaa

SEQ ID NO: 1411603 - DNA, 15 bp, Homo sapiens
ctagttacagttcta

SEQ ID NO: 1411604 - DNA, 15 bp, Homo sapiens
gctagttacagttct

SEQ ID NO: 1411605 - DNA, 15 bp, Homo sapiens
agctagttacagttc

SEQ ID NO: 1411606 - DNA, 15 bp, Homo sapiens
gagctagttacagtt

SEQ ID NO: 1411607 - DNA, 15 bp, Homo sapiens
tgagctagttacagt

SEQ ID NO: 1411608 - DNA, 15 bp, Homo sapiens
atgagctagttacag

SEQ ID NO: 1411609 - DNA, 15 bp, Homo sapiens
tatgagctagttaca

SEQ ID NO: 1411610 - DNA, 15 bp, Homo sapiens
ttatgagctagttac

SEQ ID NO: 1411611 - DNA, 15 bp, Homo sapiens
tttatgagctagtta

SEQ ID NO: 1411612 - DNA, 15 bp, Homo sapiens
atttatgagctagtt

SEQ ID NO: 1411613 - DNA, 15 bp, Homo sapiens
tatttatgagctagt

SEQ ID NO: 1411614 - DNA, 15 bp, Homo sapiens
ctatttatgagctag

SEQ ID NO: 1411615 - DNA, 15 bp, Homo sapiens
actatttatgagcta

SEQ ID NO: 1411616 - DNA, 15 bp, Homo sapiens
tactatttatgagct

SEQ ID NO: 1411617 - DNA, 15 bp, Homo sapiens
ctactatttatgagc

SEQ ID NO: 1411618 - DNA, 15 bp, Homo sapiens
gctactatttatgag

SEQ ID NO: 1411619 - DNA, 15 bp, Homo sapiens
ggctactatttatga

SEQ ID NO: 1411620 - DNA, 15 bp, Homo sapiens
tggctactatttatg

SEQ ID NO: 1411621 - DNA, 15 bp, Homo sapiens
gtggctactatttat

SEQ ID NO: 1411622 - DNA, 15 bp, Homo sapiens
agtggctactattta

SEQ ID NO: 1411623 - DNA, 15 bp, Homo sapiens
tagtggctactattt

SEQ ID NO: 1411624 - DNA, 15 bp, Homo sapiens
ctagtggctactatt

SEQ ID NO: 1411625 - DNA, 15 bp, Homo sapiens
actagtggctactat

SEQ ID NO: 1411626 - DNA, 15 bp, Homo sapiens
tactagtggctacta

SEQ ID NO: 1411627 - DNA, 15 bp, Homo sapiens
atactagtggctact

SEQ ID NO: 1411628 - DNA, 15 bp, Homo sapiens
aatactagtggctac

SEQ ID NO: 1411629 - DNA, 15 bp, Homo sapiens
taatactagtggcta

SEQ ID NO: 1411630 - DNA, 15 bp, Homo sapiens
ataatactagtggct

SEQ ID NO: 1411631 - DNA, 15 bp, Homo sapiens
gataatactagtggc

SEQ ID NO: 1411632 - DNA, 15 bp, Homo sapiens
tgataatactagtgg

SEQ ID NO: 1411633 - DNA, 15 bp, Homo sapiens
gtgataatactagtg

SEQ ID NO: 1411634 - DNA, 15 bp, Homo sapiens
agtgataatactagt

SEQ ID NO: 1411635 - DNA, 15 bp, Homo sapiens
gagtgataatactag

SEQ ID NO: 1411636 - DNA, 15 bp, Homo sapiens
tgagtgataatacta

SEQ ID NO: 1411637 - DNA, 15 bp, Homo sapiens
ctgagtgataatact

SEQ ID NO: 1411638 - DNA, 15 bp, Homo sapiens
tctgagtgataatac

SEQ ID NO: 1411639 - DNA, 15 bp, Homo sapiens
ctctgagtgataata

SEQ ID NO: 1411640 - DNA, 15 bp, Homo sapiens
gctctgagtgataat

SEQ ID NO: 1411641 - DNA, 15 bp, Homo sapiens
tgctctgagtgataa

SEQ ID NO: 1411642 - DNA, 15 bp, Homo sapiens
ctgctctgagtgata

SEQ ID NO: 1411643 - DNA, 15 bp, Homo sapiens
cctgctctgagtgat

SEQ ID NO: 1411644 - DNA, 15 bp, Homo sapiens
tcctgctctgagtga

SEQ ID NO: 1411645 - DNA, 15 bp, Homo sapiens
ttcctgctctgagtg

SEQ ID NO: 1411646 - DNA, 15 bp, Homo sapiens
tttcctgctctgagt

SEQ ID NO: 1411647 - DNA, 15 bp, Homo sapiens
ttttcctgctctgag

SEQ ID NO: 1411648 - DNA, 15 bp, Homo sapiens
cttttcctgctctga

SEQ ID NO: 1411649 - DNA, 15 bp, Homo sapiens
gcttttcctgctctg

SEQ ID NO: 1411650 - DNA, 15 bp, Homo sapiens
tgcttttcctgctct

SEQ ID NO: 1411651 - DNA, 15 bp, Homo sapiens
atgcttttcctgctc

SEQ ID NO: 1411652 - DNA, 15 bp, Homo sapiens
gatgcttttcctgct

SEQ ID NO: 1411653 - DNA, 15 bp, Homo sapiens
agatgcttttcctgc

SEQ ID NO: 1411654 - DNA, 15 bp, Homo sapiens
cagatgcttttcctg

SEQ ID NO: 1411655 - DNA, 15 bp, Homo sapiens
gcagatgcttttcct

SEQ ID NO: 1411656 - DNA, 15 bp, Homo sapiens
tgcagatgcttttcc

SEQ ID NO: 1411657 - DNA, 15 bp, Homo sapiens
gtgcagatgcttttc

SEQ ID NO: 1411658 - DNA, 15 bp, Homo sapiens
tgtgcagatgctttt

SEQ ID NO: 1411659 - DNA, 15 bp, Homo sapiens
ctgtgcagatgcttt

SEQ ID NO: 1411660 - DNA, 15 bp, Homo sapiens
tctgtgcagatgctt

SEQ ID NO: 1411661 - DNA, 15 bp, Homo sapiens
ctctgtgcagatgct

SEQ ID NO: 1411662 - DNA, 15 bp, Homo sapiens
cctctgtgcagatgc

SEQ ID NO: 1411663 - DNA, 15 bp, Homo sapiens
acctctgtgcagatg

SEQ ID NO: 1411664 - DNA, 15 bp, Homo sapiens
cacctctgtgcagat

SEQ ID NO: 1411665 - DNA, 15 bp, Homo sapiens
tcacctctgtgcaga

SEQ ID NO: 1411666 - DNA, 15 bp, Homo sapiens
gtcacctctgtgcag

SEQ ID NO: 1411667 - DNA, 15 bp, Homo sapiens
cgtcacctctgtgca

SEQ ID NO: 1411668 - DNA, 15 bp, Homo sapiens
gcgtcacctctgtgc

SEQ ID NO: 1411669 - DNA, 15 bp, Homo sapiens
agcgtcacctctgtg

SEQ ID NO: 1411670 - DNA, 15 bp, Homo sapiens
cagcgtcacctctgt

SEQ ID NO: 1411671 - DNA, 15 bp, Homo sapiens
ccagcgtcacctctg

SEQ ID NO: 1411672 - DNA, 15 bp, Homo sapiens
accagcgtcacctct

SEQ ID NO: 1411673 - DNA, 15 bp, Homo sapiens
aaccagcgtcacctc

SEQ ID NO: 1411674 - DNA, 15 bp, Homo sapiens
aaaccagcgtcacct

SEQ ID NO: 1411675 - DNA, 15 bp, Homo sapiens
gaaaccagcgtcacc

SEQ ID NO: 1411676 - DNA, 15 bp, Homo sapiens
agaaaccagcgtcac

SEQ ID NO: 1411677 - DNA, 15 bp, Homo sapiens
gagaaaccagcgtca

SEQ ID NO: 1411678 - DNA, 15 bp, Homo sapiens
agagaaaccagcgtc

SEQ ID NO: 1411679 - DNA, 15 bp, Homo sapiens
cagagaaaccagcgt

SEQ ID NO: 1411680 - DNA, 15 bp, Homo sapiens
tcagagaaaccagcg

SEQ ID NO: 1411681 - DNA, 15 bp, Homo sapiens
atcagagaaaccagc

SEQ ID NO: 1411682 - DNA, 15 bp, Homo sapiens
catcagagaaaccag

SEQ ID NO: 1411683 - DNA, 15 bp, Homo sapiens
acatcagagaaacca

SEQ ID NO: 1411684 - DNA, 15 bp, Homo sapiens
cacatcagagaaacc

SEQ ID NO: 1411685 - DNA, 15 bp, Homo sapiens
tcacatcagagaaac

SEQ ID NO: 1411686 - DNA, 15 bp, Homo sapiens
ctcacatcagagaaa

SEQ ID NO: 1411687 - DNA, 15 bp, Homo sapiens
gctcacatcagagaa

SEQ ID NO: 1411688 - DNA, 15 bp, Homo sapiens
ggctcacatcagaga

SEQ ID NO: 1411689 - DNA, 15 bp, Homo sapiens
aggctcacatcagag

SEQ ID NO: 1411690 - DNA, 15 bp, Homo sapiens
taggctcacatcaga

SEQ ID NO: 1411691 - DNA, 15 bp, Homo sapiens
ctaggctcacatcag

SEQ ID NO: 1411692 - DNA, 15 bp, Homo sapiens
actaggctcacatca

SEQ ID NO: 1411693 - DNA, 15 bp, Homo sapiens
aactaggctcacatc

SEQ ID NO: 1411694 - DNA, 15 bp, Homo sapiens
gaactaggctcacat

SEQ ID NO: 1411695 - DNA, 15 bp, Homo sapiens
tgaactaggctcaca

SEQ ID NO: 1411696 - DNA, 15 bp, Homo sapiens
ctgaactaggctcac

SEQ ID NO: 1411697 - DNA, 15 bp, Homo sapiens
cctgaactaggctca

SEQ ID NO: 1411698 - DNA, 15 bp, Homo sapiens
gcctgaactaggctc

SEQ ID NO: 1411699 - DNA, 15 bp, Homo sapiens
tgcctgaactaggct

SEQ ID NO: 1411700 - DNA, 15 bp, Homo sapiens
ctgcctgaactaggc

SEQ ID NO: 1411701 - DNA, 15 bp, Homo sapiens
actgcctgaactagg

SEQ ID NO: 1411702 - DNA, 15 bp, Homo sapiens
gactgcctgaactag

SEQ ID NO: 1411703 - DNA, 15 bp, Homo sapiens
tgactgcctgaacta

SEQ ID NO: 1411704 - DNA, 15 bp, Homo sapiens
ctgactgcctgaact

SEQ ID NO: 1411705 - DNA, 15 bp, Homo sapiens
cctgactgcctgaac

SEQ ID NO: 1411706 - DNA, 15 bp, Homo sapiens
acctgactgcctgaa

SEQ ID NO: 1411707 - DNA, 15 bp, Homo sapiens
cacctgactgcctga

SEQ ID NO: 1411708 - DNA, 15 bp, Homo sapiens
gcacctgactgcctg

SEQ ID NO: 1411709 - DNA, 15 bp, Homo sapiens
ggcacctgactgcct

SEQ ID NO: 1411710 - DNA, 15 bp, Homo sapiens
gggcacctgactgcc

SEQ ID NO: 1411711 - DNA, 15 bp, Homo sapiens
tgggcacctgactgc

SEQ ID NO: 1411712 - DNA, 15 bp, Homo sapiens
atgggcacctgactg

SEQ ID NO: 1411713 - DNA, 15 bp, Homo sapiens
aatgggcacctgact

SEQ ID NO: 1411714 - DNA, 15 bp, Homo sapiens
aaatgggcacctgac

SEQ ID NO: 1411715 - DNA, 15 bp, Homo sapiens
caaatgggcacctga

SEQ ID NO: 1411716 - DNA, 15 bp, Homo sapiens
tcaaatgggcacctg

SEQ ID NO: 1411717 - DNA, 15 bp, Homo sapiens
atcaaatgggcacct

SEQ ID NO: 1411718 - DNA, 15 bp, Homo sapiens
aatcaaatgggcacc

SEQ ID NO: 1411719 - DNA, 15 bp, Homo sapiens
taatcaaatgggcac

SEQ ID NO: 1411720 - DNA, 15 bp, Homo sapiens
ctaatcaaatgggca

SEQ ID NO: 1411721 - DNA, 15 bp, Homo sapiens
gctaatcaaatgggc

SEQ ID NO: 1411722 - DNA, 15 bp, Homo sapiens
tgctaatcaaatggg

SEQ ID NO: 1411723 - DNA, 15 bp, Homo sapiens
ttgctaatcaaatgg

SEQ ID NO: 1411724 - DNA, 15 bp, Homo sapiens
cttgctaatcaaatg

SEQ ID NO: 1411725 - DNA, 15 bp, Homo sapiens
tcttgctaatcaaat

SEQ ID NO: 1411726 - DNA, 15 bp, Homo sapiens
atcttgctaatcaaa

SEQ ID NO: 1411727 - DNA, 15 bp, Homo sapiens
catcttgctaatcaa

SEQ ID NO: 1411728 - DNA, 15 bp, Homo sapiens
ccatcttgctaatca

SEQ ID NO: 1411729 - DNA, 15 bp, Homo sapiens
gccatcttgctaatc

SEQ ID NO: 1411730 - DNA, 15 bp, Homo sapiens
agccatcttgctaat

SEQ ID NO: 1411731 - DNA, 15 bp, Homo sapiens
cagccatcttgctaa

SEQ ID NO: 1411732 - DNA, 15 bp, Homo sapiens
ccagccatcttgcta

SEQ ID NO: 1411733 - DNA, 15 bp, Homo sapiens
tccagccatcttgct

SEQ ID NO: 1411734 - DNA, 15 bp, Homo sapiens
ctccagccatcttgc

SEQ ID NO: 1411735 - DNA, 15 bp, Homo sapiens
tctccagccatcttg

SEQ ID NO: 1411736 - DNA, 15 bp, Homo sapiens
atctccagccatctt

SEQ ID NO: 1411737 - DNA, 15 bp, Homo sapiens
tatctccagccatct

SEQ ID NO: 1411738 - DNA, 15 bp, Homo sapiens
ttatctccagccatc

SEQ ID NO: 1411739 - DNA, 15 bp, Homo sapiens
attatctccagccat

SEQ ID NO: 1411740 - DNA, 15 bp, Homo sapiens
tattatctccagcca

SEQ ID NO: 1411741 - DNA, 15 bp, Homo sapiens
ttattatctccagcc

SEQ ID NO: 1411742 - DNA, 15 bp, Homo sapiens
attattatctccagc

SEQ ID NO: 1411743 - DNA, 15 bp, Homo sapiens
gattattatctccag

SEQ ID NO: 1411744 - DNA, 15 bp, Homo sapiens
tgattattatctcca

SEQ ID NO: 1411745 - DNA, 15 bp, Homo sapiens
ctgattattatctcc

SEQ ID NO: 1411746 - DNA, 15 bp, Homo sapiens
cctgattattatctc

SEQ ID NO: 1411747 - DNA, 15 bp, Homo sapiens
ccctgattattatct

SEQ ID NO: 1411748 - DNA, 15 bp, Homo sapiens
accctgattattatc

SEQ ID NO: 1411749 - DNA, 15 bp, Homo sapiens
taccctgattattat

SEQ ID NO: 1411750 - DNA, 15 bp, Homo sapiens
ttaccctgattatta

SEQ ID NO: 1411751 - DNA, 15 bp, Homo sapiens
tttaccctgattatt

SEQ ID NO: 1411752 - DNA, 15 bp, Homo sapiens
ctttaccctgattat

SEQ ID NO: 1411753 - DNA, 15 bp, Homo sapiens
cctttaccctgatta

SEQ ID NO: 1411754 - DNA, 15 bp, Homo sapiens
tcctttaccctgatt

SEQ ID NO: 1411755 - DNA, 15 bp, Homo sapiens
ttcctttaccctgat

SEQ ID NO: 1411756 - DNA, 15 bp, Homo sapiens
tttcctttaccctga

SEQ ID NO: 1411757 - DNA, 15 bp, Homo sapiens
ctttcctttaccctg

SEQ ID NO: 1411758 - DNA, 15 bp, Homo sapiens
cctttcctttaccct

SEQ ID NO: 1411759 - DNA, 15 bp, Homo sapiens
tcctttcctttaccc

SEQ ID NO: 1411760 - DNA, 15 bp, Homo sapiens
ttcctttcctttacc

SEQ ID NO: 1411761 - DNA, 15 bp, Homo sapiens
tttcctttcctttac

SEQ ID NO: 1411762 - DNA, 15 bp, Homo sapiens
ctttcctttccttta

SEQ ID NO: 1411763 - DNA, 15 bp, Homo sapiens
tctttcctttccttt

SEQ ID NO: 1411764 - DNA, 15 bp, Homo sapiens
atctttcctttcctt

SEQ ID NO: 1411765 - DNA, 15 bp, Homo sapiens
gatctttcctttcct

SEQ ID NO: 1411766 - DNA, 15 bp, Homo sapiens
ggatctttcctttcc

SEQ ID NO: 1411767 - DNA, 15 bp, Homo sapiens
gggatctttcctttc

SEQ ID NO: 1411768 - DNA, 15 bp, Homo sapiens
tgggatctttccttt

SEQ ID NO: 1411769 - DNA, 15 bp, Homo sapiens
atgggatctttcctt

SEQ ID NO: 1411770 - DNA, 15 bp, Homo sapiens
gatgggatctttcct

SEQ ID NO: 1411771 - DNA, 15 bp, Homo sapiens
cgatgggatctttcc

SEQ ID NO: 1411772 - DNA, 15 bp, Homo sapiens
tcgatgggatctttc

SEQ ID NO: 1411773 - DNA, 15 bp, Homo sapiens
ttcgatgggatcttt

SEQ ID NO: 1411774 - DNA, 15 bp, Homo sapiens
cttcgatgggatctt

SEQ ID NO: 1411775 - DNA, 15 bp, Homo sapiens
ccttcgatgggatct

SEQ ID NO: 1411776 - DNA, 15 bp, Homo sapiens
gccttcgatgggatc

SEQ ID NO: 1411777 - DNA, 15 bp, Homo sapiens
agccttcgatgggat

SEQ ID NO: 1411778 - DNA, 15 bp, Homo sapiens
gagccttcgatggga

SEQ ID NO: 1411779 - DNA, 15 bp, Homo sapiens
ggagccttcgatggg

SEQ ID NO: 1411780 - DNA, 15 bp, Homo sapiens
tggagccttcgatgg

SEQ ID NO: 1411781 - DNA, 15 bp, Homo sapiens
ctggagccttcgatg

SEQ ID NO: 1411782 - DNA, 15 bp, Homo sapiens
tctggagccttcgat

SEQ ID NO: 1411783 - DNA, 15 bp, Homo sapiens
ttctggagccttcga

SEQ ID NO: 1411784 - DNA, 15 bp, Homo sapiens
cttctggagccttcg

SEQ ID NO: 1411785 - DNA, 15 bp, Homo sapiens
acttctggagccttc

SEQ ID NO: 1411786 - DNA, 15 bp, Homo sapiens
aacttctggagcctt

SEQ ID NO: 1411787 - DNA, 15 bp, Homo sapiens
aaacttctggagcct

SEQ ID NO: 1411788 - DNA, 15 bp, Homo sapiens
caaacttctggagcc

SEQ ID NO: 1411789 - DNA, 15 bp, Homo sapiens
acaaacttctggagc

SEQ ID NO: 1411790 - DNA, 15 bp, Homo sapiens
cacaaacttctggag

SEQ ID NO: 1411791 - DNA, 15 bp, Homo sapiens
ccacaaacttctgga

SEQ ID NO: 1411792 - DNA, 15 bp, Homo sapiens
gccacaaacttctgg

SEQ ID NO: 1411793 - DNA, 15 bp, Homo sapiens
tgccacaaacttctg

SEQ ID NO: 1411794 - DNA, 15 bp, Homo sapiens
gtgccacaaacttct

SEQ ID NO: 1411795 - DNA, 15 bp, Homo sapiens
tgtgccacaaacttc

SEQ ID NO: 1411796 - DNA, 15 bp, Homo sapiens
ctgtgccacaaactt

SEQ ID NO: 1411797 - DNA, 15 bp, Homo sapiens
tctgtgccacaaact

SEQ ID NO: 1411798 - DNA, 15 bp, Homo sapiens
atctgtgccacaaac

SEQ ID NO: 1411799 - DNA, 15 bp, Homo sapiens
gatctgtgccacaaa

SEQ ID NO: 1411800 - DNA, 15 bp, Homo sapiens
tgatctgtgccacaa

SEQ ID NO: 1411801 - DNA, 15 bp, Homo sapiens
atgatctgtgccaca

SEQ ID NO: 1411802 - DNA, 15 bp, Homo sapiens
tatgatctgtgccac

SEQ ID NO: 1411803 - DNA, 15 bp, Homo sapiens
gtatgatctgtgcca

SEQ ID NO: 1411804 - DNA, 15 bp, Homo sapiens
agtatgatctgtgcc

SEQ ID NO: 1411805 - DNA, 15 bp, Homo sapiens
aagtatgatctgtgc

SEQ ID NO: 1411806 - DNA, 15 bp, Homo sapiens
gaagtatgatctgtg

SEQ ID NO: 1411807 - DNA, 15 bp, Homo sapiens
ggaagtatgatctgt

SEQ ID NO: 1411808 - DNA, 15 bp, Homo sapiens
aggaagtatgatctg

SEQ ID NO: 1411809 - DNA, 15 bp, Homo sapiens
aaggaagtatgatct

SEQ ID NO: 1411810 - DNA, 15 bp, Homo sapiens
caaggaagtatgatc

SEQ ID NO: 1411811 - DNA, 15 bp, Homo sapiens
acaaggaagtatgat

SEQ ID NO: 1411812 - DNA, 15 bp, Homo sapiens
aacaaggaagtatga

SEQ ID NO: 1411813 - DNA, 15 bp, Homo sapiens
caacaaggaagtatg

SEQ ID NO: 1411814 - DNA, 15 bp, Homo sapiens
acaacaaggaagtat

SEQ ID NO: 1411815 - DNA, 15 bp, Homo sapiens
aacaacaaggaagta

SEQ ID NO: 1411816 - DNA, 15 bp, Homo sapiens
aaacaacaaggaagt

SEQ ID NO: 1411817 - DNA, 15 bp, Homo sapiens
caaacaacaaggaag

SEQ ID NO: 1411818 - DNA, 15 bp, Homo sapiens
acaaacaacaaggaa

SEQ ID NO: 1411819 - DNA, 15 bp, Homo sapiens
aacaaacaacaagga

SEQ ID NO: 1411820 - DNA, 15 bp, Homo sapiens
aaacaaacaacaagg

SEQ ID NO: 1411821 - DNA, 15 bp, Homo sapiens
aaaacaaacaacaag

SEQ ID NO: 1411822 - DNA, 15 bp, Homo sapiens
gaaaacaaacaacaa

SEQ ID NO: 1411823 - DNA, 15 bp, Homo sapiens
ggaaaacaaacaaca

SEQ ID NO: 1411824 - DNA, 15 bp, Homo sapiens
aggaaaacaaacaac

SEQ ID NO: 1411825 - DNA, 15 bp, Homo sapiens
caggaaaacaaacaa

SEQ ID NO: 1411826 - DNA, 15 bp, Homo sapiens
gcaggaaaacaaaca

SEQ ID NO: 1411827 - DNA, 15 bp, Homo sapiens
tgcaggaaaacaaac

SEQ ID NO: 1411828 - DNA, 15 bp, Homo sapiens
ttgcaggaaaacaaa

SEQ ID NO: 1411829 - DNA, 15 bp, Homo sapiens
tttgcaggaaaacaa

SEQ ID NO: 1411830 - DNA, 15 bp, Homo sapiens
ctttgcaggaaaaca

SEQ ID NO: 1411831 - DNA, 15 bp, Homo sapiens
tctttgcaggaaaac

SEQ ID NO: 1411832 - DNA, 15 bp, Homo sapiens
ctctttgcaggaaaa

SEQ ID NO: 1411833 - DNA, 15 bp, Homo sapiens
tctctttgcaggaaa

SEQ ID NO: 1411834 - DNA, 15 bp, Homo sapiens
ttctctttgcaggaa

SEQ ID NO: 1411835 - DNA, 15 bp, Homo sapiens
attctctttgcagga

SEQ ID NO: 1411836 - DNA, 15 bp, Homo sapiens
cattctctttgcagg

SEQ ID NO: 1411837 - DNA, 15 bp, Homo sapiens
acattctctttgcag

SEQ ID NO: 1411838 - DNA, 15 bp, Homo sapiens
tacattctctttgca

SEQ ID NO: 1411839 - DNA, 15 bp, Homo sapiens
ttacattctctttgc

SEQ ID NO: 1411840 - DNA, 15 bp, Homo sapiens
cttacattctctttg

SEQ ID NO: 1411841 - DNA, 15 bp, Homo sapiens
tcttacattctcttt

SEQ ID NO: 1411842 - DNA, 15 bp, Homo sapiens
atcttacattctctt

SEQ ID NO: 1411843 - DNA, 15 bp, Homo sapiens
gatcttacattctct

SEQ ID NO: 1411844 - DNA, 15 bp, Homo sapiens
tgatcttacattctc

SEQ ID NO: 1411845 - DNA, 15 bp, Homo sapiens
ctgatcttacattct

SEQ ID NO: 1411846 - DNA, 15 bp, Homo sapiens
tctgatcttacattc

SEQ ID NO: 1411847 - DNA, 15 bp, Homo sapiens
atctgatcttacatt

SEQ ID NO: 1411848 - DNA, 15 bp, Homo sapiens
catctgatcttacat

SEQ ID NO: 1411849 - DNA, 15 bp, Homo sapiens
acatctgatcttaca

SEQ ID NO: 1411850 - DNA, 15 bp, Homo sapiens
cacatctgatcttac

SEQ ID NO: 1411851 - DNA, 15 bp, Homo sapiens
tcacatctgatctta

SEQ ID NO: 1411852 - DNA, 15 bp, Homo sapiens
gtcacatctgatctt

SEQ ID NO: 1411853 - DNA, 15 bp, Homo sapiens
agtcacatctgatct

SEQ ID NO: 1411854 - DNA, 15 bp, Homo sapiens
aagtcacatctgatc

SEQ ID NO: 1411855 - DNA, 15 bp, Homo sapiens
aaagtcacatctgat

SEQ ID NO: 1411856 - DNA, 15 bp, Homo sapiens
taaagtcacatctga

SEQ ID NO: 1411857 - DNA, 15 bp, Homo sapiens
gtaaagtcacatctg

SEQ ID NO: 1411858 - DNA, 15 bp, Homo sapiens
agtaaagtcacatct

SEQ ID NO: 1411859 - DNA, 15 bp, Homo sapiens
aagtaaagtcacatc

SEQ ID NO: 1411860 - DNA, 15 bp, Homo sapiens
aaagtaaagtcacat

SEQ ID NO: 1411861 - DNA, 15 bp, Homo sapiens
aaaagtaaagtcaca

SEQ ID NO: 1411862 - DNA, 15 bp, Homo sapiens
caaaagtaaagtcac

SEQ ID NO: 1411863 - DNA, 15 bp, Homo sapiens
tcaaaagtaaagtca

SEQ ID NO: 1411864 - DNA, 15 bp, Homo sapiens
gtcaaaagtaaagtc

SEQ ID NO: 1411865 - DNA, 15 bp, Homo sapiens
tgtcaaaagtaaagt

SEQ ID NO: 1411866 - DNA, 15 bp, Homo sapiens
ctgtcaaaagtaaag

SEQ ID NO: 1411867 - DNA, 15 bp, Homo sapiens
actgtcaaaagtaaa

SEQ ID NO: 1411868 - DNA, 15 bp, Homo sapiens
aactgtcaaaagtaa

SEQ ID NO: 1411869 - DNA, 15 bp, Homo sapiens
aaactgtcaaaagta

SEQ ID NO: 1411870 - DNA, 15 bp, Homo sapiens
caaactgtcaaaagt

SEQ ID NO: 1411871 - DNA, 15 bp, Homo sapiens
tcaaactgtcaaaag

SEQ ID NO: 1411872 - DNA, 15 bp, Homo sapiens
ttcaaactgtcaaaa

SEQ ID NO: 1411873 - DNA, 15 bp, Homo sapiens
attcaaactgtcaaa

SEQ ID NO: 1411874 - DNA, 15 bp, Homo sapiens
aattcaaactgtcaa

SEQ ID NO: 1411875 - DNA, 15 bp, Homo sapiens
gaattcaaactgtca

SEQ ID NO: 1411876 - DNA, 15 bp, Homo sapiens
agaattcaaactgtc

SEQ ID NO: 1411877 - DNA, 15 bp, Homo sapiens
aagaattcaaactgt

SEQ ID NO: 1411878 - DNA, 15 bp, Homo sapiens
caagaattcaaactg

SEQ ID NO: 1411879 - DNA, 15 bp, Homo sapiens
gcaagaattcaaact

SEQ ID NO: 1411880 - DNA, 15 bp, Homo sapiens
agcaagaattcaaac

SEQ ID NO: 1411881 - DNA, 15 bp, Homo sapiens
gagcaagaattcaaa

SEQ ID NO: 1411882 - DNA, 15 bp, Homo sapiens
tgagcaagaattcaa

SEQ ID NO: 1411883 - DNA, 15 bp, Homo sapiens
gtgagcaagaattca

SEQ ID NO: 1411884 - DNA, 15 bp, Homo sapiens
tgtgagcaagaattc

SEQ ID NO: 1411885 - DNA, 15 bp, Homo sapiens
atgtgagcaagaatt

SEQ ID NO: 1411886 - DNA, 15 bp, Homo sapiens
gatgtgagcaagaat

SEQ ID NO: 1411887 - DNA, 15 bp, Homo sapiens
tgatgtgagcaagaa

SEQ ID NO: 1411888 - DNA, 15 bp, Homo sapiens
ctgatgtgagcaaga

SEQ ID NO: 1411889 - DNA, 15 bp, Homo sapiens
gctgatgtgagcaag

SEQ ID NO: 1411890 - DNA, 15 bp, Homo sapiens
tgctgatgtgagcaa

SEQ ID NO: 1411891 - DNA, 15 bp, Homo sapiens
ttgctgatgtgagca

SEQ ID NO: 1411892 - DNA, 15 bp, Homo sapiens
tttgctgatgtgagc

SEQ ID NO: 1411893 - DNA, 15 bp, Homo sapiens
ttttgctgatgtgag

SEQ ID NO: 1411894 - DNA, 15 bp, Homo sapiens
tttttgctgatgtga

SEQ ID NO: 1411895 - DNA, 15 bp, Homo sapiens
atttttgctgatgtg

SEQ ID NO: 1411896 - DNA, 15 bp, Homo sapiens
aatttttgctgatgt

SEQ ID NO: 1411897 - DNA, 15 bp, Homo sapiens
gaatttttgctgatg

SEQ ID NO: 1411898 - DNA, 15 bp, Homo sapiens
agaatttttgctgat

SEQ ID NO: 1411899 - DNA, 15 bp, Homo sapiens
gagaatttttgctga

SEQ ID NO: 1411900 - DNA, 15 bp, Homo sapiens
ggagaatttttgctg

SEQ ID NO: 1411901 - DNA, 15 bp, Homo sapiens
tggagaatttttgct

SEQ ID NO: 1411902 - DNA, 15 bp, Homo sapiens
atggagaatttttgc

SEQ ID NO: 1411903 - DNA, 15 bp, Homo sapiens
tatggagaatttttg

SEQ ID NO: 1411904 - DNA, 15 bp, Homo sapiens
atatggagaattttt

SEQ ID NO: 1411905 - DNA, 15 bp, Homo sapiens
aatatggagaatttt

SEQ ID NO: 1411906 - DNA, 15 bp, Homo sapiens
caatatggagaattt

SEQ ID NO: 1411907 - DNA, 15 bp, Homo sapiens
ccaatatggagaatt

SEQ ID NO: 1411908 - DNA, 15 bp, Homo sapiens
tccaatatggagaat

SEQ ID NO: 1411909 - DNA, 15 bp, Homo sapiens
ttccaatatggagaa

SEQ ID NO: 1411910 - DNA, 15 bp, Homo sapiens
attccaatatggaga

SEQ ID NO: 1411911 - DNA, 15 bp, Homo sapiens
tattccaatatggag

SEQ ID NO: 1411912 - DNA, 15 bp, Homo sapiens
ttattccaatatgga

SEQ ID NO: 1411913 - DNA, 15 bp, Homo sapiens
gttattccaatatgg

SEQ ID NO: 1411914 - DNA, 15 bp, Homo sapiens
agttattccaatatg

SEQ ID NO: 1411915 - DNA, 15 bp, Homo sapiens
cagttattccaatat

SEQ ID NO: 1411916 - DNA, 15 bp, Homo sapiens
acagttattccaata

SEQ ID NO: 1411917 - DNA, 15 bp, Homo sapiens
gacagttattccaat

SEQ ID NO: 1411918 - DNA, 15 bp, Homo sapiens
ggacagttattccaa

SEQ ID NO: 1411919 - DNA, 15 bp, Homo sapiens
tggacagttattcca

SEQ ID NO: 1411920 - DNA, 15 bp, Homo sapiens
ctggacagttattcc

SEQ ID NO: 1411921 - DNA, 15 bp, Homo sapiens
actggacagttattc

SEQ ID NO: 1411922 - DNA, 15 bp, Homo sapiens
aactggacagttatt

SEQ ID NO: 1411923 - DNA, 15 bp, Homo sapiens
taactggacagttat

SEQ ID NO: 1411924 - DNA, 15 bp, Homo sapiens
ctaactggacagtta

SEQ ID NO: 1411925 - DNA, 15 bp, Homo sapiens
cctaactggacagtt

SEQ ID NO: 1411926 - DNA, 15 bp, Homo sapiens
ccctaactggacagt

SEQ ID NO: 1411927 - DNA, 15 bp, Homo sapiens
cccctaactggacag

SEQ ID NO: 1411928 - DNA, 15 bp, Homo sapiens
acccctaactggaca

SEQ ID NO: 1411929 - DNA, 15 bp, Homo sapiens
aacccctaactggac

SEQ ID NO: 1411930 - DNA, 15 bp, Homo sapiens
aaacccctaactgga

SEQ ID NO: 1411931 - DNA, 15 bp, Homo sapiens
taaacccctaactgg

SEQ ID NO: 1411932 - DNA, 15 bp, Homo sapiens
gtaaacccctaactg

SEQ ID NO: 1411933 - DNA, 15 bp, Homo sapiens
agtaaacccctaact

SEQ ID NO: 1411934 - DNA, 15 bp, Homo sapiens
aagtaaacccctaac

SEQ ID NO: 1411935 - DNA, 15 bp, Homo sapiens
taagtaaacccctaa

SEQ ID NO: 1411936 - DNA, 15 bp, Homo sapiens
ataagtaaaccccta

SEQ ID NO: 1411937 - DNA, 15 bp, Homo sapiens
aataagtaaacccct

SEQ ID NO: 1411938 - DNA, 15 bp, Homo sapiens
gaataagtaaacccc

SEQ ID NO: 1411939 - DNA, 15 bp, Homo sapiens
agaataagtaaaccc

SEQ ID NO: 1411940 - DNA, 15 bp, Homo sapiens
gagaataagtaaacc

SEQ ID NO: 1411941 - DNA, 15 bp, Homo sapiens
ggagaataagtaaac

SEQ ID NO: 1411942 - DNA, 15 bp, Homo sapiens
aggagaataagtaaa

SEQ ID NO: 1411943 - DNA, 15 bp, Homo sapiens
taggagaataagtaa

SEQ ID NO: 1411944 - DNA, 15 bp, Homo sapiens
gtaggagaataagta

SEQ ID NO: 1411945 - DNA, 15 bp, Homo sapiens
cgtaggagaataagt

SEQ ID NO: 1411946 - DNA, 15 bp, Homo sapiens
tcgtaggagaataag

SEQ ID NO: 1411947 - DNA, 15 bp, Homo sapiens
ttcgtaggagaataa

SEQ ID NO: 1411948 - DNA, 15 bp, Homo sapiens
gttcgtaggagaata

SEQ ID NO: 1411949 - DNA, 15 bp, Homo sapiens
tgttcgtaggagaat

SEQ ID NO: 1411950 - DNA, 15 bp, Homo sapiens
ttgttcgtaggagaa

SEQ ID NO: 1411951 - DNA, 15 bp, Homo sapiens
tttgttcgtaggaga

SEQ ID NO: 1411952 - DNA, 15 bp, Homo sapiens
atttgttcgtaggag

SEQ ID NO: 1411953 - DNA, 15 bp, Homo sapiens
tatttgttcgtagga

SEQ ID NO: 1411954 - DNA, 15 bp, Homo sapiens
atatttgttcgtagg

SEQ ID NO: 1411955 - DNA, 15 bp, Homo sapiens
tatatttgttcgtag

SEQ ID NO: 1411956 - DNA, 15 bp, Homo sapiens
ctatatttgttcgta

SEQ ID NO: 1411957 - DNA, 15 bp, Homo sapiens
tctatatttgttcgt

SEQ ID NO: 1411958 - DNA, 15 bp, Homo sapiens
atctatatttgttcg

SEQ ID NO: 1411959 - DNA, 15 bp, Homo sapiens
tatctatatttgttc

SEQ ID NO: 1411960 - DNA, 15 bp, Homo sapiens
ctatctatatttgtt

SEQ ID NO: 1411961 - DNA, 15 bp, Homo sapiens
actatctatatttgt

SEQ ID NO: 1411962 - DNA, 15 bp, Homo sapiens
gactatctatatttg

SEQ ID NO: 1411963 - DNA, 15 bp, Homo sapiens
tgactatctatattt

SEQ ID NO: 1411964 - DNA, 15 bp, Homo sapiens
gtgactatctatatt

SEQ ID NO: 1411965 - DNA, 15 bp, Homo sapiens
cgtgactatctatat

SEQ ID NO: 1411966 - DNA, 15 bp, Homo sapiens
gcgtgactatctata

SEQ ID NO: 1411967 - DNA, 15 bp, Homo sapiens
tgcgtgactatctat

SEQ ID NO: 1411968 - DNA, 15 bp, Homo sapiens
ttgcgtgactatcta

SEQ ID NO: 1411969 - DNA, 15 bp, Homo sapiens
tttgcgtgactatct

SEQ ID NO: 1411970 - DNA, 15 bp, Homo sapiens
ctttgcgtgactatc

SEQ ID NO: 1411971 - DNA, 15 bp, Homo sapiens
tctttgcgtgactat

SEQ ID NO: 1411972 - DNA, 15 bp, Homo sapiens
ttctttgcgtgacta

SEQ ID NO: 1411973 - DNA, 15 bp, Homo sapiens
gttctttgcgtgact

SEQ ID NO: 1411974 - DNA, 15 bp, Homo sapiens
tgttctttgcgtgac

SEQ ID NO: 1411975 - DNA, 15 bp, Homo sapiens
atgttctttgcgtga

SEQ ID NO: 1411976 - DNA, 15 bp, Homo sapiens
tatgttctttgcgtg

SEQ ID NO: 1411977 - DNA, 15 bp, Homo sapiens
ctatgttctttgcgt

SEQ ID NO: 1411978 - DNA, 15 bp, Homo sapiens
cctatgttctttgcg

SEQ ID NO: 1411979 - DNA, 15 bp, Homo sapiens
gcctatgttctttgc

SEQ ID NO: 1411980 - DNA, 15 bp, Homo sapiens
agcctatgttctttg

SEQ ID NO: 1411981 - DNA, 15 bp, Homo sapiens
cagcctatgttcttt

SEQ ID NO: 1411982 - DNA, 15 bp, Homo sapiens
acagcctatgttctt

SEQ ID NO: 1411983 - DNA, 15 bp, Homo sapiens
aacagcctatgttct

SEQ ID NO: 1411984 - DNA, 15 bp, Homo sapiens
caacagcctatgttc

SEQ ID NO: 1411985 - DNA, 15 bp, Homo sapiens
acaacagcctatgtt

SEQ ID NO: 1411986 - DNA, 15 bp, Homo sapiens
cacaacagcctatgt

SEQ ID NO: 1411987 - DNA, 15 bp, Homo sapiens
acacaacagcctatg

SEQ ID NO: 1411988 - DNA, 15 bp, Homo sapiens
tacacaacagcctat

SEQ ID NO: 1411989 - DNA, 15 bp, Homo sapiens
ttacacaacagccta

SEQ ID NO: 1411990 - DNA, 15 bp, Homo sapiens
tttacacaacagcct

SEQ ID NO: 1411991 - DNA, 15 bp, Homo sapiens
atttacacaacagcc

SEQ ID NO: 1411992 - DNA, 15 bp, Homo sapiens
aatttacacaacagc

SEQ ID NO: 1411993 - DNA, 15 bp, Homo sapiens
aaatttacacaacag

SEQ ID NO: 1411994 - DNA, 15 bp, Homo sapiens
aaaatttacacaaca

SEQ ID NO: 1411995 - DNA, 15 bp, Homo sapiens
taaaatttacacaac

SEQ ID NO: 1411996 - DNA, 15 bp, Homo sapiens
ctaaaatttacacaa

SEQ ID NO: 1411997 - DNA, 15 bp, Homo sapiens
cctaaaatttacaca

SEQ ID NO: 1411998 - DNA, 15 bp, Homo sapiens
acctaaaatttacac

SEQ ID NO: 1411999 - DNA, 15 bp, Homo sapiens
aacctaaaatttaca

SEQ ID NO: 1412000 - DNA, 15 bp, Homo sapiens
caacctaaaatttac

SEQ ID NO: 1412001 - DNA, 15 bp, Homo sapiens
acaacctaaaattta

SEQ ID NO: 1412002 - DNA, 15 bp, Homo sapiens
aacaacctaaaattt

SEQ ID NO: 1412003 - DNA, 15 bp, Homo sapiens
caacaacctaaaatt

SEQ ID NO: 1412004 - DNA, 15 bp, Homo sapiens
acaacaacctaaaat

SEQ ID NO: 1412005 - DNA, 15 bp, Homo sapiens
gacaacaacctaaaa

SEQ ID NO: 1412006 - DNA, 15 bp, Homo sapiens
tgacaacaacctaaa

SEQ ID NO: 1412007 - DNA, 15 bp, Homo sapiens
ttgacaacaacctaa

SEQ ID NO: 1412008 - DNA, 15 bp, Homo sapiens
attgacaacaaccta

SEQ ID NO: 1412009 - DNA, 15 bp, Homo sapiens
cattgacaacaacct

SEQ ID NO: 1412010 - DNA, 15 bp, Homo sapiens
tcattgacaacaacc

SEQ ID NO: 1412011 - DNA, 15 bp, Homo sapiens
atcattgacaacaac

SEQ ID NO: 1412012 - DNA, 15 bp, Homo sapiens
aatcattgacaacaa

SEQ ID NO: 1412013 - DNA, 15 bp, Homo sapiens
aaatcattgacaaca

SEQ ID NO: 1412014 - DNA, 15 bp, Homo sapiens
caaatcattgacaac

SEQ ID NO: 1412015 - DNA, 15 bp, Homo sapiens
acaaatcattgacaa

SEQ ID NO: 1412016 - DNA, 15 bp, Homo sapiens
cacaaatcattgaca

SEQ ID NO: 1412017 - DNA, 15 bp, Homo sapiens
gcacaaatcattgac

SEQ ID NO: 1412018 - DNA, 15 bp, Homo sapiens
tgcacaaatcattga

SEQ ID NO: 1412019 - DNA, 15 bp, Homo sapiens
atgcacaaatcattg

SEQ ID NO: 1412020 - DNA, 15 bp, Homo sapiens
gatgcacaaatcatt

SEQ ID NO: 1412021 - DNA, 15 bp, Homo sapiens
agatgcacaaatcat

SEQ ID NO: 1412022 - DNA, 15 bp, Homo sapiens
gagatgcacaaatca

SEQ ID NO: 1412023 - DNA, 15 bp, Homo sapiens
agagatgcacaaatc

SEQ ID NO: 1412024 - DNA, 15 bp, Homo sapiens
tagagatgcacaaat

SEQ ID NO: 1412025 - DNA, 15 bp, Homo sapiens
ttagagatgcacaaa

SEQ ID NO: 1412026 - DNA, 15 bp, Homo sapiens
tttagagatgcacaa

SEQ ID NO: 1412027 - DNA, 15 bp, Homo sapiens
atttagagatgcaca

SEQ ID NO: 1412028 - DNA, 15 bp, Homo sapiens
aatttagagatgcac

SEQ ID NO: 1412029 - DNA, 15 bp, Homo sapiens
caatttagagatgca

SEQ ID NO: 1412030 - DNA, 15 bp, Homo sapiens
ccaatttagagatgc

SEQ ID NO: 1412031 - DNA, 15 bp, Homo sapiens
tccaatttagagatg

SEQ ID NO: 1412032 - DNA, 15 bp, Homo sapiens
ttccaatttagagat

SEQ ID NO: 1412033 - DNA, 15 bp, Homo sapiens
tttccaatttagaga

SEQ ID NO: 1412034 - DNA, 15 bp, Homo sapiens
ttttccaatttagag

SEQ ID NO: 1412035 - DNA, 15 bp, Homo sapiens
gttttccaatttaga

SEQ ID NO: 1412036 - DNA, 15 bp, Homo sapiens
tgttttccaatttag

SEQ ID NO: 1412037 - DNA, 15 bp, Homo sapiens
gtgttttccaattta

SEQ ID NO: 1412038 - DNA, 15 bp, Homo sapiens
tgtgttttccaattt

SEQ ID NO: 1412039 - DNA, 15 bp, Homo sapiens
ctgtgttttccaatt

SEQ ID NO: 1412040 - DNA, 15 bp, Homo sapiens
tctgtgttttccaat

SEQ ID NO: 1412041 - DNA, 15 bp, Homo sapiens
gtctgtgttttccaa

SEQ ID NO: 1412042 - DNA, 15 bp, Homo sapiens
tgtctgtgttttcca

SEQ ID NO: 1412043 - DNA, 15 bp, Homo sapiens
atgtctgtgttttcc

SEQ ID NO: 1412044 - DNA, 15 bp, Homo sapiens
tatgtctgtgttttc

SEQ ID NO: 1412045 - DNA, 15 bp, Homo sapiens
ctatgtctgtgtttt

SEQ ID NO: 1412046 - DNA, 15 bp, Homo sapiens
actatgtctgtgttt

SEQ ID NO: 1412047 - DNA, 15 bp, Homo sapiens
aactatgtctgtgtt

SEQ ID NO: 1412048 - DNA, 15 bp, Homo sapiens
aaactatgtctgtgt

SEQ ID NO: 1412049 - DNA, 15 bp, Homo sapiens
aaaactatgtctgtg

SEQ ID NO: 1412050 - DNA, 15 bp, Homo sapiens
gaaaactatgtctgt

SEQ ID NO: 1412051 - DNA, 15 bp, Homo sapiens
tgaaaactatgtctg

SEQ ID NO: 1412052 - DNA, 15 bp, Homo sapiens
atgaaaactatgtct

SEQ ID NO: 1412053 - DNA, 15 bp, Homo sapiens
catgaaaactatgtc

SEQ ID NO: 1412054 - DNA, 15 bp, Homo sapiens
tcatgaaaactatgt

SEQ ID NO: 1412055 - DNA, 15 bp, Homo sapiens
ttcatgaaaactatg

SEQ ID NO: 1412056 - DNA, 15 bp, Homo sapiens
gttcatgaaaactat

SEQ ID NO: 1412057 - DNA, 15 bp, Homo sapiens
tgttcatgaaaacta

SEQ ID NO: 1412058 - DNA, 15 bp, Homo sapiens
atgttcatgaaaact

SEQ ID NO: 1412059 - DNA, 15 bp, Homo sapiens
catgttcatgaaaac

SEQ ID NO: 1412060 - DNA, 15 bp, Homo sapiens
ccatgttcatgaaaa

SEQ ID NO: 1412061 - DNA, 15 bp, Homo sapiens
tccatgttcatgaaa

SEQ ID NO: 1412062 - DNA, 15 bp, Homo sapiens
ctccatgttcatgaa

SEQ ID NO: 1412063 - DNA, 15 bp, Homo sapiens
tctccatgttcatga

SEQ ID NO: 1412064 - DNA, 15 bp, Homo sapiens
ttctccatgttcatg

SEQ ID NO: 1412065 - DNA, 15 bp, Homo sapiens
attctccatgttcat

SEQ ID NO: 1412066 - DNA, 15 bp, Homo sapiens
aattctccatgttca

SEQ ID NO: 1412067 - DNA, 15 bp, Homo sapiens
aaattctccatgttc

SEQ ID NO: 1412068 - DNA, 15 bp, Homo sapiens
gaaattctccatgtt

SEQ ID NO: 1412069 - DNA, 15 bp, Homo sapiens
tgaaattctccatgt

SEQ ID NO: 1412070 - DNA, 15 bp, Homo sapiens
ctgaaattctccatg

SEQ ID NO: 1412071 - DNA, 15 bp, Homo sapiens
gctgaaattctccat

SEQ ID NO: 1412072 - DNA, 15 bp, Homo sapiens
agctgaaattctcca

SEQ ID NO: 1412073 - DNA, 15 bp, Homo sapiens
tagctgaaattctcc

SEQ ID NO: 1412074 - DNA, 15 bp, Homo sapiens
gtagctgaaattctc

SEQ ID NO: 1412075 - DNA, 15 bp, Homo sapiens
tgtagctgaaattct

SEQ ID NO: 1412076 - DNA, 15 bp, Homo sapiens
ttgtagctgaaattc

SEQ ID NO: 1412077 - DNA, 15 bp, Homo sapiens
tttgtagctgaaatt

SEQ ID NO: 1412078 - DNA, 15 bp, Homo sapiens
ttttgtagctgaaat

SEQ ID NO: 1412079 - DNA, 15 bp, Homo sapiens
attttgtagctgaaa

SEQ ID NO: 1412080 - DNA, 15 bp, Homo sapiens
tattttgtagctgaa

SEQ ID NO: 1412081 - DNA, 15 bp, Homo sapiens
ttattttgtagctga

SEQ ID NO: 1412082 - DNA, 15 bp, Homo sapiens
attattttgtagctg

SEQ ID NO: 1412083 - DNA, 15 bp, Homo sapiens
aattattttgtagct

SEQ ID NO: 1412084 - DNA, 15 bp, Homo sapiens
gaattattttgtagc

SEQ ID NO: 1412085 - DNA, 15 bp, Homo sapiens
agaattattttgtag

SEQ ID NO: 1412086 - DNA, 15 bp, Homo sapiens
aagaattattttgta

SEQ ID NO: 1412087 - DNA, 15 bp, Homo sapiens
taagaattattttgt

SEQ ID NO: 1412088 - DNA, 15 bp, Homo sapiens
ctaagaattattttg

SEQ ID NO: 1412089 - DNA, 15 bp, Homo sapiens
gctaagaattatttt

SEQ ID NO: 1412090 - DNA, 15 bp, Homo sapiens
ggctaagaattattt

SEQ ID NO: 1412091 - DNA, 15 bp, Homo sapiens
tggctaagaattatt

SEQ ID NO: 1412092 - DNA, 15 bp, Homo sapiens
atggctaagaattat

SEQ ID NO: 1412093 - DNA, 15 bp, Homo sapiens
tatggctaagaatta

SEQ ID NO: 1412094 - DNA, 15 bp, Homo sapiens
ttatggctaagaatt

SEQ ID NO: 1412095 - DNA, 15 bp, Homo sapiens
attatggctaagaat

SEQ ID NO: 1412096 - DNA, 15 bp, Homo sapiens
tattatggctaagaa

SEQ ID NO: 1412097 - DNA, 15 bp, Homo sapiens
ctattatggctaaga

SEQ ID NO: 1412098 - DNA, 15 bp, Homo sapiens
cctattatggctaag

SEQ ID NO: 1412099 - DNA, 15 bp, Homo sapiens
acctattatggctaa

SEQ ID NO: 1412100 - DNA, 15 bp, Homo sapiens
tacctattatggcta

SEQ ID NO: 1412101 - DNA, 15 bp, Homo sapiens
atacctattatggct

SEQ ID NO: 1412102 - DNA, 15 bp, Homo sapiens
aatacctattatggc

SEQ ID NO: 1412103 - DNA, 15 bp, Homo sapiens
caatacctattatgg

SEQ ID NO: 1412104 - DNA, 15 bp, Homo sapiens
acaatacctattatg

SEQ ID NO: 1412105 - DNA, 15 bp, Homo sapiens
tacaatacctattat

SEQ ID NO: 1412106 - DNA, 15 bp, Homo sapiens
atacaatacctatta

SEQ ID NO: 1412107 - DNA, 15 bp, Homo sapiens
tatacaatacctatt

SEQ ID NO: 1412108 - DNA, 15 bp, Homo sapiens
atatacaatacctat

SEQ ID NO: 1412109 - DNA, 15 bp, Homo sapiens
aatatacaataccta

SEQ ID NO: 1412110 - DNA, 15 bp, Homo sapiens
aaatatacaatacct

SEQ ID NO: 1412111 - DNA, 15 bp, Homo sapiens
taaatatacaatacc

SEQ ID NO: 1412112 - DNA, 15 bp, Homo sapiens
ttaaatatacaatac

SEQ ID NO: 1412113 - DNA, 15 bp, Homo sapiens
attaaatatacaata

SEQ ID NO: 1412114 - DNA, 15 bp, Homo sapiens
aattaaatatacaat

SEQ ID NO: 1412115 - DNA, 15 bp, Homo sapiens
caattaaatatacaa

SEQ ID NO: 1412116 - DNA, 15 bp, Homo sapiens
tcaattaaatataca

SEQ ID NO: 1412117 - DNA, 15 bp, Homo sapiens
ctcaattaaatatac

SEQ ID NO: 1412118 - DNA, 15 bp, Homo sapiens
tctcaattaaatata

SEQ ID NO: 1412119 - DNA, 15 bp, Homo sapiens
ctctcaattaaatat

SEQ ID NO: 1412120 - DNA, 15 bp, Homo sapiens
tctctcaattaaata

SEQ ID NO: 1412121 - DNA, 15 bp, Homo sapiens
ttctctcaattaaat

SEQ ID NO: 1412122 - DNA, 15 bp, Homo sapiens
attctctcaattaaa

SEQ ID NO: 1412123 - DNA, 15 bp, Homo sapiens
cattctctcaattaa

SEQ ID NO: 1412124 - DNA, 15 bp, Homo sapiens
acattctctcaatta

SEQ ID NO: 1412125 - DNA, 15 bp, Homo sapiens
cacattctctcaatt

SEQ ID NO: 1412126 - DNA, 15 bp, Homo sapiens
tcacattctctcaat

SEQ ID NO: 1412127 - DNA, 15 bp, Homo sapiens
ttcacattctctcaa

SEQ ID NO: 1412128 - DNA, 15 bp, Homo sapiens
tttcacattctctca

SEQ ID NO: 1412129 - DNA, 15 bp, Homo sapiens
ttttcacattctctc

SEQ ID NO: 1412130 - DNA, 15 bp, Homo sapiens
tttttcacattctct

SEQ ID NO: 1412131 - DNA, 15 bp, Homo sapiens
gtttttcacattctc

SEQ ID NO: 1412132 - DNA, 15 bp, Homo sapiens
tgtttttcacattct

SEQ ID NO: 1412133 - DNA, 15 bp, Homo sapiens
ttgtttttcacattc

SEQ ID NO: 1412134 - DNA, 15 bp, Homo sapiens
attgtttttcacatt

SEQ ID NO: 1412135 - DNA, 15 bp, Homo sapiens
cattgtttttcacat

SEQ ID NO: 1412136 - DNA, 15 bp, Homo sapiens
tcattgtttttcaca

SEQ ID NO: 1412137 - DNA, 15 bp, Homo sapiens
ctcattgtttttcac

SEQ ID NO: 1412138 - DNA, 15 bp, Homo sapiens
cctcattgtttttca

SEQ ID NO: 1412139 - DNA, 15 bp, Homo sapiens
tcctcattgtttttc

SEQ ID NO: 1412140 - DNA, 15 bp, Homo sapiens
ttcctcattgttttt

SEQ ID NO: 1412141 - DNA, 15 bp, Homo sapiens
cttcctcattgtttt

SEQ ID NO: 1412142 - DNA, 15 bp, Homo sapiens
acttcctcattgttt

SEQ ID NO: 1412143 - DNA, 15 bp, Homo sapiens
tacttcctcattgtt

SEQ ID NO: 1412144 - DNA, 15 bp, Homo sapiens
ctacttcctcattgt

SEQ ID NO: 1412145 - DNA, 15 bp, Homo sapiens
actacttcctcattg

SEQ ID NO: 1412146 - DNA, 15 bp, Homo sapiens
aactacttcctcatt

SEQ ID NO: 1412147 - DNA, 15 bp, Homo sapiens
aaactacttcctcat

SEQ ID NO: 1412148 - DNA, 15 bp, Homo sapiens
gaaactacttcctca

SEQ ID NO: 1412149 - DNA, 15 bp, Homo sapiens
agaaactacttcctc

SEQ ID NO: 1412150 - DNA, 15 bp, Homo sapiens
gagaaactacttcct

SEQ ID NO: 1412151 - DNA, 15 bp, Homo sapiens
ggagaaactacttcc

SEQ ID NO: 1412152 - DNA, 15 bp, Homo sapiens
tggagaaactacttc

SEQ ID NO: 1412153 - DNA, 15 bp, Homo sapiens
ctggagaaactactt

SEQ ID NO: 1412154 - DNA, 15 bp, Homo sapiens
actggagaaactact

SEQ ID NO: 1412155 - DNA, 15 bp, Homo sapiens
tactggagaaactac

SEQ ID NO: 1412156 - DNA, 15 bp, Homo sapiens
atactggagaaacta

SEQ ID NO: 1412157 - DNA, 15 bp, Homo sapiens
catactggagaaact

SEQ ID NO: 1412158 - DNA, 15 bp, Homo sapiens
ccatactggagaaac

SEQ ID NO: 1412159 - DNA, 15 bp, Homo sapiens
accatactggagaaa

SEQ ID NO: 1412160 - DNA, 15 bp, Homo sapiens
caccatactggagaa

SEQ ID NO: 1412161 - DNA, 15 bp, Homo sapiens
tcaccatactggaga

SEQ ID NO: 1412162 - DNA, 15 bp, Homo sapiens
ttcaccatactggag

SEQ ID NO: 1412163 - DNA, 15 bp, Homo sapiens
tttcaccatactgga

SEQ ID NO: 1412164 - DNA, 15 bp, Homo sapiens
ctttcaccatactgg

SEQ ID NO: 1412165 - DNA, 15 bp, Homo sapiens
cctttcaccatactg

SEQ ID NO: 1412166 - DNA, 15 bp, Homo sapiens
gcctttcaccatact

SEQ ID NO: 1412167 - DNA, 15 bp, Homo sapiens
tgcctttcaccatac

SEQ ID NO: 1412168 - DNA, 15 bp, Homo sapiens
ttgcctttcaccata

SEQ ID NO: 1412169 - DNA, 15 bp, Homo sapiens
tttgcctttcaccat

SEQ ID NO: 1412170 - DNA, 15 bp, Homo sapiens
ctttgcctttcacca

SEQ ID NO: 1412171 - DNA, 15 bp, Homo sapiens
tctttgcctttcacc

SEQ ID NO: 1412172 - DNA, 15 bp, Homo sapiens
ctctttgcctttcac

SEQ ID NO: 1412173 - DNA, 15 bp, Homo sapiens
cctctttgcctttca

SEQ ID NO: 1412174 - DNA, 15 bp, Homo sapiens
ccctctttgcctttc

SEQ ID NO: 1412175 - DNA, 15 bp, Homo sapiens
accctctttgccttt

SEQ ID NO: 1412176 - DNA, 15 bp, Homo sapiens
aaccctctttgcctt

SEQ ID NO: 1412177 - DNA, 15 bp, Homo sapiens
gaaccctctttgcct

SEQ ID NO: 1412178 - DNA, 15 bp, Homo sapiens
agaaccctctttgcc

SEQ ID NO: 1412179 - DNA, 15 bp, Homo sapiens
aagaaccctctttgc

SEQ ID NO: 1412180 - DNA, 15 bp, Homo sapiens
aaagaaccctctttg

SEQ ID NO: 1412181 - DNA, 15 bp, Homo sapiens
aaaagaaccctcttt

SEQ ID NO: 1412182 - DNA, 15 bp, Homo sapiens
aaaaagaaccctctt

SEQ ID NO: 1412183 - DNA, 15 bp, Homo sapiens
aaaaaagaaccctct

SEQ ID NO: 1412184 - DNA, 15 bp, Homo sapiens
aaaaaaagaaccctc

SEQ ID NO: 1412185 - DNA, 15 bp, Homo sapiens
aaaaaaaagaaccct

SEQ ID NO: 1412186 - DNA, 15 bp, Homo sapiens
gaaaaaaaagaaccc

SEQ ID NO: 1412187 - DNA, 15 bp, Homo sapiens
ggaaaaaaaagaacc

SEQ ID NO: 1412188 - DNA, 15 bp, Homo sapiens
gggaaaaaaaagaac

SEQ ID NO: 1412189 - DNA, 15 bp, Homo sapiens
taggggaaaaaaaag

SEQ ID NO: 1412190 - DNA, 15 bp, Homo sapiens
acttaggggaaaaaa

SEQ ID NO: 1412191 - DNA, 15 bp, Homo sapiens
tacttaggggaaaaa

SEQ ID NO: 1412192 - DNA, 15 bp, Homo sapiens
ttacttaggggaaaa

SEQ ID NO: 1412193 - DNA, 15 bp, Homo sapiens
tttacttaggggaaa

SEQ ID NO: 1412194 - DNA, 15 bp, Homo sapiens
ctttacttaggggaa

SEQ ID NO: 1412195 - DNA, 15 bp, Homo sapiens
gctttacttagggga

SEQ ID NO: 1412196 - DNA, 15 bp, Homo sapiens
tgctttacttagggg

SEQ ID NO: 1412197 - DNA, 15 bp, Homo sapiens
atgctttacttaggg

SEQ ID NO: 1412198 - DNA, 15 bp, Homo sapiens
gatgctttacttagg

SEQ ID NO: 1412199 - DNA, 15 bp, Homo sapiens
agatgctttacttag

SEQ ID NO: 1412200 - DNA, 15 bp, Homo sapiens
tagatgctttactta

SEQ ID NO: 1412201 - DNA, 15 bp, Homo sapiens
gtagatgctttactt

SEQ ID NO: 1412202 - DNA, 15 bp, Homo sapiens
agtagatgctttact

SEQ ID NO: 1412203 - DNA, 15 bp, Homo sapiens
tagtagatgctttac

SEQ ID NO: 1412204 - DNA, 15 bp, Homo sapiens
ttagtagatgcttta

SEQ ID NO: 1412205 - DNA, 15 bp, Homo sapiens
tttagtagatgcttt

SEQ ID NO: 1412206 - DNA, 15 bp, Homo sapiens
atttagtagatgctt

SEQ ID NO: 1412207 - DNA, 15 bp, Homo sapiens
catttagtagatgct

SEQ ID NO: 1412208 - DNA, 15 bp, Homo sapiens
gcatttagtagatgc

SEQ ID NO: 1412209 - DNA, 15 bp, Homo sapiens
tgcatttagtagatg

SEQ ID NO: 1412210 - DNA, 15 bp, Homo sapiens
ttgcatttagtagat

SEQ ID NO: 1412211 - DNA, 15 bp, Homo sapiens
tttgcatttagtaga

SEQ ID NO: 1412212 - DNA, 15 bp, Homo sapiens
ttttgcatttagtag

SEQ ID NO: 1412213 - DNA, 15 bp, Homo sapiens
cttttgcatttagta

SEQ ID NO: 1412214 - DNA, 15 bp, Homo sapiens
tcttttgcatttagt

SEQ ID NO: 1412215 - DNA, 15 bp, Homo sapiens
ttcttttgcatttag

SEQ ID NO: 1412216 - DNA, 15 bp, Homo sapiens
tttcttttgcattta

SEQ ID NO: 1412217 - DNA, 15 bp, Homo sapiens
atttcttttgcattt

SEQ ID NO: 1412218 - DNA, 15 bp, Homo sapiens
catttcttttgcatt

SEQ ID NO: 1412219 - DNA, 15 bp, Homo sapiens
tcatttcttttgcat

SEQ ID NO: 1412220 - DNA, 15 bp, Homo sapiens
atcatttcttttgca

SEQ ID NO: 1412221 - DNA, 15 bp, Homo sapiens
aatcatttcttttgc

SEQ ID NO: 1412222 - DNA, 15 bp, Homo sapiens
caatcatttcttttg

SEQ ID NO: 1412223 - DNA, 15 bp, Homo sapiens
acaatcatttctttt

SEQ ID NO: 1412224 - DNA, 15 bp, Homo sapiens
cacaatcatttcttt

SEQ ID NO: 1412225 - DNA, 15 bp, Homo sapiens
ccacaatcatttctt

SEQ ID NO: 1412226 - DNA, 15 bp, Homo sapiens
tccacaatcatttct

SEQ ID NO: 1412227 - DNA, 15 bp, Homo sapiens
gtccacaatcatttc

SEQ ID NO: 1412228 - DNA, 15 bp, Homo sapiens
agtccacaatcattt

SEQ ID NO: 1412229 - DNA, 15 bp, Homo sapiens
gagtccacaatcatt

SEQ ID NO: 1412230 - DNA, 15 bp, Homo sapiens
agagtccacaatcat

SEQ ID NO: 1412231 - DNA, 15 bp, Homo sapiens
cagagtccacaatca

SEQ ID NO: 1412232 - DNA, 15 bp, Homo sapiens
ccagagtccacaatc

SEQ ID NO: 1412233 - DNA, 15 bp, Homo sapiens
tccagagtccacaat

SEQ ID NO: 1412234 - DNA, 15 bp, Homo sapiens
ttccagagtccacaa

SEQ ID NO: 1412235 - DNA, 15 bp, Homo sapiens
attccagagtccaca

SEQ ID NO: 1412236 - DNA, 15 bp, Homo sapiens
gattccagagtccac

SEQ ID NO: 1412237 - DNA, 15 bp, Homo sapiens
agattccagagtcca

SEQ ID NO: 1412238 - DNA, 15 bp, Homo sapiens
cagattccagagtcc

SEQ ID NO: 1412239 - DNA, 15 bp, Homo sapiens
ccagattccagagtc

SEQ ID NO: 1412240 - DNA, 15 bp, Homo sapiens
tccagattccagagt

SEQ ID NO: 1412241 - DNA, 15 bp, Homo sapiens
ttccagattccagag

SEQ ID NO: 1412242 - DNA, 15 bp, Homo sapiens
gattccagattccag

SEQ ID NO: 1412243 - DNA, 15 bp, Homo sapiens
ggattccagattcca

SEQ ID NO: 1412244 - DNA, 15 bp, Homo sapiens
tggattccagattcc

SEQ ID NO: 1412245 - DNA, 15 bp, Homo sapiens
gtggattccagattc

SEQ ID NO: 1412246 - DNA, 15 bp, Homo sapiens
cgtggattccagatt

SEQ ID NO: 1412247 - DNA, 15 bp, Homo sapiens
tcgtggattccagat

SEQ ID NO: 1412248 - DNA, 15 bp, Homo sapiens
atcgtggattccaga

SEQ ID NO: 1412249 - DNA, 15 bp, Homo sapiens
catcgtggattccag

SEQ ID NO: 1412250 - DNA, 15 bp, Homo sapiens
gcatcgtggattcca

SEQ ID NO: 1412251 - DNA, 15 bp, Homo sapiens
agcatcgtggattcc

SEQ ID NO: 1412252 - DNA, 15 bp, Homo sapiens
tagcatcgtggattc

SEQ ID NO: 1412253 - DNA, 15 bp, Homo sapiens
ctagcatcgtggatt

SEQ ID NO: 1412254 - DNA, 15 bp, Homo sapiens
gctagcatcgtggat

SEQ ID NO: 1412255 - DNA, 15 bp, Homo sapiens
tgctagcatcgtgga

SEQ ID NO: 1412256 - DNA, 15 bp, Homo sapiens
gtgctagcatcgtgg

SEQ ID NO: 1412257 - DNA, 15 bp, Homo sapiens
agtgctagcatcgtg

SEQ ID NO: 1412258 - DNA, 15 bp, Homo sapiens
aagtgctagcatcgt

SEQ ID NO: 1412259 - DNA, 15 bp, Homo sapiens
aaagtgctagcatcg

SEQ ID NO: 1412260 - DNA, 15 bp, Homo sapiens
caaagtgctagcatc

SEQ ID NO: 1412261 - DNA, 15 bp, Homo sapiens
gcaaagtgctagcat

SEQ ID NO: 1412262 - DNA, 15 bp, Homo sapiens
tgcaaagtgctagca

SEQ ID NO: 1412263 - DNA, 15 bp, Homo sapiens
ctgcaaagtgctagc

SEQ ID NO: 1412264 - DNA, 15 bp, Homo sapiens
actgcaaagtgctag

SEQ ID NO: 1412265 - DNA, 15 bp, Homo sapiens
tactgcaaagtgcta

SEQ ID NO: 1412266 - DNA, 15 bp, Homo sapiens
ttactgcaaagtgct

SEQ ID NO: 1412267 - DNA, 15 bp, Homo sapiens
attactgcaaagtgc

SEQ ID NO: 1412268 - DNA, 15 bp, Homo sapiens
tattactgcaaagtg

SEQ ID NO: 1412269 - DNA, 15 bp, Homo sapiens
ctattactgcaaagt

SEQ ID NO: 1412270 - DNA, 15 bp, Homo sapiens
gctattactgcaaag

SEQ ID NO: 1412271 - DNA, 15 bp, Homo sapiens
ggctattactgcaaa

SEQ ID NO: 1412272 - DNA, 15 bp, Homo sapiens
aggctattactgcaa

SEQ ID NO: 1412273 - DNA, 15 bp, Homo sapiens
gaggctattactgca

SEQ ID NO: 1412274 - DNA, 15 bp, Homo sapiens
agaggctattactgc

SEQ ID NO: 1412275 - DNA, 15 bp, Homo sapiens
aagaggctattactg

SEQ ID NO: 1412276 - DNA, 15 bp, Homo sapiens
aaagaggctattact

SEQ ID NO: 1412277 - DNA, 15 bp, Homo sapiens
gaaagaggctattac

SEQ ID NO: 1412278 - DNA, 15 bp, Homo sapiens
tgaaagaggctatta

SEQ ID NO: 1412279 - DNA, 15 bp, Homo sapiens
atgaaagaggctatt

SEQ ID NO: 1412280 - DNA, 15 bp, Homo sapiens
tatgaaagaggctat

SEQ ID NO: 1412281 - DNA, 15 bp, Homo sapiens
atatgaaagaggcta

SEQ ID NO: 1412282 - DNA, 15 bp, Homo sapiens
tatatgaaagaggct

SEQ ID NO: 1412283 - DNA, 15 bp, Homo sapiens
atatatgaaagaggc

SEQ ID NO: 1412284 - DNA, 15 bp, Homo sapiens
tatatatgaaagagg

SEQ ID NO: 1412285 - DNA, 15 bp, Homo sapiens
ctatatatgaaagag

SEQ ID NO: 1412286 - DNA, 15 bp, Homo sapiens
tctatatatgaaaga

SEQ ID NO: 1412287 - DNA, 15 bp, Homo sapiens
atctatatatgaaag

SEQ ID NO: 1412288 - DNA, 15 bp, Homo sapiens
gatctatatatgaaa

SEQ ID NO: 1412289 - DNA, 15 bp, Homo sapiens
agatctatatatgaa

SEQ ID NO: 1412290 - DNA, 15 bp, Homo sapiens
gagatctatatatga

SEQ ID NO: 1412291 - DNA, 15 bp, Homo sapiens
tgagatctatatatg

SEQ ID NO: 1412292 - DNA, 15 bp, Homo sapiens
gtgagatctatatat

SEQ ID NO: 1412293 - DNA, 15 bp, Homo sapiens
tgtgagatctatata

SEQ ID NO: 1412294 - DNA, 15 bp, Homo sapiens
ttgtgagatctatat

SEQ ID NO: 1412295 - DNA, 15 bp, Homo sapiens
gttgtgagatctata

SEQ ID NO: 1412296 - DNA, 15 bp, Homo sapiens
tgttgtgagatctat

SEQ ID NO: 1412297 - DNA, 15 bp, Homo sapiens
ctgttgtgagatcta

SEQ ID NO: 1412298 - DNA, 15 bp, Homo sapiens
actgttgtgagatct

SEQ ID NO: 1412299 - DNA, 15 bp, Homo sapiens
aactgttgtgagatc

SEQ ID NO: 1412300 - DNA, 15 bp, Homo sapiens
aaactgttgtgagat

SEQ ID NO: 1412301 - DNA, 15 bp, Homo sapiens
caaactgttgtgaga

SEQ ID NO: 1412302 - DNA, 15 bp, Homo sapiens
acaaactgttgtgag

SEQ ID NO: 1412303 - DNA, 15 bp, Homo sapiens
tacaaactgttgtga

SEQ ID NO: 1412304 - DNA, 15 bp, Homo sapiens
ctacaaactgttgtg

SEQ ID NO: 1412305 - DNA, 15 bp, Homo sapiens
tctacaaactgttgt

SEQ ID NO: 1412306 - DNA, 15 bp, Homo sapiens
gtctacaaactgttg

SEQ ID NO: 1412307 - DNA, 15 bp, Homo sapiens
tgtctacaaactgtt

SEQ ID NO: 1412308 - DNA, 15 bp, Homo sapiens
gtgtctacaaactgt

SEQ ID NO: 1412309 - DNA, 15 bp, Homo sapiens
agtgtctacaaactg

SEQ ID NO: 1412310 - DNA, 15 bp, Homo sapiens
tagtgtctacaaact

SEQ ID NO: 1412311 - DNA, 15 bp, Homo sapiens
ttagtgtctacaaac

SEQ ID NO: 1412312 - DNA, 15 bp, Homo sapiens
cttagtgtctacaaa

SEQ ID NO: 1412313 - DNA, 15 bp, Homo sapiens
acttagtgtctacaa

SEQ ID NO: 1412314 - DNA, 15 bp, Homo sapiens
aacttagtgtctaca

SEQ ID NO: 1412315 - DNA, 15 bp, Homo sapiens
aaacttagtgtctac

SEQ ID NO: 1412316 - DNA, 15 bp, Homo sapiens
aaaacttagtgtcta

SEQ ID NO: 1412317 - DNA, 15 bp, Homo sapiens
aaaaacttagtgtct

SEQ ID NO: 1412318 - DNA, 15 bp, Homo sapiens
gaaaaacttagtgtc

SEQ ID NO: 1412319 - DNA, 15 bp, Homo sapiens
ggaaaaacttagtgt

SEQ ID NO: 1412320 - DNA, 15 bp, Homo sapiens
tggaaaaacttagtg

SEQ ID NO: 1412321 - DNA, 15 bp, Homo sapiens
atggaaaaacttagt

SEQ ID NO: 1412322 - DNA, 15 bp, Homo sapiens
catggaaaaacttag

SEQ ID NO: 1412323 - DNA, 15 bp, Homo sapiens
gcatggaaaaactta

SEQ ID NO: 1412324 - DNA, 15 bp, Homo sapiens
agcatggaaaaactt

SEQ ID NO: 1412325 - DNA, 15 bp, Homo sapiens
gagcatggaaaaact

SEQ ID NO: 1412326 - DNA, 15 bp, Homo sapiens
ggagcatggaaaaac

SEQ ID NO: 1412327 - DNA, 15 bp, Homo sapiens
aggagcatggaaaaa

SEQ ID NO: 1412328 - DNA, 15 bp, Homo sapiens
caggagcatggaaaa

SEQ ID NO: 1412329 - DNA, 15 bp, Homo sapiens
gcaggagcatggaaa

SEQ ID NO: 1412330 - DNA, 15 bp, Homo sapiens
tgcaggagcatggaa

SEQ ID NO: 1412331 - DNA, 15 bp, Homo sapiens
ttgcaggagcatgga

SEQ ID NO: 1412332 - DNA, 15 bp, Homo sapiens
gttgcaggagcatgg

SEQ ID NO: 1412333 - DNA, 15 bp, Homo sapiens
agttgcaggagcatg

SEQ ID NO: 1412334 - DNA, 15 bp, Homo sapiens
gagttgcaggagcat

SEQ ID NO: 1412335 - DNA, 15 bp, Homo sapiens
tgagttgcaggagca

SEQ ID NO: 1412336 - DNA, 15 bp, Homo sapiens
gtgagttgcaggagc

SEQ ID NO: 1412337 - DNA, 15 bp, Homo sapiens
tgtgagttgcaggag

SEQ ID NO: 1412338 - DNA, 15 bp, Homo sapiens
gtgtgagttgcagga

SEQ ID NO: 1412339 - DNA, 15 bp, Homo sapiens
agtgtgagttgcagg

SEQ ID NO: 1412340 - DNA, 15 bp, Homo sapiens
cagtgtgagttgcag

SEQ ID NO: 1412341 - DNA, 15 bp, Homo sapiens
tcagtgtgagttgca

SEQ ID NO: 1412342 - DNA, 15 bp, Homo sapiens
ctcagtgtgagttgc

SEQ ID NO: 1412343 - DNA, 15 bp, Homo sapiens
actcagtgtgagttg

SEQ ID NO: 1412344 - DNA, 15 bp, Homo sapiens
aactcagtgtgagtt

SEQ ID NO: 1412345 - DNA, 15 bp, Homo sapiens
aaactcagtgtgagt

SEQ ID NO: 1412346 - DNA, 15 bp, Homo sapiens
aaaactcagtgtgag

SEQ ID NO: 1412347 - DNA, 15 bp, Homo sapiens
aaaaactcagtgtga

SEQ ID NO: 1412348 - DNA, 15 bp, Homo sapiens
taaaaactcagtgtg

SEQ ID NO: 1412349 - DNA, 15 bp, Homo sapiens
ataaaaactcagtgt

SEQ ID NO: 1412350 - DNA, 15 bp, Homo sapiens
aataaaaactcagtg

SEQ ID NO: 1412351 - DNA, 15 bp, Homo sapiens
aaataaaaactcagt

SEQ ID NO: 1412352 - DNA, 15 bp, Homo sapiens
taaataaaaactcag

SEQ ID NO: 1412353 - DNA, 15 bp, Homo sapiens
gtaaataaaaactca

SEQ ID NO: 1412354 - DNA, 15 bp, Homo sapiens
agtaaataaaaactc

SEQ ID NO: 1412355 - DNA, 15 bp, Homo sapiens
gagtaaataaaaact

SEQ ID NO: 1412356 - DNA, 15 bp, Homo sapiens
ggagtaaataaaaac

SEQ ID NO: 1412357 - DNA, 15 bp, Homo sapiens
gggagtaaataaaaa

SEQ ID NO: 1412358 - DNA, 15 bp, Homo sapiens
agggagtaaataaaa

SEQ ID NO: 1412359 - DNA, 15 bp, Homo sapiens
aagggagtaaataaa

SEQ ID NO: 1412360 - DNA, 15 bp, Homo sapiens
aaagggagtaaataa

SEQ ID NO: 1412361 - DNA, 15 bp, Homo sapiens
aaaagggagtaaata

SEQ ID NO: 1412362 - DNA, 15 bp, Homo sapiens
aaaaagggagtaaat

SEQ ID NO: 1412363 - DNA, 15 bp, Homo sapiens
taaaaagggagtaaa

SEQ ID NO: 1412364 - DNA, 15 bp, Homo sapiens
gtaaaaagggagtaa

SEQ ID NO: 1412365 - DNA, 15 bp, Homo sapiens
agtaaaaagggagta

SEQ ID NO: 1412366 - DNA, 15 bp, Homo sapiens
gagtaaaaagggagt

SEQ ID NO: 1412367 - DNA, 15 bp, Homo sapiens
agagtaaaaagggag

SEQ ID NO: 1412368 - DNA, 15 bp, Homo sapiens
cagagtaaaaaggga

SEQ ID NO: 1412369 - DNA, 15 bp, Homo sapiens
ccagagtaaaaaggg

SEQ ID NO: 1412370 - DNA, 15 bp, Homo sapiens
tccagagtaaaaagg

SEQ ID NO: 1412371 - DNA, 15 bp, Homo sapiens
ttccagagtaaaaag

SEQ ID NO: 1412372 - DNA, 15 bp, Homo sapiens
tttccagagtaaaaa

SEQ ID NO: 1412373 - DNA, 15 bp, Homo sapiens
ttttccagagtaaaa

SEQ ID NO: 1412374 - DNA, 15 bp, Homo sapiens
cttttccagagtaaa

SEQ ID NO: 1412375 - DNA, 15 bp, Homo sapiens
gcttttccagagtaa

SEQ ID NO: 1412376 - DNA, 15 bp, Homo sapiens
tgcttttccagagta

SEQ ID NO: 1412377 - DNA, 15 bp, Homo sapiens
ctgcttttccagagt

SEQ ID NO: 1412378 - DNA, 15 bp, Homo sapiens
cctgcttttccagag

SEQ ID NO: 1412379 - DNA, 15 bp, Homo sapiens
ccctgcttttccaga

SEQ ID NO: 1412380 - DNA, 15 bp, Homo sapiens
gccctgcttttccag

SEQ ID NO: 1412381 - DNA, 15 bp, Homo sapiens
tgccctgcttttcca

SEQ ID NO: 1412382 - DNA, 15 bp, Homo sapiens
ctgccctgcttttcc

SEQ ID NO: 1412383 - DNA, 15 bp, Homo sapiens
cctgccctgcttttc

SEQ ID NO: 1412384 - DNA, 15 bp, Homo sapiens
tcctgccctgctttt

SEQ ID NO: 1412385 - DNA, 15 bp, Homo sapiens
ttcctgccctgcttt

SEQ ID NO: 1412386 - DNA, 15 bp, Homo sapiens
cttcctgccctgctt

SEQ ID NO: 1412387 - DNA, 15 bp, Homo sapiens
acttcctgccctgct

SEQ ID NO: 1412388 - DNA, 15 bp, Homo sapiens
aacttcctgccctgc

SEQ ID NO: 1412389 - DNA, 15 bp, Homo sapiens
aaacttcctgccctg

SEQ ID NO: 1412390 - DNA, 15 bp, Homo sapiens
aaaacttcctgccct

SEQ ID NO: 1412391 - DNA, 15 bp, Homo sapiens
aaaaacttcctgccc

SEQ ID NO: 1412392 - DNA, 15 bp, Homo sapiens
taaaaacttcctgcc

SEQ ID NO: 1412393 - DNA, 15 bp, Homo sapiens
ttaaaaacttcctgc

SEQ ID NO: 1412394 - DNA, 15 bp, Homo sapiens
tttaaaaacttcctg

SEQ ID NO: 1412395 - DNA, 15 bp, Homo sapiens
ctttaaaaacttcct

SEQ ID NO: 1412396 - DNA, 15 bp, Homo sapiens
cctttaaaaacttcc

SEQ ID NO: 1412397 - DNA, 15 bp, Homo sapiens
ccctttaaaaacttc

SEQ ID NO: 1412398 - DNA, 15 bp, Homo sapiens
accctttaaaaactt

SEQ ID NO: 1412399 - DNA, 15 bp, Homo sapiens
aaccctttaaaaact

SEQ ID NO: 1412400 - DNA, 15 bp, Homo sapiens
gaaccctttaaaaac

SEQ ID NO: 1412401 - DNA, 15 bp, Homo sapiens
ggaaccctttaaaaa

SEQ ID NO: 1412402 - DNA, 15 bp, Homo sapiens
aggaaccctttaaaa

SEQ ID NO: 1412403 - DNA, 15 bp, Homo sapiens
aaggaaccctttaaa

SEQ ID NO: 1412404 - DNA, 15 bp, Homo sapiens
caaggaaccctttaa

SEQ ID NO: 1412405 - DNA, 15 bp, Homo sapiens
gcaaggaacccttta

SEQ ID NO: 1412406 - DNA, 15 bp, Homo sapiens
tgcaaggaacccttt

SEQ ID NO: 1412407 - DNA, 15 bp, Homo sapiens
ctgcaaggaaccctt

SEQ ID NO: 1412408 - DNA, 15 bp, Homo sapiens
actgcaaggaaccct

SEQ ID NO: 1412409 - DNA, 15 bp, Homo sapiens
aactgcaaggaaccc

SEQ ID NO: 1412410 - DNA, 15 bp, Homo sapiens
taactgcaaggaacc

SEQ ID NO: 1412411 - DNA, 15 bp, Homo sapiens
gtaactgcaaggaac

SEQ ID NO: 1412412 - DNA, 15 bp, Homo sapiens
tgtaactgcaaggaa

SEQ ID NO: 1412413 - DNA, 15 bp, Homo sapiens
ttgtaactgcaagga

SEQ ID NO: 1412414 - DNA, 15 bp, Homo sapiens
tttgtaactgcaagg

SEQ ID NO: 1412415 - DNA, 15 bp, Homo sapiens
ctttgtaactgcaag

SEQ ID NO: 1412416 - DNA, 15 bp, Homo sapiens
gctttgtaactgcaa

SEQ ID NO: 1412417 - DNA, 15 bp, Homo sapiens
agctttgtaactgca

SEQ ID NO: 1412418 - DNA, 15 bp, Homo sapiens
tagctttgtaactgc

SEQ ID NO: 1412419 - DNA, 15 bp, Homo sapiens
ctagctttgtaactg

SEQ ID NO: 1412420 - DNA, 15 bp, Homo sapiens
tctagctttgtaact

SEQ ID NO: 1412421 - DNA, 15 bp, Homo sapiens
ttctagctttgtaac

SEQ ID NO: 1412422 - DNA, 15 bp, Homo sapiens
attctagctttgtaa

SEQ ID NO: 1412423 - DNA, 15 bp, Homo sapiens
aattctagctttgta

SEQ ID NO: 1412424 - DNA, 15 bp, Homo sapiens
aaattctagctttgt

SEQ ID NO: 1412425 - DNA, 15 bp, Homo sapiens
caaattctagctttg

SEQ ID NO: 1412426 - DNA, 15 bp, Homo sapiens
tcaaattctagcttt

SEQ ID NO: 1412427 - DNA, 15 bp, Homo sapiens
ttcaaattctagctt

SEQ ID NO: 1412428 - DNA, 15 bp, Homo sapiens
gttcaaattctagct

SEQ ID NO: 1412429 - DNA, 15 bp, Homo sapiens
ggttcaaattctagc

SEQ ID NO: 1412430 - DNA, 15 bp, Homo sapiens
gggttcaaattctag

SEQ ID NO: 1412431 - DNA, 15 bp, Homo sapiens
tgggttcaaattcta

SEQ ID NO: 1412432 - DNA, 15 bp, Homo sapiens
ctgggttcaaattct

SEQ ID NO: 1412433 - DNA, 15 bp, Homo sapiens
actgggttcaaattc

SEQ ID NO: 1412434 - DNA, 15 bp, Homo sapiens
cactgggttcaaatt

SEQ ID NO: 1412435 - DNA, 15 bp, Homo sapiens
acactgggttcaaat

SEQ ID NO: 1412436 - DNA, 15 bp, Homo sapiens
gacactgggttcaaa

SEQ ID NO: 1412437 - DNA, 15 bp, Homo sapiens
tgacactgggttcaa

SEQ ID NO: 1412438 - DNA, 15 bp, Homo sapiens
ttgacactgggttca

SEQ ID NO: 1412439 - DNA, 15 bp, Homo sapiens
tttgacactgggttc

SEQ ID NO: 1412440 - DNA, 15 bp, Homo sapiens
ctttgacactgggtt

SEQ ID NO: 1412441 - DNA, 15 bp, Homo sapiens
gctttgacactgggt

SEQ ID NO: 1412442 - DNA, 15 bp, Homo sapiens
ggctttgacactggg

SEQ ID NO: 1412443 - DNA, 15 bp, Homo sapiens
aggctttgacactgg

SEQ ID NO: 1412444 - DNA, 15 bp, Homo sapiens
gaggctttgacactg

SEQ ID NO: 1412445 - DNA, 15 bp, Homo sapiens
agaggctttgacact

SEQ ID NO: 1412446 - DNA, 15 bp, Homo sapiens
cagaggctttgacac

SEQ ID NO: 1412447 - DNA, 15 bp, Homo sapiens
ccagaggctttgaca

SEQ ID NO: 1412448 - DNA, 15 bp, Homo sapiens
cccagaggctttgac

SEQ ID NO: 1412449 - DNA, 15 bp, Homo sapiens
acccagaggctttga

SEQ ID NO: 1412450 - DNA, 15 bp, Homo sapiens
gacccagaggctttg

SEQ ID NO: 1412451 - DNA, 15 bp, Homo sapiens
tgacccagaggcttt

SEQ ID NO: 1412452 - DNA, 15 bp, Homo sapiens
ctgacccagaggctt

SEQ ID NO: 1412453 - DNA, 15 bp, Homo sapiens
tctgacccagaggct

SEQ ID NO: 1412454 - DNA, 15 bp, Homo sapiens
atctgacccagaggc

SEQ ID NO: 1412455 - DNA, 15 bp, Homo sapiens
aatctgacccagagg

SEQ ID NO: 1412456 - DNA, 15 bp, Homo sapiens
caatctgacccagag

SEQ ID NO: 1412457 - DNA, 15 bp, Homo sapiens
ccaatctgacccaga

SEQ ID NO: 1412458 - DNA, 15 bp, Homo sapiens
cccaatctgacccag

SEQ ID NO: 1412459 - DNA, 15 bp, Homo sapiens
tcccaatctgaccca

SEQ ID NO: 1412460 - DNA, 15 bp, Homo sapiens
ctcccaatctgaccc

SEQ ID NO: 1412461 - DNA, 15 bp, Homo sapiens
cctcccaatctgacc

SEQ ID NO: 1412462 - DNA, 15 bp, Homo sapiens
ccctcccaatctgac

SEQ ID NO: 1412463 - DNA, 15 bp, Homo sapiens
cccctcccaatctga

SEQ ID NO: 1412464 - DNA, 15 bp, Homo sapiens
ccccctcccaatctg

SEQ ID NO: 1412465 - DNA, 15 bp, Homo sapiens
gccccctcccaatct

SEQ ID NO: 1412466 - DNA, 15 bp, Homo sapiens
ggccccctcccaatc

SEQ ID NO: 1412467 - DNA, 15 bp, Homo sapiens
gggccccctcccaat

SEQ ID NO: 1412468 - DNA, 15 bp, Homo sapiens
tgggccccctcccaa

SEQ ID NO: 1412469 - DNA, 15 bp, Homo sapiens
gtgggccccctccca

SEQ ID NO: 1412470 - DNA, 15 bp, Homo sapiens
cgtgggccccctccc

SEQ ID NO: 1412471 - DNA, 15 bp, Homo sapiens
acgtgggccccctcc

SEQ ID NO: 1412472 - DNA, 15 bp, Homo sapiens
aacgtgggccccctc

SEQ ID NO: 1412473 - DNA, 15 bp, Homo sapiens
caacgtgggccccct

SEQ ID NO: 1412474 - DNA, 15 bp, Homo sapiens
acaacgtgggccccc

SEQ ID NO: 1412475 - DNA, 15 bp, Homo sapiens
cacaacgtgggcccc

SEQ ID NO: 1412476 - DNA, 15 bp, Homo sapiens
tcacaacgtgggccc

SEQ ID NO: 1412477 - DNA, 15 bp, Homo sapiens
ttcacaacgtgggcc

SEQ ID NO: 1412478 - DNA, 15 bp, Homo sapiens
gttcacaacgtgggc

SEQ ID NO: 1412479 - DNA, 15 bp, Homo sapiens
agttcacaacgtggg

SEQ ID NO: 1412480 - DNA, 15 bp, Homo sapiens
aagttcacaacgtgg

SEQ ID NO: 1412481 - DNA, 15 bp, Homo sapiens
caagttcacaacgtg

SEQ ID NO: 1412482 - DNA, 15 bp, Homo sapiens
tcaagttcacaacgt

SEQ ID NO: 1412483 - DNA, 15 bp, Homo sapiens
gtcaagttcacaacg

SEQ ID NO: 1412484 - DNA, 15 bp, Homo sapiens
tgtcaagttcacaac

SEQ ID NO: 1412485 - DNA, 15 bp, Homo sapiens
ctgtcaagttcacaa

SEQ ID NO: 1412486 - DNA, 15 bp, Homo sapiens
actgtcaagttcaca

SEQ ID NO: 1412487 - DNA, 15 bp, Homo sapiens
aactgtcaagttcac

SEQ ID NO: 1412488 - DNA, 15 bp, Homo sapiens
taactgtcaagttca

SEQ ID NO: 1412489 - DNA, 15 bp, Homo sapiens
ttaactgtcaagttc

SEQ ID NO: 1412490 - DNA, 15 bp, Homo sapiens
attaactgtcaagtt

SEQ ID NO: 1412491 - DNA, 15 bp, Homo sapiens
aattaactgtcaagt

SEQ ID NO: 1412492 - DNA, 15 bp, Homo sapiens
gaattaactgtcaag

SEQ ID NO: 1412493 - DNA, 15 bp, Homo sapiens
tgaattaactgtcaa

SEQ ID NO: 1412494 - DNA, 15 bp, Homo sapiens
atgaattaactgtca

SEQ ID NO: 1412495 - DNA, 15 bp, Homo sapiens
catgaattaactgtc

SEQ ID NO: 1412496 - DNA, 15 bp, Homo sapiens
ccatgaattaactgt

SEQ ID NO: 1412497 - DNA, 15 bp, Homo sapiens
accatgaattaactg

SEQ ID NO: 1412498 - DNA, 15 bp, Homo sapiens
aaccatgaattaact

SEQ ID NO: 1412499 - DNA, 15 bp, Homo sapiens
caaccatgaattaac

SEQ ID NO: 1412500 - DNA, 15 bp, Homo sapiens
gcaaccatgaattaa

SEQ ID NO: 1412501 - DNA, 15 bp, Homo sapiens
agcaaccatgaatta

SEQ ID NO: 1412502 - DNA, 15 bp, Homo sapiens
cagcaaccatgaatt

SEQ ID NO: 1412503 - DNA, 15 bp, Homo sapiens
acagcaaccatgaat

SEQ ID NO: 1412504 - DNA, 15 bp, Homo sapiens
aacagcaaccatgaa

SEQ ID NO: 1412505 - DNA, 15 bp, Homo sapiens
aaacagcaaccatga

SEQ ID NO: 1412506 - DNA, 15 bp, Homo sapiens
aaaacagcaaccatg

SEQ ID NO: 1412507 - DNA, 15 bp, Homo sapiens
taaaacagcaaccat

SEQ ID NO: 1412508 - DNA, 15 bp, Homo sapiens
ataaaacagcaacca

SEQ ID NO: 1412509 - DNA, 15 bp, Homo sapiens
cataaaacagcaacc

SEQ ID NO: 1412510 - DNA, 15 bp, Homo sapiens
ccataaaacagcaac

SEQ ID NO: 1412511 - DNA, 15 bp, Homo sapiens
tccataaaacagcaa

SEQ ID NO: 1412512 - DNA, 15 bp, Homo sapiens
ctccataaaacagca

SEQ ID NO: 1412513 - DNA, 15 bp, Homo sapiens
gctccataaaacagc

SEQ ID NO: 1412514 - DNA, 15 bp, Homo sapiens
tgctccataaaacag

SEQ ID NO: 1412515 - DNA, 15 bp, Homo sapiens
ctgctccataaaaca

SEQ ID NO: 1412516 - DNA, 15 bp, Homo sapiens
cctgctccataaaac

SEQ ID NO: 1412517 - DNA, 15 bp, Homo sapiens
tcctgctccataaaa

SEQ ID NO: 1412518 - DNA, 15 bp, Homo sapiens
ttcctgctccataaa

SEQ ID NO: 1412519 - DNA, 15 bp, Homo sapiens
cttcctgctccataa

SEQ ID NO: 1412520 - DNA, 15 bp, Homo sapiens
acttcctgctccata

SEQ ID NO: 1412521 - DNA, 15 bp, Homo sapiens
cacttcctgctccat

SEQ ID NO: 1412522 - DNA, 15 bp, Homo sapiens
tcacttcctgctcca

SEQ ID NO: 1412523 - DNA, 15 bp, Homo sapiens
gtcacttcctgctcc

SEQ ID NO: 1412524 - DNA, 15 bp, Homo sapiens
ggtcacttcctgctc

SEQ ID NO: 1412525 - DNA, 15 bp, Homo sapiens
aggtcacttcctgct

SEQ ID NO: 1412526 - DNA, 15 bp, Homo sapiens
aaggtcacttcctgc

SEQ ID NO: 1412527 - DNA, 15 bp, Homo sapiens
aaaggtcacttcctg

SEQ ID NO: 1412528 - DNA, 15 bp, Homo sapiens
taaaggtcacttcct

SEQ ID NO: 1412529 - DNA, 15 bp, Homo sapiens
ctaaaggtcacttcc

SEQ ID NO: 1412530 - DNA, 15 bp, Homo sapiens
actaaaggtcacttc

SEQ ID NO: 1412531 - DNA, 15 bp, Homo sapiens
cactaaaggtcactt

SEQ ID NO: 1412532 - DNA, 15 bp, Homo sapiens
tcactaaaggtcact

SEQ ID NO: 1412533 - DNA, 15 bp, Homo sapiens
gtcactaaaggtcac

SEQ ID NO: 1412534 - DNA, 15 bp, Homo sapiens
agtcactaaaggtca

SEQ ID NO: 1412535 - DNA, 15 bp, Homo sapiens
gagtcactaaaggtc

SEQ ID NO: 1412536 - DNA, 15 bp, Homo sapiens
tgagtcactaaaggt

SEQ ID NO: 1412537 - DNA, 15 bp, Homo sapiens
ctgagtcactaaagg

SEQ ID NO: 1412538 - DNA, 15 bp, Homo sapiens
tctgagtcactaaag

SEQ ID NO: 1412539 - DNA, 15 bp, Homo sapiens
ctctgagtcactaaa

SEQ ID NO: 1412540 - DNA, 15 bp, Homo sapiens
cctctgagtcactaa

SEQ ID NO: 1412541 - DNA, 15 bp, Homo sapiens
tcctctgagtcacta

SEQ ID NO: 1412542 - DNA, 15 bp, Homo sapiens
ttcctctgagtcact

SEQ ID NO: 1412543 - DNA, 15 bp, Homo sapiens
cttcctctgagtcac

SEQ ID NO: 1412544 - DNA, 15 bp, Homo sapiens
ccttcctctgagtca

SEQ ID NO: 1412545 - DNA, 15 bp, Homo sapiens
tccttcctctgagtc

SEQ ID NO: 1412546 - DNA, 15 bp, Homo sapiens
attccttcctctgag

SEQ ID NO: 1412547 - DNA, 15 bp, Homo sapiens
tattccttcctctga

SEQ ID NO: 1412548 - DNA, 15 bp, Homo sapiens
ttattccttcctctg

SEQ ID NO: 1412549 - DNA, 15 bp, Homo sapiens
cttattccttcctct

SEQ ID NO: 1412550 - DNA, 15 bp, Homo sapiens
gcttattccttcctc

SEQ ID NO: 1412551 - DNA, 15 bp, Homo sapiens
agcttattccttcct

SEQ ID NO: 1412552 - DNA, 15 bp, Homo sapiens
cagcttattccttcc

SEQ ID NO: 1412553 - DNA, 15 bp, Homo sapiens
tcagcttattccttc

SEQ ID NO: 1412554 - DNA, 15 bp, Homo sapiens
ctcagcttattcctt

SEQ ID NO: 1412555 - DNA, 15 bp, Homo sapiens
cctcagcttattcct

SEQ ID NO: 1412556 - DNA, 15 bp, Homo sapiens
ccctcagcttattcc

SEQ ID NO: 1412557 - DNA, 15 bp, Homo sapiens
tccctcagcttattc

SEQ ID NO: 1412558 - DNA, 15 bp, Homo sapiens
ctccctcagcttatt

SEQ ID NO: 1412559 - DNA, 15 bp, Homo sapiens
cctccctcagcttat

SEQ ID NO: 1412560 - DNA, 15 bp, Homo sapiens
ccctccctcagctta

SEQ ID NO: 1412561 - DNA, 15 bp, Homo sapiens
accctccctcagctt

SEQ ID NO: 1412562 - DNA, 15 bp, Homo sapiens
gaccctccctcagct

SEQ ID NO: 1412563 - DNA, 15 bp, Homo sapiens
ggaccctccctcagc

SEQ ID NO: 1412564 - DNA, 15 bp, Homo sapiens
tggaccctccctcag

SEQ ID NO: 1412565 - DNA, 15 bp, Homo sapiens
ctggaccctccctca

SEQ ID NO: 1412566 - DNA, 15 bp, Homo sapiens
cctggaccctccctc

SEQ ID NO: 1412567 - DNA, 15 bp, Homo sapiens
tcctggaccctccct

SEQ ID NO: 1412568 - DNA, 15 bp, Homo sapiens
ctcctggaccctccc

SEQ ID NO: 1412569 - DNA, 15 bp, Homo sapiens
tctcctggaccctcc

SEQ ID NO: 1412570 - DNA, 15 bp, Homo sapiens
gtctcctggaccctc

SEQ ID NO: 1412571 - DNA, 15 bp, Homo sapiens
ggtctcctggaccct

SEQ ID NO: 1412572 - DNA, 15 bp, Homo sapiens
tggtctcctggaccc

SEQ ID NO: 1412573 - DNA, 15 bp, Homo sapiens
ctggtctcctggacc

SEQ ID NO: 1412574 - DNA, 15 bp, Homo sapiens
tctggtctcctggac

SEQ ID NO: 1412575 - DNA, 15 bp, Homo sapiens
ctctggtctcctgga

SEQ ID NO: 1412576 - DNA, 15 bp, Homo sapiens
cctctggtctcctgg

SEQ ID NO: 1412577 - DNA, 15 bp, Homo sapiens
acctctggtctcctg

SEQ ID NO: 1412578 - DNA, 15 bp, Homo sapiens
tacctctggtctcct

SEQ ID NO: 1412579 - DNA, 15 bp, Homo sapiens
gtacctctggtctcc

SEQ ID NO: 1412580 - DNA, 15 bp, Homo sapiens
tgtacctctggtctc

SEQ ID NO: 1412581 - DNA, 15 bp, Homo sapiens
ctgtacctctggtct

SEQ ID NO: 1412582 - DNA, 15 bp, Homo sapiens
actgtacctctggtc

SEQ ID NO: 1412583 - DNA, 15 bp, Homo sapiens
cactgtacctctggt

SEQ ID NO: 1412584 - DNA, 15 bp, Homo sapiens
gcactgtacctctgg

SEQ ID NO: 1412585 - DNA, 15 bp, Homo sapiens
ggcactgtacctctg

SEQ ID NO: 1412586 - DNA, 15 bp, Homo sapiens
aggcactgtacctct

SEQ ID NO: 1412587 - DNA, 15 bp, Homo sapiens
caggcactgtacctc

SEQ ID NO: 1412588 - DNA, 15 bp, Homo sapiens
ccaggcactgtacct

SEQ ID NO: 1412589 - DNA, 15 bp, Homo sapiens
gccaggcactgtacc

SEQ ID NO: 1412590 - DNA, 15 bp, Homo sapiens
tgccaggcactgtac

SEQ ID NO: 1412591 - DNA, 15 bp, Homo sapiens
atgccaggcactgta

SEQ ID NO: 1412592 - DNA, 15 bp, Homo sapiens
gatgccaggcactgt

SEQ ID NO: 1412593 - DNA, 15 bp, Homo sapiens
agatgccaggcactg

SEQ ID NO: 1412594 - DNA, 15 bp, Homo sapiens
gagatgccaggcact

SEQ ID NO: 1412595 - DNA, 15 bp, Homo sapiens
agagatgccaggcac

SEQ ID NO: 1412596 - DNA, 15 bp, Homo sapiens
aagagatgccaggca

SEQ ID NO: 1412597 - DNA, 15 bp, Homo sapiens
taagagatgccaggc

SEQ ID NO: 1412598 - DNA, 15 bp, Homo sapiens
ataagagatgccagg

SEQ ID NO: 1412599 - DNA, 15 bp, Homo sapiens
gataagagatgccag

SEQ ID NO: 1412600 - DNA, 15 bp, Homo sapiens
tgataagagatgcca

SEQ ID NO: 1412601 - DNA, 15 bp, Homo sapiens
gtgataagagatgcc

SEQ ID NO: 1412602 - DNA, 15 bp, Homo sapiens
agtgataagagatgc

SEQ ID NO: 1412603 - DNA, 15 bp, Homo sapiens
cagtgataagagatg

SEQ ID NO: 1412604 - DNA, 15 bp, Homo sapiens
gcagtgataagagat

SEQ ID NO: 1412605 - DNA, 15 bp, Homo sapiens
tgcagtgataagaga

SEQ ID NO: 1412606 - DNA, 15 bp, Homo sapiens
atgcagtgataagag

SEQ ID NO: 1412607 - DNA, 15 bp, Homo sapiens
aatgcagtgataaga

SEQ ID NO: 1412608 - DNA, 15 bp, Homo sapiens
gaatgcagtgataag

SEQ ID NO: 1412609 - DNA, 15 bp, Homo sapiens
agaatgcagtgataa

SEQ ID NO: 1412610 - DNA, 15 bp, Homo sapiens
tagaatgcagtgata

SEQ ID NO: 1412611 - DNA, 15 bp, Homo sapiens
ttagaatgcagtgat

SEQ ID NO: 1412612 - DNA, 15 bp, Homo sapiens
cttagaatgcagtga

SEQ ID NO: 1412613 - DNA, 15 bp, Homo sapiens
acttagaatgcagtg

SEQ ID NO: 1412614 - DNA, 15 bp, Homo sapiens
cacttagaatgcagt

SEQ ID NO: 1412615 - DNA, 15 bp, Homo sapiens
ccacttagaatgcag

SEQ ID NO: 1412616 - DNA, 15 bp, Homo sapiens
gccacttagaatgca

SEQ ID NO: 1412617 - DNA, 15 bp, Homo sapiens
agccacttagaatgc

SEQ ID NO: 1412618 - DNA, 15 bp, Homo sapiens
aagccacttagaatg

SEQ ID NO: 1412619 - DNA, 15 bp, Homo sapiens
taagccacttagaat

SEQ ID NO: 1412620 - DNA, 15 bp, Homo sapiens
ctaagccacttagaa

SEQ ID NO: 1412621 - DNA, 15 bp, Homo sapiens
gctaagccacttaga

SEQ ID NO: 1412622 - DNA, 15 bp, Homo sapiens
ggctaagccacttag

SEQ ID NO: 1412623 - DNA, 15 bp, Homo sapiens
aggctaagccactta

SEQ ID NO: 1412624 - DNA, 15 bp, Homo sapiens
aaggctaagccactt

SEQ ID NO: 1412625 - DNA, 15 bp, Homo sapiens
caaggctaagccact

SEQ ID NO: 1412626 - DNA, 15 bp, Homo sapiens
gcaaggctaagccac

SEQ ID NO: 1412627 - DNA, 15 bp, Homo sapiens
agcaaggctaagcca

SEQ ID NO: 1412628 - DNA, 15 bp, Homo sapiens
cagcaaggctaagcc

SEQ ID NO: 1412629 - DNA, 15 bp, Homo sapiens
acagcaaggctaagc

SEQ ID NO: 1412630 - DNA, 15 bp, Homo sapiens
cacagcaaggctaag

SEQ ID NO: 1412631 - DNA, 15 bp, Homo sapiens
acacagcaaggctaa

SEQ ID NO: 1412632 - DNA, 15 bp, Homo sapiens
aacacagcaaggcta

SEQ ID NO: 1412633 - DNA, 15 bp, Homo sapiens
gaacacagcaaggct

SEQ ID NO: 1412634 - DNA, 15 bp, Homo sapiens
ggaacacagcaaggc

SEQ ID NO: 1412635 - DNA, 15 bp, Homo sapiens
aggaacacagcaagg

SEQ ID NO: 1412636 - DNA, 15 bp, Homo sapiens
caggaacacagcaag

SEQ ID NO: 1412637 - DNA, 15 bp, Homo sapiens
tcaggaacacagcaa

SEQ ID NO: 1412638 - DNA, 15 bp, Homo sapiens
ttcaggaacacagca

SEQ ID NO: 1412639 - DNA, 15 bp, Homo sapiens
attcaggaacacagc

SEQ ID NO: 1412640 - DNA, 15 bp, Homo sapiens
cattcaggaacacag

SEQ ID NO: 1412641 - DNA, 15 bp, Homo sapiens
gcattcaggaacaca

SEQ ID NO: 1412642 - DNA, 15 bp, Homo sapiens
tgcattcaggaacac

SEQ ID NO: 1412643 - DNA, 15 bp, Homo sapiens
gtgcattcaggaaca

SEQ ID NO: 1412644 - DNA, 15 bp, Homo sapiens
tgtgcattcaggaac

SEQ ID NO: 1412645 - DNA, 15 bp, Homo sapiens
gtgtgcattcaggaa

SEQ ID NO: 1412646 - DNA, 15 bp, Homo sapiens
tgtgtgcattcagga

SEQ ID NO: 1412647 - DNA, 15 bp, Homo sapiens
atgtgtgcattcagg

SEQ ID NO: 1412648 - DNA, 15 bp, Homo sapiens
aatgtgtgcattcag

SEQ ID NO: 1412649 - DNA, 15 bp, Homo sapiens
caatgtgtgcattca

SEQ ID NO: 1412650 - DNA, 15 bp, Homo sapiens
ccaatgtgtgcattc

SEQ ID NO: 1412651 - DNA, 15 bp, Homo sapiens
cccaatgtgtgcatt

SEQ ID NO: 1412652 - DNA, 15 bp, Homo sapiens
tcccaatgtgtgcat

SEQ ID NO: 1412653 - DNA, 15 bp, Homo sapiens
atcccaatgtgtgca

SEQ ID NO: 1412654 - DNA, 15 bp, Homo sapiens
aatcccaatgtgtgc

SEQ ID NO: 1412655 - DNA, 15 bp, Homo sapiens
caatcccaatgtgtg

SEQ ID NO: 1412656 - DNA, 15 bp, Homo sapiens
gcaatcccaatgtgt

SEQ ID NO: 1412657 - DNA, 15 bp, Homo sapiens
tgcaatcccaatgtg

SEQ ID NO: 1412658 - DNA, 15 bp, Homo sapiens
ttgcaatcccaatgt

SEQ ID NO: 1412659 - DNA, 15 bp, Homo sapiens
gttgcaatcccaatg

SEQ ID NO: 1412660 - DNA, 15 bp, Homo sapiens
agttgcaatcccaat

SEQ ID NO: 1412661 - DNA, 15 bp, Homo sapiens
gagttgcaatcccaa

SEQ ID NO: 1412662 - DNA, 15 bp, Homo sapiens
tgagttgcaatccca

SEQ ID NO: 1412663 - DNA, 15 bp, Homo sapiens
gtgagttgcaatccc

SEQ ID NO: 1412664 - DNA, 15 bp, Homo sapiens
tgtgagttgcaatcc

SEQ ID NO: 1412665 - DNA, 15 bp, Homo sapiens
gtgtgagttgcaatc

SEQ ID NO: 1412666 - DNA, 15 bp, Homo sapiens
ggtgtgagttgcaat

SEQ ID NO: 1412667 - DNA, 15 bp, Homo sapiens
cggtgtgagttgcaa

SEQ ID NO: 1412668 - DNA, 15 bp, Homo sapiens
tcggtgtgagttgca

SEQ ID NO: 1412669 - DNA, 15 bp, Homo sapiens
gtcggtgtgagttgc

SEQ ID NO: 1412670 - DNA, 15 bp, Homo sapiens
ggtcggtgtgagttg

SEQ ID NO: 1412671 - DNA, 15 bp, Homo sapiens
tggtcggtgtgagtt

SEQ ID NO: 1412672 - DNA, 15 bp, Homo sapiens
gtggtcggtgtgagt

SEQ ID NO: 1412673 - DNA, 15 bp, Homo sapiens
agtggtcggtgtgag

SEQ ID NO: 1412674 - DNA, 15 bp, Homo sapiens
aagtggtcggtgtga

SEQ ID NO: 1412675 - DNA, 15 bp, Homo sapiens
aaagtggtcggtgtg

SEQ ID NO: 1412676 - DNA, 15 bp, Homo sapiens
taaagtggtcggtgt

SEQ ID NO: 1412677 - DNA, 15 bp, Homo sapiens
ctaaagtggtcggtg

SEQ ID NO: 1412678 - DNA, 15 bp, Homo sapiens
cctaaagtggtcggt

SEQ ID NO: 1412679 - DNA, 15 bp, Homo sapiens
acctaaagtggtcgg

SEQ ID NO: 1412680 - DNA, 15 bp, Homo sapiens
aacctaaagtggtcg

SEQ ID NO: 1412681 - DNA, 15 bp, Homo sapiens
gaacctaaagtggtc

SEQ ID NO: 1412682 - DNA, 15 bp, Homo sapiens
agaacctaaagtggt

SEQ ID NO: 1412683 - DNA, 15 bp, Homo sapiens
aagaacctaaagtgg

SEQ ID NO: 1412684 - DNA, 15 bp, Homo sapiens
gaagaacctaaagtg

SEQ ID NO: 1412685 - DNA, 15 bp, Homo sapiens
agaagaacctaaagt

SEQ ID NO: 1412686 - DNA, 15 bp, Homo sapiens
aagaagaacctaaag

SEQ ID NO: 1412687 - DNA, 15 bp, Homo sapiens
caagaagaacctaaa

SEQ ID NO: 1412688 - DNA, 15 bp, Homo sapiens
tcaagaagaacctaa

SEQ ID NO: 1412689 - DNA, 15 bp, Homo sapiens
ctcaagaagaaccta

SEQ ID NO: 1412690 - DNA, 15 bp, Homo sapiens
tctcaagaagaacct

SEQ ID NO: 1412691 - DNA, 15 bp, Homo sapiens
ctctcaagaagaacc

SEQ ID NO: 1412692 - DNA, 15 bp, Homo sapiens
tctctcaagaagaac

SEQ ID NO: 1412693 - DNA, 15 bp, Homo sapiens
atctctcaagaagaa

SEQ ID NO: 1412694 - DNA, 15 bp, Homo sapiens
tatctctcaagaaga

SEQ ID NO: 1412695 - DNA, 15 bp, Homo sapiens
ctatctctcaagaag

SEQ ID NO: 1412696 - DNA, 15 bp, Homo sapiens
cctatctctcaagaa

SEQ ID NO: 1412697 - DNA, 15 bp, Homo sapiens
gcctatctctcaaga

SEQ ID NO: 1412698 - DNA, 15 bp, Homo sapiens
agcctatctctcaag

SEQ ID NO: 1412699 - DNA, 15 bp, Homo sapiens
cagcctatctctcaa

SEQ ID NO: 1412700 - DNA, 15 bp, Homo sapiens
acagcctatctctca

SEQ ID NO: 1412701 - DNA, 15 bp, Homo sapiens
cacagcctatctctc

SEQ ID NO: 1412702 - DNA, 15 bp, Homo sapiens
tcacagcctatctct

SEQ ID NO: 1412703 - DNA, 15 bp, Homo sapiens
ctcacagcctatctc

SEQ ID NO: 1412704 - DNA, 15 bp, Homo sapiens
actcacagcctatct

SEQ ID NO: 1412705 - DNA, 15 bp, Homo sapiens
gactcacagcctatc

SEQ ID NO: 1412706 - DNA, 15 bp, Homo sapiens
ggactcacagcctat

SEQ ID NO: 1412707 - DNA, 15 bp, Homo sapiens
aggactcacagccta

SEQ ID NO: 1412708 - DNA, 15 bp, Homo sapiens
caggactcacagcct

SEQ ID NO: 1412709 - DNA, 15 bp, Homo sapiens
tcaggactcacagcc

SEQ ID NO: 1412710 - DNA, 15 bp, Homo sapiens
ttcaggactcacagc

SEQ ID NO: 1412711 - DNA, 15 bp, Homo sapiens
attcaggactcacag

SEQ ID NO: 1412712 - DNA, 15 bp, Homo sapiens
cattcaggactcaca

SEQ ID NO: 1412713 - DNA, 15 bp, Homo sapiens
ccattcaggactcac

SEQ ID NO: 1412714 - DNA, 15 bp, Homo sapiens
tccattcaggactca

SEQ ID NO: 1412715 - DNA, 15 bp, Homo sapiens
ctccattcaggactc

SEQ ID NO: 1412716 - DNA, 15 bp, Homo sapiens
actccattcaggact

SEQ ID NO: 1412717 - DNA, 15 bp, Homo sapiens
cactccattcaggac

SEQ ID NO: 1412718 - DNA, 15 bp, Homo sapiens
acactccattcagga

SEQ ID NO: 1412719 - DNA, 15 bp, Homo sapiens
cacactccattcagg

SEQ ID NO: 1412720 - DNA, 15 bp, Homo sapiens
acacactccattcag

SEQ ID NO: 1412721 - DNA, 15 bp, Homo sapiens
cacacactccattca

SEQ ID NO: 1412722 - DNA, 15 bp, Homo sapiens
acacacactccattc

SEQ ID NO: 1412723 - DNA, 15 bp, Homo sapiens
cacacacactccatt

SEQ ID NO: 1412724 - DNA, 15 bp, Homo sapiens
acacacacactccat

SEQ ID NO: 1412725 - DNA, 15 bp, Homo sapiens
cacacacacactcca

SEQ ID NO: 1412726 - DNA, 15 bp, Homo sapiens
tacacacacacactc

SEQ ID NO: 1412727 - DNA, 15 bp, Homo sapiens
ctacacacacacact

SEQ ID NO: 1412728 - DNA, 15 bp, Homo sapiens
ccctacacacacaca

SEQ ID NO: 1412729 - DNA, 15 bp, Homo sapiens
cccctacacacacac

SEQ ID NO: 1412730 - DNA, 15 bp, Homo sapiens
ccccctacacacaca

SEQ ID NO: 1412731 - DNA, 15 bp, Homo sapiens
gccccctacacacac

SEQ ID NO: 1412732 - DNA, 15 bp, Homo sapiens
agccccctacacaca

SEQ ID NO: 1412733 - DNA, 15 bp, Homo sapiens
aagccccctacacac

SEQ ID NO: 1412734 - DNA, 15 bp, Homo sapiens
caagccccctacaca

SEQ ID NO: 1412735 - DNA, 15 bp, Homo sapiens
ccaagccccctacac

SEQ ID NO: 1412736 - DNA, 15 bp, Homo sapiens
gccaagccccctaca

SEQ ID NO: 1412737 - DNA, 15 bp, Homo sapiens
agccaagccccctac

SEQ ID NO: 1412738 - DNA, 15 bp, Homo sapiens
aagccaagcccccta

SEQ ID NO: 1412739 - DNA, 15 bp, Homo sapiens
aaagccaagccccct

SEQ ID NO: 1412740 - DNA, 15 bp, Homo sapiens
gaaagccaagccccc

SEQ ID NO: 1412741 - DNA, 15 bp, Homo sapiens
tgaaagccaagcccc

SEQ ID NO: 1412742 - DNA, 15 bp, Homo sapiens
ctgaaagccaagccc

SEQ ID NO: 1412743 - DNA, 15 bp, Homo sapiens
cctgaaagccaagcc

SEQ ID NO: 1412744 - DNA, 15 bp, Homo sapiens
gcctgaaagccaagc

SEQ ID NO: 1412745 - DNA, 15 bp, Homo sapiens
ggcctgaaagccaag

SEQ ID NO: 1412746 - DNA, 15 bp, Homo sapiens
tggcctgaaagccaa

SEQ ID NO: 1412747 - DNA, 15 bp, Homo sapiens
ttggcctgaaagcca

SEQ ID NO: 1412748 - DNA, 15 bp, Homo sapiens
cttggcctgaaagcc

SEQ ID NO: 1412749 - DNA, 15 bp, Homo sapiens
tcttggcctgaaagc

SEQ ID NO: 1412750 - DNA, 15 bp, Homo sapiens
ctcttggcctgaaag

SEQ ID NO: 1412751 - DNA, 15 bp, Homo sapiens
actcttggcctgaaa

SEQ ID NO: 1412752 - DNA, 15 bp, Homo sapiens
cactcttggcctgaa

SEQ ID NO: 1412753 - DNA, 15 bp, Homo sapiens
ccactcttggcctga

SEQ ID NO: 1412754 - DNA, 15 bp, Homo sapiens
tccactcttggcctg

SEQ ID NO: 1412755 - DNA, 15 bp, Homo sapiens
ctccactcttggcct

SEQ ID NO: 1412756 - DNA, 15 bp, Homo sapiens
actccactcttggcc

SEQ ID NO: 1412757 - DNA, 15 bp, Homo sapiens
cactccactcttggc

SEQ ID NO: 1412758 - DNA, 15 bp, Homo sapiens
tcactccactcttgg

SEQ ID NO: 1412759 - DNA, 15 bp, Homo sapiens
ctcactccactcttg

SEQ ID NO: 1412760 - DNA, 15 bp, Homo sapiens
actcactccactctt

SEQ ID NO: 1412761 - DNA, 15 bp, Homo sapiens
cactcactccactct

SEQ ID NO: 1412762 - DNA, 15 bp, Homo sapiens
acactcactccactc

SEQ ID NO: 1412763 - DNA, 15 bp, Homo sapiens
cacactcactccact

SEQ ID NO: 1412764 - DNA, 15 bp, Homo sapiens
ccacactcactccac

SEQ ID NO: 1412765 - DNA, 15 bp, Homo sapiens
accacactcactcca

SEQ ID NO: 1412766 - DNA, 15 bp, Homo sapiens
taccacactcactcc

SEQ ID NO: 1412767 - DNA, 15 bp, Homo sapiens
gtaccacactcactc

SEQ ID NO: 1412768 - DNA, 15 bp, Homo sapiens
agtaccacactcact

SEQ ID NO: 1412769 - DNA, 15 bp, Homo sapiens
aagtaccacactcac

SEQ ID NO: 1412770 - DNA, 15 bp, Homo sapiens
caagtaccacactca

SEQ ID NO: 1412771 - DNA, 15 bp, Homo sapiens
ccaagtaccacactc

SEQ ID NO: 1412772 - DNA, 15 bp, Homo sapiens
accaagtaccacact

SEQ ID NO: 1412773 - DNA, 15 bp, Homo sapiens
caccaagtaccacac

SEQ ID NO: 1412774 - DNA, 15 bp, Homo sapiens
ccaccaagtaccaca

SEQ ID NO: 1412775 - DNA, 15 bp, Homo sapiens
tccaccaagtaccac

SEQ ID NO: 1412776 - DNA, 15 bp, Homo sapiens
gtccaccaagtacca

SEQ ID NO: 1412777 - DNA, 15 bp, Homo sapiens
tgtccaccaagtacc

SEQ ID NO: 1412778 - DNA, 15 bp, Homo sapiens
ctgtccaccaagtac

SEQ ID NO: 1412779 - DNA, 15 bp, Homo sapiens
tctgtccaccaagta

SEQ ID NO: 1412780 - DNA, 15 bp, Homo sapiens
ctctgtccaccaagt

SEQ ID NO: 1412781 - DNA, 15 bp, Homo sapiens
tctctgtccaccaag

SEQ ID NO: 1412782 - DNA, 15 bp, Homo sapiens
ctctctgtccaccaa

SEQ ID NO: 1412783 - DNA, 15 bp, Homo sapiens
cctctctgtccacca

SEQ ID NO: 1412784 - DNA, 15 bp, Homo sapiens
ggcctctctgtccac

SEQ ID NO: 1412785 - DNA, 15 bp, Homo sapiens
tggcctctctgtcca

SEQ ID NO: 1412786 - DNA, 15 bp, Homo sapiens
ctggcctctctgtcc

SEQ ID NO: 1412787 - DNA, 15 bp, Homo sapiens
actggcctctctgtc

SEQ ID NO: 1412788 - DNA, 15 bp, Homo sapiens
aactggcctctctgt

SEQ ID NO: 1412789 - DNA, 15 bp, Homo sapiens
caactggcctctctg

SEQ ID NO: 1412790 - DNA, 15 bp, Homo sapiens
ccaactggcctctct

SEQ ID NO: 1412791 - DNA, 15 bp, Homo sapiens
accaactggcctctc

SEQ ID NO: 1412792 - DNA, 15 bp, Homo sapiens
aaccaactggcctct

SEQ ID NO: 1412793 - DNA, 15 bp, Homo sapiens
taaccaactggcctc

SEQ ID NO: 1412794 - DNA, 15 bp, Homo sapiens
ataaccaactggcct

SEQ ID NO: 1412795 - DNA, 15 bp, Homo sapiens
gataaccaactggcc

SEQ ID NO: 1412796 - DNA, 15 bp, Homo sapiens
tgataaccaactggc

SEQ ID NO: 1412797 - DNA, 15 bp, Homo sapiens
ttgataaccaactgg

SEQ ID NO: 1412798 - DNA, 15 bp, Homo sapiens
cttgataaccaactg

SEQ ID NO: 1412799 - DNA, 15 bp, Homo sapiens
acttgataaccaact

SEQ ID NO: 1412800 - DNA, 15 bp, Homo sapiens
cacttgataaccaac

SEQ ID NO: 1412801 - DNA, 15 bp, Homo sapiens
tcacttgataaccaa

SEQ ID NO: 1412802 - DNA, 15 bp, Homo sapiens
ttcacttgataacca

SEQ ID NO: 1412803 - DNA, 15 bp, Homo sapiens
cttcacttgataacc

SEQ ID NO: 1412804 - DNA, 15 bp, Homo sapiens
ccttcacttgataac

SEQ ID NO: 1412805 - DNA, 15 bp, Homo sapiens
cccttcacttgataa

SEQ ID NO: 1412806 - DNA, 15 bp, Homo sapiens
ccccttcacttgata

SEQ ID NO: 1412807 - DNA, 15 bp, Homo sapiens
gccccttcacttgat

SEQ ID NO: 1412808 - DNA, 15 bp, Homo sapiens
cgccccttcacttga

SEQ ID NO: 1412809 - DNA, 15 bp, Homo sapiens
acgccccttcacttg

SEQ ID NO: 1412810 - DNA, 15 bp, Homo sapiens
aacgccccttcactt

SEQ ID NO: 1412811 - DNA, 15 bp, Homo sapiens
taacgccccttcact

SEQ ID NO: 1412812 - DNA, 15 bp, Homo sapiens
ctaacgccccttcac

SEQ ID NO: 1412813 - DNA, 15 bp, Homo sapiens
cctaacgccccttca

SEQ ID NO: 1412814 - DNA, 15 bp, Homo sapiens
ccctaacgccccttc

SEQ ID NO: 1412815 - DNA, 15 bp, Homo sapiens
tccctaacgcccctt

SEQ ID NO: 1412816 - DNA, 15 bp, Homo sapiens
ttccctaacgcccct

SEQ ID NO: 1412817 - DNA, 15 bp, Homo sapiens
tttccctaacgcccc

SEQ ID NO: 1412818 - DNA, 15 bp, Homo sapiens
ttttccctaacgccc

SEQ ID NO: 1412819 - DNA, 15 bp, Homo sapiens
tttttccctaacgcc

SEQ ID NO: 1412820 - DNA, 15 bp, Homo sapiens
ctttttccctaacgc

SEQ ID NO: 1412821 - DNA, 15 bp, Homo sapiens
actttttccctaacg

SEQ ID NO: 1412822 - DNA, 15 bp, Homo sapiens
aactttttccctaac

SEQ ID NO: 1412823 - DNA, 15 bp, Homo sapiens
gaactttttccctaa

SEQ ID NO: 1412824 - DNA, 15 bp, Homo sapiens
tgaactttttcccta

SEQ ID NO: 1412825 - DNA, 15 bp, Homo sapiens
ctgaactttttccct

SEQ ID NO: 1412826 - DNA, 15 bp, Homo sapiens
tctgaactttttccc

SEQ ID NO: 1412827 - DNA, 15 bp, Homo sapiens
ctctgaactttttcc

SEQ ID NO: 1412828 - DNA, 15 bp, Homo sapiens
cctctgaactttttc

SEQ ID NO: 1412829 - DNA, 15 bp, Homo sapiens
ccctctgaacttttt

SEQ ID NO: 1412830 - DNA, 15 bp, Homo sapiens
gccctctgaactttt

SEQ ID NO: 1412831 - DNA, 15 bp, Homo sapiens
tgccctctgaacttt

SEQ ID NO: 1412832 - DNA, 15 bp, Homo sapiens
ttgccctctgaactt

SEQ ID NO: 1412833 - DNA, 15 bp, Homo sapiens
tttgccctctgaact

SEQ ID NO: 1412834 - DNA, 15 bp, Homo sapiens
ttttgccctctgaac

SEQ ID NO: 1412835 - DNA, 15 bp, Homo sapiens
tttttgccctctgaa

SEQ ID NO: 1412836 - DNA, 15 bp, Homo sapiens
ctttttgccctctga

SEQ ID NO: 1412837 - DNA, 15 bp, Homo sapiens
gctttttgccctctg

SEQ ID NO: 1412838 - DNA, 15 bp, Homo sapiens
agctttttgccctct

SEQ ID NO: 1412839 - DNA, 15 bp, Homo sapiens
tagctttttgccctc

SEQ ID NO: 1412840 - DNA, 15 bp, Homo sapiens
atagctttttgccct

SEQ ID NO: 1412841 - DNA, 15 bp, Homo sapiens
catagctttttgccc

SEQ ID NO: 1412842 - DNA, 15 bp, Homo sapiens
acatagctttttgcc

SEQ ID NO: 1412843 - DNA, 15 bp, Homo sapiens
aacatagctttttgc

SEQ ID NO: 1412844 - DNA, 15 bp, Homo sapiens
caacatagctttttg

SEQ ID NO: 1412845 - DNA, 15 bp, Homo sapiens
gcaacatagcttttt

SEQ ID NO: 1412846 - DNA, 15 bp, Homo sapiens
agcaacatagctttt

SEQ ID NO: 1412847 - DNA, 15 bp, Homo sapiens
gagcaacatagcttt

SEQ ID NO: 1412848 - DNA, 15 bp, Homo sapiens
ggagcaacatagctt

SEQ ID NO: 1412849 - DNA, 15 bp, Homo sapiens
aggagcaacatagct

SEQ ID NO: 1412850 - DNA, 15 bp, Homo sapiens
aaggagcaacatagc

SEQ ID NO: 1412851 - DNA, 15 bp, Homo sapiens
gaaggagcaacatag

SEQ ID NO: 1412852 - DNA, 15 bp, Homo sapiens
agaaggagcaacata

SEQ ID NO: 1412853 - DNA, 15 bp, Homo sapiens
gagaaggagcaacat

SEQ ID NO: 1412854 - DNA, 15 bp, Homo sapiens
tgagaaggagcaaca

SEQ ID NO: 1412855 - DNA, 15 bp, Homo sapiens
gtgagaaggagcaac

SEQ ID NO: 1412856 - DNA, 15 bp, Homo sapiens
agtgagaaggagcaa

SEQ ID NO: 1412857 - DNA, 15 bp, Homo sapiens
aagtgagaaggagca

SEQ ID NO: 1412858 - DNA, 15 bp, Homo sapiens
taagtgagaaggagc

SEQ ID NO: 1412859 - DNA, 15 bp, Homo sapiens
ataagtgagaaggag

SEQ ID NO: 1412860 - DNA, 15 bp, Homo sapiens
aataagtgagaagga

SEQ ID NO: 1412861 - DNA, 15 bp, Homo sapiens
caataagtgagaagg

SEQ ID NO: 1412862 - DNA, 15 bp, Homo sapiens
acaataagtgagaag

SEQ ID NO: 1412863 - DNA, 15 bp, Homo sapiens
gacaataagtgagaa

SEQ ID NO: 1412864 - DNA, 15 bp, Homo sapiens
ggacaataagtgaga

SEQ ID NO: 1412865 - DNA, 15 bp, Homo sapiens
tggacaataagtgag

SEQ ID NO: 1412866 - DNA, 15 bp, Homo sapiens
atggacaataagtga

SEQ ID NO: 1412867 - DNA, 15 bp, Homo sapiens
catggacaataagtg

SEQ ID NO: 1412868 - DNA, 15 bp, Homo sapiens
tcatggacaataagt

SEQ ID NO: 1412869 - DNA, 15 bp, Homo sapiens
ctcatggacaataag

SEQ ID NO: 1412870 - DNA, 15 bp, Homo sapiens
actcatggacaataa

SEQ ID NO: 1412871 - DNA, 15 bp, Homo sapiens
tactcatggacaata

SEQ ID NO: 1412872 - DNA, 15 bp, Homo sapiens
atactcatggacaat

SEQ ID NO: 1412873 - DNA, 15 bp, Homo sapiens
aatactcatggacaa

SEQ ID NO: 1412874 - DNA, 15 bp, Homo sapiens
aaatactcatggaca

SEQ ID NO: 1412875 - DNA, 15 bp, Homo sapiens
aaaatactcatggac

SEQ ID NO: 1412876 - DNA, 15 bp, Homo sapiens
gaaaatactcatgga

SEQ ID NO: 1412877 - DNA, 15 bp, Homo sapiens
agaaaatactcatgg

SEQ ID NO: 1412878 - DNA, 15 bp, Homo sapiens
aagaaaatactcatg

SEQ ID NO: 1412879 - DNA, 15 bp, Homo sapiens
aaagaaaatactcat

SEQ ID NO: 1412880 - DNA, 15 bp, Homo sapiens
aaaagaaaatactca

SEQ ID NO: 1412881 - DNA, 15 bp, Homo sapiens
taaaagaaaatactc

SEQ ID NO: 1412882 - DNA, 15 bp, Homo sapiens
ttaaaagaaaatact

SEQ ID NO: 1412883 - DNA, 15 bp, Homo sapiens
tttaaaagaaaatac

SEQ ID NO: 1412884 - DNA, 15 bp, Homo sapiens
atttaaaagaaaata

SEQ ID NO: 1412885 - DNA, 15 bp, Homo sapiens
catttaaaagaaaat

SEQ ID NO: 1412886 - DNA, 15 bp, Homo sapiens
ccatttaaaagaaaa

SEQ ID NO: 1412887 - DNA, 15 bp, Homo sapiens
tccatttaaaagaaa

SEQ ID NO: 1412888 - DNA, 15 bp, Homo sapiens
ttccatttaaaagaa

SEQ ID NO: 1412889 - DNA, 15 bp, Homo sapiens
gttccatttaaaaga

SEQ ID NO: 1412890 - DNA, 15 bp, Homo sapiens
ggttccatttaaaag

SEQ ID NO: 1412891 - DNA, 15 bp, Homo sapiens
cggttccatttaaaa

SEQ ID NO: 1412892 - DNA, 15 bp, Homo sapiens
ccggttccatttaaa

SEQ ID NO: 1412893 - DNA, 15 bp, Homo sapiens
tccggttccatttaa

SEQ ID NO: 1412894 - DNA, 15 bp, Homo sapiens
ttccggttccattta

SEQ ID NO: 1412895 - DNA, 15 bp, Homo sapiens
attccggttccattt

SEQ ID NO: 1412896 - DNA, 15 bp, Homo sapiens
gattccggttccatt

SEQ ID NO: 1412897 - DNA, 15 bp, Homo sapiens
tgattccggttccat

SEQ ID NO: 1412898 - DNA, 15 bp, Homo sapiens
atgattccggttcca

SEQ ID NO: 1412899 - DNA, 15 bp, Homo sapiens
tatgattccggttcc

SEQ ID NO: 1412900 - DNA, 15 bp, Homo sapiens
ttatgattccggttc

SEQ ID NO: 1412901 - DNA, 15 bp, Homo sapiens
cttatgattccggtt

SEQ ID NO: 1412902 - DNA, 15 bp, Homo sapiens
tcttatgattccggt

SEQ ID NO: 1412903 - DNA, 15 bp, Homo sapiens
atcttatgattccgg

SEQ ID NO: 1412904 - DNA, 15 bp, Homo sapiens
tatcttatgattccg

SEQ ID NO: 1412905 - DNA, 15 bp, Homo sapiens
ttatcttatgattcc

SEQ ID NO: 1412906 - DNA, 15 bp, Homo sapiens
cttatcttatgattc

SEQ ID NO: 1412907 - DNA, 15 bp, Homo sapiens
tcttatcttatgatt

SEQ ID NO: 1412908 - DNA, 15 bp, Homo sapiens
ttcttatcttatgat

SEQ ID NO: 1412909 - DNA, 15 bp, Homo sapiens
attcttatcttatga

SEQ ID NO: 1412910 - DNA, 15 bp, Homo sapiens
cattcttatcttatg

SEQ ID NO: 1412911 - DNA, 15 bp, Homo sapiens
tcattcttatcttat

SEQ ID NO: 1412912 - DNA, 15 bp, Homo sapiens
gtcattcttatctta

SEQ ID NO: 1412913 - DNA, 15 bp, Homo sapiens
ggtcattcttatctt

SEQ ID NO: 1412914 - DNA, 15 bp, Homo sapiens
tggtcattcttatct

SEQ ID NO: 1412915 - DNA, 15 bp, Homo sapiens
ctggtcattcttatc

SEQ ID NO: 1412916 - DNA, 15 bp, Homo sapiens
cctggtcattcttat

SEQ ID NO: 1412917 - DNA, 15 bp, Homo sapiens
tcctggtcattctta

SEQ ID NO: 1412918 - DNA, 15 bp, Homo sapiens
ctcctggtcattctt

SEQ ID NO: 1412919 - DNA, 15 bp, Homo sapiens
cctcctggtcattct

SEQ ID NO: 1412920 - DNA, 15 bp, Homo sapiens
gcctcctggtcattc

SEQ ID NO: 1412921 - DNA, 15 bp, Homo sapiens
agcctcctggtcatt

SEQ ID NO: 1412922 - DNA, 15 bp, Homo sapiens
gagcctcctggtcat

SEQ ID NO: 1412923 - DNA, 15 bp, Homo sapiens
agagcctcctggtca

SEQ ID NO: 1412924 - DNA, 15 bp, Homo sapiens
cagagcctcctggtc

SEQ ID NO: 1412925 - DNA, 15 bp, Homo sapiens
ccagagcctcctggt

SEQ ID NO: 1412926 - DNA, 15 bp, Homo sapiens
accagagcctcctgg

SEQ ID NO: 1412927 - DNA, 15 bp, Homo sapiens
taccagagcctcctg

SEQ ID NO: 1412928 - DNA, 15 bp, Homo sapiens
ttaccagagcctcct

SEQ ID NO: 1412929 - DNA, 15 bp, Homo sapiens
tttaccagagcctcc

SEQ ID NO: 1412930 - DNA, 15 bp, Homo sapiens
ctttaccagagcctc

SEQ ID NO: 1412931 - DNA, 15 bp, Homo sapiens
cctttaccagagcct

SEQ ID NO: 1412932 - DNA, 15 bp, Homo sapiens
gcctttaccagagcc

SEQ ID NO: 1412933 - DNA, 15 bp, Homo sapiens
tgcctttaccagagc

SEQ ID NO: 1412934 - DNA, 15 bp, Homo sapiens
ctgcctttaccagag

SEQ ID NO: 1412935 - DNA, 15 bp, Homo sapiens
cctgcctttaccaga

SEQ ID NO: 1412936 - DNA, 15 bp, Homo sapiens
acctgcctttaccag

SEQ ID NO: 1412937 - DNA, 15 bp, Homo sapiens
cacctgcctttacca

SEQ ID NO: 1412938 - DNA, 15 bp, Homo sapiens
gcacctgcctttacc

SEQ ID NO: 1412939 - DNA, 15 bp, Homo sapiens
tgcacctgcctttac

SEQ ID NO: 1412940 - DNA, 15 bp, Homo sapiens
ttgcacctgccttta

SEQ ID NO: 1412941 - DNA, 15 bp, Homo sapiens
cttgcacctgccttt

SEQ ID NO: 1412942 - DNA, 15 bp, Homo sapiens
acttgcacctgcctt

SEQ ID NO: 1412943 - DNA, 15 bp, Homo sapiens
aacttgcacctgcct

SEQ ID NO: 1412944 - DNA, 15 bp, Homo sapiens
aaacttgcacctgcc

SEQ ID NO: 1412945 - DNA, 15 bp, Homo sapiens
aaaacttgcacctgc

SEQ ID NO: 1412946 - DNA, 15 bp, Homo sapiens
caaaacttgcacctg

SEQ ID NO: 1412947 - DNA, 15 bp, Homo sapiens
acaaaacttgcacct

SEQ ID NO: 1412948 - DNA, 15 bp, Homo sapiens
cacaaaacttgcacc

SEQ ID NO: 1412949 - DNA, 15 bp, Homo sapiens
acacaaaacttgcac

SEQ ID NO: 1412950 - DNA, 15 bp, Homo sapiens
cacacaaaacttgca

SEQ ID NO: 1412951 - DNA, 15 bp, Homo sapiens
tcacacaaaacttgc

SEQ ID NO: 1412952 - DNA, 15 bp, Homo sapiens
gtcacacaaaacttg

SEQ ID NO: 1412953 - DNA, 15 bp, Homo sapiens
tgtcacacaaaactt

SEQ ID NO: 1412954 - DNA, 15 bp, Homo sapiens
ttgtcacacaaaact

SEQ ID NO: 1412955 - DNA, 15 bp, Homo sapiens
cttgtcacacaaaac

SEQ ID NO: 1412956 - DNA, 15 bp, Homo sapiens
tcttgtcacacaaaa

SEQ ID NO: 1412957 - DNA, 15 bp, Homo sapiens
atcttgtcacacaaa

SEQ ID NO: 1412958 - DNA, 15 bp, Homo sapiens
gatcttgtcacacaa

SEQ ID NO: 1412959 - DNA, 15 bp, Homo sapiens
ggatcttgtcacaca

SEQ ID NO: 1412960 - DNA, 15 bp, Homo sapiens
aggatcttgtcacac

SEQ ID NO: 1412961 - DNA, 15 bp, Homo sapiens
gaggatcttgtcaca

SEQ ID NO: 1412962 - DNA, 15 bp, Homo sapiens
tgaggatcttgtcac

SEQ ID NO: 1412963 - DNA, 15 bp, Homo sapiens
atgaggatcttgtca

SEQ ID NO: 1412964 - DNA, 15 bp, Homo sapiens
catgaggatcttgtc

SEQ ID NO: 1412965 - DNA, 15 bp, Homo sapiens
ccatgaggatcttgt

SEQ ID NO: 1412966 - DNA, 15 bp, Homo sapiens
tccatgaggatcttg

SEQ ID NO: 1412967 - DNA, 15 bp, Homo sapiens
gtccatgaggatctt

SEQ ID NO: 1412968 - DNA, 15 bp, Homo sapiens
agtccatgaggatct

SEQ ID NO: 1412969 - DNA, 15 bp, Homo sapiens
tagtccatgaggatc

SEQ ID NO: 1412970 - DNA, 15 bp, Homo sapiens
ttagtccatgaggat

SEQ ID NO: 1412971 - DNA, 15 bp, Homo sapiens
tttagtccatgagga

SEQ ID NO: 1412972 - DNA, 15 bp, Homo sapiens
ttttagtccatgagg

SEQ ID NO: 1412973 - DNA, 15 bp, Homo sapiens
tttttagtccatgag

SEQ ID NO: 1412974 - DNA, 15 bp, Homo sapiens
ttttttagtccatga

SEQ ID NO: 1412975 - DNA, 15 bp, Homo sapiens
attttttagtccatg

SEQ ID NO: 1412976 - DNA, 15 bp, Homo sapiens
cattttttagtccat

SEQ ID NO: 1412977 - DNA, 15 bp, Homo sapiens
tcattttttagtcca

SEQ ID NO: 1412978 - DNA, 15 bp, Homo sapiens
atcattttttagtcc

SEQ ID NO: 1412979 - DNA, 15 bp, Homo sapiens
gatcattttttagtc

SEQ ID NO: 1412980 - DNA, 15 bp, Homo sapiens
tgatcattttttagt

SEQ ID NO: 1412981 - DNA, 15 bp, Homo sapiens
atgatcattttttag

SEQ ID NO: 1412982 - DNA, 15 bp, Homo sapiens
tatgatcatttttta

SEQ ID NO: 1412983 - DNA, 15 bp, Homo sapiens
atatgatcatttttt

SEQ ID NO: 1412984 - DNA, 15 bp, Homo sapiens
aatatgatcattttt

SEQ ID NO: 1412985 - DNA, 15 bp, Homo sapiens
aaatatgatcatttt

SEQ ID NO: 1412986 - DNA, 15 bp, Homo sapiens
gaaatatgatcattt

SEQ ID NO: 1412987 - DNA, 15 bp, Homo sapiens
agaaatatgatcatt

SEQ ID NO: 1412988 - DNA, 15 bp, Homo sapiens
cagaaatatgatcat

SEQ ID NO: 1412989 - DNA, 15 bp, Homo sapiens
tcagaaatatgatca

SEQ ID NO: 1412990 - DNA, 15 bp, Homo sapiens
ctcagaaatatgatc

SEQ ID NO: 1412991 - DNA, 15 bp, Homo sapiens
cctcagaaatatgat

SEQ ID NO: 1412992 - DNA, 15 bp, Homo sapiens
acctcagaaatatga

SEQ ID NO: 1412993 - DNA, 15 bp, Homo sapiens
aacctcagaaatatg

SEQ ID NO: 1412994 - DNA, 15 bp, Homo sapiens
caacctcagaaatat

SEQ ID NO: 1412995 - DNA, 15 bp, Homo sapiens
tcaacctcagaaata

SEQ ID NO: 1412996 - DNA, 15 bp, Homo sapiens
ttcaacctcagaaat

SEQ ID NO: 1412997 - DNA, 15 bp, Homo sapiens
attcaacctcagaaa

SEQ ID NO: 1412998 - DNA, 15 bp, Homo sapiens
gattcaacctcagaa

SEQ ID NO: 1412999 - DNA, 15 bp, Homo sapiens
tgattcaacctcaga

SEQ ID NO: 1413000 - DNA, 15 bp, Homo sapiens
ttgattcaacctcag

SEQ ID NO: 1413001 - DNA, 15 bp, Homo sapiens
tttgattcaacctca

SEQ ID NO: 1413002 - DNA, 15 bp, Homo sapiens
atttgattcaacctc

SEQ ID NO: 1413003 - DNA, 15 bp, Homo sapiens
tatttgattcaacct

SEQ ID NO: 1413004 - DNA, 15 bp, Homo sapiens
gtatttgattcaacc

SEQ ID NO: 1413005 - DNA, 15 bp, Homo sapiens
tgtatttgattcaac

SEQ ID NO: 1413006 - DNA, 15 bp, Homo sapiens
atgtatttgattcaa

SEQ ID NO: 1413007 - DNA, 15 bp, Homo sapiens
tatgtatttgattca

SEQ ID NO: 1413008 - DNA, 15 bp, Homo sapiens
ttatgtatttgattc

SEQ ID NO: 1413009 - DNA, 15 bp, Homo sapiens
tttatgtatttgatt

SEQ ID NO: 1413010 - DNA, 15 bp, Homo sapiens
ttttatgtatttgat

SEQ ID NO: 1413011 - DNA, 15 bp, Homo sapiens
cttttatgtatttga

SEQ ID NO: 1413012 - DNA, 15 bp, Homo sapiens
gcttttatgtatttg

SEQ ID NO: 1413013 - DNA, 15 bp, Homo sapiens
tgcttttatgtattt

SEQ ID NO: 1413014 - DNA, 15 bp, Homo sapiens
ctgcttttatgtatt

SEQ ID NO: 1413015 - DNA, 15 bp, Homo sapiens
gctgcttttatgtat

SEQ ID NO: 1413016 - DNA, 15 bp, Homo sapiens
tgctgcttttatgta

SEQ ID NO: 1413017 - DNA, 15 bp, Homo sapiens
ctgctgcttttatgt

SEQ ID NO: 1413018 - DNA, 15 bp, Homo sapiens
gctgctgcttttatg

SEQ ID NO: 1413019 - DNA, 15 bp, Homo sapiens
tgctgctgcttttat

SEQ ID NO: 1413020 - DNA, 15 bp, Homo sapiens
ttgctgctgctttta

SEQ ID NO: 1413021 - DNA, 15 bp, Homo sapiens
tttgctgctgctttt

SEQ ID NO: 1413022 - DNA, 15 bp, Homo sapiens
atttgctgctgcttt

SEQ ID NO: 1413023 - DNA, 15 bp, Homo sapiens
gatttgctgctgctt

SEQ ID NO: 1413024 - DNA, 15 bp, Homo sapiens
tgatttgctgctgct

SEQ ID NO: 1413025 - DNA, 15 bp, Homo sapiens
gtgatttgctgctgc

SEQ ID NO: 1413026 - DNA, 15 bp, Homo sapiens
tgtgatttgctgctg

SEQ ID NO: 1413027 - DNA, 15 bp, Homo sapiens
gtgtgatttgctgct

SEQ ID NO: 1413028 - DNA, 15 bp, Homo sapiens
tgtgtgatttgctgc

SEQ ID NO: 1413029 - DNA, 15 bp, Homo sapiens
gtgtgtgatttgctg

SEQ ID NO: 1413030 - DNA, 15 bp, Homo sapiens
agtgtgtgatttgct

SEQ ID NO: 1413031 - DNA, 15 bp, Homo sapiens
aagtgtgtgatttgc

SEQ ID NO: 1413032 - DNA, 15 bp, Homo sapiens
gaagtgtgtgatttg

SEQ ID NO: 1413033 - DNA, 15 bp, Homo sapiens
agaagtgtgtgattt

SEQ ID NO: 1413034 - DNA, 15 bp, Homo sapiens
aagaagtgtgtgatt

SEQ ID NO: 1413035 - DNA, 15 bp, Homo sapiens
gaagaagtgtgtgat

SEQ ID NO: 1413036 - DNA, 15 bp, Homo sapiens
cgaagaagtgtgtga

SEQ ID NO: 1413037 - DNA, 15 bp, Homo sapiens
tcgaagaagtgtgtg

SEQ ID NO: 1413038 - DNA, 15 bp, Homo sapiens
ttcgaagaagtgtgt

SEQ ID NO: 1413039 - DNA, 15 bp, Homo sapiens
cttcgaagaagtgtg

SEQ ID NO: 1413040 - DNA, 15 bp, Homo sapiens
tcttcgaagaagtgt

SEQ ID NO: 1413041 - DNA, 15 bp, Homo sapiens
ctcttcgaagaagtg

SEQ ID NO: 1413042 - DNA, 15 bp, Homo sapiens
tctcttcgaagaagt

SEQ ID NO: 1413043 - DNA, 15 bp, Homo sapiens
ctctcttcgaagaag

SEQ ID NO: 1413044 - DNA, 15 bp, Homo sapiens
actctcttcgaagaa

SEQ ID NO: 1413045 - DNA, 15 bp, Homo sapiens
aactctcttcgaaga

SEQ ID NO: 1413046 - DNA, 15 bp, Homo sapiens
taactctcttcgaag

SEQ ID NO: 1413047 - DNA, 15 bp, Homo sapiens
gtaactctcttcgaa

SEQ ID NO: 1413048 - DNA, 15 bp, Homo sapiens
ggtaactctcttcga

SEQ ID NO: 1413049 - DNA, 15 bp, Homo sapiens
tggtaactctcttcg

SEQ ID NO: 1413050 - DNA, 15 bp, Homo sapiens
ttggtaactctcttc

SEQ ID NO: 1413051 - DNA, 15 bp, Homo sapiens
cttggtaactctctt

SEQ ID NO: 1413052 - DNA, 15 bp, Homo sapiens
acttggtaactctct

SEQ ID NO: 1413053 - DNA, 15 bp, Homo sapiens
aacttggtaactctc

SEQ ID NO: 1413054 - DNA, 15 bp, Homo sapiens
caacttggtaactct

SEQ ID NO: 1413055 - DNA, 15 bp, Homo sapiens
gcaacttggtaactc

SEQ ID NO: 1413056 - DNA, 15 bp, Homo sapiens
tgcaacttggtaact

SEQ ID NO: 1413057 - DNA, 15 bp, Homo sapiens
ctgcaacttggtaac

SEQ ID NO: 1413058 - DNA, 15 bp, Homo sapiens
cctgcaacttggtaa

SEQ ID NO: 1413059 - DNA, 15 bp, Homo sapiens
ccctgcaacttggta

SEQ ID NO: 1413060 - DNA, 15 bp, Homo sapiens
cccctgcaacttggt

SEQ ID NO: 1413061 - DNA, 15 bp, Homo sapiens
tcccctgcaacttgg

SEQ ID NO: 1413062 - DNA, 15 bp, Homo sapiens
ttcccctgcaacttg

SEQ ID NO: 1413063 - DNA, 15 bp, Homo sapiens
tttcccctgcaactt

SEQ ID NO: 1413064 - DNA, 15 bp, Homo sapiens
atttcccctgcaact

SEQ ID NO: 1413065 - DNA, 15 bp, Homo sapiens
aatttcccctgcaac

SEQ ID NO: 1413066 - DNA, 15 bp, Homo sapiens
aaatttcccctgcaa

SEQ ID NO: 1413067 - DNA, 15 bp, Homo sapiens
taaatttcccctgca

SEQ ID NO: 1413068 - DNA, 15 bp, Homo sapiens
ataaatttcccctgc

SEQ ID NO: 1413069 - DNA, 15 bp, Homo sapiens
aataaatttcccctg

SEQ ID NO: 1413070 - DNA, 15 bp, Homo sapiens
taataaatttcccct

SEQ ID NO: 1413071 - DNA, 15 bp, Homo sapiens
ctaataaatttcccc

SEQ ID NO: 1413072 - DNA, 15 bp, Homo sapiens
gctaataaatttccc

SEQ ID NO: 1413073 - DNA, 15 bp, Homo sapiens
tgctaataaatttcc

SEQ ID NO: 1413074 - DNA, 15 bp, Homo sapiens
gtgctaataaatttc

SEQ ID NO: 1413075 - DNA, 15 bp, Homo sapiens
tgtgctaataaattt

SEQ ID NO: 1413076 - DNA, 15 bp, Homo sapiens
ttgtgctaataaatt

SEQ ID NO: 1413077 - DNA, 15 bp, Homo sapiens
tttgtgctaataaat

SEQ ID NO: 1413078 - DNA, 15 bp, Homo sapiens
atttgtgctaataaa

SEQ ID NO: 1413079 - DNA, 15 bp, Homo sapiens
tatttgtgctaataa

SEQ ID NO: 1413080 - DNA, 15 bp, Homo sapiens
ttatttgtgctaata

SEQ ID NO: 1413081 - DNA, 15 bp, Homo sapiens
cttatttgtgctaat

SEQ ID NO: 1413082 - DNA, 15 bp, Homo sapiens
acttatttgtgctaa

SEQ ID NO: 1413083 - DNA, 15 bp, Homo sapiens
gacttatttgtgcta

SEQ ID NO: 1413084 - DNA, 15 bp, Homo sapiens
agacttatttgtgct

SEQ ID NO: 1413085 - DNA, 15 bp, Homo sapiens
cagacttatttgtgc

SEQ ID NO: 1413086 - DNA, 15 bp, Homo sapiens
tcagacttatttgtg

SEQ ID NO: 1413087 - DNA, 15 bp, Homo sapiens
ttcagacttatttgt

SEQ ID NO: 1413088 - DNA, 15 bp, Homo sapiens
tttcagacttatttg

SEQ ID NO: 1413089 - DNA, 15 bp, Homo sapiens
ttttcagacttattt

SEQ ID NO: 1413090 - DNA, 15 bp, Homo sapiens
cttttcagacttatt

SEQ ID NO: 1413091 - DNA, 15 bp, Homo sapiens
ccttttcagacttat

SEQ ID NO: 1413092 - DNA, 15 bp, Homo sapiens
tccttttcagactta

SEQ ID NO: 1413093 - DNA, 15 bp, Homo sapiens
ttccttttcagactt

SEQ ID NO: 1413094 - DNA, 15 bp, Homo sapiens
tttccttttcagact

SEQ ID NO: 1413095 - DNA, 15 bp, Homo sapiens
ttttccttttcagac

SEQ ID NO: 1413096 - DNA, 15 bp, Homo sapiens
cttttccttttcaga

SEQ ID NO: 1413097 - DNA, 15 bp, Homo sapiens
gcttttccttttcag

SEQ ID NO: 1413098 - DNA, 15 bp, Homo sapiens
agcttttccttttca

SEQ ID NO: 1413099 - DNA, 15 bp, Homo sapiens
tagcttttccttttc

SEQ ID NO: 1413100 - DNA, 15 bp, Homo sapiens
atagcttttcctttt

SEQ ID NO: 1413101 - DNA, 15 bp, Homo sapiens
gatagcttttccttt

SEQ ID NO: 1413102 - DNA, 15 bp, Homo sapiens
ggatagcttttcctt

SEQ ID NO: 1413103 - DNA, 15 bp, Homo sapiens
tggatagcttttcct

SEQ ID NO: 1413104 - DNA, 15 bp, Homo sapiens
atggatagcttttcc

SEQ ID NO: 1413105 - DNA, 15 bp, Homo sapiens
tatggatagcttttc

SEQ ID NO: 1413106 - DNA, 15 bp, Homo sapiens
atatggatagctttt

SEQ ID NO: 1413107 - DNA, 15 bp, Homo sapiens
tatatggatagcttt

SEQ ID NO: 1413108 - DNA, 15 bp, Homo sapiens
atatatggatagctt

SEQ ID NO: 1413109 - DNA, 15 bp, Homo sapiens
tatatatggatagct

SEQ ID NO: 1413110 - DNA, 15 bp, Homo sapiens
gtatatatggatagc

SEQ ID NO: 1413111 - DNA, 15 bp, Homo sapiens
tgtatatatggatag

SEQ ID NO: 1413112 - DNA, 15 bp, Homo sapiens
ttgtatatatggata

SEQ ID NO: 1413113 - DNA, 15 bp, Homo sapiens
cttgtatatatggat

SEQ ID NO: 1413114 - DNA, 15 bp, Homo sapiens
ccttgtatatatgga

SEQ ID NO: 1413115 - DNA, 15 bp, Homo sapiens
accttgtatatatgg

SEQ ID NO: 1413116 - DNA, 15 bp, Homo sapiens
aaccttgtatatatg

SEQ ID NO: 1413117 - DNA, 15 bp, Homo sapiens
taaccttgtatatat

SEQ ID NO: 1413118 - DNA, 15 bp, Homo sapiens
ttaaccttgtatata

SEQ ID NO: 1413119 - DNA, 15 bp, Homo sapiens
cttaaccttgtatat

SEQ ID NO: 1413120 - DNA, 15 bp, Homo sapiens
acttaaccttgtata

SEQ ID NO: 1413121 - DNA, 15 bp, Homo sapiens
aacttaaccttgtat

SEQ ID NO: 1413122 - DNA, 15 bp, Homo sapiens
caacttaaccttgta

SEQ ID NO: 1413123 - DNA, 15 bp, Homo sapiens
ccaacttaaccttgt

SEQ ID NO: 1413124 - DNA, 15 bp, Homo sapiens
tccaacttaaccttg

SEQ ID NO: 1413125 - DNA, 15 bp, Homo sapiens
ttccaacttaacctt

SEQ ID NO: 1413126 - DNA, 15 bp, Homo sapiens
cttccaacttaacct

SEQ ID NO: 1413127 - DNA, 15 bp, Homo sapiens
tcttccaacttaacc

SEQ ID NO: 1413128 - DNA, 15 bp, Homo sapiens
ttcttccaacttaac

SEQ ID NO: 1413129 - DNA, 15 bp, Homo sapiens
cttcttccaacttaa

SEQ ID NO: 1413130 - DNA, 15 bp, Homo sapiens
ccttcttccaactta

SEQ ID NO: 1413131 - DNA, 15 bp, Homo sapiens
tccttcttccaactt

SEQ ID NO: 1413132 - DNA, 15 bp, Homo sapiens
ctccttcttccaact

SEQ ID NO: 1413133 - DNA, 15 bp, Homo sapiens
cctccttcttccaac

SEQ ID NO: 1413134 - DNA, 15 bp, Homo sapiens
gcctccttcttccaa

SEQ ID NO: 1413135 - DNA, 15 bp, Homo sapiens
tgcctccttcttcca

SEQ ID NO: 1413136 - DNA, 15 bp, Homo sapiens
ctgcctccttcttcc

SEQ ID NO: 1413137 - DNA, 15 bp, Homo sapiens
tctgcctccttcttc

SEQ ID NO: 1413138 - DNA, 15 bp, Homo sapiens
ttctgcctccttctt

SEQ ID NO: 1413139 - DNA, 15 bp, Homo sapiens
tttctgcctccttct

SEQ ID NO: 1413140 - DNA, 15 bp, Homo sapiens
ctttctgcctccttc

SEQ ID NO: 1413141 - DNA, 15 bp, Homo sapiens
tctttctgcctcctt

SEQ ID NO: 1413142 - DNA, 15 bp, Homo sapiens
ttctttctgcctcct

SEQ ID NO: 1413143 - DNA, 15 bp, Homo sapiens
cttctttctgcctcc

SEQ ID NO: 1413144 - DNA, 15 bp, Homo sapiens
tcttctttctgcctc

SEQ ID NO: 1413145 - DNA, 15 bp, Homo sapiens
ttcttctttctgcct

SEQ ID NO: 1413146 - DNA, 15 bp, Homo sapiens
tttcttctttctgcc

SEQ ID NO: 1413147 - DNA, 15 bp, Homo sapiens
atttcttctttctgc

SEQ ID NO: 1413148 - DNA, 15 bp, Homo sapiens
aatttcttctttctg

SEQ ID NO: 1413149 - DNA, 15 bp, Homo sapiens
ggaatttcttctttc

SEQ ID NO: 1413150 - DNA, 15 bp, Homo sapiens
tggaatttcttcttt

SEQ ID NO: 1413151 - DNA, 15 bp, Homo sapiens
ctggaatttcttctt

SEQ ID NO: 1413152 - DNA, 15 bp, Homo sapiens
actggaatttcttct

SEQ ID NO: 1413153 - DNA, 15 bp, Homo sapiens
aactggaatttcttc

SEQ ID NO: 1413154 - DNA, 15 bp, Homo sapiens
caactggaatttctt

SEQ ID NO: 1413155 - DNA, 15 bp, Homo sapiens
acaactggaatttct

SEQ ID NO: 1413156 - DNA, 15 bp, Homo sapiens
aacaactggaatttc

SEQ ID NO: 1413157 - DNA, 15 bp, Homo sapiens
taacaactggaattt

SEQ ID NO: 1413158 - DNA, 15 bp, Homo sapiens
ataacaactggaatt

SEQ ID NO: 1413159 - DNA, 15 bp, Homo sapiens
gataacaactggaat

SEQ ID NO: 1413160 - DNA, 15 bp, Homo sapiens
tgataacaactggaa

SEQ ID NO: 1413161 - DNA, 15 bp, Homo sapiens
atgataacaactgga

SEQ ID NO: 1413162 - DNA, 15 bp, Homo sapiens
aatgataacaactgg

SEQ ID NO: 1413163 - DNA, 15 bp, Homo sapiens
taatgataacaactg

SEQ ID NO: 1413164 - DNA, 15 bp, Homo sapiens
ataatgataacaact

SEQ ID NO: 1413165 - DNA, 15 bp, Homo sapiens
aataatgataacaac

SEQ ID NO: 1413166 - DNA, 15 bp, Homo sapiens
aaataatgataacaa

SEQ ID NO: 1413167 - DNA, 15 bp, Homo sapiens
aaaataatgataaca

SEQ ID NO: 1413168 - DNA, 15 bp, Homo sapiens
aaaaataatgataac

SEQ ID NO: 1413169 - DNA, 15 bp, Homo sapiens
aaaaaataatgataa

SEQ ID NO: 1413170 - DNA, 15 bp, Homo sapiens
taaaaaataatgata

SEQ ID NO: 1413171 - DNA, 15 bp, Homo sapiens
ataaaaaataatgat

SEQ ID NO: 1413172 - DNA, 15 bp, Homo sapiens
aataaaaaataatga

SEQ ID NO: 1413173 - DNA, 15 bp, Homo sapiens
gaataaaaaataatg

SEQ ID NO: 1413174 - DNA, 15 bp, Homo sapiens
ggaataaaaaataat

SEQ ID NO: 1413175 - DNA, 15 bp, Homo sapiens
ttggaataaaaaata

SEQ ID NO: 1413176 - DNA, 15 bp, Homo sapiens
tttggaataaaaaat

SEQ ID NO: 1413177 - DNA, 15 bp, Homo sapiens
atttggaataaaaaa

SEQ ID NO: 1413178 - DNA, 15 bp, Homo sapiens
aatttggaataaaaa

SEQ ID NO: 1413179 - DNA, 15 bp, Homo sapiens
caatttggaataaaa

SEQ ID NO: 1413180 - DNA, 15 bp, Homo sapiens
gcaatttggaataaa

SEQ ID NO: 1413181 - DNA, 15 bp, Homo sapiens
tgcaatttggaataa

SEQ ID NO: 1413182 - DNA, 15 bp, Homo sapiens
atgcaatttggaata

SEQ ID NO: 1413183 - DNA, 15 bp, Homo sapiens
gatgcaatttggaat

SEQ ID NO: 1413184 - DNA, 15 bp, Homo sapiens
agatgcaatttggaa

SEQ ID NO: 1413185 - DNA, 15 bp, Homo sapiens
cagatgcaatttgga

SEQ ID NO: 1413186 - DNA, 15 bp, Homo sapiens
acagatgcaatttgg

SEQ ID NO: 1413187 - DNA, 15 bp, Homo sapiens
aacagatgcaatttg

SEQ ID NO: 1413188 - DNA, 15 bp, Homo sapiens
gaacagatgcaattt

SEQ ID NO: 1413189 - DNA, 15 bp, Homo sapiens
tgaacagatgcaatt

SEQ ID NO: 1413190 - DNA, 15 bp, Homo sapiens
gtgaacagatgcaat

SEQ ID NO: 1413191 - DNA, 15 bp, Homo sapiens
agtgaacagatgcaa

SEQ ID NO: 1413192 - DNA, 15 bp, Homo sapiens
tagtgaacagatgca

SEQ ID NO: 1413193 - DNA, 15 bp, Homo sapiens
ttagtgaacagatgc

SEQ ID NO: 1413194 - DNA, 15 bp, Homo sapiens
tttagtgaacagatg

SEQ ID NO: 1413195 - DNA, 15 bp, Homo sapiens
ttttagtgaacagat

SEQ ID NO: 1413196 - DNA, 15 bp, Homo sapiens
attttagtgaacaga

SEQ ID NO: 1413197 - DNA, 15 bp, Homo sapiens
tattttagtgaacag

SEQ ID NO: 1413198 - DNA, 15 bp, Homo sapiens
gtattttagtgaaca

SEQ ID NO: 1413199 - DNA, 15 bp, Homo sapiens
agtattttagtgaac

SEQ ID NO: 1413200 - DNA, 15 bp, Homo sapiens
aagtattttagtgaa

SEQ ID NO: 1413201 - DNA, 15 bp, Homo sapiens
gaagtattttagtga

SEQ ID NO: 1413202 - DNA, 15 bp, Homo sapiens
cgaagtattttagtg

SEQ ID NO: 1413203 - DNA, 15 bp, Homo sapiens
ccgaagtattttagt

SEQ ID NO: 1413204 - DNA, 15 bp, Homo sapiens
tccgaagtattttag

SEQ ID NO: 1413205 - DNA, 15 bp, Homo sapiens
gtccgaagtatttta

SEQ ID NO: 1413206 - DNA, 15 bp, Homo sapiens
agtccgaagtatttt

SEQ ID NO: 1413207 - DNA, 15 bp, Homo sapiens
cagtccgaagtattt

SEQ ID NO: 1413208 - DNA, 15 bp, Homo sapiens
ccagtccgaagtatt

SEQ ID NO: 1413209 - DNA, 15 bp, Homo sapiens
cccagtccgaagtat

SEQ ID NO: 1413210 - DNA, 15 bp, Homo sapiens
acccagtccgaagta

SEQ ID NO: 1413211 - DNA, 15 bp, Homo sapiens
cacccagtccgaagt

SEQ ID NO: 1413212 - DNA, 15 bp, Homo sapiens
gcacccagtccgaag

SEQ ID NO: 1413213 - DNA, 15 bp, Homo sapiens
tgcacccagtccgaa

SEQ ID NO: 1413214 - DNA, 15 bp, Homo sapiens
ctgcacccagtccga

SEQ ID NO: 1413215 - DNA, 15 bp, Homo sapiens
actgcacccagtccg

SEQ ID NO: 1413216 - DNA, 15 bp, Homo sapiens
cactgcacccagtcc

SEQ ID NO: 1413217 - DNA, 15 bp, Homo sapiens
ccactgcacccagtc

SEQ ID NO: 1413218 - DNA, 15 bp, Homo sapiens
gccactgcacccagt

SEQ ID NO: 1413219 - DNA, 15 bp, Homo sapiens
aagccactgcaccca

SEQ ID NO: 1413220 - DNA, 15 bp, Homo sapiens
taagccactgcaccc

SEQ ID NO: 1413221 - DNA, 15 bp, Homo sapiens
gtaagccactgcacc

SEQ ID NO: 1413222 - DNA, 15 bp, Homo sapiens
tgtaagccactgcac

SEQ ID NO: 1413223 - DNA, 15 bp, Homo sapiens
gtgtaagccactgca

SEQ ID NO: 1413224 - DNA, 15 bp, Homo sapiens
ggtgtaagccactgc

SEQ ID NO: 1413225 - DNA, 15 bp, Homo sapiens
aggtgtaagccactg

SEQ ID NO: 1413226 - DNA, 15 bp, Homo sapiens
taggtgtaagccact

SEQ ID NO: 1413227 - DNA, 15 bp, Homo sapiens
ataggtgtaagccac

SEQ ID NO: 1413228 - DNA, 15 bp, Homo sapiens
tataggtgtaagcca

SEQ ID NO: 1413229 - DNA, 15 bp, Homo sapiens
ttataggtgtaagcc

SEQ ID NO: 1413230 - DNA, 15 bp, Homo sapiens
attataggtgtaagc

SEQ ID NO: 1413231 - DNA, 15 bp, Homo sapiens
gattataggtgtaag

SEQ ID NO: 1413232 - DNA, 15 bp, Homo sapiens
ggattataggtgtaa

SEQ ID NO: 1413233 - DNA, 15 bp, Homo sapiens
gggattataggtgta

SEQ ID NO: 1413234 - DNA, 15 bp, Homo sapiens
tagtctcccaaagtg

SEQ ID NO: 1413235 - DNA, 15 bp, Homo sapiens
ctagtctcccaaagt

SEQ ID NO: 1413236 - DNA, 15 bp, Homo sapiens
cctagtctcccaaag

SEQ ID NO: 1413237 - DNA, 15 bp, Homo sapiens
gcctagtctcccaaa

SEQ ID NO: 1413238 - DNA, 15 bp, Homo sapiens
cgcctagtctcccaa

SEQ ID NO: 1413239 - DNA, 15 bp, Homo sapiens
ccgcctagtctccca

SEQ ID NO: 1413240 - DNA, 15 bp, Homo sapiens
cccgcctagtctccc

SEQ ID NO: 1413241 - DNA, 15 bp, Homo sapiens
gcccgcctagtctcc

SEQ ID NO: 1413242 - DNA, 15 bp, Homo sapiens
tgcccgcctagtctc

SEQ ID NO: 1413243 - DNA, 15 bp, Homo sapiens
ctgcccgcctagtct

SEQ ID NO: 1413244 - DNA, 15 bp, Homo sapiens
tctgcccgcctagtc

SEQ ID NO: 1413245 - DNA, 15 bp, Homo sapiens
atctgcccgcctagt

SEQ ID NO: 1413246 - DNA, 15 bp, Homo sapiens
gatctgcccgcctag

SEQ ID NO: 1413247 - DNA, 15 bp, Homo sapiens
tgatctgcccgccta

SEQ ID NO: 1413248 - DNA, 15 bp, Homo sapiens
gcctgacctcaagtg

SEQ ID NO: 1413249 - DNA, 15 bp, Homo sapiens
tgcctgacctcaagt

SEQ ID NO: 1413250 - DNA, 15 bp, Homo sapiens
atgcctgacctcaag

SEQ ID NO: 1413251 - DNA, 15 bp, Homo sapiens
aatgcctgacctcaa

SEQ ID NO: 1413252 - DNA, 15 bp, Homo sapiens
cgaatgcctgacctc

SEQ ID NO: 1413253 - DNA, 15 bp, Homo sapiens
tcgaatgcctgacct

SEQ ID NO: 1413254 - DNA, 15 bp, Homo sapiens
ctcgaatgcctgacc

SEQ ID NO: 1413255 - DNA, 15 bp, Homo sapiens
tctcgaatgcctgac

SEQ ID NO: 1413256 - DNA, 15 bp, Homo sapiens
gtctcgaatgcctga

SEQ ID NO: 1413257 - DNA, 15 bp, Homo sapiens
ggtctcgaatgcctg

SEQ ID NO: 1413258 - DNA, 15 bp, Homo sapiens
tggtctcgaatgcct

SEQ ID NO: 1413259 - DNA, 15 bp, Homo sapiens
ctggtctcgaatgcc

SEQ ID NO: 1413260 - DNA, 15 bp, Homo sapiens
gctggtctcgaatgc

SEQ ID NO: 1413261 - DNA, 15 bp, Homo sapiens
ggctggtctcgaatg

SEQ ID NO: 1413262 - DNA, 15 bp, Homo sapiens
accaggctggtctcg

SEQ ID NO: 1413263 - DNA, 15 bp, Homo sapiens
tcatgttgaccaggc

SEQ ID NO: 1413264 - DNA, 15 bp, Homo sapiens
atcatgttgaccagg

SEQ ID NO: 1413265 - DNA, 15 bp, Homo sapiens
catcatgttgaccag

SEQ ID NO: 1413266 - DNA, 15 bp, Homo sapiens
tcatcatgttgacca

SEQ ID NO: 1413267 - DNA, 15 bp, Homo sapiens
ttcatcatgttgacc

SEQ ID NO: 1413268 - DNA, 15 bp, Homo sapiens
tttcatcatgttgac

SEQ ID NO: 1413269 - DNA, 15 bp, Homo sapiens
gtttcatcatgttga

SEQ ID NO: 1413270 - DNA, 15 bp, Homo sapiens
ggtttcatcatgttg

SEQ ID NO: 1413271 - DNA, 15 bp, Homo sapiens
gggtttcatcatgtt

SEQ ID NO: 1413272 - DNA, 15 bp, Homo sapiens
agggtttcatcatgt

SEQ ID NO: 1413273 - DNA, 15 bp, Homo sapiens
cagggtttcatcatg

SEQ ID NO: 1413274 - DNA, 15 bp, Homo sapiens
acagggtttcatcat

SEQ ID NO: 1413275 - DNA, 15 bp, Homo sapiens
gacagggtttcatca

SEQ ID NO: 1413276 - DNA, 15 bp, Homo sapiens
agacagggtttcatc

SEQ ID NO: 1413277 - DNA, 15 bp, Homo sapiens
aagacagggtttcat

SEQ ID NO: 1413278 - DNA, 15 bp, Homo sapiens
aaagacagggtttca

SEQ ID NO: 1413279 - DNA, 15 bp, Homo sapiens
taaagacagggtttc

SEQ ID NO: 1413280 - DNA, 15 bp, Homo sapiens
gtaaagacagggttt

SEQ ID NO: 1413281 - DNA, 15 bp, Homo sapiens
agtaaagacagggtt

SEQ ID NO: 1413282 - DNA, 15 bp, Homo sapiens
tagtaaagacagggt

SEQ ID NO: 1413283 - DNA, 15 bp, Homo sapiens
ttagtaaagacaggg

SEQ ID NO: 1413284 - DNA, 15 bp, Homo sapiens
tttagtaaagacagg

SEQ ID NO: 1413285 - DNA, 15 bp, Homo sapiens
ttttagtaaagacag

SEQ ID NO: 1413286 - DNA, 15 bp, Homo sapiens
tttttagtaaagaca

SEQ ID NO: 1413287 - DNA, 15 bp, Homo sapiens
atttttagtaaagac

SEQ ID NO: 1413288 - DNA, 15 bp, Homo sapiens
tatttttagtaaaga

SEQ ID NO: 1413289 - DNA, 15 bp, Homo sapiens
gtatttttagtaaag

SEQ ID NO: 1413290 - DNA, 15 bp, Homo sapiens
tgtatttttagtaaa

SEQ ID NO: 1413291 - DNA, 15 bp, Homo sapiens
ttgtatttttagtaa

SEQ ID NO: 1413292 - DNA, 15 bp, Homo sapiens
cgactggctaatttt

SEQ ID NO: 1413293 - DNA, 15 bp, Homo sapiens
acgactggctaattt

SEQ ID NO: 1413294 - DNA, 15 bp, Homo sapiens
cacgactggctaatt

SEQ ID NO: 1413295 - DNA, 15 bp, Homo sapiens
ccacgactggctaat

SEQ ID NO: 1413296 - DNA, 15 bp, Homo sapiens
accacgactggctaa

SEQ ID NO: 1413297 - DNA, 15 bp, Homo sapiens
caccacgactggcta

SEQ ID NO: 1413298 - DNA, 15 bp, Homo sapiens
ccaccacgactggct

SEQ ID NO: 1413299 - DNA, 15 bp, Homo sapiens
gccaccacgactggc

SEQ ID NO: 1413300 - DNA, 15 bp, Homo sapiens
tgccaccacgactgg

SEQ ID NO: 1413301 - DNA, 15 bp, Homo sapiens
gtgccaccacgactg

SEQ ID NO: 1413302 - DNA, 15 bp, Homo sapiens
tgtgccaccacgact

SEQ ID NO: 1413303 - DNA, 15 bp, Homo sapiens
atgtgccaccacgac

SEQ ID NO: 1413304 - DNA, 15 bp, Homo sapiens
catgtgccaccacga

SEQ ID NO: 1413305 - DNA, 15 bp, Homo sapiens
ctcactgcaacctcc

SEQ ID NO: 1413306 - DNA, 15 bp, Homo sapiens
tcaatcttggctcac

SEQ ID NO: 1413307 - DNA, 15 bp, Homo sapiens
ctcaatcttggctca

SEQ ID NO: 1413308 - DNA, 15 bp, Homo sapiens
gctcaatcttggctc

SEQ ID NO: 1413309 - DNA, 15 bp, Homo sapiens
ggctcaatcttggct

SEQ ID NO: 1413310 - DNA, 15 bp, Homo sapiens
tggctcaatcttggc

SEQ ID NO: 1413311 - DNA, 15 bp, Homo sapiens
ctggctcaatcttgg

SEQ ID NO: 1413312 - DNA, 15 bp, Homo sapiens
actggctcaatcttg

SEQ ID NO: 1413313 - DNA, 15 bp, Homo sapiens
cactggctcaatctt

SEQ ID NO: 1413314 - DNA, 15 bp, Homo sapiens
gcactggctcaatct

SEQ ID NO: 1413315 - DNA, 15 bp, Homo sapiens
tgcactggctcaatc

SEQ ID NO: 1413316 - DNA, 15 bp, Homo sapiens
gtgcactggctcaat

SEQ ID NO: 1413317 - DNA, 15 bp, Homo sapiens
agtgcactggctcaa

SEQ ID NO: 1413318 - DNA, 15 bp, Homo sapiens
gagtgcactggctca

SEQ ID NO: 1413319 - DNA, 15 bp, Homo sapiens
ggagtgcactggctc

SEQ ID NO: 1413320 - DNA, 15 bp, Homo sapiens
cggagtgcactggct

SEQ ID NO: 1413321 - DNA, 15 bp, Homo sapiens
ccggagtgcactggc

SEQ ID NO: 1413322 - DNA, 15 bp, Homo sapiens
gccggagtgcactgg

SEQ ID NO: 1413323 - DNA, 15 bp, Homo sapiens
ggccggagtgcactg

SEQ ID NO: 1413324 - DNA, 15 bp, Homo sapiens
aggccggagtgcact

SEQ ID NO: 1413325 - DNA, 15 bp, Homo sapiens
caggccggagtgcac

SEQ ID NO: 1413326 - DNA, 15 bp, Homo sapiens
ccaggccggagtgca

SEQ ID NO: 1413327 - DNA, 15 bp, Homo sapiens
cccaggccggagtgc

SEQ ID NO: 1413328 - DNA, 15 bp, Homo sapiens
acccaggccggagtg

SEQ ID NO: 1413329 - DNA, 15 bp, Homo sapiens
cacccaggccggagt

SEQ ID NO: 1413330 - DNA, 15 bp, Homo sapiens
tcacccaggccggag

SEQ ID NO: 1413331 - DNA, 15 bp, Homo sapiens
gtcacccaggccgga

SEQ ID NO: 1413332 - DNA, 15 bp, Homo sapiens
tgtcacccaggccgg

SEQ ID NO: 1413333 - DNA, 15 bp, Homo sapiens
ctgtcacccaggccg

SEQ ID NO: 1413334 - DNA, 15 bp, Homo sapiens
cctctgtcacccagg

SEQ ID NO: 1413335 - DNA, 15 bp, Homo sapiens
ccctctgtcacccag

SEQ ID NO: 1413336 - DNA, 15 bp, Homo sapiens
tccctctgtcaccca

SEQ ID NO: 1413337 - DNA, 15 bp, Homo sapiens
ctccctctgtcaccc

SEQ ID NO: 1413338 - DNA, 15 bp, Homo sapiens
tctccctctgtcacc

SEQ ID NO: 1413339 - DNA, 15 bp, Homo sapiens
gtctccctctgtcac

SEQ ID NO: 1413340 - DNA, 15 bp, Homo sapiens
gagtctccctctgtc

SEQ ID NO: 1413341 - DNA, 15 bp, Homo sapiens
ggagtctccctctgt

SEQ ID NO: 1413342 - DNA, 15 bp, Homo sapiens
tggagtctccctctg

SEQ ID NO: 1413343 - DNA, 15 bp, Homo sapiens
atggagtctccctct

SEQ ID NO: 1413344 - DNA, 15 bp, Homo sapiens
gatggagtctccctc

SEQ ID NO: 1413345 - DNA, 15 bp, Homo sapiens
agatggagtctccct

SEQ ID NO: 1413346 - DNA, 15 bp, Homo sapiens
gagatggagtctccc

SEQ ID NO: 1413347 - DNA, 15 bp, Homo sapiens
tgagatggagtctcc

SEQ ID NO: 1413348 - DNA, 15 bp, Homo sapiens
gtttttttgagatgg

SEQ ID NO: 1413349 - DNA, 15 bp, Homo sapiens
ggtttttttgagatg

SEQ ID NO: 1413350 - DNA, 15 bp, Homo sapiens
gggtttttttgagat

SEQ ID NO: 1413351 - DNA, 15 bp, Homo sapiens
tgggtttttttgaga

SEQ ID NO: 1413352 - DNA, 15 bp, Homo sapiens
ttgggtttttttgag

SEQ ID NO: 1413353 - DNA, 15 bp, Homo sapiens
tttgggtttttttga

SEQ ID NO: 1413354 - DNA, 15 bp, Homo sapiens
gtttgggtttttttg

SEQ ID NO: 1413355 - DNA, 15 bp, Homo sapiens
tgtttgggttttttt

SEQ ID NO: 1413356 - DNA, 15 bp, Homo sapiens
ttgtttgggtttttt

SEQ ID NO: 1413357 - DNA, 15 bp, Homo sapiens
tttgtttgggttttt

SEQ ID NO: 1413358 - DNA, 15 bp, Homo sapiens
atttgtttgggtttt

SEQ ID NO: 1413359 - DNA, 15 bp, Homo sapiens
tatttgtttgggttt

SEQ ID NO: 1413360 - DNA, 15 bp, Homo sapiens
atatttgtttgggtt

SEQ ID NO: 1413361 - DNA, 15 bp, Homo sapiens
aatatttgtttgggt

SEQ ID NO: 1413362 - DNA, 15 bp, Homo sapiens
aaatatttgtttggg

SEQ ID NO: 1413363 - DNA, 15 bp, Homo sapiens
aaaatatttgtttgg

SEQ ID NO: 1413364 - DNA, 15 bp, Homo sapiens
taaaatatttgtttg

SEQ ID NO: 1413365 - DNA, 15 bp, Homo sapiens
ataaaatatttgttt

SEQ ID NO: 1413366 - DNA, 15 bp, Homo sapiens
tataaaatatttgtt

SEQ ID NO: 1413367 - DNA, 15 bp, Homo sapiens
ttataaaatatttgt

SEQ ID NO: 1413368 - DNA, 15 bp, Homo sapiens
tttataaaatatttg

SEQ ID NO: 1413369 - DNA, 15 bp, Homo sapiens
ttttataaaatattt

SEQ ID NO: 1413370 - DNA, 15 bp, Homo sapiens
attttataaaatatt

SEQ ID NO: 1413371 - DNA, 15 bp, Homo sapiens
tattttataaaatat

SEQ ID NO: 1413372 - DNA, 15 bp, Homo sapiens
ctattttataaaata

SEQ ID NO: 1413373 - DNA, 15 bp, Homo sapiens
tctattttataaaat

SEQ ID NO: 1413374 - DNA, 15 bp, Homo sapiens
ttctattttataaaa

SEQ ID NO: 1413375 - DNA, 15 bp, Homo sapiens
tttctattttataaa

SEQ ID NO: 1413376 - DNA, 15 bp, Homo sapiens
atttctattttataa

SEQ ID NO: 1413377 - DNA, 15 bp, Homo sapiens
tatttctattttata

SEQ ID NO: 1413378 - DNA, 15 bp, Homo sapiens
ctatttctattttat

SEQ ID NO: 1413379 - DNA, 15 bp, Homo sapiens
tctatttctatttta

SEQ ID NO: 1413380 - DNA, 15 bp, Homo sapiens
ttctatttctatttt

SEQ ID NO: 1413381 - DNA, 15 bp, Homo sapiens
tttctatttctattt

SEQ ID NO: 1413382 - DNA, 15 bp, Homo sapiens
ttttctatttctatt

SEQ ID NO: 1413383 - DNA, 15 bp, Homo sapiens
tttttctatttctat

SEQ ID NO: 1413384 - DNA, 15 bp, Homo sapiens
atttttctatttcta

SEQ ID NO: 1413385 - DNA, 15 bp, Homo sapiens
tatttttctatttct

SEQ ID NO: 1413386 - DNA, 15 bp, Homo sapiens
ttatttttctatttc

SEQ ID NO: 1413387 - DNA, 15 bp, Homo sapiens
attatttttctattt

SEQ ID NO: 1413388 - DNA, 15 bp, Homo sapiens
tattatttttctatt

SEQ ID NO: 1413389 - DNA, 15 bp, Homo sapiens
gtattatttttctat

SEQ ID NO: 1413390 - DNA, 15 bp, Homo sapiens
tgtattatttttcta

SEQ ID NO: 1413391 - DNA, 15 bp, Homo sapiens
ttgtattatttttct

SEQ ID NO: 1413392 - DNA, 15 bp, Homo sapiens
tttgtattatttttc

SEQ ID NO: 1413393 - DNA, 15 bp, Homo sapiens
atttgtattattttt

SEQ ID NO: 1413394 - DNA, 15 bp, Homo sapiens
catttgtattatttt

SEQ ID NO: 1413395 - DNA, 15 bp, Homo sapiens
tcatttgtattattt

SEQ ID NO: 1413396 - DNA, 15 bp, Homo sapiens
ttcatttgtattatt

SEQ ID NO: 1413397 - DNA, 15 bp, Homo sapiens
tttcatttgtattat

SEQ ID NO: 1413398 - DNA, 15 bp, Homo sapiens
ttttcatttgtatta

SEQ ID NO: 1413399 - DNA, 15 bp, Homo sapiens
cttttcatttgtatt

SEQ ID NO: 1413400 - DNA, 15 bp, Homo sapiens
acttttcatttgtat

SEQ ID NO: 1413401 - DNA, 15 bp, Homo sapiens
gacttttcatttgta

SEQ ID NO: 1413402 - DNA, 15 bp, Homo sapiens
agacttttcatttgt

SEQ ID NO: 1413403 - DNA, 15 bp, Homo sapiens
tagacttttcatttg

SEQ ID NO: 1413404 - DNA, 15 bp, Homo sapiens
atagacttttcattt

SEQ ID NO: 1413405 - DNA, 15 bp, Homo sapiens
aatagacttttcatt

SEQ ID NO: 1413406 - DNA, 15 bp, Homo sapiens
taatagacttttcat

SEQ ID NO: 1413407 - DNA, 15 bp, Homo sapiens
ttaatagacttttca

SEQ ID NO: 1413408 - DNA, 15 bp, Homo sapiens
cttaatagacttttc

SEQ ID NO: 1413409 - DNA, 15 bp, Homo sapiens
acttaatagactttt

SEQ ID NO: 1413410 - DNA, 15 bp, Homo sapiens
tacttaatagacttt

SEQ ID NO: 1413411 - DNA, 15 bp, Homo sapiens
atacttaatagactt

SEQ ID NO: 1413412 - DNA, 15 bp, Homo sapiens
tatacttaatagact

SEQ ID NO: 1413413 - DNA, 15 bp, Homo sapiens
atatacttaatagac

SEQ ID NO: 1413414 - DNA, 15 bp, Homo sapiens
tatatacttaataga

SEQ ID NO: 1413415 - DNA, 15 bp, Homo sapiens
atatatacttaatag

SEQ ID NO: 1413416 - DNA, 15 bp, Homo sapiens
aatatatacttaata

SEQ ID NO: 1413417 - DNA, 15 bp, Homo sapiens
aaatatatacttaat

SEQ ID NO: 1413418 - DNA, 15 bp, Homo sapiens
aaaatatatacttaa

SEQ ID NO: 1413419 - DNA, 15 bp, Homo sapiens
aaaaatatatactta

SEQ ID NO: 1413420 - DNA, 15 bp, Homo sapiens
taaaaatatatactt

SEQ ID NO: 1413421 - DNA, 15 bp, Homo sapiens
ataaaaatatatact

SEQ ID NO: 1413422 - DNA, 15 bp, Homo sapiens
aataaaaatatatac

SEQ ID NO: 1413423 - DNA, 15 bp, Homo sapiens
taataaaaatatata

SEQ ID NO: 1413424 - DNA, 15 bp, Homo sapiens
ttaataaaaatatat

SEQ ID NO: 1413425 - DNA, 15 bp, Homo sapiens
cttaataaaaatata

SEQ ID NO: 1413426 - DNA, 15 bp, Homo sapiens
gcttaataaaaatat

SEQ ID NO: 1413427 - DNA, 15 bp, Homo sapiens
tgcttaataaaaata

SEQ ID NO: 1413428 - DNA, 15 bp, Homo sapiens
ttgcttaataaaaat

SEQ ID NO: 1413429 - DNA, 15 bp, Homo sapiens
attgcttaataaaaa

SEQ ID NO: 1413430 - DNA, 15 bp, Homo sapiens
tattgcttaataaaa

SEQ ID NO: 1413431 - DNA, 15 bp, Homo sapiens
atattgcttaataaa

SEQ ID NO: 1413432 - DNA, 15 bp, Homo sapiens
aatattgcttaataa

SEQ ID NO: 1413433 - DNA, 15 bp, Homo sapiens
taatattgcttaata

SEQ ID NO: 1413434 - DNA, 15 bp, Homo sapiens
ttaatattgcttaat

SEQ ID NO: 1413435 - DNA, 15 bp, Homo sapiens
tttaatattgcttaa

SEQ ID NO: 1413436 - DNA, 15 bp, Homo sapiens
ttttaatattgctta

SEQ ID NO: 1413437 - DNA, 15 bp, Homo sapiens
attttaatattgctt

SEQ ID NO: 1413438 - DNA, 15 bp, Homo sapiens
cattttaatattgct

SEQ ID NO: 1413439 - DNA, 15 bp, Homo sapiens
tcattttaatattgc

SEQ ID NO: 1413440 - DNA, 15 bp, Homo sapiens
gtcattttaatattg

SEQ ID NO: 1413441 - DNA, 15 bp, Homo sapiens
agtcattttaatatt

SEQ ID NO: 1413442 - DNA, 15 bp, Homo sapiens
cagtcattttaatat

SEQ ID NO: 1413443 - DNA, 15 bp, Homo sapiens
gcagtcattttaata

SEQ ID NO: 1413444 - DNA, 15 bp, Homo sapiens
tgcagtcattttaat

SEQ ID NO: 1413445 - DNA, 15 bp, Homo sapiens
ttgcagtcattttaa

SEQ ID NO: 1413446 - DNA, 15 bp, Homo sapiens
cttgcagtcatttta

SEQ ID NO: 1413447 - DNA, 15 bp, Homo sapiens
acttgcagtcatttt

SEQ ID NO: 1413448 - DNA, 15 bp, Homo sapiens
tacttgcagtcattt

SEQ ID NO: 1413449 - DNA, 15 bp, Homo sapiens
ttacttgcagtcatt

SEQ ID NO: 1413450 - DNA, 15 bp, Homo sapiens
cttacttgcagtcat

SEQ ID NO: 1413451 - DNA, 15 bp, Homo sapiens
tcttacttgcagtca

SEQ ID NO: 1413452 - DNA, 15 bp, Homo sapiens
ctcttacttgcagtc

SEQ ID NO: 1413453 - DNA, 15 bp, Homo sapiens
actcttacttgcagt

SEQ ID NO: 1413454 - DNA, 15 bp, Homo sapiens
aactcttacttgcag

SEQ ID NO: 1413455 - DNA, 15 bp, Homo sapiens
aaactcttacttgca

SEQ ID NO: 1413456 - DNA, 15 bp, Homo sapiens
taaactcttacttgc

SEQ ID NO: 1413457 - DNA, 15 bp, Homo sapiens
ataaactcttacttg

SEQ ID NO: 1413458 - DNA, 15 bp, Homo sapiens
tataaactcttactt

SEQ ID NO: 1413459 - DNA, 15 bp, Homo sapiens
atataaactcttact

SEQ ID NO: 1413460 - DNA, 15 bp, Homo sapiens
tatataaactcttac

SEQ ID NO: 1413461 - DNA, 15 bp, Homo sapiens
ctatataaactctta

SEQ ID NO: 1413462 - DNA, 15 bp, Homo sapiens
gctatataaactctt

SEQ ID NO: 1413463 - DNA, 15 bp, Homo sapiens
agctatataaactct

SEQ ID NO: 1413464 - DNA, 15 bp, Homo sapiens
tagctatataaactc

SEQ ID NO: 1413465 - DNA, 15 bp, Homo sapiens
atagctatataaact

SEQ ID NO: 1413466 - DNA, 15 bp, Homo sapiens
tatagctatataaac

SEQ ID NO: 1413467 - DNA, 15 bp, Homo sapiens
atatagctatataaa

SEQ ID NO: 1413468 - DNA, 15 bp, Homo sapiens
catatagctatataa

SEQ ID NO: 1413469 - DNA, 15 bp, Homo sapiens
acatatagctatata

SEQ ID NO: 1413470 - DNA, 15 bp, Homo sapiens
tacatatagctatat

SEQ ID NO: 1413471 - DNA, 15 bp, Homo sapiens
gtacatatagctata

SEQ ID NO: 1413472 - DNA, 15 bp, Homo sapiens
tgtacatatagctat

SEQ ID NO: 1413473 - DNA, 15 bp, Homo sapiens
atgtacatatagcta

SEQ ID NO: 1413474 - DNA, 15 bp, Homo sapiens
catgtacatatagct

SEQ ID NO: 1413475 - DNA, 15 bp, Homo sapiens
ccatgtacatatagc

SEQ ID NO: 1413476 - DNA, 15 bp, Homo sapiens
tccatgtacatatag

SEQ ID NO: 1413477 - DNA, 15 bp, Homo sapiens
atccatgtacatata

SEQ ID NO: 1413478 - DNA, 15 bp, Homo sapiens
tatccatgtacatat

SEQ ID NO: 1413479 - DNA, 15 bp, Homo sapiens
atatccatgtacata

SEQ ID NO: 1413480 - DNA, 15 bp, Homo sapiens
aatatccatgtacat

SEQ ID NO: 1413481 - DNA, 15 bp, Homo sapiens
aaatatccatgtaca

SEQ ID NO: 1413482 - DNA, 15 bp, Homo sapiens
taaatatccatgtac

SEQ ID NO: 1413483 - DNA, 15 bp, Homo sapiens
ataaatatccatgta

SEQ ID NO: 1413484 - DNA, 15 bp, Homo sapiens
tataaatatccatgt

SEQ ID NO: 1413485 - DNA, 15 bp, Homo sapiens
ctataaatatccatg

SEQ ID NO: 1413486 - DNA, 15 bp, Homo sapiens
tctataaatatccat

SEQ ID NO: 1413487 - DNA, 15 bp, Homo sapiens
atctataaatatcca

SEQ ID NO: 1413488 - DNA, 15 bp, Homo sapiens
catctataaatatcc

SEQ ID NO: 1413489 - DNA, 15 bp, Homo sapiens
tcatctataaatatc

SEQ ID NO: 1413490 - DNA, 15 bp, Homo sapiens
ctcatctataaatat

SEQ ID NO: 1413491 - DNA, 15 bp, Homo sapiens
tctcatctataaata

SEQ ID NO: 1413492 - DNA, 15 bp, Homo sapiens
atctcatctataaat

SEQ ID NO: 1413493 - DNA, 15 bp, Homo sapiens
aatctcatctataaa

SEQ ID NO: 1413494 - DNA, 15 bp, Homo sapiens
taatctcatctataa

SEQ ID NO: 1413495 - DNA, 15 bp, Homo sapiens
gtaatctcatctata

SEQ ID NO: 1413496 - DNA, 15 bp, Homo sapiens
cgtaatctcatctat

SEQ ID NO: 1413497 - DNA, 15 bp, Homo sapiens
gcgtaatctcatcta

SEQ ID NO: 1413498 - DNA, 15 bp, Homo sapiens
agcgtaatctcatct

SEQ ID NO: 1413499 - DNA, 15 bp, Homo sapiens
aagcgtaatctcatc

SEQ ID NO: 1413500 - DNA, 15 bp, Homo sapiens
taagcgtaatctcat

SEQ ID NO: 1413501 - DNA, 15 bp, Homo sapiens
gtaagcgtaatctca

SEQ ID NO: 1413502 - DNA, 15 bp, Homo sapiens
tgtaagcgtaatctc

SEQ ID NO: 1413503 - DNA, 15 bp, Homo sapiens
atgtaagcgtaatct

SEQ ID NO: 1413504 - DNA, 15 bp, Homo sapiens
aatgtaagcgtaatc

SEQ ID NO: 1413505 - DNA, 15 bp, Homo sapiens
gaatgtaagcgtaat

SEQ ID NO: 1413506 - DNA, 15 bp, Homo sapiens
agaatgtaagcgtaa

SEQ ID NO: 1413507 - DNA, 15 bp, Homo sapiens
aagaatgtaagcgta

SEQ ID NO: 1413508 - DNA, 15 bp, Homo sapiens
caagaatgtaagcgt

SEQ ID NO: 1413509 - DNA, 15 bp, Homo sapiens
gcaagaatgtaagcg

SEQ ID NO: 1413510 - DNA, 15 bp, Homo sapiens
ggcaagaatgtaagc

SEQ ID NO: 1413511 - DNA, 15 bp, Homo sapiens
gggcaagaatgtaag

SEQ ID NO: 1413512 - DNA, 15 bp, Homo sapiens
tgggcaagaatgtaa

SEQ ID NO: 1413513 - DNA, 15 bp, Homo sapiens
gtgggcaagaatgta

SEQ ID NO: 1413514 - DNA, 15 bp, Homo sapiens
tgtgggcaagaatgt

SEQ ID NO: 1413515 - DNA, 15 bp, Homo sapiens
gtgtgggcaagaatg

SEQ ID NO: 1413516 - DNA, 15 bp, Homo sapiens
ggtgtgggcaagaat

SEQ ID NO: 1413517 - DNA, 15 bp, Homo sapiens
tggtgtgggcaagaa

SEQ ID NO: 1413518 - DNA, 15 bp, Homo sapiens
atggtgtgggcaaga

SEQ ID NO: 1413519 - DNA, 15 bp, Homo sapiens
gatggtgtgggcaag

SEQ ID NO: 1413520 - DNA, 15 bp, Homo sapiens
agatggtgtgggcaa

SEQ ID NO: 1413521 - DNA, 15 bp, Homo sapiens
aagatggtgtgggca

SEQ ID NO: 1413522 - DNA, 15 bp, Homo sapiens
caagatggtgtgggc

SEQ ID NO: 1413523 - DNA, 15 bp, Homo sapiens
ccaagatggtgtggg

SEQ ID NO: 1413524 - DNA, 15 bp, Homo sapiens
tccaagatggtgtgg

SEQ ID NO: 1413525 - DNA, 15 bp, Homo sapiens
ttccaagatggtgtg

SEQ ID NO: 1413526 - DNA, 15 bp, Homo sapiens
tttccaagatggtgt

SEQ ID NO: 1413527 - DNA, 15 bp, Homo sapiens
ttttccaagatggtg

SEQ ID NO: 1413528 - DNA, 15 bp, Homo sapiens
attttccaagatggt

SEQ ID NO: 1413529 - DNA, 15 bp, Homo sapiens
cattttccaagatgg

SEQ ID NO: 1413530 - DNA, 15 bp, Homo sapiens
acattttccaagatg

SEQ ID NO: 1413531 - DNA, 15 bp, Homo sapiens
aacattttccaagat

SEQ ID NO: 1413532 - DNA, 15 bp, Homo sapiens
taacattttccaaga

SEQ ID NO: 1413533 - DNA, 15 bp, Homo sapiens
ttaacattttccaag

SEQ ID NO: 1413534 - DNA, 15 bp, Homo sapiens
cttaacattttccaa

SEQ ID NO: 1413535 - DNA, 15 bp, Homo sapiens
tcttaacattttcca

SEQ ID NO: 1413536 - DNA, 15 bp, Homo sapiens
atcttaacattttcc

SEQ ID NO: 1413537 - DNA, 15 bp, Homo sapiens
tatcttaacattttc

SEQ ID NO: 1413538 - DNA, 15 bp, Homo sapiens
ttatcttaacatttt

SEQ ID NO: 1413539 - DNA, 15 bp, Homo sapiens
attatcttaacattt

SEQ ID NO: 1413540 - DNA, 15 bp, Homo sapiens
tattatcttaacatt

SEQ ID NO: 1413541 - DNA, 15 bp, Homo sapiens
atattatcttaacat

SEQ ID NO: 1413542 - DNA, 15 bp, Homo sapiens
gatattatcttaaca

SEQ ID NO: 1413543 - DNA, 15 bp, Homo sapiens
cgatattatcttaac

SEQ ID NO: 1413544 - DNA, 15 bp, Homo sapiens
gcgatattatcttaa

SEQ ID NO: 1413545 - DNA, 15 bp, Homo sapiens
ggcgatattatctta

SEQ ID NO: 1413546 - DNA, 15 bp, Homo sapiens
aggcgatattatctt

SEQ ID NO: 1413547 - DNA, 15 bp, Homo sapiens
aaggcgatattatct

SEQ ID NO: 1413548 - DNA, 15 bp, Homo sapiens
caaggcgatattatc

SEQ ID NO: 1413549 - DNA, 15 bp, Homo sapiens
tcaaggcgatattat

SEQ ID NO: 1413550 - DNA, 15 bp, Homo sapiens
gtcaaggcgatatta

SEQ ID NO: 1413551 - DNA, 15 bp, Homo sapiens
agtcaaggcgatatt

SEQ ID NO: 1413552 - DNA, 15 bp, Homo sapiens
cagtcaaggcgatat

SEQ ID NO: 1413553 - DNA, 15 bp, Homo sapiens
tcagtcaaggcgata

SEQ ID NO: 1413554 - DNA, 15 bp, Homo sapiens
ttcagtcaaggcgat

SEQ ID NO: 1413555 - DNA, 15 bp, Homo sapiens
tttcagtcaaggcga

SEQ ID NO: 1413556 - DNA, 15 bp, Homo sapiens
ttttcagtcaaggcg

SEQ ID NO: 1413557 - DNA, 15 bp, Homo sapiens
tttttcagtcaaggc

SEQ ID NO: 1413558 - DNA, 15 bp, Homo sapiens
gtttttcagtcaagg

SEQ ID NO: 1413559 - DNA, 15 bp, Homo sapiens
tgtttttcagtcaag

SEQ ID NO: 1413560 - DNA, 15 bp, Homo sapiens
atgtttttcagtcaa

SEQ ID NO: 1413561 - DNA, 15 bp, Homo sapiens
tatgtttttcagtca

SEQ ID NO: 1413562 - DNA, 15 bp, Homo sapiens
gtatgtttttcagtc

SEQ ID NO: 1413563 - DNA, 15 bp, Homo sapiens
tgtatgtttttcagt

SEQ ID NO: 1413564 - DNA, 15 bp, Homo sapiens
ctgtatgtttttcag

SEQ ID NO: 1413565 - DNA, 15 bp, Homo sapiens
gctgtatgtttttca

SEQ ID NO: 1413566 - DNA, 15 bp, Homo sapiens
tgctgtatgtttttc

SEQ ID NO: 1413567 - DNA, 15 bp, Homo sapiens
ttgctgtatgttttt

SEQ ID NO: 1413568 - DNA, 15 bp, Homo sapiens
tttgctgtatgtttt

SEQ ID NO: 1413569 - DNA, 15 bp, Homo sapiens
gtttgctgtatgttt

SEQ ID NO: 1413570 - DNA, 15 bp, Homo sapiens
tgtttgctgtatgtt

SEQ ID NO: 1413571 - DNA, 15 bp, Homo sapiens
atgtttgctgtatgt

SEQ ID NO: 1413572 - DNA, 15 bp, Homo sapiens
catgtttgctgtatg

SEQ ID NO: 1413573 - DNA, 15 bp, Homo sapiens
ccatgtttgctgtat

SEQ ID NO: 1413574 - DNA, 15 bp, Homo sapiens
accatgtttgctgta

SEQ ID NO: 1413575 - DNA, 15 bp, Homo sapiens
gaccatgtttgctgt

SEQ ID NO: 1413576 - DNA, 15 bp, Homo sapiens
agaccatgtttgctg

SEQ ID NO: 1413577 - DNA, 15 bp, Homo sapiens
gagaccatgtttgct

SEQ ID NO: 1413578 - DNA, 15 bp, Homo sapiens
agagaccatgtttgc

SEQ ID NO: 1413579 - DNA, 15 bp, Homo sapiens
aagagaccatgtttg

SEQ ID NO: 1413580 - DNA, 15 bp, Homo sapiens
aaagagaccatgttt

SEQ ID NO: 1413581 - DNA, 15 bp, Homo sapiens
caaagagaccatgtt

SEQ ID NO: 1413582 - DNA, 15 bp, Homo sapiens
ccaaagagaccatgt

SEQ ID NO: 1413583 - DNA, 15 bp, Homo sapiens
gccaaagagaccatg

SEQ ID NO: 1413584 - DNA, 15 bp, Homo sapiens
tgccaaagagaccat

SEQ ID NO: 1413585 - DNA, 15 bp, Homo sapiens
atgccaaagagacca

SEQ ID NO: 1413586 - DNA, 15 bp, Homo sapiens
aatgccaaagagacc

SEQ ID NO: 1413587 - DNA, 15 bp, Homo sapiens
gaatgccaaagagac

SEQ ID NO: 1413588 - DNA, 15 bp, Homo sapiens
agaatgccaaagaga

SEQ ID NO: 1413589 - DNA, 15 bp, Homo sapiens
cagaatgccaaagag

SEQ ID NO: 1413590 - DNA, 15 bp, Homo sapiens
acagaatgccaaaga

SEQ ID NO: 1413591 - DNA, 15 bp, Homo sapiens
gacagaatgccaaag

SEQ ID NO: 1413592 - DNA, 15 bp, Homo sapiens
tgacagaatgccaaa

SEQ ID NO: 1413593 - DNA, 15 bp, Homo sapiens
atgacagaatgccaa

SEQ ID NO: 1413594 - DNA, 15 bp, Homo sapiens
gatgacagaatgcca

SEQ ID NO: 1413595 - DNA, 15 bp, Homo sapiens
ggatgacagaatgcc

SEQ ID NO: 1413596 - DNA, 15 bp, Homo sapiens
tggatgacagaatgc

SEQ ID NO: 1413597 - DNA, 15 bp, Homo sapiens
gtggatgacagaatg

SEQ ID NO: 1413598 - DNA, 15 bp, Homo sapiens
tgtggatgacagaat

SEQ ID NO: 1413599 - DNA, 15 bp, Homo sapiens
atgtggatgacagaa

SEQ ID NO: 1413600 - DNA, 15 bp, Homo sapiens
gatgtggatgacaga

SEQ ID NO: 1413601 - DNA, 15 bp, Homo sapiens
agatgtggatgacag

SEQ ID NO: 1413602 - DNA, 15 bp, Homo sapiens
tagatgtggatgaca

SEQ ID NO: 1413603 - DNA, 15 bp, Homo sapiens
gtagatgtggatgac

SEQ ID NO: 1413604 - DNA, 15 bp, Homo sapiens
tgtagatgtggatga

SEQ ID NO: 1413605 - DNA, 15 bp, Homo sapiens
ctgtagatgtggatg

SEQ ID NO: 1413606 - DNA, 15 bp, Homo sapiens
cctgtagatgtggat

SEQ ID NO: 1413607 - DNA, 15 bp, Homo sapiens
acctgtagatgtgga

SEQ ID NO: 1413608 - DNA, 15 bp, Homo sapiens
cacctgtagatgtgg

SEQ ID NO: 1413609 - DNA, 15 bp, Homo sapiens
gcacctgtagatgtg

SEQ ID NO: 1413610 - DNA, 15 bp, Homo sapiens
ggcacctgtagatgt

SEQ ID NO: 1413611 - DNA, 15 bp, Homo sapiens
aggcacctgtagatg

SEQ ID NO: 1413612 - DNA, 15 bp, Homo sapiens
caggcacctgtagat

SEQ ID NO: 1413613 - DNA, 15 bp, Homo sapiens
acaggcacctgtaga

SEQ ID NO: 1413614 - DNA, 15 bp, Homo sapiens
tacaggcacctgtag

SEQ ID NO: 1413615 - DNA, 15 bp, Homo sapiens
ctacaggcacctgta

SEQ ID NO: 1413616 - DNA, 15 bp, Homo sapiens
gctacaggcacctgt

SEQ ID NO: 1413617 - DNA, 15 bp, Homo sapiens
tgctacaggcacctg

SEQ ID NO: 1413618 - DNA, 15 bp, Homo sapiens
ttgctacaggcacct

SEQ ID NO: 1413619 - DNA, 15 bp, Homo sapiens
attgctacaggcacc

SEQ ID NO: 1413620 - DNA, 15 bp, Homo sapiens
cattgctacaggcac

SEQ ID NO: 1413621 - DNA, 15 bp, Homo sapiens
acattgctacaggca

SEQ ID NO: 1413622 - DNA, 15 bp, Homo sapiens
cacattgctacaggc

SEQ ID NO: 1413623 - DNA, 15 bp, Homo sapiens
acacattgctacagg

SEQ ID NO: 1413624 - DNA, 15 bp, Homo sapiens
cacacattgctacag

SEQ ID NO: 1413625 - DNA, 15 bp, Homo sapiens
ccacacattgctaca

SEQ ID NO: 1413626 - DNA, 15 bp, Homo sapiens
accacacattgctac

SEQ ID NO: 1413627 - DNA, 15 bp, Homo sapiens
taccacacattgcta

SEQ ID NO: 1413628 - DNA, 15 bp, Homo sapiens
gtaccacacattgct

SEQ ID NO: 1413629 - DNA, 15 bp, Homo sapiens
agtaccacacattgc

SEQ ID NO: 1413630 - DNA, 15 bp, Homo sapiens
tagtaccacacattg

SEQ ID NO: 1413631 - DNA, 15 bp, Homo sapiens
atagtaccacacatt

SEQ ID NO: 1413632 - DNA, 15 bp, Homo sapiens
tatagtaccacacat

SEQ ID NO: 1413633 - DNA, 15 bp, Homo sapiens
ttatagtaccacaca

SEQ ID NO: 1413634 - DNA, 15 bp, Homo sapiens
attatagtaccacac

SEQ ID NO: 1413635 - DNA, 15 bp, Homo sapiens
tattatagtaccaca

SEQ ID NO: 1413636 - DNA, 15 bp, Homo sapiens
atattatagtaccac

SEQ ID NO: 1413637 - DNA, 15 bp, Homo sapiens
tatattatagtacca

SEQ ID NO: 1413638 - DNA, 15 bp, Homo sapiens
ttatattatagtacc

SEQ ID NO: 1413639 - DNA, 15 bp, Homo sapiens
attatattatagtac

SEQ ID NO: 1413640 - DNA, 15 bp, Homo sapiens
cattatattatagta

SEQ ID NO: 1413641 - DNA, 15 bp, Homo sapiens
ccattatattatagt

SEQ ID NO: 1413642 - DNA, 15 bp, Homo sapiens
accattatattatag

SEQ ID NO: 1413643 - DNA, 15 bp, Homo sapiens
taccattatattata

SEQ ID NO: 1413644 - DNA, 15 bp, Homo sapiens
ttaccattatattat

SEQ ID NO: 1413645 - DNA, 15 bp, Homo sapiens
attaccattatatta

SEQ ID NO: 1413646 - DNA, 15 bp, Homo sapiens
aattaccattatatt

SEQ ID NO: 1413647 - DNA, 15 bp, Homo sapiens
caattaccattatat

SEQ ID NO: 1413648 - DNA, 15 bp, Homo sapiens
tcaattaccattata

SEQ ID NO: 1413649 - DNA, 15 bp, Homo sapiens
atcaattaccattat

SEQ ID NO: 1413650 - DNA, 15 bp, Homo sapiens
catcaattaccatta

SEQ ID NO: 1413651 - DNA, 15 bp, Homo sapiens
acatcaattaccatt

SEQ ID NO: 1413652 - DNA, 15 bp, Homo sapiens
aacatcaattaccat

SEQ ID NO: 1413653 - DNA, 15 bp, Homo sapiens
gaacatcaattacca

SEQ ID NO: 1413654 - DNA, 15 bp, Homo sapiens
ggaacatcaattacc

SEQ ID NO: 1413655 - DNA, 15 bp, Homo sapiens
aggaacatcaattac

SEQ ID NO: 1413656 - DNA, 15 bp, Homo sapiens
taggaacatcaatta

SEQ ID NO: 1413657 - DNA, 15 bp, Homo sapiens
ttaggaacatcaatt

SEQ ID NO: 1413658 - DNA, 15 bp, Homo sapiens
attaggaacatcaat

SEQ ID NO: 1413659 - DNA, 15 bp, Homo sapiens
aattaggaacatcaa

SEQ ID NO: 1413660 - DNA, 15 bp, Homo sapiens
aaattaggaacatca

SEQ ID NO: 1413661 - DNA, 15 bp, Homo sapiens
caaattaggaacatc

SEQ ID NO: 1413662 - DNA, 15 bp, Homo sapiens
ccaaattaggaacat

SEQ ID NO: 1413663 - DNA, 15 bp, Homo sapiens
cccaaattaggaaca

SEQ ID NO: 1413664 - DNA, 15 bp, Homo sapiens
tcccaaattaggaac

SEQ ID NO: 1413665 - DNA, 15 bp, Homo sapiens
ctcccaaattaggaa

SEQ ID NO: 1413666 - DNA, 15 bp, Homo sapiens
actcccaaattagga

SEQ ID NO: 1413667 - DNA, 15 bp, Homo sapiens
cactcccaaattagg

SEQ ID NO: 1413668 - DNA, 15 bp, Homo sapiens
acactcccaaattag

SEQ ID NO: 1413669 - DNA, 15 bp, Homo sapiens
cacactcccaaatta

SEQ ID NO: 1413670 - DNA, 15 bp, Homo sapiens
ccacactcccaaatt

SEQ ID NO: 1413671 - DNA, 15 bp, Homo sapiens
tccacactcccaaat

SEQ ID NO: 1413672 - DNA, 15 bp, Homo sapiens
ttccacactcccaaa

SEQ ID NO: 1413673 - DNA, 15 bp, Homo sapiens
tttccacactcccaa

SEQ ID NO: 1413674 - DNA, 15 bp, Homo sapiens
ctttccacactccca

SEQ ID NO: 1413675 - DNA, 15 bp, Homo sapiens
tctttccacactccc

SEQ ID NO: 1413676 - DNA, 15 bp, Homo sapiens
atctttccacactcc

SEQ ID NO: 1413677 - DNA, 15 bp, Homo sapiens
gatctttccacactc

SEQ ID NO: 1413678 - DNA, 15 bp, Homo sapiens
ggatctttccacact

SEQ ID NO: 1413679 - DNA, 15 bp, Homo sapiens
gggatctttccacac

SEQ ID NO: 1413680 - DNA, 15 bp, Homo sapiens
ggggatctttccaca

SEQ ID NO: 1413681 - DNA, 15 bp, Homo sapiens
tggggatctttccac

SEQ ID NO: 1413682 - DNA, 15 bp, Homo sapiens
ttggggatctttcca

SEQ ID NO: 1413683 - DNA, 15 bp, Homo sapiens
tttggggatctttcc

SEQ ID NO: 1413684 - DNA, 15 bp, Homo sapiens
atttggggatctttc

SEQ ID NO: 1413685 - DNA, 15 bp, Homo sapiens
catttggggatcttt

SEQ ID NO: 1413686 - DNA, 15 bp, Homo sapiens
acatttggggatctt

SEQ ID NO: 1413687 - DNA, 15 bp, Homo sapiens
gacatttggggatct

SEQ ID NO: 1413688 - DNA, 15 bp, Homo sapiens
agacatttggggatc

SEQ ID NO: 1413689 - DNA, 15 bp, Homo sapiens
aagacatttggggat

SEQ ID NO: 1413690 - DNA, 15 bp, Homo sapiens
aaagacatttgggga

SEQ ID NO: 1413691 - DNA, 15 bp, Homo sapiens
aaaagacatttgggg

SEQ ID NO: 1413692 - DNA, 15 bp, Homo sapiens
taaaagacatttggg

SEQ ID NO: 1413693 - DNA, 15 bp, Homo sapiens
ttaaaagacatttgg

SEQ ID NO: 1413694 - DNA, 15 bp, Homo sapiens
cttaaaagacatttg

SEQ ID NO: 1413695 - DNA, 15 bp, Homo sapiens
acttaaaagacattt

SEQ ID NO: 1413696 - DNA, 15 bp, Homo sapiens
gacttaaaagacatt

SEQ ID NO: 1413697 - DNA, 15 bp, Homo sapiens
tgacttaaaagacat

SEQ ID NO: 1413698 - DNA, 15 bp, Homo sapiens
atgacttaaaagaca

SEQ ID NO: 1413699 - DNA, 15 bp, Homo sapiens
gatgacttaaaagac

SEQ ID NO: 1413700 - DNA, 15 bp, Homo sapiens
tgatgacttaaaaga

SEQ ID NO: 1413701 - DNA, 15 bp, Homo sapiens
ctgatgacttaaaag

SEQ ID NO: 1413702 - DNA, 15 bp, Homo sapiens
tctgatgacttaaaa

SEQ ID NO: 1413703 - DNA, 15 bp, Homo sapiens
ctctgatgacttaaa

SEQ ID NO: 1413704 - DNA, 15 bp, Homo sapiens
tctctgatgacttaa

SEQ ID NO: 1413705 - DNA, 15 bp, Homo sapiens
ttctctgatgactta

SEQ ID NO: 1413706 - DNA, 15 bp, Homo sapiens
tttctctgatgactt

SEQ ID NO: 1413707 - DNA, 15 bp, Homo sapiens
ctttctctgatgact

SEQ ID NO: 1413708 - DNA, 15 bp, Homo sapiens
tctttctctgatgac

SEQ ID NO: 1413709 - DNA, 15 bp, Homo sapiens
atctttctctgatga

SEQ ID NO: 1413710 - DNA, 15 bp, Homo sapiens
tatctttctctgatg

SEQ ID NO: 1413711 - DNA, 15 bp, Homo sapiens
ttatctttctctgat

SEQ ID NO: 1413712 - DNA, 15 bp, Homo sapiens
tttatctttctctga

SEQ ID NO: 1413713 - DNA, 15 bp, Homo sapiens
ttttatctttctctg

SEQ ID NO: 1413714 - DNA, 15 bp, Homo sapiens
attttatctttctct

SEQ ID NO: 1413715 - DNA, 15 bp, Homo sapiens
tattttatctttctc

SEQ ID NO: 1413716 - DNA, 15 bp, Homo sapiens
ttattttatctttct

SEQ ID NO: 1413717 - DNA, 15 bp, Homo sapiens
attattttatctttc

SEQ ID NO: 1413718 - DNA, 15 bp, Homo sapiens
tattattttatcttt

SEQ ID NO: 1413719 - DNA, 15 bp, Homo sapiens
atattattttatctt

SEQ ID NO: 1413720 - DNA, 15 bp, Homo sapiens
aatattattttatct

SEQ ID NO: 1413721 - DNA, 15 bp, Homo sapiens
aaatattattttatc

SEQ ID NO: 1413722 - DNA, 15 bp, Homo sapiens
caaatattattttat

SEQ ID NO: 1413723 - DNA, 15 bp, Homo sapiens
tcaaatattatttta

SEQ ID NO: 1413724 - DNA, 15 bp, Homo sapiens
atcaaatattatttt

SEQ ID NO: 1413725 - DNA, 15 bp, Homo sapiens
tatcaaatattattt

SEQ ID NO: 1413726 - DNA, 15 bp, Homo sapiens
gtatcaaatattatt

SEQ ID NO: 1413727 - DNA, 15 bp, Homo sapiens
tgtatcaaatattat

SEQ ID NO: 1413728 - DNA, 15 bp, Homo sapiens
ctgtatcaaatatta

SEQ ID NO: 1413729 - DNA, 15 bp, Homo sapiens
gctgtatcaaatatt

SEQ ID NO: 1413730 - DNA, 15 bp, Homo sapiens
agctgtatcaaatat

SEQ ID NO: 1413731 - DNA, 15 bp, Homo sapiens
aagctgtatcaaata

SEQ ID NO: 1413732 - DNA, 15 bp, Homo sapiens
aaagctgtatcaaat

SEQ ID NO: 1413733 - DNA, 15 bp, Homo sapiens
aaaagctgtatcaaa

SEQ ID NO: 1413734 - DNA, 15 bp, Homo sapiens
gaaaagctgtatcaa

SEQ ID NO: 1413735 - DNA, 15 bp, Homo sapiens
agaaaagctgtatca

SEQ ID NO: 1413736 - DNA, 15 bp, Homo sapiens
aagaaaagctgtatc

SEQ ID NO: 1413737 - DNA, 15 bp, Homo sapiens
taagaaaagctgtat

SEQ ID NO: 1413738 - DNA, 15 bp, Homo sapiens
ttaagaaaagctgta

SEQ ID NO: 1413739 - DNA, 15 bp, Homo sapiens
tttaagaaaagctgt

SEQ ID NO: 1413740 - DNA, 15 bp, Homo sapiens
ttttaagaaaagctg

SEQ ID NO: 1413741 - DNA, 15 bp, Homo sapiens
attttaagaaaagct

SEQ ID NO: 1413742 - DNA, 15 bp, Homo sapiens
aattttaagaaaagc

SEQ ID NO: 1413743 - DNA, 15 bp, Homo sapiens
aaattttaagaaaag

SEQ ID NO: 1413744 - DNA, 15 bp, Homo sapiens
tcaaattttaagaaa

SEQ ID NO: 1413745 - DNA, 15 bp, Homo sapiens
ctcaaattttaagaa

SEQ ID NO: 1413746 - DNA, 15 bp, Homo sapiens
tctcaaattttaaga

SEQ ID NO: 1413747 - DNA, 15 bp, Homo sapiens
atctcaaattttaag

SEQ ID NO: 1413748 - DNA, 15 bp, Homo sapiens
tatctcaaattttaa

SEQ ID NO: 1413749 - DNA, 15 bp, Homo sapiens
ttatctcaaatttta

SEQ ID NO: 1413750 - DNA, 15 bp, Homo sapiens
attatctcaaatttt

SEQ ID NO: 1413751 - DNA, 15 bp, Homo sapiens
aattatctcaaattt

SEQ ID NO: 1413752 - DNA, 15 bp, Homo sapiens
aaattatctcaaatt

SEQ ID NO: 1413753 - DNA, 15 bp, Homo sapiens
aaaattatctcaaat

SEQ ID NO: 1413754 - DNA, 15 bp, Homo sapiens
taaaattatctcaaa

SEQ ID NO: 1413755 - DNA, 15 bp, Homo sapiens
ttaaaattatctcaa

SEQ ID NO: 1413756 - DNA, 15 bp, Homo sapiens
attaaaattatctca

SEQ ID NO: 1413757 - DNA, 15 bp, Homo sapiens
cattaaaattatctc

SEQ ID NO: 1413758 - DNA, 15 bp, Homo sapiens
ccattaaaattatct

SEQ ID NO: 1413759 - DNA, 15 bp, Homo sapiens
gccattaaaattatc

SEQ ID NO: 1413760 - DNA, 15 bp, Homo sapiens
cgccattaaaattat

SEQ ID NO: 1413761 - DNA, 15 bp, Homo sapiens
tcgccattaaaatta

SEQ ID NO: 1413762 - DNA, 15 bp, Homo sapiens
ctcgccattaaaatt

SEQ ID NO: 1413763 - DNA, 15 bp, Homo sapiens
actcgccattaaaat

SEQ ID NO: 1413764 - DNA, 15 bp, Homo sapiens
aactcgccattaaaa

SEQ ID NO: 1413765 - DNA, 15 bp, Homo sapiens
taactcgccattaaa

SEQ ID NO: 1413766 - DNA, 15 bp, Homo sapiens
ataactcgccattaa

SEQ ID NO: 1413767 - DNA, 15 bp, Homo sapiens
aataactcgccatta

SEQ ID NO: 1413768 - DNA, 15 bp, Homo sapiens
aaataactcgccatt

SEQ ID NO: 1413769 - DNA, 15 bp, Homo sapiens
aaaataactcgccat

SEQ ID NO: 1413770 - DNA, 15 bp, Homo sapiens
taaaataactcgcca

SEQ ID NO: 1413771 - DNA, 15 bp, Homo sapiens
ataaaataactcgcc

SEQ ID NO: 1413772 - DNA, 15 bp, Homo sapiens
cataaaataactcgc

SEQ ID NO: 1413773 - DNA, 15 bp, Homo sapiens
ccataaaataactcg

SEQ ID NO: 1413774 - DNA, 15 bp, Homo sapiens
gccataaaataactc

SEQ ID NO: 1413775 - DNA, 15 bp, Homo sapiens
ggccataaaataact

SEQ ID NO: 1413776 - DNA, 15 bp, Homo sapiens
gggccataaaataac

SEQ ID NO: 1413777 - DNA, 15 bp, Homo sapiens
agggccataaaataa

SEQ ID NO: 1413778 - DNA, 15 bp, Homo sapiens
aagggccataaaata

SEQ ID NO: 1413779 - DNA, 15 bp, Homo sapiens
aaagggccataaaat

SEQ ID NO: 1413780 - DNA, 15 bp, Homo sapiens
caaagggccataaaa

SEQ ID NO: 1413781 - DNA, 15 bp, Homo sapiens
acaaagggccataaa

SEQ ID NO: 1413782 - DNA, 15 bp, Homo sapiens
tacaaagggccataa

SEQ ID NO: 1413783 - DNA, 15 bp, Homo sapiens
atacaaagggccata

SEQ ID NO: 1413784 - DNA, 15 bp, Homo sapiens
gatacaaagggccat

SEQ ID NO: 1413785 - DNA, 15 bp, Homo sapiens
agatacaaagggcca

SEQ ID NO: 1413786 - DNA, 15 bp, Homo sapiens
aagatacaaagggcc

SEQ ID NO: 1413787 - DNA, 15 bp, Homo sapiens
caagatacaaagggc

SEQ ID NO: 1413788 - DNA, 15 bp, Homo sapiens
tcaagatacaaaggg

SEQ ID NO: 1413789 - DNA, 15 bp, Homo sapiens
ttcaagatacaaagg

SEQ ID NO: 1413790 - DNA, 15 bp, Homo sapiens
tttcaagatacaaag

SEQ ID NO: 1413791 - DNA, 15 bp, Homo sapiens
ttttcaagatacaaa

SEQ ID NO: 1413792 - DNA, 15 bp, Homo sapiens
tttttcaagatacaa

SEQ ID NO: 1413793 - DNA, 15 bp, Homo sapiens
atttttcaagataca

SEQ ID NO: 1413794 - DNA, 15 bp, Homo sapiens
aatttttcaagatac

SEQ ID NO: 1413795 - DNA, 15 bp, Homo sapiens
caatttttcaagata

SEQ ID NO: 1413796 - DNA, 15 bp, Homo sapiens
ccaatttttcaagat

SEQ ID NO: 1413797 - DNA, 15 bp, Homo sapiens
cccaatttttcaaga

SEQ ID NO: 1413798 - DNA, 15 bp, Homo sapiens
tcccaatttttcaag

SEQ ID NO: 1413799 - DNA, 15 bp, Homo sapiens
ttcccaatttttcaa

SEQ ID NO: 1413800 - DNA, 15 bp, Homo sapiens
tttcccaatttttca

SEQ ID NO: 1413801 - DNA, 15 bp, Homo sapiens
atttcccaatttttc

SEQ ID NO: 1413802 - DNA, 15 bp, Homo sapiens
gatttcccaattttt

SEQ ID NO: 1413803 - DNA, 15 bp, Homo sapiens
tgatttcccaatttt

SEQ ID NO: 1413804 - DNA, 15 bp, Homo sapiens
gtgatttcccaattt

SEQ ID NO: 1413805 - DNA, 15 bp, Homo sapiens
tgtgatttcccaatt

SEQ ID NO: 1413806 - DNA, 15 bp, Homo sapiens
atgtgatttcccaat

SEQ ID NO: 1413807 - DNA, 15 bp, Homo sapiens
tatgtgatttcccaa

SEQ ID NO: 1413808 - DNA, 15 bp, Homo sapiens
atatgtgatttccca

SEQ ID NO: 1413809 - DNA, 15 bp, Homo sapiens
catatgtgatttccc

SEQ ID NO: 1413810 - DNA, 15 bp, Homo sapiens
ccatatgtgatttcc

SEQ ID NO: 1413811 - DNA, 15 bp, Homo sapiens
accatatgtgatttc

SEQ ID NO: 1413812 - DNA, 15 bp, Homo sapiens
aaccatatgtgattt

SEQ ID NO: 1413813 - DNA, 15 bp, Homo sapiens
aaaccatatgtgatt

SEQ ID NO: 1413814 - DNA, 15 bp, Homo sapiens
taaaccatatgtgat

SEQ ID NO: 1413815 - DNA, 15 bp, Homo sapiens
ttaaaccatatgtga

SEQ ID NO: 1413816 - DNA, 15 bp, Homo sapiens
tttaaaccatatgtg

SEQ ID NO: 1413817 - DNA, 15 bp, Homo sapiens
ttttaaaccatatgt

SEQ ID NO: 1413818 - DNA, 15 bp, Homo sapiens
cttttaaaccatatg

SEQ ID NO: 1413819 - DNA, 15 bp, Homo sapiens
gcttttaaaccatat

SEQ ID NO: 1413820 - DNA, 15 bp, Homo sapiens
cgcttttaaaccata

SEQ ID NO: 1413821 - DNA, 15 bp, Homo sapiens
tcgcttttaaaccat

SEQ ID NO: 1413822 - DNA, 15 bp, Homo sapiens
ttcgcttttaaacca

SEQ ID NO: 1413823 - DNA, 15 bp, Homo sapiens
attcgcttttaaacc

SEQ ID NO: 1413824 - DNA, 15 bp, Homo sapiens
aattcgcttttaaac

SEQ ID NO: 1413825 - DNA, 15 bp, Homo sapiens
taattcgcttttaaa

SEQ ID NO: 1413826 - DNA, 15 bp, Homo sapiens
ataattcgcttttaa

SEQ ID NO: 1413827 - DNA, 15 bp, Homo sapiens
gataattcgctttta

SEQ ID NO: 1413828 - DNA, 15 bp, Homo sapiens
agataattcgctttt

SEQ ID NO: 1413829 - DNA, 15 bp, Homo sapiens
aagataattcgcttt

SEQ ID NO: 1413830 - DNA, 15 bp, Homo sapiens
taagataattcgctt

SEQ ID NO: 1413831 - DNA, 15 bp, Homo sapiens
ttaagataattcgct

SEQ ID NO: 1413832 - DNA, 15 bp, Homo sapiens
attaagataattcgc

SEQ ID NO: 1413833 - DNA, 15 bp, Homo sapiens
aattaagataattcg

SEQ ID NO: 1413834 - DNA, 15 bp, Homo sapiens
caattaagataattc

SEQ ID NO: 1413835 - DNA, 15 bp, Homo sapiens
ccaattaagataatt

SEQ ID NO: 1413836 - DNA, 15 bp, Homo sapiens
tccaattaagataat

SEQ ID NO: 1413837 - DNA, 15 bp, Homo sapiens
ttccaattaagataa

SEQ ID NO: 1413838 - DNA, 15 bp, Homo sapiens
gttccaattaagata

SEQ ID NO: 1413839 - DNA, 15 bp, Homo sapiens
tgttccaattaagat

SEQ ID NO: 1413840 - DNA, 15 bp, Homo sapiens
atgttccaattaaga

SEQ ID NO: 1413841 - DNA, 15 bp, Homo sapiens
catgttccaattaag

SEQ ID NO: 1413842 - DNA, 15 bp, Homo sapiens
gcatgttccaattaa

SEQ ID NO: 1413843 - DNA, 15 bp, Homo sapiens
ggcatgttccaatta

SEQ ID NO: 1413844 - DNA, 15 bp, Homo sapiens
tggcatgttccaatt

SEQ ID NO: 1413845 - DNA, 15 bp, Homo sapiens
atggcatgttccaat

SEQ ID NO: 1413846 - DNA, 15 bp, Homo sapiens
aatggcatgttccaa

SEQ ID NO: 1413847 - DNA, 15 bp, Homo sapiens
taatggcatgttcca

SEQ ID NO: 1413848 - DNA, 15 bp, Homo sapiens
ttaatggcatgttcc

SEQ ID NO: 1413849 - DNA, 15 bp, Homo sapiens
gttaatggcatgttc

SEQ ID NO: 1413850 - DNA, 15 bp, Homo sapiens
agttaatggcatgtt

SEQ ID NO: 1413851 - DNA, 15 bp, Homo sapiens
tagttaatggcatgt

SEQ ID NO: 1413852 - DNA, 15 bp, Homo sapiens
ctagttaatggcatg

SEQ ID NO: 1413853 - DNA, 15 bp, Homo sapiens
tctagttaatggcat

SEQ ID NO: 1413854 - DNA, 15 bp, Homo sapiens
ttctagttaatggca

SEQ ID NO: 1413855 - DNA, 15 bp, Homo sapiens
tttctagttaatggc

SEQ ID NO: 1413856 - DNA, 15 bp, Homo sapiens
ttttctagttaatgg

SEQ ID NO: 1413857 - DNA, 15 bp, Homo sapiens
gttttctagttaatg

SEQ ID NO: 1413858 - DNA, 15 bp, Homo sapiens
ggttttctagttaat

SEQ ID NO: 1413859 - DNA, 15 bp, Homo sapiens
gggttttctagttaa

SEQ ID NO: 1413860 - DNA, 15 bp, Homo sapiens
tgggttttctagtta

SEQ ID NO: 1413861 - DNA, 15 bp, Homo sapiens
atgggttttctagtt

SEQ ID NO: 1413862 - DNA, 15 bp, Homo sapiens
aatgggttttctagt

SEQ ID NO: 1413863 - DNA, 15 bp, Homo sapiens
taatgggttttctag

SEQ ID NO: 1413864 - DNA, 15 bp, Homo sapiens
ataatgggttttcta

SEQ ID NO: 1413865 - DNA, 15 bp, Homo sapiens
aataatgggttttct

SEQ ID NO: 1413866 - DNA, 15 bp, Homo sapiens
aaataatgggttttc

SEQ ID NO: 1413867 - DNA, 15 bp, Homo sapiens
gaaataatgggtttt

SEQ ID NO: 1413868 - DNA, 15 bp, Homo sapiens
tgaaataatgggttt

SEQ ID NO: 1413869 - DNA, 15 bp, Homo sapiens
ctgaaataatgggtt

SEQ ID NO: 1413870 - DNA, 15 bp, Homo sapiens
gctgaaataatgggt

SEQ ID NO: 1413871 - DNA, 15 bp, Homo sapiens
agctgaaataatggg

SEQ ID NO: 1413872 - DNA, 15 bp, Homo sapiens
aagctgaaataatgg

SEQ ID NO: 1413873 - DNA, 15 bp, Homo sapiens
caagctgaaataatg

SEQ ID NO: 1413874 - DNA, 15 bp, Homo sapiens
gcaagctgaaataat

SEQ ID NO: 1413875 - DNA, 15 bp, Homo sapiens
tgcaagctgaaataa

SEQ ID NO: 1413876 - DNA, 15 bp, Homo sapiens
gtgcaagctgaaata

SEQ ID NO: 1413877 - DNA, 15 bp, Homo sapiens
agtgcaagctgaaat

SEQ ID NO: 1413878 - DNA, 15 bp, Homo sapiens
gagtgcaagctgaaa

SEQ ID NO: 1413879 - DNA, 15 bp, Homo sapiens
agagtgcaagctgaa

SEQ ID NO: 1413880 - DNA, 15 bp, Homo sapiens
tagagtgcaagctga

SEQ ID NO: 1413881 - DNA, 15 bp, Homo sapiens
ttagagtgcaagctg

SEQ ID NO: 1413882 - DNA, 15 bp, Homo sapiens
gttagagtgcaagct

SEQ ID NO: 1413883 - DNA, 15 bp, Homo sapiens
tgttagagtgcaagc

SEQ ID NO: 1413884 - DNA, 15 bp, Homo sapiens
ctgttagagtgcaag

SEQ ID NO: 1413885 - DNA, 15 bp, Homo sapiens
tctgttagagtgcaa

SEQ ID NO: 1413886 - DNA, 15 bp, Homo sapiens
gtctgttagagtgca

SEQ ID NO: 1413887 - DNA, 15 bp, Homo sapiens
tgtctgttagagtgc

SEQ ID NO: 1413888 - DNA, 15 bp, Homo sapiens
ttgtctgttagagtg

SEQ ID NO: 1413889 - DNA, 15 bp, Homo sapiens
attgtctgttagagt

SEQ ID NO: 1413890 - DNA, 15 bp, Homo sapiens
tattgtctgttagag

SEQ ID NO: 1413891 - DNA, 15 bp, Homo sapiens
gtattgtctgttaga

SEQ ID NO: 1413892 - DNA, 15 bp, Homo sapiens
cgtattgtctgttag

SEQ ID NO: 1413893 - DNA, 15 bp, Homo sapiens
acgtattgtctgtta

SEQ ID NO: 1413894 - DNA, 15 bp, Homo sapiens
cacgtattgtctgtt

SEQ ID NO: 1413895 - DNA, 15 bp, Homo sapiens
ccacgtattgtctgt

SEQ ID NO: 1413896 - DNA, 15 bp, Homo sapiens
tccacgtattgtctg

SEQ ID NO: 1413897 - DNA, 15 bp, Homo sapiens
ttccacgtattgtct

SEQ ID NO: 1413898 - DNA, 15 bp, Homo sapiens
tttccacgtattgtc

SEQ ID NO: 1413899 - DNA, 15 bp, Homo sapiens
ttttccacgtattgt

SEQ ID NO: 1413900 - DNA, 15 bp, Homo sapiens
cttttccacgtattg

SEQ ID NO: 1413901 - DNA, 15 bp, Homo sapiens
ccttttccacgtatt

SEQ ID NO: 1413902 - DNA, 15 bp, Homo sapiens
tccttttccacgtat

SEQ ID NO: 1413903 - DNA, 15 bp, Homo sapiens
ttccttttccacgta

SEQ ID NO: 1413904 - DNA, 15 bp, Homo sapiens
tttccttttccacgt

SEQ ID NO: 1413905 - DNA, 15 bp, Homo sapiens
gtttccttttccacg

SEQ ID NO: 1413906 - DNA, 15 bp, Homo sapiens
cgtttccttttccac

SEQ ID NO: 1413907 - DNA, 15 bp, Homo sapiens
gcgtttccttttcca

SEQ ID NO: 1413908 - DNA, 15 bp, Homo sapiens
cgcgtttccttttcc

SEQ ID NO: 1413909 - DNA, 15 bp, Homo sapiens
ccgcgtttccttttc

SEQ ID NO: 1413910 - DNA, 15 bp, Homo sapiens
gccgcgtttcctttt

SEQ ID NO: 1413911 - DNA, 15 bp, Homo sapiens
ggccgcgtttccttt

SEQ ID NO: 1413912 - DNA, 15 bp, Homo sapiens
tggccgcgtttcctt

SEQ ID NO: 1413913 - DNA, 15 bp, Homo sapiens
ctggccgcgtttcct

SEQ ID NO: 1413914 - DNA, 15 bp, Homo sapiens
cctggccgcgtttcc

SEQ ID NO: 1413915 - DNA, 15 bp, Homo sapiens
ccctggccgcgtttc

SEQ ID NO: 1413916 - DNA, 15 bp, Homo sapiens
gccctggccgcgttt

SEQ ID NO: 1413917 - DNA, 15 bp, Homo sapiens
tgccctggccgcgtt

SEQ ID NO: 1413918 - DNA, 15 bp, Homo sapiens
ttgccctggccgcgt

SEQ ID NO: 1413919 - DNA, 15 bp, Homo sapiens
tttgccctggccgcg

SEQ ID NO: 1413920 - DNA, 15 bp, Homo sapiens
ttttgccctggccgc

SEQ ID NO: 1413921 - DNA, 15 bp, Homo sapiens
gttttgccctggccg

SEQ ID NO: 1413922 - DNA, 15 bp, Homo sapiens
tgttttgccctggcc

SEQ ID NO: 1413923 - DNA, 15 bp, Homo sapiens
atgttttgccctggc

SEQ ID NO: 1413924 - DNA, 15 bp, Homo sapiens
aatgttttgccctgg

SEQ ID NO: 1413925 - DNA, 15 bp, Homo sapiens
aaatgttttgccctg

SEQ ID NO: 1413926 - DNA, 15 bp, Homo sapiens
gaaatgttttgccct

SEQ ID NO: 1413927 - DNA, 15 bp, Homo sapiens
ggaaatgttttgccc

SEQ ID NO: 1413928 - DNA, 15 bp, Homo sapiens
aggaaatgttttgcc

SEQ ID NO: 1413929 - DNA, 15 bp, Homo sapiens
gaggaaatgttttgc

SEQ ID NO: 1413930 - DNA, 15 bp, Homo sapiens
agaggaaatgttttg

SEQ ID NO: 1413931 - DNA, 15 bp, Homo sapiens
aagaggaaatgtttt

SEQ ID NO: 1413932 - DNA, 15 bp, Homo sapiens
gaagaggaaatgttt

SEQ ID NO: 1413933 - DNA, 15 bp, Homo sapiens
agaagaggaaatgtt

SEQ ID NO: 1413934 - DNA, 15 bp, Homo sapiens
aagaagaggaaatgt

SEQ ID NO: 1413935 - DNA, 15 bp, Homo sapiens
taagaagaggaaatg

SEQ ID NO: 1413936 - DNA, 15 bp, Homo sapiens
ataagaagaggaaat

SEQ ID NO: 1413937 - DNA, 15 bp, Homo sapiens
tataagaagaggaaa

SEQ ID NO: 1413938 - DNA, 15 bp, Homo sapiens
ttataagaagaggaa

SEQ ID NO: 1413939 - DNA, 15 bp, Homo sapiens
tttataagaagagga

SEQ ID NO: 1413940 - DNA, 15 bp, Homo sapiens
gtttataagaagagg

SEQ ID NO: 1413941 - DNA, 15 bp, Homo sapiens
ggtttataagaagag

SEQ ID NO: 1413942 - DNA, 15 bp, Homo sapiens
aggtttataagaaga

SEQ ID NO: 1413943 - DNA, 15 bp, Homo sapiens
aaggtttataagaag

SEQ ID NO: 1413944 - DNA, 15 bp, Homo sapiens
caaggtttataagaa

SEQ ID NO: 1413945 - DNA, 15 bp, Homo sapiens
tcaaggtttataaga

SEQ ID NO: 1413946 - DNA, 15 bp, Homo sapiens
ttcaaggtttataag

SEQ ID NO: 1413947 - DNA, 15 bp, Homo sapiens
gttcaaggtttataa

SEQ ID NO: 1413948 - DNA, 15 bp, Homo sapiens
agttcaaggtttata

SEQ ID NO: 1413949 - DNA, 15 bp, Homo sapiens
cagttcaaggtttat

SEQ ID NO: 1413950 - DNA, 15 bp, Homo sapiens
tcagttcaaggttta

SEQ ID NO: 1413951 - DNA, 15 bp, Homo sapiens
ctcagttcaaggttt

SEQ ID NO: 1413952 - DNA, 15 bp, Homo sapiens
actcagttcaaggtt

SEQ ID NO: 1413953 - DNA, 15 bp, Homo sapiens
tactcagttcaaggt

SEQ ID NO: 1413954 - DNA, 15 bp, Homo sapiens
gtactcagttcaagg

SEQ ID NO: 1413955 - DNA, 15 bp, Homo sapiens
cgtactcagttcaag

SEQ ID NO: 1413956 - DNA, 15 bp, Homo sapiens
acgtactcagttcaa

SEQ ID NO: 1413957 - DNA, 15 bp, Homo sapiens
gacgtactcagttca

SEQ ID NO: 1413958 - DNA, 15 bp, Homo sapiens
ggacgtactcagttc

SEQ ID NO: 1413959 - DNA, 15 bp, Homo sapiens
gggacgtactcagtt

SEQ ID NO: 1413960 - DNA, 15 bp, Homo sapiens
agggacgtactcagt

SEQ ID NO: 1413961 - DNA, 15 bp, Homo sapiens
gagggacgtactcag

SEQ ID NO: 1413962 - DNA, 15 bp, Homo sapiens
tgagggacgtactca

SEQ ID NO: 1413963 - DNA, 15 bp, Homo sapiens
gtgagggacgtactc

SEQ ID NO: 1413964 - DNA, 15 bp, Homo sapiens
ggtgagggacgtact

SEQ ID NO: 1413965 - DNA, 15 bp, Homo sapiens
tggtgagggacgtac

SEQ ID NO: 1413966 - DNA, 15 bp, Homo sapiens
ttggtgagggacgta

SEQ ID NO: 1413967 - DNA, 15 bp, Homo sapiens
attggtgagggacgt

SEQ ID NO: 1413968 - DNA, 15 bp, Homo sapiens
aattggtgagggacg

SEQ ID NO: 1413969 - DNA, 15 bp, Homo sapiens
taattggtgagggac

SEQ ID NO: 1413970 - DNA, 15 bp, Homo sapiens
ataattggtgaggga

SEQ ID NO: 1413971 - DNA, 15 bp, Homo sapiens
tataattggtgaggg

SEQ ID NO: 1413972 - DNA, 15 bp, Homo sapiens
ctataattggtgagg

SEQ ID NO: 1413973 - DNA, 15 bp, Homo sapiens
tctataattggtgag

SEQ ID NO: 1413974 - DNA, 15 bp, Homo sapiens
ctctataattggtga

SEQ ID NO: 1413975 - DNA, 15 bp, Homo sapiens
cctctataattggtg

SEQ ID NO: 1413976 - DNA, 15 bp, Homo sapiens
ccctctataattggt

SEQ ID NO: 1413977 - DNA, 15 bp, Homo sapiens
accctctataattgg

SEQ ID NO: 1413978 - DNA, 15 bp, Homo sapiens
gaccctctataattg

SEQ ID NO: 1413979 - DNA, 15 bp, Homo sapiens
ggaccctctataatt

SEQ ID NO: 1413980 - DNA, 15 bp, Homo sapiens
gggaccctctataat

SEQ ID NO: 1413981 - DNA, 15 bp, Homo sapiens
ggggaccctctataa

SEQ ID NO: 1413982 - DNA, 15 bp, Homo sapiens
aggggaccctctata

SEQ ID NO: 1413983 - DNA, 15 bp, Homo sapiens
aaggggaccctctat

SEQ ID NO: 1413984 - DNA, 15 bp, Homo sapiens
caaggggaccctcta

SEQ ID NO: 1413985 - DNA, 15 bp, Homo sapiens
ccaaggggaccctct

SEQ ID NO: 1413986 - DNA, 15 bp, Homo sapiens
cccaaggggaccctc

SEQ ID NO: 1413987 - DNA, 15 bp, Homo sapiens
gcccaaggggaccct

SEQ ID NO: 1413988 - DNA, 15 bp, Homo sapiens
ggcccaaggggaccc

SEQ ID NO: 1413989 - DNA, 15 bp, Homo sapiens
aggcccaaggggacc

SEQ ID NO: 1413990 - DNA, 15 bp, Homo sapiens
gaggcccaaggggac

SEQ ID NO: 1413991 - DNA, 15 bp, Homo sapiens
tgaggcccaagggga

SEQ ID NO: 1413992 - DNA, 15 bp, Homo sapiens
ctgaggcccaagggg

SEQ ID NO: 1413993 - DNA, 15 bp, Homo sapiens
tctgaggcccaaggg

SEQ ID NO: 1413994 - DNA, 15 bp, Homo sapiens
ttctgaggcccaagg

SEQ ID NO: 1413995 - DNA, 15 bp, Homo sapiens
gttctgaggcccaag

SEQ ID NO: 1413996 - DNA, 15 bp, Homo sapiens
agttctgaggcccaa

SEQ ID NO: 1413997 - DNA, 15 bp, Homo sapiens
aagttctgaggccca

SEQ ID NO: 1413998 - DNA, 15 bp, Homo sapiens
aaagttctgaggccc

SEQ ID NO: 1413999 - DNA, 15 bp, Homo sapiens
gaaagttctgaggcc

SEQ ID NO: 1414000 - DNA, 15 bp, Homo sapiens
ggaaagttctgaggc

SEQ ID NO: 1414001 - DNA, 15 bp, Homo sapiens
tggaaagttctgagg

SEQ ID NO: 1414002 - DNA, 15 bp, Homo sapiens
gtggaaagttctgag

SEQ ID NO: 1414003 - DNA, 15 bp, Homo sapiens
tgtggaaagttctga

SEQ ID NO: 1414004 - DNA, 15 bp, Homo sapiens
ttgtggaaagttctg

SEQ ID NO: 1414005 - DNA, 15 bp, Homo sapiens
cttgtggaaagttct

SEQ ID NO: 1414006 - DNA, 15 bp, Homo sapiens
gcttgtggaaagttc

SEQ ID NO: 1414007 - DNA, 15 bp, Homo sapiens
cgcttgtggaaagtt

SEQ ID NO: 1414008 - DNA, 15 bp, Homo sapiens
acgcttgtggaaagt

SEQ ID NO: 1414009 - DNA, 15 bp, Homo sapiens
aacgcttgtggaaag

SEQ ID NO: 1414010 - DNA, 15 bp, Homo sapiens
caacgcttgtggaaa

SEQ ID NO: 1414011 - DNA, 15 bp, Homo sapiens
tcaacgcttgtggaa

SEQ ID NO: 1414012 - DNA, 15 bp, Homo sapiens
ctcaacgcttgtgga

SEQ ID NO: 1414013 - DNA, 15 bp, Homo sapiens
cctcaacgcttgtgg

SEQ ID NO: 1414014 - DNA, 15 bp, Homo sapiens
acctcaacgcttgtg

SEQ ID NO: 1414015 - DNA, 15 bp, Homo sapiens
gacctcaacgcttgt

SEQ ID NO: 1414016 - DNA, 15 bp, Homo sapiens
agacctcaacgcttg

SEQ ID NO: 1414017 - DNA, 15 bp, Homo sapiens
gagacctcaacgctt

SEQ ID NO: 1414018 - DNA, 15 bp, Homo sapiens
agagacctcaacgct

SEQ ID NO: 1414019 - DNA, 15 bp, Homo sapiens
tagagacctcaacgc

SEQ ID NO: 1414020 - DNA, 15 bp, Homo sapiens
atagagacctcaacg

SEQ ID NO: 1414021 - DNA, 15 bp, Homo sapiens
catagagacctcaac

SEQ ID NO: 1414022 - DNA, 15 bp, Homo sapiens
ccatagagacctcaa

SEQ ID NO: 1414023 - DNA, 15 bp, Homo sapiens
gccatagagacctca

SEQ ID NO: 1414024 - DNA, 15 bp, Homo sapiens
cgccatagagacctc

SEQ ID NO: 1414025 - DNA, 15 bp, Homo sapiens
tcgccatagagacct

SEQ ID NO: 1414026 - DNA, 15 bp, Homo sapiens
atcgccatagagacc

SEQ ID NO: 1414027 - DNA, 15 bp, Homo sapiens
catcgccatagagac

SEQ ID NO: 1414028 - DNA, 15 bp, Homo sapiens
gcatcgccatagaga

SEQ ID NO: 1414029 - DNA, 15 bp, Homo sapiens
agcatcgccatagag

SEQ ID NO: 1414030 - DNA, 15 bp, Homo sapiens
gagcatcgccataga

SEQ ID NO: 1414031 - DNA, 15 bp, Homo sapiens
ggagcatcgccatag

SEQ ID NO: 1414032 - DNA, 15 bp, Homo sapiens
gggagcatcgccata

SEQ ID NO: 1414033 - DNA, 15 bp, Homo sapiens
cgggagcatcgccat

SEQ ID NO: 1414034 - DNA, 15 bp, Homo sapiens
ccgggagcatcgcca

SEQ ID NO: 1414035 - DNA, 15 bp, Homo sapiens
gccgggagcatcgcc

SEQ ID NO: 1414036 - DNA, 15 bp, Homo sapiens
agccgggagcatcgc

SEQ ID NO: 1414037 - DNA, 15 bp, Homo sapiens
cagccgggagcatcg

SEQ ID NO: 1414038 - DNA, 15 bp, Homo sapiens
gcagccgggagcatc

SEQ ID NO: 1414039 - DNA, 15 bp, Homo sapiens
ggcagccgggagcat

SEQ ID NO: 1414040 - DNA, 15 bp, Homo sapiens
cggcagccgggagca

SEQ ID NO: 1414041 - DNA, 15 bp, Homo sapiens
tcggcagccgggagc

SEQ ID NO: 1414042 - DNA, 15 bp, Homo sapiens
ctcggcagccgggag

SEQ ID NO: 1414043 - DNA, 15 bp, Homo sapiens
cctcggcagccggga

SEQ ID NO: 1414044 - DNA, 15 bp, Homo sapiens
gcctcggcagccggg

SEQ ID NO: 1414045 - DNA, 15 bp, Homo sapiens
cgcctcggcagccgg

SEQ ID NO: 1414046 - DNA, 15 bp, Homo sapiens
ccgcctcggcagccg

SEQ ID NO: 1414047 - DNA, 15 bp, Homo sapiens
tccgcctcggcagcc

SEQ ID NO: 1414048 - DNA, 15 bp, Homo sapiens
ttccgcctcggcagc

SEQ ID NO: 1414049 - DNA, 15 bp, Homo sapiens
tttccgcctcggcag

SEQ ID NO: 1414050 - DNA, 15 bp, Homo sapiens
gtttccgcctcggca

SEQ ID NO: 1414051 - DNA, 15 bp, Homo sapiens
tgtttccgcctcggc

SEQ ID NO: 1414052 - DNA, 15 bp, Homo sapiens
gtgtttccgcctcgg

SEQ ID NO: 1414053 - DNA, 15 bp, Homo sapiens
tgtgtttccgcctcg

SEQ ID NO: 1414054 - DNA, 15 bp, Homo sapiens
ctgtgtttccgcctc

SEQ ID NO: 1414055 - DNA, 15 bp, Homo sapiens
cctgtgtttccgcct

SEQ ID NO: 1414056 - DNA, 15 bp, Homo sapiens
acctgtgtttccgcc

SEQ ID NO: 1414057 - DNA, 15 bp, Homo sapiens
cacctgtgtttccgc

SEQ ID NO: 1414058 - DNA, 15 bp, Homo sapiens
tcacctgtgtttccg

SEQ ID NO: 1414059 - DNA, 15 bp, Homo sapiens
atcacctgtgtttcc

SEQ ID NO: 1414060 - DNA, 15 bp, Homo sapiens
catcacctgtgtttc

SEQ ID NO: 1414061 - DNA, 15 bp, Homo sapiens
tcatcacctgtgttt

SEQ ID NO: 1414062 - DNA, 15 bp, Homo sapiens
ctcatcacctgtgtt

SEQ ID NO: 1414063 - DNA, 15 bp, Homo sapiens
cctcatcacctgtgt

SEQ ID NO: 1414064 - DNA, 15 bp, Homo sapiens
acctcatcacctgtg

SEQ ID NO: 1414065 - DNA, 15 bp, Homo sapiens
cacctcatcacctgt

SEQ ID NO: 1414066 - DNA, 15 bp, Homo sapiens
ccacctcatcacctg

SEQ ID NO: 1414067 - DNA, 15 bp, Homo sapiens
gccacctcatcacct

SEQ ID NO: 1414068 - DNA, 15 bp, Homo sapiens
cgccacctcatcacc

SEQ ID NO: 1414069 - DNA, 15 bp, Homo sapiens
ccgccacctcatcac

SEQ ID NO: 1414070 - DNA, 15 bp, Homo sapiens
gccgccacctcatca

SEQ ID NO: 1414071 - DNA, 15 bp, Homo sapiens
tgccgccacctcatc

SEQ ID NO: 1414072 - DNA, 15 bp, Homo sapiens
ttgccgccacctcat

SEQ ID NO: 1414073 - DNA, 15 bp, Homo sapiens
cttgccgccacctca

SEQ ID NO: 1414074 - DNA, 15 bp, Homo sapiens
gcttgccgccacctc

SEQ ID NO: 1414075 - DNA, 15 bp, Homo sapiens
tgcttgccgccacct

SEQ ID NO: 1414076 - DNA, 15 bp, Homo sapiens
gtgcttgccgccacc

SEQ ID NO: 1414077 - DNA, 15 bp, Homo sapiens
tgtgcttgccgccac

SEQ ID NO: 1414078 - DNA, 15 bp, Homo sapiens
ctgtgcttgccgcca

SEQ ID NO: 1414079 - DNA, 15 bp, Homo sapiens
actgtgcttgccgcc

SEQ ID NO: 1414080 - DNA, 15 bp, Homo sapiens
cactgtgcttgccgc

SEQ ID NO: 1414081 - DNA, 15 bp, Homo sapiens
gcactgtgcttgccg

SEQ ID NO: 1414082 - DNA, 15 bp, Homo sapiens
tgcactgtgcttgcc

SEQ ID NO: 1414083 - DNA, 15 bp, Homo sapiens
ttgcactgtgcttgc

SEQ ID NO: 1414084 - DNA, 15 bp, Homo sapiens
tttgcactgtgcttg

SEQ ID NO: 1414085 - DNA, 15 bp, Homo sapiens
ctttgcactgtgctt

SEQ ID NO: 1414086 - DNA, 15 bp, Homo sapiens
tctttgcactgtgct

SEQ ID NO: 1414087 - DNA, 15 bp, Homo sapiens
ctctttgcactgtgc

SEQ ID NO: 1414088 - DNA, 15 bp, Homo sapiens
tctctttgcactgtg

SEQ ID NO: 1414089 - DNA, 15 bp, Homo sapiens
ctctctttgcactgt

SEQ ID NO: 1414090 - DNA, 15 bp, Homo sapiens
tctctctttgcactg

SEQ ID NO: 1414091 - DNA, 15 bp, Homo sapiens
ctctctctttgcact

SEQ ID NO: 1414092 - DNA, 15 bp, Homo sapiens
tctctctctttgcac

SEQ ID NO: 1414093 - DNA, 15 bp, Homo sapiens
ttctctctctttgca

SEQ ID NO: 1414094 - DNA, 15 bp, Homo sapiens
cttctctctctttgc

SEQ ID NO: 1414095 - DNA, 15 bp, Homo sapiens
gcttctctctctttg

SEQ ID NO: 1414096 - DNA, 15 bp, Homo sapiens
tgcttctctctcttt

SEQ ID NO: 1414097 - DNA, 15 bp, Homo sapiens
ctgcttctctctctt

SEQ ID NO: 1414098 - DNA, 15 bp, Homo sapiens
gctgcttctctctct

SEQ ID NO: 1414099 - DNA, 15 bp, Homo sapiens
agctgcttctctctc

SEQ ID NO: 1414100 - DNA, 15 bp, Homo sapiens
aagctgcttctctct

SEQ ID NO: 1414101 - DNA, 15 bp, Homo sapiens
gaagctgcttctctc

SEQ ID NO: 1414102 - DNA, 15 bp, Homo sapiens
cgaagctgcttctct

SEQ ID NO: 1414103 - DNA, 15 bp, Homo sapiens
ccgaagctgcttctc

SEQ ID NO: 1414104 - DNA, 15 bp, Homo sapiens
gccgaagctgcttct

SEQ ID NO: 1414105 - DNA, 15 bp, Homo sapiens
agccgaagctgcttc

SEQ ID NO: 1414106 - DNA, 15 bp, Homo sapiens
cagccgaagctgctt

SEQ ID NO: 1414107 - DNA, 15 bp, Homo sapiens
gcagccgaagctgct

SEQ ID NO: 1414108 - DNA, 15 bp, Homo sapiens
tgcagccgaagctgc

SEQ ID NO: 1414109 - DNA, 15 bp, Homo sapiens
ctgcagccgaagctg

SEQ ID NO: 1414110 - DNA, 15 bp, Homo sapiens
gctgcagccgaagct

SEQ ID NO: 1414111 - DNA, 15 bp, Homo sapiens
tgctgcagccgaagc

SEQ ID NO: 1414112 - DNA, 15 bp, Homo sapiens
ttgctgcagccgaag

SEQ ID NO: 1414113 - DNA, 15 bp, Homo sapiens
tttgctgcagccgaa

SEQ ID NO: 1414114 - DNA, 15 bp, Homo sapiens
gtttgctgcagccga

SEQ ID NO: 1414115 - DNA, 15 bp, Homo sapiens
ggtttgctgcagccg

SEQ ID NO: 1414116 - DNA, 15 bp, Homo sapiens
tggtttgctgcagcc

SEQ ID NO: 1414117 - DNA, 15 bp, Homo sapiens
gtggtttgctgcagc

SEQ ID NO: 1414118 - DNA, 15 bp, Homo sapiens
cgtggtttgctgcag

SEQ ID NO: 1414119 - DNA, 15 bp, Homo sapiens
gcgtggtttgctgca

SEQ ID NO: 1414120 - DNA, 15 bp, Homo sapiens
tgcgtggtttgctgc

SEQ ID NO: 1414121 - DNA, 15 bp, Homo sapiens
ctgcgtggtttgctg

SEQ ID NO: 1414122 - DNA, 15 bp, Homo sapiens
cctgcgtggtttgct

SEQ ID NO: 1414123 - DNA, 15 bp, Homo sapiens
acctgcgtggtttgc

SEQ ID NO: 1414124 - DNA, 15 bp, Homo sapiens
gacctgcgtggtttg

SEQ ID NO: 1414125 - DNA, 15 bp, Homo sapiens
ggacctgcgtggttt

SEQ ID NO: 1414126 - DNA, 15 bp, Homo sapiens
aggacctgcgtggtt

SEQ ID NO: 1414127 - DNA, 15 bp, Homo sapiens
aaggacctgcgtggt

SEQ ID NO: 1414128 - DNA, 15 bp, Homo sapiens
gaaggacctgcgtgg

SEQ ID NO: 1414129 - DNA, 15 bp, Homo sapiens
agaaggacctgcgtg

SEQ ID NO: 1414130 - DNA, 15 bp, Homo sapiens
aagaaggacctgcgt

SEQ ID NO: 1414131 - DNA, 15 bp, Homo sapiens
caagaaggacctgcg

SEQ ID NO: 1414132 - DNA, 15 bp, Homo sapiens
tcaagaaggacctgc

SEQ ID NO: 1414133 - DNA, 15 bp, Homo sapiens
atcaagaaggacctg

SEQ ID NO: 1414134 - DNA, 15 bp, Homo sapiens
gatcaagaaggacct

SEQ ID NO: 1414135 - DNA, 15 bp, Homo sapiens
tgatcaagaaggacc

SEQ ID NO: 1414136 - DNA, 15 bp, Homo sapiens
atgatcaagaaggac

SEQ ID NO: 1414137 - DNA, 15 bp, Homo sapiens
gatgatcaagaagga

SEQ ID NO: 1414138 - DNA, 15 bp, Homo sapiens
agatgatcaagaagg

SEQ ID NO: 1414139 - DNA, 15 bp, Homo sapiens
tagatgatcaagaag

SEQ ID NO: 1414140 - DNA, 15 bp, Homo sapiens
ctagatgatcaagaa

SEQ ID NO: 1414141 - DNA, 15 bp, Homo sapiens
tctagatgatcaaga

SEQ ID NO: 1414142 - DNA, 15 bp, Homo sapiens
ttctagatgatcaag

SEQ ID NO: 1414143 - DNA, 15 bp, Homo sapiens
gttctagatgatcaa

SEQ ID NO: 1414144 - DNA, 15 bp, Homo sapiens
agttctagatgatca

SEQ ID NO: 1414145 - DNA, 15 bp, Homo sapiens
cagttctagatgatc

SEQ ID NO: 1414146 - DNA, 15 bp, Homo sapiens
tcagttctagatgat

SEQ ID NO: 1414147 - DNA, 15 bp, Homo sapiens
gtcagttctagatga

SEQ ID NO: 1414148 - DNA, 15 bp, Homo sapiens
ggtcagttctagatg

SEQ ID NO: 1414149 - DNA, 15 bp, Homo sapiens
cggtcagttctagat

SEQ ID NO: 1414150 - DNA, 15 bp, Homo sapiens
gcggtcagttctaga

SEQ ID NO: 1414151 - DNA, 15 bp, Homo sapiens
agcggtcagttctag

SEQ ID NO: 1414152 - DNA, 15 bp, Homo sapiens
gagcggtcagttcta

SEQ ID NO: 1414153 - DNA, 15 bp, Homo sapiens
ggagcggtcagttct

SEQ ID NO: 1414154 - DNA, 15 bp, Homo sapiens
cggagcggtcagttc

SEQ ID NO: 1414155 - DNA, 15 bp, Homo sapiens
gcggagcggtcagtt

SEQ ID NO: 1414156 - DNA, 15 bp, Homo sapiens
ggcggagcggtcagt

SEQ ID NO: 1414157 - DNA, 15 bp, Homo sapiens
aggcggagcggtcag

SEQ ID NO: 1414158 - DNA, 15 bp, Homo sapiens
aaggcggagcggtca

SEQ ID NO: 1414159 - DNA, 15 bp, Homo sapiens
caaggcggagcggtc

SEQ ID NO: 1414160 - DNA, 15 bp, Homo sapiens
gcaaggcggagcggt

SEQ ID NO: 1414161 - DNA, 15 bp, Homo sapiens
ggcaaggcggagcgg

SEQ ID NO: 1414162 - DNA, 15 bp, Homo sapiens
tggcaaggcggagcg

SEQ ID NO: 1414163 - DNA, 15 bp, Homo sapiens
ctggcaaggcggagc

SEQ ID NO: 1414164 - DNA, 15 bp, Homo sapiens
cctggcaaggcggag

SEQ ID NO: 1414165 - DNA, 15 bp, Homo sapiens
tcctggcaaggcgga

SEQ ID NO: 1414166 - DNA, 15 bp, Homo sapiens
ctcctggcaaggcgg

SEQ ID NO: 1414167 - DNA, 15 bp, Homo sapiens
actcctggcaaggcg

SEQ ID NO: 1414168 - DNA, 15 bp, Homo sapiens
gactcctggcaaggc

SEQ ID NO: 1414169 - DNA, 15 bp, Homo sapiens
agactcctggcaagg

SEQ ID NO: 1414170 - DNA, 15 bp, Homo sapiens
cagactcctggcaag

SEQ ID NO: 1414171 - DNA, 15 bp, Homo sapiens
gcagactcctggcaa

SEQ ID NO: 1414172 - DNA, 15 bp, Homo sapiens
tgcagactcctggca

SEQ ID NO: 1414173 - DNA, 15 bp, Homo sapiens
ctgcagactcctggc

SEQ ID NO: 1414174 - DNA, 15 bp, Homo sapiens
tctgcagactcctgg

SEQ ID NO: 1414175 - DNA, 15 bp, Homo sapiens
ttctgcagactcctg

SEQ ID NO: 1414176 - DNA, 15 bp, Homo sapiens
gttctgcagactcct

SEQ ID NO: 1414177 - DNA, 15 bp, Homo sapiens
ggttctgcagactcc

SEQ ID NO: 1414178 - DNA, 15 bp, Homo sapiens
tggttctgcagactc

SEQ ID NO: 1414179 - DNA, 15 bp, Homo sapiens
gtggttctgcagact

SEQ ID NO: 1414180 - DNA, 15 bp, Homo sapiens
cgtggttctgcagac

SEQ ID NO: 1414181 - DNA, 15 bp, Homo sapiens
acgtggttctgcaga

SEQ ID NO: 1414182 - DNA, 15 bp, Homo sapiens
cacgtggttctgcag

SEQ ID NO: 1414183 - DNA, 15 bp, Homo sapiens
ccacgtggttctgca

SEQ ID NO: 1414184 - DNA, 15 bp, Homo sapiens
gccacgtggttctgc

SEQ ID NO: 1414185 - DNA, 15 bp, Homo sapiens
agccacgtggttctg

SEQ ID NO: 1414186 - DNA, 15 bp, Homo sapiens
tagccacgtggttct

SEQ ID NO: 1414187 - DNA, 15 bp, Homo sapiens
ctagccacgtggttc

SEQ ID NO: 1414188 - DNA, 15 bp, Homo sapiens
gctagccacgtggtt

SEQ ID NO: 1414189 - DNA, 15 bp, Homo sapiens
ggctagccacgtggt

SEQ ID NO: 1414190 - DNA, 15 bp, Homo sapiens
aggctagccacgtgg

SEQ ID NO: 1414191 - DNA, 15 bp, Homo sapiens
caggctagccacgtg

SEQ ID NO: 1414192 - DNA, 15 bp, Homo sapiens
gcaggctagccacgt

SEQ ID NO: 1414193 - DNA, 15 bp, Homo sapiens
ggcaggctagccacg

SEQ ID NO: 1414194 - DNA, 15 bp, Homo sapiens
aggcaggctagccac

SEQ ID NO: 1414195 - DNA, 15 bp, Homo sapiens
caggcaggctagcca

SEQ ID NO: 1414196 - DNA, 15 bp, Homo sapiens
tcaggcaggctagcc

SEQ ID NO: 1414197 - DNA, 15 bp, Homo sapiens
ttcaggcaggctagc

SEQ ID NO: 1414198 - DNA, 15 bp, Homo sapiens
cttcaggcaggctag

SEQ ID NO: 1414199 - DNA, 15 bp, Homo sapiens
acttcaggcaggcta

SEQ ID NO: 1414200 - DNA, 15 bp, Homo sapiens
aacttcaggcaggct

SEQ ID NO: 1414201 - DNA, 15 bp, Homo sapiens
gaacttcaggcaggc

SEQ ID NO: 1414202 - DNA, 15 bp, Homo sapiens
agaacttcaggcagg

SEQ ID NO: 1414203 - DNA, 15 bp, Homo sapiens
gagaacttcaggcag

SEQ ID NO: 1414204 - DNA, 15 bp, Homo sapiens
tgagaacttcaggca

SEQ ID NO: 1414205 - DNA, 15 bp, Homo sapiens
gtgagaacttcaggc

SEQ ID NO: 1414206 - DNA, 15 bp, Homo sapiens
ggtgagaacttcagg

SEQ ID NO: 1414207 - DNA, 15 bp, Homo sapiens
aggtgagaacttcag

SEQ ID NO: 1414208 - DNA, 15 bp, Homo sapiens
gaggtgagaacttca

SEQ ID NO: 1414209 - DNA, 15 bp, Homo sapiens
agaggtgagaacttc

SEQ ID NO: 1414210 - DNA, 15 bp, Homo sapiens
gagaggtgagaactt

SEQ ID NO: 1414211 - DNA, 15 bp, Homo sapiens
ggagaggtgagaact

SEQ ID NO: 1414212 - DNA, 15 bp, Homo sapiens
tggagaggtgagaac

SEQ ID NO: 1414213 - DNA, 15 bp, Homo sapiens
ctggagaggtgagaa

SEQ ID NO: 1414214 - DNA, 15 bp, Homo sapiens
cctggagaggtgaga

SEQ ID NO: 1414215 - DNA, 15 bp, Homo sapiens
tcctggagaggtgag

SEQ ID NO: 1414216 - DNA, 15 bp, Homo sapiens
ttcctggagaggtga

SEQ ID NO: 1414217 - DNA, 15 bp, Homo sapiens
cttcctggagaggtg

SEQ ID NO: 1414218 - DNA, 15 bp, Homo sapiens
ccttcctggagaggt

SEQ ID NO: 1414219 - DNA, 15 bp, Homo sapiens
gccttcctggagagg

SEQ ID NO: 1414220 - DNA, 15 bp, Homo sapiens
cgccttcctggagag

SEQ ID NO: 1414221 - DNA, 15 bp, Homo sapiens
ccgccttcctggaga

SEQ ID NO: 1414222 - DNA, 15 bp, Homo sapiens
cccgccttcctggag

SEQ ID NO: 1414223 - DNA, 15 bp, Homo sapiens
ccccgccttcctgga

SEQ ID NO: 1414224 - DNA, 15 bp, Homo sapiens
cccccgccttcctgg

SEQ ID NO: 1414225 - DNA, 15 bp, Homo sapiens
ccccccgccttcctg

SEQ ID NO: 1414226 - DNA, 15 bp, Homo sapiens
gccccccgccttcct

SEQ ID NO: 1414227 - DNA, 15 bp, Homo sapiens
agccccccgccttcc

SEQ ID NO: 1414228 - DNA, 15 bp, Homo sapiens
aagccccccgccttc

SEQ ID NO: 1414229 - DNA, 15 bp, Homo sapiens
gaagccccccgcctt

SEQ ID NO: 1414230 - DNA, 15 bp, Homo sapiens
agaagccccccgcct

SEQ ID NO: 1414231 - DNA, 15 bp, Homo sapiens
tagaagccccccgcc

SEQ ID NO: 1414232 - DNA, 15 bp, Homo sapiens
ttagaagccccccgc

SEQ ID NO: 1414233 - DNA, 15 bp, Homo sapiens
attagaagccccccg

SEQ ID NO: 1414234 - DNA, 15 bp, Homo sapiens
cattagaagcccccc

SEQ ID NO: 1414235 - DNA, 15 bp, Homo sapiens
ccattagaagccccc

SEQ ID NO: 1414236 - DNA, 15 bp, Homo sapiens
gccattagaagcccc

SEQ ID NO: 1414237 - DNA, 15 bp, Homo sapiens
agccattagaagccc

SEQ ID NO: 1414238 - DNA, 15 bp, Homo sapiens
cagccattagaagcc

SEQ ID NO: 1414239 - DNA, 15 bp, Homo sapiens
gcagccattagaagc

SEQ ID NO: 1414240 - DNA, 15 bp, Homo sapiens
tgcagccattagaag

SEQ ID NO: 1414241 - DNA, 15 bp, Homo sapiens
ctgcagccattagaa

SEQ ID NO: 1414242 - DNA, 15 bp, Homo sapiens
gctgcagccattaga

SEQ ID NO: 1414243 - DNA, 15 bp, Homo sapiens
agctgcagccattag

SEQ ID NO: 1414244 - DNA, 15 bp, Homo sapiens
cagctgcagccatta

SEQ ID NO: 1414245 - DNA, 15 bp, Homo sapiens
gcagctgcagccatt

SEQ ID NO: 1414246 - DNA, 15 bp, Homo sapiens
cgcagctgcagccat

SEQ ID NO: 1414247 - DNA, 15 bp, Homo sapiens
gcgcagctgcagcca

SEQ ID NO: 1414248 - DNA, 15 bp, Homo sapiens
agcgcagctgcagcc

SEQ ID NO: 1414249 - DNA, 15 bp, Homo sapiens
cagcgcagctgcagc

SEQ ID NO: 1414250 - DNA, 15 bp, Homo sapiens
ccagcgcagctgcag

SEQ ID NO: 1414251 - DNA, 15 bp, Homo sapiens
cccagcgcagctgca

SEQ ID NO: 1414252 - DNA, 15 bp, Homo sapiens
ccccagcgcagctgc

SEQ ID NO: 1414253 - DNA, 15 bp, Homo sapiens
cccccagcgcagctg

SEQ ID NO: 1414254 - DNA, 15 bp, Homo sapiens
gcccccagcgcagct

SEQ ID NO: 1414255 - DNA, 15 bp, Homo sapiens
agcccccagcgcagc

SEQ ID NO: 1414256 - DNA, 15 bp, Homo sapiens
cagcccccagcgcag

SEQ ID NO: 1414257 - DNA, 15 bp, Homo sapiens
ccagcccccagcgca

SEQ ID NO: 1414258 - DNA, 15 bp, Homo sapiens
cccagcccccagcgc

SEQ ID NO: 1414259 - DNA, 15 bp, Homo sapiens
ccccagcccccagcg

SEQ ID NO: 1414260 - DNA, 15 bp, Homo sapiens
cccccagcccccagc

SEQ ID NO: 1414261 - DNA, 15 bp, Homo sapiens
gcccccagcccccag

SEQ ID NO: 1414262 - DNA, 15 bp, Homo sapiens
agcccccagccccca

SEQ ID NO: 1414263 - DNA, 15 bp, Homo sapiens
gagcccccagccccc

SEQ ID NO: 1414264 - DNA, 15 bp, Homo sapiens
ggagcccccagcccc

SEQ ID NO: 1414265 - DNA, 15 bp, Homo sapiens
gggagcccccagccc

SEQ ID NO: 1414266 - DNA, 15 bp, Homo sapiens
cgggagcccccagcc

SEQ ID NO: 1414267 - DNA, 15 bp, Homo sapiens
gcgggagcccccagc

SEQ ID NO: 1414268 - DNA, 15 bp, Homo sapiens
agcgggagcccccag

SEQ ID NO: 1414269 - DNA, 15 bp, Homo sapiens
cagcgggagccccca

SEQ ID NO: 1414270 - DNA, 15 bp, Homo sapiens
ccagcgggagccccc

SEQ ID NO: 1414271 - DNA, 15 bp, Homo sapiens
cccagcgggagcccc

SEQ ID NO: 1414272 - DNA, 15 bp, Homo sapiens
tcccagcgggagccc

SEQ ID NO: 1414273 - DNA, 15 bp, Homo sapiens
gtcccagcgggagcc

SEQ ID NO: 1414274 - DNA, 15 bp, Homo sapiens
agtcccagcgggagc

SEQ ID NO: 1414275 - DNA, 15 bp, Homo sapiens
gagtcccagcgggag

SEQ ID NO: 1414276 - DNA, 15 bp, Homo sapiens
ggagtcccagcggga

SEQ ID NO: 1414277 - DNA, 15 bp, Homo sapiens
tggagtcccagcggg

SEQ ID NO: 1414278 - DNA, 15 bp, Homo sapiens
gtggagtcccagcgg

SEQ ID NO: 1414279 - DNA, 15 bp, Homo sapiens
agtggagtcccagcg

SEQ ID NO: 1414280 - DNA, 15 bp, Homo sapiens
aagtggagtcccagc

SEQ ID NO: 1414281 - DNA, 15 bp, Homo sapiens
gaagtggagtcccag

SEQ ID NO: 1414282 - DNA, 15 bp, Homo sapiens
ggaagtggagtccca

SEQ ID NO: 1414283 - DNA, 15 bp, Homo sapiens
cggaagtggagtccc

SEQ ID NO: 1414284 - DNA, 15 bp, Homo sapiens
acggaagtggagtcc

SEQ ID NO: 1414285 - DNA, 15 bp, Homo sapiens
cacggaagtggagtc

SEQ ID NO: 1414286 - DNA, 15 bp, Homo sapiens
ccacggaagtggagt

SEQ ID NO: 1414287 - DNA, 15 bp, Homo sapiens
tccacggaagtggag

SEQ ID NO: 1414288 - DNA, 15 bp, Homo sapiens
atccacggaagtgga

SEQ ID NO: 1414289 - DNA, 15 bp, Homo sapiens
catccacggaagtgg

SEQ ID NO: 1414290 - DNA, 15 bp, Homo sapiens
acatccacggaagtg

SEQ ID NO: 1414291 - DNA, 15 bp, Homo sapiens
gacatccacggaagt

SEQ ID NO: 1414292 - DNA, 15 bp, Homo sapiens
agacatccacggaag

SEQ ID NO: 1414293 - DNA, 15 bp, Homo sapiens
tagacatccacggaa

SEQ ID NO: 1414294 - DNA, 15 bp, Homo sapiens
ttagacatccacgga

SEQ ID NO: 1414295 - DNA, 15 bp, Homo sapiens
cttagacatccacgg

SEQ ID NO: 1414296 - DNA, 15 bp, Homo sapiens
gcttagacatccacg

SEQ ID NO: 1414297 - DNA, 15 bp, Homo sapiens
agcttagacatccac

SEQ ID NO: 1414298 - DNA, 15 bp, Homo sapiens
aagcttagacatcca

SEQ ID NO: 1414299 - DNA, 15 bp, Homo sapiens
gaagcttagacatcc

SEQ ID NO: 1414300 - DNA, 15 bp, Homo sapiens
tgaagcttagacatc

SEQ ID NO: 1414301 - DNA, 15 bp, Homo sapiens
gtgaagcttagacat

SEQ ID NO: 1414302 - DNA, 15 bp, Homo sapiens
ggtgaagcttagaca

SEQ ID NO: 1414303 - DNA, 15 bp, Homo sapiens
aggtgaagcttagac

SEQ ID NO: 1414304 - DNA, 15 bp, Homo sapiens
aaggtgaagcttaga

SEQ ID NO: 1414305 - DNA, 15 bp, Homo sapiens
aaaggtgaagcttag

SEQ ID NO: 1414306 - DNA, 15 bp, Homo sapiens
gaaaggtgaagctta

SEQ ID NO: 1414307 - DNA, 15 bp, Homo sapiens
agaaaggtgaagctt

SEQ ID NO: 1414308 - DNA, 15 bp, Homo sapiens
aagaaaggtgaagct

SEQ ID NO: 1414309 - DNA, 15 bp, Homo sapiens
caagaaaggtgaagc

SEQ ID NO: 1414310 - DNA, 15 bp, Homo sapiens
gcaagaaaggtgaag

SEQ ID NO: 1414311 - DNA, 15 bp, Homo sapiens
cgcaagaaaggtgaa

SEQ ID NO: 1414312 - DNA, 15 bp, Homo sapiens
gcgcaagaaaggtga

SEQ ID NO: 1414313 - DNA, 15 bp, Homo sapiens
ggcgcaagaaaggtg

SEQ ID NO: 1414314 - DNA, 15 bp, Homo sapiens
gggcgcaagaaaggt

SEQ ID NO: 1414315 - DNA, 15 bp, Homo sapiens
cgggcgcaagaaagg

SEQ ID NO: 1414316 - DNA, 15 bp, Homo sapiens
gcgggcgcaagaaag

SEQ ID NO: 1414317 - DNA, 15 bp, Homo sapiens
tgcgggcgcaagaaa

SEQ ID NO: 1414318 - DNA, 15 bp, Homo sapiens
ctgcgggcgcaagaa

SEQ ID NO: 1414319 - DNA, 15 bp, Homo sapiens
cctgcgggcgcaaga

SEQ ID NO: 1414320 - DNA, 15 bp, Homo sapiens
ccctgcgggcgcaag

SEQ ID NO: 1414321 - DNA, 15 bp, Homo sapiens
cccctgcgggcgcaa

SEQ ID NO: 1414322 - DNA, 15 bp, Homo sapiens
gcccctgcgggcgca

SEQ ID NO: 1414323 - DNA, 15 bp, Homo sapiens
tgcccctgcgggcgc

SEQ ID NO: 1414324 - DNA, 15 bp, Homo sapiens
atgcccctgcgggcg

SEQ ID NO: 1414325 - DNA, 15 bp, Homo sapiens
catgcccctgcgggc

SEQ ID NO: 1414326 - DNA, 15 bp, Homo sapiens
tcatgcccctgcggg

SEQ ID NO: 1414327 - DNA, 15 bp, Homo sapiens
gtcatgcccctgcgg

SEQ ID NO: 1414328 - DNA, 15 bp, Homo sapiens
agtcatgcccctgcg

SEQ ID NO: 1414329 - DNA, 15 bp, Homo sapiens
gagtcatgcccctgc

SEQ ID NO: 1414330 - DNA, 15 bp, Homo sapiens
tgagtcatgcccctg

SEQ ID NO: 1414331 - DNA, 15 bp, Homo sapiens
ctgagtcatgcccct

SEQ ID NO: 1414332 - DNA, 15 bp, Homo sapiens
cctgagtcatgcccc

SEQ ID NO: 1414333 - DNA, 15 bp, Homo sapiens
acctgagtcatgccc

SEQ ID NO: 1414334 - DNA, 15 bp, Homo sapiens
cacctgagtcatgcc

SEQ ID NO: 1414335 - DNA, 15 bp, Homo sapiens
tcacctgagtcatgc

SEQ ID NO: 1414336 - DNA, 15 bp, Homo sapiens
ttcacctgagtcatg

SEQ ID NO: 1414337 - DNA, 15 bp, Homo sapiens
tttcacctgagtcat

SEQ ID NO: 1414338 - DNA, 15 bp, Homo sapiens
ctttcacctgagtca

SEQ ID NO: 1414339 - DNA, 15 bp, Homo sapiens
cctttcacctgagtc

SEQ ID NO: 1414340 - DNA, 15 bp, Homo sapiens
ccctttcacctgagt

SEQ ID NO: 1414341 - DNA, 15 bp, Homo sapiens
tccctttcacctgag

SEQ ID NO: 1414342 - DNA, 15 bp, Homo sapiens
ctccctttcacctga

SEQ ID NO: 1414343 - DNA, 15 bp, Homo sapiens
gctccctttcacctg

SEQ ID NO: 1414344 - DNA, 15 bp, Homo sapiens
ggctccctttcacct

SEQ ID NO: 1414345 - DNA, 15 bp, Homo sapiens
tggctccctttcacc

SEQ ID NO: 1414346 - DNA, 15 bp, Homo sapiens
atggctccctttcac

SEQ ID NO: 1414347 - DNA, 15 bp, Homo sapiens
aatggctccctttca

SEQ ID NO: 1414348 - DNA, 15 bp, Homo sapiens
aaatggctccctttc

SEQ ID NO: 1414349 - DNA, 15 bp, Homo sapiens
aaaatggctcccttt

SEQ ID NO: 1414350 - DNA, 15 bp, Homo sapiens
gaaaatggctccctt

SEQ ID NO: 1414351 - DNA, 15 bp, Homo sapiens
agaaaatggctccct

SEQ ID NO: 1414352 - DNA, 15 bp, Homo sapiens
gagaaaatggctccc

SEQ ID NO: 1414353 - DNA, 15 bp, Homo sapiens
tgagaaaatggctcc

SEQ ID NO: 1414354 - DNA, 15 bp, Homo sapiens
ctgagaaaatggctc

SEQ ID NO: 1414355 - DNA, 15 bp, Homo sapiens
tctgagaaaatggct

SEQ ID NO: 1414356 - DNA, 15 bp, Homo sapiens
gtctgagaaaatggc

SEQ ID NO: 1414357 - DNA, 15 bp, Homo sapiens
ggtctgagaaaatgg

SEQ ID NO: 1414358 - DNA, 15 bp, Homo sapiens
gggtctgagaaaatg

SEQ ID NO: 1414359 - DNA, 15 bp, Homo sapiens
ggggtctgagaaaat

SEQ ID NO: 1414360 - DNA, 15 bp, Homo sapiens
aggggtctgagaaaa

SEQ ID NO: 1414361 - DNA, 15 bp, Homo sapiens
caggggtctgagaaa

SEQ ID NO: 1414362 - DNA, 15 bp, Homo sapiens
ccaggggtctgagaa

SEQ ID NO: 1414363 - DNA, 15 bp, Homo sapiens
gccaggggtctgaga

SEQ ID NO: 1414364 - DNA, 15 bp, Homo sapiens
ggccaggggtctgag

SEQ ID NO: 1414365 - DNA, 15 bp, Homo sapiens
aggccaggggtctga

SEQ ID NO: 1414366 - DNA, 15 bp, Homo sapiens
gaggccaggggtctg

SEQ ID NO: 1414367 - DNA, 15 bp, Homo sapiens
tgaggccaggggtct

SEQ ID NO: 1414368 - DNA, 15 bp, Homo sapiens
atgaggccaggggtc

SEQ ID NO: 1414369 - DNA, 15 bp, Homo sapiens
catgaggccaggggt

SEQ ID NO: 1414370 - DNA, 15 bp, Homo sapiens
gcatgaggccagggg

SEQ ID NO: 1414371 - DNA, 15 bp, Homo sapiens
tgcatgaggccaggg

SEQ ID NO: 1414372 - DNA, 15 bp, Homo sapiens
ctgcatgaggccagg

SEQ ID NO: 1414373 - DNA, 15 bp, Homo sapiens
gctgcatgaggccag

SEQ ID NO: 1414374 - DNA, 15 bp, Homo sapiens
ggctgcatgaggcca

SEQ ID NO: 1414375 - DNA, 15 bp, Homo sapiens
gggctgcatgaggcc

SEQ ID NO: 1414376 - DNA, 15 bp, Homo sapiens
agggctgcatgaggc

SEQ ID NO: 1414377 - DNA, 15 bp, Homo sapiens
aagggctgcatgagg

SEQ ID NO: 1414378 - DNA, 15 bp, Homo sapiens
gaagggctgcatgag

SEQ ID NO: 1414379 - DNA, 15 bp, Homo sapiens
tgaagggctgcatga

SEQ ID NO: 1414380 - DNA, 15 bp, Homo sapiens
ctgaagggctgcatg

SEQ ID NO: 1414381 - DNA, 15 bp, Homo sapiens
gctgaagggctgcat

SEQ ID NO: 1414382 - DNA, 15 bp, Homo sapiens
tgctgaagggctgca

SEQ ID NO: 1414383 - DNA, 15 bp, Homo sapiens
atgctgaagggctgc

SEQ ID NO: 1414384 - DNA, 15 bp, Homo sapiens
gatgctgaagggctg

SEQ ID NO: 1414385 - DNA, 15 bp, Homo sapiens
ggatgctgaagggct

SEQ ID NO: 1414386 - DNA, 15 bp, Homo sapiens
gggatgctgaagggc

SEQ ID NO: 1414387 - DNA, 15 bp, Homo sapiens
ggggatgctgaaggg

SEQ ID NO: 1414388 - DNA, 15 bp, Homo sapiens
cggggatgctgaagg

SEQ ID NO: 1414389 - DNA, 15 bp, Homo sapiens
acggggatgctgaag

SEQ ID NO: 1414390 - DNA, 15 bp, Homo sapiens
cacggggatgctgaa

SEQ ID NO: 1414391 - DNA, 15 bp, Homo sapiens
gcacggggatgctga

SEQ ID NO: 1414392 - DNA, 15 bp, Homo sapiens
tgcacggggatgctg

SEQ ID NO: 1414393 - DNA, 15 bp, Homo sapiens
ttgcacggggatgct

SEQ ID NO: 1414394 - DNA, 15 bp, Homo sapiens
tttgcacggggatgc

SEQ ID NO: 1414395 - DNA, 15 bp, Homo sapiens
atttgcacggggatg

SEQ ID NO: 1414396 - DNA, 15 bp, Homo sapiens
gatttgcacggggat

SEQ ID NO: 1414397 - DNA, 15 bp, Homo sapiens
tgatttgcacgggga

SEQ ID NO: 1414398 - DNA, 15 bp, Homo sapiens
gtgatttgcacgggg

SEQ ID NO: 1414399 - DNA, 15 bp, Homo sapiens
tgtgatttgcacggg

SEQ ID NO: 1414400 - DNA, 15 bp, Homo sapiens
gtgtgatttgcacgg

SEQ ID NO: 1414401 - DNA, 15 bp, Homo sapiens
agtgtgatttgcacg

SEQ ID NO: 1414402 - DNA, 15 bp, Homo sapiens
aagtgtgatttgcac

SEQ ID NO: 1414403 - DNA, 15 bp, Homo sapiens
gaagtgtgatttgca

SEQ ID NO: 1414404 - DNA, 15 bp, Homo sapiens
tgaagtgtgatttgc

SEQ ID NO: 1414405 - DNA, 15 bp, Homo sapiens
ctgaagtgtgatttg

SEQ ID NO: 1414406 - DNA, 15 bp, Homo sapiens
cctgaagtgtgattt

SEQ ID NO: 1414407 - DNA, 15 bp, Homo sapiens
ccctgaagtgtgatt

SEQ ID NO: 1414408 - DNA, 15 bp, Homo sapiens
gccctgaagtgtgat

SEQ ID NO: 1414409 - DNA, 15 bp, Homo sapiens
tgccctgaagtgtga

SEQ ID NO: 1414410 - DNA, 15 bp, Homo sapiens
ctgccctgaagtgtg

SEQ ID NO: 1414411 - DNA, 15 bp, Homo sapiens
gctgccctgaagtgt

SEQ ID NO: 1414412 - DNA, 15 bp, Homo sapiens
ggctgccctgaagtg

SEQ ID NO: 1414413 - DNA, 15 bp, Homo sapiens
cggctgccctgaagt

SEQ ID NO: 1414414 - DNA, 15 bp, Homo sapiens
ccggctgccctgaag

SEQ ID NO: 1414415 - DNA, 15 bp, Homo sapiens
tccggctgccctgaa

SEQ ID NO: 1414416 - DNA, 15 bp, Homo sapiens
ctccggctgccctga

SEQ ID NO: 1414417 - DNA, 15 bp, Homo sapiens
cctccggctgccctg

SEQ ID NO: 1414418 - DNA, 15 bp, Homo sapiens
gcctccggctgccct

SEQ ID NO: 1414419 - DNA, 15 bp, Homo sapiens
cgcctccggctgccc

SEQ ID NO: 1414420 - DNA, 15 bp, Homo sapiens
gcgcctccggctgcc

SEQ ID NO: 1414421 - DNA, 15 bp, Homo sapiens
ggcgcctccggctgc

SEQ ID NO: 1414422 - DNA, 15 bp, Homo sapiens
tggcgcctccggctg

SEQ ID NO: 1414423 - DNA, 15 bp, Homo sapiens
ctggcgcctccggct

SEQ ID NO: 1414424 - DNA, 15 bp, Homo sapiens
cctggcgcctccggc

SEQ ID NO: 1414425 - DNA, 15 bp, Homo sapiens
ccctggcgcctccgg

SEQ ID NO: 1414426 - DNA, 15 bp, Homo sapiens
cccctggcgcctccg

SEQ ID NO: 1414427 - DNA, 15 bp, Homo sapiens
tcccctggcgcctcc

SEQ ID NO: 1414428 - DNA, 15 bp, Homo sapiens
ctcccctggcgcctc

SEQ ID NO: 1414429 - DNA, 15 bp, Homo sapiens
cctcccctggcgcct

SEQ ID NO: 1414430 - DNA, 15 bp, Homo sapiens
acctcccctggcgcc

SEQ ID NO: 1414431 - DNA, 15 bp, Homo sapiens
tacctcccctggcgc

SEQ ID NO: 1414432 - DNA, 15 bp, Homo sapiens
ttacctcccctggcg

SEQ ID NO: 1414433 - DNA, 15 bp, Homo sapiens
cttacctcccctggc

SEQ ID NO: 1414434 - DNA, 15 bp, Homo sapiens
acttacctcccctgg

SEQ ID NO: 1414435 - DNA, 15 bp, Homo sapiens
gacttacctcccctg

SEQ ID NO: 1414436 - DNA, 15 bp, Homo sapiens
tgacttacctcccct

SEQ ID NO: 1414437 - DNA, 15 bp, Homo sapiens
gtgacttacctcccc

SEQ ID NO: 1414438 - DNA, 15 bp, Homo sapiens
agtgacttacctccc

SEQ ID NO: 1414439 - DNA, 15 bp, Homo sapiens
aagtgacttacctcc

SEQ ID NO: 1414440 - DNA, 15 bp, Homo sapiens
gaagtgacttacctc

SEQ ID NO: 1414441 - DNA, 15 bp, Homo sapiens
ggaagtgacttacct

SEQ ID NO: 1414442 - DNA, 15 bp, Homo sapiens
cggaagtgacttacc

SEQ ID NO: 1414443 - DNA, 15 bp, Homo sapiens
ccggaagtgacttac

SEQ ID NO: 1414444 - DNA, 15 bp, Homo sapiens
tccggaagtgactta

SEQ ID NO: 1414445 - DNA, 15 bp, Homo sapiens
ttccggaagtgactt

SEQ ID NO: 1414446 - DNA, 15 bp, Homo sapiens
cttccggaagtgact

SEQ ID NO: 1414447 - DNA, 15 bp, Homo sapiens
gcttccggaagtgac

SEQ ID NO: 1414448 - DNA, 15 bp, Homo sapiens
agcttccggaagtga

SEQ ID NO: 1414449 - DNA, 15 bp, Homo sapiens
gagcttccggaagtg

SEQ ID NO: 1414450 - DNA, 15 bp, Homo sapiens
agagcttccggaagt

SEQ ID NO: 1414451 - DNA, 15 bp, Homo sapiens
cagagcttccggaag

SEQ ID NO: 1414452 - DNA, 15 bp, Homo sapiens
gcagagcttccggaa

SEQ ID NO: 1414453 - DNA, 15 bp, Homo sapiens
ggcagagcttccgga

SEQ ID NO: 1414454 - DNA, 15 bp, Homo sapiens
cggcagagcttccgg

SEQ ID NO: 1414455 - DNA, 15 bp, Homo sapiens
ccggcagagcttccg

SEQ ID NO: 1414456 - DNA, 15 bp, Homo sapiens
accggcagagcttcc

SEQ ID NO: 1414457 - DNA, 15 bp, Homo sapiens
taccggcagagcttc

SEQ ID NO: 1414458 - DNA, 15 bp, Homo sapiens
ctaccggcagagctt

SEQ ID NO: 1414459 - DNA, 15 bp, Homo sapiens
actaccggcagagct

SEQ ID NO: 1414460 - DNA, 15 bp, Homo sapiens
cactaccggcagagc

SEQ ID NO: 1414461 - DNA, 15 bp, Homo sapiens
ccactaccggcagag

SEQ ID NO: 1414462 - DNA, 15 bp, Homo sapiens
cccactaccggcaga

SEQ ID NO: 1414463 - DNA, 15 bp, Homo sapiens
tcccactaccggcag

SEQ ID NO: 1414464 - DNA, 15 bp, Homo sapiens
ttcccactaccggca

SEQ ID NO: 1414465 - DNA, 15 bp, Homo sapiens
attcccactaccggc

SEQ ID NO: 1414466 - DNA, 15 bp, Homo sapiens
gattcccactaccgg

SEQ ID NO: 1414467 - DNA, 15 bp, Homo sapiens
agattcccactaccg

SEQ ID NO: 1414468 - DNA, 15 bp, Homo sapiens
cagattcccactacc

SEQ ID NO: 1414469 - DNA, 15 bp, Homo sapiens
ccagattcccactac

SEQ ID NO: 1414470 - DNA, 15 bp, Homo sapiens
gccagattcccacta

SEQ ID NO: 1414471 - DNA, 15 bp, Homo sapiens
agccagattcccact

SEQ ID NO: 1414472 - DNA, 15 bp, Homo sapiens
cagccagattcccac

SEQ ID NO: 1414473 - DNA, 15 bp, Homo sapiens
tcagccagattccca

SEQ ID NO: 1414474 - DNA, 15 bp, Homo sapiens
ttcagccagattccc

SEQ ID NO: 1414475 - DNA, 15 bp, Homo sapiens
gttcagccagattcc

SEQ ID NO: 1414476 - DNA, 15 bp, Homo sapiens
tgttcagccagattc

SEQ ID NO: 1414477 - DNA, 15 bp, Homo sapiens
ttgttcagccagatt

SEQ ID NO: 1414478 - DNA, 15 bp, Homo sapiens
cttgttcagccagat

SEQ ID NO: 1414479 - DNA, 15 bp, Homo sapiens
gcttgttcagccaga

SEQ ID NO: 1414480 - DNA, 15 bp, Homo sapiens
tgcttgttcagccag

SEQ ID NO: 1414481 - DNA, 15 bp, Homo sapiens
ctgcttgttcagcca

SEQ ID NO: 1414482 - DNA, 15 bp, Homo sapiens
actgcttgttcagcc

SEQ ID NO: 1414483 - DNA, 15 bp, Homo sapiens
aactgcttgttcagc

SEQ ID NO: 1414484 - DNA, 15 bp, Homo sapiens
caactgcttgttcag

SEQ ID NO: 1414485 - DNA, 15 bp, Homo sapiens
gcaactgcttgttca

SEQ ID NO: 1414486 - DNA, 15 bp, Homo sapiens
tgcaactgcttgttc

SEQ ID NO: 1414487 - DNA, 15 bp, Homo sapiens
ttgcaactgcttgtt

SEQ ID NO: 1414488 - DNA, 15 bp, Homo sapiens
cttgcaactgcttgt

SEQ ID NO: 1414489 - DNA, 15 bp, Homo sapiens
tcttgcaactgcttg

SEQ ID NO: 1414490 - DNA, 15 bp, Homo sapiens
ttcttgcaactgctt

SEQ ID NO: 1414491 - DNA, 15 bp, Homo sapiens
cttcttgcaactgct

SEQ ID NO: 1414492 - DNA, 15 bp, Homo sapiens
tcttcttgcaactgc

SEQ ID NO: 1414493 - DNA, 15 bp, Homo sapiens
ctcttcttgcaactg

SEQ ID NO: 1414494 - DNA, 15 bp, Homo sapiens
cctcttcttgcaact

SEQ ID NO: 1414495 - DNA, 15 bp, Homo sapiens
ccctcttcttgcaac

SEQ ID NO: 1414496 - DNA, 15 bp, Homo sapiens
cccctcttcttgcaa

SEQ ID NO: 1414497 - DNA, 15 bp, Homo sapiens
tcccctcttcttgca

SEQ ID NO: 1414498 - DNA, 15 bp, Homo sapiens
gtcccctcttcttgc

SEQ ID NO: 1414499 - DNA, 15 bp, Homo sapiens
tgtcccctcttcttg

SEQ ID NO: 1414500 - DNA, 15 bp, Homo sapiens
atgtcccctcttctt

SEQ ID NO: 1414501 - DNA, 15 bp, Homo sapiens
gatgtcccctcttct

SEQ ID NO: 1414502 - DNA, 15 bp, Homo sapiens
agatgtcccctcttc

SEQ ID NO: 1414503 - DNA, 15 bp, Homo sapiens
gagatgtcccctctt

SEQ ID NO: 1414504 - DNA, 15 bp, Homo sapiens
cgagatgtcccctct

SEQ ID NO: 1414505 - DNA, 15 bp, Homo sapiens
tcgagatgtcccctc

SEQ ID NO: 1414506 - DNA, 15 bp, Homo sapiens
ctcgagatgtcccct

SEQ ID NO: 1414507 - DNA, 15 bp, Homo sapiens
gctcgagatgtcccc

SEQ ID NO: 1414508 - DNA, 15 bp, Homo sapiens
agctcgagatgtccc

SEQ ID NO: 1414509 - DNA, 15 bp, Homo sapiens
aagctcgagatgtcc

SEQ ID NO: 1414510 - DNA, 15 bp, Homo sapiens
caagctcgagatgtc

SEQ ID NO: 1414511 - DNA, 15 bp, Homo sapiens
ccaagctcgagatgt

SEQ ID NO: 1414512 - DNA, 15 bp, Homo sapiens
cccaagctcgagatg

SEQ ID NO: 1414513 - DNA, 15 bp, Homo sapiens
ccccaagctcgagat

SEQ ID NO: 1414514 - DNA, 15 bp, Homo sapiens
tccccaagctcgaga

SEQ ID NO: 1414515 - DNA, 15 bp, Homo sapiens
ctccccaagctcgag

SEQ ID NO: 1414516 - DNA, 15 bp, Homo sapiens
actccccaagctcga

SEQ ID NO: 1414517 - DNA, 15 bp, Homo sapiens
cactccccaagctcg

SEQ ID NO: 1414518 - DNA, 15 bp, Homo sapiens
tcactccccaagctc

SEQ ID NO: 1414519 - DNA, 15 bp, Homo sapiens
ctcactccccaagct

SEQ ID NO: 1414520 - DNA, 15 bp, Homo sapiens
actcactccccaagc

SEQ ID NO: 1414521 - DNA, 15 bp, Homo sapiens
cactcactccccaag

SEQ ID NO: 1414522 - DNA, 15 bp, Homo sapiens
acactcactccccaa

SEQ ID NO: 1414523 - DNA, 15 bp, Homo sapiens
aacactcactcccca

SEQ ID NO: 1414524 - DNA, 15 bp, Homo sapiens
aaacactcactcccc

SEQ ID NO: 1414525 - DNA, 15 bp, Homo sapiens
gaaacactcactccc

SEQ ID NO: 1414526 - DNA, 15 bp, Homo sapiens
ggaaacactcactcc

SEQ ID NO: 1414527 - DNA, 15 bp, Homo sapiens
aggaaacactcactc

SEQ ID NO: 1414528 - DNA, 15 bp, Homo sapiens
aaggaaacactcact

SEQ ID NO: 1414529 - DNA, 15 bp, Homo sapiens
aaaggaaacactcac

SEQ ID NO: 1414530 - DNA, 15 bp, Homo sapiens
aaaaggaaacactca

SEQ ID NO: 1414531 - DNA, 15 bp, Homo sapiens
aaaaaggaaacactc

SEQ ID NO: 1414532 - DNA, 15 bp, Homo sapiens
gaaaaaggaaacact

SEQ ID NO: 1414533 - DNA, 15 bp, Homo sapiens
agaaaaaggaaacac

SEQ ID NO: 1414534 - DNA, 15 bp, Homo sapiens
gagaaaaaggaaaca

SEQ ID NO: 1414535 - DNA, 15 bp, Homo sapiens
agagaaaaaggaaac

SEQ ID NO: 1414536 - DNA, 15 bp, Homo sapiens
cagagaaaaaggaaa

SEQ ID NO: 1414537 - DNA, 15 bp, Homo sapiens
tcagagaaaaaggaa

SEQ ID NO: 1414538 - DNA, 15 bp, Homo sapiens
ctcagagaaaaagga

SEQ ID NO: 1414539 - DNA, 15 bp, Homo sapiens
cctcagagaaaaagg

SEQ ID NO: 1414540 - DNA, 15 bp, Homo sapiens
tcctcagagaaaaag

SEQ ID NO: 1414541 - DNA, 15 bp, Homo sapiens
atcctcagagaaaaa

SEQ ID NO: 1414542 - DNA, 15 bp, Homo sapiens
catcctcagagaaaa

SEQ ID NO: 1414543 - DNA, 15 bp, Homo sapiens
gcatcctcagagaaa

SEQ ID NO: 1414544 - DNA, 15 bp, Homo sapiens
ggcatcctcagagaa

SEQ ID NO: 1414545 - DNA, 15 bp, Homo sapiens
gggcatcctcagaga

SEQ ID NO: 1414546 - DNA, 15 bp, Homo sapiens
tgggcatcctcagag

SEQ ID NO: 1414547 - DNA, 15 bp, Homo sapiens
gtgggcatcctcaga

SEQ ID NO: 1414548 - DNA, 15 bp, Homo sapiens
agtgggcatcctcag

SEQ ID NO: 1414549 - DNA, 15 bp, Homo sapiens
aagtgggcatcctca

SEQ ID NO: 1414550 - DNA, 15 bp, Homo sapiens
caagtgggcatcctc

SEQ ID NO: 1414551 - DNA, 15 bp, Homo sapiens
gcaagtgggcatcct

SEQ ID NO: 1414552 - DNA, 15 bp, Homo sapiens
ggcaagtgggcatcc

SEQ ID NO: 1414553 - DNA, 15 bp, Homo sapiens
tggcaagtgggcatc

SEQ ID NO: 1414554 - DNA, 15 bp, Homo sapiens
atggcaagtgggcat

SEQ ID NO: 1414555 - DNA, 15 bp, Homo sapiens
catggcaagtgggca

SEQ ID NO: 1414556 - DNA, 15 bp, Homo sapiens
gcatggcaagtgggc

SEQ ID NO: 1414557 - DNA, 15 bp, Homo sapiens
ggcatggcaagtggg

SEQ ID NO: 1414558 - DNA, 15 bp, Homo sapiens
aggcatggcaagtgg

SEQ ID NO: 1414559 - DNA, 15 bp, Homo sapiens
gaggcatggcaagtg

SEQ ID NO: 1414560 - DNA, 15 bp, Homo sapiens
ggaggcatggcaagt

SEQ ID NO: 1414561 - DNA, 15 bp, Homo sapiens
gggaggcatggcaag

SEQ ID NO: 1414562 - DNA, 15 bp, Homo sapiens
tgggaggcatggcaa

SEQ ID NO: 1414563 - DNA, 15 bp, Homo sapiens
ctgggaggcatggca

SEQ ID NO: 1414564 - DNA, 15 bp, Homo sapiens
cctgggaggcatggc

SEQ ID NO: 1414565 - DNA, 15 bp, Homo sapiens
ccctgggaggcatgg

SEQ ID NO: 1414566 - DNA, 15 bp, Homo sapiens
accctgggaggcatg

SEQ ID NO: 1414567 - DNA, 15 bp, Homo sapiens
taccctgggaggcat

SEQ ID NO: 1414568 - DNA, 15 bp, Homo sapiens
gtaccctgggaggca

SEQ ID NO: 1414569 - DNA, 15 bp, Homo sapiens
ggtaccctgggaggc

SEQ ID NO: 1414570 - DNA, 15 bp, Homo sapiens
gggtaccctgggagg

SEQ ID NO: 1414571 - DNA, 15 bp, Homo sapiens
tgggtaccctgggag

SEQ ID NO: 1414572 - DNA, 15 bp, Homo sapiens
ctgggtaccctggga

SEQ ID NO: 1414573 - DNA, 15 bp, Homo sapiens
gctgggtaccctggg

SEQ ID NO: 1414574 - DNA, 15 bp, Homo sapiens
tgctgggtaccctgg

SEQ ID NO: 1414575 - DNA, 15 bp, Homo sapiens
ctgctgggtaccctg

SEQ ID NO: 1414576 - DNA, 15 bp, Homo sapiens
cctgctgggtaccct

SEQ ID NO: 1414577 - DNA, 15 bp, Homo sapiens
gcctgctgggtaccc

SEQ ID NO: 1414578 - DNA, 15 bp, Homo sapiens
agcctgctgggtacc

SEQ ID NO: 1414579 - DNA, 15 bp, Homo sapiens
aagcctgctgggtac

SEQ ID NO: 1414580 - DNA, 15 bp, Homo sapiens
gaagcctgctgggta

SEQ ID NO: 1414581 - DNA, 15 bp, Homo sapiens
ggaagcctgctgggt

SEQ ID NO: 1414582 - DNA, 15 bp, Homo sapiens
gggaagcctgctggg

SEQ ID NO: 1414583 - DNA, 15 bp, Homo sapiens
ggggaagcctgctgg

SEQ ID NO: 1414584 - DNA, 15 bp, Homo sapiens
tggggaagcctgctg

SEQ ID NO: 1414585 - DNA, 15 bp, Homo sapiens
ctggggaagcctgct

SEQ ID NO: 1414586 - DNA, 15 bp, Homo sapiens
actggggaagcctgc

SEQ ID NO: 1414587 - DNA, 15 bp, Homo sapiens
tactggggaagcctg

SEQ ID NO: 1414588 - DNA, 15 bp, Homo sapiens
ctactggggaagcct

SEQ ID NO: 1414589 - DNA, 15 bp, Homo sapiens
gctactggggaagcc

SEQ ID NO: 1414590 - DNA, 15 bp, Homo sapiens
tgctactggggaagc

SEQ ID NO: 1414591 - DNA, 15 bp, Homo sapiens
gtgctactggggaag

SEQ ID NO: 1414592 - DNA, 15 bp, Homo sapiens
agtgctactggggaa

SEQ ID NO: 1414593 - DNA, 15 bp, Homo sapiens
gagtgctactgggga

SEQ ID NO: 1414594 - DNA, 15 bp, Homo sapiens
tgagtgctactgggg

SEQ ID NO: 1414595 - DNA, 15 bp, Homo sapiens
gtgagtgctactggg

SEQ ID NO: 1414596 - DNA, 15 bp, Homo sapiens
tgtgagtgctactgg

SEQ ID NO: 1414597 - DNA, 15 bp, Homo sapiens
atgtgagtgctactg

SEQ ID NO: 1414598 - DNA, 15 bp, Homo sapiens
gatgtgagtgctact

SEQ ID NO: 1414599 - DNA, 15 bp, Homo sapiens
tgatgtgagtgctac

SEQ ID NO: 1414600 - DNA, 15 bp, Homo sapiens
tttgctttctagtca

SEQ ID NO: 1414601 - DNA, 15 bp, Homo sapiens
gtttgctttctagtc

SEQ ID NO: 1414602 - DNA, 15 bp, Homo sapiens
agtttgctttctagt

SEQ ID NO: 1414603 - DNA, 15 bp, Homo sapiens
tagtttgctttctag

SEQ ID NO: 1414604 - DNA, 15 bp, Homo sapiens
ctagtttgctttcta

SEQ ID NO: 1414605 - DNA, 15 bp, Homo sapiens
tctagtttgctttct

SEQ ID NO: 1414606 - DNA, 15 bp, Homo sapiens
atctagtttgctttc

SEQ ID NO: 1414607 - DNA, 15 bp, Homo sapiens
gatctagtttgcttt

SEQ ID NO: 1414608 - DNA, 15 bp, Homo sapiens
tgatctagtttgctt

SEQ ID NO: 1414609 - DNA, 15 bp, Homo sapiens
atgatctagtttgct

SEQ ID NO: 1414610 - DNA, 15 bp, Homo sapiens
tatgatctagtttgc

SEQ ID NO: 1414611 - DNA, 15 bp, Homo sapiens
gtatgatctagtttg

SEQ ID NO: 1414612 - DNA, 15 bp, Homo sapiens
agtatgatctagttt

SEQ ID NO: 1414613 - DNA, 15 bp, Homo sapiens
aagtatgatctagtt

SEQ ID NO: 1414614 - DNA, 15 bp, Homo sapiens
taagtatgatctagt

SEQ ID NO: 1414615 - DNA, 15 bp, Homo sapiens
ttaagtatgatctag

SEQ ID NO: 1414616 - DNA, 15 bp, Homo sapiens
cttaagtatgatcta

SEQ ID NO: 1414617 - DNA, 15 bp, Homo sapiens
acttaagtatgatct

SEQ ID NO: 1414618 - DNA, 15 bp, Homo sapiens
cacttaagtatgatc

SEQ ID NO: 1414619 - DNA, 15 bp, Homo sapiens
gcacttaagtatgat

SEQ ID NO: 1414620 - DNA, 15 bp, Homo sapiens
agcacttaagtatga

SEQ ID NO: 1414621 - DNA, 15 bp, Homo sapiens
aagcacttaagtatg

SEQ ID NO: 1414622 - DNA, 15 bp, Homo sapiens
aaagcacttaagtat

SEQ ID NO: 1414623 - DNA, 15 bp, Homo sapiens
caaagcacttaagta

SEQ ID NO: 1414624 - DNA, 15 bp, Homo sapiens
tcaaagcacttaagt

SEQ ID NO: 1414625 - DNA, 15 bp, Homo sapiens
ctcaaagcacttaag

SEQ ID NO: 1414626 - DNA, 15 bp, Homo sapiens
gacctcaaagcactt

SEQ ID NO: 1414627 - DNA, 15 bp, Homo sapiens
ggacctcaaagcact

SEQ ID NO: 1414628 - DNA, 15 bp, Homo sapiens
aggacctcaaagcac

SEQ ID NO: 1414629 - DNA, 15 bp, Homo sapiens
aaggacctcaaagca

SEQ ID NO: 1414630 - DNA, 15 bp, Homo sapiens
caaggacctcaaagc

SEQ ID NO: 1414631 - DNA, 15 bp, Homo sapiens
ccaaggacctcaaag

SEQ ID NO: 1414632 - DNA, 15 bp, Homo sapiens
tccaaggacctcaaa

SEQ ID NO: 1414633 - DNA, 15 bp, Homo sapiens
atccaaggacctcaa

SEQ ID NO: 1414634 - DNA, 15 bp, Homo sapiens
catccaaggacctca

SEQ ID NO: 1414635 - DNA, 15 bp, Homo sapiens
tcatccaaggacctc

SEQ ID NO: 1414636 - DNA, 15 bp, Homo sapiens
ttcatccaaggacct

SEQ ID NO: 1414637 - DNA, 15 bp, Homo sapiens
tttcatccaaggacc

SEQ ID NO: 1414638 - DNA, 15 bp, Homo sapiens
ctttcatccaaggac

SEQ ID NO: 1414639 - DNA, 15 bp, Homo sapiens
tctttcatccaagga

SEQ ID NO: 1414640 - DNA, 15 bp, Homo sapiens
atctttcatccaagg

SEQ ID NO: 1414641 - DNA, 15 bp, Homo sapiens
catctttcatccaag

SEQ ID NO: 1414642 - DNA, 15 bp, Homo sapiens
gcatctttcatccaa

SEQ ID NO: 1414643 - DNA, 15 bp, Homo sapiens
agcatctttcatcca

SEQ ID NO: 1414644 - DNA, 15 bp, Homo sapiens
aagcatctttcatcc

SEQ ID NO: 1414645 - DNA, 15 bp, Homo sapiens
caagcatctttcatc

SEQ ID NO: 1414646 - DNA, 15 bp, Homo sapiens
acaagcatctttcat

SEQ ID NO: 1414647 - DNA, 15 bp, Homo sapiens
tacaagcatctttca

SEQ ID NO: 1414648 - DNA, 15 bp, Homo sapiens
ttacaagcatctttc

SEQ ID NO: 1414649 - DNA, 15 bp, Homo sapiens
tttacaagcatcttt

SEQ ID NO: 1414650 - DNA, 15 bp, Homo sapiens
atttacaagcatctt

SEQ ID NO: 1414651 - DNA, 15 bp, Homo sapiens
tatttacaagcatct

SEQ ID NO: 1414652 - DNA, 15 bp, Homo sapiens
gtatttacaagcatc

SEQ ID NO: 1414653 - DNA, 15 bp, Homo sapiens
tgtatttacaagcat

SEQ ID NO: 1414654 - DNA, 15 bp, Homo sapiens
ttgtatttacaagca

SEQ ID NO: 1414655 - DNA, 15 bp, Homo sapiens
gttgtatttacaagc

SEQ ID NO: 1414656 - DNA, 15 bp, Homo sapiens
tgttgtatttacaag

SEQ ID NO: 1414657 - DNA, 15 bp, Homo sapiens
ttgttgtatttacaa

SEQ ID NO: 1414658 - DNA, 15 bp, Homo sapiens
tttgttgtatttaca

SEQ ID NO: 1414659 - DNA, 15 bp, Homo sapiens
ctttgttgtatttac

SEQ ID NO: 1414660 - DNA, 15 bp, Homo sapiens
actttgttgtattta

SEQ ID NO: 1414661 - DNA, 15 bp, Homo sapiens
aactttgttgtattt

SEQ ID NO: 1414662 - DNA, 15 bp, Homo sapiens
taactttgttgtatt

SEQ ID NO: 1414663 - DNA, 15 bp, Homo sapiens
ttaactttgttgtat

SEQ ID NO: 1414664 - DNA, 15 bp, Homo sapiens
attaactttgttgta

SEQ ID NO: 1414665 - DNA, 15 bp, Homo sapiens
aattaactttgttgt

SEQ ID NO: 1414666 - DNA, 15 bp, Homo sapiens
taattaactttgttg

SEQ ID NO: 1414667 - DNA, 15 bp, Homo sapiens
gtaattaactttgtt

SEQ ID NO: 1414668 - DNA, 15 bp, Homo sapiens
tgtaattaactttgt

SEQ ID NO: 1414669 - DNA, 15 bp, Homo sapiens
ttgtaattaactttg

SEQ ID NO: 1414670 - DNA, 15 bp, Homo sapiens
cttgtaattaacttt

SEQ ID NO: 1414671 - DNA, 15 bp, Homo sapiens
ccttgtaattaactt

SEQ ID NO: 1414672 - DNA, 15 bp, Homo sapiens
gccttgtaattaact

SEQ ID NO: 1414673 - DNA, 15 bp, Homo sapiens
agccttgtaattaac

SEQ ID NO: 1414674 - DNA, 15 bp, Homo sapiens
cagccttgtaattaa

SEQ ID NO: 1414675 - DNA, 15 bp, Homo sapiens
acagccttgtaatta

SEQ ID NO: 1414676 - DNA, 15 bp, Homo sapiens
aacagccttgtaatt

SEQ ID NO: 1414677 - DNA, 15 bp, Homo sapiens
aaacagccttgtaat

SEQ ID NO: 1414678 - DNA, 15 bp, Homo sapiens
taaacagccttgtaa

SEQ ID NO: 1414679 - DNA, 15 bp, Homo sapiens
ataaacagccttgta

SEQ ID NO: 1414680 - DNA, 15 bp, Homo sapiens
cataaacagccttgt

SEQ ID NO: 1414681 - DNA, 15 bp, Homo sapiens
ccataaacagccttg

SEQ ID NO: 1414682 - DNA, 15 bp, Homo sapiens
accataaacagcctt

SEQ ID NO: 1414683 - DNA, 15 bp, Homo sapiens
gaccataaacagcct

SEQ ID NO: 1414684 - DNA, 15 bp, Homo sapiens
agaccataaacagcc

SEQ ID NO: 1414685 - DNA, 15 bp, Homo sapiens
cagaccataaacagc

SEQ ID NO: 1414686 - DNA, 15 bp, Homo sapiens
tcagaccataaacag

SEQ ID NO: 1414687 - DNA, 15 bp, Homo sapiens
ctcagaccataaaca

SEQ ID NO: 1414688 - DNA, 15 bp, Homo sapiens
tctcagaccataaac

SEQ ID NO: 1414689 - DNA, 15 bp, Homo sapiens
ttctcagaccataaa

SEQ ID NO: 1414690 - DNA, 15 bp, Homo sapiens
tttctcagaccataa

SEQ ID NO: 1414691 - DNA, 15 bp, Homo sapiens
ttttctcagaccata

SEQ ID NO: 1414692 - DNA, 15 bp, Homo sapiens
gttttctcagaccat

SEQ ID NO: 1414693 - DNA, 15 bp, Homo sapiens
agttttctcagacca

SEQ ID NO: 1414694 - DNA, 15 bp, Homo sapiens
cagttttctcagacc

SEQ ID NO: 1414695 - DNA, 15 bp, Homo sapiens
ccagttttctcagac

SEQ ID NO: 1414696 - DNA, 15 bp, Homo sapiens
tccagttttctcaga

SEQ ID NO: 1414697 - DNA, 15 bp, Homo sapiens
ttccagttttctcag

SEQ ID NO: 1414698 - DNA, 15 bp, Homo sapiens
tttccagttttctca

SEQ ID NO: 1414699 - DNA, 15 bp, Homo sapiens
gtttccagttttctc

SEQ ID NO: 1414700 - DNA, 15 bp, Homo sapiens
tgtttccagttttct

SEQ ID NO: 1414701 - DNA, 15 bp, Homo sapiens
ttgtttccagttttc

SEQ ID NO: 1414702 - DNA, 15 bp, Homo sapiens
gttgtttccagtttt

SEQ ID NO: 1414703 - DNA, 15 bp, Homo sapiens
ggttgtttccagttt

SEQ ID NO: 1414704 - DNA, 15 bp, Homo sapiens
aggttgtttccagtt

SEQ ID NO: 1414705 - DNA, 15 bp, Homo sapiens
taggttgtttccagt

SEQ ID NO: 1414706 - DNA, 15 bp, Homo sapiens
ttaggttgtttccag

SEQ ID NO: 1414707 - DNA, 15 bp, Homo sapiens
attaggttgtttcca

SEQ ID NO: 1414708 - DNA, 15 bp, Homo sapiens
tattaggttgtttcc

SEQ ID NO: 1414709 - DNA, 15 bp, Homo sapiens
ttattaggttgtttc

SEQ ID NO: 1414710 - DNA, 15 bp, Homo sapiens
attattaggttgttt

SEQ ID NO: 1414711 - DNA, 15 bp, Homo sapiens
tattattaggttgtt

SEQ ID NO: 1414712 - DNA, 15 bp, Homo sapiens
atattattaggttgt

SEQ ID NO: 1414713 - DNA, 15 bp, Homo sapiens
aatattattaggttg

SEQ ID NO: 1414714 - DNA, 15 bp, Homo sapiens
gaatattattaggtt

SEQ ID NO: 1414715 - DNA, 15 bp, Homo sapiens
tgaatattattaggt

SEQ ID NO: 1414716 - DNA, 15 bp, Homo sapiens
ttgaatattattagg

SEQ ID NO: 1414717 - DNA, 15 bp, Homo sapiens
attgaatattattag

SEQ ID NO: 1414718 - DNA, 15 bp, Homo sapiens
tattgaatattatta

SEQ ID NO: 1414719 - DNA, 15 bp, Homo sapiens
ttattgaatattatt

SEQ ID NO: 1414720 - DNA, 15 bp, Homo sapiens
attattgaatattat

SEQ ID NO: 1414721 - DNA, 15 bp, Homo sapiens
tattattgaatatta

SEQ ID NO: 1414722 - DNA, 15 bp, Homo sapiens
ttattattgaatatt

SEQ ID NO: 1414723 - DNA, 15 bp, Homo sapiens
cttattattgaatat

SEQ ID NO: 1414724 - DNA, 15 bp, Homo sapiens
ccttattattgaata

SEQ ID NO: 1414725 - DNA, 15 bp, Homo sapiens
tccttattattgaat

SEQ ID NO: 1414726 - DNA, 15 bp, Homo sapiens
ttccttattattgaa

SEQ ID NO: 1414727 - DNA, 15 bp, Homo sapiens
tttccttattattga

SEQ ID NO: 1414728 - DNA, 15 bp, Homo sapiens
atttccttattattg

SEQ ID NO: 1414729 - DNA, 15 bp, Homo sapiens
catttccttattatt

SEQ ID NO: 1414730 - DNA, 15 bp, Homo sapiens
ccatttccttattat

SEQ ID NO: 1414731 - DNA, 15 bp, Homo sapiens
accatttccttatta

SEQ ID NO: 1414732 - DNA, 15 bp, Homo sapiens
aaccatttccttatt

SEQ ID NO: 1414733 - DNA, 15 bp, Homo sapiens
taaccatttccttat

SEQ ID NO: 1414734 - DNA, 15 bp, Homo sapiens
ttaaccatttcctta

SEQ ID NO: 1414735 - DNA, 15 bp, Homo sapiens
cttaaccatttcctt

SEQ ID NO: 1414736 - DNA, 15 bp, Homo sapiens
ccttaaccatttcct

SEQ ID NO: 1414737 - DNA, 15 bp, Homo sapiens
tccttaaccatttcc

SEQ ID NO: 1414738 - DNA, 15 bp, Homo sapiens
ttccttaaccatttc

SEQ ID NO: 1414739 - DNA, 15 bp, Homo sapiens
tttccttaaccattt

SEQ ID NO: 1414740 - DNA, 15 bp, Homo sapiens
atttccttaaccatt

SEQ ID NO: 1414741 - DNA, 15 bp, Homo sapiens
tatttccttaaccat

SEQ ID NO: 1414742 - DNA, 15 bp, Homo sapiens
atatttccttaacca

SEQ ID NO: 1414743 - DNA, 15 bp, Homo sapiens
catatttccttaacc

SEQ ID NO: 1414744 - DNA, 15 bp, Homo sapiens
ccatatttccttaac

SEQ ID NO: 1414745 - DNA, 15 bp, Homo sapiens
gccatatttccttaa

SEQ ID NO: 1414746 - DNA, 15 bp, Homo sapiens
tgccatatttcctta

SEQ ID NO: 1414747 - DNA, 15 bp, Homo sapiens
atgccatatttcctt

SEQ ID NO: 1414748 - DNA, 15 bp, Homo sapiens
tatgccatatttcct

SEQ ID NO: 1414749 - DNA, 15 bp, Homo sapiens
atatgccatatttcc

SEQ ID NO: 1414750 - DNA, 15 bp, Homo sapiens
gatatgccatatttc

SEQ ID NO: 1414751 - DNA, 15 bp, Homo sapiens
agatatgccatattt

SEQ ID NO: 1414752 - DNA, 15 bp, Homo sapiens
tagatatgccatatt

SEQ ID NO: 1414753 - DNA, 15 bp, Homo sapiens
ttagatatgccatat

SEQ ID NO: 1414754 - DNA, 15 bp, Homo sapiens
attagatatgccata

SEQ ID NO: 1414755 - DNA, 15 bp, Homo sapiens
aattagatatgccat

SEQ ID NO: 1414756 - DNA, 15 bp, Homo sapiens
caattagatatgcca

SEQ ID NO: 1414757 - DNA, 15 bp, Homo sapiens
tcaattagatatgcc

SEQ ID NO: 1414758 - DNA, 15 bp, Homo sapiens
atcaattagatatgc

SEQ ID NO: 1414759 - DNA, 15 bp, Homo sapiens
catcaattagatatg

SEQ ID NO: 1414760 - DNA, 15 bp, Homo sapiens
ccatcaattagatat

SEQ ID NO: 1414761 - DNA, 15 bp, Homo sapiens
tccatcaattagata

SEQ ID NO: 1414762 - DNA, 15 bp, Homo sapiens
ttccatcaattagat

SEQ ID NO: 1414763 - DNA, 15 bp, Homo sapiens
gttccatcaattaga

SEQ ID NO: 1414764 - DNA, 15 bp, Homo sapiens
tgttccatcaattag

SEQ ID NO: 1414765 - DNA, 15 bp, Homo sapiens
atgttccatcaatta

SEQ ID NO: 1414766 - DNA, 15 bp, Homo sapiens
aatgttccatcaatt

SEQ ID NO: 1414767 - DNA, 15 bp, Homo sapiens
taatgttccatcaat

SEQ ID NO: 1414768 - DNA, 15 bp, Homo sapiens
ataatgttccatcaa

SEQ ID NO: 1414769 - DNA, 15 bp, Homo sapiens
cataatgttccatca

SEQ ID NO: 1414770 - DNA, 15 bp, Homo sapiens
acataatgttccatc

SEQ ID NO: 1414771 - DNA, 15 bp, Homo sapiens
tacataatgttccat

SEQ ID NO: 1414772 - DNA, 15 bp, Homo sapiens
ctacataatgttcca

SEQ ID NO: 1414773 - DNA, 15 bp, Homo sapiens
gctacataatgttcc

SEQ ID NO: 1414774 - DNA, 15 bp, Homo sapiens
ggctacataatgttc

SEQ ID NO: 1414775 - DNA, 15 bp, Homo sapiens
tggctacataatgtt

SEQ ID NO: 1414776 - DNA, 15 bp, Homo sapiens
ttggctacataatgt

SEQ ID NO: 1414777 - DNA, 15 bp, Homo sapiens
attggctacataatg

SEQ ID NO: 1414778 - DNA, 15 bp, Homo sapiens
tattggctacataat

SEQ ID NO: 1414779 - DNA, 15 bp, Homo sapiens
ctattggctacataa

SEQ ID NO: 1414780 - DNA, 15 bp, Homo sapiens
cctattggctacata

SEQ ID NO: 1414781 - DNA, 15 bp, Homo sapiens
tcctattggctacat

SEQ ID NO: 1414782 - DNA, 15 bp, Homo sapiens
atcctattggctaca

SEQ ID NO: 1414783 - DNA, 15 bp, Homo sapiens
aatcctattggctac

SEQ ID NO: 1414784 - DNA, 15 bp, Homo sapiens
taatcctattggcta

SEQ ID NO: 1414785 - DNA, 15 bp, Homo sapiens
gtaatcctattggct

SEQ ID NO: 1414786 - DNA, 15 bp, Homo sapiens
tgtaatcctattggc

SEQ ID NO: 1414787 - DNA, 15 bp, Homo sapiens
ttgtaatcctattgg

SEQ ID NO: 1414788 - DNA, 15 bp, Homo sapiens
tttgtaatcctattg

SEQ ID NO: 1414789 - DNA, 15 bp, Homo sapiens
ctttgtaatcctatt

SEQ ID NO: 1414790 - DNA, 15 bp, Homo sapiens
tctttgtaatcctat

SEQ ID NO: 1414791 - DNA, 15 bp, Homo sapiens
ttctttgtaatccta

SEQ ID NO: 1414792 - DNA, 15 bp, Homo sapiens
attctttgtaatcct

SEQ ID NO: 1414793 - DNA, 15 bp, Homo sapiens
aattctttgtaatcc

SEQ ID NO: 1414794 - DNA, 15 bp, Homo sapiens
caattctttgtaatc

SEQ ID NO: 1414795 - DNA, 15 bp, Homo sapiens
acaattctttgtaat

SEQ ID NO: 1414796 - DNA, 15 bp, Homo sapiens
aacaattctttgtaa

SEQ ID NO: 1414797 - DNA, 15 bp, Homo sapiens
taacaattctttgta

SEQ ID NO: 1414798 - DNA, 15 bp, Homo sapiens
ttaacaattctttgt

SEQ ID NO: 1414799 - DNA, 15 bp, Homo sapiens
attaacaattctttg

SEQ ID NO: 1414800 - DNA, 15 bp, Homo sapiens
cattaacaattcttt

SEQ ID NO: 1414801 - DNA, 15 bp, Homo sapiens
tcattaacaattctt

SEQ ID NO: 1414802 - DNA, 15 bp, Homo sapiens
gtcattaacaattct

SEQ ID NO: 1414803 - DNA, 15 bp, Homo sapiens
tgtcattaacaattc

SEQ ID NO: 1414804 - DNA, 15 bp, Homo sapiens
atgtcattaacaatt

SEQ ID NO: 1414805 - DNA, 15 bp, Homo sapiens
catgtcattaacaat

SEQ ID NO: 1414806 - DNA, 15 bp, Homo sapiens
ccatgtcattaacaa

SEQ ID NO: 1414807 - DNA, 15 bp, Homo sapiens
cccatgtcattaaca

SEQ ID NO: 1414808 - DNA, 15 bp, Homo sapiens
tcccatgtcattaac

SEQ ID NO: 1414809 - DNA, 15 bp, Homo sapiens
ttcccatgtcattaa

SEQ ID NO: 1414810 - DNA, 15 bp, Homo sapiens
tttcccatgtcatta

SEQ ID NO: 1414811 - DNA, 15 bp, Homo sapiens
ctttcccatgtcatt

SEQ ID NO: 1414812 - DNA, 15 bp, Homo sapiens
actttcccatgtcat

SEQ ID NO: 1414813 - DNA, 15 bp, Homo sapiens
cactttcccatgtca

SEQ ID NO: 1414814 - DNA, 15 bp, Homo sapiens
gcactttcccatgtc

SEQ ID NO: 1414815 - DNA, 15 bp, Homo sapiens
agcactttcccatgt

SEQ ID NO: 1414816 - DNA, 15 bp, Homo sapiens
aagcactttcccatg

SEQ ID NO: 1414817 - DNA, 15 bp, Homo sapiens
taagcactttcccat

SEQ ID NO: 1414818 - DNA, 15 bp, Homo sapiens
ataagcactttccca

SEQ ID NO: 1414819 - DNA, 15 bp, Homo sapiens
aataagcactttccc

SEQ ID NO: 1414820 - DNA, 15 bp, Homo sapiens
taataagcactttcc

SEQ ID NO: 1414821 - DNA, 15 bp, Homo sapiens
ataataagcactttc

SEQ ID NO: 1414822 - DNA, 15 bp, Homo sapiens
cataataagcacttt

SEQ ID NO: 1414823 - DNA, 15 bp, Homo sapiens
acataataagcactt

SEQ ID NO: 1414824 - DNA, 15 bp, Homo sapiens
aacataataagcact

SEQ ID NO: 1414825 - DNA, 15 bp, Homo sapiens
taacataataagcac

SEQ ID NO: 1414826 - DNA, 15 bp, Homo sapiens
ttaacataataagca

SEQ ID NO: 1414827 - DNA, 15 bp, Homo sapiens
cttaacataataagc

SEQ ID NO: 1414828 - DNA, 15 bp, Homo sapiens
acttaacataataag

SEQ ID NO: 1414829 - DNA, 15 bp, Homo sapiens
cacttaacataataa

SEQ ID NO: 1414830 - DNA, 15 bp, Homo sapiens
tcacttaacataata

SEQ ID NO: 1414831 - DNA, 15 bp, Homo sapiens
ttcacttaacataat

SEQ ID NO: 1414832 - DNA, 15 bp, Homo sapiens
tttcacttaacataa

SEQ ID NO: 1414833 - DNA, 15 bp, Homo sapiens
ttttcacttaacata

SEQ ID NO: 1414834 - DNA, 15 bp, Homo sapiens
tttttcacttaacat

SEQ ID NO: 1414835 - DNA, 15 bp, Homo sapiens
ctttttcacttaaca

SEQ ID NO: 1414836 - DNA, 15 bp, Homo sapiens
tctttttcacttaac

SEQ ID NO: 1414837 - DNA, 15 bp, Homo sapiens
atctttttcacttaa

SEQ ID NO: 1414838 - DNA, 15 bp, Homo sapiens
tatctttttcactta

SEQ ID NO: 1414839 - DNA, 15 bp, Homo sapiens
ttatctttttcactt

SEQ ID NO: 1414840 - DNA, 15 bp, Homo sapiens
cttatctttttcact

SEQ ID NO: 1414841 - DNA, 15 bp, Homo sapiens
tcttatctttttcac

SEQ ID NO: 1414842 - DNA, 15 bp, Homo sapiens
atcttatctttttca

SEQ ID NO: 1414843 - DNA, 15 bp, Homo sapiens
aatcttatctttttc

SEQ ID NO: 1414844 - DNA, 15 bp, Homo sapiens
taatcttatcttttt

SEQ ID NO: 1414845 - DNA, 15 bp, Homo sapiens
ttaatcttatctttt

SEQ ID NO: 1414846 - DNA, 15 bp, Homo sapiens
gttaatcttatcttt

SEQ ID NO: 1414847 - DNA, 15 bp, Homo sapiens
tgttaatcttatctt

SEQ ID NO: 1414848 - DNA, 15 bp, Homo sapiens
ttgttaatcttatct

SEQ ID NO: 1414849 - DNA, 15 bp, Homo sapiens
tttgttaatcttatc

SEQ ID NO: 1414850 - DNA, 15 bp, Homo sapiens
ttttgttaatcttat

SEQ ID NO: 1414851 - DNA, 15 bp, Homo sapiens
tttttgttaatctta

SEQ ID NO: 1414852 - DNA, 15 bp, Homo sapiens
ttttttgttaatctt

SEQ ID NO: 1414853 - DNA, 15 bp, Homo sapiens
tttttttgttaatct

SEQ ID NO: 1414854 - DNA, 15 bp, Homo sapiens
atttttttgttaatc

SEQ ID NO: 1414855 - DNA, 15 bp, Homo sapiens
gatttttttgttaat

SEQ ID NO: 1414856 - DNA, 15 bp, Homo sapiens
agatttttttgttaa

SEQ ID NO: 1414857 - DNA, 15 bp, Homo sapiens
gagatttttttgtta

SEQ ID NO: 1414858 - DNA, 15 bp, Homo sapiens
tgagatttttttgtt

SEQ ID NO: 1414859 - DNA, 15 bp, Homo sapiens
ttgagatttttttgt

SEQ ID NO: 1414860 - DNA, 15 bp, Homo sapiens
tttgagatttttttg

SEQ ID NO: 1414861 - DNA, 15 bp, Homo sapiens
atttgagattttttt

SEQ ID NO: 1414862 - DNA, 15 bp, Homo sapiens
gatttgagatttttt

SEQ ID NO: 1414863 - DNA, 15 bp, Homo sapiens
tgatttgagattttt

SEQ ID NO: 1414864 - DNA, 15 bp, Homo sapiens
atgatttgagatttt

SEQ ID NO: 1414865 - DNA, 15 bp, Homo sapiens
tatgatttgagattt

SEQ ID NO: 1414866 - DNA, 15 bp, Homo sapiens
atatgatttgagatt

SEQ ID NO: 1414867 - DNA, 15 bp, Homo sapiens
gatatgatttgagat

SEQ ID NO: 1414868 - DNA, 15 bp, Homo sapiens
agatatgatttgaga

SEQ ID NO: 1414869 - DNA, 15 bp, Homo sapiens
tagatatgatttgag

SEQ ID NO: 1414870 - DNA, 15 bp, Homo sapiens
ttagatatgatttga

SEQ ID NO: 1414871 - DNA, 15 bp, Homo sapiens
attagatatgatttg

SEQ ID NO: 1414872 - DNA, 15 bp, Homo sapiens
cattagatatgattt

SEQ ID NO: 1414873 - DNA, 15 bp, Homo sapiens
acattagatatgatt

SEQ ID NO: 1414874 - DNA, 15 bp, Homo sapiens
cacattagatatgat

SEQ ID NO: 1414875 - DNA, 15 bp, Homo sapiens
tcacattagatatga

SEQ ID NO: 1414876 - DNA, 15 bp, Homo sapiens
atcacattagatatg

SEQ ID NO: 1414877 - DNA, 15 bp, Homo sapiens
gatcacattagatat

SEQ ID NO: 1414878 - DNA, 15 bp, Homo sapiens
agatcacattagata

SEQ ID NO: 1414879 - DNA, 15 bp, Homo sapiens
gagatcacattagat

SEQ ID NO: 1414880 - DNA, 15 bp, Homo sapiens
tgagatcacattaga

SEQ ID NO: 1414881 - DNA, 15 bp, Homo sapiens
atgagatcacattag

SEQ ID NO: 1414882 - DNA, 15 bp, Homo sapiens
aatgagatcacatta

SEQ ID NO: 1414883 - DNA, 15 bp, Homo sapiens
gaatgagatcacatt

SEQ ID NO: 1414884 - DNA, 15 bp, Homo sapiens
agaatgagatcacat

SEQ ID NO: 1414885 - DNA, 15 bp, Homo sapiens
cagaatgagatcaca

SEQ ID NO: 1414886 - DNA, 15 bp, Homo sapiens
acagaatgagatcac

SEQ ID NO: 1414887 - DNA, 15 bp, Homo sapiens
aacagaatgagatca

SEQ ID NO: 1414888 - DNA, 15 bp, Homo sapiens
aaacagaatgagatc

SEQ ID NO: 1414889 - DNA, 15 bp, Homo sapiens
taaacagaatgagat

SEQ ID NO: 1414890 - DNA, 15 bp, Homo sapiens
ttaaacagaatgaga

SEQ ID NO: 1414891 - DNA, 15 bp, Homo sapiens
tttaaacagaatgag

SEQ ID NO: 1414892 - DNA, 15 bp, Homo sapiens
ttttaaacagaatga

SEQ ID NO: 1414893 - DNA, 15 bp, Homo sapiens
gttttaaacagaatg

SEQ ID NO: 1414894 - DNA, 15 bp, Homo sapiens
tgttttaaacagaat

SEQ ID NO: 1414895 - DNA, 15 bp, Homo sapiens
ttgttttaaacagaa

SEQ ID NO: 1414896 - DNA, 15 bp, Homo sapiens
attgttttaaacaga

SEQ ID NO: 1414897 - DNA, 15 bp, Homo sapiens
tattgttttaaacag

SEQ ID NO: 1414898 - DNA, 15 bp, Homo sapiens
atattgttttaaaca

SEQ ID NO: 1414899 - DNA, 15 bp, Homo sapiens
tatattgttttaaac

SEQ ID NO: 1414900 - DNA, 15 bp, Homo sapiens
ctatattgttttaaa

SEQ ID NO: 1414901 - DNA, 15 bp, Homo sapiens
cctatattgttttaa

SEQ ID NO: 1414902 - DNA, 15 bp, Homo sapiens
gcctatattgtttta

SEQ ID NO: 1414903 - DNA, 15 bp, Homo sapiens
ggcctatattgtttt

SEQ ID NO: 1414904 - DNA, 15 bp, Homo sapiens
tggcctatattgttt

SEQ ID NO: 1414905 - DNA, 15 bp, Homo sapiens
ctggcctatattgtt

SEQ ID NO: 1414906 - DNA, 15 bp, Homo sapiens
cctggcctatattgt

SEQ ID NO: 1414907 - DNA, 15 bp, Homo sapiens
acctggcctatattg

SEQ ID NO: 1414908 - DNA, 15 bp, Homo sapiens
cacctggcctatatt

SEQ ID NO: 1414909 - DNA, 15 bp, Homo sapiens
tccaccgcacctggc

SEQ ID NO: 1414910 - DNA, 15 bp, Homo sapiens
atccaccgcacctgg

SEQ ID NO: 1414911 - DNA, 15 bp, Homo sapiens
aatccaccgcacctg

SEQ ID NO: 1414912 - DNA, 15 bp, Homo sapiens
taatccaccgcacct

SEQ ID NO: 1414913 - DNA, 15 bp, Homo sapiens
ataatccaccgcacc

SEQ ID NO: 1414914 - DNA, 15 bp, Homo sapiens
cataatccaccgcac

SEQ ID NO: 1414915 - DNA, 15 bp, Homo sapiens
gcataatccaccgca

SEQ ID NO: 1414916 - DNA, 15 bp, Homo sapiens
ggcataatccaccgc

SEQ ID NO: 1414917 - DNA, 15 bp, Homo sapiens
aggcataatccaccg

SEQ ID NO: 1414918 - DNA, 15 bp, Homo sapiens
taggcataatccacc

SEQ ID NO: 1414919 - DNA, 15 bp, Homo sapiens
ataggcataatccac

SEQ ID NO: 1414920 - DNA, 15 bp, Homo sapiens
tataggcataatcca

SEQ ID NO: 1414921 - DNA, 15 bp, Homo sapiens
ttataggcataatcc

SEQ ID NO: 1414922 - DNA, 15 bp, Homo sapiens
attataggcataatc

SEQ ID NO: 1414923 - DNA, 15 bp, Homo sapiens
gattataggcataat

SEQ ID NO: 1414924 - DNA, 15 bp, Homo sapiens
agattataggcataa

SEQ ID NO: 1414925 - DNA, 15 bp, Homo sapiens
gagattataggcata

SEQ ID NO: 1414926 - DNA, 15 bp, Homo sapiens
tgagattataggcat

SEQ ID NO: 1414927 - DNA, 15 bp, Homo sapiens
ctgagattataggca

SEQ ID NO: 1414928 - DNA, 15 bp, Homo sapiens
gctgagattataggc

SEQ ID NO: 1414929 - DNA, 15 bp, Homo sapiens
tgctgagattatagg

SEQ ID NO: 1414930 - DNA, 15 bp, Homo sapiens
gtgctgagattatag

SEQ ID NO: 1414931 - DNA, 15 bp, Homo sapiens
agtgctgagattata

SEQ ID NO: 1414932 - DNA, 15 bp, Homo sapiens
aagtgctgagattat

SEQ ID NO: 1414933 - DNA, 15 bp, Homo sapiens
ttgacctcaggtgat

SEQ ID NO: 1414934 - DNA, 15 bp, Homo sapiens
cttgacctcaggtga

SEQ ID NO: 1414935 - DNA, 15 bp, Homo sapiens
tcttgacctcaggtg

SEQ ID NO: 1414936 - DNA, 15 bp, Homo sapiens
atcttgacctcaggt

SEQ ID NO: 1414937 - DNA, 15 bp, Homo sapiens
aatcttgacctcagg

SEQ ID NO: 1414938 - DNA, 15 bp, Homo sapiens
aaatcttgacctcag

SEQ ID NO: 1414939 - DNA, 15 bp, Homo sapiens
gaaatcttgacctca

SEQ ID NO: 1414940 - DNA, 15 bp, Homo sapiens
cgaaatcttgacctc

SEQ ID NO: 1414941 - DNA, 15 bp, Homo sapiens
tcgaaatcttgacct

SEQ ID NO: 1414942 - DNA, 15 bp, Homo sapiens
ctcgaaatcttgacc

SEQ ID NO: 1414943 - DNA, 15 bp, Homo sapiens
tctcgaaatcttgac

SEQ ID NO: 1414944 - DNA, 15 bp, Homo sapiens
gtctcgaaatcttga

SEQ ID NO: 1414945 - DNA, 15 bp, Homo sapiens
agtctcgaaatcttg

SEQ ID NO: 1414946 - DNA, 15 bp, Homo sapiens
tagtctcgaaatctt

SEQ ID NO: 1414947 - DNA, 15 bp, Homo sapiens
ctagtctcgaaatct

SEQ ID NO: 1414948 - DNA, 15 bp, Homo sapiens
gctagtctcgaaatc

SEQ ID NO: 1414949 - DNA, 15 bp, Homo sapiens
ggctagtctcgaaat

SEQ ID NO: 1414950 - DNA, 15 bp, Homo sapiens
aggctagtctcgaaa

SEQ ID NO: 1414951 - DNA, 15 bp, Homo sapiens
ccaggctagtctcga

SEQ ID NO: 1414952 - DNA, 15 bp, Homo sapiens
gccaggctagtctcg

SEQ ID NO: 1414953 - DNA, 15 bp, Homo sapiens
gggttttcaccatgt

SEQ ID NO: 1414954 - DNA, 15 bp, Homo sapiens
cgggttttcaccatg

SEQ ID NO: 1414955 - DNA, 15 bp, Homo sapiens
acgggttttcaccat

SEQ ID NO: 1414956 - DNA, 15 bp, Homo sapiens
aacgggttttcacca

SEQ ID NO: 1414957 - DNA, 15 bp, Homo sapiens
aaacgggttttcacc

SEQ ID NO: 1414958 - DNA, 15 bp, Homo sapiens
gaaacgggttttcac

SEQ ID NO: 1414959 - DNA, 15 bp, Homo sapiens
agaaacgggttttca

SEQ ID NO: 1414960 - DNA, 15 bp, Homo sapiens
tagaaacgggttttc

SEQ ID NO: 1414961 - DNA, 15 bp, Homo sapiens
gtagaaacgggtttt

SEQ ID NO: 1414962 - DNA, 15 bp, Homo sapiens
agtagaaacgggttt

SEQ ID NO: 1414963 - DNA, 15 bp, Homo sapiens
tagtagaaacgggtt

SEQ ID NO: 1414964 - DNA, 15 bp, Homo sapiens
ttagtagaaacgggt

SEQ ID NO: 1414965 - DNA, 15 bp, Homo sapiens
gtttttagtagaaac

SEQ ID NO: 1414966 - DNA, 15 bp, Homo sapiens
tgtttttagtagaaa

SEQ ID NO: 1414967 - DNA, 15 bp, Homo sapiens
ttgtttttagtagaa

SEQ ID NO: 1414968 - DNA, 15 bp, Homo sapiens
ttttgtttttagtag

SEQ ID NO: 1414969 - DNA, 15 bp, Homo sapiens
tttttgtttttagta

SEQ ID NO: 1414970 - DNA, 15 bp, Homo sapiens
ttttttgtttttagt

SEQ ID NO: 1414971 - DNA, 15 bp, Homo sapiens
tttttttgtttttag

SEQ ID NO: 1414972 - DNA, 15 bp, Homo sapiens
atttttttgttttta

SEQ ID NO: 1414973 - DNA, 15 bp, Homo sapiens
aatttttttgttttt

SEQ ID NO: 1414974 - DNA, 15 bp, Homo sapiens
taatttttttgtttt

SEQ ID NO: 1414975 - DNA, 15 bp, Homo sapiens
gctaatttttttgtt

SEQ ID NO: 1414976 - DNA, 15 bp, Homo sapiens
taccacgcccagcta

SEQ ID NO: 1414977 - DNA, 15 bp, Homo sapiens
ctaccacgcccagct

SEQ ID NO: 1414978 - DNA, 15 bp, Homo sapiens
gctaccacgcccagc

SEQ ID NO: 1414979 - DNA, 15 bp, Homo sapiens
ggctaccacgcccag

SEQ ID NO: 1414980 - DNA, 15 bp, Homo sapiens
cggctaccacgccca

SEQ ID NO: 1414981 - DNA, 15 bp, Homo sapiens
ccggctaccacgccc

SEQ ID NO: 1414982 - DNA, 15 bp, Homo sapiens
gccggctaccacgcc

SEQ ID NO: 1414983 - DNA, 15 bp, Homo sapiens
cgccggctaccacgc

SEQ ID NO: 1414984 - DNA, 15 bp, Homo sapiens
gcgccggctaccacg

SEQ ID NO: 1414985 - DNA, 15 bp, Homo sapiens
ggcgccggctaccac

SEQ ID NO: 1414986 - DNA, 15 bp, Homo sapiens
aggcgccggctacca

SEQ ID NO: 1414987 - DNA, 15 bp, Homo sapiens
taggcgccggctacc

SEQ ID NO: 1414988 - DNA, 15 bp, Homo sapiens
ataggcgccggctac

SEQ ID NO: 1414989 - DNA, 15 bp, Homo sapiens
tataggcgccggcta

SEQ ID NO: 1414990 - DNA, 15 bp, Homo sapiens
ttataggcgccggct

SEQ ID NO: 1414991 - DNA, 15 bp, Homo sapiens
attataggcgccggc

SEQ ID NO: 1414992 - DNA, 15 bp, Homo sapiens
gattataggcgccgg

SEQ ID NO: 1414993 - DNA, 15 bp, Homo sapiens
ggattataggcgccg

SEQ ID NO: 1414994 - DNA, 15 bp, Homo sapiens
gggattataggcgcc

SEQ ID NO: 1414995 - DNA, 15 bp, Homo sapiens
ttcccgggttcaagc

SEQ ID NO: 1414996 - DNA, 15 bp, Homo sapiens
cttcccgggttcaag

SEQ ID NO: 1414997 - DNA, 15 bp, Homo sapiens
gcttcccgggttcaa

SEQ ID NO: 1414998 - DNA, 15 bp, Homo sapiens
tgcttcccgggttca

SEQ ID NO: 1414999 - DNA, 15 bp, Homo sapiens
ctgcttcccgggttc

SEQ ID NO: 1415000 - DNA, 15 bp, Homo sapiens
tctgcttcccgggtt

SEQ ID NO: 1415001 - DNA, 15 bp, Homo sapiens
ctctgcttcccgggt

SEQ ID NO: 1415002 - DNA, 15 bp, Homo sapiens
cctctgcttcccggg

SEQ ID NO: 1415003 - DNA, 15 bp, Homo sapiens
acctctgcttcccgg

SEQ ID NO: 1415004 - DNA, 15 bp, Homo sapiens
aacctctgcttcccg

SEQ ID NO: 1415005 - DNA, 15 bp, Homo sapiens
caacctctgcttccc

SEQ ID NO: 1415006 - DNA, 15 bp, Homo sapiens
acaacctctgcttcc

SEQ ID NO: 1415007 - DNA, 15 bp, Homo sapiens
tacaacctctgcttc

SEQ ID NO: 1415008 - DNA, 15 bp, Homo sapiens
ctacaacctctgctt

SEQ ID NO: 1415009 - DNA, 15 bp, Homo sapiens
actacaacctctgct

SEQ ID NO: 1415010 - DNA, 15 bp, Homo sapiens
agctcactacaacct

SEQ ID NO: 1415011 - DNA, 15 bp, Homo sapiens
cagctcactacaacc

SEQ ID NO: 1415012 - DNA, 15 bp, Homo sapiens
tcagctcactacaac

SEQ ID NO: 1415013 - DNA, 15 bp, Homo sapiens
ctcagctcactacaa

SEQ ID NO: 1415014 - DNA, 15 bp, Homo sapiens
tctcagctcactaca

SEQ ID NO: 1415015 - DNA, 15 bp, Homo sapiens
atctcagctcactac

SEQ ID NO: 1415016 - DNA, 15 bp, Homo sapiens
gatctcagctcacta

SEQ ID NO: 1415017 - DNA, 15 bp, Homo sapiens
cagtgcagtggcatg

SEQ ID NO: 1415018 - DNA, 15 bp, Homo sapiens
gcagtgcagtggcat

SEQ ID NO: 1415019 - DNA, 15 bp, Homo sapiens
tccaggctgcagtgc

SEQ ID NO: 1415020 - DNA, 15 bp, Homo sapiens
atccaggctgcagtg

SEQ ID NO: 1415021 - DNA, 15 bp, Homo sapiens
catccaggctgcagt

SEQ ID NO: 1415022 - DNA, 15 bp, Homo sapiens
tcatccaggctgcag

SEQ ID NO: 1415023 - DNA, 15 bp, Homo sapiens
gtcatccaggctgca

SEQ ID NO: 1415024 - DNA, 15 bp, Homo sapiens
tgtcatccaggctgc

SEQ ID NO: 1415025 - DNA, 15 bp, Homo sapiens
gtttttctttttctt

SEQ ID NO: 1415026 - DNA, 15 bp, Homo sapiens
tgtttttctttttct

SEQ ID NO: 1415027 - DNA, 15 bp, Homo sapiens
ttgtttttctttttc

SEQ ID NO: 1415028 - DNA, 15 bp, Homo sapiens
tttgtttttcttttt

SEQ ID NO: 1415029 - DNA, 15 bp, Homo sapiens
ttttgtttttctttt

SEQ ID NO: 1415030 - DNA, 15 bp, Homo sapiens
gttttgtttttcttt

SEQ ID NO: 1415031 - DNA, 15 bp, Homo sapiens
tttctgttttgtttt

SEQ ID NO: 1415032 - DNA, 15 bp, Homo sapiens
gtttctgttttgttt

SEQ ID NO: 1415033 - DNA, 15 bp, Homo sapiens
tgtttctgttttgtt

SEQ ID NO: 1415034 - DNA, 15 bp, Homo sapiens
ttgtttctgttttgt

SEQ ID NO: 1415035 - DNA, 15 bp, Homo sapiens
tttgtttctgttttg

SEQ ID NO: 1415036 - DNA, 15 bp, Homo sapiens
ttttgtttctgtttt

SEQ ID NO: 1415037 - DNA, 15 bp, Homo sapiens
tttttgtttctgttt

SEQ ID NO: 1415038 - DNA, 15 bp, Homo sapiens
ttttttgtttctgtt

SEQ ID NO: 1415039 - DNA, 15 bp, Homo sapiens
gttttttgtttctgt

SEQ ID NO: 1415040 - DNA, 15 bp, Homo sapiens
tgttttttgtttctg

SEQ ID NO: 1415041 - DNA, 15 bp, Homo sapiens
ttgttttttgtttct

SEQ ID NO: 1415042 - DNA, 15 bp, Homo sapiens
tttgttttttgtttc

SEQ ID NO: 1415043 - DNA, 15 bp, Homo sapiens
gttttttgttttttg

SEQ ID NO: 1415044 - DNA, 15 bp, Homo sapiens
ggttttttgtttttt

SEQ ID NO: 1415045 - DNA, 15 bp, Homo sapiens
aggttttttgttttt

SEQ ID NO: 1415046 - DNA, 15 bp, Homo sapiens
taggttttttgtttt

SEQ ID NO: 1415047 - DNA, 15 bp, Homo sapiens
ttaggttttttgttt

SEQ ID NO: 1415048 - DNA, 15 bp, Homo sapiens
attaggttttttgtt

SEQ ID NO: 1415049 - DNA, 15 bp, Homo sapiens
tattaggttttttgt

SEQ ID NO: 1415050 - DNA, 15 bp, Homo sapiens
atattaggttttttg

SEQ ID NO: 1415051 - DNA, 15 bp, Homo sapiens
tatattaggtttttt

SEQ ID NO: 1415052 - DNA, 15 bp, Homo sapiens
ctatattaggttttt

SEQ ID NO: 1415053 - DNA, 15 bp, Homo sapiens
tctatattaggtttt

SEQ ID NO: 1415054 - DNA, 15 bp, Homo sapiens
ctctatattaggttt

SEQ ID NO: 1415055 - DNA, 15 bp, Homo sapiens
gctctatattaggtt

SEQ ID NO: 1415056 - DNA, 15 bp, Homo sapiens
tgctctatattaggt

SEQ ID NO: 1415057 - DNA, 15 bp, Homo sapiens
ctgctctatattagg

SEQ ID NO: 1415058 - DNA, 15 bp, Homo sapiens
cctgctctatattag

SEQ ID NO: 1415059 - DNA, 15 bp, Homo sapiens
tcctgctctatatta

SEQ ID NO: 1415060 - DNA, 15 bp, Homo sapiens
ctcctgctctatatt

SEQ ID NO: 1415061 - DNA, 15 bp, Homo sapiens
cctcctgctctatat

SEQ ID NO: 1415062 - DNA, 15 bp, Homo sapiens
ccctcctgctctata

SEQ ID NO: 1415063 - DNA, 15 bp, Homo sapiens
cccctcctgctctat

SEQ ID NO: 1415064 - DNA, 15 bp, Homo sapiens
tcccctcctgctcta

SEQ ID NO: 1415065 - DNA, 15 bp, Homo sapiens
atcccctcctgctct

SEQ ID NO: 1415066 - DNA, 15 bp, Homo sapiens
aatcccctcctgctc

SEQ ID NO: 1415067 - DNA, 15 bp, Homo sapiens
taatcccctcctgct

SEQ ID NO: 1415068 - DNA, 15 bp, Homo sapiens
ttaatcccctcctgc

SEQ ID NO: 1415069 - DNA, 15 bp, Homo sapiens
gttaatcccctcctg

SEQ ID NO: 1415070 - DNA, 15 bp, Homo sapiens
ggttaatcccctcct

SEQ ID NO: 1415071 - DNA, 15 bp, Homo sapiens
gggttaatcccctcc

SEQ ID NO: 1415072 - DNA, 15 bp, Homo sapiens
tgggttaatcccctc

SEQ ID NO: 1415073 - DNA, 15 bp, Homo sapiens
ctgggttaatcccct

SEQ ID NO: 1415074 - DNA, 15 bp, Homo sapiens
gctgggttaatcccc

SEQ ID NO: 1415075 - DNA, 15 bp, Homo sapiens
tgctgggttaatccc

SEQ ID NO: 1415076 - DNA, 15 bp, Homo sapiens
ttgctgggttaatcc

SEQ ID NO: 1415077 - DNA, 15 bp, Homo sapiens
tttgctgggttaatc

SEQ ID NO: 1415078 - DNA, 15 bp, Homo sapiens
gtttgctgggttaat

SEQ ID NO: 1415079 - DNA, 15 bp, Homo sapiens
ggtttgctgggttaa

SEQ ID NO: 1415080 - DNA, 15 bp, Homo sapiens
tggtttgctgggtta

SEQ ID NO: 1415081 - DNA, 15 bp, Homo sapiens
ttggtttgctgggtt

SEQ ID NO: 1415082 - DNA, 15 bp, Homo sapiens
cttggtttgctgggt

SEQ ID NO: 1415083 - DNA, 15 bp, Homo sapiens
acttggtttgctggg

SEQ ID NO: 1415084 - DNA, 15 bp, Homo sapiens
cacttggtttgctgg

SEQ ID NO: 1415085 - DNA, 15 bp, Homo sapiens
gcacttggtttgctg

SEQ ID NO: 1415086 - DNA, 15 bp, Homo sapiens
tgcacttggtttgct

SEQ ID NO: 1415087 - DNA, 15 bp, Homo sapiens
gtgcacttggtttgc

SEQ ID NO: 1415088 - DNA, 15 bp, Homo sapiens
tgtgcacttggtttg

SEQ ID NO: 1415089 - DNA, 15 bp, Homo sapiens
ttgtgcacttggttt

SEQ ID NO: 1415090 - DNA, 15 bp, Homo sapiens
attgtgcacttggtt

SEQ ID NO: 1415091 - DNA, 15 bp, Homo sapiens
gattgtgcacttggt

SEQ ID NO: 1415092 - DNA, 15 bp, Homo sapiens
tgattgtgcacttgg

SEQ ID NO: 1415093 - DNA, 15 bp, Homo sapiens
atgattgtgcacttg

SEQ ID NO: 1415094 - DNA, 15 bp, Homo sapiens
aatgattgtgcactt

SEQ ID NO: 1415095 - DNA, 15 bp, Homo sapiens
taatgattgtgcact

SEQ ID NO: 1415096 - DNA, 15 bp, Homo sapiens
gtaatgattgtgcac

SEQ ID NO: 1415097 - DNA, 15 bp, Homo sapiens
ggtaatgattgtgca

SEQ ID NO: 1415098 - DNA, 15 bp, Homo sapiens
aggtaatgattgtgc

SEQ ID NO: 1415099 - DNA, 15 bp, Homo sapiens
aaggtaatgattgtg

SEQ ID NO: 1415100 - DNA, 15 bp, Homo sapiens
aaaggtaatgattgt

SEQ ID NO: 1415101 - DNA, 15 bp, Homo sapiens
taaaggtaatgattg

SEQ ID NO: 1415102 - DNA, 15 bp, Homo sapiens
ttaaaggtaatgatt

SEQ ID NO: 1415103 - DNA, 15 bp, Homo sapiens
cttaaaggtaatgat

SEQ ID NO: 1415104 - DNA, 15 bp, Homo sapiens
acttaaaggtaatga

SEQ ID NO: 1415105 - DNA, 15 bp, Homo sapiens
cacttaaaggtaatg

SEQ ID NO: 1415106 - DNA, 15 bp, Homo sapiens
acacttaaaggtaat

SEQ ID NO: 1415107 - DNA, 15 bp, Homo sapiens
aacacttaaaggtaa

SEQ ID NO: 1415108 - DNA, 15 bp, Homo sapiens
caacacttaaaggta

SEQ ID NO: 1415109 - DNA, 15 bp, Homo sapiens
acaacacttaaaggt

SEQ ID NO: 1415110 - DNA, 15 bp, Homo sapiens
cacaacacttaaagg

SEQ ID NO: 1415111 - DNA, 15 bp, Homo sapiens
ccacaacacttaaag

SEQ ID NO: 1415112 - DNA, 15 bp, Homo sapiens
cccacaacacttaaa

SEQ ID NO: 1415113 - DNA, 15 bp, Homo sapiens
acccacaacacttaa

SEQ ID NO: 1415114 - DNA, 15 bp, Homo sapiens
cacccacaacactta

SEQ ID NO: 1415115 - DNA, 15 bp, Homo sapiens
tcacccacaacactt

SEQ ID NO: 1415116 - DNA, 15 bp, Homo sapiens
ctcacccacaacact

SEQ ID NO: 1415117 - DNA, 15 bp, Homo sapiens
actcacccacaacac

SEQ ID NO: 1415118 - DNA, 15 bp, Homo sapiens
aactcacccacaaca

SEQ ID NO: 1415119 - DNA, 15 bp, Homo sapiens
aaactcacccacaac

SEQ ID NO: 1415120 - DNA, 15 bp, Homo sapiens
aaaactcacccacaa

SEQ ID NO: 1415121 - DNA, 15 bp, Homo sapiens
aaaaactcacccaca

SEQ ID NO: 1415122 - DNA, 15 bp, Homo sapiens
caaaaactcacccac

SEQ ID NO: 1415123 - DNA, 15 bp, Homo sapiens
acaaaaactcaccca

SEQ ID NO: 1415124 - DNA, 15 bp, Homo sapiens
aacaaaaactcaccc

SEQ ID NO: 1415125 - DNA, 15 bp, Homo sapiens
gaacaaaaactcacc

SEQ ID NO: 1415126 - DNA, 15 bp, Homo sapiens
agaacaaaaactcac

SEQ ID NO: 1415127 - DNA, 15 bp, Homo sapiens
gagaacaaaaactca

SEQ ID NO: 1415128 - DNA, 15 bp, Homo sapiens
agagaacaaaaactc

SEQ ID NO: 1415129 - DNA, 15 bp, Homo sapiens
aagagaacaaaaact

SEQ ID NO: 1415130 - DNA, 15 bp, Homo sapiens
gaagagaacaaaaac

SEQ ID NO: 1415131 - DNA, 15 bp, Homo sapiens
agaagagaacaaaaa

SEQ ID NO: 1415132 - DNA, 15 bp, Homo sapiens
cagaagagaacaaaa

SEQ ID NO: 1415133 - DNA, 15 bp, Homo sapiens
acagaagagaacaaa

SEQ ID NO: 1415134 - DNA, 15 bp, Homo sapiens
tacagaagagaacaa

SEQ ID NO: 1415135 - DNA, 15 bp, Homo sapiens
gtacagaagagaaca

SEQ ID NO: 1415136 - DNA, 15 bp, Homo sapiens
tgtacagaagagaac

SEQ ID NO: 1415137 - DNA, 15 bp, Homo sapiens
atgtacagaagagaa

SEQ ID NO: 1415138 - DNA, 15 bp, Homo sapiens
aatgtacagaagaga

SEQ ID NO: 1415139 - DNA, 15 bp, Homo sapiens
aaatgtacagaagag

SEQ ID NO: 1415140 - DNA, 15 bp, Homo sapiens
aaaatgtacagaaga

SEQ ID NO: 1415141 - DNA, 15 bp, Homo sapiens
aaaaatgtacagaag

SEQ ID NO: 1415142 - DNA, 15 bp, Homo sapiens
aaaaaatgtacagaa

SEQ ID NO: 1415143 - DNA, 15 bp, Homo sapiens
aaaaaaatgtacaga

SEQ ID NO: 1415144 - DNA, 15 bp, Homo sapiens
aaaaaaaatgtacag

SEQ ID NO: 1415145 - DNA, 15 bp, Homo sapiens
aaaaaaaaatgtaca

SEQ ID NO: 1415146 - DNA, 15 bp, Homo sapiens
caaaaaaaaatgtac

SEQ ID NO: 1415147 - DNA, 15 bp, Homo sapiens
acaaaaaaaaatgta

SEQ ID NO: 1415148 - DNA, 15 bp, Homo sapiens
tacaaaaaaaaatgt

SEQ ID NO: 1415149 - DNA, 15 bp, Homo sapiens
gaaaaatacaaaaaa

SEQ ID NO: 1415150 - DNA, 15 bp, Homo sapiens
tgaaaaatacaaaaa

SEQ ID NO: 1415151 - DNA, 15 bp, Homo sapiens
ttgaaaaatacaaaa

SEQ ID NO: 1415152 - DNA, 15 bp, Homo sapiens
cttgaaaaatacaaa

SEQ ID NO: 1415153 - DNA, 15 bp, Homo sapiens
acttgaaaaatacaa

SEQ ID NO: 1415154 - DNA, 15 bp, Homo sapiens
aacttgaaaaataca

SEQ ID NO: 1415155 - DNA, 15 bp, Homo sapiens
aaacttgaaaaatac

SEQ ID NO: 1415156 - DNA, 15 bp, Homo sapiens
gaaacttgaaaaata

SEQ ID NO: 1415157 - DNA, 15 bp, Homo sapiens
tgaaacttgaaaaat

SEQ ID NO: 1415158 - DNA, 15 bp, Homo sapiens
atgaaacttgaaaaa

SEQ ID NO: 1415159 - DNA, 15 bp, Homo sapiens
tatgaaacttgaaaa

SEQ ID NO: 1415160 - DNA, 15 bp, Homo sapiens
gtatgaaacttgaaa

SEQ ID NO: 1415161 - DNA, 15 bp, Homo sapiens
tgtatgaaacttgaa

SEQ ID NO: 1415162 - DNA, 15 bp, Homo sapiens
ttgtatgaaacttga

SEQ ID NO: 1415163 - DNA, 15 bp, Homo sapiens
attgtatgaaacttg

SEQ ID NO: 1415164 - DNA, 15 bp, Homo sapiens
cattgtatgaaactt

SEQ ID NO: 1415165 - DNA, 15 bp, Homo sapiens
tcattgtatgaaact

SEQ ID NO: 1415166 - DNA, 15 bp, Homo sapiens
ctcattgtatgaaac

SEQ ID NO: 1415167 - DNA, 15 bp, Homo sapiens
gctcattgtatgaaa

SEQ ID NO: 1415168 - DNA, 15 bp, Homo sapiens
tgctcattgtatgaa

SEQ ID NO: 1415169 - DNA, 15 bp, Homo sapiens
atgctcattgtatga

SEQ ID NO: 1415170 - DNA, 15 bp, Homo sapiens
tatgctcattgtatg

SEQ ID NO: 1415171 - DNA, 15 bp, Homo sapiens
atatgctcattgtat

SEQ ID NO: 1415172 - DNA, 15 bp, Homo sapiens
tatatgctcattgta

SEQ ID NO: 1415173 - DNA, 15 bp, Homo sapiens
ttatatgctcattgt

SEQ ID NO: 1415174 - DNA, 15 bp, Homo sapiens
tttatatgctcattg

SEQ ID NO: 1415175 - DNA, 15 bp, Homo sapiens
ttttatatgctcatt

SEQ ID NO: 1415176 - DNA, 15 bp, Homo sapiens
tttttatatgctcat

SEQ ID NO: 1415177 - DNA, 15 bp, Homo sapiens
atttttatatgctca

SEQ ID NO: 1415178 - DNA, 15 bp, Homo sapiens
tatttttatatgctc

SEQ ID NO: 1415179 - DNA, 15 bp, Homo sapiens
atatttttatatgct

SEQ ID NO: 1415180 - DNA, 15 bp, Homo sapiens
tatatttttatatgc

SEQ ID NO: 1415181 - DNA, 15 bp, Homo sapiens
atatatttttatatg

SEQ ID NO: 1415182 - DNA, 15 bp, Homo sapiens
aatatatttttatat

SEQ ID NO: 1415183 - DNA, 15 bp, Homo sapiens
taatatatttttata

SEQ ID NO: 1415184 - DNA, 15 bp, Homo sapiens
gtaatatatttttat

SEQ ID NO: 1415185 - DNA, 15 bp, Homo sapiens
agtaatatattttta

SEQ ID NO: 1415186 - DNA, 15 bp, Homo sapiens
aagtaatatattttt

SEQ ID NO: 1415187 - DNA, 15 bp, Homo sapiens
aaagtaatatatttt

SEQ ID NO: 1415188 - DNA, 15 bp, Homo sapiens
gaaagtaatatattt

SEQ ID NO: 1415189 - DNA, 15 bp, Homo sapiens
tgaaagtaatatatt

SEQ ID NO: 1415190 - DNA, 15 bp, Homo sapiens
atgaaagtaatatat

SEQ ID NO: 1415191 - DNA, 15 bp, Homo sapiens
catgaaagtaatata

SEQ ID NO: 1415192 - DNA, 15 bp, Homo sapiens
tcatgaaagtaatat

SEQ ID NO: 1415193 - DNA, 15 bp, Homo sapiens
ttcatgaaagtaata

SEQ ID NO: 1415194 - DNA, 15 bp, Homo sapiens
attcatgaaagtaat

SEQ ID NO: 1415195 - DNA, 15 bp, Homo sapiens
gattcatgaaagtaa

SEQ ID NO: 1415196 - DNA, 15 bp, Homo sapiens
tgattcatgaaagta

SEQ ID NO: 1415197 - DNA, 15 bp, Homo sapiens
atgattcatgaaagt

SEQ ID NO: 1415198 - DNA, 15 bp, Homo sapiens
aatgattcatgaaag

SEQ ID NO: 1415199 - DNA, 15 bp, Homo sapiens
aaatgattcatgaaa

SEQ ID NO: 1415200 - DNA, 15 bp, Homo sapiens
caaatgattcatgaa

SEQ ID NO: 1415201 - DNA, 15 bp, Homo sapiens
tcaaatgattcatga

SEQ ID NO: 1415202 - DNA, 15 bp, Homo sapiens
gtcaaatgattcatg

SEQ ID NO: 1415203 - DNA, 15 bp, Homo sapiens
tgtcaaatgattcat

SEQ ID NO: 1415204 - DNA, 15 bp, Homo sapiens
atgtcaaatgattca

SEQ ID NO: 1415205 - DNA, 15 bp, Homo sapiens
aatgtcaaatgattc

SEQ ID NO: 1415206 - DNA, 15 bp, Homo sapiens
aaatgtcaaatgatt

SEQ ID NO: 1415207 - DNA, 15 bp, Homo sapiens
caaatgtcaaatgat

SEQ ID NO: 1415208 - DNA, 15 bp, Homo sapiens
acaaatgtcaaatga

SEQ ID NO: 1415209 - DNA, 15 bp, Homo sapiens
aacaaatgtcaaatg

SEQ ID NO: 1415210 - DNA, 15 bp, Homo sapiens
caacaaatgtcaaat

SEQ ID NO: 1415211 - DNA, 15 bp, Homo sapiens
tcaacaaatgtcaaa

SEQ ID NO: 1415212 - DNA, 15 bp, Homo sapiens
ctcaacaaatgtcaa

SEQ ID NO: 1415213 - DNA, 15 bp, Homo sapiens
cctcaacaaatgtca

SEQ ID NO: 1415214 - DNA, 15 bp, Homo sapiens
tcctcaacaaatgtc

SEQ ID NO: 1415215 - DNA, 15 bp, Homo sapiens
ttcctcaacaaatgt

SEQ ID NO: 1415216 - DNA, 15 bp, Homo sapiens
attcctcaacaaatg

SEQ ID NO: 1415217 - DNA, 15 bp, Homo sapiens
aattcctcaacaaat

SEQ ID NO: 1415218 - DNA, 15 bp, Homo sapiens
gaattcctcaacaaa

SEQ ID NO: 1415219 - DNA, 15 bp, Homo sapiens
agaattcctcaacaa

SEQ ID NO: 1415220 - DNA, 15 bp, Homo sapiens
aagaattcctcaaca

SEQ ID NO: 1415221 - DNA, 15 bp, Homo sapiens
aaagaattcctcaac

SEQ ID NO: 1415222 - DNA, 15 bp, Homo sapiens
caaagaattcctcaa

SEQ ID NO: 1415223 - DNA, 15 bp, Homo sapiens
acaaagaattcctca

SEQ ID NO: 1415224 - DNA, 15 bp, Homo sapiens
cacaaagaattcctc

SEQ ID NO: 1415225 - DNA, 15 bp, Homo sapiens
ccacaaagaattcct

SEQ ID NO: 1415226 - DNA, 15 bp, Homo sapiens
gccacaaagaattcc

SEQ ID NO: 1415227 - DNA, 15 bp, Homo sapiens
agccacaaagaattc

SEQ ID NO: 1415228 - DNA, 15 bp, Homo sapiens
tagccacaaagaatt

SEQ ID NO: 1415229 - DNA, 15 bp, Homo sapiens
ttagccacaaagaat

SEQ ID NO: 1415230 - DNA, 15 bp, Homo sapiens
cttagccacaaagaa

SEQ ID NO: 1415231 - DNA, 15 bp, Homo sapiens
acttagccacaaaga

SEQ ID NO: 1415232 - DNA, 15 bp, Homo sapiens
aacttagccacaaag

SEQ ID NO: 1415233 - DNA, 15 bp, Homo sapiens
aaacttagccacaaa

SEQ ID NO: 1415234 - DNA, 15 bp, Homo sapiens
caaacttagccacaa

SEQ ID NO: 1415235 - DNA, 15 bp, Homo sapiens
acaaacttagccaca

SEQ ID NO: 1415236 - DNA, 15 bp, Homo sapiens
tacaaacttagccac

SEQ ID NO: 1415237 - DNA, 15 bp, Homo sapiens
ctacaaacttagcca

SEQ ID NO: 1415238 - DNA, 15 bp, Homo sapiens
actacaaacttagcc

SEQ ID NO: 1415239 - DNA, 15 bp, Homo sapiens
gactacaaacttagc

SEQ ID NO: 1415240 - DNA, 15 bp, Homo sapiens
tgactacaaacttag

SEQ ID NO: 1415241 - DNA, 15 bp, Homo sapiens
ctgactacaaactta

SEQ ID NO: 1415242 - DNA, 15 bp, Homo sapiens
cctgactacaaactt

SEQ ID NO: 1415243 - DNA, 15 bp, Homo sapiens
acctgactacaaact

SEQ ID NO: 1415244 - DNA, 15 bp, Homo sapiens
gacctgactacaaac

SEQ ID NO: 1415245 - DNA, 15 bp, Homo sapiens
agacctgactacaaa

SEQ ID NO: 1415246 - DNA, 15 bp, Homo sapiens
aagacctgactacaa

SEQ ID NO: 1415247 - DNA, 15 bp, Homo sapiens
caagacctgactaca

SEQ ID NO: 1415248 - DNA, 15 bp, Homo sapiens
tcaagacctgactac

SEQ ID NO: 1415249 - DNA, 15 bp, Homo sapiens
ctcaagacctgacta

SEQ ID NO: 1415250 - DNA, 15 bp, Homo sapiens
tctcaagacctgact

SEQ ID NO: 1415251 - DNA, 15 bp, Homo sapiens
ctctcaagacctgac

SEQ ID NO: 1415252 - DNA, 15 bp, Homo sapiens
cctctcaagacctga

SEQ ID NO: 1415253 - DNA, 15 bp, Homo sapiens
acctctcaagacctg

SEQ ID NO: 1415254 - DNA, 15 bp, Homo sapiens
cacctctcaagacct

SEQ ID NO: 1415255 - DNA, 15 bp, Homo sapiens
tcacctctcaagacc

SEQ ID NO: 1415256 - DNA, 15 bp, Homo sapiens
gtcacctctcaagac

SEQ ID NO: 1415257 - DNA, 15 bp, Homo sapiens
tgtcacctctcaaga

SEQ ID NO: 1415258 - DNA, 15 bp, Homo sapiens
ttgtcacctctcaag

SEQ ID NO: 1415259 - DNA, 15 bp, Homo sapiens
gttgtcacctctcaa

SEQ ID NO: 1415260 - DNA, 15 bp, Homo sapiens
cgttgtcacctctca

SEQ ID NO: 1415261 - DNA, 15 bp, Homo sapiens
acgttgtcacctctc

SEQ ID NO: 1415262 - DNA, 15 bp, Homo sapiens
cacgttgtcacctct

SEQ ID NO: 1415263 - DNA, 15 bp, Homo sapiens
gcacgttgtcacctc

SEQ ID NO: 1415264 - DNA, 15 bp, Homo sapiens
agcacgttgtcacct

SEQ ID NO: 1415265 - DNA, 15 bp, Homo sapiens
cagcacgttgtcacc

SEQ ID NO: 1415266 - DNA, 15 bp, Homo sapiens
ccagcacgttgtcac

SEQ ID NO: 1415267 - DNA, 15 bp, Homo sapiens
gccagcacgttgtca

SEQ ID NO: 1415268 - DNA, 15 bp, Homo sapiens
tgccagcacgttgtc

SEQ ID NO: 1415269 - DNA, 15 bp, Homo sapiens
ctgccagcacgttgt

SEQ ID NO: 1415270 - DNA, 15 bp, Homo sapiens
gctgccagcacgttg

SEQ ID NO: 1415271 - DNA, 15 bp, Homo sapiens
ggctgccagcacgtt

SEQ ID NO: 1415272 - DNA, 15 bp, Homo sapiens
gggctgccagcacgt

SEQ ID NO: 1415273 - DNA, 15 bp, Homo sapiens
agggctgccagcacg

SEQ ID NO: 1415274 - DNA, 15 bp, Homo sapiens
aagggctgccagcac

SEQ ID NO: 1415275 - DNA, 15 bp, Homo sapiens
caagggctgccagca

SEQ ID NO: 1415276 - DNA, 15 bp, Homo sapiens
gcaagggctgccagc

SEQ ID NO: 1415277 - DNA, 15 bp, Homo sapiens
tgcaagggctgccag

SEQ ID NO: 1415278 - DNA, 15 bp, Homo sapiens
ctgcaagggctgcca

SEQ ID NO: 1415279 - DNA, 15 bp, Homo sapiens
gctgcaagggctgcc

SEQ ID NO: 1415280 - DNA, 15 bp, Homo sapiens
ggctgcaagggctgc

SEQ ID NO: 1415281 - DNA, 15 bp, Homo sapiens
gggctgcaagggctg

SEQ ID NO: 1415282 - DNA, 15 bp, Homo sapiens
agggctgcaagggct

SEQ ID NO: 1415283 - DNA, 15 bp, Homo sapiens
gagggctgcaagggc

SEQ ID NO: 1415284 - DNA, 15 bp, Homo sapiens
cgagggctgcaaggg

SEQ ID NO: 1415285 - DNA, 15 bp, Homo sapiens
gcgagggctgcaagg

SEQ ID NO: 1415286 - DNA, 15 bp, Homo sapiens
agcgagggctgcaag

SEQ ID NO: 1415287 - DNA, 15 bp, Homo sapiens
gagcgagggctgcaa

SEQ ID NO: 1415288 - DNA, 15 bp, Homo sapiens
cgagcgagggctgca

SEQ ID NO: 1415289 - DNA, 15 bp, Homo sapiens
gcgagcgagggctgc

SEQ ID NO: 1415290 - DNA, 15 bp, Homo sapiens
agcgagcgagggctg

SEQ ID NO: 1415291 - DNA, 15 bp, Homo sapiens
gagcgagcgagggct

SEQ ID NO: 1415292 - DNA, 15 bp, Homo sapiens
agagcgagcgagggc

SEQ ID NO: 1415293 - DNA, 15 bp, Homo sapiens
gagagcgagcgaggg

SEQ ID NO: 1415294 - DNA, 15 bp, Homo sapiens
ggagagcgagcgagg

SEQ ID NO: 1415295 - DNA, 15 bp, Homo sapiens
cggagagcgagcgag

SEQ ID NO: 1415296 - DNA, 15 bp, Homo sapiens
gcggagagcgagcga

SEQ ID NO: 1415297 - DNA, 15 bp, Homo sapiens
cgcggagagcgagcg

SEQ ID NO: 1415298 - DNA, 15 bp, Homo sapiens
gcgcggagagcgagc

SEQ ID NO: 1415299 - DNA, 15 bp, Homo sapiens
ggcgcggagagcgag

SEQ ID NO: 1415300 - DNA, 15 bp, Homo sapiens
aggcgcggagagcga

SEQ ID NO: 1415301 - DNA, 15 bp, Homo sapiens
gaggcgcggagagcg

SEQ ID NO: 1415302 - DNA, 15 bp, Homo sapiens
ggaggcgcggagagc

SEQ ID NO: 1415303 - DNA, 15 bp, Homo sapiens
gaggaggcgcggaga

SEQ ID NO: 1415304 - DNA, 15 bp, Homo sapiens
cgaggaggcgcggag

SEQ ID NO: 1415305 - DNA, 15 bp, Homo sapiens
ccgaggaggcgcgga

SEQ ID NO: 1415306 - DNA, 15 bp, Homo sapiens
gccgaggaggcgcgg

SEQ ID NO: 1415307 - DNA, 15 bp, Homo sapiens
ggccgaggaggcgcg

SEQ ID NO: 1415308 - DNA, 15 bp, Homo sapiens
aggccgaggaggcgc

SEQ ID NO: 1415309 - DNA, 15 bp, Homo sapiens
aaggccgaggaggcg

SEQ ID NO: 1415310 - DNA, 15 bp, Homo sapiens
caaggccgaggaggc

SEQ ID NO: 1415311 - DNA, 15 bp, Homo sapiens
ccaaggccgaggagg

SEQ ID NO: 1415312 - DNA, 15 bp, Homo sapiens
gccaaggccgaggag

SEQ ID NO: 1415313 - DNA, 15 bp, Homo sapiens
cgccaaggccgagga

SEQ ID NO: 1415314 - DNA, 15 bp, Homo sapiens
gcgccaaggccgagg

SEQ ID NO: 1415315 - DNA, 15 bp, Homo sapiens
ggcgccaaggccgag

SEQ ID NO: 1415316 - DNA, 15 bp, Homo sapiens
gggcgccaaggccga

SEQ ID NO: 1415317 - DNA, 15 bp, Homo sapiens
tgggcgccaaggccg

SEQ ID NO: 1415318 - DNA, 15 bp, Homo sapiens
gtgggcgccaaggcc

SEQ ID NO: 1415319 - DNA, 15 bp, Homo sapiens
agtgggcgccaaggc

SEQ ID NO: 1415320 - DNA, 15 bp, Homo sapiens
gagtgggcgccaagg

SEQ ID NO: 1415321 - DNA, 15 bp, Homo sapiens
agagtgggcgccaag

SEQ ID NO: 1415322 - DNA, 15 bp, Homo sapiens
cagagtgggcgccaa

SEQ ID NO: 1415323 - DNA, 15 bp, Homo sapiens
ccagagtgggcgcca

SEQ ID NO: 1415324 - DNA, 15 bp, Homo sapiens
gccagagtgggcgcc

SEQ ID NO: 1415325 - DNA, 15 bp, Homo sapiens
ggccagagtgggcgc

SEQ ID NO: 1415326 - DNA, 15 bp, Homo sapiens
cggccagagtgggcg

SEQ ID NO: 1415327 - DNA, 15 bp, Homo sapiens
gcggccagagtgggc

SEQ ID NO: 1415328 - DNA, 15 bp, Homo sapiens
cgcggccagagtggg

SEQ ID NO: 1415329 - DNA, 15 bp, Homo sapiens
gcgcggccagagtgg

SEQ ID NO: 1415330 - DNA, 15 bp, Homo sapiens
ggcgcggccagagtg

SEQ ID NO: 1415331 - DNA, 15 bp, Homo sapiens
aggcgcggccagagt

SEQ ID NO: 1415332 - DNA, 15 bp, Homo sapiens
caggcgcggccagag

SEQ ID NO: 1415333 - DNA, 15 bp, Homo sapiens
tcaggcgcggccaga

SEQ ID NO: 1415334 - DNA, 15 bp, Homo sapiens
ctcaggcgcggccag

SEQ ID NO: 1415335 - DNA, 15 bp, Homo sapiens
cctcaggcgcggcca

SEQ ID NO: 1415336 - DNA, 15 bp, Homo sapiens
tcctcaggcgcggcc

SEQ ID NO: 1415337 - DNA, 15 bp, Homo sapiens
ctcctcaggcgcggc

SEQ ID NO: 1415338 - DNA, 15 bp, Homo sapiens
gctcctcaggcgcgg

SEQ ID NO: 1415339 - DNA, 15 bp, Homo sapiens
ggctcctcaggcgcg

SEQ ID NO: 1415340 - DNA, 15 bp, Homo sapiens
gggctcctcaggcgc

SEQ ID NO: 1415341 - DNA, 15 bp, Homo sapiens
ggggctcctcaggcg

SEQ ID NO: 1415342 - DNA, 15 bp, Homo sapiens
aggggctcctcaggc

SEQ ID NO: 1415343 - DNA, 15 bp, Homo sapiens
aaggggctcctcagg

SEQ ID NO: 1415344 - DNA, 15 bp, Homo sapiens
aaaggggctcctcag

SEQ ID NO: 1415345 - DNA, 15 bp, Homo sapiens
gaaaggggctcctca

SEQ ID NO: 1415346 - DNA, 15 bp, Homo sapiens
agaaaggggctcctc

SEQ ID NO: 1415347 - DNA, 15 bp, Homo sapiens
cagaaaggggctcct

SEQ ID NO: 1415348 - DNA, 15 bp, Homo sapiens
ccagaaaggggctcc

SEQ ID NO: 1415349 - DNA, 15 bp, Homo sapiens
cccagaaaggggctc

SEQ ID NO: 1415350 - DNA, 15 bp, Homo sapiens
gcccagaaaggggct

SEQ ID NO: 1415351 - DNA, 15 bp, Homo sapiens
agcccagaaaggggc

SEQ ID NO: 1415352 - DNA, 15 bp, Homo sapiens
cagcccagaaagggg

SEQ ID NO: 1415353 - DNA, 15 bp, Homo sapiens
ccagcccagaaaggg

SEQ ID NO: 1415354 - DNA, 15 bp, Homo sapiens
gccagcccagaaagg

SEQ ID NO: 1415355 - DNA, 15 bp, Homo sapiens
ggccagcccagaaag

SEQ ID NO: 1415356 - DNA, 15 bp, Homo sapiens
tggccagcccagaaa

SEQ ID NO: 1415357 - DNA, 15 bp, Homo sapiens
ttggccagcccagaa

SEQ ID NO: 1415358 - DNA, 15 bp, Homo sapiens
cttggccagcccaga

SEQ ID NO: 1415359 - DNA, 15 bp, Homo sapiens
ccttggccagcccag

SEQ ID NO: 1415360 - DNA, 15 bp, Homo sapiens
gccttggccagccca

SEQ ID NO: 1415361 - DNA, 15 bp, Homo sapiens
agccttggccagccc

SEQ ID NO: 1415362 - DNA, 15 bp, Homo sapiens
tagccttggccagcc

SEQ ID NO: 1415363 - DNA, 15 bp, Homo sapiens
ctagccttggccagc

SEQ ID NO: 1415364 - DNA, 15 bp, Homo sapiens
tctagccttggccag

SEQ ID NO: 1415365 - DNA, 15 bp, Homo sapiens
ctctagccttggcca

SEQ ID NO: 1415366 - DNA, 15 bp, Homo sapiens
gctctagccttggcc

SEQ ID NO: 1415367 - DNA, 15 bp, Homo sapiens
ggctctagccttggc

SEQ ID NO: 1415368 - DNA, 15 bp, Homo sapiens
cggctctagccttgg

SEQ ID NO: 1415369 - DNA, 15 bp, Homo sapiens
ccggctctagccttg

SEQ ID NO: 1415370 - DNA, 15 bp, Homo sapiens
gccggctctagcctt

SEQ ID NO: 1415371 - DNA, 15 bp, Homo sapiens
agccggctctagcct

SEQ ID NO: 1415372 - DNA, 15 bp, Homo sapiens
gagccggctctagcc

SEQ ID NO: 1415373 - DNA, 15 bp, Homo sapiens
ggagccggctctagc

SEQ ID NO: 1415374 - DNA, 15 bp, Homo sapiens
gggagccggctctag

SEQ ID NO: 1415375 - DNA, 15 bp, Homo sapiens
agggagccggctcta

SEQ ID NO: 1415376 - DNA, 15 bp, Homo sapiens
gagggagccggctct

SEQ ID NO: 1415377 - DNA, 15 bp, Homo sapiens
tgagggagccggctc

SEQ ID NO: 1415378 - DNA, 15 bp, Homo sapiens
ctgagggagccggct

SEQ ID NO: 1415379 - DNA, 15 bp, Homo sapiens
gctgagggagccggc

SEQ ID NO: 1415380 - DNA, 15 bp, Homo sapiens
agctgagggagccgg

SEQ ID NO: 1415381 - DNA, 15 bp, Homo sapiens
aagctgagggagccg

SEQ ID NO: 1415382 - DNA, 15 bp, Homo sapiens
caagctgagggagcc

SEQ ID NO: 1415383 - DNA, 15 bp, Homo sapiens
gcaagctgagggagc

SEQ ID NO: 1415384 - DNA, 15 bp, Homo sapiens
tgcaagctgagggag

SEQ ID NO: 1415385 - DNA, 15 bp, Homo sapiens
ctgcaagctgaggga

SEQ ID NO: 1415386 - DNA, 15 bp, Homo sapiens
cctgcaagctgaggg

SEQ ID NO: 1415387 - DNA, 15 bp, Homo sapiens
ccctgcaagctgagg

SEQ ID NO: 1415388 - DNA, 15 bp, Homo sapiens
tccctgcaagctgag

SEQ ID NO: 1415389 - DNA, 15 bp, Homo sapiens
ctccctgcaagctga

SEQ ID NO: 1415390 - DNA, 15 bp, Homo sapiens
cctccctgcaagctg

SEQ ID NO: 1415391 - DNA, 15 bp, Homo sapiens
acctccctgcaagct

SEQ ID NO: 1415392 - DNA, 15 bp, Homo sapiens
cacctccctgcaagc

SEQ ID NO: 1415393 - DNA, 15 bp, Homo sapiens
ccacctccctgcaag

SEQ ID NO: 1415394 - DNA, 15 bp, Homo sapiens
cccacctccctgcaa

SEQ ID NO: 1415395 - DNA, 15 bp, Homo sapiens
ccccacctccctgca

SEQ ID NO: 1415396 - DNA, 15 bp, Homo sapiens
tccccacctccctgc

SEQ ID NO: 1415397 - DNA, 15 bp, Homo sapiens
ctccccacctccctg

SEQ ID NO: 1415398 - DNA, 15 bp, Homo sapiens
cctccccacctccct

SEQ ID NO: 1415399 - DNA, 15 bp, Homo sapiens
ccctccccacctccc

SEQ ID NO: 1415400 - DNA, 15 bp, Homo sapiens
tccctccccacctcc

SEQ ID NO: 1415401 - DNA, 15 bp, Homo sapiens
ctctccctccccacc

SEQ ID NO: 1415402 - DNA, 15 bp, Homo sapiens
cctctccctccccac

SEQ ID NO: 1415403 - DNA, 15 bp, Homo sapiens
gcctctccctcccca

SEQ ID NO: 1415404 - DNA, 15 bp, Homo sapiens
cgcctctccctcccc

SEQ ID NO: 1415405 - DNA, 15 bp, Homo sapiens
gcgcctctccctccc

SEQ ID NO: 1415406 - DNA, 15 bp, Homo sapiens
cgcgcctctccctcc

SEQ ID NO: 1415407 - DNA, 15 bp, Homo sapiens
ccgcgcctctccctc

SEQ ID NO: 1415408 - DNA, 15 bp, Homo sapiens
cccgcgcctctccct

SEQ ID NO: 1415409 - DNA, 15 bp, Homo sapiens
gcccgcgcctctccc

SEQ ID NO: 1415410 - DNA, 15 bp, Homo sapiens
cgcccgcgcctctcc

SEQ ID NO: 1415411 - DNA, 15 bp, Homo sapiens
ccgcccgcgcctctc

SEQ ID NO: 1415412 - DNA, 15 bp, Homo sapiens
cccgcccgcgcctct

SEQ ID NO: 1415413 - DNA, 15 bp, Homo sapiens
tcccgcccgcgcctc

SEQ ID NO: 1415414 - DNA, 15 bp, Homo sapiens
ttcccgcccgcgcct

SEQ ID NO: 1415415 - DNA, 15 bp, Homo sapiens
gttcccgcccgcgcc

SEQ ID NO: 1415416 - DNA, 15 bp, Homo sapiens
ggttcccgcccgcgc

SEQ ID NO: 1415417 - DNA, 15 bp, Homo sapiens
gggttcccgcccgcg

SEQ ID NO: 1415418 - DNA, 15 bp, Homo sapiens
cgggttcccgcccgc

SEQ ID NO: 1415419 - DNA, 15 bp, Homo sapiens
ccgggttcccgcccg

SEQ ID NO: 1415420 - DNA, 15 bp, Homo sapiens
cccgggttcccgccc

SEQ ID NO: 1415421 - DNA, 15 bp, Homo sapiens
gcccgggttcccgcc

SEQ ID NO: 1415422 - DNA, 15 bp, Homo sapiens
agcccgggttcccgc

SEQ ID NO: 1415423 - DNA, 15 bp, Homo sapiens
cagcccgggttcccg

SEQ ID NO: 1415424 - DNA, 15 bp, Homo sapiens
acagcccgggttccc

SEQ ID NO: 1415425 - DNA, 15 bp, Homo sapiens
cacagcccgggttcc

SEQ ID NO: 1415426 - DNA, 15 bp, Homo sapiens
gcacagcccgggttc

SEQ ID NO: 1415427 - DNA, 15 bp, Homo sapiens
cgcacagcccgggtt

SEQ ID NO: 1415428 - DNA, 15 bp, Homo sapiens
gcgcacagcccgggt

SEQ ID NO: 1415429 - DNA, 15 bp, Homo sapiens
cgcgcacagcccggg

SEQ ID NO: 1415430 - DNA, 15 bp, Homo sapiens
ccgcgcacagcccgg

SEQ ID NO: 1415431 - DNA, 15 bp, Homo sapiens
tccgcgcacagcccg

SEQ ID NO: 1415432 - DNA, 15 bp, Homo sapiens
ctccgcgcacagccc

SEQ ID NO: 1415433 - DNA, 15 bp, Homo sapiens
gctccgcgcacagcc

SEQ ID NO: 1415434 - DNA, 15 bp, Homo sapiens
agctccgcgcacagc

SEQ ID NO: 1415435 - DNA, 15 bp, Homo sapiens
aagctccgcgcacag

SEQ ID NO: 1415436 - DNA, 15 bp, Homo sapiens
caagctccgcgcaca

SEQ ID NO: 1415437 - DNA, 15 bp, Homo sapiens
gcaagctccgcgcac

SEQ ID NO: 1415438 - DNA, 15 bp, Homo sapiens
cgcaagctccgcgca

SEQ ID NO: 1415439 - DNA, 15 bp, Homo sapiens
ccgcaagctccgcgc

SEQ ID NO: 1415440 - DNA, 15 bp, Homo sapiens
cccgcaagctccgcg

SEQ ID NO: 1415441 - DNA, 15 bp, Homo sapiens
gcccgcaagctccgc

SEQ ID NO: 1415442 - DNA, 15 bp, Homo sapiens
ggcccgcaagctccg

SEQ ID NO: 1415443 - DNA, 15 bp, Homo sapiens
tggcccgcaagctcc

SEQ ID NO: 1415444 - DNA, 15 bp, Homo sapiens
ctggcccgcaagctc

SEQ ID NO: 1415445 - DNA, 15 bp, Homo sapiens
actggcccgcaagct

SEQ ID NO: 1415446 - DNA, 15 bp, Homo sapiens
gactggcccgcaagc

SEQ ID NO: 1415447 - DNA, 15 bp, Homo sapiens
ggactggcccgcaag

SEQ ID NO: 1415448 - DNA, 15 bp, Homo sapiens
cggactggcccgcaa

SEQ ID NO: 1415449 - DNA, 15 bp, Homo sapiens
tcggactggcccgca

SEQ ID NO: 1415450 - DNA, 15 bp, Homo sapiens
ctcggactggcccgc

SEQ ID NO: 1415451 - DNA, 15 bp, Homo sapiens
actcggactggcccg

SEQ ID NO: 1415452 - DNA, 15 bp, Homo sapiens
aactcggactggccc

SEQ ID NO: 1415453 - DNA, 15 bp, Homo sapiens
gaactcggactggcc

SEQ ID NO: 1415454 - DNA, 15 bp, Homo sapiens
ggaactcggactggc

SEQ ID NO: 1415455 - DNA, 15 bp, Homo sapiens
tggaactcggactgg

SEQ ID NO: 1415456 - DNA, 15 bp, Homo sapiens
ctggaactcggactg

SEQ ID NO: 1415457 - DNA, 15 bp, Homo sapiens
cctggaactcggact

SEQ ID NO: 1415458 - DNA, 15 bp, Homo sapiens
acctggaactcggac

SEQ ID NO: 1415459 - DNA, 15 bp, Homo sapiens
cacctggaactcgga

SEQ ID NO: 1415460 - DNA, 15 bp, Homo sapiens
ccacctggaactcgg

SEQ ID NO: 1415461 - DNA, 15 bp, Homo sapiens
cccacctggaactcg

SEQ ID NO: 1415462 - DNA, 15 bp, Homo sapiens
gcccacctggaactc

SEQ ID NO: 1415463 - DNA, 15 bp, Homo sapiens
cgcccacctggaact

SEQ ID NO: 1415464 - DNA, 15 bp, Homo sapiens
acgcccacctggaac

SEQ ID NO: 1415465 - DNA, 15 bp, Homo sapiens
cacgcccacctggaa

SEQ ID NO: 1415466 - DNA, 15 bp, Homo sapiens
ccacgcccacctgga

SEQ ID NO: 1415467 - DNA, 15 bp, Homo sapiens
tccacgcccacctgg

SEQ ID NO: 1415468 - DNA, 15 bp, Homo sapiens
gtccacgcccacctg

SEQ ID NO: 1415469 - DNA, 15 bp, Homo sapiens
agtccacgcccacct

SEQ ID NO: 1415470 - DNA, 15 bp, Homo sapiens
gagtccacgcccacc

SEQ ID NO: 1415471 - DNA, 15 bp, Homo sapiens
tgagtccacgcccac

SEQ ID NO: 1415472 - DNA, 15 bp, Homo sapiens
ctgagtccacgccca

SEQ ID NO: 1415473 - DNA, 15 bp, Homo sapiens
gctgagtccacgccc

SEQ ID NO: 1415474 - DNA, 15 bp, Homo sapiens
cgctgagtccacgcc

SEQ ID NO: 1415475 - DNA, 15 bp, Homo sapiens
ccgctgagtccacgc

SEQ ID NO: 1415476 - DNA, 15 bp, Homo sapiens
cccgctgagtccacg

SEQ ID NO: 1415477 - DNA, 15 bp, Homo sapiens
gcccgctgagtccac

SEQ ID NO: 1415478 - DNA, 15 bp, Homo sapiens
ggcccgctgagtcca

SEQ ID NO: 1415479 - DNA, 15 bp, Homo sapiens
tggcccgctgagtcc

SEQ ID NO: 1415480 - DNA, 15 bp, Homo sapiens
ctggcccgctgagtc

SEQ ID NO: 1415481 - DNA, 15 bp, Homo sapiens
gctggcccgctgagt

SEQ ID NO: 1415482 - DNA, 15 bp, Homo sapiens
tgctggcccgctgag

SEQ ID NO: 1415483 - DNA, 15 bp, Homo sapiens
gtgctggcccgctga

SEQ ID NO: 1415484 - DNA, 15 bp, Homo sapiens
agtgctggcccgctg

SEQ ID NO: 1415485 - DNA, 15 bp, Homo sapiens
gagtgctggcccgct

SEQ ID NO: 1415486 - DNA, 15 bp, Homo sapiens
ggagtgctggcccgc

SEQ ID NO: 1415487 - DNA, 15 bp, Homo sapiens
cggagtgctggcccg

SEQ ID NO: 1415488 - DNA, 15 bp, Homo sapiens
tcggagtgctggccc

SEQ ID NO: 1415489 - DNA, 15 bp, Homo sapiens
ctcggagtgctggcc

SEQ ID NO: 1415490 - DNA, 15 bp, Homo sapiens
actcggagtgctggc

SEQ ID NO: 1415491 - DNA, 15 bp, Homo sapiens
cactcggagtgctgg

SEQ ID NO: 1415492 - DNA, 15 bp, Homo sapiens
ccactcggagtgctg

SEQ ID NO: 1415493 - DNA, 15 bp, Homo sapiens
gccactcggagtgct

SEQ ID NO: 1415494 - DNA, 15 bp, Homo sapiens
ggccactcggagtgc

SEQ ID NO: 1415495 - DNA, 15 bp, Homo sapiens
cggccactcggagtg

SEQ ID NO: 1415496 - DNA, 15 bp, Homo sapiens
tcggccactcggagt

SEQ ID NO: 1415497 - DNA, 15 bp, Homo sapiens
gtcggccactcggag

SEQ ID NO: 1415498 - DNA, 15 bp, Homo sapiens
ggtcggccactcgga

SEQ ID NO: 1415499 - DNA, 15 bp, Homo sapiens
cggtcggccactcgg

SEQ ID NO: 1415500 - DNA, 15 bp, Homo sapiens
ccggtcggccactcg

SEQ ID NO: 1415501 - DNA, 15 bp, Homo sapiens
gccggtcggccactc

SEQ ID NO: 1415502 - DNA, 15 bp, Homo sapiens
ggccggtcggccact

SEQ ID NO: 1415503 - DNA, 15 bp, Homo sapiens
aggccggtcggccac

SEQ ID NO: 1415504 - DNA, 15 bp, Homo sapiens
taggccggtcggcca

SEQ ID NO: 1415505 - DNA, 15 bp, Homo sapiens
gtaggccggtcggcc

SEQ ID NO: 1415506 - DNA, 15 bp, Homo sapiens
tgtaggccggtcggc

SEQ ID NO: 1415507 - DNA, 15 bp, Homo sapiens
ttgtaggccggtcgg

SEQ ID NO: 1415508 - DNA, 15 bp, Homo sapiens
cttgtaggccggtcg

SEQ ID NO: 1415509 - DNA, 15 bp, Homo sapiens
gcttgtaggccggtc

SEQ ID NO: 1415510 - DNA, 15 bp, Homo sapiens
ggcttgtaggccggt

SEQ ID NO: 1415511 - DNA, 15 bp, Homo sapiens
tggcttgtaggccgg

SEQ ID NO: 1415512 - DNA, 15 bp, Homo sapiens
gtggcttgtaggccg

SEQ ID NO: 1415513 - DNA, 15 bp, Homo sapiens
cgtggcttgtaggcc

SEQ ID NO: 1415514 - DNA, 15 bp, Homo sapiens
ccgtggcttgtaggc

SEQ ID NO: 1415515 - DNA, 15 bp, Homo sapiens
tccgtggcttgtagg

SEQ ID NO: 1415516 - DNA, 15 bp, Homo sapiens
gtccgtggcttgtag

SEQ ID NO: 1415517 - DNA, 15 bp, Homo sapiens
tgtccgtggcttgta

SEQ ID NO: 1415518 - DNA, 15 bp, Homo sapiens
ctgtccgtggcttgt

SEQ ID NO: 1415519 - DNA, 15 bp, Homo sapiens
actgtccgtggcttg

SEQ ID NO: 1415520 - DNA, 15 bp, Homo sapiens
cactgtccgtggctt

SEQ ID NO: 1415521 - DNA, 15 bp, Homo sapiens
tcactgtccgtggct

SEQ ID NO: 1415522 - DNA, 15 bp, Homo sapiens
ctcactgtccgtggc

SEQ ID NO: 1415523 - DNA, 15 bp, Homo sapiens
cctcactgtccgtgg

SEQ ID NO: 1415524 - DNA, 15 bp, Homo sapiens
ccctcactgtccgtg

SEQ ID NO: 1415525 - DNA, 15 bp, Homo sapiens
cccctcactgtccgt

SEQ ID NO: 1415526 - DNA, 15 bp, Homo sapiens
gcccctcactgtccg

SEQ ID NO: 1415527 - DNA, 15 bp, Homo sapiens
agcccctcactgtcc

SEQ ID NO: 1415528 - DNA, 15 bp, Homo sapiens
aagcccctcactgtc

SEQ ID NO: 1415529 - DNA, 15 bp, Homo sapiens
taagcccctcactgt

SEQ ID NO: 1415530 - DNA, 15 bp, Homo sapiens
ctaagcccctcactg

SEQ ID NO: 1415531 - DNA, 15 bp, Homo sapiens
gctaagcccctcact

SEQ ID NO: 1415532 - DNA, 15 bp, Homo sapiens
tgctaagcccctcac

SEQ ID NO: 1415533 - DNA, 15 bp, Homo sapiens
gtgctaagcccctca

SEQ ID NO: 1415534 - DNA, 15 bp, Homo sapiens
ggtgctaagcccctc

SEQ ID NO: 1415535 - DNA, 15 bp, Homo sapiens
aggtgctaagcccct

SEQ ID NO: 1415536 - DNA, 15 bp, Homo sapiens
caggtgctaagcccc

SEQ ID NO: 1415537 - DNA, 15 bp, Homo sapiens
ccaggtgctaagccc

SEQ ID NO: 1415538 - DNA, 15 bp, Homo sapiens
cccaggtgctaagcc

SEQ ID NO: 1415539 - DNA, 15 bp, Homo sapiens
gcccaggtgctaagc

SEQ ID NO: 1415540 - DNA, 15 bp, Homo sapiens
ggcccaggtgctaag

SEQ ID NO: 1415541 - DNA, 15 bp, Homo sapiens
tggcccaggtgctaa

SEQ ID NO: 1415542 - DNA, 15 bp, Homo sapiens
ctggcccaggtgcta

SEQ ID NO: 1415543 - DNA, 15 bp, Homo sapiens
gctggcccaggtgct

SEQ ID NO: 1415544 - DNA, 15 bp, Homo sapiens
tgctggcccaggtgc

SEQ ID NO: 1415545 - DNA, 15 bp, Homo sapiens
ctgctggcccaggtg

SEQ ID NO: 1415546 - DNA, 15 bp, Homo sapiens
gctgctggcccaggt

SEQ ID NO: 1415547 - DNA, 15 bp, Homo sapiens
agctgctggcccagg

SEQ ID NO: 1415548 - DNA, 15 bp, Homo sapiens
cagctgctggcccag

SEQ ID NO: 1415549 - DNA, 15 bp, Homo sapiens
gcagctgctggccca

SEQ ID NO: 1415550 - DNA, 15 bp, Homo sapiens
agcagctgctggccc

SEQ ID NO: 1415551 - DNA, 15 bp, Homo sapiens
cagcagctgctggcc

SEQ ID NO: 1415552 - DNA, 15 bp, Homo sapiens
acagcagctgctggc

SEQ ID NO: 1415553 - DNA, 15 bp, Homo sapiens
cacagcagctgctgg

SEQ ID NO: 1415554 - DNA, 15 bp, Homo sapiens
gcacagcagctgctg

SEQ ID NO: 1415555 - DNA, 15 bp, Homo sapiens
agcacagcagctgct

SEQ ID NO: 1415556 - DNA, 15 bp, Homo sapiens
gagcacagcagctgc

SEQ ID NO: 1415557 - DNA, 15 bp, Homo sapiens
tgagcacagcagctg

SEQ ID NO: 1415558 - DNA, 15 bp, Homo sapiens
ttgagcacagcagct

SEQ ID NO: 1415559 - DNA, 15 bp, Homo sapiens
attgagcacagcagc

SEQ ID NO: 1415560 - DNA, 15 bp, Homo sapiens
aattgagcacagcag

SEQ ID NO: 1415561 - DNA, 15 bp, Homo sapiens
aaattgagcacagca

SEQ ID NO: 1415562 - DNA, 15 bp, Homo sapiens
gaaattgagcacagc

SEQ ID NO: 1415563 - DNA, 15 bp, Homo sapiens
agaaattgagcacag

SEQ ID NO: 1415564 - DNA, 15 bp, Homo sapiens
gagaaattgagcaca

SEQ ID NO: 1415565 - DNA, 15 bp, Homo sapiens
tgagaaattgagcac

SEQ ID NO: 1415566 - DNA, 15 bp, Homo sapiens
gtgagaaattgagca

SEQ ID NO: 1415567 - DNA, 15 bp, Homo sapiens
tgtgagaaattgagc

SEQ ID NO: 1415568 - DNA, 15 bp, Homo sapiens
ctgtgagaaattgag

SEQ ID NO: 1415569 - DNA, 15 bp, Homo sapiens
cctgtgagaaattga

SEQ ID NO: 1415570 - DNA, 15 bp, Homo sapiens
ccctgtgagaaattg

SEQ ID NO: 1415571 - DNA, 15 bp, Homo sapiens
gccctgtgagaaatt

SEQ ID NO: 1415572 - DNA, 15 bp, Homo sapiens
ggccctgtgagaaat

SEQ ID NO: 1415573 - DNA, 15 bp, Homo sapiens
aggccctgtgagaaa

SEQ ID NO: 1415574 - DNA, 15 bp, Homo sapiens
aaggccctgtgagaa

SEQ ID NO: 1415575 - DNA, 15 bp, Homo sapiens
taaggccctgtgaga

SEQ ID NO: 1415576 - DNA, 15 bp, Homo sapiens
ctaaggccctgtgag

SEQ ID NO: 1415577 - DNA, 15 bp, Homo sapiens
cctaaggccctgtga

SEQ ID NO: 1415578 - DNA, 15 bp, Homo sapiens
acctaaggccctgtg

SEQ ID NO: 1415579 - DNA, 15 bp, Homo sapiens
cacctaaggccctgt

SEQ ID NO: 1415580 - DNA, 15 bp, Homo sapiens
gcacctaaggccctg

SEQ ID NO: 1415581 - DNA, 15 bp, Homo sapiens
ggcacctaaggccct

SEQ ID NO: 1415582 - DNA, 15 bp, Homo sapiens
aggcacctaaggccc

SEQ ID NO: 1415583 - DNA, 15 bp, Homo sapiens
gaggcacctaaggcc

SEQ ID NO: 1415584 - DNA, 15 bp, Homo sapiens
ggaggcacctaaggc

SEQ ID NO: 1415585 - DNA, 15 bp, Homo sapiens
gggaggcacctaagg

SEQ ID NO: 1415586 - DNA, 15 bp, Homo sapiens
ggggaggcacctaag

SEQ ID NO: 1415587 - DNA, 15 bp, Homo sapiens
cggggaggcacctaa

SEQ ID NO: 1415588 - DNA, 15 bp, Homo sapiens
gcggggaggcaccta

SEQ ID NO: 1415589 - DNA, 15 bp, Homo sapiens
cgcggggaggcacct

SEQ ID NO: 1415590 - DNA, 15 bp, Homo sapiens
ccgcggggaggcacc

SEQ ID NO: 1415591 - DNA, 15 bp, Homo sapiens
cccgcggggaggcac

SEQ ID NO: 1415592 - DNA, 15 bp, Homo sapiens
ccccgcggggaggca

SEQ ID NO: 1415593 - DNA, 15 bp, Homo sapiens
gccccgcggggaggc

SEQ ID NO: 1415594 - DNA, 15 bp, Homo sapiens
tgccccgcggggagg

SEQ ID NO: 1415595 - DNA, 15 bp, Homo sapiens
ctgccccgcggggag

SEQ ID NO: 1415596 - DNA, 15 bp, Homo sapiens
cctgccccgcgggga

SEQ ID NO: 1415597 - DNA, 15 bp, Homo sapiens
ccctgccccgcgggg

SEQ ID NO: 1415598 - DNA, 15 bp, Homo sapiens
gccctgccccgcggg

SEQ ID NO: 1415599 - DNA, 15 bp, Homo sapiens
agccctgccccgcgg

SEQ ID NO: 1415600 - DNA, 15 bp, Homo sapiens
aagccctgccccgcg

SEQ ID NO: 1415601 - DNA, 15 bp, Homo sapiens
caagccctgccccgc

SEQ ID NO: 1415602 - DNA, 15 bp, Homo sapiens
ccaagccctgccccg

SEQ ID NO: 1415603 - DNA, 15 bp, Homo sapiens
cccaagccctgcccc

SEQ ID NO: 1415604 - DNA, 15 bp, Homo sapiens
tcccaagccctgccc

SEQ ID NO: 1415605 - DNA, 15 bp, Homo sapiens
gtcccaagccctgcc

SEQ ID NO: 1415606 - DNA, 15 bp, Homo sapiens
ggtcccaagccctgc

SEQ ID NO: 1415607 - DNA, 15 bp, Homo sapiens
aggtcccaagccctg

SEQ ID NO: 1415608 - DNA, 15 bp, Homo sapiens
caggtcccaagccct

SEQ ID NO: 1415609 - DNA, 15 bp, Homo sapiens
gcaggtcccaagccc

SEQ ID NO: 1415610 - DNA, 15 bp, Homo sapiens
tgcaggtcccaagcc

SEQ ID NO: 1415611 - DNA, 15 bp, Homo sapiens
ctgcaggtcccaagc

SEQ ID NO: 1415612 - DNA, 15 bp, Homo sapiens
gctgcaggtcccaag

SEQ ID NO: 1415613 - DNA, 15 bp, Homo sapiens
ggctgcaggtcccaa

SEQ ID NO: 1415614 - DNA, 15 bp, Homo sapiens
gggctgcaggtccca

SEQ ID NO: 1415615 - DNA, 15 bp, Homo sapiens
cgggctgcaggtccc

SEQ ID NO: 1415616 - DNA, 15 bp, Homo sapiens
gcgggctgcaggtcc

SEQ ID NO: 1415617 - DNA, 15 bp, Homo sapiens
ggcgggctgcaggtc

SEQ ID NO: 1415618 - DNA, 15 bp, Homo sapiens
tggcgggctgcaggt

SEQ ID NO: 1415619 - DNA, 15 bp, Homo sapiens
atggcgggctgcagg

SEQ ID NO: 1415620 - DNA, 15 bp, Homo sapiens
tatggcgggctgcag

SEQ ID NO: 1415621 - DNA, 15 bp, Homo sapiens
gtatggcgggctgca

SEQ ID NO: 1415622 - DNA, 15 bp, Homo sapiens
ggtatggcgggctgc

SEQ ID NO: 1415623 - DNA, 15 bp, Homo sapiens
aggtatggcgggctg

SEQ ID NO: 1415624 - DNA, 15 bp, Homo sapiens
caggtatggcgggct

SEQ ID NO: 1415625 - DNA, 15 bp, Homo sapiens
tcaggtatggcgggc

SEQ ID NO: 1415626 - DNA, 15 bp, Homo sapiens
ctcaggtatggcggg

SEQ ID NO: 1415627 - DNA, 15 bp, Homo sapiens
gctcaggtatggcgg

SEQ ID NO: 1415628 - DNA, 15 bp, Homo sapiens
ggctcaggtatggcg

SEQ ID NO: 1415629 - DNA, 15 bp, Homo sapiens
aggctcaggtatggc

SEQ ID NO: 1415630 - DNA, 15 bp, Homo sapiens
gaggctcaggtatgg

SEQ ID NO: 1415631 - DNA, 15 bp, Homo sapiens
ggaggctcaggtatg

SEQ ID NO: 1415632 - DNA, 15 bp, Homo sapiens
gggaggctcaggtat

SEQ ID NO: 1415633 - DNA, 15 bp, Homo sapiens
ggggaggctcaggta

SEQ ID NO: 1415634 - DNA, 15 bp, Homo sapiens
gggggaggctcaggt

SEQ ID NO: 1415635 - DNA, 15 bp, Homo sapiens
ggggggaggctcagg

SEQ ID NO: 1415636 - DNA, 15 bp, Homo sapiens
cggggggaggctcag

SEQ ID NO: 1415637 - DNA, 15 bp, Homo sapiens
gcggggggaggctca

SEQ ID NO: 1415638 - DNA, 15 bp, Homo sapiens
ggcggggggaggctc

SEQ ID NO: 1415639 - DNA, 15 bp, Homo sapiens
aggcggggggaggct

SEQ ID NO: 1415640 - DNA, 15 bp, Homo sapiens
gaggcggggggaggc

SEQ ID NO: 1415641 - DNA, 15 bp, Homo sapiens
ggaggcggggggagg

SEQ ID NO: 1415642 - DNA, 15 bp, Homo sapiens
cggaggcggggggag

SEQ ID NO: 1415643 - DNA, 15 bp, Homo sapiens
acggaggcgggggga

SEQ ID NO: 1415644 - DNA, 15 bp, Homo sapiens
cacggaggcgggggg

SEQ ID NO: 1415645 - DNA, 15 bp, Homo sapiens
ccacggaggcggggg

SEQ ID NO: 1415646 - DNA, 15 bp, Homo sapiens
cccacggaggcgggg

SEQ ID NO: 1415647 - DNA, 15 bp, Homo sapiens
gcccacggaggcggg

SEQ ID NO: 1415648 - DNA, 15 bp, Homo sapiens
agcccacggaggcgg

SEQ ID NO: 1415649 - DNA, 15 bp, Homo sapiens
gagcccacggaggcg

SEQ ID NO: 1415650 - DNA, 15 bp, Homo sapiens
ggagcccacggaggc

SEQ ID NO: 1415651 - DNA, 15 bp, Homo sapiens
aggagcccacggagg

SEQ ID NO: 1415652 - DNA, 15 bp, Homo sapiens
caggagcccacggag

SEQ ID NO: 1415653 - DNA, 15 bp, Homo sapiens
acaggagcccacgga

SEQ ID NO: 1415654 - DNA, 15 bp, Homo sapiens
cacaggagcccacgg

SEQ ID NO: 1415655 - DNA, 15 bp, Homo sapiens
gcacaggagcccacg

SEQ ID NO: 1415656 - DNA, 15 bp, Homo sapiens
ggcacaggagcccac

SEQ ID NO: 1415657 - DNA, 15 bp, Homo sapiens
cggcacaggagccca

SEQ ID NO: 1415658 - DNA, 15 bp, Homo sapiens
gcggcacaggagccc

SEQ ID NO: 1415659 - DNA, 15 bp, Homo sapiens
ggcggcacaggagcc

SEQ ID NO: 1415660 - DNA, 15 bp, Homo sapiens
gggcggcacaggagc

SEQ ID NO: 1415661 - DNA, 15 bp, Homo sapiens
cgggcggcacaggag

SEQ ID NO: 1415662 - DNA, 15 bp, Homo sapiens
tcgggcggcacagga

SEQ ID NO: 1415663 - DNA, 15 bp, Homo sapiens
ctcgggcggcacagg

SEQ ID NO: 1415664 - DNA, 15 bp, Homo sapiens
gctcgggcggcacag

SEQ ID NO: 1415665 - DNA, 15 bp, Homo sapiens
ggctcgggcggcaca

SEQ ID NO: 1415666 - DNA, 15 bp, Homo sapiens
aggctcgggcggcac

SEQ ID NO: 1415667 - DNA, 15 bp, Homo sapiens
gaggctcgggcggca

SEQ ID NO: 1415668 - DNA, 15 bp, Homo sapiens
ggaggctcgggcggc

SEQ ID NO: 1415669 - DNA, 15 bp, Homo sapiens
gggaggctcgggcgg

SEQ ID NO: 1415670 - DNA, 15 bp, Homo sapiens
agggaggctcgggcg

SEQ ID NO: 1415671 - DNA, 15 bp, Homo sapiens
cagggaggctcgggc

SEQ ID NO: 1415672 - DNA, 15 bp, Homo sapiens
tcagggaggctcggg

SEQ ID NO: 1415673 - DNA, 15 bp, Homo sapiens
atcagggaggctcgg

SEQ ID NO: 1415674 - DNA, 15 bp, Homo sapiens
catcagggaggctcg

SEQ ID NO: 1415675 - DNA, 15 bp, Homo sapiens
tcatcagggaggctc

SEQ ID NO: 1415676 - DNA, 15 bp, Homo sapiens
ctcatcagggaggct

SEQ ID NO: 1415677 - DNA, 15 bp, Homo sapiens
gctcatcagggaggc

SEQ ID NO: 1415678 - DNA, 15 bp, Homo sapiens
cgctcatcagggagg

SEQ ID NO: 1415679 - DNA, 15 bp, Homo sapiens
gcgctcatcagggag

SEQ ID NO: 1415680 - DNA, 15 bp, Homo sapiens
agcgctcatcaggga

SEQ ID NO: 1415681 - DNA, 15 bp, Homo sapiens
cagcgctcatcaggg

SEQ ID NO: 1415682 - DNA, 15 bp, Homo sapiens
gcagcgctcatcagg

SEQ ID NO: 1415683 - DNA, 15 bp, Homo sapiens
ggcagcgctcatcag

SEQ ID NO: 1415684 - DNA, 15 bp, Homo sapiens
gggcagcgctcatca

SEQ ID NO: 1415685 - DNA, 15 bp, Homo sapiens
ggggcagcgctcatc

SEQ ID NO: 1415686 - DNA, 15 bp, Homo sapiens
gggggcagcgctcat

SEQ ID NO: 1415687 - DNA, 15 bp, Homo sapiens
agggggcagcgctca

SEQ ID NO: 1415688 - DNA, 15 bp, Homo sapiens
cagggggcagcgctc

SEQ ID NO: 1415689 - DNA, 15 bp, Homo sapiens
gcagggggcagcgct

SEQ ID NO: 1415690 - DNA, 15 bp, Homo sapiens
agcagggggcagcgc

SEQ ID NO: 1415691 - DNA, 15 bp, Homo sapiens
gagcagggggcagcg

SEQ ID NO: 1415692 - DNA, 15 bp, Homo sapiens
ggagcagggggcagc

SEQ ID NO: 1415693 - DNA, 15 bp, Homo sapiens
tggagcagggggcag

SEQ ID NO: 1415694 - DNA, 15 bp, Homo sapiens
gtggagcagggggca

SEQ ID NO: 1415695 - DNA, 15 bp, Homo sapiens
cgtggagcagggggc

SEQ ID NO: 1415696 - DNA, 15 bp, Homo sapiens
ccgtggagcaggggg

SEQ ID NO: 1415697 - DNA, 15 bp, Homo sapiens
gccgtggagcagggg

SEQ ID NO: 1415698 - DNA, 15 bp, Homo sapiens
tgccgtggagcaggg

SEQ ID NO: 1415699 - DNA, 15 bp, Homo sapiens
gtgccgtggagcagg

SEQ ID NO: 1415700 - DNA, 15 bp, Homo sapiens
ggtgccgtggagcag

SEQ ID NO: 1415701 - DNA, 15 bp, Homo sapiens
gggtgccgtggagca

SEQ ID NO: 1415702 - DNA, 15 bp, Homo sapiens
tgggtgccgtggagc

SEQ ID NO: 1415703 - DNA, 15 bp, Homo sapiens
ctgggtgccgtggag

SEQ ID NO: 1415704 - DNA, 15 bp, Homo sapiens
actgggtgccgtgga

SEQ ID NO: 1415705 - DNA, 15 bp, Homo sapiens
gactgggtgccgtgg

SEQ ID NO: 1415706 - DNA, 15 bp, Homo sapiens
ggactgggtgccgtg

SEQ ID NO: 1415707 - DNA, 15 bp, Homo sapiens
gggactgggtgccgt

SEQ ID NO: 1415708 - DNA, 15 bp, Homo sapiens
tgggactgggtgccg

SEQ ID NO: 1415709 - DNA, 15 bp, Homo sapiens
atgggactgggtgcc

SEQ ID NO: 1415710 - DNA, 15 bp, Homo sapiens
gatgggactgggtgc

SEQ ID NO: 1415711 - DNA, 15 bp, Homo sapiens
ggatgggactgggtg

SEQ ID NO: 1415712 - DNA, 15 bp, Homo sapiens
tggatgggactgggt

SEQ ID NO: 1415713 - DNA, 15 bp, Homo sapiens
gtggatgggactggg

SEQ ID NO: 1415714 - DNA, 15 bp, Homo sapiens
ggtggatgggactgg

SEQ ID NO: 1415715 - DNA, 15 bp, Homo sapiens
tggtggatgggactg

SEQ ID NO: 1415716 - DNA, 15 bp, Homo sapiens
gtggtggatgggact

SEQ ID NO: 1415717 - DNA, 15 bp, Homo sapiens
agtggtggatgggac

SEQ ID NO: 1415718 - DNA, 15 bp, Homo sapiens
gagtggtggatggga

SEQ ID NO: 1415719 - DNA, 15 bp, Homo sapiens
tgagtggtggatggg

SEQ ID NO: 1415720 - DNA, 15 bp, Homo sapiens
ttgagtggtggatgg

SEQ ID NO: 1415721 - DNA, 15 bp, Homo sapiens
cttgagtggtggatg

SEQ ID NO: 1415722 - DNA, 15 bp, Homo sapiens
ccttgagtggtggat

SEQ ID NO: 1415723 - DNA, 15 bp, Homo sapiens
accttgagtggtgga

SEQ ID NO: 1415724 - DNA, 15 bp, Homo sapiens
gaccttgagtggtgg

SEQ ID NO: 1415725 - DNA, 15 bp, Homo sapiens
agaccttgagtggtg

SEQ ID NO: 1415726 - DNA, 15 bp, Homo sapiens
cagaccttgagtggt

SEQ ID NO: 1415727 - DNA, 15 bp, Homo sapiens
tcagaccttgagtgg

SEQ ID NO: 1415728 - DNA, 15 bp, Homo sapiens
ctcagaccttgagtg

SEQ ID NO: 1415729 - DNA, 15 bp, Homo sapiens
cctcagaccttgagt

SEQ ID NO: 1415730 - DNA, 15 bp, Homo sapiens
tcctcagaccttgag

SEQ ID NO: 1415731 - DNA, 15 bp, Homo sapiens
ctcctcagaccttga

SEQ ID NO: 1415732 - DNA, 15 bp, Homo sapiens
actcctcagaccttg

SEQ ID NO: 1415733 - DNA, 15 bp, Homo sapiens
cactcctcagacctt

SEQ ID NO: 1415734 - DNA, 15 bp, Homo sapiens
gcactcctcagacct

SEQ ID NO: 1415735 - DNA, 15 bp, Homo sapiens
cgcactcctcagacc

SEQ ID NO: 1415736 - DNA, 15 bp, Homo sapiens
ccgcactcctcagac

SEQ ID NO: 1415737 - DNA, 15 bp, Homo sapiens
cccgcactcctcaga

SEQ ID NO: 1415738 - DNA, 15 bp, Homo sapiens
gcccgcactcctcag

SEQ ID NO: 1415739 - DNA, 15 bp, Homo sapiens
tgcccgcactcctca

SEQ ID NO: 1415740 - DNA, 15 bp, Homo sapiens
gtgcccgcactcctc

SEQ ID NO: 1415741 - DNA, 15 bp, Homo sapiens
tgtgcccgcactcct

SEQ ID NO: 1415742 - DNA, 15 bp, Homo sapiens
gtgtgcccgcactcc

SEQ ID NO: 1415743 - DNA, 15 bp, Homo sapiens
cgtgtgcccgcactc

SEQ ID NO: 1415744 - DNA, 15 bp, Homo sapiens
gcgtgtgcccgcact

SEQ ID NO: 1415745 - DNA, 15 bp, Homo sapiens
tgcgtgtgcccgcac

SEQ ID NO: 1415746 - DNA, 15 bp, Homo sapiens
gtgcgtgtgcccgca

SEQ ID NO: 1415747 - DNA, 15 bp, Homo sapiens
tgtgcgtgtgcccgc

SEQ ID NO: 1415748 - DNA, 15 bp, Homo sapiens
ctgtgcgtgtgcccg

SEQ ID NO: 1415749 - DNA, 15 bp, Homo sapiens
cctgtgcgtgtgccc

SEQ ID NO: 1415750 - DNA, 15 bp, Homo sapiens
tcctgtgcgtgtgcc

SEQ ID NO: 1415751 - DNA, 15 bp, Homo sapiens
gtcctgtgcgtgtgc

SEQ ID NO: 1415752 - DNA, 15 bp, Homo sapiens
agtcctgtgcgtgtg

SEQ ID NO: 1415753 - DNA, 15 bp, Homo sapiens
cagtcctgtgcgtgt

SEQ ID NO: 1415754 - DNA, 15 bp, Homo sapiens
ccagtcctgtgcgtg

SEQ ID NO: 1415755 - DNA, 15 bp, Homo sapiens
gccagtcctgtgcgt

SEQ ID NO: 1415756 - DNA, 15 bp, Homo sapiens
tgccagtcctgtgcg

SEQ ID NO: 1415757 - DNA, 15 bp, Homo sapiens
ctgccagtcctgtgc

SEQ ID NO: 1415758 - DNA, 15 bp, Homo sapiens
cctgccagtcctgtg

SEQ ID NO: 1415759 - DNA, 15 bp, Homo sapiens
gcctgccagtcctgt

SEQ ID NO: 1415760 - DNA, 15 bp, Homo sapiens
tgcctgccagtcctg

SEQ ID NO: 1415761 - DNA, 15 bp, Homo sapiens
ctgcctgccagtcct

SEQ ID NO: 1415762 - DNA, 15 bp, Homo sapiens
gctgcctgccagtcc

SEQ ID NO: 1415763 - DNA, 15 bp, Homo sapiens
agctgcctgccagtc

SEQ ID NO: 1415764 - DNA, 15 bp, Homo sapiens
gagctgcctgccagt

SEQ ID NO: 1415765 - DNA, 15 bp, Homo sapiens
ggagctgcctgccag

SEQ ID NO: 1415766 - DNA, 15 bp, Homo sapiens
tggagctgcctgcca

SEQ ID NO: 1415767 - DNA, 15 bp, Homo sapiens
gtggagctgcctgcc

SEQ ID NO: 1415768 - DNA, 15 bp, Homo sapiens
ggtggagctgcctgc

SEQ ID NO: 1415769 - DNA, 15 bp, Homo sapiens
aggtggagctgcctg

SEQ ID NO: 1415770 - DNA, 15 bp, Homo sapiens
caggtggagctgcct

SEQ ID NO: 1415771 - DNA, 15 bp, Homo sapiens
acaggtggagctgcc

SEQ ID NO: 1415772 - DNA, 15 bp, Homo sapiens
cacaggtggagctgc

SEQ ID NO: 1415773 - DNA, 15 bp, Homo sapiens
ccacaggtggagctg

SEQ ID NO: 1415774 - DNA, 15 bp, Homo sapiens
gccacaggtggagct

SEQ ID NO: 1415775 - DNA, 15 bp, Homo sapiens
ggccacaggtggagc

SEQ ID NO: 1415776 - DNA, 15 bp, Homo sapiens
gggccacaggtggag

SEQ ID NO: 1415777 - DNA, 15 bp, Homo sapiens
ggggccacaggtgga

SEQ ID NO: 1415778 - DNA, 15 bp, Homo sapiens
cggggccacaggtgg

SEQ ID NO: 1415779 - DNA, 15 bp, Homo sapiens
ccggggccacaggtg

SEQ ID NO: 1415780 - DNA, 15 bp, Homo sapiens
accggggccacaggt

SEQ ID NO: 1415781 - DNA, 15 bp, Homo sapiens
caccggggccacagg

SEQ ID NO: 1415782 - DNA, 15 bp, Homo sapiens
gcaccggggccacag

SEQ ID NO: 1415783 - DNA, 15 bp, Homo sapiens
cgcaccggggccaca

SEQ ID NO: 1415784 - DNA, 15 bp, Homo sapiens
ccgcaccggggccac

SEQ ID NO: 1415785 - DNA, 15 bp, Homo sapiens
cccgcaccggggcca

SEQ ID NO: 1415786 - DNA, 15 bp, Homo sapiens
tcccgcaccggggcc

SEQ ID NO: 1415787 - DNA, 15 bp, Homo sapiens
atcccgcaccggggc

SEQ ID NO: 1415788 - DNA, 15 bp, Homo sapiens
gatcccgcaccgggg

SEQ ID NO: 1415789 - DNA, 15 bp, Homo sapiens
ggatcccgcaccggg

SEQ ID NO: 1415790 - DNA, 15 bp, Homo sapiens
tggatcccgcaccgg

SEQ ID NO: 1415791 - DNA, 15 bp, Homo sapiens
gtggatcccgcaccg

SEQ ID NO: 1415792 - DNA, 15 bp, Homo sapiens
agtggatcccgcacc

SEQ ID NO: 1415793 - DNA, 15 bp, Homo sapiens
cagtggatcccgcac

SEQ ID NO: 1415794 - DNA, 15 bp, Homo sapiens
ccagtggatcccgca

SEQ ID NO: 1415795 - DNA, 15 bp, Homo sapiens
cccagtggatcccgc

SEQ ID NO: 1415796 - DNA, 15 bp, Homo sapiens
acccagtggatcccg

SEQ ID NO: 1415797 - DNA, 15 bp, Homo sapiens
cacccagtggatccc

SEQ ID NO: 1415798 - DNA, 15 bp, Homo sapiens
tcacccagtggatcc

SEQ ID NO: 1415799 - DNA, 15 bp, Homo sapiens
ttcacccagtggatc

SEQ ID NO: 1415800 - DNA, 15 bp, Homo sapiens
cttcacccagtggat

SEQ ID NO: 1415801 - DNA, 15 bp, Homo sapiens
gcttcacccagtgga

SEQ ID NO: 1415802 - DNA, 15 bp, Homo sapiens
ggcttcacccagtgg

SEQ ID NO: 1415803 - DNA, 15 bp, Homo sapiens
tggcttcacccagtg

SEQ ID NO: 1415804 - DNA, 15 bp, Homo sapiens
ctggcttcacccagt

SEQ ID NO: 1415805 - DNA, 15 bp, Homo sapiens
gctggcttcacccag

SEQ ID NO: 1415806 - DNA, 15 bp, Homo sapiens
agctggcttcaccca

SEQ ID NO: 1415807 - DNA, 15 bp, Homo sapiens
cagctggcttcaccc

SEQ ID NO: 1415808 - DNA, 15 bp, Homo sapiens
ccagctggcttcacc

SEQ ID NO: 1415809 - DNA, 15 bp, Homo sapiens
cccagctggcttcac

SEQ ID NO: 1415810 - DNA, 15 bp, Homo sapiens
gcccagctggcttca

SEQ ID NO: 1415811 - DNA, 15 bp, Homo sapiens
gagcccagctggctt

SEQ ID NO: 1415812 - DNA, 15 bp, Homo sapiens
ggagcccagctggct

SEQ ID NO: 1415813 - DNA, 15 bp, Homo sapiens
aggagcccagctggc

SEQ ID NO: 1415814 - DNA, 15 bp, Homo sapiens
caggagcccagctgg

SEQ ID NO: 1415815 - DNA, 15 bp, Homo sapiens
tcaggagcccagctg

SEQ ID NO: 1415816 - DNA, 15 bp, Homo sapiens
ctcaggagcccagct

SEQ ID NO: 1415817 - DNA, 15 bp, Homo sapiens
actcaggagcccagc

SEQ ID NO: 1415818 - DNA, 15 bp, Homo sapiens
gactcaggagcccag

SEQ ID NO: 1415819 - DNA, 15 bp, Homo sapiens
agactcaggagccca

SEQ ID NO: 1415820 - DNA, 15 bp, Homo sapiens
cagactcaggagccc

SEQ ID NO: 1415821 - DNA, 15 bp, Homo sapiens
ccagactcaggagcc

SEQ ID NO: 1415822 - DNA, 15 bp, Homo sapiens
accagactcaggagc

SEQ ID NO: 1415823 - DNA, 15 bp, Homo sapiens
caccagactcaggag

SEQ ID NO: 1415824 - DNA, 15 bp, Homo sapiens
ccaccagactcagga

SEQ ID NO: 1415825 - DNA, 15 bp, Homo sapiens
cccaccagactcagg

SEQ ID NO: 1415826 - DNA, 15 bp, Homo sapiens
ccccaccagactcag

SEQ ID NO: 1415827 - DNA, 15 bp, Homo sapiens
tccccaccagactca

SEQ ID NO: 1415828 - DNA, 15 bp, Homo sapiens
gtccccaccagactc

SEQ ID NO: 1415829 - DNA, 15 bp, Homo sapiens
agtccccaccagact

SEQ ID NO: 1415830 - DNA, 15 bp, Homo sapiens
aagtccccaccagac

SEQ ID NO: 1415831 - DNA, 15 bp, Homo sapiens
caagtccccaccaga

SEQ ID NO: 1415832 - DNA, 15 bp, Homo sapiens
ccaagtccccaccag

SEQ ID NO: 1415833 - DNA, 15 bp, Homo sapiens
tccaagtccccacca

SEQ ID NO: 1415834 - DNA, 15 bp, Homo sapiens
ctccaagtccccacc

SEQ ID NO: 1415835 - DNA, 15 bp, Homo sapiens
tctccaagtccccac

SEQ ID NO: 1415836 - DNA, 15 bp, Homo sapiens
ttctccaagtcccca

SEQ ID NO: 1415837 - DNA, 15 bp, Homo sapiens
gttctccaagtcccc

SEQ ID NO: 1415838 - DNA, 15 bp, Homo sapiens
cgttctccaagtccc

SEQ ID NO: 1415839 - DNA, 15 bp, Homo sapiens
acgttctccaagtcc

SEQ ID NO: 1415840 - DNA, 15 bp, Homo sapiens
aacgttctccaagtc

SEQ ID NO: 1415841 - DNA, 15 bp, Homo sapiens
aaacgttctccaagt

SEQ ID NO: 1415842 - DNA, 15 bp, Homo sapiens
taaacgttctccaag

SEQ ID NO: 1415843 - DNA, 15 bp, Homo sapiens
ataaacgttctccaa

SEQ ID NO: 1415844 - DNA, 15 bp, Homo sapiens
cataaacgttctcca

SEQ ID NO: 1415845 - DNA, 15 bp, Homo sapiens
acataaacgttctcc

SEQ ID NO: 1415846 - DNA, 15 bp, Homo sapiens
aacataaacgttctc

SEQ ID NO: 1415847 - DNA, 15 bp, Homo sapiens
aaacataaacgttct

SEQ ID NO: 1415848 - DNA, 15 bp, Homo sapiens
taaacataaacgttc

SEQ ID NO: 1415849 - DNA, 15 bp, Homo sapiens
ctaaacataaacgtt

SEQ ID NO: 1415850 - DNA, 15 bp, Homo sapiens
gctaaacataaacgt

SEQ ID NO: 1415851 - DNA, 15 bp, Homo sapiens
agctaaacataaacg

SEQ ID NO: 1415852 - DNA, 15 bp, Homo sapiens
tagctaaacataaac

SEQ ID NO: 1415853 - DNA, 15 bp, Homo sapiens
ttagctaaacataaa

SEQ ID NO: 1415854 - DNA, 15 bp, Homo sapiens
cttagctaaacataa

SEQ ID NO: 1415855 - DNA, 15 bp, Homo sapiens
tcttagctaaacata

SEQ ID NO: 1415856 - DNA, 15 bp, Homo sapiens
ctcttagctaaacat

SEQ ID NO: 1415857 - DNA, 15 bp, Homo sapiens
tctcttagctaaaca

SEQ ID NO: 1415858 - DNA, 15 bp, Homo sapiens
atctcttagctaaac

SEQ ID NO: 1415859 - DNA, 15 bp, Homo sapiens
aatctcttagctaaa

SEQ ID NO: 1415860 - DNA, 15 bp, Homo sapiens
caatctcttagctaa

SEQ ID NO: 1415861 - DNA, 15 bp, Homo sapiens
acaatctcttagcta

SEQ ID NO: 1415862 - DNA, 15 bp, Homo sapiens
tacaatctcttagct

SEQ ID NO: 1415863 - DNA, 15 bp, Homo sapiens
ttacaatctcttagc

SEQ ID NO: 1415864 - DNA, 15 bp, Homo sapiens
tttacaatctcttag

SEQ ID NO: 1415865 - DNA, 15 bp, Homo sapiens
atttacaatctctta

SEQ ID NO: 1415866 - DNA, 15 bp, Homo sapiens
tatttacaatctctt

SEQ ID NO: 1415867 - DNA, 15 bp, Homo sapiens
gtatttacaatctct

SEQ ID NO: 1415868 - DNA, 15 bp, Homo sapiens
tgtatttacaatctc

SEQ ID NO: 1415869 - DNA, 15 bp, Homo sapiens
gtgtatttacaatct

SEQ ID NO: 1415870 - DNA, 15 bp, Homo sapiens
ggtgtatttacaatc

SEQ ID NO: 1415871 - DNA, 15 bp, Homo sapiens
tggtgtatttacaat

SEQ ID NO: 1415872 - DNA, 15 bp, Homo sapiens
ttggtgtatttacaa

SEQ ID NO: 1415873 - DNA, 15 bp, Homo sapiens
attggtgtatttaca

SEQ ID NO: 1415874 - DNA, 15 bp, Homo sapiens
aattggtgtatttac

SEQ ID NO: 1415875 - DNA, 15 bp, Homo sapiens
caattggtgtattta

SEQ ID NO: 1415876 - DNA, 15 bp, Homo sapiens
ccaattggtgtattt

SEQ ID NO: 1415877 - DNA, 15 bp, Homo sapiens
accaattggtgtatt

SEQ ID NO: 1415878 - DNA, 15 bp, Homo sapiens
taccaattggtgtat

SEQ ID NO: 1415879 - DNA, 15 bp, Homo sapiens
gtaccaattggtgta

SEQ ID NO: 1415880 - DNA, 15 bp, Homo sapiens
agtaccaattggtgt

SEQ ID NO: 1415881 - DNA, 15 bp, Homo sapiens
cagtaccaattggtg

SEQ ID NO: 1415882 - DNA, 15 bp, Homo sapiens
acagtaccaattggt

SEQ ID NO: 1415883 - DNA, 15 bp, Homo sapiens
cacagtaccaattgg

SEQ ID NO: 1415884 - DNA, 15 bp, Homo sapiens
acacagtaccaattg

SEQ ID NO: 1415885 - DNA, 15 bp, Homo sapiens
tacacagtaccaatt

SEQ ID NO: 1415886 - DNA, 15 bp, Homo sapiens
atacacagtaccaat

SEQ ID NO: 1415887 - DNA, 15 bp, Homo sapiens
gatacacagtaccaa

SEQ ID NO: 1415888 - DNA, 15 bp, Homo sapiens
agatacacagtacca

SEQ ID NO: 1415889 - DNA, 15 bp, Homo sapiens
tagatacacagtacc

SEQ ID NO: 1415890 - DNA, 15 bp, Homo sapiens
ctagatacacagtac

SEQ ID NO: 1415891 - DNA, 15 bp, Homo sapiens
gctagatacacagta

SEQ ID NO: 1415892 - DNA, 15 bp, Homo sapiens
agctagatacacagt

SEQ ID NO: 1415893 - DNA, 15 bp, Homo sapiens
gagctagatacacag

SEQ ID NO: 1415894 - DNA, 15 bp, Homo sapiens
tgagctagatacaca

SEQ ID NO: 1415895 - DNA, 15 bp, Homo sapiens
ttgagctagatacac

SEQ ID NO: 1415896 - DNA, 15 bp, Homo sapiens
cttgagctagataca

SEQ ID NO: 1415897 - DNA, 15 bp, Homo sapiens
ccttgagctagatac

SEQ ID NO: 1415898 - DNA, 15 bp, Homo sapiens
accttgagctagata

SEQ ID NO: 1415899 - DNA, 15 bp, Homo sapiens
aaccttgagctagat

SEQ ID NO: 1415900 - DNA, 15 bp, Homo sapiens
aaaccttgagctaga

SEQ ID NO: 1415901 - DNA, 15 bp, Homo sapiens
taaaccttgagctag

SEQ ID NO: 1415902 - DNA, 15 bp, Homo sapiens
ataaaccttgagcta

SEQ ID NO: 1415903 - DNA, 15 bp, Homo sapiens
tataaaccttgagct

SEQ ID NO: 1415904 - DNA, 15 bp, Homo sapiens
ttataaaccttgagc

SEQ ID NO: 1415905 - DNA, 15 bp, Homo sapiens
tttataaaccttgag

SEQ ID NO: 1415906 - DNA, 15 bp, Homo sapiens
gtttataaaccttga

SEQ ID NO: 1415907 - DNA, 15 bp, Homo sapiens
tgtttataaaccttg

SEQ ID NO: 1415908 - DNA, 15 bp, Homo sapiens
gtgtttataaacctt

SEQ ID NO: 1415909 - DNA, 15 bp, Homo sapiens
tgtgtttataaacct

SEQ ID NO: 1415910 - DNA, 15 bp, Homo sapiens
gtgtgtttataaacc

SEQ ID NO: 1415911 - DNA, 15 bp, Homo sapiens
ggtgtgtttataaac

SEQ ID NO: 1415912 - DNA, 15 bp, Homo sapiens
tggtgtgtttataaa

SEQ ID NO: 1415913 - DNA, 15 bp, Homo sapiens
ttggtgtgtttataa

SEQ ID NO: 1415914 - DNA, 15 bp, Homo sapiens
attggtgtgtttata

SEQ ID NO: 1415915 - DNA, 15 bp, Homo sapiens
gattggtgtgtttat

SEQ ID NO: 1415916 - DNA, 15 bp, Homo sapiens
tgattggtgtgttta

SEQ ID NO: 1415917 - DNA, 15 bp, Homo sapiens
ctgattggtgtgttt

SEQ ID NO: 1415918 - DNA, 15 bp, Homo sapiens
gctgattggtgtgtt

SEQ ID NO: 1415919 - DNA, 15 bp, Homo sapiens
tgctgattggtgtgt

SEQ ID NO: 1415920 - DNA, 15 bp, Homo sapiens
gtgctgattggtgtg

SEQ ID NO: 1415921 - DNA, 15 bp, Homo sapiens
ggtgctgattggtgt

SEQ ID NO: 1415922 - DNA, 15 bp, Homo sapiens
gggtgctgattggtg

SEQ ID NO: 1415923 - DNA, 15 bp, Homo sapiens
agggtgctgattggt

SEQ ID NO: 1415924 - DNA, 15 bp, Homo sapiens
cagggtgctgattgg

SEQ ID NO: 1415925 - DNA, 15 bp, Homo sapiens
acagggtgctgattg

SEQ ID NO: 1415926 - DNA, 15 bp, Homo sapiens
tacagggtgctgatt

SEQ ID NO: 1415927 - DNA, 15 bp, Homo sapiens
atacagggtgctgat

SEQ ID NO: 1415928 - DNA, 15 bp, Homo sapiens
gatacagggtgctga

SEQ ID NO: 1415929 - DNA, 15 bp, Homo sapiens
agatacagggtgctg

SEQ ID NO: 1415930 - DNA, 15 bp, Homo sapiens
tagatacagggtgct

SEQ ID NO: 1415931 - DNA, 15 bp, Homo sapiens
ctagatacagggtgc

SEQ ID NO: 1415932 - DNA, 15 bp, Homo sapiens
gctagatacagggtg

SEQ ID NO: 1415933 - DNA, 15 bp, Homo sapiens
agctagatacagggt

SEQ ID NO: 1415934 - DNA, 15 bp, Homo sapiens
gagctagatacaggg

SEQ ID NO: 1415935 - DNA, 15 bp, Homo sapiens
tgagctagatacagg

SEQ ID NO: 1415936 - DNA, 15 bp, Homo sapiens
ctgagctagatacag

SEQ ID NO: 1415937 - DNA, 15 bp, Homo sapiens
cctgagctagataca

SEQ ID NO: 1415938 - DNA, 15 bp, Homo sapiens
ccctgagctagatac

SEQ ID NO: 1415939 - DNA, 15 bp, Homo sapiens
accctgagctagata

SEQ ID NO: 1415940 - DNA, 15 bp, Homo sapiens
aaccctgagctagat

SEQ ID NO: 1415941 - DNA, 15 bp, Homo sapiens
aaaccctgagctaga

SEQ ID NO: 1415942 - DNA, 15 bp, Homo sapiens
caaaccctgagctag

SEQ ID NO: 1415943 - DNA, 15 bp, Homo sapiens
acaaaccctgagcta

SEQ ID NO: 1415944 - DNA, 15 bp, Homo sapiens
cacaaaccctgagct

SEQ ID NO: 1415945 - DNA, 15 bp, Homo sapiens
tcacaaaccctgagc

SEQ ID NO: 1415946 - DNA, 15 bp, Homo sapiens
ttcacaaaccctgag

SEQ ID NO: 1415947 - DNA, 15 bp, Homo sapiens
attcacaaaccctga

SEQ ID NO: 1415948 - DNA, 15 bp, Homo sapiens
tgcattcacaaaccc

SEQ ID NO: 1415949 - DNA, 15 bp, Homo sapiens
gtgcattcacaaacc

SEQ ID NO: 1415950 - DNA, 15 bp, Homo sapiens
ggtgcattcacaaac

SEQ ID NO: 1415951 - DNA, 15 bp, Homo sapiens
tggtgcattcacaaa

SEQ ID NO: 1415952 - DNA, 15 bp, Homo sapiens
ttggtgcattcacaa

SEQ ID NO: 1415953 - DNA, 15 bp, Homo sapiens
attggtgcattcaca

SEQ ID NO: 1415954 - DNA, 15 bp, Homo sapiens
gattggtgcattcac

SEQ ID NO: 1415955 - DNA, 15 bp, Homo sapiens
cgattggtgcattca

SEQ ID NO: 1415956 - DNA, 15 bp, Homo sapiens
tcgattggtgcattc

SEQ ID NO: 1415957 - DNA, 15 bp, Homo sapiens
gtcgattggtgcatt

SEQ ID NO: 1415958 - DNA, 15 bp, Homo sapiens
tgtcgattggtgcat

SEQ ID NO: 1415959 - DNA, 15 bp, Homo sapiens
gtgtcgattggtgca

SEQ ID NO: 1415960 - DNA, 15 bp, Homo sapiens
agtgtcgattggtgc

SEQ ID NO: 1415961 - DNA, 15 bp, Homo sapiens
cagtgtcgattggtg

SEQ ID NO: 1415962 - DNA, 15 bp, Homo sapiens
acagtgtcgattggt

SEQ ID NO: 1415963 - DNA, 15 bp, Homo sapiens
tacagtgtcgattgg

SEQ ID NO: 1415964 - DNA, 15 bp, Homo sapiens
atacagtgtcgattg

SEQ ID NO: 1415965 - DNA, 15 bp, Homo sapiens
gatacagtgtcgatt

SEQ ID NO: 1415966 - DNA, 15 bp, Homo sapiens
agatacagtgtcgat

SEQ ID NO: 1415967 - DNA, 15 bp, Homo sapiens
tagatacagtgtcga

SEQ ID NO: 1415968 - DNA, 15 bp, Homo sapiens
ctagatacagtgtcg

SEQ ID NO: 1415969 - DNA, 15 bp, Homo sapiens
gctagatacagtgtc

SEQ ID NO: 1415970 - DNA, 15 bp, Homo sapiens
agctagatacagtgt

SEQ ID NO: 1415971 - DNA, 15 bp, Homo sapiens
tagctagatacagtg

SEQ ID NO: 1415972 - DNA, 15 bp, Homo sapiens
gtagctagatacagt

SEQ ID NO: 1415973 - DNA, 15 bp, Homo sapiens
agtagctagatacag

SEQ ID NO: 1415974 - DNA, 15 bp, Homo sapiens
gagtagctagataca

SEQ ID NO: 1415975 - DNA, 15 bp, Homo sapiens
agagtagctagatac

SEQ ID NO: 1415976 - DNA, 15 bp, Homo sapiens
cagagtagctagata

SEQ ID NO: 1415977 - DNA, 15 bp, Homo sapiens
ccagagtagctagat

SEQ ID NO: 1415978 - DNA, 15 bp, Homo sapiens
accagagtagctaga

SEQ ID NO: 1415979 - DNA, 15 bp, Homo sapiens
caccagagtagctag

SEQ ID NO: 1415980 - DNA, 15 bp, Homo sapiens
ccaccagagtagcta

SEQ ID NO: 1415981 - DNA, 15 bp, Homo sapiens
cccaccagagtagct

SEQ ID NO: 1415982 - DNA, 15 bp, Homo sapiens
ccccaccagagtagc

SEQ ID NO: 1415983 - DNA, 15 bp, Homo sapiens
tccccaccagagtag

SEQ ID NO: 1415984 - DNA, 15 bp, Homo sapiens
gtccccaccagagta

SEQ ID NO: 1415985 - DNA, 15 bp, Homo sapiens
agtccccaccagagt

SEQ ID NO: 1415986 - DNA, 15 bp, Homo sapiens
aagtccccaccagag

SEQ ID NO: 1415987 - DNA, 15 bp, Homo sapiens
ttccaagtccccacc

SEQ ID NO: 1415988 - DNA, 15 bp, Homo sapiens
tttccaagtccccac

SEQ ID NO: 1415989 - DNA, 15 bp, Homo sapiens
ttttccaagtcccca

SEQ ID NO: 1415990 - DNA, 15 bp, Homo sapiens
gttttccaagtcccc

SEQ ID NO: 1415991 - DNA, 15 bp, Homo sapiens
cgttttccaagtccc

SEQ ID NO: 1415992 - DNA, 15 bp, Homo sapiens
acgttttccaagtcc

SEQ ID NO: 1415993 - DNA, 15 bp, Homo sapiens
aacgttttccaagtc

SEQ ID NO: 1415994 - DNA, 15 bp, Homo sapiens
aaacgttttccaagt

SEQ ID NO: 1415995 - DNA, 15 bp, Homo sapiens
caaacgttttccaag

SEQ ID NO: 1415996 - DNA, 15 bp, Homo sapiens
acaaacgttttccaa

SEQ ID NO: 1415997 - DNA, 15 bp, Homo sapiens
cacaaacgttttcca

SEQ ID NO: 1415998 - DNA, 15 bp, Homo sapiens
acacaaacgttttcc

SEQ ID NO: 1415999 - DNA, 15 bp, Homo sapiens
gacacaaacgttttc

SEQ ID NO: 1416000 - DNA, 15 bp, Homo sapiens
ggacacaaacgtttt

SEQ ID NO: 1416001 - DNA, 15 bp, Homo sapiens
tggacacaaacgttt

SEQ ID NO: 1416002 - DNA, 15 bp, Homo sapiens
gtggacacaaacgtt

SEQ ID NO: 1416003 - DNA, 15 bp, Homo sapiens
tgtggacacaaacgt

SEQ ID NO: 1416004 - DNA, 15 bp, Homo sapiens
gtgtggacacaaacg

SEQ ID NO: 1416005 - DNA, 15 bp, Homo sapiens
agtgtggacacaaac

SEQ ID NO: 1416006 - DNA, 15 bp, Homo sapiens
gagtgtggacacaaa

SEQ ID NO: 1416007 - DNA, 15 bp, Homo sapiens
agagtgtggacacaa

SEQ ID NO: 1416008 - DNA, 15 bp, Homo sapiens
cagagtgtggacaca

SEQ ID NO: 1416009 - DNA, 15 bp, Homo sapiens
acagagtgtggacac

SEQ ID NO: 1416010 - DNA, 15 bp, Homo sapiens
tacagagtgtggaca

SEQ ID NO: 1416011 - DNA, 15 bp, Homo sapiens
atacagagtgtggac

SEQ ID NO: 1416012 - DNA, 15 bp, Homo sapiens
gatacagagtgtgga

SEQ ID NO: 1416013 - DNA, 15 bp, Homo sapiens
agatacagagtgtgg

SEQ ID NO: 1416014 - DNA, 15 bp, Homo sapiens
tagatacagagtgtg

SEQ ID NO: 1416015 - DNA, 15 bp, Homo sapiens
ctagatacagagtgt

SEQ ID NO: 1416016 - DNA, 15 bp, Homo sapiens
gctagatacagagtg

SEQ ID NO: 1416017 - DNA, 15 bp, Homo sapiens
agctagatacagagt

SEQ ID NO: 1416018 - DNA, 15 bp, Homo sapiens
tagctagatacagag

SEQ ID NO: 1416019 - DNA, 15 bp, Homo sapiens
ttagctagatacaga

SEQ ID NO: 1416020 - DNA, 15 bp, Homo sapiens
attagctagatacag

SEQ ID NO: 1416021 - DNA, 15 bp, Homo sapiens
gattagctagataca

SEQ ID NO: 1416022 - DNA, 15 bp, Homo sapiens
agattagctagatac

SEQ ID NO: 1416023 - DNA, 15 bp, Homo sapiens
tagattagctagata

SEQ ID NO: 1416024 - DNA, 15 bp, Homo sapiens
ctagattagctagat

SEQ ID NO: 1416025 - DNA, 15 bp, Homo sapiens
actagattagctaga

SEQ ID NO: 1416026 - DNA, 15 bp, Homo sapiens
cactagattagctag

SEQ ID NO: 1416027 - DNA, 15 bp, Homo sapiens
ccactagattagcta

SEQ ID NO: 1416028 - DNA, 15 bp, Homo sapiens
cccactagattagct

SEQ ID NO: 1416029 - DNA, 15 bp, Homo sapiens
ccccactagattagc

SEQ ID NO: 1416030 - DNA, 15 bp, Homo sapiens
tccccactagattag

SEQ ID NO: 1416031 - DNA, 15 bp, Homo sapiens
atccccactagatta

SEQ ID NO: 1416032 - DNA, 15 bp, Homo sapiens
catccccactagatt

SEQ ID NO: 1416033 - DNA, 15 bp, Homo sapiens
acatccccactagat

SEQ ID NO: 1416034 - DNA, 15 bp, Homo sapiens
cacatccccactaga

SEQ ID NO: 1416035 - DNA, 15 bp, Homo sapiens
ccacatccccactag

SEQ ID NO: 1416036 - DNA, 15 bp, Homo sapiens
tccacatccccacta

SEQ ID NO: 1416037 - DNA, 15 bp, Homo sapiens
ctccacatccccact

SEQ ID NO: 1416038 - DNA, 15 bp, Homo sapiens
tctccacatccccac

SEQ ID NO: 1416039 - DNA, 15 bp, Homo sapiens
ttctccacatcccca

SEQ ID NO: 1416040 - DNA, 15 bp, Homo sapiens
gttctccacatcccc

SEQ ID NO: 1416041 - DNA, 15 bp, Homo sapiens
ggttctccacatccc

SEQ ID NO: 1416042 - DNA, 15 bp, Homo sapiens
aggttctccacatcc

SEQ ID NO: 1416043 - DNA, 15 bp, Homo sapiens
aaggttctccacatc

SEQ ID NO: 1416044 - DNA, 15 bp, Homo sapiens
aaaggttctccacat

SEQ ID NO: 1416045 - DNA, 15 bp, Homo sapiens
caaaggttctccaca

SEQ ID NO: 1416046 - DNA, 15 bp, Homo sapiens
acaaaggttctccac

SEQ ID NO: 1416047 - DNA, 15 bp, Homo sapiens
cacaaaggttctcca

SEQ ID NO: 1416048 - DNA, 15 bp, Homo sapiens
acacaaaggttctcc

SEQ ID NO: 1416049 - DNA, 15 bp, Homo sapiens
gacacaaaggttctc

SEQ ID NO: 1416050 - DNA, 15 bp, Homo sapiens
agacacaaaggttct

SEQ ID NO: 1416051 - DNA, 15 bp, Homo sapiens
tagacacaaaggttc

SEQ ID NO: 1416052 - DNA, 15 bp, Homo sapiens
ctagacacaaaggtt

SEQ ID NO: 1416053 - DNA, 15 bp, Homo sapiens
gctagacacaaaggt

SEQ ID NO: 1416054 - DNA, 15 bp, Homo sapiens
agctagacacaaagg

SEQ ID NO: 1416055 - DNA, 15 bp, Homo sapiens
gagctagacacaaag

SEQ ID NO: 1416056 - DNA, 15 bp, Homo sapiens
tgagctagacacaaa

SEQ ID NO: 1416057 - DNA, 15 bp, Homo sapiens
ctgagctagacacaa

SEQ ID NO: 1416058 - DNA, 15 bp, Homo sapiens
cctgagctagacaca

SEQ ID NO: 1416059 - DNA, 15 bp, Homo sapiens
ccctgagctagacac

SEQ ID NO: 1416060 - DNA, 15 bp, Homo sapiens
tccctgagctagaca

SEQ ID NO: 1416061 - DNA, 15 bp, Homo sapiens
atccctgagctagac

SEQ ID NO: 1416062 - DNA, 15 bp, Homo sapiens
aatccctgagctaga

SEQ ID NO: 1416063 - DNA, 15 bp, Homo sapiens
caatccctgagctag

SEQ ID NO: 1416064 - DNA, 15 bp, Homo sapiens
acaatccctgagcta

SEQ ID NO: 1416065 - DNA, 15 bp, Homo sapiens
tacaatccctgagct

SEQ ID NO: 1416066 - DNA, 15 bp, Homo sapiens
ttacaatccctgagc

SEQ ID NO: 1416067 - DNA, 15 bp, Homo sapiens
tttacaatccctgag

SEQ ID NO: 1416068 - DNA, 15 bp, Homo sapiens
gtttacaatccctga

SEQ ID NO: 1416069 - DNA, 15 bp, Homo sapiens
cgtttacaatccctg

SEQ ID NO: 1416070 - DNA, 15 bp, Homo sapiens
gcgtttacaatccct

SEQ ID NO: 1416071 - DNA, 15 bp, Homo sapiens
tgcgtttacaatccc

SEQ ID NO: 1416072 - DNA, 15 bp, Homo sapiens
gtgcgtttacaatcc

SEQ ID NO: 1416073 - DNA, 15 bp, Homo sapiens
ggtgcgtttacaatc

SEQ ID NO: 1416074 - DNA, 15 bp, Homo sapiens
tggtgcgtttacaat

SEQ ID NO: 1416075 - DNA, 15 bp, Homo sapiens
ttggtgcgtttacaa

SEQ ID NO: 1416076 - DNA, 15 bp, Homo sapiens
attggtgcgtttaca

SEQ ID NO: 1416077 - DNA, 15 bp, Homo sapiens
gattggtgcgtttac

SEQ ID NO: 1416078 - DNA, 15 bp, Homo sapiens
tgattggtgcgttta

SEQ ID NO: 1416079 - DNA, 15 bp, Homo sapiens
ctgattggtgcgttt

SEQ ID NO: 1416080 - DNA, 15 bp, Homo sapiens
gctgattggtgcgtt

SEQ ID NO: 1416081 - DNA, 15 bp, Homo sapiens
tgctgattggtgcgt

SEQ ID NO: 1416082 - DNA, 15 bp, Homo sapiens
gtgctgattggtgcg

SEQ ID NO: 1416083 - DNA, 15 bp, Homo sapiens
ggtgctgattggtgc

SEQ ID NO: 1416084 - DNA, 15 bp, Homo sapiens
gacagggtgctgatt

SEQ ID NO: 1416085 - DNA, 15 bp, Homo sapiens
tgacagggtgctgat

SEQ ID NO: 1416086 - DNA, 15 bp, Homo sapiens
ttgacagggtgctga

SEQ ID NO: 1416087 - DNA, 15 bp, Homo sapiens
tttgacagggtgctg

SEQ ID NO: 1416088 - DNA, 15 bp, Homo sapiens
ttttgacagggtgct

SEQ ID NO: 1416089 - DNA, 15 bp, Homo sapiens
attttgacagggtgc

SEQ ID NO: 1416090 - DNA, 15 bp, Homo sapiens
cattttgacagggtg

SEQ ID NO: 1416091 - DNA, 15 bp, Homo sapiens
ccattttgacagggt

SEQ ID NO: 1416092 - DNA, 15 bp, Homo sapiens
cccattttgacaggg

SEQ ID NO: 1416093 - DNA, 15 bp, Homo sapiens
gcccattttgacagg

SEQ ID NO: 1416094 - DNA, 15 bp, Homo sapiens
ggcccattttgacag

SEQ ID NO: 1416095 - DNA, 15 bp, Homo sapiens
tggcccattttgaca

SEQ ID NO: 1416096 - DNA, 15 bp, Homo sapiens
ttggcccattttgac

SEQ ID NO: 1416097 - DNA, 15 bp, Homo sapiens
attggcccattttga

SEQ ID NO: 1416098 - DNA, 15 bp, Homo sapiens
aattggcccattttg

SEQ ID NO: 1416099 - DNA, 15 bp, Homo sapiens
taattggcccatttt

SEQ ID NO: 1416100 - DNA, 15 bp, Homo sapiens
ctaattggcccattt

SEQ ID NO: 1416101 - DNA, 15 bp, Homo sapiens
gctaattggcccatt

SEQ ID NO: 1416102 - DNA, 15 bp, Homo sapiens
agctaattggcccat

SEQ ID NO: 1416103 - DNA, 15 bp, Homo sapiens
gagctaattggccca

SEQ ID NO: 1416104 - DNA, 15 bp, Homo sapiens
agagctaattggccc

SEQ ID NO: 1416105 - DNA, 15 bp, Homo sapiens
gagagctaattggcc

SEQ ID NO: 1416106 - DNA, 15 bp, Homo sapiens
agagagctaattggc

SEQ ID NO: 1416107 - DNA, 15 bp, Homo sapiens
cagagagctaattgg

SEQ ID NO: 1416108 - DNA, 15 bp, Homo sapiens
acagagagctaattg

SEQ ID NO: 1416109 - DNA, 15 bp, Homo sapiens
tacagagagctaatt

SEQ ID NO: 1416110 - DNA, 15 bp, Homo sapiens
ttacagagagctaat

SEQ ID NO: 1416111 - DNA, 15 bp, Homo sapiens
tttacagagagctaa

SEQ ID NO: 1416112 - DNA, 15 bp, Homo sapiens
ttttacagagagcta

SEQ ID NO: 1416113 - DNA, 15 bp, Homo sapiens
attttacagagagct

SEQ ID NO: 1416114 - DNA, 15 bp, Homo sapiens
cattttacagagagc

SEQ ID NO: 1416115 - DNA, 15 bp, Homo sapiens
ccattttacagagag

SEQ ID NO: 1416116 - DNA, 15 bp, Homo sapiens
tccattttacagaga

SEQ ID NO: 1416117 - DNA, 15 bp, Homo sapiens
gtccattttacagag

SEQ ID NO: 1416118 - DNA, 15 bp, Homo sapiens
ggtccattttacaga

SEQ ID NO: 1416119 - DNA, 15 bp, Homo sapiens
tggtccattttacag

SEQ ID NO: 1416120 - DNA, 15 bp, Homo sapiens
ttggtccattttaca

SEQ ID NO: 1416121 - DNA, 15 bp, Homo sapiens
attggtccattttac

SEQ ID NO: 1416122 - DNA, 15 bp, Homo sapiens
gattggtccatttta

SEQ ID NO: 1416123 - DNA, 15 bp, Homo sapiens
cgattggtccatttt

SEQ ID NO: 1416124 - DNA, 15 bp, Homo sapiens
ccgattggtccattt

SEQ ID NO: 1416125 - DNA, 15 bp, Homo sapiens
gccgattggtccatt

SEQ ID NO: 1416126 - DNA, 15 bp, Homo sapiens
agccgattggtccat

SEQ ID NO: 1416127 - DNA, 15 bp, Homo sapiens
gagccgattggtcca

SEQ ID NO: 1416128 - DNA, 15 bp, Homo sapiens
agagccgattggtcc

SEQ ID NO: 1416129 - DNA, 15 bp, Homo sapiens
gagagccgattggtc

SEQ ID NO: 1416130 - DNA, 15 bp, Homo sapiens
agagagccgattggt

SEQ ID NO: 1416131 - DNA, 15 bp, Homo sapiens
cagagagccgattgg

SEQ ID NO: 1416132 - DNA, 15 bp, Homo sapiens
acagagagccgattg

SEQ ID NO: 1416133 - DNA, 15 bp, Homo sapiens
tacagagagccgatt

SEQ ID NO: 1416134 - DNA, 15 bp, Homo sapiens
ttacagagagccgat

SEQ ID NO: 1416135 - DNA, 15 bp, Homo sapiens
tttacagagagccga

SEQ ID NO: 1416136 - DNA, 15 bp, Homo sapiens
ttttacagagagccg

SEQ ID NO: 1416137 - DNA, 15 bp, Homo sapiens
attttacagagagcc

SEQ ID NO: 1416138 - DNA, 15 bp, Homo sapiens
tgattggtccatttt

SEQ ID NO: 1416139 - DNA, 15 bp, Homo sapiens
ctgattggtccattt

SEQ ID NO: 1416140 - DNA, 15 bp, Homo sapiens
gctgattggtccatt

SEQ ID NO: 1416141 - DNA, 15 bp, Homo sapiens
tgctgattggtccat

SEQ ID NO: 1416142 - DNA, 15 bp, Homo sapiens
ctgctgattggtcca

SEQ ID NO: 1416143 - DNA, 15 bp, Homo sapiens
cctgctgattggtcc

SEQ ID NO: 1416144 - DNA, 15 bp, Homo sapiens
tcctgctgattggtc

SEQ ID NO: 1416145 - DNA, 15 bp, Homo sapiens
atcctgctgattggt

SEQ ID NO: 1416146 - DNA, 15 bp, Homo sapiens
catcctgctgattgg

SEQ ID NO: 1416147 - DNA, 15 bp, Homo sapiens
acatcctgctgattg

SEQ ID NO: 1416148 - DNA, 15 bp, Homo sapiens
cacatcctgctgatt

SEQ ID NO: 1416149 - DNA, 15 bp, Homo sapiens
ccacatcctgctgat

SEQ ID NO: 1416150 - DNA, 15 bp, Homo sapiens
cccacatcctgctga

SEQ ID NO: 1416151 - DNA, 15 bp, Homo sapiens
acccacatcctgctg

SEQ ID NO: 1416152 - DNA, 15 bp, Homo sapiens
cacccacatcctgct

SEQ ID NO: 1416153 - DNA, 15 bp, Homo sapiens
ccacccacatcctgc

SEQ ID NO: 1416154 - DNA, 15 bp, Homo sapiens
cccacccacatcctg

SEQ ID NO: 1416155 - DNA, 15 bp, Homo sapiens
ccccacccacatcct

SEQ ID NO: 1416156 - DNA, 15 bp, Homo sapiens
gccccacccacatcc

SEQ ID NO: 1416157 - DNA, 15 bp, Homo sapiens
ggccccacccacatc

SEQ ID NO: 1416158 - DNA, 15 bp, Homo sapiens
tggccccacccacat

SEQ ID NO: 1416159 - DNA, 15 bp, Homo sapiens
ctggccccacccaca

SEQ ID NO: 1416160 - DNA, 15 bp, Homo sapiens
tctggccccacccac

SEQ ID NO: 1416161 - DNA, 15 bp, Homo sapiens
atctggccccaccca

SEQ ID NO: 1416162 - DNA, 15 bp, Homo sapiens
tatctggccccaccc

SEQ ID NO: 1416163 - DNA, 15 bp, Homo sapiens
ttatctggccccacc

SEQ ID NO: 1416164 - DNA, 15 bp, Homo sapiens
cttatctggccccac

SEQ ID NO: 1416165 - DNA, 15 bp, Homo sapiens
tcttatctggcccca

SEQ ID NO: 1416166 - DNA, 15 bp, Homo sapiens
ctcttatctggcccc

SEQ ID NO: 1416167 - DNA, 15 bp, Homo sapiens
tctcttatctggccc

SEQ ID NO: 1416168 - DNA, 15 bp, Homo sapiens
ttctcttatctggcc

SEQ ID NO: 1416169 - DNA, 15 bp, Homo sapiens
attctcttatctggc

SEQ ID NO: 1416170 - DNA, 15 bp, Homo sapiens
tattctcttatctgg

SEQ ID NO: 1416171 - DNA, 15 bp, Homo sapiens
ttattctcttatctg

SEQ ID NO: 1416172 - DNA, 15 bp, Homo sapiens
tttattctcttatct

SEQ ID NO: 1416173 - DNA, 15 bp, Homo sapiens
ttttattctcttatc

SEQ ID NO: 1416174 - DNA, 15 bp, Homo sapiens
cttttattctcttat

SEQ ID NO: 1416175 - DNA, 15 bp, Homo sapiens
acttttattctctta

SEQ ID NO: 1416176 - DNA, 15 bp, Homo sapiens
tacttttattctctt

SEQ ID NO: 1416177 - DNA, 15 bp, Homo sapiens
ctacttttattctct

SEQ ID NO: 1416178 - DNA, 15 bp, Homo sapiens
cctacttttattctc

SEQ ID NO: 1416179 - DNA, 15 bp, Homo sapiens
gcctacttttattct

SEQ ID NO: 1416180 - DNA, 15 bp, Homo sapiens
agcctacttttattc

SEQ ID NO: 1416181 - DNA, 15 bp, Homo sapiens
cagcctacttttatt

SEQ ID NO: 1416182 - DNA, 15 bp, Homo sapiens
gcagcctacttttat

SEQ ID NO: 1416183 - DNA, 15 bp, Homo sapiens
ggcagcctactttta

SEQ ID NO: 1416184 - DNA, 15 bp, Homo sapiens
gggcagcctactttt

SEQ ID NO: 1416185 - DNA, 15 bp, Homo sapiens
ggggcagcctacttt

SEQ ID NO: 1416186 - DNA, 15 bp, Homo sapiens
tggggcagcctactt

SEQ ID NO: 1416187 - DNA, 15 bp, Homo sapiens
ctggggcagcctact

SEQ ID NO: 1416188 - DNA, 15 bp, Homo sapiens
gctggggcagcctac

SEQ ID NO: 1416189 - DNA, 15 bp, Homo sapiens
ggctggggcagccta

SEQ ID NO: 1416190 - DNA, 15 bp, Homo sapiens
tggctggggcagcct

SEQ ID NO: 1416191 - DNA, 15 bp, Homo sapiens
ctggctggggcagcc

SEQ ID NO: 1416192 - DNA, 15 bp, Homo sapiens
gctggctggggcagc

SEQ ID NO: 1416193 - DNA, 15 bp, Homo sapiens
tgctggctggggcag

SEQ ID NO: 1416194 - DNA, 15 bp, Homo sapiens
ctgctggctggggca

SEQ ID NO: 1416195 - DNA, 15 bp, Homo sapiens
actgctggctggggc

SEQ ID NO: 1416196 - DNA, 15 bp, Homo sapiens
cactgctggctgggg

SEQ ID NO: 1416197 - DNA, 15 bp, Homo sapiens
ccactgctggctggg

SEQ ID NO: 1416198 - DNA, 15 bp, Homo sapiens
gccactgctggctgg

SEQ ID NO: 1416199 - DNA, 15 bp, Homo sapiens
tgccactgctggctg

SEQ ID NO: 1416200 - DNA, 15 bp, Homo sapiens
ttgccactgctggct

SEQ ID NO: 1416201 - DNA, 15 bp, Homo sapiens
gttgccactgctggc

SEQ ID NO: 1416202 - DNA, 15 bp, Homo sapiens
ggttgccactgctgg

SEQ ID NO: 1416203 - DNA, 15 bp, Homo sapiens
aggttgccactgctg

SEQ ID NO: 1416204 - DNA, 15 bp, Homo sapiens
caggttgccactgct

SEQ ID NO: 1416205 - DNA, 15 bp, Homo sapiens
gcaggttgccactgc

SEQ ID NO: 1416206 - DNA, 15 bp, Homo sapiens
agcaggttgccactg

SEQ ID NO: 1416207 - DNA, 15 bp, Homo sapiens
gagcaggttgccact

SEQ ID NO: 1416208 - DNA, 15 bp, Homo sapiens
tgagcaggttgccac

SEQ ID NO: 1416209 - DNA, 15 bp, Homo sapiens
ctgagcaggttgcca

SEQ ID NO: 1416210 - DNA, 15 bp, Homo sapiens
cctgagcaggttgcc

SEQ ID NO: 1416211 - DNA, 15 bp, Homo sapiens
acctgagcaggttgc

SEQ ID NO: 1416212 - DNA, 15 bp, Homo sapiens
gacctgagcaggttg

SEQ ID NO: 1416213 - DNA, 15 bp, Homo sapiens
ggacctgagcaggtt

SEQ ID NO: 1416214 - DNA, 15 bp, Homo sapiens
gggacctgagcaggt

SEQ ID NO: 1416215 - DNA, 15 bp, Homo sapiens
agggacctgagcagg

SEQ ID NO: 1416216 - DNA, 15 bp, Homo sapiens
aagggacctgagcag

SEQ ID NO: 1416217 - DNA, 15 bp, Homo sapiens
aaagggacctgagca

SEQ ID NO: 1416218 - DNA, 15 bp, Homo sapiens
gaaagggacctgagc

SEQ ID NO: 1416219 - DNA, 15 bp, Homo sapiens
ggaaagggacctgag

SEQ ID NO: 1416220 - DNA, 15 bp, Homo sapiens
tggaaagggacctga

SEQ ID NO: 1416221 - DNA, 15 bp, Homo sapiens
gtggaaagggacctg

SEQ ID NO: 1416222 - DNA, 15 bp, Homo sapiens
cgtggaaagggacct

SEQ ID NO: 1416223 - DNA, 15 bp, Homo sapiens
gcgtggaaagggacc

SEQ ID NO: 1416224 - DNA, 15 bp, Homo sapiens
agcgtggaaagggac

SEQ ID NO: 1416225 - DNA, 15 bp, Homo sapiens
cagcgtggaaaggga

SEQ ID NO: 1416226 - DNA, 15 bp, Homo sapiens
acagcgtggaaaggg

SEQ ID NO: 1416227 - DNA, 15 bp, Homo sapiens
cacagcgtggaaagg

SEQ ID NO: 1416228 - DNA, 15 bp, Homo sapiens
ccacagcgtggaaag

SEQ ID NO: 1416229 - DNA, 15 bp, Homo sapiens
tccacagcgtggaaa

SEQ ID NO: 1416230 - DNA, 15 bp, Homo sapiens
ctccacagcgtggaa

SEQ ID NO: 1416231 - DNA, 15 bp, Homo sapiens
cctccacagcgtgga

SEQ ID NO: 1416232 - DNA, 15 bp, Homo sapiens
tcctccacagcgtgg

SEQ ID NO: 1416233 - DNA, 15 bp, Homo sapiens
atcctccacagcgtg

SEQ ID NO: 1416234 - DNA, 15 bp, Homo sapiens
aatcctccacagcgt

SEQ ID NO: 1416235 - DNA, 15 bp, Homo sapiens
aaatcctccacagcg

SEQ ID NO: 1416236 - DNA, 15 bp, Homo sapiens
caaatcctccacagc

SEQ ID NO: 1416237 - DNA, 15 bp, Homo sapiens
acaaatcctccacag

SEQ ID NO: 1416238 - DNA, 15 bp, Homo sapiens
aacaaatcctccaca

SEQ ID NO: 1416239 - DNA, 15 bp, Homo sapiens
gaacaaatcctccac

SEQ ID NO: 1416240 - DNA, 15 bp, Homo sapiens
ggaacaaatcctcca

SEQ ID NO: 1416241 - DNA, 15 bp, Homo sapiens
aggaacaaatcctcc

SEQ ID NO: 1416242 - DNA, 15 bp, Homo sapiens
aaggaacaaatcctc

SEQ ID NO: 1416243 - DNA, 15 bp, Homo sapiens
aaaggaacaaatcct

SEQ ID NO: 1416244 - DNA, 15 bp, Homo sapiens
caaaggaacaaatcc

SEQ ID NO: 1416245 - DNA, 15 bp, Homo sapiens
gcaaaggaacaaatc

SEQ ID NO: 1416246 - DNA, 15 bp, Homo sapiens
agcaaaggaacaaat

SEQ ID NO: 1416247 - DNA, 15 bp, Homo sapiens
gagcaaaggaacaaa

SEQ ID NO: 1416248 - DNA, 15 bp, Homo sapiens
agagcaaaggaacaa

SEQ ID NO: 1416249 - DNA, 15 bp, Homo sapiens
aagagcaaaggaaca

SEQ ID NO: 1416250 - DNA, 15 bp, Homo sapiens
aaagagcaaaggaac

SEQ ID NO: 1416251 - DNA, 15 bp, Homo sapiens
caaagagcaaaggaa

SEQ ID NO: 1416252 - DNA, 15 bp, Homo sapiens
gcaaagagcaaagga

SEQ ID NO: 1416253 - DNA, 15 bp, Homo sapiens
tgcaaagagcaaagg

SEQ ID NO: 1416254 - DNA, 15 bp, Homo sapiens
ttgcaaagagcaaag

SEQ ID NO: 1416255 - DNA, 15 bp, Homo sapiens
attgcaaagagcaaa

SEQ ID NO: 1416256 - DNA, 15 bp, Homo sapiens
tattgcaaagagcaa

SEQ ID NO: 1416257 - DNA, 15 bp, Homo sapiens
ttattgcaaagagca

SEQ ID NO: 1416258 - DNA, 15 bp, Homo sapiens
tttattgcaaagagc

SEQ ID NO: 1416259 - DNA, 15 bp, Homo sapiens
atttattgcaaagag

SEQ ID NO: 1416260 - DNA, 15 bp, Homo sapiens
gatttattgcaaaga

SEQ ID NO: 1416261 - DNA, 15 bp, Homo sapiens
agatttattgcaaag

SEQ ID NO: 1416262 - DNA, 15 bp, Homo sapiens
aagatttattgcaaa

SEQ ID NO: 1416263 - DNA, 15 bp, Homo sapiens
caagatttattgcaa

SEQ ID NO: 1416264 - DNA, 15 bp, Homo sapiens
ccaagatttattgca

SEQ ID NO: 1416265 - DNA, 15 bp, Homo sapiens
accaagatttattgc

SEQ ID NO: 1416266 - DNA, 15 bp, Homo sapiens
taccaagatttattg

SEQ ID NO: 1416267 - DNA, 15 bp, Homo sapiens
gtaccaagatttatt

SEQ ID NO: 1416268 - DNA, 15 bp, Homo sapiens
agtaccaagatttat

SEQ ID NO: 1416269 - DNA, 15 bp, Homo sapiens
cagtaccaagattta

SEQ ID NO: 1416270 - DNA, 15 bp, Homo sapiens
gcagtaccaagattt

SEQ ID NO: 1416271 - DNA, 15 bp, Homo sapiens
agcagtaccaagatt

SEQ ID NO: 1416272 - DNA, 15 bp, Homo sapiens
gagcagtaccaagat

SEQ ID NO: 1416273 - DNA, 15 bp, Homo sapiens
cgagcagtaccaaga

SEQ ID NO: 1416274 - DNA, 15 bp, Homo sapiens
acgagcagtaccaag

SEQ ID NO: 1416275 - DNA, 15 bp, Homo sapiens
aacgagcagtaccaa

SEQ ID NO: 1416276 - DNA, 15 bp, Homo sapiens
gaacgagcagtacca

SEQ ID NO: 1416277 - DNA, 15 bp, Homo sapiens
agaacgagcagtacc

SEQ ID NO: 1416278 - DNA, 15 bp, Homo sapiens
aagaacgagcagtac

SEQ ID NO: 1416279 - DNA, 15 bp, Homo sapiens
aaagaacgagcagta

SEQ ID NO: 1416280 - DNA, 15 bp, Homo sapiens
caaagaacgagcagt

SEQ ID NO: 1416281 - DNA, 15 bp, Homo sapiens
ccaaagaacgagcag

SEQ ID NO: 1416282 - DNA, 15 bp, Homo sapiens
cccaaagaacgagca

SEQ ID NO: 1416283 - DNA, 15 bp, Homo sapiens
acccaaagaacgagc

SEQ ID NO: 1416284 - DNA, 15 bp, Homo sapiens
gacccaaagaacgag

SEQ ID NO: 1416285 - DNA, 15 bp, Homo sapiens
ggacccaaagaacga

SEQ ID NO: 1416286 - DNA, 15 bp, Homo sapiens
tggacccaaagaacg

SEQ ID NO: 1416287 - DNA, 15 bp, Homo sapiens
gtggacccaaagaac

SEQ ID NO: 1416288 - DNA, 15 bp, Homo sapiens
cgtggacccaaagaa

SEQ ID NO: 1416289 - DNA, 15 bp, Homo sapiens
gcgtggacccaaaga

SEQ ID NO: 1416290 - DNA, 15 bp, Homo sapiens
agcgtggacccaaag

SEQ ID NO: 1416291 - DNA, 15 bp, Homo sapiens
cagcgtggacccaaa

SEQ ID NO: 1416292 - DNA, 15 bp, Homo sapiens
gcagcgtggacccaa

SEQ ID NO: 1416293 - DNA, 15 bp, Homo sapiens
ggcagcgtggaccca

SEQ ID NO: 1416294 - DNA, 15 bp, Homo sapiens
aggcagcgtggaccc

SEQ ID NO: 1416295 - DNA, 15 bp, Homo sapiens
aaggcagcgtggacc

SEQ ID NO: 1416296 - DNA, 15 bp, Homo sapiens
aaaggcagcgtggac

SEQ ID NO: 1416297 - DNA, 15 bp, Homo sapiens
taaaggcagcgtgga

SEQ ID NO: 1416298 - DNA, 15 bp, Homo sapiens
ataaaggcagcgtgg

SEQ ID NO: 1416299 - DNA, 15 bp, Homo sapiens
cataaaggcagcgtg

SEQ ID NO: 1416300 - DNA, 15 bp, Homo sapiens
tcataaaggcagcgt

SEQ ID NO: 1416301 - DNA, 15 bp, Homo sapiens
ctcataaaggcagcg

SEQ ID NO: 1416302 - DNA, 15 bp, Homo sapiens
gctcataaaggcagc

SEQ ID NO: 1416303 - DNA, 15 bp, Homo sapiens
agctcataaaggcag

SEQ ID NO: 1416304 - DNA, 15 bp, Homo sapiens
cagctcataaaggca

SEQ ID NO: 1416305 - DNA, 15 bp, Homo sapiens
acagctcataaaggc

SEQ ID NO: 1416306 - DNA, 15 bp, Homo sapiens
tacagctcataaagg

SEQ ID NO: 1416307 - DNA, 15 bp, Homo sapiens
ttacagctcataaag

SEQ ID NO: 1416308 - DNA, 15 bp, Homo sapiens
gttacagctcataaa

SEQ ID NO: 1416309 - DNA, 15 bp, Homo sapiens
tgttacagctcataa

SEQ ID NO: 1416310 - DNA, 15 bp, Homo sapiens
gtgttacagctcata

SEQ ID NO: 1416311 - DNA, 15 bp, Homo sapiens
agtgttacagctcat

SEQ ID NO: 1416312 - DNA, 15 bp, Homo sapiens
gagtgttacagctca

SEQ ID NO: 1416313 - DNA, 15 bp, Homo sapiens
tgagtgttacagctc

SEQ ID NO: 1416314 - DNA, 15 bp, Homo sapiens
gtgagtgttacagct

SEQ ID NO: 1416315 - DNA, 15 bp, Homo sapiens
agtgagtgttacagc

SEQ ID NO: 1416316 - DNA, 15 bp, Homo sapiens
cagtgagtgttacag

SEQ ID NO: 1416317 - DNA, 15 bp, Homo sapiens
gcagtgagtgttaca

SEQ ID NO: 1416318 - DNA, 15 bp, Homo sapiens
cgcagtgagtgttac

SEQ ID NO: 1416319 - DNA, 15 bp, Homo sapiens
tcgcagtgagtgtta

SEQ ID NO: 1416320 - DNA, 15 bp, Homo sapiens
ttcgcagtgagtgtt

SEQ ID NO: 1416321 - DNA, 15 bp, Homo sapiens
cttcgcagtgagtgt

SEQ ID NO: 1416322 - DNA, 15 bp, Homo sapiens
ccttcgcagtgagtg

SEQ ID NO: 1416323 - DNA, 15 bp, Homo sapiens
accttcgcagtgagt

SEQ ID NO: 1416324 - DNA, 15 bp, Homo sapiens
gaccttcgcagtgag

SEQ ID NO: 1416325 - DNA, 15 bp, Homo sapiens
agaccttcgcagtga

SEQ ID NO: 1416326 - DNA, 15 bp, Homo sapiens
cagaccttcgcagtg

SEQ ID NO: 1416327 - DNA, 15 bp, Homo sapiens
gcagaccttcgcagt

SEQ ID NO: 1416328 - DNA, 15 bp, Homo sapiens
tgcagaccttcgcag

SEQ ID NO: 1416329 - DNA, 15 bp, Homo sapiens
ctgcagaccttcgca

SEQ ID NO: 1416330 - DNA, 15 bp, Homo sapiens
gctgcagaccttcgc

SEQ ID NO: 1416331 - DNA, 15 bp, Homo sapiens
agctgcagaccttcg

SEQ ID NO: 1416332 - DNA, 15 bp, Homo sapiens
aagctgcagaccttc

SEQ ID NO: 1416333 - DNA, 15 bp, Homo sapiens
gaagctgcagacctt

SEQ ID NO: 1416334 - DNA, 15 bp, Homo sapiens
tgaagctgcagacct

SEQ ID NO: 1416335 - DNA, 15 bp, Homo sapiens
gtgaagctgcagacc

SEQ ID NO: 1416336 - DNA, 15 bp, Homo sapiens
agtgaagctgcagac

SEQ ID NO: 1416337 - DNA, 15 bp, Homo sapiens
gagtgaagctgcaga

SEQ ID NO: 1416338 - DNA, 15 bp, Homo sapiens
ggagtgaagctgcag

SEQ ID NO: 1416339 - DNA, 15 bp, Homo sapiens
aggagtgaagctgca

SEQ ID NO: 1416340 - DNA, 15 bp, Homo sapiens
caggagtgaagctgc

SEQ ID NO: 1416341 - DNA, 15 bp, Homo sapiens
tcaggagtgaagctg

SEQ ID NO: 1416342 - DNA, 15 bp, Homo sapiens
ttcaggagtgaagct

SEQ ID NO: 1416343 - DNA, 15 bp, Homo sapiens
cttcaggagtgaagc

SEQ ID NO: 1416344 - DNA, 15 bp, Homo sapiens
gcttcaggagtgaag

SEQ ID NO: 1416345 - DNA, 15 bp, Homo sapiens
ggcttcaggagtgaa

SEQ ID NO: 1416346 - DNA, 15 bp, Homo sapiens
tggcttcaggagtga

SEQ ID NO: 1416347 - DNA, 15 bp, Homo sapiens
ctggcttcaggagtg

SEQ ID NO: 1416348 - DNA, 15 bp, Homo sapiens
cctggcttcaggagt

SEQ ID NO: 1416349 - DNA, 15 bp, Homo sapiens
ccctggcttcaggag

SEQ ID NO: 1416350 - DNA, 15 bp, Homo sapiens
tccctggcttcagga

SEQ ID NO: 1416351 - DNA, 15 bp, Homo sapiens
ctccctggcttcagg

SEQ ID NO: 1416352 - DNA, 15 bp, Homo sapiens
tctccctggcttcag

SEQ ID NO: 1416353 - DNA, 15 bp, Homo sapiens
gtctccctggcttca

SEQ ID NO: 1416354 - DNA, 15 bp, Homo sapiens
ggtctccctggcttc

SEQ ID NO: 1416355 - DNA, 15 bp, Homo sapiens
tggtctccctggctt

SEQ ID NO: 1416356 - DNA, 15 bp, Homo sapiens
gtggtctccctggct

SEQ ID NO: 1416357 - DNA, 15 bp, Homo sapiens
cgtggtctccctggc

SEQ ID NO: 1416358 - DNA, 15 bp, Homo sapiens
tcgtggtctccctgg

SEQ ID NO: 1416359 - DNA, 15 bp, Homo sapiens
ttcgtggtctccctg

SEQ ID NO: 1416360 - DNA, 15 bp, Homo sapiens
gttcgtggtctccct

SEQ ID NO: 1416361 - DNA, 15 bp, Homo sapiens
ggttcgtggtctccc

SEQ ID NO: 1416362 - DNA, 15 bp, Homo sapiens
gggttcgtggtctcc

SEQ ID NO: 1416363 - DNA, 15 bp, Homo sapiens
tgggttcgtggtctc

SEQ ID NO: 1416364 - DNA, 15 bp, Homo sapiens
atgggttcgtggtct

SEQ ID NO: 1416365 - DNA, 15 bp, Homo sapiens
gatgggttcgtggtc

SEQ ID NO: 1416366 - DNA, 15 bp, Homo sapiens
cgatgggttcgtggt

SEQ ID NO: 1416367 - DNA, 15 bp, Homo sapiens
ccgatgggttcgtgg

SEQ ID NO: 1416368 - DNA, 15 bp, Homo sapiens
cccgatgggttcgtg

SEQ ID NO: 1416369 - DNA, 15 bp, Homo sapiens
tcccgatgggttcgt

SEQ ID NO: 1416370 - DNA, 15 bp, Homo sapiens
ctcccgatgggttcg

SEQ ID NO: 1416371 - DNA, 15 bp, Homo sapiens
cctcccgatgggttc

SEQ ID NO: 1416372 - DNA, 15 bp, Homo sapiens
tcctcccgatgggtt

SEQ ID NO: 1416373 - DNA, 15 bp, Homo sapiens
ttcctcccgatgggt

SEQ ID NO: 1416374 - DNA, 15 bp, Homo sapiens
attcctcccgatggg

SEQ ID NO: 1416375 - DNA, 15 bp, Homo sapiens
cattcctcccgatgg

SEQ ID NO: 1416376 - DNA, 15 bp, Homo sapiens
tcattcctcccgatg

SEQ ID NO: 1416377 - DNA, 15 bp, Homo sapiens
ttcattcctcccgat

SEQ ID NO: 1416378 - DNA, 15 bp, Homo sapiens
gttcattcctcccga

SEQ ID NO: 1416379 - DNA, 15 bp, Homo sapiens
tgttcattcctcccg

SEQ ID NO: 1416380 - DNA, 15 bp, Homo sapiens
ttgttcattcctccc

SEQ ID NO: 1416381 - DNA, 15 bp, Homo sapiens
gttgttcattcctcc

SEQ ID NO: 1416382 - DNA, 15 bp, Homo sapiens
agttgttcattcctc

SEQ ID NO: 1416383 - DNA, 15 bp, Homo sapiens
gagttgttcattcct

SEQ ID NO: 1416384 - DNA, 15 bp, Homo sapiens
ggagttgttcattcc

SEQ ID NO: 1416385 - DNA, 15 bp, Homo sapiens
tggagttgttcattc

SEQ ID NO: 1416386 - DNA, 15 bp, Homo sapiens
ctggagttgttcatt

SEQ ID NO: 1416387 - DNA, 15 bp, Homo sapiens
tctggagttgttcat

SEQ ID NO: 1416388 - DNA, 15 bp, Homo sapiens
ctctggagttgttca

SEQ ID NO: 1416389 - DNA, 15 bp, Homo sapiens
cctctggagttgttc

SEQ ID NO: 1416390 - DNA, 15 bp, Homo sapiens
gcctctggagttgtt

SEQ ID NO: 1416391 - DNA, 15 bp, Homo sapiens
cgcctctggagttgt

SEQ ID NO: 1416392 - DNA, 15 bp, Homo sapiens
gcgcctctggagttg

SEQ ID NO: 1416393 - DNA, 15 bp, Homo sapiens
ggcgcctctggagtt

SEQ ID NO: 1416394 - DNA, 15 bp, Homo sapiens
cggcgcctctggagt

SEQ ID NO: 1416395 - DNA, 15 bp, Homo sapiens
gcggcgcctctggag

SEQ ID NO: 1416396 - DNA, 15 bp, Homo sapiens
ggcggcgcctctgga

SEQ ID NO: 1416397 - DNA, 15 bp, Homo sapiens
aggcggcgcctctgg

SEQ ID NO: 1416398 - DNA, 15 bp, Homo sapiens
aaggcggcgcctctg

SEQ ID NO: 1416399 - DNA, 15 bp, Homo sapiens
taaggcggcgcctct

SEQ ID NO: 1416400 - DNA, 15 bp, Homo sapiens
ttaaggcggcgcctc

SEQ ID NO: 1416401 - DNA, 15 bp, Homo sapiens
cttaaggcggcgcct

SEQ ID NO: 1416402 - DNA, 15 bp, Homo sapiens
tcttaaggcggcgcc

SEQ ID NO: 1416403 - DNA, 15 bp, Homo sapiens
ctcttaaggcggcgc

SEQ ID NO: 1416404 - DNA, 15 bp, Homo sapiens
gctcttaaggcggcg

SEQ ID NO: 1416405 - DNA, 15 bp, Homo sapiens
agctcttaaggcggc

SEQ ID NO: 1416406 - DNA, 15 bp, Homo sapiens
tagctcttaaggcgg

SEQ ID NO: 1416407 - DNA, 15 bp, Homo sapiens
atagctcttaaggcg

SEQ ID NO: 1416408 - DNA, 15 bp, Homo sapiens
tatagctcttaaggc

SEQ ID NO: 1416409 - DNA, 15 bp, Homo sapiens
ttatagctcttaagg

SEQ ID NO: 1416410 - DNA, 15 bp, Homo sapiens
gttatagctcttaag

SEQ ID NO: 1416411 - DNA, 15 bp, Homo sapiens
tgttatagctcttaa

SEQ ID NO: 1416412 - DNA, 15 bp, Homo sapiens
gtgttatagctctta

SEQ ID NO: 1416413 - DNA, 15 bp, Homo sapiens
agtgttatagctctt

SEQ ID NO: 1416414 - DNA, 15 bp, Homo sapiens
gagtgttatagctct

SEQ ID NO: 1416415 - DNA, 15 bp, Homo sapiens
tgagtgttatagctc

SEQ ID NO: 1416416 - DNA, 15 bp, Homo sapiens
gtgagtgttatagct

SEQ ID NO: 1416417 - DNA, 15 bp, Homo sapiens
agtgagtgttatagc

SEQ ID NO: 1416418 - DNA, 15 bp, Homo sapiens
cagtgagtgttatag

SEQ ID NO: 1416419 - DNA, 15 bp, Homo sapiens
gcagtgagtgttata

SEQ ID NO: 1416420 - DNA, 15 bp, Homo sapiens
cgcagtgagtgttat

SEQ ID NO: 1416421 - DNA, 15 bp, Homo sapiens
ggaccttcgcagtga

SEQ ID NO: 1416422 - DNA, 15 bp, Homo sapiens
cggaccttcgcagtg

SEQ ID NO: 1416423 - DNA, 15 bp, Homo sapiens
gcggaccttcgcagt

SEQ ID NO: 1416424 - DNA, 15 bp, Homo sapiens
cgcggaccttcgcag

SEQ ID NO: 1416425 - DNA, 15 bp, Homo sapiens
ccgcggaccttcgca

SEQ ID NO: 1416426 - DNA, 15 bp, Homo sapiens
gccgcggaccttcgc

SEQ ID NO: 1416427 - DNA, 15 bp, Homo sapiens
agccgcggaccttcg

SEQ ID NO: 1416428 - DNA, 15 bp, Homo sapiens
aagccgcggaccttc

SEQ ID NO: 1416429 - DNA, 15 bp, Homo sapiens
gaagccgcggacctt

SEQ ID NO: 1416430 - DNA, 15 bp, Homo sapiens
tgaagccgcggacct

SEQ ID NO: 1416431 - DNA, 15 bp, Homo sapiens
atgaagccgcggacc

SEQ ID NO: 1416432 - DNA, 15 bp, Homo sapiens
aatgaagccgcggac

SEQ ID NO: 1416433 - DNA, 15 bp, Homo sapiens
gaatgaagccgcgga

SEQ ID NO: 1416434 - DNA, 15 bp, Homo sapiens
agaatgaagccgcgg

SEQ ID NO: 1416435 - DNA, 15 bp, Homo sapiens
aagaatgaagccgcg

SEQ ID NO: 1416436 - DNA, 15 bp, Homo sapiens
caagaatgaagccgc

SEQ ID NO: 1416437 - DNA, 15 bp, Homo sapiens
tcaagaatgaagccg

SEQ ID NO: 1416438 - DNA, 15 bp, Homo sapiens
ttcaagaatgaagcc

SEQ ID NO: 1416439 - DNA, 15 bp, Homo sapiens
cttcaagaatgaagc

SEQ ID NO: 1416440 - DNA, 15 bp, Homo sapiens
acttcaagaatgaag

SEQ ID NO: 1416441 - DNA, 15 bp, Homo sapiens
gacttcaagaatgaa

SEQ ID NO: 1416442 - DNA, 15 bp, Homo sapiens
cgacttcaagaatga

SEQ ID NO: 1416443 - DNA, 15 bp, Homo sapiens
ccgacttcaagaatg

SEQ ID NO: 1416444 - DNA, 15 bp, Homo sapiens
accgacttcaagaat

SEQ ID NO: 1416445 - DNA, 15 bp, Homo sapiens
caccgacttcaagaa

SEQ ID NO: 1416446 - DNA, 15 bp, Homo sapiens
tcaccgacttcaaga

SEQ ID NO: 1416447 - DNA, 15 bp, Homo sapiens
ctcaccgacttcaag

SEQ ID NO: 1416448 - DNA, 15 bp, Homo sapiens
tctcaccgacttcaa

SEQ ID NO: 1416449 - DNA, 15 bp, Homo sapiens
gtctcaccgacttca

SEQ ID NO: 1416450 - DNA, 15 bp, Homo sapiens
ggtctcaccgacttc

SEQ ID NO: 1416451 - DNA, 15 bp, Homo sapiens
tggtctcaccgactt

SEQ ID NO: 1416452 - DNA, 15 bp, Homo sapiens
ttggtctcaccgact

SEQ ID NO: 1416453 - DNA, 15 bp, Homo sapiens
cttggtctcaccgac

SEQ ID NO: 1416454 - DNA, 15 bp, Homo sapiens
tcttggtctcaccga

SEQ ID NO: 1416455 - DNA, 15 bp, Homo sapiens
ttcttggtctcaccg

SEQ ID NO: 1416456 - DNA, 15 bp, Homo sapiens
gttcttggtctcacc

SEQ ID NO: 1416457 - DNA, 15 bp, Homo sapiens
ggttcttggtctcac

SEQ ID NO: 1416458 - DNA, 15 bp, Homo sapiens
gggttcttggtctca

SEQ ID NO: 1416459 - DNA, 15 bp, Homo sapiens
tgggttcttggtctc

SEQ ID NO: 1416460 - DNA, 15 bp, Homo sapiens
gtgggttcttggtct

SEQ ID NO: 1416461 - DNA, 15 bp, Homo sapiens
ggtgggttcttggtc

SEQ ID NO: 1416462 - DNA, 15 bp, Homo sapiens
tggtgggttcttggt

SEQ ID NO: 1416463 - DNA, 15 bp, Homo sapiens
ttggtgggttcttgg

SEQ ID NO: 1416464 - DNA, 15 bp, Homo sapiens
attggtgggttcttg

SEQ ID NO: 1416465 - DNA, 15 bp, Homo sapiens
aattggtgggttctt

SEQ ID NO: 1416466 - DNA, 15 bp, Homo sapiens
gaattggtgggttct

SEQ ID NO: 1416467 - DNA, 15 bp, Homo sapiens
ggaattggtgggttc

SEQ ID NO: 1416468 - DNA, 15 bp, Homo sapiens
cggaattggtgggtt

SEQ ID NO: 1416469 - DNA, 15 bp, Homo sapiens
ccggaattggtgggt

SEQ ID NO: 1416470 - DNA, 15 bp, Homo sapiens
tccggaattggtggg

SEQ ID NO: 1416471 - DNA, 15 bp, Homo sapiens
gtccggaattggtgg

SEQ ID NO: 1416472 - DNA, 15 bp, Homo sapiens
tgtccggaattggtg

SEQ ID NO: 1416473 - DNA, 15 bp, Homo sapiens
gtgtccggaattggt

SEQ ID NO: 1416474 - DNA, 15 bp, Homo sapiens
tgtgtccggaattgg

SEQ ID NO: 1416475 - DNA, 15 bp, Homo sapiens
ctgtgtccggaattg

SEQ ID NO: 1416476 - DNA, 15 bp, Homo sapiens
actgtgtccggaatt

SEQ ID NO: 1416477 - DNA, 15 bp, Homo sapiens
aactgtgtccggaat

SEQ ID NO: 1416478 - DNA, 15 bp, Homo sapiens
aaactgtgtccggaa

SEQ ID NO: 1416479 - DNA, 15 bp, Homo sapiens
gaaactgtgtccgga

SEQ ID NO: 1416480 - DNA, 15 bp, Homo sapiens
tgaaactgtgtccgg

SEQ ID NO: 1416481 - DNA, 15 bp, Homo sapiens
atgaaactgtgtccg

SEQ ID NO: 1416482 - DNA, 15 bp, Homo sapiens
tatgaaactgtgtcc

SEQ ID NO: 1416483 - DNA, 15 bp, Homo sapiens
ttatgaaactgtgtc

SEQ ID NO: 1416484 - DNA, 15 bp, Homo sapiens
tttatgaaactgtgt

SEQ ID NO: 1416485 - DNA, 15 bp, Homo sapiens
atttatgaaactgtg

SEQ ID NO: 1416486 - DNA, 15 bp, Homo sapiens
catttatgaaactgt

SEQ ID NO: 1416487 - DNA, 15 bp, Homo sapiens
acatttatgaaactg

SEQ ID NO: 1416488 - DNA, 15 bp, Homo sapiens
aacatttatgaaact

SEQ ID NO: 1416489 - DNA, 15 bp, Homo sapiens
gaacatttatgaaac

SEQ ID NO: 1416490 - DNA, 15 bp, Homo sapiens
ggaacatttatgaaa

SEQ ID NO: 1416491 - DNA, 15 bp, Homo sapiens
tggaacatttatgaa

SEQ ID NO: 1416492 - DNA, 15 bp, Homo sapiens
atggaacatttatga

SEQ ID NO: 1416493 - DNA, 15 bp, Homo sapiens
tatggaacatttatg

SEQ ID NO: 1416494 - DNA, 15 bp, Homo sapiens
gtatggaacatttat

SEQ ID NO: 1416495 - DNA, 15 bp, Homo sapiens
tgtatggaacattta

SEQ ID NO: 1416496 - DNA, 15 bp, Homo sapiens
atgtatggaacattt

SEQ ID NO: 1416497 - DNA, 15 bp, Homo sapiens
catgtatggaacatt

SEQ ID NO: 1416498 - DNA, 15 bp, Homo sapiens
gcatgtatggaacat

SEQ ID NO: 1416499 - DNA, 15 bp, Homo sapiens
agcatgtatggaaca

SEQ ID NO: 1416500 - DNA, 15 bp, Homo sapiens
aagcatgtatggaac

SEQ ID NO: 1416501 - DNA, 15 bp, Homo sapiens
caagcatgtatggaa

SEQ ID NO: 1416502 - DNA, 15 bp, Homo sapiens
tcaagcatgtatgga

SEQ ID NO: 1416503 - DNA, 15 bp, Homo sapiens
ctcaagcatgtatgg

SEQ ID NO: 1416504 - DNA, 15 bp, Homo sapiens
tctcaagcatgtatg

SEQ ID NO: 1416505 - DNA, 15 bp, Homo sapiens
ttctcaagcatgtat

SEQ ID NO: 1416506 - DNA, 15 bp, Homo sapiens
attctcaagcatgta

SEQ ID NO: 1416507 - DNA, 15 bp, Homo sapiens
tattctcaagcatgt

SEQ ID NO: 1416508 - DNA, 15 bp, Homo sapiens
ttattctcaagcatg

SEQ ID NO: 1416509 - DNA, 15 bp, Homo sapiens
attattctcaagcat

SEQ ID NO: 1416510 - DNA, 15 bp, Homo sapiens
tattattctcaagca

SEQ ID NO: 1416511 - DNA, 15 bp, Homo sapiens
atattattctcaagc

SEQ ID NO: 1416512 - DNA, 15 bp, Homo sapiens
tatattattctcaag

SEQ ID NO: 1416513 - DNA, 15 bp, Homo sapiens
atatattattctcaa

SEQ ID NO: 1416514 - DNA, 15 bp, Homo sapiens
tatatattattctca

SEQ ID NO: 1416515 - DNA, 15 bp, Homo sapiens
atatatattattctc

SEQ ID NO: 1416516 - DNA, 15 bp, Homo sapiens
aatatatattattct

SEQ ID NO: 1416517 - DNA, 15 bp, Homo sapiens
gaatatatattattc

SEQ ID NO: 1416518 - DNA, 15 bp, Homo sapiens
agaatatatattatt

SEQ ID NO: 1416519 - DNA, 15 bp, Homo sapiens
cagaatatatattat

SEQ ID NO: 1416520 - DNA, 15 bp, Homo sapiens
acagaatatatatta

SEQ ID NO: 1416521 - DNA, 15 bp, Homo sapiens
tacagaatatatatt

SEQ ID NO: 1416522 - DNA, 15 bp, Homo sapiens
ctacagaatatatat

SEQ ID NO: 1416523 - DNA, 15 bp, Homo sapiens
tctacagaatatata

SEQ ID NO: 1416524 - DNA, 15 bp, Homo sapiens
ttctacagaatatat

SEQ ID NO: 1416525 - DNA, 15 bp, Homo sapiens
cttctacagaatata

SEQ ID NO: 1416526 - DNA, 15 bp, Homo sapiens
acttctacagaatat

SEQ ID NO: 1416527 - DNA, 15 bp, Homo sapiens
cacttctacagaata

SEQ ID NO: 1416528 - DNA, 15 bp, Homo sapiens
tcacttctacagaat

SEQ ID NO: 1416529 - DNA, 15 bp, Homo sapiens
ctcacttctacagaa

SEQ ID NO: 1416530 - DNA, 15 bp, Homo sapiens
actcacttctacaga

SEQ ID NO: 1416531 - DNA, 15 bp, Homo sapiens
tactcacttctacag

SEQ ID NO: 1416532 - DNA, 15 bp, Homo sapiens
atactcacttctaca

SEQ ID NO: 1416533 - DNA, 15 bp, Homo sapiens
aatactcacttctac

SEQ ID NO: 1416534 - DNA, 15 bp, Homo sapiens
gaatactcacttcta

SEQ ID NO: 1416535 - DNA, 15 bp, Homo sapiens
agaatactcacttct

SEQ ID NO: 1416536 - DNA, 15 bp, Homo sapiens
tagaatactcacttc

SEQ ID NO: 1416537 - DNA, 15 bp, Homo sapiens
atagaatactcactt

SEQ ID NO: 1416538 - DNA, 15 bp, Homo sapiens
tatagaatactcact

SEQ ID NO: 1416539 - DNA, 15 bp, Homo sapiens
atatagaatactcac

SEQ ID NO: 1416540 - DNA, 15 bp, Homo sapiens
aatatagaatactca

SEQ ID NO: 1416541 - DNA, 15 bp, Homo sapiens
aaatatagaatactc

SEQ ID NO: 1416542 - DNA, 15 bp, Homo sapiens
taaatatagaatact

SEQ ID NO: 1416543 - DNA, 15 bp, Homo sapiens
ataaatatagaatac

SEQ ID NO: 1416544 - DNA, 15 bp, Homo sapiens
gataaatatagaata

SEQ ID NO: 1416545 - DNA, 15 bp, Homo sapiens
tgataaatatagaat

SEQ ID NO: 1416546 - DNA, 15 bp, Homo sapiens
atgataaatatagaa

SEQ ID NO: 1416547 - DNA, 15 bp, Homo sapiens
aatgataaatataga

SEQ ID NO: 1416548 - DNA, 15 bp, Homo sapiens
aaatgataaatatag

SEQ ID NO: 1416549 - DNA, 15 bp, Homo sapiens
taaatgataaatata

SEQ ID NO: 1416550 - DNA, 15 bp, Homo sapiens
ctaaatgataaatat

SEQ ID NO: 1416551 - DNA, 15 bp, Homo sapiens
tctaaatgataaata

SEQ ID NO: 1416552 - DNA, 15 bp, Homo sapiens
atctaaatgataaat

SEQ ID NO: 1416553 - DNA, 15 bp, Homo sapiens
tatctaaatgataaa

SEQ ID NO: 1416554 - DNA, 15 bp, Homo sapiens
ttatctaaatgataa

SEQ ID NO: 1416555 - DNA, 15 bp, Homo sapiens
gttttatctaaatga

SEQ ID NO: 1416556 - DNA, 15 bp, Homo sapiens
agttttatctaaatg

SEQ ID NO: 1416557 - DNA, 15 bp, Homo sapiens
aagttttatctaaat

SEQ ID NO: 1416558 - DNA, 15 bp, Homo sapiens
caagttttatctaaa

SEQ ID NO: 1416559 - DNA, 15 bp, Homo sapiens
acaagttttatctaa

SEQ ID NO: 1416560 - DNA, 15 bp, Homo sapiens
aacaagttttatcta

SEQ ID NO: 1416561 - DNA, 15 bp, Homo sapiens
taacaagttttatct

SEQ ID NO: 1416562 - DNA, 15 bp, Homo sapiens
ttaacaagttttatc

SEQ ID NO: 1416563 - DNA, 15 bp, Homo sapiens
attaacaagttttat

SEQ ID NO: 1416564 - DNA, 15 bp, Homo sapiens
aattaacaagtttta

SEQ ID NO: 1416565 - DNA, 15 bp, Homo sapiens
caattaacaagtttt

SEQ ID NO: 1416566 - DNA, 15 bp, Homo sapiens
gcaattaacaagttt

SEQ ID NO: 1416567 - DNA, 15 bp, Homo sapiens
agcaattaacaagtt

SEQ ID NO: 1416568 - DNA, 15 bp, Homo sapiens
aagcaattaacaagt

SEQ ID NO: 1416569 - DNA, 15 bp, Homo sapiens
aaagcaattaacaag

SEQ ID NO: 1416570 - DNA, 15 bp, Homo sapiens
taaagcaattaacaa

SEQ ID NO: 1416571 - DNA, 15 bp, Homo sapiens
gtaaagcaattaaca

SEQ ID NO: 1416572 - DNA, 15 bp, Homo sapiens
agtaaagcaattaac

SEQ ID NO: 1416573 - DNA, 15 bp, Homo sapiens
aagtaaagcaattaa

SEQ ID NO: 1416574 - DNA, 15 bp, Homo sapiens
taagtaaagcaatta

SEQ ID NO: 1416575 - DNA, 15 bp, Homo sapiens
ttaagtaaagcaatt

SEQ ID NO: 1416576 - DNA, 15 bp, Homo sapiens
tttaagtaaagcaat

SEQ ID NO: 1416577 - DNA, 15 bp, Homo sapiens
atttaagtaaagcaa

SEQ ID NO: 1416578 - DNA, 15 bp, Homo sapiens
gatttaagtaaagca

SEQ ID NO: 1416579 - DNA, 15 bp, Homo sapiens
agatttaagtaaagc

SEQ ID NO: 1416580 - DNA, 15 bp, Homo sapiens
tagatttaagtaaag

SEQ ID NO: 1416581 - DNA, 15 bp, Homo sapiens
atagatttaagtaaa

SEQ ID NO: 1416582 - DNA, 15 bp, Homo sapiens
aatagatttaagtaa

SEQ ID NO: 1416583 - DNA, 15 bp, Homo sapiens
taatagatttaagta

SEQ ID NO: 1416584 - DNA, 15 bp, Homo sapiens
gtaatagatttaagt

SEQ ID NO: 1416585 - DNA, 15 bp, Homo sapiens
ggtaatagatttaag

SEQ ID NO: 1416586 - DNA, 15 bp, Homo sapiens
gggtaatagatttaa

SEQ ID NO: 1416587 - DNA, 15 bp, Homo sapiens
agggtaatagattta

SEQ ID NO: 1416588 - DNA, 15 bp, Homo sapiens
tagggtaatagattt

SEQ ID NO: 1416589 - DNA, 15 bp, Homo sapiens
gtagggtaatagatt

SEQ ID NO: 1416590 - DNA, 15 bp, Homo sapiens
agtagggtaatagat

SEQ ID NO: 1416591 - DNA, 15 bp, Homo sapiens
cagtagggtaataga

SEQ ID NO: 1416592 - DNA, 15 bp, Homo sapiens
ccagtagggtaatag

SEQ ID NO: 1416593 - DNA, 15 bp, Homo sapiens
accagtagggtaata

SEQ ID NO: 1416594 - DNA, 15 bp, Homo sapiens
aaccagtagggtaat

SEQ ID NO: 1416595 - DNA, 15 bp, Homo sapiens
aaaccagtagggtaa

SEQ ID NO: 1416596 - DNA, 15 bp, Homo sapiens
caaaccagtagggta

SEQ ID NO: 1416597 - DNA, 15 bp, Homo sapiens
acaaaccagtagggt

SEQ ID NO: 1416598 - DNA, 15 bp, Homo sapiens
aacaaaccagtaggg

SEQ ID NO: 1416599 - DNA, 15 bp, Homo sapiens
gaacaaaccagtagg

SEQ ID NO: 1416600 - DNA, 15 bp, Homo sapiens
tgaacaaaccagtag

SEQ ID NO: 1416601 - DNA, 15 bp, Homo sapiens
ctgaacaaaccagta

SEQ ID NO: 1416602 - DNA, 15 bp, Homo sapiens
cctgaacaaaccagt

SEQ ID NO: 1416603 - DNA, 15 bp, Homo sapiens
acctgaacaaaccag

SEQ ID NO: 1416604 - DNA, 15 bp, Homo sapiens
gacctgaacaaacca

SEQ ID NO: 1416605 - DNA, 15 bp, Homo sapiens
tgacctgaacaaacc

SEQ ID NO: 1416606 - DNA, 15 bp, Homo sapiens
ttgacctgaacaaac

SEQ ID NO: 1416607 - DNA, 15 bp, Homo sapiens
cttgacctgaacaaa

SEQ ID NO: 1416608 - DNA, 15 bp, Homo sapiens
gcttgacctgaacaa

SEQ ID NO: 1416609 - DNA, 15 bp, Homo sapiens
agcttgacctgaaca

SEQ ID NO: 1416610 - DNA, 15 bp, Homo sapiens
tagcttgacctgaac

SEQ ID NO: 1416611 - DNA, 15 bp, Homo sapiens
atagcttgacctgaa

SEQ ID NO: 1416612 - DNA, 15 bp, Homo sapiens
gatagcttgacctga

SEQ ID NO: 1416613 - DNA, 15 bp, Homo sapiens
agatagcttgacctg

SEQ ID NO: 1416614 - DNA, 15 bp, Homo sapiens
tagatagcttgacct

SEQ ID NO: 1416615 - DNA, 15 bp, Homo sapiens
ttagatagcttgacc

SEQ ID NO: 1416616 - DNA, 15 bp, Homo sapiens
tttagatagcttgac

SEQ ID NO: 1416617 - DNA, 15 bp, Homo sapiens
atttagatagcttga

SEQ ID NO: 1416618 - DNA, 15 bp, Homo sapiens
aatttagatagcttg

SEQ ID NO: 1416619 - DNA, 15 bp, Homo sapiens
taatttagatagctt

SEQ ID NO: 1416620 - DNA, 15 bp, Homo sapiens
gtaatttagatagct

SEQ ID NO: 1416621 - DNA, 15 bp, Homo sapiens
agtaatttagatagc

SEQ ID NO: 1416622 - DNA, 15 bp, Homo sapiens
cagtaatttagatag

SEQ ID NO: 1416623 - DNA, 15 bp, Homo sapiens
ccagtaatttagata

SEQ ID NO: 1416624 - DNA, 15 bp, Homo sapiens
cccagtaatttagat

SEQ ID NO: 1416625 - DNA, 15 bp, Homo sapiens
ccccagtaatttaga

SEQ ID NO: 1416626 - DNA, 15 bp, Homo sapiens
cccccagtaatttag

SEQ ID NO: 1416627 - DNA, 15 bp, Homo sapiens
tcccccagtaattta

SEQ ID NO: 1416628 - DNA, 15 bp, Homo sapiens
ctcccccagtaattt

SEQ ID NO: 1416629 - DNA, 15 bp, Homo sapiens
actcccccagtaatt

SEQ ID NO: 1416630 - DNA, 15 bp, Homo sapiens
cactcccccagtaat

SEQ ID NO: 1416631 - DNA, 15 bp, Homo sapiens
acactcccccagtaa

SEQ ID NO: 1416632 - DNA, 15 bp, Homo sapiens
tacactcccccagta

SEQ ID NO: 1416633 - DNA, 15 bp, Homo sapiens
atacactcccccagt

SEQ ID NO: 1416634 - DNA, 15 bp, Homo sapiens
tatacactcccccag

SEQ ID NO: 1416635 - DNA, 15 bp, Homo sapiens
ttatacactccccca

SEQ ID NO: 1416636 - DNA, 15 bp, Homo sapiens
tttatacactccccc

SEQ ID NO: 1416637 - DNA, 15 bp, Homo sapiens
ttttatacactcccc

SEQ ID NO: 1416638 - DNA, 15 bp, Homo sapiens
tttttatacactccc

SEQ ID NO: 1416639 - DNA, 15 bp, Homo sapiens
atttttatacactcc

SEQ ID NO: 1416640 - DNA, 15 bp, Homo sapiens
tatttttatacactc

SEQ ID NO: 1416641 - DNA, 15 bp, Homo sapiens
gtatttttatacact

SEQ ID NO: 1416642 - DNA, 15 bp, Homo sapiens
tgtatttttatacac

SEQ ID NO: 1416643 - DNA, 15 bp, Homo sapiens
atgtatttttataca

SEQ ID NO: 1416644 - DNA, 15 bp, Homo sapiens
gatgtatttttatac

SEQ ID NO: 1416645 - DNA, 15 bp, Homo sapiens
tgatgtatttttata

SEQ ID NO: 1416646 - DNA, 15 bp, Homo sapiens
atgatgtatttttat

SEQ ID NO: 1416647 - DNA, 15 bp, Homo sapiens
tatgatgtattttta

SEQ ID NO: 1416648 - DNA, 15 bp, Homo sapiens
ttatgatgtattttt

SEQ ID NO: 1416649 - DNA, 15 bp, Homo sapiens
attatgatgtatttt

SEQ ID NO: 1416650 - DNA, 15 bp, Homo sapiens
gattatgatgtattt

SEQ ID NO: 1416651 - DNA, 15 bp, Homo sapiens
agattatgatgtatt

SEQ ID NO: 1416652 - DNA, 15 bp, Homo sapiens
cagattatgatgtat

SEQ ID NO: 1416653 - DNA, 15 bp, Homo sapiens
tcagattatgatgta

SEQ ID NO: 1416654 - DNA, 15 bp, Homo sapiens
atcagattatgatgt

SEQ ID NO: 1416655 - DNA, 15 bp, Homo sapiens
tatcagattatgatg

SEQ ID NO: 1416656 - DNA, 15 bp, Homo sapiens
ctatcagattatgat

SEQ ID NO: 1416657 - DNA, 15 bp, Homo sapiens
actatcagattatga

SEQ ID NO: 1416658 - DNA, 15 bp, Homo sapiens
cactatcagattatg

SEQ ID NO: 1416659 - DNA, 15 bp, Homo sapiens
ccactatcagattat

SEQ ID NO: 1416660 - DNA, 15 bp, Homo sapiens
tccactatcagatta

SEQ ID NO: 1416661 - DNA, 15 bp, Homo sapiens
atccactatcagatt

SEQ ID NO: 1416662 - DNA, 15 bp, Homo sapiens
aatccactatcagat

SEQ ID NO: 1416663 - DNA, 15 bp, Homo sapiens
aaatccactatcaga

SEQ ID NO: 1416664 - DNA, 15 bp, Homo sapiens
aaaatccactatcag

SEQ ID NO: 1416665 - DNA, 15 bp, Homo sapiens
caaaatccactatca

SEQ ID NO: 1416666 - DNA, 15 bp, Homo sapiens
acaaaatccactatc

SEQ ID NO: 1416667 - DNA, 15 bp, Homo sapiens
gacaaaatccactat

SEQ ID NO: 1416668 - DNA, 15 bp, Homo sapiens
agacaaaatccacta

SEQ ID NO: 1416669 - DNA, 15 bp, Homo sapiens
tagacaaaatccact

SEQ ID NO: 1416670 - DNA, 15 bp, Homo sapiens
atagacaaaatccac

SEQ ID NO: 1416671 - DNA, 15 bp, Homo sapiens
aatagacaaaatcca

SEQ ID NO: 1416672 - DNA, 15 bp, Homo sapiens
aaatagacaaaatcc

SEQ ID NO: 1416673 - DNA, 15 bp, Homo sapiens
gaaatagacaaaatc

SEQ ID NO: 1416674 - DNA, 15 bp, Homo sapiens
agaaatagacaaaat

SEQ ID NO: 1416675 - DNA, 15 bp, Homo sapiens
aagaaatagacaaaa

SEQ ID NO: 1416676 - DNA, 15 bp, Homo sapiens
gaagaaatagacaaa

SEQ ID NO: 1416677 - DNA, 15 bp, Homo sapiens
agaagaaatagacaa

SEQ ID NO: 1416678 - DNA, 15 bp, Homo sapiens
aagaagaaatagaca

SEQ ID NO: 1416679 - DNA, 15 bp, Homo sapiens
caagaagaaatagac

SEQ ID NO: 1416680 - DNA, 15 bp, Homo sapiens
acaagaagaaataga

SEQ ID NO: 1416681 - DNA, 15 bp, Homo sapiens
tacaagaagaaatag

SEQ ID NO: 1416682 - DNA, 15 bp, Homo sapiens
ctacaagaagaaata

SEQ ID NO: 1416683 - DNA, 15 bp, Homo sapiens
actacaagaagaaat

SEQ ID NO: 1416684 - DNA, 15 bp, Homo sapiens
aactacaagaagaaa

SEQ ID NO: 1416685 - DNA, 15 bp, Homo sapiens
aaactacaagaagaa

SEQ ID NO: 1416686 - DNA, 15 bp, Homo sapiens
taaactacaagaaga

SEQ ID NO: 1416687 - DNA, 15 bp, Homo sapiens
ttaaactacaagaag

SEQ ID NO: 1416688 - DNA, 15 bp, Homo sapiens
attaaactacaagaa

SEQ ID NO: 1416689 - DNA, 15 bp, Homo sapiens
gattaaactacaaga

SEQ ID NO: 1416690 - DNA, 15 bp, Homo sapiens
tgattaaactacaag

SEQ ID NO: 1416691 - DNA, 15 bp, Homo sapiens
ctgattaaactacaa

SEQ ID NO: 1416692 - DNA, 15 bp, Homo sapiens
actgattaaactaca

SEQ ID NO: 1416693 - DNA, 15 bp, Homo sapiens
cactgattaaactac

SEQ ID NO: 1416694 - DNA, 15 bp, Homo sapiens
tcactgattaaacta

SEQ ID NO: 1416695 - DNA, 15 bp, Homo sapiens
ttcactgattaaact

SEQ ID NO: 1416696 - DNA, 15 bp, Homo sapiens
tttcactgattaaac

SEQ ID NO: 1416697 - DNA, 15 bp, Homo sapiens
gtttcactgattaaa

SEQ ID NO: 1416698 - DNA, 15 bp, Homo sapiens
tgtttcactgattaa

SEQ ID NO: 1416699 - DNA, 15 bp, Homo sapiens
ttgtttcactgatta

SEQ ID NO: 1416700 - DNA, 15 bp, Homo sapiens
attgtttcactgatt

SEQ ID NO: 1416701 - DNA, 15 bp, Homo sapiens
cattgtttcactgat

SEQ ID NO: 1416702 - DNA, 15 bp, Homo sapiens
gcattgtttcactga

SEQ ID NO: 1416703 - DNA, 15 bp, Homo sapiens
agcattgtttcactg

SEQ ID NO: 1416704 - DNA, 15 bp, Homo sapiens
tagcattgtttcact

SEQ ID NO: 1416705 - DNA, 15 bp, Homo sapiens
atagcattgtttcac

SEQ ID NO: 1416706 - DNA, 15 bp, Homo sapiens
gatagcattgtttca

SEQ ID NO: 1416707 - DNA, 15 bp, Homo sapiens
tgatagcattgtttc

SEQ ID NO: 1416708 - DNA, 15 bp, Homo sapiens
ctgatagcattgttt

SEQ ID NO: 1416709 - DNA, 15 bp, Homo sapiens
cctgatagcattgtt

SEQ ID NO: 1416710 - DNA, 15 bp, Homo sapiens
acctgatagcattgt

SEQ ID NO: 1416711 - DNA, 15 bp, Homo sapiens
tacctgatagcattg

SEQ ID NO: 1416712 - DNA, 15 bp, Homo sapiens
gtacctgatagcatt

SEQ ID NO: 1416713 - DNA, 15 bp, Homo sapiens
ggtacctgatagcat

SEQ ID NO: 1416714 - DNA, 15 bp, Homo sapiens
aggtacctgatagca

SEQ ID NO: 1416715 - DNA, 15 bp, Homo sapiens
taggtacctgatagc

SEQ ID NO: 1416716 - DNA, 15 bp, Homo sapiens
gtaggtacctgatag

SEQ ID NO: 1416717 - DNA, 15 bp, Homo sapiens
tgtaggtacctgata

SEQ ID NO: 1416718 - DNA, 15 bp, Homo sapiens
ttgtaggtacctgat

SEQ ID NO: 1416719 - DNA, 15 bp, Homo sapiens
tttgtaggtacctga

SEQ ID NO: 1416720 - DNA, 15 bp, Homo sapiens
atttgtaggtacctg

SEQ ID NO: 1416721 - DNA, 15 bp, Homo sapiens
aatttgtaggtacct

SEQ ID NO: 1416722 - DNA, 15 bp, Homo sapiens
taatttgtaggtacc

SEQ ID NO: 1416723 - DNA, 15 bp, Homo sapiens
ctaatttgtaggtac

SEQ ID NO: 1416724 - DNA, 15 bp, Homo sapiens
gctaatttgtaggta

SEQ ID NO: 1416725 - DNA, 15 bp, Homo sapiens
tgctaatttgtaggt

SEQ ID NO: 1416726 - DNA, 15 bp, Homo sapiens
atgctaatttgtagg

SEQ ID NO: 1416727 - DNA, 15 bp, Homo sapiens
aatgctaatttgtag

SEQ ID NO: 1416728 - DNA, 15 bp, Homo sapiens
caatgctaatttgta

SEQ ID NO: 1416729 - DNA, 15 bp, Homo sapiens
acaatgctaatttgt

SEQ ID NO: 1416730 - DNA, 15 bp, Homo sapiens
aacaatgctaatttg

SEQ ID NO: 1416731 - DNA, 15 bp, Homo sapiens
taacaatgctaattt

SEQ ID NO: 1416732 - DNA, 15 bp, Homo sapiens
gtaacaatgctaatt

SEQ ID NO: 1416733 - DNA, 15 bp, Homo sapiens
tgtaacaatgctaat

SEQ ID NO: 1416734 - DNA, 15 bp, Homo sapiens
atgtaacaatgctaa

SEQ ID NO: 1416735 - DNA, 15 bp, Homo sapiens
aatgtaacaatgcta

SEQ ID NO: 1416736 - DNA, 15 bp, Homo sapiens
aaatgtaacaatgct

SEQ ID NO: 1416737 - DNA, 15 bp, Homo sapiens
aaaatgtaacaatgc

SEQ ID NO: 1416738 - DNA, 15 bp, Homo sapiens
gaaaatgtaacaatg

SEQ ID NO: 1416739 - DNA, 15 bp, Homo sapiens
ggaaaatgtaacaat

SEQ ID NO: 1416740 - DNA, 15 bp, Homo sapiens
cggaaaatgtaacaa

SEQ ID NO: 1416741 - DNA, 15 bp, Homo sapiens
acggaaaatgtaaca

SEQ ID NO: 1416742 - DNA, 15 bp, Homo sapiens
cacggaaaatgtaac

SEQ ID NO: 1416743 - DNA, 15 bp, Homo sapiens
acacggaaaatgtaa

SEQ ID NO: 1416744 - DNA, 15 bp, Homo sapiens
cacacggaaaatgta

SEQ ID NO: 1416745 - DNA, 15 bp, Homo sapiens
tcacacggaaaatgt

SEQ ID NO: 1416746 - DNA, 15 bp, Homo sapiens
ttcacacggaaaatg

SEQ ID NO: 1416747 - DNA, 15 bp, Homo sapiens
attcacacggaaaat

SEQ ID NO: 1416748 - DNA, 15 bp, Homo sapiens
aattcacacggaaaa

SEQ ID NO: 1416749 - DNA, 15 bp, Homo sapiens
caattcacacggaaa

SEQ ID NO: 1416750 - DNA, 15 bp, Homo sapiens
tcaattcacacggaa

SEQ ID NO: 1416751 - DNA, 15 bp, Homo sapiens
ctcaattcacacgga

SEQ ID NO: 1416752 - DNA, 15 bp, Homo sapiens
gctcaattcacacgg

SEQ ID NO: 1416753 - DNA, 15 bp, Homo sapiens
ggctcaattcacacg

SEQ ID NO: 1416754 - DNA, 15 bp, Homo sapiens
aggctcaattcacac

SEQ ID NO: 1416755 - DNA, 15 bp, Homo sapiens
aaggctcaattcaca

SEQ ID NO: 1416756 - DNA, 15 bp, Homo sapiens
aaaggctcaattcac

SEQ ID NO: 1416757 - DNA, 15 bp, Homo sapiens
taaaggctcaattca

SEQ ID NO: 1416758 - DNA, 15 bp, Homo sapiens
ttaaaggctcaattc

SEQ ID NO: 1416759 - DNA, 15 bp, Homo sapiens
attaaaggctcaatt

SEQ ID NO: 1416760 - DNA, 15 bp, Homo sapiens
gattaaaggctcaat

SEQ ID NO: 1416761 - DNA, 15 bp, Homo sapiens
tgattaaaggctcaa

SEQ ID NO: 1416762 - DNA, 15 bp, Homo sapiens
ctgattaaaggctca

SEQ ID NO: 1416763 - DNA, 15 bp, Homo sapiens
actgattaaaggctc

SEQ ID NO: 1416764 - DNA, 15 bp, Homo sapiens
cactgattaaaggct

SEQ ID NO: 1416765 - DNA, 15 bp, Homo sapiens
acactgattaaaggc

SEQ ID NO: 1416766 - DNA, 15 bp, Homo sapiens
aacactgattaaagg

SEQ ID NO: 1416767 - DNA, 15 bp, Homo sapiens
taacactgattaaag

SEQ ID NO: 1416768 - DNA, 15 bp, Homo sapiens
ttaacactgattaaa

SEQ ID NO: 1416769 - DNA, 15 bp, Homo sapiens
tttaacactgattaa

SEQ ID NO: 1416770 - DNA, 15 bp, Homo sapiens
ttttaacactgatta

SEQ ID NO: 1416771 - DNA, 15 bp, Homo sapiens
gttttaacactgatt

SEQ ID NO: 1416772 - DNA, 15 bp, Homo sapiens
tgttttaacactgat

SEQ ID NO: 1416773 - DNA, 15 bp, Homo sapiens
gtgttttaacactga

SEQ ID NO: 1416774 - DNA, 15 bp, Homo sapiens
agtgttttaacactg

SEQ ID NO: 1416775 - DNA, 15 bp, Homo sapiens
aagtgttttaacact

SEQ ID NO: 1416776 - DNA, 15 bp, Homo sapiens
taagtgttttaacac

SEQ ID NO: 1416777 - DNA, 15 bp, Homo sapiens
ataagtgttttaaca

SEQ ID NO: 1416778 - DNA, 15 bp, Homo sapiens
aataagtgttttaac

SEQ ID NO: 1416779 - DNA, 15 bp, Homo sapiens
aaataagtgttttaa

SEQ ID NO: 1416780 - DNA, 15 bp, Homo sapiens
aaaataagtgtttta

SEQ ID NO: 1416781 - DNA, 15 bp, Homo sapiens
aaaaataagtgtttt

SEQ ID NO: 1416782 - DNA, 15 bp, Homo sapiens
taaaaataagtgttt

SEQ ID NO: 1416783 - DNA, 15 bp, Homo sapiens
ttaaaaataagtgtt

SEQ ID NO: 1416784 - DNA, 15 bp, Homo sapiens
tttaaaaataagtgt

SEQ ID NO: 1416785 - DNA, 15 bp, Homo sapiens
atttaaaaataagtg

SEQ ID NO: 1416786 - DNA, 15 bp, Homo sapiens
aatttaaaaataagt

SEQ ID NO: 1416787 - DNA, 15 bp, Homo sapiens
aaatttaaaaataag

SEQ ID NO: 1416788 - DNA, 15 bp, Homo sapiens
gaaatttaaaaataa

SEQ ID NO: 1416789 - DNA, 15 bp, Homo sapiens
agaaatttaaaaata

SEQ ID NO: 1416790 - DNA, 15 bp, Homo sapiens
tagaaatttaaaaat

SEQ ID NO: 1416791 - DNA, 15 bp, Homo sapiens
ttagaaatttaaaaa

SEQ ID NO: 1416792 - DNA, 15 bp, Homo sapiens
attagaaatttaaaa

SEQ ID NO: 1416793 - DNA, 15 bp, Homo sapiens
tattagaaatttaaa

SEQ ID NO: 1416794 - DNA, 15 bp, Homo sapiens
ttattagaaatttaa

SEQ ID NO: 1416795 - DNA, 15 bp, Homo sapiens
tttattagaaattta

SEQ ID NO: 1416796 - DNA, 15 bp, Homo sapiens
ctttattagaaattt

SEQ ID NO: 1416797 - DNA, 15 bp, Homo sapiens
gctttattagaaatt

SEQ ID NO: 1416798 - DNA, 15 bp, Homo sapiens
agctttattagaaat

SEQ ID NO: 1416799 - DNA, 15 bp, Homo sapiens
aagctttattagaaa

SEQ ID NO: 1416800 - DNA, 15 bp, Homo sapiens
aaagctttattagaa

SEQ ID NO: 1416801 - DNA, 15 bp, Homo sapiens
aaaagctttattaga

SEQ ID NO: 1416802 - DNA, 15 bp, Homo sapiens
aaaaagctttattag

SEQ ID NO: 1416803 - DNA, 15 bp, Homo sapiens
taaaaagctttatta

SEQ ID NO: 1416804 - DNA, 15 bp, Homo sapiens
ttaaaaagctttatt

SEQ ID NO: 1416805 - DNA, 15 bp, Homo sapiens
attaaaaagctttat

SEQ ID NO: 1416806 - DNA, 15 bp, Homo sapiens
aattaaaaagcttta

SEQ ID NO: 1416807 - DNA, 15 bp, Homo sapiens
aaattaaaaagcttt

SEQ ID NO: 1416808 - DNA, 15 bp, Homo sapiens
aaaattaaaaagctt

SEQ ID NO: 1416809 - DNA, 15 bp, Homo sapiens
aaaaattaaaaagct

SEQ ID NO: 1416810 - DNA, 15 bp, Homo sapiens
taaaaattaaaaagc

SEQ ID NO: 1416811 - DNA, 15 bp, Homo sapiens
ttaaaaattaaaaag

SEQ ID NO: 1416812 - DNA, 15 bp, Homo sapiens
gttaaaaattaaaaa

SEQ ID NO: 1416813 - DNA, 15 bp, Homo sapiens
tgttaaaaattaaaa

SEQ ID NO: 1416814 - DNA, 15 bp, Homo sapiens
atgttaaaaattaaa

SEQ ID NO: 1416815 - DNA, 15 bp, Homo sapiens
aatgttaaaaattaa

SEQ ID NO: 1416816 - DNA, 15 bp, Homo sapiens
gaatgttaaaaatta

SEQ ID NO: 1416817 - DNA, 15 bp, Homo sapiens
tgaatgttaaaaatt

SEQ ID NO: 1416818 - DNA, 15 bp, Homo sapiens
atgaatgttaaaaat

SEQ ID NO: 1416819 - DNA, 15 bp, Homo sapiens
catgaatgttaaaaa

SEQ ID NO: 1416820 - DNA, 15 bp, Homo sapiens
acatgaatgttaaaa

SEQ ID NO: 1416821 - DNA, 15 bp, Homo sapiens
aacatgaatgttaaa

SEQ ID NO: 1416822 - DNA, 15 bp, Homo sapiens
aaacatgaatgttaa

SEQ ID NO: 1416823 - DNA, 15 bp, Homo sapiens
caaacatgaatgtta

SEQ ID NO: 1416824 - DNA, 15 bp, Homo sapiens
gcaaacatgaatgtt

SEQ ID NO: 1416825 - DNA, 15 bp, Homo sapiens
agcaaacatgaatgt

SEQ ID NO: 1416826 - DNA, 15 bp, Homo sapiens
aagcaaacatgaatg

SEQ ID NO: 1416827 - DNA, 15 bp, Homo sapiens
aaagcaaacatgaat

SEQ ID NO: 1416828 - DNA, 15 bp, Homo sapiens
aaaagcaaacatgaa

SEQ ID NO: 1416829 - DNA, 15 bp, Homo sapiens
aaaaagcaaacatga

SEQ ID NO: 1416830 - DNA, 15 bp, Homo sapiens
caaaaagcaaacatg

SEQ ID NO: 1416831 - DNA, 15 bp, Homo sapiens
acaaaaagcaaacat

SEQ ID NO: 1416832 - DNA, 15 bp, Homo sapiens
aacaaaaagcaaaca

SEQ ID NO: 1416833 - DNA, 15 bp, Homo sapiens
taacaaaaagcaaac

SEQ ID NO: 1416834 - DNA, 15 bp, Homo sapiens
gtaacaaaaagcaaa

SEQ ID NO: 1416835 - DNA, 15 bp, Homo sapiens
tgtaacaaaaagcaa

SEQ ID NO: 1416836 - DNA, 15 bp, Homo sapiens
atgtaacaaaaagca

SEQ ID NO: 1416837 - DNA, 15 bp, Homo sapiens
aatgtaacaaaaagc

SEQ ID NO: 1416838 - DNA, 15 bp, Homo sapiens
aaatgtaacaaaaag

SEQ ID NO: 1416839 - DNA, 15 bp, Homo sapiens
aaaatgtaacaaaaa

SEQ ID NO: 1416840 - DNA, 15 bp, Homo sapiens
caaaatgtaacaaaa

SEQ ID NO: 1416841 - DNA, 15 bp, Homo sapiens
gcaaaatgtaacaaa

SEQ ID NO: 1416842 - DNA, 15 bp, Homo sapiens
ggcaaaatgtaacaa

SEQ ID NO: 1416843 - DNA, 15 bp, Homo sapiens
aggcaaaatgtaaca

SEQ ID NO: 1416844 - DNA, 15 bp, Homo sapiens
taggcaaaatgtaac

SEQ ID NO: 1416845 - DNA, 15 bp, Homo sapiens
ataggcaaaatgtaa

SEQ ID NO: 1416846 - DNA, 15 bp, Homo sapiens
tataggcaaaatgta

SEQ ID NO: 1416847 - DNA, 15 bp, Homo sapiens
ttataggcaaaatgt

SEQ ID NO: 1416848 - DNA, 15 bp, Homo sapiens
tttataggcaaaatg

SEQ ID NO: 1416849 - DNA, 15 bp, Homo sapiens
atttataggcaaaat

SEQ ID NO: 1416850 - DNA, 15 bp, Homo sapiens
aatttataggcaaaa

SEQ ID NO: 1416851 - DNA, 15 bp, Homo sapiens
aaatttataggcaaa

SEQ ID NO: 1416852 - DNA, 15 bp, Homo sapiens
gaaatttataggcaa

SEQ ID NO: 1416853 - DNA, 15 bp, Homo sapiens
tgaaatttataggca

SEQ ID NO: 1416854 - DNA, 15 bp, Homo sapiens
gtgaaatttataggc

SEQ ID NO: 1416855 - DNA, 15 bp, Homo sapiens
ggtgaaatttatagg

SEQ ID NO: 1416856 - DNA, 15 bp, Homo sapiens
gggtgaaatttatag

SEQ ID NO: 1416857 - DNA, 15 bp, Homo sapiens
agggtgaaatttata

SEQ ID NO: 1416858 - DNA, 15 bp, Homo sapiens
aagggtgaaatttat

SEQ ID NO: 1416859 - DNA, 15 bp, Homo sapiens
aaagggtgaaattta

SEQ ID NO: 1416860 - DNA, 15 bp, Homo sapiens
aaaagggtgaaattt

SEQ ID NO: 1416861 - DNA, 15 bp, Homo sapiens
aaaaagggtgaaatt

SEQ ID NO: 1416862 - DNA, 15 bp, Homo sapiens
caaaaagggtgaaat

SEQ ID NO: 1416863 - DNA, 15 bp, Homo sapiens
acaaaaagggtgaaa

SEQ ID NO: 1416864 - DNA, 15 bp, Homo sapiens
tacaaaaagggtgaa

SEQ ID NO: 1416865 - DNA, 15 bp, Homo sapiens
atacaaaaagggtga

SEQ ID NO: 1416866 - DNA, 15 bp, Homo sapiens
gatacaaaaagggtg

SEQ ID NO: 1416867 - DNA, 15 bp, Homo sapiens
agatacaaaaagggt

SEQ ID NO: 1416868 - DNA, 15 bp, Homo sapiens
cagatacaaaaaggg

SEQ ID NO: 1416869 - DNA, 15 bp, Homo sapiens
acagatacaaaaagg

SEQ ID NO: 1416870 - DNA, 15 bp, Homo sapiens
cacagatacaaaaag

SEQ ID NO: 1416871 - DNA, 15 bp, Homo sapiens
acacagatacaaaaa

SEQ ID NO: 1416872 - DNA, 15 bp, Homo sapiens
aacacagatacaaaa

SEQ ID NO: 1416873 - DNA, 15 bp, Homo sapiens
aaacacagatacaaa

SEQ ID NO: 1416874 - DNA, 15 bp, Homo sapiens
aaaacacagatacaa

SEQ ID NO: 1416875 - DNA, 15 bp, Homo sapiens
taaaacacagataca

SEQ ID NO: 1416876 - DNA, 15 bp, Homo sapiens
ctaaaacacagatac

SEQ ID NO: 1416877 - DNA, 15 bp, Homo sapiens
tctaaaacacagata

SEQ ID NO: 1416878 - DNA, 15 bp, Homo sapiens
atctaaaacacagat

SEQ ID NO: 1416879 - DNA, 15 bp, Homo sapiens
catctaaaacacaga

SEQ ID NO: 1416880 - DNA, 15 bp, Homo sapiens
acatctaaaacacag

SEQ ID NO: 1416881 - DNA, 15 bp, Homo sapiens
tacatctaaaacaca

SEQ ID NO: 1416882 - DNA, 15 bp, Homo sapiens
atacatctaaaacac

SEQ ID NO: 1416883 - DNA, 15 bp, Homo sapiens
gatacatctaaaaca

SEQ ID NO: 1416884 - DNA, 15 bp, Homo sapiens
agatacatctaaaac

SEQ ID NO: 1416885 - DNA, 15 bp, Homo sapiens
aagatacatctaaaa

SEQ ID NO: 1416886 - DNA, 15 bp, Homo sapiens
aaagatacatctaaa

SEQ ID NO: 1416887 - DNA, 15 bp, Homo sapiens
aaaagatacatctaa

SEQ ID NO: 1416888 - DNA, 15 bp, Homo sapiens
caaaagatacatcta

SEQ ID NO: 1416889 - DNA, 15 bp, Homo sapiens
acaaaagatacatct

SEQ ID NO: 1416890 - DNA, 15 bp, Homo sapiens
tacaaaagatacatc

SEQ ID NO: 1416891 - DNA, 15 bp, Homo sapiens
ttacaaaagatacat

SEQ ID NO: 1416892 - DNA, 15 bp, Homo sapiens
tttacaaaagataca

SEQ ID NO: 1416893 - DNA, 15 bp, Homo sapiens
ttttacaaaagatac

SEQ ID NO: 1416894 - DNA, 15 bp, Homo sapiens
tttttacaaaagata

SEQ ID NO: 1416895 - DNA, 15 bp, Homo sapiens
gtttttacaaaagat

SEQ ID NO: 1416896 - DNA, 15 bp, Homo sapiens
tgtttttacaaaaga

SEQ ID NO: 1416897 - DNA, 15 bp, Homo sapiens
atgtttttacaaaag

SEQ ID NO: 1416898 - DNA, 15 bp, Homo sapiens
catgtttttacaaaa

SEQ ID NO: 1416899 - DNA, 15 bp, Homo sapiens
gcatgtttttacaaa

SEQ ID NO: 1416900 - DNA, 15 bp, Homo sapiens
tgcatgtttttacaa

SEQ ID NO: 1416901 - DNA, 15 bp, Homo sapiens
atgcatgtttttaca

SEQ ID NO: 1416902 - DNA, 15 bp, Homo sapiens
tatgcatgtttttac

SEQ ID NO: 1416903 - DNA, 15 bp, Homo sapiens
atatgcatgttttta

SEQ ID NO: 1416904 - DNA, 15 bp, Homo sapiens
tatatgcatgttttt

SEQ ID NO: 1416905 - DNA, 15 bp, Homo sapiens
ctatatgcatgtttt

SEQ ID NO: 1416906 - DNA, 15 bp, Homo sapiens
tctatatgcatgttt

SEQ ID NO: 1416907 - DNA, 15 bp, Homo sapiens
atctatatgcatgtt

SEQ ID NO: 1416908 - DNA, 15 bp, Homo sapiens
tatctatatgcatgt

SEQ ID NO: 1416909 - DNA, 15 bp, Homo sapiens
ctatctatatgcatg

SEQ ID NO: 1416910 - DNA, 15 bp, Homo sapiens
actatctatatgcat

SEQ ID NO: 1416911 - DNA, 15 bp, Homo sapiens
aactatctatatgca

SEQ ID NO: 1416912 - DNA, 15 bp, Homo sapiens
gaactatctatatgc

SEQ ID NO: 1416913 - DNA, 15 bp, Homo sapiens
agaactatctatatg

SEQ ID NO: 1416914 - DNA, 15 bp, Homo sapiens
gagaactatctatat

SEQ ID NO: 1416915 - DNA, 15 bp, Homo sapiens
ggagaactatctata

SEQ ID NO: 1416916 - DNA, 15 bp, Homo sapiens
tggagaactatctat

SEQ ID NO: 1416917 - DNA, 15 bp, Homo sapiens
atggagaactatcta

SEQ ID NO: 1416918 - DNA, 15 bp, Homo sapiens
aatggagaactatct

SEQ ID NO: 1416919 - DNA, 15 bp, Homo sapiens
aaatggagaactatc

SEQ ID NO: 1416920 - DNA, 15 bp, Homo sapiens
taaatggagaactat

SEQ ID NO: 1416921 - DNA, 15 bp, Homo sapiens
gtaaatggagaacta

SEQ ID NO: 1416922 - DNA, 15 bp, Homo sapiens
tgtaaatggagaact

SEQ ID NO: 1416923 - DNA, 15 bp, Homo sapiens
ctgtaaatggagaac

SEQ ID NO: 1416924 - DNA, 15 bp, Homo sapiens
actgtaaatggagaa

SEQ ID NO: 1416925 - DNA, 15 bp, Homo sapiens
cactgtaaatggaga

SEQ ID NO: 1416926 - DNA, 15 bp, Homo sapiens
ccactgtaaatggag

SEQ ID NO: 1416927 - DNA, 15 bp, Homo sapiens
cccactgtaaatgga

SEQ ID NO: 1416928 - DNA, 15 bp, Homo sapiens
tcccactgtaaatgg

SEQ ID NO: 1416929 - DNA, 15 bp, Homo sapiens
atcccactgtaaatg

SEQ ID NO: 1416930 - DNA, 15 bp, Homo sapiens
aatcccactgtaaat

SEQ ID NO: 1416931 - DNA, 15 bp, Homo sapiens
taatcccactgtaaa

SEQ ID NO: 1416932 - DNA, 15 bp, Homo sapiens
gtaatcccactgtaa

SEQ ID NO: 1416933 - DNA, 15 bp, Homo sapiens
tgtaatcccactgta

SEQ ID NO: 1416934 - DNA, 15 bp, Homo sapiens
atgtaatcccactgt

SEQ ID NO: 1416935 - DNA, 15 bp, Homo sapiens
gatgtaatcccactg

SEQ ID NO: 1416936 - DNA, 15 bp, Homo sapiens
ggatgtaatcccact

SEQ ID NO: 1416937 - DNA, 15 bp, Homo sapiens
aggatgtaatcccac

SEQ ID NO: 1416938 - DNA, 15 bp, Homo sapiens
caggatgtaatccca

SEQ ID NO: 1416939 - DNA, 15 bp, Homo sapiens
tcaggatgtaatccc

SEQ ID NO: 1416940 - DNA, 15 bp, Homo sapiens
gtcaggatgtaatcc

SEQ ID NO: 1416941 - DNA, 15 bp, Homo sapiens
tgtcaggatgtaatc

SEQ ID NO: 1416942 - DNA, 15 bp, Homo sapiens
ttgtcaggatgtaat

SEQ ID NO: 1416943 - DNA, 15 bp, Homo sapiens
tttgtcaggatgtaa

SEQ ID NO: 1416944 - DNA, 15 bp, Homo sapiens
atttgtcaggatgta

SEQ ID NO: 1416945 - DNA, 15 bp, Homo sapiens
gatttgtcaggatgt

SEQ ID NO: 1416946 - DNA, 15 bp, Homo sapiens
ggatttgtcaggatg

SEQ ID NO: 1416947 - DNA, 15 bp, Homo sapiens
tggatttgtcaggat

SEQ ID NO: 1416948 - DNA, 15 bp, Homo sapiens
atggatttgtcagga

SEQ ID NO: 1416949 - DNA, 15 bp, Homo sapiens
gatggatttgtcagg

SEQ ID NO: 1416950 - DNA, 15 bp, Homo sapiens
tgatggatttgtcag

SEQ ID NO: 1416951 - DNA, 15 bp, Homo sapiens
atgatggatttgtca

SEQ ID NO: 1416952 - DNA, 15 bp, Homo sapiens
tatgatggatttgtc

SEQ ID NO: 1416953 - DNA, 15 bp, Homo sapiens
ttatgatggatttgt

SEQ ID NO: 1416954 - DNA, 15 bp, Homo sapiens
cttatgatggatttg

SEQ ID NO: 1416955 - DNA, 15 bp, Homo sapiens
acttatgatggattt

SEQ ID NO: 1416956 - DNA, 15 bp, Homo sapiens
cacttatgatggatt

SEQ ID NO: 1416957 - DNA, 15 bp, Homo sapiens
ccacttatgatggat

SEQ ID NO: 1416958 - DNA, 15 bp, Homo sapiens
tccacttatgatgga

SEQ ID NO: 1416959 - DNA, 15 bp, Homo sapiens
ttccacttatgatgg

SEQ ID NO: 1416960 - DNA, 15 bp, Homo sapiens
tttccacttatgatg

SEQ ID NO: 1416961 - DNA, 15 bp, Homo sapiens
ttttccacttatgat

SEQ ID NO: 1416962 - DNA, 15 bp, Homo sapiens
attttccacttatga

SEQ ID NO: 1416963 - DNA, 15 bp, Homo sapiens
tattttccacttatg

SEQ ID NO: 1416964 - DNA, 15 bp, Homo sapiens
gtattttccacttat

SEQ ID NO: 1416965 - DNA, 15 bp, Homo sapiens
agtattttccactta

SEQ ID NO: 1416966 - DNA, 15 bp, Homo sapiens
cagtattttccactt

SEQ ID NO: 1416967 - DNA, 15 bp, Homo sapiens
acagtattttccact

SEQ ID NO: 1416968 - DNA, 15 bp, Homo sapiens
tacagtattttccac

SEQ ID NO: 1416969 - DNA, 15 bp, Homo sapiens
ttacagtattttcca

SEQ ID NO: 1416970 - DNA, 15 bp, Homo sapiens
cttacagtattttcc

SEQ ID NO: 1416971 - DNA, 15 bp, Homo sapiens
acttacagtattttc

SEQ ID NO: 1416972 - DNA, 15 bp, Homo sapiens
aacttacagtatttt

SEQ ID NO: 1416973 - DNA, 15 bp, Homo sapiens
caacttacagtattt

SEQ ID NO: 1416974 - DNA, 15 bp, Homo sapiens
tcaacttacagtatt

SEQ ID NO: 1416975 - DNA, 15 bp, Homo sapiens
ttcaacttacagtat

SEQ ID NO: 1416976 - DNA, 15 bp, Homo sapiens
tttcaacttacagta

SEQ ID NO: 1416977 - DNA, 15 bp, Homo sapiens
ttttcaacttacagt

SEQ ID NO: 1416978 - DNA, 15 bp, Homo sapiens
gttttcaacttacag

SEQ ID NO: 1416979 - DNA, 15 bp, Homo sapiens
agttttcaacttaca

SEQ ID NO: 1416980 - DNA, 15 bp, Homo sapiens
aagttttcaacttac

SEQ ID NO: 1416981 - DNA, 15 bp, Homo sapiens
gaagttttcaactta

SEQ ID NO: 1416982 - DNA, 15 bp, Homo sapiens
tgaagttttcaactt

SEQ ID NO: 1416983 - DNA, 15 bp, Homo sapiens
ctgaagttttcaact

SEQ ID NO: 1416984 - DNA, 15 bp, Homo sapiens
tctgaagttttcaac

SEQ ID NO: 1416985 - DNA, 15 bp, Homo sapiens
ctctgaagttttcaa

SEQ ID NO: 1416986 - DNA, 15 bp, Homo sapiens
actctgaagttttca

SEQ ID NO: 1416987 - DNA, 15 bp, Homo sapiens
tactctgaagttttc

SEQ ID NO: 1416988 - DNA, 15 bp, Homo sapiens
atactctgaagtttt

SEQ ID NO: 1416989 - DNA, 15 bp, Homo sapiens
aatactctgaagttt

SEQ ID NO: 1416990 - DNA, 15 bp, Homo sapiens
taatactctgaagtt

SEQ ID NO: 1416991 - DNA, 15 bp, Homo sapiens
ctaatactctgaagt

SEQ ID NO: 1416992 - DNA, 15 bp, Homo sapiens
gctaatactctgaag

SEQ ID NO: 1416993 - DNA, 15 bp, Homo sapiens
agctaatactctgaa

SEQ ID NO: 1416994 - DNA, 15 bp, Homo sapiens
tagctaatactctga

SEQ ID NO: 1416995 - DNA, 15 bp, Homo sapiens
atagctaatactctg

SEQ ID NO: 1416996 - DNA, 15 bp, Homo sapiens
aatagctaatactct

SEQ ID NO: 1416997 - DNA, 15 bp, Homo sapiens
aaatagctaatactc

SEQ ID NO: 1416998 - DNA, 15 bp, Homo sapiens
taaatagctaatact

SEQ ID NO: 1416999 - DNA, 15 bp, Homo sapiens
gtaaatagctaatac

SEQ ID NO: 1417000 - DNA, 15 bp, Homo sapiens
ggtaaatagctaata

SEQ ID NO: 1417001 - DNA, 15 bp, Homo sapiens
gggtaaatagctaat

SEQ ID NO: 1417002 - DNA, 15 bp, Homo sapiens
agggtaaatagctaa

SEQ ID NO: 1417003 - DNA, 15 bp, Homo sapiens
gagggtaaatagcta

SEQ ID NO: 1417004 - DNA, 15 bp, Homo sapiens
tgagggtaaatagct

SEQ ID NO: 1417005 - DNA, 15 bp, Homo sapiens
atgagggtaaatagc

SEQ ID NO: 1417006 - DNA, 15 bp, Homo sapiens
catgagggtaaatag

SEQ ID NO: 1417007 - DNA, 15 bp, Homo sapiens
tcatgagggtaaata

SEQ ID NO: 1417008 - DNA, 15 bp, Homo sapiens
atcatgagggtaaat

SEQ ID NO: 1417009 - DNA, 15 bp, Homo sapiens
aatcatgagggtaaa

SEQ ID NO: 1417010 - DNA, 15 bp, Homo sapiens
caatcatgagggtaa

SEQ ID NO: 1417011 - DNA, 15 bp, Homo sapiens
acaatcatgagggta

SEQ ID NO: 1417012 - DNA, 15 bp, Homo sapiens
cacaatcatgagggt

SEQ ID NO: 1417013 - DNA, 15 bp, Homo sapiens
acacaatcatgaggg

SEQ ID NO: 1417014 - DNA, 15 bp, Homo sapiens
cacacaatcatgagg

SEQ ID NO: 1417015 - DNA, 15 bp, Homo sapiens
ccacacaatcatgag

SEQ ID NO: 1417016 - DNA, 15 bp, Homo sapiens
gccacacaatcatga

SEQ ID NO: 1417017 - DNA, 15 bp, Homo sapiens
tgccacacaatcatg

SEQ ID NO: 1417018 - DNA, 15 bp, Homo sapiens
ctgccacacaatcat

SEQ ID NO: 1417019 - DNA, 15 bp, Homo sapiens
tctgccacacaatca

SEQ ID NO: 1417020 - DNA, 15 bp, Homo sapiens
gtctgccacacaatc

SEQ ID NO: 1417021 - DNA, 15 bp, Homo sapiens
agtctgccacacaat

SEQ ID NO: 1417022 - DNA, 15 bp, Homo sapiens
cagtctgccacacaa

SEQ ID NO: 1417023 - DNA, 15 bp, Homo sapiens
ccagtctgccacaca

SEQ ID NO: 1417024 - DNA, 15 bp, Homo sapiens
cccagtctgccacac

SEQ ID NO: 1417025 - DNA, 15 bp, Homo sapiens
tcccagtctgccaca

SEQ ID NO: 1417026 - DNA, 15 bp, Homo sapiens
ttcccagtctgccac

SEQ ID NO: 1417027 - DNA, 15 bp, Homo sapiens
gttcccagtctgcca

SEQ ID NO: 1417028 - DNA, 15 bp, Homo sapiens
agttcccagtctgcc

SEQ ID NO: 1417029 - DNA, 15 bp, Homo sapiens
tagttcccagtctgc

SEQ ID NO: 1417030 - DNA, 15 bp, Homo sapiens
atagttcccagtctg

SEQ ID NO: 1417031 - DNA, 15 bp, Homo sapiens
catagttcccagtct

SEQ ID NO: 1417032 - DNA, 15 bp, Homo sapiens
ccatagttcccagtc

SEQ ID NO: 1417033 - DNA, 15 bp, Homo sapiens
gccatagttcccagt

SEQ ID NO: 1417034 - DNA, 15 bp, Homo sapiens
agccatagttcccag

SEQ ID NO: 1417035 - DNA, 15 bp, Homo sapiens
cagccatagttccca

SEQ ID NO: 1417036 - DNA, 15 bp, Homo sapiens
ccagccatagttccc

SEQ ID NO: 1417037 - DNA, 15 bp, Homo sapiens
gccagccatagttcc

SEQ ID NO: 1417038 - DNA, 15 bp, Homo sapiens
agccagccatagttc

SEQ ID NO: 1417039 - DNA, 15 bp, Homo sapiens
cagccagccatagtt

SEQ ID NO: 1417040 - DNA, 15 bp, Homo sapiens
gcagccagccatagt

SEQ ID NO: 1417041 - DNA, 15 bp, Homo sapiens
ggcagccagccatag

SEQ ID NO: 1417042 - DNA, 15 bp, Homo sapiens
tggcagccagccata

SEQ ID NO: 1417043 - DNA, 15 bp, Homo sapiens
gtggcagccagccat

SEQ ID NO: 1417044 - DNA, 15 bp, Homo sapiens
agtggcagccagcca

SEQ ID NO: 1417045 - DNA, 15 bp, Homo sapiens
cagtggcagccagcc

SEQ ID NO: 1417046 - DNA, 15 bp, Homo sapiens
gcagtggcagccagc

SEQ ID NO: 1417047 - DNA, 15 bp, Homo sapiens
ggcagtggcagccag

SEQ ID NO: 1417048 - DNA, 15 bp, Homo sapiens
gggcagtggcagcca

SEQ ID NO: 1417049 - DNA, 15 bp, Homo sapiens
tgggcagtggcagcc

SEQ ID NO: 1417050 - DNA, 15 bp, Homo sapiens
tgctgggcagtggca

SEQ ID NO: 1417051 - DNA, 15 bp, Homo sapiens
atgctgggcagtggc

SEQ ID NO: 1417052 - DNA, 15 bp, Homo sapiens
gatgctgggcagtgg

SEQ ID NO: 1417053 - DNA, 15 bp, Homo sapiens
agatgctgggcagtg

SEQ ID NO: 1417054 - DNA, 15 bp, Homo sapiens
gagatgctgggcagt

SEQ ID NO: 1417055 - DNA, 15 bp, Homo sapiens
tgagatgctgggcag

SEQ ID NO: 1417056 - DNA, 15 bp, Homo sapiens
ttgagatgctgggca

SEQ ID NO: 1417057 - DNA, 15 bp, Homo sapiens
cttgagatgctgggc

SEQ ID NO: 1417058 - DNA, 15 bp, Homo sapiens
tcttgagatgctggg

SEQ ID NO: 1417059 - DNA, 15 bp, Homo sapiens
ctcttgagatgctgg

SEQ ID NO: 1417060 - DNA, 15 bp, Homo sapiens
tctcttgagatgctg

SEQ ID NO: 1417061 - DNA, 15 bp, Homo sapiens
ctctcttgagatgct

SEQ ID NO: 1417062 - DNA, 15 bp, Homo sapiens
actctcttgagatgc

SEQ ID NO: 1417063 - DNA, 15 bp, Homo sapiens
tactctcttgagatg

SEQ ID NO: 1417064 - DNA, 15 bp, Homo sapiens
ctactctcttgagat

SEQ ID NO: 1417065 - DNA, 15 bp, Homo sapiens
cctactctcttgaga

SEQ ID NO: 1417066 - DNA, 15 bp, Homo sapiens
ccctactctcttgag

SEQ ID NO: 1417067 - DNA, 15 bp, Homo sapiens
accctactctcttga

SEQ ID NO: 1417068 - DNA, 15 bp, Homo sapiens
taccctactctcttg

SEQ ID NO: 1417069 - DNA, 15 bp, Homo sapiens
gtaccctactctctt

SEQ ID NO: 1417070 - DNA, 15 bp, Homo sapiens
agtaccctactctct

SEQ ID NO: 1417071 - DNA, 15 bp, Homo sapiens
cagtaccctactctc

SEQ ID NO: 1417072 - DNA, 15 bp, Homo sapiens
gcagtaccctactct

SEQ ID NO: 1417073 - DNA, 15 bp, Homo sapiens
tgcagtaccctactc

SEQ ID NO: 1417074 - DNA, 15 bp, Homo sapiens
atgcagtaccctact

SEQ ID NO: 1417075 - DNA, 15 bp, Homo sapiens
tatgcagtaccctac

SEQ ID NO: 1417076 - DNA, 15 bp, Homo sapiens
atatgcagtacccta

SEQ ID NO: 1417077 - DNA, 15 bp, Homo sapiens
gatatgcagtaccct

SEQ ID NO: 1417078 - DNA, 15 bp, Homo sapiens
cgatatgcagtaccc

SEQ ID NO: 1417079 - DNA, 15 bp, Homo sapiens
gcgatatgcagtacc

SEQ ID NO: 1417080 - DNA, 15 bp, Homo sapiens
agcgatatgcagtac

SEQ ID NO: 1417081 - DNA, 15 bp, Homo sapiens
tagcgatatgcagta

SEQ ID NO: 1417082 - DNA, 15 bp, Homo sapiens
ctagcgatatgcagt

SEQ ID NO: 1417083 - DNA, 15 bp, Homo sapiens
gctagcgatatgcag

SEQ ID NO: 1417084 - DNA, 15 bp, Homo sapiens
ggctagcgatatgca

SEQ ID NO: 1417085 - DNA, 15 bp, Homo sapiens
gggctagcgatatgc

SEQ ID NO: 1417086 - DNA, 15 bp, Homo sapiens
tgggctagcgatatg

SEQ ID NO: 1417087 - DNA, 15 bp, Homo sapiens
ctgggctagcgatat

SEQ ID NO: 1417088 - DNA, 15 bp, Homo sapiens
cctgggctagcgata

SEQ ID NO: 1417089 - DNA, 15 bp, Homo sapiens
tcctgggctagcgat

SEQ ID NO: 1417090 - DNA, 15 bp, Homo sapiens
ttcctgggctagcga

SEQ ID NO: 1417091 - DNA, 15 bp, Homo sapiens
tttcctgggctagcg

SEQ ID NO: 1417092 - DNA, 15 bp, Homo sapiens
atttcctgggctagc

SEQ ID NO: 1417093 - DNA, 15 bp, Homo sapiens
tatttcctgggctag

SEQ ID NO: 1417094 - DNA, 15 bp, Homo sapiens
ttatttcctgggcta

SEQ ID NO: 1417095 - DNA, 15 bp, Homo sapiens
attatttcctgggct

SEQ ID NO: 1417096 - DNA, 15 bp, Homo sapiens
cattatttcctgggc

SEQ ID NO: 1417097 - DNA, 15 bp, Homo sapiens
gcattatttcctggg

SEQ ID NO: 1417098 - DNA, 15 bp, Homo sapiens
tgcattatttcctgg

SEQ ID NO: 1417099 - DNA, 15 bp, Homo sapiens
ttgcattatttcctg

SEQ ID NO: 1417100 - DNA, 15 bp, Homo sapiens
tttgcattatttcct

SEQ ID NO: 1417101 - DNA, 15 bp, Homo sapiens
atttgcattatttcc

SEQ ID NO: 1417102 - DNA, 15 bp, Homo sapiens
aatttgcattatttc

SEQ ID NO: 1417103 - DNA, 15 bp, Homo sapiens
gaatttgcattattt

SEQ ID NO: 1417104 - DNA, 15 bp, Homo sapiens
tgaatttgcattatt

SEQ ID NO: 1417105 - DNA, 15 bp, Homo sapiens
ttgaatttgcattat

SEQ ID NO: 1417106 - DNA, 15 bp, Homo sapiens
tttgaatttgcatta

SEQ ID NO: 1417107 - DNA, 15 bp, Homo sapiens
ttttgaatttgcatt

SEQ ID NO: 1417108 - DNA, 15 bp, Homo sapiens
attttgaatttgcat

SEQ ID NO: 1417109 - DNA, 15 bp, Homo sapiens
aattttgaatttgca

SEQ ID NO: 1417110 - DNA, 15 bp, Homo sapiens
aaattttgaatttgc

SEQ ID NO: 1417111 - DNA, 15 bp, Homo sapiens
caaattttgaatttg

SEQ ID NO: 1417112 - DNA, 15 bp, Homo sapiens
tcaaattttgaattt

SEQ ID NO: 1417113 - DNA, 15 bp, Homo sapiens
ctcaaattttgaatt

SEQ ID NO: 1417114 - DNA, 15 bp, Homo sapiens
cctcaaattttgaat

SEQ ID NO: 1417115 - DNA, 15 bp, Homo sapiens
acctcaaattttgaa

SEQ ID NO: 1417116 - DNA, 15 bp, Homo sapiens
tacctcaaattttga

SEQ ID NO: 1417117 - DNA, 15 bp, Homo sapiens
gtacctcaaattttg

SEQ ID NO: 1417118 - DNA, 15 bp, Homo sapiens
tgtacctcaaatttt

SEQ ID NO: 1417119 - DNA, 15 bp, Homo sapiens
ctgtacctcaaattt

SEQ ID NO: 1417120 - DNA, 15 bp, Homo sapiens
actgtacctcaaatt

SEQ ID NO: 1417121 - DNA, 15 bp, Homo sapiens
aactgtacctcaaat

SEQ ID NO: 1417122 - DNA, 15 bp, Homo sapiens
aaactgtacctcaaa

SEQ ID NO: 1417123 - DNA, 15 bp, Homo sapiens
gaaactgtacctcaa

SEQ ID NO: 1417124 - DNA, 15 bp, Homo sapiens
agaaactgtacctca

SEQ ID NO: 1417125 - DNA, 15 bp, Homo sapiens
tagaaactgtacctc

SEQ ID NO: 1417126 - DNA, 15 bp, Homo sapiens
gtagaaactgtacct

SEQ ID NO: 1417127 - DNA, 15 bp, Homo sapiens
agtagaaactgtacc

SEQ ID NO: 1417128 - DNA, 15 bp, Homo sapiens
cagtagaaactgtac

SEQ ID NO: 1417129 - DNA, 15 bp, Homo sapiens
tcagtagaaactgta

SEQ ID NO: 1417130 - DNA, 15 bp, Homo sapiens
ttcagtagaaactgt

SEQ ID NO: 1417131 - DNA, 15 bp, Homo sapiens
attcagtagaaactg

SEQ ID NO: 1417132 - DNA, 15 bp, Homo sapiens
aattcagtagaaact

SEQ ID NO: 1417133 - DNA, 15 bp, Homo sapiens
gaattcagtagaaac

SEQ ID NO: 1417134 - DNA, 15 bp, Homo sapiens
tgaattcagtagaaa

SEQ ID NO: 1417135 - DNA, 15 bp, Homo sapiens
atgaattcagtagaa

SEQ ID NO: 1417136 - DNA, 15 bp, Homo sapiens
tatgaattcagtaga

SEQ ID NO: 1417137 - DNA, 15 bp, Homo sapiens
atatgaattcagtag

SEQ ID NO: 1417138 - DNA, 15 bp, Homo sapiens
aatatgaattcagta

SEQ ID NO: 1417139 - DNA, 15 bp, Homo sapiens
caatatgaattcagt

SEQ ID NO: 1417140 - DNA, 15 bp, Homo sapiens
gcaatatgaattcag

SEQ ID NO: 1417141 - DNA, 15 bp, Homo sapiens
agcaatatgaattca

SEQ ID NO: 1417142 - DNA, 15 bp, Homo sapiens
aagcaatatgaattc

SEQ ID NO: 1417143 - DNA, 15 bp, Homo sapiens
aaagcaatatgaatt

SEQ ID NO: 1417144 - DNA, 15 bp, Homo sapiens
gaaagcaatatgaat

SEQ ID NO: 1417145 - DNA, 15 bp, Homo sapiens
tgaaagcaatatgaa

SEQ ID NO: 1417146 - DNA, 15 bp, Homo sapiens
gtgaaagcaatatga

SEQ ID NO: 1417147 - DNA, 15 bp, Homo sapiens
tgtgaaagcaatatg

SEQ ID NO: 1417148 - DNA, 15 bp, Homo sapiens
gtgtgaaagcaatat

SEQ ID NO: 1417149 - DNA, 15 bp, Homo sapiens
ggtgtgaaagcaata

SEQ ID NO: 1417150 - DNA, 15 bp, Homo sapiens
tggtgtgaaagcaat

SEQ ID NO: 1417151 - DNA, 15 bp, Homo sapiens
atggtgtgaaagcaa

SEQ ID NO: 1417152 - DNA, 15 bp, Homo sapiens
tatggtgtgaaagca

SEQ ID NO: 1417153 - DNA, 15 bp, Homo sapiens
ctatggtgtgaaagc

SEQ ID NO: 1417154 - DNA, 15 bp, Homo sapiens
actatggtgtgaaag

SEQ ID NO: 1417155 - DNA, 15 bp, Homo sapiens
tactatggtgtgaaa

SEQ ID NO: 1417156 - DNA, 15 bp, Homo sapiens
ttactatggtgtgaa

SEQ ID NO: 1417157 - DNA, 15 bp, Homo sapiens
attactatggtgtga

SEQ ID NO: 1417158 - DNA, 15 bp, Homo sapiens
cattactatggtgtg

SEQ ID NO: 1417159 - DNA, 15 bp, Homo sapiens
acattactatggtgt

SEQ ID NO: 1417160 - DNA, 15 bp, Homo sapiens
tacattactatggtg

SEQ ID NO: 1417161 - DNA, 15 bp, Homo sapiens
ttacattactatggt

SEQ ID NO: 1417162 - DNA, 15 bp, Homo sapiens
tttacattactatgg

SEQ ID NO: 1417163 - DNA, 15 bp, Homo sapiens
ttttacattactatg

SEQ ID NO: 1417164 - DNA, 15 bp, Homo sapiens
tttttacattactat

SEQ ID NO: 1417165 - DNA, 15 bp, Homo sapiens
ttttttacattacta

SEQ ID NO: 1417166 - DNA, 15 bp, Homo sapiens
tttttttacattact

SEQ ID NO: 1417167 - DNA, 15 bp, Homo sapiens
atttttttacattac

SEQ ID NO: 1417168 - DNA, 15 bp, Homo sapiens
aatttttttacatta

SEQ ID NO: 1417169 - DNA, 15 bp, Homo sapiens
caatttttttacatt

SEQ ID NO: 1417170 - DNA, 15 bp, Homo sapiens
gcaatttttttacat

SEQ ID NO: 1417171 - DNA, 15 bp, Homo sapiens
tgcaatttttttaca

SEQ ID NO: 1417172 - DNA, 15 bp, Homo sapiens
ttgcaatttttttac

SEQ ID NO: 1417173 - DNA, 15 bp, Homo sapiens
cttgcaattttttta

SEQ ID NO: 1417174 - DNA, 15 bp, Homo sapiens
acttgcaattttttt

SEQ ID NO: 1417175 - DNA, 15 bp, Homo sapiens
cacttgcaatttttt

SEQ ID NO: 1417176 - DNA, 15 bp, Homo sapiens
acacttgcaattttt

SEQ ID NO: 1417177 - DNA, 15 bp, Homo sapiens
cacacttgcaatttt

SEQ ID NO: 1417178 - DNA, 15 bp, Homo sapiens
ccacacttgcaattt

SEQ ID NO: 1417179 - DNA, 15 bp, Homo sapiens
cccacacttgcaatt

SEQ ID NO: 1417180 - DNA, 15 bp, Homo sapiens
ccccacacttgcaat

SEQ ID NO: 1417181 - DNA, 15 bp, Homo sapiens
gccccacacttgcaa

SEQ ID NO: 1417182 - DNA, 15 bp, Homo sapiens
cgccccacacttgca

SEQ ID NO: 1417183 - DNA, 15 bp, Homo sapiens
ccgccccacacttgc

SEQ ID NO: 1417184 - DNA, 15 bp, Homo sapiens
cccgccccacacttg

SEQ ID NO: 1417185 - DNA, 15 bp, Homo sapiens
ccccgccccacactt

SEQ ID NO: 1417186 - DNA, 15 bp, Homo sapiens
gccccgccccacact

SEQ ID NO: 1417187 - DNA, 15 bp, Homo sapiens
cgccccgccccacac

SEQ ID NO: 1417188 - DNA, 15 bp, Homo sapiens
ccgccccgccccaca

SEQ ID NO: 1417189 - DNA, 15 bp, Homo sapiens
cccgccccgccccac

SEQ ID NO: 1417190 - DNA, 15 bp, Homo sapiens
gcccgccccgcccca

SEQ ID NO: 1417191 - DNA, 15 bp, Homo sapiens
ggcccgccccgcccc

SEQ ID NO: 1417192 - DNA, 15 bp, Homo sapiens
tggcccgccccgccc

SEQ ID NO: 1417193 - DNA, 15 bp, Homo sapiens
atggcccgccccgcc

SEQ ID NO: 1417194 - DNA, 15 bp, Homo sapiens
catggcccgccccgc

SEQ ID NO: 1417195 - DNA, 15 bp, Homo sapiens
ccatggcccgccccg

SEQ ID NO: 1417196 - DNA, 15 bp, Homo sapiens
cccatggcccgcccc

SEQ ID NO: 1417197 - DNA, 15 bp, Homo sapiens
ccccatggcccgccc

SEQ ID NO: 1417198 - DNA, 15 bp, Homo sapiens
gccccatggcccgcc

SEQ ID NO: 1417199 - DNA, 15 bp, Homo sapiens
cgccccatggcccgc

SEQ ID NO: 1417200 - DNA, 15 bp, Homo sapiens
ccgccccatggcccg

SEQ ID NO: 1417201 - DNA, 15 bp, Homo sapiens
cccgccccatggccc

SEQ ID NO: 1417202 - DNA, 15 bp, Homo sapiens
gcccgccccatggcc

SEQ ID NO: 1417203 - DNA, 15 bp, Homo sapiens
cgcccgccccatggc

SEQ ID NO: 1417204 - DNA, 15 bp, Homo sapiens
ccgcccgccccatgg

SEQ ID NO: 1417205 - DNA, 15 bp, Homo sapiens
tccgcccgccccatg

SEQ ID NO: 1417206 - DNA, 15 bp, Homo sapiens
ctccgcccgccccat

SEQ ID NO: 1417207 - DNA, 15 bp, Homo sapiens
cctccgcccgcccca

SEQ ID NO: 1417208 - DNA, 15 bp, Homo sapiens
gcctccgcccgcccc

SEQ ID NO: 1417209 - DNA, 15 bp, Homo sapiens
cgcctccgcccgccc

SEQ ID NO: 1417210 - DNA, 15 bp, Homo sapiens
gcgcctccgcccgcc

SEQ ID NO: 1417211 - DNA, 15 bp, Homo sapiens
ggcgcctccgcccgc

SEQ ID NO: 1417212 - DNA, 15 bp, Homo sapiens
gggcgcctccgcccg

SEQ ID NO: 1417213 - DNA, 15 bp, Homo sapiens
cgggcgcctccgccc

SEQ ID NO: 1417214 - DNA, 15 bp, Homo sapiens
tcgggcgcctccgcc

SEQ ID NO: 1417215 - DNA, 15 bp, Homo sapiens
ctcgggcgcctccgc

SEQ ID NO: 1417216 - DNA, 15 bp, Homo sapiens
gctcgggcgcctccg

SEQ ID NO: 1417217 - DNA, 15 bp, Homo sapiens
ggctcgggcgcctcc

SEQ ID NO: 1417218 - DNA, 15 bp, Homo sapiens
gggctcgggcgcctc

SEQ ID NO: 1417219 - DNA, 15 bp, Homo sapiens
ggggctcgggcgcct

SEQ ID NO: 1417220 - DNA, 15 bp, Homo sapiens
cggggctcgggcgcc

SEQ ID NO: 1417221 - DNA, 15 bp, Homo sapiens
gcggggctcgggcgc

SEQ ID NO: 1417222 - DNA, 15 bp, Homo sapiens
agcggggctcgggcg

SEQ ID NO: 1417223 - DNA, 15 bp, Homo sapiens
aagcggggctcgggc

SEQ ID NO: 1417224 - DNA, 15 bp, Homo sapiens
gaagcggggctcggg

SEQ ID NO: 1417225 - DNA, 15 bp, Homo sapiens
ggaagcggggctcgg

SEQ ID NO: 1417226 - DNA, 15 bp, Homo sapiens
gggaagcggggctcg

SEQ ID NO: 1417227 - DNA, 15 bp, Homo sapiens
ggggaagcggggctc

SEQ ID NO: 1417228 - DNA, 15 bp, Homo sapiens
gggggaagcggggct

SEQ ID NO: 1417229 - DNA, 15 bp, Homo sapiens
cgggggaagcggggc

SEQ ID NO: 1417230 - DNA, 15 bp, Homo sapiens
gcgggggaagcgggg

SEQ ID NO: 1417231 - DNA, 15 bp, Homo sapiens
cgcgggggaagcggg

SEQ ID NO: 1417232 - DNA, 15 bp, Homo sapiens
gcgcgggggaagcgg

SEQ ID NO: 1417233 - DNA, 15 bp, Homo sapiens
ggcgcgggggaagcg

SEQ ID NO: 1417234 - DNA, 15 bp, Homo sapiens
tggcgcgggggaagc

SEQ ID NO: 1417235 - DNA, 15 bp, Homo sapiens
atggcgcgggggaag

SEQ ID NO: 1417236 - DNA, 15 bp, Homo sapiens
aatggcgcgggggaa

SEQ ID NO: 1417237 - DNA, 15 bp, Homo sapiens
gaatggcgcggggga

SEQ ID NO: 1417238 - DNA, 15 bp, Homo sapiens
ggaatggcgcggggg

SEQ ID NO: 1417239 - DNA, 15 bp, Homo sapiens
tggaatggcgcgggg

SEQ ID NO: 1417240 - DNA, 15 bp, Homo sapiens
gtggaatggcgcggg

SEQ ID NO: 1417241 - DNA, 15 bp, Homo sapiens
ggtggaatggcgcgg

SEQ ID NO: 1417242 - DNA, 15 bp, Homo sapiens
gggtggaatggcgcg

SEQ ID NO: 1417243 - DNA, 15 bp, Homo sapiens
ggggtggaatggcgc

SEQ ID NO: 1417244 - DNA, 15 bp, Homo sapiens
gggggtggaatggcg

SEQ ID NO: 1417245 - DNA, 15 bp, Homo sapiens
cgggggtggaatggc

SEQ ID NO: 1417246 - DNA, 15 bp, Homo sapiens
ccgggggtggaatgg

SEQ ID NO: 1417247 - DNA, 15 bp, Homo sapiens
gccgggggtggaatg

SEQ ID NO: 1417248 - DNA, 15 bp, Homo sapiens
ggccgggggtggaat

SEQ ID NO: 1417249 - DNA, 15 bp, Homo sapiens
tggccgggggtggaa

SEQ ID NO: 1417250 - DNA, 15 bp, Homo sapiens
ctggccgggggtgga

SEQ ID NO: 1417251 - DNA, 15 bp, Homo sapiens
cctggccgggggtgg

SEQ ID NO: 1417252 - DNA, 15 bp, Homo sapiens
gcctggccgggggtg

SEQ ID NO: 1417253 - DNA, 15 bp, Homo sapiens
agcctggccgggggt

SEQ ID NO: 1417254 - DNA, 15 bp, Homo sapiens
gagcctggccggggg

SEQ ID NO: 1417255 - DNA, 15 bp, Homo sapiens
tgagcctggccgggg

SEQ ID NO: 1417256 - DNA, 15 bp, Homo sapiens
ctgagcctggccggg

SEQ ID NO: 1417257 - DNA, 15 bp, Homo sapiens
gctgagcctggccgg

SEQ ID NO: 1417258 - DNA, 15 bp, Homo sapiens
ggctgagcctggccg

SEQ ID NO: 1417259 - DNA, 15 bp, Homo sapiens
gggctgagcctggcc

SEQ ID NO: 1417260 - DNA, 15 bp, Homo sapiens
cgggctgagcctggc

SEQ ID NO: 1417261 - DNA, 15 bp, Homo sapiens
gcgggctgagcctgg

SEQ ID NO: 1417262 - DNA, 15 bp, Homo sapiens
cgcgggctgagcctg

SEQ ID NO: 1417263 - DNA, 15 bp, Homo sapiens
ccgcgggctgagcct

SEQ ID NO: 1417264 - DNA, 15 bp, Homo sapiens
gccgcgggctgagcc

SEQ ID NO: 1417265 - DNA, 15 bp, Homo sapiens
tggccgcgggctgag

SEQ ID NO: 1417266 - DNA, 15 bp, Homo sapiens
gtggccgcgggctga

SEQ ID NO: 1417267 - DNA, 15 bp, Homo sapiens
ggtggccgcgggctg

SEQ ID NO: 1417268 - DNA, 15 bp, Homo sapiens
aggtggccgcgggct

SEQ ID NO: 1417269 - DNA, 15 bp, Homo sapiens
taggtggccgcgggc

SEQ ID NO: 1417270 - DNA, 15 bp, Homo sapiens
gtaggtggccgcggg

SEQ ID NO: 1417271 - DNA, 15 bp, Homo sapiens
cgtaggtggccgcgg

SEQ ID NO: 1417272 - DNA, 15 bp, Homo sapiens
gcgtaggtggccgcg

SEQ ID NO: 1417273 - DNA, 15 bp, Homo sapiens
ggcgtaggtggccgc

SEQ ID NO: 1417274 - DNA, 15 bp, Homo sapiens
gggcgtaggtggccg

SEQ ID NO: 1417275 - DNA, 15 bp, Homo sapiens
ggggcgtaggtggcc

SEQ ID NO: 1417276 - DNA, 15 bp, Homo sapiens
cggggcgtaggtggc

SEQ ID NO: 1417277 - DNA, 15 bp, Homo sapiens
gcggggcgtaggtgg

SEQ ID NO: 1417278 - DNA, 15 bp, Homo sapiens
ggcggggcgtaggtg

SEQ ID NO: 1417279 - DNA, 15 bp, Homo sapiens
gggcggggcgtaggt

SEQ ID NO: 1417280 - DNA, 15 bp, Homo sapiens
ggggcggggcgtagg

SEQ ID NO: 1417281 - DNA, 15 bp, Homo sapiens
aggggcggggcgtag

SEQ ID NO: 1417282 - DNA, 15 bp, Homo sapiens
caggggcggggcgta

SEQ ID NO: 1417283 - DNA, 15 bp, Homo sapiens
gcaggggcggggcgt

SEQ ID NO: 1417284 - DNA, 15 bp, Homo sapiens
ggcaggggcggggcg

SEQ ID NO: 1417285 - DNA, 15 bp, Homo sapiens
cggcaggggcggggc

SEQ ID NO: 1417286 - DNA, 15 bp, Homo sapiens
ccggcaggggcgggg

SEQ ID NO: 1417287 - DNA, 15 bp, Homo sapiens
gccggcaggggcggg

SEQ ID NO: 1417288 - DNA, 15 bp, Homo sapiens
agccggcaggggcgg

SEQ ID NO: 1417289 - DNA, 15 bp, Homo sapiens
cagccggcaggggcg

SEQ ID NO: 1417290 - DNA, 15 bp, Homo sapiens
gcagccggcaggggc

SEQ ID NO: 1417291 - DNA, 15 bp, Homo sapiens
cgcagccggcagggg

SEQ ID NO: 1417292 - DNA, 15 bp, Homo sapiens
gcgcagccggcaggg

SEQ ID NO: 1417293 - DNA, 15 bp, Homo sapiens
ggcgcagccggcagg

SEQ ID NO: 1417294 - DNA, 15 bp, Homo sapiens
gggcgcagccggcag

SEQ ID NO: 1417295 - DNA, 15 bp, Homo sapiens
cgggcgcagccggca

SEQ ID NO: 1417296 - DNA, 15 bp, Homo sapiens
tcgggcgcagccggc

SEQ ID NO: 1417297 - DNA, 15 bp, Homo sapiens
ctcgggcgcagccgg

SEQ ID NO: 1417298 - DNA, 15 bp, Homo sapiens
gctcgggcgcagccg

SEQ ID NO: 1417299 - DNA, 15 bp, Homo sapiens
ggctcgggcgcagcc

SEQ ID NO: 1417300 - DNA, 15 bp, Homo sapiens
gggctcgggcgcagc

SEQ ID NO: 1417301 - DNA, 15 bp, Homo sapiens
tgggctcgggcgcag

SEQ ID NO: 1417302 - DNA, 15 bp, Homo sapiens
ctgggctcgggcgca

SEQ ID NO: 1417303 - DNA, 15 bp, Homo sapiens
actgggctcgggcgc

SEQ ID NO: 1417304 - DNA, 15 bp, Homo sapiens
gactgggctcgggcg

SEQ ID NO: 1417305 - DNA, 15 bp, Homo sapiens
ggactgggctcgggc

SEQ ID NO: 1417306 - DNA, 15 bp, Homo sapiens
gggactgggctcggg

SEQ ID NO: 1417307 - DNA, 15 bp, Homo sapiens
cgggactgggctcgg

SEQ ID NO: 1417308 - DNA, 15 bp, Homo sapiens
gcgggactgggctcg

SEQ ID NO: 1417309 - DNA, 15 bp, Homo sapiens
cgcgggactgggctc

SEQ ID NO: 1417310 - DNA, 15 bp, Homo sapiens
tcgcgggactgggct

SEQ ID NO: 1417311 - DNA, 15 bp, Homo sapiens
ctcgcgggactgggc

SEQ ID NO: 1417312 - DNA, 15 bp, Homo sapiens
gctcgcgggactggg

SEQ ID NO: 1417313 - DNA, 15 bp, Homo sapiens
ggctcgcgggactgg

SEQ ID NO: 1417314 - DNA, 15 bp, Homo sapiens
cggctcgcgggactg

SEQ ID NO: 1417315 - DNA, 15 bp, Homo sapiens
gcggctcgcgggact

SEQ ID NO: 1417316 - DNA, 15 bp, Homo sapiens
agcggctcgcgggac

SEQ ID NO: 1417317 - DNA, 15 bp, Homo sapiens
gagcggctcgcggga

SEQ ID NO: 1417318 - DNA, 15 bp, Homo sapiens
ggagcggctcgcggg

SEQ ID NO: 1417319 - DNA, 15 bp, Homo sapiens
gggagcggctcgcgg

SEQ ID NO: 1417320 - DNA, 15 bp, Homo sapiens
ggggagcggctcgcg

SEQ ID NO: 1417321 - DNA, 15 bp, Homo sapiens
cggggagcggctcgc

SEQ ID NO: 1417322 - DNA, 15 bp, Homo sapiens
ccggggagcggctcg

SEQ ID NO: 1417323 - DNA, 15 bp, Homo sapiens
gccggggagcggctc

SEQ ID NO: 1417324 - DNA, 15 bp, Homo sapiens
cgccggggagcggct

SEQ ID NO: 1417325 - DNA, 15 bp, Homo sapiens
ccgccggggagcggc

SEQ ID NO: 1417326 - DNA, 15 bp, Homo sapiens
cccgccggggagcgg

SEQ ID NO: 1417327 - DNA, 15 bp, Homo sapiens
gcccgccggggagcg

SEQ ID NO: 1417328 - DNA, 15 bp, Homo sapiens
agcccgccggggagc

SEQ ID NO: 1417329 - DNA, 15 bp, Homo sapiens
cagcccgccggggag

SEQ ID NO: 1417330 - DNA, 15 bp, Homo sapiens
ccagcccgccgggga

SEQ ID NO: 1417331 - DNA, 15 bp, Homo sapiens
gccagcccgccgggg

SEQ ID NO: 1417332 - DNA, 15 bp, Homo sapiens
agccagcccgccggg

SEQ ID NO: 1417333 - DNA, 15 bp, Homo sapiens
gagccagcccgccgg

SEQ ID NO: 1417334 - DNA, 15 bp, Homo sapiens
agagccagcccgccg

SEQ ID NO: 1417335 - DNA, 15 bp, Homo sapiens
aagagccagcccgcc

SEQ ID NO: 1417336 - DNA, 15 bp, Homo sapiens
caagagccagcccgc

SEQ ID NO: 1417337 - DNA, 15 bp, Homo sapiens
ccaagagccagcccg

SEQ ID NO: 1417338 - DNA, 15 bp, Homo sapiens
gccaagagccagccc

SEQ ID NO: 1417339 - DNA, 15 bp, Homo sapiens
ggccaagagccagcc

SEQ ID NO: 1417340 - DNA, 15 bp, Homo sapiens
gggccaagagccagc

SEQ ID NO: 1417341 - DNA, 15 bp, Homo sapiens
ggggccaagagccag

SEQ ID NO: 1417342 - DNA, 15 bp, Homo sapiens
cggggccaagagcca

SEQ ID NO: 1417343 - DNA, 15 bp, Homo sapiens
ccggggccaagagcc

SEQ ID NO: 1417344 - DNA, 15 bp, Homo sapiens
tccggggccaagagc

SEQ ID NO: 1417345 - DNA, 15 bp, Homo sapiens
ttccggggccaagag

SEQ ID NO: 1417346 - DNA, 15 bp, Homo sapiens
cttccggggccaaga

SEQ ID NO: 1417347 - DNA, 15 bp, Homo sapiens
gcttccggggccaag

SEQ ID NO: 1417348 - DNA, 15 bp, Homo sapiens
cgcttccggggccaa

SEQ ID NO: 1417349 - DNA, 15 bp, Homo sapiens
gcgcttccggggcca

SEQ ID NO: 1417350 - DNA, 15 bp, Homo sapiens
cgcgcttccggggcc

SEQ ID NO: 1417351 - DNA, 15 bp, Homo sapiens
tcgcgcttccggggc

SEQ ID NO: 1417352 - DNA, 15 bp, Homo sapiens
ctcgcgcttccgggg

SEQ ID NO: 1417353 - DNA, 15 bp, Homo sapiens
gctcgcgcttccggg

SEQ ID NO: 1417354 - DNA, 15 bp, Homo sapiens
cgctcgcgcttccgg

SEQ ID NO: 1417355 - DNA, 15 bp, Homo sapiens
acgctcgcgcttccg

SEQ ID NO: 1417356 - DNA, 15 bp, Homo sapiens
aacgctcgcgcttcc

SEQ ID NO: 1417357 - DNA, 15 bp, Homo sapiens
gaacgctcgcgcttc

SEQ ID NO: 1417358 - DNA, 15 bp, Homo sapiens
tgaacgctcgcgctt

SEQ ID NO: 1417359 - DNA, 15 bp, Homo sapiens
gtgaacgctcgcgct

SEQ ID NO: 1417360 - DNA, 15 bp, Homo sapiens
agtgaacgctcgcgc

SEQ ID NO: 1417361 - DNA, 15 bp, Homo sapiens
aagtgaacgctcgcg

SEQ ID NO: 1417362 - DNA, 15 bp, Homo sapiens
gaagtgaacgctcgc

SEQ ID NO: 1417363 - DNA, 15 bp, Homo sapiens
cgaagtgaacgctcg

SEQ ID NO: 1417364 - DNA, 15 bp, Homo sapiens
gcgaagtgaacgctc

SEQ ID NO: 1417365 - DNA, 15 bp, Homo sapiens
cgcgaagtgaacgct

SEQ ID NO: 1417366 - DNA, 15 bp, Homo sapiens
ccgcgaagtgaacgc

SEQ ID NO: 1417367 - DNA, 15 bp, Homo sapiens
gccgcgaagtgaacg

SEQ ID NO: 1417368 - DNA, 15 bp, Homo sapiens
cgccgcgaagtgaac

SEQ ID NO: 1417369 - DNA, 15 bp, Homo sapiens
tcgccgcgaagtgaa

SEQ ID NO: 1417370 - DNA, 15 bp, Homo sapiens
ctcgccgcgaagtga

SEQ ID NO: 1417371 - DNA, 15 bp, Homo sapiens
actcgccgcgaagtg

SEQ ID NO: 1417372 - DNA, 15 bp, Homo sapiens
cactcgccgcgaagt

SEQ ID NO: 1417373 - DNA, 15 bp, Homo sapiens
ccactcgccgcgaag

SEQ ID NO: 1417374 - DNA, 15 bp, Homo sapiens
gccactcgccgcgaa

SEQ ID NO: 1417375 - DNA, 15 bp, Homo sapiens
agccactcgccgcga

SEQ ID NO: 1417376 - DNA, 15 bp, Homo sapiens
gagccactcgccgcg

SEQ ID NO: 1417377 - DNA, 15 bp, Homo sapiens
ggagccactcgccgc

SEQ ID NO: 1417378 - DNA, 15 bp, Homo sapiens
cggagccactcgccg

SEQ ID NO: 1417379 - DNA, 15 bp, Homo sapiens
acggagccactcgcc

SEQ ID NO: 1417380 - DNA, 15 bp, Homo sapiens
gacggagccactcgc

SEQ ID NO: 1417381 - DNA, 15 bp, Homo sapiens
agacggagccactcg

SEQ ID NO: 1417382 - DNA, 15 bp, Homo sapiens
gagacggagccactc

SEQ ID NO: 1417383 - DNA, 15 bp, Homo sapiens
ggagacggagccact

SEQ ID NO: 1417384 - DNA, 15 bp, Homo sapiens
cggagacggagccac

SEQ ID NO: 1417385 - DNA, 15 bp, Homo sapiens
gcggagacggagcca

SEQ ID NO: 1417386 - DNA, 15 bp, Homo sapiens
cgcggagacggagcc

SEQ ID NO: 1417387 - DNA, 15 bp, Homo sapiens
ccgcggagacggagc

SEQ ID NO: 1417388 - DNA, 15 bp, Homo sapiens
tccgcggagacggag

SEQ ID NO: 1417389 - DNA, 15 bp, Homo sapiens
gtccgcggagacgga

SEQ ID NO: 1417390 - DNA, 15 bp, Homo sapiens
tgtccgcggagacgg

SEQ ID NO: 1417391 - DNA, 15 bp, Homo sapiens
ctgtccgcggagacg

SEQ ID NO: 1417392 - DNA, 15 bp, Homo sapiens
tctgtccgcggagac

SEQ ID NO: 1417393 - DNA, 15 bp, Homo sapiens
ctctgtccgcggaga

SEQ ID NO: 1417394 - DNA, 15 bp, Homo sapiens
gctctgtccgcggag

SEQ ID NO: 1417395 - DNA, 15 bp, Homo sapiens
cgctctgtccgcgga

SEQ ID NO: 1417396 - DNA, 15 bp, Homo sapiens
gcgctctgtccgcgg

SEQ ID NO: 1417397 - DNA, 15 bp, Homo sapiens
cgcgctctgtccgcg

SEQ ID NO: 1417398 - DNA, 15 bp, Homo sapiens
gcgcgctctgtccgc

SEQ ID NO: 1417399 - DNA, 15 bp, Homo sapiens
cgcgcgctctgtccg

SEQ ID NO: 1417400 - DNA, 15 bp, Homo sapiens
gcgcgcgctctgtcc

SEQ ID NO: 1417401 - DNA, 15 bp, Homo sapiens
ggcgcgcgctctgtc

SEQ ID NO: 1417402 - DNA, 15 bp, Homo sapiens
gggcgcgcgctctgt

SEQ ID NO: 1417403 - DNA, 15 bp, Homo sapiens
ggggcgcgcgctctg

SEQ ID NO: 1417404 - DNA, 15 bp, Homo sapiens
gggggcgcgcgctct

SEQ ID NO: 1417405 - DNA, 15 bp, Homo sapiens
agggggcgcgcgctc

SEQ ID NO: 1417406 - DNA, 15 bp, Homo sapiens
cagggggcgcgcgct

SEQ ID NO: 1417407 - DNA, 15 bp, Homo sapiens
ccagggggcgcgcgc

SEQ ID NO: 1417408 - DNA, 15 bp, Homo sapiens
gccagggggcgcgcg

SEQ ID NO: 1417409 - DNA, 15 bp, Homo sapiens
ggccagggggcgcgc

SEQ ID NO: 1417410 - DNA, 15 bp, Homo sapiens
gggccagggggcgcg

SEQ ID NO: 1417411 - DNA, 15 bp, Homo sapiens
cgggccagggggcgc

SEQ ID NO: 1417412 - DNA, 15 bp, Homo sapiens
ccgggccagggggcg

SEQ ID NO: 1417413 - DNA, 15 bp, Homo sapiens
gccgggccagggggc

SEQ ID NO: 1417414 - DNA, 15 bp, Homo sapiens
ggccgggccaggggg

SEQ ID NO: 1417415 - DNA, 15 bp, Homo sapiens
gggccgggccagggg

SEQ ID NO: 1417416 - DNA, 15 bp, Homo sapiens
cgggccgggccaggg

SEQ ID NO: 1417417 - DNA, 15 bp, Homo sapiens
gcgggccgggccagg

SEQ ID NO: 1417418 - DNA, 15 bp, Homo sapiens
cgcgggccgggccag

SEQ ID NO: 1417419 - DNA, 15 bp, Homo sapiens
ccgcgggccgggcca

SEQ ID NO: 1417420 - DNA, 15 bp, Homo sapiens
cccgcgggccgggcc

SEQ ID NO: 1417421 - DNA, 15 bp, Homo sapiens
ccccgcgggccgggc

SEQ ID NO: 1417422 - DNA, 15 bp, Homo sapiens
cccccgcgggccggg

SEQ ID NO: 1417423 - DNA, 15 bp, Homo sapiens
ccccccgcgggccgg

SEQ ID NO: 1417424 - DNA, 15 bp, Homo sapiens
cccccccgcgggccg

SEQ ID NO: 1417425 - DNA, 15 bp, Homo sapiens
ccccccccgcgggcc

SEQ ID NO: 1417426 - DNA, 15 bp, Homo sapiens
cccccccccgcgggc

SEQ ID NO: 1417427 - DNA, 15 bp, Homo sapiens
gcccccccccgcggg

SEQ ID NO: 1417428 - DNA, 15 bp, Homo sapiens
agcccccccccgcgg

SEQ ID NO: 1417429 - DNA, 15 bp, Homo sapiens
gagcccccccccgcg

SEQ ID NO: 1417430 - DNA, 15 bp, Homo sapiens
ggagcccccccccgc

SEQ ID NO: 1417431 - DNA, 15 bp, Homo sapiens
cggagcccccccccg

SEQ ID NO: 1417432 - DNA, 15 bp, Homo sapiens
ccggagccccccccc

SEQ ID NO: 1417433 - DNA, 15 bp, Homo sapiens
gccggagcccccccc

SEQ ID NO: 1417434 - DNA, 15 bp, Homo sapiens
tgccggagccccccc

SEQ ID NO: 1417435 - DNA, 15 bp, Homo sapiens
gtgccggagcccccc

SEQ ID NO: 1417436 - DNA, 15 bp, Homo sapiens
cgtgccggagccccc

SEQ ID NO: 1417437 - DNA, 15 bp, Homo sapiens
ccgtgccggagcccc

SEQ ID NO: 1417438 - DNA, 15 bp, Homo sapiens
accgtgccggagccc

SEQ ID NO: 1417439 - DNA, 15 bp, Homo sapiens
gaccgtgccggagcc

SEQ ID NO: 1417440 - DNA, 15 bp, Homo sapiens
ggaccgtgccggagc

SEQ ID NO: 1417441 - DNA, 15 bp, Homo sapiens
gggaccgtgccggag

SEQ ID NO: 1417442 - DNA, 15 bp, Homo sapiens
ggggaccgtgccgga

SEQ ID NO: 1417443 - DNA, 15 bp, Homo sapiens
cggggaccgtgccgg

SEQ ID NO: 1417444 - DNA, 15 bp, Homo sapiens
tcggggaccgtgccg

SEQ ID NO: 1417445 - DNA, 15 bp, Homo sapiens
ctcggggaccgtgcc

SEQ ID NO: 1417446 - DNA, 15 bp, Homo sapiens
gctcggggaccgtgc

SEQ ID NO: 1417447 - DNA, 15 bp, Homo sapiens
cgctcggggaccgtg

SEQ ID NO: 1417448 - DNA, 15 bp, Homo sapiens
acgctcggggaccgt

SEQ ID NO: 1417449 - DNA, 15 bp, Homo sapiens
aacgctcggggaccg

SEQ ID NO: 1417450 - DNA, 15 bp, Homo sapiens
aaacgctcggggacc

SEQ ID NO: 1417451 - DNA, 15 bp, Homo sapiens
gaaacgctcggggac

SEQ ID NO: 1417452 - DNA, 15 bp, Homo sapiens
ggaaacgctcgggga

SEQ ID NO: 1417453 - DNA, 15 bp, Homo sapiens
gggaaacgctcgggg

SEQ ID NO: 1417454 - DNA, 15 bp, Homo sapiens
cgggaaacgctcggg

SEQ ID NO: 1417455 - DNA, 15 bp, Homo sapiens
gcgggaaacgctcgg

SEQ ID NO: 1417456 - DNA, 15 bp, Homo sapiens
ggcgggaaacgctcg

SEQ ID NO: 1417457 - DNA, 15 bp, Homo sapiens
cggcgggaaacgctc

SEQ ID NO: 1417458 - DNA, 15 bp, Homo sapiens
ccggcgggaaacgct

SEQ ID NO: 1417459 - DNA, 15 bp, Homo sapiens
cccggcgggaaacgc

SEQ ID NO: 1417460 - DNA, 15 bp, Homo sapiens
acccggcgggaaacg

SEQ ID NO: 1417461 - DNA, 15 bp, Homo sapiens
cacccggcgggaaac

SEQ ID NO: 1417462 - DNA, 15 bp, Homo sapiens
ccacccggcgggaaa

SEQ ID NO: 1417463 - DNA, 15 bp, Homo sapiens
tccacccggcgggaa

SEQ ID NO: 1417464 - DNA, 15 bp, Homo sapiens
ctccacccggcggga

SEQ ID NO: 1417465 - DNA, 15 bp, Homo sapiens
gctccacccggcggg

SEQ ID NO: 1417466 - DNA, 15 bp, Homo sapiens
cgctccacccggcgg

SEQ ID NO: 1417467 - DNA, 15 bp, Homo sapiens
ccgctccacccggcg

SEQ ID NO: 1417468 - DNA, 15 bp, Homo sapiens
cccgctccacccggc

SEQ ID NO: 1417469 - DNA, 15 bp, Homo sapiens
gcccgctccacccgg

SEQ ID NO: 1417470 - DNA, 15 bp, Homo sapiens
ggcccgctccacccg

SEQ ID NO: 1417471 - DNA, 15 bp, Homo sapiens
cggcccgctccaccc

SEQ ID NO: 1417472 - DNA, 15 bp, Homo sapiens
tcggcccgctccacc

SEQ ID NO: 1417473 - DNA, 15 bp, Homo sapiens
ctcggcccgctccac

SEQ ID NO: 1417474 - DNA, 15 bp, Homo sapiens
gctcggcccgctcca

SEQ ID NO: 1417475 - DNA, 15 bp, Homo sapiens
ggctcggcccgctcc

SEQ ID NO: 1417476 - DNA, 15 bp, Homo sapiens
gggctcggcccgctc

SEQ ID NO: 1417477 - DNA, 15 bp, Homo sapiens
tgggctcggcccgct

SEQ ID NO: 1417478 - DNA, 15 bp, Homo sapiens
ctgggctcggcccgc

SEQ ID NO: 1417479 - DNA, 15 bp, Homo sapiens
gctgggctcggcccg

SEQ ID NO: 1417480 - DNA, 15 bp, Homo sapiens
tgctgggctcggccc

SEQ ID NO: 1417481 - DNA, 15 bp, Homo sapiens
ctgctgggctcggcc

SEQ ID NO: 1417482 - DNA, 15 bp, Homo sapiens
cctgctgggctcggc

SEQ ID NO: 1417483 - DNA, 15 bp, Homo sapiens
acctgctgggctcgg

SEQ ID NO: 1417484 - DNA, 15 bp, Homo sapiens
aacctgctgggctcg

SEQ ID NO: 1417485 - DNA, 15 bp, Homo sapiens
caacctgctgggctc

SEQ ID NO: 1417486 - DNA, 15 bp, Homo sapiens
tcaacctgctgggct

SEQ ID NO: 1417487 - DNA, 15 bp, Homo sapiens
gtcaacctgctgggc

SEQ ID NO: 1417488 - DNA, 15 bp, Homo sapiens
ggtcaacctgctggg

SEQ ID NO: 1417489 - DNA, 15 bp, Homo sapiens
tggtcaacctgctgg

SEQ ID NO: 1417490 - DNA, 15 bp, Homo sapiens
ctggtcaacctgctg

SEQ ID NO: 1417491 - DNA, 15 bp, Homo sapiens
gctggtcaacctgct

SEQ ID NO: 1417492 - DNA, 15 bp, Homo sapiens
ggctggtcaacctgc

SEQ ID NO: 1417493 - DNA, 15 bp, Homo sapiens
gggctggtcaacctg

SEQ ID NO: 1417494 - DNA, 15 bp, Homo sapiens
ggggctggtcaacct

SEQ ID NO: 1417495 - DNA, 15 bp, Homo sapiens
cggggctggtcaacc

SEQ ID NO: 1417496 - DNA, 15 bp, Homo sapiens
gcggggctggtcaac

SEQ ID NO: 1417497 - DNA, 15 bp, Homo sapiens
cgcggggctggtcaa

SEQ ID NO: 1417498 - DNA, 15 bp, Homo sapiens
ccgcggggctggtca

SEQ ID NO: 1417499 - DNA, 15 bp, Homo sapiens
gccgcggggctggtc

SEQ ID NO: 1417500 - DNA, 15 bp, Homo sapiens
ggccgcggggctggt

SEQ ID NO: 1417501 - DNA, 15 bp, Homo sapiens
tggccgcggggctgg

SEQ ID NO: 1417502 - DNA, 15 bp, Homo sapiens
gtggccgcggggctg

SEQ ID NO: 1417503 - DNA, 15 bp, Homo sapiens
cgtggccgcggggct

SEQ ID NO: 1417504 - DNA, 15 bp, Homo sapiens
gcgtggccgcggggc

SEQ ID NO: 1417505 - DNA, 15 bp, Homo sapiens
tgcgtggccgcgggg

SEQ ID NO: 1417506 - DNA, 15 bp, Homo sapiens
ctgcgtggccgcggg

SEQ ID NO: 1417507 - DNA, 15 bp, Homo sapiens
tctgcgtggccgcgg

SEQ ID NO: 1417508 - DNA, 15 bp, Homo sapiens
ctctgcgtggccgcg

SEQ ID NO: 1417509 - DNA, 15 bp, Homo sapiens
gctctgcgtggccgc

SEQ ID NO: 1417510 - DNA, 15 bp, Homo sapiens
ggctctgcgtggccg

SEQ ID NO: 1417511 - DNA, 15 bp, Homo sapiens
cggctctgcgtggcc

SEQ ID NO: 1417512 - DNA, 15 bp, Homo sapiens
ccggctctgcgtggc

SEQ ID NO: 1417513 - DNA, 15 bp, Homo sapiens
cccggctctgcgtgg

SEQ ID NO: 1417514 - DNA, 15 bp, Homo sapiens
tcccggctctgcgtg

SEQ ID NO: 1417515 - DNA, 15 bp, Homo sapiens
ctcccggctctgcgt

SEQ ID NO: 1417516 - DNA, 15 bp, Homo sapiens
tctcccggctctgcg

SEQ ID NO: 1417517 - DNA, 15 bp, Homo sapiens
atctcccggctctgc

SEQ ID NO: 1417518 - DNA, 15 bp, Homo sapiens
gatctcccggctctg

SEQ ID NO: 1417519 - DNA, 15 bp, Homo sapiens
agatctcccggctct

SEQ ID NO: 1417520 - DNA, 15 bp, Homo sapiens
tagatctcccggctc

SEQ ID NO: 1417521 - DNA, 15 bp, Homo sapiens
gtagatctcccggct

SEQ ID NO: 1417522 - DNA, 15 bp, Homo sapiens
agtagatctcccggc

SEQ ID NO: 1417523 - DNA, 15 bp, Homo sapiens
cagtagatctcccgg

SEQ ID NO: 1417524 - DNA, 15 bp, Homo sapiens
acagtagatctcccg

SEQ ID NO: 1417525 - DNA, 15 bp, Homo sapiens
aacagtagatctccc

SEQ ID NO: 1417526 - DNA, 15 bp, Homo sapiens
aaacagtagatctcc

SEQ ID NO: 1417527 - DNA, 15 bp, Homo sapiens
caaacagtagatctc

SEQ ID NO: 1417528 - DNA, 15 bp, Homo sapiens
tcaaacagtagatct

SEQ ID NO: 1417529 - DNA, 15 bp, Homo sapiens
ctcaaacagtagatc

SEQ ID NO: 1417530 - DNA, 15 bp, Homo sapiens
gctcaaacagtagat

SEQ ID NO: 1417531 - DNA, 15 bp, Homo sapiens
cgctcaaacagtaga

SEQ ID NO: 1417532 - DNA, 15 bp, Homo sapiens
gcgctcaaacagtag

SEQ ID NO: 1417533 - DNA, 15 bp, Homo sapiens
cgcgctcaaacagta

SEQ ID NO: 1417534 - DNA, 15 bp, Homo sapiens
ccgcgctcaaacagt

SEQ ID NO: 1417535 - DNA, 15 bp, Homo sapiens
tccgcgctcaaacag

SEQ ID NO: 1417536 - DNA, 15 bp, Homo sapiens
ttccgcgctcaaaca

SEQ ID NO: 1417537 - DNA, 15 bp, Homo sapiens
cttccgcgctcaaac

SEQ ID NO: 1417538 - DNA, 15 bp, Homo sapiens
gcttccgcgctcaaa

SEQ ID NO: 1417539 - DNA, 15 bp, Homo sapiens
cgcttccgcgctcaa

SEQ ID NO: 1417540 - DNA, 15 bp, Homo sapiens
gcgcttccgcgctca

SEQ ID NO: 1417541 - DNA, 15 bp, Homo sapiens
tgcgcttccgcgctc

SEQ ID NO: 1417542 - DNA, 15 bp, Homo sapiens
ctgcgcttccgcgct

SEQ ID NO: 1417543 - DNA, 15 bp, Homo sapiens
tctgcgcttccgcgc

SEQ ID NO: 1417544 - DNA, 15 bp, Homo sapiens
ctctgcgcttccgcg

SEQ ID NO: 1417545 - DNA, 15 bp, Homo sapiens
cctctgcgcttccgc

SEQ ID NO: 1417546 - DNA, 15 bp, Homo sapiens
gcctctgcgcttccg

SEQ ID NO: 1417547 - DNA, 15 bp, Homo sapiens
agcctctgcgcttcc

SEQ ID NO: 1417548 - DNA, 15 bp, Homo sapiens
cagcctctgcgcttc

SEQ ID NO: 1417549 - DNA, 15 bp, Homo sapiens
ccagcctctgcgctt

SEQ ID NO: 1417550 - DNA, 15 bp, Homo sapiens
gccagcctctgcgct

SEQ ID NO: 1417551 - DNA, 15 bp, Homo sapiens
cgccagcctctgcgc

SEQ ID NO: 1417552 - DNA, 15 bp, Homo sapiens
ccgccagcctctgcg

SEQ ID NO: 1417553 - DNA, 15 bp, Homo sapiens
tccgccagcctctgc

SEQ ID NO: 1417554 - DNA, 15 bp, Homo sapiens
ctccgccagcctctg

SEQ ID NO: 1417555 - DNA, 15 bp, Homo sapiens
cctccgccagcctct

SEQ ID NO: 1417556 - DNA, 15 bp, Homo sapiens
gcctccgccagcctc

SEQ ID NO: 1417557 - DNA, 15 bp, Homo sapiens
ggcctccgccagcct

SEQ ID NO: 1417558 - DNA, 15 bp, Homo sapiens
gggcctccgccagcc

SEQ ID NO: 1417559 - DNA, 15 bp, Homo sapiens
cgggcctccgccagc

SEQ ID NO: 1417560 - DNA, 15 bp, Homo sapiens
ccgggcctccgccag

SEQ ID NO: 1417561 - DNA, 15 bp, Homo sapiens
gccgggcctccgcca

SEQ ID NO: 1417562 - DNA, 15 bp, Homo sapiens
agccgggcctccgcc

SEQ ID NO: 1417563 - DNA, 15 bp, Homo sapiens
gagccgggcctccgc

SEQ ID NO: 1417564 - DNA, 15 bp, Homo sapiens
cgagccgggcctccg

SEQ ID NO: 1417565 - DNA, 15 bp, Homo sapiens
gcgagccgggcctcc

SEQ ID NO: 1417566 - DNA, 15 bp, Homo sapiens
ggcgagccgggcctc

SEQ ID NO: 1417567 - DNA, 15 bp, Homo sapiens
cggcgagccgggcct

SEQ ID NO: 1417568 - DNA, 15 bp, Homo sapiens
gcggcgagccgggcc

SEQ ID NO: 1417569 - DNA, 15 bp, Homo sapiens
tgcggcgagccgggc

SEQ ID NO: 1417570 - DNA, 15 bp, Homo sapiens
ttgcggcgagccggg

SEQ ID NO: 1417571 - DNA, 15 bp, Homo sapiens
tttgcggcgagccgg

SEQ ID NO: 1417572 - DNA, 15 bp, Homo sapiens
ttttgcggcgagccg

SEQ ID NO: 1417573 - DNA, 15 bp, Homo sapiens
gttttgcggcgagcc

SEQ ID NO: 1417574 - DNA, 15 bp, Homo sapiens
cgttttgcggcgagc

SEQ ID NO: 1417575 - DNA, 15 bp, Homo sapiens
ccgttttgcggcgag

SEQ ID NO: 1417576 - DNA, 15 bp, Homo sapiens
cccgttttgcggcga

SEQ ID NO: 1417577 - DNA, 15 bp, Homo sapiens
tcccgttttgcggcg

SEQ ID NO: 1417578 - DNA, 15 bp, Homo sapiens
ctcccgttttgcggc

SEQ ID NO: 1417579 - DNA, 15 bp, Homo sapiens
cctcccgttttgcgg

SEQ ID NO: 1417580 - DNA, 15 bp, Homo sapiens
gcctcccgttttgcg

SEQ ID NO: 1417581 - DNA, 15 bp, Homo sapiens
ggcctcccgttttgc

SEQ ID NO: 1417582 - DNA, 15 bp, Homo sapiens
gggcctcccgttttg

SEQ ID NO: 1417583 - DNA, 15 bp, Homo sapiens
cgggcctcccgtttt

SEQ ID NO: 1417584 - DNA, 15 bp, Homo sapiens
gcgggcctcccgttt

SEQ ID NO: 1417585 - DNA, 15 bp, Homo sapiens
cgcgggcctcccgtt

SEQ ID NO: 1417586 - DNA, 15 bp, Homo sapiens
gcgcgggcctcccgt

SEQ ID NO: 1417587 - DNA, 15 bp, Homo sapiens
cgcgcgggcctcccg

SEQ ID NO: 1417588 - DNA, 15 bp, Homo sapiens
ccgcgcgggcctccc

SEQ ID NO: 1417589 - DNA, 15 bp, Homo sapiens
tccgcgcgggcctcc

SEQ ID NO: 1417590 - DNA, 15 bp, Homo sapiens
ctccgcgcgggcctc

SEQ ID NO: 1417591 - DNA, 15 bp, Homo sapiens
cctccgcgcgggcct

SEQ ID NO: 1417592 - DNA, 15 bp, Homo sapiens
gcctccgcgcgggcc

SEQ ID NO: 1417593 - DNA, 15 bp, Homo sapiens
agcctccgcgcgggc

SEQ ID NO: 1417594 - DNA, 15 bp, Homo sapiens
gagcctccgcgcggg

SEQ ID NO: 1417595 - DNA, 15 bp, Homo sapiens
cgagcctccgcgcgg

SEQ ID NO: 1417596 - DNA, 15 bp, Homo sapiens
acgagcctccgcgcg

SEQ ID NO: 1417597 - DNA, 15 bp, Homo sapiens
cacgagcctccgcgc

SEQ ID NO: 1417598 - DNA, 15 bp, Homo sapiens
tcacgagcctccgcg

SEQ ID NO: 1417599 - DNA, 15 bp, Homo sapiens
ctcacgagcctccgc

SEQ ID NO: 1417600 - DNA, 15 bp, Homo sapiens
tctcacgagcctccg

SEQ ID NO: 1417601 - DNA, 15 bp, Homo sapiens
atctcacgagcctcc

SEQ ID NO: 1417602 - DNA, 15 bp, Homo sapiens
gatctcacgagcctc

SEQ ID NO: 1417603 - DNA, 15 bp, Homo sapiens
ggatctcacgagcct

SEQ ID NO: 1417604 - DNA, 15 bp, Homo sapiens
gggatctcacgagcc

SEQ ID NO: 1417605 - DNA, 15 bp, Homo sapiens
ggggatctcacgagc

SEQ ID NO: 1417606 - DNA, 15 bp, Homo sapiens
tggggatctcacgag

SEQ ID NO: 1417607 - DNA, 15 bp, Homo sapiens
atggggatctcacga

SEQ ID NO: 1417608 - DNA, 15 bp, Homo sapiens
catggggatctcacg

SEQ ID NO: 1417609 - DNA, 15 bp, Homo sapiens
tcatggggatctcac

SEQ ID NO: 1417610 - DNA, 15 bp, Homo sapiens
ttcatggggatctca

SEQ ID NO: 1417611 - DNA, 15 bp, Homo sapiens
cttcatggggatctc

SEQ ID NO: 1417612 - DNA, 15 bp, Homo sapiens
ccttcatggggatct

SEQ ID NO: 1417613 - DNA, 15 bp, Homo sapiens
tccttcatggggatc

SEQ ID NO: 1417614 - DNA, 15 bp, Homo sapiens
ctccttcatggggat

SEQ ID NO: 1417615 - DNA, 15 bp, Homo sapiens
gctccttcatgggga

SEQ ID NO: 1417616 - DNA, 15 bp, Homo sapiens
agctccttcatgggg

SEQ ID NO: 1417617 - DNA, 15 bp, Homo sapiens
cagctccttcatggg

SEQ ID NO: 1417618 - DNA, 15 bp, Homo sapiens
ccagctccttcatgg

SEQ ID NO: 1417619 - DNA, 15 bp, Homo sapiens
tccagctccttcatg

SEQ ID NO: 1417620 - DNA, 15 bp, Homo sapiens
ctccagctccttcat

SEQ ID NO: 1417621 - DNA, 15 bp, Homo sapiens
gctccagctccttca

SEQ ID NO: 1417622 - DNA, 15 bp, Homo sapiens
cgctccagctccttc

SEQ ID NO: 1417623 - DNA, 15 bp, Homo sapiens
ccgctccagctcctt

SEQ ID NO: 1417624 - DNA, 15 bp, Homo sapiens
gccgctccagctcct

SEQ ID NO: 1417625 - DNA, 15 bp, Homo sapiens
tgccgctccagctcc

SEQ ID NO: 1417626 - DNA, 15 bp, Homo sapiens
ctgccgctccagctc

SEQ ID NO: 1417627 - DNA, 15 bp, Homo sapiens
gctgccgctccagct

SEQ ID NO: 1417628 - DNA, 15 bp, Homo sapiens
tgctgccgctccagc

SEQ ID NO: 1417629 - DNA, 15 bp, Homo sapiens
ctgctgccgctccag

SEQ ID NO: 1417630 - DNA, 15 bp, Homo sapiens
tctgctgccgctcca

SEQ ID NO: 1417631 - DNA, 15 bp, Homo sapiens
ttctgctgccgctcc

SEQ ID NO: 1417632 - DNA, 15 bp, Homo sapiens
cttctgctgccgctc

SEQ ID NO: 1417633 - DNA, 15 bp, Homo sapiens
ccttctgctgccgct

SEQ ID NO: 1417634 - DNA, 15 bp, Homo sapiens
tccttctgctgccgc

SEQ ID NO: 1417635 - DNA, 15 bp, Homo sapiens
ctccttctgctgccg

SEQ ID NO: 1417636 - DNA, 15 bp, Homo sapiens
cctccttctgctgcc

SEQ ID NO: 1417637 - DNA, 15 bp, Homo sapiens
acctccttctgctgc

SEQ ID NO: 1417638 - DNA, 15 bp, Homo sapiens
tacctccttctgctg

SEQ ID NO: 1417639 - DNA, 15 bp, Homo sapiens
ctacctccttctgct

SEQ ID NO: 1417640 - DNA, 15 bp, Homo sapiens
tctacctccttctgc

SEQ ID NO: 1417641 - DNA, 15 bp, Homo sapiens
ttctacctccttctg

SEQ ID NO: 1417642 - DNA, 15 bp, Homo sapiens
cttctacctccttct

SEQ ID NO: 1417643 - DNA, 15 bp, Homo sapiens
tcttctacctccttc

SEQ ID NO: 1417644 - DNA, 15 bp, Homo sapiens
ctcttctacctcctt

SEQ ID NO: 1417645 - DNA, 15 bp, Homo sapiens
tctcttctacctcct

SEQ ID NO: 1417646 - DNA, 15 bp, Homo sapiens
ctctcttctacctcc

SEQ ID NO: 1417647 - DNA, 15 bp, Homo sapiens
tctctcttctacctc

SEQ ID NO: 1417648 - DNA, 15 bp, Homo sapiens
gtctctcttctacct

SEQ ID NO: 1417649 - DNA, 15 bp, Homo sapiens
ggtctctcttctacc

SEQ ID NO: 1417650 - DNA, 15 bp, Homo sapiens
tggtctctcttctac

SEQ ID NO: 1417651 - DNA, 15 bp, Homo sapiens
ctggtctctcttcta

SEQ ID NO: 1417652 - DNA, 15 bp, Homo sapiens
tctggtctctcttct

SEQ ID NO: 1417653 - DNA, 15 bp, Homo sapiens
ttctggtctctcttc

SEQ ID NO: 1417654 - DNA, 15 bp, Homo sapiens
tttctggtctctctt

SEQ ID NO: 1417655 - DNA, 15 bp, Homo sapiens
ttttctggtctctct

SEQ ID NO: 1417656 - DNA, 15 bp, Homo sapiens
tttttctggtctctc

SEQ ID NO: 1417657 - DNA, 15 bp, Homo sapiens
atttttctggtctct

SEQ ID NO: 1417658 - DNA, 15 bp, Homo sapiens
tatttttctggtctc

SEQ ID NO: 1417659 - DNA, 15 bp, Homo sapiens
atatttttctggtct

SEQ ID NO: 1417660 - DNA, 15 bp, Homo sapiens
aatatttttctggtc

SEQ ID NO: 1417661 - DNA, 15 bp, Homo sapiens
aaatatttttctggt

SEQ ID NO: 1417662 - DNA, 15 bp, Homo sapiens
aaaatatttttctgg

SEQ ID NO: 1417663 - DNA, 15 bp, Homo sapiens
taaaatatttttctg

SEQ ID NO: 1417664 - DNA, 15 bp, Homo sapiens
gtaaaatatttttct

SEQ ID NO: 1417665 - DNA, 15 bp, Homo sapiens
agtaaaatatttttc

SEQ ID NO: 1417666 - DNA, 15 bp, Homo sapiens
cagtaaaatattttt

SEQ ID NO: 1417667 - DNA, 15 bp, Homo sapiens
tcagtaaaatatttt

SEQ ID NO: 1417668 - DNA, 15 bp, Homo sapiens
ctcagtaaaatattt

SEQ ID NO: 1417669 - DNA, 15 bp, Homo sapiens
tctcagtaaaatatt

SEQ ID NO: 1417670 - DNA, 15 bp, Homo sapiens
ttctcagtaaaatat

SEQ ID NO: 1417671 - DNA, 15 bp, Homo sapiens
cttctcagtaaaata

SEQ ID NO: 1417672 - DNA, 15 bp, Homo sapiens
ccttctcagtaaaat

SEQ ID NO: 1417673 - DNA, 15 bp, Homo sapiens
cccttctcagtaaaa

SEQ ID NO: 1417674 - DNA, 15 bp, Homo sapiens
ccccttctcagtaaa

SEQ ID NO: 1417675 - DNA, 15 bp, Homo sapiens
accccttctcagtaa

SEQ ID NO: 1417676 - DNA, 15 bp, Homo sapiens
gaccccttctcagta

SEQ ID NO: 1417677 - DNA, 15 bp, Homo sapiens
agaccccttctcagt

SEQ ID NO: 1417678 - DNA, 15 bp, Homo sapiens
gagaccccttctcag

SEQ ID NO: 1417679 - DNA, 15 bp, Homo sapiens
cgagaccccttctca

SEQ ID NO: 1417680 - DNA, 15 bp, Homo sapiens
acgagaccccttctc

SEQ ID NO: 1417681 - DNA, 15 bp, Homo sapiens
tacgagaccccttct

SEQ ID NO: 1417682 - DNA, 15 bp, Homo sapiens
ttacgagaccccttc

SEQ ID NO: 1417683 - DNA, 15 bp, Homo sapiens
gttacgagacccctt

SEQ ID NO: 1417684 - DNA, 15 bp, Homo sapiens
tgttacgagacccct

SEQ ID NO: 1417685 - DNA, 15 bp, Homo sapiens
atgttacgagacccc

SEQ ID NO: 1417686 - DNA, 15 bp, Homo sapiens
catgttacgagaccc

SEQ ID NO: 1417687 - DNA, 15 bp, Homo sapiens
gcatgttacgagacc

SEQ ID NO: 1417688 - DNA, 15 bp, Homo sapiens
agcatgttacgagac

SEQ ID NO: 1417689 - DNA, 15 bp, Homo sapiens
cagcatgttacgaga

SEQ ID NO: 1417690 - DNA, 15 bp, Homo sapiens
ccagcatgttacgag

SEQ ID NO: 1417691 - DNA, 15 bp, Homo sapiens
cccagcatgttacga

SEQ ID NO: 1417692 - DNA, 15 bp, Homo sapiens
gcccagcatgttacg

SEQ ID NO: 1417693 - DNA, 15 bp, Homo sapiens
ggcccagcatgttac

SEQ ID NO: 1417694 - DNA, 15 bp, Homo sapiens
gggcccagcatgtta

SEQ ID NO: 1417695 - DNA, 15 bp, Homo sapiens
cgggcccagcatgtt

SEQ ID NO: 1417696 - DNA, 15 bp, Homo sapiens
acgggcccagcatgt

SEQ ID NO: 1417697 - DNA, 15 bp, Homo sapiens
gacgggcccagcatg

SEQ ID NO: 1417698 - DNA, 15 bp, Homo sapiens
agacgggcccagcat

SEQ ID NO: 1417699 - DNA, 15 bp, Homo sapiens
cagacgggcccagca

SEQ ID NO: 1417700 - DNA, 15 bp, Homo sapiens
gcagacgggcccagc

SEQ ID NO: 1417701 - DNA, 15 bp, Homo sapiens
tgcagacgggcccag

SEQ ID NO: 1417702 - DNA, 15 bp, Homo sapiens
ctgcagacgggccca

SEQ ID NO: 1417703 - DNA, 15 bp, Homo sapiens
gctgcagacgggccc

SEQ ID NO: 1417704 - DNA, 15 bp, Homo sapiens
ggctgcagacgggcc

SEQ ID NO: 1417705 - DNA, 15 bp, Homo sapiens
tggctgcagacgggc

SEQ ID NO: 1417706 - DNA, 15 bp, Homo sapiens
gtggctgcagacggg

SEQ ID NO: 1417707 - DNA, 15 bp, Homo sapiens
cgtggctgcagacgg

SEQ ID NO: 1417708 - DNA, 15 bp, Homo sapiens
gcgtggctgcagacg

SEQ ID NO: 1417709 - DNA, 15 bp, Homo sapiens
agcgtggctgcagac

SEQ ID NO: 1417710 - DNA, 15 bp, Homo sapiens
cagcgtggctgcaga

SEQ ID NO: 1417711 - DNA, 15 bp, Homo sapiens
ccagcgtggctgcag

SEQ ID NO: 1417712 - DNA, 15 bp, Homo sapiens
gccagcgtggctgca

SEQ ID NO: 1417713 - DNA, 15 bp, Homo sapiens
ggccagcgtggctgc

SEQ ID NO: 1417714 - DNA, 15 bp, Homo sapiens
aggccagcgtggctg

SEQ ID NO: 1417715 - DNA, 15 bp, Homo sapiens
aaggccagcgtggct

SEQ ID NO: 1417716 - DNA, 15 bp, Homo sapiens
aaaggccagcgtggc

SEQ ID NO: 1417717 - DNA, 15 bp, Homo sapiens
gaaaggccagcgtgg

SEQ ID NO: 1417718 - DNA, 15 bp, Homo sapiens
agaaaggccagcgtg

SEQ ID NO: 1417719 - DNA, 15 bp, Homo sapiens
cagaaaggccagcgt

SEQ ID NO: 1417720 - DNA, 15 bp, Homo sapiens
ccagaaaggccagcg

SEQ ID NO: 1417721 - DNA, 15 bp, Homo sapiens
cccagaaaggccagc

SEQ ID NO: 1417722 - DNA, 15 bp, Homo sapiens
acccagaaaggccag

SEQ ID NO: 1417723 - DNA, 15 bp, Homo sapiens
cacccagaaaggcca

SEQ ID NO: 1417724 - DNA, 15 bp, Homo sapiens
ccacccagaaaggcc

SEQ ID NO: 1417725 - DNA, 15 bp, Homo sapiens
cccacccagaaaggc

SEQ ID NO: 1417726 - DNA, 15 bp, Homo sapiens
tcccacccagaaagg

SEQ ID NO: 1417727 - DNA, 15 bp, Homo sapiens
gtcccacccagaaag

SEQ ID NO: 1417728 - DNA, 15 bp, Homo sapiens
agtcccacccagaaa

SEQ ID NO: 1417729 - DNA, 15 bp, Homo sapiens
aagtcccacccagaa

SEQ ID NO: 1417730 - DNA, 15 bp, Homo sapiens
gaagtcccacccaga

SEQ ID NO: 1417731 - DNA, 15 bp, Homo sapiens
ggaagtcccacccag

SEQ ID NO: 1417732 - DNA, 15 bp, Homo sapiens
aggaagtcccaccca

SEQ ID NO: 1417733 - DNA, 15 bp, Homo sapiens
gaggaagtcccaccc

SEQ ID NO: 1417734 - DNA, 15 bp, Homo sapiens
agaggaagtcccacc

SEQ ID NO: 1417735 - DNA, 15 bp, Homo sapiens
gagaggaagtcccac

SEQ ID NO: 1417736 - DNA, 15 bp, Homo sapiens
tgagaggaagtccca

SEQ ID NO: 1417737 - DNA, 15 bp, Homo sapiens
ctgagaggaagtccc

SEQ ID NO: 1417738 - DNA, 15 bp, Homo sapiens
tctgagaggaagtcc

SEQ ID NO: 1417739 - DNA, 15 bp, Homo sapiens
ctctgagaggaagtc

SEQ ID NO: 1417740 - DNA, 15 bp, Homo sapiens
tctctgagaggaagt

SEQ ID NO: 1417741 - DNA, 15 bp, Homo sapiens
ctctctgagaggaag

SEQ ID NO: 1417742 - DNA, 15 bp, Homo sapiens
cctctctgagaggaa

SEQ ID NO: 1417743 - DNA, 15 bp, Homo sapiens
gcctctctgagagga

SEQ ID NO: 1417744 - DNA, 15 bp, Homo sapiens
tgcctctctgagagg

SEQ ID NO: 1417745 - DNA, 15 bp, Homo sapiens
ctgcctctctgagag

SEQ ID NO: 1417746 - DNA, 15 bp, Homo sapiens
gctgcctctctgaga

SEQ ID NO: 1417747 - DNA, 15 bp, Homo sapiens
cgctgcctctctgag

SEQ ID NO: 1417748 - DNA, 15 bp, Homo sapiens
ccgctgcctctctga

SEQ ID NO: 1417749 - DNA, 15 bp, Homo sapiens
tccgctgcctctctg

SEQ ID NO: 1417750 - DNA, 15 bp, Homo sapiens
ctccgctgcctctct

SEQ ID NO: 1417751 - DNA, 15 bp, Homo sapiens
tctccgctgcctctc

SEQ ID NO: 1417752 - DNA, 15 bp, Homo sapiens
gtctccgctgcctct

SEQ ID NO: 1417753 - DNA, 15 bp, Homo sapiens
tgtctccgctgcctc

SEQ ID NO: 1417754 - DNA, 15 bp, Homo sapiens
gtgtctccgctgcct

SEQ ID NO: 1417755 - DNA, 15 bp, Homo sapiens
ggtgtctccgctgcc

SEQ ID NO: 1417756 - DNA, 15 bp, Homo sapiens
aggtgtctccgctgc

SEQ ID NO: 1417757 - DNA, 15 bp, Homo sapiens
gaggtgtctccgctg

SEQ ID NO: 1417758 - DNA, 15 bp, Homo sapiens
agaggtgtctccgct

SEQ ID NO: 1417759 - DNA, 15 bp, Homo sapiens
tagaggtgtctccgc

SEQ ID NO: 1417760 - DNA, 15 bp, Homo sapiens
atagaggtgtctccg

SEQ ID NO: 1417761 - DNA, 15 bp, Homo sapiens
tatagaggtgtctcc

SEQ ID NO: 1417762 - DNA, 15 bp, Homo sapiens
atatagaggtgtctc

SEQ ID NO: 1417763 - DNA, 15 bp, Homo sapiens
gatatagaggtgtct

SEQ ID NO: 1417764 - DNA, 15 bp, Homo sapiens
ggatatagaggtgtc

SEQ ID NO: 1417765 - DNA, 15 bp, Homo sapiens
tggatatagaggtgt

SEQ ID NO: 1417766 - DNA, 15 bp, Homo sapiens
atggatatagaggtg

SEQ ID NO: 1417767 - DNA, 15 bp, Homo sapiens
gatggatatagaggt

SEQ ID NO: 1417768 - DNA, 15 bp, Homo sapiens
cgatggatatagagg

SEQ ID NO: 1417769 - DNA, 15 bp, Homo sapiens
tcgatggatatagag

SEQ ID NO: 1417770 - DNA, 15 bp, Homo sapiens
gtcgatggatataga

SEQ ID NO: 1417771 - DNA, 15 bp, Homo sapiens
tgtcgatggatatag

SEQ ID NO: 1417772 - DNA, 15 bp, Homo sapiens
gtgtcgatggatata

SEQ ID NO: 1417773 - DNA, 15 bp, Homo sapiens
ggtgtcgatggatat

SEQ ID NO: 1417774 - DNA, 15 bp, Homo sapiens
cggtgtcgatggata

SEQ ID NO: 1417775 - DNA, 15 bp, Homo sapiens
tcggtgtcgatggat

SEQ ID NO: 1417776 - DNA, 15 bp, Homo sapiens
ctcggtgtcgatgga

SEQ ID NO: 1417777 - DNA, 15 bp, Homo sapiens
cctcggtgtcgatgg

SEQ ID NO: 1417778 - DNA, 15 bp, Homo sapiens
gcctcggtgtcgatg

SEQ ID NO: 1417779 - DNA, 15 bp, Homo sapiens
cgcctcggtgtcgat

SEQ ID NO: 1417780 - DNA, 15 bp, Homo sapiens
acgcctcggtgtcga

SEQ ID NO: 1417781 - DNA, 15 bp, Homo sapiens
gacgcctcggtgtcg

SEQ ID NO: 1417782 - DNA, 15 bp, Homo sapiens
ggacgcctcggtgtc

SEQ ID NO: 1417783 - DNA, 15 bp, Homo sapiens
tggacgcctcggtgt

SEQ ID NO: 1417784 - DNA, 15 bp, Homo sapiens
atggacgcctcggtg

SEQ ID NO: 1417785 - DNA, 15 bp, Homo sapiens
gatggacgcctcggt

SEQ ID NO: 1417786 - DNA, 15 bp, Homo sapiens
tgatggacgcctcgg

SEQ ID NO: 1417787 - DNA, 15 bp, Homo sapiens
ctgatggacgcctcg

SEQ ID NO: 1417788 - DNA, 15 bp, Homo sapiens
cctgatggacgcctc

SEQ ID NO: 1417789 - DNA, 15 bp, Homo sapiens
ccctgatggacgcct

SEQ ID NO: 1417790 - DNA, 15 bp, Homo sapiens
tccctgatggacgcc

SEQ ID NO: 1417791 - DNA, 15 bp, Homo sapiens
ttccctgatggacgc

SEQ ID NO: 1417792 - DNA, 15 bp, Homo sapiens
tttccctgatggacg

SEQ ID NO: 1417793 - DNA, 15 bp, Homo sapiens
atttccctgatggac

SEQ ID NO: 1417794 - DNA, 15 bp, Homo sapiens
gatttccctgatgga

SEQ ID NO: 1417795 - DNA, 15 bp, Homo sapiens
tgatttccctgatgg

SEQ ID NO: 1417796 - DNA, 15 bp, Homo sapiens
ttgatttccctgatg

SEQ ID NO: 1417797 - DNA, 15 bp, Homo sapiens
cttgatttccctgat

SEQ ID NO: 1417798 - DNA, 15 bp, Homo sapiens
ccttgatttccctga

SEQ ID NO: 1417799 - DNA, 15 bp, Homo sapiens
tccttgatttccctg

SEQ ID NO: 1417800 - DNA, 15 bp, Homo sapiens
gtccttgatttccct

SEQ ID NO: 1417801 - DNA, 15 bp, Homo sapiens
agtccttgatttccc

SEQ ID NO: 1417802 - DNA, 15 bp, Homo sapiens
gagtccttgatttcc

SEQ ID NO: 1417803 - DNA, 15 bp, Homo sapiens
agagtccttgatttc

SEQ ID NO: 1417804 - DNA, 15 bp, Homo sapiens
gagagtccttgattt

SEQ ID NO: 1417805 - DNA, 15 bp, Homo sapiens
agagagtccttgatt

SEQ ID NO: 1417806 - DNA, 15 bp, Homo sapiens
tagagagtccttgat

SEQ ID NO: 1417807 - DNA, 15 bp, Homo sapiens
ctagagagtccttga

SEQ ID NO: 1417808 - DNA, 15 bp, Homo sapiens
gctagagagtccttg

SEQ ID NO: 1417809 - DNA, 15 bp, Homo sapiens
tgctagagagtcctt

SEQ ID NO: 1417810 - DNA, 15 bp, Homo sapiens
ctgctagagagtcct

SEQ ID NO: 1417811 - DNA, 15 bp, Homo sapiens
tctgctagagagtcc

SEQ ID NO: 1417812 - DNA, 15 bp, Homo sapiens
ttctgctagagagtc

SEQ ID NO: 1417813 - DNA, 15 bp, Homo sapiens
cttctgctagagagt

SEQ ID NO: 1417814 - DNA, 15 bp, Homo sapiens
acttctgctagagag

SEQ ID NO: 1417815 - DNA, 15 bp, Homo sapiens
aacttctgctagaga

SEQ ID NO: 1417816 - DNA, 15 bp, Homo sapiens
caacttctgctagag

SEQ ID NO: 1417817 - DNA, 15 bp, Homo sapiens
tcaacttctgctaga

SEQ ID NO: 1417818 - DNA, 15 bp, Homo sapiens
ttcaacttctgctag

SEQ ID NO: 1417819 - DNA, 15 bp, Homo sapiens
cttcaacttctgcta

SEQ ID NO: 1417820 - DNA, 15 bp, Homo sapiens
tcttcaacttctgct

SEQ ID NO: 1417821 - DNA, 15 bp, Homo sapiens
ctcttcaacttctgc

SEQ ID NO: 1417822 - DNA, 15 bp, Homo sapiens
tctcttcaacttctg

SEQ ID NO: 1417823 - DNA, 15 bp, Homo sapiens
ttctcttcaacttct

SEQ ID NO: 1417824 - DNA, 15 bp, Homo sapiens
tttctcttcaacttc

SEQ ID NO: 1417825 - DNA, 15 bp, Homo sapiens
atttctcttcaactt

SEQ ID NO: 1417826 - DNA, 15 bp, Homo sapiens
catttctcttcaact

SEQ ID NO: 1417827 - DNA, 15 bp, Homo sapiens
acatttctcttcaac

SEQ ID NO: 1417828 - DNA, 15 bp, Homo sapiens
tacatttctcttcaa

SEQ ID NO: 1417829 - DNA, 15 bp, Homo sapiens
ttacatttctcttca

SEQ ID NO: 1417830 - DNA, 15 bp, Homo sapiens
cttacatttctcttc

SEQ ID NO: 1417831 - DNA, 15 bp, Homo sapiens
tcttacatttctctt

SEQ ID NO: 1417832 - DNA, 15 bp, Homo sapiens
ttcttacatttctct

SEQ ID NO: 1417833 - DNA, 15 bp, Homo sapiens
cttcttacatttctc

SEQ ID NO: 1417834 - DNA, 15 bp, Homo sapiens
ccttcttacatttct

SEQ ID NO: 1417835 - DNA, 15 bp, Homo sapiens
gccttcttacatttc

SEQ ID NO: 1417836 - DNA, 15 bp, Homo sapiens
agccttcttacattt

SEQ ID NO: 1417837 - DNA, 15 bp, Homo sapiens
tagccttcttacatt

SEQ ID NO: 1417838 - DNA, 15 bp, Homo sapiens
atagccttcttacat

SEQ ID NO: 1417839 - DNA, 15 bp, Homo sapiens
catagccttcttaca

SEQ ID NO: 1417840 - DNA, 15 bp, Homo sapiens
acatagccttcttac

SEQ ID NO: 1417841 - DNA, 15 bp, Homo sapiens
aacatagccttctta

SEQ ID NO: 1417842 - DNA, 15 bp, Homo sapiens
aaacatagccttctt

SEQ ID NO: 1417843 - DNA, 15 bp, Homo sapiens
aaaacatagccttct

SEQ ID NO: 1417844 - DNA, 15 bp, Homo sapiens
gaaaacatagccttc

SEQ ID NO: 1417845 - DNA, 15 bp, Homo sapiens
ggaaaacatagcctt

SEQ ID NO: 1417846 - DNA, 15 bp, Homo sapiens
tggaaaacatagcct

SEQ ID NO: 1417847 - DNA, 15 bp, Homo sapiens
ttggaaaacatagcc

SEQ ID NO: 1417848 - DNA, 15 bp, Homo sapiens
attggaaaacatagc

SEQ ID NO: 1417849 - DNA, 15 bp, Homo sapiens
cattggaaaacatag

SEQ ID NO: 1417850 - DNA, 15 bp, Homo sapiens
gcattggaaaacata

SEQ ID NO: 1417851 - DNA, 15 bp, Homo sapiens
agcattggaaaacat

SEQ ID NO: 1417852 - DNA, 15 bp, Homo sapiens
gagcattggaaaaca

SEQ ID NO: 1417853 - DNA, 15 bp, Homo sapiens
tgagcattggaaaac

SEQ ID NO: 1417854 - DNA, 15 bp, Homo sapiens
ctgagcattggaaaa

SEQ ID NO: 1417855 - DNA, 15 bp, Homo sapiens
actgagcattggaaa

SEQ ID NO: 1417856 - DNA, 15 bp, Homo sapiens
aactgagcattggaa

SEQ ID NO: 1417857 - DNA, 15 bp, Homo sapiens
taactgagcattgga

SEQ ID NO: 1417858 - DNA, 15 bp, Homo sapiens
ctaactgagcattgg

SEQ ID NO: 1417859 - DNA, 15 bp, Homo sapiens
tctaactgagcattg

SEQ ID NO: 1417860 - DNA, 15 bp, Homo sapiens
gtctaactgagcatt

SEQ ID NO: 1417861 - DNA, 15 bp, Homo sapiens
tgtctaactgagcat

SEQ ID NO: 1417862 - DNA, 15 bp, Homo sapiens
ttgtctaactgagca

SEQ ID NO: 1417863 - DNA, 15 bp, Homo sapiens
attgtctaactgagc

SEQ ID NO: 1417864 - DNA, 15 bp, Homo sapiens
cattgtctaactgag

SEQ ID NO: 1417865 - DNA, 15 bp, Homo sapiens
tcattgtctaactga

SEQ ID NO: 1417866 - DNA, 15 bp, Homo sapiens
ttcattgtctaactg

SEQ ID NO: 1417867 - DNA, 15 bp, Homo sapiens
tttcattgtctaact

SEQ ID NO: 1417868 - DNA, 15 bp, Homo sapiens
ttttcattgtctaac

SEQ ID NO: 1417869 - DNA, 15 bp, Homo sapiens
gttttcattgtctaa

SEQ ID NO: 1417870 - DNA, 15 bp, Homo sapiens
tgttttcattgtcta

SEQ ID NO: 1417871 - DNA, 15 bp, Homo sapiens
gtgttttcattgtct

SEQ ID NO: 1417872 - DNA, 15 bp, Homo sapiens
tgtgttttcattgtc

SEQ ID NO: 1417873 - DNA, 15 bp, Homo sapiens
ttgtgttttcattgt

SEQ ID NO: 1417874 - DNA, 15 bp, Homo sapiens
tttgtgttttcattg

SEQ ID NO: 1417875 - DNA, 15 bp, Homo sapiens
gtttgtgttttcatt

SEQ ID NO: 1417876 - DNA, 15 bp, Homo sapiens
agtttgtgttttcat

SEQ ID NO: 1417877 - DNA, 15 bp, Homo sapiens
aagtttgtgttttca

SEQ ID NO: 1417878 - DNA, 15 bp, Homo sapiens
gaagtttgtgttttc

SEQ ID NO: 1417879 - DNA, 15 bp, Homo sapiens
tgaagtttgtgtttt

SEQ ID NO: 1417880 - DNA, 15 bp, Homo sapiens
atgaagtttgtgttt

SEQ ID NO: 1417881 - DNA, 15 bp, Homo sapiens
aatgaagtttgtgtt

SEQ ID NO: 1417882 - DNA, 15 bp, Homo sapiens
aaatgaagtttgtgt

SEQ ID NO: 1417883 - DNA, 15 bp, Homo sapiens
taaatgaagtttgtg

SEQ ID NO: 1417884 - DNA, 15 bp, Homo sapiens
gtaaatgaagtttgt

SEQ ID NO: 1417885 - DNA, 15 bp, Homo sapiens
ggtaaatgaagtttg

SEQ ID NO: 1417886 - DNA, 15 bp, Homo sapiens
tggtaaatgaagttt

SEQ ID NO: 1417887 - DNA, 15 bp, Homo sapiens
ttggtaaatgaagtt

SEQ ID NO: 1417888 - DNA, 15 bp, Homo sapiens
cttggtaaatgaagt

SEQ ID NO: 1417889 - DNA, 15 bp, Homo sapiens
acttggtaaatgaag

SEQ ID NO: 1417890 - DNA, 15 bp, Homo sapiens
aacttggtaaatgaa

SEQ ID NO: 1417891 - DNA, 15 bp, Homo sapiens
caacttggtaaatga

SEQ ID NO: 1417892 - DNA, 15 bp, Homo sapiens
tcaacttggtaaatg

SEQ ID NO: 1417893 - DNA, 15 bp, Homo sapiens
gtcaacttggtaaat

SEQ ID NO: 1417894 - DNA, 15 bp, Homo sapiens
tgtcaacttggtaaa

SEQ ID NO: 1417895 - DNA, 15 bp, Homo sapiens
gtgtcaacttggtaa

SEQ ID NO: 1417896 - DNA, 15 bp, Homo sapiens
ggtgtcaacttggta

SEQ ID NO: 1417897 - DNA, 15 bp, Homo sapiens
gggtgtcaacttggt

SEQ ID NO: 1417898 - DNA, 15 bp, Homo sapiens
agggtgtcaacttgg

SEQ ID NO: 1417899 - DNA, 15 bp, Homo sapiens
cagggtgtcaacttg

SEQ ID NO: 1417900 - DNA, 15 bp, Homo sapiens
tcagggtgtcaactt

SEQ ID NO: 1417901 - DNA, 15 bp, Homo sapiens
ttcagggtgtcaact

SEQ ID NO: 1417902 - DNA, 15 bp, Homo sapiens
tttcagggtgtcaac

SEQ ID NO: 1417903 - DNA, 15 bp, Homo sapiens
ctttcagggtgtcaa

SEQ ID NO: 1417904 - DNA, 15 bp, Homo sapiens
tctttcagggtgtca

SEQ ID NO: 1417905 - DNA, 15 bp, Homo sapiens
atctttcagggtgtc

SEQ ID NO: 1417906 - DNA, 15 bp, Homo sapiens
tatctttcagggtgt

SEQ ID NO: 1417907 - DNA, 15 bp, Homo sapiens
atatctttcagggtg

SEQ ID NO: 1417908 - DNA, 15 bp, Homo sapiens
catatctttcagggt

SEQ ID NO: 1417909 - DNA, 15 bp, Homo sapiens
acatatctttcaggg

SEQ ID NO: 1417910 - DNA, 15 bp, Homo sapiens
aacatatctttcagg

SEQ ID NO: 1417911 - DNA, 15 bp, Homo sapiens
caacatatctttcag

SEQ ID NO: 1417912 - DNA, 15 bp, Homo sapiens
gcaacatatctttca

SEQ ID NO: 1417913 - DNA, 15 bp, Homo sapiens
agcaacatatctttc

SEQ ID NO: 1417914 - DNA, 15 bp, Homo sapiens
cagcaacatatcttt

SEQ ID NO: 1417915 - DNA, 15 bp, Homo sapiens
ccagcaacatatctt

SEQ ID NO: 1417916 - DNA, 15 bp, Homo sapiens
tccagcaacatatct

SEQ ID NO: 1417917 - DNA, 15 bp, Homo sapiens
ctccagcaacatatc

SEQ ID NO: 1417918 - DNA, 15 bp, Homo sapiens
tctccagcaacatat

SEQ ID NO: 1417919 - DNA, 15 bp, Homo sapiens
atctccagcaacata

SEQ ID NO: 1417920 - DNA, 15 bp, Homo sapiens
aatctccagcaacat

SEQ ID NO: 1417921 - DNA, 15 bp, Homo sapiens
caatctccagcaaca

SEQ ID NO: 1417922 - DNA, 15 bp, Homo sapiens
tcaatctccagcaac

SEQ ID NO: 1417923 - DNA, 15 bp, Homo sapiens
ttcaatctccagcaa

SEQ ID NO: 1417924 - DNA, 15 bp, Homo sapiens
cttcaatctccagca

SEQ ID NO: 1417925 - DNA, 15 bp, Homo sapiens
tcttcaatctccagc

SEQ ID NO: 1417926 - DNA, 15 bp, Homo sapiens
ttcttcaatctccag

SEQ ID NO: 1417927 - DNA, 15 bp, Homo sapiens
gttcttcaatctcca

SEQ ID NO: 1417928 - DNA, 15 bp, Homo sapiens
tgttcttcaatctcc

SEQ ID NO: 1417929 - DNA, 15 bp, Homo sapiens
ctgttcttcaatctc

SEQ ID NO: 1417930 - DNA, 15 bp, Homo sapiens
gctgttcttcaatct

SEQ ID NO: 1417931 - DNA, 15 bp, Homo sapiens
agctgttcttcaatc

SEQ ID NO: 1417932 - DNA, 15 bp, Homo sapiens
cagctgttcttcaat

SEQ ID NO: 1417933 - DNA, 15 bp, Homo sapiens
ccagctgttcttcaa

SEQ ID NO: 1417934 - DNA, 15 bp, Homo sapiens
gccagctgttcttca

SEQ ID NO: 1417935 - DNA, 15 bp, Homo sapiens
agccagctgttcttc

SEQ ID NO: 1417936 - DNA, 15 bp, Homo sapiens
cagccagctgttctt

SEQ ID NO: 1417937 - DNA, 15 bp, Homo sapiens
tcagccagctgttct

SEQ ID NO: 1417938 - DNA, 15 bp, Homo sapiens
ttcagccagctgttc

SEQ ID NO: 1417939 - DNA, 15 bp, Homo sapiens
attcagccagctgtt

SEQ ID NO: 1417940 - DNA, 15 bp, Homo sapiens
tattcagccagctgt

SEQ ID NO: 1417941 - DNA, 15 bp, Homo sapiens
atattcagccagctg

SEQ ID NO: 1417942 - DNA, 15 bp, Homo sapiens
tatattcagccagct

SEQ ID NO: 1417943 - DNA, 15 bp, Homo sapiens
ctatattcagccagc

SEQ ID NO: 1417944 - DNA, 15 bp, Homo sapiens
cctatattcagccag

SEQ ID NO: 1417945 - DNA, 15 bp, Homo sapiens
gcctatattcagcca

SEQ ID NO: 1417946 - DNA, 15 bp, Homo sapiens
cgcctatattcagcc

SEQ ID NO: 1417947 - DNA, 15 bp, Homo sapiens
ccgcctatattcagc

SEQ ID NO: 1417948 - DNA, 15 bp, Homo sapiens
gccgcctatattcag

SEQ ID NO: 1417949 - DNA, 15 bp, Homo sapiens
tgccgcctatattca

SEQ ID NO: 1417950 - DNA, 15 bp, Homo sapiens
ctgccgcctatattc

SEQ ID NO: 1417951 - DNA, 15 bp, Homo sapiens
actgccgcctatatt

SEQ ID NO: 1417952 - DNA, 15 bp, Homo sapiens
tactgccgcctatat

SEQ ID NO: 1417953 - DNA, 15 bp, Homo sapiens
gtactgccgcctata

SEQ ID NO: 1417954 - DNA, 15 bp, Homo sapiens
cgtactgccgcctat

SEQ ID NO: 1417955 - DNA, 15 bp, Homo sapiens
tcgtactgccgccta

SEQ ID NO: 1417956 - DNA, 15 bp, Homo sapiens
ttcgtactgccgcct

SEQ ID NO: 1417957 - DNA, 15 bp, Homo sapiens
cttcgtactgccgcc

SEQ ID NO: 1417958 - DNA, 15 bp, Homo sapiens
tcttcgtactgccgc

SEQ ID NO: 1417959 - DNA, 15 bp, Homo sapiens
ctcttcgtactgccg

SEQ ID NO: 1417960 - DNA, 15 bp, Homo sapiens
tctcttcgtactgcc

SEQ ID NO: 1417961 - DNA, 15 bp, Homo sapiens
ttctcttcgtactgc

SEQ ID NO: 1417962 - DNA, 15 bp, Homo sapiens
tttctcttcgtactg

SEQ ID NO: 1417963 - DNA, 15 bp, Homo sapiens
ttttctcttcgtact

SEQ ID NO: 1417964 - DNA, 15 bp, Homo sapiens
tttttctcttcgtac

SEQ ID NO: 1417965 - DNA, 15 bp, Homo sapiens
gtttttctcttcgta

SEQ ID NO: 1417966 - DNA, 15 bp, Homo sapiens
tgtttttctcttcgt

SEQ ID NO: 1417967 - DNA, 15 bp, Homo sapiens
ttgtttttctcttcg

SEQ ID NO: 1417968 - DNA, 15 bp, Homo sapiens
tttgtttttctcttc

SEQ ID NO: 1417969 - DNA, 15 bp, Homo sapiens
atttgtttttctctt

SEQ ID NO: 1417970 - DNA, 15 bp, Homo sapiens
tatttgtttttctct

SEQ ID NO: 1417971 - DNA, 15 bp, Homo sapiens
ttatttgtttttctc

SEQ ID NO: 1417972 - DNA, 15 bp, Homo sapiens
attatttgtttttct

SEQ ID NO: 1417973 - DNA, 15 bp, Homo sapiens
aattatttgtttttc

SEQ ID NO: 1417974 - DNA, 15 bp, Homo sapiens
aaattatttgttttt

SEQ ID NO: 1417975 - DNA, 15 bp, Homo sapiens
caaattatttgtttt

SEQ ID NO: 1417976 - DNA, 15 bp, Homo sapiens
tcaaattatttgttt

SEQ ID NO: 1417977 - DNA, 15 bp, Homo sapiens
ttcaaattatttgtt

SEQ ID NO: 1417978 - DNA, 15 bp, Homo sapiens
tttcaaattatttgt

SEQ ID NO: 1417979 - DNA, 15 bp, Homo sapiens
ctttcaaattatttg

SEQ ID NO: 1417980 - DNA, 15 bp, Homo sapiens
cctttcaaattattt

SEQ ID NO: 1417981 - DNA, 15 bp, Homo sapiens
ccctttcaaattatt

SEQ ID NO: 1417982 - DNA, 15 bp, Homo sapiens
tccctttcaaattat

SEQ ID NO: 1417983 - DNA, 15 bp, Homo sapiens
ttccctttcaaatta

SEQ ID NO: 1417984 - DNA, 15 bp, Homo sapiens
tttccctttcaaatt

SEQ ID NO: 1417985 - DNA, 15 bp, Homo sapiens
ttttccctttcaaat

SEQ ID NO: 1417986 - DNA, 15 bp, Homo sapiens
tttttccctttcaaa

SEQ ID NO: 1417987 - DNA, 15 bp, Homo sapiens
gtttttccctttcaa

SEQ ID NO: 1417988 - DNA, 15 bp, Homo sapiens
tgtttttccctttca

SEQ ID NO: 1417989 - DNA, 15 bp, Homo sapiens
gtgtttttccctttc

SEQ ID NO: 1417990 - DNA, 15 bp, Homo sapiens
cgtgtttttcccttt

SEQ ID NO: 1417991 - DNA, 15 bp, Homo sapiens
gcgtgtttttccctt

SEQ ID NO: 1417992 - DNA, 15 bp, Homo sapiens
ggcgtgtttttccct

SEQ ID NO: 1417993 - DNA, 15 bp, Homo sapiens
gggcgtgtttttccc

SEQ ID NO: 1417994 - DNA, 15 bp, Homo sapiens
tgggcgtgtttttcc

SEQ ID NO: 1417995 - DNA, 15 bp, Homo sapiens
gtgggcgtgtttttc

SEQ ID NO: 1417996 - DNA, 15 bp, Homo sapiens
tgtgggcgtgttttt

SEQ ID NO: 1417997 - DNA, 15 bp, Homo sapiens
ctgtgggcgtgtttt

SEQ ID NO: 1417998 - DNA, 15 bp, Homo sapiens
actgtgggcgtgttt

SEQ ID NO: 1417999 - DNA, 15 bp, Homo sapiens
tactgtgggcgtgtt

SEQ ID NO: 1418000 - DNA, 15 bp, Homo sapiens
atactgtgggcgtgt

SEQ ID NO: 1418001 - DNA, 15 bp, Homo sapiens
tatactgtgggcgtg

SEQ ID NO: 1418002 - DNA, 15 bp, Homo sapiens
gtatactgtgggcgt

SEQ ID NO: 1418003 - DNA, 15 bp, Homo sapiens
agtatactgtgggcg

SEQ ID NO: 1418004 - DNA, 15 bp, Homo sapiens
cagtatactgtgggc

SEQ ID NO: 1418005 - DNA, 15 bp, Homo sapiens
gcagtatactgtggg

SEQ ID NO: 1418006 - DNA, 15 bp, Homo sapiens
tgcagtatactgtgg

SEQ ID NO: 1418007 - DNA, 15 bp, Homo sapiens
ctgcagtatactgtg

SEQ ID NO: 1418008 - DNA, 15 bp, Homo sapiens
actgcagtatactgt

SEQ ID NO: 1418009 - DNA, 15 bp, Homo sapiens
aactgcagtatactg

SEQ ID NO: 1418010 - DNA, 15 bp, Homo sapiens
aaactgcagtatact

SEQ ID NO: 1418011 - DNA, 15 bp, Homo sapiens
gaaactgcagtatac

SEQ ID NO: 1418012 - DNA, 15 bp, Homo sapiens
tgaaactgcagtata

SEQ ID NO: 1418013 - DNA, 15 bp, Homo sapiens
ctgaaactgcagtat

SEQ ID NO: 1418014 - DNA, 15 bp, Homo sapiens
actgaaactgcagta

SEQ ID NO: 1418015 - DNA, 15 bp, Homo sapiens
aactgaaactgcagt

SEQ ID NO: 1418016 - DNA, 15 bp, Homo sapiens
aaactgaaactgcag

SEQ ID NO: 1418017 - DNA, 15 bp, Homo sapiens
caaactgaaactgca

SEQ ID NO: 1418018 - DNA, 15 bp, Homo sapiens
gcaaactgaaactgc

SEQ ID NO: 1418019 - DNA, 15 bp, Homo sapiens
agcaaactgaaactg

SEQ ID NO: 1418020 - DNA, 15 bp, Homo sapiens
cagcaaactgaaact

SEQ ID NO: 1418021 - DNA, 15 bp, Homo sapiens
tcagcaaactgaaac

SEQ ID NO: 1418022 - DNA, 15 bp, Homo sapiens
ttcagcaaactgaaa

SEQ ID NO: 1418023 - DNA, 15 bp, Homo sapiens
cttcagcaaactgaa

SEQ ID NO: 1418024 - DNA, 15 bp, Homo sapiens
acttcagcaaactga

SEQ ID NO: 1418025 - DNA, 15 bp, Homo sapiens
gacttcagcaaactg

SEQ ID NO: 1418026 - DNA, 15 bp, Homo sapiens
tgacttcagcaaact

SEQ ID NO: 1418027 - DNA, 15 bp, Homo sapiens
ttgacttcagcaaac

SEQ ID NO: 1418028 - DNA, 15 bp, Homo sapiens
cttgacttcagcaaa

SEQ ID NO: 1418029 - DNA, 15 bp, Homo sapiens
ccttgacttcagcaa

SEQ ID NO: 1418030 - DNA, 15 bp, Homo sapiens
tccttgacttcagca

SEQ ID NO: 1418031 - DNA, 15 bp, Homo sapiens
ctccttgacttcagc

SEQ ID NO: 1418032 - DNA, 15 bp, Homo sapiens
cctccttgacttcag

SEQ ID NO: 1418033 - DNA, 15 bp, Homo sapiens
gcctccttgacttca

SEQ ID NO: 1418034 - DNA, 15 bp, Homo sapiens
ggcctccttgacttc

SEQ ID NO: 1418035 - DNA, 15 bp, Homo sapiens
gggcctccttgactt

SEQ ID NO: 1418036 - DNA, 15 bp, Homo sapiens
agggcctccttgact

SEQ ID NO: 1418037 - DNA, 15 bp, Homo sapiens
cagggcctccttgac

SEQ ID NO: 1418038 - DNA, 15 bp, Homo sapiens
tcagggcctccttga

SEQ ID NO: 1418039 - DNA, 15 bp, Homo sapiens
ttcagggcctccttg

SEQ ID NO: 1418040 - DNA, 15 bp, Homo sapiens
cttcagggcctcctt

SEQ ID NO: 1418041 - DNA, 15 bp, Homo sapiens
gcttcagggcctcct

SEQ ID NO: 1418042 - DNA, 15 bp, Homo sapiens
tgcttcagggcctcc

SEQ ID NO: 1418043 - DNA, 15 bp, Homo sapiens
ttgcttcagggcctc

SEQ ID NO: 1418044 - DNA, 15 bp, Homo sapiens
tttgcttcagggcct

SEQ ID NO: 1418045 - DNA, 15 bp, Homo sapiens
gtttgcttcagggcc

SEQ ID NO: 1418046 - DNA, 15 bp, Homo sapiens
tgtttgcttcagggc

SEQ ID NO: 1418047 - DNA, 15 bp, Homo sapiens
ctgtttgcttcaggg

SEQ ID NO: 1418048 - DNA, 15 bp, Homo sapiens
tctgtttgcttcagg

SEQ ID NO: 1418049 - DNA, 15 bp, Homo sapiens
ctctgtttgcttcag

SEQ ID NO: 1418050 - DNA, 15 bp, Homo sapiens
cctctgtttgcttca

SEQ ID NO: 1418051 - DNA, 15 bp, Homo sapiens
tcctctgtttgcttc

SEQ ID NO: 1418052 - DNA, 15 bp, Homo sapiens
ttcctctgtttgctt

SEQ ID NO: 1418053 - DNA, 15 bp, Homo sapiens
tttcctctgtttgct

SEQ ID NO: 1418054 - DNA, 15 bp, Homo sapiens
atttcctctgtttgc

SEQ ID NO: 1418055 - DNA, 15 bp, Homo sapiens
catttcctctgtttg

SEQ ID NO: 1418056 - DNA, 15 bp, Homo sapiens
gcatttcctctgttt

SEQ ID NO: 1418057 - DNA, 15 bp, Homo sapiens
agcatttcctctgtt

SEQ ID NO: 1418058 - DNA, 15 bp, Homo sapiens
gagcatttcctctgt

SEQ ID NO: 1418059 - DNA, 15 bp, Homo sapiens
cgagcatttcctctg

SEQ ID NO: 1418060 - DNA, 15 bp, Homo sapiens
tcgagcatttcctct

SEQ ID NO: 1418061 - DNA, 15 bp, Homo sapiens
ctcgagcatttcctc

SEQ ID NO: 1418062 - DNA, 15 bp, Homo sapiens
tctcgagcatttcct

SEQ ID NO: 1418063 - DNA, 15 bp, Homo sapiens
ttctcgagcatttcc

SEQ ID NO: 1418064 - DNA, 15 bp, Homo sapiens
tttctcgagcatttc

SEQ ID NO: 1418065 - DNA, 15 bp, Homo sapiens
gtttctcgagcattt

SEQ ID NO: 1418066 - DNA, 15 bp, Homo sapiens
tgtttctcgagcatt

SEQ ID NO: 1418067 - DNA, 15 bp, Homo sapiens
atgtttctcgagcat

SEQ ID NO: 1418068 - DNA, 15 bp, Homo sapiens
catgtttctcgagca

SEQ ID NO: 1418069 - DNA, 15 bp, Homo sapiens
ccatgtttctcgagc

SEQ ID NO: 1418070 - DNA, 15 bp, Homo sapiens
tccatgtttctcgag

SEQ ID NO: 1418071 - DNA, 15 bp, Homo sapiens
ttccatgtttctcga

SEQ ID NO: 1418072 - DNA, 15 bp, Homo sapiens
attccatgtttctcg

SEQ ID NO: 1418073 - DNA, 15 bp, Homo sapiens
tattccatgtttctc

SEQ ID NO: 1418074 - DNA, 15 bp, Homo sapiens
ttattccatgtttct

SEQ ID NO: 1418075 - DNA, 15 bp, Homo sapiens
attattccatgtttc

SEQ ID NO: 1418076 - DNA, 15 bp, Homo sapiens
gattattccatgttt

SEQ ID NO: 1418077 - DNA, 15 bp, Homo sapiens
ggattattccatgtt

SEQ ID NO: 1418078 - DNA, 15 bp, Homo sapiens
aggattattccatgt

SEQ ID NO: 1418079 - DNA, 15 bp, Homo sapiens
taggattattccatg

SEQ ID NO: 1418080 - DNA, 15 bp, Homo sapiens
ttaggattattccat

SEQ ID NO: 1418081 - DNA, 15 bp, Homo sapiens
tttaggattattcca

SEQ ID NO: 1418082 - DNA, 15 bp, Homo sapiens
atttaggattattcc

SEQ ID NO: 1418083 - DNA, 15 bp, Homo sapiens
aatttaggattattc

SEQ ID NO: 1418084 - DNA, 15 bp, Homo sapiens
gaatttaggattatt

SEQ ID NO: 1418085 - DNA, 15 bp, Homo sapiens
tgaatttaggattat

SEQ ID NO: 1418086 - DNA, 15 bp, Homo sapiens
ctgaatttaggatta

SEQ ID NO: 1418087 - DNA, 15 bp, Homo sapiens
tctgaatttaggatt

SEQ ID NO: 1418088 - DNA, 15 bp, Homo sapiens
ttctgaatttaggat

SEQ ID NO: 1418089 - DNA, 15 bp, Homo sapiens
tttctgaatttagga

SEQ ID NO: 1418090 - DNA, 15 bp, Homo sapiens
atttctgaatttagg

SEQ ID NO: 1418091 - DNA, 15 bp, Homo sapiens
tatttctgaatttag

SEQ ID NO: 1418092 - DNA, 15 bp, Homo sapiens
ctatttctgaattta

SEQ ID NO: 1418093 - DNA, 15 bp, Homo sapiens
actatttctgaattt

SEQ ID NO: 1418094 - DNA, 15 bp, Homo sapiens
aactatttctgaatt

SEQ ID NO: 1418095 - DNA, 15 bp, Homo sapiens
taactatttctgaat

SEQ ID NO: 1418096 - DNA, 15 bp, Homo sapiens
gtaactatttctgaa

SEQ ID NO: 1418097 - DNA, 15 bp, Homo sapiens
ggtaactatttctga

SEQ ID NO: 1418098 - DNA, 15 bp, Homo sapiens
tggtaactatttctg

SEQ ID NO: 1418099 - DNA, 15 bp, Homo sapiens
ttggtaactatttct

SEQ ID NO: 1418100 - DNA, 15 bp, Homo sapiens
attggtaactatttc

SEQ ID NO: 1418101 - DNA, 15 bp, Homo sapiens
cattggtaactattt

SEQ ID NO: 1418102 - DNA, 15 bp, Homo sapiens
ccattggtaactatt

SEQ ID NO: 1418103 - DNA, 15 bp, Homo sapiens
tccattggtaactat

SEQ ID NO: 1418104 - DNA, 15 bp, Homo sapiens
ctccattggtaacta

SEQ ID NO: 1418105 - DNA, 15 bp, Homo sapiens
tctccattggtaact

SEQ ID NO: 1418106 - DNA, 15 bp, Homo sapiens
ctctccattggtaac

SEQ ID NO: 1418107 - DNA, 15 bp, Homo sapiens
tctctccattggtaa

SEQ ID NO: 1418108 - DNA, 15 bp, Homo sapiens
gtctctccattggta

SEQ ID NO: 1418109 - DNA, 15 bp, Homo sapiens
agtctctccattggt

SEQ ID NO: 1418110 - DNA, 15 bp, Homo sapiens
aagtctctccattgg

SEQ ID NO: 1418111 - DNA, 15 bp, Homo sapiens
gaagtctctccattg

SEQ ID NO: 1418112 - DNA, 15 bp, Homo sapiens
ggaagtctctccatt

SEQ ID NO: 1418113 - DNA, 15 bp, Homo sapiens
cggaagtctctccat

SEQ ID NO: 1418114 - DNA, 15 bp, Homo sapiens
tcggaagtctctcca

SEQ ID NO: 1418115 - DNA, 15 bp, Homo sapiens
gtcggaagtctctcc

SEQ ID NO: 1418116 - DNA, 15 bp, Homo sapiens
tgtcggaagtctctc

SEQ ID NO: 1418117 - DNA, 15 bp, Homo sapiens
gtgtcggaagtctct

SEQ ID NO: 1418118 - DNA, 15 bp, Homo sapiens
agtgtcggaagtctc

SEQ ID NO: 1418119 - DNA, 15 bp, Homo sapiens
gagtgtcggaagtct

SEQ ID NO: 1418120 - DNA, 15 bp, Homo sapiens
agagtgtcggaagtc

SEQ ID NO: 1418121 - DNA, 15 bp, Homo sapiens
gagagtgtcggaagt

SEQ ID NO: 1418122 - DNA, 15 bp, Homo sapiens
tgagagtgtcggaag

SEQ ID NO: 1418123 - DNA, 15 bp, Homo sapiens
ctgagagtgtcggaa

SEQ ID NO: 1418124 - DNA, 15 bp, Homo sapiens
actgagagtgtcgga

SEQ ID NO: 1418125 - DNA, 15 bp, Homo sapiens
tactgagagtgtcgg

SEQ ID NO: 1418126 - DNA, 15 bp, Homo sapiens
ttactgagagtgtcg

SEQ ID NO: 1418127 - DNA, 15 bp, Homo sapiens
attactgagagtgtc

SEQ ID NO: 1418128 - DNA, 15 bp, Homo sapiens
cattactgagagtgt

SEQ ID NO: 1418129 - DNA, 15 bp, Homo sapiens
acattactgagagtg

SEQ ID NO: 1418130 - DNA, 15 bp, Homo sapiens
aacattactgagagt

SEQ ID NO: 1418131 - DNA, 15 bp, Homo sapiens
aaacattactgagag

SEQ ID NO: 1418132 - DNA, 15 bp, Homo sapiens
caaacattactgaga

SEQ ID NO: 1418133 - DNA, 15 bp, Homo sapiens
tcaaacattactgag

SEQ ID NO: 1418134 - DNA, 15 bp, Homo sapiens
atcaaacattactga

SEQ ID NO: 1418135 - DNA, 15 bp, Homo sapiens
tatcaaacattactg

SEQ ID NO: 1418136 - DNA, 15 bp, Homo sapiens
gtatcaaacattact

SEQ ID NO: 1418137 - DNA, 15 bp, Homo sapiens
ggtatcaaacattac

SEQ ID NO: 1418138 - DNA, 15 bp, Homo sapiens
tggtatcaaacatta

SEQ ID NO: 1418139 - DNA, 15 bp, Homo sapiens
ttggtatcaaacatt

SEQ ID NO: 1418140 - DNA, 15 bp, Homo sapiens
cttggtatcaaacat

SEQ ID NO: 1418141 - DNA, 15 bp, Homo sapiens
tcttggtatcaaaca

SEQ ID NO: 1418142 - DNA, 15 bp, Homo sapiens
atcttggtatcaaac

SEQ ID NO: 1418143 - DNA, 15 bp, Homo sapiens
gatcttggtatcaaa

SEQ ID NO: 1418144 - DNA, 15 bp, Homo sapiens
ggatcttggtatcaa

SEQ ID NO: 1418145 - DNA, 15 bp, Homo sapiens
aggatcttggtatca

SEQ ID NO: 1418146 - DNA, 15 bp, Homo sapiens
taggatcttggtatc

SEQ ID NO: 1418147 - DNA, 15 bp, Homo sapiens
gtaggatcttggtat

SEQ ID NO: 1418148 - DNA, 15 bp, Homo sapiens
ggtaggatcttggta

SEQ ID NO: 1418149 - DNA, 15 bp, Homo sapiens
tggtaggatcttggt

SEQ ID NO: 1418150 - DNA, 15 bp, Homo sapiens
ttggtaggatcttgg

SEQ ID NO: 1418151 - DNA, 15 bp, Homo sapiens
cttggtaggatcttg

SEQ ID NO: 1418152 - DNA, 15 bp, Homo sapiens
tcttggtaggatctt

SEQ ID NO: 1418153 - DNA, 15 bp, Homo sapiens
atcttggtaggatct

SEQ ID NO: 1418154 - DNA, 15 bp, Homo sapiens
catcttggtaggatc

SEQ ID NO: 1418155 - DNA, 15 bp, Homo sapiens
tcatcttggtaggat

SEQ ID NO: 1418156 - DNA, 15 bp, Homo sapiens
gtcatcttggtagga

SEQ ID NO: 1418157 - DNA, 15 bp, Homo sapiens
cgtcatcttggtagg

SEQ ID NO: 1418158 - DNA, 15 bp, Homo sapiens
tcgtcatcttggtag

SEQ ID NO: 1418159 - DNA, 15 bp, Homo sapiens
ttcgtcatcttggta

SEQ ID NO: 1418160 - DNA, 15 bp, Homo sapiens
tttcgtcatcttggt

SEQ ID NO: 1418161 - DNA, 15 bp, Homo sapiens
ctttcgtcatcttgg

SEQ ID NO: 1418162 - DNA, 15 bp, Homo sapiens
tctttcgtcatcttg

SEQ ID NO: 1418163 - DNA, 15 bp, Homo sapiens
ttctttcgtcatctt

SEQ ID NO: 1418164 - DNA, 15 bp, Homo sapiens
cttctttcgtcatct

SEQ ID NO: 1418165 - DNA, 15 bp, Homo sapiens
tcttctttcgtcatc

SEQ ID NO: 1418166 - DNA, 15 bp, Homo sapiens
ctcttctttcgtcat

SEQ ID NO: 1418167 - DNA, 15 bp, Homo sapiens
actcttctttcgtca

SEQ ID NO: 1418168 - DNA, 15 bp, Homo sapiens
aactcttctttcgtc

SEQ ID NO: 1418169 - DNA, 15 bp, Homo sapiens
taactcttctttcgt

SEQ ID NO: 1418170 - DNA, 15 bp, Homo sapiens
ttaactcttctttcg

SEQ ID NO: 1418171 - DNA, 15 bp, Homo sapiens
tttaactcttctttc

SEQ ID NO: 1418172 - DNA, 15 bp, Homo sapiens
atttaactcttcttt

SEQ ID NO: 1418173 - DNA, 15 bp, Homo sapiens
catttaactcttctt

SEQ ID NO: 1418174 - DNA, 15 bp, Homo sapiens
gcatttaactcttct

SEQ ID NO: 1418175 - DNA, 15 bp, Homo sapiens
ggcatttaactcttc

SEQ ID NO: 1418176 - DNA, 15 bp, Homo sapiens
gggcatttaactctt

SEQ ID NO: 1418177 - DNA, 15 bp, Homo sapiens
agggcatttaactct

SEQ ID NO: 1418178 - DNA, 15 bp, Homo sapiens
gagggcatttaactc

SEQ ID NO: 1418179 - DNA, 15 bp, Homo sapiens
tgagggcatttaact

SEQ ID NO: 1418180 - DNA, 15 bp, Homo sapiens
ttgagggcatttaac

SEQ ID NO: 1418181 - DNA, 15 bp, Homo sapiens
cttgagggcatttaa

SEQ ID NO: 1418182 - DNA, 15 bp, Homo sapiens
acttgagggcattta

SEQ ID NO: 1418183 - DNA, 15 bp, Homo sapiens
gacttgagggcattt

SEQ ID NO: 1418184 - DNA, 15 bp, Homo sapiens
cgacttgagggcatt

SEQ ID NO: 1418185 - DNA, 15 bp, Homo sapiens
tcgacttgagggcat

SEQ ID NO: 1418186 - DNA, 15 bp, Homo sapiens
gtcgacttgagggca

SEQ ID NO: 1418187 - DNA, 15 bp, Homo sapiens
tgtcgacttgagggc

SEQ ID NO: 1418188 - DNA, 15 bp, Homo sapiens
ctgtcgacttgaggg

SEQ ID NO: 1418189 - DNA, 15 bp, Homo sapiens
cctgtcgacttgagg

SEQ ID NO: 1418190 - DNA, 15 bp, Homo sapiens
ccctgtcgacttgag

SEQ ID NO: 1418191 - DNA, 15 bp, Homo sapiens
cccctgtcgacttga

SEQ ID NO: 1418192 - DNA, 15 bp, Homo sapiens
tcccctgtcgacttg

SEQ ID NO: 1418193 - DNA, 15 bp, Homo sapiens
atcccctgtcgactt

SEQ ID NO: 1418194 - DNA, 15 bp, Homo sapiens
catcccctgtcgact

SEQ ID NO: 1418195 - DNA, 15 bp, Homo sapiens
ccatcccctgtcgac

SEQ ID NO: 1418196 - DNA, 15 bp, Homo sapiens
cccatcccctgtcga

SEQ ID NO: 1418197 - DNA, 15 bp, Homo sapiens
tcccatcccctgtcg

SEQ ID NO: 1418198 - DNA, 15 bp, Homo sapiens
gtcccatcccctgtc

SEQ ID NO: 1418199 - DNA, 15 bp, Homo sapiens
ggtcccatcccctgt

SEQ ID NO: 1418200 - DNA, 15 bp, Homo sapiens
gggtcccatcccctg

SEQ ID NO: 1418201 - DNA, 15 bp, Homo sapiens
agggtcccatcccct

SEQ ID NO: 1418202 - DNA, 15 bp, Homo sapiens
tagggtcccatcccc

SEQ ID NO: 1418203 - DNA, 15 bp, Homo sapiens
ctagggtcccatccc

SEQ ID NO: 1418204 - DNA, 15 bp, Homo sapiens
cctagggtcccatcc

SEQ ID NO: 1418205 - DNA, 15 bp, Homo sapiens
tcctagggtcccatc

SEQ ID NO: 1418206 - DNA, 15 bp, Homo sapiens
ttcctagggtcccat

SEQ ID NO: 1418207 - DNA, 15 bp, Homo sapiens
tttcctagggtccca

SEQ ID NO: 1418208 - DNA, 15 bp, Homo sapiens
gctttcctagggtcc

SEQ ID NO: 1418209 - DNA, 15 bp, Homo sapiens
ggctttcctagggtc

SEQ ID NO: 1418210 - DNA, 15 bp, Homo sapiens
tggctttcctagggt

SEQ ID NO: 1418211 - DNA, 15 bp, Homo sapiens
ctggctttcctaggg

SEQ ID NO: 1418212 - DNA, 15 bp, Homo sapiens
actggctttcctagg

SEQ ID NO: 1418213 - DNA, 15 bp, Homo sapiens
cactggctttcctag

SEQ ID NO: 1418214 - DNA, 15 bp, Homo sapiens
tcactggctttccta

SEQ ID NO: 1418215 - DNA, 15 bp, Homo sapiens
ctcactggctttcct

SEQ ID NO: 1418216 - DNA, 15 bp, Homo sapiens
cctcactggctttcc

SEQ ID NO: 1418217 - DNA, 15 bp, Homo sapiens
acctcactggctttc

SEQ ID NO: 1418218 - DNA, 15 bp, Homo sapiens
cacctcactggcttt

SEQ ID NO: 1418219 - DNA, 15 bp, Homo sapiens
ccacctcactggctt

SEQ ID NO: 1418220 - DNA, 15 bp, Homo sapiens
tccacctcactggct

SEQ ID NO: 1418221 - DNA, 15 bp, Homo sapiens
ctccacctcactggc

SEQ ID NO: 1418222 - DNA, 15 bp, Homo sapiens
cctccacctcactgg

SEQ ID NO: 1418223 - DNA, 15 bp, Homo sapiens
acctccacctcactg

SEQ ID NO: 1418224 - DNA, 15 bp, Homo sapiens
cacctccacctcact

SEQ ID NO: 1418225 - DNA, 15 bp, Homo sapiens
tcacctccacctcac

SEQ ID NO: 1418226 - DNA, 15 bp, Homo sapiens
ttcacctccacctca

SEQ ID NO: 1418227 - DNA, 15 bp, Homo sapiens
cttcacctccacctc

SEQ ID NO: 1418228 - DNA, 15 bp, Homo sapiens
tcttcacctccacct

SEQ ID NO: 1418229 - DNA, 15 bp, Homo sapiens
ttcttcacctccacc

SEQ ID NO: 1418230 - DNA, 15 bp, Homo sapiens
attcttcacctccac

SEQ ID NO: 1418231 - DNA, 15 bp, Homo sapiens
cattcttcacctcca

SEQ ID NO: 1418232 - DNA, 15 bp, Homo sapiens
tcattcttcacctcc

SEQ ID NO: 1418233 - DNA, 15 bp, Homo sapiens
ttcattcttcacctc

SEQ ID NO: 1418234 - DNA, 15 bp, Homo sapiens
tttcattcttcacct

SEQ ID NO: 1418235 - DNA, 15 bp, Homo sapiens
atttcattcttcacc

SEQ ID NO: 1418236 - DNA, 15 bp, Homo sapiens
gatttcattcttcac

SEQ ID NO: 1418237 - DNA, 15 bp, Homo sapiens
cgatttcattcttca

SEQ ID NO: 1418238 - DNA, 15 bp, Homo sapiens
acgatttcattcttc

SEQ ID NO: 1418239 - DNA, 15 bp, Homo sapiens
cacgatttcattctt

SEQ ID NO: 1418240 - DNA, 15 bp, Homo sapiens
ccacgatttcattct

SEQ ID NO: 1418241 - DNA, 15 bp, Homo sapiens
gccacgatttcattc

SEQ ID NO: 1418242 - DNA, 15 bp, Homo sapiens
cgccacgatttcatt

SEQ ID NO: 1418243 - DNA, 15 bp, Homo sapiens
tcgccacgatttcat

SEQ ID NO: 1418244 - DNA, 15 bp, Homo sapiens
ttcgccacgatttca

SEQ ID NO: 1418245 - DNA, 15 bp, Homo sapiens
attcgccacgatttc

SEQ ID NO: 1418246 - DNA, 15 bp, Homo sapiens
cattcgccacgattt

SEQ ID NO: 1418247 - DNA, 15 bp, Homo sapiens
acattcgccacgatt

SEQ ID NO: 1418248 - DNA, 15 bp, Homo sapiens
cacattcgccacgat

SEQ ID NO: 1418249 - DNA, 15 bp, Homo sapiens
ccacattcgccacga

SEQ ID NO: 1418250 - DNA, 15 bp, Homo sapiens
cccacattcgccacg

SEQ ID NO: 1418251 - DNA, 15 bp, Homo sapiens
ccccacattcgccac

SEQ ID NO: 1418252 - DNA, 15 bp, Homo sapiens
tccccacattcgcca

SEQ ID NO: 1418253 - DNA, 15 bp, Homo sapiens
ttccccacattcgcc

SEQ ID NO: 1418254 - DNA, 15 bp, Homo sapiens
tttccccacattcgc

SEQ ID NO: 1418255 - DNA, 15 bp, Homo sapiens
ttttccccacattcg

SEQ ID NO: 1418256 - DNA, 15 bp, Homo sapiens
cttttccccacattc

SEQ ID NO: 1418257 - DNA, 15 bp, Homo sapiens
tcttttccccacatt

SEQ ID NO: 1418258 - DNA, 15 bp, Homo sapiens
ctcttttccccacat

SEQ ID NO: 1418259 - DNA, 15 bp, Homo sapiens
tctcttttccccaca

SEQ ID NO: 1418260 - DNA, 15 bp, Homo sapiens
ttctcttttccccac

SEQ ID NO: 1418261 - DNA, 15 bp, Homo sapiens
tttctcttttcccca

SEQ ID NO: 1418262 - DNA, 15 bp, Homo sapiens
atttctcttttcccc

SEQ ID NO: 1418263 - DNA, 15 bp, Homo sapiens
gatttctcttttccc

SEQ ID NO: 1418264 - DNA, 15 bp, Homo sapiens
agatttctcttttcc

SEQ ID NO: 1418265 - DNA, 15 bp, Homo sapiens
aagatttctcttttc

SEQ ID NO: 1418266 - DNA, 15 bp, Homo sapiens
caagatttctctttt

SEQ ID NO: 1418267 - DNA, 15 bp, Homo sapiens
gcaagatttctcttt

SEQ ID NO: 1418268 - DNA, 15 bp, Homo sapiens
tgcaagatttctctt

SEQ ID NO: 1418269 - DNA, 15 bp, Homo sapiens
gtgcaagatttctct

SEQ ID NO: 1418270 - DNA, 15 bp, Homo sapiens
tgtgcaagatttctc

SEQ ID NO: 1418271 - DNA, 15 bp, Homo sapiens
ttgtgcaagatttct

SEQ ID NO: 1418272 - DNA, 15 bp, Homo sapiens
attgtgcaagatttc

SEQ ID NO: 1418273 - DNA, 15 bp, Homo sapiens
tattgtgcaagattt

SEQ ID NO: 1418274 - DNA, 15 bp, Homo sapiens
gtattgtgcaagatt

SEQ ID NO: 1418275 - DNA, 15 bp, Homo sapiens
agtattgtgcaagat

SEQ ID NO: 1418276 - DNA, 15 bp, Homo sapiens
cagtattgtgcaaga

SEQ ID NO: 1418277 - DNA, 15 bp, Homo sapiens
tcagtattgtgcaag

SEQ ID NO: 1418278 - DNA, 15 bp, Homo sapiens
ctcagtattgtgcaa

SEQ ID NO: 1418279 - DNA, 15 bp, Homo sapiens
tctcagtattgtgca

SEQ ID NO: 1418280 - DNA, 15 bp, Homo sapiens
ttctcagtattgtgc

SEQ ID NO: 1418281 - DNA, 15 bp, Homo sapiens
tttctcagtattgtg

SEQ ID NO: 1418282 - DNA, 15 bp, Homo sapiens
ctttctcagtattgt

SEQ ID NO: 1418283 - DNA, 15 bp, Homo sapiens
tctttctcagtattg

SEQ ID NO: 1418284 - DNA, 15 bp, Homo sapiens
ttctttctcagtatt

SEQ ID NO: 1418285 - DNA, 15 bp, Homo sapiens
gttctttctcagtat

SEQ ID NO: 1418286 - DNA, 15 bp, Homo sapiens
tgttctttctcagta

SEQ ID NO: 1418287 - DNA, 15 bp, Homo sapiens
ttgttctttctcagt

SEQ ID NO: 1418288 - DNA, 15 bp, Homo sapiens
gttgttctttctcag

SEQ ID NO: 1418289 - DNA, 15 bp, Homo sapiens
tgttgttctttctca

SEQ ID NO: 1418290 - DNA, 15 bp, Homo sapiens
gtgttgttctttctc

SEQ ID NO: 1418291 - DNA, 15 bp, Homo sapiens
tgtgttgttctttct

SEQ ID NO: 1418292 - DNA, 15 bp, Homo sapiens
gtgtgttgttctttc

SEQ ID NO: 1418293 - DNA, 15 bp, Homo sapiens
tgtgtgttgttcttt

SEQ ID NO: 1418294 - DNA, 15 bp, Homo sapiens
ctgtgtgttgttctt

SEQ ID NO: 1418295 - DNA, 15 bp, Homo sapiens
tctgtgtgttgttct

SEQ ID NO: 1418296 - DNA, 15 bp, Homo sapiens
ctctgtgtgttgttc

SEQ ID NO: 1418297 - DNA, 15 bp, Homo sapiens
cctctgtgtgttgtt

SEQ ID NO: 1418298 - DNA, 15 bp, Homo sapiens
tcctctgtgtgttgt

SEQ ID NO: 1418299 - DNA, 15 bp, Homo sapiens
gtcctctgtgtgttg

SEQ ID NO: 1418300 - DNA, 15 bp, Homo sapiens
tgtcctctgtgtgtt

SEQ ID NO: 1418301 - DNA, 15 bp, Homo sapiens
gtgtcctctgtgtgt

SEQ ID NO: 1418302 - DNA, 15 bp, Homo sapiens
tgtgtcctctgtgtg

SEQ ID NO: 1418303 - DNA, 15 bp, Homo sapiens
ctgtgtcctctgtgt

SEQ ID NO: 1418304 - DNA, 15 bp, Homo sapiens
actgtgtcctctgtg

SEQ ID NO: 1418305 - DNA, 15 bp, Homo sapiens
cactgtgtcctctgt

SEQ ID NO: 1418306 - DNA, 15 bp, Homo sapiens
tcactgtgtcctctg

SEQ ID NO: 1418307 - DNA, 15 bp, Homo sapiens
ttcactgtgtcctct

SEQ ID NO: 1418308 - DNA, 15 bp, Homo sapiens
cttcactgtgtcctc

SEQ ID NO: 1418309 - DNA, 15 bp, Homo sapiens
ccttcactgtgtcct

SEQ ID NO: 1418310 - DNA, 15 bp, Homo sapiens
tccttcactgtgtcc

SEQ ID NO: 1418311 - DNA, 15 bp, Homo sapiens
atccttcactgtgtc

SEQ ID NO: 1418312 - DNA, 15 bp, Homo sapiens
aatccttcactgtgt

SEQ ID NO: 1418313 - DNA, 15 bp, Homo sapiens
caatccttcactgtg

SEQ ID NO: 1418314 - DNA, 15 bp, Homo sapiens
acaatccttcactgt

SEQ ID NO: 1418315 - DNA, 15 bp, Homo sapiens
cacaatccttcactg

SEQ ID NO: 1418316 - DNA, 15 bp, Homo sapiens
acacaatccttcact

SEQ ID NO: 1418317 - DNA, 15 bp, Homo sapiens
cacacaatccttcac

SEQ ID NO: 1418318 - DNA, 15 bp, Homo sapiens
ccacacaatccttca

SEQ ID NO: 1418319 - DNA, 15 bp, Homo sapiens
tccacacaatccttc

SEQ ID NO: 1418320 - DNA, 15 bp, Homo sapiens
gtccacacaatcctt

SEQ ID NO: 1418321 - DNA, 15 bp, Homo sapiens
tgtccacacaatcct

SEQ ID NO: 1418322 - DNA, 15 bp, Homo sapiens
atgtccacacaatcc

SEQ ID NO: 1418323 - DNA, 15 bp, Homo sapiens
tatgtccacacaatc

SEQ ID NO: 1418324 - DNA, 15 bp, Homo sapiens
ctatgtccacacaat

SEQ ID NO: 1418325 - DNA, 15 bp, Homo sapiens
tctatgtccacacaa

SEQ ID NO: 1418326 - DNA, 15 bp, Homo sapiens
ctctatgtccacaca

SEQ ID NO: 1418327 - DNA, 15 bp, Homo sapiens
cctctatgtccacac

SEQ ID NO: 1418328 - DNA, 15 bp, Homo sapiens
acctctatgtccaca

SEQ ID NO: 1418329 - DNA, 15 bp, Homo sapiens
tacctctatgtccac

SEQ ID NO: 1418330 - DNA, 15 bp, Homo sapiens
atacctctatgtcca

SEQ ID NO: 1418331 - DNA, 15 bp, Homo sapiens
aatacctctatgtcc

SEQ ID NO: 1418332 - DNA, 15 bp, Homo sapiens
gaatacctctatgtc

SEQ ID NO: 1418333 - DNA, 15 bp, Homo sapiens
tgaatacctctatgt

SEQ ID NO: 1418334 - DNA, 15 bp, Homo sapiens
gtgaatacctctatg

SEQ ID NO: 1418335 - DNA, 15 bp, Homo sapiens
agtgaatacctctat

SEQ ID NO: 1418336 - DNA, 15 bp, Homo sapiens
cagtgaatacctcta

SEQ ID NO: 1418337 - DNA, 15 bp, Homo sapiens
gcagtgaatacctct

SEQ ID NO: 1418338 - DNA, 15 bp, Homo sapiens
agcagtgaatacctc

SEQ ID NO: 1418339 - DNA, 15 bp, Homo sapiens
cagcagtgaatacct

SEQ ID NO: 1418340 - DNA, 15 bp, Homo sapiens
ccagcagtgaatacc

SEQ ID NO: 1418341 - DNA, 15 bp, Homo sapiens
accagcagtgaatac

SEQ ID NO: 1418342 - DNA, 15 bp, Homo sapiens
caccagcagtgaata

SEQ ID NO: 1418343 - DNA, 15 bp, Homo sapiens
tcaccagcagtgaat

SEQ ID NO: 1418344 - DNA, 15 bp, Homo sapiens
ctcaccagcagtgaa

SEQ ID NO: 1418345 - DNA, 15 bp, Homo sapiens
tctcaccagcagtga

SEQ ID NO: 1418346 - DNA, 15 bp, Homo sapiens
ttctcaccagcagtg

SEQ ID NO: 1418347 - DNA, 15 bp, Homo sapiens
attctcaccagcagt

SEQ ID NO: 1418348 - DNA, 15 bp, Homo sapiens
tattctcaccagcag

SEQ ID NO: 1418349 - DNA, 15 bp, Homo sapiens
gtattctcaccagca

SEQ ID NO: 1418350 - DNA, 15 bp, Homo sapiens
ggtattctcaccagc

SEQ ID NO: 1418351 - DNA, 15 bp, Homo sapiens
cggtattctcaccag

SEQ ID NO: 1418352 - DNA, 15 bp, Homo sapiens
tcggtattctcacca

SEQ ID NO: 1418353 - DNA, 15 bp, Homo sapiens
ctcggtattctcacc

SEQ ID NO: 1418354 - DNA, 15 bp, Homo sapiens
cctcggtattctcac

SEQ ID NO: 1418355 - DNA, 15 bp, Homo sapiens
tcctcggtattctca

SEQ ID NO: 1418356 - DNA, 15 bp, Homo sapiens
gtcctcggtattctc

SEQ ID NO: 1418357 - DNA, 15 bp, Homo sapiens
ggtcctcggtattct

SEQ ID NO: 1418358 - DNA, 15 bp, Homo sapiens
tggtcctcggtattc

SEQ ID NO: 1418359 - DNA, 15 bp, Homo sapiens
ctggtcctcggtatt

SEQ ID NO: 1418360 - DNA, 15 bp, Homo sapiens
tctggtcctcggtat

SEQ ID NO: 1418361 - DNA, 15 bp, Homo sapiens
ttctggtcctcggta

SEQ ID NO: 1418362 - DNA, 15 bp, Homo sapiens
tttctggtcctcggt

SEQ ID NO: 1418363 - DNA, 15 bp, Homo sapiens
atttctggtcctcgg

SEQ ID NO: 1418364 - DNA, 15 bp, Homo sapiens
gatttctggtcctcg

SEQ ID NO: 1418365 - DNA, 15 bp, Homo sapiens
ggatttctggtcctc

SEQ ID NO: 1418366 - DNA, 15 bp, Homo sapiens
aggatttctggtcct

SEQ ID NO: 1418367 - DNA, 15 bp, Homo sapiens
gaggatttctggtcc

SEQ ID NO: 1418368 - DNA, 15 bp, Homo sapiens
agaggatttctggtc

SEQ ID NO: 1418369 - DNA, 15 bp, Homo sapiens
cagaggatttctggt

SEQ ID NO: 1418370 - DNA, 15 bp, Homo sapiens
tcagaggatttctgg

SEQ ID NO: 1418371 - DNA, 15 bp, Homo sapiens
ttcagaggatttctg

SEQ ID NO: 1418372 - DNA, 15 bp, Homo sapiens
cttcagaggatttct

SEQ ID NO: 1418373 - DNA, 15 bp, Homo sapiens
tcttcagaggatttc

SEQ ID NO: 1418374 - DNA, 15 bp, Homo sapiens
gtcttcagaggattt

SEQ ID NO: 1418375 - DNA, 15 bp, Homo sapiens
tgtcttcagaggatt

SEQ ID NO: 1418376 - DNA, 15 bp, Homo sapiens
gtgtcttcagaggat

SEQ ID NO: 1418377 - DNA, 15 bp, Homo sapiens
agtgtcttcagagga

SEQ ID NO: 1418378 - DNA, 15 bp, Homo sapiens
cagtgtcttcagagg

SEQ ID NO: 1418379 - DNA, 15 bp, Homo sapiens
gcagtgtcttcagag

SEQ ID NO: 1418380 - DNA, 15 bp, Homo sapiens
ggcagtgtcttcaga

SEQ ID NO: 1418381 - DNA, 15 bp, Homo sapiens
gggcagtgtcttcag

SEQ ID NO: 1418382 - DNA, 15 bp, Homo sapiens
ggggcagtgtcttca

SEQ ID NO: 1418383 - DNA, 15 bp, Homo sapiens
tggggcagtgtcttc

SEQ ID NO: 1418384 - DNA, 15 bp, Homo sapiens
atggggcagtgtctt

SEQ ID NO: 1418385 - DNA, 15 bp, Homo sapiens
aatggggcagtgtct

SEQ ID NO: 1418386 - DNA, 15 bp, Homo sapiens
gaatggggcagtgtc

SEQ ID NO: 1418387 - DNA, 15 bp, Homo sapiens
ggaatggggcagtgt

SEQ ID NO: 1418388 - DNA, 15 bp, Homo sapiens
aggaatggggcagtg

SEQ ID NO: 1418389 - DNA, 15 bp, Homo sapiens
taggaatggggcagt

SEQ ID NO: 1418390 - DNA, 15 bp, Homo sapiens
tgcaaaatttgtggt

SEQ ID NO: 1418391 - DNA, 15 bp, Homo sapiens
atgcaaaatttgtgg

SEQ ID NO: 1418392 - DNA, 15 bp, Homo sapiens
aatgcaaaatttgtg

SEQ ID NO: 1418393 - DNA, 15 bp, Homo sapiens
caatgcaaaatttgt

SEQ ID NO: 1418394 - DNA, 15 bp, Homo sapiens
acaatgcaaaatttg

SEQ ID NO: 1418395 - DNA, 15 bp, Homo sapiens
aacaatgcaaaattt

SEQ ID NO: 1418396 - DNA, 15 bp, Homo sapiens
gaacaatgcaaaatt

SEQ ID NO: 1418397 - DNA, 15 bp, Homo sapiens
tgaacaatgcaaaat

SEQ ID NO: 1418398 - DNA, 15 bp, Homo sapiens
atgaacaatgcaaaa

SEQ ID NO: 1418399 - DNA, 15 bp, Homo sapiens
aatgaacaatgcaaa

SEQ ID NO: 1418400 - DNA, 15 bp, Homo sapiens
caatgaacaatgcaa

SEQ ID NO: 1418401 - DNA, 15 bp, Homo sapiens
acaatgaacaatgca

SEQ ID NO: 1418402 - DNA, 15 bp, Homo sapiens
tacaatgaacaatgc

SEQ ID NO: 1418403 - DNA, 15 bp, Homo sapiens
ctacaatgaacaatg

SEQ ID NO: 1418404 - DNA, 15 bp, Homo sapiens
gctacaatgaacaat

SEQ ID NO: 1418405 - DNA, 15 bp, Homo sapiens
tgctacaatgaacaa

SEQ ID NO: 1418406 - DNA, 15 bp, Homo sapiens
gtgctacaatgaaca

SEQ ID NO: 1418407 - DNA, 15 bp, Homo sapiens
agtgctacaatgaac

SEQ ID NO: 1418408 - DNA, 15 bp, Homo sapiens
tagtgctacaatgaa

SEQ ID NO: 1418409 - DNA, 15 bp, Homo sapiens
atagtgctacaatga

SEQ ID NO: 1418410 - DNA, 15 bp, Homo sapiens
aatagtgctacaatg

SEQ ID NO: 1418411 - DNA, 15 bp, Homo sapiens
caatagtgctacaat

SEQ ID NO: 1418412 - DNA, 15 bp, Homo sapiens
ccaatagtgctacaa

SEQ ID NO: 1418413 - DNA, 15 bp, Homo sapiens
accaatagtgctaca

SEQ ID NO: 1418414 - DNA, 15 bp, Homo sapiens
taccaatagtgctac

SEQ ID NO: 1418415 - DNA, 15 bp, Homo sapiens
ttaccaatagtgcta

SEQ ID NO: 1418416 - DNA, 15 bp, Homo sapiens
attaccaatagtgct

SEQ ID NO: 1418417 - DNA, 15 bp, Homo sapiens
tattaccaatagtgc

SEQ ID NO: 1418418 - DNA, 15 bp, Homo sapiens
ttattaccaatagtg

SEQ ID NO: 1418419 - DNA, 15 bp, Homo sapiens
tttattaccaatagt

SEQ ID NO: 1418420 - DNA, 15 bp, Homo sapiens
ttttattaccaatag

SEQ ID NO: 1418421 - DNA, 15 bp, Homo sapiens
attttattaccaata

SEQ ID NO: 1418422 - DNA, 15 bp, Homo sapiens
tattttattaccaat

SEQ ID NO: 1418423 - DNA, 15 bp, Homo sapiens
ttattttattaccaa

SEQ ID NO: 1418424 - DNA, 15 bp, Homo sapiens
gttattttattacca

SEQ ID NO: 1418425 - DNA, 15 bp, Homo sapiens
tgttattttattacc

SEQ ID NO: 1418426 - DNA, 15 bp, Homo sapiens
ttgttattttattac

SEQ ID NO: 1418427 - DNA, 15 bp, Homo sapiens
tttgttattttatta

SEQ ID NO: 1418428 - DNA, 15 bp, Homo sapiens
atttgttattttatt

SEQ ID NO: 1418429 - DNA, 15 bp, Homo sapiens
catttgttattttat

SEQ ID NO: 1418430 - DNA, 15 bp, Homo sapiens
acatttgttatttta

SEQ ID NO: 1418431 - DNA, 15 bp, Homo sapiens
aacatttgttatttt

SEQ ID NO: 1418432 - DNA, 15 bp, Homo sapiens
aaacatttgttattt

SEQ ID NO: 1418433 - DNA, 15 bp, Homo sapiens
caaacatttgttatt

SEQ ID NO: 1418434 - DNA, 15 bp, Homo sapiens
acaaacatttgttat

SEQ ID NO: 1418435 - DNA, 15 bp, Homo sapiens
cacaaacatttgtta

SEQ ID NO: 1418436 - DNA, 15 bp, Homo sapiens
gcacaaacatttgtt

SEQ ID NO: 1418437 - DNA, 15 bp, Homo sapiens
tgcacaaacatttgt

SEQ ID NO: 1418438 - DNA, 15 bp, Homo sapiens
atgcacaaacatttg

SEQ ID NO: 1418439 - DNA, 15 bp, Homo sapiens
aatgcacaaacattt

SEQ ID NO: 1418440 - DNA, 15 bp, Homo sapiens
aaatgcacaaacatt

SEQ ID NO: 1418441 - DNA, 15 bp, Homo sapiens
aaaatgcacaaacat

SEQ ID NO: 1418442 - DNA, 15 bp, Homo sapiens
aaaaatgcacaaaca

SEQ ID NO: 1418443 - DNA, 15 bp, Homo sapiens
taaaaatgcacaaac

SEQ ID NO: 1418444 - DNA, 15 bp, Homo sapiens
ataaaaatgcacaaa

SEQ ID NO: 1418445 - DNA, 15 bp, Homo sapiens
cataaaaatgcacaa

SEQ ID NO: 1418446 - DNA, 15 bp, Homo sapiens
acataaaaatgcaca

SEQ ID NO: 1418447 - DNA, 15 bp, Homo sapiens
cacataaaaatgcac

SEQ ID NO: 1418448 - DNA, 15 bp, Homo sapiens
tcacataaaaatgca

SEQ ID NO: 1418449 - DNA, 15 bp, Homo sapiens
ttcacataaaaatgc

SEQ ID NO: 1418450 - DNA, 15 bp, Homo sapiens
cttcacataaaaatg

SEQ ID NO: 1418451 - DNA, 15 bp, Homo sapiens
tcttcacataaaaat

SEQ ID NO: 1418452 - DNA, 15 bp, Homo sapiens
atcttcacataaaaa

SEQ ID NO: 1418453 - DNA, 15 bp, Homo sapiens
gatcttcacataaaa

SEQ ID NO: 1418454 - DNA, 15 bp, Homo sapiens
ggatcttcacataaa

SEQ ID NO: 1418455 - DNA, 15 bp, Homo sapiens
aggatcttcacataa

SEQ ID NO: 1418456 - DNA, 15 bp, Homo sapiens
aaggatcttcacata

SEQ ID NO: 1418457 - DNA, 15 bp, Homo sapiens
gaaggatcttcacat

SEQ ID NO: 1418458 - DNA, 15 bp, Homo sapiens
agaaggatcttcaca

SEQ ID NO: 1418459 - DNA, 15 bp, Homo sapiens
gagaaggatcttcac

SEQ ID NO: 1418460 - DNA, 15 bp, Homo sapiens
cgagaaggatcttca

SEQ ID NO: 1418461 - DNA, 15 bp, Homo sapiens
acgagaaggatcttc

SEQ ID NO: 1418462 - DNA, 15 bp, Homo sapiens
tacgagaaggatctt

SEQ ID NO: 1418463 - DNA, 15 bp, Homo sapiens
atacgagaaggatct

SEQ ID NO: 1418464 - DNA, 15 bp, Homo sapiens
aatacgagaaggatc

SEQ ID NO: 1418465 - DNA, 15 bp, Homo sapiens
aaatacgagaaggat

SEQ ID NO: 1418466 - DNA, 15 bp, Homo sapiens
gaaatacgagaagga

SEQ ID NO: 1418467 - DNA, 15 bp, Homo sapiens
tgaaatacgagaagg

SEQ ID NO: 1418468 - DNA, 15 bp, Homo sapiens
atgaaatacgagaag

SEQ ID NO: 1418469 - DNA, 15 bp, Homo sapiens
aatgaaatacgagaa

SEQ ID NO: 1418470 - DNA, 15 bp, Homo sapiens
aaatgaaatacgaga

SEQ ID NO: 1418471 - DNA, 15 bp, Homo sapiens
caaatgaaatacgag

SEQ ID NO: 1418472 - DNA, 15 bp, Homo sapiens
ccaaatgaaatacga

SEQ ID NO: 1418473 - DNA, 15 bp, Homo sapiens
tccaaatgaaatacg

SEQ ID NO: 1418474 - DNA, 15 bp, Homo sapiens
ttccaaatgaaatac

SEQ ID NO: 1418475 - DNA, 15 bp, Homo sapiens
tttccaaatgaaata

SEQ ID NO: 1418476 - DNA, 15 bp, Homo sapiens
ctttccaaatgaaat

SEQ ID NO: 1418477 - DNA, 15 bp, Homo sapiens
tctttccaaatgaaa

SEQ ID NO: 1418478 - DNA, 15 bp, Homo sapiens
atctttccaaatgaa

SEQ ID NO: 1418479 - DNA, 15 bp, Homo sapiens
catctttccaaatga

SEQ ID NO: 1418480 - DNA, 15 bp, Homo sapiens
tcatctttccaaatg

SEQ ID NO: 1418481 - DNA, 15 bp, Homo sapiens
ctcatctttccaaat

SEQ ID NO: 1418482 - DNA, 15 bp, Homo sapiens
gctcatctttccaaa

SEQ ID NO: 1418483 - DNA, 15 bp, Homo sapiens
tgctcatctttccaa

SEQ ID NO: 1418484 - DNA, 15 bp, Homo sapiens
ttgctcatctttcca

SEQ ID NO: 1418485 - DNA, 15 bp, Homo sapiens
cttgctcatctttcc

SEQ ID NO: 1418486 - DNA, 15 bp, Homo sapiens
tcttgctcatctttc

SEQ ID NO: 1418487 - DNA, 15 bp, Homo sapiens
ctcttgctcatcttt

SEQ ID NO: 1418488 - DNA, 15 bp, Homo sapiens
cctcttgctcatctt

SEQ ID NO: 1418489 - DNA, 15 bp, Homo sapiens
acctcttgctcatct

SEQ ID NO: 1418490 - DNA, 15 bp, Homo sapiens
gacctcttgctcatc

SEQ ID NO: 1418491 - DNA, 15 bp, Homo sapiens
agacctcttgctcat

SEQ ID NO: 1418492 - DNA, 15 bp, Homo sapiens
cagacctcttgctca

SEQ ID NO: 1418493 - DNA, 15 bp, Homo sapiens
gcagacctcttgctc

SEQ ID NO: 1418494 - DNA, 15 bp, Homo sapiens
agcagacctcttgct

SEQ ID NO: 1418495 - DNA, 15 bp, Homo sapiens
aagcagacctcttgc

SEQ ID NO: 1418496 - DNA, 15 bp, Homo sapiens
gaagcagacctcttg

SEQ ID NO: 1418497 - DNA, 15 bp, Homo sapiens
ggaagcagacctctt

SEQ ID NO: 1418498 - DNA, 15 bp, Homo sapiens
aggaagcagacctct

SEQ ID NO: 1418499 - DNA, 15 bp, Homo sapiens
aaggaagcagacctc

SEQ ID NO: 1418500 - DNA, 15 bp, Homo sapiens
gaaggaagcagacct

SEQ ID NO: 1418501 - DNA, 15 bp, Homo sapiens
tgaaggaagcagacc

SEQ ID NO: 1418502 - DNA, 15 bp, Homo sapiens
atgaaggaagcagac

SEQ ID NO: 1418503 - DNA, 15 bp, Homo sapiens
aatgaaggaagcaga

SEQ ID NO: 1418504 - DNA, 15 bp, Homo sapiens
aaatgaaggaagcag

SEQ ID NO: 1418505 - DNA, 15 bp, Homo sapiens
aaaatgaaggaagca

SEQ ID NO: 1418506 - DNA, 15 bp, Homo sapiens
taaaatgaaggaagc

SEQ ID NO: 1418507 - DNA, 15 bp, Homo sapiens
gtaaaatgaaggaag

SEQ ID NO: 1418508 - DNA, 15 bp, Homo sapiens
agtaaaatgaaggaa

SEQ ID NO: 1418509 - DNA, 15 bp, Homo sapiens
aagtaaaatgaagga

SEQ ID NO: 1418510 - DNA, 15 bp, Homo sapiens
gaagtaaaatgaagg

SEQ ID NO: 1418511 - DNA, 15 bp, Homo sapiens
ggaagtaaaatgaag

SEQ ID NO: 1418512 - DNA, 15 bp, Homo sapiens
gggaagtaaaatgaa

SEQ ID NO: 1418513 - DNA, 15 bp, Homo sapiens
ggggaagtaaaatga

SEQ ID NO: 1418514 - DNA, 15 bp, Homo sapiens
aggggaagtaaaatg

SEQ ID NO: 1418515 - DNA, 15 bp, Homo sapiens
aaggggaagtaaaat

SEQ ID NO: 1418516 - DNA, 15 bp, Homo sapiens
gaaggggaagtaaaa

SEQ ID NO: 1418517 - DNA, 15 bp, Homo sapiens
agaaggggaagtaaa

SEQ ID NO: 1418518 - DNA, 15 bp, Homo sapiens
cagaaggggaagtaa

SEQ ID NO: 1418519 - DNA, 15 bp, Homo sapiens
acagaaggggaagta

SEQ ID NO: 1418520 - DNA, 15 bp, Homo sapiens
aacagaaggggaagt

SEQ ID NO: 1418521 - DNA, 15 bp, Homo sapiens
aaacagaaggggaag

SEQ ID NO: 1418522 - DNA, 15 bp, Homo sapiens
aaaacagaaggggaa

SEQ ID NO: 1418523 - DNA, 15 bp, Homo sapiens
aaaaacagaagggga

SEQ ID NO: 1418524 - DNA, 15 bp, Homo sapiens
caaaaacagaagggg

SEQ ID NO: 1418525 - DNA, 15 bp, Homo sapiens
tcaaaaacagaaggg

SEQ ID NO: 1418526 - DNA, 15 bp, Homo sapiens
ttcaaaaacagaagg

SEQ ID NO: 1418527 - DNA, 15 bp, Homo sapiens
tttcaaaaacagaag

SEQ ID NO: 1418528 - DNA, 15 bp, Homo sapiens
ctttcaaaaacagaa

SEQ ID NO: 1418529 - DNA, 15 bp, Homo sapiens
cctttcaaaaacaga

SEQ ID NO: 1418530 - DNA, 15 bp, Homo sapiens
gcctttcaaaaacag

SEQ ID NO: 1418531 - DNA, 15 bp, Homo sapiens
tgcctttcaaaaaca

SEQ ID NO: 1418532 - DNA, 15 bp, Homo sapiens
ctgcctttcaaaaac

SEQ ID NO: 1418533 - DNA, 15 bp, Homo sapiens
actgcctttcaaaaa

SEQ ID NO: 1418534 - DNA, 15 bp, Homo sapiens
aactgcctttcaaaa

SEQ ID NO: 1418535 - DNA, 15 bp, Homo sapiens
aaactgcctttcaaa

SEQ ID NO: 1418536 - DNA, 15 bp, Homo sapiens
gaaactgcctttcaa

SEQ ID NO: 1418537 - DNA, 15 bp, Homo sapiens
cgaaactgcctttca

SEQ ID NO: 1418538 - DNA, 15 bp, Homo sapiens
gcgaaactgcctttc

SEQ ID NO: 1418539 - DNA, 15 bp, Homo sapiens
ggcgaaactgccttt

SEQ ID NO: 1418540 - DNA, 15 bp, Homo sapiens
tggcgaaactgcctt

SEQ ID NO: 1418541 - DNA, 15 bp, Homo sapiens
ttggcgaaactgcct

SEQ ID NO: 1418542 - DNA, 15 bp, Homo sapiens
cttggcgaaactgcc

SEQ ID NO: 1418543 - DNA, 15 bp, Homo sapiens
gcttggcgaaactgc

SEQ ID NO: 1418544 - DNA, 15 bp, Homo sapiens
agcttggcgaaactg

SEQ ID NO: 1418545 - DNA, 15 bp, Homo sapiens
aagcttggcgaaact

SEQ ID NO: 1418546 - DNA, 15 bp, Homo sapiens
taagcttggcgaaac

SEQ ID NO: 1418547 - DNA, 15 bp, Homo sapiens
ttaagcttggcgaaa

SEQ ID NO: 1418548 - DNA, 15 bp, Homo sapiens
attaagcttggcgaa

SEQ ID NO: 1418549 - DNA, 15 bp, Homo sapiens
cattaagcttggcga

SEQ ID NO: 1418550 - DNA, 15 bp, Homo sapiens
gcattaagcttggcg

SEQ ID NO: 1418551 - DNA, 15 bp, Homo sapiens
tgcattaagcttggc

SEQ ID NO: 1418552 - DNA, 15 bp, Homo sapiens
ttgcattaagcttgg

SEQ ID NO: 1418553 - DNA, 15 bp, Homo sapiens
cttgcattaagcttg

SEQ ID NO: 1418554 - DNA, 15 bp, Homo sapiens
tcttgcattaagctt

SEQ ID NO: 1418555 - DNA, 15 bp, Homo sapiens
ttcttgcattaagct

SEQ ID NO: 1418556 - DNA, 15 bp, Homo sapiens
attcttgcattaagc

SEQ ID NO: 1418557 - DNA, 15 bp, Homo sapiens
tattcttgcattaag

SEQ ID NO: 1418558 - DNA, 15 bp, Homo sapiens
atattcttgcattaa

SEQ ID NO: 1418559 - DNA, 15 bp, Homo sapiens
gatattcttgcatta

SEQ ID NO: 1418560 - DNA, 15 bp, Homo sapiens
agatattcttgcatt

SEQ ID NO: 1418561 - DNA, 15 bp, Homo sapiens
cagatattcttgcat

SEQ ID NO: 1418562 - DNA, 15 bp, Homo sapiens
tcagatattcttgca

SEQ ID NO: 1418563 - DNA, 15 bp, Homo sapiens
gtcagatattcttgc

SEQ ID NO: 1418564 - DNA, 15 bp, Homo sapiens
agtcagatattcttg

SEQ ID NO: 1418565 - DNA, 15 bp, Homo sapiens
cagtcagatattctt

SEQ ID NO: 1418566 - DNA, 15 bp, Homo sapiens
acagtcagatattct

SEQ ID NO: 1418567 - DNA, 15 bp, Homo sapiens
aacagtcagatattc

SEQ ID NO: 1418568 - DNA, 15 bp, Homo sapiens
aaacagtcagatatt

SEQ ID NO: 1418569 - DNA, 15 bp, Homo sapiens
taaacagtcagatat

SEQ ID NO: 1418570 - DNA, 15 bp, Homo sapiens
ctaaacagtcagata

SEQ ID NO: 1418571 - DNA, 15 bp, Homo sapiens
tctaaacagtcagat

SEQ ID NO: 1418572 - DNA, 15 bp, Homo sapiens
ttctaaacagtcaga

SEQ ID NO: 1418573 - DNA, 15 bp, Homo sapiens
cttctaaacagtcag

SEQ ID NO: 1418574 - DNA, 15 bp, Homo sapiens
tcttctaaacagtca

SEQ ID NO: 1418575 - DNA, 15 bp, Homo sapiens
ttcttctaaacagtc

SEQ ID NO: 1418576 - DNA, 15 bp, Homo sapiens
tttcttctaaacagt

SEQ ID NO: 1418577 - DNA, 15 bp, Homo sapiens
ctttcttctaaacag

SEQ ID NO: 1418578 - DNA, 15 bp, Homo sapiens
tctttcttctaaaca

SEQ ID NO: 1418579 - DNA, 15 bp, Homo sapiens
atctttcttctaaac

SEQ ID NO: 1418580 - DNA, 15 bp, Homo sapiens
tatctttcttctaaa

SEQ ID NO: 1418581 - DNA, 15 bp, Homo sapiens
atatctttcttctaa

SEQ ID NO: 1418582 - DNA, 15 bp, Homo sapiens
caatatctttcttct

SEQ ID NO: 1418583 - DNA, 15 bp, Homo sapiens
gcaatatctttcttc

SEQ ID NO: 1418584 - DNA, 15 bp, Homo sapiens
ggcaatatctttctt

SEQ ID NO: 1418585 - DNA, 15 bp, Homo sapiens
tggcaatatctttct

SEQ ID NO: 1418586 - DNA, 15 bp, Homo sapiens
gtggcaatatctttc

SEQ ID NO: 1418587 - DNA, 15 bp, Homo sapiens
tgtggcaatatcttt

SEQ ID NO: 1418588 - DNA, 15 bp, Homo sapiens
ttgtggcaatatctt

SEQ ID NO: 1418589 - DNA, 15 bp, Homo sapiens
attgtggcaatatct

SEQ ID NO: 1418590 - DNA, 15 bp, Homo sapiens
gattgtggcaatatc

SEQ ID NO: 1418591 - DNA, 15 bp, Homo sapiens
agattgtggcaatat

SEQ ID NO: 1418592 - DNA, 15 bp, Homo sapiens
gagattgtggcaata

SEQ ID NO: 1418593 - DNA, 15 bp, Homo sapiens
agagattgtggcaat

SEQ ID NO: 1418594 - DNA, 15 bp, Homo sapiens
cagagattgtggcaa

SEQ ID NO: 1418595 - DNA, 15 bp, Homo sapiens
ccagagattgtggca

SEQ ID NO: 1418596 - DNA, 15 bp, Homo sapiens
tccagagattgtggc

SEQ ID NO: 1418597 - DNA, 15 bp, Homo sapiens
atccagagattgtgg

SEQ ID NO: 1418598 - DNA, 15 bp, Homo sapiens
catccagagattgtg

SEQ ID NO: 1418599 - DNA, 15 bp, Homo sapiens
ccatccagagattgt

SEQ ID NO: 1418600 - DNA, 15 bp, Homo sapiens
accatccagagattg

SEQ ID NO: 1418601 - DNA, 15 bp, Homo sapiens
aaccatccagagatt

SEQ ID NO: 1418602 - DNA, 15 bp, Homo sapiens
aaaccatccagagat

SEQ ID NO: 1418603 - DNA, 15 bp, Homo sapiens
aaaaccatccagaga

SEQ ID NO: 1418604 - DNA, 15 bp, Homo sapiens
gaaaaccatccagag

SEQ ID NO: 1418605 - DNA, 15 bp, Homo sapiens
ggaaaaccatccaga

SEQ ID NO: 1418606 - DNA, 15 bp, Homo sapiens
tggaaaaccatccag

SEQ ID NO: 1418607 - DNA, 15 bp, Homo sapiens
ctggaaaaccatcca

SEQ ID NO: 1418608 - DNA, 15 bp, Homo sapiens
cctggaaaaccatcc

SEQ ID NO: 1418609 - DNA, 15 bp, Homo sapiens
ccctggaaaaccatc

SEQ ID NO: 1418610 - DNA, 15 bp, Homo sapiens
accctggaaaaccat

SEQ ID NO: 1418611 - DNA, 15 bp, Homo sapiens
aaccctggaaaacca

SEQ ID NO: 1418612 - DNA, 15 bp, Homo sapiens
caaccctggaaaacc

SEQ ID NO: 1418613 - DNA, 15 bp, Homo sapiens
acaaccctggaaaac

SEQ ID NO: 1418614 - DNA, 15 bp, Homo sapiens
cacaaccctggaaaa

SEQ ID NO: 1418615 - DNA, 15 bp, Homo sapiens
acacaaccctggaaa

SEQ ID NO: 1418616 - DNA, 15 bp, Homo sapiens
aacacaaccctggaa

SEQ ID NO: 1418617 - DNA, 15 bp, Homo sapiens
taacacaaccctgga

SEQ ID NO: 1418618 - DNA, 15 bp, Homo sapiens
ataacacaaccctgg

SEQ ID NO: 1418619 - DNA, 15 bp, Homo sapiens
aataacacaaccctg

SEQ ID NO: 1418620 - DNA, 15 bp, Homo sapiens
taataacacaaccct

SEQ ID NO: 1418621 - DNA, 15 bp, Homo sapiens
gtaataacacaaccc

SEQ ID NO: 1418622 - DNA, 15 bp, Homo sapiens
agtaataacacaacc

SEQ ID NO: 1418623 - DNA, 15 bp, Homo sapiens
cagtaataacacaac

SEQ ID NO: 1418624 - DNA, 15 bp, Homo sapiens
tcagtaataacacaa

SEQ ID NO: 1418625 - DNA, 15 bp, Homo sapiens
ctcagtaataacaca

SEQ ID NO: 1418626 - DNA, 15 bp, Homo sapiens
gctcagtaataacac

SEQ ID NO: 1418627 - DNA, 15 bp, Homo sapiens
agctcagtaataaca

SEQ ID NO: 1418628 - DNA, 15 bp, Homo sapiens
aagctcagtaataac

SEQ ID NO: 1418629 - DNA, 15 bp, Homo sapiens
gaagctcagtaataa

SEQ ID NO: 1418630 - DNA, 15 bp, Homo sapiens
tgaagctcagtaata

SEQ ID NO: 1418631 - DNA, 15 bp, Homo sapiens
atgaagctcagtaat

SEQ ID NO: 1418632 - DNA, 15 bp, Homo sapiens
gatgaagctcagtaa

SEQ ID NO: 1418633 - DNA, 15 bp, Homo sapiens
agatgaagctcagta

SEQ ID NO: 1418634 - DNA, 15 bp, Homo sapiens
aagatgaagctcagt

SEQ ID NO: 1418635 - DNA, 15 bp, Homo sapiens
aaagatgaagctcag

SEQ ID NO: 1418636 - DNA, 15 bp, Homo sapiens
gaaagatgaagctca

SEQ ID NO: 1418637 - DNA, 15 bp, Homo sapiens
ggaaagatgaagctc

SEQ ID NO: 1418638 - DNA, 15 bp, Homo sapiens
tggaaagatgaagct

SEQ ID NO: 1418639 - DNA, 15 bp, Homo sapiens
ctggaaagatgaagc

SEQ ID NO: 1418640 - DNA, 15 bp, Homo sapiens
tctggaaagatgaag

SEQ ID NO: 1418641 - DNA, 15 bp, Homo sapiens
ttctggaaagatgaa

SEQ ID NO: 1418642 - DNA, 15 bp, Homo sapiens
attctggaaagatga

SEQ ID NO: 1418643 - DNA, 15 bp, Homo sapiens
cattctggaaagatg

SEQ ID NO: 1418644 - DNA, 15 bp, Homo sapiens
tcattctggaaagat

SEQ ID NO: 1418645 - DNA, 15 bp, Homo sapiens
ctcattctggaaaga

SEQ ID NO: 1418646 - DNA, 15 bp, Homo sapiens
gctcattctggaaag

SEQ ID NO: 1418647 - DNA, 15 bp, Homo sapiens
tgctcattctggaaa

SEQ ID NO: 1418648 - DNA, 15 bp, Homo sapiens
ttgctcattctggaa

SEQ ID NO: 1418649 - DNA, 15 bp, Homo sapiens
tttgctcattctgga

SEQ ID NO: 1418650 - DNA, 15 bp, Homo sapiens
ttttgctcattctgg

SEQ ID NO: 1418651 - DNA, 15 bp, Homo sapiens
gttttgctcattctg

SEQ ID NO: 1418652 - DNA, 15 bp, Homo sapiens
tgttttgctcattct

SEQ ID NO: 1418653 - DNA, 15 bp, Homo sapiens
gtgttttgctcattc

SEQ ID NO: 1418654 - DNA, 15 bp, Homo sapiens
agtgttttgctcatt

SEQ ID NO: 1418655 - DNA, 15 bp, Homo sapiens
cagtgttttgctcat

SEQ ID NO: 1418656 - DNA, 15 bp, Homo sapiens
acagtgttttgctca

SEQ ID NO: 1418657 - DNA, 15 bp, Homo sapiens
gacagtgttttgctc

SEQ ID NO: 1418658 - DNA, 15 bp, Homo sapiens
ggacagtgttttgct

SEQ ID NO: 1418659 - DNA, 15 bp, Homo sapiens
tggacagtgttttgc

SEQ ID NO: 1418660 - DNA, 15 bp, Homo sapiens
ctggacagtgttttg

SEQ ID NO: 1418661 - DNA, 15 bp, Homo sapiens
actggacagtgtttt

SEQ ID NO: 1418662 - DNA, 15 bp, Homo sapiens
gactggacagtgttt

SEQ ID NO: 1418663 - DNA, 15 bp, Homo sapiens
agactggacagtgtt

SEQ ID NO: 1418664 - DNA, 15 bp, Homo sapiens
aagactggacagtgt

SEQ ID NO: 1418665 - DNA, 15 bp, Homo sapiens
aaagactggacagtg

SEQ ID NO: 1418666 - DNA, 15 bp, Homo sapiens
caaagactggacagt

SEQ ID NO: 1418667 - DNA, 15 bp, Homo sapiens
acaaagactggacag

SEQ ID NO: 1418668 - DNA, 15 bp, Homo sapiens
aacaaagactggaca

SEQ ID NO: 1418669 - DNA, 15 bp, Homo sapiens
taacaaagactggac

SEQ ID NO: 1418670 - DNA, 15 bp, Homo sapiens
gtaacaaagactgga

SEQ ID NO: 1418671 - DNA, 15 bp, Homo sapiens
cgtaacaaagactgg

SEQ ID NO: 1418672 - DNA, 15 bp, Homo sapiens
tcgtaacaaagactg

SEQ ID NO: 1418673 - DNA, 15 bp, Homo sapiens
atcgtaacaaagact

SEQ ID NO: 1418674 - DNA, 15 bp, Homo sapiens
aatcgtaacaaagac

SEQ ID NO: 1418675 - DNA, 15 bp, Homo sapiens
aaatcgtaacaaaga

SEQ ID NO: 1418676 - DNA, 15 bp, Homo sapiens
aaaatcgtaacaaag

SEQ ID NO: 1418677 - DNA, 15 bp, Homo sapiens
caaaatcgtaacaaa

SEQ ID NO: 1418678 - DNA, 15 bp, Homo sapiens
acaaaatcgtaacaa

SEQ ID NO: 1418679 - DNA, 15 bp, Homo sapiens
tacaaaatcgtaaca

SEQ ID NO: 1418680 - DNA, 15 bp, Homo sapiens
ttacaaaatcgtaac

SEQ ID NO: 1418681 - DNA, 15 bp, Homo sapiens
attacaaaatcgtaa

SEQ ID NO: 1418682 - DNA, 15 bp, Homo sapiens
tattacaaaatcgta

SEQ ID NO: 1418683 - DNA, 15 bp, Homo sapiens
ttattacaaaatcgt

SEQ ID NO: 1418684 - DNA, 15 bp, Homo sapiens
tttattacaaaatcg

SEQ ID NO: 1418685 - DNA, 15 bp, Homo sapiens
atttattacaaaatc

SEQ ID NO: 1418686 - DNA, 15 bp, Homo sapiens
catttattacaaaat

SEQ ID NO: 1418687 - DNA, 15 bp, Homo sapiens
acatttattacaaaa

SEQ ID NO: 1418688 - DNA, 15 bp, Homo sapiens
cacatttattacaaa

SEQ ID NO: 1418689 - DNA, 15 bp, Homo sapiens
acacatttattacaa

SEQ ID NO: 1418690 - DNA, 15 bp, Homo sapiens
tacacatttattaca

SEQ ID NO: 1418691 - DNA, 15 bp, Homo sapiens
gtacacatttattac

SEQ ID NO: 1418692 - DNA, 15 bp, Homo sapiens
tgtacacatttatta

SEQ ID NO: 1418693 - DNA, 15 bp, Homo sapiens
atgtacacatttatt

SEQ ID NO: 1418694 - DNA, 15 bp, Homo sapiens
aatgtacacatttat

SEQ ID NO: 1418695 - DNA, 15 bp, Homo sapiens
aaatgtacacattta

SEQ ID NO: 1418696 - DNA, 15 bp, Homo sapiens
aaaatgtacacattt

SEQ ID NO: 1418697 - DNA, 15 bp, Homo sapiens
aaaaatgtacacatt

SEQ ID NO: 1418698 - DNA, 15 bp, Homo sapiens
aaaaaatgtacacat

SEQ ID NO: 1418699 - DNA, 15 bp, Homo sapiens
aaaaaaatgtacaca

SEQ ID NO: 1418700 - DNA, 15 bp, Homo sapiens
aaaaaaaatgtacac

SEQ ID NO: 1418701 - DNA, 15 bp, Homo sapiens
taaaaaaaatgtaca

SEQ ID NO: 1418702 - DNA, 15 bp, Homo sapiens
ttaaaaaaaatgtac

SEQ ID NO: 1418703 - DNA, 15 bp, Homo sapiens
tttaaaaaaaatgta

SEQ ID NO: 1418704 - DNA, 15 bp, Homo sapiens
atttaaaaaaaatgt

SEQ ID NO: 1418705 - DNA, 15 bp, Homo sapiens
aatttaaaaaaaatg

SEQ ID NO: 1418706 - DNA, 15 bp, Homo sapiens
aaaatttaaaaaaaa

SEQ ID NO: 1418707 - DNA, 15 bp, Homo sapiens
caaaaatttaaaaaa

SEQ ID NO: 1418708 - DNA, 15 bp, Homo sapiens
ccaaaaatttaaaaa

SEQ ID NO: 1418709 - DNA, 15 bp, Homo sapiens
tccaaaaatttaaaa

SEQ ID NO: 1418710 - DNA, 15 bp, Homo sapiens
gtccaaaaatttaaa

SEQ ID NO: 1418711 - DNA, 15 bp, Homo sapiens
tgtccaaaaatttaa

SEQ ID NO: 1418712 - DNA, 15 bp, Homo sapiens
atgtccaaaaattta

SEQ ID NO: 1418713 - DNA, 15 bp, Homo sapiens
gatgtccaaaaattt

SEQ ID NO: 1418714 - DNA, 15 bp, Homo sapiens
tgatgtccaaaaatt

SEQ ID NO: 1418715 - DNA, 15 bp, Homo sapiens
gtgatgtccaaaaat

SEQ ID NO: 1418716 - DNA, 15 bp, Homo sapiens
tgtgatgtccaaaaa

SEQ ID NO: 1418717 - DNA, 15 bp, Homo sapiens
atgtgatgtccaaaa

SEQ ID NO: 1418718 - DNA, 15 bp, Homo sapiens
catgtgatgtccaaa

SEQ ID NO: 1418719 - DNA, 15 bp, Homo sapiens
tcatgtgatgtccaa

SEQ ID NO: 1418720 - DNA, 15 bp, Homo sapiens
ttcatgtgatgtcca

SEQ ID NO: 1418721 - DNA, 15 bp, Homo sapiens
attcatgtgatgtcc

SEQ ID NO: 1418722 - DNA, 15 bp, Homo sapiens
tattcatgtgatgtc

SEQ ID NO: 1418723 - DNA, 15 bp, Homo sapiens
ttattcatgtgatgt

SEQ ID NO: 1418724 - DNA, 15 bp, Homo sapiens
tttattcatgtgatg

SEQ ID NO: 1418725 - DNA, 15 bp, Homo sapiens
ctttattcatgtgat

SEQ ID NO: 1418726 - DNA, 15 bp, Homo sapiens
cctttattcatgtga

SEQ ID NO: 1418727 - DNA, 15 bp, Homo sapiens
acctttattcatgtg

SEQ ID NO: 1418728 - DNA, 15 bp, Homo sapiens
tacctttattcatgt

SEQ ID NO: 1418729 - DNA, 15 bp, Homo sapiens
atacctttattcatg

SEQ ID NO: 1418730 - DNA, 15 bp, Homo sapiens
catacctttattcat

SEQ ID NO: 1418731 - DNA, 15 bp, Homo sapiens
acatacctttattca

SEQ ID NO: 1418732 - DNA, 15 bp, Homo sapiens
tacatacctttattc

SEQ ID NO: 1418733 - DNA, 15 bp, Homo sapiens
atacatacctttatt

SEQ ID NO: 1418734 - DNA, 15 bp, Homo sapiens
catacatacctttat

SEQ ID NO: 1418735 - DNA, 15 bp, Homo sapiens
acatacataccttta

SEQ ID NO: 1418736 - DNA, 15 bp, Homo sapiens
tacatacataccttt

SEQ ID NO: 1418737 - DNA, 15 bp, Homo sapiens
gtacatacatacctt

SEQ ID NO: 1418738 - DNA, 15 bp, Homo sapiens
cgtacatacatacct

SEQ ID NO: 1418739 - DNA, 15 bp, Homo sapiens
tcgtacatacatacc

SEQ ID NO: 1418740 - DNA, 15 bp, Homo sapiens
ttcgtacatacatac

SEQ ID NO: 1418741 - DNA, 15 bp, Homo sapiens
attcgtacatacata

SEQ ID NO: 1418742 - DNA, 15 bp, Homo sapiens
cattcgtacatacat

SEQ ID NO: 1418743 - DNA, 15 bp, Homo sapiens
acattcgtacataca

SEQ ID NO: 1418744 - DNA, 15 bp, Homo sapiens
cacattcgtacatac

SEQ ID NO: 1418745 - DNA, 15 bp, Homo sapiens
acacattcgtacata

SEQ ID NO: 1418746 - DNA, 15 bp, Homo sapiens
tacacattcgtacat

SEQ ID NO: 1418747 - DNA, 15 bp, Homo sapiens
atacacattcgtaca

SEQ ID NO: 1418748 - DNA, 15 bp, Homo sapiens
tatacacattcgtac

SEQ ID NO: 1418749 - DNA, 15 bp, Homo sapiens
atatacacattcgta

SEQ ID NO: 1418750 - DNA, 15 bp, Homo sapiens
tatatacacattcgt

SEQ ID NO: 1418751 - DNA, 15 bp, Homo sapiens
atatatacacattcg

SEQ ID NO: 1418752 - DNA, 15 bp, Homo sapiens
aatatatacacattc

SEQ ID NO: 1418753 - DNA, 15 bp, Homo sapiens
taatatatacacatt

SEQ ID NO: 1418754 - DNA, 15 bp, Homo sapiens
ataatatatacacat

SEQ ID NO: 1418755 - DNA, 15 bp, Homo sapiens
tataatatatacaca

SEQ ID NO: 1418756 - DNA, 15 bp, Homo sapiens
atataatatatacac

SEQ ID NO: 1418757 - DNA, 15 bp, Homo sapiens
tatataatatataca

SEQ ID NO: 1418758 - DNA, 15 bp, Homo sapiens
atatataatatatac

SEQ ID NO: 1418759 - DNA, 15 bp, Homo sapiens
tatatataatatata

SEQ ID NO: 1418760 - DNA, 15 bp, Homo sapiens
atatatataatatat

SEQ ID NO: 1418761 - DNA, 15 bp, Homo sapiens
catatatataatata

SEQ ID NO: 1418762 - DNA, 15 bp, Homo sapiens
tcatatatataatat

SEQ ID NO: 1418763 - DNA, 15 bp, Homo sapiens
gtcatatatataata

SEQ ID NO: 1418764 - DNA, 15 bp, Homo sapiens
tgtcatatatataat

SEQ ID NO: 1418765 - DNA, 15 bp, Homo sapiens
atgtcatatatataa

SEQ ID NO: 1418766 - DNA, 15 bp, Homo sapiens
gatgtcatatatata

SEQ ID NO: 1418767 - DNA, 15 bp, Homo sapiens
agatgtcatatatat

SEQ ID NO: 1418768 - DNA, 15 bp, Homo sapiens
tagatgtcatatata

SEQ ID NO: 1418769 - DNA, 15 bp, Homo sapiens
atagatgtcatatat

SEQ ID NO: 1418770 - DNA, 15 bp, Homo sapiens
aatagatgtcatata

SEQ ID NO: 1418771 - DNA, 15 bp, Homo sapiens
aaatagatgtcatat

SEQ ID NO: 1418772 - DNA, 15 bp, Homo sapiens
aaaatagatgtcata

SEQ ID NO: 1418773 - DNA, 15 bp, Homo sapiens
caaaatagatgtcat

SEQ ID NO: 1418774 - DNA, 15 bp, Homo sapiens
ccaaaatagatgtca

SEQ ID NO: 1418775 - DNA, 15 bp, Homo sapiens
tccaaaatagatgtc

SEQ ID NO: 1418776 - DNA, 15 bp, Homo sapiens
ttccaaaatagatgt

SEQ ID NO: 1418777 - DNA, 15 bp, Homo sapiens
tttccaaaatagatg

SEQ ID NO: 1418778 - DNA, 15 bp, Homo sapiens
ttttccaaaatagat

SEQ ID NO: 1418779 - DNA, 15 bp, Homo sapiens
attttccaaaataga

SEQ ID NO: 1418780 - DNA, 15 bp, Homo sapiens
cattttccaaaatag

SEQ ID NO: 1418781 - DNA, 15 bp, Homo sapiens
acattttccaaaata

SEQ ID NO: 1418782 - DNA, 15 bp, Homo sapiens
aacattttccaaaat

SEQ ID NO: 1418783 - DNA, 15 bp, Homo sapiens
aaacattttccaaaa

SEQ ID NO: 1418784 - DNA, 15 bp, Homo sapiens
caaacattttccaaa

SEQ ID NO: 1418785 - DNA, 15 bp, Homo sapiens
gcaaacattttccaa

SEQ ID NO: 1418786 - DNA, 15 bp, Homo sapiens
ggcaaacattttcca

SEQ ID NO: 1418787 - DNA, 15 bp, Homo sapiens
gggcaaacattttcc

SEQ ID NO: 1418788 - DNA, 15 bp, Homo sapiens
agggcaaacattttc

SEQ ID NO: 1418789 - DNA, 15 bp, Homo sapiens
cagggcaaacatttt

SEQ ID NO: 1418790 - DNA, 15 bp, Homo sapiens
gcagggcaaacattt

SEQ ID NO: 1418791 - DNA, 15 bp, Homo sapiens
agcagggcaaacatt

SEQ ID NO: 1418792 - DNA, 15 bp, Homo sapiens
cagcagggcaaacat

SEQ ID NO: 1418793 - DNA, 15 bp, Homo sapiens
acagcagggcaaaca

SEQ ID NO: 1418794 - DNA, 15 bp, Homo sapiens
tacagcagggcaaac

SEQ ID NO: 1418795 - DNA, 15 bp, Homo sapiens
gtacagcagggcaaa

SEQ ID NO: 1418796 - DNA, 15 bp, Homo sapiens
ggtacagcagggcaa

SEQ ID NO: 1418797 - DNA, 15 bp, Homo sapiens
aggtacagcagggca

SEQ ID NO: 1418798 - DNA, 15 bp, Homo sapiens
gaggtacagcagggc

SEQ ID NO: 1418799 - DNA, 15 bp, Homo sapiens
tgaggtacagcaggg

SEQ ID NO: 1418800 - DNA, 15 bp, Homo sapiens
atgaggtacagcagg

SEQ ID NO: 1418801 - DNA, 15 bp, Homo sapiens
aatgaggtacagcag

SEQ ID NO: 1418802 - DNA, 15 bp, Homo sapiens
aaatgaggtacagca

SEQ ID NO: 1418803 - DNA, 15 bp, Homo sapiens
aaaatgaggtacagc

SEQ ID NO: 1418804 - DNA, 15 bp, Homo sapiens
aaaaatgaggtacag

SEQ ID NO: 1418805 - DNA, 15 bp, Homo sapiens
taaaaatgaggtaca

SEQ ID NO: 1418806 - DNA, 15 bp, Homo sapiens
ctaaaaatgaggtac

SEQ ID NO: 1418807 - DNA, 15 bp, Homo sapiens
cctaaaaatgaggta

SEQ ID NO: 1418808 - DNA, 15 bp, Homo sapiens
tcctaaaaatgaggt

SEQ ID NO: 1418809 - DNA, 15 bp, Homo sapiens
ctcctaaaaatgagg

SEQ ID NO: 1418810 - DNA, 15 bp, Homo sapiens
cctcctaaaaatgag

SEQ ID NO: 1418811 - DNA, 15 bp, Homo sapiens
acctcctaaaaatga

SEQ ID NO: 1418812 - DNA, 15 bp, Homo sapiens
cacctcctaaaaatg

SEQ ID NO: 1418813 - DNA, 15 bp, Homo sapiens
acacctcctaaaaat

SEQ ID NO: 1418814 - DNA, 15 bp, Homo sapiens
cacacctcctaaaaa

SEQ ID NO: 1418815 - DNA, 15 bp, Homo sapiens
gcacacctcctaaaa

SEQ ID NO: 1418816 - DNA, 15 bp, Homo sapiens
tgcacacctcctaaa

SEQ ID NO: 1418817 - DNA, 15 bp, Homo sapiens
atgcacacctcctaa

SEQ ID NO: 1418818 - DNA, 15 bp, Homo sapiens
catgcacacctccta

SEQ ID NO: 1418819 - DNA, 15 bp, Homo sapiens
ccatgcacacctcct

SEQ ID NO: 1418820 - DNA, 15 bp, Homo sapiens
tccatgcacacctcc

SEQ ID NO: 1418821 - DNA, 15 bp, Homo sapiens
atccatgcacacctc

SEQ ID NO: 1418822 - DNA, 15 bp, Homo sapiens
catccatgcacacct

SEQ ID NO: 1418823 - DNA, 15 bp, Homo sapiens
gcatccatgcacacc

SEQ ID NO: 1418824 - DNA, 15 bp, Homo sapiens
tgcatccatgcacac

SEQ ID NO: 1418825 - DNA, 15 bp, Homo sapiens
ttgcatccatgcaca

SEQ ID NO: 1418826 - DNA, 15 bp, Homo sapiens
attgcatccatgcac

SEQ ID NO: 1418827 - DNA, 15 bp, Homo sapiens
tattgcatccatgca

SEQ ID NO: 1418828 - DNA, 15 bp, Homo sapiens
atattgcatccatgc

SEQ ID NO: 1418829 - DNA, 15 bp, Homo sapiens
tatattgcatccatg

SEQ ID NO: 1418830 - DNA, 15 bp, Homo sapiens
atatattgcatccat

SEQ ID NO: 1418831 - DNA, 15 bp, Homo sapiens
catatattgcatcca

SEQ ID NO: 1418832 - DNA, 15 bp, Homo sapiens
tcatatattgcatcc

SEQ ID NO: 1418833 - DNA, 15 bp, Homo sapiens
ttcatatattgcatc

SEQ ID NO: 1418834 - DNA, 15 bp, Homo sapiens
tttcatatattgcat

SEQ ID NO: 1418835 - DNA, 15 bp, Homo sapiens
ttttcatatattgca

SEQ ID NO: 1418836 - DNA, 15 bp, Homo sapiens
attttcatatattgc

SEQ ID NO: 1418837 - DNA, 15 bp, Homo sapiens
cattttcatatattg

SEQ ID NO: 1418838 - DNA, 15 bp, Homo sapiens
ccattttcatatatt

SEQ ID NO: 1418839 - DNA, 15 bp, Homo sapiens
cccattttcatatat

SEQ ID NO: 1418840 - DNA, 15 bp, Homo sapiens
tcccattttcatata

SEQ ID NO: 1418841 - DNA, 15 bp, Homo sapiens
gtcccattttcatat

SEQ ID NO: 1418842 - DNA, 15 bp, Homo sapiens
tgtcccattttcata

SEQ ID NO: 1418843 - DNA, 15 bp, Homo sapiens
atgtcccattttcat

SEQ ID NO: 1418844 - DNA, 15 bp, Homo sapiens
aatgtcccattttca

SEQ ID NO: 1418845 - DNA, 15 bp, Homo sapiens
gaatgtcccattttc

SEQ ID NO: 1418846 - DNA, 15 bp, Homo sapiens
agaatgtcccatttt

SEQ ID NO: 1418847 - DNA, 15 bp, Homo sapiens
cagaatgtcccattt

SEQ ID NO: 1418848 - DNA, 15 bp, Homo sapiens
ccagaatgtcccatt

SEQ ID NO: 1418849 - DNA, 15 bp, Homo sapiens
tccagaatgtcccat

SEQ ID NO: 1418850 - DNA, 15 bp, Homo sapiens
ttccagaatgtccca

SEQ ID NO: 1418851 - DNA, 15 bp, Homo sapiens
gttccagaatgtccc

SEQ ID NO: 1418852 - DNA, 15 bp, Homo sapiens
agttccagaatgtcc

SEQ ID NO: 1418853 - DNA, 15 bp, Homo sapiens
cagttccagaatgtc

SEQ ID NO: 1418854 - DNA, 15 bp, Homo sapiens
gcagttccagaatgt

SEQ ID NO: 1418855 - DNA, 15 bp, Homo sapiens
agcagttccagaatg

SEQ ID NO: 1418856 - DNA, 15 bp, Homo sapiens
cagcagttccagaat

SEQ ID NO: 1418857 - DNA, 15 bp, Homo sapiens
ccagcagttccagaa

SEQ ID NO: 1418858 - DNA, 15 bp, Homo sapiens
accagcagttccaga

SEQ ID NO: 1418859 - DNA, 15 bp, Homo sapiens
gaccagcagttccag

SEQ ID NO: 1418860 - DNA, 15 bp, Homo sapiens
tgaccagcagttcca

SEQ ID NO: 1418861 - DNA, 15 bp, Homo sapiens
ctgaccagcagttcc

SEQ ID NO: 1418862 - DNA, 15 bp, Homo sapiens
cctgaccagcagttc

SEQ ID NO: 1418863 - DNA, 15 bp, Homo sapiens
ccctgaccagcagtt

SEQ ID NO: 1418864 - DNA, 15 bp, Homo sapiens
cccctgaccagcagt

SEQ ID NO: 1418865 - DNA, 15 bp, Homo sapiens
tcccctgaccagcag

SEQ ID NO: 1418866 - DNA, 15 bp, Homo sapiens
gtcccctgaccagca

SEQ ID NO: 1418867 - DNA, 15 bp, Homo sapiens
agtcccctgaccagc

SEQ ID NO: 1418868 - DNA, 15 bp, Homo sapiens
aagtcccctgaccag

SEQ ID NO: 1418869 - DNA, 15 bp, Homo sapiens
aaagtcccctgacca

SEQ ID NO: 1418870 - DNA, 15 bp, Homo sapiens
caaagtcccctgacc

SEQ ID NO: 1418871 - DNA, 15 bp, Homo sapiens
acaaagtcccctgac

SEQ ID NO: 1418872 - DNA, 15 bp, Homo sapiens
gacaaagtcccctga

SEQ ID NO: 1418873 - DNA, 15 bp, Homo sapiens
cgacaaagtcccctg

SEQ ID NO: 1418874 - DNA, 15 bp, Homo sapiens
gcgacaaagtcccct

SEQ ID NO: 1418875 - DNA, 15 bp, Homo sapiens
ggcgacaaagtcccc

SEQ ID NO: 1418876 - DNA, 15 bp, Homo sapiens
gggcgacaaagtccc

SEQ ID NO: 1418877 - DNA, 15 bp, Homo sapiens
agggcgacaaagtcc

SEQ ID NO: 1418878 - DNA, 15 bp, Homo sapiens
cagggcgacaaagtc

SEQ ID NO: 1418879 - DNA, 15 bp, Homo sapiens
acagggcgacaaagt

SEQ ID NO: 1418880 - DNA, 15 bp, Homo sapiens
cacagggcgacaaag

SEQ ID NO: 1418881 - DNA, 15 bp, Homo sapiens
gcacagggcgacaaa

SEQ ID NO: 1418882 - DNA, 15 bp, Homo sapiens
tgcacagggcgacaa

SEQ ID NO: 1418883 - DNA, 15 bp, Homo sapiens
gtgcacagggcgaca

SEQ ID NO: 1418884 - DNA, 15 bp, Homo sapiens
agtgcacagggcgac

SEQ ID NO: 1418885 - DNA, 15 bp, Homo sapiens
tagtgcacagggcga

SEQ ID NO: 1418886 - DNA, 15 bp, Homo sapiens
ttagtgcacagggcg

SEQ ID NO: 1418887 - DNA, 15 bp, Homo sapiens
tttagtgcacagggc

SEQ ID NO: 1418888 - DNA, 15 bp, Homo sapiens
ttttagtgcacaggg

SEQ ID NO: 1418889 - DNA, 15 bp, Homo sapiens
cttttagtgcacagg

SEQ ID NO: 1418890 - DNA, 15 bp, Homo sapiens
ccttttagtgcacag

SEQ ID NO: 1418891 - DNA, 15 bp, Homo sapiens
cccttttagtgcaca

SEQ ID NO: 1418892 - DNA, 15 bp, Homo sapiens
gcccttttagtgcac

SEQ ID NO: 1418893 - DNA, 15 bp, Homo sapiens
ggcccttttagtgca

SEQ ID NO: 1418894 - DNA, 15 bp, Homo sapiens
tggcccttttagtgc

SEQ ID NO: 1418895 - DNA, 15 bp, Homo sapiens
ctggcccttttagtg

SEQ ID NO: 1418896 - DNA, 15 bp, Homo sapiens
tctggcccttttagt

SEQ ID NO: 1418897 - DNA, 15 bp, Homo sapiens
atctggcccttttag

SEQ ID NO: 1418898 - DNA, 15 bp, Homo sapiens
aatctggccctttta

SEQ ID NO: 1418899 - DNA, 15 bp, Homo sapiens
aaatctggccctttt

SEQ ID NO: 1418900 - DNA, 15 bp, Homo sapiens
aaaatctggcccttt

SEQ ID NO: 1418901 - DNA, 15 bp, Homo sapiens
gaaaatctggccctt

SEQ ID NO: 1418902 - DNA, 15 bp, Homo sapiens
tgaaaatctggccct

SEQ ID NO: 1418903 - DNA, 15 bp, Homo sapiens
ctgaaaatctggccc

SEQ ID NO: 1418904 - DNA, 15 bp, Homo sapiens
gctgaaaatctggcc

SEQ ID NO: 1418905 - DNA, 15 bp, Homo sapiens
tgctgaaaatctggc

SEQ ID NO: 1418906 - DNA, 15 bp, Homo sapiens
ctgctgaaaatctgg

SEQ ID NO: 1418907 - DNA, 15 bp, Homo sapiens
gctgctgaaaatctg

SEQ ID NO: 1418908 - DNA, 15 bp, Homo sapiens
ggctgctgaaaatct

SEQ ID NO: 1418909 - DNA, 15 bp, Homo sapiens
tggctgctgaaaatc

SEQ ID NO: 1418910 - DNA, 15 bp, Homo sapiens
ttggctgctgaaaat

SEQ ID NO: 1418911 - DNA, 15 bp, Homo sapiens
cttggctgctgaaaa

SEQ ID NO: 1418912 - DNA, 15 bp, Homo sapiens
ccttggctgctgaaa

SEQ ID NO: 1418913 - DNA, 15 bp, Homo sapiens
tccttggctgctgaa

SEQ ID NO: 1418914 - DNA, 15 bp, Homo sapiens
gtccttggctgctga

SEQ ID NO: 1418915 - DNA, 15 bp, Homo sapiens
tgtccttggctgctg

SEQ ID NO: 1418916 - DNA, 15 bp, Homo sapiens
atgtccttggctgct

SEQ ID NO: 1418917 - DNA, 15 bp, Homo sapiens
gatgtccttggctgc

SEQ ID NO: 1418918 - DNA, 15 bp, Homo sapiens
ggatgtccttggctg

SEQ ID NO: 1418919 - DNA, 15 bp, Homo sapiens
tggatgtccttggct

SEQ ID NO: 1418920 - DNA, 15 bp, Homo sapiens
atggatgtccttggc

SEQ ID NO: 1418921 - DNA, 15 bp, Homo sapiens
tatggatgtccttgg

SEQ ID NO: 1418922 - DNA, 15 bp, Homo sapiens
gtatggatgtccttg

SEQ ID NO: 1418923 - DNA, 15 bp, Homo sapiens
ggtatggatgtcctt

SEQ ID NO: 1418924 - DNA, 15 bp, Homo sapiens
gggtatggatgtcct

SEQ ID NO: 1418925 - DNA, 15 bp, Homo sapiens
tgggtatggatgtcc

SEQ ID NO: 1418926 - DNA, 15 bp, Homo sapiens
ttgggtatggatgtc

SEQ ID NO: 1418927 - DNA, 15 bp, Homo sapiens
cttgggtatggatgt

SEQ ID NO: 1418928 - DNA, 15 bp, Homo sapiens
acttgggtatggatg

SEQ ID NO: 1418929 - DNA, 15 bp, Homo sapiens
cacttgggtatggat

SEQ ID NO: 1418930 - DNA, 15 bp, Homo sapiens
tcacttgggtatgga

SEQ ID NO: 1418931 - DNA, 15 bp, Homo sapiens
ttcacttgggtatgg

SEQ ID NO: 1418932 - DNA, 15 bp, Homo sapiens
attcacttgggtatg

SEQ ID NO: 1418933 - DNA, 15 bp, Homo sapiens
cattcacttgggtat

SEQ ID NO: 1418934 - DNA, 15 bp, Homo sapiens
acattcacttgggta

SEQ ID NO: 1418935 - DNA, 15 bp, Homo sapiens
cacattcacttgggt

SEQ ID NO: 1418936 - DNA, 15 bp, Homo sapiens
tcacattcacttggg

SEQ ID NO: 1418937 - DNA, 15 bp, Homo sapiens
atcacattcacttgg

SEQ ID NO: 1418938 - DNA, 15 bp, Homo sapiens
catcacattcacttg

SEQ ID NO: 1418939 - DNA, 15 bp, Homo sapiens
ccatcacattcactt

SEQ ID NO: 1418940 - DNA, 15 bp, Homo sapiens
cccatcacattcact

SEQ ID NO: 1418941 - DNA, 15 bp, Homo sapiens
tcccatcacattcac

SEQ ID NO: 1418942 - DNA, 15 bp, Homo sapiens
gtcccatcacattca

SEQ ID NO: 1418943 - DNA, 15 bp, Homo sapiens
agtcccatcacattc

SEQ ID NO: 1418944 - DNA, 15 bp, Homo sapiens
aagtcccatcacatt

SEQ ID NO: 1418945 - DNA, 15 bp, Homo sapiens
taagtcccatcacat

SEQ ID NO: 1418946 - DNA, 15 bp, Homo sapiens
ttaagtcccatcaca

SEQ ID NO: 1418947 - DNA, 15 bp, Homo sapiens
tttaagtcccatcac

SEQ ID NO: 1418948 - DNA, 15 bp, Homo sapiens
ttttaagtcccatca

SEQ ID NO: 1418949 - DNA, 15 bp, Homo sapiens
cttttaagtcccatc

SEQ ID NO: 1418950 - DNA, 15 bp, Homo sapiens
tcttttaagtcccat

SEQ ID NO: 1418951 - DNA, 15 bp, Homo sapiens
ttcttttaagtccca

SEQ ID NO: 1418952 - DNA, 15 bp, Homo sapiens
cttcttttaagtccc

SEQ ID NO: 1418953 - DNA, 15 bp, Homo sapiens
acttcttttaagtcc

SEQ ID NO: 1418954 - DNA, 15 bp, Homo sapiens
cacttcttttaagtc

SEQ ID NO: 1418955 - DNA, 15 bp, Homo sapiens
tcacttcttttaagt

SEQ ID NO: 1418956 - DNA, 15 bp, Homo sapiens
ttcacttcttttaag

SEQ ID NO: 1418957 - DNA, 15 bp, Homo sapiens
gttcacttcttttaa

SEQ ID NO: 1418958 - DNA, 15 bp, Homo sapiens
agttcacttctttta

SEQ ID NO: 1418959 - DNA, 15 bp, Homo sapiens
cagttcacttctttt

SEQ ID NO: 1418960 - DNA, 15 bp, Homo sapiens
tcagttcacttcttt

SEQ ID NO: 1418961 - DNA, 15 bp, Homo sapiens
ctcagttcacttctt

SEQ ID NO: 1418962 - DNA, 15 bp, Homo sapiens
tctcagttcacttct

SEQ ID NO: 1418963 - DNA, 15 bp, Homo sapiens
gtctcagttcacttc

SEQ ID NO: 1418964 - DNA, 15 bp, Homo sapiens
tgtctcagttcactt

SEQ ID NO: 1418965 - DNA, 15 bp, Homo sapiens
ttgtctcagttcact

SEQ ID NO: 1418966 - DNA, 15 bp, Homo sapiens
attgtctcagttcac

SEQ ID NO: 1418967 - DNA, 15 bp, Homo sapiens
aattgtctcagttca

SEQ ID NO: 1418968 - DNA, 15 bp, Homo sapiens
gaattgtctcagttc

SEQ ID NO: 1418969 - DNA, 15 bp, Homo sapiens
tgaattgtctcagtt

SEQ ID NO: 1418970 - DNA, 15 bp, Homo sapiens
gtgaattgtctcagt

SEQ ID NO: 1418971 - DNA, 15 bp, Homo sapiens
agtgaattgtctcag

SEQ ID NO: 1418972 - DNA, 15 bp, Homo sapiens
gagtgaattgtctca

SEQ ID NO: 1418973 - DNA, 15 bp, Homo sapiens
agagtgaattgtctc

SEQ ID NO: 1418974 - DNA, 15 bp, Homo sapiens
cagagtgaattgtct

SEQ ID NO: 1418975 - DNA, 15 bp, Homo sapiens
ccagagtgaattgtc

SEQ ID NO: 1418976 - DNA, 15 bp, Homo sapiens
gccagagtgaattgt

SEQ ID NO: 1418977 - DNA, 15 bp, Homo sapiens
agccagagtgaattg

SEQ ID NO: 1418978 - DNA, 15 bp, Homo sapiens
cagccagagtgaatt

SEQ ID NO: 1418979 - DNA, 15 bp, Homo sapiens
acagccagagtgaat

SEQ ID NO: 1418980 - DNA, 15 bp, Homo sapiens
aacagccagagtgaa

SEQ ID NO: 1418981 - DNA, 15 bp, Homo sapiens
aaacagccagagtga

SEQ ID NO: 1418982 - DNA, 15 bp, Homo sapiens
caaacagccagagtg

SEQ ID NO: 1418983 - DNA, 15 bp, Homo sapiens
tcaaacagccagagt

SEQ ID NO: 1418984 - DNA, 15 bp, Homo sapiens
ttcaaacagccagag

SEQ ID NO: 1418985 - DNA, 15 bp, Homo sapiens
gttcaaacagccaga

SEQ ID NO: 1418986 - DNA, 15 bp, Homo sapiens
tgttcaaacagccag

SEQ ID NO: 1418987 - DNA, 15 bp, Homo sapiens
ctgttcaaacagcca

SEQ ID NO: 1418988 - DNA, 15 bp, Homo sapiens
gctgttcaaacagcc

SEQ ID NO: 1418989 - DNA, 15 bp, Homo sapiens
tgctgttcaaacagc

SEQ ID NO: 1418990 - DNA, 15 bp, Homo sapiens
ctgctgttcaaacag

SEQ ID NO: 1418991 - DNA, 15 bp, Homo sapiens
gctgctgttcaaaca

SEQ ID NO: 1418992 - DNA, 15 bp, Homo sapiens
cgctgctgttcaaac

SEQ ID NO: 1418993 - DNA, 15 bp, Homo sapiens
acgctgctgttcaaa

SEQ ID NO: 1418994 - DNA, 15 bp, Homo sapiens
aacgctgctgttcaa

SEQ ID NO: 1418995 - DNA, 15 bp, Homo sapiens
aaacgctgctgttca

SEQ ID NO: 1418996 - DNA, 15 bp, Homo sapiens
gaaacgctgctgttc

SEQ ID NO: 1418997 - DNA, 15 bp, Homo sapiens
tgaaacgctgctgtt

SEQ ID NO: 1418998 - DNA, 15 bp, Homo sapiens
atgaaacgctgctgt

SEQ ID NO: 1418999 - DNA, 15 bp, Homo sapiens
tatgaaacgctgctg

SEQ ID NO: 1419000 - DNA, 15 bp, Homo sapiens
ctatgaaacgctgct

SEQ ID NO: 1419001 - DNA, 15 bp, Homo sapiens
cctatgaaacgctgc

SEQ ID NO: 1419002 - DNA, 15 bp, Homo sapiens
tcctatgaaacgctg

SEQ ID NO: 1419003 - DNA, 15 bp, Homo sapiens
ttcctatgaaacgct

SEQ ID NO: 1419004 - DNA, 15 bp, Homo sapiens
cttcctatgaaacgc

SEQ ID NO: 1419005 - DNA, 15 bp, Homo sapiens
tcttcctatgaaacg

SEQ ID NO: 1419006 - DNA, 15 bp, Homo sapiens
ctcttcctatgaaac

SEQ ID NO: 1419007 - DNA, 15 bp, Homo sapiens
tctcttcctatgaaa

SEQ ID NO: 1419008 - DNA, 15 bp, Homo sapiens
ttctcttcctatgaa

SEQ ID NO: 1419009 - DNA, 15 bp, Homo sapiens
tttctcttcctatga

SEQ ID NO: 1419010 - DNA, 15 bp, Homo sapiens
ttttctcttcctatg

SEQ ID NO: 1419011 - DNA, 15 bp, Homo sapiens
tttttctcttcctat

SEQ ID NO: 1419012 - DNA, 15 bp, Homo sapiens
ttttttctcttccta

SEQ ID NO: 1419013 - DNA, 15 bp, Homo sapiens
tttttttctcttcct

SEQ ID NO: 1419014 - DNA, 15 bp, Homo sapiens
ctttttttctcttcc

SEQ ID NO: 1419015 - DNA, 15 bp, Homo sapiens
tctttttttctcttc

SEQ ID NO: 1419016 - DNA, 15 bp, Homo sapiens
atctttttttctctt

SEQ ID NO: 1419017 - DNA, 15 bp, Homo sapiens
gatctttttttctct

SEQ ID NO: 1419018 - DNA, 15 bp, Homo sapiens
tgatctttttttctc

SEQ ID NO: 1419019 - DNA, 15 bp, Homo sapiens
ttgatctttttttct

SEQ ID NO: 1419020 - DNA, 15 bp, Homo sapiens
attgatctttttttc

SEQ ID NO: 1419021 - DNA, 15 bp, Homo sapiens
gattgatcttttttt

SEQ ID NO: 1419022 - DNA, 15 bp, Homo sapiens
agattgatctttttt

SEQ ID NO: 1419023 - DNA, 15 bp, Homo sapiens
aagattgatcttttt

SEQ ID NO: 1419024 - DNA, 15 bp, Homo sapiens
caagattgatctttt

SEQ ID NO: 1419025 - DNA, 15 bp, Homo sapiens
acaagattgatcttt

SEQ ID NO: 1419026 - DNA, 15 bp, Homo sapiens
tacaagattgatctt

SEQ ID NO: 1419027 - DNA, 15 bp, Homo sapiens
atacaagattgatct

SEQ ID NO: 1419028 - DNA, 15 bp, Homo sapiens
aatacaagattgatc

SEQ ID NO: 1419029 - DNA, 15 bp, Homo sapiens
aaatacaagattgat

SEQ ID NO: 1419030 - DNA, 15 bp, Homo sapiens
aaaatacaagattga

SEQ ID NO: 1419031 - DNA, 15 bp, Homo sapiens
gaaaatacaagattg

SEQ ID NO: 1419032 - DNA, 15 bp, Homo sapiens
agaaaatacaagatt

SEQ ID NO: 1419033 - DNA, 15 bp, Homo sapiens
cagaaaatacaagat

SEQ ID NO: 1419034 - DNA, 15 bp, Homo sapiens
tcagaaaatacaaga

SEQ ID NO: 1419035 - DNA, 15 bp, Homo sapiens
gtcagaaaatacaag

SEQ ID NO: 1419036 - DNA, 15 bp, Homo sapiens
ggtcagaaaatacaa

SEQ ID NO: 1419037 - DNA, 15 bp, Homo sapiens
tggtcagaaaataca

SEQ ID NO: 1419038 - DNA, 15 bp, Homo sapiens
gtggtcagaaaatac

SEQ ID NO: 1419039 - DNA, 15 bp, Homo sapiens
tgtggtcagaaaata

SEQ ID NO: 1419040 - DNA, 15 bp, Homo sapiens
atgtggtcagaaaat

SEQ ID NO: 1419041 - DNA, 15 bp, Homo sapiens
tatgtggtcagaaaa

SEQ ID NO: 1419042 - DNA, 15 bp, Homo sapiens
ttatgtggtcagaaa

SEQ ID NO: 1419043 - DNA, 15 bp, Homo sapiens
tttatgtggtcagaa

SEQ ID NO: 1419044 - DNA, 15 bp, Homo sapiens
ctttatgtggtcaga

SEQ ID NO: 1419045 - DNA, 15 bp, Homo sapiens
cctttatgtggtcag

SEQ ID NO: 1419046 - DNA, 15 bp, Homo sapiens
gcctttatgtggtca

SEQ ID NO: 1419047 - DNA, 15 bp, Homo sapiens
agcctttatgtggtc

SEQ ID NO: 1419048 - DNA, 15 bp, Homo sapiens
aagcctttatgtggt

SEQ ID NO: 1419049 - DNA, 15 bp, Homo sapiens
gaagcctttatgtgg

SEQ ID NO: 1419050 - DNA, 15 bp, Homo sapiens
agaagcctttatgtg

SEQ ID NO: 1419051 - DNA, 15 bp, Homo sapiens
aagaagcctttatgt

SEQ ID NO: 1419052 - DNA, 15 bp, Homo sapiens
gaagaagcctttatg

SEQ ID NO: 1419053 - DNA, 15 bp, Homo sapiens
agaagaagcctttat

SEQ ID NO: 1419054 - DNA, 15 bp, Homo sapiens
gagaagaagccttta

SEQ ID NO: 1419055 - DNA, 15 bp, Homo sapiens
agagaagaagccttt

SEQ ID NO: 1419056 - DNA, 15 bp, Homo sapiens
aagagaagaagcctt

SEQ ID NO: 1419057 - DNA, 15 bp, Homo sapiens
aaagagaagaagcct

SEQ ID NO: 1419058 - DNA, 15 bp, Homo sapiens
caaagagaagaagcc

SEQ ID NO: 1419059 - DNA, 15 bp, Homo sapiens
acaaagagaagaagc

SEQ ID NO: 1419060 - DNA, 15 bp, Homo sapiens
tacaaagagaagaag

SEQ ID NO: 1419061 - DNA, 15 bp, Homo sapiens
ttacaaagagaagaa

SEQ ID NO: 1419062 - DNA, 15 bp, Homo sapiens
attacaaagagaaga

SEQ ID NO: 1419063 - DNA, 15 bp, Homo sapiens
tattacaaagagaag

SEQ ID NO: 1419064 - DNA, 15 bp, Homo sapiens
ttattacaaagagaa

SEQ ID NO: 1419065 - DNA, 15 bp, Homo sapiens
tttattacaaagaga

SEQ ID NO: 1419066 - DNA, 15 bp, Homo sapiens
ctttattacaaagag

SEQ ID NO: 1419067 - DNA, 15 bp, Homo sapiens
actttattacaaaga

SEQ ID NO: 1419068 - DNA, 15 bp, Homo sapiens
tactttattacaaag

SEQ ID NO: 1419069 - DNA, 15 bp, Homo sapiens
ctactttattacaaa

SEQ ID NO: 1419070 - DNA, 15 bp, Homo sapiens
tctactttattacaa

SEQ ID NO: 1419071 - DNA, 15 bp, Homo sapiens
ttctactttattaca

SEQ ID NO: 1419072 - DNA, 15 bp, Homo sapiens
tttctactttattac

SEQ ID NO: 1419073 - DNA, 15 bp, Homo sapiens
ttttctactttatta

SEQ ID NO: 1419074 - DNA, 15 bp, Homo sapiens
cttttctactttatt

SEQ ID NO: 1419075 - DNA, 15 bp, Homo sapiens
gcttttctactttat

SEQ ID NO: 1419076 - DNA, 15 bp, Homo sapiens
agcttttctacttta

SEQ ID NO: 1419077 - DNA, 15 bp, Homo sapiens
gagcttttctacttt

SEQ ID NO: 1419078 - DNA, 15 bp, Homo sapiens
agagcttttctactt

SEQ ID NO: 1419079 - DNA, 15 bp, Homo sapiens
gagagcttttctact

SEQ ID NO: 1419080 - DNA, 15 bp, Homo sapiens
ggagagcttttctac

SEQ ID NO: 1419081 - DNA, 15 bp, Homo sapiens
aggagagcttttcta

SEQ ID NO: 1419082 - DNA, 15 bp, Homo sapiens
gaggagagcttttct

SEQ ID NO: 1419083 - DNA, 15 bp, Homo sapiens
tgaggagagcttttc

SEQ ID NO: 1419084 - DNA, 15 bp, Homo sapiens
gtgaggagagctttt

SEQ ID NO: 1419085 - DNA, 15 bp, Homo sapiens
agtgaggagagcttt

SEQ ID NO: 1419086 - DNA, 15 bp, Homo sapiens
cagtgaggagagctt

SEQ ID NO: 1419087 - DNA, 15 bp, Homo sapiens
gcagtgaggagagct

SEQ ID NO: 1419088 - DNA, 15 bp, Homo sapiens
tgcagtgaggagagc

SEQ ID NO: 1419089 - DNA, 15 bp, Homo sapiens
ctgcagtgaggagag

SEQ ID NO: 1419090 - DNA, 15 bp, Homo sapiens
actgcagtgaggaga

SEQ ID NO: 1419091 - DNA, 15 bp, Homo sapiens
cactgcagtgaggag

SEQ ID NO: 1419092 - DNA, 15 bp, Homo sapiens
acactgcagtgagga

SEQ ID NO: 1419093 - DNA, 15 bp, Homo sapiens
aacactgcagtgagg

SEQ ID NO: 1419094 - DNA, 15 bp, Homo sapiens
caacactgcagtgag

SEQ ID NO: 1419095 - DNA, 15 bp, Homo sapiens
ccaacactgcagtga

SEQ ID NO: 1419096 - DNA, 15 bp, Homo sapiens
gccaacactgcagtg

SEQ ID NO: 1419097 - DNA, 15 bp, Homo sapiens
agccaacactgcagt

SEQ ID NO: 1419098 - DNA, 15 bp, Homo sapiens
aagccaacactgcag

SEQ ID NO: 1419099 - DNA, 15 bp, Homo sapiens
aaagccaacactgca

SEQ ID NO: 1419100 - DNA, 15 bp, Homo sapiens
caaagccaacactgc

SEQ ID NO: 1419101 - DNA, 15 bp, Homo sapiens
tcaaagccaacactg

SEQ ID NO: 1419102 - DNA, 15 bp, Homo sapiens
atcaaagccaacact

SEQ ID NO: 1419103 - DNA, 15 bp, Homo sapiens
aatcaaagccaacac

SEQ ID NO: 1419104 - DNA, 15 bp, Homo sapiens
aaatcaaagccaaca

SEQ ID NO: 1419105 - DNA, 15 bp, Homo sapiens
caaatcaaagccaac

SEQ ID NO: 1419106 - DNA, 15 bp, Homo sapiens
tcaaatcaaagccaa

SEQ ID NO: 1419107 - DNA, 15 bp, Homo sapiens
ttcaaatcaaagcca

SEQ ID NO: 1419108 - DNA, 15 bp, Homo sapiens
tttcaaatcaaagcc

SEQ ID NO: 1419109 - DNA, 15 bp, Homo sapiens
atttcaaatcaaagc

SEQ ID NO: 1419110 - DNA, 15 bp, Homo sapiens
aatttcaaatcaaag

SEQ ID NO: 1419111 - DNA, 15 bp, Homo sapiens
gcaatttcaaatcaa

SEQ ID NO: 1419112 - DNA, 15 bp, Homo sapiens
cgcaatttcaaatca

SEQ ID NO: 1419113 - DNA, 15 bp, Homo sapiens
tcgcaatttcaaatc

SEQ ID NO: 1419114 - DNA, 15 bp, Homo sapiens
ttcgcaatttcaaat

SEQ ID NO: 1419115 - DNA, 15 bp, Homo sapiens
tttcgcaatttcaaa

SEQ ID NO: 1419116 - DNA, 15 bp, Homo sapiens
atttcgcaatttcaa

SEQ ID NO: 1419117 - DNA, 15 bp, Homo sapiens
aatttcgcaatttca

SEQ ID NO: 1419118 - DNA, 15 bp, Homo sapiens
taatttcgcaatttc

SEQ ID NO: 1419119 - DNA, 15 bp, Homo sapiens
ataatttcgcaattt

SEQ ID NO: 1419120 - DNA, 15 bp, Homo sapiens
aataatttcgcaatt

SEQ ID NO: 1419121 - DNA, 15 bp, Homo sapiens
aaataatttcgcaat

SEQ ID NO: 1419122 - DNA, 15 bp, Homo sapiens
gaaataatttcgcaa

SEQ ID NO: 1419123 - DNA, 15 bp, Homo sapiens
agaaataatttcgca

SEQ ID NO: 1419124 - DNA, 15 bp, Homo sapiens
aagaaataatttcgc

SEQ ID NO: 1419125 - DNA, 15 bp, Homo sapiens
gaagaaataatttcg

SEQ ID NO: 1419126 - DNA, 15 bp, Homo sapiens
tgaagaaataatttc

SEQ ID NO: 1419127 - DNA, 15 bp, Homo sapiens
ttgaagaaataattt

SEQ ID NO: 1419128 - DNA, 15 bp, Homo sapiens
gttgaagaaataatt

SEQ ID NO: 1419129 - DNA, 15 bp, Homo sapiens
tgttgaagaaataat

SEQ ID NO: 1419130 - DNA, 15 bp, Homo sapiens
atgttgaagaaataa

SEQ ID NO: 1419131 - DNA, 15 bp, Homo sapiens
catgttgaagaaata

SEQ ID NO: 1419132 - DNA, 15 bp, Homo sapiens
tcatgttgaagaaat

SEQ ID NO: 1419133 - DNA, 15 bp, Homo sapiens
ttcatgttgaagaaa

SEQ ID NO: 1419134 - DNA, 15 bp, Homo sapiens
tttcatgttgaagaa

SEQ ID NO: 1419135 - DNA, 15 bp, Homo sapiens
ttttcatgttgaaga

SEQ ID NO: 1419136 - DNA, 15 bp, Homo sapiens
tttttcatgttgaag

SEQ ID NO: 1419137 - DNA, 15 bp, Homo sapiens
atttttcatgttgaa

SEQ ID NO: 1419138 - DNA, 15 bp, Homo sapiens
tatttttcatgttga

SEQ ID NO: 1419139 - DNA, 15 bp, Homo sapiens
ctatttttcatgttg

SEQ ID NO: 1419140 - DNA, 15 bp, Homo sapiens
tctatttttcatgtt

SEQ ID NO: 1419141 - DNA, 15 bp, Homo sapiens
ctctatttttcatgt

SEQ ID NO: 1419142 - DNA, 15 bp, Homo sapiens
cctctatttttcatg

SEQ ID NO: 1419143 - DNA, 15 bp, Homo sapiens
tcctctatttttcat

SEQ ID NO: 1419144 - DNA, 15 bp, Homo sapiens
ttcctctatttttca

SEQ ID NO: 1419145 - DNA, 15 bp, Homo sapiens
tttcctctatttttc

SEQ ID NO: 1419146 - DNA, 15 bp, Homo sapiens
gtttcctctattttt

SEQ ID NO: 1419147 - DNA, 15 bp, Homo sapiens
tgtttcctctatttt

SEQ ID NO: 1419148 - DNA, 15 bp, Homo sapiens
ttgtttcctctattt

SEQ ID NO: 1419149 - DNA, 15 bp, Homo sapiens
tttgtttcctctatt

SEQ ID NO: 1419150 - DNA, 15 bp, Homo sapiens
gtttgtttcctctat

SEQ ID NO: 1419151 - DNA, 15 bp, Homo sapiens
agtttgtttcctcta

SEQ ID NO: 1419152 - DNA, 15 bp, Homo sapiens
cagtttgtttcctct

SEQ ID NO: 1419153 - DNA, 15 bp, Homo sapiens
tcagtttgtttcctc

SEQ ID NO: 1419154 - DNA, 15 bp, Homo sapiens
ttcagtttgtttcct

SEQ ID NO: 1419155 - DNA, 15 bp, Homo sapiens
cttcagtttgtttcc

SEQ ID NO: 1419156 - DNA, 15 bp, Homo sapiens
acttcagtttgtttc

SEQ ID NO: 1419157 - DNA, 15 bp, Homo sapiens
aacttcagtttgttt

SEQ ID NO: 1419158 - DNA, 15 bp, Homo sapiens
aaacttcagtttgtt

SEQ ID NO: 1419159 - DNA, 15 bp, Homo sapiens
aaaacttcagtttgt

SEQ ID NO: 1419160 - DNA, 15 bp, Homo sapiens
taaaacttcagtttg

SEQ ID NO: 1419161 - DNA, 15 bp, Homo sapiens
gtaaaacttcagttt

SEQ ID NO: 1419162 - DNA, 15 bp, Homo sapiens
tgtaaaacttcagtt

SEQ ID NO: 1419163 - DNA, 15 bp, Homo sapiens
ctgtaaaacttcagt

SEQ ID NO: 1419164 - DNA, 15 bp, Homo sapiens
tctgtaaaacttcag

SEQ ID NO: 1419165 - DNA, 15 bp, Homo sapiens
atctgtaaaacttca

SEQ ID NO: 1419166 - DNA, 15 bp, Homo sapiens
tatctgtaaaacttc

SEQ ID NO: 1419167 - DNA, 15 bp, Homo sapiens
atatctgtaaaactt

SEQ ID NO: 1419168 - DNA, 15 bp, Homo sapiens
gatatctgtaaaact

SEQ ID NO: 1419169 - DNA, 15 bp, Homo sapiens
tgatatctgtaaaac

SEQ ID NO: 1419170 - DNA, 15 bp, Homo sapiens
ttgatatctgtaaaa

SEQ ID NO: 1419171 - DNA, 15 bp, Homo sapiens
tttgatatctgtaaa

SEQ ID NO: 1419172 - DNA, 15 bp, Homo sapiens
gtttgatatctgtaa

SEQ ID NO: 1419173 - DNA, 15 bp, Homo sapiens
agtttgatatctgta

SEQ ID NO: 1419174 - DNA, 15 bp, Homo sapiens
cagtttgatatctgt

SEQ ID NO: 1419175 - DNA, 15 bp, Homo sapiens
tcagtttgatatctg

SEQ ID NO: 1419176 - DNA, 15 bp, Homo sapiens
ttcagtttgatatct

SEQ ID NO: 1419177 - DNA, 15 bp, Homo sapiens
attcagtttgatatc

SEQ ID NO: 1419178 - DNA, 15 bp, Homo sapiens
cattcagtttgatat

SEQ ID NO: 1419179 - DNA, 15 bp, Homo sapiens
ccattcagtttgata

SEQ ID NO: 1419180 - DNA, 15 bp, Homo sapiens
accattcagtttgat

SEQ ID NO: 1419181 - DNA, 15 bp, Homo sapiens
caccattcagtttga

SEQ ID NO: 1419182 - DNA, 15 bp, Homo sapiens
acaccattcagtttg

SEQ ID NO: 1419183 - DNA, 15 bp, Homo sapiens
cacaccattcagttt

SEQ ID NO: 1419184 - DNA, 15 bp, Homo sapiens
tcacaccattcagtt

SEQ ID NO: 1419185 - DNA, 15 bp, Homo sapiens
gtcacaccattcagt

SEQ ID NO: 1419186 - DNA, 15 bp, Homo sapiens
agtcacaccattcag

SEQ ID NO: 1419187 - DNA, 15 bp, Homo sapiens
gagtcacaccattca

SEQ ID NO: 1419188 - DNA, 15 bp, Homo sapiens
tgagtcacaccattc

SEQ ID NO: 1419189 - DNA, 15 bp, Homo sapiens
ttgagtcacaccatt

SEQ ID NO: 1419190 - DNA, 15 bp, Homo sapiens
tttgagtcacaccat

SEQ ID NO: 1419191 - DNA, 15 bp, Homo sapiens
atttgagtcacacca

SEQ ID NO: 1419192 - DNA, 15 bp, Homo sapiens
catttgagtcacacc

SEQ ID NO: 1419193 - DNA, 15 bp, Homo sapiens
acatttgagtcacac

SEQ ID NO: 1419194 - DNA, 15 bp, Homo sapiens
gacatttgagtcaca

SEQ ID NO: 1419195 - DNA, 15 bp, Homo sapiens
agacatttgagtcac

SEQ ID NO: 1419196 - DNA, 15 bp, Homo sapiens
aagacatttgagtca

SEQ ID NO: 1419197 - DNA, 15 bp, Homo sapiens
aaagacatttgagtc

SEQ ID NO: 1419198 - DNA, 15 bp, Homo sapiens
aaaagacatttgagt

SEQ ID NO: 1419199 - DNA, 15 bp, Homo sapiens
aaaaagacatttgag

SEQ ID NO: 1419200 - DNA, 15 bp, Homo sapiens
gaaaaagacatttga

SEQ ID NO: 1419201 - DNA, 15 bp, Homo sapiens
tgaaaaagacatttg

SEQ ID NO: 1419202 - DNA, 15 bp, Homo sapiens
ctgaaaaagacattt

SEQ ID NO: 1419203 - DNA, 15 bp, Homo sapiens
gctgaaaaagacatt

SEQ ID NO: 1419204 - DNA, 15 bp, Homo sapiens
agctgaaaaagacat

SEQ ID NO: 1419205 - DNA, 15 bp, Homo sapiens
aagctgaaaaagaca

SEQ ID NO: 1419206 - DNA, 15 bp, Homo sapiens
gaagctgaaaaagac

SEQ ID NO: 1419207 - DNA, 15 bp, Homo sapiens
ggaagctgaaaaaga

SEQ ID NO: 1419208 - DNA, 15 bp, Homo sapiens
tggaagctgaaaaag

SEQ ID NO: 1419209 - DNA, 15 bp, Homo sapiens
ttggaagctgaaaaa

SEQ ID NO: 1419210 - DNA, 15 bp, Homo sapiens
gttggaagctgaaaa

SEQ ID NO: 1419211 - DNA, 15 bp, Homo sapiens
tgttggaagctgaaa

SEQ ID NO: 1419212 - DNA, 15 bp, Homo sapiens
ttgttggaagctgaa

SEQ ID NO: 1419213 - DNA, 15 bp, Homo sapiens
cttgttggaagctga

SEQ ID NO: 1419214 - DNA, 15 bp, Homo sapiens
acttgttggaagctg

SEQ ID NO: 1419215 - DNA, 15 bp, Homo sapiens
tacttgttggaagct

SEQ ID NO: 1419216 - DNA, 15 bp, Homo sapiens
ttacttgttggaagc

SEQ ID NO: 1419217 - DNA, 15 bp, Homo sapiens
attacttgttggaag

SEQ ID NO: 1419218 - DNA, 15 bp, Homo sapiens
aattacttgttggaa

SEQ ID NO: 1419219 - DNA, 15 bp, Homo sapiens
aaattacttgttgga

SEQ ID NO: 1419220 - DNA, 15 bp, Homo sapiens
taaattacttgttgg

SEQ ID NO: 1419221 - DNA, 15 bp, Homo sapiens
ttaaattacttgttg

SEQ ID NO: 1419222 - DNA, 15 bp, Homo sapiens
attaaattacttgtt

SEQ ID NO: 1419223 - DNA, 15 bp, Homo sapiens
cattaaattacttgt

SEQ ID NO: 1419224 - DNA, 15 bp, Homo sapiens
ccattaaattacttg

SEQ ID NO: 1419225 - DNA, 15 bp, Homo sapiens
tccattaaattactt

SEQ ID NO: 1419226 - DNA, 15 bp, Homo sapiens
ttccattaaattact

SEQ ID NO: 1419227 - DNA, 15 bp, Homo sapiens
tttccattaaattac

SEQ ID NO: 1419228 - DNA, 15 bp, Homo sapiens
atttccattaaatta

SEQ ID NO: 1419229 - DNA, 15 bp, Homo sapiens
tatttccattaaatt

SEQ ID NO: 1419230 - DNA, 15 bp, Homo sapiens
atatttccattaaat

SEQ ID NO: 1419231 - DNA, 15 bp, Homo sapiens
tatatttccattaaa

SEQ ID NO: 1419232 - DNA, 15 bp, Homo sapiens
ctatatttccattaa

SEQ ID NO: 1419233 - DNA, 15 bp, Homo sapiens
actatatttccatta

SEQ ID NO: 1419234 - DNA, 15 bp, Homo sapiens
cactatatttccatt

SEQ ID NO: 1419235 - DNA, 15 bp, Homo sapiens
tcactatatttccat

SEQ ID NO: 1419236 - DNA, 15 bp, Homo sapiens
ttcactatatttcca

SEQ ID NO: 1419237 - DNA, 15 bp, Homo sapiens
gttcactatatttcc

SEQ ID NO: 1419238 - DNA, 15 bp, Homo sapiens
ggttcactatatttc

SEQ ID NO: 1419239 - DNA, 15 bp, Homo sapiens
cggttcactatattt

SEQ ID NO: 1419240 - DNA, 15 bp, Homo sapiens
acggttcactatatt

SEQ ID NO: 1419241 - DNA, 15 bp, Homo sapiens
aacggttcactatat

SEQ ID NO: 1419242 - DNA, 15 bp, Homo sapiens
aaacggttcactata

SEQ ID NO: 1419243 - DNA, 15 bp, Homo sapiens
gaaacggttcactat

SEQ ID NO: 1419244 - DNA, 15 bp, Homo sapiens
tgaaacggttcacta

SEQ ID NO: 1419245 - DNA, 15 bp, Homo sapiens
gtgaaacggttcact

SEQ ID NO: 1419246 - DNA, 15 bp, Homo sapiens
agtgaaacggttcac

SEQ ID NO: 1419247 - DNA, 15 bp, Homo sapiens
aagtgaaacggttca

SEQ ID NO: 1419248 - DNA, 15 bp, Homo sapiens
caagtgaaacggttc

SEQ ID NO: 1419249 - DNA, 15 bp, Homo sapiens
acaagtgaaacggtt

SEQ ID NO: 1419250 - DNA, 15 bp, Homo sapiens
tacaagtgaaacggt

SEQ ID NO: 1419251 - DNA, 15 bp, Homo sapiens
ctacaagtgaaacgg

SEQ ID NO: 1419252 - DNA, 15 bp, Homo sapiens
cctacaagtgaaacg

SEQ ID NO: 1419253 - DNA, 15 bp, Homo sapiens
acctacaagtgaaac

SEQ ID NO: 1419254 - DNA, 15 bp, Homo sapiens
aacctacaagtgaaa

SEQ ID NO: 1419255 - DNA, 15 bp, Homo sapiens
taacctacaagtgaa

SEQ ID NO: 1419256 - DNA, 15 bp, Homo sapiens
ttaacctacaagtga

SEQ ID NO: 1419257 - DNA, 15 bp, Homo sapiens
tttaacctacaagtg

SEQ ID NO: 1419258 - DNA, 15 bp, Homo sapiens
ttttaacctacaagt

SEQ ID NO: 1419259 - DNA, 15 bp, Homo sapiens
tttttaacctacaag

SEQ ID NO: 1419260 - DNA, 15 bp, Homo sapiens
atttttaacctacaa

SEQ ID NO: 1419261 - DNA, 15 bp, Homo sapiens
catttttaacctaca

SEQ ID NO: 1419262 - DNA, 15 bp, Homo sapiens
acatttttaacctac

SEQ ID NO: 1419263 - DNA, 15 bp, Homo sapiens
tacatttttaaccta

SEQ ID NO: 1419264 - DNA, 15 bp, Homo sapiens
ctacatttttaacct

SEQ ID NO: 1419265 - DNA, 15 bp, Homo sapiens
tctacatttttaacc

SEQ ID NO: 1419266 - DNA, 15 bp, Homo sapiens
gtctacatttttaac

SEQ ID NO: 1419267 - DNA, 15 bp, Homo sapiens
tgtctacatttttaa

SEQ ID NO: 1419268 - DNA, 15 bp, Homo sapiens
ctgtctacattttta

SEQ ID NO: 1419269 - DNA, 15 bp, Homo sapiens
actgtctacattttt

SEQ ID NO: 1419270 - DNA, 15 bp, Homo sapiens
tactgtctacatttt

SEQ ID NO: 1419271 - DNA, 15 bp, Homo sapiens
atactgtctacattt

SEQ ID NO: 1419272 - DNA, 15 bp, Homo sapiens
aatactgtctacatt

SEQ ID NO: 1419273 - DNA, 15 bp, Homo sapiens
taatactgtctacat

SEQ ID NO: 1419274 - DNA, 15 bp, Homo sapiens
ttaatactgtctaca

SEQ ID NO: 1419275 - DNA, 15 bp, Homo sapiens
attaatactgtctac

SEQ ID NO: 1419276 - DNA, 15 bp, Homo sapiens
gattaatactgtcta

SEQ ID NO: 1419277 - DNA, 15 bp, Homo sapiens
tgattaatactgtct

SEQ ID NO: 1419278 - DNA, 15 bp, Homo sapiens
ctgattaatactgtc

SEQ ID NO: 1419279 - DNA, 15 bp, Homo sapiens
tctgattaatactgt

SEQ ID NO: 1419280 - DNA, 15 bp, Homo sapiens
ctctgattaatactg

SEQ ID NO: 1419281 - DNA, 15 bp, Homo sapiens
tctctgattaatact

SEQ ID NO: 1419282 - DNA, 15 bp, Homo sapiens
ttctctgattaatac

SEQ ID NO: 1419283 - DNA, 15 bp, Homo sapiens
tttctctgattaata

SEQ ID NO: 1419284 - DNA, 15 bp, Homo sapiens
ttttctctgattaat

SEQ ID NO: 1419285 - DNA, 15 bp, Homo sapiens
gttttctctgattaa

SEQ ID NO: 1419286 - DNA, 15 bp, Homo sapiens
agttttctctgatta

SEQ ID NO: 1419287 - DNA, 15 bp, Homo sapiens
aagttttctctgatt

SEQ ID NO: 1419288 - DNA, 15 bp, Homo sapiens
aaagttttctctgat

SEQ ID NO: 1419289 - DNA, 15 bp, Homo sapiens
aaaagttttctctga

SEQ ID NO: 1419290 - DNA, 15 bp, Homo sapiens
aaaaagttttctctg

SEQ ID NO: 1419291 - DNA, 15 bp, Homo sapiens
aaaaaagttttctct

SEQ ID NO: 1419292 - DNA, 15 bp, Homo sapiens
taaaaaagttttctc

SEQ ID NO: 1419293 - DNA, 15 bp, Homo sapiens
ttaaaaaagttttct

SEQ ID NO: 1419294 - DNA, 15 bp, Homo sapiens
tttaaaaaagttttc

SEQ ID NO: 1419295 - DNA, 15 bp, Homo sapiens
atttaaaaaagtttt

SEQ ID NO: 1419296 - DNA, 15 bp, Homo sapiens
catttaaaaaagttt

SEQ ID NO: 1419297 - DNA, 15 bp, Homo sapiens
ccatttaaaaaagtt

SEQ ID NO: 1419298 - DNA, 15 bp, Homo sapiens
cccatttaaaaaagt

SEQ ID NO: 1419299 - DNA, 15 bp, Homo sapiens
acccatttaaaaaag

SEQ ID NO: 1419300 - DNA, 15 bp, Homo sapiens
aacccatttaaaaaa

SEQ ID NO: 1419301 - DNA, 15 bp, Homo sapiens
caacccatttaaaaa

SEQ ID NO: 1419302 - DNA, 15 bp, Homo sapiens
acaacccatttaaaa

SEQ ID NO: 1419303 - DNA, 15 bp, Homo sapiens
cacaacccatttaaa

SEQ ID NO: 1419304 - DNA, 15 bp, Homo sapiens
ccacaacccatttaa

SEQ ID NO: 1419305 - DNA, 15 bp, Homo sapiens
gccacaacccattta

SEQ ID NO: 1419306 - DNA, 15 bp, Homo sapiens
tgccacaacccattt

SEQ ID NO: 1419307 - DNA, 15 bp, Homo sapiens
ctgccacaacccatt

SEQ ID NO: 1419308 - DNA, 15 bp, Homo sapiens
gctgccacaacccat

SEQ ID NO: 1419309 - DNA, 15 bp, Homo sapiens
tgctgccacaaccca

SEQ ID NO: 1419310 - DNA, 15 bp, Homo sapiens
atgctgccacaaccc

SEQ ID NO: 1419311 - DNA, 15 bp, Homo sapiens
aatgctgccacaacc

SEQ ID NO: 1419312 - DNA, 15 bp, Homo sapiens
taatgctgccacaac

SEQ ID NO: 1419313 - DNA, 15 bp, Homo sapiens
ctaatgctgccacaa

SEQ ID NO: 1419314 - DNA, 15 bp, Homo sapiens
tctaatgctgccaca

SEQ ID NO: 1419315 - DNA, 15 bp, Homo sapiens
ttctaatgctgccac

SEQ ID NO: 1419316 - DNA, 15 bp, Homo sapiens
tttctaatgctgcca

SEQ ID NO: 1419317 - DNA, 15 bp, Homo sapiens
atttctaatgctgcc

SEQ ID NO: 1419318 - DNA, 15 bp, Homo sapiens
tatttctaatgctgc

SEQ ID NO: 1419319 - DNA, 15 bp, Homo sapiens
ttatttctaatgctg

SEQ ID NO: 1419320 - DNA, 15 bp, Homo sapiens
tttatttctaatgct

SEQ ID NO: 1419321 - DNA, 15 bp, Homo sapiens
ttttatttctaatgc

SEQ ID NO: 1419322 - DNA, 15 bp, Homo sapiens
gttttatttctaatg

SEQ ID NO: 1419323 - DNA, 15 bp, Homo sapiens
tgttttatttctaat

SEQ ID NO: 1419324 - DNA, 15 bp, Homo sapiens
atgttttatttctaa

SEQ ID NO: 1419325 - DNA, 15 bp, Homo sapiens
aatgttttatttcta

SEQ ID NO: 1419326 - DNA, 15 bp, Homo sapiens
gaatgttttatttct

SEQ ID NO: 1419327 - DNA, 15 bp, Homo sapiens
agaatgttttatttc

SEQ ID NO: 1419328 - DNA, 15 bp, Homo sapiens
cagaatgttttattt

SEQ ID NO: 1419329 - DNA, 15 bp, Homo sapiens
tcagaatgttttatt

SEQ ID NO: 1419330 - DNA, 15 bp, Homo sapiens
ttcagaatgttttat

SEQ ID NO: 1419331 - DNA, 15 bp, Homo sapiens
attcagaatgtttta

SEQ ID NO: 1419332 - DNA, 15 bp, Homo sapiens
tattcagaatgtttt

SEQ ID NO: 1419333 - DNA, 15 bp, Homo sapiens
gtattcagaatgttt

SEQ ID NO: 1419334 - DNA, 15 bp, Homo sapiens
agtattcagaatgtt

SEQ ID NO: 1419335 - DNA, 15 bp, Homo sapiens
gagtattcagaatgt

SEQ ID NO: 1419336 - DNA, 15 bp, Homo sapiens
agagtattcagaatg

SEQ ID NO: 1419337 - DNA, 15 bp, Homo sapiens
aagagtattcagaat

SEQ ID NO: 1419338 - DNA, 15 bp, Homo sapiens
caagagtattcagaa

SEQ ID NO: 1419339 - DNA, 15 bp, Homo sapiens
ccaagagtattcaga

SEQ ID NO: 1419340 - DNA, 15 bp, Homo sapiens
tccaagagtattcag

SEQ ID NO: 1419341 - DNA, 15 bp, Homo sapiens
ttccaagagtattca

SEQ ID NO: 1419342 - DNA, 15 bp, Homo sapiens
gttccaagagtattc

SEQ ID NO: 1419343 - DNA, 15 bp, Homo sapiens
ggttccaagagtatt

SEQ ID NO: 1419344 - DNA, 15 bp, Homo sapiens
gggttccaagagtat

SEQ ID NO: 1419345 - DNA, 15 bp, Homo sapiens
tgggttccaagagta

SEQ ID NO: 1419346 - DNA, 15 bp, Homo sapiens
ttgggttccaagagt

SEQ ID NO: 1419347 - DNA, 15 bp, Homo sapiens
gttgggttccaagag

SEQ ID NO: 1419348 - DNA, 15 bp, Homo sapiens
ggttgggttccaaga

SEQ ID NO: 1419349 - DNA, 15 bp, Homo sapiens
tggttgggttccaag

SEQ ID NO: 1419350 - DNA, 15 bp, Homo sapiens
ttggttgggttccaa

SEQ ID NO: 1419351 - DNA, 15 bp, Homo sapiens
tttggttgggttcca

SEQ ID NO: 1419352 - DNA, 15 bp, Homo sapiens
ctttggttgggttcc

SEQ ID NO: 1419353 - DNA, 15 bp, Homo sapiens
actttggttgggttc

SEQ ID NO: 1419354 - DNA, 15 bp, Homo sapiens
tactttggttgggtt

SEQ ID NO: 1419355 - DNA, 15 bp, Homo sapiens
gtactttggttgggt

SEQ ID NO: 1419356 - DNA, 15 bp, Homo sapiens
agtactttggttggg

SEQ ID NO: 1419357 - DNA, 15 bp, Homo sapiens
aagtactttggttgg

SEQ ID NO: 1419358 - DNA, 15 bp, Homo sapiens
gaagtactttggttg

SEQ ID NO: 1419359 - DNA, 15 bp, Homo sapiens
agaagtactttggtt

SEQ ID NO: 1419360 - DNA, 15 bp, Homo sapiens
cagaagtactttggt

SEQ ID NO: 1419361 - DNA, 15 bp, Homo sapiens
acagaagtactttgg

SEQ ID NO: 1419362 - DNA, 15 bp, Homo sapiens
cacagaagtactttg

SEQ ID NO: 1419363 - DNA, 15 bp, Homo sapiens
tcacagaagtacttt

SEQ ID NO: 1419364 - DNA, 15 bp, Homo sapiens
ttcacagaagtactt

SEQ ID NO: 1419365 - DNA, 15 bp, Homo sapiens
tttcacagaagtact

SEQ ID NO: 1419366 - DNA, 15 bp, Homo sapiens
ttttcacagaagtac

SEQ ID NO: 1419367 - DNA, 15 bp, Homo sapiens
tttttcacagaagta

SEQ ID NO: 1419368 - DNA, 15 bp, Homo sapiens
atttttcacagaagt

SEQ ID NO: 1419369 - DNA, 15 bp, Homo sapiens
aatttttcacagaag

SEQ ID NO: 1419370 - DNA, 15 bp, Homo sapiens
aaatttttcacagaa

SEQ ID NO: 1419371 - DNA, 15 bp, Homo sapiens
taaatttttcacaga

SEQ ID NO: 1419372 - DNA, 15 bp, Homo sapiens
ataaatttttcacag

SEQ ID NO: 1419373 - DNA, 15 bp, Homo sapiens
cataaatttttcaca

SEQ ID NO: 1419374 - DNA, 15 bp, Homo sapiens
tcataaatttttcac

SEQ ID NO: 1419375 - DNA, 15 bp, Homo sapiens
ctcataaatttttca

SEQ ID NO: 1419376 - DNA, 15 bp, Homo sapiens
tctcataaatttttc

SEQ ID NO: 1419377 - DNA, 15 bp, Homo sapiens
ttctcataaattttt

SEQ ID NO: 1419378 - DNA, 15 bp, Homo sapiens
tttctcataaatttt

SEQ ID NO: 1419379 - DNA, 15 bp, Homo sapiens
atttctcataaattt

SEQ ID NO: 1419380 - DNA, 15 bp, Homo sapiens
aatttctcataaatt

SEQ ID NO: 1419381 - DNA, 15 bp, Homo sapiens
aaatttctcataaat

SEQ ID NO: 1419382 - DNA, 15 bp, Homo sapiens
gaaatttctcataaa

SEQ ID NO: 1419383 - DNA, 15 bp, Homo sapiens
agaaatttctcataa

SEQ ID NO: 1419384 - DNA, 15 bp, Homo sapiens
aagaaatttctcata

SEQ ID NO: 1419385 - DNA, 15 bp, Homo sapiens
caagaaatttctcat

SEQ ID NO: 1419386 - DNA, 15 bp, Homo sapiens
tcaagaaatttctca

SEQ ID NO: 1419387 - DNA, 15 bp, Homo sapiens
atcaagaaatttctc

SEQ ID NO: 1419388 - DNA, 15 bp, Homo sapiens
tatcaagaaatttct

SEQ ID NO: 1419389 - DNA, 15 bp, Homo sapiens
ctatcaagaaatttc

SEQ ID NO: 1419390 - DNA, 15 bp, Homo sapiens
tctatcaagaaattt

SEQ ID NO: 1419391 - DNA, 15 bp, Homo sapiens
gtctatcaagaaatt

SEQ ID NO: 1419392 - DNA, 15 bp, Homo sapiens
ggtctatcaagaaat

SEQ ID NO: 1419393 - DNA, 15 bp, Homo sapiens
aggtctatcaagaaa

SEQ ID NO: 1419394 - DNA, 15 bp, Homo sapiens
aaggtctatcaagaa

SEQ ID NO: 1419395 - DNA, 15 bp, Homo sapiens
aaaggtctatcaaga

SEQ ID NO: 1419396 - DNA, 15 bp, Homo sapiens
taaaggtctatcaag

SEQ ID NO: 1419397 - DNA, 15 bp, Homo sapiens
ttaaaggtctatcaa

SEQ ID NO: 1419398 - DNA, 15 bp, Homo sapiens
tttaaaggtctatca

SEQ ID NO: 1419399 - DNA, 15 bp, Homo sapiens
atttaaaggtctatc

SEQ ID NO: 1419400 - DNA, 15 bp, Homo sapiens
aatttaaaggtctat

SEQ ID NO: 1419401 - DNA, 15 bp, Homo sapiens
aaatttaaaggtcta

SEQ ID NO: 1419402 - DNA, 15 bp, Homo sapiens
taaatttaaaggtct

SEQ ID NO: 1419403 - DNA, 15 bp, Homo sapiens
ataaatttaaaggtc

SEQ ID NO: 1419404 - DNA, 15 bp, Homo sapiens
gataaatttaaaggt

SEQ ID NO: 1419405 - DNA, 15 bp, Homo sapiens
agataaatttaaagg

SEQ ID NO: 1419406 - DNA, 15 bp, Homo sapiens
aagataaatttaaag

SEQ ID NO: 1419407 - DNA, 15 bp, Homo sapiens
aaagataaatttaaa

SEQ ID NO: 1419408 - DNA, 15 bp, Homo sapiens
taaagataaatttaa

SEQ ID NO: 1419409 - DNA, 15 bp, Homo sapiens
ttaaagataaattta

SEQ ID NO: 1419410 - DNA, 15 bp, Homo sapiens
cttaaagataaattt

SEQ ID NO: 1419411 - DNA, 15 bp, Homo sapiens
tcttaaagataaatt

SEQ ID NO: 1419412 - DNA, 15 bp, Homo sapiens
ttcttaaagataaat

SEQ ID NO: 1419413 - DNA, 15 bp, Homo sapiens
cttcttaaagataaa

SEQ ID NO: 1419414 - DNA, 15 bp, Homo sapiens
acttcttaaagataa

SEQ ID NO: 1419415 - DNA, 15 bp, Homo sapiens
tacttcttaaagata

SEQ ID NO: 1419416 - DNA, 15 bp, Homo sapiens
ttacttcttaaagat

SEQ ID NO: 1419417 - DNA, 15 bp, Homo sapiens
attacttcttaaaga

SEQ ID NO: 1419418 - DNA, 15 bp, Homo sapiens
cattacttcttaaag

SEQ ID NO: 1419419 - DNA, 15 bp, Homo sapiens
acattacttcttaaa

SEQ ID NO: 1419420 - DNA, 15 bp, Homo sapiens
cacattacttcttaa

SEQ ID NO: 1419421 - DNA, 15 bp, Homo sapiens
gcacattacttctta

SEQ ID NO: 1419422 - DNA, 15 bp, Homo sapiens
tgcacattacttctt

SEQ ID NO: 1419423 - DNA, 15 bp, Homo sapiens
ttgcacattacttct

SEQ ID NO: 1419424 - DNA, 15 bp, Homo sapiens
tttgcacattacttc

SEQ ID NO: 1419425 - DNA, 15 bp, Homo sapiens
atttgcacattactt

SEQ ID NO: 1419426 - DNA, 15 bp, Homo sapiens
catttgcacattact

SEQ ID NO: 1419427 - DNA, 15 bp, Homo sapiens
tcatttgcacattac

SEQ ID NO: 1419428 - DNA, 15 bp, Homo sapiens
ttcatttgcacatta

SEQ ID NO: 1419429 - DNA, 15 bp, Homo sapiens
cttcatttgcacatt

SEQ ID NO: 1419430 - DNA, 15 bp, Homo sapiens
ccttcatttgcacat

SEQ ID NO: 1419431 - DNA, 15 bp, Homo sapiens
accttcatttgcaca

SEQ ID NO: 1419432 - DNA, 15 bp, Homo sapiens
taccttcatttgcac

SEQ ID NO: 1419433 - DNA, 15 bp, Homo sapiens
ttaccttcatttgca

SEQ ID NO: 1419434 - DNA, 15 bp, Homo sapiens
cttaccttcatttgc

SEQ ID NO: 1419435 - DNA, 15 bp, Homo sapiens
gcttaccttcatttg

SEQ ID NO: 1419436 - DNA, 15 bp, Homo sapiens
ggcttaccttcattt

SEQ ID NO: 1419437 - DNA, 15 bp, Homo sapiens
tggcttaccttcatt

SEQ ID NO: 1419438 - DNA, 15 bp, Homo sapiens
atggcttaccttcat

SEQ ID NO: 1419439 - DNA, 15 bp, Homo sapiens
tatggcttaccttca

SEQ ID NO: 1419440 - DNA, 15 bp, Homo sapiens
ttatggcttaccttc

SEQ ID NO: 1419441 - DNA, 15 bp, Homo sapiens
cttatggcttacctt

SEQ ID NO: 1419442 - DNA, 15 bp, Homo sapiens
ccttatggcttacct

SEQ ID NO: 1419443 - DNA, 15 bp, Homo sapiens
accttatggcttacc

SEQ ID NO: 1419444 - DNA, 15 bp, Homo sapiens
caccttatggcttac

SEQ ID NO: 1419445 - DNA, 15 bp, Homo sapiens
ccaccttatggctta

SEQ ID NO: 1419446 - DNA, 15 bp, Homo sapiens
cccaccttatggctt

SEQ ID NO: 1419447 - DNA, 15 bp, Homo sapiens
tcccaccttatggct

SEQ ID NO: 1419448 - DNA, 15 bp, Homo sapiens
ttcccaccttatggc

SEQ ID NO: 1419449 - DNA, 15 bp, Homo sapiens
attcccaccttatgg

SEQ ID NO: 1419450 - DNA, 15 bp, Homo sapiens
cattcccaccttatg

SEQ ID NO: 1419451 - DNA, 15 bp, Homo sapiens
ccattcccaccttat

SEQ ID NO: 1419452 - DNA, 15 bp, Homo sapiens
cccattcccacctta

SEQ ID NO: 1419453 - DNA, 15 bp, Homo sapiens
acccattcccacctt

SEQ ID NO: 1419454 - DNA, 15 bp, Homo sapiens
tacccattcccacct

SEQ ID NO: 1419455 - DNA, 15 bp, Homo sapiens
ctacccattcccacc

SEQ ID NO: 1419456 - DNA, 15 bp, Homo sapiens
tctacccattcccac

SEQ ID NO: 1419457 - DNA, 15 bp, Homo sapiens
gtctacccattccca

SEQ ID NO: 1419458 - DNA, 15 bp, Homo sapiens
agtctacccattccc

SEQ ID NO: 1419459 - DNA, 15 bp, Homo sapiens
aagtctacccattcc

SEQ ID NO: 1419460 - DNA, 15 bp, Homo sapiens
aaagtctacccattc

SEQ ID NO: 1419461 - DNA, 15 bp, Homo sapiens
taaagtctacccatt

SEQ ID NO: 1419462 - DNA, 15 bp, Homo sapiens
gtaaagtctacccat

SEQ ID NO: 1419463 - DNA, 15 bp, Homo sapiens
ggtaaagtctaccca

SEQ ID NO: 1419464 - DNA, 15 bp, Homo sapiens
aggtaaagtctaccc

SEQ ID NO: 1419465 - DNA, 15 bp, Homo sapiens
aaggtaaagtctacc

SEQ ID NO: 1419466 - DNA, 15 bp, Homo sapiens
gaaggtaaagtctac

SEQ ID NO: 1419467 - DNA, 15 bp, Homo sapiens
tgaaggtaaagtcta

SEQ ID NO: 1419468 - DNA, 15 bp, Homo sapiens
ctgaaggtaaagtct

SEQ ID NO: 1419469 - DNA, 15 bp, Homo sapiens
actgaaggtaaagtc

SEQ ID NO: 1419470 - DNA, 15 bp, Homo sapiens
aactgaaggtaaagt

SEQ ID NO: 1419471 - DNA, 15 bp, Homo sapiens
aaactgaaggtaaag

SEQ ID NO: 1419472 - DNA, 15 bp, Homo sapiens
caaactgaaggtaaa

SEQ ID NO: 1419473 - DNA, 15 bp, Homo sapiens
gcaaactgaaggtaa

SEQ ID NO: 1419474 - DNA, 15 bp, Homo sapiens
agcaaactgaaggta

SEQ ID NO: 1419475 - DNA, 15 bp, Homo sapiens
cagcaaactgaaggt

SEQ ID NO: 1419476 - DNA, 15 bp, Homo sapiens
ccagcaaactgaagg

SEQ ID NO: 1419477 - DNA, 15 bp, Homo sapiens
gccagcaaactgaag

SEQ ID NO: 1419478 - DNA, 15 bp, Homo sapiens
ggccagcaaactgaa

SEQ ID NO: 1419479 - DNA, 15 bp, Homo sapiens
aggccagcaaactga

SEQ ID NO: 1419480 - DNA, 15 bp, Homo sapiens
taggccagcaaactg

SEQ ID NO: 1419481 - DNA, 15 bp, Homo sapiens
ctaggccagcaaact

SEQ ID NO: 1419482 - DNA, 15 bp, Homo sapiens
tctaggccagcaaac

SEQ ID NO: 1419483 - DNA, 15 bp, Homo sapiens
atctaggccagcaaa

SEQ ID NO: 1419484 - DNA, 15 bp, Homo sapiens
tatctaggccagcaa

SEQ ID NO: 1419485 - DNA, 15 bp, Homo sapiens
atatctaggccagca

SEQ ID NO: 1419486 - DNA, 15 bp, Homo sapiens
gatatctaggccagc

SEQ ID NO: 1419487 - DNA, 15 bp, Homo sapiens
agatatctaggccag

SEQ ID NO: 1419488 - DNA, 15 bp, Homo sapiens
gagatatctaggcca

SEQ ID NO: 1419489 - DNA, 15 bp, Homo sapiens
tgagatatctaggcc

SEQ ID NO: 1419490 - DNA, 15 bp, Homo sapiens
atgagatatctaggc

SEQ ID NO: 1419491 - DNA, 15 bp, Homo sapiens
tatgagatatctagg

SEQ ID NO: 1419492 - DNA, 15 bp, Homo sapiens
atatgagatatctag

SEQ ID NO: 1419493 - DNA, 15 bp, Homo sapiens
aatatgagatatcta

SEQ ID NO: 1419494 - DNA, 15 bp, Homo sapiens
aaatatgagatatct

SEQ ID NO: 1419495 - DNA, 15 bp, Homo sapiens
taaatatgagatatc

SEQ ID NO: 1419496 - DNA, 15 bp, Homo sapiens
gtaaatatgagatat

SEQ ID NO: 1419497 - DNA, 15 bp, Homo sapiens
tgtaaatatgagata

SEQ ID NO: 1419498 - DNA, 15 bp, Homo sapiens
ttgtaaatatgagat

SEQ ID NO: 1419499 - DNA, 15 bp, Homo sapiens
cttgtaaatatgaga

SEQ ID NO: 1419500 - DNA, 15 bp, Homo sapiens
acttgtaaatatgag

SEQ ID NO: 1419501 - DNA, 15 bp, Homo sapiens
aacttgtaaatatga

SEQ ID NO: 1419502 - DNA, 15 bp, Homo sapiens
taacttgtaaatatg

SEQ ID NO: 1419503 - DNA, 15 bp, Homo sapiens
ctaacttgtaaatat

SEQ ID NO: 1419504 - DNA, 15 bp, Homo sapiens
actaacttgtaaata

SEQ ID NO: 1419505 - DNA, 15 bp, Homo sapiens
cactaacttgtaaat

SEQ ID NO: 1419506 - DNA, 15 bp, Homo sapiens
ccactaacttgtaaa

SEQ ID NO: 1419507 - DNA, 15 bp, Homo sapiens
tccactaacttgtaa

SEQ ID NO: 1419508 - DNA, 15 bp, Homo sapiens
atccactaacttgta

SEQ ID NO: 1419509 - DNA, 15 bp, Homo sapiens
aatccactaacttgt

SEQ ID NO: 1419510 - DNA, 15 bp, Homo sapiens
gaatccactaacttg

SEQ ID NO: 1419511 - DNA, 15 bp, Homo sapiens
agaatccactaactt

SEQ ID NO: 1419512 - DNA, 15 bp, Homo sapiens
aagaatccactaact

SEQ ID NO: 1419513 - DNA, 15 bp, Homo sapiens
aaagaatccactaac

SEQ ID NO: 1419514 - DNA, 15 bp, Homo sapiens
aaaagaatccactaa

SEQ ID NO: 1419515 - DNA, 15 bp, Homo sapiens
gaaaagaatccacta

SEQ ID NO: 1419516 - DNA, 15 bp, Homo sapiens
ggaaaagaatccact

SEQ ID NO: 1419517 - DNA, 15 bp, Homo sapiens
gggaaaagaatccac

SEQ ID NO: 1419518 - DNA, 15 bp, Homo sapiens
tgggaaaagaatcca

SEQ ID NO: 1419519 - DNA, 15 bp, Homo sapiens
atgggaaaagaatcc

SEQ ID NO: 1419520 - DNA, 15 bp, Homo sapiens
gatgggaaaagaatc

SEQ ID NO: 1419521 - DNA, 15 bp, Homo sapiens
agatgggaaaagaat

SEQ ID NO: 1419522 - DNA, 15 bp, Homo sapiens
tagatgggaaaagaa

SEQ ID NO: 1419523 - DNA, 15 bp, Homo sapiens
ttagatgggaaaaga

SEQ ID NO: 1419524 - DNA, 15 bp, Homo sapiens
tttagatgggaaaag

SEQ ID NO: 1419525 - DNA, 15 bp, Homo sapiens
atttagatgggaaaa

SEQ ID NO: 1419526 - DNA, 15 bp, Homo sapiens
tatttagatgggaaa

SEQ ID NO: 1419527 - DNA, 15 bp, Homo sapiens
gtatttagatgggaa

SEQ ID NO: 1419528 - DNA, 15 bp, Homo sapiens
tgtatttagatggga

SEQ ID NO: 1419529 - DNA, 15 bp, Homo sapiens
ttgtatttagatggg

SEQ ID NO: 1419530 - DNA, 15 bp, Homo sapiens
tttgtatttagatgg

SEQ ID NO: 1419531 - DNA, 15 bp, Homo sapiens
atttgtatttagatg

SEQ ID NO: 1419532 - DNA, 15 bp, Homo sapiens
tatttgtatttagat

SEQ ID NO: 1419533 - DNA, 15 bp, Homo sapiens
gtatttgtatttaga

SEQ ID NO: 1419534 - DNA, 15 bp, Homo sapiens
agtatttgtatttag

SEQ ID NO: 1419535 - DNA, 15 bp, Homo sapiens
cagtatttgtattta

SEQ ID NO: 1419536 - DNA, 15 bp, Homo sapiens
acagtatttgtattt

SEQ ID NO: 1419537 - DNA, 15 bp, Homo sapiens
tacagtatttgtatt

SEQ ID NO: 1419538 - DNA, 15 bp, Homo sapiens
atacagtatttgtat

SEQ ID NO: 1419539 - DNA, 15 bp, Homo sapiens
aatacagtatttgta

SEQ ID NO: 1419540 - DNA, 15 bp, Homo sapiens
aaatacagtatttgt

SEQ ID NO: 1419541 - DNA, 15 bp, Homo sapiens
aaaatacagtatttg

SEQ ID NO: 1419542 - DNA, 15 bp, Homo sapiens
taaaatacagtattt

SEQ ID NO: 1419543 - DNA, 15 bp, Homo sapiens
ttaaaatacagtatt

SEQ ID NO: 1419544 - DNA, 15 bp, Homo sapiens
tttaaaatacagtat

SEQ ID NO: 1419545 - DNA, 15 bp, Homo sapiens
ttttaaaatacagta

SEQ ID NO: 1419546 - DNA, 15 bp, Homo sapiens
tttttaaaatacagt

SEQ ID NO: 1419547 - DNA, 15 bp, Homo sapiens
atttttaaaatacag

SEQ ID NO: 1419548 - DNA, 15 bp, Homo sapiens
gatttttaaaataca

SEQ ID NO: 1419549 - DNA, 15 bp, Homo sapiens
tgatttttaaaatac

SEQ ID NO: 1419550 - DNA, 15 bp, Homo sapiens
ctgatttttaaaata

SEQ ID NO: 1419551 - DNA, 15 bp, Homo sapiens
tctgatttttaaaat

SEQ ID NO: 1419552 - DNA, 15 bp, Homo sapiens
cttctgatttttaaa

SEQ ID NO: 1419553 - DNA, 15 bp, Homo sapiens
tcttctgatttttaa

SEQ ID NO: 1419554 - DNA, 15 bp, Homo sapiens
atcttctgattttta

SEQ ID NO: 1419555 - DNA, 15 bp, Homo sapiens
aatcttctgattttt

SEQ ID NO: 1419556 - DNA, 15 bp, Homo sapiens
caatcttctgatttt

SEQ ID NO: 1419557 - DNA, 15 bp, Homo sapiens
tcaatcttctgattt

SEQ ID NO: 1419558 - DNA, 15 bp, Homo sapiens
ttcaatcttctgatt

SEQ ID NO: 1419559 - DNA, 15 bp, Homo sapiens
cttcaatcttctgat

SEQ ID NO: 1419560 - DNA, 15 bp, Homo sapiens
gcttcaatcttctga

SEQ ID NO: 1419561 - DNA, 15 bp, Homo sapiens
agcttcaatcttctg

SEQ ID NO: 1419562 - DNA, 15 bp, Homo sapiens
aagcttcaatcttct

SEQ ID NO: 1419563 - DNA, 15 bp, Homo sapiens
gaagcttcaatcttc

SEQ ID NO: 1419564 - DNA, 15 bp, Homo sapiens
ggaagcttcaatctt

SEQ ID NO: 1419565 - DNA, 15 bp, Homo sapiens
tggaagcttcaatct

SEQ ID NO: 1419566 - DNA, 15 bp, Homo sapiens
ttggaagcttcaatc

SEQ ID NO: 1419567 - DNA, 15 bp, Homo sapiens
tttggaagcttcaat

SEQ ID NO: 1419568 - DNA, 15 bp, Homo sapiens
ctttggaagcttcaa

SEQ ID NO: 1419569 - DNA, 15 bp, Homo sapiens
gctttggaagcttca

SEQ ID NO: 1419570 - DNA, 15 bp, Homo sapiens
tgctttggaagcttc

SEQ ID NO: 1419571 - DNA, 15 bp, Homo sapiens
ctgctttggaagctt

SEQ ID NO: 1419572 - DNA, 15 bp, Homo sapiens
tctgctttggaagct

SEQ ID NO: 1419573 - DNA, 15 bp, Homo sapiens
ttctgctttggaagc

SEQ ID NO: 1419574 - DNA, 15 bp, Homo sapiens
gttctgctttggaag

SEQ ID NO: 1419575 - DNA, 15 bp, Homo sapiens
agttctgctttggaa

SEQ ID NO: 1419576 - DNA, 15 bp, Homo sapiens
tagttctgctttgga

SEQ ID NO: 1419577 - DNA, 15 bp, Homo sapiens
ctagttctgctttgg

SEQ ID NO: 1419578 - DNA, 15 bp, Homo sapiens
tctagttctgctttg

SEQ ID NO: 1419579 - DNA, 15 bp, Homo sapiens
ctctagttctgcttt

SEQ ID NO: 1419580 - DNA, 15 bp, Homo sapiens
tctctagttctgctt

SEQ ID NO: 1419581 - DNA, 15 bp, Homo sapiens
ctctctagttctgct

SEQ ID NO: 1419582 - DNA, 15 bp, Homo sapiens
actctctagttctgc

SEQ ID NO: 1419583 - DNA, 15 bp, Homo sapiens
tactctctagttctg

SEQ ID NO: 1419584 - DNA, 15 bp, Homo sapiens
ctactctctagttct

SEQ ID NO: 1419585 - DNA, 15 bp, Homo sapiens
tctactctctagttc

SEQ ID NO: 1419586 - DNA, 15 bp, Homo sapiens
ttctactctctagtt

SEQ ID NO: 1419587 - DNA, 15 bp, Homo sapiens
tttctactctctagt

SEQ ID NO: 1419588 - DNA, 15 bp, Homo sapiens
ttttctactctctag

SEQ ID NO: 1419589 - DNA, 15 bp, Homo sapiens
tttttctactctcta

SEQ ID NO: 1419590 - DNA, 15 bp, Homo sapiens
ttttttctactctct

SEQ ID NO: 1419591 - DNA, 15 bp, Homo sapiens
cttttttctactctc

SEQ ID NO: 1419592 - DNA, 15 bp, Homo sapiens
ccttttttctactct

SEQ ID NO: 1419593 - DNA, 15 bp, Homo sapiens
gccttttttctactc

SEQ ID NO: 1419594 - DNA, 15 bp, Homo sapiens
tgccttttttctact

SEQ ID NO: 1419595 - DNA, 15 bp, Homo sapiens
ttgccttttttctac

SEQ ID NO: 1419596 - DNA, 15 bp, Homo sapiens
attgccttttttcta

SEQ ID NO: 1419597 - DNA, 15 bp, Homo sapiens
cattgccttttttct

SEQ ID NO: 1419598 - DNA, 15 bp, Homo sapiens
tcattgccttttttc

SEQ ID NO: 1419599 - DNA, 15 bp, Homo sapiens
ctcattgcctttttt

SEQ ID NO: 1419600 - DNA, 15 bp, Homo sapiens
actcattgccttttt

SEQ ID NO: 1419601 - DNA, 15 bp, Homo sapiens
aactcattgcctttt

SEQ ID NO: 1419602 - DNA, 15 bp, Homo sapiens
aaactcattgccttt

SEQ ID NO: 1419603 - DNA, 15 bp, Homo sapiens
aaaactcattgcctt

SEQ ID NO: 1419604 - DNA, 15 bp, Homo sapiens
caaaactcattgcct

SEQ ID NO: 1419605 - DNA, 15 bp, Homo sapiens
tcaaaactcattgcc

SEQ ID NO: 1419606 - DNA, 15 bp, Homo sapiens
atcaaaactcattgc

SEQ ID NO: 1419607 - DNA, 15 bp, Homo sapiens
gatcaaaactcattg

SEQ ID NO: 1419608 - DNA, 15 bp, Homo sapiens
ggatcaaaactcatt

SEQ ID NO: 1419609 - DNA, 15 bp, Homo sapiens
aggatcaaaactcat

SEQ ID NO: 1419610 - DNA, 15 bp, Homo sapiens
aaggatcaaaactca

SEQ ID NO: 1419611 - DNA, 15 bp, Homo sapiens
aaaggatcaaaactc

SEQ ID NO: 1419612 - DNA, 15 bp, Homo sapiens
taaaggatcaaaact

SEQ ID NO: 1419613 - DNA, 15 bp, Homo sapiens
ttaaaggatcaaaac

SEQ ID NO: 1419614 - DNA, 15 bp, Homo sapiens
tttaaaggatcaaaa

SEQ ID NO: 1419615 - DNA, 15 bp, Homo sapiens
atttaaaggatcaaa

SEQ ID NO: 1419616 - DNA, 15 bp, Homo sapiens
aatttaaaggatcaa

SEQ ID NO: 1419617 - DNA, 15 bp, Homo sapiens
aaatttaaaggatca

SEQ ID NO: 1419618 - DNA, 15 bp, Homo sapiens
aaaatttaaaggatc

SEQ ID NO: 1419619 - DNA, 15 bp, Homo sapiens
gaaaatttaaaggat

SEQ ID NO: 1419620 - DNA, 15 bp, Homo sapiens
tgaaaatttaaagga

SEQ ID NO: 1419621 - DNA, 15 bp, Homo sapiens
atgaaaatttaaagg

SEQ ID NO: 1419622 - DNA, 15 bp, Homo sapiens
aatgaaaatttaaag

SEQ ID NO: 1419623 - DNA, 15 bp, Homo sapiens
aaatgaaaatttaaa

SEQ ID NO: 1419624 - DNA, 15 bp, Homo sapiens
aaaatgaaaatttaa

SEQ ID NO: 1419625 - DNA, 15 bp, Homo sapiens
aaaaatgaaaattta

SEQ ID NO: 1419626 - DNA, 15 bp, Homo sapiens
taaaaatgaaaattt

SEQ ID NO: 1419627 - DNA, 15 bp, Homo sapiens
ttaaaaatgaaaatt

SEQ ID NO: 1419628 - DNA, 15 bp, Homo sapiens
gttaaaaatgaaaat

SEQ ID NO: 1419629 - DNA, 15 bp, Homo sapiens
ggttaaaaatgaaaa

SEQ ID NO: 1419630 - DNA, 15 bp, Homo sapiens
aggttaaaaatgaaa

SEQ ID NO: 1419631 - DNA, 15 bp, Homo sapiens
taggttaaaaatgaa

SEQ ID NO: 1419632 - DNA, 15 bp, Homo sapiens
ataggttaaaaatga

SEQ ID NO: 1419633 - DNA, 15 bp, Homo sapiens
aataggttaaaaatg

SEQ ID NO: 1419634 - DNA, 15 bp, Homo sapiens
aaataggttaaaaat

SEQ ID NO: 1419635 - DNA, 15 bp, Homo sapiens
aaaataggttaaaaa

SEQ ID NO: 1419636 - DNA, 15 bp, Homo sapiens
aaaaataggttaaaa

SEQ ID NO: 1419637 - DNA, 15 bp, Homo sapiens
gaaaaataggttaaa

SEQ ID NO: 1419638 - DNA, 15 bp, Homo sapiens
agaaaaataggttaa

SEQ ID NO: 1419639 - DNA, 15 bp, Homo sapiens
tagaaaaataggtta

SEQ ID NO: 1419640 - DNA, 15 bp, Homo sapiens
atagaaaaataggtt

SEQ ID NO: 1419641 - DNA, 15 bp, Homo sapiens
catagaaaaataggt

SEQ ID NO: 1419642 - DNA, 15 bp, Homo sapiens
tcatagaaaaatagg

SEQ ID NO: 1419643 - DNA, 15 bp, Homo sapiens
ttcatagaaaaatag

SEQ ID NO: 1419644 - DNA, 15 bp, Homo sapiens
cttcatagaaaaata

SEQ ID NO: 1419645 - DNA, 15 bp, Homo sapiens
tcttcatagaaaaat

SEQ ID NO: 1419646 - DNA, 15 bp, Homo sapiens
ctcttcatagaaaaa

SEQ ID NO: 1419647 - DNA, 15 bp, Homo sapiens
actcttcatagaaaa

SEQ ID NO: 1419648 - DNA, 15 bp, Homo sapiens
tactcttcatagaaa

SEQ ID NO: 1419649 - DNA, 15 bp, Homo sapiens
ttactcttcatagaa

SEQ ID NO: 1419650 - DNA, 15 bp, Homo sapiens
tttactcttcataga

SEQ ID NO: 1419651 - DNA, 15 bp, Homo sapiens
ttttactcttcatag

SEQ ID NO: 1419652 - DNA, 15 bp, Homo sapiens
cttttactcttcata

SEQ ID NO: 1419653 - DNA, 15 bp, Homo sapiens
acttttactcttcat

SEQ ID NO: 1419654 - DNA, 15 bp, Homo sapiens
gacttttactcttca

SEQ ID NO: 1419655 - DNA, 15 bp, Homo sapiens
agacttttactcttc

SEQ ID NO: 1419656 - DNA, 15 bp, Homo sapiens
cagacttttactctt

SEQ ID NO: 1419657 - DNA, 15 bp, Homo sapiens
acagacttttactct

SEQ ID NO: 1419658 - DNA, 15 bp, Homo sapiens
aacagacttttactc

SEQ ID NO: 1419659 - DNA, 15 bp, Homo sapiens
caacagacttttact

SEQ ID NO: 1419660 - DNA, 15 bp, Homo sapiens
ccaacagacttttac

SEQ ID NO: 1419661 - DNA, 15 bp, Homo sapiens
gccaacagactttta

SEQ ID NO: 1419662 - DNA, 15 bp, Homo sapiens
tgccaacagactttt

SEQ ID NO: 1419663 - DNA, 15 bp, Homo sapiens
atgccaacagacttt

SEQ ID NO: 1419664 - DNA, 15 bp, Homo sapiens
aatgccaacagactt

SEQ ID NO: 1419665 - DNA, 15 bp, Homo sapiens
taatgccaacagact

SEQ ID NO: 1419666 - DNA, 15 bp, Homo sapiens
ttaatgccaacagac

SEQ ID NO: 1419667 - DNA, 15 bp, Homo sapiens
gttaatgccaacaga

SEQ ID NO: 1419668 - DNA, 15 bp, Homo sapiens
ggttaatgccaacag

SEQ ID NO: 1419669 - DNA, 15 bp, Homo sapiens
tggttaatgccaaca

SEQ ID NO: 1419670 - DNA, 15 bp, Homo sapiens
ttggttaatgccaac

SEQ ID NO: 1419671 - DNA, 15 bp, Homo sapiens
tttggttaatgccaa

SEQ ID NO: 1419672 - DNA, 15 bp, Homo sapiens
atttggttaatgcca

SEQ ID NO: 1419673 - DNA, 15 bp, Homo sapiens
gatttggttaatgcc

SEQ ID NO: 1419674 - DNA, 15 bp, Homo sapiens
agatttggttaatgc

SEQ ID NO: 1419675 - DNA, 15 bp, Homo sapiens
aagatttggttaatg

SEQ ID NO: 1419676 - DNA, 15 bp, Homo sapiens
aaagatttggttaat

SEQ ID NO: 1419677 - DNA, 15 bp, Homo sapiens
aaaagatttggttaa

SEQ ID NO: 1419678 - DNA, 15 bp, Homo sapiens
caaaagatttggtta

SEQ ID NO: 1419679 - DNA, 15 bp, Homo sapiens
tcaaaagatttggtt

SEQ ID NO: 1419680 - DNA, 15 bp, Homo sapiens
ttcaaaagatttggt

SEQ ID NO: 1419681 - DNA, 15 bp, Homo sapiens
tttcaaaagatttgg

SEQ ID NO: 1419682 - DNA, 15 bp, Homo sapiens
ttttcaaaagatttg

SEQ ID NO: 1419683 - DNA, 15 bp, Homo sapiens
attttcaaaagattt

SEQ ID NO: 1419684 - DNA, 15 bp, Homo sapiens
cattttcaaaagatt

SEQ ID NO: 1419685 - DNA, 15 bp, Homo sapiens
tcattttcaaaagat

SEQ ID NO: 1419686 - DNA, 15 bp, Homo sapiens
ttcattttcaaaaga

SEQ ID NO: 1419687 - DNA, 15 bp, Homo sapiens
tttcattttcaaaag

SEQ ID NO: 1419688 - DNA, 15 bp, Homo sapiens
gtttcattttcaaaa

SEQ ID NO: 1419689 - DNA, 15 bp, Homo sapiens
tgtttcattttcaaa

SEQ ID NO: 1419690 - DNA, 15 bp, Homo sapiens
atgtttcattttcaa

SEQ ID NO: 1419691 - DNA, 15 bp, Homo sapiens
aatgtttcattttca

SEQ ID NO: 1419692 - DNA, 15 bp, Homo sapiens
cataaatgtttcatt

SEQ ID NO: 1419693 - DNA, 15 bp, Homo sapiens
tcataaatgtttcat

SEQ ID NO: 1419694 - DNA, 15 bp, Homo sapiens
gtcataaatgtttca

SEQ ID NO: 1419695 - DNA, 15 bp, Homo sapiens
tgtcataaatgtttc

SEQ ID NO: 1419696 - DNA, 15 bp, Homo sapiens
atgtcataaatgttt

SEQ ID NO: 1419697 - DNA, 15 bp, Homo sapiens
aatgtcataaatgtt

SEQ ID NO: 1419698 - DNA, 15 bp, Homo sapiens
caatgtcataaatgt

SEQ ID NO: 1419699 - DNA, 15 bp, Homo sapiens
gcaatgtcataaatg

SEQ ID NO: 1419700 - DNA, 15 bp, Homo sapiens
agcaatgtcataaat

SEQ ID NO: 1419701 - DNA, 15 bp, Homo sapiens
cagcaatgtcataaa

SEQ ID NO: 1419702 - DNA, 15 bp, Homo sapiens
acagcaatgtcataa

SEQ ID NO: 1419703 - DNA, 15 bp, Homo sapiens
cacagcaatgtcata

SEQ ID NO: 1419704 - DNA, 15 bp, Homo sapiens
acacagcaatgtcat

SEQ ID NO: 1419705 - DNA, 15 bp, Homo sapiens
aacacagcaatgtca

SEQ ID NO: 1419706 - DNA, 15 bp, Homo sapiens
aaacacagcaatgtc

SEQ ID NO: 1419707 - DNA, 15 bp, Homo sapiens
caaacacagcaatgt

SEQ ID NO: 1419708 - DNA, 15 bp, Homo sapiens
acaaacacagcaatg

SEQ ID NO: 1419709 - DNA, 15 bp, Homo sapiens
cacaaacacagcaat

SEQ ID NO: 1419710 - DNA, 15 bp, Homo sapiens
acacaaacacagcaa

SEQ ID NO: 1419711 - DNA, 15 bp, Homo sapiens
tacacaaacacagca

SEQ ID NO: 1419712 - DNA, 15 bp, Homo sapiens
gtacacaaacacagc

SEQ ID NO: 1419713 - DNA, 15 bp, Homo sapiens
ggtacacaaacacag

SEQ ID NO: 1419714 - DNA, 15 bp, Homo sapiens
tggtacacaaacaca

SEQ ID NO: 1419715 - DNA, 15 bp, Homo sapiens
ctggtacacaaacac

SEQ ID NO: 1419716 - DNA, 15 bp, Homo sapiens
cctggtacacaaaca

SEQ ID NO: 1419717 - DNA, 15 bp, Homo sapiens
tcctggtacacaaac

SEQ ID NO: 1419718 - DNA, 15 bp, Homo sapiens
ttcctggtacacaaa

SEQ ID NO: 1419719 - DNA, 15 bp, Homo sapiens
attcctggtacacaa

SEQ ID NO: 1419720 - DNA, 15 bp, Homo sapiens
tattcctggtacaca

SEQ ID NO: 1419721 - DNA, 15 bp, Homo sapiens
atattcctggtacac

SEQ ID NO: 1419722 - DNA, 15 bp, Homo sapiens
tatattcctggtaca

SEQ ID NO: 1419723 - DNA, 15 bp, Homo sapiens
ttatattcctggtac

SEQ ID NO: 1419724 - DNA, 15 bp, Homo sapiens
tttatattcctggta

SEQ ID NO: 1419725 - DNA, 15 bp, Homo sapiens
ctttatattcctggt

SEQ ID NO: 1419726 - DNA, 15 bp, Homo sapiens
actttatattcctgg

SEQ ID NO: 1419727 - DNA, 15 bp, Homo sapiens
cactttatattcctg

SEQ ID NO: 1419728 - DNA, 15 bp, Homo sapiens
ccactttatattcct

SEQ ID NO: 1419729 - DNA, 15 bp, Homo sapiens
gccactttatattcc

SEQ ID NO: 1419730 - DNA, 15 bp, Homo sapiens
agccactttatattc

SEQ ID NO: 1419731 - DNA, 15 bp, Homo sapiens
aagccactttatatt

SEQ ID NO: 1419732 - DNA, 15 bp, Homo sapiens
taagccactttatat

SEQ ID NO: 1419733 - DNA, 15 bp, Homo sapiens
ttaagccactttata

SEQ ID NO: 1419734 - DNA, 15 bp, Homo sapiens
tttaagccactttat

SEQ ID NO: 1419735 - DNA, 15 bp, Homo sapiens
ttttaagccacttta

SEQ ID NO: 1419736 - DNA, 15 bp, Homo sapiens
attttaagccacttt

SEQ ID NO: 1419737 - DNA, 15 bp, Homo sapiens
aattttaagccactt

SEQ ID NO: 1419738 - DNA, 15 bp, Homo sapiens
aaattttaagccact

SEQ ID NO: 1419739 - DNA, 15 bp, Homo sapiens
taaattttaagccac

SEQ ID NO: 1419740 - DNA, 15 bp, Homo sapiens
gtaaattttaagcca

SEQ ID NO: 1419741 - DNA, 15 bp, Homo sapiens
ggtaaattttaagcc

SEQ ID NO: 1419742 - DNA, 15 bp, Homo sapiens
aggtaaattttaagc

SEQ ID NO: 1419743 - DNA, 15 bp, Homo sapiens
aaggtaaattttaag

SEQ ID NO: 1419744 - DNA, 15 bp, Homo sapiens
aaaggtaaattttaa

SEQ ID NO: 1419745 - DNA, 15 bp, Homo sapiens
aaaaggtaaatttta

SEQ ID NO: 1419746 - DNA, 15 bp, Homo sapiens
aaaaaggtaaatttt

SEQ ID NO: 1419747 - DNA, 15 bp, Homo sapiens
gaaaaaggtaaattt

SEQ ID NO: 1419748 - DNA, 15 bp, Homo sapiens
agaaaaaggtaaatt

SEQ ID NO: 1419749 - DNA, 15 bp, Homo sapiens
tagaaaaaggtaaat

SEQ ID NO: 1419750 - DNA, 15 bp, Homo sapiens
atagaaaaaggtaaa

SEQ ID NO: 1419751 - DNA, 15 bp, Homo sapiens
catagaaaaaggtaa

SEQ ID NO: 1419752 - DNA, 15 bp, Homo sapiens
gcatagaaaaaggta

SEQ ID NO: 1419753 - DNA, 15 bp, Homo sapiens
tgcatagaaaaaggt

SEQ ID NO: 1419754 - DNA, 15 bp, Homo sapiens
atgcatagaaaaagg

SEQ ID NO: 1419755 - DNA, 15 bp, Homo sapiens
aatgcatagaaaaag

SEQ ID NO: 1419756 - DNA, 15 bp, Homo sapiens
aaatgcatagaaaaa

SEQ ID NO: 1419757 - DNA, 15 bp, Homo sapiens
aaaatgcatagaaaa

SEQ ID NO: 1419758 - DNA, 15 bp, Homo sapiens
caaaatgcatagaaa

SEQ ID NO: 1419759 - DNA, 15 bp, Homo sapiens
tcaaaatgcatagaa

SEQ ID NO: 1419760 - DNA, 15 bp, Homo sapiens
ctcaaaatgcataga

SEQ ID NO: 1419761 - DNA, 15 bp, Homo sapiens
tctcaaaatgcatag

SEQ ID NO: 1419762 - DNA, 15 bp, Homo sapiens
atctcaaaatgcata

SEQ ID NO: 1419763 - DNA, 15 bp, Homo sapiens
tatctcaaaatgcat

SEQ ID NO: 1419764 - DNA, 15 bp, Homo sapiens
atatctcaaaatgca

SEQ ID NO: 1419765 - DNA, 15 bp, Homo sapiens
catatctcaaaatgc

SEQ ID NO: 1419766 - DNA, 15 bp, Homo sapiens
tcatatctcaaaatg

SEQ ID NO: 1419767 - DNA, 15 bp, Homo sapiens
ctcatatctcaaaat

SEQ ID NO: 1419768 - DNA, 15 bp, Homo sapiens
tctcatatctcaaaa

SEQ ID NO: 1419769 - DNA, 15 bp, Homo sapiens
ttctcatatctcaaa

SEQ ID NO: 1419770 - DNA, 15 bp, Homo sapiens
tttctcatatctcaa

SEQ ID NO: 1419771 - DNA, 15 bp, Homo sapiens
gtttctcatatctca

SEQ ID NO: 1419772 - DNA, 15 bp, Homo sapiens
tgtttctcatatctc

SEQ ID NO: 1419773 - DNA, 15 bp, Homo sapiens
gtgtttctcatatct

SEQ ID NO: 1419774 - DNA, 15 bp, Homo sapiens
agtgtttctcatatc

SEQ ID NO: 1419775 - DNA, 15 bp, Homo sapiens
tagtgtttctcatat

SEQ ID NO: 1419776 - DNA, 15 bp, Homo sapiens
atagtgtttctcata

SEQ ID NO: 1419777 - DNA, 15 bp, Homo sapiens
tatagtgtttctcat

SEQ ID NO: 1419778 - DNA, 15 bp, Homo sapiens
ttatagtgtttctca

SEQ ID NO: 1419779 - DNA, 15 bp, Homo sapiens
tttatagtgtttctc

SEQ ID NO: 1419780 - DNA, 15 bp, Homo sapiens
ttttatagtgtttct

SEQ ID NO: 1419781 - DNA, 15 bp, Homo sapiens
tttttatagtgtttc

SEQ ID NO: 1419782 - DNA, 15 bp, Homo sapiens
ttttttatagtgttt

SEQ ID NO: 1419783 - DNA, 15 bp, Homo sapiens
gttttttatagtgtt

SEQ ID NO: 1419784 - DNA, 15 bp, Homo sapiens
tgttttttatagtgt

SEQ ID NO: 1419785 - DNA, 15 bp, Homo sapiens
ctgttttttatagtg

SEQ ID NO: 1419786 - DNA, 15 bp, Homo sapiens
cctgttttttatagt

SEQ ID NO: 1419787 - DNA, 15 bp, Homo sapiens
tcctgttttttatag

SEQ ID NO: 1419788 - DNA, 15 bp, Homo sapiens
atcctgttttttata

SEQ ID NO: 1419789 - DNA, 15 bp, Homo sapiens
aatcctgttttttat

SEQ ID NO: 1419790 - DNA, 15 bp, Homo sapiens
aaatcctgtttttta

SEQ ID NO: 1419791 - DNA, 15 bp, Homo sapiens
aaaatcctgtttttt

SEQ ID NO: 1419792 - DNA, 15 bp, Homo sapiens
gaaaatcctgttttt

SEQ ID NO: 1419793 - DNA, 15 bp, Homo sapiens
agaaaatcctgtttt

SEQ ID NO: 1419794 - DNA, 15 bp, Homo sapiens
tagaaaatcctgttt

SEQ ID NO: 1419795 - DNA, 15 bp, Homo sapiens
atagaaaatcctgtt

SEQ ID NO: 1419796 - DNA, 15 bp, Homo sapiens
gatagaaaatcctgt

SEQ ID NO: 1419797 - DNA, 15 bp, Homo sapiens
agatagaaaatcctg

SEQ ID NO: 1419798 - DNA, 15 bp, Homo sapiens
aagatagaaaatcct

SEQ ID NO: 1419799 - DNA, 15 bp, Homo sapiens
aaagatagaaaatcc

SEQ ID NO: 1419800 - DNA, 15 bp, Homo sapiens
gaaagatagaaaatc

SEQ ID NO: 1419801 - DNA, 15 bp, Homo sapiens
tgaaagatagaaaat

SEQ ID NO: 1419802 - DNA, 15 bp, Homo sapiens
atgaaagatagaaaa

SEQ ID NO: 1419803 - DNA, 15 bp, Homo sapiens
tatgaaagatagaaa

SEQ ID NO: 1419804 - DNA, 15 bp, Homo sapiens
ttatgaaagatagaa

SEQ ID NO: 1419805 - DNA, 15 bp, Homo sapiens
attatgaaagataga

SEQ ID NO: 1419806 - DNA, 15 bp, Homo sapiens
aattatgaaagatag

SEQ ID NO: 1419807 - DNA, 15 bp, Homo sapiens
taattatgaaagata

SEQ ID NO: 1419808 - DNA, 15 bp, Homo sapiens
ttaattatgaaagat

SEQ ID NO: 1419809 - DNA, 15 bp, Homo sapiens
tttaattatgaaaga

SEQ ID NO: 1419810 - DNA, 15 bp, Homo sapiens
gtttaattatgaaag

SEQ ID NO: 1419811 - DNA, 15 bp, Homo sapiens
ggtttaattatgaaa

SEQ ID NO: 1419812 - DNA, 15 bp, Homo sapiens
tggtttaattatgaa

SEQ ID NO: 1419813 - DNA, 15 bp, Homo sapiens
ttggtttaattatga

SEQ ID NO: 1419814 - DNA, 15 bp, Homo sapiens
tttggtttaattatg

SEQ ID NO: 1419815 - DNA, 15 bp, Homo sapiens
ctttggtttaattat

SEQ ID NO: 1419816 - DNA, 15 bp, Homo sapiens
gctttggtttaatta

SEQ ID NO: 1419817 - DNA, 15 bp, Homo sapiens
tgctttggtttaatt

SEQ ID NO: 1419818 - DNA, 15 bp, Homo sapiens
atgctttggtttaat

SEQ ID NO: 1419819 - DNA, 15 bp, Homo sapiens
gatgctttggtttaa

SEQ ID NO: 1419820 - DNA, 15 bp, Homo sapiens
agatgctttggttta

SEQ ID NO: 1419821 - DNA, 15 bp, Homo sapiens
gagatgctttggttt

SEQ ID NO: 1419822 - DNA, 15 bp, Homo sapiens
ggagatgctttggtt

SEQ ID NO: 1419823 - DNA, 15 bp, Homo sapiens
aggagatgctttggt

SEQ ID NO: 1419824 - DNA, 15 bp, Homo sapiens
gaggagatgctttgg

SEQ ID NO: 1419825 - DNA, 15 bp, Homo sapiens
tgaggagatgctttg

SEQ ID NO: 1419826 - DNA, 15 bp, Homo sapiens
ctgaggagatgcttt

SEQ ID NO: 1419827 - DNA, 15 bp, Homo sapiens
actgaggagatgctt

SEQ ID NO: 1419828 - DNA, 15 bp, Homo sapiens
tactgaggagatgct

SEQ ID NO: 1419829 - DNA, 15 bp, Homo sapiens
ttactgaggagatgc

SEQ ID NO: 1419830 - DNA, 15 bp, Homo sapiens
cttactgaggagatg

SEQ ID NO: 1419831 - DNA, 15 bp, Homo sapiens
tcttactgaggagat

SEQ ID NO: 1419832 - DNA, 15 bp, Homo sapiens
ttcttactgaggaga

SEQ ID NO: 1419833 - DNA, 15 bp, Homo sapiens
tttcttactgaggag

SEQ ID NO: 1419834 - DNA, 15 bp, Homo sapiens
ctttcttactgagga

SEQ ID NO: 1419835 - DNA, 15 bp, Homo sapiens
tctttcttactgagg

SEQ ID NO: 1419836 - DNA, 15 bp, Homo sapiens
atctttcttactgag

SEQ ID NO: 1419837 - DNA, 15 bp, Homo sapiens
tatctttcttactga

SEQ ID NO: 1419838 - DNA, 15 bp, Homo sapiens
ctatctttcttactg

SEQ ID NO: 1419839 - DNA, 15 bp, Homo sapiens
gctatctttcttact

SEQ ID NO: 1419840 - DNA, 15 bp, Homo sapiens
tgctatctttcttac

SEQ ID NO: 1419841 - DNA, 15 bp, Homo sapiens
gtgctatctttctta

SEQ ID NO: 1419842 - DNA, 15 bp, Homo sapiens
agtgctatctttctt

SEQ ID NO: 1419843 - DNA, 15 bp, Homo sapiens
tagtgctatctttct

SEQ ID NO: 1419844 - DNA, 15 bp, Homo sapiens
atagtgctatctttc

SEQ ID NO: 1419845 - DNA, 15 bp, Homo sapiens
tatagtgctatcttt

SEQ ID NO: 1419846 - DNA, 15 bp, Homo sapiens
atatagtgctatctt

SEQ ID NO: 1419847 - DNA, 15 bp, Homo sapiens
tatatagtgctatct

SEQ ID NO: 1419848 - DNA, 15 bp, Homo sapiens
ttatatagtgctatc

SEQ ID NO: 1419849 - DNA, 15 bp, Homo sapiens
tttatatagtgctat

SEQ ID NO: 1419850 - DNA, 15 bp, Homo sapiens
atttatatagtgcta

SEQ ID NO: 1419851 - DNA, 15 bp, Homo sapiens
gatttatatagtgct

SEQ ID NO: 1419852 - DNA, 15 bp, Homo sapiens
tgatttatatagtgc

SEQ ID NO: 1419853 - DNA, 15 bp, Homo sapiens
atgatttatatagtg

SEQ ID NO: 1419854 - DNA, 15 bp, Homo sapiens
aatgatttatatagt

SEQ ID NO: 1419855 - DNA, 15 bp, Homo sapiens
aaatgatttatatag

SEQ ID NO: 1419856 - DNA, 15 bp, Homo sapiens
aaaatgatttatata

SEQ ID NO: 1419857 - DNA, 15 bp, Homo sapiens
taaaatgatttatat

SEQ ID NO: 1419858 - DNA, 15 bp, Homo sapiens
ataaaatgatttata

SEQ ID NO: 1419859 - DNA, 15 bp, Homo sapiens
gataaaatgatttat

SEQ ID NO: 1419860 - DNA, 15 bp, Homo sapiens
agataaaatgattta

SEQ ID NO: 1419861 - DNA, 15 bp, Homo sapiens
tagataaaatgattt

SEQ ID NO: 1419862 - DNA, 15 bp, Homo sapiens
atagataaaatgatt

SEQ ID NO: 1419863 - DNA, 15 bp, Homo sapiens
aatagataaaatgat

SEQ ID NO: 1419864 - DNA, 15 bp, Homo sapiens
caatagataaaatga

SEQ ID NO: 1419865 - DNA, 15 bp, Homo sapiens
acaatagataaaatg

SEQ ID NO: 1419866 - DNA, 15 bp, Homo sapiens
cacaatagataaaat

SEQ ID NO: 1419867 - DNA, 15 bp, Homo sapiens
gcacaatagataaaa

SEQ ID NO: 1419868 - DNA, 15 bp, Homo sapiens
tgcacaatagataaa

SEQ ID NO: 1419869 - DNA, 15 bp, Homo sapiens
gtgcacaatagataa

SEQ ID NO: 1419870 - DNA, 15 bp, Homo sapiens
tgtgcacaatagata

SEQ ID NO: 1419871 - DNA, 15 bp, Homo sapiens
ttgtgcacaatagat

SEQ ID NO: 1419872 - DNA, 15 bp, Homo sapiens
tttgtgcacaataga

SEQ ID NO: 1419873 - DNA, 15 bp, Homo sapiens
gtttgtgcacaatag

SEQ ID NO: 1419874 - DNA, 15 bp, Homo sapiens
ggtttgtgcacaata

SEQ ID NO: 1419875 - DNA, 15 bp, Homo sapiens
aggtttgtgcacaat

SEQ ID NO: 1419876 - DNA, 15 bp, Homo sapiens
aaggtttgtgcacaa

SEQ ID NO: 1419877 - DNA, 15 bp, Homo sapiens
gaaggtttgtgcaca

SEQ ID NO: 1419878 - DNA, 15 bp, Homo sapiens
tgaaggtttgtgcac

SEQ ID NO: 1419879 - DNA, 15 bp, Homo sapiens
gtgaaggtttgtgca

SEQ ID NO: 1419880 - DNA, 15 bp, Homo sapiens
tgtgaaggtttgtgc

SEQ ID NO: 1419881 - DNA, 15 bp, Homo sapiens
ctgtgaaggtttgtg

SEQ ID NO: 1419882 - DNA, 15 bp, Homo sapiens
tctgtgaaggtttgt

SEQ ID NO: 1419883 - DNA, 15 bp, Homo sapiens
ttctgtgaaggtttg

SEQ ID NO: 1419884 - DNA, 15 bp, Homo sapiens
gttctgtgaaggttt

SEQ ID NO: 1419885 - DNA, 15 bp, Homo sapiens
tgttctgtgaaggtt

SEQ ID NO: 1419886 - DNA, 15 bp, Homo sapiens
gtgttctgtgaaggt

SEQ ID NO: 1419887 - DNA, 15 bp, Homo sapiens
agtgttctgtgaagg

SEQ ID NO: 1419888 - DNA, 15 bp, Homo sapiens
tagtgttctgtgaag

SEQ ID NO: 1419889 - DNA, 15 bp, Homo sapiens
atagtgttctgtgaa

SEQ ID NO: 1419890 - DNA, 15 bp, Homo sapiens
tatagtgttctgtga

SEQ ID NO: 1419891 - DNA, 15 bp, Homo sapiens
gtatagtgttctgtg

SEQ ID NO: 1419892 - DNA, 15 bp, Homo sapiens
ggtatagtgttctgt

SEQ ID NO: 1419893 - DNA, 15 bp, Homo sapiens
aggtatagtgttctg

SEQ ID NO: 1419894 - DNA, 15 bp, Homo sapiens
aaggtatagtgttct

SEQ ID NO: 1419895 - DNA, 15 bp, Homo sapiens
taaggtatagtgttc

SEQ ID NO: 1419896 - DNA, 15 bp, Homo sapiens
ataaggtatagtgtt

SEQ ID NO: 1419897 - DNA, 15 bp, Homo sapiens
aataaggtatagtgt

SEQ ID NO: 1419898 - DNA, 15 bp, Homo sapiens
aaataaggtatagtg

SEQ ID NO: 1419899 - DNA, 15 bp, Homo sapiens
caaataaggtatagt

SEQ ID NO: 1419900 - DNA, 15 bp, Homo sapiens
tcaaataaggtatag

SEQ ID NO: 1419901 - DNA, 15 bp, Homo sapiens
gtcaaataaggtata

SEQ ID NO: 1419902 - DNA, 15 bp, Homo sapiens
tgtcaaataaggtat

SEQ ID NO: 1419903 - DNA, 15 bp, Homo sapiens
atgtcaaataaggta

SEQ ID NO: 1419904 - DNA, 15 bp, Homo sapiens
tatgtcaaataaggt

SEQ ID NO: 1419905 - DNA, 15 bp, Homo sapiens
ttatgtcaaataagg

SEQ ID NO: 1419906 - DNA, 15 bp, Homo sapiens
tttatgtcaaataag

SEQ ID NO: 1419907 - DNA, 15 bp, Homo sapiens
gtttatgtcaaataa

SEQ ID NO: 1419908 - DNA, 15 bp, Homo sapiens
ggtttatgtcaaata

SEQ ID NO: 1419909 - DNA, 15 bp, Homo sapiens
tggtttatgtcaaat

SEQ ID NO: 1419910 - DNA, 15 bp, Homo sapiens
ctggtttatgtcaaa

SEQ ID NO: 1419911 - DNA, 15 bp, Homo sapiens
tctggtttatgtcaa

SEQ ID NO: 1419912 - DNA, 15 bp, Homo sapiens
ctctggtttatgtca

SEQ ID NO: 1419913 - DNA, 15 bp, Homo sapiens
actctggtttatgtc

SEQ ID NO: 1419914 - DNA, 15 bp, Homo sapiens
gactctggtttatgt

SEQ ID NO: 1419915 - DNA, 15 bp, Homo sapiens
tgactctggtttatg

SEQ ID NO: 1419916 - DNA, 15 bp, Homo sapiens
ttgactctggtttat

SEQ ID NO: 1419917 - DNA, 15 bp, Homo sapiens
tttgactctggttta

SEQ ID NO: 1419918 - DNA, 15 bp, Homo sapiens
ctttgactctggttt

SEQ ID NO: 1419919 - DNA, 15 bp, Homo sapiens
gctttgactctggtt

SEQ ID NO: 1419920 - DNA, 15 bp, Homo sapiens
tgctttgactctggt

SEQ ID NO: 1419921 - DNA, 15 bp, Homo sapiens
atgctttgactctgg

SEQ ID NO: 1419922 - DNA, 15 bp, Homo sapiens
tatgctttgactctg

SEQ ID NO: 1419923 - DNA, 15 bp, Homo sapiens
ctatgctttgactct

SEQ ID NO: 1419924 - DNA, 15 bp, Homo sapiens
tctatgctttgactc

SEQ ID NO: 1419925 - DNA, 15 bp, Homo sapiens
ttctatgctttgact

SEQ ID NO: 1419926 - DNA, 15 bp, Homo sapiens
tttctatgctttgac

SEQ ID NO: 1419927 - DNA, 15 bp, Homo sapiens
atttctatgctttga

SEQ ID NO: 1419928 - DNA, 15 bp, Homo sapiens
gatttctatgctttg

SEQ ID NO: 1419929 - DNA, 15 bp, Homo sapiens
tgatttctatgcttt

SEQ ID NO: 1419930 - DNA, 15 bp, Homo sapiens
ttgatttctatgctt

SEQ ID NO: 1419931 - DNA, 15 bp, Homo sapiens
attgatttctatgct

SEQ ID NO: 1419932 - DNA, 15 bp, Homo sapiens
gattgatttctatgc

SEQ ID NO: 1419933 - DNA, 15 bp, Homo sapiens
agattgatttctatg

SEQ ID NO: 1419934 - DNA, 15 bp, Homo sapiens
tagattgatttctat

SEQ ID NO: 1419935 - DNA, 15 bp, Homo sapiens
ctagattgatttcta

SEQ ID NO: 1419936 - DNA, 15 bp, Homo sapiens
tctagattgatttct

SEQ ID NO: 1419937 - DNA, 15 bp, Homo sapiens
ttctagattgatttc

SEQ ID NO: 1419938 - DNA, 15 bp, Homo sapiens
tttctagattgattt

SEQ ID NO: 1419939 - DNA, 15 bp, Homo sapiens
ttttctagattgatt

SEQ ID NO: 1419940 - DNA, 15 bp, Homo sapiens
tttttctagattgat

SEQ ID NO: 1419941 - DNA, 15 bp, Homo sapiens
ttttttctagattga

SEQ ID NO: 1419942 - DNA, 15 bp, Homo sapiens
tttttttctagattg

SEQ ID NO: 1419943 - DNA, 15 bp, Homo sapiens
ttttttttctagatt

SEQ ID NO: 1419944 - DNA, 15 bp, Homo sapiens
tttttttttctagat

SEQ ID NO: 1419945 - DNA, 15 bp, Homo sapiens
ctttttttttctaga

SEQ ID NO: 1419946 - DNA, 15 bp, Homo sapiens
tctttttttttctag

SEQ ID NO: 1419947 - DNA, 15 bp, Homo sapiens
atctttttttttcta

SEQ ID NO: 1419948 - DNA, 15 bp, Homo sapiens
aatctttttttttct

SEQ ID NO: 1419949 - DNA, 15 bp, Homo sapiens
taatctttttttttc

SEQ ID NO: 1419950 - DNA, 15 bp, Homo sapiens
gtaatcttttttttt

SEQ ID NO: 1419951 - DNA, 15 bp, Homo sapiens
tgtaatctttttttt

SEQ ID NO: 1419952 - DNA, 15 bp, Homo sapiens
atgtaatcttttttt

SEQ ID NO: 1419953 - DNA, 15 bp, Homo sapiens
aatgtaatctttttt

SEQ ID NO: 1419954 - DNA, 15 bp, Homo sapiens
aaatgtaatcttttt

SEQ ID NO: 1419955 - DNA, 15 bp, Homo sapiens
aaaatgtaatctttt

SEQ ID NO: 1419956 - DNA, 15 bp, Homo sapiens
aaaaatgtaatcttt

SEQ ID NO: 1419957 - DNA, 15 bp, Homo sapiens
gaaaaatgtaatctt

SEQ ID NO: 1419958 - DNA, 15 bp, Homo sapiens
ggaaaaatgtaatct

SEQ ID NO: 1419959 - DNA, 15 bp, Homo sapiens
aggaaaaatgtaatc

SEQ ID NO: 1419960 - DNA, 15 bp, Homo sapiens
taggaaaaatgtaat

SEQ ID NO: 1419961 - DNA, 15 bp, Homo sapiens
ctaggaaaaatgtaa

SEQ ID NO: 1419962 - DNA, 15 bp, Homo sapiens
actaggaaaaatgta

SEQ ID NO: 1419963 - DNA, 15 bp, Homo sapiens
tactaggaaaaatgt

SEQ ID NO: 1419964 - DNA, 15 bp, Homo sapiens
ttactaggaaaaatg

SEQ ID NO: 1419965 - DNA, 15 bp, Homo sapiens
attactaggaaaaat

SEQ ID NO: 1419966 - DNA, 15 bp, Homo sapiens
aattactaggaaaaa

SEQ ID NO: 1419967 - DNA, 15 bp, Homo sapiens
gaattactaggaaaa

SEQ ID NO: 1419968 - DNA, 15 bp, Homo sapiens
tgaattactaggaaa

SEQ ID NO: 1419969 - DNA, 15 bp, Homo sapiens
gtgaattactaggaa

SEQ ID NO: 1419970 - DNA, 15 bp, Homo sapiens
agtgaattactagga

SEQ ID NO: 1419971 - DNA, 15 bp, Homo sapiens
aagtgaattactagg

SEQ ID NO: 1419972 - DNA, 15 bp, Homo sapiens
aaagtgaattactag

SEQ ID NO: 1419973 - DNA, 15 bp, Homo sapiens
caaagtgaattacta

SEQ ID NO: 1419974 - DNA, 15 bp, Homo sapiens
acaaagtgaattact

SEQ ID NO: 1419975 - DNA, 15 bp, Homo sapiens
tacaaagtgaattac

SEQ ID NO: 1419976 - DNA, 15 bp, Homo sapiens
ttacaaagtgaatta

SEQ ID NO: 1419977 - DNA, 15 bp, Homo sapiens
tttacaaagtgaatt

SEQ ID NO: 1419978 - DNA, 15 bp, Homo sapiens
ttttacaaagtgaat

SEQ ID NO: 1419979 - DNA, 15 bp, Homo sapiens
attttacaaagtgaa

SEQ ID NO: 1419980 - DNA, 15 bp, Homo sapiens
tattttacaaagtga

SEQ ID NO: 1419981 - DNA, 15 bp, Homo sapiens
ttattttacaaagtg

SEQ ID NO: 1419982 - DNA, 15 bp, Homo sapiens
tttattttacaaagt

SEQ ID NO: 1419983 - DNA, 15 bp, Homo sapiens
ttttattttacaaag

SEQ ID NO: 1419984 - DNA, 15 bp, Homo sapiens
attttattttacaaa

SEQ ID NO: 1419985 - DNA, 15 bp, Homo sapiens
cattttattttacaa

SEQ ID NO: 1419986 - DNA, 15 bp, Homo sapiens
acattttattttaca

SEQ ID NO: 1419987 - DNA, 15 bp, Homo sapiens
tacattttattttac

SEQ ID NO: 1419988 - DNA, 15 bp, Homo sapiens
ttacattttatttta

SEQ ID NO: 1419989 - DNA, 15 bp, Homo sapiens
attacattttatttt

SEQ ID NO: 1419990 - DNA, 15 bp, Homo sapiens
aattacattttattt

SEQ ID NO: 1419991 - DNA, 15 bp, Homo sapiens
aaattacattttatt

SEQ ID NO: 1419992 - DNA, 15 bp, Homo sapiens
aaaattacattttat

SEQ ID NO: 1419993 - DNA, 15 bp, Homo sapiens
aaaaattacatttta

SEQ ID NO: 1419994 - DNA, 15 bp, Homo sapiens
gaaaaattacatttt

SEQ ID NO: 1419995 - DNA, 15 bp, Homo sapiens
ggaaaaattacattt

SEQ ID NO: 1419996 - DNA, 15 bp, Homo sapiens
aggaaaaattacatt

SEQ ID NO: 1419997 - DNA, 15 bp, Homo sapiens
taggaaaaattacat

SEQ ID NO: 1419998 - DNA, 15 bp, Homo sapiens
gtaggaaaaattaca

SEQ ID NO: 1419999 - DNA, 15 bp, Homo sapiens
tgtaggaaaaattac

SEQ ID NO: 1420000 - DNA, 15 bp, Homo sapiens
atgtaggaaaaatta

SEQ ID NO: 1420001 - DNA, 15 bp, Homo sapiens
tatgtaggaaaaatt

SEQ ID NO: 1420002 - DNA, 15 bp, Homo sapiens
ttatgtaggaaaaat

SEQ ID NO: 1420003 - DNA, 15 bp, Homo sapiens
gttatgtaggaaaaa

SEQ ID NO: 1420004 - DNA, 15 bp, Homo sapiens
ggttatgtaggaaaa

SEQ ID NO: 1420005 - DNA, 15 bp, Homo sapiens
tggttatgtaggaaa

SEQ ID NO: 1420006 - DNA, 15 bp, Homo sapiens
gtggttatgtaggaa

SEQ ID NO: 1420007 - DNA, 15 bp, Homo sapiens
tgtggttatgtagga

SEQ ID NO: 1420008 - DNA, 15 bp, Homo sapiens
ttgtggttatgtagg

SEQ ID NO: 1420009 - DNA, 15 bp, Homo sapiens
tttgtggttatgtag

SEQ ID NO: 1420010 - DNA, 15 bp, Homo sapiens
ttttgtggttatgta

SEQ ID NO: 1420011 - DNA, 15 bp, Homo sapiens
tttttgtggttatgt

SEQ ID NO: 1420012 - DNA, 15 bp, Homo sapiens
ttttttgtggttatg

SEQ ID NO: 1420013 - DNA, 15 bp, Homo sapiens
gttttttgtggttat

SEQ ID NO: 1420014 - DNA, 15 bp, Homo sapiens
tgttttttgtggtta

SEQ ID NO: 1420015 - DNA, 15 bp, Homo sapiens
ttgttttttgtggtt

SEQ ID NO: 1420016 - DNA, 15 bp, Homo sapiens
cttgttttttgtggt

SEQ ID NO: 1420017 - DNA, 15 bp, Homo sapiens
acttgttttttgtgg

SEQ ID NO: 1420018 - DNA, 15 bp, Homo sapiens
tacttgttttttgtg

SEQ ID NO: 1420019 - DNA, 15 bp, Homo sapiens
ctacttgttttttgt

SEQ ID NO: 1420020 - DNA, 15 bp, Homo sapiens
cctacttgttttttg

SEQ ID NO: 1420021 - DNA, 15 bp, Homo sapiens
tcctacttgtttttt

SEQ ID NO: 1420022 - DNA, 15 bp, Homo sapiens
ttcctacttgttttt

SEQ ID NO: 1420023 - DNA, 15 bp, Homo sapiens
cttcctacttgtttt

SEQ ID NO: 1420024 - DNA, 15 bp, Homo sapiens
tcttcctacttgttt

SEQ ID NO: 1420025 - DNA, 15 bp, Homo sapiens
ttcttcctacttgtt

SEQ ID NO: 1420026 - DNA, 15 bp, Homo sapiens
tttcttcctacttgt

SEQ ID NO: 1420027 - DNA, 15 bp, Homo sapiens
ttttcttcctacttg

SEQ ID NO: 1420028 - DNA, 15 bp, Homo sapiens
tttttcttcctactt

SEQ ID NO: 1420029 - DNA, 15 bp, Homo sapiens
atttttcttcctact

SEQ ID NO: 1420030 - DNA, 15 bp, Homo sapiens
catttttcttcctac

SEQ ID NO: 1420031 - DNA, 15 bp, Homo sapiens
acatttttcttccta

SEQ ID NO: 1420032 - DNA, 15 bp, Homo sapiens
cacatttttcttcct

SEQ ID NO: 1420033 - DNA, 15 bp, Homo sapiens
ccacatttttcttcc

SEQ ID NO: 1420034 - DNA, 15 bp, Homo sapiens
tccacatttttcttc

SEQ ID NO: 1420035 - DNA, 15 bp, Homo sapiens
ttccacatttttctt

SEQ ID NO: 1420036 - DNA, 15 bp, Homo sapiens
cttccacatttttct

SEQ ID NO: 1420037 - DNA, 15 bp, Homo sapiens
ccttccacatttttc

SEQ ID NO: 1420038 - DNA, 15 bp, Homo sapiens
cccttccacattttt

SEQ ID NO: 1420039 - DNA, 15 bp, Homo sapiens
ccccttccacatttt

SEQ ID NO: 1420040 - DNA, 15 bp, Homo sapiens
tccccttccacattt

SEQ ID NO: 1420041 - DNA, 15 bp, Homo sapiens
atccccttccacatt

SEQ ID NO: 1420042 - DNA, 15 bp, Homo sapiens
gatccccttccacat

SEQ ID NO: 1420043 - DNA, 15 bp, Homo sapiens
agatccccttccaca

SEQ ID NO: 1420044 - DNA, 15 bp, Homo sapiens
aagatccccttccac

SEQ ID NO: 1420045 - DNA, 15 bp, Homo sapiens
aaagatccccttcca

SEQ ID NO: 1420046 - DNA, 15 bp, Homo sapiens
taaagatccccttcc

SEQ ID NO: 1420047 - DNA, 15 bp, Homo sapiens
ataaagatccccttc

SEQ ID NO: 1420048 - DNA, 15 bp, Homo sapiens
aataaagatcccctt

SEQ ID NO: 1420049 - DNA, 15 bp, Homo sapiens
gaataaagatcccct

SEQ ID NO: 1420050 - DNA, 15 bp, Homo sapiens
agaataaagatcccc

SEQ ID NO: 1420051 - DNA, 15 bp, Homo sapiens
gagaataaagatccc

SEQ ID NO: 1420052 - DNA, 15 bp, Homo sapiens
tgagaataaagatcc

SEQ ID NO: 1420053 - DNA, 15 bp, Homo sapiens
atgagaataaagatc

SEQ ID NO: 1420054 - DNA, 15 bp, Homo sapiens
catgagaataaagat

SEQ ID NO: 1420055 - DNA, 15 bp, Homo sapiens
tcatgagaataaaga

SEQ ID NO: 1420056 - DNA, 15 bp, Homo sapiens
ttcatgagaataaag

SEQ ID NO: 1420057 - DNA, 15 bp, Homo sapiens
attcatgagaataaa

SEQ ID NO: 1420058 - DNA, 15 bp, Homo sapiens
tattcatgagaataa

SEQ ID NO: 1420059 - DNA, 15 bp, Homo sapiens
atattcatgagaata

SEQ ID NO: 1420060 - DNA, 15 bp, Homo sapiens
tatattcatgagaat

SEQ ID NO: 1420061 - DNA, 15 bp, Homo sapiens
ttatattcatgagaa

SEQ ID NO: 1420062 - DNA, 15 bp, Homo sapiens
tttatattcatgaga

SEQ ID NO: 1420063 - DNA, 15 bp, Homo sapiens
gtttatattcatgag

SEQ ID NO: 1420064 - DNA, 15 bp, Homo sapiens
tgtttatattcatga

SEQ ID NO: 1420065 - DNA, 15 bp, Homo sapiens
ttgtttatattcatg

SEQ ID NO: 1420066 - DNA, 15 bp, Homo sapiens
gttgtttatattcat

SEQ ID NO: 1420067 - DNA, 15 bp, Homo sapiens
tgttgtttatattca

SEQ ID NO: 1420068 - DNA, 15 bp, Homo sapiens
ttgttgtttatattc

SEQ ID NO: 1420069 - DNA, 15 bp, Homo sapiens
attgttgtttatatt

SEQ ID NO: 1420070 - DNA, 15 bp, Homo sapiens
tattgttgtttatat

SEQ ID NO: 1420071 - DNA, 15 bp, Homo sapiens
atattgttgtttata

SEQ ID NO: 1420072 - DNA, 15 bp, Homo sapiens
tatattgttgtttat

SEQ ID NO: 1420073 - DNA, 15 bp, Homo sapiens
ctatattgttgttta

SEQ ID NO: 1420074 - DNA, 15 bp, Homo sapiens
tctatattgttgttt

SEQ ID NO: 1420075 - DNA, 15 bp, Homo sapiens
atctatattgttgtt

SEQ ID NO: 1420076 - DNA, 15 bp, Homo sapiens
aatctatattgttgt

SEQ ID NO: 1420077 - DNA, 15 bp, Homo sapiens
caatctatattgttg

SEQ ID NO: 1420078 - DNA, 15 bp, Homo sapiens
tcaatctatattgtt

SEQ ID NO: 1420079 - DNA, 15 bp, Homo sapiens
ttcaatctatattgt

SEQ ID NO: 1420080 - DNA, 15 bp, Homo sapiens
cttcaatctatattg

SEQ ID NO: 1420081 - DNA, 15 bp, Homo sapiens
acttcaatctatatt

SEQ ID NO: 1420082 - DNA, 15 bp, Homo sapiens
gacttcaatctatat

SEQ ID NO: 1420083 - DNA, 15 bp, Homo sapiens
agacttcaatctata

SEQ ID NO: 1420084 - DNA, 15 bp, Homo sapiens
gagacttcaatctat

SEQ ID NO: 1420085 - DNA, 15 bp, Homo sapiens
tgagacttcaatcta

SEQ ID NO: 1420086 - DNA, 15 bp, Homo sapiens
ctgagacttcaatct

SEQ ID NO: 1420087 - DNA, 15 bp, Homo sapiens
gctgagacttcaatc

SEQ ID NO: 1420088 - DNA, 15 bp, Homo sapiens
agctgagacttcaat

SEQ ID NO: 1420089 - DNA, 15 bp, Homo sapiens
cagctgagacttcaa

SEQ ID NO: 1420090 - DNA, 15 bp, Homo sapiens
tcagctgagacttca

SEQ ID NO: 1420091 - DNA, 15 bp, Homo sapiens
ttcagctgagacttc

SEQ ID NO: 1420092 - DNA, 15 bp, Homo sapiens
cttcagctgagactt

SEQ ID NO: 1420093 - DNA, 15 bp, Homo sapiens
gcttcagctgagact

SEQ ID NO: 1420094 - DNA, 15 bp, Homo sapiens
cgcttcagctgagac

SEQ ID NO: 1420095 - DNA, 15 bp, Homo sapiens
acgcttcagctgaga

SEQ ID NO: 1420096 - DNA, 15 bp, Homo sapiens
cacgcttcagctgag

SEQ ID NO: 1420097 - DNA, 15 bp, Homo sapiens
tcacgcttcagctga

SEQ ID NO: 1420098 - DNA, 15 bp, Homo sapiens
atcacgcttcagctg

SEQ ID NO: 1420099 - DNA, 15 bp, Homo sapiens
gatcacgcttcagct

SEQ ID NO: 1420100 - DNA, 15 bp, Homo sapiens
tgatcacgcttcagc

SEQ ID NO: 1420101 - DNA, 15 bp, Homo sapiens
atgatcacgcttcag

SEQ ID NO: 1420102 - DNA, 15 bp, Homo sapiens
catgatcacgcttca

SEQ ID NO: 1420103 - DNA, 15 bp, Homo sapiens
tcatgatcacgcttc

SEQ ID NO: 1420104 - DNA, 15 bp, Homo sapiens
gtcatgatcacgctt

SEQ ID NO: 1420105 - DNA, 15 bp, Homo sapiens
agtcatgatcacgct

SEQ ID NO: 1420106 - DNA, 15 bp, Homo sapiens
cagtcatgatcacgc

SEQ ID NO: 1420107 - DNA, 15 bp, Homo sapiens
ccagtcatgatcacg

SEQ ID NO: 1420108 - DNA, 15 bp, Homo sapiens
accagtcatgatcac

SEQ ID NO: 1420109 - DNA, 15 bp, Homo sapiens
taccagtcatgatca

SEQ ID NO: 1420110 - DNA, 15 bp, Homo sapiens
gtaccagtcatgatc

SEQ ID NO: 1420111 - DNA, 15 bp, Homo sapiens
agtaccagtcatgat

SEQ ID NO: 1420112 - DNA, 15 bp, Homo sapiens
cagtaccagtcatga

SEQ ID NO: 1420113 - DNA, 15 bp, Homo sapiens
tcagtaccagtcatg

SEQ ID NO: 1420114 - DNA, 15 bp, Homo sapiens
atcagtaccagtcat

SEQ ID NO: 1420115 - DNA, 15 bp, Homo sapiens
catcagtaccagtca

SEQ ID NO: 1420116 - DNA, 15 bp, Homo sapiens
tcatcagtaccagtc

SEQ ID NO: 1420117 - DNA, 15 bp, Homo sapiens
ttcatcagtaccagt

SEQ ID NO: 1420118 - DNA, 15 bp, Homo sapiens
attcatcagtaccag

SEQ ID NO: 1420119 - DNA, 15 bp, Homo sapiens
cattcatcagtacca

SEQ ID NO: 1420120 - DNA, 15 bp, Homo sapiens
tcattcatcagtacc

SEQ ID NO: 1420121 - DNA, 15 bp, Homo sapiens
gtcattcatcagtac

SEQ ID NO: 1420122 - DNA, 15 bp, Homo sapiens
agtcattcatcagta

SEQ ID NO: 1420123 - DNA, 15 bp, Homo sapiens
gagtcattcatcagt

SEQ ID NO: 1420124 - DNA, 15 bp, Homo sapiens
ggagtcattcatcag

SEQ ID NO: 1420125 - DNA, 15 bp, Homo sapiens
cggagtcattcatca

SEQ ID NO: 1420126 - DNA, 15 bp, Homo sapiens
tcggagtcattcatc

SEQ ID NO: 1420127 - DNA, 15 bp, Homo sapiens
ttcggagtcattcat

SEQ ID NO: 1420128 - DNA, 15 bp, Homo sapiens
tttcggagtcattca

SEQ ID NO: 1420129 - DNA, 15 bp, Homo sapiens
ttttcggagtcattc

SEQ ID NO: 1420130 - DNA, 15 bp, Homo sapiens
tttttcggagtcatt

SEQ ID NO: 1420131 - DNA, 15 bp, Homo sapiens
atttttcggagtcat

SEQ ID NO: 1420132 - DNA, 15 bp, Homo sapiens
tatttttcggagtca

SEQ ID NO: 1420133 - DNA, 15 bp, Homo sapiens
ttatttttcggagtc

SEQ ID NO: 1420134 - DNA, 15 bp, Homo sapiens
cttatttttcggagt

SEQ ID NO: 1420135 - DNA, 15 bp, Homo sapiens
tcttatttttcggag

SEQ ID NO: 1420136 - DNA, 15 bp, Homo sapiens
atcttatttttcgga

SEQ ID NO: 1420137 - DNA, 15 bp, Homo sapiens
tatcttatttttcgg

SEQ ID NO: 1420138 - DNA, 15 bp, Homo sapiens
ctatcttatttttcg

SEQ ID NO: 1420139 - DNA, 15 bp, Homo sapiens
gctatcttatttttc

SEQ ID NO: 1420140 - DNA, 15 bp, Homo sapiens
agctatcttattttt

SEQ ID NO: 1420141 - DNA, 15 bp, Homo sapiens
gagctatcttatttt

SEQ ID NO: 1420142 - DNA, 15 bp, Homo sapiens
tgagctatcttattt

SEQ ID NO: 1420143 - DNA, 15 bp, Homo sapiens
atgagctatcttatt

SEQ ID NO: 1420144 - DNA, 15 bp, Homo sapiens
tatgagctatcttat

SEQ ID NO: 1420145 - DNA, 15 bp, Homo sapiens
gtatgagctatctta

SEQ ID NO: 1420146 - DNA, 15 bp, Homo sapiens
ggtatgagctatctt

SEQ ID NO: 1420147 - DNA, 15 bp, Homo sapiens
tggtatgagctatct

SEQ ID NO: 1420148 - DNA, 15 bp, Homo sapiens
ttggtatgagctatc

SEQ ID NO: 1420149 - DNA, 15 bp, Homo sapiens
cttggtatgagctat

SEQ ID NO: 1420150 - DNA, 15 bp, Homo sapiens
acttggtatgagcta

SEQ ID NO: 1420151 - DNA, 15 bp, Homo sapiens
cacttggtatgagct

SEQ ID NO: 1420152 - DNA, 15 bp, Homo sapiens
ccacttggtatgagc

SEQ ID NO: 1420153 - DNA, 15 bp, Homo sapiens
accacttggtatgag

SEQ ID NO: 1420154 - DNA, 15 bp, Homo sapiens
aaccacttggtatga

SEQ ID NO: 1420155 - DNA, 15 bp, Homo sapiens
aaaccacttggtatg

SEQ ID NO: 1420156 - DNA, 15 bp, Homo sapiens
caaaccacttggtat

SEQ ID NO: 1420157 - DNA, 15 bp, Homo sapiens
acaaaccacttggta

SEQ ID NO: 1420158 - DNA, 15 bp, Homo sapiens
aacaaaccacttggt

SEQ ID NO: 1420159 - DNA, 15 bp, Homo sapiens
caacaaaccacttgg

SEQ ID NO: 1420160 - DNA, 15 bp, Homo sapiens
acaacaaaccacttg

SEQ ID NO: 1420161 - DNA, 15 bp, Homo sapiens
gacaacaaaccactt

SEQ ID NO: 1420162 - DNA, 15 bp, Homo sapiens
agacaacaaaccact

SEQ ID NO: 1420163 - DNA, 15 bp, Homo sapiens
aagacaacaaaccac

SEQ ID NO: 1420164 - DNA, 15 bp, Homo sapiens
caagacaacaaacca

SEQ ID NO: 1420165 - DNA, 15 bp, Homo sapiens
ccaagacaacaaacc

SEQ ID NO: 1420166 - DNA, 15 bp, Homo sapiens
gccaagacaacaaac

SEQ ID NO: 1420167 - DNA, 15 bp, Homo sapiens
agccaagacaacaaa

SEQ ID NO: 1420168 - DNA, 15 bp, Homo sapiens
cagccaagacaacaa

SEQ ID NO: 1420169 - DNA, 15 bp, Homo sapiens
acagccaagacaaca

SEQ ID NO: 1420170 - DNA, 15 bp, Homo sapiens
tacagccaagacaac

SEQ ID NO: 1420171 - DNA, 15 bp, Homo sapiens
ttacagccaagacaa

SEQ ID NO: 1420172 - DNA, 15 bp, Homo sapiens
attacagccaagaca

SEQ ID NO: 1420173 - DNA, 15 bp, Homo sapiens
gattacagccaagac

SEQ ID NO: 1420174 - DNA, 15 bp, Homo sapiens
agattacagccaaga

SEQ ID NO: 1420175 - DNA, 15 bp, Homo sapiens
aagattacagccaag

SEQ ID NO: 1420176 - DNA, 15 bp, Homo sapiens
aaagattacagccaa

SEQ ID NO: 1420177 - DNA, 15 bp, Homo sapiens
aaaagattacagcca

SEQ ID NO: 1420178 - DNA, 15 bp, Homo sapiens
aaaaagattacagcc

SEQ ID NO: 1420179 - DNA, 15 bp, Homo sapiens
aaaaaagattacagc

SEQ ID NO: 1420180 - DNA, 15 bp, Homo sapiens
aaaaaaagattacag

SEQ ID NO: 1420181 - DNA, 15 bp, Homo sapiens
gaaaaaaagattaca

SEQ ID NO: 1420182 - DNA, 15 bp, Homo sapiens
agaaaaaaagattac

SEQ ID NO: 1420183 - DNA, 15 bp, Homo sapiens
gagaaaaaaagatta

SEQ ID NO: 1420184 - DNA, 15 bp, Homo sapiens
agagaaaaaaagatt

SEQ ID NO: 1420185 - DNA, 15 bp, Homo sapiens
aagagaaaaaaagat

SEQ ID NO: 1420186 - DNA, 15 bp, Homo sapiens
aaagagaaaaaaaga

SEQ ID NO: 1420187 - DNA, 15 bp, Homo sapiens
aaaagagaaaaaaag

SEQ ID NO: 1420188 - DNA, 15 bp, Homo sapiens
aaaaagagaaaaaaa

SEQ ID NO: 1420189 - DNA, 15 bp, Homo sapiens
aaaaaagagaaaaaa

SEQ ID NO: 1420190 - DNA, 15 bp, Homo sapiens
caaaaaaagagaaaa

SEQ ID NO: 1420191 - DNA, 15 bp, Homo sapiens
acaaaaaaagagaaa

SEQ ID NO: 1420192 - DNA, 15 bp, Homo sapiens
aacaaaaaaagagaa

SEQ ID NO: 1420193 - DNA, 15 bp, Homo sapiens
taacaaaaaaagaga

SEQ ID NO: 1420194 - DNA, 15 bp, Homo sapiens
ttaacaaaaaaagag

SEQ ID NO: 1420195 - DNA, 15 bp, Homo sapiens
gttaacaaaaaaaga

SEQ ID NO: 1420196 - DNA, 15 bp, Homo sapiens
agttaacaaaaaaag

SEQ ID NO: 1420197 - DNA, 15 bp, Homo sapiens
cagttaacaaaaaaa

SEQ ID NO: 1420198 - DNA, 15 bp, Homo sapiens
gcagttaacaaaaaa

SEQ ID NO: 1420199 - DNA, 15 bp, Homo sapiens
ggcagttaacaaaaa

SEQ ID NO: 1420200 - DNA, 15 bp, Homo sapiens
tggcagttaacaaaa

SEQ ID NO: 1420201 - DNA, 15 bp, Homo sapiens
atggcagttaacaaa

SEQ ID NO: 1420202 - DNA, 15 bp, Homo sapiens
tatggcagttaacaa

SEQ ID NO: 1420203 - DNA, 15 bp, Homo sapiens
atatggcagttaaca

SEQ ID NO: 1420204 - DNA, 15 bp, Homo sapiens
tatatggcagttaac

SEQ ID NO: 1420205 - DNA, 15 bp, Homo sapiens
gtatatggcagttaa

SEQ ID NO: 1420206 - DNA, 15 bp, Homo sapiens
tgtatatggcagtta

SEQ ID NO: 1420207 - DNA, 15 bp, Homo sapiens
ctgtatatggcagtt

SEQ ID NO: 1420208 - DNA, 15 bp, Homo sapiens
tctgtatatggcagt

SEQ ID NO: 1420209 - DNA, 15 bp, Homo sapiens
ctctgtatatggcag

SEQ ID NO: 1420210 - DNA, 15 bp, Homo sapiens
actctgtatatggca

SEQ ID NO: 1420211 - DNA, 15 bp, Homo sapiens
aactctgtatatggc

SEQ ID NO: 1420212 - DNA, 15 bp, Homo sapiens
aaactctgtatatgg

SEQ ID NO: 1420213 - DNA, 15 bp, Homo sapiens
aaaactctgtatatg

SEQ ID NO: 1420214 - DNA, 15 bp, Homo sapiens
taaaactctgtatat

SEQ ID NO: 1420215 - DNA, 15 bp, Homo sapiens
ttaaaactctgtata

SEQ ID NO: 1420216 - DNA, 15 bp, Homo sapiens
tttaaaactctgtat

SEQ ID NO: 1420217 - DNA, 15 bp, Homo sapiens
atttaaaactctgta

SEQ ID NO: 1420218 - DNA, 15 bp, Homo sapiens
catttaaaactctgt

SEQ ID NO: 1420219 - DNA, 15 bp, Homo sapiens
gcatttaaaactctg

SEQ ID NO: 1420220 - DNA, 15 bp, Homo sapiens
tgcatttaaaactct

SEQ ID NO: 1420221 - DNA, 15 bp, Homo sapiens
gtgcatttaaaactc

SEQ ID NO: 1420222 - DNA, 15 bp, Homo sapiens
tgtgcatttaaaact

SEQ ID NO: 1420223 - DNA, 15 bp, Homo sapiens
gtgtgcatttaaaac

SEQ ID NO: 1420224 - DNA, 15 bp, Homo sapiens
agtgtgcatttaaaa

SEQ ID NO: 1420225 - DNA, 15 bp, Homo sapiens
aagtgtgcatttaaa

SEQ ID NO: 1420226 - DNA, 15 bp, Homo sapiens
aaagtgtgcatttaa

SEQ ID NO: 1420227 - DNA, 15 bp, Homo sapiens
aaaagtgtgcattta

SEQ ID NO: 1420228 - DNA, 15 bp, Homo sapiens
gaaaagtgtgcattt

SEQ ID NO: 1420229 - DNA, 15 bp, Homo sapiens
ggaaaagtgtgcatt

SEQ ID NO: 1420230 - DNA, 15 bp, Homo sapiens
tggaaaagtgtgcat

SEQ ID NO: 1420231 - DNA, 15 bp, Homo sapiens
atggaaaagtgtgca

SEQ ID NO: 1420232 - DNA, 15 bp, Homo sapiens
aatggaaaagtgtgc

SEQ ID NO: 1420233 - DNA, 15 bp, Homo sapiens
aaatggaaaagtgtg

SEQ ID NO: 1420234 - DNA, 15 bp, Homo sapiens
aaaatggaaaagtgt

SEQ ID NO: 1420235 - DNA, 15 bp, Homo sapiens
aaaaatggaaaagtg

SEQ ID NO: 1420236 - DNA, 15 bp, Homo sapiens
aaaaaatggaaaagt

SEQ ID NO: 1420237 - DNA, 15 bp, Homo sapiens
aaaaaaatggaaaag

SEQ ID NO: 1420238 - DNA, 15 bp, Homo sapiens
caaaaaaatggaaaa

SEQ ID NO: 1420239 - DNA, 15 bp, Homo sapiens
tcaaaaaaatggaaa

SEQ ID NO: 1420240 - DNA, 15 bp, Homo sapiens
ctcaaaaaaatggaa

SEQ ID NO: 1420241 - DNA, 15 bp, Homo sapiens
actcaaaaaaatgga

SEQ ID NO: 1420242 - DNA, 15 bp, Homo sapiens
aactcaaaaaaatgg

SEQ ID NO: 1420243 - DNA, 15 bp, Homo sapiens
gaactcaaaaaaatg

SEQ ID NO: 1420244 - DNA, 15 bp, Homo sapiens
agaactcaaaaaaat

SEQ ID NO: 1420245 - DNA, 15 bp, Homo sapiens
aagaactcaaaaaaa

SEQ ID NO: 1420246 - DNA, 15 bp, Homo sapiens
aaagaactcaaaaaa

SEQ ID NO: 1420247 - DNA, 15 bp, Homo sapiens
aaaagaactcaaaaa

SEQ ID NO: 1420248 - DNA, 15 bp, Homo sapiens
aaaaagaactcaaaa

SEQ ID NO: 1420249 - DNA, 15 bp, Homo sapiens
taaaaagaactcaaa

SEQ ID NO: 1420250 - DNA, 15 bp, Homo sapiens
ataaaaagaactcaa

SEQ ID NO: 1420251 - DNA, 15 bp, Homo sapiens
gataaaaagaactca

SEQ ID NO: 1420252 - DNA, 15 bp, Homo sapiens
ggataaaaagaactc

SEQ ID NO: 1420253 - DNA, 15 bp, Homo sapiens
aggataaaaagaact

SEQ ID NO: 1420254 - DNA, 15 bp, Homo sapiens
caggataaaaagaac

SEQ ID NO: 1420255 - DNA, 15 bp, Homo sapiens
tcaggataaaaagaa

SEQ ID NO: 1420256 - DNA, 15 bp, Homo sapiens
ttcaggataaaaaga

SEQ ID NO: 1420257 - DNA, 15 bp, Homo sapiens
attcaggataaaaag

SEQ ID NO: 1420258 - DNA, 15 bp, Homo sapiens
gattcaggataaaaa

SEQ ID NO: 1420259 - DNA, 15 bp, Homo sapiens
tgattcaggataaaa

SEQ ID NO: 1420260 - DNA, 15 bp, Homo sapiens
atgattcaggataaa

SEQ ID NO: 1420261 - DNA, 15 bp, Homo sapiens
gatgattcaggataa

SEQ ID NO: 1420262 - DNA, 15 bp, Homo sapiens
tgatgattcaggata

SEQ ID NO: 1420263 - DNA, 15 bp, Homo sapiens
ttgatgattcaggat

SEQ ID NO: 1420264 - DNA, 15 bp, Homo sapiens
tttgatgattcagga

SEQ ID NO: 1420265 - DNA, 15 bp, Homo sapiens
ttttgatgattcagg

SEQ ID NO: 1420266 - DNA, 15 bp, Homo sapiens
attttgatgattcag

SEQ ID NO: 1420267 - DNA, 15 bp, Homo sapiens
cattttgatgattca

SEQ ID NO: 1420268 - DNA, 15 bp, Homo sapiens
tcattttgatgattc

SEQ ID NO: 1420269 - DNA, 15 bp, Homo sapiens
ttcattttgatgatt

SEQ ID NO: 1420270 - DNA, 15 bp, Homo sapiens
cttcattttgatgat

SEQ ID NO: 1420271 - DNA, 15 bp, Homo sapiens
tcttcattttgatga

SEQ ID NO: 1420272 - DNA, 15 bp, Homo sapiens
ttcttcattttgatg

SEQ ID NO: 1420273 - DNA, 15 bp, Homo sapiens
tttcttcattttgat

SEQ ID NO: 1420274 - DNA, 15 bp, Homo sapiens
gtttcttcattttga

SEQ ID NO: 1420275 - DNA, 15 bp, Homo sapiens
agtttcttcattttg

SEQ ID NO: 1420276 - DNA, 15 bp, Homo sapiens
gagtttcttcatttt

SEQ ID NO: 1420277 - DNA, 15 bp, Homo sapiens
agagtttcttcattt

SEQ ID NO: 1420278 - DNA, 15 bp, Homo sapiens
aagagtttcttcatt

SEQ ID NO: 1420279 - DNA, 15 bp, Homo sapiens
caagagtttcttcat

SEQ ID NO: 1420280 - DNA, 15 bp, Homo sapiens
gcaagagtttcttca

SEQ ID NO: 1420281 - DNA, 15 bp, Homo sapiens
tgcaagagtttcttc

SEQ ID NO: 1420282 - DNA, 15 bp, Homo sapiens
atgcaagagtttctt

SEQ ID NO: 1420283 - DNA, 15 bp, Homo sapiens
catgcaagagtttct

SEQ ID NO: 1420284 - DNA, 15 bp, Homo sapiens
acatgcaagagtttc

SEQ ID NO: 1420285 - DNA, 15 bp, Homo sapiens
aacatgcaagagttt

SEQ ID NO: 1420286 - DNA, 15 bp, Homo sapiens
taacatgcaagagtt

SEQ ID NO: 1420287 - DNA, 15 bp, Homo sapiens
ctaacatgcaagagt

SEQ ID NO: 1420288 - DNA, 15 bp, Homo sapiens
gctaacatgcaagag

SEQ ID NO: 1420289 - DNA, 15 bp, Homo sapiens
ggctaacatgcaaga

SEQ ID NO: 1420290 - DNA, 15 bp, Homo sapiens
tggctaacatgcaag

SEQ ID NO: 1420291 - DNA, 15 bp, Homo sapiens
ttggctaacatgcaa

SEQ ID NO: 1420292 - DNA, 15 bp, Homo sapiens
gttggctaacatgca

SEQ ID NO: 1420293 - DNA, 15 bp, Homo sapiens
agttggctaacatgc

SEQ ID NO: 1420294 - DNA, 15 bp, Homo sapiens
aagttggctaacatg

SEQ ID NO: 1420295 - DNA, 15 bp, Homo sapiens
aaagttggctaacat

SEQ ID NO: 1420296 - DNA, 15 bp, Homo sapiens
aaaagttggctaaca

SEQ ID NO: 1420297 - DNA, 15 bp, Homo sapiens
aaaaagttggctaac

SEQ ID NO: 1420298 - DNA, 15 bp, Homo sapiens
taaaaagttggctaa

SEQ ID NO: 1420299 - DNA, 15 bp, Homo sapiens
ataaaaagttggcta

SEQ ID NO: 1420300 - DNA, 15 bp, Homo sapiens
tataaaaagttggct

SEQ ID NO: 1420301 - DNA, 15 bp, Homo sapiens
ttataaaaagttggc

SEQ ID NO: 1420302 - DNA, 15 bp, Homo sapiens
gttataaaaagttgg

SEQ ID NO: 1420303 - DNA, 15 bp, Homo sapiens
agttataaaaagttg

SEQ ID NO: 1420304 - DNA, 15 bp, Homo sapiens
aagttataaaaagtt

SEQ ID NO: 1420305 - DNA, 15 bp, Homo sapiens
caagttataaaaagt

SEQ ID NO: 1420306 - DNA, 15 bp, Homo sapiens
acaagttataaaaag

SEQ ID NO: 1420307 - DNA, 15 bp, Homo sapiens
aacaagttataaaaa

SEQ ID NO: 1420308 - DNA, 15 bp, Homo sapiens
taacaagttataaaa

SEQ ID NO: 1420309 - DNA, 15 bp, Homo sapiens
ttaacaagttataaa

SEQ ID NO: 1420310 - DNA, 15 bp, Homo sapiens
attaacaagttataa

SEQ ID NO: 1420311 - DNA, 15 bp, Homo sapiens
tattaacaagttata

SEQ ID NO: 1420312 - DNA, 15 bp, Homo sapiens
atattaacaagttat

SEQ ID NO: 1420313 - DNA, 15 bp, Homo sapiens
gatattaacaagtta

SEQ ID NO: 1420314 - DNA, 15 bp, Homo sapiens
tgatattaacaagtt

SEQ ID NO: 1420315 - DNA, 15 bp, Homo sapiens
ctgatattaacaagt

SEQ ID NO: 1420316 - DNA, 15 bp, Homo sapiens
tctgatattaacaag

SEQ ID NO: 1420317 - DNA, 15 bp, Homo sapiens
ttctgatattaacaa

SEQ ID NO: 1420318 - DNA, 15 bp, Homo sapiens
tttctgatattaaca

SEQ ID NO: 1420319 - DNA, 15 bp, Homo sapiens
atttctgatattaac

SEQ ID NO: 1420320 - DNA, 15 bp, Homo sapiens
aatttctgatattaa

SEQ ID NO: 1420321 - DNA, 15 bp, Homo sapiens
taatttctgatatta

SEQ ID NO: 1420322 - DNA, 15 bp, Homo sapiens
gtaatttctgatatt

SEQ ID NO: 1420323 - DNA, 15 bp, Homo sapiens
ggtaatttctgatat

SEQ ID NO: 1420324 - DNA, 15 bp, Homo sapiens
tggtaatttctgata

SEQ ID NO: 1420325 - DNA, 15 bp, Homo sapiens
atggtaatttctgat

SEQ ID NO: 1420326 - DNA, 15 bp, Homo sapiens
catggtaatttctga

SEQ ID NO: 1420327 - DNA, 15 bp, Homo sapiens
gcatggtaatttctg

SEQ ID NO: 1420328 - DNA, 15 bp, Homo sapiens
agcatggtaatttct

SEQ ID NO: 1420329 - DNA, 15 bp, Homo sapiens
tagcatggtaatttc

SEQ ID NO: 1420330 - DNA, 15 bp, Homo sapiens
atagcatggtaattt

SEQ ID NO: 1420331 - DNA, 15 bp, Homo sapiens
catagcatggtaatt

SEQ ID NO: 1420332 - DNA, 15 bp, Homo sapiens
ccatagcatggtaat

SEQ ID NO: 1420333 - DNA, 15 bp, Homo sapiens
tccatagcatggtaa

SEQ ID NO: 1420334 - DNA, 15 bp, Homo sapiens
gtccatagcatggta

SEQ ID NO: 1420335 - DNA, 15 bp, Homo sapiens
agtccatagcatggt

SEQ ID NO: 1420336 - DNA, 15 bp, Homo sapiens
aagtccatagcatgg

SEQ ID NO: 1420337 - DNA, 15 bp, Homo sapiens
gaagtccatagcatg

SEQ ID NO: 1420338 - DNA, 15 bp, Homo sapiens
tgaagtccatagcat

SEQ ID NO: 1420339 - DNA, 15 bp, Homo sapiens
ttgaagtccatagca

SEQ ID NO: 1420340 - DNA, 15 bp, Homo sapiens
tttgaagtccatagc

SEQ ID NO: 1420341 - DNA, 15 bp, Homo sapiens
ttttgaagtccatag

SEQ ID NO: 1420342 - DNA, 15 bp, Homo sapiens
attttgaagtccata

SEQ ID NO: 1420343 - DNA, 15 bp, Homo sapiens
tattttgaagtccat

SEQ ID NO: 1420344 - DNA, 15 bp, Homo sapiens
gtattttgaagtcca

SEQ ID NO: 1420345 - DNA, 15 bp, Homo sapiens
tgtattttgaagtcc

SEQ ID NO: 1420346 - DNA, 15 bp, Homo sapiens
ttgtattttgaagtc

SEQ ID NO: 1420347 - DNA, 15 bp, Homo sapiens
tttgtattttgaagt

SEQ ID NO: 1420348 - DNA, 15 bp, Homo sapiens
atttgtattttgaag

SEQ ID NO: 1420349 - DNA, 15 bp, Homo sapiens
aatttgtattttgaa

SEQ ID NO: 1420350 - DNA, 15 bp, Homo sapiens
taatttgtattttga

SEQ ID NO: 1420351 - DNA, 15 bp, Homo sapiens
gtaatttgtattttg

SEQ ID NO: 1420352 - DNA, 15 bp, Homo sapiens
agtaatttgtatttt

SEQ ID NO: 1420353 - DNA, 15 bp, Homo sapiens
gagtaatttgtattt

SEQ ID NO: 1420354 - DNA, 15 bp, Homo sapiens
agagtaatttgtatt

SEQ ID NO: 1420355 - DNA, 15 bp, Homo sapiens
tagagtaatttgtat

SEQ ID NO: 1420356 - DNA, 15 bp, Homo sapiens
atagagtaatttgta

SEQ ID NO: 1420357 - DNA, 15 bp, Homo sapiens
aatagagtaatttgt

SEQ ID NO: 1420358 - DNA, 15 bp, Homo sapiens
aaatagagtaatttg

SEQ ID NO: 1420359 - DNA, 15 bp, Homo sapiens
caaatagagtaattt

SEQ ID NO: 1420360 - DNA, 15 bp, Homo sapiens
tcaaatagagtaatt

SEQ ID NO: 1420361 - DNA, 15 bp, Homo sapiens
ttcaaatagagtaat

SEQ ID NO: 1420362 - DNA, 15 bp, Homo sapiens
tttcaaatagagtaa

SEQ ID NO: 1420363 - DNA, 15 bp, Homo sapiens
atttcaaatagagta

SEQ ID NO: 1420364 - DNA, 15 bp, Homo sapiens
tatttcaaatagagt

SEQ ID NO: 1420365 - DNA, 15 bp, Homo sapiens
atatttcaaatagag

SEQ ID NO: 1420366 - DNA, 15 bp, Homo sapiens
aatatttcaaataga

SEQ ID NO: 1420367 - DNA, 15 bp, Homo sapiens
aaatatttcaaatag

SEQ ID NO: 1420368 - DNA, 15 bp, Homo sapiens
taaatatttcaaata

SEQ ID NO: 1420369 - DNA, 15 bp, Homo sapiens
ttaaatatttcaaat

SEQ ID NO: 1420370 - DNA, 15 bp, Homo sapiens
tttaaatatttcaaa

SEQ ID NO: 1420371 - DNA, 15 bp, Homo sapiens
ttttaaatatttcaa

SEQ ID NO: 1420372 - DNA, 15 bp, Homo sapiens
gttttaaatatttca

SEQ ID NO: 1420373 - DNA, 15 bp, Homo sapiens
tgttttaaatatttc

SEQ ID NO: 1420374 - DNA, 15 bp, Homo sapiens
gtgttttaaatattt

SEQ ID NO: 1420375 - DNA, 15 bp, Homo sapiens
agtgttttaaatatt

SEQ ID NO: 1420376 - DNA, 15 bp, Homo sapiens
tagtgttttaaatat

SEQ ID NO: 1420377 - DNA, 15 bp, Homo sapiens
gtagtgttttaaata

SEQ ID NO: 1420378 - DNA, 15 bp, Homo sapiens
agtagtgttttaaat

SEQ ID NO: 1420379 - DNA, 15 bp, Homo sapiens
aagtagtgttttaaa

SEQ ID NO: 1420380 - DNA, 15 bp, Homo sapiens
aaagtagtgttttaa

SEQ ID NO: 1420381 - DNA, 15 bp, Homo sapiens
caaagtagtgtttta

SEQ ID NO: 1420382 - DNA, 15 bp, Homo sapiens
tcaaagtagtgtttt

SEQ ID NO: 1420383 - DNA, 15 bp, Homo sapiens
ttcaaagtagtgttt

SEQ ID NO: 1420384 - DNA, 15 bp, Homo sapiens
gttcaaagtagtgtt

SEQ ID NO: 1420385 - DNA, 15 bp, Homo sapiens
agttcaaagtagtgt

SEQ ID NO: 1420386 - DNA, 15 bp, Homo sapiens
aagttcaaagtagtg

SEQ ID NO: 1420387 - DNA, 15 bp, Homo sapiens
aaagttcaaagtagt

SEQ ID NO: 1420388 - DNA, 15 bp, Homo sapiens
aaaagttcaaagtag

SEQ ID NO: 1420389 - DNA, 15 bp, Homo sapiens
aaaaagttcaaagta

SEQ ID NO: 1420390 - DNA, 15 bp, Homo sapiens
taaaaagttcaaagt

SEQ ID NO: 1420391 - DNA, 15 bp, Homo sapiens
ttaaaaagttcaaag

SEQ ID NO: 1420392 - DNA, 15 bp, Homo sapiens
tttaaaaagttcaaa

SEQ ID NO: 1420393 - DNA, 15 bp, Homo sapiens
atttaaaaagttcaa

SEQ ID NO: 1420394 - DNA, 15 bp, Homo sapiens
catttaaaaagttca

SEQ ID NO: 1420395 - DNA, 15 bp, Homo sapiens
acatttaaaaagttc

SEQ ID NO: 1420396 - DNA, 15 bp, Homo sapiens
tacatttaaaaagtt

SEQ ID NO: 1420397 - DNA, 15 bp, Homo sapiens
ttacatttaaaaagt

SEQ ID NO: 1420398 - DNA, 15 bp, Homo sapiens
gttacatttaaaaag

SEQ ID NO: 1420399 - DNA, 15 bp, Homo sapiens
tgttacatttaaaaa

SEQ ID NO: 1420400 - DNA, 15 bp, Homo sapiens
ctgttacatttaaaa

SEQ ID NO: 1420401 - DNA, 15 bp, Homo sapiens
actgttacatttaaa

SEQ ID NO: 1420402 - DNA, 15 bp, Homo sapiens
aactgttacatttaa

SEQ ID NO: 1420403 - DNA, 15 bp, Homo sapiens
taactgttacattta

SEQ ID NO: 1420404 - DNA, 15 bp, Homo sapiens
ataactgttacattt

SEQ ID NO: 1420405 - DNA, 15 bp, Homo sapiens
tataactgttacatt

SEQ ID NO: 1420406 - DNA, 15 bp, Homo sapiens
ttataactgttacat

SEQ ID NO: 1420407 - DNA, 15 bp, Homo sapiens
attataactgttaca

SEQ ID NO: 1420408 - DNA, 15 bp, Homo sapiens
tattataactgttac

SEQ ID NO: 1420409 - DNA, 15 bp, Homo sapiens
gtattataactgtta

SEQ ID NO: 1420410 - DNA, 15 bp, Homo sapiens
cgtattataactgtt

SEQ ID NO: 1420411 - DNA, 15 bp, Homo sapiens
gcgtattataactgt

SEQ ID NO: 1420412 - DNA, 15 bp, Homo sapiens
ggcgtattataactg

SEQ ID NO: 1420413 - DNA, 15 bp, Homo sapiens
aggcgtattataact

SEQ ID NO: 1420414 - DNA, 15 bp, Homo sapiens
aaggcgtattataac

SEQ ID NO: 1420415 - DNA, 15 bp, Homo sapiens
caaggcgtattataa

SEQ ID NO: 1420416 - DNA, 15 bp, Homo sapiens
tcaaggcgtattata

SEQ ID NO: 1420417 - DNA, 15 bp, Homo sapiens
atcaaggcgtattat

SEQ ID NO: 1420418 - DNA, 15 bp, Homo sapiens
aatcaaggcgtatta

SEQ ID NO: 1420419 - DNA, 15 bp, Homo sapiens
aaatcaaggcgtatt

SEQ ID NO: 1420420 - DNA, 15 bp, Homo sapiens
aaaatcaaggcgtat

SEQ ID NO: 1420421 - DNA, 15 bp, Homo sapiens
taaaatcaaggcgta

SEQ ID NO: 1420422 - DNA, 15 bp, Homo sapiens
ataaaatcaaggcgt

SEQ ID NO: 1420423 - DNA, 15 bp, Homo sapiens
tataaaatcaaggcg

SEQ ID NO: 1420424 - DNA, 15 bp, Homo sapiens
ttataaaatcaaggc

SEQ ID NO: 1420425 - DNA, 15 bp, Homo sapiens
gttataaaatcaagg

SEQ ID NO: 1420426 - DNA, 15 bp, Homo sapiens
cgttataaaatcaag

SEQ ID NO: 1420427 - DNA, 15 bp, Homo sapiens
acgttataaaatcaa

SEQ ID NO: 1420428 - DNA, 15 bp, Homo sapiens
cacgttataaaatca

SEQ ID NO: 1420429 - DNA, 15 bp, Homo sapiens
ccacgttataaaatc

SEQ ID NO: 1420430 - DNA, 15 bp, Homo sapiens
accacgttataaaat

SEQ ID NO: 1420431 - DNA, 15 bp, Homo sapiens
aaccacgttataaaa

SEQ ID NO: 1420432 - DNA, 15 bp, Homo sapiens
taaccacgttataaa

SEQ ID NO: 1420433 - DNA, 15 bp, Homo sapiens
ataaccacgttataa

SEQ ID NO: 1420434 - DNA, 15 bp, Homo sapiens
tataaccacgttata

SEQ ID NO: 1420435 - DNA, 15 bp, Homo sapiens
gtataaccacgttat

SEQ ID NO: 1420436 - DNA, 15 bp, Homo sapiens
tgtataaccacgtta

SEQ ID NO: 1420437 - DNA, 15 bp, Homo sapiens
atgtataaccacgtt

SEQ ID NO: 1420438 - DNA, 15 bp, Homo sapiens
catgtataaccacgt

SEQ ID NO: 1420439 - DNA, 15 bp, Homo sapiens
acatgtataaccacg

SEQ ID NO: 1420440 - DNA, 15 bp, Homo sapiens
tacatgtataaccac

SEQ ID NO: 1420441 - DNA, 15 bp, Homo sapiens
ttacatgtataacca

SEQ ID NO: 1420442 - DNA, 15 bp, Homo sapiens
tttacatgtataacc

SEQ ID NO: 1420443 - DNA, 15 bp, Homo sapiens
ctttacatgtataac

SEQ ID NO: 1420444 - DNA, 15 bp, Homo sapiens
tctttacatgtataa

SEQ ID NO: 1420445 - DNA, 15 bp, Homo sapiens
ctctttacatgtata

SEQ ID NO: 1420446 - DNA, 15 bp, Homo sapiens
cctctttacatgtat

SEQ ID NO: 1420447 - DNA, 15 bp, Homo sapiens
gcctctttacatgta

SEQ ID NO: 1420448 - DNA, 15 bp, Homo sapiens
agcctctttacatgt

SEQ ID NO: 1420449 - DNA, 15 bp, Homo sapiens
cagcctctttacatg

SEQ ID NO: 1420450 - DNA, 15 bp, Homo sapiens
tcagcctctttacat

SEQ ID NO: 1420451 - DNA, 15 bp, Homo sapiens
ttcagcctctttaca

SEQ ID NO: 1420452 - DNA, 15 bp, Homo sapiens
attcagcctctttac

SEQ ID NO: 1420453 - DNA, 15 bp, Homo sapiens
gattcagcctcttta

SEQ ID NO: 1420454 - DNA, 15 bp, Homo sapiens
ggattcagcctcttt

SEQ ID NO: 1420455 - DNA, 15 bp, Homo sapiens
tggattcagcctctt

SEQ ID NO: 1420456 - DNA, 15 bp, Homo sapiens
ttggattcagcctct

SEQ ID NO: 1420457 - DNA, 15 bp, Homo sapiens
gttggattcagcctc

SEQ ID NO: 1420458 - DNA, 15 bp, Homo sapiens
agttggattcagcct

SEQ ID NO: 1420459 - DNA, 15 bp, Homo sapiens
tagttggattcagcc

SEQ ID NO: 1420460 - DNA, 15 bp, Homo sapiens
ttagttggattcagc

SEQ ID NO: 1420461 - DNA, 15 bp, Homo sapiens
attagttggattcag

SEQ ID NO: 1420462 - DNA, 15 bp, Homo sapiens
aattagttggattca

SEQ ID NO: 1420463 - DNA, 15 bp, Homo sapiens
taattagttggattc

SEQ ID NO: 1420464 - DNA, 15 bp, Homo sapiens
ataattagttggatt

SEQ ID NO: 1420465 - DNA, 15 bp, Homo sapiens
tataattagttggat

SEQ ID NO: 1420466 - DNA, 15 bp, Homo sapiens
atataattagttgga

SEQ ID NO: 1420467 - DNA, 15 bp, Homo sapiens
aatataattagttgg

SEQ ID NO: 1420468 - DNA, 15 bp, Homo sapiens
aaatataattagttg

SEQ ID NO: 1420469 - DNA, 15 bp, Homo sapiens
gaaatataattagtt

SEQ ID NO: 1420470 - DNA, 15 bp, Homo sapiens
tgaaatataattagt

SEQ ID NO: 1420471 - DNA, 15 bp, Homo sapiens
gtgaaatataattag

SEQ ID NO: 1420472 - DNA, 15 bp, Homo sapiens
tgtgaaatataatta

SEQ ID NO: 1420473 - DNA, 15 bp, Homo sapiens
atgtgaaatataatt

SEQ ID NO: 1420474 - DNA, 15 bp, Homo sapiens
aatgtgaaatataat

SEQ ID NO: 1420475 - DNA, 15 bp, Homo sapiens
aaatgtgaaatataa

SEQ ID NO: 1420476 - DNA, 15 bp, Homo sapiens
aaaatgtgaaatata

SEQ ID NO: 1420477 - DNA, 15 bp, Homo sapiens
gaaaatgtgaaatat

SEQ ID NO: 1420478 - DNA, 15 bp, Homo sapiens
agaaaatgtgaaata

SEQ ID NO: 1420479 - DNA, 15 bp, Homo sapiens
aagaaaatgtgaaat

SEQ ID NO: 1420480 - DNA, 15 bp, Homo sapiens
tgaaagaaaatgtga

SEQ ID NO: 1420481 - DNA, 15 bp, Homo sapiens
ttgaaagaaaatgtg

SEQ ID NO: 1420482 - DNA, 15 bp, Homo sapiens
tttgaaagaaaatgt

SEQ ID NO: 1420483 - DNA, 15 bp, Homo sapiens
ctttgaaagaaaatg

SEQ ID NO: 1420484 - DNA, 15 bp, Homo sapiens
gctttgaaagaaaat

SEQ ID NO: 1420485 - DNA, 15 bp, Homo sapiens
agctttgaaagaaaa

SEQ ID NO: 1420486 - DNA, 15 bp, Homo sapiens
aagctttgaaagaaa

SEQ ID NO: 1420487 - DNA, 15 bp, Homo sapiens
aaagctttgaaagaa

SEQ ID NO: 1420488 - DNA, 15 bp, Homo sapiens
taaagctttgaaaga

SEQ ID NO: 1420489 - DNA, 15 bp, Homo sapiens
ttaaagctttgaaag

SEQ ID NO: 1420490 - DNA, 15 bp, Homo sapiens
attaaagctttgaaa

SEQ ID NO: 1420491 - DNA, 15 bp, Homo sapiens
aattaaagctttgaa

SEQ ID NO: 1420492 - DNA, 15 bp, Homo sapiens
gaattaaagctttga

SEQ ID NO: 1420493 - DNA, 15 bp, Homo sapiens
agaattaaagctttg

SEQ ID NO: 1420494 - DNA, 15 bp, Homo sapiens
cagaattaaagcttt

SEQ ID NO: 1420495 - DNA, 15 bp, Homo sapiens
acagaattaaagctt

SEQ ID NO: 1420496 - DNA, 15 bp, Homo sapiens
aacagaattaaagct

SEQ ID NO: 1420497 - DNA, 15 bp, Homo sapiens
taacagaattaaagc

SEQ ID NO: 1420498 - DNA, 15 bp, Homo sapiens
ttaacagaattaaag

SEQ ID NO: 1420499 - DNA, 15 bp, Homo sapiens
attaacagaattaaa

SEQ ID NO: 1420500 - DNA, 15 bp, Homo sapiens
aattaacagaattaa

SEQ ID NO: 1420501 - DNA, 15 bp, Homo sapiens
aaattaacagaatta

SEQ ID NO: 1420502 - DNA, 15 bp, Homo sapiens
gaaattaacagaatt

SEQ ID NO: 1420503 - DNA, 15 bp, Homo sapiens
ggaaattaacagaat

SEQ ID NO: 1420504 - DNA, 15 bp, Homo sapiens
gggaaattaacagaa

SEQ ID NO: 1420505 - DNA, 15 bp, Homo sapiens
ggggaaattaacaga

SEQ ID NO: 1420506 - DNA, 15 bp, Homo sapiens
gggggaaattaacag

SEQ ID NO: 1420507 - DNA, 15 bp, Homo sapiens
agggggaaattaaca

SEQ ID NO: 1420508 - DNA, 15 bp, Homo sapiens
tagggggaaattaac

SEQ ID NO: 1420509 - DNA, 15 bp, Homo sapiens
atagggggaaattaa

SEQ ID NO: 1420510 - DNA, 15 bp, Homo sapiens
tatagggggaaatta

SEQ ID NO: 1420511 - DNA, 15 bp, Homo sapiens
atatagggggaaatt

SEQ ID NO: 1420512 - DNA, 15 bp, Homo sapiens
tatatagggggaaat

SEQ ID NO: 1420513 - DNA, 15 bp, Homo sapiens
ctatatagggggaaa

SEQ ID NO: 1420514 - DNA, 15 bp, Homo sapiens
gctatatagggggaa

SEQ ID NO: 1420515 - DNA, 15 bp, Homo sapiens
agctatataggggga

SEQ ID NO: 1420516 - DNA, 15 bp, Homo sapiens
tagctatataggggg

SEQ ID NO: 1420517 - DNA, 15 bp, Homo sapiens
ctagctatatagggg

SEQ ID NO: 1420518 - DNA, 15 bp, Homo sapiens
actagctatataggg

SEQ ID NO: 1420519 - DNA, 15 bp, Homo sapiens
cactagctatatagg

SEQ ID NO: 1420520 - DNA, 15 bp, Homo sapiens
tcactagctatatag

SEQ ID NO: 1420521 - DNA, 15 bp, Homo sapiens
ttcactagctatata

SEQ ID NO: 1420522 - DNA, 15 bp, Homo sapiens
tttcactagctatat

SEQ ID NO: 1420523 - DNA, 15 bp, Homo sapiens
atttcactagctata

SEQ ID NO: 1420524 - DNA, 15 bp, Homo sapiens
tatttcactagctat

SEQ ID NO: 1420525 - DNA, 15 bp, Homo sapiens
ctatttcactagcta

SEQ ID NO: 1420526 - DNA, 15 bp, Homo sapiens
tctatttcactagct

SEQ ID NO: 1420527 - DNA, 15 bp, Homo sapiens
atctatttcactagc

SEQ ID NO: 1420528 - DNA, 15 bp, Homo sapiens
catctatttcactag

SEQ ID NO: 1420529 - DNA, 15 bp, Homo sapiens
acatctatttcacta

SEQ ID NO: 1420530 - DNA, 15 bp, Homo sapiens
cacatctatttcact

SEQ ID NO: 1420531 - DNA, 15 bp, Homo sapiens
acacatctatttcac

SEQ ID NO: 1420532 - DNA, 15 bp, Homo sapiens
tacacatctatttca

SEQ ID NO: 1420533 - DNA, 15 bp, Homo sapiens
gtacacatctatttc

SEQ ID NO: 1420534 - DNA, 15 bp, Homo sapiens
tgtacacatctattt

SEQ ID NO: 1420535 - DNA, 15 bp, Homo sapiens
gtgtacacatctatt

SEQ ID NO: 1420536 - DNA, 15 bp, Homo sapiens
agtgtacacatctat

SEQ ID NO: 1420537 - DNA, 15 bp, Homo sapiens
tagtgtacacatcta

SEQ ID NO: 1420538 - DNA, 15 bp, Homo sapiens
atagtgtacacatct

SEQ ID NO: 1420539 - DNA, 15 bp, Homo sapiens
catagtgtacacatc

SEQ ID NO: 1420540 - DNA, 15 bp, Homo sapiens
acatagtgtacacat

SEQ ID NO: 1420541 - DNA, 15 bp, Homo sapiens
aacatagtgtacaca

SEQ ID NO: 1420542 - DNA, 15 bp, Homo sapiens
taacatagtgtacac

SEQ ID NO: 1420543 - DNA, 15 bp, Homo sapiens
ttaacatagtgtaca

SEQ ID NO: 1420544 - DNA, 15 bp, Homo sapiens
tttaacatagtgtac

SEQ ID NO: 1420545 - DNA, 15 bp, Homo sapiens
atttaacatagtgta

SEQ ID NO: 1420546 - DNA, 15 bp, Homo sapiens
tatttaacatagtgt

SEQ ID NO: 1420547 - DNA, 15 bp, Homo sapiens
ttatttaacatagtg

SEQ ID NO: 1420548 - DNA, 15 bp, Homo sapiens
tttatttaacatagt

SEQ ID NO: 1420549 - DNA, 15 bp, Homo sapiens
atttatttaacatag

SEQ ID NO: 1420550 - DNA, 15 bp, Homo sapiens
aatttatttaacata

SEQ ID NO: 1420551 - DNA, 15 bp, Homo sapiens
aaatttatttaacat

SEQ ID NO: 1420552 - DNA, 15 bp, Homo sapiens
aaaatttatttaaca

SEQ ID NO: 1420553 - DNA, 15 bp, Homo sapiens
aaaaatttatttaac

SEQ ID NO: 1420554 - DNA, 15 bp, Homo sapiens
aaaaaatttatttaa

SEQ ID NO: 1420555 - DNA, 15 bp, Homo sapiens
taaaaaatttattta

SEQ ID NO: 1420556 - DNA, 15 bp, Homo sapiens
ctaaaaaatttattt

SEQ ID NO: 1420557 - DNA, 15 bp, Homo sapiens
tctaaaaaatttatt

SEQ ID NO: 1420558 - DNA, 15 bp, Homo sapiens
atctaaaaaatttat

SEQ ID NO: 1420559 - DNA, 15 bp, Homo sapiens
aatctaaaaaattta

SEQ ID NO: 1420560 - DNA, 15 bp, Homo sapiens
taatctaaaaaattt

SEQ ID NO: 1420561 - DNA, 15 bp, Homo sapiens
ttaatctaaaaaatt

SEQ ID NO: 1420562 - DNA, 15 bp, Homo sapiens
tttaatctaaaaaat

SEQ ID NO: 1420563 - DNA, 15 bp, Homo sapiens
gtttaatctaaaaaa

SEQ ID NO: 1420564 - DNA, 15 bp, Homo sapiens
agtttaatctaaaaa

SEQ ID NO: 1420565 - DNA, 15 bp, Homo sapiens
tagtttaatctaaaa

SEQ ID NO: 1420566 - DNA, 15 bp, Homo sapiens
atagtttaatctaaa

SEQ ID NO: 1420567 - DNA, 15 bp, Homo sapiens
catagtttaatctaa

SEQ ID NO: 1420568 - DNA, 15 bp, Homo sapiens
tcatagtttaatcta

SEQ ID NO: 1420569 - DNA, 15 bp, Homo sapiens
atcatagtttaatct

SEQ ID NO: 1420570 - DNA, 15 bp, Homo sapiens
aatcatagtttaatc

SEQ ID NO: 1420571 - DNA, 15 bp, Homo sapiens
caatcatagtttaat

SEQ ID NO: 1420572 - DNA, 15 bp, Homo sapiens
ccaatcatagtttaa

SEQ ID NO: 1420573 - DNA, 15 bp, Homo sapiens
gccaatcatagttta

SEQ ID NO: 1420574 - DNA, 15 bp, Homo sapiens
agccaatcatagttt

SEQ ID NO: 1420575 - DNA, 15 bp, Homo sapiens
aagccaatcatagtt

SEQ ID NO: 1420576 - DNA, 15 bp, Homo sapiens
aaagccaatcatagt

SEQ ID NO: 1420577 - DNA, 15 bp, Homo sapiens
gaaagccaatcatag

SEQ ID NO: 1420578 - DNA, 15 bp, Homo sapiens
agaaagccaatcata

SEQ ID NO: 1420579 - DNA, 15 bp, Homo sapiens
cagaaagccaatcat

SEQ ID NO: 1420580 - DNA, 15 bp, Homo sapiens
ccagaaagccaatca

SEQ ID NO: 1420581 - DNA, 15 bp, Homo sapiens
cccagaaagccaatc

SEQ ID NO: 1420582 - DNA, 15 bp, Homo sapiens
tcccagaaagccaat

SEQ ID NO: 1420583 - DNA, 15 bp, Homo sapiens
ttcccagaaagccaa

SEQ ID NO: 1420584 - DNA, 15 bp, Homo sapiens
attcccagaaagcca

SEQ ID NO: 1420585 - DNA, 15 bp, Homo sapiens
tattcccagaaagcc

SEQ ID NO: 1420586 - DNA, 15 bp, Homo sapiens
ttattcccagaaagc

SEQ ID NO: 1420587 - DNA, 15 bp, Homo sapiens
tttattcccagaaag

SEQ ID NO: 1420588 - DNA, 15 bp, Homo sapiens
ttttattcccagaaa

SEQ ID NO: 1420589 - DNA, 15 bp, Homo sapiens
cttttattcccagaa

SEQ ID NO: 1420590 - DNA, 15 bp, Homo sapiens
gcttttattcccaga

SEQ ID NO: 1420591 - DNA, 15 bp, Homo sapiens
agcttttattcccag

SEQ ID NO: 1420592 - DNA, 15 bp, Homo sapiens
tagcttttattccca

SEQ ID NO: 1420593 - DNA, 15 bp, Homo sapiens
atagcttttattccc

SEQ ID NO: 1420594 - DNA, 15 bp, Homo sapiens
aatagcttttattcc

SEQ ID NO: 1420595 - DNA, 15 bp, Homo sapiens
aaatagcttttattc

SEQ ID NO: 1420596 - DNA, 15 bp, Homo sapiens
taaatagcttttatt

SEQ ID NO: 1420597 - DNA, 15 bp, Homo sapiens
ttaaatagcttttat

SEQ ID NO: 1420598 - DNA, 15 bp, Homo sapiens
attaaatagctttta

SEQ ID NO: 1420599 - DNA, 15 bp, Homo sapiens
aattaaatagctttt

SEQ ID NO: 1420600 - DNA, 15 bp, Homo sapiens
caattaaatagcttt

SEQ ID NO: 1420601 - DNA, 15 bp, Homo sapiens
gcaattaaatagctt

SEQ ID NO: 1420602 - DNA, 15 bp, Homo sapiens
tgcaattaaatagct

SEQ ID NO: 1420603 - DNA, 15 bp, Homo sapiens
ttgcaattaaatagc

SEQ ID NO: 1420604 - DNA, 15 bp, Homo sapiens
tttgcaattaaatag

SEQ ID NO: 1420605 - DNA, 15 bp, Homo sapiens
ctttgcaattaaata

SEQ ID NO: 1420606 - DNA, 15 bp, Homo sapiens
cctttgcaattaaat

SEQ ID NO: 1420607 - DNA, 15 bp, Homo sapiens
ccctttgcaattaaa

SEQ ID NO: 1420608 - DNA, 15 bp, Homo sapiens
tccctttgcaattaa

SEQ ID NO: 1420609 - DNA, 15 bp, Homo sapiens
ttccctttgcaatta

SEQ ID NO: 1420610 - DNA, 15 bp, Homo sapiens
tttccctttgcaatt

SEQ ID NO: 1420611 - DNA, 15 bp, Homo sapiens
atttccctttgcaat

SEQ ID NO: 1420612 - DNA, 15 bp, Homo sapiens
gatttccctttgcaa

SEQ ID NO: 1420613 - DNA, 15 bp, Homo sapiens
ggatttccctttgca

SEQ ID NO: 1420614 - DNA, 15 bp, Homo sapiens
aggatttccctttgc

SEQ ID NO: 1420615 - DNA, 15 bp, Homo sapiens
aaggatttccctttg

SEQ ID NO: 1420616 - DNA, 15 bp, Homo sapiens
aaaggatttcccttt

SEQ ID NO: 1420617 - DNA, 15 bp, Homo sapiens
taaaggatttccctt

SEQ ID NO: 1420618 - DNA, 15 bp, Homo sapiens
ataaaggatttccct

SEQ ID NO: 1420619 - DNA, 15 bp, Homo sapiens
aataaaggatttccc

SEQ ID NO: 1420620 - DNA, 15 bp, Homo sapiens
aaataaaggatttcc

SEQ ID NO: 1420621 - DNA, 15 bp, Homo sapiens
caaataaaggatttc

SEQ ID NO: 1420622 - DNA, 15 bp, Homo sapiens
ccaaataaaggattt

SEQ ID NO: 1420623 - DNA, 15 bp, Homo sapiens
accaaataaaggatt

SEQ ID NO: 1420624 - DNA, 15 bp, Homo sapiens
aaccaaataaaggat

SEQ ID NO: 1420625 - DNA, 15 bp, Homo sapiens
aaaccaaataaagga

SEQ ID NO: 1420626 - DNA, 15 bp, Homo sapiens
gaaaccaaataaagg

SEQ ID NO: 1420627 - DNA, 15 bp, Homo sapiens
tgaaaccaaataaag

SEQ ID NO: 1420628 - DNA, 15 bp, Homo sapiens
ttgaaaccaaataaa

SEQ ID NO: 1420629 - DNA, 15 bp, Homo sapiens
tttgaaaccaaataa

SEQ ID NO: 1420630 - DNA, 15 bp, Homo sapiens
atttgaaaccaaata

SEQ ID NO: 1420631 - DNA, 15 bp, Homo sapiens
tatttgaaaccaaat

SEQ ID NO: 1420632 - DNA, 15 bp, Homo sapiens
atatttgaaaccaaa

SEQ ID NO: 1420633 - DNA, 15 bp, Homo sapiens
tatatttgaaaccaa

SEQ ID NO: 1420634 - DNA, 15 bp, Homo sapiens
ttatatttgaaacca

SEQ ID NO: 1420635 - DNA, 15 bp, Homo sapiens
attatatttgaaacc

SEQ ID NO: 1420636 - DNA, 15 bp, Homo sapiens
aattatatttgaaac

SEQ ID NO: 1420637 - DNA, 15 bp, Homo sapiens
taattatatttgaaa

SEQ ID NO: 1420638 - DNA, 15 bp, Homo sapiens
ataattatatttgaa

SEQ ID NO: 1420639 - DNA, 15 bp, Homo sapiens
aataattatatttga

SEQ ID NO: 1420640 - DNA, 15 bp, Homo sapiens
aaataattatatttg

SEQ ID NO: 1420641 - DNA, 15 bp, Homo sapiens
taaataattatattt

SEQ ID NO: 1420642 - DNA, 15 bp, Homo sapiens
ctaaataattatatt

SEQ ID NO: 1420643 - DNA, 15 bp, Homo sapiens
cctaaataattatat

SEQ ID NO: 1420644 - DNA, 15 bp, Homo sapiens
acctaaataattata

SEQ ID NO: 1420645 - DNA, 15 bp, Homo sapiens
cacctaaataattat

SEQ ID NO: 1420646 - DNA, 15 bp, Homo sapiens
ccacctaaataatta

SEQ ID NO: 1420647 - DNA, 15 bp, Homo sapiens
accacctaaataatt

SEQ ID NO: 1420648 - DNA, 15 bp, Homo sapiens
taccacctaaataat

SEQ ID NO: 1420649 - DNA, 15 bp, Homo sapiens
ataccacctaaataa

SEQ ID NO: 1420650 - DNA, 15 bp, Homo sapiens
aataccacctaaata

SEQ ID NO: 1420651 - DNA, 15 bp, Homo sapiens
taataccacctaaat

SEQ ID NO: 1420652 - DNA, 15 bp, Homo sapiens
ataataccacctaaa

SEQ ID NO: 1420653 - DNA, 15 bp, Homo sapiens
tataataccacctaa

SEQ ID NO: 1420654 - DNA, 15 bp, Homo sapiens
ttataataccaccta

SEQ ID NO: 1420655 - DNA, 15 bp, Homo sapiens
attataataccacct

SEQ ID NO: 1420656 - DNA, 15 bp, Homo sapiens
aattataataccacc

SEQ ID NO: 1420657 - DNA, 15 bp, Homo sapiens
aaattataataccac

SEQ ID NO: 1420658 - DNA, 15 bp, Homo sapiens
taaattataatacca

SEQ ID NO: 1420659 - DNA, 15 bp, Homo sapiens
ataaattataatacc

SEQ ID NO: 1420660 - DNA, 15 bp, Homo sapiens
tataaattataatac

SEQ ID NO: 1420661 - DNA, 15 bp, Homo sapiens
atataaattataata

SEQ ID NO: 1420662 - DNA, 15 bp, Homo sapiens
catataaattataat

SEQ ID NO: 1420663 - DNA, 15 bp, Homo sapiens
gcatataaattataa

SEQ ID NO: 1420664 - DNA, 15 bp, Homo sapiens
agcatataaattata

SEQ ID NO: 1420665 - DNA, 15 bp, Homo sapiens
tagcatataaattat

SEQ ID NO: 1420666 - DNA, 15 bp, Homo sapiens
ttagcatataaatta

SEQ ID NO: 1420667 - DNA, 15 bp, Homo sapiens
tttagcatataaatt

SEQ ID NO: 1420668 - DNA, 15 bp, Homo sapiens
ctttagcatataaat

SEQ ID NO: 1420669 - DNA, 15 bp, Homo sapiens
gctttagcatataaa

SEQ ID NO: 1420670 - DNA, 15 bp, Homo sapiens
agctttagcatataa

SEQ ID NO: 1420671 - DNA, 15 bp, Homo sapiens
gagctttagcatata

SEQ ID NO: 1420672 - DNA, 15 bp, Homo sapiens
agagctttagcatat

SEQ ID NO: 1420673 - DNA, 15 bp, Homo sapiens
tagagctttagcata

SEQ ID NO: 1420674 - DNA, 15 bp, Homo sapiens
atagagctttagcat

SEQ ID NO: 1420675 - DNA, 15 bp, Homo sapiens
aatagagctttagca

SEQ ID NO: 1420676 - DNA, 15 bp, Homo sapiens
aaatagagctttagc

SEQ ID NO: 1420677 - DNA, 15 bp, Homo sapiens
aaaatagagctttag

SEQ ID NO: 1420678 - DNA, 15 bp, Homo sapiens
gaaaatagagcttta

SEQ ID NO: 1420679 - DNA, 15 bp, Homo sapiens
tgaaaatagagcttt

SEQ ID NO: 1420680 - DNA, 15 bp, Homo sapiens
ctgaaaatagagctt

SEQ ID NO: 1420681 - DNA, 15 bp, Homo sapiens
tctgaaaatagagct

SEQ ID NO: 1420682 - DNA, 15 bp, Homo sapiens
ctctgaaaatagagc

SEQ ID NO: 1420683 - DNA, 15 bp, Homo sapiens
tctctgaaaatagag

SEQ ID NO: 1420684 - DNA, 15 bp, Homo sapiens
gtctctgaaaataga

SEQ ID NO: 1420685 - DNA, 15 bp, Homo sapiens
agtctctgaaaatag

SEQ ID NO: 1420686 - DNA, 15 bp, Homo sapiens
aagtctctgaaaata

SEQ ID NO: 1420687 - DNA, 15 bp, Homo sapiens
taagtctctgaaaat

SEQ ID NO: 1420688 - DNA, 15 bp, Homo sapiens
ttaagtctctgaaaa

SEQ ID NO: 1420689 - DNA, 15 bp, Homo sapiens
gttaagtctctgaaa

SEQ ID NO: 1420690 - DNA, 15 bp, Homo sapiens
agttaagtctctgaa

SEQ ID NO: 1420691 - DNA, 15 bp, Homo sapiens
tagttaagtctctga

SEQ ID NO: 1420692 - DNA, 15 bp, Homo sapiens
gtagttaagtctctg

SEQ ID NO: 1420693 - DNA, 15 bp, Homo sapiens
tgtagttaagtctct

SEQ ID NO: 1420694 - DNA, 15 bp, Homo sapiens
gtgtagttaagtctc

SEQ ID NO: 1420695 - DNA, 15 bp, Homo sapiens
tgtgtagttaagtct

SEQ ID NO: 1420696 - DNA, 15 bp, Homo sapiens
ttgtgtagttaagtc

SEQ ID NO: 1420697 - DNA, 15 bp, Homo sapiens
tttgtgtagttaagt

SEQ ID NO: 1420698 - DNA, 15 bp, Homo sapiens
atttgtgtagttaag

SEQ ID NO: 1420699 - DNA, 15 bp, Homo sapiens
tatttgtgtagttaa

SEQ ID NO: 1420700 - DNA, 15 bp, Homo sapiens
ctatttgtgtagtta

SEQ ID NO: 1420701 - DNA, 15 bp, Homo sapiens
actatttgtgtagtt

SEQ ID NO: 1420702 - DNA, 15 bp, Homo sapiens
aactatttgtgtagt

SEQ ID NO: 1420703 - DNA, 15 bp, Homo sapiens
aaactatttgtgtag

SEQ ID NO: 1420704 - DNA, 15 bp, Homo sapiens
aaaactatttgtgta

SEQ ID NO: 1420705 - DNA, 15 bp, Homo sapiens
gaaaactatttgtgt

SEQ ID NO: 1420706 - DNA, 15 bp, Homo sapiens
ggaaaactatttgtg

SEQ ID NO: 1420707 - DNA, 15 bp, Homo sapiens
aggaaaactatttgt

SEQ ID NO: 1420708 - DNA, 15 bp, Homo sapiens
aaggaaaactatttg

SEQ ID NO: 1420709 - DNA, 15 bp, Homo sapiens
taaggaaaactattt

SEQ ID NO: 1420710 - DNA, 15 bp, Homo sapiens
ctaaggaaaactatt

SEQ ID NO: 1420711 - DNA, 15 bp, Homo sapiens
tctaaggaaaactat

SEQ ID NO: 1420712 - DNA, 15 bp, Homo sapiens
atctaaggaaaacta

SEQ ID NO: 1420713 - DNA, 15 bp, Homo sapiens
tatctaaggaaaact

SEQ ID NO: 1420714 - DNA, 15 bp, Homo sapiens
atatctaaggaaaac

SEQ ID NO: 1420715 - DNA, 15 bp, Homo sapiens
tatatctaaggaaaa

SEQ ID NO: 1420716 - DNA, 15 bp, Homo sapiens
ttatatctaaggaaa

SEQ ID NO: 1420717 - DNA, 15 bp, Homo sapiens
attatatctaaggaa

SEQ ID NO: 1420718 - DNA, 15 bp, Homo sapiens
tattatatctaagga

SEQ ID NO: 1420719 - DNA, 15 bp, Homo sapiens
gtattatatctaagg

SEQ ID NO: 1420720 - DNA, 15 bp, Homo sapiens
tgtattatatctaag

SEQ ID NO: 1420721 - DNA, 15 bp, Homo sapiens
atgtattatatctaa

SEQ ID NO: 1420722 - DNA, 15 bp, Homo sapiens
aatgtattatatcta

SEQ ID NO: 1420723 - DNA, 15 bp, Homo sapiens
aaatgtattatatct

SEQ ID NO: 1420724 - DNA, 15 bp, Homo sapiens
aaaatgtattatatc

SEQ ID NO: 1420725 - DNA, 15 bp, Homo sapiens
taaaatgtattatat

SEQ ID NO: 1420726 - DNA, 15 bp, Homo sapiens
ttaaaatgtattata

SEQ ID NO: 1420727 - DNA, 15 bp, Homo sapiens
cttaaaatgtattat

SEQ ID NO: 1420728 - DNA, 15 bp, Homo sapiens
tcttaaaatgtatta

SEQ ID NO: 1420729 - DNA, 15 bp, Homo sapiens
ttcttaaaatgtatt

SEQ ID NO: 1420730 - DNA, 15 bp, Homo sapiens
gttcttaaaatgtat

SEQ ID NO: 1420731 - DNA, 15 bp, Homo sapiens
agttcttaaaatgta

SEQ ID NO: 1420732 - DNA, 15 bp, Homo sapiens
cagttcttaaaatgt

SEQ ID NO: 1420733 - DNA, 15 bp, Homo sapiens
tcagttcttaaaatg

SEQ ID NO: 1420734 - DNA, 15 bp, Homo sapiens
ttcagttcttaaaat

SEQ ID NO: 1420735 - DNA, 15 bp, Homo sapiens
tttcagttcttaaaa

SEQ ID NO: 1420736 - DNA, 15 bp, Homo sapiens
ctttcagttcttaaa

SEQ ID NO: 1420737 - DNA, 15 bp, Homo sapiens
actttcagttcttaa

SEQ ID NO: 1420738 - DNA, 15 bp, Homo sapiens
aactttcagttctta

SEQ ID NO: 1420739 - DNA, 15 bp, Homo sapiens
aaactttcagttctt

SEQ ID NO: 1420740 - DNA, 15 bp, Homo sapiens
taaactttcagttct

SEQ ID NO: 1420741 - DNA, 15 bp, Homo sapiens
ataaactttcagttc

SEQ ID NO: 1420742 - DNA, 15 bp, Homo sapiens
cataaactttcagtt

SEQ ID NO: 1420743 - DNA, 15 bp, Homo sapiens
acataaactttcagt

SEQ ID NO: 1420744 - DNA, 15 bp, Homo sapiens
aacataaactttcag

SEQ ID NO: 1420745 - DNA, 15 bp, Homo sapiens
taacataaactttca

SEQ ID NO: 1420746 - DNA, 15 bp, Homo sapiens
ttaacataaactttc

SEQ ID NO: 1420747 - DNA, 15 bp, Homo sapiens
attaacataaacttt

SEQ ID NO: 1420748 - DNA, 15 bp, Homo sapiens
aattaacataaactt

SEQ ID NO: 1420749 - DNA, 15 bp, Homo sapiens
gaattaacataaact

SEQ ID NO: 1420750 - DNA, 15 bp, Homo sapiens
agaattaacataaac

SEQ ID NO: 1420751 - DNA, 15 bp, Homo sapiens
aagaattaacataaa

SEQ ID NO: 1420752 - DNA, 15 bp, Homo sapiens
taagaattaacataa

SEQ ID NO: 1420753 - DNA, 15 bp, Homo sapiens
ttaagaattaacata

SEQ ID NO: 1420754 - DNA, 15 bp, Homo sapiens
tttaagaattaacat

SEQ ID NO: 1420755 - DNA, 15 bp, Homo sapiens
ctttaagaattaaca

SEQ ID NO: 1420756 - DNA, 15 bp, Homo sapiens
actttaagaattaac

SEQ ID NO: 1420757 - DNA, 15 bp, Homo sapiens
tactttaagaattaa

SEQ ID NO: 1420758 - DNA, 15 bp, Homo sapiens
atactttaagaatta

SEQ ID NO: 1420759 - DNA, 15 bp, Homo sapiens
tatactttaagaatt

SEQ ID NO: 1420760 - DNA, 15 bp, Homo sapiens
atatactttaagaat

SEQ ID NO: 1420761 - DNA, 15 bp, Homo sapiens
tatatactttaagaa

SEQ ID NO: 1420762 - DNA, 15 bp, Homo sapiens
atatatactttaaga

SEQ ID NO: 1420763 - DNA, 15 bp, Homo sapiens
tatatatactttaag

SEQ ID NO: 1420764 - DNA, 15 bp, Homo sapiens
ttatatatactttaa

SEQ ID NO: 1420765 - DNA, 15 bp, Homo sapiens
gttatatatacttta

SEQ ID NO: 1420766 - DNA, 15 bp, Homo sapiens
agttatatatacttt

SEQ ID NO: 1420767 - DNA, 15 bp, Homo sapiens
tagttatatatactt

SEQ ID NO: 1420768 - DNA, 15 bp, Homo sapiens
ctagttatatatact

SEQ ID NO: 1420769 - DNA, 15 bp, Homo sapiens
actagttatatatac

SEQ ID NO: 1420770 - DNA, 15 bp, Homo sapiens
gactagttatatata

SEQ ID NO: 1420771 - DNA, 15 bp, Homo sapiens
agactagttatatat

SEQ ID NO: 1420772 - DNA, 15 bp, Homo sapiens
cagactagttatata

SEQ ID NO: 1420773 - DNA, 15 bp, Homo sapiens
acagactagttatat

SEQ ID NO: 1420774 - DNA, 15 bp, Homo sapiens
aacagactagttata

SEQ ID NO: 1420775 - DNA, 15 bp, Homo sapiens
aaacagactagttat

SEQ ID NO: 1420776 - DNA, 15 bp, Homo sapiens
gaaacagactagtta

SEQ ID NO: 1420777 - DNA, 15 bp, Homo sapiens
agaaacagactagtt

SEQ ID NO: 1420778 - DNA, 15 bp, Homo sapiens
aagaaacagactagt

SEQ ID NO: 1420779 - DNA, 15 bp, Homo sapiens
aaagaaacagactag

SEQ ID NO: 1420780 - DNA, 15 bp, Homo sapiens
aaaagaaacagacta

SEQ ID NO: 1420781 - DNA, 15 bp, Homo sapiens
aaaaagaaacagact

SEQ ID NO: 1420782 - DNA, 15 bp, Homo sapiens
caaaaagaaacagac

SEQ ID NO: 1420783 - DNA, 15 bp, Homo sapiens
tcaaaaagaaacaga

SEQ ID NO: 1420784 - DNA, 15 bp, Homo sapiens
gtcaaaaagaaacag

SEQ ID NO: 1420785 - DNA, 15 bp, Homo sapiens
tgtcaaaaagaaaca

SEQ ID NO: 1420786 - DNA, 15 bp, Homo sapiens
gtgtcaaaaagaaac

SEQ ID NO: 1420787 - DNA, 15 bp, Homo sapiens
agtgtcaaaaagaaa

SEQ ID NO: 1420788 - DNA, 15 bp, Homo sapiens
cagtgtcaaaaagaa

SEQ ID NO: 1420789 - DNA, 15 bp, Homo sapiens
tcagtgtcaaaaaga

SEQ ID NO: 1420790 - DNA, 15 bp, Homo sapiens
ttcagtgtcaaaaag

SEQ ID NO: 1420791 - DNA, 15 bp, Homo sapiens
tttcagtgtcaaaaa

SEQ ID NO: 1420792 - DNA, 15 bp, Homo sapiens
atttcagtgtcaaaa

SEQ ID NO: 1420793 - DNA, 15 bp, Homo sapiens
aatttcagtgtcaaa

SEQ ID NO: 1420794 - DNA, 15 bp, Homo sapiens
caatttcagtgtcaa

SEQ ID NO: 1420795 - DNA, 15 bp, Homo sapiens
ccaatttcagtgtca

SEQ ID NO: 1420796 - DNA, 15 bp, Homo sapiens
cccaatttcagtgtc

SEQ ID NO: 1420797 - DNA, 15 bp, Homo sapiens
tcccaatttcagtgt

SEQ ID NO: 1420798 - DNA, 15 bp, Homo sapiens
gtcccaatttcagtg

SEQ ID NO: 1420799 - DNA, 15 bp, Homo sapiens
tgtcccaatttcagt

SEQ ID NO: 1420800 - DNA, 15 bp, Homo sapiens
ttgtcccaatttcag

SEQ ID NO: 1420801 - DNA, 15 bp, Homo sapiens
tttgtcccaatttca

SEQ ID NO: 1420802 - DNA, 15 bp, Homo sapiens
ctttgtcccaatttc

SEQ ID NO: 1420803 - DNA, 15 bp, Homo sapiens
gctttgtcccaattt

SEQ ID NO: 1420804 - DNA, 15 bp, Homo sapiens
tgctttgtcccaatt

SEQ ID NO: 1420805 - DNA, 15 bp, Homo sapiens
ctgctttgtcccaat

SEQ ID NO: 1420806 - DNA, 15 bp, Homo sapiens
cctgctttgtcccaa

SEQ ID NO: 1420807 - DNA, 15 bp, Homo sapiens
acctgctttgtccca

SEQ ID NO: 1420808 - DNA, 15 bp, Homo sapiens
cacctgctttgtccc

SEQ ID NO: 1420809 - DNA, 15 bp, Homo sapiens
gcacctgctttgtcc

SEQ ID NO: 1420810 - DNA, 15 bp, Homo sapiens
agcacctgctttgtc

SEQ ID NO: 1420811 - DNA, 15 bp, Homo sapiens
aagcacctgctttgt

SEQ ID NO: 1420812 - DNA, 15 bp, Homo sapiens
caagcacctgctttg

SEQ ID NO: 1420813 - DNA, 15 bp, Homo sapiens
tcaagcacctgcttt

SEQ ID NO: 1420814 - DNA, 15 bp, Homo sapiens
atcaagcacctgctt

SEQ ID NO: 1420815 - DNA, 15 bp, Homo sapiens
tatcaagcacctgct

SEQ ID NO: 1420816 - DNA, 15 bp, Homo sapiens
ctatcaagcacctgc

SEQ ID NO: 1420817 - DNA, 15 bp, Homo sapiens
actatcaagcacctg

SEQ ID NO: 1420818 - DNA, 15 bp, Homo sapiens
aactatcaagcacct

SEQ ID NO: 1420819 - DNA, 15 bp, Homo sapiens
caactatcaagcacc

SEQ ID NO: 1420820 - DNA, 15 bp, Homo sapiens
acaactatcaagcac

SEQ ID NO: 1420821 - DNA, 15 bp, Homo sapiens
aacaactatcaagca

SEQ ID NO: 1420822 - DNA, 15 bp, Homo sapiens
caacaactatcaagc

SEQ ID NO: 1420823 - DNA, 15 bp, Homo sapiens
tcaacaactatcaag

SEQ ID NO: 1420824 - DNA, 15 bp, Homo sapiens
gtcaacaactatcaa

SEQ ID NO: 1420825 - DNA, 15 bp, Homo sapiens
agtcaacaactatca

SEQ ID NO: 1420826 - DNA, 15 bp, Homo sapiens
cagtcaacaactatc

SEQ ID NO: 1420827 - DNA, 15 bp, Homo sapiens
tcagtcaacaactat

SEQ ID NO: 1420828 - DNA, 15 bp, Homo sapiens
atcagtcaacaacta

SEQ ID NO: 1420829 - DNA, 15 bp, Homo sapiens
tatcagtcaacaact

SEQ ID NO: 1420830 - DNA, 15 bp, Homo sapiens
ttatcagtcaacaac

SEQ ID NO: 1420831 - DNA, 15 bp, Homo sapiens
tttatcagtcaacaa

SEQ ID NO: 1420832 - DNA, 15 bp, Homo sapiens
ttttatcagtcaaca

SEQ ID NO: 1420833 - DNA, 15 bp, Homo sapiens
cttttatcagtcaac

SEQ ID NO: 1420834 - DNA, 15 bp, Homo sapiens
acttttatcagtcaa

SEQ ID NO: 1420835 - DNA, 15 bp, Homo sapiens
aacttttatcagtca

SEQ ID NO: 1420836 - DNA, 15 bp, Homo sapiens
caacttttatcagtc

SEQ ID NO: 1420837 - DNA, 15 bp, Homo sapiens
tcaacttttatcagt

SEQ ID NO: 1420838 - DNA, 15 bp, Homo sapiens
atcaacttttatcag

SEQ ID NO: 1420839 - DNA, 15 bp, Homo sapiens
tatcaacttttatca

SEQ ID NO: 1420840 - DNA, 15 bp, Homo sapiens
atatcaacttttatc

SEQ ID NO: 1420841 - DNA, 15 bp, Homo sapiens
aatatcaacttttat

SEQ ID NO: 1420842 - DNA, 15 bp, Homo sapiens
aaatatcaactttta

SEQ ID NO: 1420843 - DNA, 15 bp, Homo sapiens
gaaatatcaactttt

SEQ ID NO: 1420844 - DNA, 15 bp, Homo sapiens
tgaaatatcaacttt

SEQ ID NO: 1420845 - DNA, 15 bp, Homo sapiens
ttgaaatatcaactt

SEQ ID NO: 1420846 - DNA, 15 bp, Homo sapiens
attgaaatatcaact

SEQ ID NO: 1420847 - DNA, 15 bp, Homo sapiens
aattgaaatatcaac

SEQ ID NO: 1420848 - DNA, 15 bp, Homo sapiens
aaattgaaatatcaa

SEQ ID NO: 1420849 - DNA, 15 bp, Homo sapiens
caaattgaaatatca

SEQ ID NO: 1420850 - DNA, 15 bp, Homo sapiens
tcaaattgaaatatc

SEQ ID NO: 1420851 - DNA, 15 bp, Homo sapiens
ttcaaattgaaatat

SEQ ID NO: 1420852 - DNA, 15 bp, Homo sapiens
tttcaaattgaaata

SEQ ID NO: 1420853 - DNA, 15 bp, Homo sapiens
ttttcaaattgaaat

SEQ ID NO: 1420854 - DNA, 15 bp, Homo sapiens
attttcaaattgaaa

SEQ ID NO: 1420855 - DNA, 15 bp, Homo sapiens
tattttcaaattgaa

SEQ ID NO: 1420856 - DNA, 15 bp, Homo sapiens
ttattttcaaattga

SEQ ID NO: 1420857 - DNA, 15 bp, Homo sapiens
tttattttcaaattg

SEQ ID NO: 1420858 - DNA, 15 bp, Homo sapiens
ctttattttcaaatt

SEQ ID NO: 1420859 - DNA, 15 bp, Homo sapiens
actttattttcaaat

SEQ ID NO: 1420860 - DNA, 15 bp, Homo sapiens
ttatactttattttc

SEQ ID NO: 1420861 - DNA, 15 bp, Homo sapiens
tttatactttatttt

SEQ ID NO: 1420862 - DNA, 15 bp, Homo sapiens
ctttatactttattt

SEQ ID NO: 1420863 - DNA, 15 bp, Homo sapiens
gctttatactttatt

SEQ ID NO: 1420864 - DNA, 15 bp, Homo sapiens
tgctttatactttat

SEQ ID NO: 1420865 - DNA, 15 bp, Homo sapiens
atgctttatacttta

SEQ ID NO: 1420866 - DNA, 15 bp, Homo sapiens
aatgctttatacttt

SEQ ID NO: 1420867 - DNA, 15 bp, Homo sapiens
caatgctttatactt

SEQ ID NO: 1420868 - DNA, 15 bp, Homo sapiens
ccaatgctttatact

SEQ ID NO: 1420869 - DNA, 15 bp, Homo sapiens
cccaatgctttatac

SEQ ID NO: 1420870 - DNA, 15 bp, Homo sapiens
gcccaatgctttata

SEQ ID NO: 1420871 - DNA, 15 bp, Homo sapiens
agcccaatgctttat

SEQ ID NO: 1420872 - DNA, 15 bp, Homo sapiens
aagcccaatgcttta

SEQ ID NO: 1420873 - DNA, 15 bp, Homo sapiens
aaagcccaatgcttt

SEQ ID NO: 1420874 - DNA, 15 bp, Homo sapiens
caaagcccaatgctt

SEQ ID NO: 1420875 - DNA, 15 bp, Homo sapiens
tcaaagcccaatgct

SEQ ID NO: 1420876 - DNA, 15 bp, Homo sapiens
ctcaaagcccaatgc

SEQ ID NO: 1420877 - DNA, 15 bp, Homo sapiens
tctcaaagcccaatg

SEQ ID NO: 1420878 - DNA, 15 bp, Homo sapiens
atctcaaagcccaat

SEQ ID NO: 1420879 - DNA, 15 bp, Homo sapiens
tatctcaaagcccaa

SEQ ID NO: 1420880 - DNA, 15 bp, Homo sapiens
ctatctcaaagccca

SEQ ID NO: 1420881 - DNA, 15 bp, Homo sapiens
gctatctcaaagccc

SEQ ID NO: 1420882 - DNA, 15 bp, Homo sapiens
agctatctcaaagcc

SEQ ID NO: 1420883 - DNA, 15 bp, Homo sapiens
aagctatctcaaagc

SEQ ID NO: 1420884 - DNA, 15 bp, Homo sapiens
taagctatctcaaag

SEQ ID NO: 1420885 - DNA, 15 bp, Homo sapiens
gtaagctatctcaaa

SEQ ID NO: 1420886 - DNA, 15 bp, Homo sapiens
agtaagctatctcaa

SEQ ID NO: 1420887 - DNA, 15 bp, Homo sapiens
gagtaagctatctca

SEQ ID NO: 1420888 - DNA, 15 bp, Homo sapiens
tgagtaagctatctc

SEQ ID NO: 1420889 - DNA, 15 bp, Homo sapiens
ttgagtaagctatct

SEQ ID NO: 1420890 - DNA, 15 bp, Homo sapiens
attgagtaagctatc

SEQ ID NO: 1420891 - DNA, 15 bp, Homo sapiens
aattgagtaagctat

SEQ ID NO: 1420892 - DNA, 15 bp, Homo sapiens
taattgagtaagcta

SEQ ID NO: 1420893 - DNA, 15 bp, Homo sapiens
ataattgagtaagct

SEQ ID NO: 1420894 - DNA, 15 bp, Homo sapiens
gataattgagtaagc

SEQ ID NO: 1420895 - DNA, 15 bp, Homo sapiens
tgataattgagtaag

SEQ ID NO: 1420896 - DNA, 15 bp, Homo sapiens
atgataattgagtaa

SEQ ID NO: 1420897 - DNA, 15 bp, Homo sapiens
aatgataattgagta

SEQ ID NO: 1420898 - DNA, 15 bp, Homo sapiens
aaatgataattgagt

SEQ ID NO: 1420899 - DNA, 15 bp, Homo sapiens
caaatgataattgag

SEQ ID NO: 1420900 - DNA, 15 bp, Homo sapiens
gcaaatgataattga

SEQ ID NO: 1420901 - DNA, 15 bp, Homo sapiens
agcaaatgataattg

SEQ ID NO: 1420902 - DNA, 15 bp, Homo sapiens
tagcaaatgataatt

SEQ ID NO: 1420903 - DNA, 15 bp, Homo sapiens
atagcaaatgataat

SEQ ID NO: 1420904 - DNA, 15 bp, Homo sapiens
tatagcaaatgataa

SEQ ID NO: 1420905 - DNA, 15 bp, Homo sapiens
ttatagcaaatgata

SEQ ID NO: 1420906 - DNA, 15 bp, Homo sapiens
attatagcaaatgat

SEQ ID NO: 1420907 - DNA, 15 bp, Homo sapiens
aattatagcaaatga

SEQ ID NO: 1420908 - DNA, 15 bp, Homo sapiens
aaattatagcaaatg

SEQ ID NO: 1420909 - DNA, 15 bp, Homo sapiens
gaaattatagcaaat

SEQ ID NO: 1420910 - DNA, 15 bp, Homo sapiens
tgaaattatagcaaa

SEQ ID NO: 1420911 - DNA, 15 bp, Homo sapiens
atgaaattatagcaa

SEQ ID NO: 1420912 - DNA, 15 bp, Homo sapiens
aatgaaattatagca

SEQ ID NO: 1420913 - DNA, 15 bp, Homo sapiens
aaatgaaattatagc

SEQ ID NO: 1420914 - DNA, 15 bp, Homo sapiens
gaaaatgaaattata

SEQ ID NO: 1420915 - DNA, 15 bp, Homo sapiens
tgaaaatgaaattat

SEQ ID NO: 1420916 - DNA, 15 bp, Homo sapiens
gtgaaaatgaaatta

SEQ ID NO: 1420917 - DNA, 15 bp, Homo sapiens
tgtgaaaatgaaatt

SEQ ID NO: 1420918 - DNA, 15 bp, Homo sapiens
ttgtgaaaatgaaat

SEQ ID NO: 1420919 - DNA, 15 bp, Homo sapiens
attgtgaaaatgaaa

SEQ ID NO: 1420920 - DNA, 15 bp, Homo sapiens
tattgtgaaaatgaa

SEQ ID NO: 1420921 - DNA, 15 bp, Homo sapiens
ttattgtgaaaatga

SEQ ID NO: 1420922 - DNA, 15 bp, Homo sapiens
attattgtgaaaatg

SEQ ID NO: 1420923 - DNA, 15 bp, Homo sapiens
gattattgtgaaaat

SEQ ID NO: 1420924 - DNA, 15 bp, Homo sapiens
agattattgtgaaaa

SEQ ID NO: 1420925 - DNA, 15 bp, Homo sapiens
aagattattgtgaaa

SEQ ID NO: 1420926 - DNA, 15 bp, Homo sapiens
aaagattattgtgaa

SEQ ID NO: 1420927 - DNA, 15 bp, Homo sapiens
aaaagattattgtga

SEQ ID NO: 1420928 - DNA, 15 bp, Homo sapiens
aaaaagattattgtg

SEQ ID NO: 1420929 - DNA, 15 bp, Homo sapiens
taaaaagattattgt

SEQ ID NO: 1420930 - DNA, 15 bp, Homo sapiens
ttaaaaagattattg

SEQ ID NO: 1420931 - DNA, 15 bp, Homo sapiens
cttaaaaagattatt

SEQ ID NO: 1420932 - DNA, 15 bp, Homo sapiens
gcttaaaaagattat

SEQ ID NO: 1420933 - DNA, 15 bp, Homo sapiens
tgcttaaaaagatta

SEQ ID NO: 1420934 - DNA, 15 bp, Homo sapiens
atgcttaaaaagatt

SEQ ID NO: 1420935 - DNA, 15 bp, Homo sapiens
aatgcttaaaaagat

SEQ ID NO: 1420936 - DNA, 15 bp, Homo sapiens
aaatgcttaaaaaga

SEQ ID NO: 1420937 - DNA, 15 bp, Homo sapiens
aaaatgcttaaaaag

SEQ ID NO: 1420938 - DNA, 15 bp, Homo sapiens
gaaaatgcttaaaaa

SEQ ID NO: 1420939 - DNA, 15 bp, Homo sapiens
tgaaaatgcttaaaa

SEQ ID NO: 1420940 - DNA, 15 bp, Homo sapiens
ttgaaaatgcttaaa

SEQ ID NO: 1420941 - DNA, 15 bp, Homo sapiens
attgaaaatgcttaa

SEQ ID NO: 1420942 - DNA, 15 bp, Homo sapiens
tattgaaaatgctta

SEQ ID NO: 1420943 - DNA, 15 bp, Homo sapiens
ttattgaaaatgctt

SEQ ID NO: 1420944 - DNA, 15 bp, Homo sapiens
gttattgaaaatgct

SEQ ID NO: 1420945 - DNA, 15 bp, Homo sapiens
agttattgaaaatgc

SEQ ID NO: 1420946 - DNA, 15 bp, Homo sapiens
aagttattgaaaatg

SEQ ID NO: 1420947 - DNA, 15 bp, Homo sapiens
aaagttattgaaaat

SEQ ID NO: 1420948 - DNA, 15 bp, Homo sapiens
aaaagttattgaaaa

SEQ ID NO: 1420949 - DNA, 15 bp, Homo sapiens
taaaagttattgaaa

SEQ ID NO: 1420950 - DNA, 15 bp, Homo sapiens
ttaaaagttattgaa

SEQ ID NO: 1420951 - DNA, 15 bp, Homo sapiens
tttaaaagttattga

SEQ ID NO: 1420952 - DNA, 15 bp, Homo sapiens
atttaaaagttattg

SEQ ID NO: 1420953 - DNA, 15 bp, Homo sapiens
tatttaaaagttatt

SEQ ID NO: 1420954 - DNA, 15 bp, Homo sapiens
atatttaaaagttat

SEQ ID NO: 1420955 - DNA, 15 bp, Homo sapiens
aatatttaaaagtta

SEQ ID NO: 1420956 - DNA, 15 bp, Homo sapiens
aaatatttaaaagtt

SEQ ID NO: 1420957 - DNA, 15 bp, Homo sapiens
gaaatatttaaaagt

SEQ ID NO: 1420958 - DNA, 15 bp, Homo sapiens
aaaatttgaaatatt

SEQ ID NO: 1420959 - DNA, 15 bp, Homo sapiens
aaaaatttgaaatat

SEQ ID NO: 1420960 - DNA, 15 bp, Homo sapiens
gaaaaatttgaaata

SEQ ID NO: 1420961 - DNA, 15 bp, Homo sapiens
ggaaaaatttgaaat

SEQ ID NO: 1420962 - DNA, 15 bp, Homo sapiens
tggaaaaatttgaaa

SEQ ID NO: 1420963 - DNA, 15 bp, Homo sapiens
ctggaaaaatttgaa

SEQ ID NO: 1420964 - DNA, 15 bp, Homo sapiens
actggaaaaatttga

SEQ ID NO: 1420965 - DNA, 15 bp, Homo sapiens
gactggaaaaatttg

SEQ ID NO: 1420966 - DNA, 15 bp, Homo sapiens
agactggaaaaattt

SEQ ID NO: 1420967 - DNA, 15 bp, Homo sapiens
tagactggaaaaatt

SEQ ID NO: 1420968 - DNA, 15 bp, Homo sapiens
atagactggaaaaat

SEQ ID NO: 1420969 - DNA, 15 bp, Homo sapiens
tatagactggaaaaa

SEQ ID NO: 1420970 - DNA, 15 bp, Homo sapiens
ctatagactggaaaa

SEQ ID NO: 1420971 - DNA, 15 bp, Homo sapiens
gctatagactggaaa

SEQ ID NO: 1420972 - DNA, 15 bp, Homo sapiens
agctatagactggaa

SEQ ID NO: 1420973 - DNA, 15 bp, Homo sapiens
aagctatagactgga

SEQ ID NO: 1420974 - DNA, 15 bp, Homo sapiens
gaagctatagactgg

SEQ ID NO: 1420975 - DNA, 15 bp, Homo sapiens
agaagctatagactg

SEQ ID NO: 1420976 - DNA, 15 bp, Homo sapiens
gagaagctatagact

SEQ ID NO: 1420977 - DNA, 15 bp, Homo sapiens
agagaagctatagac

SEQ ID NO: 1420978 - DNA, 15 bp, Homo sapiens
tagagaagctataga

SEQ ID NO: 1420979 - DNA, 15 bp, Homo sapiens
ttagagaagctatag

SEQ ID NO: 1420980 - DNA, 15 bp, Homo sapiens
attagagaagctata

SEQ ID NO: 1420981 - DNA, 15 bp, Homo sapiens
aattagagaagctat

SEQ ID NO: 1420982 - DNA, 15 bp, Homo sapiens
caattagagaagcta

SEQ ID NO: 1420983 - DNA, 15 bp, Homo sapiens
tcaattagagaagct

SEQ ID NO: 1420984 - DNA, 15 bp, Homo sapiens
atcaattagagaagc

SEQ ID NO: 1420985 - DNA, 15 bp, Homo sapiens
tatcaattagagaag

SEQ ID NO: 1420986 - DNA, 15 bp, Homo sapiens
ttatcaattagagaa

SEQ ID NO: 1420987 - DNA, 15 bp, Homo sapiens
tttatcaattagaga

SEQ ID NO: 1420988 - DNA, 15 bp, Homo sapiens
atttatcaattagag

SEQ ID NO: 1420989 - DNA, 15 bp, Homo sapiens
gatttatcaattaga

SEQ ID NO: 1420990 - DNA, 15 bp, Homo sapiens
ggatttatcaattag

SEQ ID NO: 1420991 - DNA, 15 bp, Homo sapiens
aggatttatcaatta

SEQ ID NO: 1420992 - DNA, 15 bp, Homo sapiens
gaggatttatcaatt

SEQ ID NO: 1420993 - DNA, 15 bp, Homo sapiens
agaggatttatcaat

SEQ ID NO: 1420994 - DNA, 15 bp, Homo sapiens
aagaggatttatcaa

SEQ ID NO: 1420995 - DNA, 15 bp, Homo sapiens
gaagaggatttatca

SEQ ID NO: 1420996 - DNA, 15 bp, Homo sapiens
agaagaggatttatc

SEQ ID NO: 1420997 - DNA, 15 bp, Homo sapiens
tagaagaggatttat

SEQ ID NO: 1420998 - DNA, 15 bp, Homo sapiens
atagaagaggattta

SEQ ID NO: 1420999 - DNA, 15 bp, Homo sapiens
aatagaagaggattt

SEQ ID NO: 1421000 - DNA, 15 bp, Homo sapiens
gaatagaagaggatt

SEQ ID NO: 1421001 - DNA, 15 bp, Homo sapiens
tgaatagaagaggat

SEQ ID NO: 1421002 - DNA, 15 bp, Homo sapiens
gtgaatagaagagga

SEQ ID NO: 1421003 - DNA, 15 bp, Homo sapiens
tgtgaatagaagagg

SEQ ID NO: 1421004 - DNA, 15 bp, Homo sapiens
ttgtgaatagaagag

SEQ ID NO: 1421005 - DNA, 15 bp, Homo sapiens
cttgtgaatagaaga

SEQ ID NO: 1421006 - DNA, 15 bp, Homo sapiens
gcttgtgaatagaag

SEQ ID NO: 1421007 - DNA, 15 bp, Homo sapiens
ggcttgtgaatagaa

SEQ ID NO: 1421008 - DNA, 15 bp, Homo sapiens
tggcttgtgaataga

SEQ ID NO: 1421009 - DNA, 15 bp, Homo sapiens
atggcttgtgaatag

SEQ ID NO: 1421010 - DNA, 15 bp, Homo sapiens
tatggcttgtgaata

SEQ ID NO: 1421011 - DNA, 15 bp, Homo sapiens
ctatggcttgtgaat

SEQ ID NO: 1421012 - DNA, 15 bp, Homo sapiens
tctatggcttgtgaa

SEQ ID NO: 1421013 - DNA, 15 bp, Homo sapiens
atctatggcttgtga

SEQ ID NO: 1421014 - DNA, 15 bp, Homo sapiens
gatctatggcttgtg

SEQ ID NO: 1421015 - DNA, 15 bp, Homo sapiens
agatctatggcttgt

SEQ ID NO: 1421016 - DNA, 15 bp, Homo sapiens
aagatctatggcttg

SEQ ID NO: 1421017 - DNA, 15 bp, Homo sapiens
gaagatctatggctt

SEQ ID NO: 1421018 - DNA, 15 bp, Homo sapiens
ggaagatctatggct

SEQ ID NO: 1421019 - DNA, 15 bp, Homo sapiens
tggaagatctatggc

SEQ ID NO: 1421020 - DNA, 15 bp, Homo sapiens
gtggaagatctatgg

SEQ ID NO: 1421021 - DNA, 15 bp, Homo sapiens
agtggaagatctatg

SEQ ID NO: 1421022 - DNA, 15 bp, Homo sapiens
aagtggaagatctat

SEQ ID NO: 1421023 - DNA, 15 bp, Homo sapiens
aaagtggaagatcta

SEQ ID NO: 1421024 - DNA, 15 bp, Homo sapiens
caaagtggaagatct

SEQ ID NO: 1421025 - DNA, 15 bp, Homo sapiens
acaaagtggaagatc

SEQ ID NO: 1421026 - DNA, 15 bp, Homo sapiens
aacaaagtggaagat

SEQ ID NO: 1421027 - DNA, 15 bp, Homo sapiens
taacaaagtggaaga

SEQ ID NO: 1421028 - DNA, 15 bp, Homo sapiens
ataacaaagtggaag

SEQ ID NO: 1421029 - DNA, 15 bp, Homo sapiens
tataacaaagtggaa

SEQ ID NO: 1421030 - DNA, 15 bp, Homo sapiens
atataacaaagtgga

SEQ ID NO: 1421031 - DNA, 15 bp, Homo sapiens
gatataacaaagtgg

SEQ ID NO: 1421032 - DNA, 15 bp, Homo sapiens
ggatataacaaagtg

SEQ ID NO: 1421033 - DNA, 15 bp, Homo sapiens
tggatataacaaagt

SEQ ID NO: 1421034 - DNA, 15 bp, Homo sapiens
atggatataacaaag

SEQ ID NO: 1421035 - DNA, 15 bp, Homo sapiens
aatggatataacaaa

SEQ ID NO: 1421036 - DNA, 15 bp, Homo sapiens
caatggatataacaa

SEQ ID NO: 1421037 - DNA, 15 bp, Homo sapiens
gcaatggatataaca

SEQ ID NO: 1421038 - DNA, 15 bp, Homo sapiens
agcaatggatataac

SEQ ID NO: 1421039 - DNA, 15 bp, Homo sapiens
gagcaatggatataa

SEQ ID NO: 1421040 - DNA, 15 bp, Homo sapiens
tgagcaatggatata

SEQ ID NO: 1421041 - DNA, 15 bp, Homo sapiens
atgagcaatggatat

SEQ ID NO: 1421042 - DNA, 15 bp, Homo sapiens
tatgagcaatggata

SEQ ID NO: 1421043 - DNA, 15 bp, Homo sapiens
ttatgagcaatggat

SEQ ID NO: 1421044 - DNA, 15 bp, Homo sapiens
tttatgagcaatgga

SEQ ID NO: 1421045 - DNA, 15 bp, Homo sapiens
ttttatgagcaatgg

SEQ ID NO: 1421046 - DNA, 15 bp, Homo sapiens
attttatgagcaatg

SEQ ID NO: 1421047 - DNA, 15 bp, Homo sapiens
tattttatgagcaat

SEQ ID NO: 1421048 - DNA, 15 bp, Homo sapiens
atattttatgagcaa

SEQ ID NO: 1421049 - DNA, 15 bp, Homo sapiens
catattttatgagca

SEQ ID NO: 1421050 - DNA, 15 bp, Homo sapiens
acatattttatgagc

SEQ ID NO: 1421051 - DNA, 15 bp, Homo sapiens
cacatattttatgag

SEQ ID NO: 1421052 - DNA, 15 bp, Homo sapiens
ccacatattttatga

SEQ ID NO: 1421053 - DNA, 15 bp, Homo sapiens
gccacatattttatg

SEQ ID NO: 1421054 - DNA, 15 bp, Homo sapiens
tgccacatattttat

SEQ ID NO: 1421055 - DNA, 15 bp, Homo sapiens
atgccacatatttta

SEQ ID NO: 1421056 - DNA, 15 bp, Homo sapiens
gatgccacatatttt

SEQ ID NO: 1421057 - DNA, 15 bp, Homo sapiens
agatgccacatattt

SEQ ID NO: 1421058 - DNA, 15 bp, Homo sapiens
cagatgccacatatt

SEQ ID NO: 1421059 - DNA, 15 bp, Homo sapiens
tcagatgccacatat

SEQ ID NO: 1421060 - DNA, 15 bp, Homo sapiens
ctcagatgccacata

SEQ ID NO: 1421061 - DNA, 15 bp, Homo sapiens
gctcagatgccacat

SEQ ID NO: 1421062 - DNA, 15 bp, Homo sapiens
tgctcagatgccaca

SEQ ID NO: 1421063 - DNA, 15 bp, Homo sapiens
atgctcagatgccac

SEQ ID NO: 1421064 - DNA, 15 bp, Homo sapiens
catgctcagatgcca

SEQ ID NO: 1421065 - DNA, 15 bp, Homo sapiens
ccatgctcagatgcc

SEQ ID NO: 1421066 - DNA, 15 bp, Homo sapiens
gccatgctcagatgc

SEQ ID NO: 1421067 - DNA, 15 bp, Homo sapiens
agccatgctcagatg

SEQ ID NO: 1421068 - DNA, 15 bp, Homo sapiens
cagccatgctcagat

SEQ ID NO: 1421069 - DNA, 15 bp, Homo sapiens
acagccatgctcaga

SEQ ID NO: 1421070 - DNA, 15 bp, Homo sapiens
tacagccatgctcag

SEQ ID NO: 1421071 - DNA, 15 bp, Homo sapiens
gtacagccatgctca

SEQ ID NO: 1421072 - DNA, 15 bp, Homo sapiens
tgtacagccatgctc

SEQ ID NO: 1421073 - DNA, 15 bp, Homo sapiens
ctgtacagccatgct

SEQ ID NO: 1421074 - DNA, 15 bp, Homo sapiens
actgtacagccatgc

SEQ ID NO: 1421075 - DNA, 15 bp, Homo sapiens
tactgtacagccatg

SEQ ID NO: 1421076 - DNA, 15 bp, Homo sapiens
ctactgtacagccat

SEQ ID NO: 1421077 - DNA, 15 bp, Homo sapiens
cctactgtacagcca

SEQ ID NO: 1421078 - DNA, 15 bp, Homo sapiens
tcctactgtacagcc

SEQ ID NO: 1421079 - DNA, 15 bp, Homo sapiens
gtcctactgtacagc

SEQ ID NO: 1421080 - DNA, 15 bp, Homo sapiens
agtcctactgtacag

SEQ ID NO: 1421081 - DNA, 15 bp, Homo sapiens
gagtcctactgtaca

SEQ ID NO: 1421082 - DNA, 15 bp, Homo sapiens
tgagtcctactgtac

SEQ ID NO: 1421083 - DNA, 15 bp, Homo sapiens
atgagtcctactgta

SEQ ID NO: 1421084 - DNA, 15 bp, Homo sapiens
aatgagtcctactgt

SEQ ID NO: 1421085 - DNA, 15 bp, Homo sapiens
aaatgagtcctactg

SEQ ID NO: 1421086 - DNA, 15 bp, Homo sapiens
gaaatgagtcctact

SEQ ID NO: 1421087 - DNA, 15 bp, Homo sapiens
tgaaatgagtcctac

SEQ ID NO: 1421088 - DNA, 15 bp, Homo sapiens
atgaaatgagtccta

SEQ ID NO: 1421089 - DNA, 15 bp, Homo sapiens
aatgaaatgagtcct

SEQ ID NO: 1421090 - DNA, 15 bp, Homo sapiens
aaatgaaatgagtcc

SEQ ID NO: 1421091 - DNA, 15 bp, Homo sapiens
taaatgaaatgagtc

SEQ ID NO: 1421092 - DNA, 15 bp, Homo sapiens
ttaaatgaaatgagt

SEQ ID NO: 1421093 - DNA, 15 bp, Homo sapiens
gttaaatgaaatgag

SEQ ID NO: 1421094 - DNA, 15 bp, Homo sapiens
agttaaatgaaatga

SEQ ID NO: 1421095 - DNA, 15 bp, Homo sapiens
aagttaaatgaaatg

SEQ ID NO: 1421096 - DNA, 15 bp, Homo sapiens
taagttaaatgaaat

SEQ ID NO: 1421097 - DNA, 15 bp, Homo sapiens
ctaagttaaatgaaa

SEQ ID NO: 1421098 - DNA, 15 bp, Homo sapiens
tctaagttaaatgaa

SEQ ID NO: 1421099 - DNA, 15 bp, Homo sapiens
atctaagttaaatga

SEQ ID NO: 1421100 - DNA, 15 bp, Homo sapiens
aatctaagttaaatg

SEQ ID NO: 1421101 - DNA, 15 bp, Homo sapiens
aaatctaagttaaat

SEQ ID NO: 1421102 - DNA, 15 bp, Homo sapiens
taaatctaagttaaa

SEQ ID NO: 1421103 - DNA, 15 bp, Homo sapiens
ttaaatctaagttaa

SEQ ID NO: 1421104 - DNA, 15 bp, Homo sapiens
attaaatctaagtta

SEQ ID NO: 1421105 - DNA, 15 bp, Homo sapiens
tattaaatctaagtt

SEQ ID NO: 1421106 - DNA, 15 bp, Homo sapiens
ctattaaatctaagt

SEQ ID NO: 1421107 - DNA, 15 bp, Homo sapiens
gctattaaatctaag

SEQ ID NO: 1421108 - DNA, 15 bp, Homo sapiens
agctattaaatctaa

SEQ ID NO: 1421109 - DNA, 15 bp, Homo sapiens
gagctattaaatcta

SEQ ID NO: 1421110 - DNA, 15 bp, Homo sapiens
tgagctattaaatct

SEQ ID NO: 1421111 - DNA, 15 bp, Homo sapiens
ttgagctattaaatc

SEQ ID NO: 1421112 - DNA, 15 bp, Homo sapiens
attgagctattaaat

SEQ ID NO: 1421113 - DNA, 15 bp, Homo sapiens
aattgagctattaaa

SEQ ID NO: 1421114 - DNA, 15 bp, Homo sapiens
aaattgagctattaa

SEQ ID NO: 1421115 - DNA, 15 bp, Homo sapiens
aaaattgagctatta

SEQ ID NO: 1421116 - DNA, 15 bp, Homo sapiens
caaaattgagctatt

SEQ ID NO: 1421117 - DNA, 15 bp, Homo sapiens
gcaaaattgagctat

SEQ ID NO: 1421118 - DNA, 15 bp, Homo sapiens
tgcaaaattgagcta

SEQ ID NO: 1421119 - DNA, 15 bp, Homo sapiens
ttgcaaaattgagct

SEQ ID NO: 1421120 - DNA, 15 bp, Homo sapiens
tttgcaaaattgagc

SEQ ID NO: 1421121 - DNA, 15 bp, Homo sapiens
ttttgcaaaattgag

SEQ ID NO: 1421122 - DNA, 15 bp, Homo sapiens
tttttgcaaaattga

SEQ ID NO: 1421123 - DNA, 15 bp, Homo sapiens
actttttgcaaaatt

SEQ ID NO: 1421124 - DNA, 15 bp, Homo sapiens
aactttttgcaaaat

SEQ ID NO: 1421125 - DNA, 15 bp, Homo sapiens
caactttttgcaaaa

SEQ ID NO: 1421126 - DNA, 15 bp, Homo sapiens
gcaactttttgcaaa

SEQ ID NO: 1421127 - DNA, 15 bp, Homo sapiens
agcaactttttgcaa

SEQ ID NO: 1421128 - DNA, 15 bp, Homo sapiens
cagcaactttttgca

SEQ ID NO: 1421129 - DNA, 15 bp, Homo sapiens
tcagcaactttttgc

SEQ ID NO: 1421130 - DNA, 15 bp, Homo sapiens
ttcagcaactttttg

SEQ ID NO: 1421131 - DNA, 15 bp, Homo sapiens
tttcagcaacttttt

SEQ ID NO: 1421132 - DNA, 15 bp, Homo sapiens
ttttcagcaactttt

SEQ ID NO: 1421133 - DNA, 15 bp, Homo sapiens
gttttcagcaacttt

SEQ ID NO: 1421134 - DNA, 15 bp, Homo sapiens
ggttttcagcaactt

SEQ ID NO: 1421135 - DNA, 15 bp, Homo sapiens
aggttttcagcaact

SEQ ID NO: 1421136 - DNA, 15 bp, Homo sapiens
taggttttcagcaac

SEQ ID NO: 1421137 - DNA, 15 bp, Homo sapiens
ataggttttcagcaa

SEQ ID NO: 1421138 - DNA, 15 bp, Homo sapiens
tataggttttcagca

SEQ ID NO: 1421139 - DNA, 15 bp, Homo sapiens
gtataggttttcagc

SEQ ID NO: 1421140 - DNA, 15 bp, Homo sapiens
cgtataggttttcag

SEQ ID NO: 1421141 - DNA, 15 bp, Homo sapiens
acgtataggttttca

SEQ ID NO: 1421142 - DNA, 15 bp, Homo sapiens
cacgtataggttttc

SEQ ID NO: 1421143 - DNA, 15 bp, Homo sapiens
acacgtataggtttt

SEQ ID NO: 1421144 - DNA, 15 bp, Homo sapiens
cacacgtataggttt

SEQ ID NO: 1421145 - DNA, 15 bp, Homo sapiens
acacacgtataggtt

SEQ ID NO: 1421146 - DNA, 15 bp, Homo sapiens
cacacacgtataggt

SEQ ID NO: 1421147 - DNA, 15 bp, Homo sapiens
ccacacacgtatagg

SEQ ID NO: 1421148 - DNA, 15 bp, Homo sapiens
tccacacacgtatag

SEQ ID NO: 1421149 - DNA, 15 bp, Homo sapiens
ttccacacacgtata

SEQ ID NO: 1421150 - DNA, 15 bp, Homo sapiens
tttccacacacgtat

SEQ ID NO: 1421151 - DNA, 15 bp, Homo sapiens
gtttccacacacgta

SEQ ID NO: 1421152 - DNA, 15 bp, Homo sapiens
tgtttccacacacgt

SEQ ID NO: 1421153 - DNA, 15 bp, Homo sapiens
ctgtttccacacacg

SEQ ID NO: 1421154 - DNA, 15 bp, Homo sapiens
cctgtttccacacac

SEQ ID NO: 1421155 - DNA, 15 bp, Homo sapiens
tcctgtttccacaca

SEQ ID NO: 1421156 - DNA, 15 bp, Homo sapiens
atcctgtttccacac

SEQ ID NO: 1421157 - DNA, 15 bp, Homo sapiens
aatcctgtttccaca

SEQ ID NO: 1421158 - DNA, 15 bp, Homo sapiens
caatcctgtttccac

SEQ ID NO: 1421159 - DNA, 15 bp, Homo sapiens
acaatcctgtttcca

SEQ ID NO: 1421160 - DNA, 15 bp, Homo sapiens
tacaatcctgtttcc

SEQ ID NO: 1421161 - DNA, 15 bp, Homo sapiens
atacaatcctgtttc

SEQ ID NO: 1421162 - DNA, 15 bp, Homo sapiens
tatacaatcctgttt

SEQ ID NO: 1421163 - DNA, 15 bp, Homo sapiens
ttatacaatcctgtt

SEQ ID NO: 1421164 - DNA, 15 bp, Homo sapiens
attatacaatcctgt

SEQ ID NO: 1421165 - DNA, 15 bp, Homo sapiens
tattatacaatcctg

SEQ ID NO: 1421166 - DNA, 15 bp, Homo sapiens
gtattatacaatcct

SEQ ID NO: 1421167 - DNA, 15 bp, Homo sapiens
tgtattatacaatcc

SEQ ID NO: 1421168 - DNA, 15 bp, Homo sapiens
atgtattatacaatc

SEQ ID NO: 1421169 - DNA, 15 bp, Homo sapiens
aatgtattatacaat

SEQ ID NO: 1421170 - DNA, 15 bp, Homo sapiens
taatgtattatacaa

SEQ ID NO: 1421171 - DNA, 15 bp, Homo sapiens
ttaatgtattataca

SEQ ID NO: 1421172 - DNA, 15 bp, Homo sapiens
gttaatgtattatac

SEQ ID NO: 1421173 - DNA, 15 bp, Homo sapiens
ggttaatgtattata

SEQ ID NO: 1421174 - DNA, 15 bp, Homo sapiens
tggttaatgtattat

SEQ ID NO: 1421175 - DNA, 15 bp, Homo sapiens
atggttaatgtatta

SEQ ID NO: 1421176 - DNA, 15 bp, Homo sapiens
catggttaatgtatt

SEQ ID NO: 1421177 - DNA, 15 bp, Homo sapiens
ccatggttaatgtat

SEQ ID NO: 1421178 - DNA, 15 bp, Homo sapiens
accatggttaatgta

SEQ ID NO: 1421179 - DNA, 15 bp, Homo sapiens
aaccatggttaatgt

SEQ ID NO: 1421180 - DNA, 15 bp, Homo sapiens
aaaccatggttaatg

SEQ ID NO: 1421181 - DNA, 15 bp, Homo sapiens
caaaccatggttaat

SEQ ID NO: 1421182 - DNA, 15 bp, Homo sapiens
acaaaccatggttaa

SEQ ID NO: 1421183 - DNA, 15 bp, Homo sapiens
gacaaaccatggtta

SEQ ID NO: 1421184 - DNA, 15 bp, Homo sapiens
agacaaaccatggtt

SEQ ID NO: 1421185 - DNA, 15 bp, Homo sapiens
tagacaaaccatggt

SEQ ID NO: 1421186 - DNA, 15 bp, Homo sapiens
atagacaaaccatgg

SEQ ID NO: 1421187 - DNA, 15 bp, Homo sapiens
catagacaaaccatg

SEQ ID NO: 1421188 - DNA, 15 bp, Homo sapiens
acatagacaaaccat

SEQ ID NO: 1421189 - DNA, 15 bp, Homo sapiens
tacatagacaaacca

SEQ ID NO: 1421190 - DNA, 15 bp, Homo sapiens
ctacatagacaaacc

SEQ ID NO: 1421191 - DNA, 15 bp, Homo sapiens
actacatagacaaac

SEQ ID NO: 1421192 - DNA, 15 bp, Homo sapiens
aactacatagacaaa

SEQ ID NO: 1421193 - DNA, 15 bp, Homo sapiens
taactacatagacaa

SEQ ID NO: 1421194 - DNA, 15 bp, Homo sapiens
ttaactacatagaca

SEQ ID NO: 1421195 - DNA, 15 bp, Homo sapiens
attaactacatagac

SEQ ID NO: 1421196 - DNA, 15 bp, Homo sapiens
tattaactacataga

SEQ ID NO: 1421197 - DNA, 15 bp, Homo sapiens
ttattaactacatag

SEQ ID NO: 1421198 - DNA, 15 bp, Homo sapiens
cttattaactacata

SEQ ID NO: 1421199 - DNA, 15 bp, Homo sapiens
tcttattaactacat

SEQ ID NO: 1421200 - DNA, 15 bp, Homo sapiens
atcttattaactaca

SEQ ID NO: 1421201 - DNA, 15 bp, Homo sapiens
gatcttattaactac

SEQ ID NO: 1421202 - DNA, 15 bp, Homo sapiens
agatcttattaacta

SEQ ID NO: 1421203 - DNA, 15 bp, Homo sapiens
tagatcttattaact

SEQ ID NO: 1421204 - DNA, 15 bp, Homo sapiens
ctagatcttattaac

SEQ ID NO: 1421205 - DNA, 15 bp, Homo sapiens
tctagatcttattaa

SEQ ID NO: 1421206 - DNA, 15 bp, Homo sapiens
ttctagatcttatta

SEQ ID NO: 1421207 - DNA, 15 bp, Homo sapiens
tttctagatcttatt

SEQ ID NO: 1421208 - DNA, 15 bp, Homo sapiens
atttctagatcttat

SEQ ID NO: 1421209 - DNA, 15 bp, Homo sapiens
tatttctagatctta

SEQ ID NO: 1421210 - DNA, 15 bp, Homo sapiens
atatttctagatctt

SEQ ID NO: 1421211 - DNA, 15 bp, Homo sapiens
gatatttctagatct

SEQ ID NO: 1421212 - DNA, 15 bp, Homo sapiens
agatatttctagatc

SEQ ID NO: 1421213 - DNA, 15 bp, Homo sapiens
tagatatttctagat

SEQ ID NO: 1421214 - DNA, 15 bp, Homo sapiens
gtagatatttctaga

SEQ ID NO: 1421215 - DNA, 15 bp, Homo sapiens
agtagatatttctag

SEQ ID NO: 1421216 - DNA, 15 bp, Homo sapiens
tagtagatatttcta

SEQ ID NO: 1421217 - DNA, 15 bp, Homo sapiens
ttagtagatatttct

SEQ ID NO: 1421218 - DNA, 15 bp, Homo sapiens
gttagtagatatttc

SEQ ID NO: 1421219 - DNA, 15 bp, Homo sapiens
agttagtagatattt

SEQ ID NO: 1421220 - DNA, 15 bp, Homo sapiens
tagttagtagatatt

SEQ ID NO: 1421221 - DNA, 15 bp, Homo sapiens
ctagttagtagatat

SEQ ID NO: 1421222 - DNA, 15 bp, Homo sapiens
cctagttagtagata

SEQ ID NO: 1421223 - DNA, 15 bp, Homo sapiens
acctagttagtagat

SEQ ID NO: 1421224 - DNA, 15 bp, Homo sapiens
aacctagttagtaga

SEQ ID NO: 1421225 - DNA, 15 bp, Homo sapiens
gaacctagttagtag

SEQ ID NO: 1421226 - DNA, 15 bp, Homo sapiens
ggaacctagttagta

SEQ ID NO: 1421227 - DNA, 15 bp, Homo sapiens
tggaacctagttagt

SEQ ID NO: 1421228 - DNA, 15 bp, Homo sapiens
atggaacctagttag

SEQ ID NO: 1421229 - DNA, 15 bp, Homo sapiens
aatggaacctagtta

SEQ ID NO: 1421230 - DNA, 15 bp, Homo sapiens
caatggaacctagtt

SEQ ID NO: 1421231 - DNA, 15 bp, Homo sapiens
tcaatggaacctagt

SEQ ID NO: 1421232 - DNA, 15 bp, Homo sapiens
ctcaatggaacctag

SEQ ID NO: 1421233 - DNA, 15 bp, Homo sapiens
tctcaatggaaccta

SEQ ID NO: 1421234 - DNA, 15 bp, Homo sapiens
atctcaatggaacct

SEQ ID NO: 1421235 - DNA, 15 bp, Homo sapiens
tatctcaatggaacc

SEQ ID NO: 1421236 - DNA, 15 bp, Homo sapiens
ctatctcaatggaac

SEQ ID NO: 1421237 - DNA, 15 bp, Homo sapiens
actatctcaatggaa

SEQ ID NO: 1421238 - DNA, 15 bp, Homo sapiens
gactatctcaatgga

SEQ ID NO: 1421239 - DNA, 15 bp, Homo sapiens
agactatctcaatgg

SEQ ID NO: 1421240 - DNA, 15 bp, Homo sapiens
gagactatctcaatg

SEQ ID NO: 1421241 - DNA, 15 bp, Homo sapiens
agagactatctcaat

SEQ ID NO: 1421242 - DNA, 15 bp, Homo sapiens
cagagactatctcaa

SEQ ID NO: 1421243 - DNA, 15 bp, Homo sapiens
ccagagactatctca

SEQ ID NO: 1421244 - DNA, 15 bp, Homo sapiens
tccagagactatctc

SEQ ID NO: 1421245 - DNA, 15 bp, Homo sapiens
ctccagagactatct

SEQ ID NO: 1421246 - DNA, 15 bp, Homo sapiens
tctccagagactatc

SEQ ID NO: 1421247 - DNA, 15 bp, Homo sapiens
ttctccagagactat

SEQ ID NO: 1421248 - DNA, 15 bp, Homo sapiens
attctccagagacta

SEQ ID NO: 1421249 - DNA, 15 bp, Homo sapiens
cattctccagagact

SEQ ID NO: 1421250 - DNA, 15 bp, Homo sapiens
tcattctccagagac

SEQ ID NO: 1421251 - DNA, 15 bp, Homo sapiens
ttcattctccagaga

SEQ ID NO: 1421252 - DNA, 15 bp, Homo sapiens
gttcattctccagag

SEQ ID NO: 1421253 - DNA, 15 bp, Homo sapiens
agttcattctccaga

SEQ ID NO: 1421254 - DNA, 15 bp, Homo sapiens
tagttcattctccag

SEQ ID NO: 1421255 - DNA, 15 bp, Homo sapiens
ttagttcattctcca

SEQ ID NO: 1421256 - DNA, 15 bp, Homo sapiens
cttagttcattctcc

SEQ ID NO: 1421257 - DNA, 15 bp, Homo sapiens
gcttagttcattctc

SEQ ID NO: 1421258 - DNA, 15 bp, Homo sapiens
ggcttagttcattct

SEQ ID NO: 1421259 - DNA, 15 bp, Homo sapiens
tggcttagttcattc

SEQ ID NO: 1421260 - DNA, 15 bp, Homo sapiens
ctggcttagttcatt

SEQ ID NO: 1421261 - DNA, 15 bp, Homo sapiens
tctggcttagttcat

SEQ ID NO: 1421262 - DNA, 15 bp, Homo sapiens
gtctggcttagttca

SEQ ID NO: 1421263 - DNA, 15 bp, Homo sapiens
tgtctggcttagttc

SEQ ID NO: 1421264 - DNA, 15 bp, Homo sapiens
atgtctggcttagtt

SEQ ID NO: 1421265 - DNA, 15 bp, Homo sapiens
aatgtctggcttagt

SEQ ID NO: 1421266 - DNA, 15 bp, Homo sapiens
caatgtctggcttag

SEQ ID NO: 1421267 - DNA, 15 bp, Homo sapiens
tcaatgtctggctta

SEQ ID NO: 1421268 - DNA, 15 bp, Homo sapiens
ctcaatgtctggctt

SEQ ID NO: 1421269 - DNA, 15 bp, Homo sapiens
tctcaatgtctggct

SEQ ID NO: 1421270 - DNA, 15 bp, Homo sapiens
atctcaatgtctggc

SEQ ID NO: 1421271 - DNA, 15 bp, Homo sapiens
catctcaatgtctgg

SEQ ID NO: 1421272 - DNA, 15 bp, Homo sapiens
gcatctcaatgtctg

SEQ ID NO: 1421273 - DNA, 15 bp, Homo sapiens
ggcatctcaatgtct

SEQ ID NO: 1421274 - DNA, 15 bp, Homo sapiens
aggcatctcaatgtc

SEQ ID NO: 1421275 - DNA, 15 bp, Homo sapiens
aaggcatctcaatgt

SEQ ID NO: 1421276 - DNA, 15 bp, Homo sapiens
aaaggcatctcaatg

SEQ ID NO: 1421277 - DNA, 15 bp, Homo sapiens
taaaggcatctcaat

SEQ ID NO: 1421278 - DNA, 15 bp, Homo sapiens
gtaaaggcatctcaa

SEQ ID NO: 1421279 - DNA, 15 bp, Homo sapiens
agtaaaggcatctca

SEQ ID NO: 1421280 - DNA, 15 bp, Homo sapiens
aagtaaaggcatctc

SEQ ID NO: 1421281 - DNA, 15 bp, Homo sapiens
aaagtaaaggcatct

SEQ ID NO: 1421282 - DNA, 15 bp, Homo sapiens
gaaagtaaaggcatc

SEQ ID NO: 1421283 - DNA, 15 bp, Homo sapiens
agaaagtaaaggcat

SEQ ID NO: 1421284 - DNA, 15 bp, Homo sapiens
tagaaagtaaaggca

SEQ ID NO: 1421285 - DNA, 15 bp, Homo sapiens
ttagaaagtaaaggc

SEQ ID NO: 1421286 - DNA, 15 bp, Homo sapiens
tttagaaagtaaagg

SEQ ID NO: 1421287 - DNA, 15 bp, Homo sapiens
ttttagaaagtaaag

SEQ ID NO: 1421288 - DNA, 15 bp, Homo sapiens
cttttagaaagtaaa

SEQ ID NO: 1421289 - DNA, 15 bp, Homo sapiens
acttttagaaagtaa

SEQ ID NO: 1421290 - DNA, 15 bp, Homo sapiens
aacttttagaaagta

SEQ ID NO: 1421291 - DNA, 15 bp, Homo sapiens
caacttttagaaagt

SEQ ID NO: 1421292 - DNA, 15 bp, Homo sapiens
ccaacttttagaaag

SEQ ID NO: 1421293 - DNA, 15 bp, Homo sapiens
tccaacttttagaaa

SEQ ID NO: 1421294 - DNA, 15 bp, Homo sapiens
atccaacttttagaa

SEQ ID NO: 1421295 - DNA, 15 bp, Homo sapiens
gatccaacttttaga

SEQ ID NO: 1421296 - DNA, 15 bp, Homo sapiens
ggatccaacttttag

SEQ ID NO: 1421297 - DNA, 15 bp, Homo sapiens
aggatccaactttta

SEQ ID NO: 1421298 - DNA, 15 bp, Homo sapiens
taggatccaactttt

SEQ ID NO: 1421299 - DNA, 15 bp, Homo sapiens
ttaggatccaacttt

SEQ ID NO: 1421300 - DNA, 15 bp, Homo sapiens
attaggatccaactt

SEQ ID NO: 1421301 - DNA, 15 bp, Homo sapiens
cattaggatccaact

SEQ ID NO: 1421302 - DNA, 15 bp, Homo sapiens
ccattaggatccaac

SEQ ID NO: 1421303 - DNA, 15 bp, Homo sapiens
gccattaggatccaa

SEQ ID NO: 1421304 - DNA, 15 bp, Homo sapiens
tgccattaggatcca

SEQ ID NO: 1421305 - DNA, 15 bp, Homo sapiens
ctgccattaggatcc

SEQ ID NO: 1421306 - DNA, 15 bp, Homo sapiens
cctgccattaggatc

SEQ ID NO: 1421307 - DNA, 15 bp, Homo sapiens
acctgccattaggat

SEQ ID NO: 1421308 - DNA, 15 bp, Homo sapiens
gacctgccattagga

SEQ ID NO: 1421309 - DNA, 15 bp, Homo sapiens
tgacctgccattagg

SEQ ID NO: 1421310 - DNA, 15 bp, Homo sapiens
gtgacctgccattag

SEQ ID NO: 1421311 - DNA, 15 bp, Homo sapiens
tgtgacctgccatta

SEQ ID NO: 1421312 - DNA, 15 bp, Homo sapiens
ttgtgacctgccatt

SEQ ID NO: 1421313 - DNA, 15 bp, Homo sapiens
cttgtgacctgccat

SEQ ID NO: 1421314 - DNA, 15 bp, Homo sapiens
ccttgtgacctgcca

SEQ ID NO: 1421315 - DNA, 15 bp, Homo sapiens
gccttgtgacctgcc

SEQ ID NO: 1421316 - DNA, 15 bp, Homo sapiens
agccttgtgacctgc

SEQ ID NO: 1421317 - DNA, 15 bp, Homo sapiens
cagccttgtgacctg

SEQ ID NO: 1421318 - DNA, 15 bp, Homo sapiens
acagccttgtgacct

SEQ ID NO: 1421319 - DNA, 15 bp, Homo sapiens
gacagccttgtgacc

SEQ ID NO: 1421320 - DNA, 15 bp, Homo sapiens
agacagccttgtgac

SEQ ID NO: 1421321 - DNA, 15 bp, Homo sapiens
gagacagccttgtga

SEQ ID NO: 1421322 - DNA, 15 bp, Homo sapiens
ggagacagccttgtg

SEQ ID NO: 1421323 - DNA, 15 bp, Homo sapiens
aggagacagccttgt

SEQ ID NO: 1421324 - DNA, 15 bp, Homo sapiens
aaggagacagccttg

SEQ ID NO: 1421325 - DNA, 15 bp, Homo sapiens
caaggagacagcctt

SEQ ID NO: 1421326 - DNA, 15 bp, Homo sapiens
gcaaggagacagcct

SEQ ID NO: 1421327 - DNA, 15 bp, Homo sapiens
ggcaaggagacagcc

SEQ ID NO: 1421328 - DNA, 15 bp, Homo sapiens
tggcaaggagacagc

SEQ ID NO: 1421329 - DNA, 15 bp, Homo sapiens
gtggcaaggagacag

SEQ ID NO: 1421330 - DNA, 15 bp, Homo sapiens
agtggcaaggagaca

SEQ ID NO: 1421331 - DNA, 15 bp, Homo sapiens
cagtggcaaggagac

SEQ ID NO: 1421332 - DNA, 15 bp, Homo sapiens
ccagtggcaaggaga

SEQ ID NO: 1421333 - DNA, 15 bp, Homo sapiens
gccagtggcaaggag

SEQ ID NO: 1421334 - DNA, 15 bp, Homo sapiens
tgccagtggcaagga

SEQ ID NO: 1421335 - DNA, 15 bp, Homo sapiens
atgccagtggcaagg

SEQ ID NO: 1421336 - DNA, 15 bp, Homo sapiens
aatgccagtggcaag

SEQ ID NO: 1421337 - DNA, 15 bp, Homo sapiens
taatgccagtggcaa

SEQ ID NO: 1421338 - DNA, 15 bp, Homo sapiens
gtaatgccagtggca

SEQ ID NO: 1421339 - DNA, 15 bp, Homo sapiens
ggtaatgccagtggc

SEQ ID NO: 1421340 - DNA, 15 bp, Homo sapiens
tggtaatgccagtgg

SEQ ID NO: 1421341 - DNA, 15 bp, Homo sapiens
ctggtaatgccagtg

SEQ ID NO: 1421342 - DNA, 15 bp, Homo sapiens
actggtaatgccagt

SEQ ID NO: 1421343 - DNA, 15 bp, Homo sapiens
cactggtaatgccag

SEQ ID NO: 1421344 - DNA, 15 bp, Homo sapiens
tcactggtaatgcca

SEQ ID NO: 1421345 - DNA, 15 bp, Homo sapiens
gtcactggtaatgcc

SEQ ID NO: 1421346 - DNA, 15 bp, Homo sapiens
agtcactggtaatgc

SEQ ID NO: 1421347 - DNA, 15 bp, Homo sapiens
aagtcactggtaatg

SEQ ID NO: 1421348 - DNA, 15 bp, Homo sapiens
aaagtcactggtaat

SEQ ID NO: 1421349 - DNA, 15 bp, Homo sapiens
caaagtcactggtaa

SEQ ID NO: 1421350 - DNA, 15 bp, Homo sapiens
tcaaagtcactggta

SEQ ID NO: 1421351 - DNA, 15 bp, Homo sapiens
atcaaagtcactggt

SEQ ID NO: 1421352 - DNA, 15 bp, Homo sapiens
aatcaaagtcactgg

SEQ ID NO: 1421353 - DNA, 15 bp, Homo sapiens
taatcaaagtcactg

SEQ ID NO: 1421354 - DNA, 15 bp, Homo sapiens
ataatcaaagtcact

SEQ ID NO: 1421355 - DNA, 15 bp, Homo sapiens
tataatcaaagtcac

SEQ ID NO: 1421356 - DNA, 15 bp, Homo sapiens
gtataatcaaagtca

SEQ ID NO: 1421357 - DNA, 15 bp, Homo sapiens
ggtataatcaaagtc

SEQ ID NO: 1421358 - DNA, 15 bp, Homo sapiens
tggtataatcaaagt

SEQ ID NO: 1421359 - DNA, 15 bp, Homo sapiens
atggtataatcaaag

SEQ ID NO: 1421360 - DNA, 15 bp, Homo sapiens
catggtataatcaaa

SEQ ID NO: 1421361 - DNA, 15 bp, Homo sapiens
tcatggtataatcaa

SEQ ID NO: 1421362 - DNA, 15 bp, Homo sapiens
ttcatggtataatca

SEQ ID NO: 1421363 - DNA, 15 bp, Homo sapiens
attcatggtataatc

SEQ ID NO: 1421364 - DNA, 15 bp, Homo sapiens
tattcatggtataat

SEQ ID NO: 1421365 - DNA, 15 bp, Homo sapiens
gtattcatggtataa

SEQ ID NO: 1421366 - DNA, 15 bp, Homo sapiens
tgtattcatggtata

SEQ ID NO: 1421367 - DNA, 15 bp, Homo sapiens
atgtattcatggtat

SEQ ID NO: 1421368 - DNA, 15 bp, Homo sapiens
tcatgtattcatggt

SEQ ID NO: 1421369 - DNA, 15 bp, Homo sapiens
gtcatgtattcatgg

SEQ ID NO: 1421370 - DNA, 15 bp, Homo sapiens
tgtcatgtattcatg

SEQ ID NO: 1421371 - DNA, 15 bp, Homo sapiens
ctgtcatgtattcat

SEQ ID NO: 1421372 - DNA, 15 bp, Homo sapiens
tctgtcatgtattca

SEQ ID NO: 1421373 - DNA, 15 bp, Homo sapiens
atctgtcatgtattc

SEQ ID NO: 1421374 - DNA, 15 bp, Homo sapiens
gatctgtcatgtatt

SEQ ID NO: 1421375 - DNA, 15 bp, Homo sapiens
agatctgtcatgtat

SEQ ID NO: 1421376 - DNA, 15 bp, Homo sapiens
cagatctgtcatgta

SEQ ID NO: 1421377 - DNA, 15 bp, Homo sapiens
ccagatctgtcatgt

SEQ ID NO: 1421378 - DNA, 15 bp, Homo sapiens
tccagatctgtcatg

SEQ ID NO: 1421379 - DNA, 15 bp, Homo sapiens
ttccagatctgtcat

SEQ ID NO: 1421380 - DNA, 15 bp, Homo sapiens
cttccagatctgtca

SEQ ID NO: 1421381 - DNA, 15 bp, Homo sapiens
tcttccagatctgtc

SEQ ID NO: 1421382 - DNA, 15 bp, Homo sapiens
atcttccagatctgt

SEQ ID NO: 1421383 - DNA, 15 bp, Homo sapiens
catcttccagatctg

SEQ ID NO: 1421384 - DNA, 15 bp, Homo sapiens
tcatcttccagatct

SEQ ID NO: 1421385 - DNA, 15 bp, Homo sapiens
ttcatcttccagatc

SEQ ID NO: 1421386 - DNA, 15 bp, Homo sapiens
cttcatcttccagat

SEQ ID NO: 1421387 - DNA, 15 bp, Homo sapiens
gcttcatcttccaga

SEQ ID NO: 1421388 - DNA, 15 bp, Homo sapiens
tgcttcatcttccag

SEQ ID NO: 1421389 - DNA, 15 bp, Homo sapiens
ttgcttcatcttcca

SEQ ID NO: 1421390 - DNA, 15 bp, Homo sapiens
tttgcttcatcttcc

SEQ ID NO: 1421391 - DNA, 15 bp, Homo sapiens
atttgcttcatcttc

SEQ ID NO: 1421392 - DNA, 15 bp, Homo sapiens
tatttgcttcatctt

SEQ ID NO: 1421393 - DNA, 15 bp, Homo sapiens
ttatttgcttcatct

SEQ ID NO: 1421394 - DNA, 15 bp, Homo sapiens
tttatttgcttcatc

SEQ ID NO: 1421395 - DNA, 15 bp, Homo sapiens
gtttatttgcttcat

SEQ ID NO: 1421396 - DNA, 15 bp, Homo sapiens
agtttatttgcttca

SEQ ID NO: 1421397 - DNA, 15 bp, Homo sapiens
gagtttatttgcttc

SEQ ID NO: 1421398 - DNA, 15 bp, Homo sapiens
tgagtttatttgctt

SEQ ID NO: 1421399 - DNA, 15 bp, Homo sapiens
gtgagtttatttgct

SEQ ID NO: 1421400 - DNA, 15 bp, Homo sapiens
agtgagtttatttgc

SEQ ID NO: 1421401 - DNA, 15 bp, Homo sapiens
cagtgagtttatttg

SEQ ID NO: 1421402 - DNA, 15 bp, Homo sapiens
tcagtgagtttattt

SEQ ID NO: 1421403 - DNA, 15 bp, Homo sapiens
ttcagtgagtttatt

SEQ ID NO: 1421404 - DNA, 15 bp, Homo sapiens
cttcagtgagtttat

SEQ ID NO: 1421405 - DNA, 15 bp, Homo sapiens
ccttcagtgagttta

SEQ ID NO: 1421406 - DNA, 15 bp, Homo sapiens
accttcagtgagttt

SEQ ID NO: 1421407 - DNA, 15 bp, Homo sapiens
aaccttcagtgagtt

SEQ ID NO: 1421408 - DNA, 15 bp, Homo sapiens
taaccttcagtgagt

SEQ ID NO: 1421409 - DNA, 15 bp, Homo sapiens
ttaaccttcagtgag

SEQ ID NO: 1421410 - DNA, 15 bp, Homo sapiens
tttaaccttcagtga

SEQ ID NO: 1421411 - DNA, 15 bp, Homo sapiens
ttttaaccttcagtg

SEQ ID NO: 1421412 - DNA, 15 bp, Homo sapiens
attttaaccttcagt

SEQ ID NO: 1421413 - DNA, 15 bp, Homo sapiens
aattttaaccttcag

SEQ ID NO: 1421414 - DNA, 15 bp, Homo sapiens
caattttaaccttca

SEQ ID NO: 1421415 - DNA, 15 bp, Homo sapiens
ccaattttaaccttc

SEQ ID NO: 1421416 - DNA, 15 bp, Homo sapiens
cccaattttaacctt

SEQ ID NO: 1421417 - DNA, 15 bp, Homo sapiens
tcccaattttaacct

SEQ ID NO: 1421418 - DNA, 15 bp, Homo sapiens
atcccaattttaacc

SEQ ID NO: 1421419 - DNA, 15 bp, Homo sapiens
gatcccaattttaac

SEQ ID NO: 1421420 - DNA, 15 bp, Homo sapiens
agatcccaattttaa

SEQ ID NO: 1421421 - DNA, 15 bp, Homo sapiens
tagatcccaatttta

SEQ ID NO: 1421422 - DNA, 15 bp, Homo sapiens
ttagatcccaatttt

SEQ ID NO: 1421423 - DNA, 15 bp, Homo sapiens
tttagatcccaattt

SEQ ID NO: 1421424 - DNA, 15 bp, Homo sapiens
atttagatcccaatt

SEQ ID NO: 1421425 - DNA, 15 bp, Homo sapiens
gatttagatcccaat

SEQ ID NO: 1421426 - DNA, 15 bp, Homo sapiens
agatttagatcccaa

SEQ ID NO: 1421427 - DNA, 15 bp, Homo sapiens
tagatttagatccca

SEQ ID NO: 1421428 - DNA, 15 bp, Homo sapiens
ttagatttagatccc

SEQ ID NO: 1421429 - DNA, 15 bp, Homo sapiens
gttagatttagatcc

SEQ ID NO: 1421430 - DNA, 15 bp, Homo sapiens
ggttagatttagatc

SEQ ID NO: 1421431 - DNA, 15 bp, Homo sapiens
tggttagatttagat

SEQ ID NO: 1421432 - DNA, 15 bp, Homo sapiens
ttggttagatttaga

SEQ ID NO: 1421433 - DNA, 15 bp, Homo sapiens
cttggttagatttag

SEQ ID NO: 1421434 - DNA, 15 bp, Homo sapiens
acttggttagattta

SEQ ID NO: 1421435 - DNA, 15 bp, Homo sapiens
tacttggttagattt

SEQ ID NO: 1421436 - DNA, 15 bp, Homo sapiens
ctacttggttagatt

SEQ ID NO: 1421437 - DNA, 15 bp, Homo sapiens
actacttggttagat

SEQ ID NO: 1421438 - DNA, 15 bp, Homo sapiens
aactacttggttaga

SEQ ID NO: 1421439 - DNA, 15 bp, Homo sapiens
aaactacttggttag

SEQ ID NO: 1421440 - DNA, 15 bp, Homo sapiens
caaactacttggtta

SEQ ID NO: 1421441 - DNA, 15 bp, Homo sapiens
ccaaactacttggtt

SEQ ID NO: 1421442 - DNA, 15 bp, Homo sapiens
accaaactacttggt

SEQ ID NO: 1421443 - DNA, 15 bp, Homo sapiens
caccaaactacttgg

SEQ ID NO: 1421444 - DNA, 15 bp, Homo sapiens
acaccaaactacttg

SEQ ID NO: 1421445 - DNA, 15 bp, Homo sapiens
cacaccaaactactt

SEQ ID NO: 1421446 - DNA, 15 bp, Homo sapiens
acacaccaaactact

SEQ ID NO: 1421447 - DNA, 15 bp, Homo sapiens
tacacaccaaactac

SEQ ID NO: 1421448 - DNA, 15 bp, Homo sapiens
ctacacaccaaacta

SEQ ID NO: 1421449 - DNA, 15 bp, Homo sapiens
tctacacaccaaact

SEQ ID NO: 1421450 - DNA, 15 bp, Homo sapiens
ctctacacaccaaac

SEQ ID NO: 1421451 - DNA, 15 bp, Homo sapiens
actctacacaccaaa

SEQ ID NO: 1421452 - DNA, 15 bp, Homo sapiens
aactctacacaccaa

SEQ ID NO: 1421453 - DNA, 15 bp, Homo sapiens
caactctacacacca

SEQ ID NO: 1421454 - DNA, 15 bp, Homo sapiens
tcaactctacacacc

SEQ ID NO: 1421455 - DNA, 15 bp, Homo sapiens
ttcaactctacacac

SEQ ID NO: 1421456 - DNA, 15 bp, Homo sapiens
attcaactctacaca

SEQ ID NO: 1421457 - DNA, 15 bp, Homo sapiens
gattcaactctacac

SEQ ID NO: 1421458 - DNA, 15 bp, Homo sapiens
tgattcaactctaca

SEQ ID NO: 1421459 - DNA, 15 bp, Homo sapiens
ttgattcaactctac

SEQ ID NO: 1421460 - DNA, 15 bp, Homo sapiens
tttgattcaactcta

SEQ ID NO: 1421461 - DNA, 15 bp, Homo sapiens
atttgattcaactct

SEQ ID NO: 1421462 - DNA, 15 bp, Homo sapiens
tatttgattcaactc

SEQ ID NO: 1421463 - DNA, 15 bp, Homo sapiens
ctatttgattcaact

SEQ ID NO: 1421464 - DNA, 15 bp, Homo sapiens
cctatttgattcaac

SEQ ID NO: 1421465 - DNA, 15 bp, Homo sapiens
tcctatttgattcaa

SEQ ID NO: 1421466 - DNA, 15 bp, Homo sapiens
atcctatttgattca

SEQ ID NO: 1421467 - DNA, 15 bp, Homo sapiens
tatcctatttgattc

SEQ ID NO: 1421468 - DNA, 15 bp, Homo sapiens
gtatcctatttgatt

SEQ ID NO: 1421469 - DNA, 15 bp, Homo sapiens
tgtatcctatttgat

SEQ ID NO: 1421470 - DNA, 15 bp, Homo sapiens
atgtatcctatttga

SEQ ID NO: 1421471 - DNA, 15 bp, Homo sapiens
aatgtatcctatttg

SEQ ID NO: 1421472 - DNA, 15 bp, Homo sapiens
gaatgtatcctattt

SEQ ID NO: 1421473 - DNA, 15 bp, Homo sapiens
tgaatgtatcctatt

SEQ ID NO: 1421474 - DNA, 15 bp, Homo sapiens
ttgaatgtatcctat

SEQ ID NO: 1421475 - DNA, 15 bp, Homo sapiens
attgaatgtatccta

SEQ ID NO: 1421476 - DNA, 15 bp, Homo sapiens
gattgaatgtatcct

SEQ ID NO: 1421477 - DNA, 15 bp, Homo sapiens
tgattgaatgtatcc

SEQ ID NO: 1421478 - DNA, 15 bp, Homo sapiens
ttgattgaatgtatc

SEQ ID NO: 1421479 - DNA, 15 bp, Homo sapiens
cttgattgaatgtat

SEQ ID NO: 1421480 - DNA, 15 bp, Homo sapiens
tcttgattgaatgta

SEQ ID NO: 1421481 - DNA, 15 bp, Homo sapiens
ttcttgattgaatgt

SEQ ID NO: 1421482 - DNA, 15 bp, Homo sapiens
tttcttgattgaatg

SEQ ID NO: 1421483 - DNA, 15 bp, Homo sapiens
ttttcttgattgaat

SEQ ID NO: 1421484 - DNA, 15 bp, Homo sapiens
attttcttgattgaa

SEQ ID NO: 1421485 - DNA, 15 bp, Homo sapiens
aattttcttgattga

SEQ ID NO: 1421486 - DNA, 15 bp, Homo sapiens
taattttcttgattg

SEQ ID NO: 1421487 - DNA, 15 bp, Homo sapiens
gtaattttcttgatt

SEQ ID NO: 1421488 - DNA, 15 bp, Homo sapiens
agtaattttcttgat

SEQ ID NO: 1421489 - DNA, 15 bp, Homo sapiens
aagtaattttcttga

SEQ ID NO: 1421490 - DNA, 15 bp, Homo sapiens
taagtaattttcttg

SEQ ID NO: 1421491 - DNA, 15 bp, Homo sapiens
ctaagtaattttctt

SEQ ID NO: 1421492 - DNA, 15 bp, Homo sapiens
actaagtaattttct

SEQ ID NO: 1421493 - DNA, 15 bp, Homo sapiens
aactaagtaattttc

SEQ ID NO: 1421494 - DNA, 15 bp, Homo sapiens
aaactaagtaatttt

SEQ ID NO: 1421495 - DNA, 15 bp, Homo sapiens
aaaactaagtaattt

SEQ ID NO: 1421496 - DNA, 15 bp, Homo sapiens
caaaactaagtaatt

SEQ ID NO: 1421497 - DNA, 15 bp, Homo sapiens
gcaaaactaagtaat

SEQ ID NO: 1421498 - DNA, 15 bp, Homo sapiens
tgcaaaactaagtaa

SEQ ID NO: 1421499 - DNA, 15 bp, Homo sapiens
gtgcaaaactaagta

SEQ ID NO: 1421500 - DNA, 15 bp, Homo sapiens
agtgcaaaactaagt

SEQ ID NO: 1421501 - DNA, 15 bp, Homo sapiens
aagtgcaaaactaag

SEQ ID NO: 1421502 - DNA, 15 bp, Homo sapiens
aaagtgcaaaactaa

SEQ ID NO: 1421503 - DNA, 15 bp, Homo sapiens
caaagtgcaaaacta

SEQ ID NO: 1421504 - DNA, 15 bp, Homo sapiens
tcaaagtgcaaaact

SEQ ID NO: 1421505 - DNA, 15 bp, Homo sapiens
atcaaagtgcaaaac

SEQ ID NO: 1421506 - DNA, 15 bp, Homo sapiens
aatcaaagtgcaaaa

SEQ ID NO: 1421507 - DNA, 15 bp, Homo sapiens
caatcaaagtgcaaa

SEQ ID NO: 1421508 - DNA, 15 bp, Homo sapiens
acaatcaaagtgcaa

SEQ ID NO: 1421509 - DNA, 15 bp, Homo sapiens
aacaatcaaagtgca

SEQ ID NO: 1421510 - DNA, 15 bp, Homo sapiens
taacaatcaaagtgc

SEQ ID NO: 1421511 - DNA, 15 bp, Homo sapiens
ttaacaatcaaagtg

SEQ ID NO: 1421512 - DNA, 15 bp, Homo sapiens
attaacaatcaaagt

SEQ ID NO: 1421513 - DNA, 15 bp, Homo sapiens
tattaacaatcaaag

SEQ ID NO: 1421514 - DNA, 15 bp, Homo sapiens
ttattaacaatcaaa

SEQ ID NO: 1421515 - DNA, 15 bp, Homo sapiens
tttattaacaatcaa

SEQ ID NO: 1421516 - DNA, 15 bp, Homo sapiens
ctttattaacaatca

SEQ ID NO: 1421517 - DNA, 15 bp, Homo sapiens
tctttattaacaatc

SEQ ID NO: 1421518 - DNA, 15 bp, Homo sapiens
ttctttattaacaat

SEQ ID NO: 1421519 - DNA, 15 bp, Homo sapiens
attctttattaacaa

SEQ ID NO: 1421520 - DNA, 15 bp, Homo sapiens
cattctttattaaca

SEQ ID NO: 1421521 - DNA, 15 bp, Homo sapiens
ccattctttattaac

SEQ ID NO: 1421522 - DNA, 15 bp, Homo sapiens
accattctttattaa

SEQ ID NO: 1421523 - DNA, 15 bp, Homo sapiens
caccattctttatta

SEQ ID NO: 1421524 - DNA, 15 bp, Homo sapiens
ccaccattctttatt

SEQ ID NO: 1421525 - DNA, 15 bp, Homo sapiens
tccaccattctttat

SEQ ID NO: 1421526 - DNA, 15 bp, Homo sapiens
ttccaccattcttta

SEQ ID NO: 1421527 - DNA, 15 bp, Homo sapiens
attccaccattcttt

SEQ ID NO: 1421528 - DNA, 15 bp, Homo sapiens
tattccaccattctt

SEQ ID NO: 1421529 - DNA, 15 bp, Homo sapiens
atattccaccattct

SEQ ID NO: 1421530 - DNA, 15 bp, Homo sapiens
tatattccaccattc

SEQ ID NO: 1421531 - DNA, 15 bp, Homo sapiens
ttatattccaccatt

SEQ ID NO: 1421532 - DNA, 15 bp, Homo sapiens
gttatattccaccat

SEQ ID NO: 1421533 - DNA, 15 bp, Homo sapiens
tgttatattccacca

SEQ ID NO: 1421534 - DNA, 15 bp, Homo sapiens
atgttatattccacc

SEQ ID NO: 1421535 - DNA, 15 bp, Homo sapiens
catgttatattccac

SEQ ID NO: 1421536 - DNA, 15 bp, Homo sapiens
tcatgttatattcca

SEQ ID NO: 1421537 - DNA, 15 bp, Homo sapiens
atcatgttatattcc

SEQ ID NO: 1421538 - DNA, 15 bp, Homo sapiens
aatcatgttatattc

SEQ ID NO: 1421539 - DNA, 15 bp, Homo sapiens
aaatcatgttatatt

SEQ ID NO: 1421540 - DNA, 15 bp, Homo sapiens
caaatcatgttatat

SEQ ID NO: 1421541 - DNA, 15 bp, Homo sapiens
tcaaatcatgttata

SEQ ID NO: 1421542 - DNA, 15 bp, Homo sapiens
ctcaaatcatgttat

SEQ ID NO: 1421543 - DNA, 15 bp, Homo sapiens
actcaaatcatgtta

SEQ ID NO: 1421544 - DNA, 15 bp, Homo sapiens
cactcaaatcatgtt

SEQ ID NO: 1421545 - DNA, 15 bp, Homo sapiens
ccactcaaatcatgt

SEQ ID NO: 1421546 - DNA, 15 bp, Homo sapiens
accactcaaatcatg

SEQ ID NO: 1421547 - DNA, 15 bp, Homo sapiens
aaccactcaaatcat

SEQ ID NO: 1421548 - DNA, 15 bp, Homo sapiens
gaaccactcaaatca

SEQ ID NO: 1421549 - DNA, 15 bp, Homo sapiens
tgaaccactcaaatc

SEQ ID NO: 1421550 - DNA, 15 bp, Homo sapiens
atgaaccactcaaat

SEQ ID NO: 1421551 - DNA, 15 bp, Homo sapiens
tatgaaccactcaaa

SEQ ID NO: 1421552 - DNA, 15 bp, Homo sapiens
atatgaaccactcaa

SEQ ID NO: 1421553 - DNA, 15 bp, Homo sapiens
tatatgaaccactca

SEQ ID NO: 1421554 - DNA, 15 bp, Homo sapiens
atatatgaaccactc

SEQ ID NO: 1421555 - DNA, 15 bp, Homo sapiens
tatatatgaaccact

SEQ ID NO: 1421556 - DNA, 15 bp, Homo sapiens
ctatatatgaaccac

SEQ ID NO: 1421557 - DNA, 15 bp, Homo sapiens
tctatatatgaacca

SEQ ID NO: 1421558 - DNA, 15 bp, Homo sapiens
atctatatatgaacc

SEQ ID NO: 1421559 - DNA, 15 bp, Homo sapiens
gatctatatatgaac

SEQ ID NO: 1421560 - DNA, 15 bp, Homo sapiens
tgatctatatatgaa

SEQ ID NO: 1421561 - DNA, 15 bp, Homo sapiens
ctgatctatatatga

SEQ ID NO: 1421562 - DNA, 15 bp, Homo sapiens
actgatctatatatg

SEQ ID NO: 1421563 - DNA, 15 bp, Homo sapiens
tactgatctatatat

SEQ ID NO: 1421564 - DNA, 15 bp, Homo sapiens
ttactgatctatata

SEQ ID NO: 1421565 - DNA, 15 bp, Homo sapiens
cttactgatctatat

SEQ ID NO: 1421566 - DNA, 15 bp, Homo sapiens
tcttactgatctata

SEQ ID NO: 1421567 - DNA, 15 bp, Homo sapiens
ttcttactgatctat

SEQ ID NO: 1421568 - DNA, 15 bp, Homo sapiens
attcttactgatcta

SEQ ID NO: 1421569 - DNA, 15 bp, Homo sapiens
aattcttactgatct

SEQ ID NO: 1421570 - DNA, 15 bp, Homo sapiens
caattcttactgatc

SEQ ID NO: 1421571 - DNA, 15 bp, Homo sapiens
acaattcttactgat

SEQ ID NO: 1421572 - DNA, 15 bp, Homo sapiens
cacaattcttactga

SEQ ID NO: 1421573 - DNA, 15 bp, Homo sapiens
tcacaattcttactg

SEQ ID NO: 1421574 - DNA, 15 bp, Homo sapiens
atcacaattcttact

SEQ ID NO: 1421575 - DNA, 15 bp, Homo sapiens
gatcacaattcttac

SEQ ID NO: 1421576 - DNA, 15 bp, Homo sapiens
ggatcacaattctta

SEQ ID NO: 1421577 - DNA, 15 bp, Homo sapiens
aggatcacaattctt

SEQ ID NO: 1421578 - DNA, 15 bp, Homo sapiens
caggatcacaattct

SEQ ID NO: 1421579 - DNA, 15 bp, Homo sapiens
acaggatcacaattc

SEQ ID NO: 1421580 - DNA, 15 bp, Homo sapiens
aacaggatcacaatt

SEQ ID NO: 1421581 - DNA, 15 bp, Homo sapiens
caacaggatcacaat

SEQ ID NO: 1421582 - DNA, 15 bp, Homo sapiens
gcaacaggatcacaa

SEQ ID NO: 1421583 - DNA, 15 bp, Homo sapiens
ggcaacaggatcaca

SEQ ID NO: 1421584 - DNA, 15 bp, Homo sapiens
tggcaacaggatcac

SEQ ID NO: 1421585 - DNA, 15 bp, Homo sapiens
ttggcaacaggatca

SEQ ID NO: 1421586 - DNA, 15 bp, Homo sapiens
tttggcaacaggatc

SEQ ID NO: 1421587 - DNA, 15 bp, Homo sapiens
ttttggcaacaggat

SEQ ID NO: 1421588 - DNA, 15 bp, Homo sapiens
tttttggcaacagga

SEQ ID NO: 1421589 - DNA, 15 bp, Homo sapiens
atttttggcaacagg

SEQ ID NO: 1421590 - DNA, 15 bp, Homo sapiens
tatttttggcaacag

SEQ ID NO: 1421591 - DNA, 15 bp, Homo sapiens
gtatttttggcaaca

SEQ ID NO: 1421592 - DNA, 15 bp, Homo sapiens
agtatttttggcaac

SEQ ID NO: 1421593 - DNA, 15 bp, Homo sapiens
tagtatttttggcaa

SEQ ID NO: 1421594 - DNA, 15 bp, Homo sapiens
ttagtatttttggca

SEQ ID NO: 1421595 - DNA, 15 bp, Homo sapiens
attagtatttttggc

SEQ ID NO: 1421596 - DNA, 15 bp, Homo sapiens
cattagtatttttgg

SEQ ID NO: 1421597 - DNA, 15 bp, Homo sapiens
acattagtatttttg

SEQ ID NO: 1421598 - DNA, 15 bp, Homo sapiens
tacattagtattttt

SEQ ID NO: 1421599 - DNA, 15 bp, Homo sapiens
ttacattagtatttt

SEQ ID NO: 1421600 - DNA, 15 bp, Homo sapiens
attacattagtattt

SEQ ID NO: 1421601 - DNA, 15 bp, Homo sapiens
gattacattagtatt

SEQ ID NO: 1421602 - DNA, 15 bp, Homo sapiens
agattacattagtat

SEQ ID NO: 1421603 - DNA, 15 bp, Homo sapiens
aagattacattagta

SEQ ID NO: 1421604 - DNA, 15 bp, Homo sapiens
gaagattacattagt

SEQ ID NO: 1421605 - DNA, 15 bp, Homo sapiens
tgaagattacattag

SEQ ID NO: 1421606 - DNA, 15 bp, Homo sapiens
ctgaagattacatta

SEQ ID NO: 1421607 - DNA, 15 bp, Homo sapiens
gctgaagattacatt

SEQ ID NO: 1421608 - DNA, 15 bp, Homo sapiens
agctgaagattacat

SEQ ID NO: 1421609 - DNA, 15 bp, Homo sapiens
tagctgaagattaca

SEQ ID NO: 1421610 - DNA, 15 bp, Homo sapiens
gtagctgaagattac

SEQ ID NO: 1421611 - DNA, 15 bp, Homo sapiens
tgtagctgaagatta

SEQ ID NO: 1421612 - DNA, 15 bp, Homo sapiens
atgtagctgaagatt

SEQ ID NO: 1421613 - DNA, 15 bp, Homo sapiens
aatgtagctgaagat

SEQ ID NO: 1421614 - DNA, 15 bp, Homo sapiens
taatgtagctgaaga

SEQ ID NO: 1421615 - DNA, 15 bp, Homo sapiens
ttaatgtagctgaag

SEQ ID NO: 1421616 - DNA, 15 bp, Homo sapiens
cttaatgtagctgaa

SEQ ID NO: 1421617 - DNA, 15 bp, Homo sapiens
tcttaatgtagctga

SEQ ID NO: 1421618 - DNA, 15 bp, Homo sapiens
ttcttaatgtagctg

SEQ ID NO: 1421619 - DNA, 15 bp, Homo sapiens
tttcttaatgtagct

SEQ ID NO: 1421620 - DNA, 15 bp, Homo sapiens
ttttcttaatgtagc

SEQ ID NO: 1421621 - DNA, 15 bp, Homo sapiens
tttttcttaatgtag

SEQ ID NO: 1421622 - DNA, 15 bp, Homo sapiens
atttttcttaatgta

SEQ ID NO: 1421623 - DNA, 15 bp, Homo sapiens
tatttttcttaatgt

SEQ ID NO: 1421624 - DNA, 15 bp, Homo sapiens
atatttttcttaatg

SEQ ID NO: 1421625 - DNA, 15 bp, Homo sapiens
tatatttttcttaat

SEQ ID NO: 1421626 - DNA, 15 bp, Homo sapiens
ctatatttttcttaa

SEQ ID NO: 1421627 - DNA, 15 bp, Homo sapiens
gctatatttttctta

SEQ ID NO: 1421628 - DNA, 15 bp, Homo sapiens
tgctatatttttctt

SEQ ID NO: 1421629 - DNA, 15 bp, Homo sapiens
gtgctatatttttct

SEQ ID NO: 1421630 - DNA, 15 bp, Homo sapiens
agtgctatatttttc

SEQ ID NO: 1421631 - DNA, 15 bp, Homo sapiens
gagtgctatattttt

SEQ ID NO: 1421632 - DNA, 15 bp, Homo sapiens
tgagtgctatatttt

SEQ ID NO: 1421633 - DNA, 15 bp, Homo sapiens
ctgagtgctatattt

SEQ ID NO: 1421634 - DNA, 15 bp, Homo sapiens
tctgagtgctatatt

SEQ ID NO: 1421635 - DNA, 15 bp, Homo sapiens
ttctgagtgctatat

SEQ ID NO: 1421636 - DNA, 15 bp, Homo sapiens
tttctgagtgctata

SEQ ID NO: 1421637 - DNA, 15 bp, Homo sapiens
ttttctgagtgctat

SEQ ID NO: 1421638 - DNA, 15 bp, Homo sapiens
tttttctgagtgcta

SEQ ID NO: 1421639 - DNA, 15 bp, Homo sapiens
ctttttctgagtgct

SEQ ID NO: 1421640 - DNA, 15 bp, Homo sapiens
tctttttctgagtgc

SEQ ID NO: 1421641 - DNA, 15 bp, Homo sapiens
atctttttctgagtg

SEQ ID NO: 1421642 - DNA, 15 bp, Homo sapiens
tatctttttctgagt

SEQ ID NO: 1421643 - DNA, 15 bp, Homo sapiens
ctatctttttctgag

SEQ ID NO: 1421644 - DNA, 15 bp, Homo sapiens
cctatctttttctga

SEQ ID NO: 1421645 - DNA, 15 bp, Homo sapiens
tcctatctttttctg

SEQ ID NO: 1421646 - DNA, 15 bp, Homo sapiens
ttcctatctttttct

SEQ ID NO: 1421647 - DNA, 15 bp, Homo sapiens
cttcctatctttttc

SEQ ID NO: 1421648 - DNA, 15 bp, Homo sapiens
ggcttcctatctttt

SEQ ID NO: 1421649 - DNA, 15 bp, Homo sapiens
gggcttcctatcttt

SEQ ID NO: 1421650 - DNA, 15 bp, Homo sapiens
tgggcttcctatctt

SEQ ID NO: 1421651 - DNA, 15 bp, Homo sapiens
gtgggcttcctatct

SEQ ID NO: 1421652 - DNA, 15 bp, Homo sapiens
agtgggcttcctatc

SEQ ID NO: 1421653 - DNA, 15 bp, Homo sapiens
gagtgggcttcctat

SEQ ID NO: 1421654 - DNA, 15 bp, Homo sapiens
agagtgggcttccta

SEQ ID NO: 1421655 - DNA, 15 bp, Homo sapiens
tagagtgggcttcct

SEQ ID NO: 1421656 - DNA, 15 bp, Homo sapiens
gtagagtgggcttcc

SEQ ID NO: 1421657 - DNA, 15 bp, Homo sapiens
agtagagtgggcttc

SEQ ID NO: 1421658 - DNA, 15 bp, Homo sapiens
cagtagagtgggctt

SEQ ID NO: 1421659 - DNA, 15 bp, Homo sapiens
ccagtagagtgggct

SEQ ID NO: 1421660 - DNA, 15 bp, Homo sapiens
tccagtagagtgggc

SEQ ID NO: 1421661 - DNA, 15 bp, Homo sapiens
ttccagtagagtggg

SEQ ID NO: 1421662 - DNA, 15 bp, Homo sapiens
cttccagtagagtgg

SEQ ID NO: 1421663 - DNA, 15 bp, Homo sapiens
acttccagtagagtg

SEQ ID NO: 1421664 - DNA, 15 bp, Homo sapiens
tacttccagtagagt

SEQ ID NO: 1421665 - DNA, 15 bp, Homo sapiens
ttacttccagtagag

SEQ ID NO: 1421666 - DNA, 15 bp, Homo sapiens
attacttccagtaga

SEQ ID NO: 1421667 - DNA, 15 bp, Homo sapiens
gattacttccagtag

SEQ ID NO: 1421668 - DNA, 15 bp, Homo sapiens
tgattacttccagta

SEQ ID NO: 1421669 - DNA, 15 bp, Homo sapiens
gtgattacttccagt

SEQ ID NO: 1421670 - DNA, 15 bp, Homo sapiens
agtgattacttccag

SEQ ID NO: 1421671 - DNA, 15 bp, Homo sapiens
gagtgattacttcca

SEQ ID NO: 1421672 - DNA, 15 bp, Homo sapiens
tgagtgattacttcc

SEQ ID NO: 1421673 - DNA, 15 bp, Homo sapiens
atgagtgattacttc

SEQ ID NO: 1421674 - DNA, 15 bp, Homo sapiens
gatgagtgattactt

SEQ ID NO: 1421675 - DNA, 15 bp, Homo sapiens
agatgagtgattact

SEQ ID NO: 1421676 - DNA, 15 bp, Homo sapiens
cagatgagtgattac

SEQ ID NO: 1421677 - DNA, 15 bp, Homo sapiens
tcagatgagtgatta

SEQ ID NO: 1421678 - DNA, 15 bp, Homo sapiens
ttcagatgagtgatt

SEQ ID NO: 1421679 - DNA, 15 bp, Homo sapiens
tttcagatgagtgat

SEQ ID NO: 1421680 - DNA, 15 bp, Homo sapiens
atttcagatgagtga

SEQ ID NO: 1421681 - DNA, 15 bp, Homo sapiens
catttcagatgagtg

SEQ ID NO: 1421682 - DNA, 15 bp, Homo sapiens
acatttcagatgagt

SEQ ID NO: 1421683 - DNA, 15 bp, Homo sapiens
gacatttcagatgag

SEQ ID NO: 1421684 - DNA, 15 bp, Homo sapiens
tgacatttcagatga

SEQ ID NO: 1421685 - DNA, 15 bp, Homo sapiens
atgacatttcagatg

SEQ ID NO: 1421686 - DNA, 15 bp, Homo sapiens
gatgacatttcagat

SEQ ID NO: 1421687 - DNA, 15 bp, Homo sapiens
agatgacatttcaga

SEQ ID NO: 1421688 - DNA, 15 bp, Homo sapiens
aagatgacatttcag

SEQ ID NO: 1421689 - DNA, 15 bp, Homo sapiens
gaagatgacatttca

SEQ ID NO: 1421690 - DNA, 15 bp, Homo sapiens
agaagatgacatttc

SEQ ID NO: 1421691 - DNA, 15 bp, Homo sapiens
cagaagatgacattt

SEQ ID NO: 1421692 - DNA, 15 bp, Homo sapiens
acagaagatgacatt

SEQ ID NO: 1421693 - DNA, 15 bp, Homo sapiens
aacagaagatgacat

SEQ ID NO: 1421694 - DNA, 15 bp, Homo sapiens
aaacagaagatgaca

SEQ ID NO: 1421695 - DNA, 15 bp, Homo sapiens
caaacagaagatgac

SEQ ID NO: 1421696 - DNA, 15 bp, Homo sapiens
tcaaacagaagatga

SEQ ID NO: 1421697 - DNA, 15 bp, Homo sapiens
ttcaaacagaagatg

SEQ ID NO: 1421698 - DNA, 15 bp, Homo sapiens
attcaaacagaagat

SEQ ID NO: 1421699 - DNA, 15 bp, Homo sapiens
cattcaaacagaaga

SEQ ID NO: 1421700 - DNA, 15 bp, Homo sapiens
gcattcaaacagaag

SEQ ID NO: 1421701 - DNA, 15 bp, Homo sapiens
agcattcaaacagaa

SEQ ID NO: 1421702 - DNA, 15 bp, Homo sapiens
cagcattcaaacaga

SEQ ID NO: 1421703 - DNA, 15 bp, Homo sapiens
acagcattcaaacag

SEQ ID NO: 1421704 - DNA, 15 bp, Homo sapiens
tacagcattcaaaca

SEQ ID NO: 1421705 - DNA, 15 bp, Homo sapiens
atacagcattcaaac

SEQ ID NO: 1421706 - DNA, 15 bp, Homo sapiens
aatacagcattcaaa

SEQ ID NO: 1421707 - DNA, 15 bp, Homo sapiens
taatacagcattcaa

SEQ ID NO: 1421708 - DNA, 15 bp, Homo sapiens
ctaatacagcattca

SEQ ID NO: 1421709 - DNA, 15 bp, Homo sapiens
tctaatacagcattc

SEQ ID NO: 1421710 - DNA, 15 bp, Homo sapiens
ttctaatacagcatt

SEQ ID NO: 1421711 - DNA, 15 bp, Homo sapiens
cttctaatacagcat

SEQ ID NO: 1421712 - DNA, 15 bp, Homo sapiens
tcttctaatacagca

SEQ ID NO: 1421713 - DNA, 15 bp, Homo sapiens
ctcttctaatacagc

SEQ ID NO: 1421714 - DNA, 15 bp, Homo sapiens
gctcttctaatacag

SEQ ID NO: 1421715 - DNA, 15 bp, Homo sapiens
agctcttctaataca

SEQ ID NO: 1421716 - DNA, 15 bp, Homo sapiens
cagctcttctaatac

SEQ ID NO: 1421717 - DNA, 15 bp, Homo sapiens
gcagctcttctaata

SEQ ID NO: 1421718 - DNA, 15 bp, Homo sapiens
ggcagctcttctaat

SEQ ID NO: 1421719 - DNA, 15 bp, Homo sapiens
tggcagctcttctaa

SEQ ID NO: 1421720 - DNA, 15 bp, Homo sapiens
atggcagctcttcta

SEQ ID NO: 1421721 - DNA, 15 bp, Homo sapiens
catggcagctcttct

SEQ ID NO: 1421722 - DNA, 15 bp, Homo sapiens
gcatggcagctcttc

SEQ ID NO: 1421723 - DNA, 15 bp, Homo sapiens
ggcatggcagctctt

SEQ ID NO: 1421724 - DNA, 15 bp, Homo sapiens
aggcatggcagctct

SEQ ID NO: 1421725 - DNA, 15 bp, Homo sapiens
caggcatggcagctc

SEQ ID NO: 1421726 - DNA, 15 bp, Homo sapiens
ccaggcatggcagct

SEQ ID NO: 1421727 - DNA, 15 bp, Homo sapiens
cccaggcatggcagc

SEQ ID NO: 1421728 - DNA, 15 bp, Homo sapiens
ccccaggcatggcag

SEQ ID NO: 1421729 - DNA, 15 bp, Homo sapiens
tccccaggcatggca

SEQ ID NO: 1421730 - DNA, 15 bp, Homo sapiens
ttccccaggcatggc

SEQ ID NO: 1421731 - DNA, 15 bp, Homo sapiens
cttccccaggcatgg

SEQ ID NO: 1421732 - DNA, 15 bp, Homo sapiens
ccttccccaggcatg

SEQ ID NO: 1421733 - DNA, 15 bp, Homo sapiens
gccttccccaggcat

SEQ ID NO: 1421734 - DNA, 15 bp, Homo sapiens
tgccttccccaggca

SEQ ID NO: 1421735 - DNA, 15 bp, Homo sapiens
ctgccttccccaggc

SEQ ID NO: 1421736 - DNA, 15 bp, Homo sapiens
tctgccttccccagg

SEQ ID NO: 1421737 - DNA, 15 bp, Homo sapiens
ttctgccttccccag

SEQ ID NO: 1421738 - DNA, 15 bp, Homo sapiens
cttctgccttcccca

SEQ ID NO: 1421739 - DNA, 15 bp, Homo sapiens
ccttctgccttcccc

SEQ ID NO: 1421740 - DNA, 15 bp, Homo sapiens
cccttctgccttccc

SEQ ID NO: 1421741 - DNA, 15 bp, Homo sapiens
ccccttctgccttcc

SEQ ID NO: 1421742 - DNA, 15 bp, Homo sapiens
tccccttctgccttc

SEQ ID NO: 1421743 - DNA, 15 bp, Homo sapiens
atccccttctgcctt

SEQ ID NO: 1421744 - DNA, 15 bp, Homo sapiens
catccccttctgcct

SEQ ID NO: 1421745 - DNA, 15 bp, Homo sapiens
ccatccccttctgcc

SEQ ID NO: 1421746 - DNA, 15 bp, Homo sapiens
tccatccccttctgc

SEQ ID NO: 1421747 - DNA, 15 bp, Homo sapiens
ctccatccccttctg

SEQ ID NO: 1421748 - DNA, 15 bp, Homo sapiens
tctccatccccttct

SEQ ID NO: 1421749 - DNA, 15 bp, Homo sapiens
ttctccatccccttc

SEQ ID NO: 1421750 - DNA, 15 bp, Homo sapiens
cttctccatcccctt

SEQ ID NO: 1421751 - DNA, 15 bp, Homo sapiens
acttctccatcccct

SEQ ID NO: 1421752 - DNA, 15 bp, Homo sapiens
tacttctccatcccc

SEQ ID NO: 1421753 - DNA, 15 bp, Homo sapiens
ctacttctccatccc

SEQ ID NO: 1421754 - DNA, 15 bp, Homo sapiens
gctacttctccatcc

SEQ ID NO: 1421755 - DNA, 15 bp, Homo sapiens
tgctacttctccatc

SEQ ID NO: 1421756 - DNA, 15 bp, Homo sapiens
atgctacttctccat

SEQ ID NO: 1421757 - DNA, 15 bp, Homo sapiens
catgctacttctcca

SEQ ID NO: 1421758 - DNA, 15 bp, Homo sapiens
gcatgctacttctcc

SEQ ID NO: 1421759 - DNA, 15 bp, Homo sapiens
ggcatgctacttctc

SEQ ID NO: 1421760 - DNA, 15 bp, Homo sapiens
aggcatgctacttct

SEQ ID NO: 1421761 - DNA, 15 bp, Homo sapiens
aaggcatgctacttc

SEQ ID NO: 1421762 - DNA, 15 bp, Homo sapiens
gaaggcatgctactt

SEQ ID NO: 1421763 - DNA, 15 bp, Homo sapiens
agaaggcatgctact

SEQ ID NO: 1421764 - DNA, 15 bp, Homo sapiens
tagaaggcatgctac

SEQ ID NO: 1421765 - DNA, 15 bp, Homo sapiens
ctagaaggcatgcta

SEQ ID NO: 1421766 - DNA, 15 bp, Homo sapiens
gctagaaggcatgct

SEQ ID NO: 1421767 - DNA, 15 bp, Homo sapiens
agctagaaggcatgc

SEQ ID NO: 1421768 - DNA, 15 bp, Homo sapiens
cagctagaaggcatg

SEQ ID NO: 1421769 - DNA, 15 bp, Homo sapiens
gcagctagaaggcat

SEQ ID NO: 1421770 - DNA, 15 bp, Homo sapiens
ggcagctagaaggca

SEQ ID NO: 1421771 - DNA, 15 bp, Homo sapiens
aggcagctagaaggc

SEQ ID NO: 1421772 - DNA, 15 bp, Homo sapiens
caggcagctagaagg

SEQ ID NO: 1421773 - DNA, 15 bp, Homo sapiens
ccaggcagctagaag

SEQ ID NO: 1421774 - DNA, 15 bp, Homo sapiens
gccaggcagctagaa

SEQ ID NO: 1421775 - DNA, 15 bp, Homo sapiens
tgccaggcagctaga

SEQ ID NO: 1421776 - DNA, 15 bp, Homo sapiens
ttgccaggcagctag

SEQ ID NO: 1421777 - DNA, 15 bp, Homo sapiens
tttgccaggcagcta

SEQ ID NO: 1421778 - DNA, 15 bp, Homo sapiens
atttgccaggcagct

SEQ ID NO: 1421779 - DNA, 15 bp, Homo sapiens
catttgccaggcagc

SEQ ID NO: 1421780 - DNA, 15 bp, Homo sapiens
gcatttgccaggcag

SEQ ID NO: 1421781 - DNA, 15 bp, Homo sapiens
agcatttgccaggca

SEQ ID NO: 1421782 - DNA, 15 bp, Homo sapiens
cagcatttgccaggc

SEQ ID NO: 1421783 - DNA, 15 bp, Homo sapiens
acagcatttgccagg

SEQ ID NO: 1421784 - DNA, 15 bp, Homo sapiens
cacagcatttgccag

SEQ ID NO: 1421785 - DNA, 15 bp, Homo sapiens
acacagcatttgcca

SEQ ID NO: 1421786 - DNA, 15 bp, Homo sapiens
cacacagcatttgcc

SEQ ID NO: 1421787 - DNA, 15 bp, Homo sapiens
acacacagcatttgc

SEQ ID NO: 1421788 - DNA, 15 bp, Homo sapiens
aacacacagcatttg

SEQ ID NO: 1421789 - DNA, 15 bp, Homo sapiens
aaacacacagcattt

SEQ ID NO: 1421790 - DNA, 15 bp, Homo sapiens
aaaacacacagcatt

SEQ ID NO: 1421791 - DNA, 15 bp, Homo sapiens
aaaaacacacagcat

SEQ ID NO: 1421792 - DNA, 15 bp, Homo sapiens
taaaaacacacagca

SEQ ID NO: 1421793 - DNA, 15 bp, Homo sapiens
ataaaaacacacagc

SEQ ID NO: 1421794 - DNA, 15 bp, Homo sapiens
atataaaaacacaca

SEQ ID NO: 1421795 - DNA, 15 bp, Homo sapiens
tatataaaaacacac

SEQ ID NO: 1421796 - DNA, 15 bp, Homo sapiens
gtatataaaaacaca

SEQ ID NO: 1421797 - DNA, 15 bp, Homo sapiens
tgtatataaaaacac

SEQ ID NO: 1421798 - DNA, 15 bp, Homo sapiens
atgtatataaaaaca

SEQ ID NO: 1421799 - DNA, 15 bp, Homo sapiens
aatgtatataaaaac

SEQ ID NO: 1421800 - DNA, 15 bp, Homo sapiens
caatgtatataaaaa

SEQ ID NO: 1421801 - DNA, 15 bp, Homo sapiens
acaatgtatataaaa

SEQ ID NO: 1421802 - DNA, 15 bp, Homo sapiens
aacaatgtatataaa

SEQ ID NO: 1421803 - DNA, 15 bp, Homo sapiens
caacaatgtatataa

SEQ ID NO: 1421804 - DNA, 15 bp, Homo sapiens
acaacaatgtatata

SEQ ID NO: 1421805 - DNA, 15 bp, Homo sapiens
gacaacaatgtatat

SEQ ID NO: 1421806 - DNA, 15 bp, Homo sapiens
agacaacaatgtata

SEQ ID NO: 1421807 - DNA, 15 bp, Homo sapiens
cagacaacaatgtat

SEQ ID NO: 1421808 - DNA, 15 bp, Homo sapiens
tcagacaacaatgta

SEQ ID NO: 1421809 - DNA, 15 bp, Homo sapiens
ttcagacaacaatgt

SEQ ID NO: 1421810 - DNA, 15 bp, Homo sapiens
cttcagacaacaatg

SEQ ID NO: 1421811 - DNA, 15 bp, Homo sapiens
tcttcagacaacaat

SEQ ID NO: 1421812 - DNA, 15 bp, Homo sapiens
ttcttcagacaacaa

SEQ ID NO: 1421813 - DNA, 15 bp, Homo sapiens
attcttcagacaaca

SEQ ID NO: 1421814 - DNA, 15 bp, Homo sapiens
tattcttcagacaac

SEQ ID NO: 1421815 - DNA, 15 bp, Homo sapiens
ctattcttcagacaa

SEQ ID NO: 1421816 - DNA, 15 bp, Homo sapiens
gctattcttcagaca

SEQ ID NO: 1421817 - DNA, 15 bp, Homo sapiens
tgctattcttcagac

SEQ ID NO: 1421818 - DNA, 15 bp, Homo sapiens
atgctattcttcaga

SEQ ID NO: 1421819 - DNA, 15 bp, Homo sapiens
gatgctattcttcag

SEQ ID NO: 1421820 - DNA, 15 bp, Homo sapiens
tgatgctattcttca

SEQ ID NO: 1421821 - DNA, 15 bp, Homo sapiens
atgatgctattcttc

SEQ ID NO: 1421822 - DNA, 15 bp, Homo sapiens
catgatgctattctt

SEQ ID NO: 1421823 - DNA, 15 bp, Homo sapiens
tcatgatgctattct

SEQ ID NO: 1421824 - DNA, 15 bp, Homo sapiens
ctcatgatgctattc

SEQ ID NO: 1421825 - DNA, 15 bp, Homo sapiens
cctcatgatgctatt

SEQ ID NO: 1421826 - DNA, 15 bp, Homo sapiens
acctcatgatgctat

SEQ ID NO: 1421827 - DNA, 15 bp, Homo sapiens
cacctcatgatgcta

SEQ ID NO: 1421828 - DNA, 15 bp, Homo sapiens
tcacctcatgatgct

SEQ ID NO: 1421829 - DNA, 15 bp, Homo sapiens
ttcacctcatgatgc

SEQ ID NO: 1421830 - DNA, 15 bp, Homo sapiens
tttcacctcatgatg

SEQ ID NO: 1421831 - DNA, 15 bp, Homo sapiens
atttcacctcatgat

SEQ ID NO: 1421832 - DNA, 15 bp, Homo sapiens
aatttcacctcatga

SEQ ID NO: 1421833 - DNA, 15 bp, Homo sapiens
aaatttcacctcatg

SEQ ID NO: 1421834 - DNA, 15 bp, Homo sapiens
taaatttcacctcat

SEQ ID NO: 1421835 - DNA, 15 bp, Homo sapiens
ctaaatttcacctca

SEQ ID NO: 1421836 - DNA, 15 bp, Homo sapiens
actaaatttcacctc

SEQ ID NO: 1421837 - DNA, 15 bp, Homo sapiens
cactaaatttcacct

SEQ ID NO: 1421838 - DNA, 15 bp, Homo sapiens
acactaaatttcacc

SEQ ID NO: 1421839 - DNA, 15 bp, Homo sapiens
aacactaaatttcac

SEQ ID NO: 1421840 - DNA, 15 bp, Homo sapiens
gaacactaaatttca

SEQ ID NO: 1421841 - DNA, 15 bp, Homo sapiens
ggaacactaaatttc

SEQ ID NO: 1421842 - DNA, 15 bp, Homo sapiens
gggaacactaaattt

SEQ ID NO: 1421843 - DNA, 15 bp, Homo sapiens
tgggaacactaaatt

SEQ ID NO: 1421844 - DNA, 15 bp, Homo sapiens
atgggaacactaaat

SEQ ID NO: 1421845 - DNA, 15 bp, Homo sapiens
aatgggaacactaaa

SEQ ID NO: 1421846 - DNA, 15 bp, Homo sapiens
aaatgggaacactaa

SEQ ID NO: 1421847 - DNA, 15 bp, Homo sapiens
aaaatgggaacacta

SEQ ID NO: 1421848 - DNA, 15 bp, Homo sapiens
taaaatgggaacact

SEQ ID NO: 1421849 - DNA, 15 bp, Homo sapiens
ctaaaatgggaacac

SEQ ID NO: 1421850 - DNA, 15 bp, Homo sapiens
tctaaaatgggaaca

SEQ ID NO: 1421851 - DNA, 15 bp, Homo sapiens
ctctaaaatgggaac

SEQ ID NO: 1421852 - DNA, 15 bp, Homo sapiens
actctaaaatgggaa

SEQ ID NO: 1421853 - DNA, 15 bp, Homo sapiens
tactctaaaatggga

SEQ ID NO: 1421854 - DNA, 15 bp, Homo sapiens
ttactctaaaatggg

SEQ ID NO: 1421855 - DNA, 15 bp, Homo sapiens
tttactctaaaatgg

SEQ ID NO: 1421856 - DNA, 15 bp, Homo sapiens
atttactctaaaatg

SEQ ID NO: 1421857 - DNA, 15 bp, Homo sapiens
aatttactctaaaat

SEQ ID NO: 1421858 - DNA, 15 bp, Homo sapiens
aaatttactctaaaa

SEQ ID NO: 1421859 - DNA, 15 bp, Homo sapiens
aaaatttactctaaa

SEQ ID NO: 1421860 - DNA, 15 bp, Homo sapiens
taaaatttactctaa

SEQ ID NO: 1421861 - DNA, 15 bp, Homo sapiens
ttaaaatttactcta

SEQ ID NO: 1421862 - DNA, 15 bp, Homo sapiens
tttaaaatttactct

SEQ ID NO: 1421863 - DNA, 15 bp, Homo sapiens
ttttaaaatttactc

SEQ ID NO: 1421864 - DNA, 15 bp, Homo sapiens
tttttaaaatttact

SEQ ID NO: 1421865 - DNA, 15 bp, Homo sapiens
gtttttaaaatttac

SEQ ID NO: 1421866 - DNA, 15 bp, Homo sapiens
tgtttttaaaattta

SEQ ID NO: 1421867 - DNA, 15 bp, Homo sapiens
ttgtttttaaaattt

SEQ ID NO: 1421868 - DNA, 15 bp, Homo sapiens
tttgtttttaaaatt

SEQ ID NO: 1421869 - DNA, 15 bp, Homo sapiens
atttgtttttaaaat

SEQ ID NO: 1421870 - DNA, 15 bp, Homo sapiens
tatttgtttttaaaa

SEQ ID NO: 1421871 - DNA, 15 bp, Homo sapiens
ctatttgtttttaaa

SEQ ID NO: 1421872 - DNA, 15 bp, Homo sapiens
cctatttgtttttaa

SEQ ID NO: 1421873 - DNA, 15 bp, Homo sapiens
tcctatttgttttta

SEQ ID NO: 1421874 - DNA, 15 bp, Homo sapiens
ttcctatttgttttt

SEQ ID NO: 1421875 - DNA, 15 bp, Homo sapiens
attcctatttgtttt

SEQ ID NO: 1421876 - DNA, 15 bp, Homo sapiens
tattcctatttgttt

SEQ ID NO: 1421877 - DNA, 15 bp, Homo sapiens
gtattcctatttgtt

SEQ ID NO: 1421878 - DNA, 15 bp, Homo sapiens
tgtattcctatttgt

SEQ ID NO: 1421879 - DNA, 15 bp, Homo sapiens
ttgtattcctatttg

SEQ ID NO: 1421880 - DNA, 15 bp, Homo sapiens
attgtattcctattt

SEQ ID NO: 1421881 - DNA, 15 bp, Homo sapiens
aattgtattcctatt

SEQ ID NO: 1421882 - DNA, 15 bp, Homo sapiens
aaattgtattcctat

SEQ ID NO: 1421883 - DNA, 15 bp, Homo sapiens
aaaattgtattccta

SEQ ID NO: 1421884 - DNA, 15 bp, Homo sapiens
caaaattgtattcct

SEQ ID NO: 1421885 - DNA, 15 bp, Homo sapiens
ccaaaattgtattcc

SEQ ID NO: 1421886 - DNA, 15 bp, Homo sapiens
tccaaaattgtattc

SEQ ID NO: 1421887 - DNA, 15 bp, Homo sapiens
ttccaaaattgtatt

SEQ ID NO: 1421888 - DNA, 15 bp, Homo sapiens
tttccaaaattgtat

SEQ ID NO: 1421889 - DNA, 15 bp, Homo sapiens
gtttccaaaattgta

SEQ ID NO: 1421890 - DNA, 15 bp, Homo sapiens
tgtttccaaaattgt

SEQ ID NO: 1421891 - DNA, 15 bp, Homo sapiens
atgtttccaaaattg

SEQ ID NO: 1421892 - DNA, 15 bp, Homo sapiens
catgtttccaaaatt

SEQ ID NO: 1421893 - DNA, 15 bp, Homo sapiens
ccatgtttccaaaat

SEQ ID NO: 1421894 - DNA, 15 bp, Homo sapiens
accatgtttccaaaa

SEQ ID NO: 1421895 - DNA, 15 bp, Homo sapiens
taccatgtttccaaa

SEQ ID NO: 1421896 - DNA, 15 bp, Homo sapiens
ataccatgtttccaa

SEQ ID NO: 1421897 - DNA, 15 bp, Homo sapiens
aataccatgtttcca

SEQ ID NO: 1421898 - DNA, 15 bp, Homo sapiens
aaataccatgtttcc

SEQ ID NO: 1421899 - DNA, 15 bp, Homo sapiens
caaataccatgtttc

SEQ ID NO: 1421900 - DNA, 15 bp, Homo sapiens
acaaataccatgttt

SEQ ID NO: 1421901 - DNA, 15 bp, Homo sapiens
gacaaataccatgtt

SEQ ID NO: 1421902 - DNA, 15 bp, Homo sapiens
agacaaataccatgt

SEQ ID NO: 1421903 - DNA, 15 bp, Homo sapiens
aagacaaataccatg

SEQ ID NO: 1421904 - DNA, 15 bp, Homo sapiens
gaagacaaataccat

SEQ ID NO: 1421905 - DNA, 15 bp, Homo sapiens
tgaagacaaatacca

SEQ ID NO: 1421906 - DNA, 15 bp, Homo sapiens
ctgaagacaaatacc

SEQ ID NO: 1421907 - DNA, 15 bp, Homo sapiens
cctgaagacaaatac

SEQ ID NO: 1421908 - DNA, 15 bp, Homo sapiens
acctgaagacaaata

SEQ ID NO: 1421909 - DNA, 15 bp, Homo sapiens
tacctgaagacaaat

SEQ ID NO: 1421910 - DNA, 15 bp, Homo sapiens
atacctgaagacaaa

SEQ ID NO: 1421911 - DNA, 15 bp, Homo sapiens
gatacctgaagacaa

SEQ ID NO: 1421912 - DNA, 15 bp, Homo sapiens
tgatacctgaagaca

SEQ ID NO: 1421913 - DNA, 15 bp, Homo sapiens
ttgatacctgaagac

SEQ ID NO: 1421914 - DNA, 15 bp, Homo sapiens
tttgatacctgaaga

SEQ ID NO: 1421915 - DNA, 15 bp, Homo sapiens
atttgatacctgaag

SEQ ID NO: 1421916 - DNA, 15 bp, Homo sapiens
aatttgatacctgaa

SEQ ID NO: 1421917 - DNA, 15 bp, Homo sapiens
gaatttgatacctga

SEQ ID NO: 1421918 - DNA, 15 bp, Homo sapiens
tgaatttgatacctg

SEQ ID NO: 1421919 - DNA, 15 bp, Homo sapiens
ttgaatttgatacct

SEQ ID NO: 1421920 - DNA, 15 bp, Homo sapiens
cttgaatttgatacc

SEQ ID NO: 1421921 - DNA, 15 bp, Homo sapiens
tcttgaatttgatac

SEQ ID NO: 1421922 - DNA, 15 bp, Homo sapiens
ctcttgaatttgata

SEQ ID NO: 1421923 - DNA, 15 bp, Homo sapiens
gctcttgaatttgat

SEQ ID NO: 1421924 - DNA, 15 bp, Homo sapiens
agctcttgaatttga

SEQ ID NO: 1421925 - DNA, 15 bp, Homo sapiens
cagctcttgaatttg

SEQ ID NO: 1421926 - DNA, 15 bp, Homo sapiens
acagctcttgaattt

SEQ ID NO: 1421927 - DNA, 15 bp, Homo sapiens
gacagctcttgaatt

SEQ ID NO: 1421928 - DNA, 15 bp, Homo sapiens
tgacagctcttgaat

SEQ ID NO: 1421929 - DNA, 15 bp, Homo sapiens
ttgacagctcttgaa

SEQ ID NO: 1421930 - DNA, 15 bp, Homo sapiens
attgacagctcttga

SEQ ID NO: 1421931 - DNA, 15 bp, Homo sapiens
cattgacagctcttg

SEQ ID NO: 1421932 - DNA, 15 bp, Homo sapiens
tcattgacagctctt

SEQ ID NO: 1421933 - DNA, 15 bp, Homo sapiens
ttcattgacagctct

SEQ ID NO: 1421934 - DNA, 15 bp, Homo sapiens
tttcattgacagctc

SEQ ID NO: 1421935 - DNA, 15 bp, Homo sapiens
ctttcattgacagct

SEQ ID NO: 1421936 - DNA, 15 bp, Homo sapiens
cctttcattgacagc

SEQ ID NO: 1421937 - DNA, 15 bp, Homo sapiens
gcctttcattgacag

SEQ ID NO: 1421938 - DNA, 15 bp, Homo sapiens
tgcctttcattgaca

SEQ ID NO: 1421939 - DNA, 15 bp, Homo sapiens
ttgcctttcattgac

SEQ ID NO: 1421940 - DNA, 15 bp, Homo sapiens
attgcctttcattga

SEQ ID NO: 1421941 - DNA, 15 bp, Homo sapiens
aattgcctttcattg

SEQ ID NO: 1421942 - DNA, 15 bp, Homo sapiens
taattgcctttcatt

SEQ ID NO: 1421943 - DNA, 15 bp, Homo sapiens
ttaattgcctttcat

SEQ ID NO: 1421944 - DNA, 15 bp, Homo sapiens
cttaattgcctttca

SEQ ID NO: 1421945 - DNA, 15 bp, Homo sapiens
gcttaattgcctttc

SEQ ID NO: 1421946 - DNA, 15 bp, Homo sapiens
agcttaattgccttt

SEQ ID NO: 1421947 - DNA, 15 bp, Homo sapiens
gagcttaattgcctt

SEQ ID NO: 1421948 - DNA, 15 bp, Homo sapiens
tgagcttaattgcct

SEQ ID NO: 1421949 - DNA, 15 bp, Homo sapiens
atgagcttaattgcc

SEQ ID NO: 1421950 - DNA, 15 bp, Homo sapiens
aatgagcttaattgc

SEQ ID NO: 1421951 - DNA, 15 bp, Homo sapiens
gaatgagcttaattg

SEQ ID NO: 1421952 - DNA, 15 bp, Homo sapiens
agaatgagcttaatt

SEQ ID NO: 1421953 - DNA, 15 bp, Homo sapiens
aagaatgagcttaat

SEQ ID NO: 1421954 - DNA, 15 bp, Homo sapiens
caagaatgagcttaa

SEQ ID NO: 1421955 - DNA, 15 bp, Homo sapiens
acaagaatgagctta

SEQ ID NO: 1421956 - DNA, 15 bp, Homo sapiens
cacaagaatgagctt

SEQ ID NO: 1421957 - DNA, 15 bp, Homo sapiens
tcacaagaatgagct

SEQ ID NO: 1421958 - DNA, 15 bp, Homo sapiens
gtcacaagaatgagc

SEQ ID NO: 1421959 - DNA, 15 bp, Homo sapiens
agtcacaagaatgag

SEQ ID NO: 1421960 - DNA, 15 bp, Homo sapiens
cagtcacaagaatga

SEQ ID NO: 1421961 - DNA, 15 bp, Homo sapiens
ccagtcacaagaatg

SEQ ID NO: 1421962 - DNA, 15 bp, Homo sapiens
tccagtcacaagaat

SEQ ID NO: 1421963 - DNA, 15 bp, Homo sapiens
ttccagtcacaagaa

SEQ ID NO: 1421964 - DNA, 15 bp, Homo sapiens
cttccagtcacaaga

SEQ ID NO: 1421965 - DNA, 15 bp, Homo sapiens
tcttccagtcacaag

SEQ ID NO: 1421966 - DNA, 15 bp, Homo sapiens
ctcttccagtcacaa

SEQ ID NO: 1421967 - DNA, 15 bp, Homo sapiens
gctcttccagtcaca

SEQ ID NO: 1421968 - DNA, 15 bp, Homo sapiens
tgctcttccagtcac

SEQ ID NO: 1421969 - DNA, 15 bp, Homo sapiens
ctgctcttccagtca

SEQ ID NO: 1421970 - DNA, 15 bp, Homo sapiens
tctgctcttccagtc

SEQ ID NO: 1421971 - DNA, 15 bp, Homo sapiens
ttctgctcttccagt

SEQ ID NO: 1421972 - DNA, 15 bp, Homo sapiens
gttctgctcttccag

SEQ ID NO: 1421973 - DNA, 15 bp, Homo sapiens
agttctgctcttcca

SEQ ID NO: 1421974 - DNA, 15 bp, Homo sapiens
tagttctgctcttcc

SEQ ID NO: 1421975 - DNA, 15 bp, Homo sapiens
ctagttctgctcttc

SEQ ID NO: 1421976 - DNA, 15 bp, Homo sapiens
cctagttctgctctt

SEQ ID NO: 1421977 - DNA, 15 bp, Homo sapiens
tcctagttctgctct

SEQ ID NO: 1421978 - DNA, 15 bp, Homo sapiens
gtcctagttctgctc

SEQ ID NO: 1421979 - DNA, 15 bp, Homo sapiens
tgtcctagttctgct

SEQ ID NO: 1421980 - DNA, 15 bp, Homo sapiens
ttgtcctagttctgc

SEQ ID NO: 1421981 - DNA, 15 bp, Homo sapiens
tttgtcctagttctg

SEQ ID NO: 1421982 - DNA, 15 bp, Homo sapiens
atttgtcctagttct

SEQ ID NO: 1421983 - DNA, 15 bp, Homo sapiens
tatttgtcctagttc

SEQ ID NO: 1421984 - DNA, 15 bp, Homo sapiens
ttatttgtcctagtt

SEQ ID NO: 1421985 - DNA, 15 bp, Homo sapiens
cttatttgtcctagt

SEQ ID NO: 1421986 - DNA, 15 bp, Homo sapiens
ccttatttgtcctag

SEQ ID NO: 1421987 - DNA, 15 bp, Homo sapiens
cccttatttgtccta

SEQ ID NO: 1421988 - DNA, 15 bp, Homo sapiens
tcccttatttgtcct

SEQ ID NO: 1421989 - DNA, 15 bp, Homo sapiens
atcccttatttgtcc

SEQ ID NO: 1421990 - DNA, 15 bp, Homo sapiens
aatcccttatttgtc

SEQ ID NO: 1421991 - DNA, 15 bp, Homo sapiens
aaatcccttatttgt

SEQ ID NO: 1421992 - DNA, 15 bp, Homo sapiens
gaaatcccttatttg

SEQ ID NO: 1421993 - DNA, 15 bp, Homo sapiens
tgaaatcccttattt

SEQ ID NO: 1421994 - DNA, 15 bp, Homo sapiens
ctgaaatcccttatt

SEQ ID NO: 1421995 - DNA, 15 bp, Homo sapiens
actgaaatcccttat

SEQ ID NO: 1421996 - DNA, 15 bp, Homo sapiens
cactgaaatccctta

SEQ ID NO: 1421997 - DNA, 15 bp, Homo sapiens
gcactgaaatccctt

SEQ ID NO: 1421998 - DNA, 15 bp, Homo sapiens
tgcactgaaatccct

SEQ ID NO: 1421999 - DNA, 15 bp, Homo sapiens
ttgcactgaaatccc

SEQ ID NO: 1422000 - DNA, 15 bp, Homo sapiens
attgcactgaaatcc

SEQ ID NO: 1422001 - DNA, 15 bp, Homo sapiens
tattgcactgaaatc

SEQ ID NO: 1422002 - DNA, 15 bp, Homo sapiens
atattgcactgaaat

SEQ ID NO: 1422003 - DNA, 15 bp, Homo sapiens
aatattgcactgaaa

SEQ ID NO: 1422004 - DNA, 15 bp, Homo sapiens
taatattgcactgaa

SEQ ID NO: 1422005 - DNA, 15 bp, Homo sapiens
ttaatattgcactga

SEQ ID NO: 1422006 - DNA, 15 bp, Homo sapiens
tttaatattgcactg

SEQ ID NO: 1422007 - DNA, 15 bp, Homo sapiens
ttttaatattgcact

SEQ ID NO: 1422008 - DNA, 15 bp, Homo sapiens
tttttaatattgcac

SEQ ID NO: 1422009 - DNA, 15 bp, Homo sapiens
ctttttaatattgca

SEQ ID NO: 1422010 - DNA, 15 bp, Homo sapiens
actttttaatattgc

SEQ ID NO: 1422011 - DNA, 15 bp, Homo sapiens
tactttttaatattg

SEQ ID NO: 1422012 - DNA, 15 bp, Homo sapiens
ttactttttaatatt

SEQ ID NO: 1422013 - DNA, 15 bp, Homo sapiens
gttactttttaatat

SEQ ID NO: 1422014 - DNA, 15 bp, Homo sapiens
agttactttttaata

SEQ ID NO: 1422015 - DNA, 15 bp, Homo sapiens
cagttactttttaat

SEQ ID NO: 1422016 - DNA, 15 bp, Homo sapiens
tcagttactttttaa

SEQ ID NO: 1422017 - DNA, 15 bp, Homo sapiens
ctcagttacttttta

SEQ ID NO: 1422018 - DNA, 15 bp, Homo sapiens
actcagttacttttt

SEQ ID NO: 1422019 - DNA, 15 bp, Homo sapiens
aactcagttactttt

SEQ ID NO: 1422020 - DNA, 15 bp, Homo sapiens
taactcagttacttt

SEQ ID NO: 1422021 - DNA, 15 bp, Homo sapiens
ttaactcagttactt

SEQ ID NO: 1422022 - DNA, 15 bp, Homo sapiens
attaactcagttact

SEQ ID NO: 1422023 - DNA, 15 bp, Homo sapiens
aattaactcagttac

SEQ ID NO: 1422024 - DNA, 15 bp, Homo sapiens
gaattaactcagtta

SEQ ID NO: 1422025 - DNA, 15 bp, Homo sapiens
tgaattaactcagtt

SEQ ID NO: 1422026 - DNA, 15 bp, Homo sapiens
ctgaattaactcagt

SEQ ID NO: 1422027 - DNA, 15 bp, Homo sapiens
tctgaattaactcag

SEQ ID NO: 1422028 - DNA, 15 bp, Homo sapiens
atctgaattaactca

SEQ ID NO: 1422029 - DNA, 15 bp, Homo sapiens
aatctgaattaactc

SEQ ID NO: 1422030 - DNA, 15 bp, Homo sapiens
aaatctgaattaact

SEQ ID NO: 1422031 - DNA, 15 bp, Homo sapiens
aaaatctgaattaac

SEQ ID NO: 1422032 - DNA, 15 bp, Homo sapiens
aaaaatctgaattaa

SEQ ID NO: 1422033 - DNA, 15 bp, Homo sapiens
taaaaatctgaatta

SEQ ID NO: 1422034 - DNA, 15 bp, Homo sapiens
ttaaaaatctgaatt

SEQ ID NO: 1422035 - DNA, 15 bp, Homo sapiens
tttaaaaatctgaat

SEQ ID NO: 1422036 - DNA, 15 bp, Homo sapiens
atttaaaaatctgaa

SEQ ID NO: 1422037 - DNA, 15 bp, Homo sapiens
gatttaaaaatctga

SEQ ID NO: 1422038 - DNA, 15 bp, Homo sapiens
tgatttaaaaatctg

SEQ ID NO: 1422039 - DNA, 15 bp, Homo sapiens
ctgatttaaaaatct

SEQ ID NO: 1422040 - DNA, 15 bp, Homo sapiens
actgatttaaaaatc

SEQ ID NO: 1422041 - DNA, 15 bp, Homo sapiens
aactgatttaaaaat

SEQ ID NO: 1422042 - DNA, 15 bp, Homo sapiens
caactgatttaaaaa

SEQ ID NO: 1422043 - DNA, 15 bp, Homo sapiens
gcaactgatttaaaa

SEQ ID NO: 1422044 - DNA, 15 bp, Homo sapiens
agcaactgatttaaa

SEQ ID NO: 1422045 - DNA, 15 bp, Homo sapiens
aagcaactgatttaa

SEQ ID NO: 1422046 - DNA, 15 bp, Homo sapiens
aaagcaactgattta

SEQ ID NO: 1422047 - DNA, 15 bp, Homo sapiens
caaagcaactgattt

SEQ ID NO: 1422048 - DNA, 15 bp, Homo sapiens
acaaagcaactgatt

SEQ ID NO: 1422049 - DNA, 15 bp, Homo sapiens
tacaaagcaactgat

SEQ ID NO: 1422050 - DNA, 15 bp, Homo sapiens
ttacaaagcaactga

SEQ ID NO: 1422051 - DNA, 15 bp, Homo sapiens
cttacaaagcaactg

SEQ ID NO: 1422052 - DNA, 15 bp, Homo sapiens
ccttacaaagcaact

SEQ ID NO: 1422053 - DNA, 15 bp, Homo sapiens
gccttacaaagcaac

SEQ ID NO: 1422054 - DNA, 15 bp, Homo sapiens
cgccttacaaagcaa

SEQ ID NO: 1422055 - DNA, 15 bp, Homo sapiens
acgccttacaaagca

SEQ ID NO: 1422056 - DNA, 15 bp, Homo sapiens
aacgccttacaaagc

SEQ ID NO: 1422057 - DNA, 15 bp, Homo sapiens
taacgccttacaaag

SEQ ID NO: 1422058 - DNA, 15 bp, Homo sapiens
ctaacgccttacaaa

SEQ ID NO: 1422059 - DNA, 15 bp, Homo sapiens
tctaacgccttacaa

SEQ ID NO: 1422060 - DNA, 15 bp, Homo sapiens
atctaacgccttaca

SEQ ID NO: 1422061 - DNA, 15 bp, Homo sapiens
aatctaacgccttac

SEQ ID NO: 1422062 - DNA, 15 bp, Homo sapiens
aaatctaacgcctta

SEQ ID NO: 1422063 - DNA, 15 bp, Homo sapiens
taaatctaacgcctt

SEQ ID NO: 1422064 - DNA, 15 bp, Homo sapiens
ttaaatctaacgcct

SEQ ID NO: 1422065 - DNA, 15 bp, Homo sapiens
gttaaatctaacgcc

SEQ ID NO: 1422066 - DNA, 15 bp, Homo sapiens
agttaaatctaacgc

SEQ ID NO: 1422067 - DNA, 15 bp, Homo sapiens
aagttaaatctaacg

SEQ ID NO: 1422068 - DNA, 15 bp, Homo sapiens
gaagttaaatctaac

SEQ ID NO: 1422069 - DNA, 15 bp, Homo sapiens
tgaagttaaatctaa

SEQ ID NO: 1422070 - DNA, 15 bp, Homo sapiens
atgaagttaaatcta

SEQ ID NO: 1422071 - DNA, 15 bp, Homo sapiens
tatgaagttaaatct

SEQ ID NO: 1422072 - DNA, 15 bp, Homo sapiens
ctatgaagttaaatc

SEQ ID NO: 1422073 - DNA, 15 bp, Homo sapiens
cctatgaagttaaat

SEQ ID NO: 1422074 - DNA, 15 bp, Homo sapiens
tcctatgaagttaaa

SEQ ID NO: 1422075 - DNA, 15 bp, Homo sapiens
gtcctatgaagttaa

SEQ ID NO: 1422076 - DNA, 15 bp, Homo sapiens
tgtcctatgaagtta

SEQ ID NO: 1422077 - DNA, 15 bp, Homo sapiens
atgtcctatgaagtt

SEQ ID NO: 1422078 - DNA, 15 bp, Homo sapiens
tatgtcctatgaagt

SEQ ID NO: 1422079 - DNA, 15 bp, Homo sapiens
ttatgtcctatgaag

SEQ ID NO: 1422080 - DNA, 15 bp, Homo sapiens
gttatgtcctatgaa

SEQ ID NO: 1422081 - DNA, 15 bp, Homo sapiens
ggttatgtcctatga

SEQ ID NO: 1422082 - DNA, 15 bp, Homo sapiens
aggttatgtcctatg

SEQ ID NO: 1422083 - DNA, 15 bp, Homo sapiens
taggttatgtcctat

SEQ ID NO: 1422084 - DNA, 15 bp, Homo sapiens
ctaggttatgtccta

SEQ ID NO: 1422085 - DNA, 15 bp, Homo sapiens
cctaggttatgtcct

SEQ ID NO: 1422086 - DNA, 15 bp, Homo sapiens
tcctaggttatgtcc

SEQ ID NO: 1422087 - DNA, 15 bp, Homo sapiens
ctcctaggttatgtc

SEQ ID NO: 1422088 - DNA, 15 bp, Homo sapiens
tctcctaggttatgt

SEQ ID NO: 1422089 - DNA, 15 bp, Homo sapiens
ctctcctaggttatg

SEQ ID NO: 1422090 - DNA, 15 bp, Homo sapiens
tctctcctaggttat

SEQ ID NO: 1422091 - DNA, 15 bp, Homo sapiens
gtctctcctaggtta

SEQ ID NO: 1422092 - DNA, 15 bp, Homo sapiens
agtctctcctaggtt

SEQ ID NO: 1422093 - DNA, 15 bp, Homo sapiens
cagtctctcctaggt

SEQ ID NO: 1422094 - DNA, 15 bp, Homo sapiens
ccagtctctcctagg

SEQ ID NO: 1422095 - DNA, 15 bp, Homo sapiens
gccagtctctcctag

SEQ ID NO: 1422096 - DNA, 15 bp, Homo sapiens
agccagtctctccta

SEQ ID NO: 1422097 - DNA, 15 bp, Homo sapiens
cagccagtctctcct

SEQ ID NO: 1422098 - DNA, 15 bp, Homo sapiens
ccagccagtctctcc

SEQ ID NO: 1422099 - DNA, 15 bp, Homo sapiens
tccagccagtctctc

SEQ ID NO: 1422100 - DNA, 15 bp, Homo sapiens
atccagccagtctct

SEQ ID NO: 1422101 - DNA, 15 bp, Homo sapiens
tatccagccagtctc

SEQ ID NO: 1422102 - DNA, 15 bp, Homo sapiens
ctatccagccagtct

SEQ ID NO: 1422103 - DNA, 15 bp, Homo sapiens
actatccagccagtc

SEQ ID NO: 1422104 - DNA, 15 bp, Homo sapiens
cactatccagccagt

SEQ ID NO: 1422105 - DNA, 15 bp, Homo sapiens
acactatccagccag

SEQ ID NO: 1422106 - DNA, 15 bp, Homo sapiens
aacactatccagcca

SEQ ID NO: 1422107 - DNA, 15 bp, Homo sapiens
gaacactatccagcc

SEQ ID NO: 1422108 - DNA, 15 bp, Homo sapiens
agaacactatccagc

SEQ ID NO: 1422109 - DNA, 15 bp, Homo sapiens
cagaacactatccag

SEQ ID NO: 1422110 - DNA, 15 bp, Homo sapiens
acagaacactatcca

SEQ ID NO: 1422111 - DNA, 15 bp, Homo sapiens
cacagaacactatcc

SEQ ID NO: 1422112 - DNA, 15 bp, Homo sapiens
gcacagaacactatc

SEQ ID NO: 1422113 - DNA, 15 bp, Homo sapiens
tgcacagaacactat

SEQ ID NO: 1422114 - DNA, 15 bp, Homo sapiens
atgcacagaacacta

SEQ ID NO: 1422115 - DNA, 15 bp, Homo sapiens
tatgcacagaacact

SEQ ID NO: 1422116 - DNA, 15 bp, Homo sapiens
ttatgcacagaacac

SEQ ID NO: 1422117 - DNA, 15 bp, Homo sapiens
cttatgcacagaaca

SEQ ID NO: 1422118 - DNA, 15 bp, Homo sapiens
ccttatgcacagaac

SEQ ID NO: 1422119 - DNA, 15 bp, Homo sapiens
accttatgcacagaa

SEQ ID NO: 1422120 - DNA, 15 bp, Homo sapiens
taccttatgcacaga

SEQ ID NO: 1422121 - DNA, 15 bp, Homo sapiens
ttaccttatgcacag

SEQ ID NO: 1422122 - DNA, 15 bp, Homo sapiens
cttaccttatgcaca

SEQ ID NO: 1422123 - DNA, 15 bp, Homo sapiens
ccttaccttatgcac

SEQ ID NO: 1422124 - DNA, 15 bp, Homo sapiens
tccttaccttatgca

SEQ ID NO: 1422125 - DNA, 15 bp, Homo sapiens
ctccttaccttatgc

SEQ ID NO: 1422126 - DNA, 15 bp, Homo sapiens
actccttaccttatg

SEQ ID NO: 1422127 - DNA, 15 bp, Homo sapiens
aactccttaccttat

SEQ ID NO: 1422128 - DNA, 15 bp, Homo sapiens
caactccttacctta

SEQ ID NO: 1422129 - DNA, 15 bp, Homo sapiens
tcaactccttacctt

SEQ ID NO: 1422130 - DNA, 15 bp, Homo sapiens
ttcaactccttacct

SEQ ID NO: 1422131 - DNA, 15 bp, Homo sapiens
attcaactccttacc

SEQ ID NO: 1422132 - DNA, 15 bp, Homo sapiens
cattcaactccttac

SEQ ID NO: 1422133 - DNA, 15 bp, Homo sapiens
acattcaactcctta

SEQ ID NO: 1422134 - DNA, 15 bp, Homo sapiens
gacattcaactcctt

SEQ ID NO: 1422135 - DNA, 15 bp, Homo sapiens
agacattcaactcct

SEQ ID NO: 1422136 - DNA, 15 bp, Homo sapiens
aagacattcaactcc

SEQ ID NO: 1422137 - DNA, 15 bp, Homo sapiens
taagacattcaactc

SEQ ID NO: 1422138 - DNA, 15 bp, Homo sapiens
ttaagacattcaact

SEQ ID NO: 1422139 - DNA, 15 bp, Homo sapiens
attaagacattcaac

SEQ ID NO: 1422140 - DNA, 15 bp, Homo sapiens
cattaagacattcaa

SEQ ID NO: 1422141 - DNA, 15 bp, Homo sapiens
acattaagacattca

SEQ ID NO: 1422142 - DNA, 15 bp, Homo sapiens
aacattaagacattc

SEQ ID NO: 1422143 - DNA, 15 bp, Homo sapiens
gaacattaagacatt

SEQ ID NO: 1422144 - DNA, 15 bp, Homo sapiens
ggaacattaagacat

SEQ ID NO: 1422145 - DNA, 15 bp, Homo sapiens
aggaacattaagaca

SEQ ID NO: 1422146 - DNA, 15 bp, Homo sapiens
caggaacattaagac

SEQ ID NO: 1422147 - DNA, 15 bp, Homo sapiens
acaggaacattaaga

SEQ ID NO: 1422148 - DNA, 15 bp, Homo sapiens
cacaggaacattaag

SEQ ID NO: 1422149 - DNA, 15 bp, Homo sapiens
ccacaggaacattaa

SEQ ID NO: 1422150 - DNA, 15 bp, Homo sapiens
gccacaggaacatta

SEQ ID NO: 1422151 - DNA, 15 bp, Homo sapiens
agccacaggaacatt

SEQ ID NO: 1422152 - DNA, 15 bp, Homo sapiens
gagccacaggaacat

SEQ ID NO: 1422153 - DNA, 15 bp, Homo sapiens
tgagccacaggaaca

SEQ ID NO: 1422154 - DNA, 15 bp, Homo sapiens
atgagccacaggaac

SEQ ID NO: 1422155 - DNA, 15 bp, Homo sapiens
aatgagccacaggaa

SEQ ID NO: 1422156 - DNA, 15 bp, Homo sapiens
caatgagccacagga

SEQ ID NO: 1422157 - DNA, 15 bp, Homo sapiens
tcaatgagccacagg

SEQ ID NO: 1422158 - DNA, 15 bp, Homo sapiens
ttcaatgagccacag

SEQ ID NO: 1422159 - DNA, 15 bp, Homo sapiens
tttcaatgagccaca

SEQ ID NO: 1422160 - DNA, 15 bp, Homo sapiens
ttttcaatgagccac

SEQ ID NO: 1422161 - DNA, 15 bp, Homo sapiens
tttttcaatgagcca

SEQ ID NO: 1422162 - DNA, 15 bp, Homo sapiens
ctttttcaatgagcc

SEQ ID NO: 1422163 - DNA, 15 bp, Homo sapiens
actttttcaatgagc

SEQ ID NO: 1422164 - DNA, 15 bp, Homo sapiens
cactttttcaatgag

SEQ ID NO: 1422165 - DNA, 15 bp, Homo sapiens
acactttttcaatga

SEQ ID NO: 1422166 - DNA, 15 bp, Homo sapiens
aacactttttcaatg

SEQ ID NO: 1422167 - DNA, 15 bp, Homo sapiens
taacactttttcaat

SEQ ID NO: 1422168 - DNA, 15 bp, Homo sapiens
ttaacactttttcaa

SEQ ID NO: 1422169 - DNA, 15 bp, Homo sapiens
tttaacactttttca

SEQ ID NO: 1422170 - DNA, 15 bp, Homo sapiens
ctttaacactttttc

SEQ ID NO: 1422171 - DNA, 15 bp, Homo sapiens
actttaacacttttt

SEQ ID NO: 1422172 - DNA, 15 bp, Homo sapiens
tactttaacactttt

SEQ ID NO: 1422173 - DNA, 15 bp, Homo sapiens
ttactttaacacttt

SEQ ID NO: 1422174 - DNA, 15 bp, Homo sapiens
cttactttaacactt

SEQ ID NO: 1422175 - DNA, 15 bp, Homo sapiens
acttactttaacact

SEQ ID NO: 1422176 - DNA, 15 bp, Homo sapiens
cacttactttaacac

SEQ ID NO: 1422177 - DNA, 15 bp, Homo sapiens
tcacttactttaaca

SEQ ID NO: 1422178 - DNA, 15 bp, Homo sapiens
ctcacttactttaac

SEQ ID NO: 1422179 - DNA, 15 bp, Homo sapiens
tctcacttactttaa

SEQ ID NO: 1422180 - DNA, 15 bp, Homo sapiens
atctcacttacttta

SEQ ID NO: 1422181 - DNA, 15 bp, Homo sapiens
tatctcacttacttt

SEQ ID NO: 1422182 - DNA, 15 bp, Homo sapiens
ttatctcacttactt

SEQ ID NO: 1422183 - DNA, 15 bp, Homo sapiens
attatctcacttact

SEQ ID NO: 1422184 - DNA, 15 bp, Homo sapiens
aattatctcacttac

SEQ ID NO: 1422185 - DNA, 15 bp, Homo sapiens
taattatctcactta

SEQ ID NO: 1422186 - DNA, 15 bp, Homo sapiens
gtaattatctcactt

SEQ ID NO: 1422187 - DNA, 15 bp, Homo sapiens
agtaattatctcact

SEQ ID NO: 1422188 - DNA, 15 bp, Homo sapiens
cagtaattatctcac

SEQ ID NO: 1422189 - DNA, 15 bp, Homo sapiens
acagtaattatctca

SEQ ID NO: 1422190 - DNA, 15 bp, Homo sapiens
tacagtaattatctc

SEQ ID NO: 1422191 - DNA, 15 bp, Homo sapiens
atacagtaattatct

SEQ ID NO: 1422192 - DNA, 15 bp, Homo sapiens
aatacagtaattatc

SEQ ID NO: 1422193 - DNA, 15 bp, Homo sapiens
aaatacagtaattat

SEQ ID NO: 1422194 - DNA, 15 bp, Homo sapiens
gaaatacagtaatta

SEQ ID NO: 1422195 - DNA, 15 bp, Homo sapiens
tgctgaaatacagta

SEQ ID NO: 1422196 - DNA, 15 bp, Homo sapiens
ttgctgaaatacagt

SEQ ID NO: 1422197 - DNA, 15 bp, Homo sapiens
tttgctgaaatacag

SEQ ID NO: 1422198 - DNA, 15 bp, Homo sapiens
atttgctgaaataca

SEQ ID NO: 1422199 - DNA, 15 bp, Homo sapiens
gatttgctgaaatac

SEQ ID NO: 1422200 - DNA, 15 bp, Homo sapiens
agatttgctgaaata

SEQ ID NO: 1422201 - DNA, 15 bp, Homo sapiens
tagatttgctgaaat

SEQ ID NO: 1422202 - DNA, 15 bp, Homo sapiens
ttagatttgctgaaa

SEQ ID NO: 1422203 - DNA, 15 bp, Homo sapiens
attagatttgctgaa

SEQ ID NO: 1422204 - DNA, 15 bp, Homo sapiens
aattagatttgctga

SEQ ID NO: 1422205 - DNA, 15 bp, Homo sapiens
caattagatttgctg

SEQ ID NO: 1422206 - DNA, 15 bp, Homo sapiens
gcaattagatttgct

SEQ ID NO: 1422207 - DNA, 15 bp, Homo sapiens
ggcaattagatttgc

SEQ ID NO: 1422208 - DNA, 15 bp, Homo sapiens
tggcaattagatttg

SEQ ID NO: 1422209 - DNA, 15 bp, Homo sapiens
atggcaattagattt

SEQ ID NO: 1422210 - DNA, 15 bp, Homo sapiens
gatggcaattagatt

SEQ ID NO: 1422211 - DNA, 15 bp, Homo sapiens
tgatggcaattagat

SEQ ID NO: 1422212 - DNA, 15 bp, Homo sapiens
ttgatggcaattaga

SEQ ID NO: 1422213 - DNA, 15 bp, Homo sapiens
attgatggcaattag

SEQ ID NO: 1422214 - DNA, 15 bp, Homo sapiens
aattgatggcaatta

SEQ ID NO: 1422215 - DNA, 15 bp, Homo sapiens
caattgatggcaatt

SEQ ID NO: 1422216 - DNA, 15 bp, Homo sapiens
acaattgatggcaat

SEQ ID NO: 1422217 - DNA, 15 bp, Homo sapiens
tacaattgatggcaa

SEQ ID NO: 1422218 - DNA, 15 bp, Homo sapiens
ttacaattgatggca

SEQ ID NO: 1422219 - DNA, 15 bp, Homo sapiens
cttacaattgatggc

SEQ ID NO: 1422220 - DNA, 15 bp, Homo sapiens
ccttacaattgatgg

SEQ ID NO: 1422221 - DNA, 15 bp, Homo sapiens
cccttacaattgatg

SEQ ID NO: 1422222 - DNA, 15 bp, Homo sapiens
tcccttacaattgat

SEQ ID NO: 1422223 - DNA, 15 bp, Homo sapiens
gtcccttacaattga

SEQ ID NO: 1422224 - DNA, 15 bp, Homo sapiens
tgtcccttacaattg

SEQ ID NO: 1422225 - DNA, 15 bp, Homo sapiens
gtgtcccttacaatt

SEQ ID NO: 1422226 - DNA, 15 bp, Homo sapiens
ggtgtcccttacaat

SEQ ID NO: 1422227 - DNA, 15 bp, Homo sapiens
tggtgtcccttacaa

SEQ ID NO: 1422228 - DNA, 15 bp, Homo sapiens
atggtgtcccttaca

SEQ ID NO: 1422229 - DNA, 15 bp, Homo sapiens
aatggtgtcccttac

SEQ ID NO: 1422230 - DNA, 15 bp, Homo sapiens
aaatggtgtccctta

SEQ ID NO: 1422231 - DNA, 15 bp, Homo sapiens
aaaatggtgtccctt

SEQ ID NO: 1422232 - DNA, 15 bp, Homo sapiens
taaaatggtgtccct

SEQ ID NO: 1422233 - DNA, 15 bp, Homo sapiens
ataaaatggtgtccc

SEQ ID NO: 1422234 - DNA, 15 bp, Homo sapiens
cataaaatggtgtcc

SEQ ID NO: 1422235 - DNA, 15 bp, Homo sapiens
acataaaatggtgtc

SEQ ID NO: 1422236 - DNA, 15 bp, Homo sapiens
tacataaaatggtgt

SEQ ID NO: 1422237 - DNA, 15 bp, Homo sapiens
gtacataaaatggtg

SEQ ID NO: 1422238 - DNA, 15 bp, Homo sapiens
ggtacataaaatggt

SEQ ID NO: 1422239 - DNA, 15 bp, Homo sapiens
tggtacataaaatgg

SEQ ID NO: 1422240 - DNA, 15 bp, Homo sapiens
gtggtacataaaatg

SEQ ID NO: 1422241 - DNA, 15 bp, Homo sapiens
agtggtacataaaat

SEQ ID NO: 1422242 - DNA, 15 bp, Homo sapiens
tagtggtacataaaa

SEQ ID NO: 1422243 - DNA, 15 bp, Homo sapiens
ttagtggtacataaa

SEQ ID NO: 1422244 - DNA, 15 bp, Homo sapiens
cttagtggtacataa

SEQ ID NO: 1422245 - DNA, 15 bp, Homo sapiens
tcttagtggtacata

SEQ ID NO: 1422246 - DNA, 15 bp, Homo sapiens
gtcttagtggtacat

SEQ ID NO: 1422247 - DNA, 15 bp, Homo sapiens
tgtcttagtggtaca

SEQ ID NO: 1422248 - DNA, 15 bp, Homo sapiens
ttgtcttagtggtac

SEQ ID NO: 1422249 - DNA, 15 bp, Homo sapiens
cttgtcttagtggta

SEQ ID NO: 1422250 - DNA, 15 bp, Homo sapiens
gcttgtcttagtggt

SEQ ID NO: 1422251 - DNA, 15 bp, Homo sapiens
agcttgtcttagtgg

SEQ ID NO: 1422252 - DNA, 15 bp, Homo sapiens
cagcttgtcttagtg

SEQ ID NO: 1422253 - DNA, 15 bp, Homo sapiens
gcagcttgtcttagt

SEQ ID NO: 1422254 - DNA, 15 bp, Homo sapiens
ggcagcttgtcttag

SEQ ID NO: 1422255 - DNA, 15 bp, Homo sapiens
tggcagcttgtctta

SEQ ID NO: 1422256 - DNA, 15 bp, Homo sapiens
ttggcagcttgtctt

SEQ ID NO: 1422257 - DNA, 15 bp, Homo sapiens
attggcagcttgtct

SEQ ID NO: 1422258 - DNA, 15 bp, Homo sapiens
aattggcagcttgtc

SEQ ID NO: 1422259 - DNA, 15 bp, Homo sapiens
taattggcagcttgt

SEQ ID NO: 1422260 - DNA, 15 bp, Homo sapiens
gtaattggcagcttg

SEQ ID NO: 1422261 - DNA, 15 bp, Homo sapiens
tgtaattggcagctt

SEQ ID NO: 1422262 - DNA, 15 bp, Homo sapiens
ctgtaattggcagct

SEQ ID NO: 1422263 - DNA, 15 bp, Homo sapiens
tctgtaattggcagc

SEQ ID NO: 1422264 - DNA, 15 bp, Homo sapiens
ttctgtaattggcag

SEQ ID NO: 1422265 - DNA, 15 bp, Homo sapiens
attctgtaattggca

SEQ ID NO: 1422266 - DNA, 15 bp, Homo sapiens
cattctgtaattggc

SEQ ID NO: 1422267 - DNA, 15 bp, Homo sapiens
acattctgtaattgg

SEQ ID NO: 1422268 - DNA, 15 bp, Homo sapiens
tacattctgtaattg

SEQ ID NO: 1422269 - DNA, 15 bp, Homo sapiens
atacattctgtaatt

SEQ ID NO: 1422270 - DNA, 15 bp, Homo sapiens
gatacattctgtaat

SEQ ID NO: 1422271 - DNA, 15 bp, Homo sapiens
agatacattctgtaa

SEQ ID NO: 1422272 - DNA, 15 bp, Homo sapiens
tagatacattctgta

SEQ ID NO: 1422273 - DNA, 15 bp, Homo sapiens
atagatacattctgt

SEQ ID NO: 1422274 - DNA, 15 bp, Homo sapiens
aatagatacattctg

SEQ ID NO: 1422275 - DNA, 15 bp, Homo sapiens
taatagatacattct

SEQ ID NO: 1422276 - DNA, 15 bp, Homo sapiens
ataatagatacattc

SEQ ID NO: 1422277 - DNA, 15 bp, Homo sapiens
cataatagatacatt

SEQ ID NO: 1422278 - DNA, 15 bp, Homo sapiens
acataatagatacat

SEQ ID NO: 1422279 - DNA, 15 bp, Homo sapiens
cacataatagataca

SEQ ID NO: 1422280 - DNA, 15 bp, Homo sapiens
tcacataatagatac

SEQ ID NO: 1422281 - DNA, 15 bp, Homo sapiens
ttcacataatagata

SEQ ID NO: 1422282 - DNA, 15 bp, Homo sapiens
cttcacataatagat

SEQ ID NO: 1422283 - DNA, 15 bp, Homo sapiens
tcttcacataataga

SEQ ID NO: 1422284 - DNA, 15 bp, Homo sapiens
ttcttcacataatag

SEQ ID NO: 1422285 - DNA, 15 bp, Homo sapiens
tttcttcacataata

SEQ ID NO: 1422286 - DNA, 15 bp, Homo sapiens
ctttcttcacataat

SEQ ID NO: 1422287 - DNA, 15 bp, Homo sapiens
tctttcttcacataa

SEQ ID NO: 1422288 - DNA, 15 bp, Homo sapiens
gttctttcttcacat

SEQ ID NO: 1422289 - DNA, 15 bp, Homo sapiens
cgttctttcttcaca

SEQ ID NO: 1422290 - DNA, 15 bp, Homo sapiens
acgttctttcttcac

SEQ ID NO: 1422291 - DNA, 15 bp, Homo sapiens
cacgttctttcttca

SEQ ID NO: 1422292 - DNA, 15 bp, Homo sapiens
gcacgttctttcttc

SEQ ID NO: 1422293 - DNA, 15 bp, Homo sapiens
tgcacgttctttctt

SEQ ID NO: 1422294 - DNA, 15 bp, Homo sapiens
atgcacgttctttct

SEQ ID NO: 1422295 - DNA, 15 bp, Homo sapiens
gatgcacgttctttc

SEQ ID NO: 1422296 - DNA, 15 bp, Homo sapiens
agatgcacgttcttt

SEQ ID NO: 1422297 - DNA, 15 bp, Homo sapiens
aagatgcacgttctt

SEQ ID NO: 1422298 - DNA, 15 bp, Homo sapiens
taagatgcacgttct

SEQ ID NO: 1422299 - DNA, 15 bp, Homo sapiens
ctaagatgcacgttc

SEQ ID NO: 1422300 - DNA, 15 bp, Homo sapiens
tctaagatgcacgtt

SEQ ID NO: 1422301 - DNA, 15 bp, Homo sapiens
ttctaagatgcacgt

SEQ ID NO: 1422302 - DNA, 15 bp, Homo sapiens
attctaagatgcacg

SEQ ID NO: 1422303 - DNA, 15 bp, Homo sapiens
aattctaagatgcac

SEQ ID NO: 1422304 - DNA, 15 bp, Homo sapiens
caattctaagatgca

SEQ ID NO: 1422305 - DNA, 15 bp, Homo sapiens
tcaattctaagatgc

SEQ ID NO: 1422306 - DNA, 15 bp, Homo sapiens
atcaattctaagatg

SEQ ID NO: 1422307 - DNA, 15 bp, Homo sapiens
catcaattctaagat

SEQ ID NO: 1422308 - DNA, 15 bp, Homo sapiens
tcatcaattctaaga

SEQ ID NO: 1422309 - DNA, 15 bp, Homo sapiens
ctcatcaattctaag

SEQ ID NO: 1422310 - DNA, 15 bp, Homo sapiens
tctcatcaattctaa

SEQ ID NO: 1422311 - DNA, 15 bp, Homo sapiens
atctcatcaattcta

SEQ ID NO: 1422312 - DNA, 15 bp, Homo sapiens
catctcatcaattct

SEQ ID NO: 1422313 - DNA, 15 bp, Homo sapiens
acatctcatcaattc

SEQ ID NO: 1422314 - DNA, 15 bp, Homo sapiens
tacatctcatcaatt

SEQ ID NO: 1422315 - DNA, 15 bp, Homo sapiens
ctacatctcatcaat

SEQ ID NO: 1422316 - DNA, 15 bp, Homo sapiens
cctacatctcatcaa

SEQ ID NO: 1422317 - DNA, 15 bp, Homo sapiens
acctacatctcatca

SEQ ID NO: 1422318 - DNA, 15 bp, Homo sapiens
gacctacatctcatc

SEQ ID NO: 1422319 - DNA, 15 bp, Homo sapiens
agacctacatctcat

SEQ ID NO: 1422320 - DNA, 15 bp, Homo sapiens
aagacctacatctca

SEQ ID NO: 1422321 - DNA, 15 bp, Homo sapiens
caagacctacatctc

SEQ ID NO: 1422322 - DNA, 15 bp, Homo sapiens
ccaagacctacatct

SEQ ID NO: 1422323 - DNA, 15 bp, Homo sapiens
tccaagacctacatc

SEQ ID NO: 1422324 - DNA, 15 bp, Homo sapiens
ctccaagacctacat

SEQ ID NO: 1422325 - DNA, 15 bp, Homo sapiens
tctccaagacctaca

SEQ ID NO: 1422326 - DNA, 15 bp, Homo sapiens
gtctccaagacctac

SEQ ID NO: 1422327 - DNA, 15 bp, Homo sapiens
tgtctccaagaccta

SEQ ID NO: 1422328 - DNA, 15 bp, Homo sapiens
ttgtctccaagacct

SEQ ID NO: 1422329 - DNA, 15 bp, Homo sapiens
gttgtctccaagacc

SEQ ID NO: 1422330 - DNA, 15 bp, Homo sapiens
agttgtctccaagac

SEQ ID NO: 1422331 - DNA, 15 bp, Homo sapiens
tagttgtctccaaga

SEQ ID NO: 1422332 - DNA, 15 bp, Homo sapiens
ttagttgtctccaag

SEQ ID NO: 1422333 - DNA, 15 bp, Homo sapiens
tttagttgtctccaa

SEQ ID NO: 1422334 - DNA, 15 bp, Homo sapiens
ctttagttgtctcca

SEQ ID NO: 1422335 - DNA, 15 bp, Homo sapiens
tctttagttgtctcc

SEQ ID NO: 1422336 - DNA, 15 bp, Homo sapiens
ttctttagttgtctc

SEQ ID NO: 1422337 - DNA, 15 bp, Homo sapiens
attctttagttgtct

SEQ ID NO: 1422338 - DNA, 15 bp, Homo sapiens
tattctttagttgtc

SEQ ID NO: 1422339 - DNA, 15 bp, Homo sapiens
gtattctttagttgt

SEQ ID NO: 1422340 - DNA, 15 bp, Homo sapiens
agtattctttagttg

SEQ ID NO: 1422341 - DNA, 15 bp, Homo sapiens
tagtattctttagtt

SEQ ID NO: 1422342 - DNA, 15 bp, Homo sapiens
ttagtattctttagt

SEQ ID NO: 1422343 - DNA, 15 bp, Homo sapiens
cttagtattctttag

SEQ ID NO: 1422344 - DNA, 15 bp, Homo sapiens
ccttagtattcttta

SEQ ID NO: 1422345 - DNA, 15 bp, Homo sapiens
cccttagtattcttt

SEQ ID NO: 1422346 - DNA, 15 bp, Homo sapiens
ccccttagtattctt

SEQ ID NO: 1422347 - DNA, 15 bp, Homo sapiens
tccccttagtattct

SEQ ID NO: 1422348 - DNA, 15 bp, Homo sapiens
ctccccttagtattc

SEQ ID NO: 1422349 - DNA, 15 bp, Homo sapiens
cctccccttagtatt

SEQ ID NO: 1422350 - DNA, 15 bp, Homo sapiens
gcctccccttagtat

SEQ ID NO: 1422351 - DNA, 15 bp, Homo sapiens
tgcctccccttagta

SEQ ID NO: 1422352 - DNA, 15 bp, Homo sapiens
atgcctccccttagt

SEQ ID NO: 1422353 - DNA, 15 bp, Homo sapiens
catgcctccccttag

SEQ ID NO: 1422354 - DNA, 15 bp, Homo sapiens
tcatgcctcccctta

SEQ ID NO: 1422355 - DNA, 15 bp, Homo sapiens
gtcatgcctcccctt

SEQ ID NO: 1422356 - DNA, 15 bp, Homo sapiens
tgtcatgcctcccct

SEQ ID NO: 1422357 - DNA, 15 bp, Homo sapiens
ctgtcatgcctcccc

SEQ ID NO: 1422358 - DNA, 15 bp, Homo sapiens
actgtcatgcctccc

SEQ ID NO: 1422359 - DNA, 15 bp, Homo sapiens
aactgtcatgcctcc

SEQ ID NO: 1422360 - DNA, 15 bp, Homo sapiens
caactgtcatgcctc

SEQ ID NO: 1422361 - DNA, 15 bp, Homo sapiens
acaactgtcatgcct

SEQ ID NO: 1422362 - DNA, 15 bp, Homo sapiens
gacaactgtcatgcc

SEQ ID NO: 1422363 - DNA, 15 bp, Homo sapiens
tgacaactgtcatgc

SEQ ID NO: 1422364 - DNA, 15 bp, Homo sapiens
atgacaactgtcatg

SEQ ID NO: 1422365 - DNA, 15 bp, Homo sapiens
gatgacaactgtcat

SEQ ID NO: 1422366 - DNA, 15 bp, Homo sapiens
tgatgacaactgtca

SEQ ID NO: 1422367 - DNA, 15 bp, Homo sapiens
ttgatgacaactgtc

SEQ ID NO: 1422368 - DNA, 15 bp, Homo sapiens
tttgatgacaactgt

SEQ ID NO: 1422369 - DNA, 15 bp, Homo sapiens
gtttgatgacaactg

SEQ ID NO: 1422370 - DNA, 15 bp, Homo sapiens
tgtttgatgacaact

SEQ ID NO: 1422371 - DNA, 15 bp, Homo sapiens
gtgtttgatgacaac

SEQ ID NO: 1422372 - DNA, 15 bp, Homo sapiens
tgtgtttgatgacaa

SEQ ID NO: 1422373 - DNA, 15 bp, Homo sapiens
ctgtgtttgatgaca

SEQ ID NO: 1422374 - DNA, 15 bp, Homo sapiens
cctgtgtttgatgac

SEQ ID NO: 1422375 - DNA, 15 bp, Homo sapiens
tcctgtgtttgatga

SEQ ID NO: 1422376 - DNA, 15 bp, Homo sapiens
ttcctgtgtttgatg

SEQ ID NO: 1422377 - DNA, 15 bp, Homo sapiens
cttcctgtgtttgat

SEQ ID NO: 1422378 - DNA, 15 bp, Homo sapiens
tcttcctgtgtttga

SEQ ID NO: 1422379 - DNA, 15 bp, Homo sapiens
ttcttcctgtgtttg

SEQ ID NO: 1422380 - DNA, 15 bp, Homo sapiens
gttcttcctgtgttt

SEQ ID NO: 1422381 - DNA, 15 bp, Homo sapiens
agttcttcctgtgtt

SEQ ID NO: 1422382 - DNA, 15 bp, Homo sapiens
cagttcttcctgtgt

SEQ ID NO: 1422383 - DNA, 15 bp, Homo sapiens
ccagttcttcctgtg

SEQ ID NO: 1422384 - DNA, 15 bp, Homo sapiens
tccagttcttcctgt

SEQ ID NO: 1422385 - DNA, 15 bp, Homo sapiens
ttccagttcttcctg

SEQ ID NO: 1422386 - DNA, 15 bp, Homo sapiens
attccagttcttcct

SEQ ID NO: 1422387 - DNA, 15 bp, Homo sapiens
tattccagttcttcc

SEQ ID NO: 1422388 - DNA, 15 bp, Homo sapiens
ctattccagttcttc

SEQ ID NO: 1422389 - DNA, 15 bp, Homo sapiens
cctattccagttctt

SEQ ID NO: 1422390 - DNA, 15 bp, Homo sapiens
ccctattccagttct

SEQ ID NO: 1422391 - DNA, 15 bp, Homo sapiens
gccctattccagttc

SEQ ID NO: 1422392 - DNA, 15 bp, Homo sapiens
tgccctattccagtt

SEQ ID NO: 1422393 - DNA, 15 bp, Homo sapiens
ttgccctattccagt

SEQ ID NO: 1422394 - DNA, 15 bp, Homo sapiens
cttgccctattccag

SEQ ID NO: 1422395 - DNA, 15 bp, Homo sapiens
acttgccctattcca

SEQ ID NO: 1422396 - DNA, 15 bp, Homo sapiens
gacttgccctattcc

SEQ ID NO: 1422397 - DNA, 15 bp, Homo sapiens
agacttgccctattc

SEQ ID NO: 1422398 - DNA, 15 bp, Homo sapiens
gagacttgccctatt

SEQ ID NO: 1422399 - DNA, 15 bp, Homo sapiens
tgagacttgccctat

SEQ ID NO: 1422400 - DNA, 15 bp, Homo sapiens
ttgagacttgcccta

SEQ ID NO: 1422401 - DNA, 15 bp, Homo sapiens
tttgagacttgccct

SEQ ID NO: 1422402 - DNA, 15 bp, Homo sapiens
gtttgagacttgccc

SEQ ID NO: 1422403 - DNA, 15 bp, Homo sapiens
ggtttgagacttgcc

SEQ ID NO: 1422404 - DNA, 15 bp, Homo sapiens
tggtttgagacttgc

SEQ ID NO: 1422405 - DNA, 15 bp, Homo sapiens
ttggtttgagacttg

SEQ ID NO: 1422406 - DNA, 15 bp, Homo sapiens
attggtttgagactt

SEQ ID NO: 1422407 - DNA, 15 bp, Homo sapiens
tattggtttgagact

SEQ ID NO: 1422408 - DNA, 15 bp, Homo sapiens
ttattggtttgagac

SEQ ID NO: 1422409 - DNA, 15 bp, Homo sapiens
cttattggtttgaga

SEQ ID NO: 1422410 - DNA, 15 bp, Homo sapiens
ccttattggtttgag

SEQ ID NO: 1422411 - DNA, 15 bp, Homo sapiens
tccttattggtttga

SEQ ID NO: 1422412 - DNA, 15 bp, Homo sapiens
ctccttattggtttg

SEQ ID NO: 1422413 - DNA, 15 bp, Homo sapiens
tctccttattggttt

SEQ ID NO: 1422414 - DNA, 15 bp, Homo sapiens
ttctccttattggtt

SEQ ID NO: 1422415 - DNA, 15 bp, Homo sapiens
cttctccttattggt

SEQ ID NO: 1422416 - DNA, 15 bp, Homo sapiens
acttctccttattgg

SEQ ID NO: 1422417 - DNA, 15 bp, Homo sapiens
aacttctccttattg

SEQ ID NO: 1422418 - DNA, 15 bp, Homo sapiens
caacttctccttatt

SEQ ID NO: 1422419 - DNA, 15 bp, Homo sapiens
tcaacttctccttat

SEQ ID NO: 1422420 - DNA, 15 bp, Homo sapiens
ttcaacttctcctta

SEQ ID NO: 1422421 - DNA, 15 bp, Homo sapiens
attcaacttctcctt

SEQ ID NO: 1422422 - DNA, 15 bp, Homo sapiens
cattcaacttctcct

SEQ ID NO: 1422423 - DNA, 15 bp, Homo sapiens
tcattcaacttctcc

SEQ ID NO: 1422424 - DNA, 15 bp, Homo sapiens
ttcattcaacttctc

SEQ ID NO: 1422425 - DNA, 15 bp, Homo sapiens
tttcattcaacttct

SEQ ID NO: 1422426 - DNA, 15 bp, Homo sapiens
gtttcattcaacttc

SEQ ID NO: 1422427 - DNA, 15 bp, Homo sapiens
tgtttcattcaactt

SEQ ID NO: 1422428 - DNA, 15 bp, Homo sapiens
ctgtttcattcaact

SEQ ID NO: 1422429 - DNA, 15 bp, Homo sapiens
tctgtttcattcaac

SEQ ID NO: 1422430 - DNA, 15 bp, Homo sapiens
gtctgtttcattcaa

SEQ ID NO: 1422431 - DNA, 15 bp, Homo sapiens
agtctgtttcattca

SEQ ID NO: 1422432 - DNA, 15 bp, Homo sapiens
aagtctgtttcattc

SEQ ID NO: 1422433 - DNA, 15 bp, Homo sapiens
aaagtctgtttcatt

SEQ ID NO: 1422434 - DNA, 15 bp, Homo sapiens
aaaagtctgtttcat

SEQ ID NO: 1422435 - DNA, 15 bp, Homo sapiens
aaaaagtctgtttca

SEQ ID NO: 1422436 - DNA, 15 bp, Homo sapiens
gaaaaagtctgtttc

SEQ ID NO: 1422437 - DNA, 15 bp, Homo sapiens
agaaaaagtctgttt

SEQ ID NO: 1422438 - DNA, 15 bp, Homo sapiens
tagaaaaagtctgtt

SEQ ID NO: 1422439 - DNA, 15 bp, Homo sapiens
atagaaaaagtctgt

SEQ ID NO: 1422440 - DNA, 15 bp, Homo sapiens
tatagaaaaagtctg

SEQ ID NO: 1422441 - DNA, 15 bp, Homo sapiens
atatagaaaaagtct

SEQ ID NO: 1422442 - DNA, 15 bp, Homo sapiens
aatatagaaaaagtc

SEQ ID NO: 1422443 - DNA, 15 bp, Homo sapiens
taatatagaaaaagt

SEQ ID NO: 1422444 - DNA, 15 bp, Homo sapiens
ttaatatagaaaaag

SEQ ID NO: 1422445 - DNA, 15 bp, Homo sapiens
cttaatatagaaaaa

SEQ ID NO: 1422446 - DNA, 15 bp, Homo sapiens
ccttaatatagaaaa

SEQ ID NO: 1422447 - DNA, 15 bp, Homo sapiens
accttaatatagaaa

SEQ ID NO: 1422448 - DNA, 15 bp, Homo sapiens
caccttaatatagaa

SEQ ID NO: 1422449 - DNA, 15 bp, Homo sapiens
gcaccttaatataga

SEQ ID NO: 1422450 - DNA, 15 bp, Homo sapiens
agcaccttaatatag

SEQ ID NO: 1422451 - DNA, 15 bp, Homo sapiens
tagcaccttaatata

SEQ ID NO: 1422452 - DNA, 15 bp, Homo sapiens
gtagcaccttaatat

SEQ ID NO: 1422453 - DNA, 15 bp, Homo sapiens
tgtagcaccttaata

SEQ ID NO: 1422454 - DNA, 15 bp, Homo sapiens
gtgtagcaccttaat

SEQ ID NO: 1422455 - DNA, 15 bp, Homo sapiens
tgtgtagcaccttaa

SEQ ID NO: 1422456 - DNA, 15 bp, Homo sapiens
ctgtgtagcacctta

SEQ ID NO: 1422457 - DNA, 15 bp, Homo sapiens
actgtgtagcacctt

SEQ ID NO: 1422458 - DNA, 15 bp, Homo sapiens
tactgtgtagcacct

SEQ ID NO: 1422459 - DNA, 15 bp, Homo sapiens
gtactgtgtagcacc

SEQ ID NO: 1422460 - DNA, 15 bp, Homo sapiens
agtactgtgtagcac

SEQ ID NO: 1422461 - DNA, 15 bp, Homo sapiens
tagtactgtgtagca

SEQ ID NO: 1422462 - DNA, 15 bp, Homo sapiens
ctagtactgtgtagc

SEQ ID NO: 1422463 - DNA, 15 bp, Homo sapiens
gctagtactgtgtag

SEQ ID NO: 1422464 - DNA, 15 bp, Homo sapiens
agctagtactgtgta

SEQ ID NO: 1422465 - DNA, 15 bp, Homo sapiens
cagctagtactgtgt

SEQ ID NO: 1422466 - DNA, 15 bp, Homo sapiens
gcagctagtactgtg

SEQ ID NO: 1422467 - DNA, 15 bp, Homo sapiens
agcagctagtactgt

SEQ ID NO: 1422468 - DNA, 15 bp, Homo sapiens
aagcagctagtactg

SEQ ID NO: 1422469 - DNA, 15 bp, Homo sapiens
gaagcagctagtact

SEQ ID NO: 1422470 - DNA, 15 bp, Homo sapiens
tgaagcagctagtac

SEQ ID NO: 1422471 - DNA, 15 bp, Homo sapiens
atgaagcagctagta

SEQ ID NO: 1422472 - DNA, 15 bp, Homo sapiens
catgaagcagctagt

SEQ ID NO: 1422473 - DNA, 15 bp, Homo sapiens
tcatgaagcagctag

SEQ ID NO: 1422474 - DNA, 15 bp, Homo sapiens
ttcatgaagcagcta

SEQ ID NO: 1422475 - DNA, 15 bp, Homo sapiens
cttcatgaagcagct

SEQ ID NO: 1422476 - DNA, 15 bp, Homo sapiens
acttcatgaagcagc

SEQ ID NO: 1422477 - DNA, 15 bp, Homo sapiens
tacttcatgaagcag

SEQ ID NO: 1422478 - DNA, 15 bp, Homo sapiens
ttacttcatgaagca

SEQ ID NO: 1422479 - DNA, 15 bp, Homo sapiens
tttacttcatgaagc

SEQ ID NO: 1422480 - DNA, 15 bp, Homo sapiens
ctttacttcatgaag

SEQ ID NO: 1422481 - DNA, 15 bp, Homo sapiens
cctttacttcatgaa

SEQ ID NO: 1422482 - DNA, 15 bp, Homo sapiens
acctttacttcatga

SEQ ID NO: 1422483 - DNA, 15 bp, Homo sapiens
aacctttacttcatg

SEQ ID NO: 1422484 - DNA, 15 bp, Homo sapiens
gaacctttacttcat

SEQ ID NO: 1422485 - DNA, 15 bp, Homo sapiens
tgaacctttacttca

SEQ ID NO: 1422486 - DNA, 15 bp, Homo sapiens
ctgaacctttacttc

SEQ ID NO: 1422487 - DNA, 15 bp, Homo sapiens
actgaacctttactt

SEQ ID NO: 1422488 - DNA, 15 bp, Homo sapiens
gactgaacctttact

SEQ ID NO: 1422489 - DNA, 15 bp, Homo sapiens
tgactgaacctttac

SEQ ID NO: 1422490 - DNA, 15 bp, Homo sapiens
ttgactgaaccttta

SEQ ID NO: 1422491 - DNA, 15 bp, Homo sapiens
attgactgaaccttt

SEQ ID NO: 1422492 - DNA, 15 bp, Homo sapiens
cattgactgaacctt

SEQ ID NO: 1422493 - DNA, 15 bp, Homo sapiens
acattgactgaacct

SEQ ID NO: 1422494 - DNA, 15 bp, Homo sapiens
cacattgactgaacc

SEQ ID NO: 1422495 - DNA, 15 bp, Homo sapiens
gcacattgactgaac

SEQ ID NO: 1422496 - DNA, 15 bp, Homo sapiens
tgcacattgactgaa

SEQ ID NO: 1422497 - DNA, 15 bp, Homo sapiens
ttgcacattgactga

SEQ ID NO: 1422498 - DNA, 15 bp, Homo sapiens
tttgcacattgactg

SEQ ID NO: 1422499 - DNA, 15 bp, Homo sapiens
gtttgcacattgact

SEQ ID NO: 1422500 - DNA, 15 bp, Homo sapiens
tgtttgcacattgac

SEQ ID NO: 1422501 - DNA, 15 bp, Homo sapiens
ttgtttgcacattga

SEQ ID NO: 1422502 - DNA, 15 bp, Homo sapiens
tttgtttgcacattg

SEQ ID NO: 1422503 - DNA, 15 bp, Homo sapiens
gtttgtttgcacatt

SEQ ID NO: 1422504 - DNA, 15 bp, Homo sapiens
agtttgtttgcacat

SEQ ID NO: 1422505 - DNA, 15 bp, Homo sapiens
cagtttgtttgcaca

SEQ ID NO: 1422506 - DNA, 15 bp, Homo sapiens
tcagtttgtttgcac

SEQ ID NO: 1422507 - DNA, 15 bp, Homo sapiens
ttcagtttgtttgca

SEQ ID NO: 1422508 - DNA, 15 bp, Homo sapiens
attcagtttgtttgc

SEQ ID NO: 1422509 - DNA, 15 bp, Homo sapiens
cattcagtttgtttg

SEQ ID NO: 1422510 - DNA, 15 bp, Homo sapiens
tcattcagtttgttt

SEQ ID NO: 1422511 - DNA, 15 bp, Homo sapiens
gtcattcagtttgtt

SEQ ID NO: 1422512 - DNA, 15 bp, Homo sapiens
agtcattcagtttgt

SEQ ID NO: 1422513 - DNA, 15 bp, Homo sapiens
gagtcattcagtttg

SEQ ID NO: 1422514 - DNA, 15 bp, Homo sapiens
agagtcattcagttt

SEQ ID NO: 1422515 - DNA, 15 bp, Homo sapiens
gagagtcattcagtt

SEQ ID NO: 1422516 - DNA, 15 bp, Homo sapiens
tgagagtcattcagt

SEQ ID NO: 1422517 - DNA, 15 bp, Homo sapiens
ttgagagtcattcag

SEQ ID NO: 1422518 - DNA, 15 bp, Homo sapiens
attgagagtcattca

SEQ ID NO: 1422519 - DNA, 15 bp, Homo sapiens
aattgagagtcattc

SEQ ID NO: 1422520 - DNA, 15 bp, Homo sapiens
taattgagagtcatt

SEQ ID NO: 1422521 - DNA, 15 bp, Homo sapiens
ctaattgagagtcat

SEQ ID NO: 1422522 - DNA, 15 bp, Homo sapiens
actaattgagagtca

SEQ ID NO: 1422523 - DNA, 15 bp, Homo sapiens
aactaattgagagtc

SEQ ID NO: 1422524 - DNA, 15 bp, Homo sapiens
caactaattgagagt

SEQ ID NO: 1422525 - DNA, 15 bp, Homo sapiens
tcaactaattgagag

SEQ ID NO: 1422526 - DNA, 15 bp, Homo sapiens
gtcaactaattgaga

SEQ ID NO: 1422527 - DNA, 15 bp, Homo sapiens
tgtcaactaattgag

SEQ ID NO: 1422528 - DNA, 15 bp, Homo sapiens
ctgtcaactaattga

SEQ ID NO: 1422529 - DNA, 15 bp, Homo sapiens
cctgtcaactaattg

SEQ ID NO: 1422530 - DNA, 15 bp, Homo sapiens
tcctgtcaactaatt

SEQ ID NO: 1422531 - DNA, 15 bp, Homo sapiens
gtcctgtcaactaat

SEQ ID NO: 1422532 - DNA, 15 bp, Homo sapiens
agtcctgtcaactaa

SEQ ID NO: 1422533 - DNA, 15 bp, Homo sapiens
cagtcctgtcaacta

SEQ ID NO: 1422534 - DNA, 15 bp, Homo sapiens
gcagtcctgtcaact

SEQ ID NO: 1422535 - DNA, 15 bp, Homo sapiens
ggcagtcctgtcaac

SEQ ID NO: 1422536 - DNA, 15 bp, Homo sapiens
aggcagtcctgtcaa

SEQ ID NO: 1422537 - DNA, 15 bp, Homo sapiens
aaggcagtcctgtca

SEQ ID NO: 1422538 - DNA, 15 bp, Homo sapiens
aaaggcagtcctgtc

SEQ ID NO: 1422539 - DNA, 15 bp, Homo sapiens
aaaaggcagtcctgt

SEQ ID NO: 1422540 - DNA, 15 bp, Homo sapiens
aaaaaggcagtcctg

SEQ ID NO: 1422541 - DNA, 15 bp, Homo sapiens
taaaaaggcagtcct

SEQ ID NO: 1422542 - DNA, 15 bp, Homo sapiens
ttaaaaaggcagtcc

SEQ ID NO: 1422543 - DNA, 15 bp, Homo sapiens
tttaaaaaggcagtc

SEQ ID NO: 1422544 - DNA, 15 bp, Homo sapiens
atttaaaaaggcagt

SEQ ID NO: 1422545 - DNA, 15 bp, Homo sapiens
tatttaaaaaggcag

SEQ ID NO: 1422546 - DNA, 15 bp, Homo sapiens
ttatttaaaaaggca

SEQ ID NO: 1422547 - DNA, 15 bp, Homo sapiens
tttatttaaaaaggc

SEQ ID NO: 1422548 - DNA, 15 bp, Homo sapiens
ttttatttaaaaagg

SEQ ID NO: 1422549 - DNA, 15 bp, Homo sapiens
tttttatttaaaaag

SEQ ID NO: 1422550 - DNA, 15 bp, Homo sapiens
ctttttatttaaaaa

SEQ ID NO: 1422551 - DNA, 15 bp, Homo sapiens
actttttatttaaaa

SEQ ID NO: 1422552 - DNA, 15 bp, Homo sapiens
aactttttatttaaa

SEQ ID NO: 1422553 - DNA, 15 bp, Homo sapiens
caactttttatttaa

SEQ ID NO: 1422554 - DNA, 15 bp, Homo sapiens
tcaactttttattta

SEQ ID NO: 1422555 - DNA, 15 bp, Homo sapiens
ttcaactttttattt

SEQ ID NO: 1422556 - DNA, 15 bp, Homo sapiens
attcaactttttatt

SEQ ID NO: 1422557 - DNA, 15 bp, Homo sapiens
cattcaactttttat

SEQ ID NO: 1422558 - DNA, 15 bp, Homo sapiens
acattcaacttttta

SEQ ID NO: 1422559 - DNA, 15 bp, Homo sapiens
cacattcaacttttt

SEQ ID NO: 1422560 - DNA, 15 bp, Homo sapiens
tcacattcaactttt

SEQ ID NO: 1422561 - DNA, 15 bp, Homo sapiens
atcacattcaacttt

SEQ ID NO: 1422562 - DNA, 15 bp, Homo sapiens
aatcacattcaactt

SEQ ID NO: 1422563 - DNA, 15 bp, Homo sapiens
taatcacattcaact

SEQ ID NO: 1422564 - DNA, 15 bp, Homo sapiens
gtaatcacattcaac

SEQ ID NO: 1422565 - DNA, 15 bp, Homo sapiens
agtaatcacattcaa

SEQ ID NO: 1422566 - DNA, 15 bp, Homo sapiens
aagtaatcacattca

SEQ ID NO: 1422567 - DNA, 15 bp, Homo sapiens
gaagtaatcacattc

SEQ ID NO: 1422568 - DNA, 15 bp, Homo sapiens
ggaagtaatcacatt

SEQ ID NO: 1422569 - DNA, 15 bp, Homo sapiens
tggaagtaatcacat

SEQ ID NO: 1422570 - DNA, 15 bp, Homo sapiens
ctggaagtaatcaca

SEQ ID NO: 1422571 - DNA, 15 bp, Homo sapiens
tctggaagtaatcac

SEQ ID NO: 1422572 - DNA, 15 bp, Homo sapiens
gtctggaagtaatca

SEQ ID NO: 1422573 - DNA, 15 bp, Homo sapiens
ggtctggaagtaatc

SEQ ID NO: 1422574 - DNA, 15 bp, Homo sapiens
aggtctggaagtaat

SEQ ID NO: 1422575 - DNA, 15 bp, Homo sapiens
gaggtctggaagtaa

SEQ ID NO: 1422576 - DNA, 15 bp, Homo sapiens
agaggtctggaagta

SEQ ID NO: 1422577 - DNA, 15 bp, Homo sapiens
aagaggtctggaagt

SEQ ID NO: 1422578 - DNA, 15 bp, Homo sapiens
aaagaggtctggaag

SEQ ID NO: 1422579 - DNA, 15 bp, Homo sapiens
aaaagaggtctggaa

SEQ ID NO: 1422580 - DNA, 15 bp, Homo sapiens
gaaaagaggtctgga

SEQ ID NO: 1422581 - DNA, 15 bp, Homo sapiens
tgaaaagaggtctgg

SEQ ID NO: 1422582 - DNA, 15 bp, Homo sapiens
ctgaaaagaggtctg

SEQ ID NO: 1422583 - DNA, 15 bp, Homo sapiens
gctgaaaagaggtct

SEQ ID NO: 1422584 - DNA, 15 bp, Homo sapiens
agctgaaaagaggtc

SEQ ID NO: 1422585 - DNA, 15 bp, Homo sapiens
gagctgaaaagaggt

SEQ ID NO: 1422586 - DNA, 15 bp, Homo sapiens
agagctgaaaagagg

SEQ ID NO: 1422587 - DNA, 15 bp, Homo sapiens
aagagctgaaaagag

SEQ ID NO: 1422588 - DNA, 15 bp, Homo sapiens
aaagagctgaaaaga

SEQ ID NO: 1422589 - DNA, 15 bp, Homo sapiens
taaagagctgaaaag

SEQ ID NO: 1422590 - DNA, 15 bp, Homo sapiens
ttaaagagctgaaaa

SEQ ID NO: 1422591 - DNA, 15 bp, Homo sapiens
cttaaagagctgaaa

SEQ ID NO: 1422592 - DNA, 15 bp, Homo sapiens
ccttaaagagctgaa

SEQ ID NO: 1422593 - DNA, 15 bp, Homo sapiens
accttaaagagctga

SEQ ID NO: 1422594 - DNA, 15 bp, Homo sapiens
taccttaaagagctg

SEQ ID NO: 1422595 - DNA, 15 bp, Homo sapiens
gtaccttaaagagct

SEQ ID NO: 1422596 - DNA, 15 bp, Homo sapiens
agtaccttaaagagc

SEQ ID NO: 1422597 - DNA, 15 bp, Homo sapiens
cagtaccttaaagag

SEQ ID NO: 1422598 - DNA, 15 bp, Homo sapiens
tcagtaccttaaaga

SEQ ID NO: 1422599 - DNA, 15 bp, Homo sapiens
atcagtaccttaaag

SEQ ID NO: 1422600 - DNA, 15 bp, Homo sapiens
tatcagtaccttaaa

SEQ ID NO: 1422601 - DNA, 15 bp, Homo sapiens
gtatcagtaccttaa

SEQ ID NO: 1422602 - DNA, 15 bp, Homo sapiens
ggtatcagtacctta

SEQ ID NO: 1422603 - DNA, 15 bp, Homo sapiens
gggtatcagtacctt

SEQ ID NO: 1422604 - DNA, 15 bp, Homo sapiens
agggtatcagtacct

SEQ ID NO: 1422605 - DNA, 15 bp, Homo sapiens
aagggtatcagtacc

SEQ ID NO: 1422606 - DNA, 15 bp, Homo sapiens
aaagggtatcagtac

SEQ ID NO: 1422607 - DNA, 15 bp, Homo sapiens
aaaagggtatcagta

SEQ ID NO: 1422608 - DNA, 15 bp, Homo sapiens
gaaaagggtatcagt

SEQ ID NO: 1422609 - DNA, 15 bp, Homo sapiens
agaaaagggtatcag

SEQ ID NO: 1422610 - DNA, 15 bp, Homo sapiens
aagaaaagggtatca

SEQ ID NO: 1422611 - DNA, 15 bp, Homo sapiens
caagaaaagggtatc

SEQ ID NO: 1422612 - DNA, 15 bp, Homo sapiens
tcaagaaaagggtat

SEQ ID NO: 1422613 - DNA, 15 bp, Homo sapiens
atcaagaaaagggta

SEQ ID NO: 1422614 - DNA, 15 bp, Homo sapiens
aatcaagaaaagggt

SEQ ID NO: 1422615 - DNA, 15 bp, Homo sapiens
aaatcaagaaaaggg

SEQ ID NO: 1422616 - DNA, 15 bp, Homo sapiens
caaatcaagaaaagg

SEQ ID NO: 1422617 - DNA, 15 bp, Homo sapiens
tcaaatcaagaaaag

SEQ ID NO: 1422618 - DNA, 15 bp, Homo sapiens
ttcaaatcaagaaaa

SEQ ID NO: 1422619 - DNA, 15 bp, Homo sapiens
cttcaaatcaagaaa

SEQ ID NO: 1422620 - DNA, 15 bp, Homo sapiens
acttcaaatcaagaa

SEQ ID NO: 1422621 - DNA, 15 bp, Homo sapiens
aacttcaaatcaaga

SEQ ID NO: 1422622 - DNA, 15 bp, Homo sapiens
caacttcaaatcaag

SEQ ID NO: 1422623 - DNA, 15 bp, Homo sapiens
ccaacttcaaatcaa

SEQ ID NO: 1422624 - DNA, 15 bp, Homo sapiens
tccaacttcaaatca

SEQ ID NO: 1422625 - DNA, 15 bp, Homo sapiens
ctccaacttcaaatc

SEQ ID NO: 1422626 - DNA, 15 bp, Homo sapiens
tctccaacttcaaat

SEQ ID NO: 1422627 - DNA, 15 bp, Homo sapiens
gtctccaacttcaaa

SEQ ID NO: 1422628 - DNA, 15 bp, Homo sapiens
agtctccaacttcaa

SEQ ID NO: 1422629 - DNA, 15 bp, Homo sapiens
tagtctccaacttca

SEQ ID NO: 1422630 - DNA, 15 bp, Homo sapiens
atagtctccaacttc

SEQ ID NO: 1422631 - DNA, 15 bp, Homo sapiens
catagtctccaactt

SEQ ID NO: 1422632 - DNA, 15 bp, Homo sapiens
tcatagtctccaact

SEQ ID NO: 1422633 - DNA, 15 bp, Homo sapiens
atcatagtctccaac

SEQ ID NO: 1422634 - DNA, 15 bp, Homo sapiens
catcatagtctccaa

SEQ ID NO: 1422635 - DNA, 15 bp, Homo sapiens
acatcatagtctcca

SEQ ID NO: 1422636 - DNA, 15 bp, Homo sapiens
gacatcatagtctcc

SEQ ID NO: 1422637 - DNA, 15 bp, Homo sapiens
tgacatcatagtctc

SEQ ID NO: 1422638 - DNA, 15 bp, Homo sapiens
atgacatcatagtct

SEQ ID NO: 1422639 - DNA, 15 bp, Homo sapiens
gatgacatcatagtc

SEQ ID NO: 1422640 - DNA, 15 bp, Homo sapiens
tgatgacatcatagt

SEQ ID NO: 1422641 - DNA, 15 bp, Homo sapiens
ctgatgacatcatag

SEQ ID NO: 1422642 - DNA, 15 bp, Homo sapiens
cctgatgacatcata

SEQ ID NO: 1422643 - DNA, 15 bp, Homo sapiens
ccctgatgacatcat

SEQ ID NO: 1422644 - DNA, 15 bp, Homo sapiens
gccctgatgacatca

SEQ ID NO: 1422645 - DNA, 15 bp, Homo sapiens
agccctgatgacatc

SEQ ID NO: 1422646 - DNA, 15 bp, Homo sapiens
tagccctgatgacat

SEQ ID NO: 1422647 - DNA, 15 bp, Homo sapiens
ttagccctgatgaca

SEQ ID NO: 1422648 - DNA, 15 bp, Homo sapiens
tttagccctgatgac

SEQ ID NO: 1422649 - DNA, 15 bp, Homo sapiens
ttttagccctgatga

SEQ ID NO: 1422650 - DNA, 15 bp, Homo sapiens
cttttagccctgatg

SEQ ID NO: 1422651 - DNA, 15 bp, Homo sapiens
ccttttagccctgat

SEQ ID NO: 1422652 - DNA, 15 bp, Homo sapiens
accttttagccctga

SEQ ID NO: 1422653 - DNA, 15 bp, Homo sapiens
taccttttagccctg

SEQ ID NO: 1422654 - DNA, 15 bp, Homo sapiens
ataccttttagccct

SEQ ID NO: 1422655 - DNA, 15 bp, Homo sapiens
tataccttttagccc

SEQ ID NO: 1422656 - DNA, 15 bp, Homo sapiens
atataccttttagcc

SEQ ID NO: 1422657 - DNA, 15 bp, Homo sapiens
tatataccttttagc

SEQ ID NO: 1422658 - DNA, 15 bp, Homo sapiens
gtatataccttttag

SEQ ID NO: 1422659 - DNA, 15 bp, Homo sapiens
agtatatacctttta

SEQ ID NO: 1422660 - DNA, 15 bp, Homo sapiens
aagtatatacctttt

SEQ ID NO: 1422661 - DNA, 15 bp, Homo sapiens
taagtatataccttt

SEQ ID NO: 1422662 - DNA, 15 bp, Homo sapiens
ttaagtatatacctt

SEQ ID NO: 1422663 - DNA, 15 bp, Homo sapiens
tttaagtatatacct

SEQ ID NO: 1422664 - DNA, 15 bp, Homo sapiens
ctttaagtatatacc

SEQ ID NO: 1422665 - DNA, 15 bp, Homo sapiens
gctttaagtatatac

SEQ ID NO: 1422666 - DNA, 15 bp, Homo sapiens
tgctttaagtatata

SEQ ID NO: 1422667 - DNA, 15 bp, Homo sapiens
atgctttaagtatat

SEQ ID NO: 1422668 - DNA, 15 bp, Homo sapiens
aatgctttaagtata

SEQ ID NO: 1422669 - DNA, 15 bp, Homo sapiens
caatgctttaagtat

SEQ ID NO: 1422670 - DNA, 15 bp, Homo sapiens
tcaatgctttaagta

SEQ ID NO: 1422671 - DNA, 15 bp, Homo sapiens
gtcaatgctttaagt

SEQ ID NO: 1422672 - DNA, 15 bp, Homo sapiens
ggtcaatgctttaag

SEQ ID NO: 1422673 - DNA, 15 bp, Homo sapiens
aggtcaatgctttaa

SEQ ID NO: 1422674 - DNA, 15 bp, Homo sapiens
aaggtcaatgcttta

SEQ ID NO: 1422675 - DNA, 15 bp, Homo sapiens
aaaggtcaatgcttt

SEQ ID NO: 1422676 - DNA, 15 bp, Homo sapiens
taaaggtcaatgctt

SEQ ID NO: 1422677 - DNA, 15 bp, Homo sapiens
ttaaaggtcaatgct

SEQ ID NO: 1422678 - DNA, 15 bp, Homo sapiens
cttaaaggtcaatgc

SEQ ID NO: 1422679 - DNA, 15 bp, Homo sapiens
acttaaaggtcaatg

SEQ ID NO: 1422680 - DNA, 15 bp, Homo sapiens
tacttaaaggtcaat

SEQ ID NO: 1422681 - DNA, 15 bp, Homo sapiens
gtacttaaaggtcaa

SEQ ID NO: 1422682 - DNA, 15 bp, Homo sapiens
tgtacttaaaggtca

SEQ ID NO: 1422683 - DNA, 15 bp, Homo sapiens
atgtacttaaaggtc

SEQ ID NO: 1422684 - DNA, 15 bp, Homo sapiens
tatgtacttaaaggt

SEQ ID NO: 1422685 - DNA, 15 bp, Homo sapiens
ttatgtacttaaagg

SEQ ID NO: 1422686 - DNA, 15 bp, Homo sapiens
cttatgtacttaaag

SEQ ID NO: 1422687 - DNA, 15 bp, Homo sapiens
tcttatgtacttaaa

SEQ ID NO: 1422688 - DNA, 15 bp, Homo sapiens
ttcttatgtacttaa

SEQ ID NO: 1422689 - DNA, 15 bp, Homo sapiens
attcttatgtactta

SEQ ID NO: 1422690 - DNA, 15 bp, Homo sapiens
tattcttatgtactt

SEQ ID NO: 1422691 - DNA, 15 bp, Homo sapiens
atattcttatgtact

SEQ ID NO: 1422692 - DNA, 15 bp, Homo sapiens
catattcttatgtac

SEQ ID NO: 1422693 - DNA, 15 bp, Homo sapiens
gcatattcttatgta

SEQ ID NO: 1422694 - DNA, 15 bp, Homo sapiens
agcatattcttatgt

SEQ ID NO: 1422695 - DNA, 15 bp, Homo sapiens
cagcatattcttatg

SEQ ID NO: 1422696 - DNA, 15 bp, Homo sapiens
acagcatattcttat

SEQ ID NO: 1422697 - DNA, 15 bp, Homo sapiens
aacagcatattctta

SEQ ID NO: 1422698 - DNA, 15 bp, Homo sapiens
gaacagcatattctt

SEQ ID NO: 1422699 - DNA, 15 bp, Homo sapiens
agaacagcatattct

SEQ ID NO: 1422700 - DNA, 15 bp, Homo sapiens
cagaacagcatattc

SEQ ID NO: 1422701 - DNA, 15 bp, Homo sapiens
acagaacagcatatt

SEQ ID NO: 1422702 - DNA, 15 bp, Homo sapiens
cacagaacagcatat

SEQ ID NO: 1422703 - DNA, 15 bp, Homo sapiens
tcacagaacagcata

SEQ ID NO: 1422704 - DNA, 15 bp, Homo sapiens
ttcacagaacagcat

SEQ ID NO: 1422705 - DNA, 15 bp, Homo sapiens
attcacagaacagca

SEQ ID NO: 1422706 - DNA, 15 bp, Homo sapiens
gattcacagaacagc

SEQ ID NO: 1422707 - DNA, 15 bp, Homo sapiens
tgattcacagaacag

SEQ ID NO: 1422708 - DNA, 15 bp, Homo sapiens
atgattcacagaaca

SEQ ID NO: 1422709 - DNA, 15 bp, Homo sapiens
catgattcacagaac

SEQ ID NO: 1422710 - DNA, 15 bp, Homo sapiens
ccatgattcacagaa

SEQ ID NO: 1422711 - DNA, 15 bp, Homo sapiens
tccatgattcacaga

SEQ ID NO: 1422712 - DNA, 15 bp, Homo sapiens
atccatgattcacag

SEQ ID NO: 1422713 - DNA, 15 bp, Homo sapiens
tatccatgattcaca

SEQ ID NO: 1422714 - DNA, 15 bp, Homo sapiens
ttatccatgattcac

SEQ ID NO: 1422715 - DNA, 15 bp, Homo sapiens
cttatccatgattca

SEQ ID NO: 1422716 - DNA, 15 bp, Homo sapiens
ccttatccatgattc

SEQ ID NO: 1422717 - DNA, 15 bp, Homo sapiens
accttatccatgatt

SEQ ID NO: 1422718 - DNA, 15 bp, Homo sapiens
taccttatccatgat

SEQ ID NO: 1422719 - DNA, 15 bp, Homo sapiens
ataccttatccatga

SEQ ID NO: 1422720 - DNA, 15 bp, Homo sapiens
tataccttatccatg

SEQ ID NO: 1422721 - DNA, 15 bp, Homo sapiens
gtataccttatccat

SEQ ID NO: 1422722 - DNA, 15 bp, Homo sapiens
agtataccttatcca

SEQ ID NO: 1422723 - DNA, 15 bp, Homo sapiens
aagtataccttatcc

SEQ ID NO: 1422724 - DNA, 15 bp, Homo sapiens
taagtataccttatc

SEQ ID NO: 1422725 - DNA, 15 bp, Homo sapiens
ttaagtataccttat

SEQ ID NO: 1422726 - DNA, 15 bp, Homo sapiens
tttaagtatacctta

SEQ ID NO: 1422727 - DNA, 15 bp, Homo sapiens
ttttaagtatacctt

SEQ ID NO: 1422728 - DNA, 15 bp, Homo sapiens
attttaagtatacct

SEQ ID NO: 1422729 - DNA, 15 bp, Homo sapiens
gattttaagtatacc

SEQ ID NO: 1422730 - DNA, 15 bp, Homo sapiens
tgattttaagtatac

SEQ ID NO: 1422731 - DNA, 15 bp, Homo sapiens
gtgattttaagtata

SEQ ID NO: 1422732 - DNA, 15 bp, Homo sapiens
agtgattttaagtat

SEQ ID NO: 1422733 - DNA, 15 bp, Homo sapiens
cagtgattttaagta

SEQ ID NO: 1422734 - DNA, 15 bp, Homo sapiens
gcagtgattttaagt

SEQ ID NO: 1422735 - DNA, 15 bp, Homo sapiens
agcagtgattttaag

SEQ ID NO: 1422736 - DNA, 15 bp, Homo sapiens
tagcagtgattttaa

SEQ ID NO: 1422737 - DNA, 15 bp, Homo sapiens
atagcagtgatttta

SEQ ID NO: 1422738 - DNA, 15 bp, Homo sapiens
tatagcagtgatttt

SEQ ID NO: 1422739 - DNA, 15 bp, Homo sapiens
atatagcagtgattt

SEQ ID NO: 1422740 - DNA, 15 bp, Homo sapiens
gatatagcagtgatt

SEQ ID NO: 1422741 - DNA, 15 bp, Homo sapiens
agatatagcagtgat

SEQ ID NO: 1422742 - DNA, 15 bp, Homo sapiens
aagatatagcagtga

SEQ ID NO: 1422743 - DNA, 15 bp, Homo sapiens
aaagatatagcagtg

SEQ ID NO: 1422744 - DNA, 15 bp, Homo sapiens
caaagatatagcagt

SEQ ID NO: 1422745 - DNA, 15 bp, Homo sapiens
ccaaagatatagcag

SEQ ID NO: 1422746 - DNA, 15 bp, Homo sapiens
tccaaagatatagca

SEQ ID NO: 1422747 - DNA, 15 bp, Homo sapiens
ttccaaagatatagc

SEQ ID NO: 1422748 - DNA, 15 bp, Homo sapiens
tttccaaagatatag

SEQ ID NO: 1422749 - DNA, 15 bp, Homo sapiens
ctttccaaagatata

SEQ ID NO: 1422750 - DNA, 15 bp, Homo sapiens
tctttccaaagatat

SEQ ID NO: 1422751 - DNA, 15 bp, Homo sapiens
ttctttccaaagata

SEQ ID NO: 1422752 - DNA, 15 bp, Homo sapiens
tttctttccaaagat

SEQ ID NO: 1422753 - DNA, 15 bp, Homo sapiens
atttctttccaaaga

SEQ ID NO: 1422754 - DNA, 15 bp, Homo sapiens
aatttctttccaaag

SEQ ID NO: 1422755 - DNA, 15 bp, Homo sapiens
aaatttctttccaaa

SEQ ID NO: 1422756 - DNA, 15 bp, Homo sapiens
taaatttctttccaa

SEQ ID NO: 1422757 - DNA, 15 bp, Homo sapiens
ttaaatttctttcca

SEQ ID NO: 1422758 - DNA, 15 bp, Homo sapiens
tttaaatttctttcc

SEQ ID NO: 1422759 - DNA, 15 bp, Homo sapiens
atttaaatttctttc

SEQ ID NO: 1422760 - DNA, 15 bp, Homo sapiens
gatttaaatttcttt

SEQ ID NO: 1422761 - DNA, 15 bp, Homo sapiens
tgatttaaatttctt

SEQ ID NO: 1422762 - DNA, 15 bp, Homo sapiens
ttgatttaaatttct

SEQ ID NO: 1422763 - DNA, 15 bp, Homo sapiens
tttgatttaaatttc

SEQ ID NO: 1422764 - DNA, 15 bp, Homo sapiens
ttttgatttaaattt

SEQ ID NO: 1422765 - DNA, 15 bp, Homo sapiens
tttttgatttaaatt

SEQ ID NO: 1422766 - DNA, 15 bp, Homo sapiens
ttttttgatttaaat

SEQ ID NO: 1422767 - DNA, 15 bp, Homo sapiens
cttttttgatttaaa

SEQ ID NO: 1422768 - DNA, 15 bp, Homo sapiens
tcttttttgatttaa

SEQ ID NO: 1422769 - DNA, 15 bp, Homo sapiens
ttcttttttgattta

SEQ ID NO: 1422770 - DNA, 15 bp, Homo sapiens
attcttttttgattt

SEQ ID NO: 1422771 - DNA, 15 bp, Homo sapiens
aattcttttttgatt

SEQ ID NO: 1422772 - DNA, 15 bp, Homo sapiens
taattcttttttgat

SEQ ID NO: 1422773 - DNA, 15 bp, Homo sapiens
gtaattcttttttga

SEQ ID NO: 1422774 - DNA, 15 bp, Homo sapiens
tgtaattcttttttg

SEQ ID NO: 1422775 - DNA, 15 bp, Homo sapiens
ttgtaattctttttt

SEQ ID NO: 1422776 - DNA, 15 bp, Homo sapiens
tttgtaattcttttt

SEQ ID NO: 1422777 - DNA, 15 bp, Homo sapiens
ttttgtaattctttt

SEQ ID NO: 1422778 - DNA, 15 bp, Homo sapiens
cttttgtaattcttt

SEQ ID NO: 1422779 - DNA, 15 bp, Homo sapiens
ccttttgtaattctt

SEQ ID NO: 1422780 - DNA, 15 bp, Homo sapiens
gccttttgtaattct

SEQ ID NO: 1422781 - DNA, 15 bp, Homo sapiens
tgccttttgtaattc

SEQ ID NO: 1422782 - DNA, 15 bp, Homo sapiens
ttgccttttgtaatt

SEQ ID NO: 1422783 - DNA, 15 bp, Homo sapiens
gttgccttttgtaat

SEQ ID NO: 1422784 - DNA, 15 bp, Homo sapiens
agttgccttttgtaa

SEQ ID NO: 1422785 - DNA, 15 bp, Homo sapiens
aagttgccttttgta

SEQ ID NO: 1422786 - DNA, 15 bp, Homo sapiens
aaagttgccttttgt

SEQ ID NO: 1422787 - DNA, 15 bp, Homo sapiens
taaagttgccttttg

SEQ ID NO: 1422788 - DNA, 15 bp, Homo sapiens
ataaagttgcctttt

SEQ ID NO: 1422789 - DNA, 15 bp, Homo sapiens
aataaagttgccttt

SEQ ID NO: 1422790 - DNA, 15 bp, Homo sapiens
caataaagttgcctt

SEQ ID NO: 1422791 - DNA, 15 bp, Homo sapiens
tcaataaagttgcct

SEQ ID NO: 1422792 - DNA, 15 bp, Homo sapiens
ttcaataaagttgcc

SEQ ID NO: 1422793 - DNA, 15 bp, Homo sapiens
gttcaataaagttgc

SEQ ID NO: 1422794 - DNA, 15 bp, Homo sapiens
agttcaataaagttg

SEQ ID NO: 1422795 - DNA, 15 bp, Homo sapiens
aagttcaataaagtt

SEQ ID NO: 1422796 - DNA, 15 bp, Homo sapiens
taagttcaataaagt

SEQ ID NO: 1422797 - DNA, 15 bp, Homo sapiens
gtaagttcaataaag

SEQ ID NO: 1422798 - DNA, 15 bp, Homo sapiens
tgtaagttcaataaa

SEQ ID NO: 1422799 - DNA, 15 bp, Homo sapiens
atgtaagttcaataa

SEQ ID NO: 1422800 - DNA, 15 bp, Homo sapiens
catgtaagttcaata

SEQ ID NO: 1422801 - DNA, 15 bp, Homo sapiens
acatgtaagttcaat

SEQ ID NO: 1422802 - DNA, 15 bp, Homo sapiens
tacatgtaagttcaa

SEQ ID NO: 1422803 - DNA, 15 bp, Homo sapiens
ctacatgtaagttca

SEQ ID NO: 1422804 - DNA, 15 bp, Homo sapiens
tctacatgtaagttc

SEQ ID NO: 1422805 - DNA, 15 bp, Homo sapiens
ctctacatgtaagtt

SEQ ID NO: 1422806 - DNA, 15 bp, Homo sapiens
actctacatgtaagt

SEQ ID NO: 1422807 - DNA, 15 bp, Homo sapiens
aactctacatgtaag

SEQ ID NO: 1422808 - DNA, 15 bp, Homo sapiens
caactctacatgtaa

SEQ ID NO: 1422809 - DNA, 15 bp, Homo sapiens
acaactctacatgta

SEQ ID NO: 1422810 - DNA, 15 bp, Homo sapiens
aacaactctacatgt

SEQ ID NO: 1422811 - DNA, 15 bp, Homo sapiens
aaacaactctacatg

SEQ ID NO: 1422812 - DNA, 15 bp, Homo sapiens
aaaacaactctacat

SEQ ID NO: 1422813 - DNA, 15 bp, Homo sapiens
caaaacaactctaca

SEQ ID NO: 1422814 - DNA, 15 bp, Homo sapiens
tcaaaacaactctac

SEQ ID NO: 1422815 - DNA, 15 bp, Homo sapiens
atcaaaacaactcta

SEQ ID NO: 1422816 - DNA, 15 bp, Homo sapiens
catcaaaacaactct

SEQ ID NO: 1422817 - DNA, 15 bp, Homo sapiens
acatcaaaacaactc

SEQ ID NO: 1422818 - DNA, 15 bp, Homo sapiens
aacatcaaaacaact

SEQ ID NO: 1422819 - DNA, 15 bp, Homo sapiens
taacatcaaaacaac

SEQ ID NO: 1422820 - DNA, 15 bp, Homo sapiens
ctaacatcaaaacaa

SEQ ID NO: 1422821 - DNA, 15 bp, Homo sapiens
cctaacatcaaaaca

SEQ ID NO: 1422822 - DNA, 15 bp, Homo sapiens
tcctaacatcaaaac

SEQ ID NO: 1422823 - DNA, 15 bp, Homo sapiens
ctcctaacatcaaaa

SEQ ID NO: 1422824 - DNA, 15 bp, Homo sapiens
actcctaacatcaaa

SEQ ID NO: 1422825 - DNA, 15 bp, Homo sapiens
tactcctaacatcaa

SEQ ID NO: 1422826 - DNA, 15 bp, Homo sapiens
ctactcctaacatca

SEQ ID NO: 1422827 - DNA, 15 bp, Homo sapiens
cctactcctaacatc

SEQ ID NO: 1422828 - DNA, 15 bp, Homo sapiens
tcctactcctaacat

SEQ ID NO: 1422829 - DNA, 15 bp, Homo sapiens
ttcctactcctaaca

SEQ ID NO: 1422830 - DNA, 15 bp, Homo sapiens
attcctactcctaac

SEQ ID NO: 1422831 - DNA, 15 bp, Homo sapiens
cattcctactcctaa

SEQ ID NO: 1422832 - DNA, 15 bp, Homo sapiens
acattcctactccta

SEQ ID NO: 1422833 - DNA, 15 bp, Homo sapiens
cacattcctactcct

SEQ ID NO: 1422834 - DNA, 15 bp, Homo sapiens
tcacattcctactcc

SEQ ID NO: 1422835 - DNA, 15 bp, Homo sapiens
ttcacattcctactc

SEQ ID NO: 1422836 - DNA, 15 bp, Homo sapiens
tttcacattcctact

SEQ ID NO: 1422837 - DNA, 15 bp, Homo sapiens
gtttcacattcctac

SEQ ID NO: 1422838 - DNA, 15 bp, Homo sapiens
tgtttcacattccta

SEQ ID NO: 1422839 - DNA, 15 bp, Homo sapiens
atgtttcacattcct

SEQ ID NO: 1422840 - DNA, 15 bp, Homo sapiens
aatgtttcacattcc

SEQ ID NO: 1422841 - DNA, 15 bp, Homo sapiens
taatgtttcacattc

SEQ ID NO: 1422842 - DNA, 15 bp, Homo sapiens
ttaatgtttcacatt

SEQ ID NO: 1422843 - DNA, 15 bp, Homo sapiens
attaatgtttcacat

SEQ ID NO: 1422844 - DNA, 15 bp, Homo sapiens
tattaatgtttcaca

SEQ ID NO: 1422845 - DNA, 15 bp, Homo sapiens
ttattaatgtttcac

SEQ ID NO: 1422846 - DNA, 15 bp, Homo sapiens
tttattaatgtttca

SEQ ID NO: 1422847 - DNA, 15 bp, Homo sapiens
ctttattaatgtttc

SEQ ID NO: 1422848 - DNA, 15 bp, Homo sapiens
gctttattaatgttt

SEQ ID NO: 1422849 - DNA, 15 bp, Homo sapiens
tgctttattaatgtt

SEQ ID NO: 1422850 - DNA, 15 bp, Homo sapiens
gtgctttattaatgt

SEQ ID NO: 1422851 - DNA, 15 bp, Homo sapiens
tgtgctttattaatg

SEQ ID NO: 1422852 - DNA, 15 bp, Homo sapiens
ttgtgctttattaat

SEQ ID NO: 1422853 - DNA, 15 bp, Homo sapiens
gttgtgctttattaa

SEQ ID NO: 1422854 - DNA, 15 bp, Homo sapiens
tgttgtgctttatta

SEQ ID NO: 1422855 - DNA, 15 bp, Homo sapiens
ttgttgtgctttatt

SEQ ID NO: 1422856 - DNA, 15 bp, Homo sapiens
tttgttgtgctttat

SEQ ID NO: 1422857 - DNA, 15 bp, Homo sapiens
atttgttgtgcttta

SEQ ID NO: 1422858 - DNA, 15 bp, Homo sapiens
tatttgttgtgcttt

SEQ ID NO: 1422859 - DNA, 15 bp, Homo sapiens
ctatttgttgtgctt

SEQ ID NO: 1422860 - DNA, 15 bp, Homo sapiens
actatttgttgtgct

SEQ ID NO: 1422861 - DNA, 15 bp, Homo sapiens
tactatttgttgtgc

SEQ ID NO: 1422862 - DNA, 15 bp, Homo sapiens
ttactatttgttgtg

SEQ ID NO: 1422863 - DNA, 15 bp, Homo sapiens
attactatttgttgt

SEQ ID NO: 1422864 - DNA, 15 bp, Homo sapiens
gattactatttgttg

SEQ ID NO: 1422865 - DNA, 15 bp, Homo sapiens
tgattactatttgtt

SEQ ID NO: 1422866 - DNA, 15 bp, Homo sapiens
atgattactatttgt

SEQ ID NO: 1422867 - DNA, 15 bp, Homo sapiens
tatgattactatttg

SEQ ID NO: 1422868 - DNA, 15 bp, Homo sapiens
atatgattactattt

SEQ ID NO: 1422869 - DNA, 15 bp, Homo sapiens
catatgattactatt

SEQ ID NO: 1422870 - DNA, 15 bp, Homo sapiens
acatatgattactat

SEQ ID NO: 1422871 - DNA, 15 bp, Homo sapiens
tacatatgattacta

SEQ ID NO: 1422872 - DNA, 15 bp, Homo sapiens
atacatatgattact

SEQ ID NO: 1422873 - DNA, 15 bp, Homo sapiens
catacatatgattac

SEQ ID NO: 1422874 - DNA, 15 bp, Homo sapiens
acatacatatgatta

SEQ ID NO: 1422875 - DNA, 15 bp, Homo sapiens
cacatacatatgatt

SEQ ID NO: 1422876 - DNA, 15 bp, Homo sapiens
acacatacatatgat

SEQ ID NO: 1422877 - DNA, 15 bp, Homo sapiens
cacacatacatatga

SEQ ID NO: 1422878 - DNA, 15 bp, Homo sapiens
acacacatacatatg

SEQ ID NO: 1422879 - DNA, 15 bp, Homo sapiens
tacacacatacatat

SEQ ID NO: 1422880 - DNA, 15 bp, Homo sapiens
aatacacacatacat

SEQ ID NO: 1422881 - DNA, 15 bp, Homo sapiens
gaatacacacataca

SEQ ID NO: 1422882 - DNA, 15 bp, Homo sapiens
tgaatacacacatac

SEQ ID NO: 1422883 - DNA, 15 bp, Homo sapiens
gtgaatacacacata

SEQ ID NO: 1422884 - DNA, 15 bp, Homo sapiens
ggtgaatacacacat

SEQ ID NO: 1422885 - DNA, 15 bp, Homo sapiens
tggtgaatacacaca

SEQ ID NO: 1422886 - DNA, 15 bp, Homo sapiens
ctggtgaatacacac

SEQ ID NO: 1422887 - DNA, 15 bp, Homo sapiens
tctggtgaatacaca

SEQ ID NO: 1422888 - DNA, 15 bp, Homo sapiens
atctggtgaatacac

SEQ ID NO: 1422889 - DNA, 15 bp, Homo sapiens
aatctggtgaataca

SEQ ID NO: 1422890 - DNA, 15 bp, Homo sapiens
aaatctggtgaatac

SEQ ID NO: 1422891 - DNA, 15 bp, Homo sapiens
taaatctggtgaata

SEQ ID NO: 1422892 - DNA, 15 bp, Homo sapiens
ataaatctggtgaat

SEQ ID NO: 1422893 - DNA, 15 bp, Homo sapiens
aataaatctggtgaa

SEQ ID NO: 1422894 - DNA, 15 bp, Homo sapiens
aaataaatctggtga

SEQ ID NO: 1422895 - DNA, 15 bp, Homo sapiens
taaataaatctggtg

SEQ ID NO: 1422896 - DNA, 15 bp, Homo sapiens
ataaataaatctggt

SEQ ID NO: 1422897 - DNA, 15 bp, Homo sapiens
cataaataaatctgg

SEQ ID NO: 1422898 - DNA, 15 bp, Homo sapiens
acataaataaatctg

SEQ ID NO: 1422899 - DNA, 15 bp, Homo sapiens
cacataaataaatct

SEQ ID NO: 1422900 - DNA, 15 bp, Homo sapiens
acacataaataaatc

SEQ ID NO: 1422901 - DNA, 15 bp, Homo sapiens
tacacataaataaat

SEQ ID NO: 1422902 - DNA, 15 bp, Homo sapiens
atacacataaataaa

SEQ ID NO: 1422903 - DNA, 15 bp, Homo sapiens
tatacacataaataa

SEQ ID NO: 1422904 - DNA, 15 bp, Homo sapiens
atatacacataaata

SEQ ID NO: 1422905 - DNA, 15 bp, Homo sapiens
aatatacacataaat

SEQ ID NO: 1422906 - DNA, 15 bp, Homo sapiens
aaatatacacataaa

SEQ ID NO: 1422907 - DNA, 15 bp, Homo sapiens
gaaatatacacataa

SEQ ID NO: 1422908 - DNA, 15 bp, Homo sapiens
agaaatatacacata

SEQ ID NO: 1422909 - DNA, 15 bp, Homo sapiens
tagaaatatacacat

SEQ ID NO: 1422910 - DNA, 15 bp, Homo sapiens
gtagaaatatacaca

SEQ ID NO: 1422911 - DNA, 15 bp, Homo sapiens
tgtagaaatatacac

SEQ ID NO: 1422912 - DNA, 15 bp, Homo sapiens
atgtagaaatataca

SEQ ID NO: 1422913 - DNA, 15 bp, Homo sapiens
aatgtagaaatatac

SEQ ID NO: 1422914 - DNA, 15 bp, Homo sapiens
aaatgtagaaatata

SEQ ID NO: 1422915 - DNA, 15 bp, Homo sapiens
caaatgtagaaatat

SEQ ID NO: 1422916 - DNA, 15 bp, Homo sapiens
tcaaatgtagaaata

SEQ ID NO: 1422917 - DNA, 15 bp, Homo sapiens
ttcaaatgtagaaat

SEQ ID NO: 1422918 - DNA, 15 bp, Homo sapiens
tttcaaatgtagaaa

SEQ ID NO: 1422919 - DNA, 15 bp, Homo sapiens
ctttcaaatgtagaa

SEQ ID NO: 1422920 - DNA, 15 bp, Homo sapiens
tctttcaaatgtaga

SEQ ID NO: 1422921 - DNA, 15 bp, Homo sapiens
ctctttcaaatgtag

SEQ ID NO: 1422922 - DNA, 15 bp, Homo sapiens
cctctttcaaatgta

SEQ ID NO: 1422923 - DNA, 15 bp, Homo sapiens
tcctctttcaaatgt

SEQ ID NO: 1422924 - DNA, 15 bp, Homo sapiens
ttcctctttcaaatg

SEQ ID NO: 1422925 - DNA, 15 bp, Homo sapiens
tttcctctttcaaat

SEQ ID NO: 1422926 - DNA, 15 bp, Homo sapiens
ttttcctctttcaaa

SEQ ID NO: 1422927 - DNA, 15 bp, Homo sapiens
tttttcctctttcaa

SEQ ID NO: 1422928 - DNA, 15 bp, Homo sapiens
ctttttcctctttca

SEQ ID NO: 1422929 - DNA, 15 bp, Homo sapiens
tctttttcctctttc

SEQ ID NO: 1422930 - DNA, 15 bp, Homo sapiens
gtctttttcctcttt

SEQ ID NO: 1422931 - DNA, 15 bp, Homo sapiens
tgtctttttcctctt

SEQ ID NO: 1422932 - DNA, 15 bp, Homo sapiens
ttgtctttttcctct

SEQ ID NO: 1422933 - DNA, 15 bp, Homo sapiens
attgtctttttcctc

SEQ ID NO: 1422934 - DNA, 15 bp, Homo sapiens
aattgtctttttcct

SEQ ID NO: 1422935 - DNA, 15 bp, Homo sapiens
aaattgtctttttcc

SEQ ID NO: 1422936 - DNA, 15 bp, Homo sapiens
aaaattgtctttttc

SEQ ID NO: 1422937 - DNA, 15 bp, Homo sapiens
aaaaattgtcttttt

SEQ ID NO: 1422938 - DNA, 15 bp, Homo sapiens
taaaaattgtctttt

SEQ ID NO: 1422939 - DNA, 15 bp, Homo sapiens
ttaaaaattgtcttt

SEQ ID NO: 1422940 - DNA, 15 bp, Homo sapiens
cttaaaaattgtctt

SEQ ID NO: 1422941 - DNA, 15 bp, Homo sapiens
acttaaaaattgtct

SEQ ID NO: 1422942 - DNA, 15 bp, Homo sapiens
aacttaaaaattgtc

SEQ ID NO: 1422943 - DNA, 15 bp, Homo sapiens
aaacttaaaaattgt

SEQ ID NO: 1422944 - DNA, 15 bp, Homo sapiens
aaaacttaaaaattg

SEQ ID NO: 1422945 - DNA, 15 bp, Homo sapiens
caaaacttaaaaatt

SEQ ID NO: 1422946 - DNA, 15 bp, Homo sapiens
tcaaaacttaaaaat

SEQ ID NO: 1422947 - DNA, 15 bp, Homo sapiens
gtcaaaacttaaaaa

SEQ ID NO: 1422948 - DNA, 15 bp, Homo sapiens
cgtcaaaacttaaaa

SEQ ID NO: 1422949 - DNA, 15 bp, Homo sapiens
acgtcaaaacttaaa

SEQ ID NO: 1422950 - DNA, 15 bp, Homo sapiens
tacgtcaaaacttaa

SEQ ID NO: 1422951 - DNA, 15 bp, Homo sapiens
ttacgtcaaaactta

SEQ ID NO: 1422952 - DNA, 15 bp, Homo sapiens
atttacgtcaaaact

SEQ ID NO: 1422953 - DNA, 15 bp, Homo sapiens
catttacgtcaaaac

SEQ ID NO: 1422954 - DNA, 15 bp, Homo sapiens
acatttacgtcaaaa

SEQ ID NO: 1422955 - DNA, 15 bp, Homo sapiens
aacatttacgtcaaa

SEQ ID NO: 1422956 - DNA, 15 bp, Homo sapiens
aaacatttacgtcaa

SEQ ID NO: 1422957 - DNA, 15 bp, Homo sapiens
taaacatttacgtca

SEQ ID NO: 1422958 - DNA, 15 bp, Homo sapiens
ctaaacatttacgtc

SEQ ID NO: 1422959 - DNA, 15 bp, Homo sapiens
actaaacatttacgt

SEQ ID NO: 1422960 - DNA, 15 bp, Homo sapiens
gactaaacatttacg

SEQ ID NO: 1422961 - DNA, 15 bp, Homo sapiens
agactaaacatttac

SEQ ID NO: 1422962 - DNA, 15 bp, Homo sapiens
cagactaaacattta

SEQ ID NO: 1422963 - DNA, 15 bp, Homo sapiens
tcagactaaacattt

SEQ ID NO: 1422964 - DNA, 15 bp, Homo sapiens
ttcagactaaacatt

SEQ ID NO: 1422965 - DNA, 15 bp, Homo sapiens
tttcagactaaacat

SEQ ID NO: 1422966 - DNA, 15 bp, Homo sapiens
atttcagactaaaca

SEQ ID NO: 1422967 - DNA, 15 bp, Homo sapiens
aatttcagactaaac

SEQ ID NO: 1422968 - DNA, 15 bp, Homo sapiens
caatttcagactaaa

SEQ ID NO: 1422969 - DNA, 15 bp, Homo sapiens
acaatttcagactaa

SEQ ID NO: 1422970 - DNA, 15 bp, Homo sapiens
tacaatttcagacta

SEQ ID NO: 1422971 - DNA, 15 bp, Homo sapiens
gtacaatttcagact

SEQ ID NO: 1422972 - DNA, 15 bp, Homo sapiens
cgtacaatttcagac

SEQ ID NO: 1422973 - DNA, 15 bp, Homo sapiens
acgtacaatttcaga

SEQ ID NO: 1422974 - DNA, 15 bp, Homo sapiens
aacgtacaatttcag

SEQ ID NO: 1422975 - DNA, 15 bp, Homo sapiens
caacgtacaatttca

SEQ ID NO: 1422976 - DNA, 15 bp, Homo sapiens
gcaacgtacaatttc

SEQ ID NO: 1422977 - DNA, 15 bp, Homo sapiens
tgcaacgtacaattt

SEQ ID NO: 1422978 - DNA, 15 bp, Homo sapiens
atgcaacgtacaatt

SEQ ID NO: 1422979 - DNA, 15 bp, Homo sapiens
aatgcaacgtacaat

SEQ ID NO: 1422980 - DNA, 15 bp, Homo sapiens
taatgcaacgtacaa

SEQ ID NO: 1422981 - DNA, 15 bp, Homo sapiens
ctaatgcaacgtaca

SEQ ID NO: 1422982 - DNA, 15 bp, Homo sapiens
actaatgcaacgtac

SEQ ID NO: 1422983 - DNA, 15 bp, Homo sapiens
cactaatgcaacgta

SEQ ID NO: 1422984 - DNA, 15 bp, Homo sapiens
acactaatgcaacgt

SEQ ID NO: 1422985 - DNA, 15 bp, Homo sapiens
cacactaatgcaacg

SEQ ID NO: 1422986 - DNA, 15 bp, Homo sapiens
gcacactaatgcaac

SEQ ID NO: 1422987 - DNA, 15 bp, Homo sapiens
tgcacactaatgcaa

SEQ ID NO: 1422988 - DNA, 15 bp, Homo sapiens
ttgcacactaatgca

SEQ ID NO: 1422989 - DNA, 15 bp, Homo sapiens
attgcacactaatgc

SEQ ID NO: 1422990 - DNA, 15 bp, Homo sapiens
gattgcacactaatg

SEQ ID NO: 1422991 - DNA, 15 bp, Homo sapiens
agattgcacactaat

SEQ ID NO: 1422992 - DNA, 15 bp, Homo sapiens
gagattgcacactaa

SEQ ID NO: 1422993 - DNA, 15 bp, Homo sapiens
ggagattgcacacta

SEQ ID NO: 1422994 - DNA, 15 bp, Homo sapiens
aggagattgcacact

SEQ ID NO: 1422995 - DNA, 15 bp, Homo sapiens
caggagattgcacac

SEQ ID NO: 1422996 - DNA, 15 bp, Homo sapiens
ccaggagattgcaca

SEQ ID NO: 1422997 - DNA, 15 bp, Homo sapiens
cccaggagattgcac

SEQ ID NO: 1422998 - DNA, 15 bp, Homo sapiens
acccaggagattgca

SEQ ID NO: 1422999 - DNA, 15 bp, Homo sapiens
tacccaggagattgc

SEQ ID NO: 1423000 - DNA, 15 bp, Homo sapiens
gtacccaggagattg

SEQ ID NO: 1423001 - DNA, 15 bp, Homo sapiens
tgtacccaggagatt

SEQ ID NO: 1423002 - DNA, 15 bp, Homo sapiens
ttgtacccaggagat

SEQ ID NO: 1423003 - DNA, 15 bp, Homo sapiens
cttgtacccaggaga

SEQ ID NO: 1423004 - DNA, 15 bp, Homo sapiens
acttgtacccaggag

SEQ ID NO: 1423005 - DNA, 15 bp, Homo sapiens
tacttgtacccagga

SEQ ID NO: 1423006 - DNA, 15 bp, Homo sapiens
gtacttgtacccagg

SEQ ID NO: 1423007 - DNA, 15 bp, Homo sapiens
agtacttgtacccag

SEQ ID NO: 1423008 - DNA, 15 bp, Homo sapiens
tagtacttgtaccca

SEQ ID NO: 1423009 - DNA, 15 bp, Homo sapiens
ttagtacttgtaccc

SEQ ID NO: 1423010 - DNA, 15 bp, Homo sapiens
cttagtacttgtacc

SEQ ID NO: 1423011 - DNA, 15 bp, Homo sapiens
acttagtacttgtac

SEQ ID NO: 1423012 - DNA, 15 bp, Homo sapiens
tacttagtacttgta

SEQ ID NO: 1423013 - DNA, 15 bp, Homo sapiens
ctacttagtacttgt

SEQ ID NO: 1423014 - DNA, 15 bp, Homo sapiens
tctacttagtacttg

SEQ ID NO: 1423015 - DNA, 15 bp, Homo sapiens
ttctacttagtactt

SEQ ID NO: 1423016 - DNA, 15 bp, Homo sapiens
attctacttagtact

SEQ ID NO: 1423017 - DNA, 15 bp, Homo sapiens
tattctacttagtac

SEQ ID NO: 1423018 - DNA, 15 bp, Homo sapiens
ttattctacttagta

SEQ ID NO: 1423019 - DNA, 15 bp, Homo sapiens
tttattctacttagt

SEQ ID NO: 1423020 - DNA, 15 bp, Homo sapiens
ttttattctacttag

SEQ ID NO: 1423021 - DNA, 15 bp, Homo sapiens
attttattctactta

SEQ ID NO: 1423022 - DNA, 15 bp, Homo sapiens
gattttattctactt

SEQ ID NO: 1423023 - DNA, 15 bp, Homo sapiens
agattttattctact

SEQ ID NO: 1423024 - DNA, 15 bp, Homo sapiens
aagattttattctac

SEQ ID NO: 1423025 - DNA, 15 bp, Homo sapiens
caagattttattcta

SEQ ID NO: 1423026 - DNA, 15 bp, Homo sapiens
acaagattttattct

SEQ ID NO: 1423027 - DNA, 15 bp, Homo sapiens
aacaagattttattc

SEQ ID NO: 1423028 - DNA, 15 bp, Homo sapiens
aaacaagattttatt

SEQ ID NO: 1423029 - DNA, 15 bp, Homo sapiens
gaaacaagattttat

SEQ ID NO: 1423030 - DNA, 15 bp, Homo sapiens
agaaacaagatttta

SEQ ID NO: 1423031 - DNA, 15 bp, Homo sapiens
aagaaacaagatttt

SEQ ID NO: 1423032 - DNA, 15 bp, Homo sapiens
taagaaacaagattt

SEQ ID NO: 1423033 - DNA, 15 bp, Homo sapiens
ttaagaaacaagatt

SEQ ID NO: 1423034 - DNA, 15 bp, Homo sapiens
tttaagaaacaagat

SEQ ID NO: 1423035 - DNA, 15 bp, Homo sapiens
ttttaagaaacaaga

SEQ ID NO: 1423036 - DNA, 15 bp, Homo sapiens
attttaagaaacaag

SEQ ID NO: 1423037 - DNA, 15 bp, Homo sapiens
gattttaagaaacaa

SEQ ID NO: 1423038 - DNA, 15 bp, Homo sapiens
ggattttaagaaaca

SEQ ID NO: 1423039 - DNA, 15 bp, Homo sapiens
gggattttaagaaac

SEQ ID NO: 1423040 - DNA, 15 bp, Homo sapiens
tgggattttaagaaa

SEQ ID NO: 1423041 - DNA, 15 bp, Homo sapiens
gtgggattttaagaa

SEQ ID NO: 1423042 - DNA, 15 bp, Homo sapiens
agtgggattttaaga

SEQ ID NO: 1423043 - DNA, 15 bp, Homo sapiens
tagtgggattttaag

SEQ ID NO: 1423044 - DNA, 15 bp, Homo sapiens
ttagtgggattttaa

SEQ ID NO: 1423045 - DNA, 15 bp, Homo sapiens
tttagtgggatttta

SEQ ID NO: 1423046 - DNA, 15 bp, Homo sapiens
atttagtgggatttt

SEQ ID NO: 1423047 - DNA, 15 bp, Homo sapiens
tatttagtgggattt

SEQ ID NO: 1423048 - DNA, 15 bp, Homo sapiens
atatttagtgggatt

SEQ ID NO: 1423049 - DNA, 15 bp, Homo sapiens
aatatttagtgggat

SEQ ID NO: 1423050 - DNA, 15 bp, Homo sapiens
taatatttagtggga

SEQ ID NO: 1423051 - DNA, 15 bp, Homo sapiens
ataatatttagtggg

SEQ ID NO: 1423052 - DNA, 15 bp, Homo sapiens
tataatatttagtgg

SEQ ID NO: 1423053 - DNA, 15 bp, Homo sapiens
ttataatatttagtg

SEQ ID NO: 1423054 - DNA, 15 bp, Homo sapiens
attataatatttagt

SEQ ID NO: 1423055 - DNA, 15 bp, Homo sapiens
gattataatatttag

SEQ ID NO: 1423056 - DNA, 15 bp, Homo sapiens
ggattataatattta

SEQ ID NO: 1423057 - DNA, 15 bp, Homo sapiens
gggattataatattt

SEQ ID NO: 1423058 - DNA, 15 bp, Homo sapiens
agggattataatatt

SEQ ID NO: 1423059 - DNA, 15 bp, Homo sapiens
cagggattataatat

SEQ ID NO: 1423060 - DNA, 15 bp, Homo sapiens
acagggattataata

SEQ ID NO: 1423061 - DNA, 15 bp, Homo sapiens
cacagggattataat

SEQ ID NO: 1423062 - DNA, 15 bp, Homo sapiens
acacagggattataa

SEQ ID NO: 1423063 - DNA, 15 bp, Homo sapiens
tacacagggattata

SEQ ID NO: 1423064 - DNA, 15 bp, Homo sapiens
atacacagggattat

SEQ ID NO: 1423065 - DNA, 15 bp, Homo sapiens
gatacacagggatta

SEQ ID NO: 1423066 - DNA, 15 bp, Homo sapiens
tgatacacagggatt

SEQ ID NO: 1423067 - DNA, 15 bp, Homo sapiens
ctgatacacagggat

SEQ ID NO: 1423068 - DNA, 15 bp, Homo sapiens
cctgatacacaggga

SEQ ID NO: 1423069 - DNA, 15 bp, Homo sapiens
ccctgatacacaggg

SEQ ID NO: 1423070 - DNA, 15 bp, Homo sapiens
cccctgatacacagg

SEQ ID NO: 1423071 - DNA, 15 bp, Homo sapiens
gcccctgatacacag

SEQ ID NO: 1423072 - DNA, 15 bp, Homo sapiens
tgcccctgatacaca

SEQ ID NO: 1423073 - DNA, 15 bp, Homo sapiens
atgcccctgatacac

SEQ ID NO: 1423074 - DNA, 15 bp, Homo sapiens
aatgcccctgataca

SEQ ID NO: 1423075 - DNA, 15 bp, Homo sapiens
gaatgcccctgatac

SEQ ID NO: 1423076 - DNA, 15 bp, Homo sapiens
tgaatgcccctgata

SEQ ID NO: 1423077 - DNA, 15 bp, Homo sapiens
atgaatgcccctgat

SEQ ID NO: 1423078 - DNA, 15 bp, Homo sapiens
aatgaatgcccctga

SEQ ID NO: 1423079 - DNA, 15 bp, Homo sapiens
aaatgaatgcccctg

SEQ ID NO: 1423080 - DNA, 15 bp, Homo sapiens
taaatgaatgcccct

SEQ ID NO: 1423081 - DNA, 15 bp, Homo sapiens
gtaaatgaatgcccc

SEQ ID NO: 1423082 - DNA, 15 bp, Homo sapiens
agtaaatgaatgccc

SEQ ID NO: 1423083 - DNA, 15 bp, Homo sapiens
aagtaaatgaatgcc

SEQ ID NO: 1423084 - DNA, 15 bp, Homo sapiens
aaagtaaatgaatgc

SEQ ID NO: 1423085 - DNA, 15 bp, Homo sapiens
aaaagtaaatgaatg

SEQ ID NO: 1423086 - DNA, 15 bp, Homo sapiens
aaaaagtaaatgaat

SEQ ID NO: 1423087 - DNA, 15 bp, Homo sapiens
gaaaaagtaaatgaa

SEQ ID NO: 1423088 - DNA, 15 bp, Homo sapiens
ggaaaaagtaaatga

SEQ ID NO: 1423089 - DNA, 15 bp, Homo sapiens
aggaaaaagtaaatg

SEQ ID NO: 1423090 - DNA, 15 bp, Homo sapiens
taggaaaaagtaaat

SEQ ID NO: 1423091 - DNA, 15 bp, Homo sapiens
ataggaaaaagtaaa

SEQ ID NO: 1423092 - DNA, 15 bp, Homo sapiens
tataggaaaaagtaa

SEQ ID NO: 1423093 - DNA, 15 bp, Homo sapiens
ttataggaaaaagta

SEQ ID NO: 1423094 - DNA, 15 bp, Homo sapiens
gttataggaaaaagt

SEQ ID NO: 1423095 - DNA, 15 bp, Homo sapiens
tgttataggaaaaag

SEQ ID NO: 1423096 - DNA, 15 bp, Homo sapiens
atgttataggaaaaa

SEQ ID NO: 1423097 - DNA, 15 bp, Homo sapiens
gatgttataggaaaa

SEQ ID NO: 1423098 - DNA, 15 bp, Homo sapiens
ggatgttataggaaa

SEQ ID NO: 1423099 - DNA, 15 bp, Homo sapiens
tggatgttataggaa

SEQ ID NO: 1423100 - DNA, 15 bp, Homo sapiens
ttggatgttatagga

SEQ ID NO: 1423101 - DNA, 15 bp, Homo sapiens
attggatgttatagg

SEQ ID NO: 1423102 - DNA, 15 bp, Homo sapiens
cattggatgttatag

SEQ ID NO: 1423103 - DNA, 15 bp, Homo sapiens
acattggatgttata

SEQ ID NO: 1423104 - DNA, 15 bp, Homo sapiens
aacattggatgttat

SEQ ID NO: 1423105 - DNA, 15 bp, Homo sapiens
gaacattggatgtta

SEQ ID NO: 1423106 - DNA, 15 bp, Homo sapiens
agaacattggatgtt

SEQ ID NO: 1423107 - DNA, 15 bp, Homo sapiens
tagaacattggatgt

SEQ ID NO: 1423108 - DNA, 15 bp, Homo sapiens
ctagaacattggatg

SEQ ID NO: 1423109 - DNA, 15 bp, Homo sapiens
cctagaacattggat

SEQ ID NO: 1423110 - DNA, 15 bp, Homo sapiens
ccctagaacattgga

SEQ ID NO: 1423111 - DNA, 15 bp, Homo sapiens
gccctagaacattgg

SEQ ID NO: 1423112 - DNA, 15 bp, Homo sapiens
tgccctagaacattg

SEQ ID NO: 1423113 - DNA, 15 bp, Homo sapiens
ctgccctagaacatt

SEQ ID NO: 1423114 - DNA, 15 bp, Homo sapiens
tctgccctagaacat

SEQ ID NO: 1423115 - DNA, 15 bp, Homo sapiens
ttctgccctagaaca

SEQ ID NO: 1423116 - DNA, 15 bp, Homo sapiens
tttctgccctagaac

SEQ ID NO: 1423117 - DNA, 15 bp, Homo sapiens
gtttctgccctagaa

SEQ ID NO: 1423118 - DNA, 15 bp, Homo sapiens
ggtttctgccctaga

SEQ ID NO: 1423119 - DNA, 15 bp, Homo sapiens
tggtttctgccctag

SEQ ID NO: 1423120 - DNA, 15 bp, Homo sapiens
atggtttctgcccta

SEQ ID NO: 1423121 - DNA, 15 bp, Homo sapiens
catggtttctgccct

SEQ ID NO: 1423122 - DNA, 15 bp, Homo sapiens
acatggtttctgccc

SEQ ID NO: 1423123 - DNA, 15 bp, Homo sapiens
aacatggtttctgcc

SEQ ID NO: 1423124 - DNA, 15 bp, Homo sapiens
taacatggtttctgc

SEQ ID NO: 1423125 - DNA, 15 bp, Homo sapiens
gtaacatggtttctg

SEQ ID NO: 1423126 - DNA, 15 bp, Homo sapiens
agtaacatggtttct

SEQ ID NO: 1423127 - DNA, 15 bp, Homo sapiens
tagtaacatggtttc

SEQ ID NO: 1423128 - DNA, 15 bp, Homo sapiens
gtagtaacatggttt

SEQ ID NO: 1423129 - DNA, 15 bp, Homo sapiens
tgtagtaacatggtt

SEQ ID NO: 1423130 - DNA, 15 bp, Homo sapiens
ttgtagtaacatggt

SEQ ID NO: 1423131 - DNA, 15 bp, Homo sapiens
attgtagtaacatgg

SEQ ID NO: 1423132 - DNA, 15 bp, Homo sapiens
tattgtagtaacatg

SEQ ID NO: 1423133 - DNA, 15 bp, Homo sapiens
ctattgtagtaacat

SEQ ID NO: 1423134 - DNA, 15 bp, Homo sapiens
actattgtagtaaca

SEQ ID NO: 1423135 - DNA, 15 bp, Homo sapiens
tactattgtagtaac

SEQ ID NO: 1423136 - DNA, 15 bp, Homo sapiens
atactattgtagtaa

SEQ ID NO: 1423137 - DNA, 15 bp, Homo sapiens
aatactattgtagta

SEQ ID NO: 1423138 - DNA, 15 bp, Homo sapiens
aaatactattgtagt

SEQ ID NO: 1423139 - DNA, 15 bp, Homo sapiens
caaatactattgtag

SEQ ID NO: 1423140 - DNA, 15 bp, Homo sapiens
acaaatactattgta

SEQ ID NO: 1423141 - DNA, 15 bp, Homo sapiens
aacaaatactattgt

SEQ ID NO: 1423142 - DNA, 15 bp, Homo sapiens
taacaaatactattg

SEQ ID NO: 1423143 - DNA, 15 bp, Homo sapiens
ctaacaaatactatt

SEQ ID NO: 1423144 - DNA, 15 bp, Homo sapiens
gctaacaaatactat

SEQ ID NO: 1423145 - DNA, 15 bp, Homo sapiens
tgctaacaaatacta

SEQ ID NO: 1423146 - DNA, 15 bp, Homo sapiens
ctgctaacaaatact

SEQ ID NO: 1423147 - DNA, 15 bp, Homo sapiens
tctgctaacaaatac

SEQ ID NO: 1423148 - DNA, 15 bp, Homo sapiens
ttctgctaacaaata

SEQ ID NO: 1423149 - DNA, 15 bp, Homo sapiens
gttctgctaacaaat

SEQ ID NO: 1423150 - DNA, 15 bp, Homo sapiens
tgttctgctaacaaa

SEQ ID NO: 1423151 - DNA, 15 bp, Homo sapiens
ctgttctgctaacaa

SEQ ID NO: 1423152 - DNA, 15 bp, Homo sapiens
cctgttctgctaaca

SEQ ID NO: 1423153 - DNA, 15 bp, Homo sapiens
tcctgttctgctaac

SEQ ID NO: 1423154 - DNA, 15 bp, Homo sapiens
ctcctgttctgctaa

SEQ ID NO: 1423155 - DNA, 15 bp, Homo sapiens
cctcctgttctgcta

SEQ ID NO: 1423156 - DNA, 15 bp, Homo sapiens
tcctcctgttctgct

SEQ ID NO: 1423157 - DNA, 15 bp, Homo sapiens
ttcctcctgttctgc

SEQ ID NO: 1423158 - DNA, 15 bp, Homo sapiens
tttcctcctgttctg

SEQ ID NO: 1423159 - DNA, 15 bp, Homo sapiens
ctttcctcctgttct

SEQ ID NO: 1423160 - DNA, 15 bp, Homo sapiens
gctttcctcctgttc

SEQ ID NO: 1423161 - DNA, 15 bp, Homo sapiens
agctttcctcctgtt

SEQ ID NO: 1423162 - DNA, 15 bp, Homo sapiens
cagctttcctcctgt

SEQ ID NO: 1423163 - DNA, 15 bp, Homo sapiens
tcagctttcctcctg

SEQ ID NO: 1423164 - DNA, 15 bp, Homo sapiens
ttcagctttcctcct

SEQ ID NO: 1423165 - DNA, 15 bp, Homo sapiens
attcagctttcctcc

SEQ ID NO: 1423166 - DNA, 15 bp, Homo sapiens
gattcagctttcctc

SEQ ID NO: 1423167 - DNA, 15 bp, Homo sapiens
ggattcagctttcct

SEQ ID NO: 1423168 - DNA, 15 bp, Homo sapiens
tggattcagctttcc

SEQ ID NO: 1423169 - DNA, 15 bp, Homo sapiens
atggattcagctttc

SEQ ID NO: 1423170 - DNA, 15 bp, Homo sapiens
tatggattcagcttt

SEQ ID NO: 1423171 - DNA, 15 bp, Homo sapiens
atatggattcagctt

SEQ ID NO: 1423172 - DNA, 15 bp, Homo sapiens
tatatggattcagct

SEQ ID NO: 1423173 - DNA, 15 bp, Homo sapiens
atatatggattcagc

SEQ ID NO: 1423174 - DNA, 15 bp, Homo sapiens
tatatatggattcag

SEQ ID NO: 1423175 - DNA, 15 bp, Homo sapiens
ttatatatggattca

SEQ ID NO: 1423176 - DNA, 15 bp, Homo sapiens
tttatatatggattc

SEQ ID NO: 1423177 - DNA, 15 bp, Homo sapiens
atttatatatggatt

SEQ ID NO: 1423178 - DNA, 15 bp, Homo sapiens
tatttatatatggat

SEQ ID NO: 1423179 - DNA, 15 bp, Homo sapiens
atatttatatatgga

SEQ ID NO: 1423180 - DNA, 15 bp, Homo sapiens
tatatttatatatgg

SEQ ID NO: 1423181 - DNA, 15 bp, Homo sapiens
ttatatttatatatg

SEQ ID NO: 1423182 - DNA, 15 bp, Homo sapiens
tttatatttatatat

SEQ ID NO: 1423183 - DNA, 15 bp, Homo sapiens
ttttatatttatata

SEQ ID NO: 1423184 - DNA, 15 bp, Homo sapiens
gttttatatttatat

SEQ ID NO: 1423185 - DNA, 15 bp, Homo sapiens
tgttttatatttata

SEQ ID NO: 1423186 - DNA, 15 bp, Homo sapiens
ctgttttatatttat

SEQ ID NO: 1423187 - DNA, 15 bp, Homo sapiens
gctgttttatattta

SEQ ID NO: 1423188 - DNA, 15 bp, Homo sapiens
tgctgttttatattt

SEQ ID NO: 1423189 - DNA, 15 bp, Homo sapiens
ttgctgttttatatt

SEQ ID NO: 1423190 - DNA, 15 bp, Homo sapiens
tttgctgttttatat

SEQ ID NO: 1423191 - DNA, 15 bp, Homo sapiens
ttttgctgttttata

SEQ ID NO: 1423192 - DNA, 15 bp, Homo sapiens
cttttgctgttttat

SEQ ID NO: 1423193 - DNA, 15 bp, Homo sapiens
acttttgctgtttta

SEQ ID NO: 1423194 - DNA, 15 bp, Homo sapiens
cacttttgctgtttt

SEQ ID NO: 1423195 - DNA, 15 bp, Homo sapiens
gcacttttgctgttt

SEQ ID NO: 1423196 - DNA, 15 bp, Homo sapiens
agcacttttgctgtt

SEQ ID NO: 1423197 - DNA, 15 bp, Homo sapiens
aagcacttttgctgt

SEQ ID NO: 1423198 - DNA, 15 bp, Homo sapiens
aaagcacttttgctg

SEQ ID NO: 1423199 - DNA, 15 bp, Homo sapiens
aaaagcacttttgct

SEQ ID NO: 1423200 - DNA, 15 bp, Homo sapiens
taaaagcacttttgc

SEQ ID NO: 1423201 - DNA, 15 bp, Homo sapiens
ataaaagcacttttg

SEQ ID NO: 1423202 - DNA, 15 bp, Homo sapiens
gataaaagcactttt

SEQ ID NO: 1423203 - DNA, 15 bp, Homo sapiens
agataaaagcacttt

SEQ ID NO: 1423204 - DNA, 15 bp, Homo sapiens
gagataaaagcactt

SEQ ID NO: 1423205 - DNA, 15 bp, Homo sapiens
tgagataaaagcact

SEQ ID NO: 1423206 - DNA, 15 bp, Homo sapiens
ctgagataaaagcac

SEQ ID NO: 1423207 - DNA, 15 bp, Homo sapiens
actgagataaaagca

SEQ ID NO: 1423208 - DNA, 15 bp, Homo sapiens
aactgagataaaagc

SEQ ID NO: 1423209 - DNA, 15 bp, Homo sapiens
taactgagataaaag

SEQ ID NO: 1423210 - DNA, 15 bp, Homo sapiens
ataactgagataaaa

SEQ ID NO: 1423211 - DNA, 15 bp, Homo sapiens
aataactgagataaa

SEQ ID NO: 1423212 - DNA, 15 bp, Homo sapiens
aaataactgagataa

SEQ ID NO: 1423213 - DNA, 15 bp, Homo sapiens
gaaataactgagata

SEQ ID NO: 1423214 - DNA, 15 bp, Homo sapiens
ggaaataactgagat

SEQ ID NO: 1423215 - DNA, 15 bp, Homo sapiens
aggaaataactgaga

SEQ ID NO: 1423216 - DNA, 15 bp, Homo sapiens
caggaaataactgag

SEQ ID NO: 1423217 - DNA, 15 bp, Homo sapiens
ccaggaaataactga

SEQ ID NO: 1423218 - DNA, 15 bp, Homo sapiens
cccaggaaataactg

SEQ ID NO: 1423219 - DNA, 15 bp, Homo sapiens
tcccaggaaataact

SEQ ID NO: 1423220 - DNA, 15 bp, Homo sapiens
ttcccaggaaataac

SEQ ID NO: 1423221 - DNA, 15 bp, Homo sapiens
attcccaggaaataa

SEQ ID NO: 1423222 - DNA, 15 bp, Homo sapiens
tattcccaggaaata

SEQ ID NO: 1423223 - DNA, 15 bp, Homo sapiens
atattcccaggaaat

SEQ ID NO: 1423224 - DNA, 15 bp, Homo sapiens
aatattcccaggaaa

SEQ ID NO: 1423225 - DNA, 15 bp, Homo sapiens
aaatattcccaggaa

SEQ ID NO: 1423226 - DNA, 15 bp, Homo sapiens
gaaatattcccagga

SEQ ID NO: 1423227 - DNA, 15 bp, Homo sapiens
agaaatattcccagg

SEQ ID NO: 1423228 - DNA, 15 bp, Homo sapiens
cagaaatattcccag

SEQ ID NO: 1423229 - DNA, 15 bp, Homo sapiens
gcagaaatattccca

SEQ ID NO: 1423230 - DNA, 15 bp, Homo sapiens
agcagaaatattccc

SEQ ID NO: 1423231 - DNA, 15 bp, Homo sapiens
cagcagaaatattcc

SEQ ID NO: 1423232 - DNA, 15 bp, Homo sapiens
tcagcagaaatattc

SEQ ID NO: 1423233 - DNA, 15 bp, Homo sapiens
atcagcagaaatatt

SEQ ID NO: 1423234 - DNA, 15 bp, Homo sapiens
gatcagcagaaatat

SEQ ID NO: 1423235 - DNA, 15 bp, Homo sapiens
agatcagcagaaata

SEQ ID NO: 1423236 - DNA, 15 bp, Homo sapiens
aagatcagcagaaat

SEQ ID NO: 1423237 - DNA, 15 bp, Homo sapiens
taagatcagcagaaa

SEQ ID NO: 1423238 - DNA, 15 bp, Homo sapiens
ttaagatcagcagaa

SEQ ID NO: 1423239 - DNA, 15 bp, Homo sapiens
cttaagatcagcaga

SEQ ID NO: 1423240 - DNA, 15 bp, Homo sapiens
tcttaagatcagcag

SEQ ID NO: 1423241 - DNA, 15 bp, Homo sapiens
atcttaagatcagca

SEQ ID NO: 1423242 - DNA, 15 bp, Homo sapiens
aatcttaagatcagc

SEQ ID NO: 1423243 - DNA, 15 bp, Homo sapiens
aaatcttaagatcag

SEQ ID NO: 1423244 - DNA, 15 bp, Homo sapiens
gaaatcttaagatca

SEQ ID NO: 1423245 - DNA, 15 bp, Homo sapiens
ggaaatcttaagatc

SEQ ID NO: 1423246 - DNA, 15 bp, Homo sapiens
aggaaatcttaagat

SEQ ID NO: 1423247 - DNA, 15 bp, Homo sapiens
gaggaaatcttaaga

SEQ ID NO: 1423248 - DNA, 15 bp, Homo sapiens
agaggaaatcttaag

SEQ ID NO: 1423249 - DNA, 15 bp, Homo sapiens
aagaggaaatcttaa

SEQ ID NO: 1423250 - DNA, 15 bp, Homo sapiens
gaagaggaaatctta

SEQ ID NO: 1423251 - DNA, 15 bp, Homo sapiens
tgaagaggaaatctt

SEQ ID NO: 1423252 - DNA, 15 bp, Homo sapiens
ctgaagaggaaatct

SEQ ID NO: 1423253 - DNA, 15 bp, Homo sapiens
actgaagaggaaatc

SEQ ID NO: 1423254 - DNA, 15 bp, Homo sapiens
aactgaagaggaaat

SEQ ID NO: 1423255 - DNA, 15 bp, Homo sapiens
aaactgaagaggaaa

SEQ ID NO: 1423256 - DNA, 15 bp, Homo sapiens
caaactgaagaggaa

SEQ ID NO: 1423257 - DNA, 15 bp, Homo sapiens
acaaactgaagagga

SEQ ID NO: 1423258 - DNA, 15 bp, Homo sapiens
tacaaactgaagagg

SEQ ID NO: 1423259 - DNA, 15 bp, Homo sapiens
atacaaactgaagag

SEQ ID NO: 1423260 - DNA, 15 bp, Homo sapiens
catacaaactgaaga

SEQ ID NO: 1423261 - DNA, 15 bp, Homo sapiens
acatacaaactgaag

SEQ ID NO: 1423262 - DNA, 15 bp, Homo sapiens
tacatacaaactgaa

SEQ ID NO: 1423263 - DNA, 15 bp, Homo sapiens
atacatacaaactga

SEQ ID NO: 1423264 - DNA, 15 bp, Homo sapiens
tatacatacaaactg

SEQ ID NO: 1423265 - DNA, 15 bp, Homo sapiens
ttatacatacaaact

SEQ ID NO: 1423266 - DNA, 15 bp, Homo sapiens
tttatacatacaaac

SEQ ID NO: 1423267 - DNA, 15 bp, Homo sapiens
ttttatacatacaaa

SEQ ID NO: 1423268 - DNA, 15 bp, Homo sapiens
tttttatacatacaa

SEQ ID NO: 1423269 - DNA, 15 bp, Homo sapiens
gtttttatacataca

SEQ ID NO: 1423270 - DNA, 15 bp, Homo sapiens
agtttttatacatac

SEQ ID NO: 1423271 - DNA, 15 bp, Homo sapiens
cagtttttatacata

SEQ ID NO: 1423272 - DNA, 15 bp, Homo sapiens
tcagtttttatacat

SEQ ID NO: 1423273 - DNA, 15 bp, Homo sapiens
atcagtttttataca

SEQ ID NO: 1423274 - DNA, 15 bp, Homo sapiens
tatcagtttttatac

SEQ ID NO: 1423275 - DNA, 15 bp, Homo sapiens
ttatcagtttttata

SEQ ID NO: 1423276 - DNA, 15 bp, Homo sapiens
attatcagtttttat

SEQ ID NO: 1423277 - DNA, 15 bp, Homo sapiens
cattatcagttttta

SEQ ID NO: 1423278 - DNA, 15 bp, Homo sapiens
acattatcagttttt

SEQ ID NO: 1423279 - DNA, 15 bp, Homo sapiens
tacattatcagtttt

SEQ ID NO: 1423280 - DNA, 15 bp, Homo sapiens
ttacattatcagttt

SEQ ID NO: 1423281 - DNA, 15 bp, Homo sapiens
attacattatcagtt

SEQ ID NO: 1423282 - DNA, 15 bp, Homo sapiens
cattacattatcagt

SEQ ID NO: 1423283 - DNA, 15 bp, Homo sapiens
ccattacattatcag

SEQ ID NO: 1423284 - DNA, 15 bp, Homo sapiens
cccattacattatca

SEQ ID NO: 1423285 - DNA, 15 bp, Homo sapiens
tcccattacattatc

SEQ ID NO: 1423286 - DNA, 15 bp, Homo sapiens
ttcccattacattat

SEQ ID NO: 1423287 - DNA, 15 bp, Homo sapiens
attcccattacatta

SEQ ID NO: 1423288 - DNA, 15 bp, Homo sapiens
aattcccattacatt

SEQ ID NO: 1423289 - DNA, 15 bp, Homo sapiens
taattcccattacat

SEQ ID NO: 1423290 - DNA, 15 bp, Homo sapiens
gtaattcccattaca

SEQ ID NO: 1423291 - DNA, 15 bp, Homo sapiens
tgtaattcccattac

SEQ ID NO: 1423292 - DNA, 15 bp, Homo sapiens
atgtaattcccatta

SEQ ID NO: 1423293 - DNA, 15 bp, Homo sapiens
aatgtaattcccatt

SEQ ID NO: 1423294 - DNA, 15 bp, Homo sapiens
taatgtaattcccat

SEQ ID NO: 1423295 - DNA, 15 bp, Homo sapiens
ataatgtaattccca

SEQ ID NO: 1423296 - DNA, 15 bp, Homo sapiens
gataatgtaattccc

SEQ ID NO: 1423297 - DNA, 15 bp, Homo sapiens
tgataatgtaattcc

SEQ ID NO: 1423298 - DNA, 15 bp, Homo sapiens
ctgataatgtaattc

SEQ ID NO: 1423299 - DNA, 15 bp, Homo sapiens
actgataatgtaatt

SEQ ID NO: 1423300 - DNA, 15 bp, Homo sapiens
aactgataatgtaat

SEQ ID NO: 1423301 - DNA, 15 bp, Homo sapiens
taactgataatgtaa

SEQ ID NO: 1423302 - DNA, 15 bp, Homo sapiens
ataactgataatgta

SEQ ID NO: 1423303 - DNA, 15 bp, Homo sapiens
cataactgataatgt

SEQ ID NO: 1423304 - DNA, 15 bp, Homo sapiens
acataactgataatg

SEQ ID NO: 1423305 - DNA, 15 bp, Homo sapiens
tacataactgataat

SEQ ID NO: 1423306 - DNA, 15 bp, Homo sapiens
atacataactgataa

SEQ ID NO: 1423307 - DNA, 15 bp, Homo sapiens
catacataactgata

SEQ ID NO: 1423308 - DNA, 15 bp, Homo sapiens
gcatacataactgat

SEQ ID NO: 1423309 - DNA, 15 bp, Homo sapiens
tgcatacataactga

SEQ ID NO: 1423310 - DNA, 15 bp, Homo sapiens
atgcatacataactg

SEQ ID NO: 1423311 - DNA, 15 bp, Homo sapiens
aatgcatacataact

SEQ ID NO: 1423312 - DNA, 15 bp, Homo sapiens
taatgcatacataac

SEQ ID NO: 1423313 - DNA, 15 bp, Homo sapiens
ttaatgcatacataa

SEQ ID NO: 1423314 - DNA, 15 bp, Homo sapiens
attaatgcatacata

SEQ ID NO: 1423315 - DNA, 15 bp, Homo sapiens
aattaatgcatacat

SEQ ID NO: 1423316 - DNA, 15 bp, Homo sapiens
caattaatgcataca

SEQ ID NO: 1423317 - DNA, 15 bp, Homo sapiens
tcaattaatgcatac

SEQ ID NO: 1423318 - DNA, 15 bp, Homo sapiens
ttcaattaatgcata

SEQ ID NO: 1423319 - DNA, 15 bp, Homo sapiens
cttcaattaatgcat

SEQ ID NO: 1423320 - DNA, 15 bp, Homo sapiens
ccttcaattaatgca

SEQ ID NO: 1423321 - DNA, 15 bp, Homo sapiens
accttcaattaatgc

SEQ ID NO: 1423322 - DNA, 15 bp, Homo sapiens
aaccttcaattaatg

SEQ ID NO: 1423323 - DNA, 15 bp, Homo sapiens
aaaccttcaattaat

SEQ ID NO: 1423324 - DNA, 15 bp, Homo sapiens
aaaaccttcaattaa

SEQ ID NO: 1423325 - DNA, 15 bp, Homo sapiens
aaaaaccttcaatta

SEQ ID NO: 1423326 - DNA, 15 bp, Homo sapiens
aaaaaaccttcaatt

SEQ ID NO: 1423327 - DNA, 15 bp, Homo sapiens
taaaaaaccttcaat

SEQ ID NO: 1423328 - DNA, 15 bp, Homo sapiens
ttaaaaaaccttcaa

SEQ ID NO: 1423329 - DNA, 15 bp, Homo sapiens
attaaaaaaccttca

SEQ ID NO: 1423330 - DNA, 15 bp, Homo sapiens
gattaaaaaaccttc

SEQ ID NO: 1423331 - DNA, 15 bp, Homo sapiens
ggattaaaaaacctt

SEQ ID NO: 1423332 - DNA, 15 bp, Homo sapiens
tggattaaaaaacct

SEQ ID NO: 1423333 - DNA, 15 bp, Homo sapiens
ttggattaaaaaacc

SEQ ID NO: 1423334 - DNA, 15 bp, Homo sapiens
attggattaaaaaac

SEQ ID NO: 1423335 - DNA, 15 bp, Homo sapiens
aattggattaaaaaa

SEQ ID NO: 1423336 - DNA, 15 bp, Homo sapiens
taattggattaaaaa

SEQ ID NO: 1423337 - DNA, 15 bp, Homo sapiens
ttaattggattaaaa

SEQ ID NO: 1423338 - DNA, 15 bp, Homo sapiens
tttaattggattaaa

SEQ ID NO: 1423339 - DNA, 15 bp, Homo sapiens
gtttaattggattaa

SEQ ID NO: 1423340 - DNA, 15 bp, Homo sapiens
tgtttaattggatta

SEQ ID NO: 1423341 - DNA, 15 bp, Homo sapiens
ctgtttaattggatt

SEQ ID NO: 1423342 - DNA, 15 bp, Homo sapiens
actgtttaattggat

SEQ ID NO: 1423343 - DNA, 15 bp, Homo sapiens
aactgtttaattgga

SEQ ID NO: 1423344 - DNA, 15 bp, Homo sapiens
caactgtttaattgg

SEQ ID NO: 1423345 - DNA, 15 bp, Homo sapiens
acaactgtttaattg

SEQ ID NO: 1423346 - DNA, 15 bp, Homo sapiens
cacaactgtttaatt

SEQ ID NO: 1423347 - DNA, 15 bp, Homo sapiens
acacaactgtttaat

SEQ ID NO: 1423348 - DNA, 15 bp, Homo sapiens
tacacaactgtttaa

SEQ ID NO: 1423349 - DNA, 15 bp, Homo sapiens
ttacacaactgttta

SEQ ID NO: 1423350 - DNA, 15 bp, Homo sapiens
tttacacaactgttt

SEQ ID NO: 1423351 - DNA, 15 bp, Homo sapiens
atttacacaactgtt

SEQ ID NO: 1423352 - DNA, 15 bp, Homo sapiens
tatttacacaactgt

SEQ ID NO: 1423353 - DNA, 15 bp, Homo sapiens
gtatttacacaactg

SEQ ID NO: 1423354 - DNA, 15 bp, Homo sapiens
agtatttacacaact

SEQ ID NO: 1423355 - DNA, 15 bp, Homo sapiens
cagtatttacacaac

SEQ ID NO: 1423356 - DNA, 15 bp, Homo sapiens
acagtatttacacaa

SEQ ID NO: 1423357 - DNA, 15 bp, Homo sapiens
cacagtatttacaca

SEQ ID NO: 1423358 - DNA, 15 bp, Homo sapiens
tcacagtatttacac

SEQ ID NO: 1423359 - DNA, 15 bp, Homo sapiens
gtcacagtatttaca

SEQ ID NO: 1423360 - DNA, 15 bp, Homo sapiens
tgtcacagtatttac

SEQ ID NO: 1423361 - DNA, 15 bp, Homo sapiens
ttgtcacagtattta

SEQ ID NO: 1423362 - DNA, 15 bp, Homo sapiens
cttgtcacagtattt

SEQ ID NO: 1423363 - DNA, 15 bp, Homo sapiens
tcttgtcacagtatt

SEQ ID NO: 1423364 - DNA, 15 bp, Homo sapiens
atcttgtcacagtat

SEQ ID NO: 1423365 - DNA, 15 bp, Homo sapiens
aatcttgtcacagta

SEQ ID NO: 1423366 - DNA, 15 bp, Homo sapiens
aaatcttgtcacagt

SEQ ID NO: 1423367 - DNA, 15 bp, Homo sapiens
aaaatcttgtcacag

SEQ ID NO: 1423368 - DNA, 15 bp, Homo sapiens
taaaatcttgtcaca

SEQ ID NO: 1423369 - DNA, 15 bp, Homo sapiens
ctaaaatcttgtcac

SEQ ID NO: 1423370 - DNA, 15 bp, Homo sapiens
actaaaatcttgtca

SEQ ID NO: 1423371 - DNA, 15 bp, Homo sapiens
cactaaaatcttgtc

SEQ ID NO: 1423372 - DNA, 15 bp, Homo sapiens
tcactaaaatcttgt

SEQ ID NO: 1423373 - DNA, 15 bp, Homo sapiens
gtcactaaaatcttg

SEQ ID NO: 1423374 - DNA, 15 bp, Homo sapiens
tgtcactaaaatctt

SEQ ID NO: 1423375 - DNA, 15 bp, Homo sapiens
atgtcactaaaatct

SEQ ID NO: 1423376 - DNA, 15 bp, Homo sapiens
catgtcactaaaatc

SEQ ID NO: 1423377 - DNA, 15 bp, Homo sapiens
acatgtcactaaaat

SEQ ID NO: 1423378 - DNA, 15 bp, Homo sapiens
gacatgtcactaaaa

SEQ ID NO: 1423379 - DNA, 15 bp, Homo sapiens
agacatgtcactaaa

SEQ ID NO: 1423380 - DNA, 15 bp, Homo sapiens
gagacatgtcactaa

SEQ ID NO: 1423381 - DNA, 15 bp, Homo sapiens
agagacatgtcacta

SEQ ID NO: 1423382 - DNA, 15 bp, Homo sapiens
aagagacatgtcact

SEQ ID NO: 1423383 - DNA, 15 bp, Homo sapiens
aaagagacatgtcac

SEQ ID NO: 1423384 - DNA, 15 bp, Homo sapiens
taaagagacatgtca

SEQ ID NO: 1423385 - DNA, 15 bp, Homo sapiens
ataaagagacatgtc

SEQ ID NO: 1423386 - DNA, 15 bp, Homo sapiens
gataaagagacatgt

SEQ ID NO: 1423387 - DNA, 15 bp, Homo sapiens
tgataaagagacatg

SEQ ID NO: 1423388 - DNA, 15 bp, Homo sapiens
atgataaagagacat

SEQ ID NO: 1423389 - DNA, 15 bp, Homo sapiens
tatgataaagagaca

SEQ ID NO: 1423390 - DNA, 15 bp, Homo sapiens
ttatgataaagagac

SEQ ID NO: 1423391 - DNA, 15 bp, Homo sapiens
cttatgataaagaga

SEQ ID NO: 1423392 - DNA, 15 bp, Homo sapiens
tcttatgataaagag

SEQ ID NO: 1423393 - DNA, 15 bp, Homo sapiens
ttcttatgataaaga

SEQ ID NO: 1423394 - DNA, 15 bp, Homo sapiens
gttcttatgataaag

SEQ ID NO: 1423395 - DNA, 15 bp, Homo sapiens
agttcttatgataaa

SEQ ID NO: 1423396 - DNA, 15 bp, Homo sapiens
gagttcttatgataa

SEQ ID NO: 1423397 - DNA, 15 bp, Homo sapiens
tgagttcttatgata

SEQ ID NO: 1423398 - DNA, 15 bp, Homo sapiens
ttgagttcttatgat

SEQ ID NO: 1423399 - DNA, 15 bp, Homo sapiens
cttgagttcttatga

SEQ ID NO: 1423400 - DNA, 15 bp, Homo sapiens
tcttgagttcttatg

SEQ ID NO: 1423401 - DNA, 15 bp, Homo sapiens
atcttgagttcttat

SEQ ID NO: 1423402 - DNA, 15 bp, Homo sapiens
aatcttgagttctta

SEQ ID NO: 1423403 - DNA, 15 bp, Homo sapiens
aaatcttgagttctt

SEQ ID NO: 1423404 - DNA, 15 bp, Homo sapiens
taaatcttgagttct

SEQ ID NO: 1423405 - DNA, 15 bp, Homo sapiens
ataaatcttgagttc

SEQ ID NO: 1423406 - DNA, 15 bp, Homo sapiens
tataaatcttgagtt

SEQ ID NO: 1423407 - DNA, 15 bp, Homo sapiens
ctataaatcttgagt

SEQ ID NO: 1423408 - DNA, 15 bp, Homo sapiens
cctataaatcttgag

SEQ ID NO: 1423409 - DNA, 15 bp, Homo sapiens
ccctataaatcttga

SEQ ID NO: 1423410 - DNA, 15 bp, Homo sapiens
gccctataaatcttg

SEQ ID NO: 1423411 - DNA, 15 bp, Homo sapiens
agccctataaatctt

SEQ ID NO: 1423412 - DNA, 15 bp, Homo sapiens
aagccctataaatct

SEQ ID NO: 1423413 - DNA, 15 bp, Homo sapiens
aaagccctataaatc

SEQ ID NO: 1423414 - DNA, 15 bp, Homo sapiens
aaaagccctataaat

SEQ ID NO: 1423415 - DNA, 15 bp, Homo sapiens
aaaaagccctataaa

SEQ ID NO: 1423416 - DNA, 15 bp, Homo sapiens
taaaaagccctataa

SEQ ID NO: 1423417 - DNA, 15 bp, Homo sapiens
ttaaaaagccctata

SEQ ID NO: 1423418 - DNA, 15 bp, Homo sapiens
tttaaaaagccctat

SEQ ID NO: 1423419 - DNA, 15 bp, Homo sapiens
ttttaaaaagcccta

SEQ ID NO: 1423420 - DNA, 15 bp, Homo sapiens
tttttaaaaagccct

SEQ ID NO: 1423421 - DNA, 15 bp, Homo sapiens
ctttttaaaaagccc

SEQ ID NO: 1423422 - DNA, 15 bp, Homo sapiens
gctttttaaaaagcc

SEQ ID NO: 1423423 - DNA, 15 bp, Homo sapiens
agctttttaaaaagc

SEQ ID NO: 1423424 - DNA, 15 bp, Homo sapiens
tagctttttaaaaag

SEQ ID NO: 1423425 - DNA, 15 bp, Homo sapiens
ctagctttttaaaaa

SEQ ID NO: 1423426 - DNA, 15 bp, Homo sapiens
actagctttttaaaa

SEQ ID NO: 1423427 - DNA, 15 bp, Homo sapiens
gactagctttttaaa

SEQ ID NO: 1423428 - DNA, 15 bp, Homo sapiens
tgactagctttttaa

SEQ ID NO: 1423429 - DNA, 15 bp, Homo sapiens
atgactagcttttta

SEQ ID NO: 1423430 - DNA, 15 bp, Homo sapiens
aatgactagcttttt

SEQ ID NO: 1423431 - DNA, 15 bp, Homo sapiens
aaatgactagctttt

SEQ ID NO: 1423432 - DNA, 15 bp, Homo sapiens
gaaatgactagcttt

SEQ ID NO: 1423433 - DNA, 15 bp, Homo sapiens
ggaaatgactagctt

SEQ ID NO: 1423434 - DNA, 15 bp, Homo sapiens
tggaaatgactagct

SEQ ID NO: 1423435 - DNA, 15 bp, Homo sapiens
atggaaatgactagc

SEQ ID NO: 1423436 - DNA, 15 bp, Homo sapiens
catggaaatgactag

SEQ ID NO: 1423437 - DNA, 15 bp, Homo sapiens
acatggaaatgacta

SEQ ID NO: 1423438 - DNA, 15 bp, Homo sapiens
aacatggaaatgact

SEQ ID NO: 1423439 - DNA, 15 bp, Homo sapiens
aaacatggaaatgac

SEQ ID NO: 1423440 - DNA, 15 bp, Homo sapiens
taaacatggaaatga

SEQ ID NO: 1423441 - DNA, 15 bp, Homo sapiens
ataaacatggaaatg

SEQ ID NO: 1423442 - DNA, 15 bp, Homo sapiens
aataaacatggaaat

SEQ ID NO: 1423443 - DNA, 15 bp, Homo sapiens
caataaacatggaaa

SEQ ID NO: 1423444 - DNA, 15 bp, Homo sapiens
acaataaacatggaa

SEQ ID NO: 1423445 - DNA, 15 bp, Homo sapiens
tacaataaacatgga

SEQ ID NO: 1423446 - DNA, 15 bp, Homo sapiens
gtacaataaacatgg

SEQ ID NO: 1423447 - DNA, 15 bp, Homo sapiens
tgtacaataaacatg

SEQ ID NO: 1423448 - DNA, 15 bp, Homo sapiens
ctgtacaataaacat

SEQ ID NO: 1423449 - DNA, 15 bp, Homo sapiens
actgtacaataaaca

SEQ ID NO: 1423450 - DNA, 15 bp, Homo sapiens
aactgtacaataaac

SEQ ID NO: 1423451 - DNA, 15 bp, Homo sapiens
aaactgtacaataaa

SEQ ID NO: 1423452 - DNA, 15 bp, Homo sapiens
aaaactgtacaataa

SEQ ID NO: 1423453 - DNA, 15 bp, Homo sapiens
gaaaactgtacaata

SEQ ID NO: 1423454 - DNA, 15 bp, Homo sapiens
agaaaactgtacaat

SEQ ID NO: 1423455 - DNA, 15 bp, Homo sapiens
gagaaaactgtacaa

SEQ ID NO: 1423456 - DNA, 15 bp, Homo sapiens
agagaaaactgtaca

SEQ ID NO: 1423457 - DNA, 15 bp, Homo sapiens
gagagaaaactgtac

SEQ ID NO: 1423458 - DNA, 15 bp, Homo sapiens
tgagagaaaactgta

SEQ ID NO: 1423459 - DNA, 15 bp, Homo sapiens
ctgagagaaaactgt

SEQ ID NO: 1423460 - DNA, 15 bp, Homo sapiens
actgagagaaaactg

SEQ ID NO: 1423461 - DNA, 15 bp, Homo sapiens
aactgagagaaaact

SEQ ID NO: 1423462 - DNA, 15 bp, Homo sapiens
taactgagagaaaac

SEQ ID NO: 1423463 - DNA, 15 bp, Homo sapiens
ataactgagagaaaa

SEQ ID NO: 1423464 - DNA, 15 bp, Homo sapiens
aataactgagagaaa

SEQ ID NO: 1423465 - DNA, 15 bp, Homo sapiens
aaataactgagagaa

SEQ ID NO: 1423466 - DNA, 15 bp, Homo sapiens
taaataactgagaga

SEQ ID NO: 1423467 - DNA, 15 bp, Homo sapiens
ttaaataactgagag

SEQ ID NO: 1423468 - DNA, 15 bp, Homo sapiens
tttaaataactgaga

SEQ ID NO: 1423469 - DNA, 15 bp, Homo sapiens
atttaaataactgag

SEQ ID NO: 1423470 - DNA, 15 bp, Homo sapiens
catttaaataactga

SEQ ID NO: 1423471 - DNA, 15 bp, Homo sapiens
tcatttaaataactg

SEQ ID NO: 1423472 - DNA, 15 bp, Homo sapiens
gtcatttaaataact

SEQ ID NO: 1423473 - DNA, 15 bp, Homo sapiens
agtcatttaaataac

SEQ ID NO: 1423474 - DNA, 15 bp, Homo sapiens
aagtcatttaaataa

SEQ ID NO: 1423475 - DNA, 15 bp, Homo sapiens
gaagtcatttaaata

SEQ ID NO: 1423476 - DNA, 15 bp, Homo sapiens
agaagtcatttaaat

SEQ ID NO: 1423477 - DNA, 15 bp, Homo sapiens
aagaagtcatttaaa

SEQ ID NO: 1423478 - DNA, 15 bp, Homo sapiens
caagaagtcatttaa

SEQ ID NO: 1423479 - DNA, 15 bp, Homo sapiens
tcaagaagtcattta

SEQ ID NO: 1423480 - DNA, 15 bp, Homo sapiens
ttcaagaagtcattt

SEQ ID NO: 1423481 - DNA, 15 bp, Homo sapiens
tttcaagaagtcatt

SEQ ID NO: 1423482 - DNA, 15 bp, Homo sapiens
ctttcaagaagtcat

SEQ ID NO: 1423483 - DNA, 15 bp, Homo sapiens
actttcaagaagtca

SEQ ID NO: 1423484 - DNA, 15 bp, Homo sapiens
cactttcaagaagtc

SEQ ID NO: 1423485 - DNA, 15 bp, Homo sapiens
acactttcaagaagt

SEQ ID NO: 1423486 - DNA, 15 bp, Homo sapiens
gacactttcaagaag

SEQ ID NO: 1423487 - DNA, 15 bp, Homo sapiens
tgacactttcaagaa

SEQ ID NO: 1423488 - DNA, 15 bp, Homo sapiens
ttgacactttcaaga

SEQ ID NO: 1423489 - DNA, 15 bp, Homo sapiens
tttgacactttcaag

SEQ ID NO: 1423490 - DNA, 15 bp, Homo sapiens
ttttgacactttcaa

SEQ ID NO: 1423491 - DNA, 15 bp, Homo sapiens
attttgacactttca

SEQ ID NO: 1423492 - DNA, 15 bp, Homo sapiens
aattttgacactttc

SEQ ID NO: 1423493 - DNA, 15 bp, Homo sapiens
gaattttgacacttt

SEQ ID NO: 1423494 - DNA, 15 bp, Homo sapiens
tgaattttgacactt

SEQ ID NO: 1423495 - DNA, 15 bp, Homo sapiens
gtgaattttgacact

SEQ ID NO: 1423496 - DNA, 15 bp, Homo sapiens
tgtgaattttgacac

SEQ ID NO: 1423497 - DNA, 15 bp, Homo sapiens
ttgtgaattttgaca

SEQ ID NO: 1423498 - DNA, 15 bp, Homo sapiens
cttgtgaattttgac

SEQ ID NO: 1423499 - DNA, 15 bp, Homo sapiens
ccttgtgaattttga

SEQ ID NO: 1423500 - DNA, 15 bp, Homo sapiens
accttgtgaattttg

SEQ ID NO: 1423501 - DNA, 15 bp, Homo sapiens
gaccttgtgaatttt

SEQ ID NO: 1423502 - DNA, 15 bp, Homo sapiens
ggaccttgtgaattt

SEQ ID NO: 1423503 - DNA, 15 bp, Homo sapiens
aggaccttgtgaatt

SEQ ID NO: 1423504 - DNA, 15 bp, Homo sapiens
taggaccttgtgaat

SEQ ID NO: 1423505 - DNA, 15 bp, Homo sapiens
ttaggaccttgtgaa

SEQ ID NO: 1423506 - DNA, 15 bp, Homo sapiens
attaggaccttgtga

SEQ ID NO: 1423507 - DNA, 15 bp, Homo sapiens
aattaggaccttgtg

SEQ ID NO: 1423508 - DNA, 15 bp, Homo sapiens
caattaggaccttgt

SEQ ID NO: 1423509 - DNA, 15 bp, Homo sapiens
acaattaggaccttg

SEQ ID NO: 1423510 - DNA, 15 bp, Homo sapiens
gacaattaggacctt

SEQ ID NO: 1423511 - DNA, 15 bp, Homo sapiens
tgacaattaggacct

SEQ ID NO: 1423512 - DNA, 15 bp, Homo sapiens
atgacaattaggacc

SEQ ID NO: 1423513 - DNA, 15 bp, Homo sapiens
tatgacaattaggac

SEQ ID NO: 1423514 - DNA, 15 bp, Homo sapiens
ttatgacaattagga

SEQ ID NO: 1423515 - DNA, 15 bp, Homo sapiens
attatgacaattagg

SEQ ID NO: 1423516 - DNA, 15 bp, Homo sapiens
aattatgacaattag

SEQ ID NO: 1423517 - DNA, 15 bp, Homo sapiens
gaattatgacaatta

SEQ ID NO: 1423518 - DNA, 15 bp, Homo sapiens
agaattatgacaatt

SEQ ID NO: 1423519 - DNA, 15 bp, Homo sapiens
gagaattatgacaat

SEQ ID NO: 1423520 - DNA, 15 bp, Homo sapiens
agagaattatgacaa

SEQ ID NO: 1423521 - DNA, 15 bp, Homo sapiens
tagagaattatgaca

SEQ ID NO: 1423522 - DNA, 15 bp, Homo sapiens
atagagaattatgac

SEQ ID NO: 1423523 - DNA, 15 bp, Homo sapiens
gatagagaattatga

SEQ ID NO: 1423524 - DNA, 15 bp, Homo sapiens
agatagagaattatg

SEQ ID NO: 1423525 - DNA, 15 bp, Homo sapiens
aagatagagaattat

SEQ ID NO: 1423526 - DNA, 15 bp, Homo sapiens
caagatagagaatta

SEQ ID NO: 1423527 - DNA, 15 bp, Homo sapiens
tcaagatagagaatt

SEQ ID NO: 1423528 - DNA, 15 bp, Homo sapiens
ttcaagatagagaat

SEQ ID NO: 1423529 - DNA, 15 bp, Homo sapiens
tttcaagatagagaa

SEQ ID NO: 1423530 - DNA, 15 bp, Homo sapiens
ttttcaagatagaga

SEQ ID NO: 1423531 - DNA, 15 bp, Homo sapiens
attttcaagatagag

SEQ ID NO: 1423532 - DNA, 15 bp, Homo sapiens
gattttcaagataga

SEQ ID NO: 1423533 - DNA, 15 bp, Homo sapiens
ggattttcaagatag

SEQ ID NO: 1423534 - DNA, 15 bp, Homo sapiens
tggattttcaagata

SEQ ID NO: 1423535 - DNA, 15 bp, Homo sapiens
ttggattttcaagat

SEQ ID NO: 1423536 - DNA, 15 bp, Homo sapiens
tttggattttcaaga

SEQ ID NO: 1423537 - DNA, 15 bp, Homo sapiens
atttggattttcaag

SEQ ID NO: 1423538 - DNA, 15 bp, Homo sapiens
aatttggattttcaa

SEQ ID NO: 1423539 - DNA, 15 bp, Homo sapiens
taatttggattttca

SEQ ID NO: 1423540 - DNA, 15 bp, Homo sapiens
ataatttggattttc

SEQ ID NO: 1423541 - DNA, 15 bp, Homo sapiens
aataatttggatttt

SEQ ID NO: 1423542 - DNA, 15 bp, Homo sapiens
caataatttggattt

SEQ ID NO: 1423543 - DNA, 15 bp, Homo sapiens
gcaataatttggatt

SEQ ID NO: 1423544 - DNA, 15 bp, Homo sapiens
tgcaataatttggat

SEQ ID NO: 1423545 - DNA, 15 bp, Homo sapiens
atgcaataatttgga

SEQ ID NO: 1423546 - DNA, 15 bp, Homo sapiens
tatgcaataatttgg

SEQ ID NO: 1423547 - DNA, 15 bp, Homo sapiens
ctatgcaataatttg

SEQ ID NO: 1423548 - DNA, 15 bp, Homo sapiens
actatgcaataattt

SEQ ID NO: 1423549 - DNA, 15 bp, Homo sapiens
gactatgcaataatt

SEQ ID NO: 1423550 - DNA, 15 bp, Homo sapiens
tgactatgcaataat

SEQ ID NO: 1423551 - DNA, 15 bp, Homo sapiens
ttgactatgcaataa

SEQ ID NO: 1423552 - DNA, 15 bp, Homo sapiens
tttgactatgcaata

SEQ ID NO: 1423553 - DNA, 15 bp, Homo sapiens
atttgactatgcaat

SEQ ID NO: 1423554 - DNA, 15 bp, Homo sapiens
tatttgactatgcaa

SEQ ID NO: 1423555 - DNA, 15 bp, Homo sapiens
ctatttgactatgca

SEQ ID NO: 1423556 - DNA, 15 bp, Homo sapiens
gctatttgactatgc

SEQ ID NO: 1423557 - DNA, 15 bp, Homo sapiens
tgctatttgactatg

SEQ ID NO: 1423558 - DNA, 15 bp, Homo sapiens
atgctatttgactat

SEQ ID NO: 1423559 - DNA, 15 bp, Homo sapiens
tatgctatttgacta

SEQ ID NO: 1423560 - DNA, 15 bp, Homo sapiens
atatgctatttgact

SEQ ID NO: 1423561 - DNA, 15 bp, Homo sapiens
catatgctatttgac

SEQ ID NO: 1423562 - DNA, 15 bp, Homo sapiens
tcatatgctatttga

SEQ ID NO: 1423563 - DNA, 15 bp, Homo sapiens
atcatatgctatttg

SEQ ID NO: 1423564 - DNA, 15 bp, Homo sapiens
tatcatatgctattt

SEQ ID NO: 1423565 - DNA, 15 bp, Homo sapiens
ttatcatatgctatt

SEQ ID NO: 1423566 - DNA, 15 bp, Homo sapiens
gttatcatatgctat

SEQ ID NO: 1423567 - DNA, 15 bp, Homo sapiens
ggttatcatatgcta

SEQ ID NO: 1423568 - DNA, 15 bp, Homo sapiens
tggttatcatatgct

SEQ ID NO: 1423569 - DNA, 15 bp, Homo sapiens
ctggttatcatatgc

SEQ ID NO: 1423570 - DNA, 15 bp, Homo sapiens
actggttatcatatg

SEQ ID NO: 1423571 - DNA, 15 bp, Homo sapiens
aactggttatcatat

SEQ ID NO: 1423572 - DNA, 15 bp, Homo sapiens
caactggttatcata

SEQ ID NO: 1423573 - DNA, 15 bp, Homo sapiens
tcaactggttatcat

SEQ ID NO: 1423574 - DNA, 15 bp, Homo sapiens
gtcaactggttatca

SEQ ID NO: 1423575 - DNA, 15 bp, Homo sapiens
tgtcaactggttatc

SEQ ID NO: 1423576 - DNA, 15 bp, Homo sapiens
atgtcaactggttat

SEQ ID NO: 1423577 - DNA, 15 bp, Homo sapiens
catgtcaactggtta

SEQ ID NO: 1423578 - DNA, 15 bp, Homo sapiens
acatgtcaactggtt

SEQ ID NO: 1423579 - DNA, 15 bp, Homo sapiens
cacatgtcaactggt

SEQ ID NO: 1423580 - DNA, 15 bp, Homo sapiens
gcacatgtcaactgg

SEQ ID NO: 1423581 - DNA, 15 bp, Homo sapiens
agcacatgtcaactg

SEQ ID NO: 1423582 - DNA, 15 bp, Homo sapiens
tagcacatgtcaact

SEQ ID NO: 1423583 - DNA, 15 bp, Homo sapiens
ttagcacatgtcaac

SEQ ID NO: 1423584 - DNA, 15 bp, Homo sapiens
tttagcacatgtcaa

SEQ ID NO: 1423585 - DNA, 15 bp, Homo sapiens
ttttagcacatgtca

SEQ ID NO: 1423586 - DNA, 15 bp, Homo sapiens
attttagcacatgtc

SEQ ID NO: 1423587 - DNA, 15 bp, Homo sapiens
tattttagcacatgt

SEQ ID NO: 1423588 - DNA, 15 bp, Homo sapiens
gtattttagcacatg

SEQ ID NO: 1423589 - DNA, 15 bp, Homo sapiens
agtattttagcacat

SEQ ID NO: 1423590 - DNA, 15 bp, Homo sapiens
aagtattttagcaca

SEQ ID NO: 1423591 - DNA, 15 bp, Homo sapiens
taagtattttagcac

SEQ ID NO: 1423592 - DNA, 15 bp, Homo sapiens
ttaagtattttagca

SEQ ID NO: 1423593 - DNA, 15 bp, Homo sapiens
tttaagtattttagc

SEQ ID NO: 1423594 - DNA, 15 bp, Homo sapiens
gtttaagtattttag

SEQ ID NO: 1423595 - DNA, 15 bp, Homo sapiens
agtttaagtatttta

SEQ ID NO: 1423596 - DNA, 15 bp, Homo sapiens
tagtttaagtatttt

SEQ ID NO: 1423597 - DNA, 15 bp, Homo sapiens
atagtttaagtattt

SEQ ID NO: 1423598 - DNA, 15 bp, Homo sapiens
gatagtttaagtatt

SEQ ID NO: 1423599 - DNA, 15 bp, Homo sapiens
agatagtttaagtat

SEQ ID NO: 1423600 - DNA, 15 bp, Homo sapiens
aagatagtttaagta

SEQ ID NO: 1423601 - DNA, 15 bp, Homo sapiens
gaagatagtttaagt

SEQ ID NO: 1423602 - DNA, 15 bp, Homo sapiens
agaagatagtttaag

SEQ ID NO: 1423603 - DNA, 15 bp, Homo sapiens
tagaagatagtttaa

SEQ ID NO: 1423604 - DNA, 15 bp, Homo sapiens
gtagaagatagttta

SEQ ID NO: 1423605 - DNA, 15 bp, Homo sapiens
tgtagaagatagttt

SEQ ID NO: 1423606 - DNA, 15 bp, Homo sapiens
atgtagaagatagtt

SEQ ID NO: 1423607 - DNA, 15 bp, Homo sapiens
tatgtagaagatagt

SEQ ID NO: 1423608 - DNA, 15 bp, Homo sapiens
ctatgtagaagatag

SEQ ID NO: 1423609 - DNA, 15 bp, Homo sapiens
gctatgtagaagata

SEQ ID NO: 1423610 - DNA, 15 bp, Homo sapiens
tgctatgtagaagat

SEQ ID NO: 1423611 - DNA, 15 bp, Homo sapiens
ttgctatgtagaaga

SEQ ID NO: 1423612 - DNA, 15 bp, Homo sapiens
tttgctatgtagaag

SEQ ID NO: 1423613 - DNA, 15 bp, Homo sapiens
ctttgctatgtagaa

SEQ ID NO: 1423614 - DNA, 15 bp, Homo sapiens
gctttgctatgtaga

SEQ ID NO: 1423615 - DNA, 15 bp, Homo sapiens
ggctttgctatgtag

SEQ ID NO: 1423616 - DNA, 15 bp, Homo sapiens
tggctttgctatgta

SEQ ID NO: 1423617 - DNA, 15 bp, Homo sapiens
ttggctttgctatgt

SEQ ID NO: 1423618 - DNA, 15 bp, Homo sapiens
attggctttgctatg

SEQ ID NO: 1423619 - DNA, 15 bp, Homo sapiens
aattggctttgctat

SEQ ID NO: 1423620 - DNA, 15 bp, Homo sapiens
aaattggctttgcta

SEQ ID NO: 1423621 - DNA, 15 bp, Homo sapiens
aaaattggctttgct

SEQ ID NO: 1423622 - DNA, 15 bp, Homo sapiens
aaaaattggctttgc

SEQ ID NO: 1423623 - DNA, 15 bp, Homo sapiens
gaaaaattggctttg

SEQ ID NO: 1423624 - DNA, 15 bp, Homo sapiens
tgaaaaattggcttt

SEQ ID NO: 1423625 - DNA, 15 bp, Homo sapiens
atgaaaaattggctt

SEQ ID NO: 1423626 - DNA, 15 bp, Homo sapiens
aatgaaaaattggct

SEQ ID NO: 1423627 - DNA, 15 bp, Homo sapiens
gaatgaaaaattggc

SEQ ID NO: 1423628 - DNA, 15 bp, Homo sapiens
agaatgaaaaattgg

SEQ ID NO: 1423629 - DNA, 15 bp, Homo sapiens
aagaatgaaaaattg

SEQ ID NO: 1423630 - DNA, 15 bp, Homo sapiens
aaagaatgaaaaatt

SEQ ID NO: 1423631 - DNA, 15 bp, Homo sapiens
aaaagaatgaaaaat

SEQ ID NO: 1423632 - DNA, 15 bp, Homo sapiens
aaaaagaatgaaaaa

SEQ ID NO: 1423633 - DNA, 15 bp, Homo sapiens
caaaaagaatgaaaa

SEQ ID NO: 1423634 - DNA, 15 bp, Homo sapiens
tcaaaaagaatgaaa

SEQ ID NO: 1423635 - DNA, 15 bp, Homo sapiens
ttcaaaaagaatgaa

SEQ ID NO: 1423636 - DNA, 15 bp, Homo sapiens
tttcaaaaagaatga

SEQ ID NO: 1423637 - DNA, 15 bp, Homo sapiens
atttcaaaaagaatg

SEQ ID NO: 1423638 - DNA, 15 bp, Homo sapiens
aatttcaaaaagaat

SEQ ID NO: 1423639 - DNA, 15 bp, Homo sapiens
aaatttcaaaaagaa

SEQ ID NO: 1423640 - DNA, 15 bp, Homo sapiens
taaatttcaaaaaga

SEQ ID NO: 1423641 - DNA, 15 bp, Homo sapiens
ataaatttcaaaaag

SEQ ID NO: 1423642 - DNA, 15 bp, Homo sapiens
gataaatttcaaaaa

SEQ ID NO: 1423643 - DNA, 15 bp, Homo sapiens
agataaatttcaaaa

SEQ ID NO: 1423644 - DNA, 15 bp, Homo sapiens
aagataaatttcaaa

SEQ ID NO: 1423645 - DNA, 15 bp, Homo sapiens
taagataaatttcaa

SEQ ID NO: 1423646 - DNA, 15 bp, Homo sapiens
ctaagataaatttca

SEQ ID NO: 1423647 - DNA, 15 bp, Homo sapiens
actaagataaatttc

SEQ ID NO: 1423648 - DNA, 15 bp, Homo sapiens
aactaagataaattt

SEQ ID NO: 1423649 - DNA, 15 bp, Homo sapiens
aaactaagataaatt

SEQ ID NO: 1423650 - DNA, 15 bp, Homo sapiens
aaaactaagataaat

SEQ ID NO: 1423651 - DNA, 15 bp, Homo sapiens
gaaaactaagataaa

SEQ ID NO: 1423652 - DNA, 15 bp, Homo sapiens
tgaaaactaagataa

SEQ ID NO: 1423653 - DNA, 15 bp, Homo sapiens
atgaaaactaagata

SEQ ID NO: 1423654 - DNA, 15 bp, Homo sapiens
aatgaaaactaagat

SEQ ID NO: 1423655 - DNA, 15 bp, Homo sapiens
aaatgaaaactaaga

SEQ ID NO: 1423656 - DNA, 15 bp, Homo sapiens
gaaatgaaaactaag

SEQ ID NO: 1423657 - DNA, 15 bp, Homo sapiens
agaaatgaaaactaa

SEQ ID NO: 1423658 - DNA, 15 bp, Homo sapiens
tagaaatgaaaacta

SEQ ID NO: 1423659 - DNA, 15 bp, Homo sapiens
ctagaaatgaaaact

SEQ ID NO: 1423660 - DNA, 15 bp, Homo sapiens
cctagaaatgaaaac

SEQ ID NO: 1423661 - DNA, 15 bp, Homo sapiens
gcctagaaatgaaaa

SEQ ID NO: 1423662 - DNA, 15 bp, Homo sapiens
ggcctagaaatgaaa

SEQ ID NO: 1423663 - DNA, 15 bp, Homo sapiens
aggcctagaaatgaa

SEQ ID NO: 1423664 - DNA, 15 bp, Homo sapiens
caggcctagaaatga

SEQ ID NO: 1423665 - DNA, 15 bp, Homo sapiens
tcaggcctagaaatg

SEQ ID NO: 1423666 - DNA, 15 bp, Homo sapiens
ttcaggcctagaaat

SEQ ID NO: 1423667 - DNA, 15 bp, Homo sapiens
tttcaggcctagaaa

SEQ ID NO: 1423668 - DNA, 15 bp, Homo sapiens
ctttcaggcctagaa

SEQ ID NO: 1423669 - DNA, 15 bp, Homo sapiens
cctttcaggcctaga

SEQ ID NO: 1423670 - DNA, 15 bp, Homo sapiens
gcctttcaggcctag

SEQ ID NO: 1423671 - DNA, 15 bp, Homo sapiens
ggcctttcaggccta

SEQ ID NO: 1423672 - DNA, 15 bp, Homo sapiens
tggcctttcaggcct

SEQ ID NO: 1423673 - DNA, 15 bp, Homo sapiens
atggcctttcaggcc

SEQ ID NO: 1423674 - DNA, 15 bp, Homo sapiens
tatggcctttcaggc

SEQ ID NO: 1423675 - DNA, 15 bp, Homo sapiens
gtatggcctttcagg

SEQ ID NO: 1423676 - DNA, 15 bp, Homo sapiens
ggtatggcctttcag

SEQ ID NO: 1423677 - DNA, 15 bp, Homo sapiens
tggtatggcctttca

SEQ ID NO: 1423678 - DNA, 15 bp, Homo sapiens
atggtatggcctttc

SEQ ID NO: 1423679 - DNA, 15 bp, Homo sapiens
tatggtatggccttt

SEQ ID NO: 1423680 - DNA, 15 bp, Homo sapiens
gtatggtatggcctt

SEQ ID NO: 1423681 - DNA, 15 bp, Homo sapiens
ggtatggtatggcct

SEQ ID NO: 1423682 - DNA, 15 bp, Homo sapiens
tggtatggtatggcc

SEQ ID NO: 1423683 - DNA, 15 bp, Homo sapiens
gtggtatggtatggc

SEQ ID NO: 1423684 - DNA, 15 bp, Homo sapiens
tggtggtatggtatg

SEQ ID NO: 1423685 - DNA, 15 bp, Homo sapiens
ttggtggtatggtat

SEQ ID NO: 1423686 - DNA, 15 bp, Homo sapiens
tttggtggtatggta

SEQ ID NO: 1423687 - DNA, 15 bp, Homo sapiens
ttttggtggtatggt

SEQ ID NO: 1423688 - DNA, 15 bp, Homo sapiens
attttggtggtatgg

SEQ ID NO: 1423689 - DNA, 15 bp, Homo sapiens
cattttggtggtatg

SEQ ID NO: 1423690 - DNA, 15 bp, Homo sapiens
acattttggtggtat

SEQ ID NO: 1423691 - DNA, 15 bp, Homo sapiens
aacattttggtggta

SEQ ID NO: 1423692 - DNA, 15 bp, Homo sapiens
aaacattttggtggt

SEQ ID NO: 1423693 - DNA, 15 bp, Homo sapiens
aaaacattttggtgg

SEQ ID NO: 1423694 - DNA, 15 bp, Homo sapiens
caaaacattttggtg

SEQ ID NO: 1423695 - DNA, 15 bp, Homo sapiens
tcaaaacattttggt

SEQ ID NO: 1423696 - DNA, 15 bp, Homo sapiens
gtcaaaacattttgg

SEQ ID NO: 1423697 - DNA, 15 bp, Homo sapiens
tgtcaaaacattttg

SEQ ID NO: 1423698 - DNA, 15 bp, Homo sapiens
atgtcaaaacatttt

SEQ ID NO: 1423699 - DNA, 15 bp, Homo sapiens
gatgtcaaaacattt

SEQ ID NO: 1423700 - DNA, 15 bp, Homo sapiens
agatgtcaaaacatt

SEQ ID NO: 1423701 - DNA, 15 bp, Homo sapiens
aagatgtcaaaacat

SEQ ID NO: 1423702 - DNA, 15 bp, Homo sapiens
aaagatgtcaaaaca

SEQ ID NO: 1423703 - DNA, 15 bp, Homo sapiens
gaaagatgtcaaaac

SEQ ID NO: 1423704 - DNA, 15 bp, Homo sapiens
agaaagatgtcaaaa

SEQ ID NO: 1423705 - DNA, 15 bp, Homo sapiens
aagaaagatgtcaaa

SEQ ID NO: 1423706 - DNA, 15 bp, Homo sapiens
taagaaagatgtcaa

SEQ ID NO: 1423707 - DNA, 15 bp, Homo sapiens
ctaagaaagatgtca

SEQ ID NO: 1423708 - DNA, 15 bp, Homo sapiens
tctaagaaagatgtc

SEQ ID NO: 1423709 - DNA, 15 bp, Homo sapiens
ctctaagaaagatgt

SEQ ID NO: 1423710 - DNA, 15 bp, Homo sapiens
tctctaagaaagatg

SEQ ID NO: 1423711 - DNA, 15 bp, Homo sapiens
ttctctaagaaagat

SEQ ID NO: 1423712 - DNA, 15 bp, Homo sapiens
cttctctaagaaaga

SEQ ID NO: 1423713 - DNA, 15 bp, Homo sapiens
tcttctctaagaaag

SEQ ID NO: 1423714 - DNA, 15 bp, Homo sapiens
atcttctctaagaaa

SEQ ID NO: 1423715 - DNA, 15 bp, Homo sapiens
aatcttctctaagaa

SEQ ID NO: 1423716 - DNA, 15 bp, Homo sapiens
taatcttctctaaga

SEQ ID NO: 1423717 - DNA, 15 bp, Homo sapiens
ttaatcttctctaag

SEQ ID NO: 1423718 - DNA, 15 bp, Homo sapiens
tttaatcttctctaa

SEQ ID NO: 1423719 - DNA, 15 bp, Homo sapiens
atttaatcttctcta

SEQ ID NO: 1423720 - DNA, 15 bp, Homo sapiens
tatttaatcttctct

SEQ ID NO: 1423721 - DNA, 15 bp, Homo sapiens
ttatttaatcttctc

SEQ ID NO: 1423722 - DNA, 15 bp, Homo sapiens
tttatttaatcttct

SEQ ID NO: 1423723 - DNA, 15 bp, Homo sapiens
ttttatttaatcttc

SEQ ID NO: 1423724 - DNA, 15 bp, Homo sapiens
gttttatttaatctt

SEQ ID NO: 1423725 - DNA, 15 bp, Homo sapiens
agttttatttaatct

SEQ ID NO: 1423726 - DNA, 15 bp, Homo sapiens
cagttttatttaatc

SEQ ID NO: 1423727 - DNA, 15 bp, Homo sapiens
ccagttttatttaat

SEQ ID NO: 1423728 - DNA, 15 bp, Homo sapiens
gccagttttatttaa

SEQ ID NO: 1423729 - DNA, 15 bp, Homo sapiens
agccagttttattta

SEQ ID NO: 1423730 - DNA, 15 bp, Homo sapiens
aagccagttttattt

SEQ ID NO: 1423731 - DNA, 15 bp, Homo sapiens
aaagccagttttatt

SEQ ID NO: 1423732 - DNA, 15 bp, Homo sapiens
taaagccagttttat

SEQ ID NO: 1423733 - DNA, 15 bp, Homo sapiens
ataaagccagtttta

SEQ ID NO: 1423734 - DNA, 15 bp, Homo sapiens
cataaagccagtttt

SEQ ID NO: 1423735 - DNA, 15 bp, Homo sapiens
gcataaagccagttt

SEQ ID NO: 1423736 - DNA, 15 bp, Homo sapiens
ggcataaagccagtt

SEQ ID NO: 1423737 - DNA, 15 bp, Homo sapiens
tggcataaagccagt

SEQ ID NO: 1423738 - DNA, 15 bp, Homo sapiens
ttggcataaagccag

SEQ ID NO: 1423739 - DNA, 15 bp, Homo sapiens
tttggcataaagcca

SEQ ID NO: 1423740 - DNA, 15 bp, Homo sapiens
ttttggcataaagcc

SEQ ID NO: 1423741 - DNA, 15 bp, Homo sapiens
cttttggcataaagc

SEQ ID NO: 1423742 - DNA, 15 bp, Homo sapiens
acttttggcataaag

SEQ ID NO: 1423743 - DNA, 15 bp, Homo sapiens
cacttttggcataaa

SEQ ID NO: 1423744 - DNA, 15 bp, Homo sapiens
acacttttggcataa

SEQ ID NO: 1423745 - DNA, 15 bp, Homo sapiens
aacacttttggcata

SEQ ID NO: 1423746 - DNA, 15 bp, Homo sapiens
taacacttttggcat

SEQ ID NO: 1423747 - DNA, 15 bp, Homo sapiens
ctaacacttttggca

SEQ ID NO: 1423748 - DNA, 15 bp, Homo sapiens
actaacacttttggc

SEQ ID NO: 1423749 - DNA, 15 bp, Homo sapiens
aactaacacttttgg

SEQ ID NO: 1423750 - DNA, 15 bp, Homo sapiens
gaactaacacttttg

SEQ ID NO: 1423751 - DNA, 15 bp, Homo sapiens
agaactaacactttt

SEQ ID NO: 1423752 - DNA, 15 bp, Homo sapiens
aagaactaacacttt

SEQ ID NO: 1423753 - DNA, 15 bp, Homo sapiens
aaagaactaacactt

SEQ ID NO: 1423754 - DNA, 15 bp, Homo sapiens
aaaagaactaacact

SEQ ID NO: 1423755 - DNA, 15 bp, Homo sapiens
taaaagaactaacac

SEQ ID NO: 1423756 - DNA, 15 bp, Homo sapiens
ctaaaagaactaaca

SEQ ID NO: 1423757 - DNA, 15 bp, Homo sapiens
tctaaaagaactaac

SEQ ID NO: 1423758 - DNA, 15 bp, Homo sapiens
gtctaaaagaactaa

SEQ ID NO: 1423759 - DNA, 15 bp, Homo sapiens
tgtctaaaagaacta

SEQ ID NO: 1423760 - DNA, 15 bp, Homo sapiens
ttgtctaaaagaact

SEQ ID NO: 1423761 - DNA, 15 bp, Homo sapiens
attgtctaaaagaac

SEQ ID NO: 1423762 - DNA, 15 bp, Homo sapiens
tattgtctaaaagaa

SEQ ID NO: 1423763 - DNA, 15 bp, Homo sapiens
ttattgtctaaaaga

SEQ ID NO: 1423764 - DNA, 15 bp, Homo sapiens
attattgtctaaaag

SEQ ID NO: 1423765 - DNA, 15 bp, Homo sapiens
aattattgtctaaaa

SEQ ID NO: 1423766 - DNA, 15 bp, Homo sapiens
caattattgtctaaa

SEQ ID NO: 1423767 - DNA, 15 bp, Homo sapiens
tcaattattgtctaa

SEQ ID NO: 1423768 - DNA, 15 bp, Homo sapiens
ttcaattattgtcta

SEQ ID NO: 1423769 - DNA, 15 bp, Homo sapiens
cttcaattattgtct

SEQ ID NO: 1423770 - DNA, 15 bp, Homo sapiens
ccttcaattattgtc

SEQ ID NO: 1423771 - DNA, 15 bp, Homo sapiens
gccttcaattattgt

SEQ ID NO: 1423772 - DNA, 15 bp, Homo sapiens
tgccttcaattattg

SEQ ID NO: 1423773 - DNA, 15 bp, Homo sapiens
gtgccttcaattatt

SEQ ID NO: 1423774 - DNA, 15 bp, Homo sapiens
agtgccttcaattat

SEQ ID NO: 1423775 - DNA, 15 bp, Homo sapiens
tagtgccttcaatta

SEQ ID NO: 1423776 - DNA, 15 bp, Homo sapiens
ctagtgccttcaatt

SEQ ID NO: 1423777 - DNA, 15 bp, Homo sapiens
gctagtgccttcaat

SEQ ID NO: 1423778 - DNA, 15 bp, Homo sapiens
agctagtgccttcaa

SEQ ID NO: 1423779 - DNA, 15 bp, Homo sapiens
cagctagtgccttca

SEQ ID NO: 1423780 - DNA, 15 bp, Homo sapiens
tcagctagtgccttc

SEQ ID NO: 1423781 - DNA, 15 bp, Homo sapiens
ctcagctagtgcctt

SEQ ID NO: 1423782 - DNA, 15 bp, Homo sapiens
cctcagctagtgcct

SEQ ID NO: 1423783 - DNA, 15 bp, Homo sapiens
tcctcagctagtgcc

SEQ ID NO: 1423784 - DNA, 15 bp, Homo sapiens
ttcctcagctagtgc

SEQ ID NO: 1423785 - DNA, 15 bp, Homo sapiens
tttcctcagctagtg

SEQ ID NO: 1423786 - DNA, 15 bp, Homo sapiens
ttttcctcagctagt

SEQ ID NO: 1423787 - DNA, 15 bp, Homo sapiens
gttttcctcagctag

SEQ ID NO: 1423788 - DNA, 15 bp, Homo sapiens
tgttttcctcagcta

SEQ ID NO: 1423789 - DNA, 15 bp, Homo sapiens
ttgttttcctcagct

SEQ ID NO: 1423790 - DNA, 15 bp, Homo sapiens
tttgttttcctcagc

SEQ ID NO: 1423791 - DNA, 15 bp, Homo sapiens
atttgttttcctcag

SEQ ID NO: 1423792 - DNA, 15 bp, Homo sapiens
gatttgttttcctca

SEQ ID NO: 1423793 - DNA, 15 bp, Homo sapiens
agatttgttttcctc

SEQ ID NO: 1423794 - DNA, 15 bp, Homo sapiens
aagatttgttttcct

SEQ ID NO: 1423795 - DNA, 15 bp, Homo sapiens
aaagatttgttttcc

SEQ ID NO: 1423796 - DNA, 15 bp, Homo sapiens
taaagatttgttttc

SEQ ID NO: 1423797 - DNA, 15 bp, Homo sapiens
gtaaagatttgtttt

SEQ ID NO: 1423798 - DNA, 15 bp, Homo sapiens
agtaaagatttgttt

SEQ ID NO: 1423799 - DNA, 15 bp, Homo sapiens
tagtaaagatttgtt

SEQ ID NO: 1423800 - DNA, 15 bp, Homo sapiens
atagtaaagatttgt

SEQ ID NO: 1423801 - DNA, 15 bp, Homo sapiens
catagtaaagatttg

SEQ ID NO: 1423802 - DNA, 15 bp, Homo sapiens
tcatagtaaagattt

SEQ ID NO: 1423803 - DNA, 15 bp, Homo sapiens
ttcatagtaaagatt

SEQ ID NO: 1423804 - DNA, 15 bp, Homo sapiens
attcatagtaaagat

SEQ ID NO: 1423805 - DNA, 15 bp, Homo sapiens
gattcatagtaaaga

SEQ ID NO: 1423806 - DNA, 15 bp, Homo sapiens
tgattcatagtaaag

SEQ ID NO: 1423807 - DNA, 15 bp, Homo sapiens
ctgattcatagtaaa

SEQ ID NO: 1423808 - DNA, 15 bp, Homo sapiens
tctgattcatagtaa

SEQ ID NO: 1423809 - DNA, 15 bp, Homo sapiens
ctctgattcatagta

SEQ ID NO: 1423810 - DNA, 15 bp, Homo sapiens
gctctgattcatagt

SEQ ID NO: 1423811 - DNA, 15 bp, Homo sapiens
agctctgattcatag

SEQ ID NO: 1423812 - DNA, 15 bp, Homo sapiens
cagctctgattcata

SEQ ID NO: 1423813 - DNA, 15 bp, Homo sapiens
ccagctctgattcat

SEQ ID NO: 1423814 - DNA, 15 bp, Homo sapiens
accagctctgattca

SEQ ID NO: 1423815 - DNA, 15 bp, Homo sapiens
gaccagctctgattc

SEQ ID NO: 1423816 - DNA, 15 bp, Homo sapiens
agaccagctctgatt

SEQ ID NO: 1423817 - DNA, 15 bp, Homo sapiens
gagaccagctctgat

SEQ ID NO: 1423818 - DNA, 15 bp, Homo sapiens
agagaccagctctga

SEQ ID NO: 1423819 - DNA, 15 bp, Homo sapiens
tagagaccagctctg

SEQ ID NO: 1423820 - DNA, 15 bp, Homo sapiens
ttagagaccagctct

SEQ ID NO: 1423821 - DNA, 15 bp, Homo sapiens
attagagaccagctc

SEQ ID NO: 1423822 - DNA, 15 bp, Homo sapiens
aattagagaccagct

SEQ ID NO: 1423823 - DNA, 15 bp, Homo sapiens
aaattagagaccagc

SEQ ID NO: 1423824 - DNA, 15 bp, Homo sapiens
caaattagagaccag

SEQ ID NO: 1423825 - DNA, 15 bp, Homo sapiens
acaaattagagacca

SEQ ID NO: 1423826 - DNA, 15 bp, Homo sapiens
tacaaattagagacc

SEQ ID NO: 1423827 - DNA, 15 bp, Homo sapiens
atacaaattagagac

SEQ ID NO: 1423828 - DNA, 15 bp, Homo sapiens
catacaaattagaga

SEQ ID NO: 1423829 - DNA, 15 bp, Homo sapiens
acatacaaattagag

SEQ ID NO: 1423830 - DNA, 15 bp, Homo sapiens
cacatacaaattaga

SEQ ID NO: 1423831 - DNA, 15 bp, Homo sapiens
acacatacaaattag

SEQ ID NO: 1423832 - DNA, 15 bp, Homo sapiens
aacacatacaaatta

SEQ ID NO: 1423833 - DNA, 15 bp, Homo sapiens
aaacacatacaaatt

SEQ ID NO: 1423834 - DNA, 15 bp, Homo sapiens
gaaacacatacaaat

SEQ ID NO: 1423835 - DNA, 15 bp, Homo sapiens
ggaaacacatacaaa

SEQ ID NO: 1423836 - DNA, 15 bp, Homo sapiens
aggaaacacatacaa

SEQ ID NO: 1423837 - DNA, 15 bp, Homo sapiens
caggaaacacataca

SEQ ID NO: 1423838 - DNA, 15 bp, Homo sapiens
tcaggaaacacatac

SEQ ID NO: 1423839 - DNA, 15 bp, Homo sapiens
ttcaggaaacacata

SEQ ID NO: 1423840 - DNA, 15 bp, Homo sapiens
tttcaggaaacacat

SEQ ID NO: 1423841 - DNA, 15 bp, Homo sapiens
atttcaggaaacaca

SEQ ID NO: 1423842 - DNA, 15 bp, Homo sapiens
catttcaggaaacac

SEQ ID NO: 1423843 - DNA, 15 bp, Homo sapiens
acatttcaggaaaca

SEQ ID NO: 1423844 - DNA, 15 bp, Homo sapiens
tacatttcaggaaac

SEQ ID NO: 1423845 - DNA, 15 bp, Homo sapiens
ttacatttcaggaaa

SEQ ID NO: 1423846 - DNA, 15 bp, Homo sapiens
attacatttcaggaa

SEQ ID NO: 1423847 - DNA, 15 bp, Homo sapiens
cattacatttcagga

SEQ ID NO: 1423848 - DNA, 15 bp, Homo sapiens
acattacatttcagg

SEQ ID NO: 1423849 - DNA, 15 bp, Homo sapiens
aacattacatttcag

SEQ ID NO: 1423850 - DNA, 15 bp, Homo sapiens
aaacattacatttca

SEQ ID NO: 1423851 - DNA, 15 bp, Homo sapiens
aaaacattacatttc

SEQ ID NO: 1423852 - DNA, 15 bp, Homo sapiens
aaaaacattacattt

SEQ ID NO: 1423853 - DNA, 15 bp, Homo sapiens
caaaaacattacatt

SEQ ID NO: 1423854 - DNA, 15 bp, Homo sapiens
acaaaaacattacat

SEQ ID NO: 1423855 - DNA, 15 bp, Homo sapiens
cacaaaaacattaca

SEQ ID NO: 1423856 - DNA, 15 bp, Homo sapiens
tcacaaaaacattac

SEQ ID NO: 1423857 - DNA, 15 bp, Homo sapiens
atcacaaaaacatta

SEQ ID NO: 1423858 - DNA, 15 bp, Homo sapiens
aatcacaaaaacatt

SEQ ID NO: 1423859 - DNA, 15 bp, Homo sapiens
aaatcacaaaaacat

SEQ ID NO: 1423860 - DNA, 15 bp, Homo sapiens
caaatcacaaaaaca

SEQ ID NO: 1423861 - DNA, 15 bp, Homo sapiens
gcaaatcacaaaaac

SEQ ID NO: 1423862 - DNA, 15 bp, Homo sapiens
tgcaaatcacaaaaa

SEQ ID NO: 1423863 - DNA, 15 bp, Homo sapiens
atgcaaatcacaaaa

SEQ ID NO: 1423864 - DNA, 15 bp, Homo sapiens
aatgcaaatcacaaa

SEQ ID NO: 1423865 - DNA, 15 bp, Homo sapiens
aaatgcaaatcacaa

SEQ ID NO: 1423866 - DNA, 15 bp, Homo sapiens
taaatgcaaatcaca

SEQ ID NO: 1423867 - DNA, 15 bp, Homo sapiens
ataaatgcaaatcac

SEQ ID NO: 1423868 - DNA, 15 bp, Homo sapiens
aataaatgcaaatca

SEQ ID NO: 1423869 - DNA, 15 bp, Homo sapiens
aaataaatgcaaatc

SEQ ID NO: 1423870 - DNA, 15 bp, Homo sapiens
aaaaataaatgcaaa

SEQ ID NO: 1423871 - DNA, 15 bp, Homo sapiens
caaaaataaatgcaa

SEQ ID NO: 1423872 - DNA, 15 bp, Homo sapiens
ccaaaaataaatgca

SEQ ID NO: 1423873 - DNA, 15 bp, Homo sapiens
gccaaaaataaatgc

SEQ ID NO: 1423874 - DNA, 15 bp, Homo sapiens
ggccaaaaataaatg

SEQ ID NO: 1423875 - DNA, 15 bp, Homo sapiens
aggccaaaaataaat

SEQ ID NO: 1423876 - DNA, 15 bp, Homo sapiens
taggccaaaaataaa

SEQ ID NO: 1423877 - DNA, 15 bp, Homo sapiens
ttaggccaaaaataa

SEQ ID NO: 1423878 - DNA, 15 bp, Homo sapiens
cttaggccaaaaata

SEQ ID NO: 1423879 - DNA, 15 bp, Homo sapiens
acttaggccaaaaat

SEQ ID NO: 1423880 - DNA, 15 bp, Homo sapiens
cacttaggccaaaaa

SEQ ID NO: 1423881 - DNA, 15 bp, Homo sapiens
tcacttaggccaaaa

SEQ ID NO: 1423882 - DNA, 15 bp, Homo sapiens
gtcacttaggccaaa

SEQ ID NO: 1423883 - DNA, 15 bp, Homo sapiens
tgtcacttaggccaa

SEQ ID NO: 1423884 - DNA, 15 bp, Homo sapiens
atgtcacttaggcca

SEQ ID NO: 1423885 - DNA, 15 bp, Homo sapiens
aatgtcacttaggcc

SEQ ID NO: 1423886 - DNA, 15 bp, Homo sapiens
aaatgtcacttaggc

SEQ ID NO: 1423887 - DNA, 15 bp, Homo sapiens
aaaatgtcacttagg

SEQ ID NO: 1423888 - DNA, 15 bp, Homo sapiens
caaaatgtcacttag

SEQ ID NO: 1423889 - DNA, 15 bp, Homo sapiens
tcaaaatgtcactta

SEQ ID NO: 1423890 - DNA, 15 bp, Homo sapiens
gtcaaaatgtcactt

SEQ ID NO: 1423891 - DNA, 15 bp, Homo sapiens
ggtcaaaatgtcact

SEQ ID NO: 1423892 - DNA, 15 bp, Homo sapiens
tggtcaaaatgtcac

SEQ ID NO: 1423893 - DNA, 15 bp, Homo sapiens
atggtcaaaatgtca

SEQ ID NO: 1423894 - DNA, 15 bp, Homo sapiens
tatggtcaaaatgtc

SEQ ID NO: 1423895 - DNA, 15 bp, Homo sapiens
atatggtcaaaatgt

SEQ ID NO: 1423896 - DNA, 15 bp, Homo sapiens
tatatggtcaaaatg

SEQ ID NO: 1423897 - DNA, 15 bp, Homo sapiens
ttatatggtcaaaat

SEQ ID NO: 1423898 - DNA, 15 bp, Homo sapiens
attatatggtcaaaa

SEQ ID NO: 1423899 - DNA, 15 bp, Homo sapiens
aattatatggtcaaa

SEQ ID NO: 1423900 - DNA, 15 bp, Homo sapiens
aaattatatggtcaa

SEQ ID NO: 1423901 - DNA, 15 bp, Homo sapiens
taaattatatggtca

SEQ ID NO: 1423902 - DNA, 15 bp, Homo sapiens
gtaaattatatggtc

SEQ ID NO: 1423903 - DNA, 15 bp, Homo sapiens
agtaaattatatggt

SEQ ID NO: 1423904 - DNA, 15 bp, Homo sapiens
aagtaaattatatgg

SEQ ID NO: 1423905 - DNA, 15 bp, Homo sapiens
aaagtaaattatatg

SEQ ID NO: 1423906 - DNA, 15 bp, Homo sapiens
aaaagtaaattatat

SEQ ID NO: 1423907 - DNA, 15 bp, Homo sapiens
taaaagtaaattata

SEQ ID NO: 1423908 - DNA, 15 bp, Homo sapiens
ttaaaagtaaattat

SEQ ID NO: 1423909 - DNA, 15 bp, Homo sapiens
tttaaaagtaaatta

SEQ ID NO: 1423910 - DNA, 15 bp, Homo sapiens
ttttaaaagtaaatt

SEQ ID NO: 1423911 - DNA, 15 bp, Homo sapiens
gttttaaaagtaaat

SEQ ID NO: 1423912 - DNA, 15 bp, Homo sapiens
agttttaaaagtaaa

SEQ ID NO: 1423913 - DNA, 15 bp, Homo sapiens
aagttttaaaagtaa

SEQ ID NO: 1423914 - DNA, 15 bp, Homo sapiens
taagttttaaaagta

SEQ ID NO: 1423915 - DNA, 15 bp, Homo sapiens
gtaagttttaaaagt

SEQ ID NO: 1423916 - DNA, 15 bp, Homo sapiens
tgtaagttttaaaag

SEQ ID NO: 1423917 - DNA, 15 bp, Homo sapiens
ttgtaagttttaaaa

SEQ ID NO: 1423918 - DNA, 15 bp, Homo sapiens
attgtaagttttaaa

SEQ ID NO: 1423919 - DNA, 15 bp, Homo sapiens
tattgtaagttttaa

SEQ ID NO: 1423920 - DNA, 15 bp, Homo sapiens
gtattgtaagtttta

SEQ ID NO: 1423921 - DNA, 15 bp, Homo sapiens
tgtattgtaagtttt

SEQ ID NO: 1423922 - DNA, 15 bp, Homo sapiens
atgtattgtaagttt

SEQ ID NO: 1423923 - DNA, 15 bp, Homo sapiens
catgtattgtaagtt

SEQ ID NO: 1423924 - DNA, 15 bp, Homo sapiens
gcatgtattgtaagt

SEQ ID NO: 1423925 - DNA, 15 bp, Homo sapiens
agcatgtattgtaag

SEQ ID NO: 1423926 - DNA, 15 bp, Homo sapiens
aagcatgtattgtaa

SEQ ID NO: 1423927 - DNA, 15 bp, Homo sapiens
aaagcatgtattgta

SEQ ID NO: 1423928 - DNA, 15 bp, Homo sapiens
aaaagcatgtattgt

SEQ ID NO: 1423929 - DNA, 15 bp, Homo sapiens
aaaaagcatgtattg

SEQ ID NO: 1423930 - DNA, 15 bp, Homo sapiens
aaaaaagcatgtatt

SEQ ID NO: 1423931 - DNA, 15 bp, Homo sapiens
gaaaaaagcatgtat

SEQ ID NO: 1423932 - DNA, 15 bp, Homo sapiens
agaaaaaagcatgta

SEQ ID NO: 1423933 - DNA, 15 bp, Homo sapiens
aagaaaaaagcatgt

SEQ ID NO: 1423934 - DNA, 15 bp, Homo sapiens
gaagaaaaaagcatg

SEQ ID NO: 1423935 - DNA, 15 bp, Homo sapiens
ggaagaaaaaagcat

SEQ ID NO: 1423936 - DNA, 15 bp, Homo sapiens
tggaagaaaaaagca

SEQ ID NO: 1423937 - DNA, 15 bp, Homo sapiens
ctggaagaaaaaagc

SEQ ID NO: 1423938 - DNA, 15 bp, Homo sapiens
cctggaagaaaaaag

SEQ ID NO: 1423939 - DNA, 15 bp, Homo sapiens
gcctggaagaaaaaa

SEQ ID NO: 1423940 - DNA, 15 bp, Homo sapiens
ggcctggaagaaaaa

SEQ ID NO: 1423941 - DNA, 15 bp, Homo sapiens
tggcctggaagaaaa

SEQ ID NO: 1423942 - DNA, 15 bp, Homo sapiens
ttggcctggaagaaa

SEQ ID NO: 1423943 - DNA, 15 bp, Homo sapiens
tttggcctggaagaa

SEQ ID NO: 1423944 - DNA, 15 bp, Homo sapiens
gtttggcctggaaga

SEQ ID NO: 1423945 - DNA, 15 bp, Homo sapiens
agtttggcctggaag

SEQ ID NO: 1423946 - DNA, 15 bp, Homo sapiens
tagtttggcctggaa

SEQ ID NO: 1423947 - DNA, 15 bp, Homo sapiens
atagtttggcctgga

SEQ ID NO: 1423948 - DNA, 15 bp, Homo sapiens
aatagtttggcctgg

SEQ ID NO: 1423949 - DNA, 15 bp, Homo sapiens
aaatagtttggcctg

SEQ ID NO: 1423950 - DNA, 15 bp, Homo sapiens
gaaatagtttggcct

SEQ ID NO: 1423951 - DNA, 15 bp, Homo sapiens
ggaaatagtttggcc

SEQ ID NO: 1423952 - DNA, 15 bp, Homo sapiens
aggaaatagtttggc

SEQ ID NO: 1423953 - DNA, 15 bp, Homo sapiens
taggaaatagtttgg

SEQ ID NO: 1423954 - DNA, 15 bp, Homo sapiens
ctaggaaatagtttg

SEQ ID NO: 1423955 - DNA, 15 bp, Homo sapiens
actaggaaatagttt

SEQ ID NO: 1423956 - DNA, 15 bp, Homo sapiens
cactaggaaatagtt

SEQ ID NO: 1423957 - DNA, 15 bp, Homo sapiens
gcactaggaaatagt

SEQ ID NO: 1423958 - DNA, 15 bp, Homo sapiens
tgcactaggaaatag

SEQ ID NO: 1423959 - DNA, 15 bp, Homo sapiens
atgcactaggaaata

SEQ ID NO: 1423960 - DNA, 15 bp, Homo sapiens
tatgcactaggaaat

SEQ ID NO: 1423961 - DNA, 15 bp, Homo sapiens
ttatgcactaggaaa

SEQ ID NO: 1423962 - DNA, 15 bp, Homo sapiens
attatgcactaggaa

SEQ ID NO: 1423963 - DNA, 15 bp, Homo sapiens
cattatgcactagga

SEQ ID NO: 1423964 - DNA, 15 bp, Homo sapiens
tcattatgcactagg

SEQ ID NO: 1423965 - DNA, 15 bp, Homo sapiens
ttcattatgcactag

SEQ ID NO: 1423966 - DNA, 15 bp, Homo sapiens
cttcattatgcacta

SEQ ID NO: 1423967 - DNA, 15 bp, Homo sapiens
tcttcattatgcact

SEQ ID NO: 1423968 - DNA, 15 bp, Homo sapiens
atcttcattatgcac

SEQ ID NO: 1423969 - DNA, 15 bp, Homo sapiens
tatcttcattatgca

SEQ ID NO: 1423970 - DNA, 15 bp, Homo sapiens
ttatcttcattatgc

SEQ ID NO: 1423971 - DNA, 15 bp, Homo sapiens
attatcttcattatg

SEQ ID NO: 1423972 - DNA, 15 bp, Homo sapiens
aattatcttcattat

SEQ ID NO: 1423973 - DNA, 15 bp, Homo sapiens
aaattatcttcatta

SEQ ID NO: 1423974 - DNA, 15 bp, Homo sapiens
aaaattatcttcatt

SEQ ID NO: 1423975 - DNA, 15 bp, Homo sapiens
caaaattatcttcat

SEQ ID NO: 1423976 - DNA, 15 bp, Homo sapiens
tcaaaattatcttca

SEQ ID NO: 1423977 - DNA, 15 bp, Homo sapiens
atcaaaattatcttc

SEQ ID NO: 1423978 - DNA, 15 bp, Homo sapiens
catcaaaattatctt

SEQ ID NO: 1423979 - DNA, 15 bp, Homo sapiens
tcatcaaaattatct

SEQ ID NO: 1423980 - DNA, 15 bp, Homo sapiens
atcatcaaaattatc

SEQ ID NO: 1423981 - DNA, 15 bp, Homo sapiens
tatcatcaaaattat

SEQ ID NO: 1423982 - DNA, 15 bp, Homo sapiens
ttatcatcaaaatta

SEQ ID NO: 1423983 - DNA, 15 bp, Homo sapiens
attatcatcaaaatt

SEQ ID NO: 1423984 - DNA, 15 bp, Homo sapiens
tattatcatcaaaat

SEQ ID NO: 1423985 - DNA, 15 bp, Homo sapiens
gtattatcatcaaaa

SEQ ID NO: 1423986 - DNA, 15 bp, Homo sapiens
tgtattatcatcaaa

SEQ ID NO: 1423987 - DNA, 15 bp, Homo sapiens
atgtattatcatcaa

SEQ ID NO: 1423988 - DNA, 15 bp, Homo sapiens
catgtattatcatca

SEQ ID NO: 1423989 - DNA, 15 bp, Homo sapiens
tcatgtattatcatc

SEQ ID NO: 1423990 - DNA, 15 bp, Homo sapiens
ttcatgtattatcat

SEQ ID NO: 1423991 - DNA, 15 bp, Homo sapiens
attcatgtattatca

SEQ ID NO: 1423992 - DNA, 15 bp, Homo sapiens
aattcatgtattatc

SEQ ID NO: 1423993 - DNA, 15 bp, Homo sapiens
gaattcatgtattat

SEQ ID NO: 1423994 - DNA, 15 bp, Homo sapiens
agaattcatgtatta

SEQ ID NO: 1423995 - DNA, 15 bp, Homo sapiens
aagaattcatgtatt

SEQ ID NO: 1423996 - DNA, 15 bp, Homo sapiens
gaagaattcatgtat

SEQ ID NO: 1423997 - DNA, 15 bp, Homo sapiens
tgaagaattcatgta

SEQ ID NO: 1423998 - DNA, 15 bp, Homo sapiens
ttgaagaattcatgt

SEQ ID NO: 1423999 - DNA, 15 bp, Homo sapiens
tttgaagaattcatg

SEQ ID NO: 1424000 - DNA, 15 bp, Homo sapiens
gtttgaagaattcat

SEQ ID NO: 1424001 - DNA, 15 bp, Homo sapiens
tgtttgaagaattca

SEQ ID NO: 1424002 - DNA, 15 bp, Homo sapiens
atgtttgaagaattc

SEQ ID NO: 1424003 - DNA, 15 bp, Homo sapiens
aatgtttgaagaatt

SEQ ID NO: 1424004 - DNA, 15 bp, Homo sapiens
aaatgtttgaagaat

SEQ ID NO: 1424005 - DNA, 15 bp, Homo sapiens
aaaatgtttgaagaa

SEQ ID NO: 1424006 - DNA, 15 bp, Homo sapiens
caaaatgtttgaaga

SEQ ID NO: 1424007 - DNA, 15 bp, Homo sapiens
ccaaaatgtttgaag

SEQ ID NO: 1424008 - DNA, 15 bp, Homo sapiens
tccaaaatgtttgaa

SEQ ID NO: 1424009 - DNA, 15 bp, Homo sapiens
ttccaaaatgtttga

SEQ ID NO: 1424010 - DNA, 15 bp, Homo sapiens
cttccaaaatgtttg

SEQ ID NO: 1424011 - DNA, 15 bp, Homo sapiens
tcttccaaaatgttt

SEQ ID NO: 1424012 - DNA, 15 bp, Homo sapiens
ttcttccaaaatgtt

SEQ ID NO: 1424013 - DNA, 15 bp, Homo sapiens
attcttccaaaatgt

SEQ ID NO: 1424014 - DNA, 15 bp, Homo sapiens
tattcttccaaaatg

SEQ ID NO: 1424015 - DNA, 15 bp, Homo sapiens
gtattcttccaaaat

SEQ ID NO: 1424016 - DNA, 15 bp, Homo sapiens
agtattcttccaaaa

SEQ ID NO: 1424017 - DNA, 15 bp, Homo sapiens
aagtattcttccaaa

SEQ ID NO: 1424018 - DNA, 15 bp, Homo sapiens
gaagtattcttccaa

SEQ ID NO: 1424019 - DNA, 15 bp, Homo sapiens
tgaagtattcttcca

SEQ ID NO: 1424020 - DNA, 15 bp, Homo sapiens
ttgaagtattcttcc

SEQ ID NO: 1424021 - DNA, 15 bp, Homo sapiens
tttgaagtattcttc

SEQ ID NO: 1424022 - DNA, 15 bp, Homo sapiens
atttgaagtattctt

SEQ ID NO: 1424023 - DNA, 15 bp, Homo sapiens
aatttgaagtattct

SEQ ID NO: 1424024 - DNA, 15 bp, Homo sapiens
aaatttgaagtattc

SEQ ID NO: 1424025 - DNA, 15 bp, Homo sapiens
gaaatttgaagtatt

SEQ ID NO: 1424026 - DNA, 15 bp, Homo sapiens
tgaaatttgaagtat

SEQ ID NO: 1424027 - DNA, 15 bp, Homo sapiens
ttgaaatttgaagta

SEQ ID NO: 1424028 - DNA, 15 bp, Homo sapiens
cttgaaatttgaagt

SEQ ID NO: 1424029 - DNA, 15 bp, Homo sapiens
ccttgaaatttgaag

SEQ ID NO: 1424030 - DNA, 15 bp, Homo sapiens
cccttgaaatttgaa

SEQ ID NO: 1424031 - DNA, 15 bp, Homo sapiens
acccttgaaatttga

SEQ ID NO: 1424032 - DNA, 15 bp, Homo sapiens
cacccttgaaatttg

SEQ ID NO: 1424033 - DNA, 15 bp, Homo sapiens
ccacccttgaaattt

SEQ ID NO: 1424034 - DNA, 15 bp, Homo sapiens
accacccttgaaatt

SEQ ID NO: 1424035 - DNA, 15 bp, Homo sapiens
taccacccttgaaat

SEQ ID NO: 1424036 - DNA, 15 bp, Homo sapiens
ataccacccttgaaa

SEQ ID NO: 1424037 - DNA, 15 bp, Homo sapiens
cataccacccttgaa

SEQ ID NO: 1424038 - DNA, 15 bp, Homo sapiens
tcataccacccttga

SEQ ID NO: 1424039 - DNA, 15 bp, Homo sapiens
atcataccacccttg

SEQ ID NO: 1424040 - DNA, 15 bp, Homo sapiens
catcataccaccctt

SEQ ID NO: 1424041 - DNA, 15 bp, Homo sapiens
acatcataccaccct

SEQ ID NO: 1424042 - DNA, 15 bp, Homo sapiens
gacatcataccaccc

SEQ ID NO: 1424043 - DNA, 15 bp, Homo sapiens
ggacatcataccacc

SEQ ID NO: 1424044 - DNA, 15 bp, Homo sapiens
tggacatcataccac

SEQ ID NO: 1424045 - DNA, 15 bp, Homo sapiens
gtggacatcatacca

SEQ ID NO: 1424046 - DNA, 15 bp, Homo sapiens
tgtggacatcatacc

SEQ ID NO: 1424047 - DNA, 15 bp, Homo sapiens
ttgtggacatcatac

SEQ ID NO: 1424048 - DNA, 15 bp, Homo sapiens
tttgtggacatcata

SEQ ID NO: 1424049 - DNA, 15 bp, Homo sapiens
atttgtggacatcat

SEQ ID NO: 1424050 - DNA, 15 bp, Homo sapiens
gatttgtggacatca

SEQ ID NO: 1424051 - DNA, 15 bp, Homo sapiens
cgatttgtggacatc

SEQ ID NO: 1424052 - DNA, 15 bp, Homo sapiens
gcgatttgtggacat

SEQ ID NO: 1424053 - DNA, 15 bp, Homo sapiens
agcgatttgtggaca

SEQ ID NO: 1424054 - DNA, 15 bp, Homo sapiens
cagcgatttgtggac

SEQ ID NO: 1424055 - DNA, 15 bp, Homo sapiens
tcagcgatttgtgga

SEQ ID NO: 1424056 - DNA, 15 bp, Homo sapiens
ctcagcgatttgtgg

SEQ ID NO: 1424057 - DNA, 15 bp, Homo sapiens
actcagcgatttgtg

SEQ ID NO: 1424058 - DNA, 15 bp, Homo sapiens
gactcagcgatttgt

SEQ ID NO: 1424059 - DNA, 15 bp, Homo sapiens
agactcagcgatttg

SEQ ID NO: 1424060 - DNA, 15 bp, Homo sapiens
cagactcagcgattt

SEQ ID NO: 1424061 - DNA, 15 bp, Homo sapiens
gcagactcagcgatt

SEQ ID NO: 1424062 - DNA, 15 bp, Homo sapiens
agcagactcagcgat

SEQ ID NO: 1424063 - DNA, 15 bp, Homo sapiens
aagcagactcagcga

SEQ ID NO: 1424064 - DNA, 15 bp, Homo sapiens
caagcagactcagcg

SEQ ID NO: 1424065 - DNA, 15 bp, Homo sapiens
tcaagcagactcagc

SEQ ID NO: 1424066 - DNA, 15 bp, Homo sapiens
atcaagcagactcag

SEQ ID NO: 1424067 - DNA, 15 bp, Homo sapiens
aatcaagcagactca

SEQ ID NO: 1424068 - DNA, 15 bp, Homo sapiens
gaatcaagcagactc

SEQ ID NO: 1424069 - DNA, 15 bp, Homo sapiens
agaatcaagcagact

SEQ ID NO: 1424070 - DNA, 15 bp, Homo sapiens
aagaatcaagcagac

SEQ ID NO: 1424071 - DNA, 15 bp, Homo sapiens
aaagaatcaagcaga

SEQ ID NO: 1424072 - DNA, 15 bp, Homo sapiens
aaaagaatcaagcag

SEQ ID NO: 1424073 - DNA, 15 bp, Homo sapiens
aaaaagaatcaagca

SEQ ID NO: 1424074 - DNA, 15 bp, Homo sapiens
taaaaagaatcaagc

SEQ ID NO: 1424075 - DNA, 15 bp, Homo sapiens
ctaaaaagaatcaag

SEQ ID NO: 1424076 - DNA, 15 bp, Homo sapiens
tctaaaaagaatcaa

SEQ ID NO: 1424077 - DNA, 15 bp, Homo sapiens
ttctaaaaagaatca

SEQ ID NO: 1424078 - DNA, 15 bp, Homo sapiens
attctaaaaagaatc

SEQ ID NO: 1424079 - DNA, 15 bp, Homo sapiens
gattctaaaaagaat

SEQ ID NO: 1424080 - DNA, 15 bp, Homo sapiens
tgattctaaaaagaa

SEQ ID NO: 1424081 - DNA, 15 bp, Homo sapiens
ctgattctaaaaaga

SEQ ID NO: 1424082 - DNA, 15 bp, Homo sapiens
cctgattctaaaaag

SEQ ID NO: 1424083 - DNA, 15 bp, Homo sapiens
gcctgattctaaaaa

SEQ ID NO: 1424084 - DNA, 15 bp, Homo sapiens
ggcctgattctaaaa

SEQ ID NO: 1424085 - DNA, 15 bp, Homo sapiens
aggcctgattctaaa

SEQ ID NO: 1424086 - DNA, 15 bp, Homo sapiens
gaggcctgattctaa

SEQ ID NO: 1424087 - DNA, 15 bp, Homo sapiens
agaggcctgattcta

SEQ ID NO: 1424088 - DNA, 15 bp, Homo sapiens
aagaggcctgattct

SEQ ID NO: 1424089 - DNA, 15 bp, Homo sapiens
caagaggcctgattc

SEQ ID NO: 1424090 - DNA, 15 bp, Homo sapiens
tcaagaggcctgatt

SEQ ID NO: 1424091 - DNA, 15 bp, Homo sapiens
atcaagaggcctgat

SEQ ID NO: 1424092 - DNA, 15 bp, Homo sapiens
tatcaagaggcctga

SEQ ID NO: 1424093 - DNA, 15 bp, Homo sapiens
gtatcaagaggcctg

SEQ ID NO: 1424094 - DNA, 15 bp, Homo sapiens
agtatcaagaggcct

SEQ ID NO: 1424095 - DNA, 15 bp, Homo sapiens
tagtatcaagaggcc

SEQ ID NO: 1424096 - DNA, 15 bp, Homo sapiens
ttagtatcaagaggc

SEQ ID NO: 1424097 - DNA, 15 bp, Homo sapiens
attagtatcaagagg

SEQ ID NO: 1424098 - DNA, 15 bp, Homo sapiens
aattagtatcaagag

SEQ ID NO: 1424099 - DNA, 15 bp, Homo sapiens
aaattagtatcaaga

SEQ ID NO: 1424100 - DNA, 15 bp, Homo sapiens
taaattagtatcaag

SEQ ID NO: 1424101 - DNA, 15 bp, Homo sapiens
ataaattagtatcaa

SEQ ID NO: 1424102 - DNA, 15 bp, Homo sapiens
tataaattagtatca

SEQ ID NO: 1424103 - DNA, 15 bp, Homo sapiens
ttataaattagtatc

SEQ ID NO: 1424104 - DNA, 15 bp, Homo sapiens
attataaattagtat

SEQ ID NO: 1424105 - DNA, 15 bp, Homo sapiens
cattataaattagta

SEQ ID NO: 1424106 - DNA, 15 bp, Homo sapiens
tcattataaattagt

SEQ ID NO: 1424107 - DNA, 15 bp, Homo sapiens
ctcattataaattag

SEQ ID NO: 1424108 - DNA, 15 bp, Homo sapiens
tctcattataaatta

SEQ ID NO: 1424109 - DNA, 15 bp, Homo sapiens
ttctcattataaatt

SEQ ID NO: 1424110 - DNA, 15 bp, Homo sapiens
tttctcattataaat

SEQ ID NO: 1424111 - DNA, 15 bp, Homo sapiens
ttttctcattataaa

SEQ ID NO: 1424112 - DNA, 15 bp, Homo sapiens
gttttctcattataa

SEQ ID NO: 1424113 - DNA, 15 bp, Homo sapiens
agttttctcattata

SEQ ID NO: 1424114 - DNA, 15 bp, Homo sapiens
tagttttctcattat

SEQ ID NO: 1424115 - DNA, 15 bp, Homo sapiens
atagttttctcatta

SEQ ID NO: 1424116 - DNA, 15 bp, Homo sapiens
aatagttttctcatt

SEQ ID NO: 1424117 - DNA, 15 bp, Homo sapiens
aaatagttttctcat

SEQ ID NO: 1424118 - DNA, 15 bp, Homo sapiens
aaaatagttttctca

SEQ ID NO: 1424119 - DNA, 15 bp, Homo sapiens
taaaatagttttctc

SEQ ID NO: 1424120 - DNA, 15 bp, Homo sapiens
ttaaaatagttttct

SEQ ID NO: 1424121 - DNA, 15 bp, Homo sapiens
tttaaaatagttttc

SEQ ID NO: 1424122 - DNA, 15 bp, Homo sapiens
atttaaaatagtttt

SEQ ID NO: 1424123 - DNA, 15 bp, Homo sapiens
aatttaaaatagttt

SEQ ID NO: 1424124 - DNA, 15 bp, Homo sapiens
taatttaaaatagtt

SEQ ID NO: 1424125 - DNA, 15 bp, Homo sapiens
ttaatttaaaatagt

SEQ ID NO: 1424126 - DNA, 15 bp, Homo sapiens
tttaatttaaaatag

SEQ ID NO: 1424127 - DNA, 15 bp, Homo sapiens
gtttaatttaaaata

SEQ ID NO: 1424128 - DNA, 15 bp, Homo sapiens
tgtttaatttaaaat

SEQ ID NO: 1424129 - DNA, 15 bp, Homo sapiens
atgtttaatttaaaa

SEQ ID NO: 1424130 - DNA, 15 bp, Homo sapiens
aatgtttaatttaaa

SEQ ID NO: 1424131 - DNA, 15 bp, Homo sapiens
aaatgtttaatttaa

SEQ ID NO: 1424132 - DNA, 15 bp, Homo sapiens
taaatgtttaattta

SEQ ID NO: 1424133 - DNA, 15 bp, Homo sapiens
ataaatgtttaattt

SEQ ID NO: 1424134 - DNA, 15 bp, Homo sapiens
aataaatgtttaatt

SEQ ID NO: 1424135 - DNA, 15 bp, Homo sapiens
gaataaatgtttaat

SEQ ID NO: 1424136 - DNA, 15 bp, Homo sapiens
agaataaatgtttaa

SEQ ID NO: 1424137 - DNA, 15 bp, Homo sapiens
aagaataaatgttta

SEQ ID NO: 1424138 - DNA, 15 bp, Homo sapiens
gaagaataaatgttt

SEQ ID NO: 1424139 - DNA, 15 bp, Homo sapiens
tgaagaataaatgtt

SEQ ID NO: 1424140 - DNA, 15 bp, Homo sapiens
ttgaagaataaatgt

SEQ ID NO: 1424141 - DNA, 15 bp, Homo sapiens
tttgaagaataaatg

SEQ ID NO: 1424142 - DNA, 15 bp, Homo sapiens
ttttgaagaataaat

SEQ ID NO: 1424143 - DNA, 15 bp, Homo sapiens
attttgaagaataaa

SEQ ID NO: 1424144 - DNA, 15 bp, Homo sapiens
aattttgaagaataa

SEQ ID NO: 1424145 - DNA, 15 bp, Homo sapiens
taattttgaagaata

SEQ ID NO: 1424146 - DNA, 15 bp, Homo sapiens
ataattttgaagaat

SEQ ID NO: 1424147 - DNA, 15 bp, Homo sapiens
tataattttgaagaa

SEQ ID NO: 1424148 - DNA, 15 bp, Homo sapiens
gtataattttgaaga

SEQ ID NO: 1424149 - DNA, 15 bp, Homo sapiens
tgtataattttgaag

SEQ ID NO: 1424150 - DNA, 15 bp, Homo sapiens
atgtataattttgaa

SEQ ID NO: 1424151 - DNA, 15 bp, Homo sapiens
gatgtataattttga

SEQ ID NO: 1424152 - DNA, 15 bp, Homo sapiens
agatgtataattttg

SEQ ID NO: 1424153 - DNA, 15 bp, Homo sapiens
cagatgtataatttt

SEQ ID NO: 1424154 - DNA, 15 bp, Homo sapiens
tcagatgtataattt

SEQ ID NO: 1424155 - DNA, 15 bp, Homo sapiens
ttcagatgtataatt

SEQ ID NO: 1424156 - DNA, 15 bp, Homo sapiens
attcagatgtataat

SEQ ID NO: 1424157 - DNA, 15 bp, Homo sapiens
cattcagatgtataa

SEQ ID NO: 1424158 - DNA, 15 bp, Homo sapiens
tcattcagatgtata

SEQ ID NO: 1424159 - DNA, 15 bp, Homo sapiens
ctcattcagatgtat

SEQ ID NO: 1424160 - DNA, 15 bp, Homo sapiens
tctcattcagatgta

SEQ ID NO: 1424161 - DNA, 15 bp, Homo sapiens
ttctcattcagatgt

SEQ ID NO: 1424162 - DNA, 15 bp, Homo sapiens
tttctcattcagatg

SEQ ID NO: 1424163 - DNA, 15 bp, Homo sapiens
ttttctcattcagat

SEQ ID NO: 1424164 - DNA, 15 bp, Homo sapiens
gttttctcattcaga

SEQ ID NO: 1424165 - DNA, 15 bp, Homo sapiens
tgttttctcattcag

SEQ ID NO: 1424166 - DNA, 15 bp, Homo sapiens
atgttttctcattca

SEQ ID NO: 1424167 - DNA, 15 bp, Homo sapiens
aatgttttctcattc

SEQ ID NO: 1424168 - DNA, 15 bp, Homo sapiens
gtaatgttttctcat

SEQ ID NO: 1424169 - DNA, 15 bp, Homo sapiens
tgtaatgttttctca

SEQ ID NO: 1424170 - DNA, 15 bp, Homo sapiens
atgtaatgttttctc

SEQ ID NO: 1424171 - DNA, 15 bp, Homo sapiens
catgtaatgttttct

SEQ ID NO: 1424172 - DNA, 15 bp, Homo sapiens
tcatgtaatgttttc

SEQ ID NO: 1424173 - DNA, 15 bp, Homo sapiens
ctcatgtaatgtttt

SEQ ID NO: 1424174 - DNA, 15 bp, Homo sapiens
cctcatgtaatgttt

SEQ ID NO: 1424175 - DNA, 15 bp, Homo sapiens
ccctcatgtaatgtt

SEQ ID NO: 1424176 - DNA, 15 bp, Homo sapiens
tccctcatgtaatgt

SEQ ID NO: 1424177 - DNA, 15 bp, Homo sapiens
ttccctcatgtaatg

SEQ ID NO: 1424178 - DNA, 15 bp, Homo sapiens
attccctcatgtaat

SEQ ID NO: 1424179 - DNA, 15 bp, Homo sapiens
cattccctcatgtaa

SEQ ID NO: 1424180 - DNA, 15 bp, Homo sapiens
tcattccctcatgta

SEQ ID NO: 1424181 - DNA, 15 bp, Homo sapiens
atcattccctcatgt

SEQ ID NO: 1424182 - DNA, 15 bp, Homo sapiens
tatcattccctcatg

SEQ ID NO: 1424183 - DNA, 15 bp, Homo sapiens
atatcattccctcat

SEQ ID NO: 1424184 - DNA, 15 bp, Homo sapiens
tatatcattccctca

SEQ ID NO: 1424185 - DNA, 15 bp, Homo sapiens
ttatatcattccctc

SEQ ID NO: 1424186 - DNA, 15 bp, Homo sapiens
tttatatcattccct

SEQ ID NO: 1424187 - DNA, 15 bp, Homo sapiens
atttatatcattccc

SEQ ID NO: 1424188 - DNA, 15 bp, Homo sapiens
tatttatatcattcc

SEQ ID NO: 1424189 - DNA, 15 bp, Homo sapiens
ctatttatatcattc

SEQ ID NO: 1424190 - DNA, 15 bp, Homo sapiens
actatttatatcatt

SEQ ID NO: 1424191 - DNA, 15 bp, Homo sapiens
aactatttatatcat

SEQ ID NO: 1424192 - DNA, 15 bp, Homo sapiens
aaactatttatatca

SEQ ID NO: 1424193 - DNA, 15 bp, Homo sapiens
gaaactatttatatc

SEQ ID NO: 1424194 - DNA, 15 bp, Homo sapiens
tgaaactatttatat

SEQ ID NO: 1424195 - DNA, 15 bp, Homo sapiens
atgaaactatttata

SEQ ID NO: 1424196 - DNA, 15 bp, Homo sapiens
gatgaaactatttat

SEQ ID NO: 1424197 - DNA, 15 bp, Homo sapiens
agatgaaactattta

SEQ ID NO: 1424198 - DNA, 15 bp, Homo sapiens
aagatgaaactattt

SEQ ID NO: 1424199 - DNA, 15 bp, Homo sapiens
gaagatgaaactatt

SEQ ID NO: 1424200 - DNA, 15 bp, Homo sapiens
agaagatgaaactat

SEQ ID NO: 1424201 - DNA, 15 bp, Homo sapiens
aagaagatgaaacta

SEQ ID NO: 1424202 - DNA, 15 bp, Homo sapiens
taagaagatgaaact

SEQ ID NO: 1424203 - DNA, 15 bp, Homo sapiens
ataagaagatgaaac

SEQ ID NO: 1424204 - DNA, 15 bp, Homo sapiens
cataagaagatgaaa

SEQ ID NO: 1424205 - DNA, 15 bp, Homo sapiens
acataagaagatgaa

SEQ ID NO: 1424206 - DNA, 15 bp, Homo sapiens
tacataagaagatga

SEQ ID NO: 1424207 - DNA, 15 bp, Homo sapiens
atacataagaagatg

SEQ ID NO: 1424208 - DNA, 15 bp, Homo sapiens
tatacataagaagat

SEQ ID NO: 1424209 - DNA, 15 bp, Homo sapiens
ttatacataagaaga

SEQ ID NO: 1424210 - DNA, 15 bp, Homo sapiens
tttatacataagaag

SEQ ID NO: 1424211 - DNA, 15 bp, Homo sapiens
ttttatacataagaa

SEQ ID NO: 1424212 - DNA, 15 bp, Homo sapiens
tttttatacataaga

SEQ ID NO: 1424213 - DNA, 15 bp, Homo sapiens
atttttatacataag

SEQ ID NO: 1424214 - DNA, 15 bp, Homo sapiens
tatttttatacataa

SEQ ID NO: 1424215 - DNA, 15 bp, Homo sapiens
ttatttttatacata

SEQ ID NO: 1424216 - DNA, 15 bp, Homo sapiens
tttatttttatacat

SEQ ID NO: 1424217 - DNA, 15 bp, Homo sapiens
ctttatttttataca

SEQ ID NO: 1424218 - DNA, 15 bp, Homo sapiens
tctttatttttatac

SEQ ID NO: 1424219 - DNA, 15 bp, Homo sapiens
atctttatttttata

SEQ ID NO: 1424220 - DNA, 15 bp, Homo sapiens
aatctttatttttat

SEQ ID NO: 1424221 - DNA, 15 bp, Homo sapiens
aaatctttattttta

SEQ ID NO: 1424222 - DNA, 15 bp, Homo sapiens
caaatctttattttt

SEQ ID NO: 1424223 - DNA, 15 bp, Homo sapiens
ccaaatctttatttt

SEQ ID NO: 1424224 - DNA, 15 bp, Homo sapiens
cccaaatctttattt

SEQ ID NO: 1424225 - DNA, 15 bp, Homo sapiens
ccccaaatctttatt

SEQ ID NO: 1424226 - DNA, 15 bp, Homo sapiens
gccccaaatctttat

SEQ ID NO: 1424227 - DNA, 15 bp, Homo sapiens
tgccccaaatcttta

SEQ ID NO: 1424228 - DNA, 15 bp, Homo sapiens
ctgccccaaatcttt

SEQ ID NO: 1424229 - DNA, 15 bp, Homo sapiens
gctgccccaaatctt

SEQ ID NO: 1424230 - DNA, 15 bp, Homo sapiens
ggctgccccaaatct

SEQ ID NO: 1424231 - DNA, 15 bp, Homo sapiens
tggctgccccaaatc

SEQ ID NO: 1424232 - DNA, 15 bp, Homo sapiens
ctggctgccccaaat

SEQ ID NO: 1424233 - DNA, 15 bp, Homo sapiens
tctggctgccccaaa

SEQ ID NO: 1424234 - DNA, 15 bp, Homo sapiens
ttctggctgccccaa

SEQ ID NO: 1424235 - DNA, 15 bp, Homo sapiens
attctggctgcccca

SEQ ID NO: 1424236 - DNA, 15 bp, Homo sapiens
cattctggctgcccc

SEQ ID NO: 1424237 - DNA, 15 bp, Homo sapiens
acattctggctgccc

SEQ ID NO: 1424238 - DNA, 15 bp, Homo sapiens
aacattctggctgcc

SEQ ID NO: 1424239 - DNA, 15 bp, Homo sapiens
tgaaacattctggct

SEQ ID NO: 1424240 - DNA, 15 bp, Homo sapiens
ttgaaacattctggc

SEQ ID NO: 1424241 - DNA, 15 bp, Homo sapiens
tttgaaacattctgg

SEQ ID NO: 1424242 - DNA, 15 bp, Homo sapiens
ctttgaaacattctg

SEQ ID NO: 1424243 - DNA, 15 bp, Homo sapiens
gctttgaaacattct

SEQ ID NO: 1424244 - DNA, 15 bp, Homo sapiens
agctttgaaacattc

SEQ ID NO: 1424245 - DNA, 15 bp, Homo sapiens
tagctttgaaacatt

SEQ ID NO: 1424246 - DNA, 15 bp, Homo sapiens
gtagctttgaaacat

SEQ ID NO: 1424247 - DNA, 15 bp, Homo sapiens
ggtagctttgaaaca

SEQ ID NO: 1424248 - DNA, 15 bp, Homo sapiens
aggtagctttgaaac

SEQ ID NO: 1424249 - DNA, 15 bp, Homo sapiens
aaggtagctttgaaa

SEQ ID NO: 1424250 - DNA, 15 bp, Homo sapiens
aaaggtagctttgaa

SEQ ID NO: 1424251 - DNA, 15 bp, Homo sapiens
taaaggtagctttga

SEQ ID NO: 1424252 - DNA, 15 bp, Homo sapiens
ttaaaggtagctttg

SEQ ID NO: 1424253 - DNA, 15 bp, Homo sapiens
tttaaaggtagcttt

SEQ ID NO: 1424254 - DNA, 15 bp, Homo sapiens
atttaaaggtagctt

SEQ ID NO: 1424255 - DNA, 15 bp, Homo sapiens
gatttaaaggtagct

SEQ ID NO: 1424256 - DNA, 15 bp, Homo sapiens
agatttaaaggtagc

SEQ ID NO: 1424257 - DNA, 15 bp, Homo sapiens
cagatttaaaggtag

SEQ ID NO: 1424258 - DNA, 15 bp, Homo sapiens
acagatttaaaggta

SEQ ID NO: 1424259 - DNA, 15 bp, Homo sapiens
aacagatttaaaggt

SEQ ID NO: 1424260 - DNA, 15 bp, Homo sapiens
taacagatttaaagg

SEQ ID NO: 1424261 - DNA, 15 bp, Homo sapiens
gtaacagatttaaag

SEQ ID NO: 1424262 - DNA, 15 bp, Homo sapiens
tgtaacagatttaaa

SEQ ID NO: 1424263 - DNA, 15 bp, Homo sapiens
atgtaacagatttaa

SEQ ID NO: 1424264 - DNA, 15 bp, Homo sapiens
tatgtaacagattta

SEQ ID NO: 1424265 - DNA, 15 bp, Homo sapiens
gtatgtaacagattt

SEQ ID NO: 1424266 - DNA, 15 bp, Homo sapiens
agtatgtaacagatt

SEQ ID NO: 1424267 - DNA, 15 bp, Homo sapiens
cagtatgtaacagat

SEQ ID NO: 1424268 - DNA, 15 bp, Homo sapiens
tcagtatgtaacaga

SEQ ID NO: 1424269 - DNA, 15 bp, Homo sapiens
ttcagtatgtaacag

SEQ ID NO: 1424270 - DNA, 15 bp, Homo sapiens
gttcagtatgtaaca

SEQ ID NO: 1424271 - DNA, 15 bp, Homo sapiens
tgttcagtatgtaac

SEQ ID NO: 1424272 - DNA, 15 bp, Homo sapiens
atgttcagtatgtaa

SEQ ID NO: 1424273 - DNA, 15 bp, Homo sapiens
aatgttcagtatgta

SEQ ID NO: 1424274 - DNA, 15 bp, Homo sapiens
aaatgttcagtatgt

SEQ ID NO: 1424275 - DNA, 15 bp, Homo sapiens
taaatgttcagtatg

SEQ ID NO: 1424276 - DNA, 15 bp, Homo sapiens
ataaatgttcagtat

SEQ ID NO: 1424277 - DNA, 15 bp, Homo sapiens
aataaatgttcagta

SEQ ID NO: 1424278 - DNA, 15 bp, Homo sapiens
aaataaatgttcagt

SEQ ID NO: 1424279 - DNA, 15 bp, Homo sapiens
aaaataaatgttcag

SEQ ID NO: 1424280 - DNA, 15 bp, Homo sapiens
taaaataaatgttca

SEQ ID NO: 1424281 - DNA, 15 bp, Homo sapiens
ttaaaataaatgttc

SEQ ID NO: 1424282 - DNA, 15 bp, Homo sapiens
cttaaaataaatgtt

SEQ ID NO: 1424283 - DNA, 15 bp, Homo sapiens
tcttaaaataaatgt

SEQ ID NO: 1424284 - DNA, 15 bp, Homo sapiens
atcttaaaataaatg

SEQ ID NO: 1424285 - DNA, 15 bp, Homo sapiens
catcttaaaataaat

SEQ ID NO: 1424286 - DNA, 15 bp, Homo sapiens
ccatcttaaaataaa

SEQ ID NO: 1424287 - DNA, 15 bp, Homo sapiens
tccatcttaaaataa

SEQ ID NO: 1424288 - DNA, 15 bp, Homo sapiens
ctccatcttaaaata

SEQ ID NO: 1424289 - DNA, 15 bp, Homo sapiens
actccatcttaaaat

SEQ ID NO: 1424290 - DNA, 15 bp, Homo sapiens
aactccatcttaaaa

SEQ ID NO: 1424291 - DNA, 15 bp, Homo sapiens
aaactccatcttaaa

SEQ ID NO: 1424292 - DNA, 15 bp, Homo sapiens
aaaactccatcttaa

SEQ ID NO: 1424293 - DNA, 15 bp, Homo sapiens
taaaactccatctta

SEQ ID NO: 1424294 - DNA, 15 bp, Homo sapiens
ttaaaactccatctt

SEQ ID NO: 1424295 - DNA, 15 bp, Homo sapiens
attaaaactccatct

SEQ ID NO: 1424296 - DNA, 15 bp, Homo sapiens
aattaaaactccatc

SEQ ID NO: 1424297 - DNA, 15 bp, Homo sapiens
taattaaaactccat

SEQ ID NO: 1424298 - DNA, 15 bp, Homo sapiens
gtaattaaaactcca

SEQ ID NO: 1424299 - DNA, 15 bp, Homo sapiens
ggtaattaaaactcc

SEQ ID NO: 1424300 - DNA, 15 bp, Homo sapiens
tggtaattaaaactc

SEQ ID NO: 1424301 - DNA, 15 bp, Homo sapiens
atggtaattaaaact

SEQ ID NO: 1424302 - DNA, 15 bp, Homo sapiens
tatggtaattaaaac

SEQ ID NO: 1424303 - DNA, 15 bp, Homo sapiens
atatggtaattaaaa

SEQ ID NO: 1424304 - DNA, 15 bp, Homo sapiens
catatggtaattaaa

SEQ ID NO: 1424305 - DNA, 15 bp, Homo sapiens
acatatggtaattaa

SEQ ID NO: 1424306 - DNA, 15 bp, Homo sapiens
tacatatggtaatta

SEQ ID NO: 1424307 - DNA, 15 bp, Homo sapiens
ttacatatggtaatt

SEQ ID NO: 1424308 - DNA, 15 bp, Homo sapiens
gttacatatggtaat

SEQ ID NO: 1424309 - DNA, 15 bp, Homo sapiens
tgttacatatggtaa

SEQ ID NO: 1424310 - DNA, 15 bp, Homo sapiens
ctgttacatatggta

SEQ ID NO: 1424311 - DNA, 15 bp, Homo sapiens
actgttacatatggt

SEQ ID NO: 1424312 - DNA, 15 bp, Homo sapiens
cactgttacatatgg

SEQ ID NO: 1424313 - DNA, 15 bp, Homo sapiens
gcactgttacatatg

SEQ ID NO: 1424314 - DNA, 15 bp, Homo sapiens
tgcactgttacatat

SEQ ID NO: 1424315 - DNA, 15 bp, Homo sapiens
atgcactgttacata

SEQ ID NO: 1424316 - DNA, 15 bp, Homo sapiens
catgcactgttacat

SEQ ID NO: 1424317 - DNA, 15 bp, Homo sapiens
tcatgcactgttaca

SEQ ID NO: 1424318 - DNA, 15 bp, Homo sapiens
ttcatgcactgttac

SEQ ID NO: 1424319 - DNA, 15 bp, Homo sapiens
tttcatgcactgtta

SEQ ID NO: 1424320 - DNA, 15 bp, Homo sapiens
ttttcatgcactgtt

SEQ ID NO: 1424321 - DNA, 15 bp, Homo sapiens
tttttcatgcactgt

SEQ ID NO: 1424322 - DNA, 15 bp, Homo sapiens
atttttcatgcactg

SEQ ID NO: 1424323 - DNA, 15 bp, Homo sapiens
catttttcatgcact

SEQ ID NO: 1424324 - DNA, 15 bp, Homo sapiens
ccatttttcatgcac

SEQ ID NO: 1424325 - DNA, 15 bp, Homo sapiens
cccatttttcatgca

SEQ ID NO: 1424326 - DNA, 15 bp, Homo sapiens
gcccatttttcatgc

SEQ ID NO: 1424327 - DNA, 15 bp, Homo sapiens
agcccatttttcatg

SEQ ID NO: 1424328 - DNA, 15 bp, Homo sapiens
cagcccatttttcat

SEQ ID NO: 1424329 - DNA, 15 bp, Homo sapiens
acagcccatttttca

SEQ ID NO: 1424330 - DNA, 15 bp, Homo sapiens
gacagcccatttttc

SEQ ID NO: 1424331 - DNA, 15 bp, Homo sapiens
agacagcccattttt

SEQ ID NO: 1424332 - DNA, 15 bp, Homo sapiens
aagacagcccatttt

SEQ ID NO: 1424333 - DNA, 15 bp, Homo sapiens
aaagacagcccattt

SEQ ID NO: 1424334 - DNA, 15 bp, Homo sapiens
caaagacagcccatt

SEQ ID NO: 1424335 - DNA, 15 bp, Homo sapiens
tcaaagacagcccat

SEQ ID NO: 1424336 - DNA, 15 bp, Homo sapiens
ctcaaagacagccca

SEQ ID NO: 1424337 - DNA, 15 bp, Homo sapiens
actcaaagacagccc

SEQ ID NO: 1424338 - DNA, 15 bp, Homo sapiens
aactcaaagacagcc

SEQ ID NO: 1424339 - DNA, 15 bp, Homo sapiens
taactcaaagacagc

SEQ ID NO: 1424340 - DNA, 15 bp, Homo sapiens
ttaactcaaagacag

SEQ ID NO: 1424341 - DNA, 15 bp, Homo sapiens
tttaactcaaagaca

SEQ ID NO: 1424342 - DNA, 15 bp, Homo sapiens
atttaactcaaagac

SEQ ID NO: 1424343 - DNA, 15 bp, Homo sapiens
tatttaactcaaaga

SEQ ID NO: 1424344 - DNA, 15 bp, Homo sapiens
atatttaactcaaag

SEQ ID NO: 1424345 - DNA, 15 bp, Homo sapiens
aatatttaactcaaa

SEQ ID NO: 1424346 - DNA, 15 bp, Homo sapiens
aaatatttaactcaa

SEQ ID NO: 1424347 - DNA, 15 bp, Homo sapiens
gaaatatttaactca

SEQ ID NO: 1424348 - DNA, 15 bp, Homo sapiens
ggaaatatttaactc

SEQ ID NO: 1424349 - DNA, 15 bp, Homo sapiens
gggaaatatttaact

SEQ ID NO: 1424350 - DNA, 15 bp, Homo sapiens
ggggaaatatttaac

SEQ ID NO: 1424351 - DNA, 15 bp, Homo sapiens
aggggaaatatttaa

SEQ ID NO: 1424352 - DNA, 15 bp, Homo sapiens
gaggggaaatattta

SEQ ID NO: 1424353 - DNA, 15 bp, Homo sapiens
agaggggaaatattt

SEQ ID NO: 1424354 - DNA, 15 bp, Homo sapiens
aagaggggaaatatt

SEQ ID NO: 1424355 - DNA, 15 bp, Homo sapiens
taagaggggaaatat

SEQ ID NO: 1424356 - DNA, 15 bp, Homo sapiens
ttaagaggggaaata

SEQ ID NO: 1424357 - DNA, 15 bp, Homo sapiens
cttaagaggggaaat

SEQ ID NO: 1424358 - DNA, 15 bp, Homo sapiens
tcttaagaggggaaa

SEQ ID NO: 1424359 - DNA, 15 bp, Homo sapiens
ctcttaagaggggaa

SEQ ID NO: 1424360 - DNA, 15 bp, Homo sapiens
tctcttaagagggga

SEQ ID NO: 1424361 - DNA, 15 bp, Homo sapiens
ttctcttaagagggg

SEQ ID NO: 1424362 - DNA, 15 bp, Homo sapiens
tttctcttaagaggg

SEQ ID NO: 1424363 - DNA, 15 bp, Homo sapiens
ctttctcttaagagg

SEQ ID NO: 1424364 - DNA, 15 bp, Homo sapiens
tctttctcttaagag

SEQ ID NO: 1424365 - DNA, 15 bp, Homo sapiens
atctttctcttaaga

SEQ ID NO: 1424366 - DNA, 15 bp, Homo sapiens
tatctttctcttaag

SEQ ID NO: 1424367 - DNA, 15 bp, Homo sapiens
catatctttctctta

SEQ ID NO: 1424368 - DNA, 15 bp, Homo sapiens
acatatctttctctt

SEQ ID NO: 1424369 - DNA, 15 bp, Homo sapiens
aacatatctttctct

SEQ ID NO: 1424370 - DNA, 15 bp, Homo sapiens
aaacatatctttctc

SEQ ID NO: 1424371 - DNA, 15 bp, Homo sapiens
caaacatatctttct

SEQ ID NO: 1424372 - DNA, 15 bp, Homo sapiens
acaaacatatctttc

SEQ ID NO: 1424373 - DNA, 15 bp, Homo sapiens
aacaaacatatcttt

SEQ ID NO: 1424374 - DNA, 15 bp, Homo sapiens
aaacaaacatatctt

SEQ ID NO: 1424375 - DNA, 15 bp, Homo sapiens
aaaacaaacatatct

SEQ ID NO: 1424376 - DNA, 15 bp, Homo sapiens
aaaaacaaacatatc

SEQ ID NO: 1424377 - DNA, 15 bp, Homo sapiens
aaaaaacaaacatat

SEQ ID NO: 1424378 - DNA, 15 bp, Homo sapiens
aaaaaaacaaacata

SEQ ID NO: 1424379 - DNA, 15 bp, Homo sapiens
taaaaaaacaaacat

SEQ ID NO: 1424380 - DNA, 15 bp, Homo sapiens
ataaaaaaacaaaca

SEQ ID NO: 1424381 - DNA, 15 bp, Homo sapiens
aataaaaaaacaaac

SEQ ID NO: 1424382 - DNA, 15 bp, Homo sapiens
caaaataaaaaaaca

SEQ ID NO: 1424383 - DNA, 15 bp, Homo sapiens
tcaaaataaaaaaac

SEQ ID NO: 1424384 - DNA, 15 bp, Homo sapiens
ttcaaaataaaaaaa

SEQ ID NO: 1424385 - DNA, 15 bp, Homo sapiens
attcaaaataaaaaa

SEQ ID NO: 1424386 - DNA, 15 bp, Homo sapiens
cattcaaaataaaaa

SEQ ID NO: 1424387 - DNA, 15 bp, Homo sapiens
acattcaaaataaaa

SEQ ID NO: 1424388 - DNA, 15 bp, Homo sapiens
aacattcaaaataaa

SEQ ID NO: 1424389 - DNA, 15 bp, Homo sapiens
aaacattcaaaataa

SEQ ID NO: 1424390 - DNA, 15 bp, Homo sapiens
aaaacattcaaaata

SEQ ID NO: 1424391 - DNA, 15 bp, Homo sapiens
taaaacattcaaaat

SEQ ID NO: 1424392 - DNA, 15 bp, Homo sapiens
ttaaaacattcaaaa

SEQ ID NO: 1424393 - DNA, 15 bp, Homo sapiens
gttaaaacattcaaa

SEQ ID NO: 1424394 - DNA, 15 bp, Homo sapiens
agttaaaacattcaa

SEQ ID NO: 1424395 - DNA, 15 bp, Homo sapiens
aagttaaaacattca

SEQ ID NO: 1424396 - DNA, 15 bp, Homo sapiens
taagttaaaacattc

SEQ ID NO: 1424397 - DNA, 15 bp, Homo sapiens
ataagttaaaacatt

SEQ ID NO: 1424398 - DNA, 15 bp, Homo sapiens
aataagttaaaacat

SEQ ID NO: 1424399 - DNA, 15 bp, Homo sapiens
caataagttaaaaca

SEQ ID NO: 1424400 - DNA, 15 bp, Homo sapiens
acaataagttaaaac

SEQ ID NO: 1424401 - DNA, 15 bp, Homo sapiens
gacaataagttaaaa

SEQ ID NO: 1424402 - DNA, 15 bp, Homo sapiens
agacaataagttaaa

SEQ ID NO: 1424403 - DNA, 15 bp, Homo sapiens
aagacaataagttaa

SEQ ID NO: 1424404 - DNA, 15 bp, Homo sapiens
gaagacaataagtta

SEQ ID NO: 1424405 - DNA, 15 bp, Homo sapiens
tgaagacaataagtt

SEQ ID NO: 1424406 - DNA, 15 bp, Homo sapiens
ttgaagacaataagt

SEQ ID NO: 1424407 - DNA, 15 bp, Homo sapiens
cttgaagacaataag

SEQ ID NO: 1424408 - DNA, 15 bp, Homo sapiens
acttgaagacaataa

SEQ ID NO: 1424409 - DNA, 15 bp, Homo sapiens
cacttgaagacaata

SEQ ID NO: 1424410 - DNA, 15 bp, Homo sapiens
ccacttgaagacaat

SEQ ID NO: 1424411 - DNA, 15 bp, Homo sapiens
accacttgaagacaa

SEQ ID NO: 1424412 - DNA, 15 bp, Homo sapiens
aaccacttgaagaca

SEQ ID NO: 1424413 - DNA, 15 bp, Homo sapiens
taaccacttgaagac

SEQ ID NO: 1424414 - DNA, 15 bp, Homo sapiens
ttaaccacttgaaga

SEQ ID NO: 1424415 - DNA, 15 bp, Homo sapiens
attaaccacttgaag

SEQ ID NO: 1424416 - DNA, 15 bp, Homo sapiens
tattaaccacttgaa

SEQ ID NO: 1424417 - DNA, 15 bp, Homo sapiens
atattaaccacttga

SEQ ID NO: 1424418 - DNA, 15 bp, Homo sapiens
aatattaaccacttg

SEQ ID NO: 1424419 - DNA, 15 bp, Homo sapiens
gaatattaaccactt

SEQ ID NO: 1424420 - DNA, 15 bp, Homo sapiens
agaatattaaccact

SEQ ID NO: 1424421 - DNA, 15 bp, Homo sapiens
aagaatattaaccac

SEQ ID NO: 1424422 - DNA, 15 bp, Homo sapiens
gaagaatattaacca

SEQ ID NO: 1424423 - DNA, 15 bp, Homo sapiens
tgaagaatattaacc

SEQ ID NO: 1424424 - DNA, 15 bp, Homo sapiens
ttgaagaatattaac

SEQ ID NO: 1424425 - DNA, 15 bp, Homo sapiens
tttgaagaatattaa

SEQ ID NO: 1424426 - DNA, 15 bp, Homo sapiens
atttgaagaatatta

SEQ ID NO: 1424427 - DNA, 15 bp, Homo sapiens
tatttgaagaatatt

SEQ ID NO: 1424428 - DNA, 15 bp, Homo sapiens
atatttgaagaatat

SEQ ID NO: 1424429 - DNA, 15 bp, Homo sapiens
tatatttgaagaata

SEQ ID NO: 1424430 - DNA, 15 bp, Homo sapiens
ttatatttgaagaat

SEQ ID NO: 1424431 - DNA, 15 bp, Homo sapiens
gttatatttgaagaa

SEQ ID NO: 1424432 - DNA, 15 bp, Homo sapiens
tgttatatttgaaga

SEQ ID NO: 1424433 - DNA, 15 bp, Homo sapiens
atgttatatttgaag

SEQ ID NO: 1424434 - DNA, 15 bp, Homo sapiens
catgttatatttgaa

SEQ ID NO: 1424435 - DNA, 15 bp, Homo sapiens
gcatgttatatttga

SEQ ID NO: 1424436 - DNA, 15 bp, Homo sapiens
agcatgttatatttg

SEQ ID NO: 1424437 - DNA, 15 bp, Homo sapiens
cagcatgttatattt

SEQ ID NO: 1424438 - DNA, 15 bp, Homo sapiens
acagcatgttatatt

SEQ ID NO: 1424439 - DNA, 15 bp, Homo sapiens
gacagcatgttatat

SEQ ID NO: 1424440 - DNA, 15 bp, Homo sapiens
agacagcatgttata

SEQ ID NO: 1424441 - DNA, 15 bp, Homo sapiens
tagacagcatgttat

SEQ ID NO: 1424442 - DNA, 15 bp, Homo sapiens
atagacagcatgtta

SEQ ID NO: 1424443 - DNA, 15 bp, Homo sapiens
aatagacagcatgtt

SEQ ID NO: 1424444 - DNA, 15 bp, Homo sapiens
caatagacagcatgt

SEQ ID NO: 1424445 - DNA, 15 bp, Homo sapiens
gcaatagacagcatg

SEQ ID NO: 1424446 - DNA, 15 bp, Homo sapiens
tgcaatagacagcat

SEQ ID NO: 1424447 - DNA, 15 bp, Homo sapiens
atgcaatagacagca

SEQ ID NO: 1424448 - DNA, 15 bp, Homo sapiens
catgcaatagacagc

SEQ ID NO: 1424449 - DNA, 15 bp, Homo sapiens
tcatgcaatagacag

SEQ ID NO: 1424450 - DNA, 15 bp, Homo sapiens
ctcatgcaatagaca

SEQ ID NO: 1424451 - DNA, 15 bp, Homo sapiens
actcatgcaatagac

SEQ ID NO: 1424452 - DNA, 15 bp, Homo sapiens
aactcatgcaataga

SEQ ID NO: 1424453 - DNA, 15 bp, Homo sapiens
taactcatgcaatag

SEQ ID NO: 1424454 - DNA, 15 bp, Homo sapiens
ataactcatgcaata

SEQ ID NO: 1424455 - DNA, 15 bp, Homo sapiens
tataactcatgcaat

SEQ ID NO: 1424456 - DNA, 15 bp, Homo sapiens
atataactcatgcaa

SEQ ID NO: 1424457 - DNA, 15 bp, Homo sapiens
gatataactcatgca

SEQ ID NO: 1424458 - DNA, 15 bp, Homo sapiens
agatataactcatgc

SEQ ID NO: 1424459 - DNA, 15 bp, Homo sapiens
gagatataactcatg

SEQ ID NO: 1424460 - DNA, 15 bp, Homo sapiens
tgagatataactcat

SEQ ID NO: 1424461 - DNA, 15 bp, Homo sapiens
ctgagatataactca

SEQ ID NO: 1424462 - DNA, 15 bp, Homo sapiens
actgagatataactc

SEQ ID NO: 1424463 - DNA, 15 bp, Homo sapiens
aactgagatataact

SEQ ID NO: 1424464 - DNA, 15 bp, Homo sapiens
aaactgagatataac

SEQ ID NO: 1424465 - DNA, 15 bp, Homo sapiens
aaaactgagatataa

SEQ ID NO: 1424466 - DNA, 15 bp, Homo sapiens
taaaactgagatata

SEQ ID NO: 1424467 - DNA, 15 bp, Homo sapiens
ttaaaactgagatat

SEQ ID NO: 1424468 - DNA, 15 bp, Homo sapiens
tttaaaactgagata

SEQ ID NO: 1424469 - DNA, 15 bp, Homo sapiens
ttttaaaactgagat

SEQ ID NO: 1424470 - DNA, 15 bp, Homo sapiens
tttttaaaactgaga

SEQ ID NO: 1424471 - DNA, 15 bp, Homo sapiens
ttttttaaaactgag

SEQ ID NO: 1424472 - DNA, 15 bp, Homo sapiens
attttttaaaactga

SEQ ID NO: 1424473 - DNA, 15 bp, Homo sapiens
cattttttaaaactg

SEQ ID NO: 1424474 - DNA, 15 bp, Homo sapiens
gcattttttaaaact

SEQ ID NO: 1424475 - DNA, 15 bp, Homo sapiens
tgcattttttaaaac

SEQ ID NO: 1424476 - DNA, 15 bp, Homo sapiens
ttgcattttttaaaa

SEQ ID NO: 1424477 - DNA, 15 bp, Homo sapiens
cttgcattttttaaa

SEQ ID NO: 1424478 - DNA, 15 bp, Homo sapiens
acttgcattttttaa

SEQ ID NO: 1424479 - DNA, 15 bp, Homo sapiens
gacttgcatttttta

SEQ ID NO: 1424480 - DNA, 15 bp, Homo sapiens
tgacttgcatttttt

SEQ ID NO: 1424481 - DNA, 15 bp, Homo sapiens
atgacttgcattttt

SEQ ID NO: 1424482 - DNA, 15 bp, Homo sapiens
catgacttgcatttt

SEQ ID NO: 1424483 - DNA, 15 bp, Homo sapiens
acatgacttgcattt

SEQ ID NO: 1424484 - DNA, 15 bp, Homo sapiens
aacatgacttgcatt

SEQ ID NO: 1424485 - DNA, 15 bp, Homo sapiens
taacatgacttgcat

SEQ ID NO: 1424486 - DNA, 15 bp, Homo sapiens
gtaacatgacttgca

SEQ ID NO: 1424487 - DNA, 15 bp, Homo sapiens
agtaacatgacttgc

SEQ ID NO: 1424488 - DNA, 15 bp, Homo sapiens
gagtaacatgacttg

SEQ ID NO: 1424489 - DNA, 15 bp, Homo sapiens
ggagtaacatgactt

SEQ ID NO: 1424490 - DNA, 15 bp, Homo sapiens
aggagtaacatgact

SEQ ID NO: 1424491 - DNA, 15 bp, Homo sapiens
gaggagtaacatgac

SEQ ID NO: 1424492 - DNA, 15 bp, Homo sapiens
agaggagtaacatga

SEQ ID NO: 1424493 - DNA, 15 bp, Homo sapiens
cagaggagtaacatg

SEQ ID NO: 1424494 - DNA, 15 bp, Homo sapiens
gcagaggagtaacat

SEQ ID NO: 1424495 - DNA, 15 bp, Homo sapiens
agcagaggagtaaca

SEQ ID NO: 1424496 - DNA, 15 bp, Homo sapiens
gagcagaggagtaac

SEQ ID NO: 1424497 - DNA, 15 bp, Homo sapiens
tgagcagaggagtaa

SEQ ID NO: 1424498 - DNA, 15 bp, Homo sapiens
ttgagcagaggagta

SEQ ID NO: 1424499 - DNA, 15 bp, Homo sapiens
tttgagcagaggagt

SEQ ID NO: 1424500 - DNA, 15 bp, Homo sapiens
ttttgagcagaggag

SEQ ID NO: 1424501 - DNA, 15 bp, Homo sapiens
tttttgagcagagga

SEQ ID NO: 1424502 - DNA, 15 bp, Homo sapiens
ctttttgagcagagg

SEQ ID NO: 1424503 - DNA, 15 bp, Homo sapiens
actttttgagcagag

SEQ ID NO: 1424504 - DNA, 15 bp, Homo sapiens
aactttttgagcaga

SEQ ID NO: 1424505 - DNA, 15 bp, Homo sapiens
taactttttgagcag

SEQ ID NO: 1424506 - DNA, 15 bp, Homo sapiens
ataactttttgagca

SEQ ID NO: 1424507 - DNA, 15 bp, Homo sapiens
aataactttttgagc

SEQ ID NO: 1424508 - DNA, 15 bp, Homo sapiens
aaataactttttgag

SEQ ID NO: 1424509 - DNA, 15 bp, Homo sapiens
ggaaataactttttg

SEQ ID NO: 1424510 - DNA, 15 bp, Homo sapiens
tggaaataacttttt

SEQ ID NO: 1424511 - DNA, 15 bp, Homo sapiens
ctggaaataactttt

SEQ ID NO: 1424512 - DNA, 15 bp, Homo sapiens
tctggaaataacttt

SEQ ID NO: 1424513 - DNA, 15 bp, Homo sapiens
atctggaaataactt

SEQ ID NO: 1424514 - DNA, 15 bp, Homo sapiens
aatctggaaataact

SEQ ID NO: 1424515 - DNA, 15 bp, Homo sapiens
aaatctggaaataac

SEQ ID NO: 1424516 - DNA, 15 bp, Homo sapiens
gaaatctggaaataa

SEQ ID NO: 1424517 - DNA, 15 bp, Homo sapiens
ggaaatctggaaata

SEQ ID NO: 1424518 - DNA, 15 bp, Homo sapiens
gggaaatctggaaat

SEQ ID NO: 1424519 - DNA, 15 bp, Homo sapiens
agggaaatctggaaa

SEQ ID NO: 1424520 - DNA, 15 bp, Homo sapiens
aagggaaatctggaa

SEQ ID NO: 1424521 - DNA, 15 bp, Homo sapiens
aaagggaaatctgga

SEQ ID NO: 1424522 - DNA, 15 bp, Homo sapiens
aaaagggaaatctgg

SEQ ID NO: 1424523 - DNA, 15 bp, Homo sapiens
aaaaagggaaatctg

SEQ ID NO: 1424524 - DNA, 15 bp, Homo sapiens
aaaaaagggaaatct

SEQ ID NO: 1424525 - DNA, 15 bp, Homo sapiens
aaaaaaagggaaatc

SEQ ID NO: 1424526 - DNA, 15 bp, Homo sapiens
taaaaaaagggaaat

SEQ ID NO: 1424527 - DNA, 15 bp, Homo sapiens
ataaaaaaagggaaa

SEQ ID NO: 1424528 - DNA, 15 bp, Homo sapiens
gataaaaaaagggaa

SEQ ID NO: 1424529 - DNA, 15 bp, Homo sapiens
agataaaaaaaggga

SEQ ID NO: 1424530 - DNA, 15 bp, Homo sapiens
tagataaaaaaaggg

SEQ ID NO: 1424531 - DNA, 15 bp, Homo sapiens
ttagataaaaaaagg

SEQ ID NO: 1424532 - DNA, 15 bp, Homo sapiens
tttagataaaaaaag

SEQ ID NO: 1424533 - DNA, 15 bp, Homo sapiens
ctttagataaaaaaa

SEQ ID NO: 1424534 - DNA, 15 bp, Homo sapiens
actttagataaaaaa

SEQ ID NO: 1424535 - DNA, 15 bp, Homo sapiens
aactttagataaaaa

SEQ ID NO: 1424536 - DNA, 15 bp, Homo sapiens
aaactttagataaaa

SEQ ID NO: 1424537 - DNA, 15 bp, Homo sapiens
aaaactttagataaa

SEQ ID NO: 1424538 - DNA, 15 bp, Homo sapiens
caaaactttagataa

SEQ ID NO: 1424539 - DNA, 15 bp, Homo sapiens
acaaaactttagata

SEQ ID NO: 1424540 - DNA, 15 bp, Homo sapiens
tacaaaactttagat

SEQ ID NO: 1424541 - DNA, 15 bp, Homo sapiens
atacaaaactttaga

SEQ ID NO: 1424542 - DNA, 15 bp, Homo sapiens
tatacaaaactttag

SEQ ID NO: 1424543 - DNA, 15 bp, Homo sapiens
ttatacaaaacttta

SEQ ID NO: 1424544 - DNA, 15 bp, Homo sapiens
attatacaaaacttt

SEQ ID NO: 1424545 - DNA, 15 bp, Homo sapiens
aattatacaaaactt

SEQ ID NO: 1424546 - DNA, 15 bp, Homo sapiens
aaattatacaaaact

SEQ ID NO: 1424547 - DNA, 15 bp, Homo sapiens
aaaattatacaaaac

SEQ ID NO: 1424548 - DNA, 15 bp, Homo sapiens
aaaaattatacaaaa

SEQ ID NO: 1424549 - DNA, 15 bp, Homo sapiens
aaaaaattatacaaa

SEQ ID NO: 1424550 - DNA, 15 bp, Homo sapiens
aaaaaaattatacaa

SEQ ID NO: 1424551 - DNA, 15 bp, Homo sapiens
gaaaaaaattataca

SEQ ID NO: 1424552 - DNA, 15 bp, Homo sapiens
tgaaaaaaattatac

SEQ ID NO: 1424553 - DNA, 15 bp, Homo sapiens
ctgaaaaaaattata

SEQ ID NO: 1424554 - DNA, 15 bp, Homo sapiens
actgaaaaaaattat

SEQ ID NO: 1424555 - DNA, 15 bp, Homo sapiens
aactgaaaaaaatta

SEQ ID NO: 1424556 - DNA, 15 bp, Homo sapiens
gaactgaaaaaaatt

SEQ ID NO: 1424557 - DNA, 15 bp, Homo sapiens
tgaactgaaaaaaat

SEQ ID NO: 1424558 - DNA, 15 bp, Homo sapiens
gtgaactgaaaaaaa

SEQ ID NO: 1424559 - DNA, 15 bp, Homo sapiens
agtgaactgaaaaaa

SEQ ID NO: 1424560 - DNA, 15 bp, Homo sapiens
gagtgaactgaaaaa

SEQ ID NO: 1424561 - DNA, 15 bp, Homo sapiens
agagtgaactgaaaa

SEQ ID NO: 1424562 - DNA, 15 bp, Homo sapiens
tagagtgaactgaaa

SEQ ID NO: 1424563 - DNA, 15 bp, Homo sapiens
ttagagtgaactgaa

SEQ ID NO: 1424564 - DNA, 15 bp, Homo sapiens
tttagagtgaactga

SEQ ID NO: 1424565 - DNA, 15 bp, Homo sapiens
atttagagtgaactg

SEQ ID NO: 1424566 - DNA, 15 bp, Homo sapiens
catttagagtgaact

SEQ ID NO: 1424567 - DNA, 15 bp, Homo sapiens
tcatttagagtgaac

SEQ ID NO: 1424568 - DNA, 15 bp, Homo sapiens
gtcatttagagtgaa

SEQ ID NO: 1424569 - DNA, 15 bp, Homo sapiens
agtcatttagagtga

SEQ ID NO: 1424570 - DNA, 15 bp, Homo sapiens
aagtcatttagagtg

SEQ ID NO: 1424571 - DNA, 15 bp, Homo sapiens
taagtcatttagagt

SEQ ID NO: 1424572 - DNA, 15 bp, Homo sapiens
ttaagtcatttagag

SEQ ID NO: 1424573 - DNA, 15 bp, Homo sapiens
attaagtcatttaga

SEQ ID NO: 1424574 - DNA, 15 bp, Homo sapiens
tattaagtcatttag

SEQ ID NO: 1424575 - DNA, 15 bp, Homo sapiens
atattaagtcattta

SEQ ID NO: 1424576 - DNA, 15 bp, Homo sapiens
tatattaagtcattt

SEQ ID NO: 1424577 - DNA, 15 bp, Homo sapiens
ctatattaagtcatt

SEQ ID NO: 1424578 - DNA, 15 bp, Homo sapiens
cctatattaagtcat

SEQ ID NO: 1424579 - DNA, 15 bp, Homo sapiens
acctatattaagtca

SEQ ID NO: 1424580 - DNA, 15 bp, Homo sapiens
gacctatattaagtc

SEQ ID NO: 1424581 - DNA, 15 bp, Homo sapiens
agacctatattaagt

SEQ ID NO: 1424582 - DNA, 15 bp, Homo sapiens
tagacctatattaag

SEQ ID NO: 1424583 - DNA, 15 bp, Homo sapiens
ttagacctatattaa

SEQ ID NO: 1424584 - DNA, 15 bp, Homo sapiens
tttagacctatatta

SEQ ID NO: 1424585 - DNA, 15 bp, Homo sapiens
ttttagacctatatt

SEQ ID NO: 1424586 - DNA, 15 bp, Homo sapiens
attttagacctatat

SEQ ID NO: 1424587 - DNA, 15 bp, Homo sapiens
aattttagacctata

SEQ ID NO: 1424588 - DNA, 15 bp, Homo sapiens
aaattttagacctat

SEQ ID NO: 1424589 - DNA, 15 bp, Homo sapiens
caaattttagaccta

SEQ ID NO: 1424590 - DNA, 15 bp, Homo sapiens
tcaaattttagacct

SEQ ID NO: 1424591 - DNA, 15 bp, Homo sapiens
ttcaaattttagacc

SEQ ID NO: 1424592 - DNA, 15 bp, Homo sapiens
attcaaattttagac

SEQ ID NO: 1424593 - DNA, 15 bp, Homo sapiens
tattcaaattttaga

SEQ ID NO: 1424594 - DNA, 15 bp, Homo sapiens
atattcaaattttag

SEQ ID NO: 1424595 - DNA, 15 bp, Homo sapiens
aatattcaaatttta

SEQ ID NO: 1424596 - DNA, 15 bp, Homo sapiens
taatattcaaatttt

SEQ ID NO: 1424597 - DNA, 15 bp, Homo sapiens
ctaatattcaaattt

SEQ ID NO: 1424598 - DNA, 15 bp, Homo sapiens
actaatattcaaatt

SEQ ID NO: 1424599 - DNA, 15 bp, Homo sapiens
aactaatattcaaat

SEQ ID NO: 1424600 - DNA, 15 bp, Homo sapiens
caactaatattcaaa

SEQ ID NO: 1424601 - DNA, 15 bp, Homo sapiens
tcaactaatattcaa

SEQ ID NO: 1424602 - DNA, 15 bp, Homo sapiens
gtcaactaatattca

SEQ ID NO: 1424603 - DNA, 15 bp, Homo sapiens
agtcaactaatattc

SEQ ID NO: 1424604 - DNA, 15 bp, Homo sapiens
aagtcaactaatatt

SEQ ID NO: 1424605 - DNA, 15 bp, Homo sapiens
caagtcaactaatat

SEQ ID NO: 1424606 - DNA, 15 bp, Homo sapiens
acaagtcaactaata

SEQ ID NO: 1424607 - DNA, 15 bp, Homo sapiens
tacaagtcaactaat

SEQ ID NO: 1424608 - DNA, 15 bp, Homo sapiens
atacaagtcaactaa

SEQ ID NO: 1424609 - DNA, 15 bp, Homo sapiens
tatacaagtcaacta

SEQ ID NO: 1424610 - DNA, 15 bp, Homo sapiens
atatacaagtcaact

SEQ ID NO: 1424611 - DNA, 15 bp, Homo sapiens
gatatacaagtcaac

SEQ ID NO: 1424612 - DNA, 15 bp, Homo sapiens
tgatatacaagtcaa

SEQ ID NO: 1424613 - DNA, 15 bp, Homo sapiens
gtgatatacaagtca

SEQ ID NO: 1424614 - DNA, 15 bp, Homo sapiens
agtgatatacaagtc

SEQ ID NO: 1424615 - DNA, 15 bp, Homo sapiens
tagtgatatacaagt

SEQ ID NO: 1424616 - DNA, 15 bp, Homo sapiens
atagtgatatacaag

SEQ ID NO: 1424617 - DNA, 15 bp, Homo sapiens
aatagtgatatacaa

SEQ ID NO: 1424618 - DNA, 15 bp, Homo sapiens
taatagtgatataca

SEQ ID NO: 1424619 - DNA, 15 bp, Homo sapiens
ctaatagtgatatac

SEQ ID NO: 1424620 - DNA, 15 bp, Homo sapiens
cctaatagtgatata

SEQ ID NO: 1424621 - DNA, 15 bp, Homo sapiens
tcctaatagtgatat

SEQ ID NO: 1424622 - DNA, 15 bp, Homo sapiens
ttcctaatagtgata

SEQ ID NO: 1424623 - DNA, 15 bp, Homo sapiens
attcctaatagtgat

SEQ ID NO: 1424624 - DNA, 15 bp, Homo sapiens
gattcctaatagtga

SEQ ID NO: 1424625 - DNA, 15 bp, Homo sapiens
ggattcctaatagtg

SEQ ID NO: 1424626 - DNA, 15 bp, Homo sapiens
tggattcctaatagt

SEQ ID NO: 1424627 - DNA, 15 bp, Homo sapiens
ttggattcctaatag

SEQ ID NO: 1424628 - DNA, 15 bp, Homo sapiens
tttggattcctaata

SEQ ID NO: 1424629 - DNA, 15 bp, Homo sapiens
atttggattcctaat

SEQ ID NO: 1424630 - DNA, 15 bp, Homo sapiens
aatttggattcctaa

SEQ ID NO: 1424631 - DNA, 15 bp, Homo sapiens
gaatttggattccta

SEQ ID NO: 1424632 - DNA, 15 bp, Homo sapiens
ggaatttggattcct

SEQ ID NO: 1424633 - DNA, 15 bp, Homo sapiens
gggaatttggattcc

SEQ ID NO: 1424634 - DNA, 15 bp, Homo sapiens
agggaatttggattc

SEQ ID NO: 1424635 - DNA, 15 bp, Homo sapiens
tagggaatttggatt

SEQ ID NO: 1424636 - DNA, 15 bp, Homo sapiens
gtagggaatttggat

SEQ ID NO: 1424637 - DNA, 15 bp, Homo sapiens
tgtagggaatttgga

SEQ ID NO: 1424638 - DNA, 15 bp, Homo sapiens
atgtagggaatttgg

SEQ ID NO: 1424639 - DNA, 15 bp, Homo sapiens
aatgtagggaatttg

SEQ ID NO: 1424640 - DNA, 15 bp, Homo sapiens
aaatgtagggaattt

SEQ ID NO: 1424641 - DNA, 15 bp, Homo sapiens
caaatgtagggaatt

SEQ ID NO: 1424642 - DNA, 15 bp, Homo sapiens
gcaaatgtagggaat

SEQ ID NO: 1424643 - DNA, 15 bp, Homo sapiens
tgcaaatgtagggaa

SEQ ID NO: 1424644 - DNA, 15 bp, Homo sapiens
ttgcaaatgtaggga

SEQ ID NO: 1424645 - DNA, 15 bp, Homo sapiens
attgcaaatgtaggg

SEQ ID NO: 1424646 - DNA, 15 bp, Homo sapiens
cattgcaaatgtagg

SEQ ID NO: 1424647 - DNA, 15 bp, Homo sapiens
tcattgcaaatgtag

SEQ ID NO: 1424648 - DNA, 15 bp, Homo sapiens
gtcattgcaaatgta

SEQ ID NO: 1424649 - DNA, 15 bp, Homo sapiens
tgtcattgcaaatgt

SEQ ID NO: 1424650 - DNA, 15 bp, Homo sapiens
gtgtcattgcaaatg

SEQ ID NO: 1424651 - DNA, 15 bp, Homo sapiens
agtgtcattgcaaat

SEQ ID NO: 1424652 - DNA, 15 bp, Homo sapiens
cagtgtcattgcaaa

SEQ ID NO: 1424653 - DNA, 15 bp, Homo sapiens
acagtgtcattgcaa

SEQ ID NO: 1424654 - DNA, 15 bp, Homo sapiens
gacagtgtcattgca

SEQ ID NO: 1424655 - DNA, 15 bp, Homo sapiens
tgacagtgtcattgc

SEQ ID NO: 1424656 - DNA, 15 bp, Homo sapiens
atgacagtgtcattg

SEQ ID NO: 1424657 - DNA, 15 bp, Homo sapiens
aatgacagtgtcatt

SEQ ID NO: 1424658 - DNA, 15 bp, Homo sapiens
caatgacagtgtcat

SEQ ID NO: 1424659 - DNA, 15 bp, Homo sapiens
tcaatgacagtgtca

SEQ ID NO: 1424660 - DNA, 15 bp, Homo sapiens
ttcaatgacagtgtc

SEQ ID NO: 1424661 - DNA, 15 bp, Homo sapiens
gttcaatgacagtgt

SEQ ID NO: 1424662 - DNA, 15 bp, Homo sapiens
tgttcaatgacagtg

SEQ ID NO: 1424663 - DNA, 15 bp, Homo sapiens
ttgttcaatgacagt

SEQ ID NO: 1424664 - DNA, 15 bp, Homo sapiens
gttgttcaatgacag

SEQ ID NO: 1424665 - DNA, 15 bp, Homo sapiens
tgttgttcaatgaca

SEQ ID NO: 1424666 - DNA, 15 bp, Homo sapiens
ttgttgttcaatgac

SEQ ID NO: 1424667 - DNA, 15 bp, Homo sapiens
tttgttgttcaatga

SEQ ID NO: 1424668 - DNA, 15 bp, Homo sapiens
ttttgttgttcaatg

SEQ ID NO: 1424669 - DNA, 15 bp, Homo sapiens
attttgttgttcaat

SEQ ID NO: 1424670 - DNA, 15 bp, Homo sapiens
gattttgttgttcaa

SEQ ID NO: 1424671 - DNA, 15 bp, Homo sapiens
ggattttgttgttca

SEQ ID NO: 1424672 - DNA, 15 bp, Homo sapiens
tggattttgttgttc

SEQ ID NO: 1424673 - DNA, 15 bp, Homo sapiens
atggattttgttgtt

SEQ ID NO: 1424674 - DNA, 15 bp, Homo sapiens
aatggattttgttgt

SEQ ID NO: 1424675 - DNA, 15 bp, Homo sapiens
taatggattttgttg

SEQ ID NO: 1424676 - DNA, 15 bp, Homo sapiens
ataatggattttgtt

SEQ ID NO: 1424677 - DNA, 15 bp, Homo sapiens
gataatggattttgt

SEQ ID NO: 1424678 - DNA, 15 bp, Homo sapiens
ggataatggattttg

SEQ ID NO: 1424679 - DNA, 15 bp, Homo sapiens
aggataatggatttt

SEQ ID NO: 1424680 - DNA, 15 bp, Homo sapiens
taggataatggattt

SEQ ID NO: 1424681 - DNA, 15 bp, Homo sapiens
ctaggataatggatt

SEQ ID NO: 1424682 - DNA, 15 bp, Homo sapiens
tctaggataatggat

SEQ ID NO: 1424683 - DNA, 15 bp, Homo sapiens
ttctaggataatgga

SEQ ID NO: 1424684 - DNA, 15 bp, Homo sapiens
cttctaggataatgg

SEQ ID NO: 1424685 - DNA, 15 bp, Homo sapiens
acttctaggataatg

SEQ ID NO: 1424686 - DNA, 15 bp, Homo sapiens
cacttctaggataat

SEQ ID NO: 1424687 - DNA, 15 bp, Homo sapiens
acacttctaggataa

SEQ ID NO: 1424688 - DNA, 15 bp, Homo sapiens
aacacttctaggata

SEQ ID NO: 1424689 - DNA, 15 bp, Homo sapiens
aaacacttctaggat

SEQ ID NO: 1424690 - DNA, 15 bp, Homo sapiens
caaacacttctagga

SEQ ID NO: 1424691 - DNA, 15 bp, Homo sapiens
acaaacacttctagg

SEQ ID NO: 1424692 - DNA, 15 bp, Homo sapiens
tacaaacacttctag

SEQ ID NO: 1424693 - DNA, 15 bp, Homo sapiens
ttacaaacacttcta

SEQ ID NO: 1424694 - DNA, 15 bp, Homo sapiens
atttacaaacacttc

SEQ ID NO: 1424695 - DNA, 15 bp, Homo sapiens
aatttacaaacactt

SEQ ID NO: 1424696 - DNA, 15 bp, Homo sapiens
caatttacaaacact

SEQ ID NO: 1424697 - DNA, 15 bp, Homo sapiens
ccaatttacaaacac

SEQ ID NO: 1424698 - DNA, 15 bp, Homo sapiens
tccaatttacaaaca

SEQ ID NO: 1424699 - DNA, 15 bp, Homo sapiens
ttccaatttacaaac

SEQ ID NO: 1424700 - DNA, 15 bp, Homo sapiens
attccaatttacaaa

SEQ ID NO: 1424701 - DNA, 15 bp, Homo sapiens
tattccaatttacaa

SEQ ID NO: 1424702 - DNA, 15 bp, Homo sapiens
atattccaatttaca

SEQ ID NO: 1424703 - DNA, 15 bp, Homo sapiens
gatattccaatttac

SEQ ID NO: 1424704 - DNA, 15 bp, Homo sapiens
tgatattccaattta

SEQ ID NO: 1424705 - DNA, 15 bp, Homo sapiens
atgatattccaattt

SEQ ID NO: 1424706 - DNA, 15 bp, Homo sapiens
catgatattccaatt

SEQ ID NO: 1424707 - DNA, 15 bp, Homo sapiens
ccatgatattccaat

SEQ ID NO: 1424708 - DNA, 15 bp, Homo sapiens
tccatgatattccaa

SEQ ID NO: 1424709 - DNA, 15 bp, Homo sapiens
ttccatgatattcca

SEQ ID NO: 1424710 - DNA, 15 bp, Homo sapiens
tttccatgatattcc

SEQ ID NO: 1424711 - DNA, 15 bp, Homo sapiens
ttttccatgatattc

SEQ ID NO: 1424712 - DNA, 15 bp, Homo sapiens
cttttccatgatatt

SEQ ID NO: 1424713 - DNA, 15 bp, Homo sapiens
tcttttccatgatat

SEQ ID NO: 1424714 - DNA, 15 bp, Homo sapiens
ttcttttccatgata

SEQ ID NO: 1424715 - DNA, 15 bp, Homo sapiens
tttcttttccatgat

SEQ ID NO: 1424716 - DNA, 15 bp, Homo sapiens
ttttcttttccatga

SEQ ID NO: 1424717 - DNA, 15 bp, Homo sapiens
cttttcttttccatg

SEQ ID NO: 1424718 - DNA, 15 bp, Homo sapiens
gcttttcttttccat

SEQ ID NO: 1424719 - DNA, 15 bp, Homo sapiens
agcttttcttttcca

SEQ ID NO: 1424720 - DNA, 15 bp, Homo sapiens
gagcttttcttttcc

SEQ ID NO: 1424721 - DNA, 15 bp, Homo sapiens
tgagcttttcttttc

SEQ ID NO: 1424722 - DNA, 15 bp, Homo sapiens
ctgagcttttctttt

SEQ ID NO: 1424723 - DNA, 15 bp, Homo sapiens
tctgagcttttcttt

SEQ ID NO: 1424724 - DNA, 15 bp, Homo sapiens
gtctgagcttttctt

SEQ ID NO: 1424725 - DNA, 15 bp, Homo sapiens
agtctgagcttttct

SEQ ID NO: 1424726 - DNA, 15 bp, Homo sapiens
aagtctgagcttttc

SEQ ID NO: 1424727 - DNA, 15 bp, Homo sapiens
aaagtctgagctttt

SEQ ID NO: 1424728 - DNA, 15 bp, Homo sapiens
gaaagtctgagcttt

SEQ ID NO: 1424729 - DNA, 15 bp, Homo sapiens
cgaaagtctgagctt

SEQ ID NO: 1424730 - DNA, 15 bp, Homo sapiens
tcgaaagtctgagct

SEQ ID NO: 1424731 - DNA, 15 bp, Homo sapiens
ttcgaaagtctgagc

SEQ ID NO: 1424732 - DNA, 15 bp, Homo sapiens
attcgaaagtctgag

SEQ ID NO: 1424733 - DNA, 15 bp, Homo sapiens
cattcgaaagtctga

SEQ ID NO: 1424734 - DNA, 15 bp, Homo sapiens
acattcgaaagtctg

SEQ ID NO: 1424735 - DNA, 15 bp, Homo sapiens
aacattcgaaagtct

SEQ ID NO: 1424736 - DNA, 15 bp, Homo sapiens
taacattcgaaagtc

SEQ ID NO: 1424737 - DNA, 15 bp, Homo sapiens
ttaacattcgaaagt

SEQ ID NO: 1424738 - DNA, 15 bp, Homo sapiens
tttaacattcgaaag

SEQ ID NO: 1424739 - DNA, 15 bp, Homo sapiens
ctttaacattcgaaa

SEQ ID NO: 1424740 - DNA, 15 bp, Homo sapiens
actttaacattcgaa

SEQ ID NO: 1424741 - DNA, 15 bp, Homo sapiens
cactttaacattcga

SEQ ID NO: 1424742 - DNA, 15 bp, Homo sapiens
ccactttaacattcg

SEQ ID NO: 1424743 - DNA, 15 bp, Homo sapiens
cccactttaacattc

SEQ ID NO: 1424744 - DNA, 15 bp, Homo sapiens
ccccactttaacatt

SEQ ID NO: 1424745 - DNA, 15 bp, Homo sapiens
gccccactttaacat

SEQ ID NO: 1424746 - DNA, 15 bp, Homo sapiens
tgccccactttaaca

SEQ ID NO: 1424747 - DNA, 15 bp, Homo sapiens
atgccccactttaac

SEQ ID NO: 1424748 - DNA, 15 bp, Homo sapiens
gatgccccactttaa

SEQ ID NO: 1424749 - DNA, 15 bp, Homo sapiens
ggatgccccacttta

SEQ ID NO: 1424750 - DNA, 15 bp, Homo sapiens
aggatgccccacttt

SEQ ID NO: 1424751 - DNA, 15 bp, Homo sapiens
aaggatgccccactt

SEQ ID NO: 1424752 - DNA, 15 bp, Homo sapiens
aaaggatgccccact

SEQ ID NO: 1424753 - DNA, 15 bp, Homo sapiens
gaaaggatgccccac

SEQ ID NO: 1424754 - DNA, 15 bp, Homo sapiens
ggaaaggatgcccca

SEQ ID NO: 1424755 - DNA, 15 bp, Homo sapiens
tggaaaggatgcccc

SEQ ID NO: 1424756 - DNA, 15 bp, Homo sapiens
ttggaaaggatgccc

SEQ ID NO: 1424757 - DNA, 15 bp, Homo sapiens
gttggaaaggatgcc

SEQ ID NO: 1424758 - DNA, 15 bp, Homo sapiens
agttggaaaggatgc

SEQ ID NO: 1424759 - DNA, 15 bp, Homo sapiens
aagttggaaaggatg

SEQ ID NO: 1424760 - DNA, 15 bp, Homo sapiens
aaagttggaaaggat

SEQ ID NO: 1424761 - DNA, 15 bp, Homo sapiens
caaagttggaaagga

SEQ ID NO: 1424762 - DNA, 15 bp, Homo sapiens
tcaaagttggaaagg

SEQ ID NO: 1424763 - DNA, 15 bp, Homo sapiens
gtcaaagttggaaag

SEQ ID NO: 1424764 - DNA, 15 bp, Homo sapiens
agtcaaagttggaaa

SEQ ID NO: 1424765 - DNA, 15 bp, Homo sapiens
aagtcaaagttggaa

SEQ ID NO: 1424766 - DNA, 15 bp, Homo sapiens
taagtcaaagttgga

SEQ ID NO: 1424767 - DNA, 15 bp, Homo sapiens
ataagtcaaagttgg

SEQ ID NO: 1424768 - DNA, 15 bp, Homo sapiens
aataagtcaaagttg

SEQ ID NO: 1424769 - DNA, 15 bp, Homo sapiens
taataagtcaaagtt

SEQ ID NO: 1424770 - DNA, 15 bp, Homo sapiens
ataataagtcaaagt

SEQ ID NO: 1424771 - DNA, 15 bp, Homo sapiens
aataataagtcaaag

SEQ ID NO: 1424772 - DNA, 15 bp, Homo sapiens
gaataataagtcaaa

SEQ ID NO: 1424773 - DNA, 15 bp, Homo sapiens
agaataataagtcaa

SEQ ID NO: 1424774 - DNA, 15 bp, Homo sapiens
aagaataataagtca

SEQ ID NO: 1424775 - DNA, 15 bp, Homo sapiens
taagaataataagtc

SEQ ID NO: 1424776 - DNA, 15 bp, Homo sapiens
ctaagaataataagt

SEQ ID NO: 1424777 - DNA, 15 bp, Homo sapiens
gctaagaataataag

SEQ ID NO: 1424778 - DNA, 15 bp, Homo sapiens
tgctaagaataataa

SEQ ID NO: 1424779 - DNA, 15 bp, Homo sapiens
atgctaagaataata

SEQ ID NO: 1424780 - DNA, 15 bp, Homo sapiens
aatgctaagaataat

SEQ ID NO: 1424781 - DNA, 15 bp, Homo sapiens
aaatgctaagaataa

SEQ ID NO: 1424782 - DNA, 15 bp, Homo sapiens
aaaatgctaagaata

SEQ ID NO: 1424783 - DNA, 15 bp, Homo sapiens
caaaatgctaagaat

SEQ ID NO: 1424784 - DNA, 15 bp, Homo sapiens
ccaaaatgctaagaa

SEQ ID NO: 1424785 - DNA, 15 bp, Homo sapiens
tccaaaatgctaaga

SEQ ID NO: 1424786 - DNA, 15 bp, Homo sapiens
gtccaaaatgctaag

SEQ ID NO: 1424787 - DNA, 15 bp, Homo sapiens
agtccaaaatgctaa

SEQ ID NO: 1424788 - DNA, 15 bp, Homo sapiens
tagtccaaaatgcta

SEQ ID NO: 1424789 - DNA, 15 bp, Homo sapiens
ttagtccaaaatgct

SEQ ID NO: 1424790 - DNA, 15 bp, Homo sapiens
cttagtccaaaatgc

SEQ ID NO: 1424791 - DNA, 15 bp, Homo sapiens
ccttagtccaaaatg

SEQ ID NO: 1424792 - DNA, 15 bp, Homo sapiens
cccttagtccaaaat

SEQ ID NO: 1424793 - DNA, 15 bp, Homo sapiens
acccttagtccaaaa

SEQ ID NO: 1424794 - DNA, 15 bp, Homo sapiens
tacccttagtccaaa

SEQ ID NO: 1424795 - DNA, 15 bp, Homo sapiens
ttacccttagtccaa

SEQ ID NO: 1424796 - DNA, 15 bp, Homo sapiens
tttacccttagtcca

SEQ ID NO: 1424797 - DNA, 15 bp, Homo sapiens
ttttacccttagtcc

SEQ ID NO: 1424798 - DNA, 15 bp, Homo sapiens
gttttacccttagtc

SEQ ID NO: 1424799 - DNA, 15 bp, Homo sapiens
ggttttacccttagt

SEQ ID NO: 1424800 - DNA, 15 bp, Homo sapiens
aggttttacccttag

SEQ ID NO: 1424801 - DNA, 15 bp, Homo sapiens
aaggttttaccctta

SEQ ID NO: 1424802 - DNA, 15 bp, Homo sapiens
taaggttttaccctt

SEQ ID NO: 1424803 - DNA, 15 bp, Homo sapiens
ctaaggttttaccct

SEQ ID NO: 1424804 - DNA, 15 bp, Homo sapiens
actaaggttttaccc

SEQ ID NO: 1424805 - DNA, 15 bp, Homo sapiens
aactaaggttttacc

SEQ ID NO: 1424806 - DNA, 15 bp, Homo sapiens
aaactaaggttttac

SEQ ID NO: 1424807 - DNA, 15 bp, Homo sapiens
gaaactaaggtttta

SEQ ID NO: 1424808 - DNA, 15 bp, Homo sapiens
ggaaactaaggtttt

SEQ ID NO: 1424809 - DNA, 15 bp, Homo sapiens
aggaaactaaggttt

SEQ ID NO: 1424810 - DNA, 15 bp, Homo sapiens
taggaaactaaggtt

SEQ ID NO: 1424811 - DNA, 15 bp, Homo sapiens
gtaggaaactaaggt

SEQ ID NO: 1424812 - DNA, 15 bp, Homo sapiens
tgtaggaaactaagg

SEQ ID NO: 1424813 - DNA, 15 bp, Homo sapiens
atgtaggaaactaag

SEQ ID NO: 1424814 - DNA, 15 bp, Homo sapiens
gatgtaggaaactaa

SEQ ID NO: 1424815 - DNA, 15 bp, Homo sapiens
tgatgtaggaaacta

SEQ ID NO: 1424816 - DNA, 15 bp, Homo sapiens
atgatgtaggaaact

SEQ ID NO: 1424817 - DNA, 15 bp, Homo sapiens
tatgatgtaggaaac

SEQ ID NO: 1424818 - DNA, 15 bp, Homo sapiens
atatgatgtaggaaa

SEQ ID NO: 1424819 - DNA, 15 bp, Homo sapiens
gatatgatgtaggaa

SEQ ID NO: 1424820 - DNA, 15 bp, Homo sapiens
tgatatgatgtagga

SEQ ID NO: 1424821 - DNA, 15 bp, Homo sapiens
ttgatatgatgtagg

SEQ ID NO: 1424822 - DNA, 15 bp, Homo sapiens
tttgatatgatgtag

SEQ ID NO: 1424823 - DNA, 15 bp, Homo sapiens
ttttgatatgatgta

SEQ ID NO: 1424824 - DNA, 15 bp, Homo sapiens
cttttgatatgatgt

SEQ ID NO: 1424825 - DNA, 15 bp, Homo sapiens
tcttttgatatgatg

SEQ ID NO: 1424826 - DNA, 15 bp, Homo sapiens
ctcttttgatatgat

SEQ ID NO: 1424827 - DNA, 15 bp, Homo sapiens
tctcttttgatatga

SEQ ID NO: 1424828 - DNA, 15 bp, Homo sapiens
ttctcttttgatatg

SEQ ID NO: 1424829 - DNA, 15 bp, Homo sapiens
attctcttttgatat

SEQ ID NO: 1424830 - DNA, 15 bp, Homo sapiens
tattctcttttgata

SEQ ID NO: 1424831 - DNA, 15 bp, Homo sapiens
gtattctcttttgat

SEQ ID NO: 1424832 - DNA, 15 bp, Homo sapiens
agtattctcttttga

SEQ ID NO: 1424833 - DNA, 15 bp, Homo sapiens
cagtattctcttttg

SEQ ID NO: 1424834 - DNA, 15 bp, Homo sapiens
tcagtattctctttt

SEQ ID NO: 1424835 - DNA, 15 bp, Homo sapiens
ttcagtattctcttt

SEQ ID NO: 1424836 - DNA, 15 bp, Homo sapiens
cttcagtattctctt

SEQ ID NO: 1424837 - DNA, 15 bp, Homo sapiens
tcttcagtattctct

SEQ ID NO: 1424838 - DNA, 15 bp, Homo sapiens
ttcttcagtattctc

SEQ ID NO: 1424839 - DNA, 15 bp, Homo sapiens
tttcttcagtattct

SEQ ID NO: 1424840 - DNA, 15 bp, Homo sapiens
gtttcttcagtattc

SEQ ID NO: 1424841 - DNA, 15 bp, Homo sapiens
agtttcttcagtatt

SEQ ID NO: 1424842 - DNA, 15 bp, Homo sapiens
cagtttcttcagtat

SEQ ID NO: 1424843 - DNA, 15 bp, Homo sapiens
ccagtttcttcagta

SEQ ID NO: 1424844 - DNA, 15 bp, Homo sapiens
tccagtttcttcagt

SEQ ID NO: 1424845 - DNA, 15 bp, Homo sapiens
ttccagtttcttcag

SEQ ID NO: 1424846 - DNA, 15 bp, Homo sapiens
cttccagtttcttca

SEQ ID NO: 1424847 - DNA, 15 bp, Homo sapiens
acttccagtttcttc

SEQ ID NO: 1424848 - DNA, 15 bp, Homo sapiens
aacttccagtttctt

SEQ ID NO: 1424849 - DNA, 15 bp, Homo sapiens
caacttccagtttct

SEQ ID NO: 1424850 - DNA, 15 bp, Homo sapiens
acaacttccagtttc

SEQ ID NO: 1424851 - DNA, 15 bp, Homo sapiens
cacaacttccagttt

SEQ ID NO: 1424852 - DNA, 15 bp, Homo sapiens
gcacaacttccagtt

SEQ ID NO: 1424853 - DNA, 15 bp, Homo sapiens
tgcacaacttccagt

SEQ ID NO: 1424854 - DNA, 15 bp, Homo sapiens
atgcacaacttccag

SEQ ID NO: 1424855 - DNA, 15 bp, Homo sapiens
tatgcacaacttcca

SEQ ID NO: 1424856 - DNA, 15 bp, Homo sapiens
ttatgcacaacttcc

SEQ ID NO: 1424857 - DNA, 15 bp, Homo sapiens
gttatgcacaacttc

SEQ ID NO: 1424858 - DNA, 15 bp, Homo sapiens
tgttatgcacaactt

SEQ ID NO: 1424859 - DNA, 15 bp, Homo sapiens
ttgttatgcacaact

SEQ ID NO: 1424860 - DNA, 15 bp, Homo sapiens
tttgttatgcacaac

SEQ ID NO: 1424861 - DNA, 15 bp, Homo sapiens
ttttgttatgcacaa

SEQ ID NO: 1424862 - DNA, 15 bp, Homo sapiens
cttttgttatgcaca

SEQ ID NO: 1424863 - DNA, 15 bp, Homo sapiens
ccttttgttatgcac

SEQ ID NO: 1424864 - DNA, 15 bp, Homo sapiens
gccttttgttatgca

SEQ ID NO: 1424865 - DNA, 15 bp, Homo sapiens
ggccttttgttatgc

SEQ ID NO: 1424866 - DNA, 15 bp, Homo sapiens
aggccttttgttatg

SEQ ID NO: 1424867 - DNA, 15 bp, Homo sapiens
taggccttttgttat

SEQ ID NO: 1424868 - DNA, 15 bp, Homo sapiens
ctaggccttttgtta

SEQ ID NO: 1424869 - DNA, 15 bp, Homo sapiens
cctaggccttttgtt

SEQ ID NO: 1424870 - DNA, 15 bp, Homo sapiens
tcctaggccttttgt

SEQ ID NO: 1424871 - DNA, 15 bp, Homo sapiens
ctcctaggccttttg

SEQ ID NO: 1424872 - DNA, 15 bp, Homo sapiens
tctcctaggcctttt

SEQ ID NO: 1424873 - DNA, 15 bp, Homo sapiens
ctctcctaggccttt

SEQ ID NO: 1424874 - DNA, 15 bp, Homo sapiens
tctctcctaggcctt

SEQ ID NO: 1424875 - DNA, 15 bp, Homo sapiens
gtctctcctaggcct

SEQ ID NO: 1424876 - DNA, 15 bp, Homo sapiens
tgtctctcctaggcc

SEQ ID NO: 1424877 - DNA, 15 bp, Homo sapiens
atgtctctcctaggc

SEQ ID NO: 1424878 - DNA, 15 bp, Homo sapiens
tatgtctctcctagg

SEQ ID NO: 1424879 - DNA, 15 bp, Homo sapiens
ttatgtctctcctag

SEQ ID NO: 1424880 - DNA, 15 bp, Homo sapiens
attatgtctctccta

SEQ ID NO: 1424881 - DNA, 15 bp, Homo sapiens
cattatgtctctcct

SEQ ID NO: 1424882 - DNA, 15 bp, Homo sapiens
ccattatgtctctcc

SEQ ID NO: 1424883 - DNA, 15 bp, Homo sapiens
gccattatgtctctc

SEQ ID NO: 1424884 - DNA, 15 bp, Homo sapiens
agccattatgtctct

SEQ ID NO: 1424885 - DNA, 15 bp, Homo sapiens
cagccattatgtctc

SEQ ID NO: 1424886 - DNA, 15 bp, Homo sapiens
acagccattatgtct

SEQ ID NO: 1424887 - DNA, 15 bp, Homo sapiens
gacagccattatgtc

SEQ ID NO: 1424888 - DNA, 15 bp, Homo sapiens
agacagccattatgt

SEQ ID NO: 1424889 - DNA, 15 bp, Homo sapiens
aagacagccattatg

SEQ ID NO: 1424890 - DNA, 15 bp, Homo sapiens
gaagacagccattat

SEQ ID NO: 1424891 - DNA, 15 bp, Homo sapiens
agaagacagccatta

SEQ ID NO: 1424892 - DNA, 15 bp, Homo sapiens
gagaagacagccatt

SEQ ID NO: 1424893 - DNA, 15 bp, Homo sapiens
tgagaagacagccat

SEQ ID NO: 1424894 - DNA, 15 bp, Homo sapiens
gtgagaagacagcca

SEQ ID NO: 1424895 - DNA, 15 bp, Homo sapiens
ggtgagaagacagcc

SEQ ID NO: 1424896 - DNA, 15 bp, Homo sapiens
aggtgagaagacagc

SEQ ID NO: 1424897 - DNA, 15 bp, Homo sapiens
gaggtgagaagacag

SEQ ID NO: 1424898 - DNA, 15 bp, Homo sapiens
agaggtgagaagaca

SEQ ID NO: 1424899 - DNA, 15 bp, Homo sapiens
cagaggtgagaagac

SEQ ID NO: 1424900 - DNA, 15 bp, Homo sapiens
tcagaggtgagaaga

SEQ ID NO: 1424901 - DNA, 15 bp, Homo sapiens
ctcagaggtgagaag

SEQ ID NO: 1424902 - DNA, 15 bp, Homo sapiens
cctcagaggtgagaa

SEQ ID NO: 1424903 - DNA, 15 bp, Homo sapiens
acctcagaggtgaga

SEQ ID NO: 1424904 - DNA, 15 bp, Homo sapiens
tacctcagaggtgag

SEQ ID NO: 1424905 - DNA, 15 bp, Homo sapiens
ctacctcagaggtga

SEQ ID NO: 1424906 - DNA, 15 bp, Homo sapiens
tctacctcagaggtg

SEQ ID NO: 1424907 - DNA, 15 bp, Homo sapiens
ctctacctcagaggt

SEQ ID NO: 1424908 - DNA, 15 bp, Homo sapiens
actctacctcagagg

SEQ ID NO: 1424909 - DNA, 15 bp, Homo sapiens
gactctacctcagag

SEQ ID NO: 1424910 - DNA, 15 bp, Homo sapiens
tgactctacctcaga

SEQ ID NO: 1424911 - DNA, 15 bp, Homo sapiens
atgactctacctcag

SEQ ID NO: 1424912 - DNA, 15 bp, Homo sapiens
aatgactctacctca

SEQ ID NO: 1424913 - DNA, 15 bp, Homo sapiens
aaatgactctacctc

SEQ ID NO: 1424914 - DNA, 15 bp, Homo sapiens
caaatgactctacct

SEQ ID NO: 1424915 - DNA, 15 bp, Homo sapiens
acaaatgactctacc

SEQ ID NO: 1424916 - DNA, 15 bp, Homo sapiens
tacaaatgactctac

SEQ ID NO: 1424917 - DNA, 15 bp, Homo sapiens
ttacaaatgactcta

SEQ ID NO: 1424918 - DNA, 15 bp, Homo sapiens
cttacaaatgactct

SEQ ID NO: 1424919 - DNA, 15 bp, Homo sapiens
ccttacaaatgactc

SEQ ID NO: 1424920 - DNA, 15 bp, Homo sapiens
gccttacaaatgact

SEQ ID NO: 1424921 - DNA, 15 bp, Homo sapiens
agccttacaaatgac

SEQ ID NO: 1424922 - DNA, 15 bp, Homo sapiens
aagccttacaaatga

SEQ ID NO: 1424923 - DNA, 15 bp, Homo sapiens
taagccttacaaatg

SEQ ID NO: 1424924 - DNA, 15 bp, Homo sapiens
ttaagccttacaaat

SEQ ID NO: 1424925 - DNA, 15 bp, Homo sapiens
attaagccttacaaa

SEQ ID NO: 1424926 - DNA, 15 bp, Homo sapiens
gattaagccttacaa

SEQ ID NO: 1424927 - DNA, 15 bp, Homo sapiens
ggattaagccttaca

SEQ ID NO: 1424928 - DNA, 15 bp, Homo sapiens
aggattaagccttac

SEQ ID NO: 1424929 - DNA, 15 bp, Homo sapiens
aaggattaagcctta

SEQ ID NO: 1424930 - DNA, 15 bp, Homo sapiens
aaaggattaagcctt

SEQ ID NO: 1424931 - DNA, 15 bp, Homo sapiens
aaaaggattaagcct

SEQ ID NO: 1424932 - DNA, 15 bp, Homo sapiens
aaaaaggattaagcc

SEQ ID NO: 1424933 - DNA, 15 bp, Homo sapiens
aaaaaaggattaagc

SEQ ID NO: 1424934 - DNA, 15 bp, Homo sapiens
aaaaaaaggattaag

SEQ ID NO: 1424935 - DNA, 15 bp, Homo sapiens
aaaaaaaaggattaa

SEQ ID NO: 1424936 - DNA, 15 bp, Homo sapiens
aaaaaaaaaggatta

SEQ ID NO: 1424937 - DNA, 15 bp, Homo sapiens
aaaaaaaaaaggatt

SEQ ID NO: 1424938 - DNA, 15 bp, Homo sapiens
gtctcaagaaaaaaa

SEQ ID NO: 1424939 - DNA, 15 bp, Homo sapiens
cgtctcaagaaaaaa

SEQ ID NO: 1424940 - DNA, 15 bp, Homo sapiens
ccgtctcaagaaaaa

SEQ ID NO: 1424941 - DNA, 15 bp, Homo sapiens
tccgtctcaagaaaa

SEQ ID NO: 1424942 - DNA, 15 bp, Homo sapiens
ctccgtctcaagaaa

SEQ ID NO: 1424943 - DNA, 15 bp, Homo sapiens
actccgtctcaagaa

SEQ ID NO: 1424944 - DNA, 15 bp, Homo sapiens
gactccgtctcaaga

SEQ ID NO: 1424945 - DNA, 15 bp, Homo sapiens
agactccgtctcaag

SEQ ID NO: 1424946 - DNA, 15 bp, Homo sapiens
acacctaatataagc

SEQ ID NO: 1424947 - DNA, 15 bp, Homo sapiens
aacacctaatataag

SEQ ID NO: 1424948 - DNA, 15 bp, Homo sapiens
caacacctaatataa

SEQ ID NO: 1424949 - DNA, 15 bp, Homo sapiens
gcaacacctaatata

SEQ ID NO: 1424950 - DNA, 15 bp, Homo sapiens
tgcaacacctaatat

SEQ ID NO: 1424951 - DNA, 15 bp, Homo sapiens
atgcaacacctaata

SEQ ID NO: 1424952 - DNA, 15 bp, Homo sapiens
gatgcaacacctaat

SEQ ID NO: 1424953 - DNA, 15 bp, Homo sapiens
cgatgcaacacctaa

SEQ ID NO: 1424954 - DNA, 15 bp, Homo sapiens
tcgatgcaacaccta

SEQ ID NO: 1424955 - DNA, 15 bp, Homo sapiens
gtcgatgcaacacct

SEQ ID NO: 1424956 - DNA, 15 bp, Homo sapiens
cgtcgatgcaacacc

SEQ ID NO: 1424957 - DNA, 15 bp, Homo sapiens
acgtcgatgcaacac

SEQ ID NO: 1424958 - DNA, 15 bp, Homo sapiens
tacgtcgatgcaaca

SEQ ID NO: 1424959 - DNA, 15 bp, Homo sapiens
ctacgtcgatgcaac

SEQ ID NO: 1424960 - DNA, 15 bp, Homo sapiens
cctacgtcgatgcaa

SEQ ID NO: 1424961 - DNA, 15 bp, Homo sapiens
acctacgtcgatgca

SEQ ID NO: 1424962 - DNA, 15 bp, Homo sapiens
gacctacgtcgatgc

SEQ ID NO: 1424963 - DNA, 15 bp, Homo sapiens
ggacctacgtcgatg

SEQ ID NO: 1424964 - DNA, 15 bp, Homo sapiens
tggacctacgtcgat

SEQ ID NO: 1424965 - DNA, 15 bp, Homo sapiens
atggacctacgtcga

SEQ ID NO: 1424966 - DNA, 15 bp, Homo sapiens
aatggacctacgtcg

SEQ ID NO: 1424967 - DNA, 15 bp, Homo sapiens
aaatggacctacgtc

SEQ ID NO: 1424968 - DNA, 15 bp, Homo sapiens
gaaatggacctacgt

SEQ ID NO: 1424969 - DNA, 15 bp, Homo sapiens
agaaatggacctacg

SEQ ID NO: 1424970 - DNA, 15 bp, Homo sapiens
gagaaatggacctac

SEQ ID NO: 1424971 - DNA, 15 bp, Homo sapiens
agagaaatggaccta

SEQ ID NO: 1424972 - DNA, 15 bp, Homo sapiens
tagagaaatggacct

SEQ ID NO: 1424973 - DNA, 15 bp, Homo sapiens
ttagagaaatggacc

SEQ ID NO: 1424974 - DNA, 15 bp, Homo sapiens
tttagagaaatggac

SEQ ID NO: 1424975 - DNA, 15 bp, Homo sapiens
ctttagagaaatgga

SEQ ID NO: 1424976 - DNA, 15 bp, Homo sapiens
tctttagagaaatgg

SEQ ID NO: 1424977 - DNA, 15 bp, Homo sapiens
gtctttagagaaatg

SEQ ID NO: 1424978 - DNA, 15 bp, Homo sapiens
tgtctttagagaaat

SEQ ID NO: 1424979 - DNA, 15 bp, Homo sapiens
ttgtctttagagaaa

SEQ ID NO: 1424980 - DNA, 15 bp, Homo sapiens
tttgtctttagagaa

SEQ ID NO: 1424981 - DNA, 15 bp, Homo sapiens
gtttgtctttagaga

SEQ ID NO: 1424982 - DNA, 15 bp, Homo sapiens
tgtttgtctttagag

SEQ ID NO: 1424983 - DNA, 15 bp, Homo sapiens
gtgtttgtctttaga

SEQ ID NO: 1424984 - DNA, 15 bp, Homo sapiens
agtgtttgtctttag

SEQ ID NO: 1424985 - DNA, 15 bp, Homo sapiens
gagtgtttgtcttta

SEQ ID NO: 1424986 - DNA, 15 bp, Homo sapiens
agagtgtttgtcttt

SEQ ID NO: 1424987 - DNA, 15 bp, Homo sapiens
aagagtgtttgtctt

SEQ ID NO: 1424988 - DNA, 15 bp, Homo sapiens
gaagagtgtttgtct

SEQ ID NO: 1424989 - DNA, 15 bp, Homo sapiens
ggaagagtgtttgtc

SEQ ID NO: 1424990 - DNA, 15 bp, Homo sapiens
aggaagagtgtttgt

SEQ ID NO: 1424991 - DNA, 15 bp, Homo sapiens
caggaagagtgtttg

SEQ ID NO: 1424992 - DNA, 15 bp, Homo sapiens
acaggaagagtgttt

SEQ ID NO: 1424993 - DNA, 15 bp, Homo sapiens
aacaggaagagtgtt

SEQ ID NO: 1424994 - DNA, 15 bp, Homo sapiens
taacaggaagagtgt

SEQ ID NO: 1424995 - DNA, 15 bp, Homo sapiens
ctaacaggaagagtg

SEQ ID NO: 1424996 - DNA, 15 bp, Homo sapiens
gctaacaggaagagt

SEQ ID NO: 1424997 - DNA, 15 bp, Homo sapiens
ggctaacaggaagag

SEQ ID NO: 1424998 - DNA, 15 bp, Homo sapiens
tggctaacaggaaga

SEQ ID NO: 1424999 - DNA, 15 bp, Homo sapiens
atggctaacaggaag

SEQ ID NO: 1425000 - DNA, 15 bp, Homo sapiens
gatggctaacaggaa

SEQ ID NO: 1425001 - DNA, 15 bp, Homo sapiens
tgatggctaacagga

SEQ ID NO: 1425002 - DNA, 15 bp, Homo sapiens
atgatggctaacagg

SEQ ID NO: 1425003 - DNA, 15 bp, Homo sapiens
catgatggctaacag

SEQ ID NO: 1425004 - DNA, 15 bp, Homo sapiens
gcatgatggctaaca

SEQ ID NO: 1425005 - DNA, 15 bp, Homo sapiens
agcatgatggctaac

SEQ ID NO: 1425006 - DNA, 15 bp, Homo sapiens
tagcatgatggctaa

SEQ ID NO: 1425007 - DNA, 15 bp, Homo sapiens
ctagcatgatggcta

SEQ ID NO: 1425008 - DNA, 15 bp, Homo sapiens
cctagcatgatggct

SEQ ID NO: 1425009 - DNA, 15 bp, Homo sapiens
tcctagcatgatggc

SEQ ID NO: 1425010 - DNA, 15 bp, Homo sapiens
gtcctagcatgatgg

SEQ ID NO: 1425011 - DNA, 15 bp, Homo sapiens
tgtcctagcatgatg

SEQ ID NO: 1425012 - DNA, 15 bp, Homo sapiens
ctgtcctagcatgat

SEQ ID NO: 1425013 - DNA, 15 bp, Homo sapiens
cctgtcctagcatga

SEQ ID NO: 1425014 - DNA, 15 bp, Homo sapiens
gcctgtcctagcatg

SEQ ID NO: 1425015 - DNA, 15 bp, Homo sapiens
agcctgtcctagcat

SEQ ID NO: 1425016 - DNA, 15 bp, Homo sapiens
gagcctgtcctagca

SEQ ID NO: 1425017 - DNA, 15 bp, Homo sapiens
agagcctgtcctagc

SEQ ID NO: 1425018 - DNA, 15 bp, Homo sapiens
gagagcctgtcctag

SEQ ID NO: 1425019 - DNA, 15 bp, Homo sapiens
ggagagcctgtccta

SEQ ID NO: 1425020 - DNA, 15 bp, Homo sapiens
tggagagcctgtcct

SEQ ID NO: 1425021 - DNA, 15 bp, Homo sapiens
atggagagcctgtcc

SEQ ID NO: 1425022 - DNA, 15 bp, Homo sapiens
catggagagcctgtc

SEQ ID NO: 1425023 - DNA, 15 bp, Homo sapiens
acatggagagcctgt

SEQ ID NO: 1425024 - DNA, 15 bp, Homo sapiens
aacatggagagcctg

SEQ ID NO: 1425025 - DNA, 15 bp, Homo sapiens
aaacatggagagcct

SEQ ID NO: 1425026 - DNA, 15 bp, Homo sapiens
aaaacatggagagcc

SEQ ID NO: 1425027 - DNA, 15 bp, Homo sapiens
aaaaacatggagagc

SEQ ID NO: 1425028 - DNA, 15 bp, Homo sapiens
caaaaacatggagag

SEQ ID NO: 1425029 - DNA, 15 bp, Homo sapiens
ccaaaaacatggaga

SEQ ID NO: 1425030 - DNA, 15 bp, Homo sapiens
tccaaaaacatggag

SEQ ID NO: 1425031 - DNA, 15 bp, Homo sapiens
atccaaaaacatgga

SEQ ID NO: 1425032 - DNA, 15 bp, Homo sapiens
aatccaaaaacatgg

SEQ ID NO: 1425033 - DNA, 15 bp, Homo sapiens
gaatccaaaaacatg

SEQ ID NO: 1425034 - DNA, 15 bp, Homo sapiens
agaatccaaaaacat

SEQ ID NO: 1425035 - DNA, 15 bp, Homo sapiens
cagaatccaaaaaca

SEQ ID NO: 1425036 - DNA, 15 bp, Homo sapiens
acagaatccaaaaac

SEQ ID NO: 1425037 - DNA, 15 bp, Homo sapiens
aacagaatccaaaaa

SEQ ID NO: 1425038 - DNA, 15 bp, Homo sapiens
gaacagaatccaaaa

SEQ ID NO: 1425039 - DNA, 15 bp, Homo sapiens
tgaacagaatccaaa

SEQ ID NO: 1425040 - DNA, 15 bp, Homo sapiens
ttgaacagaatccaa

SEQ ID NO: 1425041 - DNA, 15 bp, Homo sapiens
cttgaacagaatcca

SEQ ID NO: 1425042 - DNA, 15 bp, Homo sapiens
tcttgaacagaatcc

SEQ ID NO: 1425043 - DNA, 15 bp, Homo sapiens
gtcttgaacagaatc

SEQ ID NO: 1425044 - DNA, 15 bp, Homo sapiens
ggtcttgaacagaat

SEQ ID NO: 1425045 - DNA, 15 bp, Homo sapiens
aggtcttgaacagaa

SEQ ID NO: 1425046 - DNA, 15 bp, Homo sapiens
aaggtcttgaacaga

SEQ ID NO: 1425047 - DNA, 15 bp, Homo sapiens
aaaggtcttgaacag

SEQ ID NO: 1425048 - DNA, 15 bp, Homo sapiens
aaaaggtcttgaaca

SEQ ID NO: 1425049 - DNA, 15 bp, Homo sapiens
taaaaggtcttgaac

SEQ ID NO: 1425050 - DNA, 15 bp, Homo sapiens
ttaaaaggtcttgaa

SEQ ID NO: 1425051 - DNA, 15 bp, Homo sapiens
gttaaaaggtcttga

SEQ ID NO: 1425052 - DNA, 15 bp, Homo sapiens
agttaaaaggtcttg

SEQ ID NO: 1425053 - DNA, 15 bp, Homo sapiens
aagttaaaaggtctt

SEQ ID NO: 1425054 - DNA, 15 bp, Homo sapiens
gaagttaaaaggtct

SEQ ID NO: 1425055 - DNA, 15 bp, Homo sapiens
tgaagttaaaaggtc

SEQ ID NO: 1425056 - DNA, 15 bp, Homo sapiens
gtgaagttaaaaggt

SEQ ID NO: 1425057 - DNA, 15 bp, Homo sapiens
agtgaagttaaaagg

SEQ ID NO: 1425058 - DNA, 15 bp, Homo sapiens
tagtgaagttaaaag

SEQ ID NO: 1425059 - DNA, 15 bp, Homo sapiens
ctagtgaagttaaaa

SEQ ID NO: 1425060 - DNA, 15 bp, Homo sapiens
tctagtgaagttaaa

SEQ ID NO: 1425061 - DNA, 15 bp, Homo sapiens
atctagtgaagttaa

SEQ ID NO: 1425062 - DNA, 15 bp, Homo sapiens
tatctagtgaagtta

SEQ ID NO: 1425063 - DNA, 15 bp, Homo sapiens
gtatctagtgaagtt

SEQ ID NO: 1425064 - DNA, 15 bp, Homo sapiens
agtatctagtgaagt

SEQ ID NO: 1425065 - DNA, 15 bp, Homo sapiens
cagtatctagtgaag

SEQ ID NO: 1425066 - DNA, 15 bp, Homo sapiens
acagtatctagtgaa

SEQ ID NO: 1425067 - DNA, 15 bp, Homo sapiens
aacagtatctagtga

SEQ ID NO: 1425068 - DNA, 15 bp, Homo sapiens
taacagtatctagtg

SEQ ID NO: 1425069 - DNA, 15 bp, Homo sapiens
ataacagtatctagt

SEQ ID NO: 1425070 - DNA, 15 bp, Homo sapiens
tataacagtatctag

SEQ ID NO: 1425071 - DNA, 15 bp, Homo sapiens
atataacagtatcta

SEQ ID NO: 1425072 - DNA, 15 bp, Homo sapiens
tatataacagtatct

SEQ ID NO: 1425073 - DNA, 15 bp, Homo sapiens
ctatataacagtatc

SEQ ID NO: 1425074 - DNA, 15 bp, Homo sapiens
gctatataacagtat

SEQ ID NO: 1425075 - DNA, 15 bp, Homo sapiens
tgctatataacagta

SEQ ID NO: 1425076 - DNA, 15 bp, Homo sapiens
ttgctatataacagt

SEQ ID NO: 1425077 - DNA, 15 bp, Homo sapiens
attgctatataacag

SEQ ID NO: 1425078 - DNA, 15 bp, Homo sapiens
tattgctatataaca

SEQ ID NO: 1425079 - DNA, 15 bp, Homo sapiens
gtattgctatataac

SEQ ID NO: 1425080 - DNA, 15 bp, Homo sapiens
ggtattgctatataa

SEQ ID NO: 1425081 - DNA, 15 bp, Homo sapiens
gggtattgctatata

SEQ ID NO: 1425082 - DNA, 15 bp, Homo sapiens
tgggtattgctatat

SEQ ID NO: 1425083 - DNA, 15 bp, Homo sapiens
ttgggtattgctata

SEQ ID NO: 1425084 - DNA, 15 bp, Homo sapiens
attgggtattgctat

SEQ ID NO: 1425085 - DNA, 15 bp, Homo sapiens
aattgggtattgcta

SEQ ID NO: 1425086 - DNA, 15 bp, Homo sapiens
aaattgggtattgct

SEQ ID NO: 1425087 - DNA, 15 bp, Homo sapiens
aaaattgggtattgc

SEQ ID NO: 1425088 - DNA, 15 bp, Homo sapiens
gaaaattgggtattg

SEQ ID NO: 1425089 - DNA, 15 bp, Homo sapiens
agaaaattgggtatt

SEQ ID NO: 1425090 - DNA, 15 bp, Homo sapiens
tagaaaattgggtat

SEQ ID NO: 1425091 - DNA, 15 bp, Homo sapiens
ttagaaaattgggta

SEQ ID NO: 1425092 - DNA, 15 bp, Homo sapiens
tttagaaaattgggt

SEQ ID NO: 1425093 - DNA, 15 bp, Homo sapiens
ctttagaaaattggg

SEQ ID NO: 1425094 - DNA, 15 bp, Homo sapiens
actttagaaaattgg

SEQ ID NO: 1425095 - DNA, 15 bp, Homo sapiens
cactttagaaaattg

SEQ ID NO: 1425096 - DNA, 15 bp, Homo sapiens
gcactttagaaaatt

SEQ ID NO: 1425097 - DNA, 15 bp, Homo sapiens
tgcactttagaaaat

SEQ ID NO: 1425098 - DNA, 15 bp, Homo sapiens
atgcactttagaaaa

SEQ ID NO: 1425099 - DNA, 15 bp, Homo sapiens
catgcactttagaaa

SEQ ID NO: 1425100 - DNA, 15 bp, Homo sapiens
ccatgcactttagaa

SEQ ID NO: 1425101 - DNA, 15 bp, Homo sapiens
gccatgcactttaga

SEQ ID NO: 1425102 - DNA, 15 bp, Homo sapiens
tgccatgcactttag

SEQ ID NO: 1425103 - DNA, 15 bp, Homo sapiens
ttgccatgcacttta

SEQ ID NO: 1425104 - DNA, 15 bp, Homo sapiens
tttgccatgcacttt

SEQ ID NO: 1425105 - DNA, 15 bp, Homo sapiens
ttttgccatgcactt

SEQ ID NO: 1425106 - DNA, 15 bp, Homo sapiens
gttttgccatgcact

SEQ ID NO: 1425107 - DNA, 15 bp, Homo sapiens
tgttttgccatgcac

SEQ ID NO: 1425108 - DNA, 15 bp, Homo sapiens
ttgttttgccatgca

SEQ ID NO: 1425109 - DNA, 15 bp, Homo sapiens
tttgttttgccatgc

SEQ ID NO: 1425110 - DNA, 15 bp, Homo sapiens
ttttgttttgccatg

SEQ ID NO: 1425111 - DNA, 15 bp, Homo sapiens
tttttgttttgccat

SEQ ID NO: 1425112 - DNA, 15 bp, Homo sapiens
atttttgttttgcca

SEQ ID NO: 1425113 - DNA, 15 bp, Homo sapiens
catttttgttttgcc

SEQ ID NO: 1425114 - DNA, 15 bp, Homo sapiens
ccatttttgttttgc

SEQ ID NO: 1425115 - DNA, 15 bp, Homo sapiens
cccatttttgttttg

SEQ ID NO: 1425116 - DNA, 15 bp, Homo sapiens
tcccatttttgtttt

SEQ ID NO: 1425117 - DNA, 15 bp, Homo sapiens
ttcccatttttgttt

SEQ ID NO: 1425118 - DNA, 15 bp, Homo sapiens
attcccatttttgtt

SEQ ID NO: 1425119 - DNA, 15 bp, Homo sapiens
aattcccatttttgt

SEQ ID NO: 1425120 - DNA, 15 bp, Homo sapiens
taattcccatttttg

SEQ ID NO: 1425121 - DNA, 15 bp, Homo sapiens
ctaattcccattttt

SEQ ID NO: 1425122 - DNA, 15 bp, Homo sapiens
tctaattcccatttt

SEQ ID NO: 1425123 - DNA, 15 bp, Homo sapiens
atctaattcccattt

SEQ ID NO: 1425124 - DNA, 15 bp, Homo sapiens
tatctaattcccatt

SEQ ID NO: 1425125 - DNA, 15 bp, Homo sapiens
gtatctaattcccat

SEQ ID NO: 1425126 - DNA, 15 bp, Homo sapiens
agtatctaattccca

SEQ ID NO: 1425127 - DNA, 15 bp, Homo sapiens
tagtatctaattccc

SEQ ID NO: 1425128 - DNA, 15 bp, Homo sapiens
ctagtatctaattcc

SEQ ID NO: 1425129 - DNA, 15 bp, Homo sapiens
tctagtatctaattc

SEQ ID NO: 1425130 - DNA, 15 bp, Homo sapiens
ttctagtatctaatt

SEQ ID NO: 1425131 - DNA, 15 bp, Homo sapiens
attctagtatctaat

SEQ ID NO: 1425132 - DNA, 15 bp, Homo sapiens
tattctagtatctaa

SEQ ID NO: 1425133 - DNA, 15 bp, Homo sapiens
gtattctagtatcta

SEQ ID NO: 1425134 - DNA, 15 bp, Homo sapiens
agtattctagtatct

SEQ ID NO: 1425135 - DNA, 15 bp, Homo sapiens
tagtattctagtatc

SEQ ID NO: 1425136 - DNA, 15 bp, Homo sapiens
ttagtattctagtat

SEQ ID NO: 1425137 - DNA, 15 bp, Homo sapiens
tttagtattctagta

SEQ ID NO: 1425138 - DNA, 15 bp, Homo sapiens
ttttagtattctagt

SEQ ID NO: 1425139 - DNA, 15 bp, Homo sapiens
gttttagtattctag

SEQ ID NO: 1425140 - DNA, 15 bp, Homo sapiens
agttttagtattcta

SEQ ID NO: 1425141 - DNA, 15 bp, Homo sapiens
gagttttagtattct

SEQ ID NO: 1425142 - DNA, 15 bp, Homo sapiens
agagttttagtattc

SEQ ID NO: 1425143 - DNA, 15 bp, Homo sapiens
aagagttttagtatt

SEQ ID NO: 1425144 - DNA, 15 bp, Homo sapiens
gaagagttttagtat

SEQ ID NO: 1425145 - DNA, 15 bp, Homo sapiens
agaagagttttagta

SEQ ID NO: 1425146 - DNA, 15 bp, Homo sapiens
tagaagagttttagt

SEQ ID NO: 1425147 - DNA, 15 bp, Homo sapiens
ctagaagagttttag

SEQ ID NO: 1425148 - DNA, 15 bp, Homo sapiens
tctagaagagtttta

SEQ ID NO: 1425149 - DNA, 15 bp, Homo sapiens
gtctagaagagtttt

SEQ ID NO: 1425150 - DNA, 15 bp, Homo sapiens
ggtctagaagagttt

SEQ ID NO: 1425151 - DNA, 15 bp, Homo sapiens
tggtctagaagagtt

SEQ ID NO: 1425152 - DNA, 15 bp, Homo sapiens
ttggtctagaagagt

SEQ ID NO: 1425153 - DNA, 15 bp, Homo sapiens
gttggtctagaagag

SEQ ID NO: 1425154 - DNA, 15 bp, Homo sapiens
ggttggtctagaaga

SEQ ID NO: 1425155 - DNA, 15 bp, Homo sapiens
gggttggtctagaag

SEQ ID NO: 1425156 - DNA, 15 bp, Homo sapiens
agggttggtctagaa

SEQ ID NO: 1425157 - DNA, 15 bp, Homo sapiens
aagggttggtctaga

SEQ ID NO: 1425158 - DNA, 15 bp, Homo sapiens
aaagggttggtctag

SEQ ID NO: 1425159 - DNA, 15 bp, Homo sapiens
aaaagggttggtcta

SEQ ID NO: 1425160 - DNA, 15 bp, Homo sapiens
caaaagggttggtct

SEQ ID NO: 1425161 - DNA, 15 bp, Homo sapiens
acaaaagggttggtc

SEQ ID NO: 1425162 - DNA, 15 bp, Homo sapiens
tacaaaagggttggt

SEQ ID NO: 1425163 - DNA, 15 bp, Homo sapiens
gtacaaaagggttgg

SEQ ID NO: 1425164 - DNA, 15 bp, Homo sapiens
cgtacaaaagggttg

SEQ ID NO: 1425165 - DNA, 15 bp, Homo sapiens
tcgtacaaaagggtt

SEQ ID NO: 1425166 - DNA, 15 bp, Homo sapiens
gtcgtacaaaagggt

SEQ ID NO: 1425167 - DNA, 15 bp, Homo sapiens
tgtcgtacaaaaggg

SEQ ID NO: 1425168 - DNA, 15 bp, Homo sapiens
ttgtcgtacaaaagg

SEQ ID NO: 1425169 - DNA, 15 bp, Homo sapiens
cttgtcgtacaaaag

SEQ ID NO: 1425170 - DNA, 15 bp, Homo sapiens
ccttgtcgtacaaaa

SEQ ID NO: 1425171 - DNA, 15 bp, Homo sapiens
tccttgtcgtacaaa

SEQ ID NO: 1425172 - DNA, 15 bp, Homo sapiens
ctccttgtcgtacaa

SEQ ID NO: 1425173 - DNA, 15 bp, Homo sapiens
cctccttgtcgtaca

SEQ ID NO: 1425174 - DNA, 15 bp, Homo sapiens
tcctccttgtcgtac

SEQ ID NO: 1425175 - DNA, 15 bp, Homo sapiens
ttcctccttgtcgta

SEQ ID NO: 1425176 - DNA, 15 bp, Homo sapiens
tttcctccttgtcgt

SEQ ID NO: 1425177 - DNA, 15 bp, Homo sapiens
gtttcctccttgtcg

SEQ ID NO: 1425178 - DNA, 15 bp, Homo sapiens
agtttcctccttgtc

SEQ ID NO: 1425179 - DNA, 15 bp, Homo sapiens
tagtttcctccttgt

SEQ ID NO: 1425180 - DNA, 15 bp, Homo sapiens
ttagtttcctccttg

SEQ ID NO: 1425181 - DNA, 15 bp, Homo sapiens
attagtttcctcctt

SEQ ID NO: 1425182 - DNA, 15 bp, Homo sapiens
tattagtttcctcct

SEQ ID NO: 1425183 - DNA, 15 bp, Homo sapiens
atattagtttcctcc

SEQ ID NO: 1425184 - DNA, 15 bp, Homo sapiens
aatattagtttcctc

SEQ ID NO: 1425185 - DNA, 15 bp, Homo sapiens
caatattagtttcct

SEQ ID NO: 1425186 - DNA, 15 bp, Homo sapiens
gcaatattagtttcc

SEQ ID NO: 1425187 - DNA, 15 bp, Homo sapiens
agcaatattagtttc

SEQ ID NO: 1425188 - DNA, 15 bp, Homo sapiens
tagcaatattagttt

SEQ ID NO: 1425189 - DNA, 15 bp, Homo sapiens
atagcaatattagtt

SEQ ID NO: 1425190 - DNA, 15 bp, Homo sapiens
catagcaatattagt

SEQ ID NO: 1425191 - DNA, 15 bp, Homo sapiens
ccatagcaatattag

SEQ ID NO: 1425192 - DNA, 15 bp, Homo sapiens
accatagcaatatta

SEQ ID NO: 1425193 - DNA, 15 bp, Homo sapiens
aaccatagcaatatt

SEQ ID NO: 1425194 - DNA, 15 bp, Homo sapiens
aaaccatagcaatat

SEQ ID NO: 1425195 - DNA, 15 bp, Homo sapiens
taaaccatagcaata

SEQ ID NO: 1425196 - DNA, 15 bp, Homo sapiens
ttaaaccatagcaat

SEQ ID NO: 1425197 - DNA, 15 bp, Homo sapiens
tttaaaccatagcaa

SEQ ID NO: 1425198 - DNA, 15 bp, Homo sapiens
ttttaaaccatagca

SEQ ID NO: 1425199 - DNA, 15 bp, Homo sapiens
cttttaaaccatagc

SEQ ID NO: 1425200 - DNA, 15 bp, Homo sapiens
acttttaaaccatag

SEQ ID NO: 1425201 - DNA, 15 bp, Homo sapiens
cacttttaaaccata

SEQ ID NO: 1425202 - DNA, 15 bp, Homo sapiens
acacttttaaaccat

SEQ ID NO: 1425203 - DNA, 15 bp, Homo sapiens
gacacttttaaacca

SEQ ID NO: 1425204 - DNA, 15 bp, Homo sapiens
ggacacttttaaacc

SEQ ID NO: 1425205 - DNA, 15 bp, Homo sapiens
gggacacttttaaac

SEQ ID NO: 1425206 - DNA, 15 bp, Homo sapiens
ggggacacttttaaa

SEQ ID NO: 1425207 - DNA, 15 bp, Homo sapiens
gggggacacttttaa

SEQ ID NO: 1425208 - DNA, 15 bp, Homo sapiens
tgggggacactttta

SEQ ID NO: 1425209 - DNA, 15 bp, Homo sapiens
ttgggggacactttt

SEQ ID NO: 1425210 - DNA, 15 bp, Homo sapiens
tttgggggacacttt

SEQ ID NO: 1425211 - DNA, 15 bp, Homo sapiens
atttgggggacactt

SEQ ID NO: 1425212 - DNA, 15 bp, Homo sapiens
aatttgggggacact

SEQ ID NO: 1425213 - DNA, 15 bp, Homo sapiens
aaatttgggggacac

SEQ ID NO: 1425214 - DNA, 15 bp, Homo sapiens
taaatttgggggaca

SEQ ID NO: 1425215 - DNA, 15 bp, Homo sapiens
ttaaatttgggggac

SEQ ID NO: 1425216 - DNA, 15 bp, Homo sapiens
attaaatttggggga

SEQ ID NO: 1425217 - DNA, 15 bp, Homo sapiens
cattaaatttggggg

SEQ ID NO: 1425218 - DNA, 15 bp, Homo sapiens
acattaaatttgggg

SEQ ID NO: 1425219 - DNA, 15 bp, Homo sapiens
cacattaaatttggg

SEQ ID NO: 1425220 - DNA, 15 bp, Homo sapiens
acacattaaatttgg

SEQ ID NO: 1425221 - DNA, 15 bp, Homo sapiens
aacacattaaatttg

SEQ ID NO: 1425222 - DNA, 15 bp, Homo sapiens
taacacattaaattt

SEQ ID NO: 1425223 - DNA, 15 bp, Homo sapiens
ctaacacattaaatt

SEQ ID NO: 1425224 - DNA, 15 bp, Homo sapiens
tctaacacattaaat

SEQ ID NO: 1425225 - DNA, 15 bp, Homo sapiens
ttctaacacattaaa

SEQ ID NO: 1425226 - DNA, 15 bp, Homo sapiens
gttctaacacattaa

SEQ ID NO: 1425227 - DNA, 15 bp, Homo sapiens
tgttctaacacatta

SEQ ID NO: 1425228 - DNA, 15 bp, Homo sapiens
atgttctaacacatt

SEQ ID NO: 1425229 - DNA, 15 bp, Homo sapiens
tatgttctaacacat

SEQ ID NO: 1425230 - DNA, 15 bp, Homo sapiens
atatgttctaacaca

SEQ ID NO: 1425231 - DNA, 15 bp, Homo sapiens
aatatgttctaacac

SEQ ID NO: 1425232 - DNA, 15 bp, Homo sapiens
gaatatgttctaaca

SEQ ID NO: 1425233 - DNA, 15 bp, Homo sapiens
ggaatatgttctaac

SEQ ID NO: 1425234 - DNA, 15 bp, Homo sapiens
gggaatatgttctaa

SEQ ID NO: 1425235 - DNA, 15 bp, Homo sapiens
ggggaatatgttcta

SEQ ID NO: 1425236 - DNA, 15 bp, Homo sapiens
tggggaatatgttct

SEQ ID NO: 1425237 - DNA, 15 bp, Homo sapiens
ttggggaatatgttc

SEQ ID NO: 1425238 - DNA, 15 bp, Homo sapiens
tttggggaatatgtt

SEQ ID NO: 1425239 - DNA, 15 bp, Homo sapiens
atttggggaatatgt

SEQ ID NO: 1425240 - DNA, 15 bp, Homo sapiens
aatttggggaatatg

SEQ ID NO: 1425241 - DNA, 15 bp, Homo sapiens
gaatttggggaatat

SEQ ID NO: 1425242 - DNA, 15 bp, Homo sapiens
tgaatttggggaata

SEQ ID NO: 1425243 - DNA, 15 bp, Homo sapiens
atgaatttggggaat

SEQ ID NO: 1425244 - DNA, 15 bp, Homo sapiens
tatgaatttggggaa

SEQ ID NO: 1425245 - DNA, 15 bp, Homo sapiens
atatgaatttgggga

SEQ ID NO: 1425246 - DNA, 15 bp, Homo sapiens
aatatgaatttgggg

SEQ ID NO: 1425247 - DNA, 15 bp, Homo sapiens
aaatatgaatttggg

SEQ ID NO: 1425248 - DNA, 15 bp, Homo sapiens
aaaatatgaatttgg

SEQ ID NO: 1425249 - DNA, 15 bp, Homo sapiens
aaaaatatgaatttg

SEQ ID NO: 1425250 - DNA, 15 bp, Homo sapiens
caaaaatatgaattt

SEQ ID NO: 1425251 - DNA, 15 bp, Homo sapiens
tcaaaaatatgaatt

SEQ ID NO: 1425252 - DNA, 15 bp, Homo sapiens
atcaaaaatatgaat

SEQ ID NO: 1425253 - DNA, 15 bp, Homo sapiens
catcaaaaatatgaa

SEQ ID NO: 1425254 - DNA, 15 bp, Homo sapiens
ccatcaaaaatatga

SEQ ID NO: 1425255 - DNA, 15 bp, Homo sapiens
gccatcaaaaatatg

SEQ ID NO: 1425256 - DNA, 15 bp, Homo sapiens
tgccatcaaaaatat

SEQ ID NO: 1425257 - DNA, 15 bp, Homo sapiens
atgccatcaaaaata

SEQ ID NO: 1425258 - DNA, 15 bp, Homo sapiens
aatgccatcaaaaat

SEQ ID NO: 1425259 - DNA, 15 bp, Homo sapiens
aaatgccatcaaaaa

SEQ ID NO: 1425260 - DNA, 15 bp, Homo sapiens
gaaatgccatcaaaa

SEQ ID NO: 1425261 - DNA, 15 bp, Homo sapiens
cgaaatgccatcaaa

SEQ ID NO: 1425262 - DNA, 15 bp, Homo sapiens
tcgaaatgccatcaa

SEQ ID NO: 1425263 - DNA, 15 bp, Homo sapiens
ctcgaaatgccatca

SEQ ID NO: 1425264 - DNA, 15 bp, Homo sapiens
tctcgaaatgccatc

SEQ ID NO: 1425265 - DNA, 15 bp, Homo sapiens
atctcgaaatgccat

SEQ ID NO: 1425266 - DNA, 15 bp, Homo sapiens
catctcgaaatgcca

SEQ ID NO: 1425267 - DNA, 15 bp, Homo sapiens
ccatctcgaaatgcc

SEQ ID NO: 1425268 - DNA, 15 bp, Homo sapiens
cccatctcgaaatgc

SEQ ID NO: 1425269 - DNA, 15 bp, Homo sapiens
ccccatctcgaaatg

SEQ ID NO: 1425270 - DNA, 15 bp, Homo sapiens
gccccatctcgaaat

SEQ ID NO: 1425271 - DNA, 15 bp, Homo sapiens
ggccccatctcgaaa

SEQ ID NO: 1425272 - DNA, 15 bp, Homo sapiens
aggccccatctcgaa

SEQ ID NO: 1425273 - DNA, 15 bp, Homo sapiens
aaggccccatctcga

SEQ ID NO: 1425274 - DNA, 15 bp, Homo sapiens
aaaggccccatctcg

SEQ ID NO: 1425275 - DNA, 15 bp, Homo sapiens
caaaggccccatctc

SEQ ID NO: 1425276 - DNA, 15 bp, Homo sapiens
ccaaaggccccatct

SEQ ID NO: 1425277 - DNA, 15 bp, Homo sapiens
cccaaaggccccatc

SEQ ID NO: 1425278 - DNA, 15 bp, Homo sapiens
tcccaaaggccccat

SEQ ID NO: 1425279 - DNA, 15 bp, Homo sapiens
ctcccaaaggcccca

SEQ ID NO: 1425280 - DNA, 15 bp, Homo sapiens
tctcccaaaggcccc

SEQ ID NO: 1425281 - DNA, 15 bp, Homo sapiens
atctcccaaaggccc

SEQ ID NO: 1425282 - DNA, 15 bp, Homo sapiens
tatctcccaaaggcc

SEQ ID NO: 1425283 - DNA, 15 bp, Homo sapiens
ttatctcccaaaggc

SEQ ID NO: 1425284 - DNA, 15 bp, Homo sapiens
attatctcccaaagg

SEQ ID NO: 1425285 - DNA, 15 bp, Homo sapiens
aattatctcccaaag

SEQ ID NO: 1425286 - DNA, 15 bp, Homo sapiens
taattatctcccaaa

SEQ ID NO: 1425287 - DNA, 15 bp, Homo sapiens
ctaattatctcccaa

SEQ ID NO: 1425288 - DNA, 15 bp, Homo sapiens
cctaattatctccca

SEQ ID NO: 1425289 - DNA, 15 bp, Homo sapiens
tcctaattatctccc

SEQ ID NO: 1425290 - DNA, 15 bp, Homo sapiens
atcctaattatctcc

SEQ ID NO: 1425291 - DNA, 15 bp, Homo sapiens
aatcctaattatctc

SEQ ID NO: 1425292 - DNA, 15 bp, Homo sapiens
taatcctaattatct

SEQ ID NO: 1425293 - DNA, 15 bp, Homo sapiens
ttaatcctaattatc

SEQ ID NO: 1425294 - DNA, 15 bp, Homo sapiens
tttaatcctaattat

SEQ ID NO: 1425295 - DNA, 15 bp, Homo sapiens
atttaatcctaatta

SEQ ID NO: 1425296 - DNA, 15 bp, Homo sapiens
tatttaatcctaatt

SEQ ID NO: 1425297 - DNA, 15 bp, Homo sapiens
ttatttaatcctaat

SEQ ID NO: 1425298 - DNA, 15 bp, Homo sapiens
cttatttaatcctaa

SEQ ID NO: 1425299 - DNA, 15 bp, Homo sapiens
ccttatttaatccta

SEQ ID NO: 1425300 - DNA, 15 bp, Homo sapiens
accttatttaatcct

SEQ ID NO: 1425301 - DNA, 15 bp, Homo sapiens
gaccttatttaatcc

SEQ ID NO: 1425302 - DNA, 15 bp, Homo sapiens
tgaccttatttaatc

SEQ ID NO: 1425303 - DNA, 15 bp, Homo sapiens
atgaccttatttaat

SEQ ID NO: 1425304 - DNA, 15 bp, Homo sapiens
gatgaccttatttaa

SEQ ID NO: 1425305 - DNA, 15 bp, Homo sapiens
tgatgaccttattta

SEQ ID NO: 1425306 - DNA, 15 bp, Homo sapiens
ctgatgaccttattt

SEQ ID NO: 1425307 - DNA, 15 bp, Homo sapiens
cctgatgaccttatt

SEQ ID NO: 1425308 - DNA, 15 bp, Homo sapiens
ccctgatgaccttat

SEQ ID NO: 1425309 - DNA, 15 bp, Homo sapiens
accctgatgacctta

SEQ ID NO: 1425310 - DNA, 15 bp, Homo sapiens
caccctgatgacctt

SEQ ID NO: 1425311 - DNA, 15 bp, Homo sapiens
acaccctgatgacct

SEQ ID NO: 1425312 - DNA, 15 bp, Homo sapiens
cacaccctgatgacc

SEQ ID NO: 1425313 - DNA, 15 bp, Homo sapiens
ccacaccctgatgac

SEQ ID NO: 1425314 - DNA, 15 bp, Homo sapiens
cccacaccctgatga

SEQ ID NO: 1425315 - DNA, 15 bp, Homo sapiens
ccccacaccctgatg

SEQ ID NO: 1425316 - DNA, 15 bp, Homo sapiens
gccccacaccctgat

SEQ ID NO: 1425317 - DNA, 15 bp, Homo sapiens
ggccccacaccctga

SEQ ID NO: 1425318 - DNA, 15 bp, Homo sapiens
aggccccacaccctg

SEQ ID NO: 1425319 - DNA, 15 bp, Homo sapiens
caggccccacaccct

SEQ ID NO: 1425320 - DNA, 15 bp, Homo sapiens
tcaggccccacaccc

SEQ ID NO: 1425321 - DNA, 15 bp, Homo sapiens
atcaggccccacacc

SEQ ID NO: 1425322 - DNA, 15 bp, Homo sapiens
catcaggccccacac

SEQ ID NO: 1425323 - DNA, 15 bp, Homo sapiens
ccatcaggccccaca

SEQ ID NO: 1425324 - DNA, 15 bp, Homo sapiens
cccatcaggccccac

SEQ ID NO: 1425325 - DNA, 15 bp, Homo sapiens
tcccatcaggcccca

SEQ ID NO: 1425326 - DNA, 15 bp, Homo sapiens
gtcccatcaggcccc

SEQ ID NO: 1425327 - DNA, 15 bp, Homo sapiens
agtcccatcaggccc

SEQ ID NO: 1425328 - DNA, 15 bp, Homo sapiens
cagtcccatcaggcc

SEQ ID NO: 1425329 - DNA, 15 bp, Homo sapiens
ccagtcccatcaggc

SEQ ID NO: 1425330 - DNA, 15 bp, Homo sapiens
accagtcccatcagg

SEQ ID NO: 1425331 - DNA, 15 bp, Homo sapiens
caccagtcccatcag

SEQ ID NO: 1425332 - DNA, 15 bp, Homo sapiens
ccaccagtcccatca

SEQ ID NO: 1425333 - DNA, 15 bp, Homo sapiens
gccaccagtcccatc

SEQ ID NO: 1425334 - DNA, 15 bp, Homo sapiens
agccaccagtcccat

SEQ ID NO: 1425335 - DNA, 15 bp, Homo sapiens
aagccaccagtccca

SEQ ID NO: 1425336 - DNA, 15 bp, Homo sapiens
aaagccaccagtccc

SEQ ID NO: 1425337 - DNA, 15 bp, Homo sapiens
taaagccaccagtcc

SEQ ID NO: 1425338 - DNA, 15 bp, Homo sapiens
ataaagccaccagtc

SEQ ID NO: 1425339 - DNA, 15 bp, Homo sapiens
tataaagccaccagt

SEQ ID NO: 1425340 - DNA, 15 bp, Homo sapiens
atataaagccaccag

SEQ ID NO: 1425341 - DNA, 15 bp, Homo sapiens
catataaagccacca

SEQ ID NO: 1425342 - DNA, 15 bp, Homo sapiens
acatataaagccacc

SEQ ID NO: 1425343 - DNA, 15 bp, Homo sapiens
tacatataaagccac

SEQ ID NO: 1425344 - DNA, 15 bp, Homo sapiens
gtacatataaagcca

SEQ ID NO: 1425345 - DNA, 15 bp, Homo sapiens
tgtacatataaagcc

SEQ ID NO: 1425346 - DNA, 15 bp, Homo sapiens
ctgtacatataaagc

SEQ ID NO: 1425347 - DNA, 15 bp, Homo sapiens
actgtacatataaag

SEQ ID NO: 1425348 - DNA, 15 bp, Homo sapiens
cactgtacatataaa

SEQ ID NO: 1425349 - DNA, 15 bp, Homo sapiens
ccactgtacatataa

SEQ ID NO: 1425350 - DNA, 15 bp, Homo sapiens
gccactgtacatata

SEQ ID NO: 1425351 - DNA, 15 bp, Homo sapiens
ggccactgtacatat

SEQ ID NO: 1425352 - DNA, 15 bp, Homo sapiens
aggccactgtacata

SEQ ID NO: 1425353 - DNA, 15 bp, Homo sapiens
caggccactgtacat

SEQ ID NO: 1425354 - DNA, 15 bp, Homo sapiens
tcaggccactgtaca

SEQ ID NO: 1425355 - DNA, 15 bp, Homo sapiens
ctcaggccactgtac

SEQ ID NO: 1425356 - DNA, 15 bp, Homo sapiens
actcaggccactgta

SEQ ID NO: 1425357 - DNA, 15 bp, Homo sapiens
aactcaggccactgt

SEQ ID NO: 1425358 - DNA, 15 bp, Homo sapiens
taactcaggccactg

SEQ ID NO: 1425359 - DNA, 15 bp, Homo sapiens
ttaactcaggccact

SEQ ID NO: 1425360 - DNA, 15 bp, Homo sapiens
attaactcaggccac

SEQ ID NO: 1425361 - DNA, 15 bp, Homo sapiens
tattaactcaggcca

SEQ ID NO: 1425362 - DNA, 15 bp, Homo sapiens
ctattaactcaggcc

SEQ ID NO: 1425363 - DNA, 15 bp, Homo sapiens
cctattaactcaggc

SEQ ID NO: 1425364 - DNA, 15 bp, Homo sapiens
gcctattaactcagg

SEQ ID NO: 1425365 - DNA, 15 bp, Homo sapiens
tgcctattaactcag

SEQ ID NO: 1425366 - DNA, 15 bp, Homo sapiens
atgcctattaactca

SEQ ID NO: 1425367 - DNA, 15 bp, Homo sapiens
aatgcctattaactc

SEQ ID NO: 1425368 - DNA, 15 bp, Homo sapiens
gaatgcctattaact

SEQ ID NO: 1425369 - DNA, 15 bp, Homo sapiens
agaatgcctattaac

SEQ ID NO: 1425370 - DNA, 15 bp, Homo sapiens
aagaatgcctattaa

SEQ ID NO: 1425371 - DNA, 15 bp, Homo sapiens
caagaatgcctatta

SEQ ID NO: 1425372 - DNA, 15 bp, Homo sapiens
gcaagaatgcctatt

SEQ ID NO: 1425373 - DNA, 15 bp, Homo sapiens
agcaagaatgcctat

SEQ ID NO: 1425374 - DNA, 15 bp, Homo sapiens
aagcaagaatgccta

SEQ ID NO: 1425375 - DNA, 15 bp, Homo sapiens
aaagcaagaatgcct

SEQ ID NO: 1425376 - DNA, 15 bp, Homo sapiens
gaaagcaagaatgcc

SEQ ID NO: 1425377 - DNA, 15 bp, Homo sapiens
agaaagcaagaatgc

SEQ ID NO: 1425378 - DNA, 15 bp, Homo sapiens
aagaaagcaagaatg

SEQ ID NO: 1425379 - DNA, 15 bp, Homo sapiens
caagaaagcaagaat

SEQ ID NO: 1425380 - DNA, 15 bp, Homo sapiens
gcaagaaagcaagaa

SEQ ID NO: 1425381 - DNA, 15 bp, Homo sapiens
agcaagaaagcaaga

SEQ ID NO: 1425382 - DNA, 15 bp, Homo sapiens
tagcaagaaagcaag

SEQ ID NO: 1425383 - DNA, 15 bp, Homo sapiens
atagcaagaaagcaa

SEQ ID NO: 1425384 - DNA, 15 bp, Homo sapiens
catagcaagaaagca

SEQ ID NO: 1425385 - DNA, 15 bp, Homo sapiens
ccatagcaagaaagc

SEQ ID NO: 1425386 - DNA, 15 bp, Homo sapiens
tccatagcaagaaag

SEQ ID NO: 1425387 - DNA, 15 bp, Homo sapiens
ttccatagcaagaaa

SEQ ID NO: 1425388 - DNA, 15 bp, Homo sapiens
gttccatagcaagaa

SEQ ID NO: 1425389 - DNA, 15 bp, Homo sapiens
agttccatagcaaga

SEQ ID NO: 1425390 - DNA, 15 bp, Homo sapiens
cagttccatagcaag

SEQ ID NO: 1425391 - DNA, 15 bp, Homo sapiens
gcagttccatagcaa

SEQ ID NO: 1425392 - DNA, 15 bp, Homo sapiens
ggcagttccatagca

SEQ ID NO: 1425393 - DNA, 15 bp, Homo sapiens
aggcagttccatagc

SEQ ID NO: 1425394 - DNA, 15 bp, Homo sapiens
aaggcagttccatag

SEQ ID NO: 1425395 - DNA, 15 bp, Homo sapiens
gaaggcagttccata

SEQ ID NO: 1425396 - DNA, 15 bp, Homo sapiens
agaaggcagttccat

SEQ ID NO: 1425397 - DNA, 15 bp, Homo sapiens
cagaaggcagttcca

SEQ ID NO: 1425398 - DNA, 15 bp, Homo sapiens
gcagaaggcagttcc

SEQ ID NO: 1425399 - DNA, 15 bp, Homo sapiens
ggcagaaggcagttc

SEQ ID NO: 1425400 - DNA, 15 bp, Homo sapiens
tggcagaaggcagtt

SEQ ID NO: 1425401 - DNA, 15 bp, Homo sapiens
atggcagaaggcagt

SEQ ID NO: 1425402 - DNA, 15 bp, Homo sapiens
catggcagaaggcag

SEQ ID NO: 1425403 - DNA, 15 bp, Homo sapiens
acatggcagaaggca

SEQ ID NO: 1425404 - DNA, 15 bp, Homo sapiens
aacatggcagaaggc

SEQ ID NO: 1425405 - DNA, 15 bp, Homo sapiens
taacatggcagaagg

SEQ ID NO: 1425406 - DNA, 15 bp, Homo sapiens
ctaacatggcagaag

SEQ ID NO: 1425407 - DNA, 15 bp, Homo sapiens
cctaacatggcagaa

SEQ ID NO: 1425408 - DNA, 15 bp, Homo sapiens
ccctaacatggcaga

SEQ ID NO: 1425409 - DNA, 15 bp, Homo sapiens
accctaacatggcag

SEQ ID NO: 1425410 - DNA, 15 bp, Homo sapiens
taccctaacatggca

SEQ ID NO: 1425411 - DNA, 15 bp, Homo sapiens
gtaccctaacatggc

SEQ ID NO: 1425412 - DNA, 15 bp, Homo sapiens
tgtaccctaacatgg

SEQ ID NO: 1425413 - DNA, 15 bp, Homo sapiens
gtgtaccctaacatg

SEQ ID NO: 1425414 - DNA, 15 bp, Homo sapiens
tgtgtaccctaacat

SEQ ID NO: 1425415 - DNA, 15 bp, Homo sapiens
ttgtgtaccctaaca

SEQ ID NO: 1425416 - DNA, 15 bp, Homo sapiens
cttgtgtaccctaac

SEQ ID NO: 1425417 - DNA, 15 bp, Homo sapiens
ccttgtgtaccctaa

SEQ ID NO: 1425418 - DNA, 15 bp, Homo sapiens
tccttgtgtacccta

SEQ ID NO: 1425419 - DNA, 15 bp, Homo sapiens
gtccttgtgtaccct

SEQ ID NO: 1425420 - DNA, 15 bp, Homo sapiens
ggtccttgtgtaccc

SEQ ID NO: 1425421 - DNA, 15 bp, Homo sapiens
aggtccttgtgtacc

SEQ ID NO: 1425422 - DNA, 15 bp, Homo sapiens
caggtccttgtgtac

SEQ ID NO: 1425423 - DNA, 15 bp, Homo sapiens
tcaggtccttgtgta

SEQ ID NO: 1425424 - DNA, 15 bp, Homo sapiens
gtcaggtccttgtgt

SEQ ID NO: 1425425 - DNA, 15 bp, Homo sapiens
ggtcaggtccttgtg

SEQ ID NO: 1425426 - DNA, 15 bp, Homo sapiens
tggtcaggtccttgt

SEQ ID NO: 1425427 - DNA, 15 bp, Homo sapiens
ctggtcaggtccttg

SEQ ID NO: 1425428 - DNA, 15 bp, Homo sapiens
tctggtcaggtcctt

SEQ ID NO: 1425429 - DNA, 15 bp, Homo sapiens
atctggtcaggtcct

SEQ ID NO: 1425430 - DNA, 15 bp, Homo sapiens
tatctggtcaggtcc

SEQ ID NO: 1425431 - DNA, 15 bp, Homo sapiens
gtatctggtcaggtc

SEQ ID NO: 1425432 - DNA, 15 bp, Homo sapiens
agtatctggtcaggt

SEQ ID NO: 1425433 - DNA, 15 bp, Homo sapiens
tagtatctggtcagg

SEQ ID NO: 1425434 - DNA, 15 bp, Homo sapiens
gtagtatctggtcag

SEQ ID NO: 1425435 - DNA, 15 bp, Homo sapiens
agtagtatctggtca

SEQ ID NO: 1425436 - DNA, 15 bp, Homo sapiens
cagtagtatctggtc

SEQ ID NO: 1425437 - DNA, 15 bp, Homo sapiens
acagtagtatctggt

SEQ ID NO: 1425438 - DNA, 15 bp, Homo sapiens
gacagtagtatctgg

SEQ ID NO: 1425439 - DNA, 15 bp, Homo sapiens
tgacagtagtatctg

SEQ ID NO: 1425440 - DNA, 15 bp, Homo sapiens
atgacagtagtatct

SEQ ID NO: 1425441 - DNA, 15 bp, Homo sapiens
catgacagtagtatc

SEQ ID NO: 1425442 - DNA, 15 bp, Homo sapiens
gcatgacagtagtat

SEQ ID NO: 1425443 - DNA, 15 bp, Homo sapiens
agcatgacagtagta

SEQ ID NO: 1425444 - DNA, 15 bp, Homo sapiens
gagcatgacagtagt

SEQ ID NO: 1425445 - DNA, 15 bp, Homo sapiens
agagcatgacagtag

SEQ ID NO: 1425446 - DNA, 15 bp, Homo sapiens
aagagcatgacagta

SEQ ID NO: 1425447 - DNA, 15 bp, Homo sapiens
caagagcatgacagt

SEQ ID NO: 1425448 - DNA, 15 bp, Homo sapiens
ccaagagcatgacag

SEQ ID NO: 1425449 - DNA, 15 bp, Homo sapiens
tccaagagcatgaca

SEQ ID NO: 1425450 - DNA, 15 bp, Homo sapiens
gtccaagagcatgac

SEQ ID NO: 1425451 - DNA, 15 bp, Homo sapiens
agtccaagagcatga

SEQ ID NO: 1425452 - DNA, 15 bp, Homo sapiens
aagtccaagagcatg

SEQ ID NO: 1425453 - DNA, 15 bp, Homo sapiens
gaagtccaagagcat

SEQ ID NO: 1425454 - DNA, 15 bp, Homo sapiens
ggaagtccaagagca

SEQ ID NO: 1425455 - DNA, 15 bp, Homo sapiens
gggaagtccaagagc

SEQ ID NO: 1425456 - DNA, 15 bp, Homo sapiens
tgggaagtccaagag

SEQ ID NO: 1425457 - DNA, 15 bp, Homo sapiens
ctgggaagtccaaga

SEQ ID NO: 1425458 - DNA, 15 bp, Homo sapiens
gctgggaagtccaag

SEQ ID NO: 1425459 - DNA, 15 bp, Homo sapiens
tgctgggaagtccaa

SEQ ID NO: 1425460 - DNA, 15 bp, Homo sapiens
atgctgggaagtcca

SEQ ID NO: 1425461 - DNA, 15 bp, Homo sapiens
gatgctgggaagtcc

SEQ ID NO: 1425462 - DNA, 15 bp, Homo sapiens
agatgctgggaagtc

SEQ ID NO: 1425463 - DNA, 15 bp, Homo sapiens
tagatgctgggaagt

SEQ ID NO: 1425464 - DNA, 15 bp, Homo sapiens
ctagatgctgggaag

SEQ ID NO: 1425465 - DNA, 15 bp, Homo sapiens
tctagatgctgggaa

SEQ ID NO: 1425466 - DNA, 15 bp, Homo sapiens
ttctagatgctggga

SEQ ID NO: 1425467 - DNA, 15 bp, Homo sapiens
attctagatgctggg

SEQ ID NO: 1425468 - DNA, 15 bp, Homo sapiens
aattctagatgctgg

SEQ ID NO: 1425469 - DNA, 15 bp, Homo sapiens
caattctagatgctg

SEQ ID NO: 1425470 - DNA, 15 bp, Homo sapiens
acaattctagatgct

SEQ ID NO: 1425471 - DNA, 15 bp, Homo sapiens
tacaattctagatgc

SEQ ID NO: 1425472 - DNA, 15 bp, Homo sapiens
ttacaattctagatg

SEQ ID NO: 1425473 - DNA, 15 bp, Homo sapiens
cttacaattctagat

SEQ ID NO: 1425474 - DNA, 15 bp, Homo sapiens
tcttacaattctaga

SEQ ID NO: 1425475 - DNA, 15 bp, Homo sapiens
ttcttacaattctag

SEQ ID NO: 1425476 - DNA, 15 bp, Homo sapiens
tttcttacaattcta

SEQ ID NO: 1425477 - DNA, 15 bp, Homo sapiens
atttcttacaattct

SEQ ID NO: 1425478 - DNA, 15 bp, Homo sapiens
tatttcttacaattc

SEQ ID NO: 1425479 - DNA, 15 bp, Homo sapiens
ttatttcttacaatt

SEQ ID NO: 1425480 - DNA, 15 bp, Homo sapiens
cttatttcttacaat

SEQ ID NO: 1425481 - DNA, 15 bp, Homo sapiens
acttatttcttacaa

SEQ ID NO: 1425482 - DNA, 15 bp, Homo sapiens
aacttatttcttaca

SEQ ID NO: 1425483 - DNA, 15 bp, Homo sapiens
aaacttatttcttac

SEQ ID NO: 1425484 - DNA, 15 bp, Homo sapiens
gaaacttatttctta

SEQ ID NO: 1425485 - DNA, 15 bp, Homo sapiens
agaaacttatttctt

SEQ ID NO: 1425486 - DNA, 15 bp, Homo sapiens
aagaaacttatttct

SEQ ID NO: 1425487 - DNA, 15 bp, Homo sapiens
aaagaaacttatttc

SEQ ID NO: 1425488 - DNA, 15 bp, Homo sapiens
taaagaaacttattt

SEQ ID NO: 1425489 - DNA, 15 bp, Homo sapiens
ataaagaaacttatt

SEQ ID NO: 1425490 - DNA, 15 bp, Homo sapiens
tataaagaaacttat

SEQ ID NO: 1425491 - DNA, 15 bp, Homo sapiens
ttataaagaaactta

SEQ ID NO: 1425492 - DNA, 15 bp, Homo sapiens
tttataaagaaactt

SEQ ID NO: 1425493 - DNA, 15 bp, Homo sapiens
atttataaagaaact

SEQ ID NO: 1425494 - DNA, 15 bp, Homo sapiens
aatttataaagaaac

SEQ ID NO: 1425495 - DNA, 15 bp, Homo sapiens
taatttataaagaaa

SEQ ID NO: 1425496 - DNA, 15 bp, Homo sapiens
gtaatttataaagaa

SEQ ID NO: 1425497 - DNA, 15 bp, Homo sapiens
ggtaatttataaaga

SEQ ID NO: 1425498 - DNA, 15 bp, Homo sapiens
tgaatacctgagact

SEQ ID NO: 1425499 - DNA, 15 bp, Homo sapiens
ctgaatacctgagac

SEQ ID NO: 1425500 - DNA, 15 bp, Homo sapiens
actgaatacctgaga

SEQ ID NO: 1425501 - DNA, 15 bp, Homo sapiens
aactgaatacctgag

SEQ ID NO: 1425502 - DNA, 15 bp, Homo sapiens
taactgaatacctga

SEQ ID NO: 1425503 - DNA, 15 bp, Homo sapiens
ataactgaatacctg

SEQ ID NO: 1425504 - DNA, 15 bp, Homo sapiens
tataactgaatacct

SEQ ID NO: 1425505 - DNA, 15 bp, Homo sapiens
ctataactgaatacc

SEQ ID NO: 1425506 - DNA, 15 bp, Homo sapiens
gctataactgaatac

SEQ ID NO: 1425507 - DNA, 15 bp, Homo sapiens
tgctataactgaata

SEQ ID NO: 1425508 - DNA, 15 bp, Homo sapiens
ttgctataactgaat

SEQ ID NO: 1425509 - DNA, 15 bp, Homo sapiens
gttgctataactgaa

SEQ ID NO: 1425510 - DNA, 15 bp, Homo sapiens
tgttgctataactga

SEQ ID NO: 1425511 - DNA, 15 bp, Homo sapiens
ctgttgctataactg

SEQ ID NO: 1425512 - DNA, 15 bp, Homo sapiens
tctgttgctataact

SEQ ID NO: 1425513 - DNA, 15 bp, Homo sapiens
ttctgttgctataac

SEQ ID NO: 1425514 - DNA, 15 bp, Homo sapiens
tttctgttgctataa

SEQ ID NO: 1425515 - DNA, 15 bp, Homo sapiens
ttttctgttgctata

SEQ ID NO: 1425516 - DNA, 15 bp, Homo sapiens
attttctgttgctat

SEQ ID NO: 1425517 - DNA, 15 bp, Homo sapiens
tattttctgttgcta

SEQ ID NO: 1425518 - DNA, 15 bp, Homo sapiens
ctattttctgttgct

SEQ ID NO: 1425519 - DNA, 15 bp, Homo sapiens
tctattttctgttgc

SEQ ID NO: 1425520 - DNA, 15 bp, Homo sapiens
gtctattttctgttg

SEQ ID NO: 1425521 - DNA, 15 bp, Homo sapiens
agtctattttctgtt

SEQ ID NO: 1425522 - DNA, 15 bp, Homo sapiens
tagtctattttctgt

SEQ ID NO: 1425523 - DNA, 15 bp, Homo sapiens
ttagtctattttctg

SEQ ID NO: 1425524 - DNA, 15 bp, Homo sapiens
cttagtctattttct

SEQ ID NO: 1425525 - DNA, 15 bp, Homo sapiens
tcttagtctattttc

SEQ ID NO: 1425526 - DNA, 15 bp, Homo sapiens
ctcttagtctatttt

SEQ ID NO: 1425527 - DNA, 15 bp, Homo sapiens
cctcttagtctattt

SEQ ID NO: 1425528 - DNA, 15 bp, Homo sapiens
tcctcttagtctatt

SEQ ID NO: 1425529 - DNA, 15 bp, Homo sapiens
atcctcttagtctat

SEQ ID NO: 1425530 - DNA, 15 bp, Homo sapiens
aatcctcttagtcta

SEQ ID NO: 1425531 - DNA, 15 bp, Homo sapiens
taatcctcttagtct

SEQ ID NO: 1425532 - DNA, 15 bp, Homo sapiens
ataatcctcttagtc

SEQ ID NO: 1425533 - DNA, 15 bp, Homo sapiens
aataatcctcttagt

SEQ ID NO: 1425534 - DNA, 15 bp, Homo sapiens
aaataatcctcttag

SEQ ID NO: 1425535 - DNA, 15 bp, Homo sapiens
taaataatcctctta

SEQ ID NO: 1425536 - DNA, 15 bp, Homo sapiens
gtaaataatcctctt

SEQ ID NO: 1425537 - DNA, 15 bp, Homo sapiens
ggtaaataatcctct

SEQ ID NO: 1425538 - DNA, 15 bp, Homo sapiens
aggtaaataatcctc

SEQ ID NO: 1425539 - DNA, 15 bp, Homo sapiens
aaggtaaataatcct

SEQ ID NO: 1425540 - DNA, 15 bp, Homo sapiens
caaggtaaataatcc

SEQ ID NO: 1425541 - DNA, 15 bp, Homo sapiens
acaaggtaaataatc

SEQ ID NO: 1425542 - DNA, 15 bp, Homo sapiens
cacaaggtaaataat

SEQ ID NO: 1425543 - DNA, 15 bp, Homo sapiens
acacaaggtaaataa

SEQ ID NO: 1425544 - DNA, 15 bp, Homo sapiens
gacacaaggtaaata

SEQ ID NO: 1425545 - DNA, 15 bp, Homo sapiens
tgacacaaggtaaat

SEQ ID NO: 1425546 - DNA, 15 bp, Homo sapiens
ttgacacaaggtaaa

SEQ ID NO: 1425547 - DNA, 15 bp, Homo sapiens
tttgacacaaggtaa

SEQ ID NO: 1425548 - DNA, 15 bp, Homo sapiens
atttgacacaaggta

SEQ ID NO: 1425549 - DNA, 15 bp, Homo sapiens
aatttgacacaaggt

SEQ ID NO: 1425550 - DNA, 15 bp, Homo sapiens
taatttgacacaagg

SEQ ID NO: 1425551 - DNA, 15 bp, Homo sapiens
ataatttgacacaag

SEQ ID NO: 1425552 - DNA, 15 bp, Homo sapiens
aataatttgacacaa

SEQ ID NO: 1425553 - DNA, 15 bp, Homo sapiens
aaataatttgacaca

SEQ ID NO: 1425554 - DNA, 15 bp, Homo sapiens
taaataatttgacac

SEQ ID NO: 1425555 - DNA, 15 bp, Homo sapiens
gtaaataatttgaca

SEQ ID NO: 1425556 - DNA, 15 bp, Homo sapiens
agtaaataatttgac

SEQ ID NO: 1425557 - DNA, 15 bp, Homo sapiens
tagtaaataatttga

SEQ ID NO: 1425558 - DNA, 15 bp, Homo sapiens
gtagtaaataatttg

SEQ ID NO: 1425559 - DNA, 15 bp, Homo sapiens
agtagtaaataattt

SEQ ID NO: 1425560 - DNA, 15 bp, Homo sapiens
tagtagtaaataatt

SEQ ID NO: 1425561 - DNA, 15 bp, Homo sapiens
ttagtagtaaataat

SEQ ID NO: 1425562 - DNA, 15 bp, Homo sapiens
tttagtagtaaataa

SEQ ID NO: 1425563 - DNA, 15 bp, Homo sapiens
ctttagtagtaaata

SEQ ID NO: 1425564 - DNA, 15 bp, Homo sapiens
gctttagtagtaaat

SEQ ID NO: 1425565 - DNA, 15 bp, Homo sapiens
agctttagtagtaaa

SEQ ID NO: 1425566 - DNA, 15 bp, Homo sapiens
cagctttagtagtaa

SEQ ID NO: 1425567 - DNA, 15 bp, Homo sapiens
ccagctttagtagta

SEQ ID NO: 1425568 - DNA, 15 bp, Homo sapiens
cccagctttagtagt

SEQ ID NO: 1425569 - DNA, 15 bp, Homo sapiens
tcccagctttagtag

SEQ ID NO: 1425570 - DNA, 15 bp, Homo sapiens
gtcccagctttagta

SEQ ID NO: 1425571 - DNA, 15 bp, Homo sapiens
ggtcccagctttagt

SEQ ID NO: 1425572 - DNA, 15 bp, Homo sapiens
tggtcccagctttag

SEQ ID NO: 1425573 - DNA, 15 bp, Homo sapiens
ttggtcccagcttta

SEQ ID NO: 1425574 - DNA, 15 bp, Homo sapiens
tttggtcccagcttt

SEQ ID NO: 1425575 - DNA, 15 bp, Homo sapiens
ttttggtcccagctt

SEQ ID NO: 1425576 - DNA, 15 bp, Homo sapiens
gttttggtcccagct

SEQ ID NO: 1425577 - DNA, 15 bp, Homo sapiens
ggttttggtcccagc

SEQ ID NO: 1425578 - DNA, 15 bp, Homo sapiens
aggttttggtcccag

SEQ ID NO: 1425579 - DNA, 15 bp, Homo sapiens
gaggttttggtccca

SEQ ID NO: 1425580 - DNA, 15 bp, Homo sapiens
agaggttttggtccc

SEQ ID NO: 1425581 - DNA, 15 bp, Homo sapiens
aagaggttttggtcc

SEQ ID NO: 1425582 - DNA, 15 bp, Homo sapiens
caagaggttttggtc

SEQ ID NO: 1425583 - DNA, 15 bp, Homo sapiens
ccaagaggttttggt

SEQ ID NO: 1425584 - DNA, 15 bp, Homo sapiens
gccaagaggttttgg

SEQ ID NO: 1425585 - DNA, 15 bp, Homo sapiens
ggccaagaggttttg

SEQ ID NO: 1425586 - DNA, 15 bp, Homo sapiens
aggccaagaggtttt

SEQ ID NO: 1425587 - DNA, 15 bp, Homo sapiens
gaggccaagaggttt

SEQ ID NO: 1425588 - DNA, 15 bp, Homo sapiens
agaggccaagaggtt

SEQ ID NO: 1425589 - DNA, 15 bp, Homo sapiens
tagaggccaagaggt

SEQ ID NO: 1425590 - DNA, 15 bp, Homo sapiens
atagaggccaagagg

SEQ ID NO: 1425591 - DNA, 15 bp, Homo sapiens
catagaggccaagag

SEQ ID NO: 1425592 - DNA, 15 bp, Homo sapiens
acatagaggccaaga

SEQ ID NO: 1425593 - DNA, 15 bp, Homo sapiens
aacatagaggccaag

SEQ ID NO: 1425594 - DNA, 15 bp, Homo sapiens
aaacatagaggccaa

SEQ ID NO: 1425595 - DNA, 15 bp, Homo sapiens
gaaacatagaggcca

SEQ ID NO: 1425596 - DNA, 15 bp, Homo sapiens
tgaaacatagaggcc

SEQ ID NO: 1425597 - DNA, 15 bp, Homo sapiens
ttgaaacatagaggc

SEQ ID NO: 1425598 - DNA, 15 bp, Homo sapiens
cttgaaacatagagg

SEQ ID NO: 1425599 - DNA, 15 bp, Homo sapiens
acttgaaacatagag

SEQ ID NO: 1425600 - DNA, 15 bp, Homo sapiens
aacttgaaacataga

SEQ ID NO: 1425601 - DNA, 15 bp, Homo sapiens
gaacttgaaacatag

SEQ ID NO: 1425602 - DNA, 15 bp, Homo sapiens
ggaacttgaaacata

SEQ ID NO: 1425603 - DNA, 15 bp, Homo sapiens
tggaacttgaaacat

SEQ ID NO: 1425604 - DNA, 15 bp, Homo sapiens
ttggaacttgaaaca

SEQ ID NO: 1425605 - DNA, 15 bp, Homo sapiens
tttggaacttgaaac

SEQ ID NO: 1425606 - DNA, 15 bp, Homo sapiens
ctttggaacttgaaa

SEQ ID NO: 1425607 - DNA, 15 bp, Homo sapiens
gctttggaacttgaa

SEQ ID NO: 1425608 - DNA, 15 bp, Homo sapiens
agctttggaacttga

SEQ ID NO: 1425609 - DNA, 15 bp, Homo sapiens
cagctttggaacttg

SEQ ID NO: 1425610 - DNA, 15 bp, Homo sapiens
tcagctttggaactt

SEQ ID NO: 1425611 - DNA, 15 bp, Homo sapiens
atcagctttggaact

SEQ ID NO: 1425612 - DNA, 15 bp, Homo sapiens
aatcagctttggaac

SEQ ID NO: 1425613 - DNA, 15 bp, Homo sapiens
aaatcagctttggaa

SEQ ID NO: 1425614 - DNA, 15 bp, Homo sapiens
gaaatcagctttgga

SEQ ID NO: 1425615 - DNA, 15 bp, Homo sapiens
ggaaatcagctttgg

SEQ ID NO: 1425616 - DNA, 15 bp, Homo sapiens
gggaaatcagctttg

SEQ ID NO: 1425617 - DNA, 15 bp, Homo sapiens
agggaaatcagcttt

SEQ ID NO: 1425618 - DNA, 15 bp, Homo sapiens
aagggaaatcagctt

SEQ ID NO: 1425619 - DNA, 15 bp, Homo sapiens
aaagggaaatcagct

SEQ ID NO: 1425620 - DNA, 15 bp, Homo sapiens
aaaagggaaatcagc

SEQ ID NO: 1425621 - DNA, 15 bp, Homo sapiens
taaaagggaaatcag

SEQ ID NO: 1425622 - DNA, 15 bp, Homo sapiens
gtaaaagggaaatca

SEQ ID NO: 1425623 - DNA, 15 bp, Homo sapiens
agtaaaagggaaatc

SEQ ID NO: 1425624 - DNA, 15 bp, Homo sapiens
tagtaaaagggaaat

SEQ ID NO: 1425625 - DNA, 15 bp, Homo sapiens
gtagtaaaagggaaa

SEQ ID NO: 1425626 - DNA, 15 bp, Homo sapiens
tgtagtaaaagggaa

SEQ ID NO: 1425627 - DNA, 15 bp, Homo sapiens
atgtagtaaaaggga

SEQ ID NO: 1425628 - DNA, 15 bp, Homo sapiens
tatgtagtaaaaggg

SEQ ID NO: 1425629 - DNA, 15 bp, Homo sapiens
gtatgtagtaaaagg

SEQ ID NO: 1425630 - DNA, 15 bp, Homo sapiens
ggtatgtagtaaaag

SEQ ID NO: 1425631 - DNA, 15 bp, Homo sapiens
aggtatgtagtaaaa

SEQ ID NO: 1425632 - DNA, 15 bp, Homo sapiens
caggtatgtagtaaa

SEQ ID NO: 1425633 - DNA, 15 bp, Homo sapiens
acaggtatgtagtaa

SEQ ID NO: 1425634 - DNA, 15 bp, Homo sapiens
cacaggtatgtagta

SEQ ID NO: 1425635 - DNA, 15 bp, Homo sapiens
acacaggtatgtagt

SEQ ID NO: 1425636 - DNA, 15 bp, Homo sapiens
tacacaggtatgtag

SEQ ID NO: 1425637 - DNA, 15 bp, Homo sapiens
atacacaggtatgta

SEQ ID NO: 1425638 - DNA, 15 bp, Homo sapiens
tatacacaggtatgt

SEQ ID NO: 1425639 - DNA, 15 bp, Homo sapiens
atatacacaggtatg

SEQ ID NO: 1425640 - DNA, 15 bp, Homo sapiens
gatatacacaggtat

SEQ ID NO: 1425641 - DNA, 15 bp, Homo sapiens
agatatacacaggta

SEQ ID NO: 1425642 - DNA, 15 bp, Homo sapiens
gagatatacacaggt

SEQ ID NO: 1425643 - DNA, 15 bp, Homo sapiens
agagatatacacagg

SEQ ID NO: 1425644 - DNA, 15 bp, Homo sapiens
gagagatatacacag

SEQ ID NO: 1425645 - DNA, 15 bp, Homo sapiens
ggagagatatacaca

SEQ ID NO: 1425646 - DNA, 15 bp, Homo sapiens
gggagagatatacac

SEQ ID NO: 1425647 - DNA, 15 bp, Homo sapiens
tgggagagatataca

SEQ ID NO: 1425648 - DNA, 15 bp, Homo sapiens
atgggagagatatac

SEQ ID NO: 1425649 - DNA, 15 bp, Homo sapiens
tatgggagagatata

SEQ ID NO: 1425650 - DNA, 15 bp, Homo sapiens
gtatgggagagatat

SEQ ID NO: 1425651 - DNA, 15 bp, Homo sapiens
tgtatgggagagata

SEQ ID NO: 1425652 - DNA, 15 bp, Homo sapiens
ctgtatgggagagat

SEQ ID NO: 1425653 - DNA, 15 bp, Homo sapiens
tctgtatgggagaga

SEQ ID NO: 1425654 - DNA, 15 bp, Homo sapiens
atctgtatgggagag

SEQ ID NO: 1425655 - DNA, 15 bp, Homo sapiens
aatctgtatgggaga

SEQ ID NO: 1425656 - DNA, 15 bp, Homo sapiens
gaatctgtatgggag

SEQ ID NO: 1425657 - DNA, 15 bp, Homo sapiens
tgaatctgtatggga

SEQ ID NO: 1425658 - DNA, 15 bp, Homo sapiens
gtgaatctgtatggg

SEQ ID NO: 1425659 - DNA, 15 bp, Homo sapiens
agtgaatctgtatgg

SEQ ID NO: 1425660 - DNA, 15 bp, Homo sapiens
cagtgaatctgtatg

SEQ ID NO: 1425661 - DNA, 15 bp, Homo sapiens
gcagtgaatctgtat

SEQ ID NO: 1425662 - DNA, 15 bp, Homo sapiens
tgcagtgaatctgta

SEQ ID NO: 1425663 - DNA, 15 bp, Homo sapiens
ctgcagtgaatctgt

SEQ ID NO: 1425664 - DNA, 15 bp, Homo sapiens
actgcagtgaatctg

SEQ ID NO: 1425665 - DNA, 15 bp, Homo sapiens
aactgcagtgaatct

SEQ ID NO: 1425666 - DNA, 15 bp, Homo sapiens
taactgcagtgaatc

SEQ ID NO: 1425667 - DNA, 15 bp, Homo sapiens
ttaactgcagtgaat

SEQ ID NO: 1425668 - DNA, 15 bp, Homo sapiens
gttaactgcagtgaa

SEQ ID NO: 1425669 - DNA, 15 bp, Homo sapiens
tgttaactgcagtga

SEQ ID NO: 1425670 - DNA, 15 bp, Homo sapiens
atgttaactgcagtg

SEQ ID NO: 1425671 - DNA, 15 bp, Homo sapiens
catgttaactgcagt

SEQ ID NO: 1425672 - DNA, 15 bp, Homo sapiens
tcatgttaactgcag

SEQ ID NO: 1425673 - DNA, 15 bp, Homo sapiens
ttcatgttaactgca

SEQ ID NO: 1425674 - DNA, 15 bp, Homo sapiens
tttcatgttaactgc

SEQ ID NO: 1425675 - DNA, 15 bp, Homo sapiens
ctttcatgttaactg

SEQ ID NO: 1425676 - DNA, 15 bp, Homo sapiens
tctttcatgttaact

SEQ ID NO: 1425677 - DNA, 15 bp, Homo sapiens
gtctttcatgttaac

SEQ ID NO: 1425678 - DNA, 15 bp, Homo sapiens
agtctttcatgttaa

SEQ ID NO: 1425679 - DNA, 15 bp, Homo sapiens
gagtctttcatgtta

SEQ ID NO: 1425680 - DNA, 15 bp, Homo sapiens
tgagtctttcatgtt

SEQ ID NO: 1425681 - DNA, 15 bp, Homo sapiens
ttgagtctttcatgt

SEQ ID NO: 1425682 - DNA, 15 bp, Homo sapiens
gttgagtctttcatg

SEQ ID NO: 1425683 - DNA, 15 bp, Homo sapiens
tgttgagtctttcat

SEQ ID NO: 1425684 - DNA, 15 bp, Homo sapiens
ctgttgagtctttca

SEQ ID NO: 1425685 - DNA, 15 bp, Homo sapiens
actgttgagtctttc

SEQ ID NO: 1425686 - DNA, 15 bp, Homo sapiens
aactgttgagtcttt

SEQ ID NO: 1425687 - DNA, 15 bp, Homo sapiens
caactgttgagtctt

SEQ ID NO: 1425688 - DNA, 15 bp, Homo sapiens
ccaactgttgagtct

SEQ ID NO: 1425689 - DNA, 15 bp, Homo sapiens
accaactgttgagtc

SEQ ID NO: 1425690 - DNA, 15 bp, Homo sapiens
caccaactgttgagt

SEQ ID NO: 1425691 - DNA, 15 bp, Homo sapiens
tcaccaactgttgag

SEQ ID NO: 1425692 - DNA, 15 bp, Homo sapiens
ctcaccaactgttga

SEQ ID NO: 1425693 - DNA, 15 bp, Homo sapiens
tctcaccaactgttg

SEQ ID NO: 1425694 - DNA, 15 bp, Homo sapiens
atctcaccaactgtt

SEQ ID NO: 1425695 - DNA, 15 bp, Homo sapiens
aatctcaccaactgt

SEQ ID NO: 1425696 - DNA, 15 bp, Homo sapiens
aaatctcaccaactg

SEQ ID NO: 1425697 - DNA, 15 bp, Homo sapiens
aaaatctcaccaact

SEQ ID NO: 1425698 - DNA, 15 bp, Homo sapiens
taaaatctcaccaac

SEQ ID NO: 1425699 - DNA, 15 bp, Homo sapiens
ctaaaatctcaccaa

SEQ ID NO: 1425700 - DNA, 15 bp, Homo sapiens
cctaaaatctcacca

SEQ ID NO: 1425701 - DNA, 15 bp, Homo sapiens
tcctaaaatctcacc

SEQ ID NO: 1425702 - DNA, 15 bp, Homo sapiens
ttcctaaaatctcac

SEQ ID NO: 1425703 - DNA, 15 bp, Homo sapiens
gttcctaaaatctca

SEQ ID NO: 1425704 - DNA, 15 bp, Homo sapiens
agttcctaaaatctc

SEQ ID NO: 1425705 - DNA, 15 bp, Homo sapiens
gagttcctaaaatct

SEQ ID NO: 1425706 - DNA, 15 bp, Homo sapiens
agagttcctaaaatc

SEQ ID NO: 1425707 - DNA, 15 bp, Homo sapiens
tagagttcctaaaat

SEQ ID NO: 1425708 - DNA, 15 bp, Homo sapiens
ctagagttcctaaaa

SEQ ID NO: 1425709 - DNA, 15 bp, Homo sapiens
tctagagttcctaaa

SEQ ID NO: 1425710 - DNA, 15 bp, Homo sapiens
ctctagagttcctaa

SEQ ID NO: 1425711 - DNA, 15 bp, Homo sapiens
gctctagagttccta

SEQ ID NO: 1425712 - DNA, 15 bp, Homo sapiens
tgctctagagttcct

SEQ ID NO: 1425713 - DNA, 15 bp, Homo sapiens
gtgctctagagttcc

SEQ ID NO: 1425714 - DNA, 15 bp, Homo sapiens
agtgctctagagttc

SEQ ID NO: 1425715 - DNA, 15 bp, Homo sapiens
tagtgctctagagtt

SEQ ID NO: 1425716 - DNA, 15 bp, Homo sapiens
gtagtgctctagagt

SEQ ID NO: 1425717 - DNA, 15 bp, Homo sapiens
ggtagtgctctagag

SEQ ID NO: 1425718 - DNA, 15 bp, Homo sapiens
tggtagtgctctaga

SEQ ID NO: 1425719 - DNA, 15 bp, Homo sapiens
ctggtagtgctctag

SEQ ID NO: 1425720 - DNA, 15 bp, Homo sapiens
actggtagtgctcta

SEQ ID NO: 1425721 - DNA, 15 bp, Homo sapiens
tactggtagtgctct

SEQ ID NO: 1425722 - DNA, 15 bp, Homo sapiens
atactggtagtgctc

SEQ ID NO: 1425723 - DNA, 15 bp, Homo sapiens
catactggtagtgct

SEQ ID NO: 1425724 - DNA, 15 bp, Homo sapiens
ccatactggtagtgc

SEQ ID NO: 1425725 - DNA, 15 bp, Homo sapiens
accatactggtagtg

SEQ ID NO: 1425726 - DNA, 15 bp, Homo sapiens
taccatactggtagt

SEQ ID NO: 1425727 - DNA, 15 bp, Homo sapiens
ataccatactggtag

SEQ ID NO: 1425728 - DNA, 15 bp, Homo sapiens
aataccatactggta

SEQ ID NO: 1425729 - DNA, 15 bp, Homo sapiens
taataccatactggt

SEQ ID NO: 1425730 - DNA, 15 bp, Homo sapiens
ttaataccatactgg

SEQ ID NO: 1425731 - DNA, 15 bp, Homo sapiens
tttaataccatactg

SEQ ID NO: 1425732 - DNA, 15 bp, Homo sapiens
ttttaataccatact

SEQ ID NO: 1425733 - DNA, 15 bp, Homo sapiens
tttttaataccatac

SEQ ID NO: 1425734 - DNA, 15 bp, Homo sapiens
atttttaataccata

SEQ ID NO: 1425735 - DNA, 15 bp, Homo sapiens
aatttttaataccat

SEQ ID NO: 1425736 - DNA, 15 bp, Homo sapiens
aaatttttaatacca

SEQ ID NO: 1425737 - DNA, 15 bp, Homo sapiens
caaatttttaatacc

SEQ ID NO: 1425738 - DNA, 15 bp, Homo sapiens
gcaaatttttaatac

SEQ ID NO: 1425739 - DNA, 15 bp, Homo sapiens
agcaaatttttaata

SEQ ID NO: 1425740 - DNA, 15 bp, Homo sapiens
tagcaaatttttaat

SEQ ID NO: 1425741 - DNA, 15 bp, Homo sapiens
ttagcaaatttttaa

SEQ ID NO: 1425742 - DNA, 15 bp, Homo sapiens
attagcaaattttta

SEQ ID NO: 1425743 - DNA, 15 bp, Homo sapiens
gattagcaaattttt

SEQ ID NO: 1425744 - DNA, 15 bp, Homo sapiens
agattagcaaatttt

SEQ ID NO: 1425745 - DNA, 15 bp, Homo sapiens
tagattagcaaattt

SEQ ID NO: 1425746 - DNA, 15 bp, Homo sapiens
atagattagcaaatt

SEQ ID NO: 1425747 - DNA, 15 bp, Homo sapiens
gatagattagcaaat

SEQ ID NO: 1425748 - DNA, 15 bp, Homo sapiens
ggatagattagcaaa

SEQ ID NO: 1425749 - DNA, 15 bp, Homo sapiens
tggatagattagcaa

SEQ ID NO: 1425750 - DNA, 15 bp, Homo sapiens
ctggatagattagca

SEQ ID NO: 1425751 - DNA, 15 bp, Homo sapiens
tctggatagattagc

SEQ ID NO: 1425752 - DNA, 15 bp, Homo sapiens
ttctggatagattag

SEQ ID NO: 1425753 - DNA, 15 bp, Homo sapiens
attctggatagatta

SEQ ID NO: 1425754 - DNA, 15 bp, Homo sapiens
cattctggatagatt

SEQ ID NO: 1425755 - DNA, 15 bp, Homo sapiens
acattctggatagat

SEQ ID NO: 1425756 - DNA, 15 bp, Homo sapiens
tacattctggataga

SEQ ID NO: 1425757 - DNA, 15 bp, Homo sapiens
ttacattctggatag

SEQ ID NO: 1425758 - DNA, 15 bp, Homo sapiens
tttacattctggata

SEQ ID NO: 1425759 - DNA, 15 bp, Homo sapiens
atttacattctggat

SEQ ID NO: 1425760 - DNA, 15 bp, Homo sapiens
aatttacattctgga

SEQ ID NO: 1425761 - DNA, 15 bp, Homo sapiens
aaatttacattctgg

SEQ ID NO: 1425762 - DNA, 15 bp, Homo sapiens
aaaatttacattctg

SEQ ID NO: 1425763 - DNA, 15 bp, Homo sapiens
taaaatttacattct

SEQ ID NO: 1425764 - DNA, 15 bp, Homo sapiens
ttaaaatttacattc

SEQ ID NO: 1425765 - DNA, 15 bp, Homo sapiens
ccattaaaatttaca

SEQ ID NO: 1425766 - DNA, 15 bp, Homo sapiens
tccattaaaatttac

SEQ ID NO: 1425767 - DNA, 15 bp, Homo sapiens
ttccattaaaattta

SEQ ID NO: 1425768 - DNA, 15 bp, Homo sapiens
tttccattaaaattt

SEQ ID NO: 1425769 - DNA, 15 bp, Homo sapiens
ttttccattaaaatt

SEQ ID NO: 1425770 - DNA, 15 bp, Homo sapiens
tttttccattaaaat

SEQ ID NO: 1425771 - DNA, 15 bp, Homo sapiens
ttttttccattaaaa

SEQ ID NO: 1425772 - DNA, 15 bp, Homo sapiens
attttttccattaaa

SEQ ID NO: 1425773 - DNA, 15 bp, Homo sapiens
cattttttccattaa

SEQ ID NO: 1425774 - DNA, 15 bp, Homo sapiens
acattttttccatta

SEQ ID NO: 1425775 - DNA, 15 bp, Homo sapiens
cacattttttccatt

SEQ ID NO: 1425776 - DNA, 15 bp, Homo sapiens
tcacattttttccat

SEQ ID NO: 1425777 - DNA, 15 bp, Homo sapiens
ttcacattttttcca

SEQ ID NO: 1425778 - DNA, 15 bp, Homo sapiens
attcacattttttcc

SEQ ID NO: 1425779 - DNA, 15 bp, Homo sapiens
aattcacattttttc

SEQ ID NO: 1425780 - DNA, 15 bp, Homo sapiens
caattcacatttttt

SEQ ID NO: 1425781 - DNA, 15 bp, Homo sapiens
tcaattcacattttt

SEQ ID NO: 1425782 - DNA, 15 bp, Homo sapiens
atcaattcacatttt

SEQ ID NO: 1425783 - DNA, 15 bp, Homo sapiens
aatcaattcacattt

SEQ ID NO: 1425784 - DNA, 15 bp, Homo sapiens
caatcaattcacatt

SEQ ID NO: 1425785 - DNA, 15 bp, Homo sapiens
acaatcaattcacat

SEQ ID NO: 1425786 - DNA, 15 bp, Homo sapiens
gacaatcaattcaca

SEQ ID NO: 1425787 - DNA, 15 bp, Homo sapiens
agacaatcaattcac

SEQ ID NO: 1425788 - DNA, 15 bp, Homo sapiens
cagacaatcaattca

SEQ ID NO: 1425789 - DNA, 15 bp, Homo sapiens
acagacaatcaattc

SEQ ID NO: 1425790 - DNA, 15 bp, Homo sapiens
cacagacaatcaatt

SEQ ID NO: 1425791 - DNA, 15 bp, Homo sapiens
acacagacaatcaat

SEQ ID NO: 1425792 - DNA, 15 bp, Homo sapiens
aacacagacaatcaa

SEQ ID NO: 1425793 - DNA, 15 bp, Homo sapiens
aaacacagacaatca

SEQ ID NO: 1425794 - DNA, 15 bp, Homo sapiens
aaaacacagacaatc

SEQ ID NO: 1425795 - DNA, 15 bp, Homo sapiens
caaaacacagacaat

SEQ ID NO: 1425796 - DNA, 15 bp, Homo sapiens
gcaaaacacagacaa

SEQ ID NO: 1425797 - DNA, 15 bp, Homo sapiens
agcaaaacacagaca

SEQ ID NO: 1425798 - DNA, 15 bp, Homo sapiens
aagcaaaacacagac

SEQ ID NO: 1425799 - DNA, 15 bp, Homo sapiens
aaagcaaaacacaga

SEQ ID NO: 1425800 - DNA, 15 bp, Homo sapiens
gaaagcaaaacacag

SEQ ID NO: 1425801 - DNA, 15 bp, Homo sapiens
ggaaagcaaaacaca

SEQ ID NO: 1425802 - DNA, 15 bp, Homo sapiens
aggaaagcaaaacac

SEQ ID NO: 1425803 - DNA, 15 bp, Homo sapiens
gaggaaagcaaaaca

SEQ ID NO: 1425804 - DNA, 15 bp, Homo sapiens
tgaggaaagcaaaac

SEQ ID NO: 1425805 - DNA, 15 bp, Homo sapiens
ctgaggaaagcaaaa

SEQ ID NO: 1425806 - DNA, 15 bp, Homo sapiens
actgaggaaagcaaa

SEQ ID NO: 1425807 - DNA, 15 bp, Homo sapiens
aactgaggaaagcaa

SEQ ID NO: 1425808 - DNA, 15 bp, Homo sapiens
caactgaggaaagca

SEQ ID NO: 1425809 - DNA, 15 bp, Homo sapiens
gcaactgaggaaagc

SEQ ID NO: 1425810 - DNA, 15 bp, Homo sapiens
tgcaactgaggaaag

SEQ ID NO: 1425811 - DNA, 15 bp, Homo sapiens
ttgcaactgaggaaa

SEQ ID NO: 1425812 - DNA, 15 bp, Homo sapiens
tttgcaactgaggaa

SEQ ID NO: 1425813 - DNA, 15 bp, Homo sapiens
gtttgcaactgagga

SEQ ID NO: 1425814 - DNA, 15 bp, Homo sapiens
tgtttgcaactgagg

SEQ ID NO: 1425815 - DNA, 15 bp, Homo sapiens
atgtttgcaactgag

SEQ ID NO: 1425816 - DNA, 15 bp, Homo sapiens
tatgtttgcaactga

SEQ ID NO: 1425817 - DNA, 15 bp, Homo sapiens
ttatgtttgcaactg

SEQ ID NO: 1425818 - DNA, 15 bp, Homo sapiens
tttatgtttgcaact

SEQ ID NO: 1425819 - DNA, 15 bp, Homo sapiens
ctttatgtttgcaac

SEQ ID NO: 1425820 - DNA, 15 bp, Homo sapiens
cctttatgtttgcaa

SEQ ID NO: 1425821 - DNA, 15 bp, Homo sapiens
gcctttatgtttgca

SEQ ID NO: 1425822 - DNA, 15 bp, Homo sapiens
agcctttatgtttgc

SEQ ID NO: 1425823 - DNA, 15 bp, Homo sapiens
tagcctttatgtttg

SEQ ID NO: 1425824 - DNA, 15 bp, Homo sapiens
atagcctttatgttt

SEQ ID NO: 1425825 - DNA, 15 bp, Homo sapiens
tatagcctttatgtt

SEQ ID NO: 1425826 - DNA, 15 bp, Homo sapiens
gtatagcctttatgt

SEQ ID NO: 1425827 - DNA, 15 bp, Homo sapiens
tgtatagcctttatg

SEQ ID NO: 1425828 - DNA, 15 bp, Homo sapiens
gtgtatagcctttat

SEQ ID NO: 1425829 - DNA, 15 bp, Homo sapiens
tgtgtatagccttta

SEQ ID NO: 1425830 - DNA, 15 bp, Homo sapiens
ttgtgtatagccttt

SEQ ID NO: 1425831 - DNA, 15 bp, Homo sapiens
tttgtgtatagcctt

SEQ ID NO: 1425832 - DNA, 15 bp, Homo sapiens
gtttgtgtatagcct

SEQ ID NO: 1425833 - DNA, 15 bp, Homo sapiens
tgtttgtgtatagcc

SEQ ID NO: 1425834 - DNA, 15 bp, Homo sapiens
atgtttgtgtatagc

SEQ ID NO: 1425835 - DNA, 15 bp, Homo sapiens
tatgtttgtgtatag

SEQ ID NO: 1425836 - DNA, 15 bp, Homo sapiens
ttatgtttgtgtata

SEQ ID NO: 1425837 - DNA, 15 bp, Homo sapiens
tttatgtttgtgtat

SEQ ID NO: 1425838 - DNA, 15 bp, Homo sapiens
atttatgtttgtgta

SEQ ID NO: 1425839 - DNA, 15 bp, Homo sapiens
aatttatgtttgtgt

SEQ ID NO: 1425840 - DNA, 15 bp, Homo sapiens
aaatttatgtttgtg

SEQ ID NO: 1425841 - DNA, 15 bp, Homo sapiens
caaatttatgtttgt

SEQ ID NO: 1425842 - DNA, 15 bp, Homo sapiens
tcaaatttatgtttg

SEQ ID NO: 1425843 - DNA, 15 bp, Homo sapiens
ctcaaatttatgttt

SEQ ID NO: 1425844 - DNA, 15 bp, Homo sapiens
gctcaaatttatgtt

SEQ ID NO: 1425845 - DNA, 15 bp, Homo sapiens
agctcaaatttatgt

SEQ ID NO: 1425846 - DNA, 15 bp, Homo sapiens
aagctcaaatttatg

SEQ ID NO: 1425847 - DNA, 15 bp, Homo sapiens
aaagctcaaatttat

SEQ ID NO: 1425848 - DNA, 15 bp, Homo sapiens
aaaagctcaaattta

SEQ ID NO: 1425849 - DNA, 15 bp, Homo sapiens
taaaagctcaaattt

SEQ ID NO: 1425850 - DNA, 15 bp, Homo sapiens
ttaaaagctcaaatt

SEQ ID NO: 1425851 - DNA, 15 bp, Homo sapiens
tttaaaagctcaaat

SEQ ID NO: 1425852 - DNA, 15 bp, Homo sapiens
ttttaaaagctcaaa

SEQ ID NO: 1425853 - DNA, 15 bp, Homo sapiens
tttttaaaagctcaa

SEQ ID NO: 1425854 - DNA, 15 bp, Homo sapiens
ttttttaaaagctca

SEQ ID NO: 1425855 - DNA, 15 bp, Homo sapiens
attttttaaaagctc

SEQ ID NO: 1425856 - DNA, 15 bp, Homo sapiens
tattttttaaaagct

SEQ ID NO: 1425857 - DNA, 15 bp, Homo sapiens
atattttttaaaagc

SEQ ID NO: 1425858 - DNA, 15 bp, Homo sapiens
aatattttttaaaag

SEQ ID NO: 1425859 - DNA, 15 bp, Homo sapiens
aaatattttttaaaa

SEQ ID NO: 1425860 - DNA, 15 bp, Homo sapiens
aaaatattttttaaa

SEQ ID NO: 1425861 - DNA, 15 bp, Homo sapiens
taaaatattttttaa

SEQ ID NO: 1425862 - DNA, 15 bp, Homo sapiens
ttaaaatatttttta

SEQ ID NO: 1425863 - DNA, 15 bp, Homo sapiens
tttaaaatatttttt

SEQ ID NO: 1425864 - DNA, 15 bp, Homo sapiens
atttaaaatattttt

SEQ ID NO: 1425865 - DNA, 15 bp, Homo sapiens
tatttaaaatatttt

SEQ ID NO: 1425866 - DNA, 15 bp, Homo sapiens
ttatttaaaatattt

SEQ ID NO: 1425867 - DNA, 15 bp, Homo sapiens
gttatttaaaatatt

SEQ ID NO: 1425868 - DNA, 15 bp, Homo sapiens
agttatttaaaatat

SEQ ID NO: 1425869 - DNA, 15 bp, Homo sapiens
tagttatttaaaata

SEQ ID NO: 1425870 - DNA, 15 bp, Homo sapiens
gtagttatttaaaat

SEQ ID NO: 1425871 - DNA, 15 bp, Homo sapiens
tgtagttatttaaaa

SEQ ID NO: 1425872 - DNA, 15 bp, Homo sapiens
ttgtagttatttaaa

SEQ ID NO: 1425873 - DNA, 15 bp, Homo sapiens
attgtagttatttaa

SEQ ID NO: 1425874 - DNA, 15 bp, Homo sapiens
aattgtagttattta

SEQ ID NO: 1425875 - DNA, 15 bp, Homo sapiens
taattgtagttattt

SEQ ID NO: 1425876 - DNA, 15 bp, Homo sapiens
gtaattgtagttatt

SEQ ID NO: 1425877 - DNA, 15 bp, Homo sapiens
tgtaattgtagttat

SEQ ID NO: 1425878 - DNA, 15 bp, Homo sapiens
ttgtaattgtagtta

SEQ ID NO: 1425879 - DNA, 15 bp, Homo sapiens
cttgtaattgtagtt

SEQ ID NO: 1425880 - DNA, 15 bp, Homo sapiens
gcttgtaattgtagt

SEQ ID NO: 1425881 - DNA, 15 bp, Homo sapiens
tgcttgtaattgtag

SEQ ID NO: 1425882 - DNA, 15 bp, Homo sapiens
ttgcttgtaattgta

SEQ ID NO: 1425883 - DNA, 15 bp, Homo sapiens
tttgcttgtaattgt

SEQ ID NO: 1425884 - DNA, 15 bp, Homo sapiens
ttttgcttgtaattg

SEQ ID NO: 1425885 - DNA, 15 bp, Homo sapiens
attttgcttgtaatt

SEQ ID NO: 1425886 - DNA, 15 bp, Homo sapiens
cattttgcttgtaat

SEQ ID NO: 1425887 - DNA, 15 bp, Homo sapiens
gcattttgcttgtaa

SEQ ID NO: 1425888 - DNA, 15 bp, Homo sapiens
tgcattttgcttgta

SEQ ID NO: 1425889 - DNA, 15 bp, Homo sapiens
ttgcattttgcttgt

SEQ ID NO: 1425890 - DNA, 15 bp, Homo sapiens
tttgcattttgcttg

SEQ ID NO: 1425891 - DNA, 15 bp, Homo sapiens
ctttgcattttgctt

SEQ ID NO: 1425892 - DNA, 15 bp, Homo sapiens
actttgcattttgct

SEQ ID NO: 1425893 - DNA, 15 bp, Homo sapiens
gactttgcattttgc

SEQ ID NO: 1425894 - DNA, 15 bp, Homo sapiens
agactttgcattttg

SEQ ID NO: 1425895 - DNA, 15 bp, Homo sapiens
cagactttgcatttt

SEQ ID NO: 1425896 - DNA, 15 bp, Homo sapiens
ccagactttgcattt

SEQ ID NO: 1425897 - DNA, 15 bp, Homo sapiens
cccagactttgcatt

SEQ ID NO: 1425898 - DNA, 15 bp, Homo sapiens
tcccagactttgcat

SEQ ID NO: 1425899 - DNA, 15 bp, Homo sapiens
ctcccagactttgca

SEQ ID NO: 1425900 - DNA, 15 bp, Homo sapiens
gctcccagactttgc

SEQ ID NO: 1425901 - DNA, 15 bp, Homo sapiens
agctcccagactttg

SEQ ID NO: 1425902 - DNA, 15 bp, Homo sapiens
aagctcccagacttt

SEQ ID NO: 1425903 - DNA, 15 bp, Homo sapiens
gaagctcccagactt

SEQ ID NO: 1425904 - DNA, 15 bp, Homo sapiens
agaagctcccagact

SEQ ID NO: 1425905 - DNA, 15 bp, Homo sapiens
aagaagctcccagac

SEQ ID NO: 1425906 - DNA, 15 bp, Homo sapiens
caagaagctcccaga

SEQ ID NO: 1425907 - DNA, 15 bp, Homo sapiens
ccaagaagctcccag

SEQ ID NO: 1425908 - DNA, 15 bp, Homo sapiens
accaagaagctccca

SEQ ID NO: 1425909 - DNA, 15 bp, Homo sapiens
aaccaagaagctccc

SEQ ID NO: 1425910 - DNA, 15 bp, Homo sapiens
taaccaagaagctcc

SEQ ID NO: 1425911 - DNA, 15 bp, Homo sapiens
ttaaccaagaagctc

SEQ ID NO: 1425912 - DNA, 15 bp, Homo sapiens
attaaccaagaagct

SEQ ID NO: 1425913 - DNA, 15 bp, Homo sapiens
cattaaccaagaagc

SEQ ID NO: 1425914 - DNA, 15 bp, Homo sapiens
acattaaccaagaag

SEQ ID NO: 1425915 - DNA, 15 bp, Homo sapiens
aacattaaccaagaa

SEQ ID NO: 1425916 - DNA, 15 bp, Homo sapiens
caacattaaccaaga

SEQ ID NO: 1425917 - DNA, 15 bp, Homo sapiens
tcaacattaaccaag

SEQ ID NO: 1425918 - DNA, 15 bp, Homo sapiens
ttcaacattaaccaa

SEQ ID NO: 1425919 - DNA, 15 bp, Homo sapiens
gttcaacattaacca

SEQ ID NO: 1425920 - DNA, 15 bp, Homo sapiens
agttcaacattaacc

SEQ ID NO: 1425921 - DNA, 15 bp, Homo sapiens
tagttcaacattaac

SEQ ID NO: 1425922 - DNA, 15 bp, Homo sapiens
ctagttcaacattaa

SEQ ID NO: 1425923 - DNA, 15 bp, Homo sapiens
cctagttcaacatta

SEQ ID NO: 1425924 - DNA, 15 bp, Homo sapiens
gcctagttcaacatt

SEQ ID NO: 1425925 - DNA, 15 bp, Homo sapiens
tgcctagttcaacat

SEQ ID NO: 1425926 - DNA, 15 bp, Homo sapiens
ttgcctagttcaaca

SEQ ID NO: 1425927 - DNA, 15 bp, Homo sapiens
attgcctagttcaac

SEQ ID NO: 1425928 - DNA, 15 bp, Homo sapiens
cattgcctagttcaa

SEQ ID NO: 1425929 - DNA, 15 bp, Homo sapiens
ccattgcctagttca

SEQ ID NO: 1425930 - DNA, 15 bp, Homo sapiens
accattgcctagttc

SEQ ID NO: 1425931 - DNA, 15 bp, Homo sapiens
aaccattgcctagtt

SEQ ID NO: 1425932 - DNA, 15 bp, Homo sapiens
taaccattgcctagt

SEQ ID NO: 1425933 - DNA, 15 bp, Homo sapiens
ttaaccattgcctag

SEQ ID NO: 1425934 - DNA, 15 bp, Homo sapiens
tttaaccattgccta

SEQ ID NO: 1425935 - DNA, 15 bp, Homo sapiens
ttttaaccattgcct

SEQ ID NO: 1425936 - DNA, 15 bp, Homo sapiens
attttaaccattgcc

SEQ ID NO: 1425937 - DNA, 15 bp, Homo sapiens
gattttaaccattgc

SEQ ID NO: 1425938 - DNA, 15 bp, Homo sapiens
ggattttaaccattg

SEQ ID NO: 1425939 - DNA, 15 bp, Homo sapiens
gggattttaaccatt

SEQ ID NO: 1425940 - DNA, 15 bp, Homo sapiens
agggattttaaccat

SEQ ID NO: 1425941 - DNA, 15 bp, Homo sapiens
aagggattttaacca

SEQ ID NO: 1425942 - DNA, 15 bp, Homo sapiens
gaagggattttaacc

SEQ ID NO: 1425943 - DNA, 15 bp, Homo sapiens
ggaagggattttaac

SEQ ID NO: 1425944 - DNA, 15 bp, Homo sapiens
aggaagggattttaa

SEQ ID NO: 1425945 - DNA, 15 bp, Homo sapiens
caggaagggatttta

SEQ ID NO: 1425946 - DNA, 15 bp, Homo sapiens
acaggaagggatttt

SEQ ID NO: 1425947 - DNA, 15 bp, Homo sapiens
aacaggaagggattt

SEQ ID NO: 1425948 - DNA, 15 bp, Homo sapiens
gaacaggaagggatt

SEQ ID NO: 1425949 - DNA, 15 bp, Homo sapiens
agaacaggaagggat

SEQ ID NO: 1425950 - DNA, 15 bp, Homo sapiens
tagaacaggaaggga

SEQ ID NO: 1425951 - DNA, 15 bp, Homo sapiens
ttagaacaggaaggg

SEQ ID NO: 1425952 - DNA, 15 bp, Homo sapiens
attagaacaggaagg

SEQ ID NO: 1425953 - DNA, 15 bp, Homo sapiens
aattagaacaggaag

SEQ ID NO: 1425954 - DNA, 15 bp, Homo sapiens
aaattagaacaggaa

SEQ ID NO: 1425955 - DNA, 15 bp, Homo sapiens
taaattagaacagga

SEQ ID NO: 1425956 - DNA, 15 bp, Homo sapiens
gtaaattagaacagg

SEQ ID NO: 1425957 - DNA, 15 bp, Homo sapiens
agtaaattagaacag

SEQ ID NO: 1425958 - DNA, 15 bp, Homo sapiens
cagtaaattagaaca

SEQ ID NO: 1425959 - DNA, 15 bp, Homo sapiens
acagtaaattagaac

SEQ ID NO: 1425960 - DNA, 15 bp, Homo sapiens
tacagtaaattagaa

SEQ ID NO: 1425961 - DNA, 15 bp, Homo sapiens
ttacagtaaattaga

SEQ ID NO: 1425962 - DNA, 15 bp, Homo sapiens
attacagtaaattag

SEQ ID NO: 1425963 - DNA, 15 bp, Homo sapiens
aattacagtaaatta

SEQ ID NO: 1425964 - DNA, 15 bp, Homo sapiens
ctaattacagtaaat

SEQ ID NO: 1425965 - DNA, 15 bp, Homo sapiens
tctaattacagtaaa

SEQ ID NO: 1425966 - DNA, 15 bp, Homo sapiens
ctctaattacagtaa

SEQ ID NO: 1425967 - DNA, 15 bp, Homo sapiens
tctctaattacagta

SEQ ID NO: 1425968 - DNA, 15 bp, Homo sapiens
atctctaattacagt

SEQ ID NO: 1425969 - DNA, 15 bp, Homo sapiens
tatctctaattacag

SEQ ID NO: 1425970 - DNA, 15 bp, Homo sapiens
ctatctctaattaca

SEQ ID NO: 1425971 - DNA, 15 bp, Homo sapiens
actatctctaattac

SEQ ID NO: 1425972 - DNA, 15 bp, Homo sapiens
tactatctctaatta

SEQ ID NO: 1425973 - DNA, 15 bp, Homo sapiens
ttactatctctaatt

SEQ ID NO: 1425974 - DNA, 15 bp, Homo sapiens
cttactatctctaat

SEQ ID NO: 1425975 - DNA, 15 bp, Homo sapiens
acttactatctctaa

SEQ ID NO: 1425976 - DNA, 15 bp, Homo sapiens
tacttactatctcta

SEQ ID NO: 1425977 - DNA, 15 bp, Homo sapiens
ctacttactatctct

SEQ ID NO: 1425978 - DNA, 15 bp, Homo sapiens
actacttactatctc

SEQ ID NO: 1425979 - DNA, 15 bp, Homo sapiens
cactacttactatct

SEQ ID NO: 1425980 - DNA, 15 bp, Homo sapiens
acactacttactatc

SEQ ID NO: 1425981 - DNA, 15 bp, Homo sapiens
aacactacttactat

SEQ ID NO: 1425982 - DNA, 15 bp, Homo sapiens
gaacactacttacta

SEQ ID NO: 1425983 - DNA, 15 bp, Homo sapiens
agaacactacttact

SEQ ID NO: 1425984 - DNA, 15 bp, Homo sapiens
aagaacactacttac

SEQ ID NO: 1425985 - DNA, 15 bp, Homo sapiens
taagaacactactta

SEQ ID NO: 1425986 - DNA, 15 bp, Homo sapiens
ctaagaacactactt

SEQ ID NO: 1425987 - DNA, 15 bp, Homo sapiens
actaagaacactact

SEQ ID NO: 1425988 - DNA, 15 bp, Homo sapiens
tactaagaacactac

SEQ ID NO: 1425989 - DNA, 15 bp, Homo sapiens
ttactaagaacacta

SEQ ID NO: 1425990 - DNA, 15 bp, Homo sapiens
attactaagaacact

SEQ ID NO: 1425991 - DNA, 15 bp, Homo sapiens
tattactaagaacac

SEQ ID NO: 1425992 - DNA, 15 bp, Homo sapiens
ttattactaagaaca

SEQ ID NO: 1425993 - DNA, 15 bp, Homo sapiens
attattactaagaac

SEQ ID NO: 1425994 - DNA, 15 bp, Homo sapiens
aattattactaagaa

SEQ ID NO: 1425995 - DNA, 15 bp, Homo sapiens
taattattactaaga

SEQ ID NO: 1425996 - DNA, 15 bp, Homo sapiens
ataattattactaag

SEQ ID NO: 1425997 - DNA, 15 bp, Homo sapiens
tataattattactaa

SEQ ID NO: 1425998 - DNA, 15 bp, Homo sapiens
atataattattacta

SEQ ID NO: 1425999 - DNA, 15 bp, Homo sapiens
catataattattact

SEQ ID NO: 1426000 - DNA, 15 bp, Homo sapiens
gcatataattattac

SEQ ID NO: 1426001 - DNA, 15 bp, Homo sapiens
agcatataattatta

SEQ ID NO: 1426002 - DNA, 15 bp, Homo sapiens
gagcatataattatt

SEQ ID NO: 1426003 - DNA, 15 bp, Homo sapiens
tgagcatataattat

SEQ ID NO: 1426004 - DNA, 15 bp, Homo sapiens
atgagcatataatta

SEQ ID NO: 1426005 - DNA, 15 bp, Homo sapiens
aatgagcatataatt

SEQ ID NO: 1426006 - DNA, 15 bp, Homo sapiens
aaatgagcatataat

SEQ ID NO: 1426007 - DNA, 15 bp, Homo sapiens
aaaatgagcatataa

SEQ ID NO: 1426008 - DNA, 15 bp, Homo sapiens
taaaatgagcatata

SEQ ID NO: 1426009 - DNA, 15 bp, Homo sapiens
ttaaaatgagcatat

SEQ ID NO: 1426010 - DNA, 15 bp, Homo sapiens
attaaaatgagcata

SEQ ID NO: 1426011 - DNA, 15 bp, Homo sapiens
tattaaaatgagcat

SEQ ID NO: 1426012 - DNA, 15 bp, Homo sapiens
ctattaaaatgagca

SEQ ID NO: 1426013 - DNA, 15 bp, Homo sapiens
cctattaaaatgagc

SEQ ID NO: 1426014 - DNA, 15 bp, Homo sapiens
acctattaaaatgag

SEQ ID NO: 1426015 - DNA, 15 bp, Homo sapiens
cacctattaaaatga

SEQ ID NO: 1426016 - DNA, 15 bp, Homo sapiens
tcacctattaaaatg

SEQ ID NO: 1426017 - DNA, 15 bp, Homo sapiens
ttcacctattaaaat

SEQ ID NO: 1426018 - DNA, 15 bp, Homo sapiens
cttcacctattaaaa

SEQ ID NO: 1426019 - DNA, 15 bp, Homo sapiens
acttcacctattaaa

SEQ ID NO: 1426020 - DNA, 15 bp, Homo sapiens
aacttcacctattaa

SEQ ID NO: 1426021 - DNA, 15 bp, Homo sapiens
aaacttcacctatta

SEQ ID NO: 1426022 - DNA, 15 bp, Homo sapiens
taaacttcacctatt

SEQ ID NO: 1426023 - DNA, 15 bp, Homo sapiens
ataaacttcacctat

SEQ ID NO: 1426024 - DNA, 15 bp, Homo sapiens
cataaacttcaccta

SEQ ID NO: 1426025 - DNA, 15 bp, Homo sapiens
ccataaacttcacct

SEQ ID NO: 1426026 - DNA, 15 bp, Homo sapiens
gccataaacttcacc

SEQ ID NO: 1426027 - DNA, 15 bp, Homo sapiens
ggccataaacttcac

SEQ ID NO: 1426028 - DNA, 15 bp, Homo sapiens
tggccataaacttca

SEQ ID NO: 1426029 - DNA, 15 bp, Homo sapiens
ctggccataaacttc

SEQ ID NO: 1426030 - DNA, 15 bp, Homo sapiens
cctggccataaactt

SEQ ID NO: 1426031 - DNA, 15 bp, Homo sapiens
tcctggccataaact

SEQ ID NO: 1426032 - DNA, 15 bp, Homo sapiens
ttcctggccataaac

SEQ ID NO: 1426033 - DNA, 15 bp, Homo sapiens
tttcctggccataaa

SEQ ID NO: 1426034 - DNA, 15 bp, Homo sapiens
ttttcctggccataa

SEQ ID NO: 1426035 - DNA, 15 bp, Homo sapiens
tttttcctggccata

SEQ ID NO: 1426036 - DNA, 15 bp, Homo sapiens
ttttttcctggccat

SEQ ID NO: 1426037 - DNA, 15 bp, Homo sapiens
gttttttcctggcca

SEQ ID NO: 1426038 - DNA, 15 bp, Homo sapiens
tgttttttcctggcc

SEQ ID NO: 1426039 - DNA, 15 bp, Homo sapiens
ttgttttttcctggc

SEQ ID NO: 1426040 - DNA, 15 bp, Homo sapiens
attgttttttcctgg

SEQ ID NO: 1426041 - DNA, 15 bp, Homo sapiens
gattgttttttcctg

SEQ ID NO: 1426042 - DNA, 15 bp, Homo sapiens
tgattgttttttcct

SEQ ID NO: 1426043 - DNA, 15 bp, Homo sapiens
ctgattgttttttcc

SEQ ID NO: 1426044 - DNA, 15 bp, Homo sapiens
tctgattgttttttc

SEQ ID NO: 1426045 - DNA, 15 bp, Homo sapiens
ttctgattgtttttt

SEQ ID NO: 1426046 - DNA, 15 bp, Homo sapiens
tttctgattgttttt

SEQ ID NO: 1426047 - DNA, 15 bp, Homo sapiens
ttttctgattgtttt

SEQ ID NO: 1426048 - DNA, 15 bp, Homo sapiens
tttttctgattgttt

SEQ ID NO: 1426049 - DNA, 15 bp, Homo sapiens
ttttttctgattgtt

SEQ ID NO: 1426050 - DNA, 15 bp, Homo sapiens
attttttctgattgt

SEQ ID NO: 1426051 - DNA, 15 bp, Homo sapiens
tattttttctgattg

SEQ ID NO: 1426052 - DNA, 15 bp, Homo sapiens
ctattttttctgatt

SEQ ID NO: 1426053 - DNA, 15 bp, Homo sapiens
actattttttctgat

SEQ ID NO: 1426054 - DNA, 15 bp, Homo sapiens
cactattttttctga

SEQ ID NO: 1426055 - DNA, 15 bp, Homo sapiens
tcactattttttctg

SEQ ID NO: 1426056 - DNA, 15 bp, Homo sapiens
gtcactattttttct

SEQ ID NO: 1426057 - DNA, 15 bp, Homo sapiens
ggtcactattttttc

SEQ ID NO: 1426058 - DNA, 15 bp, Homo sapiens
tggtcactatttttt

SEQ ID NO: 1426059 - DNA, 15 bp, Homo sapiens
gtggtcactattttt

SEQ ID NO: 1426060 - DNA, 15 bp, Homo sapiens
tgtggtcactatttt

SEQ ID NO: 1426061 - DNA, 15 bp, Homo sapiens
atgtggtcactattt

SEQ ID NO: 1426062 - DNA, 15 bp, Homo sapiens
tatgtggtcactatt

SEQ ID NO: 1426063 - DNA, 15 bp, Homo sapiens
ctatgtggtcactat

SEQ ID NO: 1426064 - DNA, 15 bp, Homo sapiens
cctatgtggtcacta

SEQ ID NO: 1426065 - DNA, 15 bp, Homo sapiens
tcctatgtggtcact

SEQ ID NO: 1426066 - DNA, 15 bp, Homo sapiens
ttcctatgtggtcac

SEQ ID NO: 1426067 - DNA, 15 bp, Homo sapiens
tttcctatgtggtca

SEQ ID NO: 1426068 - DNA, 15 bp, Homo sapiens
atttcctatgtggtc

SEQ ID NO: 1426069 - DNA, 15 bp, Homo sapiens
catttcctatgtggt

SEQ ID NO: 1426070 - DNA, 15 bp, Homo sapiens
acatttcctatgtgg

SEQ ID NO: 1426071 - DNA, 15 bp, Homo sapiens
tacatttcctatgtg

SEQ ID NO: 1426072 - DNA, 15 bp, Homo sapiens
atacatttcctatgt

SEQ ID NO: 1426073 - DNA, 15 bp, Homo sapiens
aatacatttcctatg

SEQ ID NO: 1426074 - DNA, 15 bp, Homo sapiens
aaatacatttcctat

SEQ ID NO: 1426075 - DNA, 15 bp, Homo sapiens
aaaatacatttccta

SEQ ID NO: 1426076 - DNA, 15 bp, Homo sapiens
caaaatacatttcct

SEQ ID NO: 1426077 - DNA, 15 bp, Homo sapiens
tcaaaatacatttcc

SEQ ID NO: 1426078 - DNA, 15 bp, Homo sapiens
ttcaaaatacatttc

SEQ ID NO: 1426079 - DNA, 15 bp, Homo sapiens
attcaaaatacattt

SEQ ID NO: 1426080 - DNA, 15 bp, Homo sapiens
aattcaaaatacatt

SEQ ID NO: 1426081 - DNA, 15 bp, Homo sapiens
aaattcaaaatacat

SEQ ID NO: 1426082 - DNA, 15 bp, Homo sapiens
taaattcaaaataca

SEQ ID NO: 1426083 - DNA, 15 bp, Homo sapiens
ttaaattcaaaatac

SEQ ID NO: 1426084 - DNA, 15 bp, Homo sapiens
tttaaattcaaaata

SEQ ID NO: 1426085 - DNA, 15 bp, Homo sapiens
ttttaaattcaaaat

SEQ ID NO: 1426086 - DNA, 15 bp, Homo sapiens
attttaaattcaaaa

SEQ ID NO: 1426087 - DNA, 15 bp, Homo sapiens
aattttaaattcaaa

SEQ ID NO: 1426088 - DNA, 15 bp, Homo sapiens
gaattttaaattcaa

SEQ ID NO: 1426089 - DNA, 15 bp, Homo sapiens
agaattttaaattca

SEQ ID NO: 1426090 - DNA, 15 bp, Homo sapiens
cagaattttaaattc

SEQ ID NO: 1426091 - DNA, 15 bp, Homo sapiens
tcagaattttaaatt

SEQ ID NO: 1426092 - DNA, 15 bp, Homo sapiens
ctcagaattttaaat

SEQ ID NO: 1426093 - DNA, 15 bp, Homo sapiens
cctcagaattttaaa

SEQ ID NO: 1426094 - DNA, 15 bp, Homo sapiens
gcctcagaattttaa

SEQ ID NO: 1426095 - DNA, 15 bp, Homo sapiens
agcctcagaatttta

SEQ ID NO: 1426096 - DNA, 15 bp, Homo sapiens
tagcctcagaatttt

SEQ ID NO: 1426097 - DNA, 15 bp, Homo sapiens
ttagcctcagaattt

SEQ ID NO: 1426098 - DNA, 15 bp, Homo sapiens
attagcctcagaatt

SEQ ID NO: 1426099 - DNA, 15 bp, Homo sapiens
tattagcctcagaat

SEQ ID NO: 1426100 - DNA, 15 bp, Homo sapiens
ttattagcctcagaa

SEQ ID NO: 1426101 - DNA, 15 bp, Homo sapiens
gttattagcctcaga

SEQ ID NO: 1426102 - DNA, 15 bp, Homo sapiens
tgttattagcctcag

SEQ ID NO: 1426103 - DNA, 15 bp, Homo sapiens
ttgttattagcctca

SEQ ID NO: 1426104 - DNA, 15 bp, Homo sapiens
tttgttattagcctc

SEQ ID NO: 1426105 - DNA, 15 bp, Homo sapiens
atttgttattagcct

SEQ ID NO: 1426106 - DNA, 15 bp, Homo sapiens
tatttgttattagcc

SEQ ID NO: 1426107 - DNA, 15 bp, Homo sapiens
atatttgttattagc

SEQ ID NO: 1426108 - DNA, 15 bp, Homo sapiens
aatatttgttattag

SEQ ID NO: 1426109 - DNA, 15 bp, Homo sapiens
aaatatttgttatta

SEQ ID NO: 1426110 - DNA, 15 bp, Homo sapiens
taaatatttgttatt

SEQ ID NO: 1426111 - DNA, 15 bp, Homo sapiens
ttaaatatttgttat

SEQ ID NO: 1426112 - DNA, 15 bp, Homo sapiens
gttaaatatttgtta

SEQ ID NO: 1426113 - DNA, 15 bp, Homo sapiens
tgttaaatatttgtt

SEQ ID NO: 1426114 - DNA, 15 bp, Homo sapiens
gtgttaaatatttgt

SEQ ID NO: 1426115 - DNA, 15 bp, Homo sapiens
agtgttaaatatttg

SEQ ID NO: 1426116 - DNA, 15 bp, Homo sapiens
gagtgttaaatattt

SEQ ID NO: 1426117 - DNA, 15 bp, Homo sapiens
tgagtgttaaatatt

SEQ ID NO: 1426118 - DNA, 15 bp, Homo sapiens
atgagtgttaaatat

SEQ ID NO: 1426119 - DNA, 15 bp, Homo sapiens
tatgagtgttaaata

SEQ ID NO: 1426120 - DNA, 15 bp, Homo sapiens
ttatgagtgttaaat

SEQ ID NO: 1426121 - DNA, 15 bp, Homo sapiens
attatgagtgttaaa

SEQ ID NO: 1426122 - DNA, 15 bp, Homo sapiens
cattatgagtgttaa

SEQ ID NO: 1426123 - DNA, 15 bp, Homo sapiens
ccattatgagtgtta

SEQ ID NO: 1426124 - DNA, 15 bp, Homo sapiens
tccattatgagtgtt

SEQ ID NO: 1426125 - DNA, 15 bp, Homo sapiens
ctccattatgagtgt

SEQ ID NO: 1426126 - DNA, 15 bp, Homo sapiens
gctccattatgagtg

SEQ ID NO: 1426127 - DNA, 15 bp, Homo sapiens
tgctccattatgagt

SEQ ID NO: 1426128 - DNA, 15 bp, Homo sapiens
atgctccattatgag

SEQ ID NO: 1426129 - DNA, 15 bp, Homo sapiens
catgctccattatga

SEQ ID NO: 1426130 - DNA, 15 bp, Homo sapiens
ccatgctccattatg

SEQ ID NO: 1426131 - DNA, 15 bp, Homo sapiens
gccatgctccattat

SEQ ID NO: 1426132 - DNA, 15 bp, Homo sapiens
tgccatgctccatta

SEQ ID NO: 1426133 - DNA, 15 bp, Homo sapiens
ttgccatgctccatt

SEQ ID NO: 1426134 - DNA, 15 bp, Homo sapiens
cttgccatgctccat

SEQ ID NO: 1426135 - DNA, 15 bp, Homo sapiens
ccttgccatgctcca

SEQ ID NO: 1426136 - DNA, 15 bp, Homo sapiens
tccttgccatgctcc

SEQ ID NO: 1426137 - DNA, 15 bp, Homo sapiens
ttccttgccatgctc

SEQ ID NO: 1426138 - DNA, 15 bp, Homo sapiens
tttccttgccatgct

SEQ ID NO: 1426139 - DNA, 15 bp, Homo sapiens
atttccttgccatgc

SEQ ID NO: 1426140 - DNA, 15 bp, Homo sapiens
aatttccttgccatg

SEQ ID NO: 1426141 - DNA, 15 bp, Homo sapiens
taatttccttgccat

SEQ ID NO: 1426142 - DNA, 15 bp, Homo sapiens
ttaatttccttgcca

SEQ ID NO: 1426143 - DNA, 15 bp, Homo sapiens
attaatttccttgcc

SEQ ID NO: 1426144 - DNA, 15 bp, Homo sapiens
aattaatttccttgc

SEQ ID NO: 1426145 - DNA, 15 bp, Homo sapiens
aaattaatttccttg

SEQ ID NO: 1426146 - DNA, 15 bp, Homo sapiens
caaattaatttcctt

SEQ ID NO: 1426147 - DNA, 15 bp, Homo sapiens
ccaaattaatttcct

SEQ ID NO: 1426148 - DNA, 15 bp, Homo sapiens
accaaattaatttcc

SEQ ID NO: 1426149 - DNA, 15 bp, Homo sapiens
taccaaattaatttc

SEQ ID NO: 1426150 - DNA, 15 bp, Homo sapiens
ataccaaattaattt

SEQ ID NO: 1426151 - DNA, 15 bp, Homo sapiens
gataccaaattaatt

SEQ ID NO: 1426152 - DNA, 15 bp, Homo sapiens
tgataccaaattaat

SEQ ID NO: 1426153 - DNA, 15 bp, Homo sapiens
ctgataccaaattaa

SEQ ID NO: 1426154 - DNA, 15 bp, Homo sapiens
gctgataccaaatta

SEQ ID NO: 1426155 - DNA, 15 bp, Homo sapiens
tgctgataccaaatt

SEQ ID NO: 1426156 - DNA, 15 bp, Homo sapiens
ttgctgataccaaat

SEQ ID NO: 1426157 - DNA, 15 bp, Homo sapiens
cttgctgataccaaa

SEQ ID NO: 1426158 - DNA, 15 bp, Homo sapiens
gcttgctgataccaa

SEQ ID NO: 1426159 - DNA, 15 bp, Homo sapiens
agcttgctgatacca

SEQ ID NO: 1426160 - DNA, 15 bp, Homo sapiens
cagcttgctgatacc

SEQ ID NO: 1426161 - DNA, 15 bp, Homo sapiens
ccagcttgctgatac

SEQ ID NO: 1426162 - DNA, 15 bp, Homo sapiens
tccagcttgctgata

SEQ ID NO: 1426163 - DNA, 15 bp, Homo sapiens
ttccagcttgctgat

SEQ ID NO: 1426164 - DNA, 15 bp, Homo sapiens
gttccagcttgctga

SEQ ID NO: 1426165 - DNA, 15 bp, Homo sapiens
agttccagcttgctg

SEQ ID NO: 1426166 - DNA, 15 bp, Homo sapiens
gagttccagcttgct

SEQ ID NO: 1426167 - DNA, 15 bp, Homo sapiens
tgagttccagcttgc

SEQ ID NO: 1426168 - DNA, 15 bp, Homo sapiens
ttgagttccagcttg

SEQ ID NO: 1426169 - DNA, 15 bp, Homo sapiens
attgagttccagctt

SEQ ID NO: 1426170 - DNA, 15 bp, Homo sapiens
aattgagttccagct

SEQ ID NO: 1426171 - DNA, 15 bp, Homo sapiens
aaattgagttccagc

SEQ ID NO: 1426172 - DNA, 15 bp, Homo sapiens
gaaattgagttccag

SEQ ID NO: 1426173 - DNA, 15 bp, Homo sapiens
ggaaattgagttcca

SEQ ID NO: 1426174 - DNA, 15 bp, Homo sapiens
aggaaattgagttcc

SEQ ID NO: 1426175 - DNA, 15 bp, Homo sapiens
taggaaattgagttc

SEQ ID NO: 1426176 - DNA, 15 bp, Homo sapiens
ataggaaattgagtt

SEQ ID NO: 1426177 - DNA, 15 bp, Homo sapiens
cataggaaattgagt

SEQ ID NO: 1426178 - DNA, 15 bp, Homo sapiens
tcataggaaattgag

SEQ ID NO: 1426179 - DNA, 15 bp, Homo sapiens
gtcataggaaattga

SEQ ID NO: 1426180 - DNA, 15 bp, Homo sapiens
tgtcataggaaattg

SEQ ID NO: 1426181 - DNA, 15 bp, Homo sapiens
atgtcataggaaatt

SEQ ID NO: 1426182 - DNA, 15 bp, Homo sapiens
aatgtcataggaaat

SEQ ID NO: 1426183 - DNA, 15 bp, Homo sapiens
taatgtcataggaaa

SEQ ID NO: 1426184 - DNA, 15 bp, Homo sapiens
ttaatgtcataggaa

SEQ ID NO: 1426185 - DNA, 15 bp, Homo sapiens
gttaatgtcatagga

SEQ ID NO: 1426186 - DNA, 15 bp, Homo sapiens
tgttaatgtcatagg

SEQ ID NO: 1426187 - DNA, 15 bp, Homo sapiens
ttgttaatgtcatag

SEQ ID NO: 1426188 - DNA, 15 bp, Homo sapiens
tttgttaatgtcata

SEQ ID NO: 1426189 - DNA, 15 bp, Homo sapiens
ttttgttaatgtcat

SEQ ID NO: 1426190 - DNA, 15 bp, Homo sapiens
attttgttaatgtca

SEQ ID NO: 1426191 - DNA, 15 bp, Homo sapiens
gattttgttaatgtc

SEQ ID NO: 1426192 - DNA, 15 bp, Homo sapiens
agattttgttaatgt

SEQ ID NO: 1426193 - DNA, 15 bp, Homo sapiens
tagattttgttaatg

SEQ ID NO: 1426194 - DNA, 15 bp, Homo sapiens
atagattttgttaat

SEQ ID NO: 1426195 - DNA, 15 bp, Homo sapiens
tatagattttgttaa

SEQ ID NO: 1426196 - DNA, 15 bp, Homo sapiens
ttatagattttgtta

SEQ ID NO: 1426197 - DNA, 15 bp, Homo sapiens
attatagattttgtt

SEQ ID NO: 1426198 - DNA, 15 bp, Homo sapiens
aattatagattttgt

SEQ ID NO: 1426199 - DNA, 15 bp, Homo sapiens
taattatagattttg

SEQ ID NO: 1426200 - DNA, 15 bp, Homo sapiens
ataattatagatttt

SEQ ID NO: 1426201 - DNA, 15 bp, Homo sapiens
tataattatagattt

SEQ ID NO: 1426202 - DNA, 15 bp, Homo sapiens
ctataattatagatt

SEQ ID NO: 1426203 - DNA, 15 bp, Homo sapiens
gctataattatagat

SEQ ID NO: 1426204 - DNA, 15 bp, Homo sapiens
agctataattataga

SEQ ID NO: 1426205 - DNA, 15 bp, Homo sapiens
cagctataattatag

SEQ ID NO: 1426206 - DNA, 15 bp, Homo sapiens
gcagctataattata

SEQ ID NO: 1426207 - DNA, 15 bp, Homo sapiens
agcagctataattat

SEQ ID NO: 1426208 - DNA, 15 bp, Homo sapiens
cagcagctataatta

SEQ ID NO: 1426209 - DNA, 15 bp, Homo sapiens
tcagcagctataatt

SEQ ID NO: 1426210 - DNA, 15 bp, Homo sapiens
ttcagcagctataat

SEQ ID NO: 1426211 - DNA, 15 bp, Homo sapiens
attcagcagctataa

SEQ ID NO: 1426212 - DNA, 15 bp, Homo sapiens
gattcagcagctata

SEQ ID NO: 1426213 - DNA, 15 bp, Homo sapiens
tgattcagcagctat

SEQ ID NO: 1426214 - DNA, 15 bp, Homo sapiens
ttgattcagcagcta

SEQ ID NO: 1426215 - DNA, 15 bp, Homo sapiens
cttgattcagcagct

SEQ ID NO: 1426216 - DNA, 15 bp, Homo sapiens
tcttgattcagcagc

SEQ ID NO: 1426217 - DNA, 15 bp, Homo sapiens
ttcttgattcagcag

SEQ ID NO: 1426218 - DNA, 15 bp, Homo sapiens
cttcttgattcagca

SEQ ID NO: 1426219 - DNA, 15 bp, Homo sapiens
tcttcttgattcagc

SEQ ID NO: 1426220 - DNA, 15 bp, Homo sapiens
ttcttcttgattcag

SEQ ID NO: 1426221 - DNA, 15 bp, Homo sapiens
tttcttcttgattca

SEQ ID NO: 1426222 - DNA, 15 bp, Homo sapiens
ttttcttcttgattc

SEQ ID NO: 1426223 - DNA, 15 bp, Homo sapiens
attttcttcttgatt

SEQ ID NO: 1426224 - DNA, 15 bp, Homo sapiens
tattttcttcttgat

SEQ ID NO: 1426225 - DNA, 15 bp, Homo sapiens
atattttcttcttga

SEQ ID NO: 1426226 - DNA, 15 bp, Homo sapiens
tatattttcttcttg

SEQ ID NO: 1426227 - DNA, 15 bp, Homo sapiens
ttatattttcttctt

SEQ ID NO: 1426228 - DNA, 15 bp, Homo sapiens
tttatattttcttct

SEQ ID NO: 1426229 - DNA, 15 bp, Homo sapiens
ttttatattttcttc

SEQ ID NO: 1426230 - DNA, 15 bp, Homo sapiens
attttatattttctt

SEQ ID NO: 1426231 - DNA, 15 bp, Homo sapiens
cattttatattttct

SEQ ID NO: 1426232 - DNA, 15 bp, Homo sapiens
ccattttatattttc

SEQ ID NO: 1426233 - DNA, 15 bp, Homo sapiens
accattttatatttt

SEQ ID NO: 1426234 - DNA, 15 bp, Homo sapiens
aaccattttatattt

SEQ ID NO: 1426235 - DNA, 15 bp, Homo sapiens
aaaccattttatatt

SEQ ID NO: 1426236 - DNA, 15 bp, Homo sapiens
aaaaccattttatat

SEQ ID NO: 1426237 - DNA, 15 bp, Homo sapiens
taaaaccattttata

SEQ ID NO: 1426238 - DNA, 15 bp, Homo sapiens
ataaaaccattttat

SEQ ID NO: 1426239 - DNA, 15 bp, Homo sapiens
tataaaaccatttta

SEQ ID NO: 1426240 - DNA, 15 bp, Homo sapiens
atataaaaccatttt

SEQ ID NO: 1426241 - DNA, 15 bp, Homo sapiens
catataaaaccattt

SEQ ID NO: 1426242 - DNA, 15 bp, Homo sapiens
ccatataaaaccatt

SEQ ID NO: 1426243 - DNA, 15 bp, Homo sapiens
accatataaaaccat

SEQ ID NO: 1426244 - DNA, 15 bp, Homo sapiens
aaccatataaaacca

SEQ ID NO: 1426245 - DNA, 15 bp, Homo sapiens
aaaccatataaaacc

SEQ ID NO: 1426246 - DNA, 15 bp, Homo sapiens
aaaaccatataaaac

SEQ ID NO: 1426247 - DNA, 15 bp, Homo sapiens
gaaaaccatataaaa

SEQ ID NO: 1426248 - DNA, 15 bp, Homo sapiens
agaaaaccatataaa

SEQ ID NO: 1426249 - DNA, 15 bp, Homo sapiens
aagaaaaccatataa

SEQ ID NO: 1426250 - DNA, 15 bp, Homo sapiens
aaagaaaaccatata

SEQ ID NO: 1426251 - DNA, 15 bp, Homo sapiens
caaagaaaaccatat

SEQ ID NO: 1426252 - DNA, 15 bp, Homo sapiens
acaaagaaaaccata

SEQ ID NO: 1426253 - DNA, 15 bp, Homo sapiens
aacaaagaaaaccat

SEQ ID NO: 1426254 - DNA, 15 bp, Homo sapiens
caacaaagaaaacca

SEQ ID NO: 1426255 - DNA, 15 bp, Homo sapiens
ccaacaaagaaaacc

SEQ ID NO: 1426256 - DNA, 15 bp, Homo sapiens
tccaacaaagaaaac

SEQ ID NO: 1426257 - DNA, 15 bp, Homo sapiens
atccaacaaagaaaa

SEQ ID NO: 1426258 - DNA, 15 bp, Homo sapiens
gatccaacaaagaaa

SEQ ID NO: 1426259 - DNA, 15 bp, Homo sapiens
tgatccaacaaagaa

SEQ ID NO: 1426260 - DNA, 15 bp, Homo sapiens
gtgatccaacaaaga

SEQ ID NO: 1426261 - DNA, 15 bp, Homo sapiens
agtgatccaacaaag

SEQ ID NO: 1426262 - DNA, 15 bp, Homo sapiens
gagtgatccaacaaa

SEQ ID NO: 1426263 - DNA, 15 bp, Homo sapiens
tgagtgatccaacaa

SEQ ID NO: 1426264 - DNA, 15 bp, Homo sapiens
atgagtgatccaaca

SEQ ID NO: 1426265 - DNA, 15 bp, Homo sapiens
tatgagtgatccaac

SEQ ID NO: 1426266 - DNA, 15 bp, Homo sapiens
gtatgagtgatccaa

SEQ ID NO: 1426267 - DNA, 15 bp, Homo sapiens
agtatgagtgatcca

SEQ ID NO: 1426268 - DNA, 15 bp, Homo sapiens
aagtatgagtgatcc

SEQ ID NO: 1426269 - DNA, 15 bp, Homo sapiens
aaagtatgagtgatc

SEQ ID NO: 1426270 - DNA, 15 bp, Homo sapiens
gaaagtatgagtgat

SEQ ID NO: 1426271 - DNA, 15 bp, Homo sapiens
tgaaagtatgagtga

SEQ ID NO: 1426272 - DNA, 15 bp, Homo sapiens
atgaaagtatgagtg

SEQ ID NO: 1426273 - DNA, 15 bp, Homo sapiens
gatgaaagtatgagt

SEQ ID NO: 1426274 - DNA, 15 bp, Homo sapiens
tgatgaaagtatgag

SEQ ID NO: 1426275 - DNA, 15 bp, Homo sapiens
atgatgaaagtatga

SEQ ID NO: 1426276 - DNA, 15 bp, Homo sapiens
catgatgaaagtatg

SEQ ID NO: 1426277 - DNA, 15 bp, Homo sapiens
acatgatgaaagtat

SEQ ID NO: 1426278 - DNA, 15 bp, Homo sapiens
cacatgatgaaagta

SEQ ID NO: 1426279 - DNA, 15 bp, Homo sapiens
acacatgatgaaagt

SEQ ID NO: 1426280 - DNA, 15 bp, Homo sapiens
tacacatgatgaaag

SEQ ID NO: 1426281 - DNA, 15 bp, Homo sapiens
ttacacatgatgaaa

SEQ ID NO: 1426282 - DNA, 15 bp, Homo sapiens
attacacatgatgaa

SEQ ID NO: 1426283 - DNA, 15 bp, Homo sapiens
tattacacatgatga

SEQ ID NO: 1426284 - DNA, 15 bp, Homo sapiens
atattacacatgatg

SEQ ID NO: 1426285 - DNA, 15 bp, Homo sapiens
gatattacacatgat

SEQ ID NO: 1426286 - DNA, 15 bp, Homo sapiens
agatattacacatga

SEQ ID NO: 1426287 - DNA, 15 bp, Homo sapiens
tagatattacacatg

SEQ ID NO: 1426288 - DNA, 15 bp, Homo sapiens
ctagatattacacat

SEQ ID NO: 1426289 - DNA, 15 bp, Homo sapiens
actagatattacaca

SEQ ID NO: 1426290 - DNA, 15 bp, Homo sapiens
tactagatattacac

SEQ ID NO: 1426291 - DNA, 15 bp, Homo sapiens
ttactagatattaca

SEQ ID NO: 1426292 - DNA, 15 bp, Homo sapiens
tttactagatattac

SEQ ID NO: 1426293 - DNA, 15 bp, Homo sapiens
ttttactagatatta

SEQ ID NO: 1426294 - DNA, 15 bp, Homo sapiens
tttttactagatatt

SEQ ID NO: 1426295 - DNA, 15 bp, Homo sapiens
ttttttactagatat

SEQ ID NO: 1426296 - DNA, 15 bp, Homo sapiens
cttttttactagata

SEQ ID NO: 1426297 - DNA, 15 bp, Homo sapiens
ccttttttactagat

SEQ ID NO: 1426298 - DNA, 15 bp, Homo sapiens
accttttttactaga

SEQ ID NO: 1426299 - DNA, 15 bp, Homo sapiens
gaccttttttactag

SEQ ID NO: 1426300 - DNA, 15 bp, Homo sapiens
agaccttttttacta

SEQ ID NO: 1426301 - DNA, 15 bp, Homo sapiens
tagaccttttttact

SEQ ID NO: 1426302 - DNA, 15 bp, Homo sapiens
ttagaccttttttac

SEQ ID NO: 1426303 - DNA, 15 bp, Homo sapiens
tttagacctttttta

SEQ ID NO: 1426304 - DNA, 15 bp, Homo sapiens
gtttagacctttttt

SEQ ID NO: 1426305 - DNA, 15 bp, Homo sapiens
agtttagaccttttt

SEQ ID NO: 1426306 - DNA, 15 bp, Homo sapiens
gagtttagacctttt

SEQ ID NO: 1426307 - DNA, 15 bp, Homo sapiens
agagtttagaccttt

SEQ ID NO: 1426308 - DNA, 15 bp, Homo sapiens
tagagtttagacctt

SEQ ID NO: 1426309 - DNA, 15 bp, Homo sapiens
ctagagtttagacct

SEQ ID NO: 1426310 - DNA, 15 bp, Homo sapiens
tctagagtttagacc

SEQ ID NO: 1426311 - DNA, 15 bp, Homo sapiens
ttctagagtttagac

SEQ ID NO: 1426312 - DNA, 15 bp, Homo sapiens
gttctagagtttaga

SEQ ID NO: 1426313 - DNA, 15 bp, Homo sapiens
cgttctagagtttag

SEQ ID NO: 1426314 - DNA, 15 bp, Homo sapiens
acgttctagagttta

SEQ ID NO: 1426315 - DNA, 15 bp, Homo sapiens
tacgttctagagttt

SEQ ID NO: 1426316 - DNA, 15 bp, Homo sapiens
ttacgttctagagtt

SEQ ID NO: 1426317 - DNA, 15 bp, Homo sapiens
tttacgttctagagt

SEQ ID NO: 1426318 - DNA, 15 bp, Homo sapiens
atttacgttctagag

SEQ ID NO: 1426319 - DNA, 15 bp, Homo sapiens
aatttacgttctaga

SEQ ID NO: 1426320 - DNA, 15 bp, Homo sapiens
aaatttacgttctag

SEQ ID NO: 1426321 - DNA, 15 bp, Homo sapiens
aaaatttacgttcta

SEQ ID NO: 1426322 - DNA, 15 bp, Homo sapiens
taaaatttacgttct

SEQ ID NO: 1426323 - DNA, 15 bp, Homo sapiens
ttaaaatttacgttc

SEQ ID NO: 1426324 - DNA, 15 bp, Homo sapiens
attaaaatttacgtt

SEQ ID NO: 1426325 - DNA, 15 bp, Homo sapiens
tattaaaatttacgt

SEQ ID NO: 1426326 - DNA, 15 bp, Homo sapiens
ctattaaaatttacg

SEQ ID NO: 1426327 - DNA, 15 bp, Homo sapiens
tctattaaaatttac

SEQ ID NO: 1426328 - DNA, 15 bp, Homo sapiens
ttctattaaaattta

SEQ ID NO: 1426329 - DNA, 15 bp, Homo sapiens
tttctattaaaattt

SEQ ID NO: 1426330 - DNA, 15 bp, Homo sapiens
ttttctattaaaatt

SEQ ID NO: 1426331 - DNA, 15 bp, Homo sapiens
tttttctattaaaat

SEQ ID NO: 1426332 - DNA, 15 bp, Homo sapiens
ctttttctattaaaa

SEQ ID NO: 1426333 - DNA, 15 bp, Homo sapiens
actttttctattaaa

SEQ ID NO: 1426334 - DNA, 15 bp, Homo sapiens
cactttttctattaa

SEQ ID NO: 1426335 - DNA, 15 bp, Homo sapiens
tcactttttctatta

SEQ ID NO: 1426336 - DNA, 15 bp, Homo sapiens
atcactttttctatt

SEQ ID NO: 1426337 - DNA, 15 bp, Homo sapiens
aatcactttttctat

SEQ ID NO: 1426338 - DNA, 15 bp, Homo sapiens
taatcactttttcta

SEQ ID NO: 1426339 - DNA, 15 bp, Homo sapiens
ataatcactttttct

SEQ ID NO: 1426340 - DNA, 15 bp, Homo sapiens
tataatcactttttc

SEQ ID NO: 1426341 - DNA, 15 bp, Homo sapiens
gtataatcacttttt

SEQ ID NO: 1426342 - DNA, 15 bp, Homo sapiens
tgtataatcactttt

SEQ ID NO: 1426343 - DNA, 15 bp, Homo sapiens
atgtataatcacttt

SEQ ID NO: 1426344 - DNA, 15 bp, Homo sapiens
aatgtataatcactt

SEQ ID NO: 1426345 - DNA, 15 bp, Homo sapiens
taatgtataatcact

SEQ ID NO: 1426346 - DNA, 15 bp, Homo sapiens
ataatgtataatcac

SEQ ID NO: 1426347 - DNA, 15 bp, Homo sapiens
aataatgtataatca

SEQ ID NO: 1426348 - DNA, 15 bp, Homo sapiens
aaataatgtataatc

SEQ ID NO: 1426349 - DNA, 15 bp, Homo sapiens
aaaataatgtataat

SEQ ID NO: 1426350 - DNA, 15 bp, Homo sapiens
gaaaataatgtataa

SEQ ID NO: 1426351 - DNA, 15 bp, Homo sapiens
ggaaaataatgtata

SEQ ID NO: 1426352 - DNA, 15 bp, Homo sapiens
aggaaaataatgtat

SEQ ID NO: 1426353 - DNA, 15 bp, Homo sapiens
taggaaaataatgta

SEQ ID NO: 1426354 - DNA, 15 bp, Homo sapiens
ataggaaaataatgt

SEQ ID NO: 1426355 - DNA, 15 bp, Homo sapiens
cataggaaaataatg

SEQ ID NO: 1426356 - DNA, 15 bp, Homo sapiens
acataggaaaataat

SEQ ID NO: 1426357 - DNA, 15 bp, Homo sapiens
tacataggaaaataa

SEQ ID NO: 1426358 - DNA, 15 bp, Homo sapiens
atacataggaaaata

SEQ ID NO: 1426359 - DNA, 15 bp, Homo sapiens
aatacataggaaaat

SEQ ID NO: 1426360 - DNA, 15 bp, Homo sapiens
aaatacataggaaaa

SEQ ID NO: 1426361 - DNA, 15 bp, Homo sapiens
aaaatacataggaaa

SEQ ID NO: 1426362 - DNA, 15 bp, Homo sapiens
gaaaatacataggaa

SEQ ID NO: 1426363 - DNA, 15 bp, Homo sapiens
cgaaaatacatagga

SEQ ID NO: 1426364 - DNA, 15 bp, Homo sapiens
gcgaaaatacatagg

SEQ ID NO: 1426365 - DNA, 15 bp, Homo sapiens
agcgaaaatacatag

SEQ ID NO: 1426366 - DNA, 15 bp, Homo sapiens
aagcgaaaatacata

SEQ ID NO: 1426367 - DNA, 15 bp, Homo sapiens
aaagcgaaaatacat

SEQ ID NO: 1426368 - DNA, 15 bp, Homo sapiens
aaaagcgaaaataca

SEQ ID NO: 1426369 - DNA, 15 bp, Homo sapiens
gaaaagcgaaaatac

SEQ ID NO: 1426370 - DNA, 15 bp, Homo sapiens
tgaaaagcgaaaata

SEQ ID NO: 1426371 - DNA, 15 bp, Homo sapiens
ttgaaaagcgaaaat

SEQ ID NO: 1426372 - DNA, 15 bp, Homo sapiens
cttgaaaagcgaaaa

SEQ ID NO: 1426373 - DNA, 15 bp, Homo sapiens
acttgaaaagcgaaa

SEQ ID NO: 1426374 - DNA, 15 bp, Homo sapiens
cacttgaaaagcgaa

SEQ ID NO: 1426375 - DNA, 15 bp, Homo sapiens
acacttgaaaagcga

SEQ ID NO: 1426376 - DNA, 15 bp, Homo sapiens
aacacttgaaaagcg

SEQ ID NO: 1426377 - DNA, 15 bp, Homo sapiens
aaacacttgaaaagc

SEQ ID NO: 1426378 - DNA, 15 bp, Homo sapiens
taaacacttgaaaag

SEQ ID NO: 1426379 - DNA, 15 bp, Homo sapiens
ctaaacacttgaaaa

SEQ ID NO: 1426380 - DNA, 15 bp, Homo sapiens
actaaacacttgaaa

SEQ ID NO: 1426381 - DNA, 15 bp, Homo sapiens
cactaaacacttgaa

SEQ ID NO: 1426382 - DNA, 15 bp, Homo sapiens
ccactaaacacttga

SEQ ID NO: 1426383 - DNA, 15 bp, Homo sapiens
gccactaaacacttg

SEQ ID NO: 1426384 - DNA, 15 bp, Homo sapiens
tgccactaaacactt

SEQ ID NO: 1426385 - DNA, 15 bp, Homo sapiens
ctgccactaaacact

SEQ ID NO: 1426386 - DNA, 15 bp, Homo sapiens
actgccactaaacac

SEQ ID NO: 1426387 - DNA, 15 bp, Homo sapiens
aactgccactaaaca

SEQ ID NO: 1426388 - DNA, 15 bp, Homo sapiens
taactgccactaaac

SEQ ID NO: 1426389 - DNA, 15 bp, Homo sapiens
ataactgccactaaa

SEQ ID NO: 1426390 - DNA, 15 bp, Homo sapiens
gataactgccactaa

SEQ ID NO: 1426391 - DNA, 15 bp, Homo sapiens
tgataactgccacta

SEQ ID NO: 1426392 - DNA, 15 bp, Homo sapiens
ttgataactgccact

SEQ ID NO: 1426393 - DNA, 15 bp, Homo sapiens
tttgataactgccac

SEQ ID NO: 1426394 - DNA, 15 bp, Homo sapiens
ttttgataactgcca

SEQ ID NO: 1426395 - DNA, 15 bp, Homo sapiens
tttttgataactgcc

SEQ ID NO: 1426396 - DNA, 15 bp, Homo sapiens
ttttttgataactgc

SEQ ID NO: 1426397 - DNA, 15 bp, Homo sapiens
gttttttgataactg

SEQ ID NO: 1426398 - DNA, 15 bp, Homo sapiens
agttttttgataact

SEQ ID NO: 1426399 - DNA, 15 bp, Homo sapiens
aagttttttgataac

SEQ ID NO: 1426400 - DNA, 15 bp, Homo sapiens
gaagttttttgataa

SEQ ID NO: 1426401 - DNA, 15 bp, Homo sapiens
tgaagttttttgata

SEQ ID NO: 1426402 - DNA, 15 bp, Homo sapiens
atgaagttttttgat

SEQ ID NO: 1426403 - DNA, 15 bp, Homo sapiens
tatgaagttttttga

SEQ ID NO: 1426404 - DNA, 15 bp, Homo sapiens
ttatgaagttttttg

SEQ ID NO: 1426405 - DNA, 15 bp, Homo sapiens
attatgaagtttttt

SEQ ID NO: 1426406 - DNA, 15 bp, Homo sapiens
cattatgaagttttt

SEQ ID NO: 1426407 - DNA, 15 bp, Homo sapiens
acattatgaagtttt

SEQ ID NO: 1426408 - DNA, 15 bp, Homo sapiens
cacattatgaagttt

SEQ ID NO: 1426409 - DNA, 15 bp, Homo sapiens
gcacattatgaagtt

SEQ ID NO: 1426410 - DNA, 15 bp, Homo sapiens
ggcacattatgaagt

SEQ ID NO: 1426411 - DNA, 15 bp, Homo sapiens
tggcacattatgaag

SEQ ID NO: 1426412 - DNA, 15 bp, Homo sapiens
ttggcacattatgaa

SEQ ID NO: 1426413 - DNA, 15 bp, Homo sapiens
attggcacattatga

SEQ ID NO: 1426414 - DNA, 15 bp, Homo sapiens
aattggcacattatg

SEQ ID NO: 1426415 - DNA, 15 bp, Homo sapiens
aaattggcacattat

SEQ ID NO: 1426416 - DNA, 15 bp, Homo sapiens
aaaattggcacatta

SEQ ID NO: 1426417 - DNA, 15 bp, Homo sapiens
aaaaattggcacatt

SEQ ID NO: 1426418 - DNA, 15 bp, Homo sapiens
caaaaattggcacat

SEQ ID NO: 1426419 - DNA, 15 bp, Homo sapiens
tcaaaaattggcaca

SEQ ID NO: 1426420 - DNA, 15 bp, Homo sapiens
ttcaaaaattggcac

SEQ ID NO: 1426421 - DNA, 15 bp, Homo sapiens
tttcaaaaattggca

SEQ ID NO: 1426422 - DNA, 15 bp, Homo sapiens
ttttcaaaaattggc

SEQ ID NO: 1426423 - DNA, 15 bp, Homo sapiens
tttttcaaaaattgg

SEQ ID NO: 1426424 - DNA, 15 bp, Homo sapiens
ttttttcaaaaattg

SEQ ID NO: 1426425 - DNA, 15 bp, Homo sapiens
attttttcaaaaatt

SEQ ID NO: 1426426 - DNA, 15 bp, Homo sapiens
aattttttcaaaaat

SEQ ID NO: 1426427 - DNA, 15 bp, Homo sapiens
aaattttttcaaaaa

SEQ ID NO: 1426428 - DNA, 15 bp, Homo sapiens
aaaattttttcaaaa

SEQ ID NO: 1426429 - DNA, 15 bp, Homo sapiens
gaaaattttttcaaa

SEQ ID NO: 1426430 - DNA, 15 bp, Homo sapiens
ggaaaattttttcaa

SEQ ID NO: 1426431 - DNA, 15 bp, Homo sapiens
gggaaaattttttca

SEQ ID NO: 1426432 - DNA, 15 bp, Homo sapiens
tgggaaaattttttc

SEQ ID NO: 1426433 - DNA, 15 bp, Homo sapiens
gtgggaaaatttttt

SEQ ID NO: 1426434 - DNA, 15 bp, Homo sapiens
ggtgggaaaattttt

SEQ ID NO: 1426435 - DNA, 15 bp, Homo sapiens
aggtgggaaaatttt

SEQ ID NO: 1426436 - DNA, 15 bp, Homo sapiens
caggtgggaaaattt

SEQ ID NO: 1426437 - DNA, 15 bp, Homo sapiens
gcaggtgggaaaatt

SEQ ID NO: 1426438 - DNA, 15 bp, Homo sapiens
agcaggtgggaaaat

SEQ ID NO: 1426439 - DNA, 15 bp, Homo sapiens
cagcaggtgggaaaa

SEQ ID NO: 1426440 - DNA, 15 bp, Homo sapiens
acagcaggtgggaaa

SEQ ID NO: 1426441 - DNA, 15 bp, Homo sapiens
tacagcaggtgggaa

SEQ ID NO: 1426442 - DNA, 15 bp, Homo sapiens
ttacagcaggtggga

SEQ ID NO: 1426443 - DNA, 15 bp, Homo sapiens
tttacagcaggtggg

SEQ ID NO: 1426444 - DNA, 15 bp, Homo sapiens
atttacagcaggtgg

SEQ ID NO: 1426445 - DNA, 15 bp, Homo sapiens
aatttacagcaggtg

SEQ ID NO: 1426446 - DNA, 15 bp, Homo sapiens
gaatttacagcaggt

SEQ ID NO: 1426447 - DNA, 15 bp, Homo sapiens
ggaatttacagcagg

SEQ ID NO: 1426448 - DNA, 15 bp, Homo sapiens
gggaatttacagcag

SEQ ID NO: 1426449 - DNA, 15 bp, Homo sapiens
agggaatttacagca

SEQ ID NO: 1426450 - DNA, 15 bp, Homo sapiens
aagggaatttacagc

SEQ ID NO: 1426451 - DNA, 15 bp, Homo sapiens
gaagggaatttacag

SEQ ID NO: 1426452 - DNA, 15 bp, Homo sapiens
agaagggaatttaca

SEQ ID NO: 1426453 - DNA, 15 bp, Homo sapiens
tagaagggaatttac

SEQ ID NO: 1426454 - DNA, 15 bp, Homo sapiens
atagaagggaattta

SEQ ID NO: 1426455 - DNA, 15 bp, Homo sapiens
aatagaagggaattt

SEQ ID NO: 1426456 - DNA, 15 bp, Homo sapiens
gaatagaagggaatt

SEQ ID NO: 1426457 - DNA, 15 bp, Homo sapiens
ggaatagaagggaat

SEQ ID NO: 1426458 - DNA, 15 bp, Homo sapiens
aggaatagaagggaa

SEQ ID NO: 1426459 - DNA, 15 bp, Homo sapiens
taggaatagaaggga

SEQ ID NO: 1426460 - DNA, 15 bp, Homo sapiens
ctaggaatagaaggg

SEQ ID NO: 1426461 - DNA, 15 bp, Homo sapiens
cctaggaatagaagg

SEQ ID NO: 1426462 - DNA, 15 bp, Homo sapiens
tcctaggaatagaag

SEQ ID NO: 1426463 - DNA, 15 bp, Homo sapiens
atcctaggaatagaa

SEQ ID NO: 1426464 - DNA, 15 bp, Homo sapiens
tatcctaggaataga

SEQ ID NO: 1426465 - DNA, 15 bp, Homo sapiens
gtatcctaggaatag

SEQ ID NO: 1426466 - DNA, 15 bp, Homo sapiens
tgtatcctaggaata

SEQ ID NO: 1426467 - DNA, 15 bp, Homo sapiens
ttgtatcctaggaat

SEQ ID NO: 1426468 - DNA, 15 bp, Homo sapiens
tttgtatcctaggaa

SEQ ID NO: 1426469 - DNA, 15 bp, Homo sapiens
ttttgtatcctagga

SEQ ID NO: 1426470 - DNA, 15 bp, Homo sapiens
cttttgtatcctagg

SEQ ID NO: 1426471 - DNA, 15 bp, Homo sapiens
gcttttgtatcctag

SEQ ID NO: 1426472 - DNA, 15 bp, Homo sapiens
ggcttttgtatccta

SEQ ID NO: 1426473 - DNA, 15 bp, Homo sapiens
aggcttttgtatcct

SEQ ID NO: 1426474 - DNA, 15 bp, Homo sapiens
caggcttttgtatcc

SEQ ID NO: 1426475 - DNA, 15 bp, Homo sapiens
gcaggcttttgtatc

SEQ ID NO: 1426476 - DNA, 15 bp, Homo sapiens
ggcaggcttttgtat

SEQ ID NO: 1426477 - DNA, 15 bp, Homo sapiens
aggcaggcttttgta

SEQ ID NO: 1426478 - DNA, 15 bp, Homo sapiens
aaggcaggcttttgt

SEQ ID NO: 1426479 - DNA, 15 bp, Homo sapiens
taaggcaggcttttg

SEQ ID NO: 1426480 - DNA, 15 bp, Homo sapiens
ttaaggcaggctttt

SEQ ID NO: 1426481 - DNA, 15 bp, Homo sapiens
tttaaggcaggcttt

SEQ ID NO: 1426482 - DNA, 15 bp, Homo sapiens
ttttaaggcaggctt

SEQ ID NO: 1426483 - DNA, 15 bp, Homo sapiens
attttaaggcaggct

SEQ ID NO: 1426484 - DNA, 15 bp, Homo sapiens
aattttaaggcaggc

SEQ ID NO: 1426485 - DNA, 15 bp, Homo sapiens
taattttaaggcagg

SEQ ID NO: 1426486 - DNA, 15 bp, Homo sapiens
ataattttaaggcag

SEQ ID NO: 1426487 - DNA, 15 bp, Homo sapiens
aataattttaaggca

SEQ ID NO: 1426488 - DNA, 15 bp, Homo sapiens
aaataattttaaggc

SEQ ID NO: 1426489 - DNA, 15 bp, Homo sapiens
aaaataattttaagg

SEQ ID NO: 1426490 - DNA, 15 bp, Homo sapiens
aaaaataattttaag

SEQ ID NO: 1426491 - DNA, 15 bp, Homo sapiens
taaaaataattttaa

SEQ ID NO: 1426492 - DNA, 15 bp, Homo sapiens
ctaaaaataatttta

SEQ ID NO: 1426493 - DNA, 15 bp, Homo sapiens
tctaaaaataatttt

SEQ ID NO: 1426494 - DNA, 15 bp, Homo sapiens
ttctaaaaataattt

SEQ ID NO: 1426495 - DNA, 15 bp, Homo sapiens
attctaaaaataatt

SEQ ID NO: 1426496 - DNA, 15 bp, Homo sapiens
gattctaaaaataat

SEQ ID NO: 1426497 - DNA, 15 bp, Homo sapiens
agattctaaaaataa

SEQ ID NO: 1426498 - DNA, 15 bp, Homo sapiens
aagattctaaaaata

SEQ ID NO: 1426499 - DNA, 15 bp, Homo sapiens
aaagattctaaaaat

SEQ ID NO: 1426500 - DNA, 15 bp, Homo sapiens
aaaagattctaaaaa

SEQ ID NO: 1426501 - DNA, 15 bp, Homo sapiens
taaaagattctaaaa

SEQ ID NO: 1426502 - DNA, 15 bp, Homo sapiens
ataaaagattctaaa

SEQ ID NO: 1426503 - DNA, 15 bp, Homo sapiens
aataaaagattctaa

SEQ ID NO: 1426504 - DNA, 15 bp, Homo sapiens
taataaaagattcta

SEQ ID NO: 1426505 - DNA, 15 bp, Homo sapiens
ttaataaaagattct

SEQ ID NO: 1426506 - DNA, 15 bp, Homo sapiens
tttaataaaagattc

SEQ ID NO: 1426507 - DNA, 15 bp, Homo sapiens
ttttaataaaagatt

SEQ ID NO: 1426508 - DNA, 15 bp, Homo sapiens
tttttaataaaagat

SEQ ID NO: 1426509 - DNA, 15 bp, Homo sapiens
ctttttaataaaaga

SEQ ID NO: 1426510 - DNA, 15 bp, Homo sapiens
actttttaataaaag

SEQ ID NO: 1426511 - DNA, 15 bp, Homo sapiens
tactttttaataaaa

SEQ ID NO: 1426512 - DNA, 15 bp, Homo sapiens
atactttttaataaa

SEQ ID NO: 1426513 - DNA, 15 bp, Homo sapiens
tatactttttaataa

SEQ ID NO: 1426514 - DNA, 15 bp, Homo sapiens
atatactttttaata

SEQ ID NO: 1426515 - DNA, 15 bp, Homo sapiens
tatatactttttaat

SEQ ID NO: 1426516 - DNA, 15 bp, Homo sapiens
atatatactttttaa

SEQ ID NO: 1426517 - DNA, 15 bp, Homo sapiens
tatatatacttttta

SEQ ID NO: 1426518 - DNA, 15 bp, Homo sapiens
gtatatatacttttt

SEQ ID NO: 1426519 - DNA, 15 bp, Homo sapiens
tgtatatatactttt

SEQ ID NO: 1426520 - DNA, 15 bp, Homo sapiens
atgtatatatacttt

SEQ ID NO: 1426521 - DNA, 15 bp, Homo sapiens
tatgtatatatactt

SEQ ID NO: 1426522 - DNA, 15 bp, Homo sapiens
atatgtatatatact

SEQ ID NO: 1426523 - DNA, 15 bp, Homo sapiens
catatgtatatatac

SEQ ID NO: 1426524 - DNA, 15 bp, Homo sapiens
tcatatgtatatata

SEQ ID NO: 1426525 - DNA, 15 bp, Homo sapiens
atcatatgtatatat

SEQ ID NO: 1426526 - DNA, 15 bp, Homo sapiens
tatcatatgtatata

SEQ ID NO: 1426527 - DNA, 15 bp, Homo sapiens
atatcatatgtatat

SEQ ID NO: 1426528 - DNA, 15 bp, Homo sapiens
aatatcatatgtata

SEQ ID NO: 1426529 - DNA, 15 bp, Homo sapiens
caatatcatatgtat

SEQ ID NO: 1426530 - DNA, 15 bp, Homo sapiens
acaatatcatatgta

SEQ ID NO: 1426531 - DNA, 15 bp, Homo sapiens
tacaatatcatatgt

SEQ ID NO: 1426532 - DNA, 15 bp, Homo sapiens
atacaatatcatatg

SEQ ID NO: 1426533 - DNA, 15 bp, Homo sapiens
tatacaatatcatat

SEQ ID NO: 1426534 - DNA, 15 bp, Homo sapiens
gtatacaatatcata

SEQ ID NO: 1426535 - DNA, 15 bp, Homo sapiens
agtatacaatatcat

SEQ ID NO: 1426536 - DNA, 15 bp, Homo sapiens
cagtatacaatatca

SEQ ID NO: 1426537 - DNA, 15 bp, Homo sapiens
gcagtatacaatatc

SEQ ID NO: 1426538 - DNA, 15 bp, Homo sapiens
tgcagtatacaatat

SEQ ID NO: 1426539 - DNA, 15 bp, Homo sapiens
ttgcagtatacaata

SEQ ID NO: 1426540 - DNA, 15 bp, Homo sapiens
gttgcagtatacaat

SEQ ID NO: 1426541 - DNA, 15 bp, Homo sapiens
agttgcagtatacaa

SEQ ID NO: 1426542 - DNA, 15 bp, Homo sapiens
aagttgcagtataca

SEQ ID NO: 1426543 - DNA, 15 bp, Homo sapiens
aaagttgcagtatac

SEQ ID NO: 1426544 - DNA, 15 bp, Homo sapiens
taaagttgcagtata

SEQ ID NO: 1426545 - DNA, 15 bp, Homo sapiens
ctaaagttgcagtat

SEQ ID NO: 1426546 - DNA, 15 bp, Homo sapiens
gctaaagttgcagta

SEQ ID NO: 1426547 - DNA, 15 bp, Homo sapiens
tgctaaagttgcagt

SEQ ID NO: 1426548 - DNA, 15 bp, Homo sapiens
atgctaaagttgcag

SEQ ID NO: 1426549 - DNA, 15 bp, Homo sapiens
gatgctaaagttgca

SEQ ID NO: 1426550 - DNA, 15 bp, Homo sapiens
tgatgctaaagttgc

SEQ ID NO: 1426551 - DNA, 15 bp, Homo sapiens
ctgatgctaaagttg

SEQ ID NO: 1426552 - DNA, 15 bp, Homo sapiens
gctgatgctaaagtt

SEQ ID NO: 1426553 - DNA, 15 bp, Homo sapiens
ggctgatgctaaagt

SEQ ID NO: 1426554 - DNA, 15 bp, Homo sapiens
tggctgatgctaaag

SEQ ID NO: 1426555 - DNA, 15 bp, Homo sapiens
gtggctgatgctaaa

SEQ ID NO: 1426556 - DNA, 15 bp, Homo sapiens
tgtggctgatgctaa

SEQ ID NO: 1426557 - DNA, 15 bp, Homo sapiens
ctgtggctgatgcta

SEQ ID NO: 1426558 - DNA, 15 bp, Homo sapiens
cctgtggctgatgct

SEQ ID NO: 1426559 - DNA, 15 bp, Homo sapiens
tcctgtggctgatgc

SEQ ID NO: 1426560 - DNA, 15 bp, Homo sapiens
gtcctgtggctgatg

SEQ ID NO: 1426561 - DNA, 15 bp, Homo sapiens
agtcctgtggctgat

SEQ ID NO: 1426562 - DNA, 15 bp, Homo sapiens
aagtcctgtggctga

SEQ ID NO: 1426563 - DNA, 15 bp, Homo sapiens
aaagtcctgtggctg

SEQ ID NO: 1426564 - DNA, 15 bp, Homo sapiens
aaaagtcctgtggct

SEQ ID NO: 1426565 - DNA, 15 bp, Homo sapiens
aaaaagtcctgtggc

SEQ ID NO: 1426566 - DNA, 15 bp, Homo sapiens
caaaaagtcctgtgg

SEQ ID NO: 1426567 - DNA, 15 bp, Homo sapiens
tcaaaaagtcctgtg

SEQ ID NO: 1426568 - DNA, 15 bp, Homo sapiens
ttcaaaaagtcctgt

SEQ ID NO: 1426569 - DNA, 15 bp, Homo sapiens
attcaaaaagtcctg

SEQ ID NO: 1426570 - DNA, 15 bp, Homo sapiens
tattcaaaaagtcct

SEQ ID NO: 1426571 - DNA, 15 bp, Homo sapiens
atattcaaaaagtcc

SEQ ID NO: 1426572 - DNA, 15 bp, Homo sapiens
aatattcaaaaagtc

SEQ ID NO: 1426573 - DNA, 15 bp, Homo sapiens
caatattcaaaaagt

SEQ ID NO: 1426574 - DNA, 15 bp, Homo sapiens
tcaatattcaaaaag

SEQ ID NO: 1426575 - DNA, 15 bp, Homo sapiens
atcaatattcaaaaa

SEQ ID NO: 1426576 - DNA, 15 bp, Homo sapiens
gatcaatattcaaaa

SEQ ID NO: 1426577 - DNA, 15 bp, Homo sapiens
tgatcaatattcaaa

SEQ ID NO: 1426578 - DNA, 15 bp, Homo sapiens
atgatcaatattcaa

SEQ ID NO: 1426579 - DNA, 15 bp, Homo sapiens
catgatcaatattca

SEQ ID NO: 1426580 - DNA, 15 bp, Homo sapiens
tcatgatcaatattc

SEQ ID NO: 1426581 - DNA, 15 bp, Homo sapiens
ctcatgatcaatatt

SEQ ID NO: 1426582 - DNA, 15 bp, Homo sapiens
tctcatgatcaatat

SEQ ID NO: 1426583 - DNA, 15 bp, Homo sapiens
ttctcatgatcaata

SEQ ID NO: 1426584 - DNA, 15 bp, Homo sapiens
gttctcatgatcaat

SEQ ID NO: 1426585 - DNA, 15 bp, Homo sapiens
tgttctcatgatcaa

SEQ ID NO: 1426586 - DNA, 15 bp, Homo sapiens
ttgttctcatgatca

SEQ ID NO: 1426587 - DNA, 15 bp, Homo sapiens
tttgttctcatgatc

SEQ ID NO: 1426588 - DNA, 15 bp, Homo sapiens
atttgttctcatgat

SEQ ID NO: 1426589 - DNA, 15 bp, Homo sapiens
aatttgttctcatga

SEQ ID NO: 1426590 - DNA, 15 bp, Homo sapiens
taatttgttctcatg

SEQ ID NO: 1426591 - DNA, 15 bp, Homo sapiens
ataatttgttctcat

SEQ ID NO: 1426592 - DNA, 15 bp, Homo sapiens
tataatttgttctca

SEQ ID NO: 1426593 - DNA, 15 bp, Homo sapiens
ttataatttgttctc

SEQ ID NO: 1426594 - DNA, 15 bp, Homo sapiens
cttataatttgttct

SEQ ID NO: 1426595 - DNA, 15 bp, Homo sapiens
acttataatttgttc

SEQ ID NO: 1426596 - DNA, 15 bp, Homo sapiens
tacttataatttgtt

SEQ ID NO: 1426597 - DNA, 15 bp, Homo sapiens
ttacttataatttgt

SEQ ID NO: 1426598 - DNA, 15 bp, Homo sapiens
gttacttataatttg

SEQ ID NO: 1426599 - DNA, 15 bp, Homo sapiens
tgttacttataattt

SEQ ID NO: 1426600 - DNA, 15 bp, Homo sapiens
atgttacttataatt

SEQ ID NO: 1426601 - DNA, 15 bp, Homo sapiens
catgttacttataat

SEQ ID NO: 1426602 - DNA, 15 bp, Homo sapiens
ccatgttacttataa

SEQ ID NO: 1426603 - DNA, 15 bp, Homo sapiens
gccatgttacttata

SEQ ID NO: 1426604 - DNA, 15 bp, Homo sapiens
agccatgttacttat

SEQ ID NO: 1426605 - DNA, 15 bp, Homo sapiens
aagccatgttactta

SEQ ID NO: 1426606 - DNA, 15 bp, Homo sapiens
aaagccatgttactt

SEQ ID NO: 1426607 - DNA, 15 bp, Homo sapiens
caaagccatgttact

SEQ ID NO: 1426608 - DNA, 15 bp, Homo sapiens
tcaaagccatgttac

SEQ ID NO: 1426609 - DNA, 15 bp, Homo sapiens
atcaaagccatgtta

SEQ ID NO: 1426610 - DNA, 15 bp, Homo sapiens
catcaaagccatgtt

SEQ ID NO: 1426611 - DNA, 15 bp, Homo sapiens
gcatcaaagccatgt

SEQ ID NO: 1426612 - DNA, 15 bp, Homo sapiens
ggcatcaaagccatg

SEQ ID NO: 1426613 - DNA, 15 bp, Homo sapiens
gggcatcaaagccat

SEQ ID NO: 1426614 - DNA, 15 bp, Homo sapiens
agggcatcaaagcca

SEQ ID NO: 1426615 - DNA, 15 bp, Homo sapiens
aagggcatcaaagcc

SEQ ID NO: 1426616 - DNA, 15 bp, Homo sapiens
caagggcatcaaagc

SEQ ID NO: 1426617 - DNA, 15 bp, Homo sapiens
acaagggcatcaaag

SEQ ID NO: 1426618 - DNA, 15 bp, Homo sapiens
aacaagggcatcaaa

SEQ ID NO: 1426619 - DNA, 15 bp, Homo sapiens
aaacaagggcatcaa

SEQ ID NO: 1426620 - DNA, 15 bp, Homo sapiens
taaacaagggcatca

SEQ ID NO: 1426621 - DNA, 15 bp, Homo sapiens
ctaaacaagggcatc

SEQ ID NO: 1426622 - DNA, 15 bp, Homo sapiens
tctaaacaagggcat

SEQ ID NO: 1426623 - DNA, 15 bp, Homo sapiens
gtctaaacaagggca

SEQ ID NO: 1426624 - DNA, 15 bp, Homo sapiens
tgtctaaacaagggc

SEQ ID NO: 1426625 - DNA, 15 bp, Homo sapiens
ctgtctaaacaaggg

SEQ ID NO: 1426626 - DNA, 15 bp, Homo sapiens
cctgtctaaacaagg

SEQ ID NO: 1426627 - DNA, 15 bp, Homo sapiens
gcctgtctaaacaag

SEQ ID NO: 1426628 - DNA, 15 bp, Homo sapiens
agcctgtctaaacaa

SEQ ID NO: 1426629 - DNA, 15 bp, Homo sapiens
aagcctgtctaaaca

SEQ ID NO: 1426630 - DNA, 15 bp, Homo sapiens
aaagcctgtctaaac

SEQ ID NO: 1426631 - DNA, 15 bp, Homo sapiens
taaagcctgtctaaa

SEQ ID NO: 1426632 - DNA, 15 bp, Homo sapiens
ataaagcctgtctaa

SEQ ID NO: 1426633 - DNA, 15 bp, Homo sapiens
aataaagcctgtcta

SEQ ID NO: 1426634 - DNA, 15 bp, Homo sapiens
aaataaagcctgtct

SEQ ID NO: 1426635 - DNA, 15 bp, Homo sapiens
aaaataaagcctgtc

SEQ ID NO: 1426636 - DNA, 15 bp, Homo sapiens
aaaaataaagcctgt

SEQ ID NO: 1426637 - DNA, 15 bp, Homo sapiens
gaaaaataaagcctg

SEQ ID NO: 1426638 - DNA, 15 bp, Homo sapiens
agaaaaataaagcct

SEQ ID NO: 1426639 - DNA, 15 bp, Homo sapiens
aagaaaaataaagcc

SEQ ID NO: 1426640 - DNA, 15 bp, Homo sapiens
aaagaaaaataaagc

SEQ ID NO: 1426641 - DNA, 15 bp, Homo sapiens
aaaagaaaaataaag

SEQ ID NO: 1426642 - DNA, 15 bp, Homo sapiens
taaaagaaaaataaa

SEQ ID NO: 1426643 - DNA, 15 bp, Homo sapiens
ttaaaagaaaaataa

SEQ ID NO: 1426644 - DNA, 15 bp, Homo sapiens
tttaaaagaaaaata

SEQ ID NO: 1426645 - DNA, 15 bp, Homo sapiens
atttaaaagaaaaat

SEQ ID NO: 1426646 - DNA, 15 bp, Homo sapiens
aatttaaaagaaaaa

SEQ ID NO: 1426647 - DNA, 15 bp, Homo sapiens
caatttaaaagaaaa

SEQ ID NO: 1426648 - DNA, 15 bp, Homo sapiens
tcaatttaaaagaaa

SEQ ID NO: 1426649 - DNA, 15 bp, Homo sapiens
ttcaatttaaaagaa

SEQ ID NO: 1426650 - DNA, 15 bp, Homo sapiens
gttcaatttaaaaga

SEQ ID NO: 1426651 - DNA, 15 bp, Homo sapiens
agttcaatttaaaag

SEQ ID NO: 1426652 - DNA, 15 bp, Homo sapiens
aagttcaatttaaaa

SEQ ID NO: 1426653 - DNA, 15 bp, Homo sapiens
aaagttcaatttaaa

SEQ ID NO: 1426654 - DNA, 15 bp, Homo sapiens
taaagttcaatttaa

SEQ ID NO: 1426655 - DNA, 15 bp, Homo sapiens
ataaagttcaattta

SEQ ID NO: 1426656 - DNA, 15 bp, Homo sapiens
gataaagttcaattt

SEQ ID NO: 1426657 - DNA, 15 bp, Homo sapiens
tgataaagttcaatt

SEQ ID NO: 1426658 - DNA, 15 bp, Homo sapiens
ttgataaagttcaat

SEQ ID NO: 1426659 - DNA, 15 bp, Homo sapiens
cttgataaagttcaa

SEQ ID NO: 1426660 - DNA, 15 bp, Homo sapiens
tcttgataaagttca

SEQ ID NO: 1426661 - DNA, 15 bp, Homo sapiens
gtcttgataaagttc

SEQ ID NO: 1426662 - DNA, 15 bp, Homo sapiens
ggtcttgataaagtt

SEQ ID NO: 1426663 - DNA, 15 bp, Homo sapiens
aggtcttgataaagt

SEQ ID NO: 1426664 - DNA, 15 bp, Homo sapiens
caggtcttgataaag

SEQ ID NO: 1426665 - DNA, 15 bp, Homo sapiens
ccaggtcttgataaa

SEQ ID NO: 1426666 - DNA, 15 bp, Homo sapiens
gccaggtcttgataa

SEQ ID NO: 1426667 - DNA, 15 bp, Homo sapiens
ggccaggtcttgata

SEQ ID NO: 1426668 - DNA, 15 bp, Homo sapiens
tggccaggtcttgat

SEQ ID NO: 1426669 - DNA, 15 bp, Homo sapiens
atggccaggtcttga

SEQ ID NO: 1426670 - DNA, 15 bp, Homo sapiens
catggccaggtcttg

SEQ ID NO: 1426671 - DNA, 15 bp, Homo sapiens
tcatggccaggtctt

SEQ ID NO: 1426672 - DNA, 15 bp, Homo sapiens
atcatggccaggtct

SEQ ID NO: 1426673 - DNA, 15 bp, Homo sapiens
gatcatggccaggtc

SEQ ID NO: 1426674 - DNA, 15 bp, Homo sapiens
ggatcatggccaggt

SEQ ID NO: 1426675 - DNA, 15 bp, Homo sapiens
aggatcatggccagg

SEQ ID NO: 1426676 - DNA, 15 bp, Homo sapiens
taggatcatggccag

SEQ ID NO: 1426677 - DNA, 15 bp, Homo sapiens
gtaggatcatggcca

SEQ ID NO: 1426678 - DNA, 15 bp, Homo sapiens
agtaggatcatggcc

SEQ ID NO: 1426679 - DNA, 15 bp, Homo sapiens
cagtaggatcatggc

SEQ ID NO: 1426680 - DNA, 15 bp, Homo sapiens
ccagtaggatcatgg

SEQ ID NO: 1426681 - DNA, 15 bp, Homo sapiens
tccagtaggatcatg

SEQ ID NO: 1426682 - DNA, 15 bp, Homo sapiens
ttccagtaggatcat

SEQ ID NO: 1426683 - DNA, 15 bp, Homo sapiens
tttccagtaggatca

SEQ ID NO: 1426684 - DNA, 15 bp, Homo sapiens
ttttccagtaggatc

SEQ ID NO: 1426685 - DNA, 15 bp, Homo sapiens
tttttccagtaggat

SEQ ID NO: 1426686 - DNA, 15 bp, Homo sapiens
gtttttccagtagga

SEQ ID NO: 1426687 - DNA, 15 bp, Homo sapiens
agtttttccagtagg

SEQ ID NO: 1426688 - DNA, 15 bp, Homo sapiens
tagtttttccagtag

SEQ ID NO: 1426689 - DNA, 15 bp, Homo sapiens
gtagtttttccagta

SEQ ID NO: 1426690 - DNA, 15 bp, Homo sapiens
agtagtttttccagt

SEQ ID NO: 1426691 - DNA, 15 bp, Homo sapiens
cagtagtttttccag

SEQ ID NO: 1426692 - DNA, 15 bp, Homo sapiens
gcagtagtttttcca

SEQ ID NO: 1426693 - DNA, 15 bp, Homo sapiens
tgcagtagtttttcc

SEQ ID NO: 1426694 - DNA, 15 bp, Homo sapiens
ctgcagtagtttttc

SEQ ID NO: 1426695 - DNA, 15 bp, Homo sapiens
tctgcagtagttttt

SEQ ID NO: 1426696 - DNA, 15 bp, Homo sapiens
gtctgcagtagtttt

SEQ ID NO: 1426697 - DNA, 15 bp, Homo sapiens
cgtctgcagtagttt

SEQ ID NO: 1426698 - DNA, 15 bp, Homo sapiens
tcgtctgcagtagtt

SEQ ID NO: 1426699 - DNA, 15 bp, Homo sapiens
atcgtctgcagtagt

SEQ ID NO: 1426700 - DNA, 15 bp, Homo sapiens
catcgtctgcagtag

SEQ ID NO: 1426701 - DNA, 15 bp, Homo sapiens
acatcgtctgcagta

SEQ ID NO: 1426702 - DNA, 15 bp, Homo sapiens
tacatcgtctgcagt

SEQ ID NO: 1426703 - DNA, 15 bp, Homo sapiens
gtacatcgtctgcag

SEQ ID NO: 1426704 - DNA, 15 bp, Homo sapiens
tgtacatcgtctgca

SEQ ID NO: 1426705 - DNA, 15 bp, Homo sapiens
atgtacatcgtctgc

SEQ ID NO: 1426706 - DNA, 15 bp, Homo sapiens
gatgtacatcgtctg

SEQ ID NO: 1426707 - DNA, 15 bp, Homo sapiens
tgatgtacatcgtct

SEQ ID NO: 1426708 - DNA, 15 bp, Homo sapiens
ttgatgtacatcgtc

SEQ ID NO: 1426709 - DNA, 15 bp, Homo sapiens
tttgatgtacatcgt

SEQ ID NO: 1426710 - DNA, 15 bp, Homo sapiens
atttgatgtacatcg

SEQ ID NO: 1426711 - DNA, 15 bp, Homo sapiens
tatttgatgtacatc

SEQ ID NO: 1426712 - DNA, 15 bp, Homo sapiens
ttatttgatgtacat

SEQ ID NO: 1426713 - DNA, 15 bp, Homo sapiens
cttatttgatgtaca

SEQ ID NO: 1426714 - DNA, 15 bp, Homo sapiens
acttatttgatgtac

SEQ ID NO: 1426715 - DNA, 15 bp, Homo sapiens
gacttatttgatgta

SEQ ID NO: 1426716 - DNA, 15 bp, Homo sapiens
tgacttatttgatgt

SEQ ID NO: 1426717 - DNA, 15 bp, Homo sapiens
ctgacttatttgatg

SEQ ID NO: 1426718 - DNA, 15 bp, Homo sapiens
actgacttatttgat

SEQ ID NO: 1426719 - DNA, 15 bp, Homo sapiens
gactgacttatttga

SEQ ID NO: 1426720 - DNA, 15 bp, Homo sapiens
agactgacttatttg

SEQ ID NO: 1426721 - DNA, 15 bp, Homo sapiens
cagactgacttattt

SEQ ID NO: 1426722 - DNA, 15 bp, Homo sapiens
ccagactgacttatt

SEQ ID NO: 1426723 - DNA, 15 bp, Homo sapiens
accagactgacttat

SEQ ID NO: 1426724 - DNA, 15 bp, Homo sapiens
aaccagactgactta

SEQ ID NO: 1426725 - DNA, 15 bp, Homo sapiens
gaaccagactgactt

SEQ ID NO: 1426726 - DNA, 15 bp, Homo sapiens
agaaccagactgact

SEQ ID NO: 1426727 - DNA, 15 bp, Homo sapiens
aagaaccagactgac

SEQ ID NO: 1426728 - DNA, 15 bp, Homo sapiens
taagaaccagactga

SEQ ID NO: 1426729 - DNA, 15 bp, Homo sapiens
ttaagaaccagactg

SEQ ID NO: 1426730 - DNA, 15 bp, Homo sapiens
attaagaaccagact

SEQ ID NO: 1426731 - DNA, 15 bp, Homo sapiens
tattaagaaccagac

SEQ ID NO: 1426732 - DNA, 15 bp, Homo sapiens
atattaagaaccaga

SEQ ID NO: 1426733 - DNA, 15 bp, Homo sapiens
aatattaagaaccag

SEQ ID NO: 1426734 - DNA, 15 bp, Homo sapiens
taatattaagaacca

SEQ ID NO: 1426735 - DNA, 15 bp, Homo sapiens
gtaatattaagaacc

SEQ ID NO: 1426736 - DNA, 15 bp, Homo sapiens
tgtaatattaagaac

SEQ ID NO: 1426737 - DNA, 15 bp, Homo sapiens
atgtaatattaagaa

SEQ ID NO: 1426738 - DNA, 15 bp, Homo sapiens
aatgtaatattaaga

SEQ ID NO: 1426739 - DNA, 15 bp, Homo sapiens
aaatgtaatattaag

SEQ ID NO: 1426740 - DNA, 15 bp, Homo sapiens
aaaatgtaatattaa

SEQ ID NO: 1426741 - DNA, 15 bp, Homo sapiens
aaaaatgtaatatta

SEQ ID NO: 1426742 - DNA, 15 bp, Homo sapiens
taaaaatgtaatatt

SEQ ID NO: 1426743 - DNA, 15 bp, Homo sapiens
ttaaaaatgtaatat

SEQ ID NO: 1426744 - DNA, 15 bp, Homo sapiens
attaaaaatgtaata

SEQ ID NO: 1426745 - DNA, 15 bp, Homo sapiens
gattaaaaatgtaat

SEQ ID NO: 1426746 - DNA, 15 bp, Homo sapiens
agattaaaaatgtaa

SEQ ID NO: 1426747 - DNA, 15 bp, Homo sapiens
aagattaaaaatgta

SEQ ID NO: 1426748 - DNA, 15 bp, Homo sapiens
taagattaaaaatgt

SEQ ID NO: 1426749 - DNA, 15 bp, Homo sapiens
ttaagattaaaaatg

SEQ ID NO: 1426750 - DNA, 15 bp, Homo sapiens
attaagattaaaaat

SEQ ID NO: 1426751 - DNA, 15 bp, Homo sapiens
aattaagattaaaaa

SEQ ID NO: 1426752 - DNA, 15 bp, Homo sapiens
caattaagattaaaa

SEQ ID NO: 1426753 - DNA, 15 bp, Homo sapiens
ccaattaagattaaa

SEQ ID NO: 1426754 - DNA, 15 bp, Homo sapiens
accaattaagattaa

SEQ ID NO: 1426755 - DNA, 15 bp, Homo sapiens
caccaattaagatta

SEQ ID NO: 1426756 - DNA, 15 bp, Homo sapiens
ccaccaattaagatt

SEQ ID NO: 1426757 - DNA, 15 bp, Homo sapiens
tccaccaattaagat

SEQ ID NO: 1426758 - DNA, 15 bp, Homo sapiens
ttccaccaattaaga

SEQ ID NO: 1426759 - DNA, 15 bp, Homo sapiens
gttccaccaattaag

SEQ ID NO: 1426760 - DNA, 15 bp, Homo sapiens
tgttccaccaattaa

SEQ ID NO: 1426761 - DNA, 15 bp, Homo sapiens
gtgttccaccaatta

SEQ ID NO: 1426762 - DNA, 15 bp, Homo sapiens
agtgttccaccaatt

SEQ ID NO: 1426763 - DNA, 15 bp, Homo sapiens
tagtgttccaccaat

SEQ ID NO: 1426764 - DNA, 15 bp, Homo sapiens
atagtgttccaccaa

SEQ ID NO: 1426765 - DNA, 15 bp, Homo sapiens
aatagtgttccacca

SEQ ID NO: 1426766 - DNA, 15 bp, Homo sapiens
gaatagtgttccacc

SEQ ID NO: 1426767 - DNA, 15 bp, Homo sapiens
tgaatagtgttccac

SEQ ID NO: 1426768 - DNA, 15 bp, Homo sapiens
ttgaatagtgttcca

SEQ ID NO: 1426769 - DNA, 15 bp, Homo sapiens
tttgaatagtgttcc

SEQ ID NO: 1426770 - DNA, 15 bp, Homo sapiens
ctttgaatagtgttc

SEQ ID NO: 1426771 - DNA, 15 bp, Homo sapiens
tctttgaatagtgtt

SEQ ID NO: 1426772 - DNA, 15 bp, Homo sapiens
ttctttgaatagtgt

SEQ ID NO: 1426773 - DNA, 15 bp, Homo sapiens
tttctttgaatagtg

SEQ ID NO: 1426774 - DNA, 15 bp, Homo sapiens
ctttctttgaatagt

SEQ ID NO: 1426775 - DNA, 15 bp, Homo sapiens
cctttctttgaatag

SEQ ID NO: 1426776 - DNA, 15 bp, Homo sapiens
tcctttctttgaata

SEQ ID NO: 1426777 - DNA, 15 bp, Homo sapiens
gtcctttctttgaat

SEQ ID NO: 1426778 - DNA, 15 bp, Homo sapiens
agtcctttctttgaa

SEQ ID NO: 1426779 - DNA, 15 bp, Homo sapiens
tagtcctttctttga

SEQ ID NO: 1426780 - DNA, 15 bp, Homo sapiens
ctagtcctttctttg

SEQ ID NO: 1426781 - DNA, 15 bp, Homo sapiens
gctagtcctttcttt

SEQ ID NO: 1426782 - DNA, 15 bp, Homo sapiens
agctagtcctttctt

SEQ ID NO: 1426783 - DNA, 15 bp, Homo sapiens
cagctagtcctttct

SEQ ID NO: 1426784 - DNA, 15 bp, Homo sapiens
gcagctagtcctttc

SEQ ID NO: 1426785 - DNA, 15 bp, Homo sapiens
agcagctagtccttt

SEQ ID NO: 1426786 - DNA, 15 bp, Homo sapiens
aagcagctagtcctt

SEQ ID NO: 1426787 - DNA, 15 bp, Homo sapiens
aaagcagctagtcct

SEQ ID NO: 1426788 - DNA, 15 bp, Homo sapiens
aaaagcagctagtcc

SEQ ID NO: 1426789 - DNA, 15 bp, Homo sapiens
aaaaagcagctagtc

SEQ ID NO: 1426790 - DNA, 15 bp, Homo sapiens
gaaaaagcagctagt

SEQ ID NO: 1426791 - DNA, 15 bp, Homo sapiens
agaaaaagcagctag

SEQ ID NO: 1426792 - DNA, 15 bp, Homo sapiens
cagaaaaagcagcta

SEQ ID NO: 1426793 - DNA, 15 bp, Homo sapiens
acagaaaaagcagct

SEQ ID NO: 1426794 - DNA, 15 bp, Homo sapiens
cacagaaaaagcagc

SEQ ID NO: 1426795 - DNA, 15 bp, Homo sapiens
gcacagaaaaagcag

SEQ ID NO: 1426796 - DNA, 15 bp, Homo sapiens
agcacagaaaaagca

SEQ ID NO: 1426797 - DNA, 15 bp, Homo sapiens
tagcacagaaaaagc

SEQ ID NO: 1426798 - DNA, 15 bp, Homo sapiens
gtagcacagaaaaag

SEQ ID NO: 1426799 - DNA, 15 bp, Homo sapiens
agtagcacagaaaaa

SEQ ID NO: 1426800 - DNA, 15 bp, Homo sapiens
aagtagcacagaaaa

SEQ ID NO: 1426801 - DNA, 15 bp, Homo sapiens
gaagtagcacagaaa

SEQ ID NO: 1426802 - DNA, 15 bp, Homo sapiens
ggaagtagcacagaa

SEQ ID NO: 1426803 - DNA, 15 bp, Homo sapiens
tggaagtagcacaga

SEQ ID NO: 1426804 - DNA, 15 bp, Homo sapiens
gtggaagtagcacag

SEQ ID NO: 1426805 - DNA, 15 bp, Homo sapiens
ggtggaagtagcaca

SEQ ID NO: 1426806 - DNA, 15 bp, Homo sapiens
aggtggaagtagcac

SEQ ID NO: 1426807 - DNA, 15 bp, Homo sapiens
aaggtggaagtagca

SEQ ID NO: 1426808 - DNA, 15 bp, Homo sapiens
aaaggtggaagtagc

SEQ ID NO: 1426809 - DNA, 15 bp, Homo sapiens
gaaaggtggaagtag

SEQ ID NO: 1426810 - DNA, 15 bp, Homo sapiens
tgaaaggtggaagta

SEQ ID NO: 1426811 - DNA, 15 bp, Homo sapiens
gtgaaaggtggaagt

SEQ ID NO: 1426812 - DNA, 15 bp, Homo sapiens
tgtgaaaggtggaag

SEQ ID NO: 1426813 - DNA, 15 bp, Homo sapiens
ctgtgaaaggtggaa

SEQ ID NO: 1426814 - DNA, 15 bp, Homo sapiens
cctgtgaaaggtgga

SEQ ID NO: 1426815 - DNA, 15 bp, Homo sapiens
ccctgtgaaaggtgg

SEQ ID NO: 1426816 - DNA, 15 bp, Homo sapiens
tccctgtgaaaggtg

SEQ ID NO: 1426817 - DNA, 15 bp, Homo sapiens
ttccctgtgaaaggt

SEQ ID NO: 1426818 - DNA, 15 bp, Homo sapiens
gttccctgtgaaagg

SEQ ID NO: 1426819 - DNA, 15 bp, Homo sapiens
tgttccctgtgaaag

SEQ ID NO: 1426820 - DNA, 15 bp, Homo sapiens
ctgttccctgtgaaa

SEQ ID NO: 1426821 - DNA, 15 bp, Homo sapiens
tctgttccctgtgaa

SEQ ID NO: 1426822 - DNA, 15 bp, Homo sapiens
ctctgttccctgtga

SEQ ID NO: 1426823 - DNA, 15 bp, Homo sapiens
tctctgttccctgtg

SEQ ID NO: 1426824 - DNA, 15 bp, Homo sapiens
atctctgttccctgt

SEQ ID NO: 1426825 - DNA, 15 bp, Homo sapiens
aatctctgttccctg

SEQ ID NO: 1426826 - DNA, 15 bp, Homo sapiens
aaatctctgttccct

SEQ ID NO: 1426827 - DNA, 15 bp, Homo sapiens
aaaatctctgttccc

SEQ ID NO: 1426828 - DNA, 15 bp, Homo sapiens
taaaatctctgttcc

SEQ ID NO: 1426829 - DNA, 15 bp, Homo sapiens
ttaaaatctctgttc

SEQ ID NO: 1426830 - DNA, 15 bp, Homo sapiens
cttaaaatctctgtt

SEQ ID NO: 1426831 - DNA, 15 bp, Homo sapiens
acttaaaatctctgt

SEQ ID NO: 1426832 - DNA, 15 bp, Homo sapiens
cacttaaaatctctg

SEQ ID NO: 1426833 - DNA, 15 bp, Homo sapiens
tcacttaaaatctct

SEQ ID NO: 1426834 - DNA, 15 bp, Homo sapiens
gtcacttaaaatctc

SEQ ID NO: 1426835 - DNA, 15 bp, Homo sapiens
ggtcacttaaaatct

SEQ ID NO: 1426836 - DNA, 15 bp, Homo sapiens
aggtcacttaaaatc

SEQ ID NO: 1426837 - DNA, 15 bp, Homo sapiens
gaggtcacttaaaat

SEQ ID NO: 1426838 - DNA, 15 bp, Homo sapiens
tgaggtcacttaaaa

SEQ ID NO: 1426839 - DNA, 15 bp, Homo sapiens
ctgaggtcacttaaa

SEQ ID NO: 1426840 - DNA, 15 bp, Homo sapiens
tctgaggtcacttaa

SEQ ID NO: 1426841 - DNA, 15 bp, Homo sapiens
atctgaggtcactta

SEQ ID NO: 1426842 - DNA, 15 bp, Homo sapiens
gatctgaggtcactt

SEQ ID NO: 1426843 - DNA, 15 bp, Homo sapiens
agatctgaggtcact

SEQ ID NO: 1426844 - DNA, 15 bp, Homo sapiens
aagatctgaggtcac

SEQ ID NO: 1426845 - DNA, 15 bp, Homo sapiens
taagatctgaggtca

SEQ ID NO: 1426846 - DNA, 15 bp, Homo sapiens
ctaagatctgaggtc

SEQ ID NO: 1426847 - DNA, 15 bp, Homo sapiens
gctaagatctgaggt

SEQ ID NO: 1426848 - DNA, 15 bp, Homo sapiens
tgctaagatctgagg

SEQ ID NO: 1426849 - DNA, 15 bp, Homo sapiens
atgctaagatctgag

SEQ ID NO: 1426850 - DNA, 15 bp, Homo sapiens
aatgctaagatctga

SEQ ID NO: 1426851 - DNA, 15 bp, Homo sapiens
aaatgctaagatctg

SEQ ID NO: 1426852 - DNA, 15 bp, Homo sapiens
gaaatgctaagatct

SEQ ID NO: 1426853 - DNA, 15 bp, Homo sapiens
agaaatgctaagatc

SEQ ID NO: 1426854 - DNA, 15 bp, Homo sapiens
cagaaatgctaagat

SEQ ID NO: 1426855 - DNA, 15 bp, Homo sapiens
tcagaaatgctaaga

SEQ ID NO: 1426856 - DNA, 15 bp, Homo sapiens
gctcagaaatgctaa

SEQ ID NO: 1426857 - DNA, 15 bp, Homo sapiens
agctcagaaatgcta

SEQ ID NO: 1426858 - DNA, 15 bp, Homo sapiens
aagctcagaaatgct

SEQ ID NO: 1426859 - DNA, 15 bp, Homo sapiens
aaagctcagaaatgc

SEQ ID NO: 1426860 - DNA, 15 bp, Homo sapiens
gaaagctcagaaatg

SEQ ID NO: 1426861 - DNA, 15 bp, Homo sapiens
ggaaagctcagaaat

SEQ ID NO: 1426862 - DNA, 15 bp, Homo sapiens
aggaaagctcagaaa

SEQ ID NO: 1426863 - DNA, 15 bp, Homo sapiens
caggaaagctcagaa

SEQ ID NO: 1426864 - DNA, 15 bp, Homo sapiens
ccaggaaagctcaga

SEQ ID NO: 1426865 - DNA, 15 bp, Homo sapiens
tccaggaaagctcag

SEQ ID NO: 1426866 - DNA, 15 bp, Homo sapiens
ctccaggaaagctca

SEQ ID NO: 1426867 - DNA, 15 bp, Homo sapiens
actccaggaaagctc

SEQ ID NO: 1426868 - DNA, 15 bp, Homo sapiens
aactccaggaaagct

SEQ ID NO: 1426869 - DNA, 15 bp, Homo sapiens
gaactccaggaaagc

SEQ ID NO: 1426870 - DNA, 15 bp, Homo sapiens
agaactccaggaaag

SEQ ID NO: 1426871 - DNA, 15 bp, Homo sapiens
aagaactccaggaaa

SEQ ID NO: 1426872 - DNA, 15 bp, Homo sapiens
taagaactccaggaa

SEQ ID NO: 1426873 - DNA, 15 bp, Homo sapiens
gtaagaactccagga

SEQ ID NO: 1426874 - DNA, 15 bp, Homo sapiens
agtaagaactccagg

SEQ ID NO: 1426875 - DNA, 15 bp, Homo sapiens
tagtaagaactccag

SEQ ID NO: 1426876 - DNA, 15 bp, Homo sapiens
gtagtaagaactcca

SEQ ID NO: 1426877 - DNA, 15 bp, Homo sapiens
ggtagtaagaactcc

SEQ ID NO: 1426878 - DNA, 15 bp, Homo sapiens
tggtagtaagaactc

SEQ ID NO: 1426879 - DNA, 15 bp, Homo sapiens
atggtagtaagaact

SEQ ID NO: 1426880 - DNA, 15 bp, Homo sapiens
aatggtagtaagaac

SEQ ID NO: 1426881 - DNA, 15 bp, Homo sapiens
gaatggtagtaagaa

SEQ ID NO: 1426882 - DNA, 15 bp, Homo sapiens
agaatggtagtaaga

SEQ ID NO: 1426883 - DNA, 15 bp, Homo sapiens
cagaatggtagtaag

SEQ ID NO: 1426884 - DNA, 15 bp, Homo sapiens
tcagaatggtagtaa

SEQ ID NO: 1426885 - DNA, 15 bp, Homo sapiens
gtcagaatggtagta

SEQ ID NO: 1426886 - DNA, 15 bp, Homo sapiens
agtcagaatggtagt

SEQ ID NO: 1426887 - DNA, 15 bp, Homo sapiens
aagtcagaatggtag

SEQ ID NO: 1426888 - DNA, 15 bp, Homo sapiens
taagtcagaatggta

SEQ ID NO: 1426889 - DNA, 15 bp, Homo sapiens
ctaagtcagaatggt

SEQ ID NO: 1426890 - DNA, 15 bp, Homo sapiens
actaagtcagaatgg

SEQ ID NO: 1426891 - DNA, 15 bp, Homo sapiens
tactaagtcagaatg

SEQ ID NO: 1426892 - DNA, 15 bp, Homo sapiens
ttactaagtcagaat

SEQ ID NO: 1426893 - DNA, 15 bp, Homo sapiens
cttactaagtcagaa

SEQ ID NO: 1426894 - DNA, 15 bp, Homo sapiens
acttactaagtcaga

SEQ ID NO: 1426895 - DNA, 15 bp, Homo sapiens
cacttactaagtcag

SEQ ID NO: 1426896 - DNA, 15 bp, Homo sapiens
ccacttactaagtca

SEQ ID NO: 1426897 - DNA, 15 bp, Homo sapiens
accacttactaagtc

SEQ ID NO: 1426898 - DNA, 15 bp, Homo sapiens
caccacttactaagt

SEQ ID NO: 1426899 - DNA, 15 bp, Homo sapiens
tcaccacttactaag

SEQ ID NO: 1426900 - DNA, 15 bp, Homo sapiens
gtcaccacttactaa

SEQ ID NO: 1426901 - DNA, 15 bp, Homo sapiens
ggtcaccacttacta

SEQ ID NO: 1426902 - DNA, 15 bp, Homo sapiens
aggtcaccacttact

SEQ ID NO: 1426903 - DNA, 15 bp, Homo sapiens
caggtcaccacttac

SEQ ID NO: 1426904 - DNA, 15 bp, Homo sapiens
acaggtcaccactta

SEQ ID NO: 1426905 - DNA, 15 bp, Homo sapiens
tacaggtcaccactt

SEQ ID NO: 1426906 - DNA, 15 bp, Homo sapiens
atacaggtcaccact

SEQ ID NO: 1426907 - DNA, 15 bp, Homo sapiens
aatacaggtcaccac

SEQ ID NO: 1426908 - DNA, 15 bp, Homo sapiens
gaatacaggtcacca

SEQ ID NO: 1426909 - DNA, 15 bp, Homo sapiens
agaatacaggtcacc

SEQ ID NO: 1426910 - DNA, 15 bp, Homo sapiens
cagaatacaggtcac

SEQ ID NO: 1426911 - DNA, 15 bp, Homo sapiens
tcagaatacaggtca

SEQ ID NO: 1426912 - DNA, 15 bp, Homo sapiens
ttcagaatacaggtc

SEQ ID NO: 1426913 - DNA, 15 bp, Homo sapiens
tttcagaatacaggt

SEQ ID NO: 1426914 - DNA, 15 bp, Homo sapiens
gtttcagaatacagg

SEQ ID NO: 1426915 - DNA, 15 bp, Homo sapiens
agtttcagaatacag

SEQ ID NO: 1426916 - DNA, 15 bp, Homo sapiens
cagtttcagaataca

SEQ ID NO: 1426917 - DNA, 15 bp, Homo sapiens
tcagtttcagaatac

SEQ ID NO: 1426918 - DNA, 15 bp, Homo sapiens
ctcagtttcagaata

SEQ ID NO: 1426919 - DNA, 15 bp, Homo sapiens
cctcagtttcagaat

SEQ ID NO: 1426920 - DNA, 15 bp, Homo sapiens
ccctcagtttcagaa

SEQ ID NO: 1426921 - DNA, 15 bp, Homo sapiens
cccctcagtttcaga

SEQ ID NO: 1426922 - DNA, 15 bp, Homo sapiens
gcccctcagtttcag

SEQ ID NO: 1426923 - DNA, 15 bp, Homo sapiens
agcccctcagtttca

SEQ ID NO: 1426924 - DNA, 15 bp, Homo sapiens
cagcccctcagtttc

SEQ ID NO: 1426925 - DNA, 15 bp, Homo sapiens
tcagcccctcagttt

SEQ ID NO: 1426926 - DNA, 15 bp, Homo sapiens
gtcagcccctcagtt

SEQ ID NO: 1426927 - DNA, 15 bp, Homo sapiens
tgtcagcccctcagt

SEQ ID NO: 1426928 - DNA, 15 bp, Homo sapiens
atgtcagcccctcag

SEQ ID NO: 1426929 - DNA, 15 bp, Homo sapiens
tatgtcagcccctca

SEQ ID NO: 1426930 - DNA, 15 bp, Homo sapiens
atatgtcagcccctc

SEQ ID NO: 1426931 - DNA, 15 bp, Homo sapiens
gatatgtcagcccct

SEQ ID NO: 1426932 - DNA, 15 bp, Homo sapiens
ggatatgtcagcccc

SEQ ID NO: 1426933 - DNA, 15 bp, Homo sapiens
tggatatgtcagccc

SEQ ID NO: 1426934 - DNA, 15 bp, Homo sapiens
ttggatatgtcagcc

SEQ ID NO: 1426935 - DNA, 15 bp, Homo sapiens
attggatatgtcagc

SEQ ID NO: 1426936 - DNA, 15 bp, Homo sapiens
gattggatatgtcag

SEQ ID NO: 1426937 - DNA, 15 bp, Homo sapiens
agattggatatgtca

SEQ ID NO: 1426938 - DNA, 15 bp, Homo sapiens
aagattggatatgtc

SEQ ID NO: 1426939 - DNA, 15 bp, Homo sapiens
gaagattggatatgt

SEQ ID NO: 1426940 - DNA, 15 bp, Homo sapiens
ggaagattggatatg

SEQ ID NO: 1426941 - DNA, 15 bp, Homo sapiens
aggaagattggatat

SEQ ID NO: 1426942 - DNA, 15 bp, Homo sapiens
aaggaagattggata

SEQ ID NO: 1426943 - DNA, 15 bp, Homo sapiens
caaggaagattggat

SEQ ID NO: 1426944 - DNA, 15 bp, Homo sapiens
ccaaggaagattgga

SEQ ID NO: 1426945 - DNA, 15 bp, Homo sapiens
cccaaggaagattgg

SEQ ID NO: 1426946 - DNA, 15 bp, Homo sapiens
tcccaaggaagattg

SEQ ID NO: 1426947 - DNA, 15 bp, Homo sapiens
ttcccaaggaagatt

SEQ ID NO: 1426948 - DNA, 15 bp, Homo sapiens
attcccaaggaagat

SEQ ID NO: 1426949 - DNA, 15 bp, Homo sapiens
cattcccaaggaaga

SEQ ID NO: 1426950 - DNA, 15 bp, Homo sapiens
acattcccaaggaag

SEQ ID NO: 1426951 - DNA, 15 bp, Homo sapiens
cacattcccaaggaa

SEQ ID NO: 1426952 - DNA, 15 bp, Homo sapiens
tcacattcccaagga

SEQ ID NO: 1426953 - DNA, 15 bp, Homo sapiens
atcacattcccaagg

SEQ ID NO: 1426954 - DNA, 15 bp, Homo sapiens
tatcacattcccaag

SEQ ID NO: 1426955 - DNA, 15 bp, Homo sapiens
ttatcacattcccaa

SEQ ID NO: 1426956 - DNA, 15 bp, Homo sapiens
tttatcacattccca

SEQ ID NO: 1426957 - DNA, 15 bp, Homo sapiens
ctttatcacattccc

SEQ ID NO: 1426958 - DNA, 15 bp, Homo sapiens
gctttatcacattcc

SEQ ID NO: 1426959 - DNA, 15 bp, Homo sapiens
tgctttatcacattc

SEQ ID NO: 1426960 - DNA, 15 bp, Homo sapiens
ctgctttatcacatt

SEQ ID NO: 1426961 - DNA, 15 bp, Homo sapiens
gctgctttatcacat

SEQ ID NO: 1426962 - DNA, 15 bp, Homo sapiens
agctgctttatcaca

SEQ ID NO: 1426963 - DNA, 15 bp, Homo sapiens
gagctgctttatcac

SEQ ID NO: 1426964 - DNA, 15 bp, Homo sapiens
ggagctgctttatca

SEQ ID NO: 1426965 - DNA, 15 bp, Homo sapiens
cggagctgctttatc

SEQ ID NO: 1426966 - DNA, 15 bp, Homo sapiens
gcggagctgctttat

SEQ ID NO: 1426967 - DNA, 15 bp, Homo sapiens
agcggagctgcttta

SEQ ID NO: 1426968 - DNA, 15 bp, Homo sapiens
aagcggagctgcttt

SEQ ID NO: 1426969 - DNA, 15 bp, Homo sapiens
gaagcggagctgctt

SEQ ID NO: 1426970 - DNA, 15 bp, Homo sapiens
tgaagcggagctgct

SEQ ID NO: 1426971 - DNA, 15 bp, Homo sapiens
ttgaagcggagctgc

SEQ ID NO: 1426972 - DNA, 15 bp, Homo sapiens
cttgaagcggagctg

SEQ ID NO: 1426973 - DNA, 15 bp, Homo sapiens
acttgaagcggagct

SEQ ID NO: 1426974 - DNA, 15 bp, Homo sapiens
tacttgaagcggagc

SEQ ID NO: 1426975 - DNA, 15 bp, Homo sapiens
ttacttgaagcggag

SEQ ID NO: 1426976 - DNA, 15 bp, Homo sapiens
cttacttgaagcgga

SEQ ID NO: 1426977 - DNA, 15 bp, Homo sapiens
acttacttgaagcgg

SEQ ID NO: 1426978 - DNA, 15 bp, Homo sapiens
tacttacttgaagcg

SEQ ID NO: 1426979 - DNA, 15 bp, Homo sapiens
ttacttacttgaagc

SEQ ID NO: 1426980 - DNA, 15 bp, Homo sapiens
tttacttacttgaag

SEQ ID NO: 1426981 - DNA, 15 bp, Homo sapiens
ttttacttacttgaa

SEQ ID NO: 1426982 - DNA, 15 bp, Homo sapiens
gttttacttacttga

SEQ ID NO: 1426983 - DNA, 15 bp, Homo sapiens
agttttacttacttg

SEQ ID NO: 1426984 - DNA, 15 bp, Homo sapiens
tagttttacttactt

SEQ ID NO: 1426985 - DNA, 15 bp, Homo sapiens
ttagttttacttact

SEQ ID NO: 1426986 - DNA, 15 bp, Homo sapiens
attagttttacttac

SEQ ID NO: 1426987 - DNA, 15 bp, Homo sapiens
tattagttttactta

SEQ ID NO: 1426988 - DNA, 15 bp, Homo sapiens
ttattagttttactt

SEQ ID NO: 1426989 - DNA, 15 bp, Homo sapiens
tttattagttttact

SEQ ID NO: 1426990 - DNA, 15 bp, Homo sapiens
gtttattagttttac

SEQ ID NO: 1426991 - DNA, 15 bp, Homo sapiens
tgtttattagtttta

SEQ ID NO: 1426992 - DNA, 15 bp, Homo sapiens
gtgtttattagtttt

SEQ ID NO: 1426993 - DNA, 15 bp, Homo sapiens
agtgtttattagttt

SEQ ID NO: 1426994 - DNA, 15 bp, Homo sapiens
aagtgtttattagtt

SEQ ID NO: 1426995 - DNA, 15 bp, Homo sapiens
gaagtgtttattagt

SEQ ID NO: 1426996 - DNA, 15 bp, Homo sapiens
ggaagtgtttattag

SEQ ID NO: 1426997 - DNA, 15 bp, Homo sapiens
tggaagtgtttatta

SEQ ID NO: 1426998 - DNA, 15 bp, Homo sapiens
ctggaagtgtttatt

SEQ ID NO: 1426999 - DNA, 15 bp, Homo sapiens
actggaagtgtttat

SEQ ID NO: 1427000 - DNA, 15 bp, Homo sapiens
cactggaagtgttta

SEQ ID NO: 1427001 - DNA, 15 bp, Homo sapiens
acactggaagtgttt

SEQ ID NO: 1427002 - DNA, 15 bp, Homo sapiens
aacactggaagtgtt

SEQ ID NO: 1427003 - DNA, 15 bp, Homo sapiens
aaacactggaagtgt

SEQ ID NO: 1427004 - DNA, 15 bp, Homo sapiens
gaaacactggaagtg

SEQ ID NO: 1427005 - DNA, 15 bp, Homo sapiens
tgaaacactggaagt

SEQ ID NO: 1427006 - DNA, 15 bp, Homo sapiens
atgaaacactggaag

SEQ ID NO: 1427007 - DNA, 15 bp, Homo sapiens
aatgaaacactggaa

SEQ ID NO: 1427008 - DNA, 15 bp, Homo sapiens
taatgaaacactgga

SEQ ID NO: 1427009 - DNA, 15 bp, Homo sapiens
ttaatgaaacactgg

SEQ ID NO: 1427010 - DNA, 15 bp, Homo sapiens
cttaatgaaacactg

SEQ ID NO: 1427011 - DNA, 15 bp, Homo sapiens
tcttaatgaaacact

SEQ ID NO: 1427012 - DNA, 15 bp, Homo sapiens
ttcttaatgaaacac

SEQ ID NO: 1427013 - DNA, 15 bp, Homo sapiens
attcttaatgaaaca

SEQ ID NO: 1427014 - DNA, 15 bp, Homo sapiens
tattcttaatgaaac

SEQ ID NO: 1427015 - DNA, 15 bp, Homo sapiens
ttattcttaatgaaa

SEQ ID NO: 1427016 - DNA, 15 bp, Homo sapiens
tttattcttaatgaa

SEQ ID NO: 1427017 - DNA, 15 bp, Homo sapiens
ttttattcttaatga

SEQ ID NO: 1427018 - DNA, 15 bp, Homo sapiens
attttattcttaatg

SEQ ID NO: 1427019 - DNA, 15 bp, Homo sapiens
tattttattcttaat

SEQ ID NO: 1427020 - DNA, 15 bp, Homo sapiens
ctattttattcttaa

SEQ ID NO: 1427021 - DNA, 15 bp, Homo sapiens
tctattttattctta

SEQ ID NO: 1427022 - DNA, 15 bp, Homo sapiens
ttctattttattctt

SEQ ID NO: 1427023 - DNA, 15 bp, Homo sapiens
tttctattttattct

SEQ ID NO: 1427024 - DNA, 15 bp, Homo sapiens
atttctattttattc

SEQ ID NO: 1427025 - DNA, 15 bp, Homo sapiens
aatttctattttatt

SEQ ID NO: 1427026 - DNA, 15 bp, Homo sapiens
caatttctattttat

SEQ ID NO: 1427027 - DNA, 15 bp, Homo sapiens
tcaatttctatttta

SEQ ID NO: 1427028 - DNA, 15 bp, Homo sapiens
atcaatttctatttt

SEQ ID NO: 1427029 - DNA, 15 bp, Homo sapiens
aatcaatttctattt

SEQ ID NO: 1427030 - DNA, 15 bp, Homo sapiens
aaatcaatttctatt

SEQ ID NO: 1427031 - DNA, 15 bp, Homo sapiens
taaatcaatttctat

SEQ ID NO: 1427032 - DNA, 15 bp, Homo sapiens
ttaaatcaatttcta

SEQ ID NO: 1427033 - DNA, 15 bp, Homo sapiens
attaaatcaatttct

SEQ ID NO: 1427034 - DNA, 15 bp, Homo sapiens
aattaaatcaatttc

SEQ ID NO: 1427035 - DNA, 15 bp, Homo sapiens
aaattaaatcaattt

SEQ ID NO: 1427036 - DNA, 15 bp, Homo sapiens
caaattaaatcaatt

SEQ ID NO: 1427037 - DNA, 15 bp, Homo sapiens
acaaattaaatcaat

SEQ ID NO: 1427038 - DNA, 15 bp, Homo sapiens
cacaaattaaatcaa

SEQ ID NO: 1427039 - DNA, 15 bp, Homo sapiens
tcacaaattaaatca

SEQ ID NO: 1427040 - DNA, 15 bp, Homo sapiens
ttcacaaattaaatc

SEQ ID NO: 1427041 - DNA, 15 bp, Homo sapiens
cttcacaaattaaat

SEQ ID NO: 1427042 - DNA, 15 bp, Homo sapiens
acttcacaaattaaa

SEQ ID NO: 1427043 - DNA, 15 bp, Homo sapiens
gacttcacaaattaa

SEQ ID NO: 1427044 - DNA, 15 bp, Homo sapiens
agacttcacaaatta

SEQ ID NO: 1427045 - DNA, 15 bp, Homo sapiens
aagacttcacaaatt

SEQ ID NO: 1427046 - DNA, 15 bp, Homo sapiens
ttaagacttcacaaa

SEQ ID NO: 1427047 - DNA, 15 bp, Homo sapiens
attaagacttcacaa

SEQ ID NO: 1427048 - DNA, 15 bp, Homo sapiens
tattaagacttcaca

SEQ ID NO: 1427049 - DNA, 15 bp, Homo sapiens
gtattaagacttcac

SEQ ID NO: 1427050 - DNA, 15 bp, Homo sapiens
cgtattaagacttca

SEQ ID NO: 1427051 - DNA, 15 bp, Homo sapiens
acgtattaagacttc

SEQ ID NO: 1427052 - DNA, 15 bp, Homo sapiens
aacgtattaagactt

SEQ ID NO: 1427053 - DNA, 15 bp, Homo sapiens
aaacgtattaagact

SEQ ID NO: 1427054 - DNA, 15 bp, Homo sapiens
caaacgtattaagac

SEQ ID NO: 1427055 - DNA, 15 bp, Homo sapiens
tcaaacgtattaaga

SEQ ID NO: 1427056 - DNA, 15 bp, Homo sapiens
gtcaaacgtattaag

SEQ ID NO: 1427057 - DNA, 15 bp, Homo sapiens
agtcaaacgtattaa

SEQ ID NO: 1427058 - DNA, 15 bp, Homo sapiens
aagtcaaacgtatta

SEQ ID NO: 1427059 - DNA, 15 bp, Homo sapiens
aaagtcaaacgtatt

SEQ ID NO: 1427060 - DNA, 15 bp, Homo sapiens
gaaagtcaaacgtat

SEQ ID NO: 1427061 - DNA, 15 bp, Homo sapiens
tgaaagtcaaacgta

SEQ ID NO: 1427062 - DNA, 15 bp, Homo sapiens
ttgaaagtcaaacgt

SEQ ID NO: 1427063 - DNA, 15 bp, Homo sapiens
attgaaagtcaaacg

SEQ ID NO: 1427064 - DNA, 15 bp, Homo sapiens
tattgaaagtcaaac

SEQ ID NO: 1427065 - DNA, 15 bp, Homo sapiens
ttattgaaagtcaaa

SEQ ID NO: 1427066 - DNA, 15 bp, Homo sapiens
tttattgaaagtcaa

SEQ ID NO: 1427067 - DNA, 15 bp, Homo sapiens
ctttattgaaagtca

SEQ ID NO: 1427068 - DNA, 15 bp, Homo sapiens
tctttattgaaagtc

SEQ ID NO: 1427069 - DNA, 15 bp, Homo sapiens
atctttattgaaagt

SEQ ID NO: 1427070 - DNA, 15 bp, Homo sapiens
catctttattgaaag

SEQ ID NO: 1427071 - DNA, 15 bp, Homo sapiens
acatctttattgaaa

SEQ ID NO: 1427072 - DNA, 15 bp, Homo sapiens
cacatctttattgaa

SEQ ID NO: 1427073 - DNA, 15 bp, Homo sapiens
tcacatctttattga

SEQ ID NO: 1427074 - DNA, 15 bp, Homo sapiens
ttcacatctttattg

SEQ ID NO: 1427075 - DNA, 15 bp, Homo sapiens
cttcacatctttatt

SEQ ID NO: 1427076 - DNA, 15 bp, Homo sapiens
tcttcacatctttat

SEQ ID NO: 1427077 - DNA, 15 bp, Homo sapiens
atcttcacatcttta

SEQ ID NO: 1427078 - DNA, 15 bp, Homo sapiens
tatcttcacatcttt

SEQ ID NO: 1427079 - DNA, 15 bp, Homo sapiens
ttatcttcacatctt

SEQ ID NO: 1427080 - DNA, 15 bp, Homo sapiens
tttatcttcacatct

SEQ ID NO: 1427081 - DNA, 15 bp, Homo sapiens
ttttatcttcacatc

SEQ ID NO: 1427082 - DNA, 15 bp, Homo sapiens
cttttatcttcacat

SEQ ID NO: 1427083 - DNA, 15 bp, Homo sapiens
acttttatcttcaca

SEQ ID NO: 1427084 - DNA, 15 bp, Homo sapiens
cacttttatcttcac

SEQ ID NO: 1427085 - DNA, 15 bp, Homo sapiens
acacttttatcttca

SEQ ID NO: 1427086 - DNA, 15 bp, Homo sapiens
aacacttttatcttc

SEQ ID NO: 1427087 - DNA, 15 bp, Homo sapiens
gaacacttttatctt

SEQ ID NO: 1427088 - DNA, 15 bp, Homo sapiens
tgaacacttttatct

SEQ ID NO: 1427089 - DNA, 15 bp, Homo sapiens
ctgaacacttttatc

SEQ ID NO: 1427090 - DNA, 15 bp, Homo sapiens
tctgaacacttttat

SEQ ID NO: 1427091 - DNA, 15 bp, Homo sapiens
ctctgaacactttta

SEQ ID NO: 1427092 - DNA, 15 bp, Homo sapiens
tctctgaacactttt

SEQ ID NO: 1427093 - DNA, 15 bp, Homo sapiens
ttctctgaacacttt

SEQ ID NO: 1427094 - DNA, 15 bp, Homo sapiens
tttctctgaacactt

SEQ ID NO: 1427095 - DNA, 15 bp, Homo sapiens
ttttctctgaacact

SEQ ID NO: 1427096 - DNA, 15 bp, Homo sapiens
cttttctctgaacac

SEQ ID NO: 1427097 - DNA, 15 bp, Homo sapiens
gcttttctctgaaca

SEQ ID NO: 1427098 - DNA, 15 bp, Homo sapiens
agcttttctctgaac

SEQ ID NO: 1427099 - DNA, 15 bp, Homo sapiens
tagcttttctctgaa

SEQ ID NO: 1427100 - DNA, 15 bp, Homo sapiens
ttagcttttctctga

SEQ ID NO: 1427101 - DNA, 15 bp, Homo sapiens
tttagcttttctctg

SEQ ID NO: 1427102 - DNA, 15 bp, Homo sapiens
atttagcttttctct

SEQ ID NO: 1427103 - DNA, 15 bp, Homo sapiens
aatttagcttttctc

SEQ ID NO: 1427104 - DNA, 15 bp, Homo sapiens
taatttagcttttct

SEQ ID NO: 1427105 - DNA, 15 bp, Homo sapiens
ttaatttagcttttc

SEQ ID NO: 1427106 - DNA, 15 bp, Homo sapiens
tttaatttagctttt

SEQ ID NO: 1427107 - DNA, 15 bp, Homo sapiens
ttttaatttagcttt

SEQ ID NO: 1427108 - DNA, 15 bp, Homo sapiens
tttttaatttagctt

SEQ ID NO: 1427109 - DNA, 15 bp, Homo sapiens
gtttttaatttagct

SEQ ID NO: 1427110 - DNA, 15 bp, Homo sapiens
tgtttttaatttagc

SEQ ID NO: 1427111 - DNA, 15 bp, Homo sapiens
ctgtttttaatttag

SEQ ID NO: 1427112 - DNA, 15 bp, Homo sapiens
cctgtttttaattta

SEQ ID NO: 1427113 - DNA, 15 bp, Homo sapiens
tcctgtttttaattt

SEQ ID NO: 1427114 - DNA, 15 bp, Homo sapiens
ttcctgtttttaatt

SEQ ID NO: 1427115 - DNA, 15 bp, Homo sapiens
tttcctgtttttaat

SEQ ID NO: 1427116 - DNA, 15 bp, Homo sapiens
gtttcctgtttttaa

SEQ ID NO: 1427117 - DNA, 15 bp, Homo sapiens
tgtttcctgttttta

SEQ ID NO: 1427118 - DNA, 15 bp, Homo sapiens
ctgtttcctgttttt

SEQ ID NO: 1427119 - DNA, 15 bp, Homo sapiens
cctgtttcctgtttt

SEQ ID NO: 1427120 - DNA, 15 bp, Homo sapiens
tcctgtttcctgttt

SEQ ID NO: 1427121 - DNA, 15 bp, Homo sapiens
ctcctgtttcctgtt

SEQ ID NO: 1427122 - DNA, 15 bp, Homo sapiens
tctcctgtttcctgt

SEQ ID NO: 1427123 - DNA, 15 bp, Homo sapiens
ttctcctgtttcctg

SEQ ID NO: 1427124 - DNA, 15 bp, Homo sapiens
tttctcctgtttcct

SEQ ID NO: 1427125 - DNA, 15 bp, Homo sapiens
ttttctcctgtttcc

SEQ ID NO: 1427126 - DNA, 15 bp, Homo sapiens
tttttctcctgtttc

SEQ ID NO: 1427127 - DNA, 15 bp, Homo sapiens
ttttttctcctgttt

SEQ ID NO: 1427128 - DNA, 15 bp, Homo sapiens
tttttttctcctgtt

SEQ ID NO: 1427129 - DNA, 15 bp, Homo sapiens
atttttttctcctgt

SEQ ID NO: 1427130 - DNA, 15 bp, Homo sapiens
catttttttctcctg

SEQ ID NO: 1427131 - DNA, 15 bp, Homo sapiens
acatttttttctcct

SEQ ID NO: 1427132 - DNA, 15 bp, Homo sapiens
gacatttttttctcc

SEQ ID NO: 1427133 - DNA, 15 bp, Homo sapiens
agacatttttttctc

SEQ ID NO: 1427134 - DNA, 15 bp, Homo sapiens
tagacatttttttct

SEQ ID NO: 1427135 - DNA, 15 bp, Homo sapiens
ctagacatttttttc

SEQ ID NO: 1427136 - DNA, 15 bp, Homo sapiens
tctagacattttttt

SEQ ID NO: 1427137 - DNA, 15 bp, Homo sapiens
ctctagacatttttt

SEQ ID NO: 1427138 - DNA, 15 bp, Homo sapiens
tctctagacattttt

SEQ ID NO: 1427139 - DNA, 15 bp, Homo sapiens
ttctctagacatttt

SEQ ID NO: 1427140 - DNA, 15 bp, Homo sapiens
gttctctagacattt

SEQ ID NO: 1427141 - DNA, 15 bp, Homo sapiens
tgttctctagacatt

SEQ ID NO: 1427142 - DNA, 15 bp, Homo sapiens
ctgttctctagacat

SEQ ID NO: 1427143 - DNA, 15 bp, Homo sapiens
tctgttctctagaca

SEQ ID NO: 1427144 - DNA, 15 bp, Homo sapiens
ttctgttctctagac

SEQ ID NO: 1427145 - DNA, 15 bp, Homo sapiens
cttctgttctctaga

SEQ ID NO: 1427146 - DNA, 15 bp, Homo sapiens
tcttctgttctctag

SEQ ID NO: 1427147 - DNA, 15 bp, Homo sapiens
gtcttctgttctcta

SEQ ID NO: 1427148 - DNA, 15 bp, Homo sapiens
tgtcttctgttctct

SEQ ID NO: 1427149 - DNA, 15 bp, Homo sapiens
gtgtcttctgttctc

SEQ ID NO: 1427150 - DNA, 15 bp, Homo sapiens
tgtgtcttctgttct

SEQ ID NO: 1427151 - DNA, 15 bp, Homo sapiens
ttgtgtcttctgttc

SEQ ID NO: 1427152 - DNA, 15 bp, Homo sapiens
cttgtgtcttctgtt

SEQ ID NO: 1427153 - DNA, 15 bp, Homo sapiens
acttgtgtcttctgt

SEQ ID NO: 1427154 - DNA, 15 bp, Homo sapiens
aacttgtgtcttctg

SEQ ID NO: 1427155 - DNA, 15 bp, Homo sapiens
aaacttgtgtcttct

SEQ ID NO: 1427156 - DNA, 15 bp, Homo sapiens
gaaacttgtgtcttc

SEQ ID NO: 1427157 - DNA, 15 bp, Homo sapiens
agaaacttgtgtctt

SEQ ID NO: 1427158 - DNA, 15 bp, Homo sapiens
aagaaacttgtgtct

SEQ ID NO: 1427159 - DNA, 15 bp, Homo sapiens
aaagaaacttgtgtc

SEQ ID NO: 1427160 - DNA, 15 bp, Homo sapiens
taaagaaacttgtgt

SEQ ID NO: 1427161 - DNA, 15 bp, Homo sapiens
ttaaagaaacttgtg

SEQ ID NO: 1427162 - DNA, 15 bp, Homo sapiens
tttaaagaaacttgt

SEQ ID NO: 1427163 - DNA, 15 bp, Homo sapiens
atttaaagaaacttg

SEQ ID NO: 1427164 - DNA, 15 bp, Homo sapiens
tatttaaagaaactt

SEQ ID NO: 1427165 - DNA, 15 bp, Homo sapiens
gtatttaaagaaact

SEQ ID NO: 1427166 - DNA, 15 bp, Homo sapiens
agtatttaaagaaac

SEQ ID NO: 1427167 - DNA, 15 bp, Homo sapiens
aagtatttaaagaaa

SEQ ID NO: 1427168 - DNA, 15 bp, Homo sapiens
aaagtatttaaagaa

SEQ ID NO: 1427169 - DNA, 15 bp, Homo sapiens
taaagtatttaaaga

SEQ ID NO: 1427170 - DNA, 15 bp, Homo sapiens
ttaaagtatttaaag

SEQ ID NO: 1427171 - DNA, 15 bp, Homo sapiens
cttaaagtatttaaa

SEQ ID NO: 1427172 - DNA, 15 bp, Homo sapiens
tcttaaagtatttaa

SEQ ID NO: 1427173 - DNA, 15 bp, Homo sapiens
ttcttaaagtattta

SEQ ID NO: 1427174 - DNA, 15 bp, Homo sapiens
attcttaaagtattt

SEQ ID NO: 1427175 - DNA, 15 bp, Homo sapiens
tattcttaaagtatt

SEQ ID NO: 1427176 - DNA, 15 bp, Homo sapiens
ttattcttaaagtat

SEQ ID NO: 1427177 - DNA, 15 bp, Homo sapiens
attattcttaaagta

SEQ ID NO: 1427178 - DNA, 15 bp, Homo sapiens
aattattcttaaagt

SEQ ID NO: 1427179 - DNA, 15 bp, Homo sapiens
caattattcttaaag

SEQ ID NO: 1427180 - DNA, 15 bp, Homo sapiens
gcaattattcttaaa

SEQ ID NO: 1427181 - DNA, 15 bp, Homo sapiens
ggcaattattcttaa

SEQ ID NO: 1427182 - DNA, 15 bp, Homo sapiens
tggcaattattctta

SEQ ID NO: 1427183 - DNA, 15 bp, Homo sapiens
ttggcaattattctt

SEQ ID NO: 1427184 - DNA, 15 bp, Homo sapiens
cttggcaattattct

SEQ ID NO: 1427185 - DNA, 15 bp, Homo sapiens
tcttggcaattattc

SEQ ID NO: 1427186 - DNA, 15 bp, Homo sapiens
ttcttggcaattatt

SEQ ID NO: 1427187 - DNA, 15 bp, Homo sapiens
tttcttggcaattat

SEQ ID NO: 1427188 - DNA, 15 bp, Homo sapiens
ctttcttggcaatta

SEQ ID NO: 1427189 - DNA, 15 bp, Homo sapiens
tctttcttggcaatt

SEQ ID NO: 1427190 - DNA, 15 bp, Homo sapiens
ttctttcttggcaat

SEQ ID NO: 1427191 - DNA, 15 bp, Homo sapiens
tttctttcttggcaa

SEQ ID NO: 1427192 - DNA, 15 bp, Homo sapiens
atttctttcttggca

SEQ ID NO: 1427193 - DNA, 15 bp, Homo sapiens
aatttctttcttggc

SEQ ID NO: 1427194 - DNA, 15 bp, Homo sapiens
caatttctttcttgg

SEQ ID NO: 1427195 - DNA, 15 bp, Homo sapiens
tcaatttctttcttg

SEQ ID NO: 1427196 - DNA, 15 bp, Homo sapiens
gtcaatttctttctt

SEQ ID NO: 1427197 - DNA, 15 bp, Homo sapiens
agtcaatttctttct

SEQ ID NO: 1427198 - DNA, 15 bp, Homo sapiens
tagtcaatttctttc

SEQ ID NO: 1427199 - DNA, 15 bp, Homo sapiens
ttagtcaatttcttt

SEQ ID NO: 1427200 - DNA, 15 bp, Homo sapiens
tttagtcaatttctt

SEQ ID NO: 1427201 - DNA, 15 bp, Homo sapiens
atttagtcaatttct

SEQ ID NO: 1427202 - DNA, 15 bp, Homo sapiens
catttagtcaatttc

SEQ ID NO: 1427203 - DNA, 15 bp, Homo sapiens
gcatttagtcaattt

SEQ ID NO: 1427204 - DNA, 15 bp, Homo sapiens
tgcatttagtcaatt

SEQ ID NO: 1427205 - DNA, 15 bp, Homo sapiens
ctgcatttagtcaat

SEQ ID NO: 1427206 - DNA, 15 bp, Homo sapiens
tctgcatttagtcaa

SEQ ID NO: 1427207 - DNA, 15 bp, Homo sapiens
ttctgcatttagtca

SEQ ID NO: 1427208 - DNA, 15 bp, Homo sapiens
gttctgcatttagtc

SEQ ID NO: 1427209 - DNA, 15 bp, Homo sapiens
agttctgcatttagt

SEQ ID NO: 1427210 - DNA, 15 bp, Homo sapiens
cagttctgcatttag

SEQ ID NO: 1427211 - DNA, 15 bp, Homo sapiens
tcagttctgcattta

SEQ ID NO: 1427212 - DNA, 15 bp, Homo sapiens
ttcagttctgcattt

SEQ ID NO: 1427213 - DNA, 15 bp, Homo sapiens
tttcagttctgcatt

SEQ ID NO: 1427214 - DNA, 15 bp, Homo sapiens
ctttcagttctgcat

SEQ ID NO: 1427215 - DNA, 15 bp, Homo sapiens
tctttcagttctgca

SEQ ID NO: 1427216 - DNA, 15 bp, Homo sapiens
ttctttcagttctgc

SEQ ID NO: 1427217 - DNA, 15 bp, Homo sapiens
tttctttcagttctg

SEQ ID NO: 1427218 - DNA, 15 bp, Homo sapiens
ttttctttcagttct

SEQ ID NO: 1427219 - DNA, 15 bp, Homo sapiens
attttctttcagttc

SEQ ID NO: 1427220 - DNA, 15 bp, Homo sapiens
cattttctttcagtt

SEQ ID NO: 1427221 - DNA, 15 bp, Homo sapiens
tcattttctttcagt

SEQ ID NO: 1427222 - DNA, 15 bp, Homo sapiens
ttcattttctttcag

SEQ ID NO: 1427223 - DNA, 15 bp, Homo sapiens
attcattttctttca

SEQ ID NO: 1427224 - DNA, 15 bp, Homo sapiens
aattcattttctttc

SEQ ID NO: 1427225 - DNA, 15 bp, Homo sapiens
aaattcattttcttt

SEQ ID NO: 1427226 - DNA, 15 bp, Homo sapiens
aaaattcattttctt

SEQ ID NO: 1427227 - DNA, 15 bp, Homo sapiens
taaaattcattttct

SEQ ID NO: 1427228 - DNA, 15 bp, Homo sapiens
ttaaaattcattttc

SEQ ID NO: 1427229 - DNA, 15 bp, Homo sapiens
tttaaaattcatttt

SEQ ID NO: 1427230 - DNA, 15 bp, Homo sapiens
ttttaaaattcattt

SEQ ID NO: 1427231 - DNA, 15 bp, Homo sapiens
gttttaaaattcatt

SEQ ID NO: 1427232 - DNA, 15 bp, Homo sapiens
agttttaaaattcat

SEQ ID NO: 1427233 - DNA, 15 bp, Homo sapiens
aagttttaaaattca

SEQ ID NO: 1427234 - DNA, 15 bp, Homo sapiens
gaagttttaaaattc

SEQ ID NO: 1427235 - DNA, 15 bp, Homo sapiens
tgaagttttaaaatt

SEQ ID NO: 1427236 - DNA, 15 bp, Homo sapiens
ttgaagttttaaaat

SEQ ID NO: 1427237 - DNA, 15 bp, Homo sapiens
cttgaagttttaaaa

SEQ ID NO: 1427238 - DNA, 15 bp, Homo sapiens
tcttgaagttttaaa

SEQ ID NO: 1427239 - DNA, 15 bp, Homo sapiens
ttcttgaagttttaa

SEQ ID NO: 1427240 - DNA, 15 bp, Homo sapiens
attcttgaagtttta

SEQ ID NO: 1427241 - DNA, 15 bp, Homo sapiens
aattcttgaagtttt

SEQ ID NO: 1427242 - DNA, 15 bp, Homo sapiens
aaattcttgaagttt

SEQ ID NO: 1427243 - DNA, 15 bp, Homo sapiens
gaaattcttgaagtt

SEQ ID NO: 1427244 - DNA, 15 bp, Homo sapiens
tgaaattcttgaagt

SEQ ID NO: 1427245 - DNA, 15 bp, Homo sapiens
ctgaaattcttgaag

SEQ ID NO: 1427246 - DNA, 15 bp, Homo sapiens
actgaaattcttgaa

SEQ ID NO: 1427247 - DNA, 15 bp, Homo sapiens
aactgaaattcttga

SEQ ID NO: 1427248 - DNA, 15 bp, Homo sapiens
taactgaaattcttg

SEQ ID NO: 1427249 - DNA, 15 bp, Homo sapiens
ttaactgaaattctt

SEQ ID NO: 1427250 - DNA, 15 bp, Homo sapiens
tttaactgaaattct

SEQ ID NO: 1427251 - DNA, 15 bp, Homo sapiens
ttttaactgaaattc

SEQ ID NO: 1427252 - DNA, 15 bp, Homo sapiens
attttaactgaaatt

SEQ ID NO: 1427253 - DNA, 15 bp, Homo sapiens
tattttaactgaaat

SEQ ID NO: 1427254 - DNA, 15 bp, Homo sapiens
ttattttaactgaaa

SEQ ID NO: 1427255 - DNA, 15 bp, Homo sapiens
cttattttaactgaa

SEQ ID NO: 1427256 - DNA, 15 bp, Homo sapiens
tcttattttaactga

SEQ ID NO: 1427257 - DNA, 15 bp, Homo sapiens
atcttattttaactg

SEQ ID NO: 1427258 - DNA, 15 bp, Homo sapiens
tatcttattttaact

SEQ ID NO: 1427259 - DNA, 15 bp, Homo sapiens
ctatcttattttaac

SEQ ID NO: 1427260 - DNA, 15 bp, Homo sapiens
tctatcttattttaa

SEQ ID NO: 1427261 - DNA, 15 bp, Homo sapiens
ttctatcttatttta

SEQ ID NO: 1427262 - DNA, 15 bp, Homo sapiens
attctatcttatttt

SEQ ID NO: 1427263 - DNA, 15 bp, Homo sapiens
aattctatcttattt

SEQ ID NO: 1427264 - DNA, 15 bp, Homo sapiens
aaattctatcttatt

SEQ ID NO: 1427265 - DNA, 15 bp, Homo sapiens
aaaattctatcttat

SEQ ID NO: 1427266 - DNA, 15 bp, Homo sapiens
gaaaattctatctta

SEQ ID NO: 1427267 - DNA, 15 bp, Homo sapiens
agaaaattctatctt

SEQ ID NO: 1427268 - DNA, 15 bp, Homo sapiens
cagaaaattctatct

SEQ ID NO: 1427269 - DNA, 15 bp, Homo sapiens
tcagaaaattctatc

SEQ ID NO: 1427270 - DNA, 15 bp, Homo sapiens
atcagaaaattctat

SEQ ID NO: 1427271 - DNA, 15 bp, Homo sapiens
aatcagaaaattcta

SEQ ID NO: 1427272 - DNA, 15 bp, Homo sapiens
aaatcagaaaattct

SEQ ID NO: 1427273 - DNA, 15 bp, Homo sapiens
aaaatcagaaaattc

SEQ ID NO: 1427274 - DNA, 15 bp, Homo sapiens
caaaatcagaaaatt

SEQ ID NO: 1427275 - DNA, 15 bp, Homo sapiens
acaaaatcagaaaat

SEQ ID NO: 1427276 - DNA, 15 bp, Homo sapiens
aacaaaatcagaaaa

SEQ ID NO: 1427277 - DNA, 15 bp, Homo sapiens
gaacaaaatcagaaa

SEQ ID NO: 1427278 - DNA, 15 bp, Homo sapiens
ggaacaaaatcagaa

SEQ ID NO: 1427279 - DNA, 15 bp, Homo sapiens
gggaacaaaatcaga

SEQ ID NO: 1427280 - DNA, 15 bp, Homo sapiens
agggaacaaaatcag

SEQ ID NO: 1427281 - DNA, 15 bp, Homo sapiens
tagggaacaaaatca

SEQ ID NO: 1427282 - DNA, 15 bp, Homo sapiens
ctagggaacaaaatc

SEQ ID NO: 1427283 - DNA, 15 bp, Homo sapiens
tctagggaacaaaat

SEQ ID NO: 1427284 - DNA, 15 bp, Homo sapiens
gtctagggaacaaaa

SEQ ID NO: 1427285 - DNA, 15 bp, Homo sapiens
agtctagggaacaaa

SEQ ID NO: 1427286 - DNA, 15 bp, Homo sapiens
aagtctagggaacaa

SEQ ID NO: 1427287 - DNA, 15 bp, Homo sapiens
taagtctagggaaca

SEQ ID NO: 1427288 - DNA, 15 bp, Homo sapiens
ctaagtctagggaac

SEQ ID NO: 1427289 - DNA, 15 bp, Homo sapiens
tctaagtctagggaa

SEQ ID NO: 1427290 - DNA, 15 bp, Homo sapiens
gtctaagtctaggga

SEQ ID NO: 1427291 - DNA, 15 bp, Homo sapiens
ggtctaagtctaggg

SEQ ID NO: 1427292 - DNA, 15 bp, Homo sapiens
tggtctaagtctagg

SEQ ID NO: 1427293 - DNA, 15 bp, Homo sapiens
gtggtctaagtctag

SEQ ID NO: 1427294 - DNA, 15 bp, Homo sapiens
ggtggtctaagtcta

SEQ ID NO: 1427295 - DNA, 15 bp, Homo sapiens
cggtggtctaagtct

SEQ ID NO: 1427296 - DNA, 15 bp, Homo sapiens
acggtggtctaagtc

SEQ ID NO: 1427297 - DNA, 15 bp, Homo sapiens
tacggtggtctaagt

SEQ ID NO: 1427298 - DNA, 15 bp, Homo sapiens
gtacggtggtctaag

SEQ ID NO: 1427299 - DNA, 15 bp, Homo sapiens
agtacggtggtctaa

SEQ ID NO: 1427300 - DNA, 15 bp, Homo sapiens
aagtacggtggtcta

SEQ ID NO: 1427301 - DNA, 15 bp, Homo sapiens
gaagtacggtggtct

SEQ ID NO: 1427302 - DNA, 15 bp, Homo sapiens
tgaagtacggtggtc

SEQ ID NO: 1427303 - DNA, 15 bp, Homo sapiens
ctgaagtacggtggt

SEQ ID NO: 1427304 - DNA, 15 bp, Homo sapiens
actgaagtacggtgg

SEQ ID NO: 1427305 - DNA, 15 bp, Homo sapiens
aactgaagtacggtg

SEQ ID NO: 1427306 - DNA, 15 bp, Homo sapiens
aaactgaagtacggt

SEQ ID NO: 1427307 - DNA, 15 bp, Homo sapiens
aaaactgaagtacgg

SEQ ID NO: 1427308 - DNA, 15 bp, Homo sapiens
caaaactgaagtacg

SEQ ID NO: 1427309 - DNA, 15 bp, Homo sapiens
tcaaaactgaagtac

SEQ ID NO: 1427310 - DNA, 15 bp, Homo sapiens
ctcaaaactgaagta

SEQ ID NO: 1427311 - DNA, 15 bp, Homo sapiens
cctcaaaactgaagt

SEQ ID NO: 1427312 - DNA, 15 bp, Homo sapiens
gcctcaaaactgaag

SEQ ID NO: 1427313 - DNA, 15 bp, Homo sapiens
tgcctcaaaactgaa

SEQ ID NO: 1427314 - DNA, 15 bp, Homo sapiens
ctgcctcaaaactga

SEQ ID NO: 1427315 - DNA, 15 bp, Homo sapiens
tctgcctcaaaactg

SEQ ID NO: 1427316 - DNA, 15 bp, Homo sapiens
ctctgcctcaaaact

SEQ ID NO: 1427317 - DNA, 15 bp, Homo sapiens
cctctgcctcaaaac

SEQ ID NO: 1427318 - DNA, 15 bp, Homo sapiens
acctctgcctcaaaa

SEQ ID NO: 1427319 - DNA, 15 bp, Homo sapiens
aacctctgcctcaaa

SEQ ID NO: 1427320 - DNA, 15 bp, Homo sapiens
aaacctctgcctcaa

SEQ ID NO: 1427321 - DNA, 15 bp, Homo sapiens
gaaacctctgcctca

SEQ ID NO: 1427322 - DNA, 15 bp, Homo sapiens
tgaaacctctgcctc

SEQ ID NO: 1427323 - DNA, 15 bp, Homo sapiens
atgaaacctctgcct

SEQ ID NO: 1427324 - DNA, 15 bp, Homo sapiens
aatgaaacctctgcc

SEQ ID NO: 1427325 - DNA, 15 bp, Homo sapiens
gaatgaaacctctgc

SEQ ID NO: 1427326 - DNA, 15 bp, Homo sapiens
tgaatgaaacctctg

SEQ ID NO: 1427327 - DNA, 15 bp, Homo sapiens
gtgaatgaaacctct

SEQ ID NO: 1427328 - DNA, 15 bp, Homo sapiens
tgtgaatgaaacctc

SEQ ID NO: 1427329 - DNA, 15 bp, Homo sapiens
ctgtgaatgaaacct

SEQ ID NO: 1427330 - DNA, 15 bp, Homo sapiens
tctgtgaatgaaacc

SEQ ID NO: 1427331 - DNA, 15 bp, Homo sapiens
ttctgtgaatgaaac

SEQ ID NO: 1427332 - DNA, 15 bp, Homo sapiens
cttctgtgaatgaaa

SEQ ID NO: 1427333 - DNA, 15 bp, Homo sapiens
tcttctgtgaatgaa

SEQ ID NO: 1427334 - DNA, 15 bp, Homo sapiens
gtcttctgtgaatga

SEQ ID NO: 1427335 - DNA, 15 bp, Homo sapiens
agtcttctgtgaatg

SEQ ID NO: 1427336 - DNA, 15 bp, Homo sapiens
aagtcttctgtgaat

SEQ ID NO: 1427337 - DNA, 15 bp, Homo sapiens
aaagtcttctgtgaa

SEQ ID NO: 1427338 - DNA, 15 bp, Homo sapiens
caaagtcttctgtga

SEQ ID NO: 1427339 - DNA, 15 bp, Homo sapiens
tcaaagtcttctgtg

SEQ ID NO: 1427340 - DNA, 15 bp, Homo sapiens
ctcaaagtcttctgt

SEQ ID NO: 1427341 - DNA, 15 bp, Homo sapiens
gctcaaagtcttctg

SEQ ID NO: 1427342 - DNA, 15 bp, Homo sapiens
agctcaaagtcttct

SEQ ID NO: 1427343 - DNA, 15 bp, Homo sapiens
gagctcaaagtcttc

SEQ ID NO: 1427344 - DNA, 15 bp, Homo sapiens
agagctcaaagtctt

SEQ ID NO: 1427345 - DNA, 15 bp, Homo sapiens
cagagctcaaagtct

SEQ ID NO: 1427346 - DNA, 15 bp, Homo sapiens
ccagagctcaaagtc

SEQ ID NO: 1427347 - DNA, 15 bp, Homo sapiens
tccagagctcaaagt

SEQ ID NO: 1427348 - DNA, 15 bp, Homo sapiens
ttccagagctcaaag

SEQ ID NO: 1427349 - DNA, 15 bp, Homo sapiens
attccagagctcaaa

SEQ ID NO: 1427350 - DNA, 15 bp, Homo sapiens
gattccagagctcaa

SEQ ID NO: 1427351 - DNA, 15 bp, Homo sapiens
tgattccagagctca

SEQ ID NO: 1427352 - DNA, 15 bp, Homo sapiens
atgattccagagctc

SEQ ID NO: 1427353 - DNA, 15 bp, Homo sapiens
aatgattccagagct

SEQ ID NO: 1427354 - DNA, 15 bp, Homo sapiens
caatgattccagagc

SEQ ID NO: 1427355 - DNA, 15 bp, Homo sapiens
tcaatgattccagag

SEQ ID NO: 1427356 - DNA, 15 bp, Homo sapiens
ttcaatgattccaga

SEQ ID NO: 1427357 - DNA, 15 bp, Homo sapiens
tttcaatgattccag

SEQ ID NO: 1427358 - DNA, 15 bp, Homo sapiens
ttttcaatgattcca

SEQ ID NO: 1427359 - DNA, 15 bp, Homo sapiens
tttttcaatgattcc

SEQ ID NO: 1427360 - DNA, 15 bp, Homo sapiens
gtttttcaatgattc

SEQ ID NO: 1427361 - DNA, 15 bp, Homo sapiens
cgtttttcaatgatt

SEQ ID NO: 1427362 - DNA, 15 bp, Homo sapiens
tcgtttttcaatgat

SEQ ID NO: 1427363 - DNA, 15 bp, Homo sapiens
ttcgtttttcaatga

SEQ ID NO: 1427364 - DNA, 15 bp, Homo sapiens
gttcgtttttcaatg

SEQ ID NO: 1427365 - DNA, 15 bp, Homo sapiens
ggttcgtttttcaat

SEQ ID NO: 1427366 - DNA, 15 bp, Homo sapiens
tggttcgtttttcaa

SEQ ID NO: 1427367 - DNA, 15 bp, Homo sapiens
atggttcgtttttca

SEQ ID NO: 1427368 - DNA, 15 bp, Homo sapiens
tatggttcgtttttc

SEQ ID NO: 1427369 - DNA, 15 bp, Homo sapiens
atatggttcgttttt

SEQ ID NO: 1427370 - DNA, 15 bp, Homo sapiens
aatatggttcgtttt

SEQ ID NO: 1427371 - DNA, 15 bp, Homo sapiens
gaatatggttcgttt

SEQ ID NO: 1427372 - DNA, 15 bp, Homo sapiens
tgaatatggttcgtt

SEQ ID NO: 1427373 - DNA, 15 bp, Homo sapiens
atgaatatggttcgt

SEQ ID NO: 1427374 - DNA, 15 bp, Homo sapiens
aatgaatatggttcg

SEQ ID NO: 1427375 - DNA, 15 bp, Homo sapiens
taatgaatatggttc

SEQ ID NO: 1427376 - DNA, 15 bp, Homo sapiens
ttaatgaatatggtt

SEQ ID NO: 1427377 - DNA, 15 bp, Homo sapiens
tttaatgaatatggt

SEQ ID NO: 1427378 - DNA, 15 bp, Homo sapiens
atttaatgaatatgg

SEQ ID NO: 1427379 - DNA, 15 bp, Homo sapiens
aatttaatgaatatg

SEQ ID NO: 1427380 - DNA, 15 bp, Homo sapiens
taatttaatgaatat

SEQ ID NO: 1427381 - DNA, 15 bp, Homo sapiens
ataatttaatgaata

SEQ ID NO: 1427382 - DNA, 15 bp, Homo sapiens
aataatttaatgaat

SEQ ID NO: 1427383 - DNA, 15 bp, Homo sapiens
caataatttaatgaa

SEQ ID NO: 1427384 - DNA, 15 bp, Homo sapiens
ccaataatttaatga

SEQ ID NO: 1427385 - DNA, 15 bp, Homo sapiens
accaataatttaatg

SEQ ID NO: 1427386 - DNA, 15 bp, Homo sapiens
taccaataatttaat

SEQ ID NO: 1427387 - DNA, 15 bp, Homo sapiens
ctaccaataatttaa

SEQ ID NO: 1427388 - DNA, 15 bp, Homo sapiens
actaccaataattta

SEQ ID NO: 1427389 - DNA, 15 bp, Homo sapiens
gactaccaataattt

SEQ ID NO: 1427390 - DNA, 15 bp, Homo sapiens
ggactaccaataatt

SEQ ID NO: 1427391 - DNA, 15 bp, Homo sapiens
gggactaccaataat

SEQ ID NO: 1427392 - DNA, 15 bp, Homo sapiens
ggggactaccaataa

SEQ ID NO: 1427393 - DNA, 15 bp, Homo sapiens
gggggactaccaata

SEQ ID NO: 1427394 - DNA, 15 bp, Homo sapiens
tgggggactaccaat

SEQ ID NO: 1427395 - DNA, 15 bp, Homo sapiens
ttgggggactaccaa

SEQ ID NO: 1427396 - DNA, 15 bp, Homo sapiens
gttgggggactacca

SEQ ID NO: 1427397 - DNA, 15 bp, Homo sapiens
agttgggggactacc

SEQ ID NO: 1427398 - DNA, 15 bp, Homo sapiens
cagttgggggactac

SEQ ID NO: 1427399 - DNA, 15 bp, Homo sapiens
gcagttgggggacta

SEQ ID NO: 1427400 - DNA, 15 bp, Homo sapiens
agcagttgggggact

SEQ ID NO: 1427401 - DNA, 15 bp, Homo sapiens
cagcagttgggggac

SEQ ID NO: 1427402 - DNA, 15 bp, Homo sapiens
acagcagttggggga

SEQ ID NO: 1427403 - DNA, 15 bp, Homo sapiens
cacagcagttggggg

SEQ ID NO: 1427404 - DNA, 15 bp, Homo sapiens
gcacagcagttgggg

SEQ ID NO: 1427405 - DNA, 15 bp, Homo sapiens
tgcacagcagttggg

SEQ ID NO: 1427406 - DNA, 15 bp, Homo sapiens
atgcacagcagttgg

SEQ ID NO: 1427407 - DNA, 15 bp, Homo sapiens
aatgcacagcagttg

SEQ ID NO: 1427408 - DNA, 15 bp, Homo sapiens
taatgcacagcagtt

SEQ ID NO: 1427409 - DNA, 15 bp, Homo sapiens
ttaatgcacagcagt

SEQ ID NO: 1427410 - DNA, 15 bp, Homo sapiens
attaatgcacagcag

SEQ ID NO: 1427411 - DNA, 15 bp, Homo sapiens
tattaatgcacagca

SEQ ID NO: 1427412 - DNA, 15 bp, Homo sapiens
ctattaatgcacagc

SEQ ID NO: 1427413 - DNA, 15 bp, Homo sapiens
cctattaatgcacag

SEQ ID NO: 1427414 - DNA, 15 bp, Homo sapiens
tcctattaatgcaca

SEQ ID NO: 1427415 - DNA, 15 bp, Homo sapiens
ttcctattaatgcac

SEQ ID NO: 1427416 - DNA, 15 bp, Homo sapiens
attcctattaatgca

SEQ ID NO: 1427417 - DNA, 15 bp, Homo sapiens
aattcctattaatgc

SEQ ID NO: 1427418 - DNA, 15 bp, Homo sapiens
taattcctattaatg

SEQ ID NO: 1427419 - DNA, 15 bp, Homo sapiens
ttaattcctattaat

SEQ ID NO: 1427420 - DNA, 15 bp, Homo sapiens
attaattcctattaa

SEQ ID NO: 1427421 - DNA, 15 bp, Homo sapiens
aattaattcctatta

SEQ ID NO: 1427422 - DNA, 15 bp, Homo sapiens
gaattaattcctatt

SEQ ID NO: 1427423 - DNA, 15 bp, Homo sapiens
agaattaattcctat

SEQ ID NO: 1427424 - DNA, 15 bp, Homo sapiens
cagaattaattccta

SEQ ID NO: 1427425 - DNA, 15 bp, Homo sapiens
gcagaattaattcct

SEQ ID NO: 1427426 - DNA, 15 bp, Homo sapiens
ggcagaattaattcc

SEQ ID NO: 1427427 - DNA, 15 bp, Homo sapiens
aggcagaattaattc

SEQ ID NO: 1427428 - DNA, 15 bp, Homo sapiens
gaggcagaattaatt

SEQ ID NO: 1427429 - DNA, 15 bp, Homo sapiens
tgaggcagaattaat

SEQ ID NO: 1427430 - DNA, 15 bp, Homo sapiens
atgaggcagaattaa

SEQ ID NO: 1427431 - DNA, 15 bp, Homo sapiens
aatgaggcagaatta

SEQ ID NO: 1427432 - DNA, 15 bp, Homo sapiens
aaatgaggcagaatt

SEQ ID NO: 1427433 - DNA, 15 bp, Homo sapiens
gaaatgaggcagaat

SEQ ID NO: 1427434 - DNA, 15 bp, Homo sapiens
tgaaatgaggcagaa

SEQ ID NO: 1427435 - DNA, 15 bp, Homo sapiens
ctgaaatgaggcaga

SEQ ID NO: 1427436 - DNA, 15 bp, Homo sapiens
actgaaatgaggcag

SEQ ID NO: 1427437 - DNA, 15 bp, Homo sapiens
aactgaaatgaggca

SEQ ID NO: 1427438 - DNA, 15 bp, Homo sapiens
gaactgaaatgaggc

SEQ ID NO: 1427439 - DNA, 15 bp, Homo sapiens
ggaactgaaatgagg

SEQ ID NO: 1427440 - DNA, 15 bp, Homo sapiens
aggaactgaaatgag

SEQ ID NO: 1427441 - DNA, 15 bp, Homo sapiens
gaggaactgaaatga

SEQ ID NO: 1427442 - DNA, 15 bp, Homo sapiens
tgaggaactgaaatg

SEQ ID NO: 1427443 - DNA, 15 bp, Homo sapiens
ttgaggaactgaaat

SEQ ID NO: 1427444 - DNA, 15 bp, Homo sapiens
gttgaggaactgaaa

SEQ ID NO: 1427445 - DNA, 15 bp, Homo sapiens
tgttgaggaactgaa

SEQ ID NO: 1427446 - DNA, 15 bp, Homo sapiens
atgttgaggaactga

SEQ ID NO: 1427447 - DNA, 15 bp, Homo sapiens
tatgttgaggaactg

SEQ ID NO: 1427448 - DNA, 15 bp, Homo sapiens
gtatgttgaggaact

SEQ ID NO: 1427449 - DNA, 15 bp, Homo sapiens
agtatgttgaggaac

SEQ ID NO: 1427450 - DNA, 15 bp, Homo sapiens
cagtatgttgaggaa

SEQ ID NO: 1427451 - DNA, 15 bp, Homo sapiens
tcagtatgttgagga

SEQ ID NO: 1427452 - DNA, 15 bp, Homo sapiens
ctcagtatgttgagg

SEQ ID NO: 1427453 - DNA, 15 bp, Homo sapiens
gctcagtatgttgag

SEQ ID NO: 1427454 - DNA, 15 bp, Homo sapiens
agctcagtatgttga

SEQ ID NO: 1427455 - DNA, 15 bp, Homo sapiens
tagctcagtatgttg

SEQ ID NO: 1427456 - DNA, 15 bp, Homo sapiens
ctagctcagtatgtt

SEQ ID NO: 1427457 - DNA, 15 bp, Homo sapiens
tctagctcagtatgt

SEQ ID NO: 1427458 - DNA, 15 bp, Homo sapiens
ttctagctcagtatg

SEQ ID NO: 1427459 - DNA, 15 bp, Homo sapiens
attctagctcagtat

SEQ ID NO: 1427460 - DNA, 15 bp, Homo sapiens
tattctagctcagta

SEQ ID NO: 1427461 - DNA, 15 bp, Homo sapiens
ttattctagctcagt

SEQ ID NO: 1427462 - DNA, 15 bp, Homo sapiens
attattctagctcag

SEQ ID NO: 1427463 - DNA, 15 bp, Homo sapiens
aattattctagctca

SEQ ID NO: 1427464 - DNA, 15 bp, Homo sapiens
caattattctagctc

SEQ ID NO: 1427465 - DNA, 15 bp, Homo sapiens
acaattattctagct

SEQ ID NO: 1427466 - DNA, 15 bp, Homo sapiens
tacaattattctagc

SEQ ID NO: 1427467 - DNA, 15 bp, Homo sapiens
atacaattattctag

SEQ ID NO: 1427468 - DNA, 15 bp, Homo sapiens
gatacaattattcta

SEQ ID NO: 1427469 - DNA, 15 bp, Homo sapiens
agatacaattattct

SEQ ID NO: 1427470 - DNA, 15 bp, Homo sapiens
aagatacaattattc

SEQ ID NO: 1427471 - DNA, 15 bp, Homo sapiens
caagatacaattatt

SEQ ID NO: 1427472 - DNA, 15 bp, Homo sapiens
acaagatacaattat

SEQ ID NO: 1427473 - DNA, 15 bp, Homo sapiens
aacaagatacaatta

SEQ ID NO: 1427474 - DNA, 15 bp, Homo sapiens
taacaagatacaatt

SEQ ID NO: 1427475 - DNA, 15 bp, Homo sapiens
ataacaagatacaat

SEQ ID NO: 1427476 - DNA, 15 bp, Homo sapiens
aataacaagatacaa

SEQ ID NO: 1427477 - DNA, 15 bp, Homo sapiens
aaataacaagataca

SEQ ID NO: 1427478 - DNA, 15 bp, Homo sapiens
caaataacaagatac

SEQ ID NO: 1427479 - DNA, 15 bp, Homo sapiens
acaaataacaagata

SEQ ID NO: 1427480 - DNA, 15 bp, Homo sapiens
aacaaataacaagat

SEQ ID NO: 1427481 - DNA, 15 bp, Homo sapiens
gaacaaataacaaga

SEQ ID NO: 1427482 - DNA, 15 bp, Homo sapiens
tgaacaaataacaag

SEQ ID NO: 1427483 - DNA, 15 bp, Homo sapiens
atgaacaaataacaa

SEQ ID NO: 1427484 - DNA, 15 bp, Homo sapiens
gatgaacaaataaca

SEQ ID NO: 1427485 - DNA, 15 bp, Homo sapiens
tgatgaacaaataac

SEQ ID NO: 1427486 - DNA, 15 bp, Homo sapiens
atgatgaacaaataa

SEQ ID NO: 1427487 - DNA, 15 bp, Homo sapiens
aatgatgaacaaata

SEQ ID NO: 1427488 - DNA, 15 bp, Homo sapiens
caatgatgaacaaat

SEQ ID NO: 1427489 - DNA, 15 bp, Homo sapiens
gcaatgatgaacaaa

SEQ ID NO: 1427490 - DNA, 15 bp, Homo sapiens
agcaatgatgaacaa

SEQ ID NO: 1427491 - DNA, 15 bp, Homo sapiens
aagcaatgatgaaca

SEQ ID NO: 1427492 - DNA, 15 bp, Homo sapiens
gaagcaatgatgaac

SEQ ID NO: 1427493 - DNA, 15 bp, Homo sapiens
tgaagcaatgatgaa

SEQ ID NO: 1427494 - DNA, 15 bp, Homo sapiens
ctgaagcaatgatga

SEQ ID NO: 1427495 - DNA, 15 bp, Homo sapiens
tctgaagcaatgatg

SEQ ID NO: 1427496 - DNA, 15 bp, Homo sapiens
atctgaagcaatgat

SEQ ID NO: 1427497 - DNA, 15 bp, Homo sapiens
gatctgaagcaatga

SEQ ID NO: 1427498 - DNA, 15 bp, Homo sapiens
agatctgaagcaatg

SEQ ID NO: 1427499 - DNA, 15 bp, Homo sapiens
aagatctgaagcaat

SEQ ID NO: 1427500 - DNA, 15 bp, Homo sapiens
taagatctgaagcaa

SEQ ID NO: 1427501 - DNA, 15 bp, Homo sapiens
ctaagatctgaagca

SEQ ID NO: 1427502 - DNA, 15 bp, Homo sapiens
tctaagatctgaagc

SEQ ID NO: 1427503 - DNA, 15 bp, Homo sapiens
gtctaagatctgaag

SEQ ID NO: 1427504 - DNA, 15 bp, Homo sapiens
tgtctaagatctgaa

SEQ ID NO: 1427505 - DNA, 15 bp, Homo sapiens
atgtctaagatctga

SEQ ID NO: 1427506 - DNA, 15 bp, Homo sapiens
tatgtctaagatctg

SEQ ID NO: 1427507 - DNA, 15 bp, Homo sapiens
ctatgtctaagatct

SEQ ID NO: 1427508 - DNA, 15 bp, Homo sapiens
gctatgtctaagatc

SEQ ID NO: 1427509 - DNA, 15 bp, Homo sapiens
agctatgtctaagat

SEQ ID NO: 1427510 - DNA, 15 bp, Homo sapiens
aagctatgtctaaga

SEQ ID NO: 1427511 - DNA, 15 bp, Homo sapiens
aaagctatgtctaag

SEQ ID NO: 1427512 - DNA, 15 bp, Homo sapiens
aaaagctatgtctaa

SEQ ID NO: 1427513 - DNA, 15 bp, Homo sapiens
gaaaagctatgtcta

SEQ ID NO: 1427514 - DNA, 15 bp, Homo sapiens
ggaaaagctatgtct

SEQ ID NO: 1427515 - DNA, 15 bp, Homo sapiens
aggaaaagctatgtc

SEQ ID NO: 1427516 - DNA, 15 bp, Homo sapiens
aaggaaaagctatgt

SEQ ID NO: 1427517 - DNA, 15 bp, Homo sapiens
aaaggaaaagctatg

SEQ ID NO: 1427518 - DNA, 15 bp, Homo sapiens
gaaaggaaaagctat

SEQ ID NO: 1427519 - DNA, 15 bp, Homo sapiens
agaaaggaaaagcta

SEQ ID NO: 1427520 - DNA, 15 bp, Homo sapiens
aagaaaggaaaagct

SEQ ID NO: 1427521 - DNA, 15 bp, Homo sapiens
caagaaaggaaaagc

SEQ ID NO: 1427522 - DNA, 15 bp, Homo sapiens
ccaagaaaggaaaag

SEQ ID NO: 1427523 - DNA, 15 bp, Homo sapiens
tccaagaaaggaaaa

SEQ ID NO: 1427524 - DNA, 15 bp, Homo sapiens
ttccaagaaaggaaa

SEQ ID NO: 1427525 - DNA, 15 bp, Homo sapiens
tttccaagaaaggaa

SEQ ID NO: 1427526 - DNA, 15 bp, Homo sapiens
ttttccaagaaagga

SEQ ID NO: 1427527 - DNA, 15 bp, Homo sapiens
cttttccaagaaagg

SEQ ID NO: 1427528 - DNA, 15 bp, Homo sapiens
tcttttccaagaaag

SEQ ID NO: 1427529 - DNA, 15 bp, Homo sapiens
ttcttttccaagaaa

SEQ ID NO: 1427530 - DNA, 15 bp, Homo sapiens
cttcttttccaagaa

SEQ ID NO: 1427531 - DNA, 15 bp, Homo sapiens
tcttcttttccaaga

SEQ ID NO: 1427532 - DNA, 15 bp, Homo sapiens
atcttcttttccaag

SEQ ID NO: 1427533 - DNA, 15 bp, Homo sapiens
aatcttcttttccaa

SEQ ID NO: 1427534 - DNA, 15 bp, Homo sapiens
taatcttcttttcca

SEQ ID NO: 1427535 - DNA, 15 bp, Homo sapiens
ataatcttcttttcc

SEQ ID NO: 1427536 - DNA, 15 bp, Homo sapiens
tataatcttcttttc

SEQ ID NO: 1427537 - DNA, 15 bp, Homo sapiens
ttataatcttctttt

SEQ ID NO: 1427538 - DNA, 15 bp, Homo sapiens
gttataatcttcttt

SEQ ID NO: 1427539 - DNA, 15 bp, Homo sapiens
tgttataatcttctt

SEQ ID NO: 1427540 - DNA, 15 bp, Homo sapiens
ttgttataatcttct

SEQ ID NO: 1427541 - DNA, 15 bp, Homo sapiens
attgttataatcttc

SEQ ID NO: 1427542 - DNA, 15 bp, Homo sapiens
tattgttataatctt

SEQ ID NO: 1427543 - DNA, 15 bp, Homo sapiens
ctattgttataatct

SEQ ID NO: 1427544 - DNA, 15 bp, Homo sapiens
tctattgttataatc

SEQ ID NO: 1427545 - DNA, 15 bp, Homo sapiens
ttctattgttataat

SEQ ID NO: 1427546 - DNA, 15 bp, Homo sapiens
tttctattgttataa

SEQ ID NO: 1427547 - DNA, 15 bp, Homo sapiens
ttttctattgttata

SEQ ID NO: 1427548 - DNA, 15 bp, Homo sapiens
tttttctattgttat

SEQ ID NO: 1427549 - DNA, 15 bp, Homo sapiens
ttttttctattgtta

SEQ ID NO: 1427550 - DNA, 15 bp, Homo sapiens
tttttttctattgtt

SEQ ID NO: 1427551 - DNA, 15 bp, Homo sapiens
ttttttttctattgt

SEQ ID NO: 1427552 - DNA, 15 bp, Homo sapiens
cttttttttctattg

SEQ ID NO: 1427553 - DNA, 15 bp, Homo sapiens
tcttttttttctatt

SEQ ID NO: 1427554 - DNA, 15 bp, Homo sapiens
atcttttttttctat

SEQ ID NO: 1427555 - DNA, 15 bp, Homo sapiens
aatcttttttttcta

SEQ ID NO: 1427556 - DNA, 15 bp, Homo sapiens
taatcttttttttct

SEQ ID NO: 1427557 - DNA, 15 bp, Homo sapiens
ataatcttttttttc

SEQ ID NO: 1427558 - DNA, 15 bp, Homo sapiens
aataatctttttttt

SEQ ID NO: 1427559 - DNA, 15 bp, Homo sapiens
gaaataatctttttt

SEQ ID NO: 1427560 - DNA, 15 bp, Homo sapiens
ggaaataatcttttt

SEQ ID NO: 1427561 - DNA, 15 bp, Homo sapiens
aggaaataatctttt

SEQ ID NO: 1427562 - DNA, 15 bp, Homo sapiens
taggaaataatcttt

SEQ ID NO: 1427563 - DNA, 15 bp, Homo sapiens
ataggaaataatctt

SEQ ID NO: 1427564 - DNA, 15 bp, Homo sapiens
cataggaaataatct

SEQ ID NO: 1427565 - DNA, 15 bp, Homo sapiens
acataggaaataatc

SEQ ID NO: 1427566 - DNA, 15 bp, Homo sapiens
aacataggaaataat

SEQ ID NO: 1427567 - DNA, 15 bp, Homo sapiens
aaacataggaaataa

SEQ ID NO: 1427568 - DNA, 15 bp, Homo sapiens
aaaacataggaaata

SEQ ID NO: 1427569 - DNA, 15 bp, Homo sapiens
aaaaacataggaaat

SEQ ID NO: 1427570 - DNA, 15 bp, Homo sapiens
aaaaaacataggaaa

SEQ ID NO: 1427571 - DNA, 15 bp, Homo sapiens
taaaaaacataggaa

SEQ ID NO: 1427572 - DNA, 15 bp, Homo sapiens
ataaaaaacatagga

SEQ ID NO: 1427573 - DNA, 15 bp, Homo sapiens
aataaaaaacatagg

SEQ ID NO: 1427574 - DNA, 15 bp, Homo sapiens
aaataaaaaacatag

SEQ ID NO: 1427575 - DNA, 15 bp, Homo sapiens
aaaataaaaaacata

SEQ ID NO: 1427576 - DNA, 15 bp, Homo sapiens
aaaaataaaaaacat

SEQ ID NO: 1427577 - DNA, 15 bp, Homo sapiens
gaaaaataaaaaaca

SEQ ID NO: 1427578 - DNA, 15 bp, Homo sapiens
ggaaaaataaaaaac

SEQ ID NO: 1427579 - DNA, 15 bp, Homo sapiens
aggaaaaataaaaaa

SEQ ID NO: 1427580 - DNA, 15 bp, Homo sapiens
caggaaaaataaaaa

SEQ ID NO: 1427581 - DNA, 15 bp, Homo sapiens
gcaggaaaaataaaa

SEQ ID NO: 1427582 - DNA, 15 bp, Homo sapiens
tgcaggaaaaataaa

SEQ ID NO: 1427583 - DNA, 15 bp, Homo sapiens
ttgcaggaaaaataa

SEQ ID NO: 1427584 - DNA, 15 bp, Homo sapiens
attgcaggaaaaata

SEQ ID NO: 1427585 - DNA, 15 bp, Homo sapiens
tattgcaggaaaaat

SEQ ID NO: 1427586 - DNA, 15 bp, Homo sapiens
ctattgcaggaaaaa

SEQ ID NO: 1427587 - DNA, 15 bp, Homo sapiens
cctattgcaggaaaa

SEQ ID NO: 1427588 - DNA, 15 bp, Homo sapiens
tcctattgcaggaaa

SEQ ID NO: 1427589 - DNA, 15 bp, Homo sapiens
ttcctattgcaggaa

SEQ ID NO: 1427590 - DNA, 15 bp, Homo sapiens
tttcctattgcagga

SEQ ID NO: 1427591 - DNA, 15 bp, Homo sapiens
ttttcctattgcagg

SEQ ID NO: 1427592 - DNA, 15 bp, Homo sapiens
tttttcctattgcag

SEQ ID NO: 1427593 - DNA, 15 bp, Homo sapiens
ctttttcctattgca

SEQ ID NO: 1427594 - DNA, 15 bp, Homo sapiens
tctttttcctattgc

SEQ ID NO: 1427595 - DNA, 15 bp, Homo sapiens
atctttttcctattg

SEQ ID NO: 1427596 - DNA, 15 bp, Homo sapiens
gaatctttttcctat

SEQ ID NO: 1427597 - DNA, 15 bp, Homo sapiens
tgaatctttttccta

SEQ ID NO: 1427598 - DNA, 15 bp, Homo sapiens
ctgaatctttttcct

SEQ ID NO: 1427599 - DNA, 15 bp, Homo sapiens
tctgaatctttttcc

SEQ ID NO: 1427600 - DNA, 15 bp, Homo sapiens
atctgaatctttttc

SEQ ID NO: 1427601 - DNA, 15 bp, Homo sapiens
aatctgaatcttttt

SEQ ID NO: 1427602 - DNA, 15 bp, Homo sapiens
caatctgaatctttt

SEQ ID NO: 1427603 - DNA, 15 bp, Homo sapiens
tcaatctgaatcttt

SEQ ID NO: 1427604 - DNA, 15 bp, Homo sapiens
ttcaatctgaatctt

SEQ ID NO: 1427605 - DNA, 15 bp, Homo sapiens
cttcaatctgaatct

SEQ ID NO: 1427606 - DNA, 15 bp, Homo sapiens
tcttcaatctgaatc

SEQ ID NO: 1427607 - DNA, 15 bp, Homo sapiens
atcttcaatctgaat

SEQ ID NO: 1427608 - DNA, 15 bp, Homo sapiens
aatcttcaatctgaa

SEQ ID NO: 1427609 - DNA, 15 bp, Homo sapiens
aaatcttcaatctga

SEQ ID NO: 1427610 - DNA, 15 bp, Homo sapiens
caaatcttcaatctg

SEQ ID NO: 1427611 - DNA, 15 bp, Homo sapiens
acaaatcttcaatct

SEQ ID NO: 1427612 - DNA, 15 bp, Homo sapiens
cacaaatcttcaatc

SEQ ID NO: 1427613 - DNA, 15 bp, Homo sapiens
tcacaaatcttcaat

SEQ ID NO: 1427614 - DNA, 15 bp, Homo sapiens
atcacaaatcttcaa

SEQ ID NO: 1427615 - DNA, 15 bp, Homo sapiens
aatcacaaatcttca

SEQ ID NO: 1427616 - DNA, 15 bp, Homo sapiens
aaatcacaaatcttc

SEQ ID NO: 1427617 - DNA, 15 bp, Homo sapiens
aaaatcacaaatctt

SEQ ID NO: 1427618 - DNA, 15 bp, Homo sapiens
gaaaatcacaaatct

SEQ ID NO: 1427619 - DNA, 15 bp, Homo sapiens
cgaaaatcacaaatc

SEQ ID NO: 1427620 - DNA, 15 bp, Homo sapiens
ccgaaaatcacaaat

SEQ ID NO: 1427621 - DNA, 15 bp, Homo sapiens
accgaaaatcacaaa

SEQ ID NO: 1427622 - DNA, 15 bp, Homo sapiens
aaccgaaaatcacaa

SEQ ID NO: 1427623 - DNA, 15 bp, Homo sapiens
taaccgaaaatcaca

SEQ ID NO: 1427624 - DNA, 15 bp, Homo sapiens
ataaccgaaaatcac

SEQ ID NO: 1427625 - DNA, 15 bp, Homo sapiens
cataaccgaaaatca

SEQ ID NO: 1427626 - DNA, 15 bp, Homo sapiens
gcataaccgaaaatc

SEQ ID NO: 1427627 - DNA, 15 bp, Homo sapiens
agcataaccgaaaat

SEQ ID NO: 1427628 - DNA, 15 bp, Homo sapiens
tagcataaccgaaaa

SEQ ID NO: 1427629 - DNA, 15 bp, Homo sapiens
atagcataaccgaaa

SEQ ID NO: 1427630 - DNA, 15 bp, Homo sapiens
aatagcataaccgaa

SEQ ID NO: 1427631 - DNA, 15 bp, Homo sapiens
aaatagcataaccga

SEQ ID NO: 1427632 - DNA, 15 bp, Homo sapiens
gaaatagcataaccg

SEQ ID NO: 1427633 - DNA, 15 bp, Homo sapiens
tgaaatagcataacc

SEQ ID NO: 1427634 - DNA, 15 bp, Homo sapiens
ttgaaatagcataac

SEQ ID NO: 1427635 - DNA, 15 bp, Homo sapiens
attgaaatagcataa

SEQ ID NO: 1427636 - DNA, 15 bp, Homo sapiens
aattgaaatagcata

SEQ ID NO: 1427637 - DNA, 15 bp, Homo sapiens
taattgaaatagcat

SEQ ID NO: 1427638 - DNA, 15 bp, Homo sapiens
ataattgaaatagca

SEQ ID NO: 1427639 - DNA, 15 bp, Homo sapiens
aataattgaaatagc

SEQ ID NO: 1427640 - DNA, 15 bp, Homo sapiens
taataattgaaatag

SEQ ID NO: 1427641 - DNA, 15 bp, Homo sapiens
ttaataattgaaata

SEQ ID NO: 1427642 - DNA, 15 bp, Homo sapiens
tttaataattgaaat

SEQ ID NO: 1427643 - DNA, 15 bp, Homo sapiens
gtttaataattgaaa

SEQ ID NO: 1427644 - DNA, 15 bp, Homo sapiens
agtttaataattgaa

SEQ ID NO: 1427645 - DNA, 15 bp, Homo sapiens
gagtttaataattga

SEQ ID NO: 1427646 - DNA, 15 bp, Homo sapiens
tgagtttaataattg

SEQ ID NO: 1427647 - DNA, 15 bp, Homo sapiens
gtgagtttaataatt

SEQ ID NO: 1427648 - DNA, 15 bp, Homo sapiens
agtgagtttaataat

SEQ ID NO: 1427649 - DNA, 15 bp, Homo sapiens
aagtgagtttaataa

SEQ ID NO: 1427650 - DNA, 15 bp, Homo sapiens
aaagtgagtttaata

SEQ ID NO: 1427651 - DNA, 15 bp, Homo sapiens
aaaagtgagtttaat

SEQ ID NO: 1427652 - DNA, 15 bp, Homo sapiens
taaaagtgagtttaa

SEQ ID NO: 1427653 - DNA, 15 bp, Homo sapiens
ttaaaagtgagttta

SEQ ID NO: 1427654 - DNA, 15 bp, Homo sapiens
cttaaaagtgagttt

SEQ ID NO: 1427655 - DNA, 15 bp, Homo sapiens
gcttaaaagtgagtt

SEQ ID NO: 1427656 - DNA, 15 bp, Homo sapiens
tgcttaaaagtgagt

SEQ ID NO: 1427657 - DNA, 15 bp, Homo sapiens
ttgcttaaaagtgag

SEQ ID NO: 1427658 - DNA, 15 bp, Homo sapiens
attgcttaaaagtga

SEQ ID NO: 1427659 - DNA, 15 bp, Homo sapiens
cattgcttaaaagtg

SEQ ID NO: 1427660 - DNA, 15 bp, Homo sapiens
acattgcttaaaagt

SEQ ID NO: 1427661 - DNA, 15 bp, Homo sapiens
tacattgcttaaaag

SEQ ID NO: 1427662 - DNA, 15 bp, Homo sapiens
ttacattgcttaaaa

SEQ ID NO: 1427663 - DNA, 15 bp, Homo sapiens
attacattgcttaaa

SEQ ID NO: 1427664 - DNA, 15 bp, Homo sapiens
gattacattgcttaa

SEQ ID NO: 1427665 - DNA, 15 bp, Homo sapiens
tgattacattgctta

SEQ ID NO: 1427666 - DNA, 15 bp, Homo sapiens
gtgattacattgctt

SEQ ID NO: 1427667 - DNA, 15 bp, Homo sapiens
tgtgattacattgct

SEQ ID NO: 1427668 - DNA, 15 bp, Homo sapiens
ttgtgattacattgc

SEQ ID NO: 1427669 - DNA, 15 bp, Homo sapiens
attgtgattacattg

SEQ ID NO: 1427670 - DNA, 15 bp, Homo sapiens
aattgtgattacatt

SEQ ID NO: 1427671 - DNA, 15 bp, Homo sapiens
caattgtgattacat

SEQ ID NO: 1427672 - DNA, 15 bp, Homo sapiens
acaattgtgattaca

SEQ ID NO: 1427673 - DNA, 15 bp, Homo sapiens
gacaattgtgattac

SEQ ID NO: 1427674 - DNA, 15 bp, Homo sapiens
agacaattgtgatta

SEQ ID NO: 1427675 - DNA, 15 bp, Homo sapiens
aagacaattgtgatt

SEQ ID NO: 1427676 - DNA, 15 bp, Homo sapiens
aaagacaattgtgat

SEQ ID NO: 1427677 - DNA, 15 bp, Homo sapiens
taaagacaattgtga

SEQ ID NO: 1427678 - DNA, 15 bp, Homo sapiens
ataaagacaattgtg

SEQ ID NO: 1427679 - DNA, 15 bp, Homo sapiens
cataaagacaattgt

SEQ ID NO: 1427680 - DNA, 15 bp, Homo sapiens
gcataaagacaattg

SEQ ID NO: 1427681 - DNA, 15 bp, Homo sapiens
agcataaagacaatt

SEQ ID NO: 1427682 - DNA, 15 bp, Homo sapiens
tagcataaagacaat

SEQ ID NO: 1427683 - DNA, 15 bp, Homo sapiens
ttagcataaagacaa

SEQ ID NO: 1427684 - DNA, 15 bp, Homo sapiens
gttagcataaagaca

SEQ ID NO: 1427685 - DNA, 15 bp, Homo sapiens
tgttagcataaagac

SEQ ID NO: 1427686 - DNA, 15 bp, Homo sapiens
ctgttagcataaaga

SEQ ID NO: 1427687 - DNA, 15 bp, Homo sapiens
cctgttagcataaag

SEQ ID NO: 1427688 - DNA, 15 bp, Homo sapiens
tcctgttagcataaa

SEQ ID NO: 1427689 - DNA, 15 bp, Homo sapiens
ttcctgttagcataa

SEQ ID NO: 1427690 - DNA, 15 bp, Homo sapiens
tttcctgttagcata

SEQ ID NO: 1427691 - DNA, 15 bp, Homo sapiens
ttttcctgttagcat

SEQ ID NO: 1427692 - DNA, 15 bp, Homo sapiens
cttttcctgttagca

SEQ ID NO: 1427693 - DNA, 15 bp, Homo sapiens
tcttttcctgttagc

SEQ ID NO: 1427694 - DNA, 15 bp, Homo sapiens
ttcttttcctgttag

SEQ ID NO: 1427695 - DNA, 15 bp, Homo sapiens
attcttttcctgtta

SEQ ID NO: 1427696 - DNA, 15 bp, Homo sapiens
tattcttttcctgtt

SEQ ID NO: 1427697 - DNA, 15 bp, Homo sapiens
gtattcttttcctgt

SEQ ID NO: 1427698 - DNA, 15 bp, Homo sapiens
tgtattcttttcctg

SEQ ID NO: 1427699 - DNA, 15 bp, Homo sapiens
ttgtattcttttcct

SEQ ID NO: 1427700 - DNA, 15 bp, Homo sapiens
attgtattcttttcc

SEQ ID NO: 1427701 - DNA, 15 bp, Homo sapiens
aattgtattcttttc

SEQ ID NO: 1427702 - DNA, 15 bp, Homo sapiens
gaattgtattctttt

SEQ ID NO: 1427703 - DNA, 15 bp, Homo sapiens
agaattgtattcttt

SEQ ID NO: 1427704 - DNA, 15 bp, Homo sapiens
aagaattgtattctt

SEQ ID NO: 1427705 - DNA, 15 bp, Homo sapiens
taagaattgtattct

SEQ ID NO: 1427706 - DNA, 15 bp, Homo sapiens
gtaagaattgtattc

SEQ ID NO: 1427707 - DNA, 15 bp, Homo sapiens
tgtaagaattgtatt

SEQ ID NO: 1427708 - DNA, 15 bp, Homo sapiens
atgtaagaattgtat

SEQ ID NO: 1427709 - DNA, 15 bp, Homo sapiens
aatgtaagaattgta

SEQ ID NO: 1427710 - DNA, 15 bp, Homo sapiens
aaatgtaagaattgt

SEQ ID NO: 1427711 - DNA, 15 bp, Homo sapiens
taaatgtaagaattg

SEQ ID NO: 1427712 - DNA, 15 bp, Homo sapiens
ttaaatgtaagaatt

SEQ ID NO: 1427713 - DNA, 15 bp, Homo sapiens
tttaaatgtaagaat

SEQ ID NO: 1427714 - DNA, 15 bp, Homo sapiens
atttaaatgtaagaa

SEQ ID NO: 1427715 - DNA, 15 bp, Homo sapiens
aatttaaatgtaaga

SEQ ID NO: 1427716 - DNA, 15 bp, Homo sapiens
taatttaaatgtaag

SEQ ID NO: 1427717 - DNA, 15 bp, Homo sapiens
ttaatttaaatgtaa

SEQ ID NO: 1427718 - DNA, 15 bp, Homo sapiens
tttaatttaaatgta

SEQ ID NO: 1427719 - DNA, 15 bp, Homo sapiens
ttttaatttaaatgt

SEQ ID NO: 1427720 - DNA, 15 bp, Homo sapiens
tttttaatttaaatg

SEQ ID NO: 1427721 - DNA, 15 bp, Homo sapiens
ttttttaatttaaat

SEQ ID NO: 1427722 - DNA, 15 bp, Homo sapiens
tttttttaatttaaa

SEQ ID NO: 1427723 - DNA, 15 bp, Homo sapiens
ctttttttaatttaa

SEQ ID NO: 1427724 - DNA, 15 bp, Homo sapiens
tctttttttaattta

SEQ ID NO: 1427725 - DNA, 15 bp, Homo sapiens
ttctttttttaattt

SEQ ID NO: 1427726 - DNA, 15 bp, Homo sapiens
tttctttttttaatt

SEQ ID NO: 1427727 - DNA, 15 bp, Homo sapiens
ttttctttttttaat

SEQ ID NO: 1427728 - DNA, 15 bp, Homo sapiens
gattttcttttttta

SEQ ID NO: 1427729 - DNA, 15 bp, Homo sapiens
agattttcttttttt

SEQ ID NO: 1427730 - DNA, 15 bp, Homo sapiens
gagattttctttttt

SEQ ID NO: 1427731 - DNA, 15 bp, Homo sapiens
tgagattttcttttt

SEQ ID NO: 1427732 - DNA, 15 bp, Homo sapiens
ttgagattttctttt

SEQ ID NO: 1427733 - DNA, 15 bp, Homo sapiens
tttgagattttcttt

SEQ ID NO: 1427734 - DNA, 15 bp, Homo sapiens
ttttgagattttctt

SEQ ID NO: 1427735 - DNA, 15 bp, Homo sapiens
gttttgagattttct

SEQ ID NO: 1427736 - DNA, 15 bp, Homo sapiens
ggttttgagattttc

SEQ ID NO: 1427737 - DNA, 15 bp, Homo sapiens
aggttttgagatttt

SEQ ID NO: 1427738 - DNA, 15 bp, Homo sapiens
caggttttgagattt

SEQ ID NO: 1427739 - DNA, 15 bp, Homo sapiens
tcaggttttgagatt

SEQ ID NO: 1427740 - DNA, 15 bp, Homo sapiens
ttcaggttttgagat

SEQ ID NO: 1427741 - DNA, 15 bp, Homo sapiens
tttcaggttttgaga

SEQ ID NO: 1427742 - DNA, 15 bp, Homo sapiens
ctttcaggttttgag

SEQ ID NO: 1427743 - DNA, 15 bp, Homo sapiens
cctttcaggttttga

SEQ ID NO: 1427744 - DNA, 15 bp, Homo sapiens
acctttcaggttttg

SEQ ID NO: 1427745 - DNA, 15 bp, Homo sapiens
tacctttcaggtttt

SEQ ID NO: 1427746 - DNA, 15 bp, Homo sapiens
atacctttcaggttt

SEQ ID NO: 1427747 - DNA, 15 bp, Homo sapiens
aatacctttcaggtt

SEQ ID NO: 1427748 - DNA, 15 bp, Homo sapiens
taatacctttcaggt

SEQ ID NO: 1427749 - DNA, 15 bp, Homo sapiens
ctaatacctttcagg

SEQ ID NO: 1427750 - DNA, 15 bp, Homo sapiens
tctaatacctttcag

SEQ ID NO: 1427751 - DNA, 15 bp, Homo sapiens
ctctaatacctttca

SEQ ID NO: 1427752 - DNA, 15 bp, Homo sapiens
tctctaatacctttc

SEQ ID NO: 1427753 - DNA, 15 bp, Homo sapiens
ttctctaataccttt

SEQ ID NO: 1427754 - DNA, 15 bp, Homo sapiens
gttctctaatacctt

SEQ ID NO: 1427755 - DNA, 15 bp, Homo sapiens
tgttctctaatacct

SEQ ID NO: 1427756 - DNA, 15 bp, Homo sapiens
ttgttctctaatacc

SEQ ID NO: 1427757 - DNA, 15 bp, Homo sapiens
tttgttctctaatac

SEQ ID NO: 1427758 - DNA, 15 bp, Homo sapiens
ctttgttctctaata

SEQ ID NO: 1427759 - DNA, 15 bp, Homo sapiens
gctttgttctctaat

SEQ ID NO: 1427760 - DNA, 15 bp, Homo sapiens
tgctttgttctctaa

SEQ ID NO: 1427761 - DNA, 15 bp, Homo sapiens
atgctttgttctcta

SEQ ID NO: 1427762 - DNA, 15 bp, Homo sapiens
gatgctttgttctct

SEQ ID NO: 1427763 - DNA, 15 bp, Homo sapiens
agatgctttgttctc

SEQ ID NO: 1427764 - DNA, 15 bp, Homo sapiens
aagatgctttgttct

SEQ ID NO: 1427765 - DNA, 15 bp, Homo sapiens
gaagatgctttgttc

SEQ ID NO: 1427766 - DNA, 15 bp, Homo sapiens
ggaagatgctttgtt

SEQ ID NO: 1427767 - DNA, 15 bp, Homo sapiens
aggaagatgctttgt

SEQ ID NO: 1427768 - DNA, 15 bp, Homo sapiens
taggaagatgctttg

SEQ ID NO: 1427769 - DNA, 15 bp, Homo sapiens
ttaggaagatgcttt

SEQ ID NO: 1427770 - DNA, 15 bp, Homo sapiens
attaggaagatgctt

SEQ ID NO: 1427771 - DNA, 15 bp, Homo sapiens
aattaggaagatgct

SEQ ID NO: 1427772 - DNA, 15 bp, Homo sapiens
aaattaggaagatgc

SEQ ID NO: 1427773 - DNA, 15 bp, Homo sapiens
caaattaggaagatg

SEQ ID NO: 1427774 - DNA, 15 bp, Homo sapiens
ccaaattaggaagat

SEQ ID NO: 1427775 - DNA, 15 bp, Homo sapiens
tccaaattaggaaga

SEQ ID NO: 1427776 - DNA, 15 bp, Homo sapiens
gtccaaattaggaag

SEQ ID NO: 1427777 - DNA, 15 bp, Homo sapiens
cgtccaaattaggaa

SEQ ID NO: 1427778 - DNA, 15 bp, Homo sapiens
acgtccaaattagga

SEQ ID NO: 1427779 - DNA, 15 bp, Homo sapiens
aacgtccaaattagg

SEQ ID NO: 1427780 - DNA, 15 bp, Homo sapiens
aaacgtccaaattag

SEQ ID NO: 1427781 - DNA, 15 bp, Homo sapiens
aaaacgtccaaatta

SEQ ID NO: 1427782 - DNA, 15 bp, Homo sapiens
aaaaacgtccaaatt

SEQ ID NO: 1427783 - DNA, 15 bp, Homo sapiens
gaaaaacgtccaaat

SEQ ID NO: 1427784 - DNA, 15 bp, Homo sapiens
tgaaaaacgtccaaa

SEQ ID NO: 1427785 - DNA, 15 bp, Homo sapiens
ttgaaaaacgtccaa

SEQ ID NO: 1427786 - DNA, 15 bp, Homo sapiens
tttgaaaaacgtcca

SEQ ID NO: 1427787 - DNA, 15 bp, Homo sapiens
gtttgaaaaacgtcc

SEQ ID NO: 1427788 - DNA, 15 bp, Homo sapiens
agtttgaaaaacgtc

SEQ ID NO: 1427789 - DNA, 15 bp, Homo sapiens
gagtttgaaaaacgt

SEQ ID NO: 1427790 - DNA, 15 bp, Homo sapiens
agagtttgaaaaacg

SEQ ID NO: 1427791 - DNA, 15 bp, Homo sapiens
tagagtttgaaaaac

SEQ ID NO: 1427792 - DNA, 15 bp, Homo sapiens
gtagagtttgaaaaa

SEQ ID NO: 1427793 - DNA, 15 bp, Homo sapiens
tgtagagtttgaaaa

SEQ ID NO: 1427794 - DNA, 15 bp, Homo sapiens
atgtagagtttgaaa

SEQ ID NO: 1427795 - DNA, 15 bp, Homo sapiens
gatgtagagtttgaa

SEQ ID NO: 1427796 - DNA, 15 bp, Homo sapiens
agatgtagagtttga

SEQ ID NO: 1427797 - DNA, 15 bp, Homo sapiens
aagatgtagagtttg

SEQ ID NO: 1427798 - DNA, 15 bp, Homo sapiens
gaagatgtagagttt

SEQ ID NO: 1427799 - DNA, 15 bp, Homo sapiens
agaagatgtagagtt

SEQ ID NO: 1427800 - DNA, 15 bp, Homo sapiens
aagaagatgtagagt

SEQ ID NO: 1427801 - DNA, 15 bp, Homo sapiens
taagaagatgtagag

SEQ ID NO: 1427802 - DNA, 15 bp, Homo sapiens
ttaagaagatgtaga

SEQ ID NO: 1427803 - DNA, 15 bp, Homo sapiens
attaagaagatgtag

SEQ ID NO: 1427804 - DNA, 15 bp, Homo sapiens
aattaagaagatgta

SEQ ID NO: 1427805 - DNA, 15 bp, Homo sapiens
aaattaagaagatgt

SEQ ID NO: 1427806 - DNA, 15 bp, Homo sapiens
taaattaagaagatg

SEQ ID NO: 1427807 - DNA, 15 bp, Homo sapiens
ataaattaagaagat

SEQ ID NO: 1427808 - DNA, 15 bp, Homo sapiens
aataaattaagaaga

SEQ ID NO: 1427809 - DNA, 15 bp, Homo sapiens
caataaattaagaag

SEQ ID NO: 1427810 - DNA, 15 bp, Homo sapiens
tcaataaattaagaa

SEQ ID NO: 1427811 - DNA, 15 bp, Homo sapiens
ctcaataaattaaga

SEQ ID NO: 1427812 - DNA, 15 bp, Homo sapiens
tctcaataaattaag

SEQ ID NO: 1427813 - DNA, 15 bp, Homo sapiens
ttctcaataaattaa

SEQ ID NO: 1427814 - DNA, 15 bp, Homo sapiens
tttctcaataaatta

SEQ ID NO: 1427815 - DNA, 15 bp, Homo sapiens
ttttctcaataaatt

SEQ ID NO: 1427816 - DNA, 15 bp, Homo sapiens
tttttctcaataaat

SEQ ID NO: 1427817 - DNA, 15 bp, Homo sapiens
ctttttctcaataaa

SEQ ID NO: 1427818 - DNA, 15 bp, Homo sapiens
tctttttctcaataa

SEQ ID NO: 1427819 - DNA, 15 bp, Homo sapiens
gtctttttctcaata

SEQ ID NO: 1427820 - DNA, 15 bp, Homo sapiens
tgtctttttctcaat

SEQ ID NO: 1427821 - DNA, 15 bp, Homo sapiens
gtgtctttttctcaa

SEQ ID NO: 1427822 - DNA, 15 bp, Homo sapiens
agtgtctttttctca

SEQ ID NO: 1427823 - DNA, 15 bp, Homo sapiens
aagtgtctttttctc

SEQ ID NO: 1427824 - DNA, 15 bp, Homo sapiens
taagtgtctttttct

SEQ ID NO: 1427825 - DNA, 15 bp, Homo sapiens
ctaagtgtctttttc

SEQ ID NO: 1427826 - DNA, 15 bp, Homo sapiens
cctaagtgtcttttt

SEQ ID NO: 1427827 - DNA, 15 bp, Homo sapiens
tcctaagtgtctttt

SEQ ID NO: 1427828 - DNA, 15 bp, Homo sapiens
atcctaagtgtcttt

SEQ ID NO: 1427829 - DNA, 15 bp, Homo sapiens
gatcctaagtgtctt

SEQ ID NO: 1427830 - DNA, 15 bp, Homo sapiens
agatcctaagtgtct

SEQ ID NO: 1427831 - DNA, 15 bp, Homo sapiens
aagatcctaagtgtc

SEQ ID NO: 1427832 - DNA, 15 bp, Homo sapiens
gaagatcctaagtgt

SEQ ID NO: 1427833 - DNA, 15 bp, Homo sapiens
ggaagatcctaagtg

SEQ ID NO: 1427834 - DNA, 15 bp, Homo sapiens
aggaagatcctaagt

SEQ ID NO: 1427835 - DNA, 15 bp, Homo sapiens
caggaagatcctaag

SEQ ID NO: 1427836 - DNA, 15 bp, Homo sapiens
acaggaagatcctaa

SEQ ID NO: 1427837 - DNA, 15 bp, Homo sapiens
tacaggaagatccta

SEQ ID NO: 1427838 - DNA, 15 bp, Homo sapiens
ttacaggaagatcct

SEQ ID NO: 1427839 - DNA, 15 bp, Homo sapiens
attacaggaagatcc

SEQ ID NO: 1427840 - DNA, 15 bp, Homo sapiens
aattacaggaagatc

SEQ ID NO: 1427841 - DNA, 15 bp, Homo sapiens
taattacaggaagat

SEQ ID NO: 1427842 - DNA, 15 bp, Homo sapiens
ttaattacaggaaga

SEQ ID NO: 1427843 - DNA, 15 bp, Homo sapiens
attaattacaggaag

SEQ ID NO: 1427844 - DNA, 15 bp, Homo sapiens
aattaattacaggaa

SEQ ID NO: 1427845 - DNA, 15 bp, Homo sapiens
aaattaattacagga

SEQ ID NO: 1427846 - DNA, 15 bp, Homo sapiens
caaattaattacagg

SEQ ID NO: 1427847 - DNA, 15 bp, Homo sapiens
gcaaattaattacag

SEQ ID NO: 1427848 - DNA, 15 bp, Homo sapiens
ggcaaattaattaca

SEQ ID NO: 1427849 - DNA, 15 bp, Homo sapiens
gggcaaattaattac

SEQ ID NO: 1427850 - DNA, 15 bp, Homo sapiens
tgggcaaattaatta

SEQ ID NO: 1427851 - DNA, 15 bp, Homo sapiens
atgggcaaattaatt

SEQ ID NO: 1427852 - DNA, 15 bp, Homo sapiens
aatgggcaaattaat

SEQ ID NO: 1427853 - DNA, 15 bp, Homo sapiens
caatgggcaaattaa

SEQ ID NO: 1427854 - DNA, 15 bp, Homo sapiens
gcaatgggcaaatta

SEQ ID NO: 1427855 - DNA, 15 bp, Homo sapiens
agcaatgggcaaatt

SEQ ID NO: 1427856 - DNA, 15 bp, Homo sapiens
cagcaatgggcaaat

SEQ ID NO: 1427857 - DNA, 15 bp, Homo sapiens
ccagcaatgggcaaa

SEQ ID NO: 1427858 - DNA, 15 bp, Homo sapiens
cccagcaatgggcaa

SEQ ID NO: 1427859 - DNA, 15 bp, Homo sapiens
tcccagcaatgggca

SEQ ID NO: 1427860 - DNA, 15 bp, Homo sapiens
ttcccagcaatgggc

SEQ ID NO: 1427861 - DNA, 15 bp, Homo sapiens
tttcccagcaatggg

SEQ ID NO: 1427862 - DNA, 15 bp, Homo sapiens
atttcccagcaatgg

SEQ ID NO: 1427863 - DNA, 15 bp, Homo sapiens
tatttcccagcaatg

SEQ ID NO: 1427864 - DNA, 15 bp, Homo sapiens
gtatttcccagcaat

SEQ ID NO: 1427865 - DNA, 15 bp, Homo sapiens
agtatttcccagcaa

SEQ ID NO: 1427866 - DNA, 15 bp, Homo sapiens
aagtatttcccagca

SEQ ID NO: 1427867 - DNA, 15 bp, Homo sapiens
caagtatttcccagc

SEQ ID NO: 1427868 - DNA, 15 bp, Homo sapiens
acaagtatttcccag

SEQ ID NO: 1427869 - DNA, 15 bp, Homo sapiens
aacaagtatttccca

SEQ ID NO: 1427870 - DNA, 15 bp, Homo sapiens
taacaagtatttccc

SEQ ID NO: 1427871 - DNA, 15 bp, Homo sapiens
gtaacaagtatttcc

SEQ ID NO: 1427872 - DNA, 15 bp, Homo sapiens
ggtaacaagtatttc

SEQ ID NO: 1427873 - DNA, 15 bp, Homo sapiens
aggtaacaagtattt

SEQ ID NO: 1427874 - DNA, 15 bp, Homo sapiens
caggtaacaagtatt

SEQ ID NO: 1427875 - DNA, 15 bp, Homo sapiens
acaggtaacaagtat

SEQ ID NO: 1427876 - DNA, 15 bp, Homo sapiens
gacaggtaacaagta

SEQ ID NO: 1427877 - DNA, 15 bp, Homo sapiens
tgacaggtaacaagt

SEQ ID NO: 1427878 - DNA, 15 bp, Homo sapiens
atgacaggtaacaag

SEQ ID NO: 1427879 - DNA, 15 bp, Homo sapiens
tatgacaggtaacaa

SEQ ID NO: 1427880 - DNA, 15 bp, Homo sapiens
ttatgacaggtaaca

SEQ ID NO: 1427881 - DNA, 15 bp, Homo sapiens
attatgacaggtaac

SEQ ID NO: 1427882 - DNA, 15 bp, Homo sapiens
cattatgacaggtaa

SEQ ID NO: 1427883 - DNA, 15 bp, Homo sapiens
acattatgacaggta

SEQ ID NO: 1427884 - DNA, 15 bp, Homo sapiens
tacattatgacaggt

SEQ ID NO: 1427885 - DNA, 15 bp, Homo sapiens
ctacattatgacagg

SEQ ID NO: 1427886 - DNA, 15 bp, Homo sapiens
actacattatgacag

SEQ ID NO: 1427887 - DNA, 15 bp, Homo sapiens
cactacattatgaca

SEQ ID NO: 1427888 - DNA, 15 bp, Homo sapiens
gcactacattatgac

SEQ ID NO: 1427889 - DNA, 15 bp, Homo sapiens
agcactacattatga

SEQ ID NO: 1427890 - DNA, 15 bp, Homo sapiens
aagcactacattatg

SEQ ID NO: 1427891 - DNA, 15 bp, Homo sapiens
gaagcactacattat

SEQ ID NO: 1427892 - DNA, 15 bp, Homo sapiens
tgaagcactacatta

SEQ ID NO: 1427893 - DNA, 15 bp, Homo sapiens
ttgaagcactacatt

SEQ ID NO: 1427894 - DNA, 15 bp, Homo sapiens
tttgaagcactacat

SEQ ID NO: 1427895 - DNA, 15 bp, Homo sapiens
ttttgaagcactaca

SEQ ID NO: 1427896 - DNA, 15 bp, Homo sapiens
attttgaagcactac

SEQ ID NO: 1427897 - DNA, 15 bp, Homo sapiens
tattttgaagcacta

SEQ ID NO: 1427898 - DNA, 15 bp, Homo sapiens
ttattttgaagcact

SEQ ID NO: 1427899 - DNA, 15 bp, Homo sapiens
gttattttgaagcac

SEQ ID NO: 1427900 - DNA, 15 bp, Homo sapiens
cgttattttgaagca

SEQ ID NO: 1427901 - DNA, 15 bp, Homo sapiens
acgttattttgaagc

SEQ ID NO: 1427902 - DNA, 15 bp, Homo sapiens
aacgttattttgaag

SEQ ID NO: 1427903 - DNA, 15 bp, Homo sapiens
taacgttattttgaa

SEQ ID NO: 1427904 - DNA, 15 bp, Homo sapiens
ataacgttattttga

SEQ ID NO: 1427905 - DNA, 15 bp, Homo sapiens
gataacgttattttg

SEQ ID NO: 1427906 - DNA, 15 bp, Homo sapiens
tgataacgttatttt

SEQ ID NO: 1427907 - DNA, 15 bp, Homo sapiens
ctgataacgttattt

SEQ ID NO: 1427908 - DNA, 15 bp, Homo sapiens
tctgataacgttatt

SEQ ID NO: 1427909 - DNA, 15 bp, Homo sapiens
ttctgataacgttat

SEQ ID NO: 1427910 - DNA, 15 bp, Homo sapiens
gttctgataacgtta

SEQ ID NO: 1427911 - DNA, 15 bp, Homo sapiens
agttctgataacgtt

SEQ ID NO: 1427912 - DNA, 15 bp, Homo sapiens
cagttctgataacgt

SEQ ID NO: 1427913 - DNA, 15 bp, Homo sapiens
gcagttctgataacg

SEQ ID NO: 1427914 - DNA, 15 bp, Homo sapiens
tgcagttctgataac

SEQ ID NO: 1427915 - DNA, 15 bp, Homo sapiens
ctgcagttctgataa

SEQ ID NO: 1427916 - DNA, 15 bp, Homo sapiens
actgcagttctgata

SEQ ID NO: 1427917 - DNA, 15 bp, Homo sapiens
gactgcagttctgat

SEQ ID NO: 1427918 - DNA, 15 bp, Homo sapiens
cgactgcagttctga

SEQ ID NO: 1427919 - DNA, 15 bp, Homo sapiens
tcgactgcagttctg

SEQ ID NO: 1427920 - DNA, 15 bp, Homo sapiens
ttcgactgcagttct

SEQ ID NO: 1427921 - DNA, 15 bp, Homo sapiens
tttcgactgcagttc

SEQ ID NO: 1427922 - DNA, 15 bp, Homo sapiens
ctttcgactgcagtt

SEQ ID NO: 1427923 - DNA, 15 bp, Homo sapiens
cctttcgactgcagt

SEQ ID NO: 1427924 - DNA, 15 bp, Homo sapiens
acctttcgactgcag

SEQ ID NO: 1427925 - DNA, 15 bp, Homo sapiens
tacctttcgactgca

SEQ ID NO: 1427926 - DNA, 15 bp, Homo sapiens
gtacctttcgactgc

SEQ ID NO: 1427927 - DNA, 15 bp, Homo sapiens
agtacctttcgactg

SEQ ID NO: 1427928 - DNA, 15 bp, Homo sapiens
gagtacctttcgact

SEQ ID NO: 1427929 - DNA, 15 bp, Homo sapiens
tgagtacctttcgac

SEQ ID NO: 1427930 - DNA, 15 bp, Homo sapiens
ttgagtacctttcga

SEQ ID NO: 1427931 - DNA, 15 bp, Homo sapiens
attgagtacctttcg

SEQ ID NO: 1427932 - DNA, 15 bp, Homo sapiens
tattgagtacctttc

SEQ ID NO: 1427933 - DNA, 15 bp, Homo sapiens
gtattgagtaccttt

SEQ ID NO: 1427934 - DNA, 15 bp, Homo sapiens
ggtattgagtacctt

SEQ ID NO: 1427935 - DNA, 15 bp, Homo sapiens
tggtattgagtacct

SEQ ID NO: 1427936 - DNA, 15 bp, Homo sapiens
ctggtattgagtacc

SEQ ID NO: 1427937 - DNA, 15 bp, Homo sapiens
actggtattgagtac

SEQ ID NO: 1427938 - DNA, 15 bp, Homo sapiens
aactggtattgagta

SEQ ID NO: 1427939 - DNA, 15 bp, Homo sapiens
taactggtattgagt

SEQ ID NO: 1427940 - DNA, 15 bp, Homo sapiens
ttaactggtattgag

SEQ ID NO: 1427941 - DNA, 15 bp, Homo sapiens
acttaactggtattg

SEQ ID NO: 1427942 - DNA, 15 bp, Homo sapiens
tacttaactggtatt

SEQ ID NO: 1427943 - DNA, 15 bp, Homo sapiens
ttacttaactggtat

SEQ ID NO: 1427944 - DNA, 15 bp, Homo sapiens
gttacttaactggta

SEQ ID NO: 1427945 - DNA, 15 bp, Homo sapiens
tgttacttaactggt

SEQ ID NO: 1427946 - DNA, 15 bp, Homo sapiens
atgttacttaactgg

SEQ ID NO: 1427947 - DNA, 15 bp, Homo sapiens
aatgttacttaactg

SEQ ID NO: 1427948 - DNA, 15 bp, Homo sapiens
aaatgttacttaact

SEQ ID NO: 1427949 - DNA, 15 bp, Homo sapiens
caaatgttacttaac

SEQ ID NO: 1427950 - DNA, 15 bp, Homo sapiens
tcaaatgttacttaa

SEQ ID NO: 1427951 - DNA, 15 bp, Homo sapiens
ttcaaatgttactta

SEQ ID NO: 1427952 - DNA, 15 bp, Homo sapiens
cttcaaatgttactt

SEQ ID NO: 1427953 - DNA, 15 bp, Homo sapiens
acttcaaatgttact

SEQ ID NO: 1427954 - DNA, 15 bp, Homo sapiens
gacttcaaatgttac

SEQ ID NO: 1427955 - DNA, 15 bp, Homo sapiens
ggacttcaaatgtta

SEQ ID NO: 1427956 - DNA, 15 bp, Homo sapiens
tggacttcaaatgtt

SEQ ID NO: 1427957 - DNA, 15 bp, Homo sapiens
ctggacttcaaatgt

SEQ ID NO: 1427958 - DNA, 15 bp, Homo sapiens
cctggacttcaaatg

SEQ ID NO: 1427959 - DNA, 15 bp, Homo sapiens
tcctggacttcaaat

SEQ ID NO: 1427960 - DNA, 15 bp, Homo sapiens
ttcctggacttcaaa

SEQ ID NO: 1427961 - DNA, 15 bp, Homo sapiens
tttcctggacttcaa

SEQ ID NO: 1427962 - DNA, 15 bp, Homo sapiens
ctttcctggacttca

SEQ ID NO: 1427963 - DNA, 15 bp, Homo sapiens
tctttcctggacttc

SEQ ID NO: 1427964 - DNA, 15 bp, Homo sapiens
ctctttcctggactt

SEQ ID NO: 1427965 - DNA, 15 bp, Homo sapiens
tctctttcctggact

SEQ ID NO: 1427966 - DNA, 15 bp, Homo sapiens
ttctctttcctggac

SEQ ID NO: 1427967 - DNA, 15 bp, Homo sapiens
cttctctttcctgga

SEQ ID NO: 1427968 - DNA, 15 bp, Homo sapiens
acttctctttcctgg

SEQ ID NO: 1427969 - DNA, 15 bp, Homo sapiens
gacttctctttcctg

SEQ ID NO: 1427970 - DNA, 15 bp, Homo sapiens
tgacttctctttcct

SEQ ID NO: 1427971 - DNA, 15 bp, Homo sapiens
ttgacttctctttcc

SEQ ID NO: 1427972 - DNA, 15 bp, Homo sapiens
cttgacttctctttc

SEQ ID NO: 1427973 - DNA, 15 bp, Homo sapiens
tcttgacttctcttt

SEQ ID NO: 1427974 - DNA, 15 bp, Homo sapiens
ttcttgacttctctt

SEQ ID NO: 1427975 - DNA, 15 bp, Homo sapiens
attcttgacttctct

SEQ ID NO: 1427976 - DNA, 15 bp, Homo sapiens
aattcttgacttctc

SEQ ID NO: 1427977 - DNA, 15 bp, Homo sapiens
gaattcttgacttct

SEQ ID NO: 1427978 - DNA, 15 bp, Homo sapiens
ggaattcttgacttc

SEQ ID NO: 1427979 - DNA, 15 bp, Homo sapiens
tggaattcttgactt

SEQ ID NO: 1427980 - DNA, 15 bp, Homo sapiens
atggaattcttgact

SEQ ID NO: 1427981 - DNA, 15 bp, Homo sapiens
catggaattcttgac

SEQ ID NO: 1427982 - DNA, 15 bp, Homo sapiens
tcatggaattcttga

SEQ ID NO: 1427983 - DNA, 15 bp, Homo sapiens
atcatggaattcttg

SEQ ID NO: 1427984 - DNA, 15 bp, Homo sapiens
aatcatggaattctt

SEQ ID NO: 1427985 - DNA, 15 bp, Homo sapiens
gaatcatggaattct

SEQ ID NO: 1427986 - DNA, 15 bp, Homo sapiens
ggaatcatggaattc

SEQ ID NO: 1427987 - DNA, 15 bp, Homo sapiens
tggaatcatggaatt

SEQ ID NO: 1427988 - DNA, 15 bp, Homo sapiens
atggaatcatggaat

SEQ ID NO: 1427989 - DNA, 15 bp, Homo sapiens
catggaatcatggaa

SEQ ID NO: 1427990 - DNA, 15 bp, Homo sapiens
acatggaatcatgga

SEQ ID NO: 1427991 - DNA, 15 bp, Homo sapiens
aacatggaatcatgg

SEQ ID NO: 1427992 - DNA, 15 bp, Homo sapiens
aaacatggaatcatg

SEQ ID NO: 1427993 - DNA, 15 bp, Homo sapiens
gaaacatggaatcat

SEQ ID NO: 1427994 - DNA, 15 bp, Homo sapiens
ggaaacatggaatca

SEQ ID NO: 1427995 - DNA, 15 bp, Homo sapiens
cggaaacatggaatc

SEQ ID NO: 1427996 - DNA, 15 bp, Homo sapiens
acggaaacatggaat

SEQ ID NO: 1427997 - DNA, 15 bp, Homo sapiens
tacggaaacatggaa

SEQ ID NO: 1427998 - DNA, 15 bp, Homo sapiens
atacggaaacatgga

SEQ ID NO: 1427999 - DNA, 15 bp, Homo sapiens
aatacggaaacatgg

SEQ ID NO: 1428000 - DNA, 15 bp, Homo sapiens
gaatacggaaacatg

SEQ ID NO: 1428001 - DNA, 15 bp, Homo sapiens
tgaatacggaaacat

SEQ ID NO: 1428002 - DNA, 15 bp, Homo sapiens
atgaatacggaaaca

SEQ ID NO: 1428003 - DNA, 15 bp, Homo sapiens
gatgaatacggaaac

SEQ ID NO: 1428004 - DNA, 15 bp, Homo sapiens
tgatgaatacggaaa

SEQ ID NO: 1428005 - DNA, 15 bp, Homo sapiens
ctgatgaatacggaa

SEQ ID NO: 1428006 - DNA, 15 bp, Homo sapiens
cctgatgaatacgga

SEQ ID NO: 1428007 - DNA, 15 bp, Homo sapiens
tcctgatgaatacgg

SEQ ID NO: 1428008 - DNA, 15 bp, Homo sapiens
ttcctgatgaatacg

SEQ ID NO: 1428009 - DNA, 15 bp, Homo sapiens
gttcctgatgaatac

SEQ ID NO: 1428010 - DNA, 15 bp, Homo sapiens
tgttcctgatgaata

SEQ ID NO: 1428011 - DNA, 15 bp, Homo sapiens
atgttcctgatgaat

SEQ ID NO: 1428012 - DNA, 15 bp, Homo sapiens
tatgttcctgatgaa

SEQ ID NO: 1428013 - DNA, 15 bp, Homo sapiens
ttatgttcctgatga

SEQ ID NO: 1428014 - DNA, 15 bp, Homo sapiens
attatgttcctgatg

SEQ ID NO: 1428015 - DNA, 15 bp, Homo sapiens
aattatgttcctgat

SEQ ID NO: 1428016 - DNA, 15 bp, Homo sapiens
taattatgttcctga

SEQ ID NO: 1428017 - DNA, 15 bp, Homo sapiens
ttaattatgttcctg

SEQ ID NO: 1428018 - DNA, 15 bp, Homo sapiens
cttaattatgttcct

SEQ ID NO: 1428019 - DNA, 15 bp, Homo sapiens
tcttaattatgttcc

SEQ ID NO: 1428020 - DNA, 15 bp, Homo sapiens
ctcttaattatgttc

SEQ ID NO: 1428021 - DNA, 15 bp, Homo sapiens
actcttaattatgtt

SEQ ID NO: 1428022 - DNA, 15 bp, Homo sapiens
aactcttaattatgt

SEQ ID NO: 1428023 - DNA, 15 bp, Homo sapiens
aaactcttaattatg

SEQ ID NO: 1428024 - DNA, 15 bp, Homo sapiens
taaactcttaattat

SEQ ID NO: 1428025 - DNA, 15 bp, Homo sapiens
ataaactcttaatta

SEQ ID NO: 1428026 - DNA, 15 bp, Homo sapiens
aataaactcttaatt

SEQ ID NO: 1428027 - DNA, 15 bp, Homo sapiens
gaataaactcttaat

SEQ ID NO: 1428028 - DNA, 15 bp, Homo sapiens
tgaataaactcttaa

SEQ ID NO: 1428029 - DNA, 15 bp, Homo sapiens
atgaataaactctta

SEQ ID NO: 1428030 - DNA, 15 bp, Homo sapiens
aatgaataaactctt

SEQ ID NO: 1428031 - DNA, 15 bp, Homo sapiens
aaatgaataaactct

SEQ ID NO: 1428032 - DNA, 15 bp, Homo sapiens
caaatgaataaactc

SEQ ID NO: 1428033 - DNA, 15 bp, Homo sapiens
tcaaatgaataaact

SEQ ID NO: 1428034 - DNA, 15 bp, Homo sapiens
ctcaaatgaataaac

SEQ ID NO: 1428035 - DNA, 15 bp, Homo sapiens
tctcaaatgaataaa

SEQ ID NO: 1428036 - DNA, 15 bp, Homo sapiens
gtctcaaatgaataa

SEQ ID NO: 1428037 - DNA, 15 bp, Homo sapiens
agtctcaaatgaata

SEQ ID NO: 1428038 - DNA, 15 bp, Homo sapiens
aagtctcaaatgaat

SEQ ID NO: 1428039 - DNA, 15 bp, Homo sapiens
taagtctcaaatgaa

SEQ ID NO: 1428040 - DNA, 15 bp, Homo sapiens
gtaagtctcaaatga

SEQ ID NO: 1428041 - DNA, 15 bp, Homo sapiens
tgtaagtctcaaatg

SEQ ID NO: 1428042 - DNA, 15 bp, Homo sapiens
ttgtaagtctcaaat

SEQ ID NO: 1428043 - DNA, 15 bp, Homo sapiens
cttgtaagtctcaaa

SEQ ID NO: 1428044 - DNA, 15 bp, Homo sapiens
gcttgtaagtctcaa

SEQ ID NO: 1428045 - DNA, 15 bp, Homo sapiens
tgcttgtaagtctca

SEQ ID NO: 1428046 - DNA, 15 bp, Homo sapiens
ttgcttgtaagtctc

SEQ ID NO: 1428047 - DNA, 15 bp, Homo sapiens
tttgcttgtaagtct

SEQ ID NO: 1428048 - DNA, 15 bp, Homo sapiens
gtttgcttgtaagtc

SEQ ID NO: 1428049 - DNA, 15 bp, Homo sapiens
tgtttgcttgtaagt

SEQ ID NO: 1428050 - DNA, 15 bp, Homo sapiens
ttgtttgcttgtaag

SEQ ID NO: 1428051 - DNA, 15 bp, Homo sapiens
tttgtttgcttgtaa

SEQ ID NO: 1428052 - DNA, 15 bp, Homo sapiens
ttttgtttgcttgta

SEQ ID NO: 1428053 - DNA, 15 bp, Homo sapiens
tttttgtttgcttgt

SEQ ID NO: 1428054 - DNA, 15 bp, Homo sapiens
ttttttgtttgcttg

SEQ ID NO: 1428055 - DNA, 15 bp, Homo sapiens
tttttttgtttgctt

SEQ ID NO: 1428056 - DNA, 15 bp, Homo sapiens
ctttttttgtttgct

SEQ ID NO: 1428057 - DNA, 15 bp, Homo sapiens
actttttttgtttgc

SEQ ID NO: 1428058 - DNA, 15 bp, Homo sapiens
aactttttttgtttg

SEQ ID NO: 1428059 - DNA, 15 bp, Homo sapiens
aaactttttttgttt

SEQ ID NO: 1428060 - DNA, 15 bp, Homo sapiens
taaactttttttgtt

SEQ ID NO: 1428061 - DNA, 15 bp, Homo sapiens
ataaactttttttgt

SEQ ID NO: 1428062 - DNA, 15 bp, Homo sapiens
cataaactttttttg

SEQ ID NO: 1428063 - DNA, 15 bp, Homo sapiens
acataaacttttttt

SEQ ID NO: 1428064 - DNA, 15 bp, Homo sapiens
tacataaactttttt

SEQ ID NO: 1428065 - DNA, 15 bp, Homo sapiens
ctacataaacttttt

SEQ ID NO: 1428066 - DNA, 15 bp, Homo sapiens
actacataaactttt

SEQ ID NO: 1428067 - DNA, 15 bp, Homo sapiens
aactacataaacttt

SEQ ID NO: 1428068 - DNA, 15 bp, Homo sapiens
aaactacataaactt

SEQ ID NO: 1428069 - DNA, 15 bp, Homo sapiens
caaactacataaact

SEQ ID NO: 1428070 - DNA, 15 bp, Homo sapiens
gcaaactacataaac

SEQ ID NO: 1428071 - DNA, 15 bp, Homo sapiens
tgcaaactacataaa

SEQ ID NO: 1428072 - DNA, 15 bp, Homo sapiens
ttgcaaactacataa

SEQ ID NO: 1428073 - DNA, 15 bp, Homo sapiens
cttgcaaactacata

SEQ ID NO: 1428074 - DNA, 15 bp, Homo sapiens
ccttgcaaactacat

SEQ ID NO: 1428075 - DNA, 15 bp, Homo sapiens
tccttgcaaactaca

SEQ ID NO: 1428076 - DNA, 15 bp, Homo sapiens
ttccttgcaaactac

SEQ ID NO: 1428077 - DNA, 15 bp, Homo sapiens
cttccttgcaaacta

SEQ ID NO: 1428078 - DNA, 15 bp, Homo sapiens
acttccttgcaaact

SEQ ID NO: 1428079 - DNA, 15 bp, Homo sapiens
aacttccttgcaaac

SEQ ID NO: 1428080 - DNA, 15 bp, Homo sapiens
taacttccttgcaaa

SEQ ID NO: 1428081 - DNA, 15 bp, Homo sapiens
ttaacttccttgcaa

SEQ ID NO: 1428082 - DNA, 15 bp, Homo sapiens
attaacttccttgca

SEQ ID NO: 1428083 - DNA, 15 bp, Homo sapiens
tattaacttccttgc

SEQ ID NO: 1428084 - DNA, 15 bp, Homo sapiens
atattaacttccttg

SEQ ID NO: 1428085 - DNA, 15 bp, Homo sapiens
aatattaacttcctt

SEQ ID NO: 1428086 - DNA, 15 bp, Homo sapiens
gaatattaacttcct

SEQ ID NO: 1428087 - DNA, 15 bp, Homo sapiens
agaatattaacttcc

SEQ ID NO: 1428088 - DNA, 15 bp, Homo sapiens
cagaatattaacttc

SEQ ID NO: 1428089 - DNA, 15 bp, Homo sapiens
tcagaatattaactt

SEQ ID NO: 1428090 - DNA, 15 bp, Homo sapiens
atcagaatattaact

SEQ ID NO: 1428091 - DNA, 15 bp, Homo sapiens
aatcagaatattaac

SEQ ID NO: 1428092 - DNA, 15 bp, Homo sapiens
aaatcagaatattaa

SEQ ID NO: 1428093 - DNA, 15 bp, Homo sapiens
aaaatcagaatatta

SEQ ID NO: 1428094 - DNA, 15 bp, Homo sapiens
taaaatcagaatatt

SEQ ID NO: 1428095 - DNA, 15 bp, Homo sapiens
ataaaatcagaatat

SEQ ID NO: 1428096 - DNA, 15 bp, Homo sapiens
aataaaatcagaata

SEQ ID NO: 1428097 - DNA, 15 bp, Homo sapiens
gaataaaatcagaat

SEQ ID NO: 1428098 - DNA, 15 bp, Homo sapiens
agaataaaatcagaa

SEQ ID NO: 1428099 - DNA, 15 bp, Homo sapiens
aagaataaaatcaga

SEQ ID NO: 1428100 - DNA, 15 bp, Homo sapiens
gaagaataaaatcag

SEQ ID NO: 1428101 - DNA, 15 bp, Homo sapiens
cgaagaataaaatca

SEQ ID NO: 1428102 - DNA, 15 bp, Homo sapiens
tcgaagaataaaatc

SEQ ID NO: 1428103 - DNA, 15 bp, Homo sapiens
ttcgaagaataaaat

SEQ ID NO: 1428104 - DNA, 15 bp, Homo sapiens
tttcgaagaataaaa

SEQ ID NO: 1428105 - DNA, 15 bp, Homo sapiens
atttcgaagaataaa

SEQ ID NO: 1428106 - DNA, 15 bp, Homo sapiens
catttcgaagaataa

SEQ ID NO: 1428107 - DNA, 15 bp, Homo sapiens
acatttcgaagaata

SEQ ID NO: 1428108 - DNA, 15 bp, Homo sapiens
tacatttcgaagaat

SEQ ID NO: 1428109 - DNA, 15 bp, Homo sapiens
gtacatttcgaagaa

SEQ ID NO: 1428110 - DNA, 15 bp, Homo sapiens
tgtacatttcgaaga

SEQ ID NO: 1428111 - DNA, 15 bp, Homo sapiens
atgtacatttcgaag

SEQ ID NO: 1428112 - DNA, 15 bp, Homo sapiens
tatgtacatttcgaa

SEQ ID NO: 1428113 - DNA, 15 bp, Homo sapiens
atatgtacatttcga

SEQ ID NO: 1428114 - DNA, 15 bp, Homo sapiens
tatatgtacatttcg

SEQ ID NO: 1428115 - DNA, 15 bp, Homo sapiens
ttatatgtacatttc

SEQ ID NO: 1428116 - DNA, 15 bp, Homo sapiens
tttatatgtacattt

SEQ ID NO: 1428117 - DNA, 15 bp, Homo sapiens
atttatatgtacatt

SEQ ID NO: 1428118 - DNA, 15 bp, Homo sapiens
tatttatatgtacat

SEQ ID NO: 1428119 - DNA, 15 bp, Homo sapiens
ctatttatatgtaca

SEQ ID NO: 1428120 - DNA, 15 bp, Homo sapiens
actatttatatgtac

SEQ ID NO: 1428121 - DNA, 15 bp, Homo sapiens
aactatttatatgta

SEQ ID NO: 1428122 - DNA, 15 bp, Homo sapiens
gaactatttatatgt

SEQ ID NO: 1428123 - DNA, 15 bp, Homo sapiens
agaactatttatatg

SEQ ID NO: 1428124 - DNA, 15 bp, Homo sapiens
gagaactatttatat

SEQ ID NO: 1428125 - DNA, 15 bp, Homo sapiens
tgagaactatttata

SEQ ID NO: 1428126 - DNA, 15 bp, Homo sapiens
ttgagaactatttat

SEQ ID NO: 1428127 - DNA, 15 bp, Homo sapiens
cttgagaactattta

SEQ ID NO: 1428128 - DNA, 15 bp, Homo sapiens
acttgagaactattt

SEQ ID NO: 1428129 - DNA, 15 bp, Homo sapiens
aacttgagaactatt

SEQ ID NO: 1428130 - DNA, 15 bp, Homo sapiens
aaacttgagaactat

SEQ ID NO: 1428131 - DNA, 15 bp, Homo sapiens
caaacttgagaacta

SEQ ID NO: 1428132 - DNA, 15 bp, Homo sapiens
tcaaacttgagaact

SEQ ID NO: 1428133 - DNA, 15 bp, Homo sapiens
atcaaacttgagaac

SEQ ID NO: 1428134 - DNA, 15 bp, Homo sapiens
aatcaaacttgagaa

SEQ ID NO: 1428135 - DNA, 15 bp, Homo sapiens
aaatcaaacttgaga

SEQ ID NO: 1428136 - DNA, 15 bp, Homo sapiens
aaaatcaaacttgag

SEQ ID NO: 1428137 - DNA, 15 bp, Homo sapiens
taaaatcaaacttga

SEQ ID NO: 1428138 - DNA, 15 bp, Homo sapiens
ataaaatcaaacttg

SEQ ID NO: 1428139 - DNA, 15 bp, Homo sapiens
cataaaatcaaactt

SEQ ID NO: 1428140 - DNA, 15 bp, Homo sapiens
tcataaaatcaaact

SEQ ID NO: 1428141 - DNA, 15 bp, Homo sapiens
atcataaaatcaaac

SEQ ID NO: 1428142 - DNA, 15 bp, Homo sapiens
tatcataaaatcaaa

SEQ ID NO: 1428143 - DNA, 15 bp, Homo sapiens
ttatcataaaatcaa

SEQ ID NO: 1428144 - DNA, 15 bp, Homo sapiens
tttatcataaaatca

SEQ ID NO: 1428145 - DNA, 15 bp, Homo sapiens
ttttatcataaaatc

SEQ ID NO: 1428146 - DNA, 15 bp, Homo sapiens
cttttatcataaaat

SEQ ID NO: 1428147 - DNA, 15 bp, Homo sapiens
acttttatcataaaa

SEQ ID NO: 1428148 - DNA, 15 bp, Homo sapiens
cacttttatcataaa

SEQ ID NO: 1428149 - DNA, 15 bp, Homo sapiens
acacttttatcataa

SEQ ID NO: 1428150 - DNA, 15 bp, Homo sapiens
tacacttttatcata

SEQ ID NO: 1428151 - DNA, 15 bp, Homo sapiens
ctacacttttatcat

SEQ ID NO: 1428152 - DNA, 15 bp, Homo sapiens
actacacttttatca

SEQ ID NO: 1428153 - DNA, 15 bp, Homo sapiens
aactacacttttatc

SEQ ID NO: 1428154 - DNA, 15 bp, Homo sapiens
aaactacacttttat

SEQ ID NO: 1428155 - DNA, 15 bp, Homo sapiens
caaactacactttta

SEQ ID NO: 1428156 - DNA, 15 bp, Homo sapiens
ccaaactacactttt

SEQ ID NO: 1428157 - DNA, 15 bp, Homo sapiens
cccaaactacacttt

SEQ ID NO: 1428158 - DNA, 15 bp, Homo sapiens
tcccaaactacactt

SEQ ID NO: 1428159 - DNA, 15 bp, Homo sapiens
ttcccaaactacact

SEQ ID NO: 1428160 - DNA, 15 bp, Homo sapiens
tttcccaaactacac

SEQ ID NO: 1428161 - DNA, 15 bp, Homo sapiens
ttttcccaaactaca

SEQ ID NO: 1428162 - DNA, 15 bp, Homo sapiens
cttttcccaaactac

SEQ ID NO: 1428163 - DNA, 15 bp, Homo sapiens
ccttttcccaaacta

SEQ ID NO: 1428164 - DNA, 15 bp, Homo sapiens
accttttcccaaact

SEQ ID NO: 1428165 - DNA, 15 bp, Homo sapiens
gaccttttcccaaac

SEQ ID NO: 1428166 - DNA, 15 bp, Homo sapiens
tgaccttttcccaaa

SEQ ID NO: 1428167 - DNA, 15 bp, Homo sapiens
atgaccttttcccaa

SEQ ID NO: 1428168 - DNA, 15 bp, Homo sapiens
aatgaccttttccca

SEQ ID NO: 1428169 - DNA, 15 bp, Homo sapiens
gaatgaccttttccc

SEQ ID NO: 1428170 - DNA, 15 bp, Homo sapiens
agaatgaccttttcc

SEQ ID NO: 1428171 - DNA, 15 bp, Homo sapiens
tagaatgaccttttc

SEQ ID NO: 1428172 - DNA, 15 bp, Homo sapiens
ttagaatgacctttt

SEQ ID NO: 1428173 - DNA, 15 bp, Homo sapiens
gttagaatgaccttt

SEQ ID NO: 1428174 - DNA, 15 bp, Homo sapiens
agttagaatgacctt

SEQ ID NO: 1428175 - DNA, 15 bp, Homo sapiens
aagttagaatgacct

SEQ ID NO: 1428176 - DNA, 15 bp, Homo sapiens
aaagttagaatgacc

SEQ ID NO: 1428177 - DNA, 15 bp, Homo sapiens
taaagttagaatgac

SEQ ID NO: 1428178 - DNA, 15 bp, Homo sapiens
ttaaagttagaatga

SEQ ID NO: 1428179 - DNA, 15 bp, Homo sapiens
tttaaagttagaatg

SEQ ID NO: 1428180 - DNA, 15 bp, Homo sapiens
ttttaaagttagaat

SEQ ID NO: 1428181 - DNA, 15 bp, Homo sapiens
tttttaaagttagaa

SEQ ID NO: 1428182 - DNA, 15 bp, Homo sapiens
ctttttaaagttaga

SEQ ID NO: 1428183 - DNA, 15 bp, Homo sapiens
cctttttaaagttag

SEQ ID NO: 1428184 - DNA, 15 bp, Homo sapiens
acctttttaaagtta

SEQ ID NO: 1428185 - DNA, 15 bp, Homo sapiens
gacctttttaaagtt

SEQ ID NO: 1428186 - DNA, 15 bp, Homo sapiens
cgacctttttaaagt

SEQ ID NO: 1428187 - DNA, 15 bp, Homo sapiens
gcgacctttttaaag

SEQ ID NO: 1428188 - DNA, 15 bp, Homo sapiens
cgcgacctttttaaa

SEQ ID NO: 1428189 - DNA, 15 bp, Homo sapiens
tcgcgacctttttaa

SEQ ID NO: 1428190 - DNA, 15 bp, Homo sapiens
ttcgcgaccttttta

SEQ ID NO: 1428191 - DNA, 15 bp, Homo sapiens
tttcgcgaccttttt

SEQ ID NO: 1428192 - DNA, 15 bp, Homo sapiens
ttttcgcgacctttt

SEQ ID NO: 1428193 - DNA, 15 bp, Homo sapiens
gttttcgcgaccttt

SEQ ID NO: 1428194 - DNA, 15 bp, Homo sapiens
tgttttcgcgacctt

SEQ ID NO: 1428195 - DNA, 15 bp, Homo sapiens
ttgttttcgcgacct

SEQ ID NO: 1428196 - DNA, 15 bp, Homo sapiens
attgttttcgcgacc

SEQ ID NO: 1428197 - DNA, 15 bp, Homo sapiens
tattgttttcgcgac

SEQ ID NO: 1428198 - DNA, 15 bp, Homo sapiens
ctattgttttcgcga

SEQ ID NO: 1428199 - DNA, 15 bp, Homo sapiens
tctattgttttcgcg

SEQ ID NO: 1428200 - DNA, 15 bp, Homo sapiens
ctctattgttttcgc

SEQ ID NO: 1428201 - DNA, 15 bp, Homo sapiens
cctctattgttttcg

SEQ ID NO: 1428202 - DNA, 15 bp, Homo sapiens
gcctctattgttttc

SEQ ID NO: 1428203 - DNA, 15 bp, Homo sapiens
agcctctattgtttt

SEQ ID NO: 1428204 - DNA, 15 bp, Homo sapiens
cagcctctattgttt

SEQ ID NO: 1428205 - DNA, 15 bp, Homo sapiens
tcagcctctattgtt

SEQ ID NO: 1428206 - DNA, 15 bp, Homo sapiens
ttcagcctctattgt

SEQ ID NO: 1428207 - DNA, 15 bp, Homo sapiens
cttcagcctctattg

SEQ ID NO: 1428208 - DNA, 15 bp, Homo sapiens
gcttcagcctctatt

SEQ ID NO: 1428209 - DNA, 15 bp, Homo sapiens
tgcttcagcctctat

SEQ ID NO: 1428210 - DNA, 15 bp, Homo sapiens
atgcttcagcctcta

SEQ ID NO: 1428211 - DNA, 15 bp, Homo sapiens
aatgcttcagcctct

SEQ ID NO: 1428212 - DNA, 15 bp, Homo sapiens
caatgcttcagcctc

SEQ ID NO: 1428213 - DNA, 15 bp, Homo sapiens
acaatgcttcagcct

SEQ ID NO: 1428214 - DNA, 15 bp, Homo sapiens
aacaatgcttcagcc

SEQ ID NO: 1428215 - DNA, 15 bp, Homo sapiens
taacaatgcttcagc

SEQ ID NO: 1428216 - DNA, 15 bp, Homo sapiens
ctaacaatgcttcag

SEQ ID NO: 1428217 - DNA, 15 bp, Homo sapiens
gctaacaatgcttca

SEQ ID NO: 1428218 - DNA, 15 bp, Homo sapiens
cgctaacaatgcttc

SEQ ID NO: 1428219 - DNA, 15 bp, Homo sapiens
acgctaacaatgctt

SEQ ID NO: 1428220 - DNA, 15 bp, Homo sapiens
tacgctaacaatgct

SEQ ID NO: 1428221 - DNA, 15 bp, Homo sapiens
ttacgctaacaatgc

SEQ ID NO: 1428222 - DNA, 15 bp, Homo sapiens
attacgctaacaatg

SEQ ID NO: 1428223 - DNA, 15 bp, Homo sapiens
aattacgctaacaat

SEQ ID NO: 1428224 - DNA, 15 bp, Homo sapiens
caattacgctaacaa

SEQ ID NO: 1428225 - DNA, 15 bp, Homo sapiens
ccaattacgctaaca

SEQ ID NO: 1428226 - DNA, 15 bp, Homo sapiens
cccaattacgctaac

SEQ ID NO: 1428227 - DNA, 15 bp, Homo sapiens
ccccaattacgctaa

SEQ ID NO: 1428228 - DNA, 15 bp, Homo sapiens
cccccaattacgcta

SEQ ID NO: 1428229 - DNA, 15 bp, Homo sapiens
tcccccaattacgct

SEQ ID NO: 1428230 - DNA, 15 bp, Homo sapiens
ctcccccaattacgc

SEQ ID NO: 1428231 - DNA, 15 bp, Homo sapiens
cctcccccaattacg

SEQ ID NO: 1428232 - DNA, 15 bp, Homo sapiens
tcctcccccaattac

SEQ ID NO: 1428233 - DNA, 15 bp, Homo sapiens
ctcctcccccaatta

SEQ ID NO: 1428234 - DNA, 15 bp, Homo sapiens
cctcctcccccaatt

SEQ ID NO: 1428235 - DNA, 15 bp, Homo sapiens
ccctcctcccccaat

SEQ ID NO: 1428236 - DNA, 15 bp, Homo sapiens
tccctcctcccccaa

SEQ ID NO: 1428237 - DNA, 15 bp, Homo sapiens
ctccctcctccccca

SEQ ID NO: 1428238 - DNA, 15 bp, Homo sapiens
gctccctcctccccc

SEQ ID NO: 1428239 - DNA, 15 bp, Homo sapiens
tgctccctcctcccc

SEQ ID NO: 1428240 - DNA, 15 bp, Homo sapiens
ttgctccctcctccc

SEQ ID NO: 1428241 - DNA, 15 bp, Homo sapiens
gttgctccctcctcc

SEQ ID NO: 1428242 - DNA, 15 bp, Homo sapiens
cgttgctccctcctc

SEQ ID NO: 1428243 - DNA, 15 bp, Homo sapiens
ccgttgctccctcct

SEQ ID NO: 1428244 - DNA, 15 bp, Homo sapiens
gccgttgctccctcc

SEQ ID NO: 1428245 - DNA, 15 bp, Homo sapiens
tgccgttgctccctc

SEQ ID NO: 1428246 - DNA, 15 bp, Homo sapiens
ttgccgttgctccct

SEQ ID NO: 1428247 - DNA, 15 bp, Homo sapiens
cttgccgttgctccc

SEQ ID NO: 1428248 - DNA, 15 bp, Homo sapiens
tcttgccgttgctcc

SEQ ID NO: 1428249 - DNA, 15 bp, Homo sapiens
ttcttgccgttgctc

SEQ ID NO: 1428250 - DNA, 15 bp, Homo sapiens
attcttgccgttgct

SEQ ID NO: 1428251 - DNA, 15 bp, Homo sapiens
aattcttgccgttgc

SEQ ID NO: 1428252 - DNA, 15 bp, Homo sapiens
taattcttgccgttg

SEQ ID NO: 1428253 - DNA, 15 bp, Homo sapiens
ttaattcttgccgtt

SEQ ID NO: 1428254 - DNA, 15 bp, Homo sapiens
cttaattcttgccgt

SEQ ID NO: 1428255 - DNA, 15 bp, Homo sapiens
tcttaattcttgccg

SEQ ID NO: 1428256 - DNA, 15 bp, Homo sapiens
ctcttaattcttgcc

SEQ ID NO: 1428257 - DNA, 15 bp, Homo sapiens
gctcttaattcttgc

SEQ ID NO: 1428258 - DNA, 15 bp, Homo sapiens
tgctcttaattcttg

SEQ ID NO: 1428259 - DNA, 15 bp, Homo sapiens
ctgctcttaattctt

SEQ ID NO: 1428260 - DNA, 15 bp, Homo sapiens
tctgctcttaattct

SEQ ID NO: 1428261 - DNA, 15 bp, Homo sapiens
ttctgctcttaattc

SEQ ID NO: 1428262 - DNA, 15 bp, Homo sapiens
gttctgctcttaatt

SEQ ID NO: 1428263 - DNA, 15 bp, Homo sapiens
tgttctgctcttaat

SEQ ID NO: 1428264 - DNA, 15 bp, Homo sapiens
gtgttctgctcttaa

SEQ ID NO: 1428265 - DNA, 15 bp, Homo sapiens
tgtgttctgctctta

SEQ ID NO: 1428266 - DNA, 15 bp, Homo sapiens
ctgtgttctgctctt

SEQ ID NO: 1428267 - DNA, 15 bp, Homo sapiens
cctgtgttctgctct

SEQ ID NO: 1428268 - DNA, 15 bp, Homo sapiens
acctgtgttctgctc

SEQ ID NO: 1428269 - DNA, 15 bp, Homo sapiens
gacctgtgttctgct

SEQ ID NO: 1428270 - DNA, 15 bp, Homo sapiens
agacctgtgttctgc

SEQ ID NO: 1428271 - DNA, 15 bp, Homo sapiens
tagacctgtgttctg

SEQ ID NO: 1428272 - DNA, 15 bp, Homo sapiens
ctagacctgtgttct

SEQ ID NO: 1428273 - DNA, 15 bp, Homo sapiens
tctagacctgtgttc

SEQ ID NO: 1428274 - DNA, 15 bp, Homo sapiens
ttctagacctgtgtt

SEQ ID NO: 1428275 - DNA, 15 bp, Homo sapiens
tttctagacctgtgt

SEQ ID NO: 1428276 - DNA, 15 bp, Homo sapiens
gtttctagacctgtg

SEQ ID NO: 1428277 - DNA, 15 bp, Homo sapiens
tgtttctagacctgt

SEQ ID NO: 1428278 - DNA, 15 bp, Homo sapiens
ctgtttctagacctg

SEQ ID NO: 1428279 - DNA, 15 bp, Homo sapiens
actgtttctagacct

SEQ ID NO: 1428280 - DNA, 15 bp, Homo sapiens
tactgtttctagacc

SEQ ID NO: 1428281 - DNA, 15 bp, Homo sapiens
gtactgtttctagac

SEQ ID NO: 1428282 - DNA, 15 bp, Homo sapiens
ggtactgtttctaga

SEQ ID NO: 1428283 - DNA, 15 bp, Homo sapiens
aggtactgtttctag

SEQ ID NO: 1428284 - DNA, 15 bp, Homo sapiens
caggtactgtttcta

SEQ ID NO: 1428285 - DNA, 15 bp, Homo sapiens
acaggtactgtttct

SEQ ID NO: 1428286 - DNA, 15 bp, Homo sapiens
gacaggtactgtttc

SEQ ID NO: 1428287 - DNA, 15 bp, Homo sapiens
ggacaggtactgttt

SEQ ID NO: 1428288 - DNA, 15 bp, Homo sapiens
gggacaggtactgtt

SEQ ID NO: 1428289 - DNA, 15 bp, Homo sapiens
tgggacaggtactgt

SEQ ID NO: 1428290 - DNA, 15 bp, Homo sapiens
ttgggacaggtactg

SEQ ID NO: 1428291 - DNA, 15 bp, Homo sapiens
tttgggacaggtact

SEQ ID NO: 1428292 - DNA, 15 bp, Homo sapiens
ctttgggacaggtac

SEQ ID NO: 1428293 - DNA, 15 bp, Homo sapiens
actttgggacaggta

SEQ ID NO: 1428294 - DNA, 15 bp, Homo sapiens
cactttgggacaggt

SEQ ID NO: 1428295 - DNA, 15 bp, Homo sapiens
ccactttgggacagg

SEQ ID NO: 1428296 - DNA, 15 bp, Homo sapiens
cccactttgggacag

SEQ ID NO: 1428297 - DNA, 15 bp, Homo sapiens
acccactttgggaca

SEQ ID NO: 1428298 - DNA, 15 bp, Homo sapiens
gacccactttgggac

SEQ ID NO: 1428299 - DNA, 15 bp, Homo sapiens
agacccactttggga

SEQ ID NO: 1428300 - DNA, 15 bp, Homo sapiens
cagacccactttggg

SEQ ID NO: 1428301 - DNA, 15 bp, Homo sapiens
gcagacccactttgg

SEQ ID NO: 1428302 - DNA, 15 bp, Homo sapiens
ggcagacccactttg

SEQ ID NO: 1428303 - DNA, 15 bp, Homo sapiens
gggcagacccacttt

SEQ ID NO: 1428304 - DNA, 15 bp, Homo sapiens
cgggcagacccactt

SEQ ID NO: 1428305 - DNA, 15 bp, Homo sapiens
ccgggcagacccact

SEQ ID NO: 1428306 - DNA, 15 bp, Homo sapiens
gccgggcagacccac

SEQ ID NO: 1428307 - DNA, 15 bp, Homo sapiens
cgccgggcagaccca

SEQ ID NO: 1428308 - DNA, 15 bp, Homo sapiens
gcgccgggcagaccc

SEQ ID NO: 1428309 - DNA, 15 bp, Homo sapiens
agcgccgggcagacc

SEQ ID NO: 1428310 - DNA, 15 bp, Homo sapiens
cagcgccgggcagac

SEQ ID NO: 1428311 - DNA, 15 bp, Homo sapiens
acagcgccgggcaga

SEQ ID NO: 1428312 - DNA, 15 bp, Homo sapiens
gacagcgccgggcag

SEQ ID NO: 1428313 - DNA, 15 bp, Homo sapiens
cgacagcgccgggca

SEQ ID NO: 1428314 - DNA, 15 bp, Homo sapiens
gcgacagcgccgggc

SEQ ID NO: 1428315 - DNA, 15 bp, Homo sapiens
agcgacagcgccggg

SEQ ID NO: 1428316 - DNA, 15 bp, Homo sapiens
aagcgacagcgccgg

SEQ ID NO: 1428317 - DNA, 15 bp, Homo sapiens
aaagcgacagcgccg

SEQ ID NO: 1428318 - DNA, 15 bp, Homo sapiens
taaagcgacagcgcc

SEQ ID NO: 1428319 - DNA, 15 bp, Homo sapiens
ttaaagcgacagcgc

SEQ ID NO: 1428320 - DNA, 15 bp, Homo sapiens
cttaaagcgacagcg

SEQ ID NO: 1428321 - DNA, 15 bp, Homo sapiens
gcttaaagcgacagc

SEQ ID NO: 1428322 - DNA, 15 bp, Homo sapiens
tgcttaaagcgacag

SEQ ID NO: 1428323 - DNA, 15 bp, Homo sapiens
ctgcttaaagcgaca

SEQ ID NO: 1428324 - DNA, 15 bp, Homo sapiens
gctgcttaaagcgac

SEQ ID NO: 1428325 - DNA, 15 bp, Homo sapiens
cgctgcttaaagcga

SEQ ID NO: 1428326 - DNA, 15 bp, Homo sapiens
gcgctgcttaaagcg

SEQ ID NO: 1428327 - DNA, 15 bp, Homo sapiens
agcgctgcttaaagc

SEQ ID NO: 1428328 - DNA, 15 bp, Homo sapiens
gagcgctgcttaaag

SEQ ID NO: 1428329 - DNA, 15 bp, Homo sapiens
ggagcgctgcttaaa

SEQ ID NO: 1428330 - DNA, 15 bp, Homo sapiens
aggagcgctgcttaa

SEQ ID NO: 1428331 - DNA, 15 bp, Homo sapiens
caggagcgctgctta

SEQ ID NO: 1428332 - DNA, 15 bp, Homo sapiens
ccaggagcgctgctt

SEQ ID NO: 1428333 - DNA, 15 bp, Homo sapiens
tccaggagcgctgct

SEQ ID NO: 1428334 - DNA, 15 bp, Homo sapiens
ttccaggagcgctgc

SEQ ID NO: 1428335 - DNA, 15 bp, Homo sapiens
tttccaggagcgctg

SEQ ID NO: 1428336 - DNA, 15 bp, Homo sapiens
gtttccaggagcgct

SEQ ID NO: 1428337 - DNA, 15 bp, Homo sapiens
ggtttccaggagcgc

SEQ ID NO: 1428338 - DNA, 15 bp, Homo sapiens
aggtttccaggagcg

SEQ ID NO: 1428339 - DNA, 15 bp, Homo sapiens
gaggtttccaggagc

SEQ ID NO: 1428340 - DNA, 15 bp, Homo sapiens
tgaggtttccaggag

SEQ ID NO: 1428341 - DNA, 15 bp, Homo sapiens
atgaggtttccagga

SEQ ID NO: 1428342 - DNA, 15 bp, Homo sapiens
gatgaggtttccagg

SEQ ID NO: 1428343 - DNA, 15 bp, Homo sapiens
agatgaggtttccag

SEQ ID NO: 1428344 - DNA, 15 bp, Homo sapiens
tagatgaggtttcca

SEQ ID NO: 1428345 - DNA, 15 bp, Homo sapiens
gtagatgaggtttcc

SEQ ID NO: 1428346 - DNA, 15 bp, Homo sapiens
tgtagatgaggtttc

SEQ ID NO: 1428347 - DNA, 15 bp, Homo sapiens
ttgtagatgaggttt

SEQ ID NO: 1428348 - DNA, 15 bp, Homo sapiens
tttgtagatgaggtt

SEQ ID NO: 1428349 - DNA, 15 bp, Homo sapiens
atttgtagatgaggt

SEQ ID NO: 1428350 - DNA, 15 bp, Homo sapiens
gatttgtagatgagg

SEQ ID NO: 1428351 - DNA, 15 bp, Homo sapiens
ggatttgtagatgag

SEQ ID NO: 1428352 - DNA, 15 bp, Homo sapiens
aggatttgtagatga

SEQ ID NO: 1428353 - DNA, 15 bp, Homo sapiens
caggatttgtagatg

SEQ ID NO: 1428354 - DNA, 15 bp, Homo sapiens
ccaggatttgtagat

SEQ ID NO: 1428355 - DNA, 15 bp, Homo sapiens
cccaggatttgtaga

SEQ ID NO: 1428356 - DNA, 15 bp, Homo sapiens
ccccaggatttgtag

SEQ ID NO: 1428357 - DNA, 15 bp, Homo sapiens
gccccaggatttgta

SEQ ID NO: 1428358 - DNA, 15 bp, Homo sapiens
cgccccaggatttgt

SEQ ID NO: 1428359 - DNA, 15 bp, Homo sapiens
ccgccccaggatttg

SEQ ID NO: 1428360 - DNA, 15 bp, Homo sapiens
cccgccccaggattt

SEQ ID NO: 1428361 - DNA, 15 bp, Homo sapiens
acccgccccaggatt

SEQ ID NO: 1428362 - DNA, 15 bp, Homo sapiens
gacccgccccaggat

SEQ ID NO: 1428363 - DNA, 15 bp, Homo sapiens
tgacccgccccagga

SEQ ID NO: 1428364 - DNA, 15 bp, Homo sapiens
ctgacccgccccagg

SEQ ID NO: 1428365 - DNA, 15 bp, Homo sapiens
cctgacccgccccag

SEQ ID NO: 1428366 - DNA, 15 bp, Homo sapiens
ccctgacccgcccca

SEQ ID NO: 1428367 - DNA, 15 bp, Homo sapiens
cccctgacccgcccc

SEQ ID NO: 1428368 - DNA, 15 bp, Homo sapiens
acccctgacccgccc

SEQ ID NO: 1428369 - DNA, 15 bp, Homo sapiens
cacccctgacccgcc

SEQ ID NO: 1428370 - DNA, 15 bp, Homo sapiens
ccacccctgacccgc

SEQ ID NO: 1428371 - DNA, 15 bp, Homo sapiens
gccacccctgacccg

SEQ ID NO: 1428372 - DNA, 15 bp, Homo sapiens
tgccacccctgaccc

SEQ ID NO: 1428373 - DNA, 15 bp, Homo sapiens
ttgccacccctgacc

SEQ ID NO: 1428374 - DNA, 15 bp, Homo sapiens
cttgccacccctgac

SEQ ID NO: 1428375 - DNA, 15 bp, Homo sapiens
tcttgccacccctga

SEQ ID NO: 1428376 - DNA, 15 bp, Homo sapiens
gtcttgccacccctg

SEQ ID NO: 1428377 - DNA, 15 bp, Homo sapiens
agtcttgccacccct

SEQ ID NO: 1428378 - DNA, 15 bp, Homo sapiens
gagtcttgccacccc

SEQ ID NO: 1428379 - DNA, 15 bp, Homo sapiens
ggagtcttgccaccc

SEQ ID NO: 1428380 - DNA, 15 bp, Homo sapiens
aggagtcttgccacc

SEQ ID NO: 1428381 - DNA, 15 bp, Homo sapiens
taggagtcttgccac

SEQ ID NO: 1428382 - DNA, 15 bp, Homo sapiens
ttaggagtcttgcca

SEQ ID NO: 1428383 - DNA, 15 bp, Homo sapiens
cttaggagtcttgcc

SEQ ID NO: 1428384 - DNA, 15 bp, Homo sapiens
ccttaggagtcttgc

SEQ ID NO: 1428385 - DNA, 15 bp, Homo sapiens
tccttaggagtcttg

SEQ ID NO: 1428386 - DNA, 15 bp, Homo sapiens
ctccttaggagtctt

SEQ ID NO: 1428387 - DNA, 15 bp, Homo sapiens
cctccttaggagtct

SEQ ID NO: 1428388 - DNA, 15 bp, Homo sapiens
ccctccttaggagtc

SEQ ID NO: 1428389 - DNA, 15 bp, Homo sapiens
tccctccttaggagt

SEQ ID NO: 1428390 - DNA, 15 bp, Homo sapiens
ttccctccttaggag

SEQ ID NO: 1428391 - DNA, 15 bp, Homo sapiens
tttccctccttagga

SEQ ID NO: 1428392 - DNA, 15 bp, Homo sapiens
gtttccctccttagg

SEQ ID NO: 1428393 - DNA, 15 bp, Homo sapiens
cgtttccctccttag

SEQ ID NO: 1428394 - DNA, 15 bp, Homo sapiens
tcgtttccctcctta

SEQ ID NO: 1428395 - DNA, 15 bp, Homo sapiens
gtcgtttccctcctt

SEQ ID NO: 1428396 - DNA, 15 bp, Homo sapiens
tgtcgtttccctcct

SEQ ID NO: 1428397 - DNA, 15 bp, Homo sapiens
ctgtcgtttccctcc

SEQ ID NO: 1428398 - DNA, 15 bp, Homo sapiens
tctgtcgtttccctc

SEQ ID NO: 1428399 - DNA, 15 bp, Homo sapiens
ttctgtcgtttccct

SEQ ID NO: 1428400 - DNA, 15 bp, Homo sapiens
tttctgtcgtttccc

SEQ ID NO: 1428401 - DNA, 15 bp, Homo sapiens
atttctgtcgtttcc

SEQ ID NO: 1428402 - DNA, 15 bp, Homo sapiens
catttctgtcgtttc

SEQ ID NO: 1428403 - DNA, 15 bp, Homo sapiens
tcatttctgtcgttt

SEQ ID NO: 1428404 - DNA, 15 bp, Homo sapiens
atcatttctgtcgtt

SEQ ID NO: 1428405 - DNA, 15 bp, Homo sapiens
aatcatttctgtcgt

SEQ ID NO: 1428406 - DNA, 15 bp, Homo sapiens
gaatcatttctgtcg

SEQ ID NO: 1428407 - DNA, 15 bp, Homo sapiens
agaatcatttctgtc

SEQ ID NO: 1428408 - DNA, 15 bp, Homo sapiens
cagaatcatttctgt

SEQ ID NO: 1428409 - DNA, 15 bp, Homo sapiens
acagaatcatttctg

SEQ ID NO: 1428410 - DNA, 15 bp, Homo sapiens
aacagaatcatttct

SEQ ID NO: 1428411 - DNA, 15 bp, Homo sapiens
gaacagaatcatttc

SEQ ID NO: 1428412 - DNA, 15 bp, Homo sapiens
agaacagaatcattt

SEQ ID NO: 1428413 - DNA, 15 bp, Homo sapiens
aagaacagaatcatt

SEQ ID NO: 1428414 - DNA, 15 bp, Homo sapiens
caagaacagaatcat

SEQ ID NO: 1428415 - DNA, 15 bp, Homo sapiens
gcaagaacagaatca

SEQ ID NO: 1428416 - DNA, 15 bp, Homo sapiens
cgcaagaacagaatc

SEQ ID NO: 1428417 - DNA, 15 bp, Homo sapiens
tcgcaagaacagaat

SEQ ID NO: 1428418 - DNA, 15 bp, Homo sapiens
ctcgcaagaacagaa

SEQ ID NO: 1428419 - DNA, 15 bp, Homo sapiens
gctcgcaagaacaga

SEQ ID NO: 1428420 - DNA, 15 bp, Homo sapiens
ggctcgcaagaacag

SEQ ID NO: 1428421 - DNA, 15 bp, Homo sapiens
gggctcgcaagaaca

SEQ ID NO: 1428422 - DNA, 15 bp, Homo sapiens
ggggctcgcaagaac

SEQ ID NO: 1428423 - DNA, 15 bp, Homo sapiens
tggggctcgcaagaa

SEQ ID NO: 1428424 - DNA, 15 bp, Homo sapiens
ttggggctcgcaaga

SEQ ID NO: 1428425 - DNA, 15 bp, Homo sapiens
tttggggctcgcaag

SEQ ID NO: 1428426 - DNA, 15 bp, Homo sapiens
ctttggggctcgcaa

SEQ ID NO: 1428427 - DNA, 15 bp, Homo sapiens
gctttggggctcgca

SEQ ID NO: 1428428 - DNA, 15 bp, Homo sapiens
tgctttggggctcgc

SEQ ID NO: 1428429 - DNA, 15 bp, Homo sapiens
ttgctttggggctcg

SEQ ID NO: 1428430 - DNA, 15 bp, Homo sapiens
cttgctttggggctc

SEQ ID NO: 1428431 - DNA, 15 bp, Homo sapiens
tcttgctttggggct

SEQ ID NO: 1428432 - DNA, 15 bp, Homo sapiens
ctcttgctttggggc

SEQ ID NO: 1428433 - DNA, 15 bp, Homo sapiens
actcttgctttgggg

SEQ ID NO: 1428434 - DNA, 15 bp, Homo sapiens
tactcttgctttggg

SEQ ID NO: 1428435 - DNA, 15 bp, Homo sapiens
gtactcttgctttgg

SEQ ID NO: 1428436 - DNA, 15 bp, Homo sapiens
agtactcttgctttg

SEQ ID NO: 1428437 - DNA, 15 bp, Homo sapiens
aagtactcttgcttt

SEQ ID NO: 1428438 - DNA, 15 bp, Homo sapiens
aaagtactcttgctt

SEQ ID NO: 1428439 - DNA, 15 bp, Homo sapiens
aaaagtactcttgct

SEQ ID NO: 1428440 - DNA, 15 bp, Homo sapiens
gaaaagtactcttgc

SEQ ID NO: 1428441 - DNA, 15 bp, Homo sapiens
agaaaagtactcttg

SEQ ID NO: 1428442 - DNA, 15 bp, Homo sapiens
cagaaaagtactctt

SEQ ID NO: 1428443 - DNA, 15 bp, Homo sapiens
tcagaaaagtactct

SEQ ID NO: 1428444 - DNA, 15 bp, Homo sapiens
atcagaaaagtactc

SEQ ID NO: 1428445 - DNA, 15 bp, Homo sapiens
catcagaaaagtact

SEQ ID NO: 1428446 - DNA, 15 bp, Homo sapiens
ccatcagaaaagtac

SEQ ID NO: 1428447 - DNA, 15 bp, Homo sapiens
cccatcagaaaagta

SEQ ID NO: 1428448 - DNA, 15 bp, Homo sapiens
acccatcagaaaagt

SEQ ID NO: 1428449 - DNA, 15 bp, Homo sapiens
tacccatcagaaaag

SEQ ID NO: 1428450 - DNA, 15 bp, Homo sapiens
ttacccatcagaaaa

SEQ ID NO: 1428451 - DNA, 15 bp, Homo sapiens
tttacccatcagaaa

SEQ ID NO: 1428452 - DNA, 15 bp, Homo sapiens
ctttacccatcagaa

SEQ ID NO: 1428453 - DNA, 15 bp, Homo sapiens
actttacccatcaga

SEQ ID NO: 1428454 - DNA, 15 bp, Homo sapiens
cactttacccatcag

SEQ ID NO: 1428455 - DNA, 15 bp, Homo sapiens
ccactttacccatca

SEQ ID NO: 1428456 - DNA, 15 bp, Homo sapiens
accactttacccatc

SEQ ID NO: 1428457 - DNA, 15 bp, Homo sapiens
taccactttacccat

SEQ ID NO: 1428458 - DNA, 15 bp, Homo sapiens
ataccactttaccca

SEQ ID NO: 1428459 - DNA, 15 bp, Homo sapiens
aataccactttaccc

SEQ ID NO: 1428460 - DNA, 15 bp, Homo sapiens
aaataccactttacc

SEQ ID NO: 1428461 - DNA, 15 bp, Homo sapiens
gaaataccactttac

SEQ ID NO: 1428462 - DNA, 15 bp, Homo sapiens
agaaataccacttta

SEQ ID NO: 1428463 - DNA, 15 bp, Homo sapiens
aagaaataccacttt

SEQ ID NO: 1428464 - DNA, 15 bp, Homo sapiens
aaagaaataccactt

SEQ ID NO: 1428465 - DNA, 15 bp, Homo sapiens
gaaagaaataccact

SEQ ID NO: 1428466 - DNA, 15 bp, Homo sapiens
ggaaagaaataccac

SEQ ID NO: 1428467 - DNA, 15 bp, Homo sapiens
tggaaagaaatacca

SEQ ID NO: 1428468 - DNA, 15 bp, Homo sapiens
ctggaaagaaatacc

SEQ ID NO: 1428469 - DNA, 15 bp, Homo sapiens
cctggaaagaaatac

SEQ ID NO: 1428470 - DNA, 15 bp, Homo sapiens
gcctggaaagaaata

SEQ ID NO: 1428471 - DNA, 15 bp, Homo sapiens
agcctggaaagaaat

SEQ ID NO: 1428472 - DNA, 15 bp, Homo sapiens
cagcctggaaagaaa

SEQ ID NO: 1428473 - DNA, 15 bp, Homo sapiens
gcagcctggaaagaa

SEQ ID NO: 1428474 - DNA, 15 bp, Homo sapiens
tgcagcctggaaaga

SEQ ID NO: 1428475 - DNA, 15 bp, Homo sapiens
ttgcagcctggaaag

SEQ ID NO: 1428476 - DNA, 15 bp, Homo sapiens
tttgcagcctggaaa

SEQ ID NO: 1428477 - DNA, 15 bp, Homo sapiens
ctttgcagcctggaa

SEQ ID NO: 1428478 - DNA, 15 bp, Homo sapiens
gctttgcagcctgga

SEQ ID NO: 1428479 - DNA, 15 bp, Homo sapiens
agctttgcagcctgg

SEQ ID NO: 1428480 - DNA, 15 bp, Homo sapiens
gagctttgcagcctg

SEQ ID NO: 1428481 - DNA, 15 bp, Homo sapiens
agagctttgcagcct

SEQ ID NO: 1428482 - DNA, 15 bp, Homo sapiens
gagagctttgcagcc

SEQ ID NO: 1428483 - DNA, 15 bp, Homo sapiens
ggagagctttgcagc

SEQ ID NO: 1428484 - DNA, 15 bp, Homo sapiens
tggagagctttgcag

SEQ ID NO: 1428485 - DNA, 15 bp, Homo sapiens
gtggagagctttgca

SEQ ID NO: 1428486 - DNA, 15 bp, Homo sapiens
ggtggagagctttgc

SEQ ID NO: 1428487 - DNA, 15 bp, Homo sapiens
aggtggagagctttg

SEQ ID NO: 1428488 - DNA, 15 bp, Homo sapiens
aaggtggagagcttt

SEQ ID NO: 1428489 - DNA, 15 bp, Homo sapiens
aaaggtggagagctt

SEQ ID NO: 1428490 - DNA, 15 bp, Homo sapiens
aaaaggtggagagct

SEQ ID NO: 1428491 - DNA, 15 bp, Homo sapiens
aaaaaggtggagagc

SEQ ID NO: 1428492 - DNA, 15 bp, Homo sapiens
gaaaaaggtggagag

SEQ ID NO: 1428493 - DNA, 15 bp, Homo sapiens
ggaaaaaggtggaga

SEQ ID NO: 1428494 - DNA, 15 bp, Homo sapiens
aggaaaaaggtggag

SEQ ID NO: 1428495 - DNA, 15 bp, Homo sapiens
aaggaaaaaggtgga

SEQ ID NO: 1428496 - DNA, 15 bp, Homo sapiens
aaaggaaaaaggtgg

SEQ ID NO: 1428497 - DNA, 15 bp, Homo sapiens
caaaggaaaaaggtg

SEQ ID NO: 1428498 - DNA, 15 bp, Homo sapiens
ccaaaggaaaaaggt

SEQ ID NO: 1428499 - DNA, 15 bp, Homo sapiens
accaaaggaaaaagg

SEQ ID NO: 1428500 - DNA, 15 bp, Homo sapiens
gaccaaaggaaaaag

SEQ ID NO: 1428501 - DNA, 15 bp, Homo sapiens
agaccaaaggaaaaa

SEQ ID NO: 1428502 - DNA, 15 bp, Homo sapiens
gagaccaaaggaaaa

SEQ ID NO: 1428503 - DNA, 15 bp, Homo sapiens
tgagaccaaaggaaa

SEQ ID NO: 1428504 - DNA, 15 bp, Homo sapiens
ctgagaccaaaggaa

SEQ ID NO: 1428505 - DNA, 15 bp, Homo sapiens
actgagaccaaagga

SEQ ID NO: 1428506 - DNA, 15 bp, Homo sapiens
gactgagaccaaagg

SEQ ID NO: 1428507 - DNA, 15 bp, Homo sapiens
tgactgagaccaaag

SEQ ID NO: 1428508 - DNA, 15 bp, Homo sapiens
ctgactgagaccaaa

SEQ ID NO: 1428509 - DNA, 15 bp, Homo sapiens
gctgactgagaccaa

SEQ ID NO: 1428510 - DNA, 15 bp, Homo sapiens
ggctgactgagacca

SEQ ID NO: 1428511 - DNA, 15 bp, Homo sapiens
gggctgactgagacc

SEQ ID NO: 1428512 - DNA, 15 bp, Homo sapiens
ggggctgactgagac

SEQ ID NO: 1428513 - DNA, 15 bp, Homo sapiens
tggggctgactgaga

SEQ ID NO: 1428514 - DNA, 15 bp, Homo sapiens
ctggggctgactgag

SEQ ID NO: 1428515 - DNA, 15 bp, Homo sapiens
gctggggctgactga

SEQ ID NO: 1428516 - DNA, 15 bp, Homo sapiens
ggctggggctgactg

SEQ ID NO: 1428517 - DNA, 15 bp, Homo sapiens
tggctggggctgact

SEQ ID NO: 1428518 - DNA, 15 bp, Homo sapiens
atggctggggctgac

SEQ ID NO: 1428519 - DNA, 15 bp, Homo sapiens
catggctggggctga

SEQ ID NO: 1428520 - DNA, 15 bp, Homo sapiens
ccatggctggggctg

SEQ ID NO: 1428521 - DNA, 15 bp, Homo sapiens
cccatggctggggct

SEQ ID NO: 1428522 - DNA, 15 bp, Homo sapiens
ccccatggctggggc

SEQ ID NO: 1428523 - DNA, 15 bp, Homo sapiens
ttgcccccatggctg

SEQ ID NO: 1428524 - DNA, 15 bp, Homo sapiens
tttgcccccatggct

SEQ ID NO: 1428525 - DNA, 15 bp, Homo sapiens
atttgcccccatggc

SEQ ID NO: 1428526 - DNA, 15 bp, Homo sapiens
gatttgcccccatgg

SEQ ID NO: 1428527 - DNA, 15 bp, Homo sapiens
tgatttgcccccatg

SEQ ID NO: 1428528 - DNA, 15 bp, Homo sapiens
ttgatttgcccccat

SEQ ID NO: 1428529 - DNA, 15 bp, Homo sapiens
cttgatttgccccca

SEQ ID NO: 1428530 - DNA, 15 bp, Homo sapiens
acttgatttgccccc

SEQ ID NO: 1428531 - DNA, 15 bp, Homo sapiens
aacttgatttgcccc

SEQ ID NO: 1428532 - DNA, 15 bp, Homo sapiens
caacttgatttgccc

SEQ ID NO: 1428533 - DNA, 15 bp, Homo sapiens
ccaacttgatttgcc

SEQ ID NO: 1428534 - DNA, 15 bp, Homo sapiens
cccaacttgatttgc

SEQ ID NO: 1428535 - DNA, 15 bp, Homo sapiens
ccccaacttgatttg

SEQ ID NO: 1428536 - DNA, 15 bp, Homo sapiens
accccaacttgattt

SEQ ID NO: 1428537 - DNA, 15 bp, Homo sapiens
gaccccaacttgatt

SEQ ID NO: 1428538 - DNA, 15 bp, Homo sapiens
tgaccccaacttgat

SEQ ID NO: 1428539 - DNA, 15 bp, Homo sapiens
ttgaccccaacttga

SEQ ID NO: 1428540 - DNA, 15 bp, Homo sapiens
gttgaccccaacttg

SEQ ID NO: 1428541 - DNA, 15 bp, Homo sapiens
agttgaccccaactt

SEQ ID NO: 1428542 - DNA, 15 bp, Homo sapiens
gagttgaccccaact

SEQ ID NO: 1428543 - DNA, 15 bp, Homo sapiens
cgagttgaccccaac

SEQ ID NO: 1428544 - DNA, 15 bp, Homo sapiens
ccgagttgaccccaa

SEQ ID NO: 1428545 - DNA, 15 bp, Homo sapiens
gccgagttgacccca

SEQ ID NO: 1428546 - DNA, 15 bp, Homo sapiens
agccgagttgacccc

SEQ ID NO: 1428547 - DNA, 15 bp, Homo sapiens
cagccgagttgaccc

SEQ ID NO: 1428548 - DNA, 15 bp, Homo sapiens
gcagccgagttgacc

SEQ ID NO: 1428549 - DNA, 15 bp, Homo sapiens
ggcagccgagttgac

SEQ ID NO: 1428550 - DNA, 15 bp, Homo sapiens
tggcagccgagttga

SEQ ID NO: 1428551 - DNA, 15 bp, Homo sapiens
ctggcagccgagttg

SEQ ID NO: 1428552 - DNA, 15 bp, Homo sapiens
tctggcagccgagtt

SEQ ID NO: 1428553 - DNA, 15 bp, Homo sapiens
ctctggcagccgagt

SEQ ID NO: 1428554 - DNA, 15 bp, Homo sapiens
tctctggcagccgag

SEQ ID NO: 1428555 - DNA, 15 bp, Homo sapiens
gtctctggcagccga

SEQ ID NO: 1428556 - DNA, 15 bp, Homo sapiens
ggtctctggcagccg

SEQ ID NO: 1428557 - DNA, 15 bp, Homo sapiens
aggtctctggcagcc

SEQ ID NO: 1428558 - DNA, 15 bp, Homo sapiens
taggtctctggcagc

SEQ ID NO: 1428559 - DNA, 15 bp, Homo sapiens
ttaggtctctggcag

SEQ ID NO: 1428560 - DNA, 15 bp, Homo sapiens
cttaggtctctggca

SEQ ID NO: 1428561 - DNA, 15 bp, Homo sapiens
acttaggtctctggc

SEQ ID NO: 1428562 - DNA, 15 bp, Homo sapiens
aacttaggtctctgg

SEQ ID NO: 1428563 - DNA, 15 bp, Homo sapiens
caacttaggtctctg

SEQ ID NO: 1428564 - DNA, 15 bp, Homo sapiens
gcaacttaggtctct

SEQ ID NO: 1428565 - DNA, 15 bp, Homo sapiens
ggcaacttaggtctc

SEQ ID NO: 1428566 - DNA, 15 bp, Homo sapiens
tggcaacttaggtct

SEQ ID NO: 1428567 - DNA, 15 bp, Homo sapiens
gtggcaacttaggtc

SEQ ID NO: 1428568 - DNA, 15 bp, Homo sapiens
tgtggcaacttaggt

SEQ ID NO: 1428569 - DNA, 15 bp, Homo sapiens
ttgtggcaacttagg

SEQ ID NO: 1428570 - DNA, 15 bp, Homo sapiens
cttgtggcaacttag

SEQ ID NO: 1428571 - DNA, 15 bp, Homo sapiens
ccttgtggcaactta

SEQ ID NO: 1428572 - DNA, 15 bp, Homo sapiens
cccttgtggcaactt

SEQ ID NO: 1428573 - DNA, 15 bp, Homo sapiens
acccttgtggcaact

SEQ ID NO: 1428574 - DNA, 15 bp, Homo sapiens
gacccttgtggcaac

SEQ ID NO: 1428575 - DNA, 15 bp, Homo sapiens
tgacccttgtggcaa

SEQ ID NO: 1428576 - DNA, 15 bp, Homo sapiens
gtgacccttgtggca

SEQ ID NO: 1428577 - DNA, 15 bp, Homo sapiens
ggtgacccttgtggc

SEQ ID NO: 1428578 - DNA, 15 bp, Homo sapiens
cggtgacccttgtgg

SEQ ID NO: 1428579 - DNA, 15 bp, Homo sapiens
tcggtgacccttgtg

SEQ ID NO: 1428580 - DNA, 15 bp, Homo sapiens
gtcggtgacccttgt

SEQ ID NO: 1428581 - DNA, 15 bp, Homo sapiens
cgtcggtgacccttg

SEQ ID NO: 1428582 - DNA, 15 bp, Homo sapiens
tcgtcggtgaccctt

SEQ ID NO: 1428583 - DNA, 15 bp, Homo sapiens
gtcgtcggtgaccct

SEQ ID NO: 1428584 - DNA, 15 bp, Homo sapiens
ggtcgtcggtgaccc

SEQ ID NO: 1428585 - DNA, 15 bp, Homo sapiens
aggtcgtcggtgacc

SEQ ID NO: 1428586 - DNA, 15 bp, Homo sapiens
taggtcgtcggtgac

SEQ ID NO: 1428587 - DNA, 15 bp, Homo sapiens
ttaggtcgtcggtga

SEQ ID NO: 1428588 - DNA, 15 bp, Homo sapiens
cttaggtcgtcggtg

SEQ ID NO: 1428589 - DNA, 15 bp, Homo sapiens
gcttaggtcgtcggt

SEQ ID NO: 1428590 - DNA, 15 bp, Homo sapiens
tgcttaggtcgtcgg

SEQ ID NO: 1428591 - DNA, 15 bp, Homo sapiens
ctgcttaggtcgtcg

SEQ ID NO: 1428592 - DNA, 15 bp, Homo sapiens
gctgcttaggtcgtc

SEQ ID NO: 1428593 - DNA, 15 bp, Homo sapiens
tgctgcttaggtcgt

SEQ ID NO: 1428594 - DNA, 15 bp, Homo sapiens
ttgctgcttaggtcg

SEQ ID NO: 1428595 - DNA, 15 bp, Homo sapiens
cttgctgcttaggtc

SEQ ID NO: 1428596 - DNA, 15 bp, Homo sapiens
acttgctgcttaggt

SEQ ID NO: 1428597 - DNA, 15 bp, Homo sapiens
aacttgctgcttagg

SEQ ID NO: 1428598 - DNA, 15 bp, Homo sapiens
aaacttgctgcttag

SEQ ID NO: 1428599 - DNA, 15 bp, Homo sapiens
gaaacttgctgctta

SEQ ID NO: 1428600 - DNA, 15 bp, Homo sapiens
ggaaacttgctgctt

SEQ ID NO: 1428601 - DNA, 15 bp, Homo sapiens
aggaaacttgctgct

SEQ ID NO: 1428602 - DNA, 15 bp, Homo sapiens
aaggaaacttgctgc

SEQ ID NO: 1428603 - DNA, 15 bp, Homo sapiens
gaaggaaacttgctg

SEQ ID NO: 1428604 - DNA, 15 bp, Homo sapiens
cgaaggaaacttgct

SEQ ID NO: 1428605 - DNA, 15 bp, Homo sapiens
acgaaggaaacttgc

SEQ ID NO: 1428606 - DNA, 15 bp, Homo sapiens
gacgaaggaaacttg

SEQ ID NO: 1428607 - DNA, 15 bp, Homo sapiens
ggacgaaggaaactt

SEQ ID NO: 1428608 - DNA, 15 bp, Homo sapiens
tggacgaaggaaact

SEQ ID NO: 1428609 - DNA, 15 bp, Homo sapiens
ctggacgaaggaaac

SEQ ID NO: 1428610 - DNA, 15 bp, Homo sapiens
gctggacgaaggaaa

SEQ ID NO: 1428611 - DNA, 15 bp, Homo sapiens
ggctggacgaaggaa

SEQ ID NO: 1428612 - DNA, 15 bp, Homo sapiens
aggctggacgaagga

SEQ ID NO: 1428613 - DNA, 15 bp, Homo sapiens
gaggctggacgaagg

SEQ ID NO: 1428614 - DNA, 15 bp, Homo sapiens
ggaggctggacgaag

SEQ ID NO: 1428615 - DNA, 15 bp, Homo sapiens
aggaggctggacgaa

SEQ ID NO: 1428616 - DNA, 15 bp, Homo sapiens
caggaggctggacga

SEQ ID NO: 1428617 - DNA, 15 bp, Homo sapiens
gcaggaggctggacg

SEQ ID NO: 1428618 - DNA, 15 bp, Homo sapiens
ggcaggaggctggac

SEQ ID NO: 1428619 - DNA, 15 bp, Homo sapiens
gggcaggaggctgga

SEQ ID NO: 1428620 - DNA, 15 bp, Homo sapiens
ggggcaggaggctgg

SEQ ID NO: 1428621 - DNA, 15 bp, Homo sapiens
gggggcaggaggctg

SEQ ID NO: 1428622 - DNA, 15 bp, Homo sapiens
tgggggcaggaggct

SEQ ID NO: 1428623 - DNA, 15 bp, Homo sapiens
gtgggggcaggaggc

SEQ ID NO: 1428624 - DNA, 15 bp, Homo sapiens
cgtgggggcaggagg

SEQ ID NO: 1428625 - DNA, 15 bp, Homo sapiens
gcgtgggggcaggag

SEQ ID NO: 1428626 - DNA, 15 bp, Homo sapiens
tgcgtgggggcagga

SEQ ID NO: 1428627 - DNA, 15 bp, Homo sapiens
gtgcgtgggggcagg

SEQ ID NO: 1428628 - DNA, 15 bp, Homo sapiens
tgtgcgtgggggcag

SEQ ID NO: 1428629 - DNA, 15 bp, Homo sapiens
atgtgcgtgggggca

SEQ ID NO: 1428630 - DNA, 15 bp, Homo sapiens
aatgtgcgtgggggc

SEQ ID NO: 1428631 - DNA, 15 bp, Homo sapiens
caatgtgcgtggggg

SEQ ID NO: 1428632 - DNA, 15 bp, Homo sapiens
gcaatgtgcgtgggg

SEQ ID NO: 1428633 - DNA, 15 bp, Homo sapiens
ggcaatgtgcgtggg

SEQ ID NO: 1428634 - DNA, 15 bp, Homo sapiens
aggcaatgtgcgtgg

SEQ ID NO: 1428635 - DNA, 15 bp, Homo sapiens
gaggcaatgtgcgtg

SEQ ID NO: 1428636 - DNA, 15 bp, Homo sapiens
ggaggcaatgtgcgt

SEQ ID NO: 1428637 - DNA, 15 bp, Homo sapiens
tggaggcaatgtgcg

SEQ ID NO: 1428638 - DNA, 15 bp, Homo sapiens
gtggaggcaatgtgc

SEQ ID NO: 1428639 - DNA, 15 bp, Homo sapiens
tgtggaggcaatgtg

SEQ ID NO: 1428640 - DNA, 15 bp, Homo sapiens
ctgtggaggcaatgt

SEQ ID NO: 1428641 - DNA, 15 bp, Homo sapiens
gctgtggaggcaatg

SEQ ID NO: 1428642 - DNA, 15 bp, Homo sapiens
tgctgtggaggcaat

SEQ ID NO: 1428643 - DNA, 15 bp, Homo sapiens
ttgctgtggaggcaa

SEQ ID NO: 1428644 - DNA, 15 bp, Homo sapiens
tttgctgtggaggca

SEQ ID NO: 1428645 - DNA, 15 bp, Homo sapiens
gtttgctgtggaggc

SEQ ID NO: 1428646 - DNA, 15 bp, Homo sapiens
agtttgctgtggagg

SEQ ID NO: 1428647 - DNA, 15 bp, Homo sapiens
gagtttgctgtggag

SEQ ID NO: 1428648 - DNA, 15 bp, Homo sapiens
ggagtttgctgtgga

SEQ ID NO: 1428649 - DNA, 15 bp, Homo sapiens
tggagtttgctgtgg

SEQ ID NO: 1428650 - DNA, 15 bp, Homo sapiens
gtggagtttgctgtg

SEQ ID NO: 1428651 - DNA, 15 bp, Homo sapiens
ggtggagtttgctgt

SEQ ID NO: 1428652 - DNA, 15 bp, Homo sapiens
aggtggagtttgctg

SEQ ID NO: 1428653 - DNA, 15 bp, Homo sapiens
caggtggagtttgct

SEQ ID NO: 1428654 - DNA, 15 bp, Homo sapiens
tcaggtggagtttgc

SEQ ID NO: 1428655 - DNA, 15 bp, Homo sapiens
gtcaggtggagtttg

SEQ ID NO: 1428656 - DNA, 15 bp, Homo sapiens
agtcaggtggagttt

SEQ ID NO: 1428657 - DNA, 15 bp, Homo sapiens
gagtcaggtggagtt

SEQ ID NO: 1428658 - DNA, 15 bp, Homo sapiens
tgagtcaggtggagt

SEQ ID NO: 1428659 - DNA, 15 bp, Homo sapiens
ctgagtcaggtggag

SEQ ID NO: 1428660 - DNA, 15 bp, Homo sapiens
gctgagtcaggtgga

SEQ ID NO: 1428661 - DNA, 15 bp, Homo sapiens
agctgagtcaggtgg

SEQ ID NO: 1428662 - DNA, 15 bp, Homo sapiens
aagctgagtcaggtg

SEQ ID NO: 1428663 - DNA, 15 bp, Homo sapiens
caagctgagtcaggt

SEQ ID NO: 1428664 - DNA, 15 bp, Homo sapiens
acaagctgagtcagg

SEQ ID NO: 1428665 - DNA, 15 bp, Homo sapiens
aacaagctgagtcag

SEQ ID NO: 1428666 - DNA, 15 bp, Homo sapiens
aaacaagctgagtca

SEQ ID NO: 1428667 - DNA, 15 bp, Homo sapiens
taaacaagctgagtc

SEQ ID NO: 1428668 - DNA, 15 bp, Homo sapiens
ttaaacaagctgagt

SEQ ID NO: 1428669 - DNA, 15 bp, Homo sapiens
gttaaacaagctgag

SEQ ID NO: 1428670 - DNA, 15 bp, Homo sapiens
agttaaacaagctga

SEQ ID NO: 1428671 - DNA, 15 bp, Homo sapiens
gagttaaacaagctg

SEQ ID NO: 1428672 - DNA, 15 bp, Homo sapiens
ggagttaaacaagct

SEQ ID NO: 1428673 - DNA, 15 bp, Homo sapiens
tggagttaaacaagc

SEQ ID NO: 1428674 - DNA, 15 bp, Homo sapiens
ttggagttaaacaag

SEQ ID NO: 1428675 - DNA, 15 bp, Homo sapiens
attggagttaaacaa

SEQ ID NO: 1428676 - DNA, 15 bp, Homo sapiens
gattggagttaaaca

SEQ ID NO: 1428677 - DNA, 15 bp, Homo sapiens
ggattggagttaaac

SEQ ID NO: 1428678 - DNA, 15 bp, Homo sapiens
aggattggagttaaa

SEQ ID NO: 1428679 - DNA, 15 bp, Homo sapiens
caggattggagttaa

SEQ ID NO: 1428680 - DNA, 15 bp, Homo sapiens
gcaggattggagtta

SEQ ID NO: 1428681 - DNA, 15 bp, Homo sapiens
tgcaggattggagtt

SEQ ID NO: 1428682 - DNA, 15 bp, Homo sapiens
ctgcaggattggagt

SEQ ID NO: 1428683 - DNA, 15 bp, Homo sapiens
gctgcaggattggag

SEQ ID NO: 1428684 - DNA, 15 bp, Homo sapiens
ggctgcaggattgga

SEQ ID NO: 1428685 - DNA, 15 bp, Homo sapiens
gggctgcaggattgg

SEQ ID NO: 1428686 - DNA, 15 bp, Homo sapiens
agggctgcaggattg

SEQ ID NO: 1428687 - DNA, 15 bp, Homo sapiens
gagggctgcaggatt

SEQ ID NO: 1428688 - DNA, 15 bp, Homo sapiens
ggagggctgcaggat

SEQ ID NO: 1428689 - DNA, 15 bp, Homo sapiens
gggagggctgcagga

SEQ ID NO: 1428690 - DNA, 15 bp, Homo sapiens
cgggagggctgcagg

SEQ ID NO: 1428691 - DNA, 15 bp, Homo sapiens
ccgggagggctgcag

SEQ ID NO: 1428692 - DNA, 15 bp, Homo sapiens
gccgggagggctgca

SEQ ID NO: 1428693 - DNA, 15 bp, Homo sapiens
ggccgggagggctgc

SEQ ID NO: 1428694 - DNA, 15 bp, Homo sapiens
aggccgggagggctg

SEQ ID NO: 1428695 - DNA, 15 bp, Homo sapiens
gaggccgggagggct

SEQ ID NO: 1428696 - DNA, 15 bp, Homo sapiens
tgaggccgggagggc

SEQ ID NO: 1428697 - DNA, 15 bp, Homo sapiens
ctgaggccgggaggg

SEQ ID NO: 1428698 - DNA, 15 bp, Homo sapiens
gctgaggccgggagg

SEQ ID NO: 1428699 - DNA, 15 bp, Homo sapiens
tgctgaggccgggag

SEQ ID NO: 1428700 - DNA, 15 bp, Homo sapiens
ctgctgaggccggga

SEQ ID NO: 1428701 - DNA, 15 bp, Homo sapiens
cctgctgaggccggg

SEQ ID NO: 1428702 - DNA, 15 bp, Homo sapiens
ccctgctgaggccgg

SEQ ID NO: 1428703 - DNA, 15 bp, Homo sapiens
accctgctgaggccg

SEQ ID NO: 1428704 - DNA, 15 bp, Homo sapiens
gaccctgctgaggcc

SEQ ID NO: 1428705 - DNA, 15 bp, Homo sapiens
tgaccctgctgaggc

SEQ ID NO: 1428706 - DNA, 15 bp, Homo sapiens
ctgaccctgctgagg

SEQ ID NO: 1428707 - DNA, 15 bp, Homo sapiens
cctgaccctgctgag

SEQ ID NO: 1428708 - DNA, 15 bp, Homo sapiens
ccctgaccctgctga

SEQ ID NO: 1428709 - DNA, 15 bp, Homo sapiens
cccctgaccctgctg

SEQ ID NO: 1428710 - DNA, 15 bp, Homo sapiens
ccccctgaccctgct

SEQ ID NO: 1428711 - DNA, 15 bp, Homo sapiens
gccccctgaccctgc

SEQ ID NO: 1428712 - DNA, 15 bp, Homo sapiens
cgccccctgaccctg

SEQ ID NO: 1428713 - DNA, 15 bp, Homo sapiens
gcgccccctgaccct

SEQ ID NO: 1428714 - DNA, 15 bp, Homo sapiens
cgcgccccctgaccc

SEQ ID NO: 1428715 - DNA, 15 bp, Homo sapiens
ccgcgccccctgacc

SEQ ID NO: 1428716 - DNA, 15 bp, Homo sapiens
cccgcgccccctgac

SEQ ID NO: 1428717 - DNA, 15 bp, Homo sapiens
acccgcgccccctga

SEQ ID NO: 1428718 - DNA, 15 bp, Homo sapiens
gacccgcgccccctg

SEQ ID NO: 1428719 - DNA, 15 bp, Homo sapiens
agacccgcgccccct

SEQ ID NO: 1428720 - DNA, 15 bp, Homo sapiens
cagacccgcgccccc

SEQ ID NO: 1428721 - DNA, 15 bp, Homo sapiens
gcagacccgcgcccc

SEQ ID NO: 1428722 - DNA, 15 bp, Homo sapiens
cgcagacccgcgccc

SEQ ID NO: 1428723 - DNA, 15 bp, Homo sapiens
gcgcagacccgcgcc

SEQ ID NO: 1428724 - DNA, 15 bp, Homo sapiens
ggcgcagacccgcgc

SEQ ID NO: 1428725 - DNA, 15 bp, Homo sapiens
tggcgcagacccgcg

SEQ ID NO: 1428726 - DNA, 15 bp, Homo sapiens
ttggcgcagacccgc

SEQ ID NO: 1428727 - DNA, 15 bp, Homo sapiens
cttggcgcagacccg

SEQ ID NO: 1428728 - DNA, 15 bp, Homo sapiens
tcttggcgcagaccc

SEQ ID NO: 1428729 - DNA, 15 bp, Homo sapiens
gtcttggcgcagacc

SEQ ID NO: 1428730 - DNA, 15 bp, Homo sapiens
cgtcttggcgcagac

SEQ ID NO: 1428731 - DNA, 15 bp, Homo sapiens
ccgtcttggcgcaga

SEQ ID NO: 1428732 - DNA, 15 bp, Homo sapiens
accgtcttggcgcag

SEQ ID NO: 1428733 - DNA, 15 bp, Homo sapiens
aaccgtcttggcgca

SEQ ID NO: 1428734 - DNA, 15 bp, Homo sapiens
taaccgtcttggcgc

SEQ ID NO: 1428735 - DNA, 15 bp, Homo sapiens
ctaaccgtcttggcg

SEQ ID NO: 1428736 - DNA, 15 bp, Homo sapiens
cctaaccgtcttggc

SEQ ID NO: 1428737 - DNA, 15 bp, Homo sapiens
tcctaaccgtcttgg

SEQ ID NO: 1428738 - DNA, 15 bp, Homo sapiens
ctcctaaccgtcttg

SEQ ID NO: 1428739 - DNA, 15 bp, Homo sapiens
cctcctaaccgtctt

SEQ ID NO: 1428740 - DNA, 15 bp, Homo sapiens
gcctcctaaccgtct

SEQ ID NO: 1428741 - DNA, 15 bp, Homo sapiens
ggcctcctaaccgtc

SEQ ID NO: 1428742 - DNA, 15 bp, Homo sapiens
gggcctcctaaccgt

SEQ ID NO: 1428743 - DNA, 15 bp, Homo sapiens
tgggcctcctaaccg

SEQ ID NO: 1428744 - DNA, 15 bp, Homo sapiens
ttgggcctcctaacc

SEQ ID NO: 1428745 - DNA, 15 bp, Homo sapiens
cttgggcctcctaac

SEQ ID NO: 1428746 - DNA, 15 bp, Homo sapiens
acttgggcctcctaa

SEQ ID NO: 1428747 - DNA, 15 bp, Homo sapiens
gacttgggcctccta

SEQ ID NO: 1428748 - DNA, 15 bp, Homo sapiens
ggacttgggcctcct

SEQ ID NO: 1428749 - DNA, 15 bp, Homo sapiens
aggacttgggcctcc

SEQ ID NO: 1428750 - DNA, 15 bp, Homo sapiens
caggacttgggcctc

SEQ ID NO: 1428751 - DNA, 15 bp, Homo sapiens
ccaggacttgggcct

SEQ ID NO: 1428752 - DNA, 15 bp, Homo sapiens
cccaggacttgggcc

SEQ ID NO: 1428753 - DNA, 15 bp, Homo sapiens
tcccaggacttgggc

SEQ ID NO: 1428754 - DNA, 15 bp, Homo sapiens
gtcccaggacttggg

SEQ ID NO: 1428755 - DNA, 15 bp, Homo sapiens
agtcccaggacttgg

SEQ ID NO: 1428756 - DNA, 15 bp, Homo sapiens
cagtcccaggacttg

SEQ ID NO: 1428757 - DNA, 15 bp, Homo sapiens
ccagtcccaggactt

SEQ ID NO: 1428758 - DNA, 15 bp, Homo sapiens
tccagtcccaggact

SEQ ID NO: 1428759 - DNA, 15 bp, Homo sapiens
gtccagtcccaggac

SEQ ID NO: 1428760 - DNA, 15 bp, Homo sapiens
cgtccagtcccagga

SEQ ID NO: 1428761 - DNA, 15 bp, Homo sapiens
ccgtccagtcccagg

SEQ ID NO: 1428762 - DNA, 15 bp, Homo sapiens
accgtccagtcccag

SEQ ID NO: 1428763 - DNA, 15 bp, Homo sapiens
aaccgtccagtccca

SEQ ID NO: 1428764 - DNA, 15 bp, Homo sapiens
taaccgtccagtccc

SEQ ID NO: 1428765 - DNA, 15 bp, Homo sapiens
gtaaccgtccagtcc

SEQ ID NO: 1428766 - DNA, 15 bp, Homo sapiens
agtaaccgtccagtc

SEQ ID NO: 1428767 - DNA, 15 bp, Homo sapiens
cagtaaccgtccagt

SEQ ID NO: 1428768 - DNA, 15 bp, Homo sapiens
gcagtaaccgtccag

SEQ ID NO: 1428769 - DNA, 15 bp, Homo sapiens
cgcagtaaccgtcca

SEQ ID NO: 1428770 - DNA, 15 bp, Homo sapiens
gcgcagtaaccgtcc

SEQ ID NO: 1428771 - DNA, 15 bp, Homo sapiens
agcgcagtaaccgtc

SEQ ID NO: 1428772 - DNA, 15 bp, Homo sapiens
gagcgcagtaaccgt

SEQ ID NO: 1428773 - DNA, 15 bp, Homo sapiens
ggagcgcagtaaccg

SEQ ID NO: 1428774 - DNA, 15 bp, Homo sapiens
gggagcgcagtaacc

SEQ ID NO: 1428775 - DNA, 15 bp, Homo sapiens
agggagcgcagtaac

SEQ ID NO: 1428776 - DNA, 15 bp, Homo sapiens
aagggagcgcagtaa

SEQ ID NO: 1428777 - DNA, 15 bp, Homo sapiens
caagggagcgcagta

SEQ ID NO: 1428778 - DNA, 15 bp, Homo sapiens
ccaagggagcgcagt

SEQ ID NO: 1428779 - DNA, 15 bp, Homo sapiens
cccaagggagcgcag

SEQ ID NO: 1428780 - DNA, 15 bp, Homo sapiens
gcccaagggagcgca

SEQ ID NO: 1428781 - DNA, 15 bp, Homo sapiens
cgcccaagggagcgc

SEQ ID NO: 1428782 - DNA, 15 bp, Homo sapiens
gcgcccaagggagcg

SEQ ID NO: 1428783 - DNA, 15 bp, Homo sapiens
tgcgcccaagggagc

SEQ ID NO: 1428784 - DNA, 15 bp, Homo sapiens
ctgcgcccaagggag

SEQ ID NO: 1428785 - DNA, 15 bp, Homo sapiens
gctgcgcccaaggga

SEQ ID NO: 1428786 - DNA, 15 bp, Homo sapiens
ggctgcgcccaaggg

SEQ ID NO: 1428787 - DNA, 15 bp, Homo sapiens
cggctgcgcccaagg

SEQ ID NO: 1428788 - DNA, 15 bp, Homo sapiens
gcggctgcgcccaag

SEQ ID NO: 1428789 - DNA, 15 bp, Homo sapiens
agcggctgcgcccaa

SEQ ID NO: 1428790 - DNA, 15 bp, Homo sapiens
cagcggctgcgccca

SEQ ID NO: 1428791 - DNA, 15 bp, Homo sapiens
ccagcggctgcgccc

SEQ ID NO: 1428792 - DNA, 15 bp, Homo sapiens
gccagcggctgcgcc

SEQ ID NO: 1428793 - DNA, 15 bp, Homo sapiens
cgccagcggctgcgc

SEQ ID NO: 1428794 - DNA, 15 bp, Homo sapiens
ccgccagcggctgcg

SEQ ID NO: 1428795 - DNA, 15 bp, Homo sapiens
gccgccagcggctgc

SEQ ID NO: 1428796 - DNA, 15 bp, Homo sapiens
cgccgccagcggctg

SEQ ID NO: 1428797 - DNA, 15 bp, Homo sapiens
acgccgccagcggct

SEQ ID NO: 1428798 - DNA, 15 bp, Homo sapiens
cacgccgccagcggc

SEQ ID NO: 1428799 - DNA, 15 bp, Homo sapiens
ccacgccgccagcgg

SEQ ID NO: 1428800 - DNA, 15 bp, Homo sapiens
cccacgccgccagcg

SEQ ID NO: 1428801 - DNA, 15 bp, Homo sapiens
gcccacgccgccagc

SEQ ID NO: 1428802 - DNA, 15 bp, Homo sapiens
cgcccacgccgccag

SEQ ID NO: 1428803 - DNA, 15 bp, Homo sapiens
gcgcccacgccgcca

SEQ ID NO: 1428804 - DNA, 15 bp, Homo sapiens
cgcgcccacgccgcc

SEQ ID NO: 1428805 - DNA, 15 bp, Homo sapiens
ccgcgcccacgccgc

SEQ ID NO: 1428806 - DNA, 15 bp, Homo sapiens
gccgcgcccacgccg

SEQ ID NO: 1428807 - DNA, 15 bp, Homo sapiens
agccgcgcccacgcc

SEQ ID NO: 1428808 - DNA, 15 bp, Homo sapiens
cagccgcgcccacgc

SEQ ID NO: 1428809 - DNA, 15 bp, Homo sapiens
ccagccgcgcccacg

SEQ ID NO: 1428810 - DNA, 15 bp, Homo sapiens
cccagccgcgcccac

SEQ ID NO: 1428811 - DNA, 15 bp, Homo sapiens
acccagccgcgccca

SEQ ID NO: 1428812 - DNA, 15 bp, Homo sapiens
gacccagccgcgccc

SEQ ID NO: 1428813 - DNA, 15 bp, Homo sapiens
tgacccagccgcgcc

SEQ ID NO: 1428814 - DNA, 15 bp, Homo sapiens
gtgacccagccgcgc

SEQ ID NO: 1428815 - DNA, 15 bp, Homo sapiens
cgtgacccagccgcg

SEQ ID NO: 1428816 - DNA, 15 bp, Homo sapiens
gcgtgacccagccgc

SEQ ID NO: 1428817 - DNA, 15 bp, Homo sapiens
ggcgtgacccagccg

SEQ ID NO: 1428818 - DNA, 15 bp, Homo sapiens
aggcgtgacccagcc

SEQ ID NO: 1428819 - DNA, 15 bp, Homo sapiens
gaggcgtgacccagc

SEQ ID NO: 1428820 - DNA, 15 bp, Homo sapiens
ggaggcgtgacccag

SEQ ID NO: 1428821 - DNA, 15 bp, Homo sapiens
cggaggcgtgaccca

SEQ ID NO: 1428822 - DNA, 15 bp, Homo sapiens
ccggaggcgtgaccc

SEQ ID NO: 1428823 - DNA, 15 bp, Homo sapiens
gccggaggcgtgacc

SEQ ID NO: 1428824 - DNA, 15 bp, Homo sapiens
tgccggaggcgtgac

SEQ ID NO: 1428825 - DNA, 15 bp, Homo sapiens
gtgccggaggcgtga

SEQ ID NO: 1428826 - DNA, 15 bp, Homo sapiens
ggtgccggaggcgtg

SEQ ID NO: 1428827 - DNA, 15 bp, Homo sapiens
tggtgccggaggcgt

SEQ ID NO: 1428828 - DNA, 15 bp, Homo sapiens
gtggtgccggaggcg

SEQ ID NO: 1428829 - DNA, 15 bp, Homo sapiens
ggtggtgccggaggc

SEQ ID NO: 1428830 - DNA, 15 bp, Homo sapiens
cggtggtgccggagg

SEQ ID NO: 1428831 - DNA, 15 bp, Homo sapiens
gcggtggtgccggag

SEQ ID NO: 1428832 - DNA, 15 bp, Homo sapiens
cgcggtggtgccgga

SEQ ID NO: 1428833 - DNA, 15 bp, Homo sapiens
gcgcggtggtgccgg

SEQ ID NO: 1428834 - DNA, 15 bp, Homo sapiens
cgcgcggtggtgccg

SEQ ID NO: 1428835 - DNA, 15 bp, Homo sapiens
gcgcgcggtggtgcc

SEQ ID NO: 1428836 - DNA, 15 bp, Homo sapiens
ggcgcgcggtggtgc

SEQ ID NO: 1428837 - DNA, 15 bp, Homo sapiens
tggcgcgcggtggtg

SEQ ID NO: 1428838 - DNA, 15 bp, Homo sapiens
ctggcgcgcggtggt

SEQ ID NO: 1428839 - DNA, 15 bp, Homo sapiens
gctggcgcgcggtgg

SEQ ID NO: 1428840 - DNA, 15 bp, Homo sapiens
ggctggcgcgcggtg

SEQ ID NO: 1428841 - DNA, 15 bp, Homo sapiens
gggctggcgcgcggt

SEQ ID NO: 1428842 - DNA, 15 bp, Homo sapiens
cgggctggcgcgcgg

SEQ ID NO: 1428843 - DNA, 15 bp, Homo sapiens
gcgggctggcgcgcg

SEQ ID NO: 1428844 - DNA, 15 bp, Homo sapiens
ggcgggctggcgcgc

SEQ ID NO: 1428845 - DNA, 15 bp, Homo sapiens
gggcgggctggcgcg

SEQ ID NO: 1428846 - DNA, 15 bp, Homo sapiens
cgggcgggctggcgc

SEQ ID NO: 1428847 - DNA, 15 bp, Homo sapiens
acgggcgggctggcg

SEQ ID NO: 1428848 - DNA, 15 bp, Homo sapiens
cacgggcgggctggc

SEQ ID NO: 1428849 - DNA, 15 bp, Homo sapiens
ccacgggcgggctgg

SEQ ID NO: 1428850 - DNA, 15 bp, Homo sapiens
gccacgggcgggctg

SEQ ID NO: 1428851 - DNA, 15 bp, Homo sapiens
tgccacgggcgggct

SEQ ID NO: 1428852 - DNA, 15 bp, Homo sapiens
atgccacgggcgggc

SEQ ID NO: 1428853 - DNA, 15 bp, Homo sapiens
catgccacgggcggg

SEQ ID NO: 1428854 - DNA, 15 bp, Homo sapiens
ccatgccacgggcgg

SEQ ID NO: 1428855 - DNA, 15 bp, Homo sapiens
cccatgccacgggcg

SEQ ID NO: 1428856 - DNA, 15 bp, Homo sapiens
tcccatgccacgggc

SEQ ID NO: 1428857 - DNA, 15 bp, Homo sapiens
ttcccatgccacggg

SEQ ID NO: 1428858 - DNA, 15 bp, Homo sapiens
gttcccatgccacgg

SEQ ID NO: 1428859 - DNA, 15 bp, Homo sapiens
ggttcccatgccacg

SEQ ID NO: 1428860 - DNA, 15 bp, Homo sapiens
aggttcccatgccac

SEQ ID NO: 1428861 - DNA, 15 bp, Homo sapiens
caggttcccatgcca

SEQ ID NO: 1428862 - DNA, 15 bp, Homo sapiens
gcaggttcccatgcc

SEQ ID NO: 1428863 - DNA, 15 bp, Homo sapiens
cgcaggttcccatgc

SEQ ID NO: 1428864 - DNA, 15 bp, Homo sapiens
tcgcaggttcccatg

SEQ ID NO: 1428865 - DNA, 15 bp, Homo sapiens
atcgcaggttcccat

SEQ ID NO: 1428866 - DNA, 15 bp, Homo sapiens
aatcgcaggttccca

SEQ ID NO: 1428867 - DNA, 15 bp, Homo sapiens
gaatcgcaggttccc

SEQ ID NO: 1428868 - DNA, 15 bp, Homo sapiens
tgaatcgcaggttcc

SEQ ID NO: 1428869 - DNA, 15 bp, Homo sapiens
ctgaatcgcaggttc

SEQ ID NO: 1428870 - DNA, 15 bp, Homo sapiens
actgaatcgcaggtt

SEQ ID NO: 1428871 - DNA, 15 bp, Homo sapiens
gactgaatcgcaggt

SEQ ID NO: 1428872 - DNA, 15 bp, Homo sapiens
cgactgaatcgcagg

SEQ ID NO: 1428873 - DNA, 15 bp, Homo sapiens
acgactgaatcgcag

SEQ ID NO: 1428874 - DNA, 15 bp, Homo sapiens
gacgactgaatcgca

SEQ ID NO: 1428875 - DNA, 15 bp, Homo sapiens
ggacgactgaatcgc

SEQ ID NO: 1428876 - DNA, 15 bp, Homo sapiens
gggacgactgaatcg

SEQ ID NO: 1428877 - DNA, 15 bp, Homo sapiens
ggggacgactgaatc

SEQ ID NO: 1428878 - DNA, 15 bp, Homo sapiens
cggggacgactgaat

SEQ ID NO: 1428879 - DNA, 15 bp, Homo sapiens
ccggggacgactgaa

SEQ ID NO: 1428880 - DNA, 15 bp, Homo sapiens
cccggggacgactga

SEQ ID NO: 1428881 - DNA, 15 bp, Homo sapiens
ccccggggacgactg

SEQ ID NO: 1428882 - DNA, 15 bp, Homo sapiens
tccccggggacgact

SEQ ID NO: 1428883 - DNA, 15 bp, Homo sapiens
gtccccggggacgac

SEQ ID NO: 1428884 - DNA, 15 bp, Homo sapiens
ggtccccggggacga

SEQ ID NO: 1428885 - DNA, 15 bp, Homo sapiens
aggtccccggggacg

SEQ ID NO: 1428886 - DNA, 15 bp, Homo sapiens
gaggtccccggggac

SEQ ID NO: 1428887 - DNA, 15 bp, Homo sapiens
ggaggtccccgggga

SEQ ID NO: 1428888 - DNA, 15 bp, Homo sapiens
gggaggtccccgggg

SEQ ID NO: 1428889 - DNA, 15 bp, Homo sapiens
tgggaggtccccggg

SEQ ID NO: 1428890 - DNA, 15 bp, Homo sapiens
ctgggaggtccccgg

SEQ ID NO: 1428891 - DNA, 15 bp, Homo sapiens
gctgggaggtccccg

SEQ ID NO: 1428892 - DNA, 15 bp, Homo sapiens
cgctgggaggtcccc

SEQ ID NO: 1428893 - DNA, 15 bp, Homo sapiens
gcgctgggaggtccc

SEQ ID NO: 1428894 - DNA, 15 bp, Homo sapiens
tgcgctgggaggtcc

SEQ ID NO: 1428895 - DNA, 15 bp, Homo sapiens
gtgcgctgggaggtc

SEQ ID NO: 1428896 - DNA, 15 bp, Homo sapiens
tgtgcgctgggaggt

SEQ ID NO: 1428897 - DNA, 15 bp, Homo sapiens
gtgtgcgctgggagg

SEQ ID NO: 1428898 - DNA, 15 bp, Homo sapiens
ggtgtgcgctgggag

SEQ ID NO: 1428899 - DNA, 15 bp, Homo sapiens
cggtgtgcgctggga

SEQ ID NO: 1428900 - DNA, 15 bp, Homo sapiens
gcggtgtgcgctggg

SEQ ID NO: 1428901 - DNA, 15 bp, Homo sapiens
agcggtgtgcgctgg

SEQ ID NO: 1428902 - DNA, 15 bp, Homo sapiens
tagcggtgtgcgctg

SEQ ID NO: 1428903 - DNA, 15 bp, Homo sapiens
ctagcggtgtgcgct

SEQ ID NO: 1428904 - DNA, 15 bp, Homo sapiens
gctagcggtgtgcgc

SEQ ID NO: 1428905 - DNA, 15 bp, Homo sapiens
ggctagcggtgtgcg

SEQ ID NO: 1428906 - DNA, 15 bp, Homo sapiens
aggctagcggtgtgc

SEQ ID NO: 1428907 - DNA, 15 bp, Homo sapiens
caggctagcggtgtg

SEQ ID NO: 1428908 - DNA, 15 bp, Homo sapiens
ccaggctagcggtgt

SEQ ID NO: 1428909 - DNA, 15 bp, Homo sapiens
cccaggctagcggtg

SEQ ID NO: 1428910 - DNA, 15 bp, Homo sapiens
ccccaggctagcggt

SEQ ID NO: 1428911 - DNA, 15 bp, Homo sapiens
gccccaggctagcgg

SEQ ID NO: 1428912 - DNA, 15 bp, Homo sapiens
agccccaggctagcg

SEQ ID NO: 1428913 - DNA, 15 bp, Homo sapiens
aagccccaggctagc

SEQ ID NO: 1428914 - DNA, 15 bp, Homo sapiens
aaagccccaggctag

SEQ ID NO: 1428915 - DNA, 15 bp, Homo sapiens
gaaagccccaggcta

SEQ ID NO: 1428916 - DNA, 15 bp, Homo sapiens
tgaaagccccaggct

SEQ ID NO: 1428917 - DNA, 15 bp, Homo sapiens
gtgaaagccccaggc

SEQ ID NO: 1428918 - DNA, 15 bp, Homo sapiens
ggtgaaagccccagg

SEQ ID NO: 1428919 - DNA, 15 bp, Homo sapiens
aggtgaaagccccag

SEQ ID NO: 1428920 - DNA, 15 bp, Homo sapiens
gaggtgaaagcccca

SEQ ID NO: 1428921 - DNA, 15 bp, Homo sapiens
cgaggtgaaagcccc

SEQ ID NO: 1428922 - DNA, 15 bp, Homo sapiens
tcgaggtgaaagccc

SEQ ID NO: 1428923 - DNA, 15 bp, Homo sapiens
atcgaggtgaaagcc

SEQ ID NO: 1428924 - DNA, 15 bp, Homo sapiens
gatcgaggtgaaagc

SEQ ID NO: 1428925 - DNA, 15 bp, Homo sapiens
ggatcgaggtgaaag

SEQ ID NO: 1428926 - DNA, 15 bp, Homo sapiens
cggatcgaggtgaaa

SEQ ID NO: 1428927 - DNA, 15 bp, Homo sapiens
gcggatcgaggtgaa

SEQ ID NO: 1428928 - DNA, 15 bp, Homo sapiens
ggcggatcgaggtga

SEQ ID NO: 1428929 - DNA, 15 bp, Homo sapiens
gggcggatcgaggtg

SEQ ID NO: 1428930 - DNA, 15 bp, Homo sapiens
cgggcggatcgaggt

SEQ ID NO: 1428931 - DNA, 15 bp, Homo sapiens
ccgggcggatcgagg

SEQ ID NO: 1428932 - DNA, 15 bp, Homo sapiens
gccgggcggatcgag

SEQ ID NO: 1428933 - DNA, 15 bp, Homo sapiens
ggccgggcggatcga

SEQ ID NO: 1428934 - DNA, 15 bp, Homo sapiens
aggccgggcggatcg

SEQ ID NO: 1428935 - DNA, 15 bp, Homo sapiens
caggccgggcggatc

SEQ ID NO: 1428936 - DNA, 15 bp, Homo sapiens
ccaggccgggcggat

SEQ ID NO: 1428937 - DNA, 15 bp, Homo sapiens
cccaggccgggcgga

SEQ ID NO: 1428938 - DNA, 15 bp, Homo sapiens
gcccaggccgggcgg

SEQ ID NO: 1428939 - DNA, 15 bp, Homo sapiens
cgcccaggccgggcg

SEQ ID NO: 1428940 - DNA, 15 bp, Homo sapiens
ccgcccaggccgggc

SEQ ID NO: 1428941 - DNA, 15 bp, Homo sapiens
gccgcccaggccggg

SEQ ID NO: 1428942 - DNA, 15 bp, Homo sapiens
agccgcccaggccgg

SEQ ID NO: 1428943 - DNA, 15 bp, Homo sapiens
gagccgcccaggccg

SEQ ID NO: 1428944 - DNA, 15 bp, Homo sapiens
cgagccgcccaggcc

SEQ ID NO: 1428945 - DNA, 15 bp, Homo sapiens
acgagccgcccaggc

SEQ ID NO: 1428946 - DNA, 15 bp, Homo sapiens
cacgagccgcccagg

SEQ ID NO: 1428947 - DNA, 15 bp, Homo sapiens
acacgagccgcccag

SEQ ID NO: 1428948 - DNA, 15 bp, Homo sapiens
gacacgagccgccca

SEQ ID NO: 1428949 - DNA, 15 bp, Homo sapiens
ggacacgagccgccc

SEQ ID NO: 1428950 - DNA, 15 bp, Homo sapiens
aggacacgagccgcc

SEQ ID NO: 1428951 - DNA, 15 bp, Homo sapiens
gaggacacgagccgc

SEQ ID NO: 1428952 - DNA, 15 bp, Homo sapiens
ggaggacacgagccg

SEQ ID NO: 1428953 - DNA, 15 bp, Homo sapiens
gggaggacacgagcc

SEQ ID NO: 1428954 - DNA, 15 bp, Homo sapiens
tgggaggacacgagc

SEQ ID NO: 1428955 - DNA, 15 bp, Homo sapiens
gtgggaggacacgag

SEQ ID NO: 1428956 - DNA, 15 bp, Homo sapiens
tgtgggaggacacga

SEQ ID NO: 1428957 - DNA, 15 bp, Homo sapiens
gtgtgggaggacacg

SEQ ID NO: 1428958 - DNA, 15 bp, Homo sapiens
ggtgtgggaggacac

SEQ ID NO: 1428959 - DNA, 15 bp, Homo sapiens
cggtgtgggaggaca

SEQ ID NO: 1428960 - DNA, 15 bp, Homo sapiens
gcggtgtgggaggac

SEQ ID NO: 1428961 - DNA, 15 bp, Homo sapiens
ggcggtgtgggagga

SEQ ID NO: 1428962 - DNA, 15 bp, Homo sapiens
tggcggtgtgggagg

SEQ ID NO: 1428963 - DNA, 15 bp, Homo sapiens
gtggcggtgtgggag

SEQ ID NO: 1428964 - DNA, 15 bp, Homo sapiens
ggtggcggtgtggga

SEQ ID NO: 1428965 - DNA, 15 bp, Homo sapiens
gggtggcggtgtggg

SEQ ID NO: 1428966 - DNA, 15 bp, Homo sapiens
cgggtggcggtgtgg

SEQ ID NO: 1428967 - DNA, 15 bp, Homo sapiens
acgggtggcggtgtg

SEQ ID NO: 1428968 - DNA, 15 bp, Homo sapiens
cacgggtggcggtgt

SEQ ID NO: 1428969 - DNA, 15 bp, Homo sapiens
gcacgggtggcggtg

SEQ ID NO: 1428970 - DNA, 15 bp, Homo sapiens
ggcacgggtggcggt

SEQ ID NO: 1428971 - DNA, 15 bp, Homo sapiens
gggcacgggtggcgg

SEQ ID NO: 1428972 - DNA, 15 bp, Homo sapiens
cgggcacgggtggcg

SEQ ID NO: 1428973 - DNA, 15 bp, Homo sapiens
gcgggcacgggtggc

SEQ ID NO: 1428974 - DNA, 15 bp, Homo sapiens
agcgggcacgggtgg

SEQ ID NO: 1428975 - DNA, 15 bp, Homo sapiens
aagcgggcacgggtg

SEQ ID NO: 1428976 - DNA, 15 bp, Homo sapiens
gaagcgggcacgggt

SEQ ID NO: 1428977 - DNA, 15 bp, Homo sapiens
ggaagcgggcacggg

SEQ ID NO: 1428978 - DNA, 15 bp, Homo sapiens
gggaagcgggcacgg

SEQ ID NO: 1428979 - DNA, 15 bp, Homo sapiens
cgggaagcgggcacg

SEQ ID NO: 1428980 - DNA, 15 bp, Homo sapiens
ccgggaagcgggcac

SEQ ID NO: 1428981 - DNA, 15 bp, Homo sapiens
cccgggaagcgggca

SEQ ID NO: 1428982 - DNA, 15 bp, Homo sapiens
ccccgggaagcgggc

SEQ ID NO: 1428983 - DNA, 15 bp, Homo sapiens
accccgggaagcggg

SEQ ID NO: 1428984 - DNA, 15 bp, Homo sapiens
caccccgggaagcgg

SEQ ID NO: 1428985 - DNA, 15 bp, Homo sapiens
gcaccccgggaagcg

SEQ ID NO: 1428986 - DNA, 15 bp, Homo sapiens
cgcaccccgggaagc

SEQ ID NO: 1428987 - DNA, 15 bp, Homo sapiens
gcgcaccccgggaag

SEQ ID NO: 1428988 - DNA, 15 bp, Homo sapiens
ggcgcaccccgggaa

SEQ ID NO: 1428989 - DNA, 15 bp, Homo sapiens
gggcgcaccccggga

SEQ ID NO: 1428990 - DNA, 15 bp, Homo sapiens
cgggcgcaccccggg

SEQ ID NO: 1428991 - DNA, 15 bp, Homo sapiens
ccgggcgcaccccgg

SEQ ID NO: 1428992 - DNA, 15 bp, Homo sapiens
tccgggcgcaccccg

SEQ ID NO: 1428993 - DNA, 15 bp, Homo sapiens
ctccgggcgcacccc

SEQ ID NO: 1428994 - DNA, 15 bp, Homo sapiens
gctccgggcgcaccc

SEQ ID NO: 1428995 - DNA, 15 bp, Homo sapiens
ggctccgggcgcacc

SEQ ID NO: 1428996 - DNA, 15 bp, Homo sapiens
aggctccgggcgcac

SEQ ID NO: 1428997 - DNA, 15 bp, Homo sapiens
caggctccgggcgca

SEQ ID NO: 1428998 - DNA, 15 bp, Homo sapiens
ccaggctccgggcgc

SEQ ID NO: 1428999 - DNA, 15 bp, Homo sapiens
gccaggctccgggcg

SEQ ID NO: 1429000 - DNA, 15 bp, Homo sapiens
ggccaggctccgggc

SEQ ID NO: 1429001 - DNA, 15 bp, Homo sapiens
cggccaggctccggg

SEQ ID NO: 1429002 - DNA, 15 bp, Homo sapiens
gcggccaggctccgg

SEQ ID NO: 1429003 - DNA, 15 bp, Homo sapiens
agcggccaggctccg

SEQ ID NO: 1429004 - DNA, 15 bp, Homo sapiens
gagcggccaggctcc

SEQ ID NO: 1429005 - DNA, 15 bp, Homo sapiens
agagcggccaggctc

SEQ ID NO: 1429006 - DNA, 15 bp, Homo sapiens
gagagcggccaggct

SEQ ID NO: 1429007 - DNA, 15 bp, Homo sapiens
ggagagcggccaggc

SEQ ID NO: 1429008 - DNA, 15 bp, Homo sapiens
gggagagcggccagg

SEQ ID NO: 1429009 - DNA, 15 bp, Homo sapiens
agggagagcggccag

SEQ ID NO: 1429010 - DNA, 15 bp, Homo sapiens
cagggagagcggcca

SEQ ID NO: 1429011 - DNA, 15 bp, Homo sapiens
gcagggagagcggcc

SEQ ID NO: 1429012 - DNA, 15 bp, Homo sapiens
tgcagggagagcggc

SEQ ID NO: 1429013 - DNA, 15 bp, Homo sapiens
ctgcagggagagcgg

SEQ ID NO: 1429014 - DNA, 15 bp, Homo sapiens
cctgcagggagagcg

SEQ ID NO: 1429015 - DNA, 15 bp, Homo sapiens
acctgcagggagagc

SEQ ID NO: 1429016 - DNA, 15 bp, Homo sapiens
cacctgcagggagag

SEQ ID NO: 1429017 - DNA, 15 bp, Homo sapiens
tcacctgcagggaga

SEQ ID NO: 1429018 - DNA, 15 bp, Homo sapiens
gtcacctgcagggag

SEQ ID NO: 1429019 - DNA, 15 bp, Homo sapiens
ggtcacctgcaggga

SEQ ID NO: 1429020 - DNA, 15 bp, Homo sapiens
tggtcacctgcaggg

SEQ ID NO: 1429021 - DNA, 15 bp, Homo sapiens
ctggtcacctgcagg

SEQ ID NO: 1429022 - DNA, 15 bp, Homo sapiens
actggtcacctgcag

SEQ ID NO: 1429023 - DNA, 15 bp, Homo sapiens
tactggtcacctgca

SEQ ID NO: 1429024 - DNA, 15 bp, Homo sapiens
gtactggtcacctgc

SEQ ID NO: 1429025 - DNA, 15 bp, Homo sapiens
agtactggtcacctg

SEQ ID NO: 1429026 - DNA, 15 bp, Homo sapiens
gagtactggtcacct

SEQ ID NO: 1429027 - DNA, 15 bp, Homo sapiens
cgagtactggtcacc

SEQ ID NO: 1429028 - DNA, 15 bp, Homo sapiens
acgagtactggtcac

SEQ ID NO: 1429029 - DNA, 15 bp, Homo sapiens
aacgagtactggtca

SEQ ID NO: 1429030 - DNA, 15 bp, Homo sapiens
aaacgagtactggtc

SEQ ID NO: 1429031 - DNA, 15 bp, Homo sapiens
caaacgagtactggt

SEQ ID NO: 1429032 - DNA, 15 bp, Homo sapiens
ccaaacgagtactgg

SEQ ID NO: 1429033 - DNA, 15 bp, Homo sapiens
tccaaacgagtactg

SEQ ID NO: 1429034 - DNA, 15 bp, Homo sapiens
ctccaaacgagtact

SEQ ID NO: 1429035 - DNA, 15 bp, Homo sapiens
actccaaacgagtac

SEQ ID NO: 1429036 - DNA, 15 bp, Homo sapiens
aactccaaacgagta

SEQ ID NO: 1429037 - DNA, 15 bp, Homo sapiens
gaactccaaacgagt

SEQ ID NO: 1429038 - DNA, 15 bp, Homo sapiens
tgaactccaaacgag

SEQ ID NO: 1429039 - DNA, 15 bp, Homo sapiens
ttgaactccaaacga

SEQ ID NO: 1429040 - DNA, 15 bp, Homo sapiens
cttgaactccaaacg

SEQ ID NO: 1429041 - DNA, 15 bp, Homo sapiens
tcttgaactccaaac

SEQ ID NO: 1429042 - DNA, 15 bp, Homo sapiens
atcttgaactccaaa

SEQ ID NO: 1429043 - DNA, 15 bp, Homo sapiens
aatcttgaactccaa

SEQ ID NO: 1429044 - DNA, 15 bp, Homo sapiens
gaatcttgaactcca

SEQ ID NO: 1429045 - DNA, 15 bp, Homo sapiens
ggaatcttgaactcc

SEQ ID NO: 1429046 - DNA, 15 bp, Homo sapiens
gggaatcttgaactc

SEQ ID NO: 1429047 - DNA, 15 bp, Homo sapiens
cgggaatcttgaact

SEQ ID NO: 1429048 - DNA, 15 bp, Homo sapiens
gcgggaatcttgaac

SEQ ID NO: 1429049 - DNA, 15 bp, Homo sapiens
ggcgggaatcttgaa

SEQ ID NO: 1429050 - DNA, 15 bp, Homo sapiens
cggcgggaatcttga

SEQ ID NO: 1429051 - DNA, 15 bp, Homo sapiens
gcggcgggaatcttg

SEQ ID NO: 1429052 - DNA, 15 bp, Homo sapiens
agcggcgggaatctt

SEQ ID NO: 1429053 - DNA, 15 bp, Homo sapiens
gagcggcgggaatct

SEQ ID NO: 1429054 - DNA, 15 bp, Homo sapiens
ggagcggcgggaatc

SEQ ID NO: 1429055 - DNA, 15 bp, Homo sapiens
tggagcggcgggaat

SEQ ID NO: 1429056 - DNA, 15 bp, Homo sapiens
gtggagcggcgggaa

SEQ ID NO: 1429057 - DNA, 15 bp, Homo sapiens
agtggagcggcggga

SEQ ID NO: 1429058 - DNA, 15 bp, Homo sapiens
aagtggagcggcggg

SEQ ID NO: 1429059 - DNA, 15 bp, Homo sapiens
caagtggagcggcgg

SEQ ID NO: 1429060 - DNA, 15 bp, Homo sapiens
tcaagtggagcggcg

SEQ ID NO: 1429061 - DNA, 15 bp, Homo sapiens
ttcaagtggagcggc

SEQ ID NO: 1429062 - DNA, 15 bp, Homo sapiens
gttcaagtggagcgg

SEQ ID NO: 1429063 - DNA, 15 bp, Homo sapiens
agttcaagtggagcg

SEQ ID NO: 1429064 - DNA, 15 bp, Homo sapiens
gagttcaagtggagc

SEQ ID NO: 1429065 - DNA, 15 bp, Homo sapiens
ggagttcaagtggag

SEQ ID NO: 1429066 - DNA, 15 bp, Homo sapiens
tggagttcaagtgga

SEQ ID NO: 1429067 - DNA, 15 bp, Homo sapiens
gtggagttcaagtgg

SEQ ID NO: 1429068 - DNA, 15 bp, Homo sapiens
ggtggagttcaagtg

SEQ ID NO: 1429069 - DNA, 15 bp, Homo sapiens
gggtggagttcaagt

SEQ ID NO: 1429070 - DNA, 15 bp, Homo sapiens
agggtggagttcaag

SEQ ID NO: 1429071 - DNA, 15 bp, Homo sapiens
gagggtggagttcaa

SEQ ID NO: 1429072 - DNA, 15 bp, Homo sapiens
ggagggtggagttca

SEQ ID NO: 1429073 - DNA, 15 bp, Homo sapiens
gggagggtggagttc

SEQ ID NO: 1429074 - DNA, 15 bp, Homo sapiens
ggggagggtggagtt

SEQ ID NO: 1429075 - DNA, 15 bp, Homo sapiens
aggggagggtggagt

SEQ ID NO: 1429076 - DNA, 15 bp, Homo sapiens
gaggggagggtggag

SEQ ID NO: 1429077 - DNA, 15 bp, Homo sapiens
agaggggagggtgga

SEQ ID NO: 1429078 - DNA, 15 bp, Homo sapiens
aagaggggagggtgg

SEQ ID NO: 1429079 - DNA, 15 bp, Homo sapiens
taagaggggagggtg

SEQ ID NO: 1429080 - DNA, 15 bp, Homo sapiens
ataagaggggagggt

SEQ ID NO: 1429081 - DNA, 15 bp, Homo sapiens
aataagaggggaggg

SEQ ID NO: 1429082 - DNA, 15 bp, Homo sapiens
taataagaggggagg

SEQ ID NO: 1429083 - DNA, 15 bp, Homo sapiens
ataataagaggggag

SEQ ID NO: 1429084 - DNA, 15 bp, Homo sapiens
aataataagagggga

SEQ ID NO: 1429085 - DNA, 15 bp, Homo sapiens
taataataagagggg

SEQ ID NO: 1429086 - DNA, 15 bp, Homo sapiens
ataataataagaggg

SEQ ID NO: 1429087 - DNA, 15 bp, Homo sapiens
aataataataagagg

SEQ ID NO: 1429088 - DNA, 15 bp, Homo sapiens
taataataataagag

SEQ ID NO: 1429089 - DNA, 15 bp, Homo sapiens
ataataataataaga

SEQ ID NO: 1429090 - DNA, 15 bp, Homo sapiens
aataataataataag

SEQ ID NO: 1429091 - DNA, 15 bp, Homo sapiens
aaaataataataata

SEQ ID NO: 1429092 - DNA, 15 bp, Homo sapiens
taaaataataataat

SEQ ID NO: 1429093 - DNA, 15 bp, Homo sapiens
ttaaaataataataa

SEQ ID NO: 1429094 - DNA, 15 bp, Homo sapiens
gttaaaataataata

SEQ ID NO: 1429095 - DNA, 15 bp, Homo sapiens
agttaaaataataat

SEQ ID NO: 1429096 - DNA, 15 bp, Homo sapiens
aagttaaaataataa

SEQ ID NO: 1429097 - DNA, 15 bp, Homo sapiens
gaagttaaaataata

SEQ ID NO: 1429098 - DNA, 15 bp, Homo sapiens
ggaagttaaaataat

SEQ ID NO: 1429099 - DNA, 15 bp, Homo sapiens
gggaagttaaaataa

SEQ ID NO: 1429100 - DNA, 15 bp, Homo sapiens
agggaagttaaaata

SEQ ID NO: 1429101 - DNA, 15 bp, Homo sapiens
gagggaagttaaaat

SEQ ID NO: 1429102 - DNA, 15 bp, Homo sapiens
ggagggaagttaaaa

SEQ ID NO: 1429103 - DNA, 15 bp, Homo sapiens
cggagggaagttaaa

SEQ ID NO: 1429104 - DNA, 15 bp, Homo sapiens
ccggagggaagttaa

SEQ ID NO: 1429105 - DNA, 15 bp, Homo sapiens
accggagggaagtta

SEQ ID NO: 1429106 - DNA, 15 bp, Homo sapiens
aaccggagggaagtt

SEQ ID NO: 1429107 - DNA, 15 bp, Homo sapiens
taaccggagggaagt

SEQ ID NO: 1429108 - DNA, 15 bp, Homo sapiens
ttaaccggagggaag

SEQ ID NO: 1429109 - DNA, 15 bp, Homo sapiens
cttaaccggagggaa

SEQ ID NO: 1429110 - DNA, 15 bp, Homo sapiens
gcttaaccggaggga

SEQ ID NO: 1429111 - DNA, 15 bp, Homo sapiens
agcttaaccggaggg

SEQ ID NO: 1429112 - DNA, 15 bp, Homo sapiens
tagcttaaccggagg

SEQ ID NO: 1429113 - DNA, 15 bp, Homo sapiens
ttagcttaaccggag

SEQ ID NO: 1429114 - DNA, 15 bp, Homo sapiens
tttagcttaaccgga

SEQ ID NO: 1429115 - DNA, 15 bp, Homo sapiens
atttagcttaaccgg

SEQ ID NO: 1429116 - DNA, 15 bp, Homo sapiens
aatttagcttaaccg

SEQ ID NO: 1429117 - DNA, 15 bp, Homo sapiens
caatttagcttaacc

SEQ ID NO: 1429118 - DNA, 15 bp, Homo sapiens
tcaatttagcttaac

SEQ ID NO: 1429119 - DNA, 15 bp, Homo sapiens
atcaatttagcttaa

SEQ ID NO: 1429120 - DNA, 15 bp, Homo sapiens
gatcaatttagctta

SEQ ID NO: 1429121 - DNA, 15 bp, Homo sapiens
agatcaatttagctt

SEQ ID NO: 1429122 - DNA, 15 bp, Homo sapiens
aagatcaatttagct

SEQ ID NO: 1429123 - DNA, 15 bp, Homo sapiens
taagatcaatttagc

SEQ ID NO: 1429124 - DNA, 15 bp, Homo sapiens
ttaagatcaatttag

SEQ ID NO: 1429125 - DNA, 15 bp, Homo sapiens
attaagatcaattta

SEQ ID NO: 1429126 - DNA, 15 bp, Homo sapiens
gattaagatcaattt

SEQ ID NO: 1429127 - DNA, 15 bp, Homo sapiens
agattaagatcaatt

SEQ ID NO: 1429128 - DNA, 15 bp, Homo sapiens
aagattaagatcaat

SEQ ID NO: 1429129 - DNA, 15 bp, Homo sapiens
aaagattaagatcaa

SEQ ID NO: 1429130 - DNA, 15 bp, Homo sapiens
gaaagattaagatca

SEQ ID NO: 1429131 - DNA, 15 bp, Homo sapiens
tgaaagattaagatc

SEQ ID NO: 1429132 - DNA, 15 bp, Homo sapiens
atgaaagattaagat

SEQ ID NO: 1429133 - DNA, 15 bp, Homo sapiens
gatgaaagattaaga

SEQ ID NO: 1429134 - DNA, 15 bp, Homo sapiens
agatgaaagattaag

SEQ ID NO: 1429135 - DNA, 15 bp, Homo sapiens
gagatgaaagattaa

SEQ ID NO: 1429136 - DNA, 15 bp, Homo sapiens
cgagatgaaagatta

SEQ ID NO: 1429137 - DNA, 15 bp, Homo sapiens
ccgagatgaaagatt

SEQ ID NO: 1429138 - DNA, 15 bp, Homo sapiens
tccgagatgaaagat

SEQ ID NO: 1429139 - DNA, 15 bp, Homo sapiens
gtccgagatgaaaga

SEQ ID NO: 1429140 - DNA, 15 bp, Homo sapiens
cgtccgagatgaaag

SEQ ID NO: 1429141 - DNA, 15 bp, Homo sapiens
acgtccgagatgaaa

SEQ ID NO: 1429142 - DNA, 15 bp, Homo sapiens
gacgtccgagatgaa

SEQ ID NO: 1429143 - DNA, 15 bp, Homo sapiens
ggacgtccgagatga

SEQ ID NO: 1429144 - DNA, 15 bp, Homo sapiens
gggacgtccgagatg

SEQ ID NO: 1429145 - DNA, 15 bp, Homo sapiens
agggacgtccgagat

SEQ ID NO: 1429146 - DNA, 15 bp, Homo sapiens
gagggacgtccgaga

SEQ ID NO: 1429147 - DNA, 15 bp, Homo sapiens
agagggacgtccgag

SEQ ID NO: 1429148 - DNA, 15 bp, Homo sapiens
tagagggacgtccga

SEQ ID NO: 1429149 - DNA, 15 bp, Homo sapiens
ttagagggacgtccg

SEQ ID NO: 1429150 - DNA, 15 bp, Homo sapiens
cttagagggacgtcc

SEQ ID NO: 1429151 - DNA, 15 bp, Homo sapiens
ccttagagggacgtc

SEQ ID NO: 1429152 - DNA, 15 bp, Homo sapiens
cccttagagggacgt

SEQ ID NO: 1429153 - DNA, 15 bp, Homo sapiens
ccccttagagggacg

SEQ ID NO: 1429154 - DNA, 15 bp, Homo sapiens
tccccttagagggac

SEQ ID NO: 1429155 - DNA, 15 bp, Homo sapiens
ctccccttagaggga

SEQ ID NO: 1429156 - DNA, 15 bp, Homo sapiens
actccccttagaggg

SEQ ID NO: 1429157 - DNA, 15 bp, Homo sapiens
cactccccttagagg

SEQ ID NO: 1429158 - DNA, 15 bp, Homo sapiens
tcactccccttagag

SEQ ID NO: 1429159 - DNA, 15 bp, Homo sapiens
ctcactccccttaga

SEQ ID NO: 1429160 - DNA, 15 bp, Homo sapiens
gctcactccccttag

SEQ ID NO: 1429161 - DNA, 15 bp, Homo sapiens
cgctcactcccctta

SEQ ID NO: 1429162 - DNA, 15 bp, Homo sapiens
tcgctcactcccctt

SEQ ID NO: 1429163 - DNA, 15 bp, Homo sapiens
ttcgctcactcccct

SEQ ID NO: 1429164 - DNA, 15 bp, Homo sapiens
cttcgctcactcccc

SEQ ID NO: 1429165 - DNA, 15 bp, Homo sapiens
tcttcgctcactccc

SEQ ID NO: 1429166 - DNA, 15 bp, Homo sapiens
atcttcgctcactcc

SEQ ID NO: 1429167 - DNA, 15 bp, Homo sapiens
aatcttcgctcactc

SEQ ID NO: 1429168 - DNA, 15 bp, Homo sapiens
gaatcttcgctcact

SEQ ID NO: 1429169 - DNA, 15 bp, Homo sapiens
ggaatcttcgctcac

SEQ ID NO: 1429170 - DNA, 15 bp, Homo sapiens
cggaatcttcgctca

SEQ ID NO: 1429171 - DNA, 15 bp, Homo sapiens
tcggaatcttcgctc

SEQ ID NO: 1429172 - DNA, 15 bp, Homo sapiens
atcggaatcttcgct

SEQ ID NO: 1429173 - DNA, 15 bp, Homo sapiens
aatcggaatcttcgc

SEQ ID NO: 1429174 - DNA, 15 bp, Homo sapiens
caatcggaatcttcg

SEQ ID NO: 1429175 - DNA, 15 bp, Homo sapiens
gcaatcggaatcttc

SEQ ID NO: 1429176 - DNA, 15 bp, Homo sapiens
tgcaatcggaatctt

SEQ ID NO: 1429177 - DNA, 15 bp, Homo sapiens
ttgcaatcggaatct

SEQ ID NO: 1429178 - DNA, 15 bp, Homo sapiens
cttgcaatcggaatc

SEQ ID NO: 1429179 - DNA, 15 bp, Homo sapiens
acttgcaatcggaat

SEQ ID NO: 1429180 - DNA, 15 bp, Homo sapiens
gacttgcaatcggaa

SEQ ID NO: 1429181 - DNA, 15 bp, Homo sapiens
cgacttgcaatcgga

SEQ ID NO: 1429182 - DNA, 15 bp, Homo sapiens
gcgacttgcaatcgg

SEQ ID NO: 1429183 - DNA, 15 bp, Homo sapiens
ggcgacttgcaatcg

SEQ ID NO: 1429184 - DNA, 15 bp, Homo sapiens
cggcgacttgcaatc

SEQ ID NO: 1429185 - DNA, 15 bp, Homo sapiens
gcggcgacttgcaat

SEQ ID NO: 1429186 - DNA, 15 bp, Homo sapiens
agcggcgacttgcaa

SEQ ID NO: 1429187 - DNA, 15 bp, Homo sapiens
cagcggcgacttgca

SEQ ID NO: 1429188 - DNA, 15 bp, Homo sapiens
acagcggcgacttgc

SEQ ID NO: 1429189 - DNA, 15 bp, Homo sapiens
gacagcggcgacttg

SEQ ID NO: 1429190 - DNA, 15 bp, Homo sapiens
cgacagcggcgactt

SEQ ID NO: 1429191 - DNA, 15 bp, Homo sapiens
gcgacagcggcgact

SEQ ID NO: 1429192 - DNA, 15 bp, Homo sapiens
agcgacagcggcgac

SEQ ID NO: 1429193 - DNA, 15 bp, Homo sapiens
aagcgacagcggcga

SEQ ID NO: 1429194 - DNA, 15 bp, Homo sapiens
caagcgacagcggcg

SEQ ID NO: 1429195 - DNA, 15 bp, Homo sapiens
acaagcgacagcggc

SEQ ID NO: 1429196 - DNA, 15 bp, Homo sapiens
cacaagcgacagcgg

SEQ ID NO: 1429197 - DNA, 15 bp, Homo sapiens
gcacaagcgacagcg

SEQ ID NO: 1429198 - DNA, 15 bp, Homo sapiens
ggcacaagcgacagc

SEQ ID NO: 1429199 - DNA, 15 bp, Homo sapiens
gggcacaagcgacag

SEQ ID NO: 1429200 - DNA, 15 bp, Homo sapiens
cgggcacaagcgaca

SEQ ID NO: 1429201 - DNA, 15 bp, Homo sapiens
acgggcacaagcgac

SEQ ID NO: 1429202 - DNA, 15 bp, Homo sapiens
gacgggcacaagcga

SEQ ID NO: 1429203 - DNA, 15 bp, Homo sapiens
tgacgggcacaagcg

SEQ ID NO: 1429204 - DNA, 15 bp, Homo sapiens
ctgacgggcacaagc

SEQ ID NO: 1429205 - DNA, 15 bp, Homo sapiens
gctgacgggcacaag

SEQ ID NO: 1429206 - DNA, 15 bp, Homo sapiens
ggctgacgggcacaa

SEQ ID NO: 1429207 - DNA, 15 bp, Homo sapiens
gggctgacgggcaca

SEQ ID NO: 1429208 - DNA, 15 bp, Homo sapiens
ggggctgacgggcac

SEQ ID NO: 1429209 - DNA, 15 bp, Homo sapiens
aggggctgacgggca

SEQ ID NO: 1429210 - DNA, 15 bp, Homo sapiens
gaggggctgacgggc

SEQ ID NO: 1429211 - DNA, 15 bp, Homo sapiens
cgaggggctgacggg

SEQ ID NO: 1429212 - DNA, 15 bp, Homo sapiens
gcgaggggctgacgg

SEQ ID NO: 1429213 - DNA, 15 bp, Homo sapiens
ggcgaggggctgacg

SEQ ID NO: 1429214 - DNA, 15 bp, Homo sapiens
gggcgaggggctgac

SEQ ID NO: 1429215 - DNA, 15 bp, Homo sapiens
tgggcgaggggctga

SEQ ID NO: 1429216 - DNA, 15 bp, Homo sapiens
ttgggcgaggggctg

SEQ ID NO: 1429217 - DNA, 15 bp, Homo sapiens
tttgggcgaggggct

SEQ ID NO: 1429218 - DNA, 15 bp, Homo sapiens
ctttgggcgaggggc

SEQ ID NO: 1429219 - DNA, 15 bp, Homo sapiens
cctttgggcgagggg

SEQ ID NO: 1429220 - DNA, 15 bp, Homo sapiens
tcctttgggcgaggg

SEQ ID NO: 1429221 - DNA, 15 bp, Homo sapiens
ctcctttgggcgagg

SEQ ID NO: 1429222 - DNA, 15 bp, Homo sapiens
tctcctttgggcgag

SEQ ID NO: 1429223 - DNA, 15 bp, Homo sapiens
gtctcctttgggcga

SEQ ID NO: 1429224 - DNA, 15 bp, Homo sapiens
cgtctcctttgggcg

SEQ ID NO: 1429225 - DNA, 15 bp, Homo sapiens
gcgtctcctttgggc

SEQ ID NO: 1429226 - DNA, 15 bp, Homo sapiens
ggcgtctcctttggg

SEQ ID NO: 1429227 - DNA, 15 bp, Homo sapiens
gggcgtctcctttgg

SEQ ID NO: 1429228 - DNA, 15 bp, Homo sapiens
ggggcgtctcctttg

SEQ ID NO: 1429229 - DNA, 15 bp, Homo sapiens
gggggcgtctccttt

SEQ ID NO: 1429230 - DNA, 15 bp, Homo sapiens
cgggggcgtctcctt

SEQ ID NO: 1429231 - DNA, 15 bp, Homo sapiens
ccgggggcgtctcct

SEQ ID NO: 1429232 - DNA, 15 bp, Homo sapiens
cccgggggcgtctcc

SEQ ID NO: 1429233 - DNA, 15 bp, Homo sapiens
gcccgggggcgtctc

SEQ ID NO: 1429234 - DNA, 15 bp, Homo sapiens
cgcccgggggcgtct

SEQ ID NO: 1429235 - DNA, 15 bp, Homo sapiens
ccgcccgggggcgtc

SEQ ID NO: 1429236 - DNA, 15 bp, Homo sapiens
cccgcccgggggcgt

SEQ ID NO: 1429237 - DNA, 15 bp, Homo sapiens
ccccgcccgggggcg

SEQ ID NO: 1429238 - DNA, 15 bp, Homo sapiens
gccccgcccgggggc

SEQ ID NO: 1429239 - DNA, 15 bp, Homo sapiens
cgccccgcccggggg

SEQ ID NO: 1429240 - DNA, 15 bp, Homo sapiens
ccgccccgcccgggg

SEQ ID NO: 1429241 - DNA, 15 bp, Homo sapiens
cccgccccgcccggg

SEQ ID NO: 1429242 - DNA, 15 bp, Homo sapiens
ccccgccccgcccgg

SEQ ID NO: 1429243 - DNA, 15 bp, Homo sapiens
gccccgccccgcccg

SEQ ID NO: 1429244 - DNA, 15 bp, Homo sapiens
tccgccccgccccgc

SEQ ID NO: 1429245 - DNA, 15 bp, Homo sapiens
ctccgccccgccccg

SEQ ID NO: 1429246 - DNA, 15 bp, Homo sapiens
gctccgccccgcccc

SEQ ID NO: 1429247 - DNA, 15 bp, Homo sapiens
cgctccgccccgccc

SEQ ID NO: 1429248 - DNA, 15 bp, Homo sapiens
ccgctccgccccgcc

SEQ ID NO: 1429249 - DNA, 15 bp, Homo sapiens
cccgctccgccccgc

SEQ ID NO: 1429250 - DNA, 15 bp, Homo sapiens
ccccgctccgccccg

SEQ ID NO: 1429251 - DNA, 15 bp, Homo sapiens
gccccgctccgcccc

SEQ ID NO: 1429252 - DNA, 15 bp, Homo sapiens
cgccccgctccgccc

SEQ ID NO: 1429253 - DNA, 15 bp, Homo sapiens
ccgccccgctccgcc

SEQ ID NO: 1429254 - DNA, 15 bp, Homo sapiens
cccgccccgctccgc

SEQ ID NO: 1429255 - DNA, 15 bp, Homo sapiens
ccccgccccgctccg

SEQ ID NO: 1429256 - DNA, 15 bp, Homo sapiens
gccccgccccgctcc

SEQ ID NO: 1429257 - DNA, 15 bp, Homo sapiens
cgccccgccccgctc

SEQ ID NO: 1429258 - DNA, 15 bp, Homo sapiens
ccgccccgccccgct

SEQ ID NO: 1429259 - DNA, 15 bp, Homo sapiens
ttccgccccgccccg

SEQ ID NO: 1429260 - DNA, 15 bp, Homo sapiens
cttccgccccgcccc

SEQ ID NO: 1429261 - DNA, 15 bp, Homo sapiens
ccttccgccccgccc

SEQ ID NO: 1429262 - DNA, 15 bp, Homo sapiens
cccttccgccccgcc

SEQ ID NO: 1429263 - DNA, 15 bp, Homo sapiens
gcccttccgccccgc

SEQ ID NO: 1429264 - DNA, 15 bp, Homo sapiens
ggcccttccgccccg

SEQ ID NO: 1429265 - DNA, 15 bp, Homo sapiens
gggcccttccgcccc

SEQ ID NO: 1429266 - DNA, 15 bp, Homo sapiens
cgggcccttccgccc

SEQ ID NO: 1429267 - DNA, 15 bp, Homo sapiens
ccgggcccttccgcc

SEQ ID NO: 1429268 - DNA, 15 bp, Homo sapiens
cccgggcccttccgc

SEQ ID NO: 1429269 - DNA, 15 bp, Homo sapiens
acccgggcccttccg

SEQ ID NO: 1429270 - DNA, 15 bp, Homo sapiens
gacccgggcccttcc

SEQ ID NO: 1429271 - DNA, 15 bp, Homo sapiens
agacccgggcccttc

SEQ ID NO: 1429272 - DNA, 15 bp, Homo sapiens
cagacccgggccctt

SEQ ID NO: 1429273 - DNA, 15 bp, Homo sapiens
gcagacccgggccct

SEQ ID NO: 1429274 - DNA, 15 bp, Homo sapiens
agcagacccgggccc

SEQ ID NO: 1429275 - DNA, 15 bp, Homo sapiens
cagcagacccgggcc

SEQ ID NO: 1429276 - DNA, 15 bp, Homo sapiens
gcagcagacccgggc

SEQ ID NO: 1429277 - DNA, 15 bp, Homo sapiens
cgcagcagacccggg

SEQ ID NO: 1429278 - DNA, 15 bp, Homo sapiens
ccgcagcagacccgg

SEQ ID NO: 1429279 - DNA, 15 bp, Homo sapiens
tccgcagcagacccg

SEQ ID NO: 1429280 - DNA, 15 bp, Homo sapiens
gtccgcagcagaccc

SEQ ID NO: 1429281 - DNA, 15 bp, Homo sapiens
cgtccgcagcagacc

SEQ ID NO: 1429282 - DNA, 15 bp, Homo sapiens
ccgtccgcagcagac

SEQ ID NO: 1429283 - DNA, 15 bp, Homo sapiens
cccgtccgcagcaga

SEQ ID NO: 1429284 - DNA, 15 bp, Homo sapiens
ccccgtccgcagcag

SEQ ID NO: 1429285 - DNA, 15 bp, Homo sapiens
gccccgtccgcagca

SEQ ID NO: 1429286 - DNA, 15 bp, Homo sapiens
cgccccgtccgcagc

SEQ ID NO: 1429287 - DNA, 15 bp, Homo sapiens
ccgccccgtccgcag

SEQ ID NO: 1429288 - DNA, 15 bp, Homo sapiens
cccgccccgtccgca

SEQ ID NO: 1429289 - DNA, 15 bp, Homo sapiens
ccccgccccgtccgc

SEQ ID NO: 1429290 - DNA, 15 bp, Homo sapiens
gccccgccccgtccg

SEQ ID NO: 1429291 - DNA, 15 bp, Homo sapiens
ccgccccgccccgtc

SEQ ID NO: 1429292 - DNA, 15 bp, Homo sapiens
tccgccccgccccgt

SEQ ID NO: 1429293 - DNA, 15 bp, Homo sapiens
ggctccgccccgccc

SEQ ID NO: 1429294 - DNA, 15 bp, Homo sapiens
aggctccgccccgcc

SEQ ID NO: 1429295 - DNA, 15 bp, Homo sapiens
gaggctccgccccgc

SEQ ID NO: 1429296 - DNA, 15 bp, Homo sapiens
ggaggctccgccccg

SEQ ID NO: 1429297 - DNA, 15 bp, Homo sapiens
aggaggctccgcccc

SEQ ID NO: 1429298 - DNA, 15 bp, Homo sapiens
gaggaggctccgccc

SEQ ID NO: 1429299 - DNA, 15 bp, Homo sapiens
ggaggaggctccgcc

SEQ ID NO: 1429300 - DNA, 15 bp, Homo sapiens
aggaggaggctccgc

SEQ ID NO: 1429301 - DNA, 15 bp, Homo sapiens
caggaggaggctccg

SEQ ID NO: 1429302 - DNA, 15 bp, Homo sapiens
gcaggaggaggctcc

SEQ ID NO: 1429303 - DNA, 15 bp, Homo sapiens
tgcaggaggaggctc

SEQ ID NO: 1429304 - DNA, 15 bp, Homo sapiens
gtgcaggaggaggct

SEQ ID NO: 1429305 - DNA, 15 bp, Homo sapiens
cgtgcaggaggaggc

SEQ ID NO: 1429306 - DNA, 15 bp, Homo sapiens
ccgtgcaggaggagg

SEQ ID NO: 1429307 - DNA, 15 bp, Homo sapiens
cccgtgcaggaggag

SEQ ID NO: 1429308 - DNA, 15 bp, Homo sapiens
ccccgtgcaggagga

SEQ ID NO: 1429309 - DNA, 15 bp, Homo sapiens
cccccgtgcaggagg

SEQ ID NO: 1429310 - DNA, 15 bp, Homo sapiens
tcccccgtgcaggag

SEQ ID NO: 1429311 - DNA, 15 bp, Homo sapiens
ctcccccgtgcagga

SEQ ID NO: 1429312 - DNA, 15 bp, Homo sapiens
gctcccccgtgcagg

SEQ ID NO: 1429313 - DNA, 15 bp, Homo sapiens
ggctcccccgtgcag

SEQ ID NO: 1429314 - DNA, 15 bp, Homo sapiens
gggctcccccgtgca

SEQ ID NO: 1429315 - DNA, 15 bp, Homo sapiens
ggggctcccccgtgc

SEQ ID NO: 1429316 - DNA, 15 bp, Homo sapiens
gggggctcccccgtg

SEQ ID NO: 1429317 - DNA, 15 bp, Homo sapiens
cgggggctcccccgt

SEQ ID NO: 1429318 - DNA, 15 bp, Homo sapiens
ccgggggctcccccg

SEQ ID NO: 1429319 - DNA, 15 bp, Homo sapiens
cccgggggctccccc

SEQ ID NO: 1429320 - DNA, 15 bp, Homo sapiens
gcccgggggctcccc

SEQ ID NO: 1429321 - DNA, 15 bp, Homo sapiens
agcccgggggctccc

SEQ ID NO: 1429322 - DNA, 15 bp, Homo sapiens
gagcccgggggctcc

SEQ ID NO: 1429323 - DNA, 15 bp, Homo sapiens
cgagcccgggggctc

SEQ ID NO: 1429324 - DNA, 15 bp, Homo sapiens
gcgagcccgggggct

SEQ ID NO: 1429325 - DNA, 15 bp, Homo sapiens
ggcgagcccgggggc

SEQ ID NO: 1429326 - DNA, 15 bp, Homo sapiens
gggcgagcccggggg

SEQ ID NO: 1429327 - DNA, 15 bp, Homo sapiens
ggggcgagcccgggg

SEQ ID NO: 1429328 - DNA, 15 bp, Homo sapiens
tggggcgagcccggg

SEQ ID NO: 1429329 - DNA, 15 bp, Homo sapiens
ctggggcgagcccgg

SEQ ID NO: 1429330 - DNA, 15 bp, Homo sapiens
gctggggcgagcccg

SEQ ID NO: 1429331 - DNA, 15 bp, Homo sapiens
agctggggcgagccc

SEQ ID NO: 1429332 - DNA, 15 bp, Homo sapiens
gagctggggcgagcc

SEQ ID NO: 1429333 - DNA, 15 bp, Homo sapiens
tgagctggggcgagc

SEQ ID NO: 1429334 - DNA, 15 bp, Homo sapiens
ctgagctggggcgag

SEQ ID NO: 1429335 - DNA, 15 bp, Homo sapiens
tctgagctggggcga

SEQ ID NO: 1429336 - DNA, 15 bp, Homo sapiens
gtctgagctggggcg

SEQ ID NO: 1429337 - DNA, 15 bp, Homo sapiens
tgtctgagctggggc

SEQ ID NO: 1429338 - DNA, 15 bp, Homo sapiens
gtgtctgagctgggg

SEQ ID NO: 1429339 - DNA, 15 bp, Homo sapiens
agtgtctgagctggg

SEQ ID NO: 1429340 - DNA, 15 bp, Homo sapiens
gagtgtctgagctgg

SEQ ID NO: 1429341 - DNA, 15 bp, Homo sapiens
ggagtgtctgagctg

SEQ ID NO: 1429342 - DNA, 15 bp, Homo sapiens
aggagtgtctgagct

SEQ ID NO: 1429343 - DNA, 15 bp, Homo sapiens
taggagtgtctgagc

SEQ ID NO: 1429344 - DNA, 15 bp, Homo sapiens
ctaggagtgtctgag

SEQ ID NO: 1429345 - DNA, 15 bp, Homo sapiens
gctaggagtgtctga

SEQ ID NO: 1429346 - DNA, 15 bp, Homo sapiens
ggctaggagtgtctg

SEQ ID NO: 1429347 - DNA, 15 bp, Homo sapiens
aggctaggagtgtct

SEQ ID NO: 1429348 - DNA, 15 bp, Homo sapiens
aaggctaggagtgtc

SEQ ID NO: 1429349 - DNA, 15 bp, Homo sapiens
caaggctaggagtgt

SEQ ID NO: 1429350 - DNA, 15 bp, Homo sapiens
ccaaggctaggagtg

SEQ ID NO: 1429351 - DNA, 15 bp, Homo sapiens
cccaaggctaggagt

SEQ ID NO: 1429352 - DNA, 15 bp, Homo sapiens
ccccaaggctaggag

SEQ ID NO: 1429353 - DNA, 15 bp, Homo sapiens
gccccaaggctagga

SEQ ID NO: 1429354 - DNA, 15 bp, Homo sapiens
tgccccaaggctagg

SEQ ID NO: 1429355 - DNA, 15 bp, Homo sapiens
ctgccccaaggctag

SEQ ID NO: 1429356 - DNA, 15 bp, Homo sapiens
gctgccccaaggcta

SEQ ID NO: 1429357 - DNA, 15 bp, Homo sapiens
agctgccccaaggct

SEQ ID NO: 1429358 - DNA, 15 bp, Homo sapiens
cagctgccccaaggc

SEQ ID NO: 1429359 - DNA, 15 bp, Homo sapiens
gcagctgccccaagg

SEQ ID NO: 1429360 - DNA, 15 bp, Homo sapiens
ggcagctgccccaag

SEQ ID NO: 1429361 - DNA, 15 bp, Homo sapiens
cggcagctgccccaa

SEQ ID NO: 1429362 - DNA, 15 bp, Homo sapiens
ccggcagctgcccca

SEQ ID NO: 1429363 - DNA, 15 bp, Homo sapiens
cccggcagctgcccc

SEQ ID NO: 1429364 - DNA, 15 bp, Homo sapiens
gcccggcagctgccc

SEQ ID NO: 1429365 - DNA, 15 bp, Homo sapiens
cgcccggcagctgcc

SEQ ID NO: 1429366 - DNA, 15 bp, Homo sapiens
tcgcccggcagctgc

SEQ ID NO: 1429367 - DNA, 15 bp, Homo sapiens
ctcgcccggcagctg

SEQ ID NO: 1429368 - DNA, 15 bp, Homo sapiens
actcgcccggcagct

SEQ ID NO: 1429369 - DNA, 15 bp, Homo sapiens
gactcgcccggcagc

SEQ ID NO: 1429370 - DNA, 15 bp, Homo sapiens
tgactcgcccggcag

SEQ ID NO: 1429371 - DNA, 15 bp, Homo sapiens
ctgactcgcccggca

SEQ ID NO: 1429372 - DNA, 15 bp, Homo sapiens
gctgactcgcccggc

SEQ ID NO: 1429373 - DNA, 15 bp, Homo sapiens
cgctgactcgcccgg

SEQ ID NO: 1429374 - DNA, 15 bp, Homo sapiens
ccgctgactcgcccg

SEQ ID NO: 1429375 - DNA, 15 bp, Homo sapiens
tccgctgactcgccc

SEQ ID NO: 1429376 - DNA, 15 bp, Homo sapiens
ctccgctgactcgcc

SEQ ID NO: 1429377 - DNA, 15 bp, Homo sapiens
actccgctgactcgc

SEQ ID NO: 1429378 - DNA, 15 bp, Homo sapiens
tactccgctgactcg

SEQ ID NO: 1429379 - DNA, 15 bp, Homo sapiens
ctactccgctgactc

SEQ ID NO: 1429380 - DNA, 15 bp, Homo sapiens
gctactccgctgact

SEQ ID NO: 1429381 - DNA, 15 bp, Homo sapiens
cgctactccgctgac

SEQ ID NO: 1429382 - DNA, 15 bp, Homo sapiens
ccgctactccgctga

SEQ ID NO: 1429383 - DNA, 15 bp, Homo sapiens
gccgctactccgctg

SEQ ID NO: 1429384 - DNA, 15 bp, Homo sapiens
ggccgctactccgct

SEQ ID NO: 1429385 - DNA, 15 bp, Homo sapiens
tggccgctactccgc

SEQ ID NO: 1429386 - DNA, 15 bp, Homo sapiens
ctggccgctactccg

SEQ ID NO: 1429387 - DNA, 15 bp, Homo sapiens
gctggccgctactcc

SEQ ID NO: 1429388 - DNA, 15 bp, Homo sapiens
cgctggccgctactc

SEQ ID NO: 1429389 - DNA, 15 bp, Homo sapiens
ccgctggccgctact

SEQ ID NO: 1429390 - DNA, 15 bp, Homo sapiens
cccgctggccgctac

SEQ ID NO: 1429391 - DNA, 15 bp, Homo sapiens
gcccgctggccgcta

SEQ ID NO: 1429392 - DNA, 15 bp, Homo sapiens
cgcccgctggccgct

SEQ ID NO: 1429393 - DNA, 15 bp, Homo sapiens
tcgcccgctggccgc

SEQ ID NO: 1429394 - DNA, 15 bp, Homo sapiens
atcgcccgctggccg

SEQ ID NO: 1429395 - DNA, 15 bp, Homo sapiens
catcgcccgctggcc

SEQ ID NO: 1429396 - DNA, 15 bp, Homo sapiens
ccatcgcccgctggc

SEQ ID NO: 1429397 - DNA, 15 bp, Homo sapiens
tccatcgcccgctgg

SEQ ID NO: 1429398 - DNA, 15 bp, Homo sapiens
ctccatcgcccgctg

SEQ ID NO: 1429399 - DNA, 15 bp, Homo sapiens
tctccatcgcccgct

SEQ ID NO: 1429400 - DNA, 15 bp, Homo sapiens
gtctccatcgcccgc

SEQ ID NO: 1429401 - DNA, 15 bp, Homo sapiens
tgtctccatcgcccg

SEQ ID NO: 1429402 - DNA, 15 bp, Homo sapiens
ctgtctccatcgccc

SEQ ID NO: 1429403 - DNA, 15 bp, Homo sapiens
tctgtctccatcgcc

SEQ ID NO: 1429404 - DNA, 15 bp, Homo sapiens
ctctgtctccatcgc

SEQ ID NO: 1429405 - DNA, 15 bp, Homo sapiens
tctctgtctccatcg

SEQ ID NO: 1429406 - DNA, 15 bp, Homo sapiens
gtctctctgtctcca

SEQ ID NO: 1429407 - DNA, 15 bp, Homo sapiens
tgtctctctgtctcc

SEQ ID NO: 1429408 - DNA, 15 bp, Homo sapiens
gtgtctctctgtctc

SEQ ID NO: 1429409 - DNA, 15 bp, Homo sapiens
ggtgtctctctgtct

SEQ ID NO: 1429410 - DNA, 15 bp, Homo sapiens
gggtgtctctctgtc

SEQ ID NO: 1429411 - DNA, 15 bp, Homo sapiens
cgggtgtctctctgt

SEQ ID NO: 1429412 - DNA, 15 bp, Homo sapiens
tcgggtgtctctctg

SEQ ID NO: 1429413 - DNA, 15 bp, Homo sapiens
gtcgggtgtctctct

SEQ ID NO: 1429414 - DNA, 15 bp, Homo sapiens
cgtcgggtgtctctc

SEQ ID NO: 1429415 - DNA, 15 bp, Homo sapiens
tcgtcgggtgtctct

SEQ ID NO: 1429416 - DNA, 15 bp, Homo sapiens
ctcgtcgggtgtctc

SEQ ID NO: 1429417 - DNA, 15 bp, Homo sapiens
tctcgtcgggtgtct

SEQ ID NO: 1429418 - DNA, 15 bp, Homo sapiens
ctctcgtcgggtgtc

SEQ ID NO: 1429419 - DNA, 15 bp, Homo sapiens
cctctcgtcgggtgt

SEQ ID NO: 1429420 - DNA, 15 bp, Homo sapiens
tcctctcgtcgggtg

SEQ ID NO: 1429421 - DNA, 15 bp, Homo sapiens
ctcctctcgtcgggt

SEQ ID NO: 1429422 - DNA, 15 bp, Homo sapiens
cctcctctcgtcggg

SEQ ID NO: 1429423 - DNA, 15 bp, Homo sapiens
gcctcctctcgtcgg

SEQ ID NO: 1429424 - DNA, 15 bp, Homo sapiens
cgcctcctctcgtcg

SEQ ID NO: 1429425 - DNA, 15 bp, Homo sapiens
ccgcctcctctcgtc

SEQ ID NO: 1429426 - DNA, 15 bp, Homo sapiens
cccgcctcctctcgt

SEQ ID NO: 1429427 - DNA, 15 bp, Homo sapiens
ccccgcctcctctcg

SEQ ID NO: 1429428 - DNA, 15 bp, Homo sapiens
accccgcctcctctc

SEQ ID NO: 1429429 - DNA, 15 bp, Homo sapiens
caccccgcctcctct

SEQ ID NO: 1429430 - DNA, 15 bp, Homo sapiens
ccaccccgcctcctc

SEQ ID NO: 1429431 - DNA, 15 bp, Homo sapiens
cccaccccgcctcct

SEQ ID NO: 1429432 - DNA, 15 bp, Homo sapiens
ccccaccccgcctcc

SEQ ID NO: 1429433 - DNA, 15 bp, Homo sapiens
cccccaccccgcctc

SEQ ID NO: 1429434 - DNA, 15 bp, Homo sapiens
tcccccaccccgcct

SEQ ID NO: 1429435 - DNA, 15 bp, Homo sapiens
ctcccccaccccgcc

SEQ ID NO: 1429436 - DNA, 15 bp, Homo sapiens
cctcccccaccccgc

SEQ ID NO: 1429437 - DNA, 15 bp, Homo sapiens
gcctcccccaccccg

SEQ ID NO: 1429438 - DNA, 15 bp, Homo sapiens
cgcctcccccacccc

SEQ ID NO: 1429439 - DNA, 15 bp, Homo sapiens
ccgcctcccccaccc

SEQ ID NO: 1429440 - DNA, 15 bp, Homo sapiens
cccgcctcccccacc

SEQ ID NO: 1429441 - DNA, 15 bp, Homo sapiens
ccccgcctcccccac

SEQ ID NO: 1429442 - DNA, 15 bp, Homo sapiens
tccccgcctccccca

SEQ ID NO: 1429443 - DNA, 15 bp, Homo sapiens
ctccccgcctccccc

SEQ ID NO: 1429444 - DNA, 15 bp, Homo sapiens
tctccccgcctcccc

SEQ ID NO: 1429445 - DNA, 15 bp, Homo sapiens
ctctccccgcctccc

SEQ ID NO: 1429446 - DNA, 15 bp, Homo sapiens
actctccccgcctcc

SEQ ID NO: 1429447 - DNA, 15 bp, Homo sapiens
cactctccccgcctc

SEQ ID NO: 1429448 - DNA, 15 bp, Homo sapiens
gcactctccccgcct

SEQ ID NO: 1429449 - DNA, 15 bp, Homo sapiens
cgcactctccccgcc

SEQ ID NO: 1429450 - DNA, 15 bp, Homo sapiens
ccgcactctccccgc

SEQ ID NO: 1429451 - DNA, 15 bp, Homo sapiens
cccgcactctccccg

SEQ ID NO: 1429452 - DNA, 15 bp, Homo sapiens
ccccgcactctcccc

SEQ ID NO: 1429453 - DNA, 15 bp, Homo sapiens
cccccgcactctccc

SEQ ID NO: 1429454 - DNA, 15 bp, Homo sapiens
gcccccgcactctcc

SEQ ID NO: 1429455 - DNA, 15 bp, Homo sapiens
cgcccccgcactctc

SEQ ID NO: 1429456 - DNA, 15 bp, Homo sapiens
ccgcccccgcactct

SEQ ID NO: 1429457 - DNA, 15 bp, Homo sapiens
tccgcccccgcactc

SEQ ID NO: 1429458 - DNA, 15 bp, Homo sapiens
ctccgcccccgcact

SEQ ID NO: 1429459 - DNA, 15 bp, Homo sapiens
cctccgcccccgcac

SEQ ID NO: 1429460 - DNA, 15 bp, Homo sapiens
gcctccgcccccgca

SEQ ID NO: 1429461 - DNA, 15 bp, Homo sapiens
agcctccgcccccgc

SEQ ID NO: 1429462 - DNA, 15 bp, Homo sapiens
cagcctccgcccccg

SEQ ID NO: 1429463 - DNA, 15 bp, Homo sapiens
ccagcctccgccccc

SEQ ID NO: 1429464 - DNA, 15 bp, Homo sapiens
gccagcctccgcccc

SEQ ID NO: 1429465 - DNA, 15 bp, Homo sapiens
tgccagcctccgccc

SEQ ID NO: 1429466 - DNA, 15 bp, Homo sapiens
ctgccagcctccgcc

SEQ ID NO: 1429467 - DNA, 15 bp, Homo sapiens
cctgccagcctccgc

SEQ ID NO: 1429468 - DNA, 15 bp, Homo sapiens
ccctgccagcctccg

SEQ ID NO: 1429469 - DNA, 15 bp, Homo sapiens
ccccctgccagcctc

SEQ ID NO: 1429470 - DNA, 15 bp, Homo sapiens
gccccctgccagcct

SEQ ID NO: 1429471 - DNA, 15 bp, Homo sapiens
cgccccctgccagcc

SEQ ID NO: 1429472 - DNA, 15 bp, Homo sapiens
gcgccccctgccagc

SEQ ID NO: 1429473 - DNA, 15 bp, Homo sapiens
agcgccccctgccag

SEQ ID NO: 1429474 - DNA, 15 bp, Homo sapiens
cagcgccccctgcca

SEQ ID NO: 1429475 - DNA, 15 bp, Homo sapiens
ccagcgccccctgcc

SEQ ID NO: 1429476 - DNA, 15 bp, Homo sapiens
tccagcgccccctgc

SEQ ID NO: 1429477 - DNA, 15 bp, Homo sapiens
ttccagcgccccctg

SEQ ID NO: 1429478 - DNA, 15 bp, Homo sapiens
cttccagcgccccct

SEQ ID NO: 1429479 - DNA, 15 bp, Homo sapiens
gcttccagcgccccc

SEQ ID NO: 1429480 - DNA, 15 bp, Homo sapiens
agcttccagcgcccc

SEQ ID NO: 1429481 - DNA, 15 bp, Homo sapiens
cagcttccagcgccc

SEQ ID NO: 1429482 - DNA, 15 bp, Homo sapiens
ccagcttccagcgcc

SEQ ID NO: 1429483 - DNA, 15 bp, Homo sapiens
tccagcttccagcgc

SEQ ID NO: 1429484 - DNA, 15 bp, Homo sapiens
ctccagcttccagcg

SEQ ID NO: 1429485 - DNA, 15 bp, Homo sapiens
gctccagcttccagc

SEQ ID NO: 1429486 - DNA, 15 bp, Homo sapiens
cgctccagcttccag

SEQ ID NO: 1429487 - DNA, 15 bp, Homo sapiens
ccgctccagcttcca

SEQ ID NO: 1429488 - DNA, 15 bp, Homo sapiens
accgctccagcttcc

SEQ ID NO: 1429489 - DNA, 15 bp, Homo sapiens
gaccgctccagcttc

SEQ ID NO: 1429490 - DNA, 15 bp, Homo sapiens
ggaccgctccagctt

SEQ ID NO: 1429491 - DNA, 15 bp, Homo sapiens
cggaccgctccagct

SEQ ID NO: 1429492 - DNA, 15 bp, Homo sapiens
acggaccgctccagc

SEQ ID NO: 1429493 - DNA, 15 bp, Homo sapiens
cacggaccgctccag

SEQ ID NO: 1429494 - DNA, 15 bp, Homo sapiens
gcacggaccgctcca

SEQ ID NO: 1429495 - DNA, 15 bp, Homo sapiens
cgcacggaccgctcc

SEQ ID NO: 1429496 - DNA, 15 bp, Homo sapiens
gcgcacggaccgctc

SEQ ID NO: 1429497 - DNA, 15 bp, Homo sapiens
agcgcacggaccgct

SEQ ID NO: 1429498 - DNA, 15 bp, Homo sapiens
gagcgcacggaccgc

SEQ ID NO: 1429499 - DNA, 15 bp, Homo sapiens
ggagcgcacggaccg

SEQ ID NO: 1429500 - DNA, 15 bp, Homo sapiens
gggagcgcacggacc

SEQ ID NO: 1429501 - DNA, 15 bp, Homo sapiens
ggggagcgcacggac

SEQ ID NO: 1429502 - DNA, 15 bp, Homo sapiens
cggggagcgcacgga

SEQ ID NO: 1429503 - DNA, 15 bp, Homo sapiens
gcggggagcgcacgg

SEQ ID NO: 1429504 - DNA, 15 bp, Homo sapiens
cgcggggagcgcacg

SEQ ID NO: 1429505 - DNA, 15 bp, Homo sapiens
gcgcggggagcgcac

SEQ ID NO: 1429506 - DNA, 15 bp, Homo sapiens
ggcgcggggagcgca

SEQ ID NO: 1429507 - DNA, 15 bp, Homo sapiens
gggcgcggggagcgc

SEQ ID NO: 1429508 - DNA, 15 bp, Homo sapiens
cgggcgcggggagcg

SEQ ID NO: 1429509 - DNA, 15 bp, Homo sapiens
tcgggcgcggggagc

SEQ ID NO: 1429510 - DNA, 15 bp, Homo sapiens
ctcgggcgcggggag

SEQ ID NO: 1429511 - DNA, 15 bp, Homo sapiens
cctcgggcgcgggga

SEQ ID NO: 1429512 - DNA, 15 bp, Homo sapiens
ccctcgggcgcgggg

SEQ ID NO: 1429513 - DNA, 15 bp, Homo sapiens
accctcgggcgcggg

SEQ ID NO: 1429514 - DNA, 15 bp, Homo sapiens
caccctcgggcgcgg

SEQ ID NO: 1429515 - DNA, 15 bp, Homo sapiens
gcaccctcgggcgcg

SEQ ID NO: 1429516 - DNA, 15 bp, Homo sapiens
tgcaccctcgggcgc

SEQ ID NO: 1429517 - DNA, 15 bp, Homo sapiens
ctgcaccctcgggcg

SEQ ID NO: 1429518 - DNA, 15 bp, Homo sapiens
cctgcaccctcgggc

SEQ ID NO: 1429519 - DNA, 15 bp, Homo sapiens
tcctgcaccctcggg

SEQ ID NO: 1429520 - DNA, 15 bp, Homo sapiens
ctcctgcaccctcgg

SEQ ID NO: 1429521 - DNA, 15 bp, Homo sapiens
cctcctgcaccctcg

SEQ ID NO: 1429522 - DNA, 15 bp, Homo sapiens
gcctcctgcaccctc

SEQ ID NO: 1429523 - DNA, 15 bp, Homo sapiens
agcctcctgcaccct

SEQ ID NO: 1429524 - DNA, 15 bp, Homo sapiens
gagcctcctgcaccc

SEQ ID NO: 1429525 - DNA, 15 bp, Homo sapiens
agagcctcctgcacc

SEQ ID NO: 1429526 - DNA, 15 bp, Homo sapiens
cagagcctcctgcac

SEQ ID NO: 1429527 - DNA, 15 bp, Homo sapiens
tcagagcctcctgca

SEQ ID NO: 1429528 - DNA, 15 bp, Homo sapiens
ttcagagcctcctgc

SEQ ID NO: 1429529 - DNA, 15 bp, Homo sapiens
cttcagagcctcctg

SEQ ID NO: 1429530 - DNA, 15 bp, Homo sapiens
gcttcagagcctcct

SEQ ID NO: 1429531 - DNA, 15 bp, Homo sapiens
cgcttcagagcctcc

SEQ ID NO: 1429532 - DNA, 15 bp, Homo sapiens
ccgcttcagagcctc

SEQ ID NO: 1429533 - DNA, 15 bp, Homo sapiens
gccgcttcagagcct

SEQ ID NO: 1429534 - DNA, 15 bp, Homo sapiens
agccgcttcagagcc

SEQ ID NO: 1429535 - DNA, 15 bp, Homo sapiens
cagccgcttcagagc

SEQ ID NO: 1429536 - DNA, 15 bp, Homo sapiens
gcagccgcttcagag

SEQ ID NO: 1429537 - DNA, 15 bp, Homo sapiens
agcagccgcttcaga

SEQ ID NO: 1429538 - DNA, 15 bp, Homo sapiens
cagcagccgcttcag

SEQ ID NO: 1429539 - DNA, 15 bp, Homo sapiens
gcagcagccgcttca

SEQ ID NO: 1429540 - DNA, 15 bp, Homo sapiens
tgcagcagccgcttc

SEQ ID NO: 1429541 - DNA, 15 bp, Homo sapiens
gtgcagcagccgctt

SEQ ID NO: 1429542 - DNA, 15 bp, Homo sapiens
ggtgcagcagccgct

SEQ ID NO: 1429543 - DNA, 15 bp, Homo sapiens
cggtgcagcagccgc

SEQ ID NO: 1429544 - DNA, 15 bp, Homo sapiens
gcggtgcagcagccg

SEQ ID NO: 1429545 - DNA, 15 bp, Homo sapiens
cgcggtgcagcagcc

SEQ ID NO: 1429546 - DNA, 15 bp, Homo sapiens
ccgcggtgcagcagc

SEQ ID NO: 1429547 - DNA, 15 bp, Homo sapiens
cccgcggtgcagcag

SEQ ID NO: 1429548 - DNA, 15 bp, Homo sapiens
ccccgcggtgcagca

SEQ ID NO: 1429549 - DNA, 15 bp, Homo sapiens
gccccgcggtgcagc

SEQ ID NO: 1429550 - DNA, 15 bp, Homo sapiens
ggccccgcggtgcag

SEQ ID NO: 1429551 - DNA, 15 bp, Homo sapiens
gggccccgcggtgca

SEQ ID NO: 1429552 - DNA, 15 bp, Homo sapiens
tgggccccgcggtgc

SEQ ID NO: 1429553 - DNA, 15 bp, Homo sapiens
ctgggccccgcggtg

SEQ ID NO: 1429554 - DNA, 15 bp, Homo sapiens
cctgggccccgcggt

SEQ ID NO: 1429555 - DNA, 15 bp, Homo sapiens
gcctgggccccgcgg

SEQ ID NO: 1429556 - DNA, 15 bp, Homo sapiens
cgcctgggccccgcg

SEQ ID NO: 1429557 - DNA, 15 bp, Homo sapiens
ccgcctgggccccgc

SEQ ID NO: 1429558 - DNA, 15 bp, Homo sapiens
gccgcctgggccccg

SEQ ID NO: 1429559 - DNA, 15 bp, Homo sapiens
cgccgcctgggcccc

SEQ ID NO: 1429560 - DNA, 15 bp, Homo sapiens
ccgccgcctgggccc

SEQ ID NO: 1429561 - DNA, 15 bp, Homo sapiens
gccgccgcctgggcc

SEQ ID NO: 1429562 - DNA, 15 bp, Homo sapiens
agccgccgcctgggc

SEQ ID NO: 1429563 - DNA, 15 bp, Homo sapiens
cagccgccgcctggg

SEQ ID NO: 1429564 - DNA, 15 bp, Homo sapiens
ccagccgccgcctgg

SEQ ID NO: 1429565 - DNA, 15 bp, Homo sapiens
cccagccgccgcctg

SEQ ID NO: 1429566 - DNA, 15 bp, Homo sapiens
ccccagccgccgcct

SEQ ID NO: 1429567 - DNA, 15 bp, Homo sapiens
cccccagccgccgcc

SEQ ID NO: 1429568 - DNA, 15 bp, Homo sapiens
ccccccagccgccgc

SEQ ID NO: 1429569 - DNA, 15 bp, Homo sapiens
gccccccagccgccg

SEQ ID NO: 1429570 - DNA, 15 bp, Homo sapiens
agccccccagccgcc

SEQ ID NO: 1429571 - DNA, 15 bp, Homo sapiens
cagccccccagccgc

SEQ ID NO: 1429572 - DNA, 15 bp, Homo sapiens
ccagccccccagccg

SEQ ID NO: 1429573 - DNA, 15 bp, Homo sapiens
cccagccccccagcc

SEQ ID NO: 1429574 - DNA, 15 bp, Homo sapiens
ccccagccccccagc

SEQ ID NO: 1429575 - DNA, 15 bp, Homo sapiens
cccccagccccccag

SEQ ID NO: 1429576 - DNA, 15 bp, Homo sapiens
ccccccagcccccca

SEQ ID NO: 1429577 - DNA, 15 bp, Homo sapiens
gccccccagcccccc

SEQ ID NO: 1429578 - DNA, 15 bp, Homo sapiens
cgccccccagccccc

SEQ ID NO: 1429579 - DNA, 15 bp, Homo sapiens
gcgccccccagcccc

SEQ ID NO: 1429580 - DNA, 15 bp, Homo sapiens
agcgccccccagccc

SEQ ID NO: 1429581 - DNA, 15 bp, Homo sapiens
cagcgccccccagcc

SEQ ID NO: 1429582 - DNA, 15 bp, Homo sapiens
gcagcgccccccagc

SEQ ID NO: 1429583 - DNA, 15 bp, Homo sapiens
ggcagcgccccccag

SEQ ID NO: 1429584 - DNA, 15 bp, Homo sapiens
cggcagcgcccccca

SEQ ID NO: 1429585 - DNA, 15 bp, Homo sapiens
gcggcagcgcccccc

SEQ ID NO: 1429586 - DNA, 15 bp, Homo sapiens
ggcggcagcgccccc

SEQ ID NO: 1429587 - DNA, 15 bp, Homo sapiens
cggcggcagcgcccc

SEQ ID NO: 1429588 - DNA, 15 bp, Homo sapiens
gcggcggcagcgccc

SEQ ID NO: 1429589 - DNA, 15 bp, Homo sapiens
ggcggcggcagcgcc

SEQ ID NO: 1429590 - DNA, 15 bp, Homo sapiens
cggcggcggcagcgc

SEQ ID NO: 1429591 - DNA, 15 bp, Homo sapiens
gcggcggcggcagcg

SEQ ID NO: 1429592 - DNA, 15 bp, Homo sapiens
ccggcggcggcggcg

SEQ ID NO: 1429593 - DNA, 15 bp, Homo sapiens
cccggcggcggcggc

SEQ ID NO: 1429594 - DNA, 15 bp, Homo sapiens
ccccggcggcggcgg

SEQ ID NO: 1429595 - DNA, 15 bp, Homo sapiens
cccccggcggcggcg

SEQ ID NO: 1429596 - DNA, 15 bp, Homo sapiens
gcccccggcggcggc

SEQ ID NO: 1429597 - DNA, 15 bp, Homo sapiens
cgcccccggcggcgg

SEQ ID NO: 1429598 - DNA, 15 bp, Homo sapiens
acgcccccggcggcg

SEQ ID NO: 1429599 - DNA, 15 bp, Homo sapiens
gacgcccccggcggc

SEQ ID NO: 1429600 - DNA, 15 bp, Homo sapiens
cgacgcccccggcgg

SEQ ID NO: 1429601 - DNA, 15 bp, Homo sapiens
gcgacgcccccggcg

SEQ ID NO: 1429602 - DNA, 15 bp, Homo sapiens
agcgacgcccccggc

SEQ ID NO: 1429603 - DNA, 15 bp, Homo sapiens
cagcgacgcccccgg

SEQ ID NO: 1429604 - DNA, 15 bp, Homo sapiens
ccagcgacgcccccg

SEQ ID NO: 1429605 - DNA, 15 bp, Homo sapiens
gccagcgacgccccc

SEQ ID NO: 1429606 - DNA, 15 bp, Homo sapiens
ggccagcgacgcccc

SEQ ID NO: 1429607 - DNA, 15 bp, Homo sapiens
aggccagcgacgccc

SEQ ID NO: 1429608 - DNA, 15 bp, Homo sapiens
gaggccagcgacgcc

SEQ ID NO: 1429609 - DNA, 15 bp, Homo sapiens
cgaggccagcgacgc

SEQ ID NO: 1429610 - DNA, 15 bp, Homo sapiens
ccgaggccagcgacg

SEQ ID NO: 1429611 - DNA, 15 bp, Homo sapiens
gccgaggccagcgac

SEQ ID NO: 1429612 - DNA, 15 bp, Homo sapiens
ggccgaggccagcga

SEQ ID NO: 1429613 - DNA, 15 bp, Homo sapiens
gggccgaggccagcg

SEQ ID NO: 1429614 - DNA, 15 bp, Homo sapiens
ggggccgaggccagc

SEQ ID NO: 1429615 - DNA, 15 bp, Homo sapiens
aggggccgaggccag

SEQ ID NO: 1429616 - DNA, 15 bp, Homo sapiens
aaggggccgaggcca

SEQ ID NO: 1429617 - DNA, 15 bp, Homo sapiens
aaaggggccgaggcc

SEQ ID NO: 1429618 - DNA, 15 bp, Homo sapiens
caaaggggccgaggc

SEQ ID NO: 1429619 - DNA, 15 bp, Homo sapiens
acaaaggggccgagg

SEQ ID NO: 1429620 - DNA, 15 bp, Homo sapiens
aacaaaggggccgag

SEQ ID NO: 1429621 - DNA, 15 bp, Homo sapiens
gaacaaaggggccga

SEQ ID NO: 1429622 - DNA, 15 bp, Homo sapiens
agaacaaaggggccg

SEQ ID NO: 1429623 - DNA, 15 bp, Homo sapiens
gagaacaaaggggcc

SEQ ID NO: 1429624 - DNA, 15 bp, Homo sapiens
cgagaacaaaggggc

SEQ ID NO: 1429625 - DNA, 15 bp, Homo sapiens
gcgagaacaaagggg

SEQ ID NO: 1429626 - DNA, 15 bp, Homo sapiens
cgcgagaacaaaggg

SEQ ID NO: 1429627 - DNA, 15 bp, Homo sapiens
gcgcgagaacaaagg

SEQ ID NO: 1429628 - DNA, 15 bp, Homo sapiens
cgcgcgagaacaaag

SEQ ID NO: 1429629 - DNA, 15 bp, Homo sapiens
gcgcgcgagaacaaa

SEQ ID NO: 1429630 - DNA, 15 bp, Homo sapiens
agcgcgcgagaacaa

SEQ ID NO: 1429631 - DNA, 15 bp, Homo sapiens
gagcgcgcgagaaca

SEQ ID NO: 1429632 - DNA, 15 bp, Homo sapiens
ggagcgcgcgagaac

SEQ ID NO: 1429633 - DNA, 15 bp, Homo sapiens
gggagcgcgcgagaa

SEQ ID NO: 1429634 - DNA, 15 bp, Homo sapiens
ggggagcgcgcgaga

SEQ ID NO: 1429635 - DNA, 15 bp, Homo sapiens
gggggagcgcgcgag

SEQ ID NO: 1429636 - DNA, 15 bp, Homo sapiens
agggggagcgcgcga

SEQ ID NO: 1429637 - DNA, 15 bp, Homo sapiens
gagggggagcgcgcg

SEQ ID NO: 1429638 - DNA, 15 bp, Homo sapiens
cgagggggagcgcgc

SEQ ID NO: 1429639 - DNA, 15 bp, Homo sapiens
gcgagggggagcgcg

SEQ ID NO: 1429640 - DNA, 15 bp, Homo sapiens
ggcgagggggagcgc

SEQ ID NO: 1429641 - DNA, 15 bp, Homo sapiens
cggcgagggggagcg

SEQ ID NO: 1429642 - DNA, 15 bp, Homo sapiens
gcggcgagggggagc

SEQ ID NO: 1429643 - DNA, 15 bp, Homo sapiens
ggcggcgagggggag

SEQ ID NO: 1429644 - DNA, 15 bp, Homo sapiens
gggcggcgaggggga

SEQ ID NO: 1429645 - DNA, 15 bp, Homo sapiens
tgggcggcgaggggg

SEQ ID NO: 1429646 - DNA, 15 bp, Homo sapiens
gtgggcggcgagggg

SEQ ID NO: 1429647 - DNA, 15 bp, Homo sapiens
agtgggcggcgaggg

SEQ ID NO: 1429648 - DNA, 15 bp, Homo sapiens
gagtgggcggcgagg

SEQ ID NO: 1429649 - DNA, 15 bp, Homo sapiens
ggagtgggcggcgag

SEQ ID NO: 1429650 - DNA, 15 bp, Homo sapiens
gggagtgggcggcga

SEQ ID NO: 1429651 - DNA, 15 bp, Homo sapiens
ggggagtgggcggcg

SEQ ID NO: 1429652 - DNA, 15 bp, Homo sapiens
aggggagtgggcggc

SEQ ID NO: 1429653 - DNA, 15 bp, Homo sapiens
caggggagtgggcgg

SEQ ID NO: 1429654 - DNA, 15 bp, Homo sapiens
gcaggggagtgggcg

SEQ ID NO: 1429655 - DNA, 15 bp, Homo sapiens
agcaggggagtgggc

SEQ ID NO: 1429656 - DNA, 15 bp, Homo sapiens
cagcaggggagtggg

SEQ ID NO: 1429657 - DNA, 15 bp, Homo sapiens
acagcaggggagtgg

SEQ ID NO: 1429658 - DNA, 15 bp, Homo sapiens
gacagcaggggagtg

SEQ ID NO: 1429659 - DNA, 15 bp, Homo sapiens
cgacagcaggggagt

SEQ ID NO: 1429660 - DNA, 15 bp, Homo sapiens
gcgacagcaggggag

SEQ ID NO: 1429661 - DNA, 15 bp, Homo sapiens
cgcgacagcagggga

SEQ ID NO: 1429662 - DNA, 15 bp, Homo sapiens
gcgcgacagcagggg

SEQ ID NO: 1429663 - DNA, 15 bp, Homo sapiens
cgcgcgacagcaggg

SEQ ID NO: 1429664 - DNA, 15 bp, Homo sapiens
ccgcgcgacagcagg

SEQ ID NO: 1429665 - DNA, 15 bp, Homo sapiens
gccgcgcgacagcag

SEQ ID NO: 1429666 - DNA, 15 bp, Homo sapiens
cgccgcgcgacagca

SEQ ID NO: 1429667 - DNA, 15 bp, Homo sapiens
ccgccgcgcgacagc

SEQ ID NO: 1429668 - DNA, 15 bp, Homo sapiens
gccgccgcgcgacag

SEQ ID NO: 1429669 - DNA, 15 bp, Homo sapiens
cgccgccgcgcgaca

SEQ ID NO: 1429670 - DNA, 15 bp, Homo sapiens
ccgccgccgcgcgac

SEQ ID NO: 1429671 - DNA, 15 bp, Homo sapiens
gccgccgccgcgcga

SEQ ID NO: 1429672 - DNA, 15 bp, Homo sapiens
cgccgccgccgcgcg

SEQ ID NO: 1429673 - DNA, 15 bp, Homo sapiens
ccgccgccgccgcgc

SEQ ID NO: 1429674 - DNA, 15 bp, Homo sapiens
accgccgccgccgcg

SEQ ID NO: 1429675 - DNA, 15 bp, Homo sapiens
caccgccgccgccgc

SEQ ID NO: 1429676 - DNA, 15 bp, Homo sapiens
ccaccgccgccgccg

SEQ ID NO: 1429677 - DNA, 15 bp, Homo sapiens
gccaccgccgccgcc

SEQ ID NO: 1429678 - DNA, 15 bp, Homo sapiens
cgccaccgccgccgc

SEQ ID NO: 1429679 - DNA, 15 bp, Homo sapiens
ccgccaccgccgccg

SEQ ID NO: 1429680 - DNA, 15 bp, Homo sapiens
gccgccaccgccgcc

SEQ ID NO: 1429681 - DNA, 15 bp, Homo sapiens
cgccgccaccgccgc

SEQ ID NO: 1429682 - DNA, 15 bp, Homo sapiens
ccgccgccaccgccg

SEQ ID NO: 1429683 - DNA, 15 bp, Homo sapiens
gccgccgccaccgcc

SEQ ID NO: 1429684 - DNA, 15 bp, Homo sapiens
cgccgccgccaccgc

SEQ ID NO: 1429685 - DNA, 15 bp, Homo sapiens
ccgccgccgccaccg

SEQ ID NO: 1429686 - DNA, 15 bp, Homo sapiens
gccgccgccgccacc

SEQ ID NO: 1429687 - DNA, 15 bp, Homo sapiens
agccgccgccgccac

SEQ ID NO: 1429688 - DNA, 15 bp, Homo sapiens
gagccgccgccgcca

SEQ ID NO: 1429689 - DNA, 15 bp, Homo sapiens
ggagccgccgccgcc

SEQ ID NO: 1429690 - DNA, 15 bp, Homo sapiens
aggagccgccgccgc

SEQ ID NO: 1429691 - DNA, 15 bp, Homo sapiens
gaggagccgccgccg

SEQ ID NO: 1429692 - DNA, 15 bp, Homo sapiens
ggaggagccgccgcc

SEQ ID NO: 1429693 - DNA, 15 bp, Homo sapiens
gggaggagccgccgc

SEQ ID NO: 1429694 - DNA, 15 bp, Homo sapiens
cgggaggagccgccg

SEQ ID NO: 1429695 - DNA, 15 bp, Homo sapiens
gcgggaggagccgcc

SEQ ID NO: 1429696 - DNA, 15 bp, Homo sapiens
ggcgggaggagccgc

SEQ ID NO: 1429697 - DNA, 15 bp, Homo sapiens
gggcgggaggagccg

SEQ ID NO: 1429698 - DNA, 15 bp, Homo sapiens
cgggcgggaggagcc

SEQ ID NO: 1429699 - DNA, 15 bp, Homo sapiens
tcgggcgggaggagc

SEQ ID NO: 1429700 - DNA, 15 bp, Homo sapiens
ctcgggcgggaggag

SEQ ID NO: 1429701 - DNA, 15 bp, Homo sapiens
cctcgggcgggagga

SEQ ID NO: 1429702 - DNA, 15 bp, Homo sapiens
gcctcgggcgggagg

SEQ ID NO: 1429703 - DNA, 15 bp, Homo sapiens
tgcctcgggcgggag

SEQ ID NO: 1429704 - DNA, 15 bp, Homo sapiens
ctgcctcgggcggga

SEQ ID NO: 1429705 - DNA, 15 bp, Homo sapiens
actgcctcgggcggg

SEQ ID NO: 1429706 - DNA, 15 bp, Homo sapiens
gactgcctcgggcgg

SEQ ID NO: 1429707 - DNA, 15 bp, Homo sapiens
cgactgcctcgggcg

SEQ ID NO: 1429708 - DNA, 15 bp, Homo sapiens
ccgactgcctcgggc

SEQ ID NO: 1429709 - DNA, 15 bp, Homo sapiens
cccgactgcctcggg

SEQ ID NO: 1429710 - DNA, 15 bp, Homo sapiens
gcccgactgcctcgg

SEQ ID NO: 1429711 - DNA, 15 bp, Homo sapiens
agcccgactgcctcg

SEQ ID NO: 1429712 - DNA, 15 bp, Homo sapiens
gagcccgactgcctc

SEQ ID NO: 1429713 - DNA, 15 bp, Homo sapiens
cgagcccgactgcct

SEQ ID NO: 1429714 - DNA, 15 bp, Homo sapiens
ccgagcccgactgcc

SEQ ID NO: 1429715 - DNA, 15 bp, Homo sapiens
gccgagcccgactgc

SEQ ID NO: 1429716 - DNA, 15 bp, Homo sapiens
cgccgagcccgactg

SEQ ID NO: 1429717 - DNA, 15 bp, Homo sapiens
gcgccgagcccgact

SEQ ID NO: 1429718 - DNA, 15 bp, Homo sapiens
ggcgccgagcccgac

SEQ ID NO: 1429719 - DNA, 15 bp, Homo sapiens
cggcgccgagcccga

SEQ ID NO: 1429720 - DNA, 15 bp, Homo sapiens
ccggcgccgagcccg

SEQ ID NO: 1429721 - DNA, 15 bp, Homo sapiens
cccggcgccgagccc

SEQ ID NO: 1429722 - DNA, 15 bp, Homo sapiens
ccccggcgccgagcc

SEQ ID NO: 1429723 - DNA, 15 bp, Homo sapiens
cccccggcgccgagc

SEQ ID NO: 1429724 - DNA, 15 bp, Homo sapiens
gcccccggcgccgag

SEQ ID NO: 1429725 - DNA, 15 bp, Homo sapiens
cgcccccggcgccga

SEQ ID NO: 1429726 - DNA, 15 bp, Homo sapiens
ccgcccccggcgccg

SEQ ID NO: 1429727 - DNA, 15 bp, Homo sapiens
cccgcccccggcgcc

SEQ ID NO: 1429728 - DNA, 15 bp, Homo sapiens
tcccgcccccggcgc

SEQ ID NO: 1429729 - DNA, 15 bp, Homo sapiens
ctcccgcccccggcg

SEQ ID NO: 1429730 - DNA, 15 bp, Homo sapiens
cctcccgcccccggc

SEQ ID NO: 1429731 - DNA, 15 bp, Homo sapiens
ccctcccgcccccgg

SEQ ID NO: 1429732 - DNA, 15 bp, Homo sapiens
cccctcccgcccccg

SEQ ID NO: 1429733 - DNA, 15 bp, Homo sapiens
ccccctcccgccccc

SEQ ID NO: 1429734 - DNA, 15 bp, Homo sapiens
gccccctcccgcccc

SEQ ID NO: 1429735 - DNA, 15 bp, Homo sapiens
cgccccctcccgccc

SEQ ID NO: 1429736 - DNA, 15 bp, Homo sapiens
ccgccccctcccgcc

SEQ ID NO: 1429737 - DNA, 15 bp, Homo sapiens
cccgccccctcccgc

SEQ ID NO: 1429738 - DNA, 15 bp, Homo sapiens
ccccgccccctcccg

SEQ ID NO: 1429739 - DNA, 15 bp, Homo sapiens
tccccccgccccctc

SEQ ID NO: 1429740 - DNA, 15 bp, Homo sapiens
ctccccccgccccct

SEQ ID NO: 1429741 - DNA, 15 bp, Homo sapiens
gctccccccgccccc

SEQ ID NO: 1429742 - DNA, 15 bp, Homo sapiens
tgctccccccgcccc

SEQ ID NO: 1429743 - DNA, 15 bp, Homo sapiens
gtgctccccccgccc

SEQ ID NO: 1429744 - DNA, 15 bp, Homo sapiens
cgtgctccccccgcc

SEQ ID NO: 1429745 - DNA, 15 bp, Homo sapiens
gcgtgctccccccgc

SEQ ID NO: 1429746 - DNA, 15 bp, Homo sapiens
ggcgtgctccccccg

SEQ ID NO: 1429747 - DNA, 15 bp, Homo sapiens
tggcgtgctcccccc

SEQ ID NO: 1429748 - DNA, 15 bp, Homo sapiens
ctggcgtgctccccc

SEQ ID NO: 1429749 - DNA, 15 bp, Homo sapiens
gctggcgtgctcccc

SEQ ID NO: 1429750 - DNA, 15 bp, Homo sapiens
ggctggcgtgctccc

SEQ ID NO: 1429751 - DNA, 15 bp, Homo sapiens
cggctggcgtgctcc

SEQ ID NO: 1429752 - DNA, 15 bp, Homo sapiens
gcggctggcgtgctc

SEQ ID NO: 1429753 - DNA, 15 bp, Homo sapiens
ggcggctggcgtgct

SEQ ID NO: 1429754 - DNA, 15 bp, Homo sapiens
cggcggctggcgtgc

SEQ ID NO: 1429755 - DNA, 15 bp, Homo sapiens
tcggcggctggcgtg

SEQ ID NO: 1429756 - DNA, 15 bp, Homo sapiens
ctcggcggctggcgt

SEQ ID NO: 1429757 - DNA, 15 bp, Homo sapiens
tctcggcggctggcg

SEQ ID NO: 1429758 - DNA, 15 bp, Homo sapiens
ctctcggcggctggc

SEQ ID NO: 1429759 - DNA, 15 bp, Homo sapiens
actctcggcggctgg

SEQ ID NO: 1429760 - DNA, 15 bp, Homo sapiens
cactctcggcggctg

SEQ ID NO: 1429761 - DNA, 15 bp, Homo sapiens
ccactctcggcggct

SEQ ID NO: 1429762 - DNA, 15 bp, Homo sapiens
cccactctcggcggc

SEQ ID NO: 1429763 - DNA, 15 bp, Homo sapiens
ccccactctcggcgg

SEQ ID NO: 1429764 - DNA, 15 bp, Homo sapiens
cccccactctcggcg

SEQ ID NO: 1429765 - DNA, 15 bp, Homo sapiens
ccccccactctcggc

SEQ ID NO: 1429766 - DNA, 15 bp, Homo sapiens
gccccccactctcgg

SEQ ID NO: 1429767 - DNA, 15 bp, Homo sapiens
cgccccccactctcg

SEQ ID NO: 1429768 - DNA, 15 bp, Homo sapiens
tcgccccccactctc

SEQ ID NO: 1429769 - DNA, 15 bp, Homo sapiens
atcgccccccactct

SEQ ID NO: 1429770 - DNA, 15 bp, Homo sapiens
catcgccccccactc

SEQ ID NO: 1429771 - DNA, 15 bp, Homo sapiens
ccatcgccccccact

SEQ ID NO: 1429772 - DNA, 15 bp, Homo sapiens
gccatcgccccccac

SEQ ID NO: 1429773 - DNA, 15 bp, Homo sapiens
cgccatcgcccccca

SEQ ID NO: 1429774 - DNA, 15 bp, Homo sapiens
tcgccatcgcccccc

SEQ ID NO: 1429775 - DNA, 15 bp, Homo sapiens
ttcgccatcgccccc

SEQ ID NO: 1429776 - DNA, 15 bp, Homo sapiens
cttcgccatcgcccc

SEQ ID NO: 1429777 - DNA, 15 bp, Homo sapiens
gcttcgccatcgccc

SEQ ID NO: 1429778 - DNA, 15 bp, Homo sapiens
agcttcgccatcgcc

SEQ ID NO: 1429779 - DNA, 15 bp, Homo sapiens
gagcttcgccatcgc

SEQ ID NO: 1429780 - DNA, 15 bp, Homo sapiens
ggagcttcgccatcg

SEQ ID NO: 1429781 - DNA, 15 bp, Homo sapiens
cggagcttcgccatc

SEQ ID NO: 1429782 - DNA, 15 bp, Homo sapiens
ccggagcttcgccat

SEQ ID NO: 1429783 - DNA, 15 bp, Homo sapiens
cccggagcttcgcca

SEQ ID NO: 1429784 - DNA, 15 bp, Homo sapiens
acccggagcttcgcc

SEQ ID NO: 1429785 - DNA, 15 bp, Homo sapiens
cacccggagcttcgc

SEQ ID NO: 1429786 - DNA, 15 bp, Homo sapiens
ccacccggagcttcg

SEQ ID NO: 1429787 - DNA, 15 bp, Homo sapiens
gccacccggagcttc

SEQ ID NO: 1429788 - DNA, 15 bp, Homo sapiens
agccacccggagctt

SEQ ID NO: 1429789 - DNA, 15 bp, Homo sapiens
aagccacccggagct

SEQ ID NO: 1429790 - DNA, 15 bp, Homo sapiens
taagccacccggagc

SEQ ID NO: 1429791 - DNA, 15 bp, Homo sapiens
gtaagccacccggag

SEQ ID NO: 1429792 - DNA, 15 bp, Homo sapiens
cgtaagccacccgga

SEQ ID NO: 1429793 - DNA, 15 bp, Homo sapiens
tcgtaagccacccgg

SEQ ID NO: 1429794 - DNA, 15 bp, Homo sapiens
ctcgtaagccacccg

SEQ ID NO: 1429795 - DNA, 15 bp, Homo sapiens
actcgtaagccaccc

SEQ ID NO: 1429796 - DNA, 15 bp, Homo sapiens
tactcgtaagccacc

SEQ ID NO: 1429797 - DNA, 15 bp, Homo sapiens
gtactcgtaagccac

SEQ ID NO: 1429798 - DNA, 15 bp, Homo sapiens
tgtactcgtaagcca

SEQ ID NO: 1429799 - DNA, 15 bp, Homo sapiens
gtgtactcgtaagcc

SEQ ID NO: 1429800 - DNA, 15 bp, Homo sapiens
cgtgtactcgtaagc

SEQ ID NO: 1429801 - DNA, 15 bp, Homo sapiens
ccgtgtactcgtaag

SEQ ID NO: 1429802 - DNA, 15 bp, Homo sapiens
tccgtgtactcgtaa

SEQ ID NO: 1429803 - DNA, 15 bp, Homo sapiens
ttccgtgtactcgta

SEQ ID NO: 1429804 - DNA, 15 bp, Homo sapiens
cttccgtgtactcgt

SEQ ID NO: 1429805 - DNA, 15 bp, Homo sapiens
gcttccgtgtactcg

SEQ ID NO: 1429806 - DNA, 15 bp, Homo sapiens
ggcttccgtgtactc

SEQ ID NO: 1429807 - DNA, 15 bp, Homo sapiens
cggcttccgtgtact

SEQ ID NO: 1429808 - DNA, 15 bp, Homo sapiens
tcggcttccgtgtac

SEQ ID NO: 1429809 - DNA, 15 bp, Homo sapiens
ctcggcttccgtgta

SEQ ID NO: 1429810 - DNA, 15 bp, Homo sapiens
cctcggcttccgtgt

SEQ ID NO: 1429811 - DNA, 15 bp, Homo sapiens
tcctcggcttccgtg

SEQ ID NO: 1429812 - DNA, 15 bp, Homo sapiens
gtcctcggcttccgt

SEQ ID NO: 1429813 - DNA, 15 bp, Homo sapiens
tgtcctcggcttccg

SEQ ID NO: 1429814 - DNA, 15 bp, Homo sapiens
ttgtcctcggcttcc

SEQ ID NO: 1429815 - DNA, 15 bp, Homo sapiens
cttgtcctcggcttc

SEQ ID NO: 1429816 - DNA, 15 bp, Homo sapiens
tcttgtcctcggctt

SEQ ID NO: 1429817 - DNA, 15 bp, Homo sapiens
ctcttgtcctcggct

SEQ ID NO: 1429818 - DNA, 15 bp, Homo sapiens
gctcttgtcctcggc

SEQ ID NO: 1429819 - DNA, 15 bp, Homo sapiens
tgctcttgtcctcgg

SEQ ID NO: 1429820 - DNA, 15 bp, Homo sapiens
atgctcttgtcctcg

SEQ ID NO: 1429821 - DNA, 15 bp, Homo sapiens
gatgctcttgtcctc

SEQ ID NO: 1429822 - DNA, 15 bp, Homo sapiens
ggatgctcttgtcct

SEQ ID NO: 1429823 - DNA, 15 bp, Homo sapiens
cggatgctcttgtcc

SEQ ID NO: 1429824 - DNA, 15 bp, Homo sapiens
ccggatgctcttgtc

SEQ ID NO: 1429825 - DNA, 15 bp, Homo sapiens
gccggatgctcttgt

SEQ ID NO: 1429826 - DNA, 15 bp, Homo sapiens
agccggatgctcttg

SEQ ID NO: 1429827 - DNA, 15 bp, Homo sapiens
gagccggatgctctt

SEQ ID NO: 1429828 - DNA, 15 bp, Homo sapiens
cgagccggatgctct

SEQ ID NO: 1429829 - DNA, 15 bp, Homo sapiens
ccgagccggatgctc

SEQ ID NO: 1429830 - DNA, 15 bp, Homo sapiens
gccgagccggatgct

SEQ ID NO: 1429831 - DNA, 15 bp, Homo sapiens
agccgagccggatgc

SEQ ID NO: 1429832 - DNA, 15 bp, Homo sapiens
aagccgagccggatg

SEQ ID NO: 1429833 - DNA, 15 bp, Homo sapiens
caagccgagccggat

SEQ ID NO: 1429834 - DNA, 15 bp, Homo sapiens
acaagccgagccgga

SEQ ID NO: 1429835 - DNA, 15 bp, Homo sapiens
aacaagccgagccgg

SEQ ID NO: 1429836 - DNA, 15 bp, Homo sapiens
aaacaagccgagccg

SEQ ID NO: 1429837 - DNA, 15 bp, Homo sapiens
gaaacaagccgagcc

SEQ ID NO: 1429838 - DNA, 15 bp, Homo sapiens
agaaacaagccgagc

SEQ ID NO: 1429839 - DNA, 15 bp, Homo sapiens
gagaaacaagccgag

SEQ ID NO: 1429840 - DNA, 15 bp, Homo sapiens
tgagaaacaagccga

SEQ ID NO: 1429841 - DNA, 15 bp, Homo sapiens
atgagaaacaagccg

SEQ ID NO: 1429842 - DNA, 15 bp, Homo sapiens
gatgagaaacaagcc

SEQ ID NO: 1429843 - DNA, 15 bp, Homo sapiens
tgatgagaaacaagc

SEQ ID NO: 1429844 - DNA, 15 bp, Homo sapiens
atgatgagaaacaag

SEQ ID NO: 1429845 - DNA, 15 bp, Homo sapiens
gatgatgagaaacaa

SEQ ID NO: 1429846 - DNA, 15 bp, Homo sapiens
agatgatgagaaaca

SEQ ID NO: 1429847 - DNA, 15 bp, Homo sapiens
gagatgatgagaaac

SEQ ID NO: 1429848 - DNA, 15 bp, Homo sapiens
ggagatgatgagaaa

SEQ ID NO: 1429849 - DNA, 15 bp, Homo sapiens
cggagatgatgagaa

SEQ ID NO: 1429850 - DNA, 15 bp, Homo sapiens
ccggagatgatgaga

SEQ ID NO: 1429851 - DNA, 15 bp, Homo sapiens
gccggagatgatgag

SEQ ID NO: 1429852 - DNA, 15 bp, Homo sapiens
cgccggagatgatga

SEQ ID NO: 1429853 - DNA, 15 bp, Homo sapiens
acgccggagatgatg

SEQ ID NO: 1429854 - DNA, 15 bp, Homo sapiens
gacgccggagatgat

SEQ ID NO: 1429855 - DNA, 15 bp, Homo sapiens
cgacgccggagatga

SEQ ID NO: 1429856 - DNA, 15 bp, Homo sapiens
acgacgccggagatg

SEQ ID NO: 1429857 - DNA, 15 bp, Homo sapiens
cacgacgccggagat

SEQ ID NO: 1429858 - DNA, 15 bp, Homo sapiens
acacgacgccggaga

SEQ ID NO: 1429859 - DNA, 15 bp, Homo sapiens
gacacgacgccggag

SEQ ID NO: 1429860 - DNA, 15 bp, Homo sapiens
cgacacgacgccgga

SEQ ID NO: 1429861 - DNA, 15 bp, Homo sapiens
gcgacacgacgccgg

SEQ ID NO: 1429862 - DNA, 15 bp, Homo sapiens
agcgacacgacgccg

SEQ ID NO: 1429863 - DNA, 15 bp, Homo sapiens
gagcgacacgacgcc

SEQ ID NO: 1429864 - DNA, 15 bp, Homo sapiens
agagcgacacgacgc

SEQ ID NO: 1429865 - DNA, 15 bp, Homo sapiens
aagagcgacacgacg

SEQ ID NO: 1429866 - DNA, 15 bp, Homo sapiens
gaagagcgacacgac

SEQ ID NO: 1429867 - DNA, 15 bp, Homo sapiens
tgaagagcgacacga

SEQ ID NO: 1429868 - DNA, 15 bp, Homo sapiens
atgaagagcgacacg

SEQ ID NO: 1429869 - DNA, 15 bp, Homo sapiens
gatgaagagcgacac

SEQ ID NO: 1429870 - DNA, 15 bp, Homo sapiens
agatgaagagcgaca

SEQ ID NO: 1429871 - DNA, 15 bp, Homo sapiens
aagatgaagagcgac

SEQ ID NO: 1429872 - DNA, 15 bp, Homo sapiens
gaagatgaagagcga

SEQ ID NO: 1429873 - DNA, 15 bp, Homo sapiens
cgaagatgaagagcg

SEQ ID NO: 1429874 - DNA, 15 bp, Homo sapiens
ccgaagatgaagagc

SEQ ID NO: 1429875 - DNA, 15 bp, Homo sapiens
gccgaagatgaagag

SEQ ID NO: 1429876 - DNA, 15 bp, Homo sapiens
agccgaagatgaaga

SEQ ID NO: 1429877 - DNA, 15 bp, Homo sapiens
aagccgaagatgaag

SEQ ID NO: 1429878 - DNA, 15 bp, Homo sapiens
gaagccgaagatgaa

SEQ ID NO: 1429879 - DNA, 15 bp, Homo sapiens
agaagccgaagatga

SEQ ID NO: 1429880 - DNA, 15 bp, Homo sapiens
cagaagccgaagatg

SEQ ID NO: 1429881 - DNA, 15 bp, Homo sapiens
gcagaagccgaagat

SEQ ID NO: 1429882 - DNA, 15 bp, Homo sapiens
agcagaagccgaaga

SEQ ID NO: 1429883 - DNA, 15 bp, Homo sapiens
cagcagaagccgaag

SEQ ID NO: 1429884 - DNA, 15 bp, Homo sapiens
ccagcagaagccgaa

SEQ ID NO: 1429885 - DNA, 15 bp, Homo sapiens
gccagcagaagccga

SEQ ID NO: 1429886 - DNA, 15 bp, Homo sapiens
agccagcagaagccg

SEQ ID NO: 1429887 - DNA, 15 bp, Homo sapiens
cagccagcagaagcc

SEQ ID NO: 1429888 - DNA, 15 bp, Homo sapiens
tcagccagcagaagc

SEQ ID NO: 1429889 - DNA, 15 bp, Homo sapiens
ctcagccagcagaag

SEQ ID NO: 1429890 - DNA, 15 bp, Homo sapiens
actcagccagcagaa

SEQ ID NO: 1429891 - DNA, 15 bp, Homo sapiens
gactcagccagcaga

SEQ ID NO: 1429892 - DNA, 15 bp, Homo sapiens
ggactcagccagcag

SEQ ID NO: 1429893 - DNA, 15 bp, Homo sapiens
gggactcagccagca

SEQ ID NO: 1429894 - DNA, 15 bp, Homo sapiens
cgggactcagccagc

SEQ ID NO: 1429895 - DNA, 15 bp, Homo sapiens
gcgggactcagccag

SEQ ID NO: 1429896 - DNA, 15 bp, Homo sapiens
cgcgggactcagcca

SEQ ID NO: 1429897 - DNA, 15 bp, Homo sapiens
gcgcgggactcagcc

SEQ ID NO: 1429898 - DNA, 15 bp, Homo sapiens
agcgcgggactcagc

SEQ ID NO: 1429899 - DNA, 15 bp, Homo sapiens
cagcgcgggactcag

SEQ ID NO: 1429900 - DNA, 15 bp, Homo sapiens
gcagcgcgggactca

SEQ ID NO: 1429901 - DNA, 15 bp, Homo sapiens
tgcagcgcgggactc

SEQ ID NO: 1429902 - DNA, 15 bp, Homo sapiens
ctgcagcgcgggact

SEQ ID NO: 1429903 - DNA, 15 bp, Homo sapiens
cctgcagcgcgggac

SEQ ID NO: 1429904 - DNA, 15 bp, Homo sapiens
tcctgcagcgcggga

SEQ ID NO: 1429905 - DNA, 15 bp, Homo sapiens
atcctgcagcgcggg

SEQ ID NO: 1429906 - DNA, 15 bp, Homo sapiens
gatcctgcagcgcgg

SEQ ID NO: 1429907 - DNA, 15 bp, Homo sapiens
agatcctgcagcgcg

SEQ ID NO: 1429908 - DNA, 15 bp, Homo sapiens
cagatcctgcagcgc

SEQ ID NO: 1429909 - DNA, 15 bp, Homo sapiens
gcagatcctgcagcg

SEQ ID NO: 1429910 - DNA, 15 bp, Homo sapiens
tgcagatcctgcagc

SEQ ID NO: 1429911 - DNA, 15 bp, Homo sapiens
ttgcagatcctgcag

SEQ ID NO: 1429912 - DNA, 15 bp, Homo sapiens
cttgcagatcctgca

SEQ ID NO: 1429913 - DNA, 15 bp, Homo sapiens
gcttgcagatcctgc

SEQ ID NO: 1429914 - DNA, 15 bp, Homo sapiens
ggcttgcagatcctg

SEQ ID NO: 1429915 - DNA, 15 bp, Homo sapiens
tggcttgcagatcct

SEQ ID NO: 1429916 - DNA, 15 bp, Homo sapiens
gtggcttgcagatcc

SEQ ID NO: 1429917 - DNA, 15 bp, Homo sapiens
cgtggcttgcagatc

SEQ ID NO: 1429918 - DNA, 15 bp, Homo sapiens
ccgtggcttgcagat

SEQ ID NO: 1429919 - DNA, 15 bp, Homo sapiens
tccgtggcttgcaga

SEQ ID NO: 1429920 - DNA, 15 bp, Homo sapiens
ctccgtggcttgcag

SEQ ID NO: 1429921 - DNA, 15 bp, Homo sapiens
cctccgtggcttgca

SEQ ID NO: 1429922 - DNA, 15 bp, Homo sapiens
gcctccgtggcttgc

SEQ ID NO: 1429923 - DNA, 15 bp, Homo sapiens
ggcctccgtggcttg

SEQ ID NO: 1429924 - DNA, 15 bp, Homo sapiens
tggcctccgtggctt

SEQ ID NO: 1429925 - DNA, 15 bp, Homo sapiens
ttggcctccgtggct

SEQ ID NO: 1429926 - DNA, 15 bp, Homo sapiens
attggcctccgtggc

SEQ ID NO: 1429927 - DNA, 15 bp, Homo sapiens
aattggcctccgtgg

SEQ ID NO: 1429928 - DNA, 15 bp, Homo sapiens
caattggcctccgtg

SEQ ID NO: 1429929 - DNA, 15 bp, Homo sapiens
gcaattggcctccgt

SEQ ID NO: 1429930 - DNA, 15 bp, Homo sapiens
tgcaattggcctccg

SEQ ID NO: 1429931 - DNA, 15 bp, Homo sapiens
gtgcaattggcctcc

SEQ ID NO: 1429932 - DNA, 15 bp, Homo sapiens
cgtgcaattggcctc

SEQ ID NO: 1429933 - DNA, 15 bp, Homo sapiens
ccgtgcaattggcct

SEQ ID NO: 1429934 - DNA, 15 bp, Homo sapiens
accgtgcaattggcc

SEQ ID NO: 1429935 - DNA, 15 bp, Homo sapiens
caccgtgcaattggc

SEQ ID NO: 1429936 - DNA, 15 bp, Homo sapiens
gcaccgtgcaattgg

SEQ ID NO: 1429937 - DNA, 15 bp, Homo sapiens
agcaccgtgcaattg

SEQ ID NO: 1429938 - DNA, 15 bp, Homo sapiens
cagcaccgtgcaatt

SEQ ID NO: 1429939 - DNA, 15 bp, Homo sapiens
acagcaccgtgcaat

SEQ ID NO: 1429940 - DNA, 15 bp, Homo sapiens
gacagcaccgtgcaa

SEQ ID NO: 1429941 - DNA, 15 bp, Homo sapiens
cgacagcaccgtgca

SEQ ID NO: 1429942 - DNA, 15 bp, Homo sapiens
ccgacagcaccgtgc

SEQ ID NO: 1429943 - DNA, 15 bp, Homo sapiens
accgacagcaccgtg

SEQ ID NO: 1429944 - DNA, 15 bp, Homo sapiens
caccgacagcaccgt

SEQ ID NO: 1429945 - DNA, 15 bp, Homo sapiens
gcaccgacagcaccg

SEQ ID NO: 1429946 - DNA, 15 bp, Homo sapiens
tgcaccgacagcacc

SEQ ID NO: 1429947 - DNA, 15 bp, Homo sapiens
ctgcaccgacagcac

SEQ ID NO: 1429948 - DNA, 15 bp, Homo sapiens
gctgcaccgacagca

SEQ ID NO: 1429949 - DNA, 15 bp, Homo sapiens
tgctgcaccgacagc

SEQ ID NO: 1429950 - DNA, 15 bp, Homo sapiens
ctgctgcaccgacag

SEQ ID NO: 1429951 - DNA, 15 bp, Homo sapiens
tctgctgcaccgaca

SEQ ID NO: 1429952 - DNA, 15 bp, Homo sapiens
atctgctgcaccgac

SEQ ID NO: 1429953 - DNA, 15 bp, Homo sapiens
gatctgctgcaccga

SEQ ID NO: 1429954 - DNA, 15 bp, Homo sapiens
cgatctgctgcaccg

SEQ ID NO: 1429955 - DNA, 15 bp, Homo sapiens
ccgatctgctgcacc

SEQ ID NO: 1429956 - DNA, 15 bp, Homo sapiens
gccgatctgctgcac

SEQ ID NO: 1429957 - DNA, 15 bp, Homo sapiens
cgccgatctgctgca

SEQ ID NO: 1429958 - DNA, 15 bp, Homo sapiens
tcgccgatctgctgc

SEQ ID NO: 1429959 - DNA, 15 bp, Homo sapiens
ctcgccgatctgctg

SEQ ID NO: 1429960 - DNA, 15 bp, Homo sapiens
cctcgccgatctgct

SEQ ID NO: 1429961 - DNA, 15 bp, Homo sapiens
acctcgccgatctgc

SEQ ID NO: 1429962 - DNA, 15 bp, Homo sapiens
cacctcgccgatctg

SEQ ID NO: 1429963 - DNA, 15 bp, Homo sapiens
acacctcgccgatct

SEQ ID NO: 1429964 - DNA, 15 bp, Homo sapiens
aacacctcgccgatc

SEQ ID NO: 1429965 - DNA, 15 bp, Homo sapiens
gaacacctcgccgat

SEQ ID NO: 1429966 - DNA, 15 bp, Homo sapiens
cgaacacctcgccga

SEQ ID NO: 1429967 - DNA, 15 bp, Homo sapiens
tcgaacacctcgccg

SEQ ID NO: 1429968 - DNA, 15 bp, Homo sapiens
ctcgaacacctcgcc

SEQ ID NO: 1429969 - DNA, 15 bp, Homo sapiens
actcgaacacctcgc

SEQ ID NO: 1429970 - DNA, 15 bp, Homo sapiens
cactcgaacacctcg

SEQ ID NO: 1429971 - DNA, 15 bp, Homo sapiens
gcactcgaacacctc

SEQ ID NO: 1429972 - DNA, 15 bp, Homo sapiens
tgcactcgaacacct

SEQ ID NO: 1429973 - DNA, 15 bp, Homo sapiens
gtgcactcgaacacc

SEQ ID NO: 1429974 - DNA, 15 bp, Homo sapiens
ggtgcactcgaacac

SEQ ID NO: 1429975 - DNA, 15 bp, Homo sapiens
aggtgcactcgaaca

SEQ ID NO: 1429976 - DNA, 15 bp, Homo sapiens
aaggtgcactcgaac

SEQ ID NO: 1429977 - DNA, 15 bp, Homo sapiens
gaaggtgcactcgaa

SEQ ID NO: 1429978 - DNA, 15 bp, Homo sapiens
tgaaggtgcactcga

SEQ ID NO: 1429979 - DNA, 15 bp, Homo sapiens
gtgaaggtgcactcg

SEQ ID NO: 1429980 - DNA, 15 bp, Homo sapiens
ggtgaaggtgcactc

SEQ ID NO: 1429981 - DNA, 15 bp, Homo sapiens
aggtgaaggtgcact

SEQ ID NO: 1429982 - DNA, 15 bp, Homo sapiens
caggtgaaggtgcac

SEQ ID NO: 1429983 - DNA, 15 bp, Homo sapiens
acaggtgaaggtgca

SEQ ID NO: 1429984 - DNA, 15 bp, Homo sapiens
cacaggtgaaggtgc

SEQ ID NO: 1429985 - DNA, 15 bp, Homo sapiens
ccacaggtgaaggtg

SEQ ID NO: 1429986 - DNA, 15 bp, Homo sapiens
gccacaggtgaaggt

SEQ ID NO: 1429987 - DNA, 15 bp, Homo sapiens
cgccacaggtgaagg

SEQ ID NO: 1429988 - DNA, 15 bp, Homo sapiens
gcgccacaggtgaag

SEQ ID NO: 1429989 - DNA, 15 bp, Homo sapiens
ggcgccacaggtgaa

SEQ ID NO: 1429990 - DNA, 15 bp, Homo sapiens
cggcgccacaggtga

SEQ ID NO: 1429991 - DNA, 15 bp, Homo sapiens
tcggcgccacaggtg

SEQ ID NO: 1429992 - DNA, 15 bp, Homo sapiens
gtcggcgccacaggt

SEQ ID NO: 1429993 - DNA, 15 bp, Homo sapiens
agtcggcgccacagg

SEQ ID NO: 1429994 - DNA, 15 bp, Homo sapiens
cagtcggcgccacag

SEQ ID NO: 1429995 - DNA, 15 bp, Homo sapiens
gcagtcggcgccaca

SEQ ID NO: 1429996 - DNA, 15 bp, Homo sapiens
tgcagtcggcgccac

SEQ ID NO: 1429997 - DNA, 15 bp, Homo sapiens
ctgcagtcggcgcca

SEQ ID NO: 1429998 - DNA, 15 bp, Homo sapiens
cctgcagtcggcgcc

SEQ ID NO: 1429999 - DNA, 15 bp, Homo sapiens
ccctgcagtcggcgc

SEQ ID NO: 1430000 - DNA, 15 bp, Homo sapiens
cccctgcagtcggcg

SEQ ID NO: 1430001 - DNA, 15 bp, Homo sapiens
gcccctgcagtcggc

SEQ ID NO: 1430002 - DNA, 15 bp, Homo sapiens
tgcccctgcagtcgg

SEQ ID NO: 1430003 - DNA, 15 bp, Homo sapiens
gtgcccctgcagtcg

SEQ ID NO: 1430004 - DNA, 15 bp, Homo sapiens
ggtgcccctgcagtc

SEQ ID NO: 1430005 - DNA, 15 bp, Homo sapiens
aggtgcccctgcagt

SEQ ID NO: 1430006 - DNA, 15 bp, Homo sapiens
gaggtgcccctgcag

SEQ ID NO: 1430007 - DNA, 15 bp, Homo sapiens
cgaggtgcccctgca

SEQ ID NO: 1430008 - DNA, 15 bp, Homo sapiens
gcgaggtgcccctgc

SEQ ID NO: 1430009 - DNA, 15 bp, Homo sapiens
tgcgaggtgcccctg

SEQ ID NO: 1430010 - DNA, 15 bp, Homo sapiens
ctgcgaggtgcccct

SEQ ID NO: 1430011 - DNA, 15 bp, Homo sapiens
actgcgaggtgcccc

SEQ ID NO: 1430012 - DNA, 15 bp, Homo sapiens
tactgcgaggtgccc

SEQ ID NO: 1430013 - DNA, 15 bp, Homo sapiens
gtactgcgaggtgcc

SEQ ID NO: 1430014 - DNA, 15 bp, Homo sapiens
ggtactgcgaggtgc

SEQ ID NO: 1430015 - DNA, 15 bp, Homo sapiens
gggtactgcgaggtg

SEQ ID NO: 1430016 - DNA, 15 bp, Homo sapiens
ggggtactgcgaggt

SEQ ID NO: 1430017 - DNA, 15 bp, Homo sapiens
aggggtactgcgagg

SEQ ID NO: 1430018 - DNA, 15 bp, Homo sapiens
caggggtactgcgag

SEQ ID NO: 1430019 - DNA, 15 bp, Homo sapiens
gcaggggtactgcga

SEQ ID NO: 1430020 - DNA, 15 bp, Homo sapiens
cgcaggggtactgcg

SEQ ID NO: 1430021 - DNA, 15 bp, Homo sapiens
acgcaggggtactgc

SEQ ID NO: 1430022 - DNA, 15 bp, Homo sapiens
gacgcaggggtactg

SEQ ID NO: 1430023 - DNA, 15 bp, Homo sapiens
ggacgcaggggtact

SEQ ID NO: 1430024 - DNA, 15 bp, Homo sapiens
tggacgcaggggtac

SEQ ID NO: 1430025 - DNA, 15 bp, Homo sapiens
ctggacgcaggggta

SEQ ID NO: 1430026 - DNA, 15 bp, Homo sapiens
cctggacgcaggggt

SEQ ID NO: 1430027 - DNA, 15 bp, Homo sapiens
acctggacgcagggg

SEQ ID NO: 1430028 - DNA, 15 bp, Homo sapiens
gacctggacgcaggg

SEQ ID NO: 1430029 - DNA, 15 bp, Homo sapiens
agacctggacgcagg

SEQ ID NO: 1430030 - DNA, 15 bp, Homo sapiens
tagacctggacgcag

SEQ ID NO: 1430031 - DNA, 15 bp, Homo sapiens
gtagacctggacgca

SEQ ID NO: 1430032 - DNA, 15 bp, Homo sapiens
cgtagacctggacgc

SEQ ID NO: 1430033 - DNA, 15 bp, Homo sapiens
acgtagacctggacg

SEQ ID NO: 1430034 - DNA, 15 bp, Homo sapiens
cacgtagacctggac

SEQ ID NO: 1430035 - DNA, 15 bp, Homo sapiens
tcacgtagacctgga

SEQ ID NO: 1430036 - DNA, 15 bp, Homo sapiens
ttcacgtagacctgg

SEQ ID NO: 1430037 - DNA, 15 bp, Homo sapiens
gttcacgtagacctg

SEQ ID NO: 1430038 - DNA, 15 bp, Homo sapiens
tgttcacgtagacct

SEQ ID NO: 1430039 - DNA, 15 bp, Homo sapiens
ttgttcacgtagacc

SEQ ID NO: 1430040 - DNA, 15 bp, Homo sapiens
gttgttcacgtagac

SEQ ID NO: 1430041 - DNA, 15 bp, Homo sapiens
agttgttcacgtaga

SEQ ID NO: 1430042 - DNA, 15 bp, Homo sapiens
gagttgttcacgtag

SEQ ID NO: 1430043 - DNA, 15 bp, Homo sapiens
agagttgttcacgta

SEQ ID NO: 1430044 - DNA, 15 bp, Homo sapiens
cagagttgttcacgt

SEQ ID NO: 1430045 - DNA, 15 bp, Homo sapiens
tcagagttgttcacg

SEQ ID NO: 1430046 - DNA, 15 bp, Homo sapiens
ctcagagttgttcac

SEQ ID NO: 1430047 - DNA, 15 bp, Homo sapiens
actcagagttgttca

SEQ ID NO: 1430048 - DNA, 15 bp, Homo sapiens
gactcagagttgttc

SEQ ID NO: 1430049 - DNA, 15 bp, Homo sapiens
ggactcagagttgtt

SEQ ID NO: 1430050 - DNA, 15 bp, Homo sapiens
tggactcagagttgt

SEQ ID NO: 1430051 - DNA, 15 bp, Homo sapiens
ttggactcagagttg

SEQ ID NO: 1430052 - DNA, 15 bp, Homo sapiens
gttggactcagagtt

SEQ ID NO: 1430053 - DNA, 15 bp, Homo sapiens
agttggactcagagt

SEQ ID NO: 1430054 - DNA, 15 bp, Homo sapiens
agagttggactcaga

SEQ ID NO: 1430055 - DNA, 15 bp, Homo sapiens
tagagttggactcag

SEQ ID NO: 1430056 - DNA, 15 bp, Homo sapiens
ctagagttggactca

SEQ ID NO: 1430057 - DNA, 15 bp, Homo sapiens
cctagagttggactc

SEQ ID NO: 1430058 - DNA, 15 bp, Homo sapiens
ccctagagttggact

SEQ ID NO: 1430059 - DNA, 15 bp, Homo sapiens
gccctagagttggac

SEQ ID NO: 1430060 - DNA, 15 bp, Homo sapiens
cgccctagagttgga

SEQ ID NO: 1430061 - DNA, 15 bp, Homo sapiens
gcgccctagagttgg

SEQ ID NO: 1430062 - DNA, 15 bp, Homo sapiens
agcgccctagagttg

SEQ ID NO: 1430063 - DNA, 15 bp, Homo sapiens
cagcgccctagagtt

SEQ ID NO: 1430064 - DNA, 15 bp, Homo sapiens
gcagcgccctagagt

SEQ ID NO: 1430065 - DNA, 15 bp, Homo sapiens
agcagcgccctagag

SEQ ID NO: 1430066 - DNA, 15 bp, Homo sapiens
cagcagcgccctaga

SEQ ID NO: 1430067 - DNA, 15 bp, Homo sapiens
gcagcagcgccctag

SEQ ID NO: 1430068 - DNA, 15 bp, Homo sapiens
tgcagcagcgcccta

SEQ ID NO: 1430069 - DNA, 15 bp, Homo sapiens
gtgcagcagcgccct

SEQ ID NO: 1430070 - DNA, 15 bp, Homo sapiens
tgtgcagcagcgccc

SEQ ID NO: 1430071 - DNA, 15 bp, Homo sapiens
ctgtgcagcagcgcc

SEQ ID NO: 1430072 - DNA, 15 bp, Homo sapiens
gctgtgcagcagcgc

SEQ ID NO: 1430073 - DNA, 15 bp, Homo sapiens
cgctgtgcagcagcg

SEQ ID NO: 1430074 - DNA, 15 bp, Homo sapiens
tcgctgtgcagcagc

SEQ ID NO: 1430075 - DNA, 15 bp, Homo sapiens
gtcgctgtgcagcag

SEQ ID NO: 1430076 - DNA, 15 bp, Homo sapiens
cgtcgctgtgcagca

SEQ ID NO: 1430077 - DNA, 15 bp, Homo sapiens
tcgtcgctgtgcagc

SEQ ID NO: 1430078 - DNA, 15 bp, Homo sapiens
ctcgtcgctgtgcag

SEQ ID NO: 1430079 - DNA, 15 bp, Homo sapiens
gctcgtcgctgtgca

SEQ ID NO: 1430080 - DNA, 15 bp, Homo sapiens
tgctcgtcgctgtgc

SEQ ID NO: 1430081 - DNA, 15 bp, Homo sapiens
gtgctcgtcgctgtg

SEQ ID NO: 1430082 - DNA, 15 bp, Homo sapiens
ggtgctcgtcgctgt

SEQ ID NO: 1430083 - DNA, 15 bp, Homo sapiens
tggtgctcgtcgctg

SEQ ID NO: 1430084 - DNA, 15 bp, Homo sapiens
ctggtgctcgtcgct

SEQ ID NO: 1430085 - DNA, 15 bp, Homo sapiens
gctggtgctcgtcgc

SEQ ID NO: 1430086 - DNA, 15 bp, Homo sapiens
agctggtgctcgtcg

SEQ ID NO: 1430087 - DNA, 15 bp, Homo sapiens
gagctggtgctcgtc

SEQ ID NO: 1430088 - DNA, 15 bp, Homo sapiens
ggagctggtgctcgt

SEQ ID NO: 1430089 - DNA, 15 bp, Homo sapiens
aggagctggtgctcg

SEQ ID NO: 1430090 - DNA, 15 bp, Homo sapiens
caggagctggtgctc

SEQ ID NO: 1430091 - DNA, 15 bp, Homo sapiens
tcaggagctggtgct

SEQ ID NO: 1430092 - DNA, 15 bp, Homo sapiens
gtcaggagctggtgc

SEQ ID NO: 1430093 - DNA, 15 bp, Homo sapiens
ggtcaggagctggtg

SEQ ID NO: 1430094 - DNA, 15 bp, Homo sapiens
tggtcaggagctggt

SEQ ID NO: 1430095 - DNA, 15 bp, Homo sapiens
ttggtcaggagctgg

SEQ ID NO: 1430096 - DNA, 15 bp, Homo sapiens
gttggtcaggagctg

SEQ ID NO: 1430097 - DNA, 15 bp, Homo sapiens
ggttggtcaggagct

SEQ ID NO: 1430098 - DNA, 15 bp, Homo sapiens
gggttggtcaggagc

SEQ ID NO: 1430099 - DNA, 15 bp, Homo sapiens
ggggttggtcaggag

SEQ ID NO: 1430100 - DNA, 15 bp, Homo sapiens
tggggttggtcagga

SEQ ID NO: 1430101 - DNA, 15 bp, Homo sapiens
ttggggttggtcagg

SEQ ID NO: 1430102 - DNA, 15 bp, Homo sapiens
cttggggttggtcag

SEQ ID NO: 1430103 - DNA, 15 bp, Homo sapiens
ccttggggttggtca

SEQ ID NO: 1430104 - DNA, 15 bp, Homo sapiens
accttggggttggtc

SEQ ID NO: 1430105 - DNA, 15 bp, Homo sapiens
taccttggggttggt

SEQ ID NO: 1430106 - DNA, 15 bp, Homo sapiens
ttaccttggggttgg

SEQ ID NO: 1430107 - DNA, 15 bp, Homo sapiens
cttaccttggggttg

SEQ ID NO: 1430108 - DNA, 15 bp, Homo sapiens
tcttaccttggggtt

SEQ ID NO: 1430109 - DNA, 15 bp, Homo sapiens
ttcttaccttggggt

SEQ ID NO: 1430110 - DNA, 15 bp, Homo sapiens
gttcttaccttgggg

SEQ ID NO: 1430111 - DNA, 15 bp, Homo sapiens
cgttcttaccttggg

SEQ ID NO: 1430112 - DNA, 15 bp, Homo sapiens
gcgttcttaccttgg

SEQ ID NO: 1430113 - DNA, 15 bp, Homo sapiens
ggcgttcttaccttg

SEQ ID NO: 1430114 - DNA, 15 bp, Homo sapiens
gggcgttcttacctt

SEQ ID NO: 1430115 - DNA, 15 bp, Homo sapiens
ggggcgttcttacct

SEQ ID NO: 1430116 - DNA, 15 bp, Homo sapiens
cggggcgttcttacc

SEQ ID NO: 1430117 - DNA, 15 bp, Homo sapiens
gcggggcgttcttac

SEQ ID NO: 1430118 - DNA, 15 bp, Homo sapiens
cgcggggcgttctta

SEQ ID NO: 1430119 - DNA, 15 bp, Homo sapiens
gcgcggggcgttctt

SEQ ID NO: 1430120 - DNA, 15 bp, Homo sapiens
tgcgcggggcgttct

SEQ ID NO: 1430121 - DNA, 15 bp, Homo sapiens
gtgcgcggggcgttc

SEQ ID NO: 1430122 - DNA, 15 bp, Homo sapiens
ggtgcgcggggcgtt

SEQ ID NO: 1430123 - DNA, 15 bp, Homo sapiens
gggtgcgcggggcgt

SEQ ID NO: 1430124 - DNA, 15 bp, Homo sapiens
tgggtgcgcggggcg

SEQ ID NO: 1430125 - DNA, 15 bp, Homo sapiens
ctgggtgcgcggggc

SEQ ID NO: 1430126 - DNA, 15 bp, Homo sapiens
cctgggtgcgcgggg

SEQ ID NO: 1430127 - DNA, 15 bp, Homo sapiens
ccctgggtgcgcggg

SEQ ID NO: 1430128 - DNA, 15 bp, Homo sapiens
cccctgggtgcgcgg

SEQ ID NO: 1430129 - DNA, 15 bp, Homo sapiens
gcccctgggtgcgcg

SEQ ID NO: 1430130 - DNA, 15 bp, Homo sapiens
agcccctgggtgcgc

SEQ ID NO: 1430131 - DNA, 15 bp, Homo sapiens
gagcccctgggtgcg

SEQ ID NO: 1430132 - DNA, 15 bp, Homo sapiens
ggagcccctgggtgc

SEQ ID NO: 1430133 - DNA, 15 bp, Homo sapiens
gggagcccctgggtg

SEQ ID NO: 1430134 - DNA, 15 bp, Homo sapiens
ggggagcccctgggt

SEQ ID NO: 1430135 - DNA, 15 bp, Homo sapiens
cggggagcccctggg

SEQ ID NO: 1430136 - DNA, 15 bp, Homo sapiens
gcggggagcccctgg

SEQ ID NO: 1430137 - DNA, 15 bp, Homo sapiens
cgcggggagcccctg

SEQ ID NO: 1430138 - DNA, 15 bp, Homo sapiens
tcgcggggagcccct

SEQ ID NO: 1430139 - DNA, 15 bp, Homo sapiens
ctcgcggggagcccc

SEQ ID NO: 1430140 - DNA, 15 bp, Homo sapiens
cctcgcggggagccc

SEQ ID NO: 1430141 - DNA, 15 bp, Homo sapiens
ccctcgcggggagcc

SEQ ID NO: 1430142 - DNA, 15 bp, Homo sapiens
tccctcgcggggagc

SEQ ID NO: 1430143 - DNA, 15 bp, Homo sapiens
ctccctcgcggggag

SEQ ID NO: 1430144 - DNA, 15 bp, Homo sapiens
cctccctcgcgggga

SEQ ID NO: 1430145 - DNA, 15 bp, Homo sapiens
acctccctcgcgggg

SEQ ID NO: 1430146 - DNA, 15 bp, Homo sapiens
aacctccctcgcggg

SEQ ID NO: 1430147 - DNA, 15 bp, Homo sapiens
aaacctccctcgcgg

SEQ ID NO: 1430148 - DNA, 15 bp, Homo sapiens
caaacctccctcgcg

SEQ ID NO: 1430149 - DNA, 15 bp, Homo sapiens
ccaaacctccctcgc

SEQ ID NO: 1430150 - DNA, 15 bp, Homo sapiens
tccaaacctccctcg

SEQ ID NO: 1430151 - DNA, 15 bp, Homo sapiens
ctccaaacctccctc

SEQ ID NO: 1430152 - DNA, 15 bp, Homo sapiens
cctccaaacctccct

SEQ ID NO: 1430153 - DNA, 15 bp, Homo sapiens
gcctccaaacctccc

SEQ ID NO: 1430154 - DNA, 15 bp, Homo sapiens
tgcctccaaacctcc

SEQ ID NO: 1430155 - DNA, 15 bp, Homo sapiens
ctgcctccaaacctc

SEQ ID NO: 1430156 - DNA, 15 bp, Homo sapiens
gctgcctccaaacct

SEQ ID NO: 1430157 - DNA, 15 bp, Homo sapiens
cgctgcctccaaacc

SEQ ID NO: 1430158 - DNA, 15 bp, Homo sapiens
acgctgcctccaaac

SEQ ID NO: 1430159 - DNA, 15 bp, Homo sapiens
gacgctgcctccaaa

SEQ ID NO: 1430160 - DNA, 15 bp, Homo sapiens
cgacgctgcctccaa

SEQ ID NO: 1430161 - DNA, 15 bp, Homo sapiens
ccgacgctgcctcca

SEQ ID NO: 1430162 - DNA, 15 bp, Homo sapiens
accgacgctgcctcc

SEQ ID NO: 1430163 - DNA, 15 bp, Homo sapiens
caccgacgctgcctc

SEQ ID NO: 1430164 - DNA, 15 bp, Homo sapiens
acaccgacgctgcct

SEQ ID NO: 1430165 - DNA, 15 bp, Homo sapiens
aacaccgacgctgcc

SEQ ID NO: 1430166 - DNA, 15 bp, Homo sapiens
taacaccgacgctgc

SEQ ID NO: 1430167 - DNA, 15 bp, Homo sapiens
ctaacaccgacgctg

SEQ ID NO: 1430168 - DNA, 15 bp, Homo sapiens
tctaacaccgacgct

SEQ ID NO: 1430169 - DNA, 15 bp, Homo sapiens
gtctaacaccgacgc

SEQ ID NO: 1430170 - DNA, 15 bp, Homo sapiens
agtctaacaccgacg

SEQ ID NO: 1430171 - DNA, 15 bp, Homo sapiens
gagtctaacaccgac

SEQ ID NO: 1430172 - DNA, 15 bp, Homo sapiens
ggagtctaacaccga

SEQ ID NO: 1430173 - DNA, 15 bp, Homo sapiens
cggagtctaacaccg

SEQ ID NO: 1430174 - DNA, 15 bp, Homo sapiens
gcggagtctaacacc

SEQ ID NO: 1430175 - DNA, 15 bp, Homo sapiens
cgcggagtctaacac

SEQ ID NO: 1430176 - DNA, 15 bp, Homo sapiens
gcgcggagtctaaca

SEQ ID NO: 1430177 - DNA, 15 bp, Homo sapiens
cgcgcggagtctaac

SEQ ID NO: 1430178 - DNA, 15 bp, Homo sapiens
ccgcgcggagtctaa

SEQ ID NO: 1430179 - DNA, 15 bp, Homo sapiens
cccgcgcggagtcta

SEQ ID NO: 1430180 - DNA, 15 bp, Homo sapiens
ccccgcgcggagtct

SEQ ID NO: 1430181 - DNA, 15 bp, Homo sapiens
tccccgcgcggagtc

SEQ ID NO: 1430182 - DNA, 15 bp, Homo sapiens
ctccccgcgcggagt

SEQ ID NO: 1430183 - DNA, 15 bp, Homo sapiens
cctccccgcgcggag

SEQ ID NO: 1430184 - DNA, 15 bp, Homo sapiens
ccctccccgcgcgga

SEQ ID NO: 1430185 - DNA, 15 bp, Homo sapiens
accctccccgcgcgg

SEQ ID NO: 1430186 - DNA, 15 bp, Homo sapiens
aaccctccccgcgcg

SEQ ID NO: 1430187 - DNA, 15 bp, Homo sapiens
gaaccctccccgcgc

SEQ ID NO: 1430188 - DNA, 15 bp, Homo sapiens
cgaaccctccccgcg

SEQ ID NO: 1430189 - DNA, 15 bp, Homo sapiens
ccgaaccctccccgc

SEQ ID NO: 1430190 - DNA, 15 bp, Homo sapiens
gccgaaccctccccg

SEQ ID NO: 1430191 - DNA, 15 bp, Homo sapiens
cgccgaaccctcccc

SEQ ID NO: 1430192 - DNA, 15 bp, Homo sapiens
acgccgaaccctccc

SEQ ID NO: 1430193 - DNA, 15 bp, Homo sapiens
cacgccgaaccctcc

SEQ ID NO: 1430194 - DNA, 15 bp, Homo sapiens
acacgccgaaccctc

SEQ ID NO: 1430195 - DNA, 15 bp, Homo sapiens
cacacgccgaaccct

SEQ ID NO: 1430196 - DNA, 15 bp, Homo sapiens
gcacacgccgaaccc

SEQ ID NO: 1430197 - DNA, 15 bp, Homo sapiens
agcacacgccgaacc

SEQ ID NO: 1430198 - DNA, 15 bp, Homo sapiens
gagcacacgccgaac

SEQ ID NO: 1430199 - DNA, 15 bp, Homo sapiens
cgagcacacgccgaa

SEQ ID NO: 1430200 - DNA, 15 bp, Homo sapiens
gcgagcacacgccga

SEQ ID NO: 1430201 - DNA, 15 bp, Homo sapiens
tgcgagcacacgccg

SEQ ID NO: 1430202 - DNA, 15 bp, Homo sapiens
atgcgagcacacgcc

SEQ ID NO: 1430203 - DNA, 15 bp, Homo sapiens
aatgcgagcacacgc

SEQ ID NO: 1430204 - DNA, 15 bp, Homo sapiens
caatgcgagcacacg

SEQ ID NO: 1430205 - DNA, 15 bp, Homo sapiens
gcaatgcgagcacac

SEQ ID NO: 1430206 - DNA, 15 bp, Homo sapiens
agcaatgcgagcaca

SEQ ID NO: 1430207 - DNA, 15 bp, Homo sapiens
tagcaatgcgagcac

SEQ ID NO: 1430208 - DNA, 15 bp, Homo sapiens
ctagcaatgcgagca

SEQ ID NO: 1430209 - DNA, 15 bp, Homo sapiens
cctagcaatgcgagc

SEQ ID NO: 1430210 - DNA, 15 bp, Homo sapiens
tcctagcaatgcgag

SEQ ID NO: 1430211 - DNA, 15 bp, Homo sapiens
ctcctagcaatgcga

SEQ ID NO: 1430212 - DNA, 15 bp, Homo sapiens
cctcctagcaatgcg

SEQ ID NO: 1430213 - DNA, 15 bp, Homo sapiens
tcctcctagcaatgc

SEQ ID NO: 1430214 - DNA, 15 bp, Homo sapiens
ctcctcctagcaatg

SEQ ID NO: 1430215 - DNA, 15 bp, Homo sapiens
tctcctcctagcaat

SEQ ID NO: 1430216 - DNA, 15 bp, Homo sapiens
gtctcctcctagcaa

SEQ ID NO: 1430217 - DNA, 15 bp, Homo sapiens
ggtctcctcctagca

SEQ ID NO: 1430218 - DNA, 15 bp, Homo sapiens
tggtctcctcctagc

SEQ ID NO: 1430219 - DNA, 15 bp, Homo sapiens
ctggtctcctcctag

SEQ ID NO: 1430220 - DNA, 15 bp, Homo sapiens
cctggtctcctccta

SEQ ID NO: 1430221 - DNA, 15 bp, Homo sapiens
acctggtctcctcct

SEQ ID NO: 1430222 - DNA, 15 bp, Homo sapiens
cacctggtctcctcc

SEQ ID NO: 1430223 - DNA, 15 bp, Homo sapiens
ccacctggtctcctc

SEQ ID NO: 1430224 - DNA, 15 bp, Homo sapiens
gccacctggtctcct

SEQ ID NO: 1430225 - DNA, 15 bp, Homo sapiens
cgccacctggtctcc

SEQ ID NO: 1430226 - DNA, 15 bp, Homo sapiens
gcgccacctggtctc

SEQ ID NO: 1430227 - DNA, 15 bp, Homo sapiens
tgcgccacctggtct

SEQ ID NO: 1430228 - DNA, 15 bp, Homo sapiens
ctgcgccacctggtc

SEQ ID NO: 1430229 - DNA, 15 bp, Homo sapiens
cctgcgccacctggt

SEQ ID NO: 1430230 - DNA, 15 bp, Homo sapiens
gcctgcgccacctgg

SEQ ID NO: 1430231 - DNA, 15 bp, Homo sapiens
agcctgcgccacctg

SEQ ID NO: 1430232 - DNA, 15 bp, Homo sapiens
cagcctgcgccacct

SEQ ID NO: 1430233 - DNA, 15 bp, Homo sapiens
acagcctgcgccacc

SEQ ID NO: 1430234 - DNA, 15 bp, Homo sapiens
cacagcctgcgccac

SEQ ID NO: 1430235 - DNA, 15 bp, Homo sapiens
gcacagcctgcgcca

SEQ ID NO: 1430236 - DNA, 15 bp, Homo sapiens
agcacagcctgcgcc

SEQ ID NO: 1430237 - DNA, 15 bp, Homo sapiens
gagcacagcctgcgc

SEQ ID NO: 1430238 - DNA, 15 bp, Homo sapiens
tgagcacagcctgcg

SEQ ID NO: 1430239 - DNA, 15 bp, Homo sapiens
ttgagcacagcctgc

SEQ ID NO: 1430240 - DNA, 15 bp, Homo sapiens
tttgagcacagcctg

SEQ ID NO: 1430241 - DNA, 15 bp, Homo sapiens
gtttgagcacagcct

SEQ ID NO: 1430242 - DNA, 15 bp, Homo sapiens
ggtttgagcacagcc

SEQ ID NO: 1430243 - DNA, 15 bp, Homo sapiens
tggtttgagcacagc

SEQ ID NO: 1430244 - DNA, 15 bp, Homo sapiens
ctggtttgagcacag

SEQ ID NO: 1430245 - DNA, 15 bp, Homo sapiens
cctggtttgagcaca

SEQ ID NO: 1430246 - DNA, 15 bp, Homo sapiens
tcctggtttgagcac

SEQ ID NO: 1430247 - DNA, 15 bp, Homo sapiens
ttcctggtttgagca

SEQ ID NO: 1430248 - DNA, 15 bp, Homo sapiens
attcctggtttgagc

SEQ ID NO: 1430249 - DNA, 15 bp, Homo sapiens
cattcctggtttgag

SEQ ID NO: 1430250 - DNA, 15 bp, Homo sapiens
tcattcctggtttga

SEQ ID NO: 1430251 - DNA, 15 bp, Homo sapiens
gtcattcctggtttg

SEQ ID NO: 1430252 - DNA, 15 bp, Homo sapiens
agtcattcctggttt

SEQ ID NO: 1430253 - DNA, 15 bp, Homo sapiens
tagtcattcctggtt

SEQ ID NO: 1430254 - DNA, 15 bp, Homo sapiens
gtagtcattcctggt

SEQ ID NO: 1430255 - DNA, 15 bp, Homo sapiens
tgtagtcattcctgg

SEQ ID NO: 1430256 - DNA, 15 bp, Homo sapiens
atgtagtcattcctg

SEQ ID NO: 1430257 - DNA, 15 bp, Homo sapiens
gatgtagtcattcct

SEQ ID NO: 1430258 - DNA, 15 bp, Homo sapiens
tgatgtagtcattcc

SEQ ID NO: 1430259 - DNA, 15 bp, Homo sapiens
ctgatgtagtcattc

SEQ ID NO: 1430260 - DNA, 15 bp, Homo sapiens
cctgatgtagtcatt

SEQ ID NO: 1430261 - DNA, 15 bp, Homo sapiens
ccctgatgtagtcat

SEQ ID NO: 1430262 - DNA, 15 bp, Homo sapiens
tccctgatgtagtca

SEQ ID NO: 1430263 - DNA, 15 bp, Homo sapiens
ctccctgatgtagtc

SEQ ID NO: 1430264 - DNA, 15 bp, Homo sapiens
gctccctgatgtagt

SEQ ID NO: 1430265 - DNA, 15 bp, Homo sapiens
ggctccctgatgtag

SEQ ID NO: 1430266 - DNA, 15 bp, Homo sapiens
gggctccctgatgta

SEQ ID NO: 1430267 - DNA, 15 bp, Homo sapiens
ggggctccctgatgt

SEQ ID NO: 1430268 - DNA, 15 bp, Homo sapiens
tggggctccctgatg

SEQ ID NO: 1430269 - DNA, 15 bp, Homo sapiens
ctggggctccctgat

SEQ ID NO: 1430270 - DNA, 15 bp, Homo sapiens
cctggggctccctga

SEQ ID NO: 1430271 - DNA, 15 bp, Homo sapiens
ccctggggctccctg

SEQ ID NO: 1430272 - DNA, 15 bp, Homo sapiens
gccctggggctccct

SEQ ID NO: 1430273 - DNA, 15 bp, Homo sapiens
agccctggggctccc

SEQ ID NO: 1430274 - DNA, 15 bp, Homo sapiens
gagccctggggctcc

SEQ ID NO: 1430275 - DNA, 15 bp, Homo sapiens
ggagccctggggctc

SEQ ID NO: 1430276 - DNA, 15 bp, Homo sapiens
cggagccctggggct

SEQ ID NO: 1430277 - DNA, 15 bp, Homo sapiens
ccggagccctggggc

SEQ ID NO: 1430278 - DNA, 15 bp, Homo sapiens
accggagccctgggg

SEQ ID NO: 1430279 - DNA, 15 bp, Homo sapiens
gaccggagccctggg

SEQ ID NO: 1430280 - DNA, 15 bp, Homo sapiens
agaccggagccctgg

SEQ ID NO: 1430281 - DNA, 15 bp, Homo sapiens
aagaccggagccctg

SEQ ID NO: 1430282 - DNA, 15 bp, Homo sapiens
aaagaccggagccct

SEQ ID NO: 1430283 - DNA, 15 bp, Homo sapiens
aaaagaccggagccc

SEQ ID NO: 1430284 - DNA, 15 bp, Homo sapiens
gaaaagaccggagcc

SEQ ID NO: 1430285 - DNA, 15 bp, Homo sapiens
tgaaaagaccggagc

SEQ ID NO: 1430286 - DNA, 15 bp, Homo sapiens
ctgaaaagaccggag

SEQ ID NO: 1430287 - DNA, 15 bp, Homo sapiens
cctgaaaagaccgga

SEQ ID NO: 1430288 - DNA, 15 bp, Homo sapiens
acctgaaaagaccgg

SEQ ID NO: 1430289 - DNA, 15 bp, Homo sapiens
cacctgaaaagaccg

SEQ ID NO: 1430290 - DNA, 15 bp, Homo sapiens
ccacctgaaaagacc

SEQ ID NO: 1430291 - DNA, 15 bp, Homo sapiens
cccacctgaaaagac

SEQ ID NO: 1430292 - DNA, 15 bp, Homo sapiens
acccacctgaaaaga

SEQ ID NO: 1430293 - DNA, 15 bp, Homo sapiens
aacccacctgaaaag

SEQ ID NO: 1430294 - DNA, 15 bp, Homo sapiens
aaacccacctgaaaa

SEQ ID NO: 1430295 - DNA, 15 bp, Homo sapiens
taaacccacctgaaa

SEQ ID NO: 1430296 - DNA, 15 bp, Homo sapiens
gtaaacccacctgaa

SEQ ID NO: 1430297 - DNA, 15 bp, Homo sapiens
cgtaaacccacctga

SEQ ID NO: 1430298 - DNA, 15 bp, Homo sapiens
gcgtaaacccacctg

SEQ ID NO: 1430299 - DNA, 15 bp, Homo sapiens
cgcgtaaacccacct

SEQ ID NO: 1430300 - DNA, 15 bp, Homo sapiens
gcgcgtaaacccacc

SEQ ID NO: 1430301 - DNA, 15 bp, Homo sapiens
cgcgcgtaaacccac

SEQ ID NO: 1430302 - DNA, 15 bp, Homo sapiens
ccgcgcgtaaaccca

SEQ ID NO: 1430303 - DNA, 15 bp, Homo sapiens
gccgcgcgtaaaccc

SEQ ID NO: 1430304 - DNA, 15 bp, Homo sapiens
cgccgcgcgtaaacc

SEQ ID NO: 1430305 - DNA, 15 bp, Homo sapiens
tcgccgcgcgtaaac

SEQ ID NO: 1430306 - DNA, 15 bp, Homo sapiens
gtcgccgcgcgtaaa

SEQ ID NO: 1430307 - DNA, 15 bp, Homo sapiens
ggtcgccgcgcgtaa

SEQ ID NO: 1430308 - DNA, 15 bp, Homo sapiens
tggtcgccgcgcgta

SEQ ID NO: 1430309 - DNA, 15 bp, Homo sapiens
ctggtcgccgcgcgt

SEQ ID NO: 1430310 - DNA, 15 bp, Homo sapiens
actggtcgccgcgcg

SEQ ID NO: 1430311 - DNA, 15 bp, Homo sapiens
cactggtcgccgcgc

SEQ ID NO: 1430312 - DNA, 15 bp, Homo sapiens
ccactggtcgccgcg

SEQ ID NO: 1430313 - DNA, 15 bp, Homo sapiens
accactggtcgccgc

SEQ ID NO: 1430314 - DNA, 15 bp, Homo sapiens
caccactggtcgccg

SEQ ID NO: 1430315 - DNA, 15 bp, Homo sapiens
gcaccactggtcgcc

SEQ ID NO: 1430316 - DNA, 15 bp, Homo sapiens
ggcaccactggtcgc

SEQ ID NO: 1430317 - DNA, 15 bp, Homo sapiens
gggcaccactggtcg

SEQ ID NO: 1430318 - DNA, 15 bp, Homo sapiens
tgggcaccactggtc

SEQ ID NO: 1430319 - DNA, 15 bp, Homo sapiens
ctgggcaccactggt

SEQ ID NO: 1430320 - DNA, 15 bp, Homo sapiens
tctgggcaccactgg

SEQ ID NO: 1430321 - DNA, 15 bp, Homo sapiens
ctctgggcaccactg

SEQ ID NO: 1430322 - DNA, 15 bp, Homo sapiens
cctctgggcaccact

SEQ ID NO: 1430323 - DNA, 15 bp, Homo sapiens
gcctctgggcaccac

SEQ ID NO: 1430324 - DNA, 15 bp, Homo sapiens
agcctctgggcacca

SEQ ID NO: 1430325 - DNA, 15 bp, Homo sapiens
aagcctctgggcacc

SEQ ID NO: 1430326 - DNA, 15 bp, Homo sapiens
taagcctctgggcac

SEQ ID NO: 1430327 - DNA, 15 bp, Homo sapiens
gtaagcctctgggca

SEQ ID NO: 1430328 - DNA, 15 bp, Homo sapiens
agtaagcctctgggc

SEQ ID NO: 1430329 - DNA, 15 bp, Homo sapiens
aagtaagcctctggg

SEQ ID NO: 1430330 - DNA, 15 bp, Homo sapiens
aaagtaagcctctgg

SEQ ID NO: 1430331 - DNA, 15 bp, Homo sapiens
taaagtaagcctctg

SEQ ID NO: 1430332 - DNA, 15 bp, Homo sapiens
ttaaagtaagcctct

SEQ ID NO: 1430333 - DNA, 15 bp, Homo sapiens
tttaaagtaagcctc

SEQ ID NO: 1430334 - DNA, 15 bp, Homo sapiens
ttttaaagtaagcct

SEQ ID NO: 1430335 - DNA, 15 bp, Homo sapiens
gttttaaagtaagcc

SEQ ID NO: 1430336 - DNA, 15 bp, Homo sapiens
ggttttaaagtaagc

SEQ ID NO: 1430337 - DNA, 15 bp, Homo sapiens
aggttttaaagtaag

SEQ ID NO: 1430338 - DNA, 15 bp, Homo sapiens
caggttttaaagtaa

SEQ ID NO: 1430339 - DNA, 15 bp, Homo sapiens
acaggttttaaagta

SEQ ID NO: 1430340 - DNA, 15 bp, Homo sapiens
gacaggttttaaagt

SEQ ID NO: 1430341 - DNA, 15 bp, Homo sapiens
agacaggttttaaag

SEQ ID NO: 1430342 - DNA, 15 bp, Homo sapiens
aagacaggttttaaa

SEQ ID NO: 1430343 - DNA, 15 bp, Homo sapiens
caagacaggttttaa

SEQ ID NO: 1430344 - DNA, 15 bp, Homo sapiens
gcaagacaggtttta

SEQ ID NO: 1430345 - DNA, 15 bp, Homo sapiens
ggcaagacaggtttt

SEQ ID NO: 1430346 - DNA, 15 bp, Homo sapiens
aggcaagacaggttt

SEQ ID NO: 1430347 - DNA, 15 bp, Homo sapiens
caggcaagacaggtt

SEQ ID NO: 1430348 - DNA, 15 bp, Homo sapiens
ccaggcaagacaggt

SEQ ID NO: 1430349 - DNA, 15 bp, Homo sapiens
accaggcaagacagg

SEQ ID NO: 1430350 - DNA, 15 bp, Homo sapiens
gaccaggcaagacag

SEQ ID NO: 1430351 - DNA, 15 bp, Homo sapiens
agaccaggcaagaca

SEQ ID NO: 1430352 - DNA, 15 bp, Homo sapiens
gagaccaggcaagac

SEQ ID NO: 1430353 - DNA, 15 bp, Homo sapiens
tgagaccaggcaaga

SEQ ID NO: 1430354 - DNA, 15 bp, Homo sapiens
ctgagaccaggcaag

SEQ ID NO: 1430355 - DNA, 15 bp, Homo sapiens
tctgagaccaggcaa

SEQ ID NO: 1430356 - DNA, 15 bp, Homo sapiens
atctgagaccaggca

SEQ ID NO: 1430357 - DNA, 15 bp, Homo sapiens
aatctgagaccaggc

SEQ ID NO: 1430358 - DNA, 15 bp, Homo sapiens
aaatctgagaccagg

SEQ ID NO: 1430359 - DNA, 15 bp, Homo sapiens
aaaatctgagaccag

SEQ ID NO: 1430360 - DNA, 15 bp, Homo sapiens
caaaatctgagacca

SEQ ID NO: 1430361 - DNA, 15 bp, Homo sapiens
tcaaaatctgagacc

SEQ ID NO: 1430362 - DNA, 15 bp, Homo sapiens
ctcaaaatctgagac

SEQ ID NO: 1430363 - DNA, 15 bp, Homo sapiens
cctcaaaatctgaga

SEQ ID NO: 1430364 - DNA, 15 bp, Homo sapiens
gcctcaaaatctgag

SEQ ID NO: 1430365 - DNA, 15 bp, Homo sapiens
ggcctcaaaatctga

SEQ ID NO: 1430366 - DNA, 15 bp, Homo sapiens
aggcctcaaaatctg

SEQ ID NO: 1430367 - DNA, 15 bp, Homo sapiens
gaggcctcaaaatct

SEQ ID NO: 1430368 - DNA, 15 bp, Homo sapiens
cgaggcctcaaaatc

SEQ ID NO: 1430369 - DNA, 15 bp, Homo sapiens
tcgaggcctcaaaat

SEQ ID NO: 1430370 - DNA, 15 bp, Homo sapiens
gtcgaggcctcaaaa

SEQ ID NO: 1430371 - DNA, 15 bp, Homo sapiens
ggtcgaggcctcaaa

SEQ ID NO: 1430372 - DNA, 15 bp, Homo sapiens
gggtcgaggcctcaa

SEQ ID NO: 1430373 - DNA, 15 bp, Homo sapiens
tgggtcgaggcctca

SEQ ID NO: 1430374 - DNA, 15 bp, Homo sapiens
ctgggtcgaggcctc

SEQ ID NO: 1430375 - DNA, 15 bp, Homo sapiens
actgggtcgaggcct

SEQ ID NO: 1430376 - DNA, 15 bp, Homo sapiens
gactgggtcgaggcc

SEQ ID NO: 1430377 - DNA, 15 bp, Homo sapiens
ggactgggtcgaggc

SEQ ID NO: 1430378 - DNA, 15 bp, Homo sapiens
cggactgggtcgagg

SEQ ID NO: 1430379 - DNA, 15 bp, Homo sapiens
ccggactgggtcgag

SEQ ID NO: 1430380 - DNA, 15 bp, Homo sapiens
cccggactgggtcga

SEQ ID NO: 1430381 - DNA, 15 bp, Homo sapiens
acccggactgggtcg

SEQ ID NO: 1430382 - DNA, 15 bp, Homo sapiens
gacccggactgggtc

SEQ ID NO: 1430383 - DNA, 15 bp, Homo sapiens
ggacccggactgggt

SEQ ID NO: 1430384 - DNA, 15 bp, Homo sapiens
aggacccggactggg

SEQ ID NO: 1430385 - DNA, 15 bp, Homo sapiens
caggacccggactgg

SEQ ID NO: 1430386 - DNA, 15 bp, Homo sapiens
gcaggacccggactg

SEQ ID NO: 1430387 - DNA, 15 bp, Homo sapiens
cgcaggacccggact

SEQ ID NO: 1430388 - DNA, 15 bp, Homo sapiens
gcgcaggacccggac

SEQ ID NO: 1430389 - DNA, 15 bp, Homo sapiens
ggcgcaggacccgga

SEQ ID NO: 1430390 - DNA, 15 bp, Homo sapiens
aggcgcaggacccgg

SEQ ID NO: 1430391 - DNA, 15 bp, Homo sapiens
taggcgcaggacccg

SEQ ID NO: 1430392 - DNA, 15 bp, Homo sapiens
gtaggcgcaggaccc

SEQ ID NO: 1430393 - DNA, 15 bp, Homo sapiens
ggtaggcgcaggacc

SEQ ID NO: 1430394 - DNA, 15 bp, Homo sapiens
cggtaggcgcaggac

SEQ ID NO: 1430395 - DNA, 15 bp, Homo sapiens
ccggtaggcgcagga

SEQ ID NO: 1430396 - DNA, 15 bp, Homo sapiens
tccggtaggcgcagg

SEQ ID NO: 1430397 - DNA, 15 bp, Homo sapiens
gtccggtaggcgcag

SEQ ID NO: 1430398 - DNA, 15 bp, Homo sapiens
agtccggtaggcgca

SEQ ID NO: 1430399 - DNA, 15 bp, Homo sapiens
cagtccggtaggcgc

SEQ ID NO: 1430400 - DNA, 15 bp, Homo sapiens
ccagtccggtaggcg

SEQ ID NO: 1430401 - DNA, 15 bp, Homo sapiens
cccagtccggtaggc

SEQ ID NO: 1430402 - DNA, 15 bp, Homo sapiens
acccagtccggtagg

SEQ ID NO: 1430403 - DNA, 15 bp, Homo sapiens
aacccagtccggtag

SEQ ID NO: 1430404 - DNA, 15 bp, Homo sapiens
aaacccagtccggta

SEQ ID NO: 1430405 - DNA, 15 bp, Homo sapiens
caaacccagtccggt

SEQ ID NO: 1430406 - DNA, 15 bp, Homo sapiens
ccaaacccagtccgg

SEQ ID NO: 1430407 - DNA, 15 bp, Homo sapiens
tccaaacccagtccg

SEQ ID NO: 1430408 - DNA, 15 bp, Homo sapiens
ctccaaacccagtcc

SEQ ID NO: 1430409 - DNA, 15 bp, Homo sapiens
tctccaaacccagtc

SEQ ID NO: 1430410 - DNA, 15 bp, Homo sapiens
ttctccaaacccagt

SEQ ID NO: 1430411 - DNA, 15 bp, Homo sapiens
cttctccaaacccag

SEQ ID NO: 1430412 - DNA, 15 bp, Homo sapiens
acttctccaaaccca

SEQ ID NO: 1430413 - DNA, 15 bp, Homo sapiens
cacttctccaaaccc

SEQ ID NO: 1430414 - DNA, 15 bp, Homo sapiens
gcacttctccaaacc

SEQ ID NO: 1430415 - DNA, 15 bp, Homo sapiens
tgcacttctccaaac

SEQ ID NO: 1430416 - DNA, 15 bp, Homo sapiens
ttgcacttctccaaa

SEQ ID NO: 1430417 - DNA, 15 bp, Homo sapiens
cttgcacttctccaa

SEQ ID NO: 1430418 - DNA, 15 bp, Homo sapiens
ccttgcacttctcca

SEQ ID NO: 1430419 - DNA, 15 bp, Homo sapiens
tccttgcacttctcc

SEQ ID NO: 1430420 - DNA, 15 bp, Homo sapiens
ctccttgcacttctc

SEQ ID NO: 1430421 - DNA, 15 bp, Homo sapiens
gctccttgcacttct

SEQ ID NO: 1430422 - DNA, 15 bp, Homo sapiens
ggctccttgcacttc

SEQ ID NO: 1430423 - DNA, 15 bp, Homo sapiens
tggctccttgcactt

SEQ ID NO: 1430424 - DNA, 15 bp, Homo sapiens
ttggctccttgcact

SEQ ID NO: 1430425 - DNA, 15 bp, Homo sapiens
cttggctccttgcac

SEQ ID NO: 1430426 - DNA, 15 bp, Homo sapiens
tcttggctccttgca

SEQ ID NO: 1430427 - DNA, 15 bp, Homo sapiens
ttcttggctccttgc

SEQ ID NO: 1430428 - DNA, 15 bp, Homo sapiens
tttcttggctccttg

SEQ ID NO: 1430429 - DNA, 15 bp, Homo sapiens
ctttcttggctcctt

SEQ ID NO: 1430430 - DNA, 15 bp, Homo sapiens
actttcttggctcct

SEQ ID NO: 1430431 - DNA, 15 bp, Homo sapiens
aactttcttggctcc

SEQ ID NO: 1430432 - DNA, 15 bp, Homo sapiens
taactttcttggctc

SEQ ID NO: 1430433 - DNA, 15 bp, Homo sapiens
ttaactttcttggct

SEQ ID NO: 1430434 - DNA, 15 bp, Homo sapiens
gttaactttcttggc

SEQ ID NO: 1430435 - DNA, 15 bp, Homo sapiens
agttaactttcttgg

SEQ ID NO: 1430436 - DNA, 15 bp, Homo sapiens
aagttaactttcttg

SEQ ID NO: 1430437 - DNA, 15 bp, Homo sapiens
aaagttaactttctt

SEQ ID NO: 1430438 - DNA, 15 bp, Homo sapiens
aaaagttaactttct

SEQ ID NO: 1430439 - DNA, 15 bp, Homo sapiens
gaaaagttaactttc

SEQ ID NO: 1430440 - DNA, 15 bp, Homo sapiens
ggaaaagttaacttt

SEQ ID NO: 1430441 - DNA, 15 bp, Homo sapiens
aggaaaagttaactt

SEQ ID NO: 1430442 - DNA, 15 bp, Homo sapiens
gaggaaaagttaact

SEQ ID NO: 1430443 - DNA, 15 bp, Homo sapiens
ggaggaaaagttaac

SEQ ID NO: 1430444 - DNA, 15 bp, Homo sapiens
tggaggaaaagttaa

SEQ ID NO: 1430445 - DNA, 15 bp, Homo sapiens
atggaggaaaagtta

SEQ ID NO: 1430446 - DNA, 15 bp, Homo sapiens
aatggaggaaaagtt

SEQ ID NO: 1430447 - DNA, 15 bp, Homo sapiens
aaatggaggaaaagt

SEQ ID NO: 1430448 - DNA, 15 bp, Homo sapiens
taaatggaggaaaag

SEQ ID NO: 1430449 - DNA, 15 bp, Homo sapiens
ttaaatggaggaaaa

SEQ ID NO: 1430450 - DNA, 15 bp, Homo sapiens
tttaaatggaggaaa

SEQ ID NO: 1430451 - DNA, 15 bp, Homo sapiens
ctttaaatggaggaa

SEQ ID NO: 1430452 - DNA, 15 bp, Homo sapiens
gctttaaatggagga

SEQ ID NO: 1430453 - DNA, 15 bp, Homo sapiens
ggctttaaatggagg

SEQ ID NO: 1430454 - DNA, 15 bp, Homo sapiens
tggctttaaatggag

SEQ ID NO: 1430455 - DNA, 15 bp, Homo sapiens
ctggctttaaatgga

SEQ ID NO: 1430456 - DNA, 15 bp, Homo sapiens
actggctttaaatgg

SEQ ID NO: 1430457 - DNA, 15 bp, Homo sapiens
cactggctttaaatg

SEQ ID NO: 1430458 - DNA, 15 bp, Homo sapiens
ccactggctttaaat

SEQ ID NO: 1430459 - DNA, 15 bp, Homo sapiens
accactggctttaaa

SEQ ID NO: 1430460 - DNA, 15 bp, Homo sapiens
aaccactggctttaa

SEQ ID NO: 1430461 - DNA, 15 bp, Homo sapiens
taaccactggcttta

SEQ ID NO: 1430462 - DNA, 15 bp, Homo sapiens
ctaaccactggcttt

SEQ ID NO: 1430463 - DNA, 15 bp, Homo sapiens
gctaaccactggctt

SEQ ID NO: 1430464 - DNA, 15 bp, Homo sapiens
cgctaaccactggct

SEQ ID NO: 1430465 - DNA, 15 bp, Homo sapiens
ccgctaaccactggc

SEQ ID NO: 1430466 - DNA, 15 bp, Homo sapiens
cccgctaaccactgg

SEQ ID NO: 1430467 - DNA, 15 bp, Homo sapiens
ccccgctaaccactg

SEQ ID NO: 1430468 - DNA, 15 bp, Homo sapiens
tccccgctaaccact

SEQ ID NO: 1430469 - DNA, 15 bp, Homo sapiens
atccccgctaaccac

SEQ ID NO: 1430470 - DNA, 15 bp, Homo sapiens
gatccccgctaacca

SEQ ID NO: 1430471 - DNA, 15 bp, Homo sapiens
ggatccccgctaacc

SEQ ID NO: 1430472 - DNA, 15 bp, Homo sapiens
tggatccccgctaac

SEQ ID NO: 1430473 - DNA, 15 bp, Homo sapiens
gtggatccccgctaa

SEQ ID NO: 1430474 - DNA, 15 bp, Homo sapiens
ggtggatccccgcta

SEQ ID NO: 1430475 - DNA, 15 bp, Homo sapiens
aggtggatccccgct

SEQ ID NO: 1430476 - DNA, 15 bp, Homo sapiens
taggtggatccccgc

SEQ ID NO: 1430477 - DNA, 15 bp, Homo sapiens
gtaggtggatccccg

SEQ ID NO: 1430478 - DNA, 15 bp, Homo sapiens
agtaggtggatcccc

SEQ ID NO: 1430479 - DNA, 15 bp, Homo sapiens
gagtaggtggatccc

SEQ ID NO: 1430480 - DNA, 15 bp, Homo sapiens
ggagtaggtggatcc

SEQ ID NO: 1430481 - DNA, 15 bp, Homo sapiens
tggagtaggtggatc

SEQ ID NO: 1430482 - DNA, 15 bp, Homo sapiens
ctggagtaggtggat

SEQ ID NO: 1430483 - DNA, 15 bp, Homo sapiens
gctggagtaggtgga

SEQ ID NO: 1430484 - DNA, 15 bp, Homo sapiens
agctggagtaggtgg

SEQ ID NO: 1430485 - DNA, 15 bp, Homo sapiens
gagctggagtaggtg

SEQ ID NO: 1430486 - DNA, 15 bp, Homo sapiens
tgagctggagtaggt

SEQ ID NO: 1430487 - DNA, 15 bp, Homo sapiens
gtgagctggagtagg

SEQ ID NO: 1430488 - DNA, 15 bp, Homo sapiens
cgtgagctggagtag

SEQ ID NO: 1430489 - DNA, 15 bp, Homo sapiens
ccgtgagctggagta

SEQ ID NO: 1430490 - DNA, 15 bp, Homo sapiens
accgtgagctggagt

SEQ ID NO: 1430491 - DNA, 15 bp, Homo sapiens
gaccgtgagctggag

SEQ ID NO: 1430492 - DNA, 15 bp, Homo sapiens
tgaccgtgagctgga

SEQ ID NO: 1430493 - DNA, 15 bp, Homo sapiens
ttgaccgtgagctgg

SEQ ID NO: 1430494 - DNA, 15 bp, Homo sapiens
cttgaccgtgagctg

SEQ ID NO: 1430495 - DNA, 15 bp, Homo sapiens
ccttgaccgtgagct

SEQ ID NO: 1430496 - DNA, 15 bp, Homo sapiens
accttgaccgtgagc

SEQ ID NO: 1430497 - DNA, 15 bp, Homo sapiens
gaccttgaccgtgag

SEQ ID NO: 1430498 - DNA, 15 bp, Homo sapiens
ggaccttgaccgtga

SEQ ID NO: 1430499 - DNA, 15 bp, Homo sapiens
cggaccttgaccgtg

SEQ ID NO: 1430500 - DNA, 15 bp, Homo sapiens
tcggaccttgaccgt

SEQ ID NO: 1430501 - DNA, 15 bp, Homo sapiens
ctcggaccttgaccg

SEQ ID NO: 1430502 - DNA, 15 bp, Homo sapiens
gctcggaccttgacc

SEQ ID NO: 1430503 - DNA, 15 bp, Homo sapiens
agctcggaccttgac

SEQ ID NO: 1430504 - DNA, 15 bp, Homo sapiens
aagctcggaccttga

SEQ ID NO: 1430505 - DNA, 15 bp, Homo sapiens
gaagctcggaccttg

SEQ ID NO: 1430506 - DNA, 15 bp, Homo sapiens
tgaagctcggacctt

SEQ ID NO: 1430507 - DNA, 15 bp, Homo sapiens
ctgaagctcggacct

SEQ ID NO: 1430508 - DNA, 15 bp, Homo sapiens
gctgaagctcggacc

SEQ ID NO: 1430509 - DNA, 15 bp, Homo sapiens
agctgaagctcggac

SEQ ID NO: 1430510 - DNA, 15 bp, Homo sapiens
cagctgaagctcgga

SEQ ID NO: 1430511 - DNA, 15 bp, Homo sapiens
ccagctgaagctcgg

SEQ ID NO: 1430512 - DNA, 15 bp, Homo sapiens
accagctgaagctcg

SEQ ID NO: 1430513 - DNA, 15 bp, Homo sapiens
gaccagctgaagctc

SEQ ID NO: 1430514 - DNA, 15 bp, Homo sapiens
agaccagctgaagct

SEQ ID NO: 1430515 - DNA, 15 bp, Homo sapiens
gagaccagctgaagc

SEQ ID NO: 1430516 - DNA, 15 bp, Homo sapiens
tgagaccagctgaag

SEQ ID NO: 1430517 - DNA, 15 bp, Homo sapiens
atgagaccagctgaa

SEQ ID NO: 1430518 - DNA, 15 bp, Homo sapiens
gatgagaccagctga

SEQ ID NO: 1430519 - DNA, 15 bp, Homo sapiens
agatgagaccagctg

SEQ ID NO: 1430520 - DNA, 15 bp, Homo sapiens
tagatgagaccagct

SEQ ID NO: 1430521 - DNA, 15 bp, Homo sapiens
ctagatgagaccagc

SEQ ID NO: 1430522 - DNA, 15 bp, Homo sapiens
tctagatgagaccag

SEQ ID NO: 1430523 - DNA, 15 bp, Homo sapiens
ttctagatgagacca

SEQ ID NO: 1430524 - DNA, 15 bp, Homo sapiens
gttctagatgagacc

SEQ ID NO: 1430525 - DNA, 15 bp, Homo sapiens
agttctagatgagac

SEQ ID NO: 1430526 - DNA, 15 bp, Homo sapiens
gagttctagatgaga

SEQ ID NO: 1430527 - DNA, 15 bp, Homo sapiens
tgagttctagatgag

SEQ ID NO: 1430528 - DNA, 15 bp, Homo sapiens
ctgagttctagatga

SEQ ID NO: 1430529 - DNA, 15 bp, Homo sapiens
tctgagttctagatg

SEQ ID NO: 1430530 - DNA, 15 bp, Homo sapiens
atctgagttctagat

SEQ ID NO: 1430531 - DNA, 15 bp, Homo sapiens
catctgagttctaga

SEQ ID NO: 1430532 - DNA, 15 bp, Homo sapiens
ccatctgagttctag

SEQ ID NO: 1430533 - DNA, 15 bp, Homo sapiens
tccatctgagttcta

SEQ ID NO: 1430534 - DNA, 15 bp, Homo sapiens
ttccatctgagttct

SEQ ID NO: 1430535 - DNA, 15 bp, Homo sapiens
attccatctgagttc

SEQ ID NO: 1430536 - DNA, 15 bp, Homo sapiens
cattccatctgagtt

SEQ ID NO: 1430537 - DNA, 15 bp, Homo sapiens
tcattccatctgagt

SEQ ID NO: 1430538 - DNA, 15 bp, Homo sapiens
gtcattccatctgag

SEQ ID NO: 1430539 - DNA, 15 bp, Homo sapiens
ggtcattccatctga

SEQ ID NO: 1430540 - DNA, 15 bp, Homo sapiens
aggtcattccatctg

SEQ ID NO: 1430541 - DNA, 15 bp, Homo sapiens
aaggtcattccatct

SEQ ID NO: 1430542 - DNA, 15 bp, Homo sapiens
gaaggtcattccatc

SEQ ID NO: 1430543 - DNA, 15 bp, Homo sapiens
ggaaggtcattccat

SEQ ID NO: 1430544 - DNA, 15 bp, Homo sapiens
aggaaggtcattcca

SEQ ID NO: 1430545 - DNA, 15 bp, Homo sapiens
aaggaaggtcattcc

SEQ ID NO: 1430546 - DNA, 15 bp, Homo sapiens
caaggaaggtcattc

SEQ ID NO: 1430547 - DNA, 15 bp, Homo sapiens
tcaaggaaggtcatt

SEQ ID NO: 1430548 - DNA, 15 bp, Homo sapiens
ttcaaggaaggtcat

SEQ ID NO: 1430549 - DNA, 15 bp, Homo sapiens
tttcaaggaaggtca

SEQ ID NO: 1430550 - DNA, 15 bp, Homo sapiens
ctttcaaggaaggtc

SEQ ID NO: 1430551 - DNA, 15 bp, Homo sapiens
cctttcaaggaaggt

SEQ ID NO: 1430552 - DNA, 15 bp, Homo sapiens
acctttcaaggaagg

SEQ ID NO: 1430553 - DNA, 15 bp, Homo sapiens
gacctttcaaggaag

SEQ ID NO: 1430554 - DNA, 15 bp, Homo sapiens
cgacctttcaaggaa

SEQ ID NO: 1430555 - DNA, 15 bp, Homo sapiens
tcgacctttcaagga

SEQ ID NO: 1430556 - DNA, 15 bp, Homo sapiens
ctcgacctttcaagg

SEQ ID NO: 1430557 - DNA, 15 bp, Homo sapiens
cctcgacctttcaag

SEQ ID NO: 1430558 - DNA, 15 bp, Homo sapiens
ccctcgacctttcaa

SEQ ID NO: 1430559 - DNA, 15 bp, Homo sapiens
cccctcgacctttca

SEQ ID NO: 1430560 - DNA, 15 bp, Homo sapiens
tcccctcgacctttc

SEQ ID NO: 1430561 - DNA, 15 bp, Homo sapiens
gtcccctcgaccttt

SEQ ID NO: 1430562 - DNA, 15 bp, Homo sapiens
agtcccctcgacctt

SEQ ID NO: 1430563 - DNA, 15 bp, Homo sapiens
gagtcccctcgacct

SEQ ID NO: 1430564 - DNA, 15 bp, Homo sapiens
agagtcccctcgacc

SEQ ID NO: 1430565 - DNA, 15 bp, Homo sapiens
gagagtcccctcgac

SEQ ID NO: 1430566 - DNA, 15 bp, Homo sapiens
cgagagtcccctcga

SEQ ID NO: 1430567 - DNA, 15 bp, Homo sapiens
tcgagagtcccctcg

SEQ ID NO: 1430568 - DNA, 15 bp, Homo sapiens
ttcgagagtcccctc

SEQ ID NO: 1430569 - DNA, 15 bp, Homo sapiens
tttcgagagtcccct

SEQ ID NO: 1430570 - DNA, 15 bp, Homo sapiens
ctttcgagagtcccc

SEQ ID NO: 1430571 - DNA, 15 bp, Homo sapiens
actttcgagagtccc

SEQ ID NO: 1430572 - DNA, 15 bp, Homo sapiens
aactttcgagagtcc

SEQ ID NO: 1430573 - DNA, 15 bp, Homo sapiens
caactttcgagagtc

SEQ ID NO: 1430574 - DNA, 15 bp, Homo sapiens
acaactttcgagagt

SEQ ID NO: 1430575 - DNA, 15 bp, Homo sapiens
cacaactttcgagag

SEQ ID NO: 1430576 - DNA, 15 bp, Homo sapiens
tcacaactttcgaga

SEQ ID NO: 1430577 - DNA, 15 bp, Homo sapiens
ctcacaactttcgag

SEQ ID NO: 1430578 - DNA, 15 bp, Homo sapiens
tctcacaactttcga

SEQ ID NO: 1430579 - DNA, 15 bp, Homo sapiens
ctctcacaactttcg

SEQ ID NO: 1430580 - DNA, 15 bp, Homo sapiens
tctctcacaactttc

SEQ ID NO: 1430581 - DNA, 15 bp, Homo sapiens
ctctctcacaacttt

SEQ ID NO: 1430582 - DNA, 15 bp, Homo sapiens
actctctcacaactt

SEQ ID NO: 1430583 - DNA, 15 bp, Homo sapiens
aactctctcacaact

SEQ ID NO: 1430584 - DNA, 15 bp, Homo sapiens
gaactctctcacaac

SEQ ID NO: 1430585 - DNA, 15 bp, Homo sapiens
ggaactctctcacaa

SEQ ID NO: 1430586 - DNA, 15 bp, Homo sapiens
aggaactctctcaca

SEQ ID NO: 1430587 - DNA, 15 bp, Homo sapiens
gaggaactctctcac

SEQ ID NO: 1430588 - DNA, 15 bp, Homo sapiens
tgaggaactctctca

SEQ ID NO: 1430589 - DNA, 15 bp, Homo sapiens
gtgaggaactctctc

SEQ ID NO: 1430590 - DNA, 15 bp, Homo sapiens
ggtgaggaactctct

SEQ ID NO: 1430591 - DNA, 15 bp, Homo sapiens
aggtgaggaactctc

SEQ ID NO: 1430592 - DNA, 15 bp, Homo sapiens
aaggtgaggaactct

SEQ ID NO: 1430593 - DNA, 15 bp, Homo sapiens
aaaggtgaggaactc

SEQ ID NO: 1430594 - DNA, 15 bp, Homo sapiens
aaaaggtgaggaact

SEQ ID NO: 1430595 - DNA, 15 bp, Homo sapiens
gaaaaggtgaggaac

SEQ ID NO: 1430596 - DNA, 15 bp, Homo sapiens
cgaaaaggtgaggaa

SEQ ID NO: 1430597 - DNA, 15 bp, Homo sapiens
gcgaaaaggtgagga

SEQ ID NO: 1430598 - DNA, 15 bp, Homo sapiens
agcgaaaaggtgagg

SEQ ID NO: 1430599 - DNA, 15 bp, Homo sapiens
gagcgaaaaggtgag

SEQ ID NO: 1430600 - DNA, 15 bp, Homo sapiens
agagcgaaaaggtga

SEQ ID NO: 1430601 - DNA, 15 bp, Homo sapiens
tagagcgaaaaggtg

SEQ ID NO: 1430602 - DNA, 15 bp, Homo sapiens
gtagagcgaaaaggt

SEQ ID NO: 1430603 - DNA, 15 bp, Homo sapiens
tgtagagcgaaaagg

SEQ ID NO: 1430604 - DNA, 15 bp, Homo sapiens
atgtagagcgaaaag

SEQ ID NO: 1430605 - DNA, 15 bp, Homo sapiens
tatgtagagcgaaaa

SEQ ID NO: 1430606 - DNA, 15 bp, Homo sapiens
ctatgtagagcgaaa

SEQ ID NO: 1430607 - DNA, 15 bp, Homo sapiens
cctatgtagagcgaa

SEQ ID NO: 1430608 - DNA, 15 bp, Homo sapiens
gcctatgtagagcga

SEQ ID NO: 1430609 - DNA, 15 bp, Homo sapiens
tgcctatgtagagcg

SEQ ID NO: 1430610 - DNA, 15 bp, Homo sapiens
atgcctatgtagagc

SEQ ID NO: 1430611 - DNA, 15 bp, Homo sapiens
aatgcctatgtagag

SEQ ID NO: 1430612 - DNA, 15 bp, Homo sapiens
aaatgcctatgtaga

SEQ ID NO: 1430613 - DNA, 15 bp, Homo sapiens
aaaatgcctatgtag

SEQ ID NO: 1430614 - DNA, 15 bp, Homo sapiens
gaaaatgcctatgta

SEQ ID NO: 1430615 - DNA, 15 bp, Homo sapiens
tgaaaatgcctatgt

SEQ ID NO: 1430616 - DNA, 15 bp, Homo sapiens
ttgaaaatgcctatg

SEQ ID NO: 1430617 - DNA, 15 bp, Homo sapiens
gttgaaaatgcctat

SEQ ID NO: 1430618 - DNA, 15 bp, Homo sapiens
agttgaaaatgccta

SEQ ID NO: 1430619 - DNA, 15 bp, Homo sapiens
aagttgaaaatgcct

SEQ ID NO: 1430620 - DNA, 15 bp, Homo sapiens
caagttgaaaatgcc

SEQ ID NO: 1430621 - DNA, 15 bp, Homo sapiens
ccaagttgaaaatgc

SEQ ID NO: 1430622 - DNA, 15 bp, Homo sapiens
cccaagttgaaaatg

SEQ ID NO: 1430623 - DNA, 15 bp, Homo sapiens
ccccaagttgaaaat

SEQ ID NO: 1430624 - DNA, 15 bp, Homo sapiens
accccaagttgaaaa

SEQ ID NO: 1430625 - DNA, 15 bp, Homo sapiens
aaccccaagttgaaa

SEQ ID NO: 1430626 - DNA, 15 bp, Homo sapiens
gaaccccaagttgaa

SEQ ID NO: 1430627 - DNA, 15 bp, Homo sapiens
tgaaccccaagttga

SEQ ID NO: 1430628 - DNA, 15 bp, Homo sapiens
ttgaaccccaagttg

SEQ ID NO: 1430629 - DNA, 15 bp, Homo sapiens
tttgaaccccaagtt

SEQ ID NO: 1430630 - DNA, 15 bp, Homo sapiens
ctttgaaccccaagt

SEQ ID NO: 1430631 - DNA, 15 bp, Homo sapiens
tctttgaaccccaag

SEQ ID NO: 1430632 - DNA, 15 bp, Homo sapiens
atctttgaaccccaa

SEQ ID NO: 1430633 - DNA, 15 bp, Homo sapiens
tatctttgaacccca

SEQ ID NO: 1430634 - DNA, 15 bp, Homo sapiens
ttatctttgaacccc

SEQ ID NO: 1430635 - DNA, 15 bp, Homo sapiens
cttatctttgaaccc

SEQ ID NO: 1430636 - DNA, 15 bp, Homo sapiens
gcttatctttgaacc

SEQ ID NO: 1430637 - DNA, 15 bp, Homo sapiens
agcttatctttgaac

SEQ ID NO: 1430638 - DNA, 15 bp, Homo sapiens
aagcttatctttgaa

SEQ ID NO: 1430639 - DNA, 15 bp, Homo sapiens
aaagcttatctttga

SEQ ID NO: 1430640 - DNA, 15 bp, Homo sapiens
aaaagcttatctttg

SEQ ID NO: 1430641 - DNA, 15 bp, Homo sapiens
caaaagcttatcttt

SEQ ID NO: 1430642 - DNA, 15 bp, Homo sapiens
acaaaagcttatctt

SEQ ID NO: 1430643 - DNA, 15 bp, Homo sapiens
cacaaaagcttatct

SEQ ID NO: 1430644 - DNA, 15 bp, Homo sapiens
ccacaaaagcttatc

SEQ ID NO: 1430645 - DNA, 15 bp, Homo sapiens
gccacaaaagcttat

SEQ ID NO: 1430646 - DNA, 15 bp, Homo sapiens
agccacaaaagctta

SEQ ID NO: 1430647 - DNA, 15 bp, Homo sapiens
aagccacaaaagctt

SEQ ID NO: 1430648 - DNA, 15 bp, Homo sapiens
caagccacaaaagct

SEQ ID NO: 1430649 - DNA, 15 bp, Homo sapiens
tcaagccacaaaagc

SEQ ID NO: 1430650 - DNA, 15 bp, Homo sapiens
gtcaagccacaaaag

SEQ ID NO: 1430651 - DNA, 15 bp, Homo sapiens
tgtcaagccacaaaa

SEQ ID NO: 1430652 - DNA, 15 bp, Homo sapiens
ttgtcaagccacaaa

SEQ ID NO: 1430653 - DNA, 15 bp, Homo sapiens
tttgtcaagccacaa

SEQ ID NO: 1430654 - DNA, 15 bp, Homo sapiens
gtttgtcaagccaca

SEQ ID NO: 1430655 - DNA, 15 bp, Homo sapiens
cgtttgtcaagccac

SEQ ID NO: 1430656 - DNA, 15 bp, Homo sapiens
tcgtttgtcaagcca

SEQ ID NO: 1430657 - DNA, 15 bp, Homo sapiens
gtcgtttgtcaagcc

SEQ ID NO: 1430658 - DNA, 15 bp, Homo sapiens
ggtcgtttgtcaagc

SEQ ID NO: 1430659 - DNA, 15 bp, Homo sapiens
gggtcgtttgtcaag

SEQ ID NO: 1430660 - DNA, 15 bp, Homo sapiens
cgggtcgtttgtcaa

SEQ ID NO: 1430661 - DNA, 15 bp, Homo sapiens
ccgggtcgtttgtca

SEQ ID NO: 1430662 - DNA, 15 bp, Homo sapiens
tccgggtcgtttgtc

SEQ ID NO: 1430663 - DNA, 15 bp, Homo sapiens
ttccgggtcgtttgt

SEQ ID NO: 1430664 - DNA, 15 bp, Homo sapiens
attccgggtcgtttg

SEQ ID NO: 1430665 - DNA, 15 bp, Homo sapiens
gattccgggtcgttt

SEQ ID NO: 1430666 - DNA, 15 bp, Homo sapiens
tgattccgggtcgtt

SEQ ID NO: 1430667 - DNA, 15 bp, Homo sapiens
ttgattccgggtcgt

SEQ ID NO: 1430668 - DNA, 15 bp, Homo sapiens
tttgattccgggtcg

SEQ ID NO: 1430669 - DNA, 15 bp, Homo sapiens
atttgattccgggtc

SEQ ID NO: 1430670 - DNA, 15 bp, Homo sapiens
catttgattccgggt

SEQ ID NO: 1430671 - DNA, 15 bp, Homo sapiens
acatttgattccggg

SEQ ID NO: 1430672 - DNA, 15 bp, Homo sapiens
cacatttgattccgg

SEQ ID NO: 1430673 - DNA, 15 bp, Homo sapiens
ccacatttgattccg

SEQ ID NO: 1430674 - DNA, 15 bp, Homo sapiens
tccacatttgattcc

SEQ ID NO: 1430675 - DNA, 15 bp, Homo sapiens
ttccacatttgattc

SEQ ID NO: 1430676 - DNA, 15 bp, Homo sapiens
attccacatttgatt

SEQ ID NO: 1430677 - DNA, 15 bp, Homo sapiens
tattccacatttgat

SEQ ID NO: 1430678 - DNA, 15 bp, Homo sapiens
atattccacatttga

SEQ ID NO: 1430679 - DNA, 15 bp, Homo sapiens
aatattccacatttg

SEQ ID NO: 1430680 - DNA, 15 bp, Homo sapiens
caatattccacattt

SEQ ID NO: 1430681 - DNA, 15 bp, Homo sapiens
gcaatattccacatt

SEQ ID NO: 1430682 - DNA, 15 bp, Homo sapiens
cgcaatattccacat

SEQ ID NO: 1430683 - DNA, 15 bp, Homo sapiens
ccgcaatattccaca

SEQ ID NO: 1430684 - DNA, 15 bp, Homo sapiens
cccgcaatattccac

SEQ ID NO: 1430685 - DNA, 15 bp, Homo sapiens
acccgcaatattcca

SEQ ID NO: 1430686 - DNA, 15 bp, Homo sapiens
gacccgcaatattcc

SEQ ID NO: 1430687 - DNA, 15 bp, Homo sapiens
ggacccgcaatattc

SEQ ID NO: 1430688 - DNA, 15 bp, Homo sapiens
tggacccgcaatatt

SEQ ID NO: 1430689 - DNA, 15 bp, Homo sapiens
atggacccgcaatat

SEQ ID NO: 1430690 - DNA, 15 bp, Homo sapiens
aatggacccgcaata

SEQ ID NO: 1430691 - DNA, 15 bp, Homo sapiens
aaatggacccgcaat

SEQ ID NO: 1430692 - DNA, 15 bp, Homo sapiens
aaaatggacccgcaa

SEQ ID NO: 1430693 - DNA, 15 bp, Homo sapiens
caaaatggacccgca

SEQ ID NO: 1430694 - DNA, 15 bp, Homo sapiens
ccaaaatggacccgc

SEQ ID NO: 1430695 - DNA, 15 bp, Homo sapiens
cccaaaatggacccg

SEQ ID NO: 1430696 - DNA, 15 bp, Homo sapiens
tcccaaaatggaccc

SEQ ID NO: 1430697 - DNA, 15 bp, Homo sapiens
ttcccaaaatggacc

SEQ ID NO: 1430698 - DNA, 15 bp, Homo sapiens
cttcccaaaatggac

SEQ ID NO: 1430699 - DNA, 15 bp, Homo sapiens
acttcccaaaatgga

SEQ ID NO: 1430700 - DNA, 15 bp, Homo sapiens
tacttcccaaaatgg

SEQ ID NO: 1430701 - DNA, 15 bp, Homo sapiens
gtacttcccaaaatg

SEQ ID NO: 1430702 - DNA, 15 bp, Homo sapiens
tgtacttcccaaaat

SEQ ID NO: 1430703 - DNA, 15 bp, Homo sapiens
ctgtacttcccaaaa

SEQ ID NO: 1430704 - DNA, 15 bp, Homo sapiens
tctgtacttcccaaa

SEQ ID NO: 1430705 - DNA, 15 bp, Homo sapiens
ctctgtacttcccaa

SEQ ID NO: 1430706 - DNA, 15 bp, Homo sapiens
cctctgtacttccca

SEQ ID NO: 1430707 - DNA, 15 bp, Homo sapiens
ccctctgtacttccc

SEQ ID NO: 1430708 - DNA, 15 bp, Homo sapiens
gccctctgtacttcc

SEQ ID NO: 1430709 - DNA, 15 bp, Homo sapiens
agccctctgtacttc

SEQ ID NO: 1430710 - DNA, 15 bp, Homo sapiens
gagccctctgtactt

SEQ ID NO: 1430711 - DNA, 15 bp, Homo sapiens
ggagccctctgtact

SEQ ID NO: 1430712 - DNA, 15 bp, Homo sapiens
aggagccctctgtac

SEQ ID NO: 1430713 - DNA, 15 bp, Homo sapiens
taggagccctctgta

SEQ ID NO: 1430714 - DNA, 15 bp, Homo sapiens
ctaggagccctctgt

SEQ ID NO: 1430715 - DNA, 15 bp, Homo sapiens
actaggagccctctg

SEQ ID NO: 1430716 - DNA, 15 bp, Homo sapiens
aactaggagccctct

SEQ ID NO: 1430717 - DNA, 15 bp, Homo sapiens
aaactaggagccctc

SEQ ID NO: 1430718 - DNA, 15 bp, Homo sapiens
aaaactaggagccct

SEQ ID NO: 1430719 - DNA, 15 bp, Homo sapiens
gaaaactaggagccc

SEQ ID NO: 1430720 - DNA, 15 bp, Homo sapiens
tgaaaactaggagcc

SEQ ID NO: 1430721 - DNA, 15 bp, Homo sapiens
atgaaaactaggagc

SEQ ID NO: 1430722 - DNA, 15 bp, Homo sapiens
catgaaaactaggag

SEQ ID NO: 1430723 - DNA, 15 bp, Homo sapiens
tcatgaaaactagga

SEQ ID NO: 1430724 - DNA, 15 bp, Homo sapiens
ttcatgaaaactagg

SEQ ID NO: 1430725 - DNA, 15 bp, Homo sapiens
tttcatgaaaactag

SEQ ID NO: 1430726 - DNA, 15 bp, Homo sapiens
atttcatgaaaacta

SEQ ID NO: 1430727 - DNA, 15 bp, Homo sapiens
tatttcatgaaaact

SEQ ID NO: 1430728 - DNA, 15 bp, Homo sapiens
ctatttcatgaaaac

SEQ ID NO: 1430729 - DNA, 15 bp, Homo sapiens
tctatttcatgaaaa

SEQ ID NO: 1430730 - DNA, 15 bp, Homo sapiens
atctatttcatgaaa

SEQ ID NO: 1430731 - DNA, 15 bp, Homo sapiens
aatctatttcatgaa

SEQ ID NO: 1430732 - DNA, 15 bp, Homo sapiens
gaatctatttcatga

SEQ ID NO: 1430733 - DNA, 15 bp, Homo sapiens
agaatctatttcatg

SEQ ID NO: 1430734 - DNA, 15 bp, Homo sapiens
gagaatctatttcat

SEQ ID NO: 1430735 - DNA, 15 bp, Homo sapiens
tgagaatctatttca

SEQ ID NO: 1430736 - DNA, 15 bp, Homo sapiens
ttgagaatctatttc

SEQ ID NO: 1430737 - DNA, 15 bp, Homo sapiens
tttgagaatctattt

SEQ ID NO: 1430738 - DNA, 15 bp, Homo sapiens
ttttgagaatctatt

SEQ ID NO: 1430739 - DNA, 15 bp, Homo sapiens
cttttgagaatctat

SEQ ID NO: 1430740 - DNA, 15 bp, Homo sapiens
tcttttgagaatcta

SEQ ID NO: 1430741 - DNA, 15 bp, Homo sapiens
ctcttttgagaatct

SEQ ID NO: 1430742 - DNA, 15 bp, Homo sapiens
actcttttgagaatc

SEQ ID NO: 1430743 - DNA, 15 bp, Homo sapiens
gactcttttgagaat

SEQ ID NO: 1430744 - DNA, 15 bp, Homo sapiens
agactcttttgagaa

SEQ ID NO: 1430745 - DNA, 15 bp, Homo sapiens
tagactcttttgaga

SEQ ID NO: 1430746 - DNA, 15 bp, Homo sapiens
gtagactcttttgag

SEQ ID NO: 1430747 - DNA, 15 bp, Homo sapiens
tgtagactcttttga

SEQ ID NO: 1430748 - DNA, 15 bp, Homo sapiens
ctgtagactcttttg

SEQ ID NO: 1430749 - DNA, 15 bp, Homo sapiens
cctgtagactctttt

SEQ ID NO: 1430750 - DNA, 15 bp, Homo sapiens
ccctgtagactcttt

SEQ ID NO: 1430751 - DNA, 15 bp, Homo sapiens
tccctgtagactctt

SEQ ID NO: 1430752 - DNA, 15 bp, Homo sapiens
ctccctgtagactct

SEQ ID NO: 1430753 - DNA, 15 bp, Homo sapiens
gctccctgtagactc

SEQ ID NO: 1430754 - DNA, 15 bp, Homo sapiens
ggctccctgtagact

SEQ ID NO: 1430755 - DNA, 15 bp, Homo sapiens
aggctccctgtagac

SEQ ID NO: 1430756 - DNA, 15 bp, Homo sapiens
taggctccctgtaga

SEQ ID NO: 1430757 - DNA, 15 bp, Homo sapiens
ctaggctccctgtag

SEQ ID NO: 1430758 - DNA, 15 bp, Homo sapiens
actaggctccctgta

SEQ ID NO: 1430759 - DNA, 15 bp, Homo sapiens
aactaggctccctgt

SEQ ID NO: 1430760 - DNA, 15 bp, Homo sapiens
taactaggctccctg

SEQ ID NO: 1430761 - DNA, 15 bp, Homo sapiens
gtaactaggctccct

SEQ ID NO: 1430762 - DNA, 15 bp, Homo sapiens
ggtaactaggctccc

SEQ ID NO: 1430763 - DNA, 15 bp, Homo sapiens
gggtaactaggctcc

SEQ ID NO: 1430764 - DNA, 15 bp, Homo sapiens
agggtaactaggctc

SEQ ID NO: 1430765 - DNA, 15 bp, Homo sapiens
aagggtaactaggct

SEQ ID NO: 1430766 - DNA, 15 bp, Homo sapiens
aaagggtaactaggc

SEQ ID NO: 1430767 - DNA, 15 bp, Homo sapiens
caaagggtaactagg

SEQ ID NO: 1430768 - DNA, 15 bp, Homo sapiens
acaaagggtaactag

SEQ ID NO: 1430769 - DNA, 15 bp, Homo sapiens
cacaaagggtaacta

SEQ ID NO: 1430770 - DNA, 15 bp, Homo sapiens
acacaaagggtaact

SEQ ID NO: 1430771 - DNA, 15 bp, Homo sapiens
aacacaaagggtaac

SEQ ID NO: 1430772 - DNA, 15 bp, Homo sapiens
aaacacaaagggtaa

SEQ ID NO: 1430773 - DNA, 15 bp, Homo sapiens
taaacacaaagggta

SEQ ID NO: 1430774 - DNA, 15 bp, Homo sapiens
ctaaacacaaagggt

SEQ ID NO: 1430775 - DNA, 15 bp, Homo sapiens
cctaaacacaaaggg

SEQ ID NO: 1430776 - DNA, 15 bp, Homo sapiens
ccctaaacacaaagg

SEQ ID NO: 1430777 - DNA, 15 bp, Homo sapiens
tccctaaacacaaag

SEQ ID NO: 1430778 - DNA, 15 bp, Homo sapiens
gtccctaaacacaaa

SEQ ID NO: 1430779 - DNA, 15 bp, Homo sapiens
tgtccctaaacacaa

SEQ ID NO: 1430780 - DNA, 15 bp, Homo sapiens
ctgtccctaaacaca

SEQ ID NO: 1430781 - DNA, 15 bp, Homo sapiens
actgtccctaaacac

SEQ ID NO: 1430782 - DNA, 15 bp, Homo sapiens
gactgtccctaaaca

SEQ ID NO: 1430783 - DNA, 15 bp, Homo sapiens
tgactgtccctaaac

SEQ ID NO: 1430784 - DNA, 15 bp, Homo sapiens
ctgactgtccctaaa

SEQ ID NO: 1430785 - DNA, 15 bp, Homo sapiens
cctgactgtccctaa

SEQ ID NO: 1430786 - DNA, 15 bp, Homo sapiens
tcctgactgtcccta

SEQ ID NO: 1430787 - DNA, 15 bp, Homo sapiens
ctcctgactgtccct

SEQ ID NO: 1430788 - DNA, 15 bp, Homo sapiens
actcctgactgtccc

SEQ ID NO: 1430789 - DNA, 15 bp, Homo sapiens
gactcctgactgtcc

SEQ ID NO: 1430790 - DNA, 15 bp, Homo sapiens
cgactcctgactgtc

SEQ ID NO: 1430791 - DNA, 15 bp, Homo sapiens
acgactcctgactgt

SEQ ID NO: 1430792 - DNA, 15 bp, Homo sapiens
gacgactcctgactg

SEQ ID NO: 1430793 - DNA, 15 bp, Homo sapiens
agacgactcctgact

SEQ ID NO: 1430794 - DNA, 15 bp, Homo sapiens
cagacgactcctgac

SEQ ID NO: 1430795 - DNA, 15 bp, Homo sapiens
ccagacgactcctga

SEQ ID NO: 1430796 - DNA, 15 bp, Homo sapiens
tccagacgactcctg

SEQ ID NO: 1430797 - DNA, 15 bp, Homo sapiens
ctccagacgactcct

SEQ ID NO: 1430798 - DNA, 15 bp, Homo sapiens
tctccagacgactcc

SEQ ID NO: 1430799 - DNA, 15 bp, Homo sapiens
ttctccagacgactc

SEQ ID NO: 1430800 - DNA, 15 bp, Homo sapiens
gttctccagacgact

SEQ ID NO: 1430801 - DNA, 15 bp, Homo sapiens
tgttctccagacgac

SEQ ID NO: 1430802 - DNA, 15 bp, Homo sapiens
ctgttctccagacga

SEQ ID NO: 1430803 - DNA, 15 bp, Homo sapiens
actgttctccagacg

SEQ ID NO: 1430804 - DNA, 15 bp, Homo sapiens
tactgttctccagac

SEQ ID NO: 1430805 - DNA, 15 bp, Homo sapiens
ttactgttctccaga

SEQ ID NO: 1430806 - DNA, 15 bp, Homo sapiens
tttactgttctccag

SEQ ID NO: 1430807 - DNA, 15 bp, Homo sapiens
ttttactgttctcca

SEQ ID NO: 1430808 - DNA, 15 bp, Homo sapiens
gttttactgttctcc

SEQ ID NO: 1430809 - DNA, 15 bp, Homo sapiens
agttttactgttctc

SEQ ID NO: 1430810 - DNA, 15 bp, Homo sapiens
aagttttactgttct

SEQ ID NO: 1430811 - DNA, 15 bp, Homo sapiens
caagttttactgttc

SEQ ID NO: 1430812 - DNA, 15 bp, Homo sapiens
gcaagttttactgtt

SEQ ID NO: 1430813 - DNA, 15 bp, Homo sapiens
agcaagttttactgt

SEQ ID NO: 1430814 - DNA, 15 bp, Homo sapiens
cagcaagttttactg

SEQ ID NO: 1430815 - DNA, 15 bp, Homo sapiens
tcagcaagttttact

SEQ ID NO: 1430816 - DNA, 15 bp, Homo sapiens
ttcagcaagttttac

SEQ ID NO: 1430817 - DNA, 15 bp, Homo sapiens
tttcagcaagtttta

SEQ ID NO: 1430818 - DNA, 15 bp, Homo sapiens
ttttcagcaagtttt

SEQ ID NO: 1430819 - DNA, 15 bp, Homo sapiens
attttcagcaagttt

SEQ ID NO: 1430820 - DNA, 15 bp, Homo sapiens
tattttcagcaagtt

SEQ ID NO: 1430821 - DNA, 15 bp, Homo sapiens
ctattttcagcaagt

SEQ ID NO: 1430822 - DNA, 15 bp, Homo sapiens
tctattttcagcaag

SEQ ID NO: 1430823 - DNA, 15 bp, Homo sapiens
ttctattttcagcaa

SEQ ID NO: 1430824 - DNA, 15 bp, Homo sapiens
tttctattttcagca

SEQ ID NO: 1430825 - DNA, 15 bp, Homo sapiens
ttttctattttcagc

SEQ ID NO: 1430826 - DNA, 15 bp, Homo sapiens
gttttctattttcag

SEQ ID NO: 1430827 - DNA, 15 bp, Homo sapiens
ggttttctattttca

SEQ ID NO: 1430828 - DNA, 15 bp, Homo sapiens
aggttttctattttc

SEQ ID NO: 1430829 - DNA, 15 bp, Homo sapiens
aaggttttctatttt

SEQ ID NO: 1430830 - DNA, 15 bp, Homo sapiens
gaaggttttctattt

SEQ ID NO: 1430831 - DNA, 15 bp, Homo sapiens
tgaaggttttctatt

SEQ ID NO: 1430832 - DNA, 15 bp, Homo sapiens
ctgaaggttttctat

SEQ ID NO: 1430833 - DNA, 15 bp, Homo sapiens
actgaaggttttcta

SEQ ID NO: 1430834 - DNA, 15 bp, Homo sapiens
cactgaaggttttct

SEQ ID NO: 1430835 - DNA, 15 bp, Homo sapiens
tcactgaaggttttc

SEQ ID NO: 1430836 - DNA, 15 bp, Homo sapiens
ttcactgaaggtttt

SEQ ID NO: 1430837 - DNA, 15 bp, Homo sapiens
tttcactgaaggttt

SEQ ID NO: 1430838 - DNA, 15 bp, Homo sapiens
atttcactgaaggtt

SEQ ID NO: 1430839 - DNA, 15 bp, Homo sapiens
catttcactgaaggt

SEQ ID NO: 1430840 - DNA, 15 bp, Homo sapiens
acatttcactgaagg

SEQ ID NO: 1430841 - DNA, 15 bp, Homo sapiens
tacatttcactgaag

SEQ ID NO: 1430842 - DNA, 15 bp, Homo sapiens
gtacatttcactgaa

SEQ ID NO: 1430843 - DNA, 15 bp, Homo sapiens
ggtacatttcactga

SEQ ID NO: 1430844 - DNA, 15 bp, Homo sapiens
aggtacatttcactg

SEQ ID NO: 1430845 - DNA, 15 bp, Homo sapiens
taggtacatttcact

SEQ ID NO: 1430846 - DNA, 15 bp, Homo sapiens
ttaggtacatttcac

SEQ ID NO: 1430847 - DNA, 15 bp, Homo sapiens
attaggtacatttca

SEQ ID NO: 1430848 - DNA, 15 bp, Homo sapiens
tattaggtacatttc

SEQ ID NO: 1430849 - DNA, 15 bp, Homo sapiens
atattaggtacattt

SEQ ID NO: 1430850 - DNA, 15 bp, Homo sapiens
catattaggtacatt

SEQ ID NO: 1430851 - DNA, 15 bp, Homo sapiens
tcatattaggtacat

SEQ ID NO: 1430852 - DNA, 15 bp, Homo sapiens
gtcatattaggtaca

SEQ ID NO: 1430853 - DNA, 15 bp, Homo sapiens
agtcatattaggtac

SEQ ID NO: 1430854 - DNA, 15 bp, Homo sapiens
aagtcatattaggta

SEQ ID NO: 1430855 - DNA, 15 bp, Homo sapiens
gaagtcatattaggt

SEQ ID NO: 1430856 - DNA, 15 bp, Homo sapiens
agaagtcatattagg

SEQ ID NO: 1430857 - DNA, 15 bp, Homo sapiens
gagaagtcatattag

SEQ ID NO: 1430858 - DNA, 15 bp, Homo sapiens
agagaagtcatatta

SEQ ID NO: 1430859 - DNA, 15 bp, Homo sapiens
cagagaagtcatatt

SEQ ID NO: 1430860 - DNA, 15 bp, Homo sapiens
tcagagaagtcatat

SEQ ID NO: 1430861 - DNA, 15 bp, Homo sapiens
gtcagagaagtcata

SEQ ID NO: 1430862 - DNA, 15 bp, Homo sapiens
tgtcagagaagtcat

SEQ ID NO: 1430863 - DNA, 15 bp, Homo sapiens
ttgtcagagaagtca

SEQ ID NO: 1430864 - DNA, 15 bp, Homo sapiens
gttgtcagagaagtc

SEQ ID NO: 1430865 - DNA, 15 bp, Homo sapiens
agttgtcagagaagt

SEQ ID NO: 1430866 - DNA, 15 bp, Homo sapiens
aagttgtcagagaag

SEQ ID NO: 1430867 - DNA, 15 bp, Homo sapiens
gaagttgtcagagaa

SEQ ID NO: 1430868 - DNA, 15 bp, Homo sapiens
agaagttgtcagaga

SEQ ID NO: 1430869 - DNA, 15 bp, Homo sapiens
tagaagttgtcagag

SEQ ID NO: 1430870 - DNA, 15 bp, Homo sapiens
atagaagttgtcaga

SEQ ID NO: 1430871 - DNA, 15 bp, Homo sapiens
aatagaagttgtcag

SEQ ID NO: 1430872 - DNA, 15 bp, Homo sapiens
caatagaagttgtca

SEQ ID NO: 1430873 - DNA, 15 bp, Homo sapiens
ccaatagaagttgtc

SEQ ID NO: 1430874 - DNA, 15 bp, Homo sapiens
accaatagaagttgt

SEQ ID NO: 1430875 - DNA, 15 bp, Homo sapiens
gaccaatagaagttg

SEQ ID NO: 1430876 - DNA, 15 bp, Homo sapiens
agaccaatagaagtt

SEQ ID NO: 1430877 - DNA, 15 bp, Homo sapiens
gagaccaatagaagt

SEQ ID NO: 1430878 - DNA, 15 bp, Homo sapiens
cgagaccaatagaag

SEQ ID NO: 1430879 - DNA, 15 bp, Homo sapiens
tcgagaccaatagaa

SEQ ID NO: 1430880 - DNA, 15 bp, Homo sapiens
ttcgagaccaataga

SEQ ID NO: 1430881 - DNA, 15 bp, Homo sapiens
tttcgagaccaatag

SEQ ID NO: 1430882 - DNA, 15 bp, Homo sapiens
ctttcgagaccaata

SEQ ID NO: 1430883 - DNA, 15 bp, Homo sapiens
gctttcgagaccaat

SEQ ID NO: 1430884 - DNA, 15 bp, Homo sapiens
tgctttcgagaccaa

SEQ ID NO: 1430885 - DNA, 15 bp, Homo sapiens
ttgctttcgagacca

SEQ ID NO: 1430886 - DNA, 15 bp, Homo sapiens
cttgctttcgagacc

SEQ ID NO: 1430887 - DNA, 15 bp, Homo sapiens
gcttgctttcgagac

SEQ ID NO: 1430888 - DNA, 15 bp, Homo sapiens
tgcttgctttcgaga

SEQ ID NO: 1430889 - DNA, 15 bp, Homo sapiens
ttgcttgctttcgag

SEQ ID NO: 1430890 - DNA, 15 bp, Homo sapiens
cttgcttgctttcga

SEQ ID NO: 1430891 - DNA, 15 bp, Homo sapiens
tcttgcttgctttcg

SEQ ID NO: 1430892 - DNA, 15 bp, Homo sapiens
ttcttgcttgctttc

SEQ ID NO: 1430893 - DNA, 15 bp, Homo sapiens
cttcttgcttgcttt

SEQ ID NO: 1430894 - DNA, 15 bp, Homo sapiens
tcttcttgcttgctt

SEQ ID NO: 1430895 - DNA, 15 bp, Homo sapiens
ttcttcttgcttgct

SEQ ID NO: 1430896 - DNA, 15 bp, Homo sapiens
tttcttcttgcttgc

SEQ ID NO: 1430897 - DNA, 15 bp, Homo sapiens
ttttcttcttgcttg

SEQ ID NO: 1430898 - DNA, 15 bp, Homo sapiens
tttttcttcttgctt

SEQ ID NO: 1430899 - DNA, 15 bp, Homo sapiens
ctttttcttcttgct

SEQ ID NO: 1430900 - DNA, 15 bp, Homo sapiens
tctttttcttcttgc

SEQ ID NO: 1430901 - DNA, 15 bp, Homo sapiens
ttctttttcttcttg

SEQ ID NO: 1430902 - DNA, 15 bp, Homo sapiens
tttttctttttcttc

SEQ ID NO: 1430903 - DNA, 15 bp, Homo sapiens
ttttttttctttttc

SEQ ID NO: 1430904 - DNA, 15 bp, Homo sapiens
cttttttttttttct

SEQ ID NO: 1430905 - DNA, 15 bp, Homo sapiens
tcttttttttttttc

SEQ ID NO: 1430906 - DNA, 15 bp, Homo sapiens
tttatcttttttttt

SEQ ID NO: 1430907 - DNA, 15 bp, Homo sapiens
ttttatctttttttt

SEQ ID NO: 1430908 - DNA, 15 bp, Homo sapiens
gttttatcttttttt

SEQ ID NO: 1430909 - DNA, 15 bp, Homo sapiens
ggttttatctttttt

SEQ ID NO: 1430910 - DNA, 15 bp, Homo sapiens
aggttttatcttttt

SEQ ID NO: 1430911 - DNA, 15 bp, Homo sapiens
caggttttatctttt

SEQ ID NO: 1430912 - DNA, 15 bp, Homo sapiens
ccaggttttatcttt

SEQ ID NO: 1430913 - DNA, 15 bp, Homo sapiens
accaggttttatctt

SEQ ID NO: 1430914 - DNA, 15 bp, Homo sapiens
aaccaggttttatct

SEQ ID NO: 1430915 - DNA, 15 bp, Homo sapiens
taaccaggttttatc

SEQ ID NO: 1430916 - DNA, 15 bp, Homo sapiens
ctaaccaggttttat

SEQ ID NO: 1430917 - DNA, 15 bp, Homo sapiens
cctaaccaggtttta

SEQ ID NO: 1430918 - DNA, 15 bp, Homo sapiens
tcctaaccaggtttt

SEQ ID NO: 1430919 - DNA, 15 bp, Homo sapiens
gtcctaaccaggttt

SEQ ID NO: 1430920 - DNA, 15 bp, Homo sapiens
agtcctaaccaggtt

SEQ ID NO: 1430921 - DNA, 15 bp, Homo sapiens
gagtcctaaccaggt

SEQ ID NO: 1430922 - DNA, 15 bp, Homo sapiens
ggagtcctaaccagg

SEQ ID NO: 1430923 - DNA, 15 bp, Homo sapiens
gggagtcctaaccag

SEQ ID NO: 1430924 - DNA, 15 bp, Homo sapiens
cgggagtcctaacca

SEQ ID NO: 1430925 - DNA, 15 bp, Homo sapiens
ccgggagtcctaacc

SEQ ID NO: 1430926 - DNA, 15 bp, Homo sapiens
cccgggagtcctaac

SEQ ID NO: 1430927 - DNA, 15 bp, Homo sapiens
tcccgggagtcctaa

SEQ ID NO: 1430928 - DNA, 15 bp, Homo sapiens
atcccgggagtccta

SEQ ID NO: 1430929 - DNA, 15 bp, Homo sapiens
catcccgggagtcct

SEQ ID NO: 1430930 - DNA, 15 bp, Homo sapiens
ccatcccgggagtcc

SEQ ID NO: 1430931 - DNA, 15 bp, Homo sapiens
tccatcccgggagtc

SEQ ID NO: 1430932 - DNA, 15 bp, Homo sapiens
ctccatcccgggagt

SEQ ID NO: 1430933 - DNA, 15 bp, Homo sapiens
tctccatcccgggag

SEQ ID NO: 1430934 - DNA, 15 bp, Homo sapiens
ctctccatcccggga

SEQ ID NO: 1430935 - DNA, 15 bp, Homo sapiens
gctctccatcccggg

SEQ ID NO: 1430936 - DNA, 15 bp, Homo sapiens
tgctctccatcccgg

SEQ ID NO: 1430937 - DNA, 15 bp, Homo sapiens
ctgctctccatcccg

SEQ ID NO: 1430938 - DNA, 15 bp, Homo sapiens
tctgctctccatccc

SEQ ID NO: 1430939 - DNA, 15 bp, Homo sapiens
ctctgctctccatcc

SEQ ID NO: 1430940 - DNA, 15 bp, Homo sapiens
tctctgctctccatc

SEQ ID NO: 1430941 - DNA, 15 bp, Homo sapiens
ctctctgctctccat

SEQ ID NO: 1430942 - DNA, 15 bp, Homo sapiens
tctctctgctctcca

SEQ ID NO: 1430943 - DNA, 15 bp, Homo sapiens
ctctctctgctctcc

SEQ ID NO: 1430944 - DNA, 15 bp, Homo sapiens
cctctctctgctctc

SEQ ID NO: 1430945 - DNA, 15 bp, Homo sapiens
tcctctctctgctct

SEQ ID NO: 1430946 - DNA, 15 bp, Homo sapiens
ttcctctctctgctc

SEQ ID NO: 1430947 - DNA, 15 bp, Homo sapiens
cttcctctctctgct

SEQ ID NO: 1430948 - DNA, 15 bp, Homo sapiens
acttcctctctctgc

SEQ ID NO: 1430949 - DNA, 15 bp, Homo sapiens
gacttcctctctctg

SEQ ID NO: 1430950 - DNA, 15 bp, Homo sapiens
agacttcctctctct

SEQ ID NO: 1430951 - DNA, 15 bp, Homo sapiens
gagacttcctctctc

SEQ ID NO: 1430952 - DNA, 15 bp, Homo sapiens
tgagacttcctctct

SEQ ID NO: 1430953 - DNA, 15 bp, Homo sapiens
ctgagacttcctctc

SEQ ID NO: 1430954 - DNA, 15 bp, Homo sapiens
tctgagacttcctct

SEQ ID NO: 1430955 - DNA, 15 bp, Homo sapiens
ttctgagacttcctc

SEQ ID NO: 1430956 - DNA, 15 bp, Homo sapiens
tttctgagacttcct

SEQ ID NO: 1430957 - DNA, 15 bp, Homo sapiens
ttttctgagacttcc

SEQ ID NO: 1430958 - DNA, 15 bp, Homo sapiens
gttttctgagacttc

SEQ ID NO: 1430959 - DNA, 15 bp, Homo sapiens
agttttctgagactt

SEQ ID NO: 1430960 - DNA, 15 bp, Homo sapiens
cagttttctgagact

SEQ ID NO: 1430961 - DNA, 15 bp, Homo sapiens
acagttttctgagac

SEQ ID NO: 1430962 - DNA, 15 bp, Homo sapiens
aacagttttctgaga

SEQ ID NO: 1430963 - DNA, 15 bp, Homo sapiens
gaacagttttctgag

SEQ ID NO: 1430964 - DNA, 15 bp, Homo sapiens
ggaacagttttctga

SEQ ID NO: 1430965 - DNA, 15 bp, Homo sapiens
gggaacagttttctg

SEQ ID NO: 1430966 - DNA, 15 bp, Homo sapiens
tgggaacagttttct

SEQ ID NO: 1430967 - DNA, 15 bp, Homo sapiens
ttgggaacagttttc

SEQ ID NO: 1430968 - DNA, 15 bp, Homo sapiens
attgggaacagtttt

SEQ ID NO: 1430969 - DNA, 15 bp, Homo sapiens
cattgggaacagttt

SEQ ID NO: 1430970 - DNA, 15 bp, Homo sapiens
ccattgggaacagtt

SEQ ID NO: 1430971 - DNA, 15 bp, Homo sapiens
tccattgggaacagt

SEQ ID NO: 1430972 - DNA, 15 bp, Homo sapiens
ctccattgggaacag

SEQ ID NO: 1430973 - DNA, 15 bp, Homo sapiens
tctccattgggaaca

SEQ ID NO: 1430974 - DNA, 15 bp, Homo sapiens
ttctccattgggaac

SEQ ID NO: 1430975 - DNA, 15 bp, Homo sapiens
tttctccattgggaa

SEQ ID NO: 1430976 - DNA, 15 bp, Homo sapiens
ttttctccattggga

SEQ ID NO: 1430977 - DNA, 15 bp, Homo sapiens
tttttctccattggg

SEQ ID NO: 1430978 - DNA, 15 bp, Homo sapiens
atttttctccattgg

SEQ ID NO: 1430979 - DNA, 15 bp, Homo sapiens
tatttttctccattg

SEQ ID NO: 1430980 - DNA, 15 bp, Homo sapiens
ttatttttctccatt

SEQ ID NO: 1430981 - DNA, 15 bp, Homo sapiens
gttatttttctccat

SEQ ID NO: 1430982 - DNA, 15 bp, Homo sapiens
agttatttttctcca

SEQ ID NO: 1430983 - DNA, 15 bp, Homo sapiens
aagttatttttctcc

SEQ ID NO: 1430984 - DNA, 15 bp, Homo sapiens
taagttatttttctc

SEQ ID NO: 1430985 - DNA, 15 bp, Homo sapiens
ataagttatttttct

SEQ ID NO: 1430986 - DNA, 15 bp, Homo sapiens
tataagttatttttc

SEQ ID NO: 1430987 - DNA, 15 bp, Homo sapiens
ttataagttattttt

SEQ ID NO: 1430988 - DNA, 15 bp, Homo sapiens
tttataagttatttt

SEQ ID NO: 1430989 - DNA, 15 bp, Homo sapiens
ttttataagttattt

SEQ ID NO: 1430990 - DNA, 15 bp, Homo sapiens
tttttataagttatt

SEQ ID NO: 1430991 - DNA, 15 bp, Homo sapiens
ctttttataagttat

SEQ ID NO: 1430992 - DNA, 15 bp, Homo sapiens
gctttttataagtta

SEQ ID NO: 1430993 - DNA, 15 bp, Homo sapiens
tgctttttataagtt

SEQ ID NO: 1430994 - DNA, 15 bp, Homo sapiens
ctgctttttataagt

SEQ ID NO: 1430995 - DNA, 15 bp, Homo sapiens
actgctttttataag

SEQ ID NO: 1430996 - DNA, 15 bp, Homo sapiens
cactgctttttataa

SEQ ID NO: 1430997 - DNA, 15 bp, Homo sapiens
acactgctttttata

SEQ ID NO: 1430998 - DNA, 15 bp, Homo sapiens
gacactgctttttat

SEQ ID NO: 1430999 - DNA, 15 bp, Homo sapiens
ggacactgcttttta

SEQ ID NO: 1431000 - DNA, 15 bp, Homo sapiens
aggacactgcttttt

SEQ ID NO: 1431001 - DNA, 15 bp, Homo sapiens
aaggacactgctttt

SEQ ID NO: 1431002 - DNA, 15 bp, Homo sapiens
taaggacactgcttt

SEQ ID NO: 1431003 - DNA, 15 bp, Homo sapiens
ctaaggacactgctt

SEQ ID NO: 1431004 - DNA, 15 bp, Homo sapiens
gctaaggacactgct

SEQ ID NO: 1431005 - DNA, 15 bp, Homo sapiens
ggctaaggacactgc

SEQ ID NO: 1431006 - DNA, 15 bp, Homo sapiens
aggctaaggacactg

SEQ ID NO: 1431007 - DNA, 15 bp, Homo sapiens
caggctaaggacact

SEQ ID NO: 1431008 - DNA, 15 bp, Homo sapiens
acaggctaaggacac

SEQ ID NO: 1431009 - DNA, 15 bp, Homo sapiens
cacaggctaaggaca

SEQ ID NO: 1431010 - DNA, 15 bp, Homo sapiens
tcacaggctaaggac

SEQ ID NO: 1431011 - DNA, 15 bp, Homo sapiens
ttcacaggctaagga

SEQ ID NO: 1431012 - DNA, 15 bp, Homo sapiens
gttcacaggctaagg

SEQ ID NO: 1431013 - DNA, 15 bp, Homo sapiens
agttcacaggctaag

SEQ ID NO: 1431014 - DNA, 15 bp, Homo sapiens
tagttcacaggctaa

SEQ ID NO: 1431015 - DNA, 15 bp, Homo sapiens
ttagttcacaggcta

SEQ ID NO: 1431016 - DNA, 15 bp, Homo sapiens
attagttcacaggct

SEQ ID NO: 1431017 - DNA, 15 bp, Homo sapiens
aattagttcacaggc

SEQ ID NO: 1431018 - DNA, 15 bp, Homo sapiens
caattagttcacagg

SEQ ID NO: 1431019 - DNA, 15 bp, Homo sapiens
tcaattagttcacag

SEQ ID NO: 1431020 - DNA, 15 bp, Homo sapiens
ctcaattagttcaca

SEQ ID NO: 1431021 - DNA, 15 bp, Homo sapiens
gctcaattagttcac

SEQ ID NO: 1431022 - DNA, 15 bp, Homo sapiens
agctcaattagttca

SEQ ID NO: 1431023 - DNA, 15 bp, Homo sapiens
aagctcaattagttc

SEQ ID NO: 1431024 - DNA, 15 bp, Homo sapiens
aaagctcaattagtt

SEQ ID NO: 1431025 - DNA, 15 bp, Homo sapiens
caaagctcaattagt

SEQ ID NO: 1431026 - DNA, 15 bp, Homo sapiens
acaaagctcaattag

SEQ ID NO: 1431027 - DNA, 15 bp, Homo sapiens
tacaaagctcaatta

SEQ ID NO: 1431028 - DNA, 15 bp, Homo sapiens
ctacaaagctcaatt

SEQ ID NO: 1431029 - DNA, 15 bp, Homo sapiens
actacaaagctcaat

SEQ ID NO: 1431030 - DNA, 15 bp, Homo sapiens
cactacaaagctcaa

SEQ ID NO: 1431031 - DNA, 15 bp, Homo sapiens
gcactacaaagctca

SEQ ID NO: 1431032 - DNA, 15 bp, Homo sapiens
tgcactacaaagctc

SEQ ID NO: 1431033 - DNA, 15 bp, Homo sapiens
gtgcactacaaagct

SEQ ID NO: 1431034 - DNA, 15 bp, Homo sapiens
ggtgcactacaaagc

SEQ ID NO: 1431035 - DNA, 15 bp, Homo sapiens
aggtgcactacaaag

SEQ ID NO: 1431036 - DNA, 15 bp, Homo sapiens
caggtgcactacaaa

SEQ ID NO: 1431037 - DNA, 15 bp, Homo sapiens
ccaggtgcactacaa

SEQ ID NO: 1431038 - DNA, 15 bp, Homo sapiens
accaggtgcactaca

SEQ ID NO: 1431039 - DNA, 15 bp, Homo sapiens
aaccaggtgcactac

SEQ ID NO: 1431040 - DNA, 15 bp, Homo sapiens
gaaccaggtgcacta

SEQ ID NO: 1431041 - DNA, 15 bp, Homo sapiens
agaaccaggtgcact

SEQ ID NO: 1431042 - DNA, 15 bp, Homo sapiens
cagaaccaggtgcac

SEQ ID NO: 1431043 - DNA, 15 bp, Homo sapiens
ccagaaccaggtgca

SEQ ID NO: 1431044 - DNA, 15 bp, Homo sapiens
accagaaccaggtgc

SEQ ID NO: 1431045 - DNA, 15 bp, Homo sapiens
aaccagaaccaggtg

SEQ ID NO: 1431046 - DNA, 15 bp, Homo sapiens
gaaccagaaccaggt

SEQ ID NO: 1431047 - DNA, 15 bp, Homo sapiens
ggaaccagaaccagg

SEQ ID NO: 1431048 - DNA, 15 bp, Homo sapiens
cggaaccagaaccag

SEQ ID NO: 1431049 - DNA, 15 bp, Homo sapiens
acggaaccagaacca

SEQ ID NO: 1431050 - DNA, 15 bp, Homo sapiens
aacggaaccagaacc

SEQ ID NO: 1431051 - DNA, 15 bp, Homo sapiens
aaacggaaccagaac

SEQ ID NO: 1431052 - DNA, 15 bp, Homo sapiens
gaaacggaaccagaa

SEQ ID NO: 1431053 - DNA, 15 bp, Homo sapiens
agaaacggaaccaga

SEQ ID NO: 1431054 - DNA, 15 bp, Homo sapiens
tagaaacggaaccag

SEQ ID NO: 1431055 - DNA, 15 bp, Homo sapiens
gtagaaacggaacca

SEQ ID NO: 1431056 - DNA, 15 bp, Homo sapiens
agtagaaacggaacc

SEQ ID NO: 1431057 - DNA, 15 bp, Homo sapiens
aagtagaaacggaac

SEQ ID NO: 1431058 - DNA, 15 bp, Homo sapiens
gaagtagaaacggaa

SEQ ID NO: 1431059 - DNA, 15 bp, Homo sapiens
ggaagtagaaacgga

SEQ ID NO: 1431060 - DNA, 15 bp, Homo sapiens
gggaagtagaaacgg

SEQ ID NO: 1431061 - DNA, 15 bp, Homo sapiens
agggaagtagaaacg

SEQ ID NO: 1431062 - DNA, 15 bp, Homo sapiens
aagggaagtagaaac

SEQ ID NO: 1431063 - DNA, 15 bp, Homo sapiens
caagggaagtagaaa

SEQ ID NO: 1431064 - DNA, 15 bp, Homo sapiens
tcaagggaagtagaa

SEQ ID NO: 1431065 - DNA, 15 bp, Homo sapiens
atcaagggaagtaga

SEQ ID NO: 1431066 - DNA, 15 bp, Homo sapiens
gatcaagggaagtag

SEQ ID NO: 1431067 - DNA, 15 bp, Homo sapiens
agatcaagggaagta

SEQ ID NO: 1431068 - DNA, 15 bp, Homo sapiens
aagatcaagggaagt

SEQ ID NO: 1431069 - DNA, 15 bp, Homo sapiens
aaagatcaagggaag

SEQ ID NO: 1431070 - DNA, 15 bp, Homo sapiens
aaaagatcaagggaa

SEQ ID NO: 1431071 - DNA, 15 bp, Homo sapiens
gaaaagatcaaggga

SEQ ID NO: 1431072 - DNA, 15 bp, Homo sapiens
agaaaagatcaaggg

SEQ ID NO: 1431073 - DNA, 15 bp, Homo sapiens
cagaaaagatcaagg

SEQ ID NO: 1431074 - DNA, 15 bp, Homo sapiens
gcagaaaagatcaag

SEQ ID NO: 1431075 - DNA, 15 bp, Homo sapiens
agcagaaaagatcaa

SEQ ID NO: 1431076 - DNA, 15 bp, Homo sapiens
gagcagaaaagatca

SEQ ID NO: 1431077 - DNA, 15 bp, Homo sapiens
agagcagaaaagatc

SEQ ID NO: 1431078 - DNA, 15 bp, Homo sapiens
gagagcagaaaagat

SEQ ID NO: 1431079 - DNA, 15 bp, Homo sapiens
ggagagcagaaaaga

SEQ ID NO: 1431080 - DNA, 15 bp, Homo sapiens
aggagagcagaaaag

SEQ ID NO: 1431081 - DNA, 15 bp, Homo sapiens
aaggagagcagaaaa

SEQ ID NO: 1431082 - DNA, 15 bp, Homo sapiens
caaggagagcagaaa

SEQ ID NO: 1431083 - DNA, 15 bp, Homo sapiens
acaaggagagcagaa

SEQ ID NO: 1431084 - DNA, 15 bp, Homo sapiens
aacaaggagagcaga

SEQ ID NO: 1431085 - DNA, 15 bp, Homo sapiens
caacaaggagagcag

SEQ ID NO: 1431086 - DNA, 15 bp, Homo sapiens
gcaacaaggagagca

SEQ ID NO: 1431087 - DNA, 15 bp, Homo sapiens
agcaacaaggagagc

SEQ ID NO: 1431088 - DNA, 15 bp, Homo sapiens
aagcaacaaggagag

SEQ ID NO: 1431089 - DNA, 15 bp, Homo sapiens
taagcaacaaggaga

SEQ ID NO: 1431090 - DNA, 15 bp, Homo sapiens
ttaagcaacaaggag

SEQ ID NO: 1431091 - DNA, 15 bp, Homo sapiens
gttaagcaacaagga

SEQ ID NO: 1431092 - DNA, 15 bp, Homo sapiens
agttaagcaacaagg

SEQ ID NO: 1431093 - DNA, 15 bp, Homo sapiens
tagttaagcaacaag

SEQ ID NO: 1431094 - DNA, 15 bp, Homo sapiens
atagttaagcaacaa

SEQ ID NO: 1431095 - DNA, 15 bp, Homo sapiens
gatagttaagcaaca

SEQ ID NO: 1431096 - DNA, 15 bp, Homo sapiens
tgatagttaagcaac

SEQ ID NO: 1431097 - DNA, 15 bp, Homo sapiens
ttgatagttaagcaa

SEQ ID NO: 1431098 - DNA, 15 bp, Homo sapiens
tttgatagttaagca

SEQ ID NO: 1431099 - DNA, 15 bp, Homo sapiens
ctttgatagttaagc

SEQ ID NO: 1431100 - DNA, 15 bp, Homo sapiens
cctttgatagttaag

SEQ ID NO: 1431101 - DNA, 15 bp, Homo sapiens
acctttgatagttaa

SEQ ID NO: 1431102 - DNA, 15 bp, Homo sapiens
tacctttgatagtta

SEQ ID NO: 1431103 - DNA, 15 bp, Homo sapiens
atacctttgatagtt

SEQ ID NO: 1431104 - DNA, 15 bp, Homo sapiens
catacctttgatagt

SEQ ID NO: 1431105 - DNA, 15 bp, Homo sapiens
acatacctttgatag

SEQ ID NO: 1431106 - DNA, 15 bp, Homo sapiens
tacatacctttgata

SEQ ID NO: 1431107 - DNA, 15 bp, Homo sapiens
atacatacctttgat

SEQ ID NO: 1431108 - DNA, 15 bp, Homo sapiens
gatacatacctttga

SEQ ID NO: 1431109 - DNA, 15 bp, Homo sapiens
agatacatacctttg

SEQ ID NO: 1431110 - DNA, 15 bp, Homo sapiens
aagatacataccttt

SEQ ID NO: 1431111 - DNA, 15 bp, Homo sapiens
aaagatacatacctt

SEQ ID NO: 1431112 - DNA, 15 bp, Homo sapiens
aaaagatacatacct

SEQ ID NO: 1431113 - DNA, 15 bp, Homo sapiens
aaaaagatacatacc

SEQ ID NO: 1431114 - DNA, 15 bp, Homo sapiens
taaaaagatacatac

SEQ ID NO: 1431115 - DNA, 15 bp, Homo sapiens
ttaaaaagatacata

SEQ ID NO: 1431116 - DNA, 15 bp, Homo sapiens
tttaaaaagatacat

SEQ ID NO: 1431117 - DNA, 15 bp, Homo sapiens
ttttaaaaagataca

SEQ ID NO: 1431118 - DNA, 15 bp, Homo sapiens
cttttaaaaagatac

SEQ ID NO: 1431119 - DNA, 15 bp, Homo sapiens
acttttaaaaagata

SEQ ID NO: 1431120 - DNA, 15 bp, Homo sapiens
aacttttaaaaagat

SEQ ID NO: 1431121 - DNA, 15 bp, Homo sapiens
taacttttaaaaaga

SEQ ID NO: 1431122 - DNA, 15 bp, Homo sapiens
gtaacttttaaaaag

SEQ ID NO: 1431123 - DNA, 15 bp, Homo sapiens
agtaacttttaaaaa

SEQ ID NO: 1431124 - DNA, 15 bp, Homo sapiens
cagtaacttttaaaa

SEQ ID NO: 1431125 - DNA, 15 bp, Homo sapiens
tcagtaacttttaaa

SEQ ID NO: 1431126 - DNA, 15 bp, Homo sapiens
gtcagtaacttttaa

SEQ ID NO: 1431127 - DNA, 15 bp, Homo sapiens
tgtcagtaactttta

SEQ ID NO: 1431128 - DNA, 15 bp, Homo sapiens
atgtcagtaactttt

SEQ ID NO: 1431129 - DNA, 15 bp, Homo sapiens
aatgtcagtaacttt

SEQ ID NO: 1431130 - DNA, 15 bp, Homo sapiens
aaatgtcagtaactt

SEQ ID NO: 1431131 - DNA, 15 bp, Homo sapiens
aaaatgtcagtaact

SEQ ID NO: 1431132 - DNA, 15 bp, Homo sapiens
gaaaaatgtcagtaa

SEQ ID NO: 1431133 - DNA, 15 bp, Homo sapiens
ggaaaaatgtcagta

SEQ ID NO: 1431134 - DNA, 15 bp, Homo sapiens
aggaaaaatgtcagt

SEQ ID NO: 1431135 - DNA, 15 bp, Homo sapiens
aaggaaaaatgtcag

SEQ ID NO: 1431136 - DNA, 15 bp, Homo sapiens
aaaggaaaaatgtca

SEQ ID NO: 1431137 - DNA, 15 bp, Homo sapiens
aaaaggaaaaatgtc

SEQ ID NO: 1431138 - DNA, 15 bp, Homo sapiens
aaaaaggaaaaatgt

SEQ ID NO: 1431139 - DNA, 15 bp, Homo sapiens
aaaaaaggaaaaatg

SEQ ID NO: 1431140 - DNA, 15 bp, Homo sapiens
aaaaaaaggaaaaat

SEQ ID NO: 1431141 - DNA, 15 bp, Homo sapiens
caaaaaaaggaaaaa

SEQ ID NO: 1431142 - DNA, 15 bp, Homo sapiens
ctcaaaaaaaggaaa

SEQ ID NO: 1431143 - DNA, 15 bp, Homo sapiens
cctcaaaaaaaggaa

SEQ ID NO: 1431144 - DNA, 15 bp, Homo sapiens
ccctcaaaaaaagga

SEQ ID NO: 1431145 - DNA, 15 bp, Homo sapiens
tccctcaaaaaaagg

SEQ ID NO: 1431146 - DNA, 15 bp, Homo sapiens
atccctcaaaaaaag

SEQ ID NO: 1431147 - DNA, 15 bp, Homo sapiens
gatccctcaaaaaaa

SEQ ID NO: 1431148 - DNA, 15 bp, Homo sapiens
tgatccctcaaaaaa

SEQ ID NO: 1431149 - DNA, 15 bp, Homo sapiens
ttgatccctcaaaaa

SEQ ID NO: 1431150 - DNA, 15 bp, Homo sapiens
cttgatccctcaaaa

SEQ ID NO: 1431151 - DNA, 15 bp, Homo sapiens
gcttgatccctcaaa

SEQ ID NO: 1431152 - DNA, 15 bp, Homo sapiens
tgcttgatccctcaa

SEQ ID NO: 1431153 - DNA, 15 bp, Homo sapiens
ctgcttgatccctca

SEQ ID NO: 1431154 - DNA, 15 bp, Homo sapiens
tctgcttgatccctc

SEQ ID NO: 1431155 - DNA, 15 bp, Homo sapiens
ttctgcttgatccct

SEQ ID NO: 1431156 - DNA, 15 bp, Homo sapiens
tttctgcttgatccc

SEQ ID NO: 1431157 - DNA, 15 bp, Homo sapiens
ttttctgcttgatcc

SEQ ID NO: 1431158 - DNA, 15 bp, Homo sapiens
tttttctgcttgatc

SEQ ID NO: 1431159 - DNA, 15 bp, Homo sapiens
gtttttctgcttgat

SEQ ID NO: 1431160 - DNA, 15 bp, Homo sapiens
tgtttttctgcttga

SEQ ID NO: 1431161 - DNA, 15 bp, Homo sapiens
ctgtttttctgcttg

SEQ ID NO: 1431162 - DNA, 15 bp, Homo sapiens
actgtttttctgctt

SEQ ID NO: 1431163 - DNA, 15 bp, Homo sapiens
gactgtttttctgct

SEQ ID NO: 1431164 - DNA, 15 bp, Homo sapiens
ggactgtttttctgc

SEQ ID NO: 1431165 - DNA, 15 bp, Homo sapiens
tggactgtttttctg

SEQ ID NO: 1431166 - DNA, 15 bp, Homo sapiens
ttggactgtttttct

SEQ ID NO: 1431167 - DNA, 15 bp, Homo sapiens
tttggactgtttttc

SEQ ID NO: 1431168 - DNA, 15 bp, Homo sapiens
ttttggactgttttt

SEQ ID NO: 1431169 - DNA, 15 bp, Homo sapiens
cttttggactgtttt

SEQ ID NO: 1431170 - DNA, 15 bp, Homo sapiens
ccttttggactgttt

SEQ ID NO: 1431171 - DNA, 15 bp, Homo sapiens
cccttttggactgtt

SEQ ID NO: 1431172 - DNA, 15 bp, Homo sapiens
tcccttttggactgt

SEQ ID NO: 1431173 - DNA, 15 bp, Homo sapiens
ttcccttttggactg

SEQ ID NO: 1431174 - DNA, 15 bp, Homo sapiens
attcccttttggact

SEQ ID NO: 1431175 - DNA, 15 bp, Homo sapiens
cattcccttttggac

SEQ ID NO: 1431176 - DNA, 15 bp, Homo sapiens
gcattcccttttgga

SEQ ID NO: 1431177 - DNA, 15 bp, Homo sapiens
tgcattcccttttgg

SEQ ID NO: 1431178 - DNA, 15 bp, Homo sapiens
atgcattcccttttg

SEQ ID NO: 1431179 - DNA, 15 bp, Homo sapiens
gatgcattccctttt

SEQ ID NO: 1431180 - DNA, 15 bp, Homo sapiens
agatgcattcccttt

SEQ ID NO: 1431181 - DNA, 15 bp, Homo sapiens
aagatgcattccctt

SEQ ID NO: 1431182 - DNA, 15 bp, Homo sapiens
caagatgcattccct

SEQ ID NO: 1431183 - DNA, 15 bp, Homo sapiens
acaagatgcattccc

SEQ ID NO: 1431184 - DNA, 15 bp, Homo sapiens
cacaagatgcattcc

SEQ ID NO: 1431185 - DNA, 15 bp, Homo sapiens
acacaagatgcattc

SEQ ID NO: 1431186 - DNA, 15 bp, Homo sapiens
aacacaagatgcatt

SEQ ID NO: 1431187 - DNA, 15 bp, Homo sapiens
gaacacaagatgcat

SEQ ID NO: 1431188 - DNA, 15 bp, Homo sapiens
tgaacacaagatgca

SEQ ID NO: 1431189 - DNA, 15 bp, Homo sapiens
gtgaacacaagatgc

SEQ ID NO: 1431190 - DNA, 15 bp, Homo sapiens
tgtgaacacaagatg

SEQ ID NO: 1431191 - DNA, 15 bp, Homo sapiens
ctgtgaacacaagat

SEQ ID NO: 1431192 - DNA, 15 bp, Homo sapiens
cctgtgaacacaaga

SEQ ID NO: 1431193 - DNA, 15 bp, Homo sapiens
tcctgtgaacacaag

SEQ ID NO: 1431194 - DNA, 15 bp, Homo sapiens
ttcctgtgaacacaa

SEQ ID NO: 1431195 - DNA, 15 bp, Homo sapiens
tttcctgtgaacaca

SEQ ID NO: 1431196 - DNA, 15 bp, Homo sapiens
ttttcctgtgaacac

SEQ ID NO: 1431197 - DNA, 15 bp, Homo sapiens
gttttcctgtgaaca

SEQ ID NO: 1431198 - DNA, 15 bp, Homo sapiens
agttttcctgtgaac

SEQ ID NO: 1431199 - DNA, 15 bp, Homo sapiens
aagttttcctgtgaa

SEQ ID NO: 1431200 - DNA, 15 bp, Homo sapiens
aaagttttcctgtga

SEQ ID NO: 1431201 - DNA, 15 bp, Homo sapiens
gaaagttttcctgtg

SEQ ID NO: 1431202 - DNA, 15 bp, Homo sapiens
agaaagttttcctgt

SEQ ID NO: 1431203 - DNA, 15 bp, Homo sapiens
cagaaagttttcctg

SEQ ID NO: 1431204 - DNA, 15 bp, Homo sapiens
acagaaagttttcct

SEQ ID NO: 1431205 - DNA, 15 bp, Homo sapiens
aacagaaagttttcc

SEQ ID NO: 1431206 - DNA, 15 bp, Homo sapiens
taacagaaagttttc

SEQ ID NO: 1431207 - DNA, 15 bp, Homo sapiens
ttaacagaaagtttt

SEQ ID NO: 1431208 - DNA, 15 bp, Homo sapiens
gttaacagaaagttt

SEQ ID NO: 1431209 - DNA, 15 bp, Homo sapiens
agttaacagaaagtt

SEQ ID NO: 1431210 - DNA, 15 bp, Homo sapiens
gagttaacagaaagt

SEQ ID NO: 1431211 - DNA, 15 bp, Homo sapiens
agagttaacagaaag

SEQ ID NO: 1431212 - DNA, 15 bp, Homo sapiens
tagagttaacagaaa

SEQ ID NO: 1431213 - DNA, 15 bp, Homo sapiens
ttagagttaacagaa

SEQ ID NO: 1431214 - DNA, 15 bp, Homo sapiens
gttagagttaacaga

SEQ ID NO: 1431215 - DNA, 15 bp, Homo sapiens
tgttagagttaacag

SEQ ID NO: 1431216 - DNA, 15 bp, Homo sapiens
ttgttagagttaaca

SEQ ID NO: 1431217 - DNA, 15 bp, Homo sapiens
cttgttagagttaac

SEQ ID NO: 1431218 - DNA, 15 bp, Homo sapiens
tcttgttagagttaa

SEQ ID NO: 1431219 - DNA, 15 bp, Homo sapiens
atcttgttagagtta

SEQ ID NO: 1431220 - DNA, 15 bp, Homo sapiens
tatcttgttagagtt

SEQ ID NO: 1431221 - DNA, 15 bp, Homo sapiens
atatcttgttagagt

SEQ ID NO: 1431222 - DNA, 15 bp, Homo sapiens
tatatcttgttagag

SEQ ID NO: 1431223 - DNA, 15 bp, Homo sapiens
atatatcttgttaga

SEQ ID NO: 1431224 - DNA, 15 bp, Homo sapiens
aatatatcttgttag

SEQ ID NO: 1431225 - DNA, 15 bp, Homo sapiens
aaatatatcttgtta

SEQ ID NO: 1431226 - DNA, 15 bp, Homo sapiens
taaatatatcttgtt

SEQ ID NO: 1431227 - DNA, 15 bp, Homo sapiens
ataaatatatcttgt

SEQ ID NO: 1431228 - DNA, 15 bp, Homo sapiens
tataaatatatcttg

SEQ ID NO: 1431229 - DNA, 15 bp, Homo sapiens
atataaatatatctt

SEQ ID NO: 1431230 - DNA, 15 bp, Homo sapiens
aatataaatatatct

SEQ ID NO: 1431231 - DNA, 15 bp, Homo sapiens
taatataaatatatc

SEQ ID NO: 1431232 - DNA, 15 bp, Homo sapiens
ttaatataaatatat

SEQ ID NO: 1431233 - DNA, 15 bp, Homo sapiens
attaatataaatata

SEQ ID NO: 1431234 - DNA, 15 bp, Homo sapiens
gattaatataaatat

SEQ ID NO: 1431235 - DNA, 15 bp, Homo sapiens
ggattaatataaata

SEQ ID NO: 1431236 - DNA, 15 bp, Homo sapiens
tggattaatataaat

SEQ ID NO: 1431237 - DNA, 15 bp, Homo sapiens
ttggattaatataaa

SEQ ID NO: 1431238 - DNA, 15 bp, Homo sapiens
tttggattaatataa

SEQ ID NO: 1431239 - DNA, 15 bp, Homo sapiens
ttttggattaatata

SEQ ID NO: 1431240 - DNA, 15 bp, Homo sapiens
cttttggattaatat

SEQ ID NO: 1431241 - DNA, 15 bp, Homo sapiens
tcttttggattaata

SEQ ID NO: 1431242 - DNA, 15 bp, Homo sapiens
ttcttttggattaat

SEQ ID NO: 1431243 - DNA, 15 bp, Homo sapiens
tttcttttggattaa

SEQ ID NO: 1431244 - DNA, 15 bp, Homo sapiens
ttttcttttggatta

SEQ ID NO: 1431245 - DNA, 15 bp, Homo sapiens
tttttcttttggatt

SEQ ID NO: 1431246 - DNA, 15 bp, Homo sapiens
ttttttcttttggat

SEQ ID NO: 1431247 - DNA, 15 bp, Homo sapiens
atttttttcttttgg

SEQ ID NO: 1431248 - DNA, 15 bp, Homo sapiens
aatttttttcttttg

SEQ ID NO: 1431249 - DNA, 15 bp, Homo sapiens
gaatttttttctttt

SEQ ID NO: 1431250 - DNA, 15 bp, Homo sapiens
agaatttttttcttt

SEQ ID NO: 1431251 - DNA, 15 bp, Homo sapiens
tagaatttttttctt

SEQ ID NO: 1431252 - DNA, 15 bp, Homo sapiens
gtagaatttttttct

SEQ ID NO: 1431253 - DNA, 15 bp, Homo sapiens
tgtagaatttttttc

SEQ ID NO: 1431254 - DNA, 15 bp, Homo sapiens
atgtagaattttttt

SEQ ID NO: 1431255 - DNA, 15 bp, Homo sapiens
aatgtagaatttttt

SEQ ID NO: 1431256 - DNA, 15 bp, Homo sapiens
taatgtagaattttt

SEQ ID NO: 1431257 - DNA, 15 bp, Homo sapiens
ttaatgtagaatttt

SEQ ID NO: 1431258 - DNA, 15 bp, Homo sapiens
attaatgtagaattt

SEQ ID NO: 1431259 - DNA, 15 bp, Homo sapiens
tattaatgtagaatt

SEQ ID NO: 1431260 - DNA, 15 bp, Homo sapiens
atattaatgtagaat

SEQ ID NO: 1431261 - DNA, 15 bp, Homo sapiens
aatattaatgtagaa

SEQ ID NO: 1431262 - DNA, 15 bp, Homo sapiens
taatattaatgtaga

SEQ ID NO: 1431263 - DNA, 15 bp, Homo sapiens
ataatattaatgtag

SEQ ID NO: 1431264 - DNA, 15 bp, Homo sapiens
tataatattaatgta

SEQ ID NO: 1431265 - DNA, 15 bp, Homo sapiens
ttataatattaatgt

SEQ ID NO: 1431266 - DNA, 15 bp, Homo sapiens
attataatattaatg

SEQ ID NO: 1431267 - DNA, 15 bp, Homo sapiens
tattataatattaat

SEQ ID NO: 1431268 - DNA, 15 bp, Homo sapiens
ctattataatattaa

SEQ ID NO: 1431269 - DNA, 15 bp, Homo sapiens
actattataatatta

SEQ ID NO: 1431270 - DNA, 15 bp, Homo sapiens
tactattataatatt

SEQ ID NO: 1431271 - DNA, 15 bp, Homo sapiens
atactattataatat

SEQ ID NO: 1431272 - DNA, 15 bp, Homo sapiens
aatactattataata

SEQ ID NO: 1431273 - DNA, 15 bp, Homo sapiens
aaatactattataat

SEQ ID NO: 1431274 - DNA, 15 bp, Homo sapiens
taaatactattataa

SEQ ID NO: 1431275 - DNA, 15 bp, Homo sapiens
ttaaatactattata

SEQ ID NO: 1431276 - DNA, 15 bp, Homo sapiens
tttaaatactattat

SEQ ID NO: 1431277 - DNA, 15 bp, Homo sapiens
ttttaaatactatta

SEQ ID NO: 1431278 - DNA, 15 bp, Homo sapiens
gttttaaatactatt

SEQ ID NO: 1431279 - DNA, 15 bp, Homo sapiens
tgttttaaatactat

SEQ ID NO: 1431280 - DNA, 15 bp, Homo sapiens
ctgttttaaatacta

SEQ ID NO: 1431281 - DNA, 15 bp, Homo sapiens
gctgttttaaatact

SEQ ID NO: 1431282 - DNA, 15 bp, Homo sapiens
agctgttttaaatac

SEQ ID NO: 1431283 - DNA, 15 bp, Homo sapiens
aagctgttttaaata

SEQ ID NO: 1431284 - DNA, 15 bp, Homo sapiens
taagctgttttaaat

SEQ ID NO: 1431285 - DNA, 15 bp, Homo sapiens
gtaagctgttttaaa

SEQ ID NO: 1431286 - DNA, 15 bp, Homo sapiens
ggtaagctgttttaa

SEQ ID NO: 1431287 - DNA, 15 bp, Homo sapiens
cggtaagctgtttta

SEQ ID NO: 1431288 - DNA, 15 bp, Homo sapiens
acggtaagctgtttt

SEQ ID NO: 1431289 - DNA, 15 bp, Homo sapiens
gacggtaagctgttt

SEQ ID NO: 1431290 - DNA, 15 bp, Homo sapiens
tgacggtaagctgtt

SEQ ID NO: 1431291 - DNA, 15 bp, Homo sapiens
gtgacggtaagctgt

SEQ ID NO: 1431292 - DNA, 15 bp, Homo sapiens
agtgacggtaagctg

SEQ ID NO: 1431293 - DNA, 15 bp, Homo sapiens
gagtgacggtaagct

SEQ ID NO: 1431294 - DNA, 15 bp, Homo sapiens
agagtgacggtaagc

SEQ ID NO: 1431295 - DNA, 15 bp, Homo sapiens
cagagtgacggtaag

SEQ ID NO: 1431296 - DNA, 15 bp, Homo sapiens
gcagagtgacggtaa

SEQ ID NO: 1431297 - DNA, 15 bp, Homo sapiens
tgcagagtgacggta

SEQ ID NO: 1431298 - DNA, 15 bp, Homo sapiens
ttgcagagtgacggt

SEQ ID NO: 1431299 - DNA, 15 bp, Homo sapiens
attgcagagtgacgg

SEQ ID NO: 1431300 - DNA, 15 bp, Homo sapiens
tattgcagagtgacg

SEQ ID NO: 1431301 - DNA, 15 bp, Homo sapiens
ttattgcagagtgac

SEQ ID NO: 1431302 - DNA, 15 bp, Homo sapiens
tttattgcagagtga

SEQ ID NO: 1431303 - DNA, 15 bp, Homo sapiens
ttttattgcagagtg

SEQ ID NO: 1431304 - DNA, 15 bp, Homo sapiens
gttttattgcagagt

SEQ ID NO: 1431305 - DNA, 15 bp, Homo sapiens
agttttattgcagag

SEQ ID NO: 1431306 - DNA, 15 bp, Homo sapiens
aagttttattgcaga

SEQ ID NO: 1431307 - DNA, 15 bp, Homo sapiens
caagttttattgcag

SEQ ID NO: 1431308 - DNA, 15 bp, Homo sapiens
acaagttttattgca

SEQ ID NO: 1431309 - DNA, 15 bp, Homo sapiens
cacaagttttattgc

SEQ ID NO: 1431310 - DNA, 15 bp, Homo sapiens
ccacaagttttattg

SEQ ID NO: 1431311 - DNA, 15 bp, Homo sapiens
accacaagttttatt

SEQ ID NO: 1431312 - DNA, 15 bp, Homo sapiens
gaccacaagttttat

SEQ ID NO: 1431313 - DNA, 15 bp, Homo sapiens
agaccacaagtttta

SEQ ID NO: 1431314 - DNA, 15 bp, Homo sapiens
aagaccacaagtttt

SEQ ID NO: 1431315 - DNA, 15 bp, Homo sapiens
taagaccacaagttt

SEQ ID NO: 1431316 - DNA, 15 bp, Homo sapiens
gtaagaccacaagtt

SEQ ID NO: 1431317 - DNA, 15 bp, Homo sapiens
ggtaagaccacaagt

SEQ ID NO: 1431318 - DNA, 15 bp, Homo sapiens
aggtaagaccacaag

SEQ ID NO: 1431319 - DNA, 15 bp, Homo sapiens
gaggtaagaccacaa

SEQ ID NO: 1431320 - DNA, 15 bp, Homo sapiens
ggaggtaagaccaca

SEQ ID NO: 1431321 - DNA, 15 bp, Homo sapiens
aggaggtaagaccac

SEQ ID NO: 1431322 - DNA, 15 bp, Homo sapiens
caggaggtaagacca

SEQ ID NO: 1431323 - DNA, 15 bp, Homo sapiens
tcaggaggtaagacc

SEQ ID NO: 1431324 - DNA, 15 bp, Homo sapiens
ttcaggaggtaagac

SEQ ID NO: 1431325 - DNA, 15 bp, Homo sapiens
gttcaggaggtaaga

SEQ ID NO: 1431326 - DNA, 15 bp, Homo sapiens
tgttcaggaggtaag

SEQ ID NO: 1431327 - DNA, 15 bp, Homo sapiens
ctgttcaggaggtaa

SEQ ID NO: 1431328 - DNA, 15 bp, Homo sapiens
actgttcaggaggta

SEQ ID NO: 1431329 - DNA, 15 bp, Homo sapiens
tactgttcaggaggt

SEQ ID NO: 1431330 - DNA, 15 bp, Homo sapiens
ttactgttcaggagg

SEQ ID NO: 1431331 - DNA, 15 bp, Homo sapiens
tttactgttcaggag

SEQ ID NO: 1431332 - DNA, 15 bp, Homo sapiens
atttactgttcagga

SEQ ID NO: 1431333 - DNA, 15 bp, Homo sapiens
aatttactgttcagg

SEQ ID NO: 1431334 - DNA, 15 bp, Homo sapiens
gaatttactgttcag

SEQ ID NO: 1431335 - DNA, 15 bp, Homo sapiens
agaatttactgttca

SEQ ID NO: 1431336 - DNA, 15 bp, Homo sapiens
aagaatttactgttc

SEQ ID NO: 1431337 - DNA, 15 bp, Homo sapiens
caagaatttactgtt

SEQ ID NO: 1431338 - DNA, 15 bp, Homo sapiens
tcaagaatttactgt

SEQ ID NO: 1431339 - DNA, 15 bp, Homo sapiens
ttcaagaatttactg

SEQ ID NO: 1431340 - DNA, 15 bp, Homo sapiens
attcaagaatttact

SEQ ID NO: 1431341 - DNA, 15 bp, Homo sapiens
aattcaagaatttac

SEQ ID NO: 1431342 - DNA, 15 bp, Homo sapiens
aaattcaagaattta

SEQ ID NO: 1431343 - DNA, 15 bp, Homo sapiens
caaattcaagaattt

SEQ ID NO: 1431344 - DNA, 15 bp, Homo sapiens
tcaaattcaagaatt

SEQ ID NO: 1431345 - DNA, 15 bp, Homo sapiens
ctcaaattcaagaat

SEQ ID NO: 1431346 - DNA, 15 bp, Homo sapiens
tctcaaattcaagaa

SEQ ID NO: 1431347 - DNA, 15 bp, Homo sapiens
gtctcaaattcaaga

SEQ ID NO: 1431348 - DNA, 15 bp, Homo sapiens
tgtctcaaattcaag

SEQ ID NO: 1431349 - DNA, 15 bp, Homo sapiens
atgtctcaaattcaa

SEQ ID NO: 1431350 - DNA, 15 bp, Homo sapiens
aatgtctcaaattca

SEQ ID NO: 1431351 - DNA, 15 bp, Homo sapiens
aaatgtctcaaattc

SEQ ID NO: 1431352 - DNA, 15 bp, Homo sapiens
taaatgtctcaaatt

SEQ ID NO: 1431353 - DNA, 15 bp, Homo sapiens
ctaaatgtctcaaat

SEQ ID NO: 1431354 - DNA, 15 bp, Homo sapiens
tctaaatgtctcaaa

SEQ ID NO: 1431355 - DNA, 15 bp, Homo sapiens
ttctaaatgtctcaa

SEQ ID NO: 1431356 - DNA, 15 bp, Homo sapiens
tttctaaatgtctca

SEQ ID NO: 1431357 - DNA, 15 bp, Homo sapiens
ttttctaaatgtctc

SEQ ID NO: 1431358 - DNA, 15 bp, Homo sapiens
attttctaaatgtct

SEQ ID NO: 1431359 - DNA, 15 bp, Homo sapiens
tattttctaaatgtc

SEQ ID NO: 1431360 - DNA, 15 bp, Homo sapiens
atattttctaaatgt

SEQ ID NO: 1431361 - DNA, 15 bp, Homo sapiens
aatattttctaaatg

SEQ ID NO: 1431362 - DNA, 15 bp, Homo sapiens
aaatattttctaaat

SEQ ID NO: 1431363 - DNA, 15 bp, Homo sapiens
gaaatattttctaaa

SEQ ID NO: 1431364 - DNA, 15 bp, Homo sapiens
agaaatattttctaa

SEQ ID NO: 1431365 - DNA, 15 bp, Homo sapiens
aagaaatattttcta

SEQ ID NO: 1431366 - DNA, 15 bp, Homo sapiens
aaagaaatattttct

SEQ ID NO: 1431367 - DNA, 15 bp, Homo sapiens
aaaagaaatattttc

SEQ ID NO: 1431368 - DNA, 15 bp, Homo sapiens
aaaaagaaatatttt

SEQ ID NO: 1431369 - DNA, 15 bp, Homo sapiens
taaaaagaaatattt

SEQ ID NO: 1431370 - DNA, 15 bp, Homo sapiens
ttaaaaagaaatatt

SEQ ID NO: 1431371 - DNA, 15 bp, Homo sapiens
tttaaaaagaaatat

SEQ ID NO: 1431372 - DNA, 15 bp, Homo sapiens
ttttaaaaagaaata

SEQ ID NO: 1431373 - DNA, 15 bp, Homo sapiens
tttttaaaaagaaat

SEQ ID NO: 1431374 - DNA, 15 bp, Homo sapiens
atttttaaaaagaaa

SEQ ID NO: 1431375 - DNA, 15 bp, Homo sapiens
atatttttaaaaaga

SEQ ID NO: 1431376 - DNA, 15 bp, Homo sapiens
catatttttaaaaag

SEQ ID NO: 1431377 - DNA, 15 bp, Homo sapiens
tcatatttttaaaaa

SEQ ID NO: 1431378 - DNA, 15 bp, Homo sapiens
ttcatatttttaaaa

SEQ ID NO: 1431379 - DNA, 15 bp, Homo sapiens
attcatatttttaaa

SEQ ID NO: 1431380 - DNA, 15 bp, Homo sapiens
cattcatatttttaa

SEQ ID NO: 1431381 - DNA, 15 bp, Homo sapiens
tcattcatattttta

SEQ ID NO: 1431382 - DNA, 15 bp, Homo sapiens
gtcattcatattttt

SEQ ID NO: 1431383 - DNA, 15 bp, Homo sapiens
agtcattcatatttt

SEQ ID NO: 1431384 - DNA, 15 bp, Homo sapiens
gagtcattcatattt

SEQ ID NO: 1431385 - DNA, 15 bp, Homo sapiens
ggagtcattcatatt

SEQ ID NO: 1431386 - DNA, 15 bp, Homo sapiens
aggagtcattcatat

SEQ ID NO: 1431387 - DNA, 15 bp, Homo sapiens
gaggagtcattcata

SEQ ID NO: 1431388 - DNA, 15 bp, Homo sapiens
agaggagtcattcat

SEQ ID NO: 1431389 - DNA, 15 bp, Homo sapiens
gagaggagtcattca

SEQ ID NO: 1431390 - DNA, 15 bp, Homo sapiens
tgagaggagtcattc

SEQ ID NO: 1431391 - DNA, 15 bp, Homo sapiens
ttgagaggagtcatt

SEQ ID NO: 1431392 - DNA, 15 bp, Homo sapiens
tttgagaggagtcat

SEQ ID NO: 1431393 - DNA, 15 bp, Homo sapiens
ttttgagaggagtca

SEQ ID NO: 1431394 - DNA, 15 bp, Homo sapiens
attttttttttgaga

SEQ ID NO: 1431395 - DNA, 15 bp, Homo sapiens
cattttttttttgag

SEQ ID NO: 1431396 - DNA, 15 bp, Homo sapiens
gcattttttttttga

SEQ ID NO: 1431397 - DNA, 15 bp, Homo sapiens
agcattttttttttg

SEQ ID NO: 1431398 - DNA, 15 bp, Homo sapiens
gagcatttttttttt

SEQ ID NO: 1431399 - DNA, 15 bp, Homo sapiens
ggagcattttttttt

SEQ ID NO: 1431400 - DNA, 15 bp, Homo sapiens
aggagcatttttttt

SEQ ID NO: 1431401 - DNA, 15 bp, Homo sapiens
caggagcattttttt

SEQ ID NO: 1431402 - DNA, 15 bp, Homo sapiens
acaggagcatttttt

SEQ ID NO: 1431403 - DNA, 15 bp, Homo sapiens
gacaggagcattttt

SEQ ID NO: 1431404 - DNA, 15 bp, Homo sapiens
cgacaggagcatttt

SEQ ID NO: 1431405 - DNA, 15 bp, Homo sapiens
tcgacaggagcattt

SEQ ID NO: 1431406 - DNA, 15 bp, Homo sapiens
gtcgacaggagcatt

SEQ ID NO: 1431407 - DNA, 15 bp, Homo sapiens
tgtcgacaggagcat

SEQ ID NO: 1431408 - DNA, 15 bp, Homo sapiens
ttgtcgacaggagca

SEQ ID NO: 1431409 - DNA, 15 bp, Homo sapiens
tttgtcgacaggagc

SEQ ID NO: 1431410 - DNA, 15 bp, Homo sapiens
atttgtcgacaggag

SEQ ID NO: 1431411 - DNA, 15 bp, Homo sapiens
catttgtcgacagga

SEQ ID NO: 1431412 - DNA, 15 bp, Homo sapiens
tcatttgtcgacagg

SEQ ID NO: 1431413 - DNA, 15 bp, Homo sapiens
ttcatttgtcgacag

SEQ ID NO: 1431414 - DNA, 15 bp, Homo sapiens
attcatttgtcgaca

SEQ ID NO: 1431415 - DNA, 15 bp, Homo sapiens
tattcatttgtcgac

SEQ ID NO: 1431416 - DNA, 15 bp, Homo sapiens
atattcatttgtcga

SEQ ID NO: 1431417 - DNA, 15 bp, Homo sapiens
aatattcatttgtcg

SEQ ID NO: 1431418 - DNA, 15 bp, Homo sapiens
caatattcatttgtc

SEQ ID NO: 1431419 - DNA, 15 bp, Homo sapiens
tcaatattcatttgt

SEQ ID NO: 1431420 - DNA, 15 bp, Homo sapiens
atcaatattcatttg

SEQ ID NO: 1431421 - DNA, 15 bp, Homo sapiens
aatcaatattcattt

SEQ ID NO: 1431422 - DNA, 15 bp, Homo sapiens
aaatcaatattcatt

SEQ ID NO: 1431423 - DNA, 15 bp, Homo sapiens
taaatcaatattcat

SEQ ID NO: 1431424 - DNA, 15 bp, Homo sapiens
gtaaatcaatattca

SEQ ID NO: 1431425 - DNA, 15 bp, Homo sapiens
ggtaaatcaatattc

SEQ ID NO: 1431426 - DNA, 15 bp, Homo sapiens
aggtaaatcaatatt

SEQ ID NO: 1431427 - DNA, 15 bp, Homo sapiens
aaggtaaatcaatat

SEQ ID NO: 1431428 - DNA, 15 bp, Homo sapiens
taaggtaaatcaata

SEQ ID NO: 1431429 - DNA, 15 bp, Homo sapiens
ttaaggtaaatcaat

SEQ ID NO: 1431430 - DNA, 15 bp, Homo sapiens
tttaaggtaaatcaa

SEQ ID NO: 1431431 - DNA, 15 bp, Homo sapiens
ttttaaggtaaatca

SEQ ID NO: 1431432 - DNA, 15 bp, Homo sapiens
tttttaaggtaaatc

SEQ ID NO: 1431433 - DNA, 15 bp, Homo sapiens
ttttttaaggtaaat

SEQ ID NO: 1431434 - DNA, 15 bp, Homo sapiens
attttttaaggtaaa

SEQ ID NO: 1431435 - DNA, 15 bp, Homo sapiens
tattttttaaggtaa

SEQ ID NO: 1431436 - DNA, 15 bp, Homo sapiens
atattttttaaggta

SEQ ID NO: 1431437 - DNA, 15 bp, Homo sapiens
gatattttttaaggt

SEQ ID NO: 1431438 - DNA, 15 bp, Homo sapiens
tgatattttttaagg

SEQ ID NO: 1431439 - DNA, 15 bp, Homo sapiens
ttgatattttttaag

SEQ ID NO: 1431440 - DNA, 15 bp, Homo sapiens
attgatattttttaa

SEQ ID NO: 1431441 - DNA, 15 bp, Homo sapiens
tattgatatttttta

SEQ ID NO: 1431442 - DNA, 15 bp, Homo sapiens
ttattgatatttttt

SEQ ID NO: 1431443 - DNA, 15 bp, Homo sapiens
attattgatattttt

SEQ ID NO: 1431444 - DNA, 15 bp, Homo sapiens
tattattgatatttt

SEQ ID NO: 1431445 - DNA, 15 bp, Homo sapiens
gtattattgatattt

SEQ ID NO: 1431446 - DNA, 15 bp, Homo sapiens
tgtattattgatatt

SEQ ID NO: 1431447 - DNA, 15 bp, Homo sapiens
atgtattattgatat

SEQ ID NO: 1431448 - DNA, 15 bp, Homo sapiens
tatgtattattgata

SEQ ID NO: 1431449 - DNA, 15 bp, Homo sapiens
ttatgtattattgat

SEQ ID NO: 1431450 - DNA, 15 bp, Homo sapiens
cttatgtattattga

SEQ ID NO: 1431451 - DNA, 15 bp, Homo sapiens
gcttatgtattattg

SEQ ID NO: 1431452 - DNA, 15 bp, Homo sapiens
tgcttatgtattatt

SEQ ID NO: 1431453 - DNA, 15 bp, Homo sapiens
ctgcttatgtattat

SEQ ID NO: 1431454 - DNA, 15 bp, Homo sapiens
actgcttatgtatta

SEQ ID NO: 1431455 - DNA, 15 bp, Homo sapiens
tactgcttatgtatt

SEQ ID NO: 1431456 - DNA, 15 bp, Homo sapiens
ttactgcttatgtat

SEQ ID NO: 1431457 - DNA, 15 bp, Homo sapiens
tttactgcttatgta

SEQ ID NO: 1431458 - DNA, 15 bp, Homo sapiens
atttactgcttatgt

SEQ ID NO: 1431459 - DNA, 15 bp, Homo sapiens
tatttactgcttatg

SEQ ID NO: 1431460 - DNA, 15 bp, Homo sapiens
atatttactgcttat

SEQ ID NO: 1431461 - DNA, 15 bp, Homo sapiens
tatatttactgctta

SEQ ID NO: 1431462 - DNA, 15 bp, Homo sapiens
ctatatttactgctt

SEQ ID NO: 1431463 - DNA, 15 bp, Homo sapiens
cctatatttactgct

SEQ ID NO: 1431464 - DNA, 15 bp, Homo sapiens
tcctatatttactgc

SEQ ID NO: 1431465 - DNA, 15 bp, Homo sapiens
gtcctatatttactg

SEQ ID NO: 1431466 - DNA, 15 bp, Homo sapiens
agtcctatatttact

SEQ ID NO: 1431467 - DNA, 15 bp, Homo sapiens
tagtcctatatttac

SEQ ID NO: 1431468 - DNA, 15 bp, Homo sapiens
ttagtcctatattta

SEQ ID NO: 1431469 - DNA, 15 bp, Homo sapiens
cttagtcctatattt

SEQ ID NO: 1431470 - DNA, 15 bp, Homo sapiens
tcttagtcctatatt

SEQ ID NO: 1431471 - DNA, 15 bp, Homo sapiens
ttcttagtcctatat

SEQ ID NO: 1431472 - DNA, 15 bp, Homo sapiens
attcttagtcctata

SEQ ID NO: 1431473 - DNA, 15 bp, Homo sapiens
tattcttagtcctat

SEQ ID NO: 1431474 - DNA, 15 bp, Homo sapiens
atattcttagtccta

SEQ ID NO: 1431475 - DNA, 15 bp, Homo sapiens
tatattcttagtcct

SEQ ID NO: 1431476 - DNA, 15 bp, Homo sapiens
ctatattcttagtcc

SEQ ID NO: 1431477 - DNA, 15 bp, Homo sapiens
tctatattcttagtc

SEQ ID NO: 1431478 - DNA, 15 bp, Homo sapiens
ttctatattcttagt

SEQ ID NO: 1431479 - DNA, 15 bp, Homo sapiens
attctatattcttag

SEQ ID NO: 1431480 - DNA, 15 bp, Homo sapiens
aattctatattctta

SEQ ID NO: 1431481 - DNA, 15 bp, Homo sapiens
aaattctatattctt

SEQ ID NO: 1431482 - DNA, 15 bp, Homo sapiens
caaattctatattct

SEQ ID NO: 1431483 - DNA, 15 bp, Homo sapiens
ccaaattctatattc

SEQ ID NO: 1431484 - DNA, 15 bp, Homo sapiens
tccaaattctatatt

SEQ ID NO: 1431485 - DNA, 15 bp, Homo sapiens
ctccaaattctatat

SEQ ID NO: 1431486 - DNA, 15 bp, Homo sapiens
actccaaattctata

SEQ ID NO: 1431487 - DNA, 15 bp, Homo sapiens
tactccaaattctat

SEQ ID NO: 1431488 - DNA, 15 bp, Homo sapiens
atactccaaattcta

SEQ ID NO: 1431489 - DNA, 15 bp, Homo sapiens
tatactccaaattct

SEQ ID NO: 1431490 - DNA, 15 bp, Homo sapiens
ttatactccaaattc

SEQ ID NO: 1431491 - DNA, 15 bp, Homo sapiens
attatactccaaatt

SEQ ID NO: 1431492 - DNA, 15 bp, Homo sapiens
cattatactccaaat

SEQ ID NO: 1431493 - DNA, 15 bp, Homo sapiens
acattatactccaaa

SEQ ID NO: 1431494 - DNA, 15 bp, Homo sapiens
aacattatactccaa

SEQ ID NO: 1431495 - DNA, 15 bp, Homo sapiens
taacattatactcca

SEQ ID NO: 1431496 - DNA, 15 bp, Homo sapiens
ttaacattatactcc

SEQ ID NO: 1431497 - DNA, 15 bp, Homo sapiens
tttaacattatactc

SEQ ID NO: 1431498 - DNA, 15 bp, Homo sapiens
ctttaacattatact

SEQ ID NO: 1431499 - DNA, 15 bp, Homo sapiens
tctttaacattatac

SEQ ID NO: 1431500 - DNA, 15 bp, Homo sapiens
atctttaacattata

SEQ ID NO: 1431501 - DNA, 15 bp, Homo sapiens
gatctttaacattat

SEQ ID NO: 1431502 - DNA, 15 bp, Homo sapiens
agatctttaacatta

SEQ ID NO: 1431503 - DNA, 15 bp, Homo sapiens
aagatctttaacatt

SEQ ID NO: 1431504 - DNA, 15 bp, Homo sapiens
caagatctttaacat

SEQ ID NO: 1431505 - DNA, 15 bp, Homo sapiens
tcaagatctttaaca

SEQ ID NO: 1431506 - DNA, 15 bp, Homo sapiens
ttcaagatctttaac

SEQ ID NO: 1431507 - DNA, 15 bp, Homo sapiens
cttcaagatctttaa

SEQ ID NO: 1431508 - DNA, 15 bp, Homo sapiens
tcttcaagatcttta

SEQ ID NO: 1431509 - DNA, 15 bp, Homo sapiens
ctcttcaagatcttt

SEQ ID NO: 1431510 - DNA, 15 bp, Homo sapiens
cctcttcaagatctt

SEQ ID NO: 1431511 - DNA, 15 bp, Homo sapiens
acctcttcaagatct

SEQ ID NO: 1431512 - DNA, 15 bp, Homo sapiens
cacctcttcaagatc

SEQ ID NO: 1431513 - DNA, 15 bp, Homo sapiens
tcacctcttcaagat

SEQ ID NO: 1431514 - DNA, 15 bp, Homo sapiens
atcacctcttcaaga

SEQ ID NO: 1431515 - DNA, 15 bp, Homo sapiens
tatcacctcttcaag

SEQ ID NO: 1431516 - DNA, 15 bp, Homo sapiens
ttatcacctcttcaa

SEQ ID NO: 1431517 - DNA, 15 bp, Homo sapiens
gttatcacctcttca

SEQ ID NO: 1431518 - DNA, 15 bp, Homo sapiens
cgttatcacctcttc

SEQ ID NO: 1431519 - DNA, 15 bp, Homo sapiens
acgttatcacctctt

SEQ ID NO: 1431520 - DNA, 15 bp, Homo sapiens
gacgttatcacctct

SEQ ID NO: 1431521 - DNA, 15 bp, Homo sapiens
agacgttatcacctc

SEQ ID NO: 1431522 - DNA, 15 bp, Homo sapiens
gagacgttatcacct

SEQ ID NO: 1431523 - DNA, 15 bp, Homo sapiens
tgagacgttatcacc

SEQ ID NO: 1431524 - DNA, 15 bp, Homo sapiens
ttgagacgttatcac

SEQ ID NO: 1431525 - DNA, 15 bp, Homo sapiens
tttgagacgttatca

SEQ ID NO: 1431526 - DNA, 15 bp, Homo sapiens
ctttgagacgttatc

SEQ ID NO: 1431527 - DNA, 15 bp, Homo sapiens
tctttgagacgttat

SEQ ID NO: 1431528 - DNA, 15 bp, Homo sapiens
gtctttgagacgtta

SEQ ID NO: 1431529 - DNA, 15 bp, Homo sapiens
tgtctttgagacgtt

SEQ ID NO: 1431530 - DNA, 15 bp, Homo sapiens
ttgtctttgagacgt

SEQ ID NO: 1431531 - DNA, 15 bp, Homo sapiens
tttgtctttgagacg

SEQ ID NO: 1431532 - DNA, 15 bp, Homo sapiens
atttgtctttgagac

SEQ ID NO: 1431533 - DNA, 15 bp, Homo sapiens
catttgtctttgaga

SEQ ID NO: 1431534 - DNA, 15 bp, Homo sapiens
acatttgtctttgag

SEQ ID NO: 1431535 - DNA, 15 bp, Homo sapiens
aacatttgtctttga

SEQ ID NO: 1431536 - DNA, 15 bp, Homo sapiens
caacatttgtctttg

SEQ ID NO: 1431537 - DNA, 15 bp, Homo sapiens
acaacatttgtcttt

SEQ ID NO: 1431538 - DNA, 15 bp, Homo sapiens
tacaacatttgtctt

SEQ ID NO: 1431539 - DNA, 15 bp, Homo sapiens
ttacaacatttgtct

SEQ ID NO: 1431540 - DNA, 15 bp, Homo sapiens
gttacaacatttgtc

SEQ ID NO: 1431541 - DNA, 15 bp, Homo sapiens
agttacaacatttgt

SEQ ID NO: 1431542 - DNA, 15 bp, Homo sapiens
aagttacaacatttg

SEQ ID NO: 1431543 - DNA, 15 bp, Homo sapiens
caagttacaacattt

SEQ ID NO: 1431544 - DNA, 15 bp, Homo sapiens
tcaagttacaacatt

SEQ ID NO: 1431545 - DNA, 15 bp, Homo sapiens
atcaagttacaacat

SEQ ID NO: 1431546 - DNA, 15 bp, Homo sapiens
gatcaagttacaaca

SEQ ID NO: 1431547 - DNA, 15 bp, Homo sapiens
ggatcaagttacaac

SEQ ID NO: 1431548 - DNA, 15 bp, Homo sapiens
aggatcaagttacaa

SEQ ID NO: 1431549 - DNA, 15 bp, Homo sapiens
gaggatcaagttaca

SEQ ID NO: 1431550 - DNA, 15 bp, Homo sapiens
agaggatcaagttac

SEQ ID NO: 1431551 - DNA, 15 bp, Homo sapiens
aagaggatcaagtta

SEQ ID NO: 1431552 - DNA, 15 bp, Homo sapiens
taagaggatcaagtt

SEQ ID NO: 1431553 - DNA, 15 bp, Homo sapiens
ttaagaggatcaagt

SEQ ID NO: 1431554 - DNA, 15 bp, Homo sapiens
attaagaggatcaag

SEQ ID NO: 1431555 - DNA, 15 bp, Homo sapiens
cattaagaggatcaa

SEQ ID NO: 1431556 - DNA, 15 bp, Homo sapiens
gcattaagaggatca

SEQ ID NO: 1431557 - DNA, 15 bp, Homo sapiens
agcattaagaggatc

SEQ ID NO: 1431558 - DNA, 15 bp, Homo sapiens
gagcattaagaggat

SEQ ID NO: 1431559 - DNA, 15 bp, Homo sapiens
tgagcattaagagga

SEQ ID NO: 1431560 - DNA, 15 bp, Homo sapiens
ctgagcattaagagg

SEQ ID NO: 1431561 - DNA, 15 bp, Homo sapiens
cctgagcattaagag

SEQ ID NO: 1431562 - DNA, 15 bp, Homo sapiens
tcctgagcattaaga

SEQ ID NO: 1431563 - DNA, 15 bp, Homo sapiens
ttcctgagcattaag

SEQ ID NO: 1431564 - DNA, 15 bp, Homo sapiens
attcctgagcattaa

SEQ ID NO: 1431565 - DNA, 15 bp, Homo sapiens
aattcctgagcatta

SEQ ID NO: 1431566 - DNA, 15 bp, Homo sapiens
aaattcctgagcatt

SEQ ID NO: 1431567 - DNA, 15 bp, Homo sapiens
taaattcctgagcat

SEQ ID NO: 1431568 - DNA, 15 bp, Homo sapiens
ttaaattcctgagca

SEQ ID NO: 1431569 - DNA, 15 bp, Homo sapiens
tttaaattcctgagc

SEQ ID NO: 1431570 - DNA, 15 bp, Homo sapiens
ttttaaattcctgag

SEQ ID NO: 1431571 - DNA, 15 bp, Homo sapiens
tttttaaattcctga

SEQ ID NO: 1431572 - DNA, 15 bp, Homo sapiens
ctttttaaattcctg

SEQ ID NO: 1431573 - DNA, 15 bp, Homo sapiens
tctttttaaattcct

SEQ ID NO: 1431574 - DNA, 15 bp, Homo sapiens
ttctttttaaattcc

SEQ ID NO: 1431575 - DNA, 15 bp, Homo sapiens
tttctttttaaattc

SEQ ID NO: 1431576 - DNA, 15 bp, Homo sapiens
atttctttttaaatt

SEQ ID NO: 1431577 - DNA, 15 bp, Homo sapiens
gatttctttttaaat

SEQ ID NO: 1431578 - DNA, 15 bp, Homo sapiens
agatttctttttaaa

SEQ ID NO: 1431579 - DNA, 15 bp, Homo sapiens
gagatttctttttaa

SEQ ID NO: 1431580 - DNA, 15 bp, Homo sapiens
tgagatttcttttta

SEQ ID NO: 1431581 - DNA, 15 bp, Homo sapiens
ctgagatttcttttt

SEQ ID NO: 1431582 - DNA, 15 bp, Homo sapiens
cctgagatttctttt

SEQ ID NO: 1431583 - DNA, 15 bp, Homo sapiens
ccctgagatttcttt

SEQ ID NO: 1431584 - DNA, 15 bp, Homo sapiens
accctgagatttctt

SEQ ID NO: 1431585 - DNA, 15 bp, Homo sapiens
aaccctgagatttct

SEQ ID NO: 1431586 - DNA, 15 bp, Homo sapiens
aaaccctgagatttc

SEQ ID NO: 1431587 - DNA, 15 bp, Homo sapiens
aaaaccctgagattt

SEQ ID NO: 1431588 - DNA, 15 bp, Homo sapiens
taaaaccctgagatt

SEQ ID NO: 1431589 - DNA, 15 bp, Homo sapiens
ctaaaaccctgagat

SEQ ID NO: 1431590 - DNA, 15 bp, Homo sapiens
tctaaaaccctgaga

SEQ ID NO: 1431591 - DNA, 15 bp, Homo sapiens
ttctaaaaccctgag

SEQ ID NO: 1431592 - DNA, 15 bp, Homo sapiens
tttctaaaaccctga

SEQ ID NO: 1431593 - DNA, 15 bp, Homo sapiens
gtttctaaaaccctg

SEQ ID NO: 1431594 - DNA, 15 bp, Homo sapiens
tgtttctaaaaccct

SEQ ID NO: 1431595 - DNA, 15 bp, Homo sapiens
atgtttctaaaaccc

SEQ ID NO: 1431596 - DNA, 15 bp, Homo sapiens
aatgtttctaaaacc

SEQ ID NO: 1431597 - DNA, 15 bp, Homo sapiens
aaatgtttctaaaac

SEQ ID NO: 1431598 - DNA, 15 bp, Homo sapiens
aaaatgtttctaaaa

SEQ ID NO: 1431599 - DNA, 15 bp, Homo sapiens
aaaaatgtttctaaa

SEQ ID NO: 1431600 - DNA, 15 bp, Homo sapiens
aaaaaatgtttctaa

SEQ ID NO: 1431601 - DNA, 15 bp, Homo sapiens
aaaaaaatgtttcta

SEQ ID NO: 1431602 - DNA, 15 bp, Homo sapiens
aaaaaaaatgtttct

SEQ ID NO: 1431603 - DNA, 15 bp, Homo sapiens
aaaaaaaaatgtttc

SEQ ID NO: 1431604 - DNA, 15 bp, Homo sapiens
aaaaaaaaaatgttt

SEQ ID NO: 1431605 - DNA, 15 bp, Homo sapiens
aaaaaaaaaaatgtt

SEQ ID NO: 1431606 - DNA, 15 bp, Homo sapiens
ctaaaaaaaaaaatg

SEQ ID NO: 1431607 - DNA, 15 bp, Homo sapiens
tctaaaaaaaaaaat

SEQ ID NO: 1431608 - DNA, 15 bp, Homo sapiens
ttctaaaaaaaaaaa

SEQ ID NO: 1431609 - DNA, 15 bp, Homo sapiens
attctaaaaaaaaaa

SEQ ID NO: 1431610 - DNA, 15 bp, Homo sapiens
aattctaaaaaaaaa

SEQ ID NO: 1431611 - DNA, 15 bp, Homo sapiens
taattctaaaaaaaa

SEQ ID NO: 1431612 - DNA, 15 bp, Homo sapiens
ttaattctaaaaaaa

SEQ ID NO: 1431613 - DNA, 15 bp, Homo sapiens
tttaattctaaaaaa

SEQ ID NO: 1431614 - DNA, 15 bp, Homo sapiens
atttaattctaaaaa

SEQ ID NO: 1431615 - DNA, 15 bp, Homo sapiens
gatttaattctaaaa

SEQ ID NO: 1431616 - DNA, 15 bp, Homo sapiens
tgatttaattctaaa

SEQ ID NO: 1431617 - DNA, 15 bp, Homo sapiens
ttgatttaattctaa

SEQ ID NO: 1431618 - DNA, 15 bp, Homo sapiens
attgatttaattcta

SEQ ID NO: 1431619 - DNA, 15 bp, Homo sapiens
tattgatttaattct

SEQ ID NO: 1431620 - DNA, 15 bp, Homo sapiens
ttattgatttaattc

SEQ ID NO: 1431621 - DNA, 15 bp, Homo sapiens
attattgatttaatt

SEQ ID NO: 1431622 - DNA, 15 bp, Homo sapiens
cattattgatttaat

SEQ ID NO: 1431623 - DNA, 15 bp, Homo sapiens
acattattgatttaa

SEQ ID NO: 1431624 - DNA, 15 bp, Homo sapiens
gacattattgattta

SEQ ID NO: 1431625 - DNA, 15 bp, Homo sapiens
tgacattattgattt

SEQ ID NO: 1431626 - DNA, 15 bp, Homo sapiens
ttgacattattgatt

SEQ ID NO: 1431627 - DNA, 15 bp, Homo sapiens
tttgacattattgat

SEQ ID NO: 1431628 - DNA, 15 bp, Homo sapiens
ctttgacattattga

SEQ ID NO: 1431629 - DNA, 15 bp, Homo sapiens
tctttgacattattg

SEQ ID NO: 1431630 - DNA, 15 bp, Homo sapiens
atctttgacattatt

SEQ ID NO: 1431631 - DNA, 15 bp, Homo sapiens
catctttgacattat

SEQ ID NO: 1431632 - DNA, 15 bp, Homo sapiens
tcatctttgacatta

SEQ ID NO: 1431633 - DNA, 15 bp, Homo sapiens
ctcatctttgacatt

SEQ ID NO: 1431634 - DNA, 15 bp, Homo sapiens
actcatctttgacat

SEQ ID NO: 1431635 - DNA, 15 bp, Homo sapiens
cactcatctttgaca

SEQ ID NO: 1431636 - DNA, 15 bp, Homo sapiens
gcactcatctttgac

SEQ ID NO: 1431637 - DNA, 15 bp, Homo sapiens
ggcactcatctttga

SEQ ID NO: 1431638 - DNA, 15 bp, Homo sapiens
tggcactcatctttg

SEQ ID NO: 1431639 - DNA, 15 bp, Homo sapiens
ttggcactcatcttt

SEQ ID NO: 1431640 - DNA, 15 bp, Homo sapiens
gttggcactcatctt

SEQ ID NO: 1431641 - DNA, 15 bp, Homo sapiens
ggttggcactcatct

SEQ ID NO: 1431642 - DNA, 15 bp, Homo sapiens
tggttggcactcatc

SEQ ID NO: 1431643 - DNA, 15 bp, Homo sapiens
ctggttggcactcat

SEQ ID NO: 1431644 - DNA, 15 bp, Homo sapiens
actggttggcactca

SEQ ID NO: 1431645 - DNA, 15 bp, Homo sapiens
tactggttggcactc

SEQ ID NO: 1431646 - DNA, 15 bp, Homo sapiens
ctactggttggcact

SEQ ID NO: 1431647 - DNA, 15 bp, Homo sapiens
actactggttggcac

SEQ ID NO: 1431648 - DNA, 15 bp, Homo sapiens
tactactggttggca

SEQ ID NO: 1431649 - DNA, 15 bp, Homo sapiens
ttactactggttggc

SEQ ID NO: 1431650 - DNA, 15 bp, Homo sapiens
attactactggttgg

SEQ ID NO: 1431651 - DNA, 15 bp, Homo sapiens
cattactactggttg

SEQ ID NO: 1431652 - DNA, 15 bp, Homo sapiens
tcattactactggtt

SEQ ID NO: 1431653 - DNA, 15 bp, Homo sapiens
atcattactactggt

SEQ ID NO: 1431654 - DNA, 15 bp, Homo sapiens
aatcattactactgg

SEQ ID NO: 1431655 - DNA, 15 bp, Homo sapiens
aaatcattactactg

SEQ ID NO: 1431656 - DNA, 15 bp, Homo sapiens
taaatcattactact

SEQ ID NO: 1431657 - DNA, 15 bp, Homo sapiens
ctaaatcattactac

SEQ ID NO: 1431658 - DNA, 15 bp, Homo sapiens
tctaaatcattacta

SEQ ID NO: 1431659 - DNA, 15 bp, Homo sapiens
ttctaaatcattact

SEQ ID NO: 1431660 - DNA, 15 bp, Homo sapiens
tttctaaatcattac

SEQ ID NO: 1431661 - DNA, 15 bp, Homo sapiens
atttctaaatcatta

SEQ ID NO: 1431662 - DNA, 15 bp, Homo sapiens
aatttctaaatcatt

SEQ ID NO: 1431663 - DNA, 15 bp, Homo sapiens
taatttctaaatcat

SEQ ID NO: 1431664 - DNA, 15 bp, Homo sapiens
ataatttctaaatca

SEQ ID NO: 1431665 - DNA, 15 bp, Homo sapiens
tataatttctaaatc

SEQ ID NO: 1431666 - DNA, 15 bp, Homo sapiens
atataatttctaaat

SEQ ID NO: 1431667 - DNA, 15 bp, Homo sapiens
catataatttctaaa

SEQ ID NO: 1431668 - DNA, 15 bp, Homo sapiens
ccatataatttctaa

SEQ ID NO: 1431669 - DNA, 15 bp, Homo sapiens
gccatataatttcta

SEQ ID NO: 1431670 - DNA, 15 bp, Homo sapiens
tgccatataatttct

SEQ ID NO: 1431671 - DNA, 15 bp, Homo sapiens
ctgccatataatttc

SEQ ID NO: 1431672 - DNA, 15 bp, Homo sapiens
actgccatataattt

SEQ ID NO: 1431673 - DNA, 15 bp, Homo sapiens
aactgccatataatt

SEQ ID NO: 1431674 - DNA, 15 bp, Homo sapiens
gaactgccatataat

SEQ ID NO: 1431675 - DNA, 15 bp, Homo sapiens
tgaactgccatataa

SEQ ID NO: 1431676 - DNA, 15 bp, Homo sapiens
atgaactgccatata

SEQ ID NO: 1431677 - DNA, 15 bp, Homo sapiens
gatgaactgccatat

SEQ ID NO: 1431678 - DNA, 15 bp, Homo sapiens
tgatgaactgccata

SEQ ID NO: 1431679 - DNA, 15 bp, Homo sapiens
atgatgaactgccat

SEQ ID NO: 1431680 - DNA, 15 bp, Homo sapiens
aatgatgaactgcca

SEQ ID NO: 1431681 - DNA, 15 bp, Homo sapiens
aaatgatgaactgcc

SEQ ID NO: 1431682 - DNA, 15 bp, Homo sapiens
taaatgatgaactgc

SEQ ID NO: 1431683 - DNA, 15 bp, Homo sapiens
ctaaatgatgaactg

SEQ ID NO: 1431684 - DNA, 15 bp, Homo sapiens
tctaaatgatgaact

SEQ ID NO: 1431685 - DNA, 15 bp, Homo sapiens
ttctaaatgatgaac

SEQ ID NO: 1431686 - DNA, 15 bp, Homo sapiens
cttctaaatgatgaa

SEQ ID NO: 1431687 - DNA, 15 bp, Homo sapiens
acttctaaatgatga

SEQ ID NO: 1431688 - DNA, 15 bp, Homo sapiens
aacttctaaatgatg

SEQ ID NO: 1431689 - DNA, 15 bp, Homo sapiens
caacttctaaatgat

SEQ ID NO: 1431690 - DNA, 15 bp, Homo sapiens
acaacttctaaatga

SEQ ID NO: 1431691 - DNA, 15 bp, Homo sapiens
aacaacttctaaatg

SEQ ID NO: 1431692 - DNA, 15 bp, Homo sapiens
taacaacttctaaat

SEQ ID NO: 1431693 - DNA, 15 bp, Homo sapiens
ataacaacttctaaa

SEQ ID NO: 1431694 - DNA, 15 bp, Homo sapiens
tataacaacttctaa

SEQ ID NO: 1431695 - DNA, 15 bp, Homo sapiens
ctataacaacttcta

SEQ ID NO: 1431696 - DNA, 15 bp, Homo sapiens
actataacaacttct

SEQ ID NO: 1431697 - DNA, 15 bp, Homo sapiens
aactataacaacttc

SEQ ID NO: 1431698 - DNA, 15 bp, Homo sapiens
caactataacaactt

SEQ ID NO: 1431699 - DNA, 15 bp, Homo sapiens
ccaactataacaact

SEQ ID NO: 1431700 - DNA, 15 bp, Homo sapiens
accaactataacaac

SEQ ID NO: 1431701 - DNA, 15 bp, Homo sapiens
caccaactataacaa

SEQ ID NO: 1431702 - DNA, 15 bp, Homo sapiens
tcaccaactataaca

SEQ ID NO: 1431703 - DNA, 15 bp, Homo sapiens
ttcaccaactataac

SEQ ID NO: 1431704 - DNA, 15 bp, Homo sapiens
tttcaccaactataa

SEQ ID NO: 1431705 - DNA, 15 bp, Homo sapiens
gtttcaccaactata

SEQ ID NO: 1431706 - DNA, 15 bp, Homo sapiens
cgtttcaccaactat

SEQ ID NO: 1431707 - DNA, 15 bp, Homo sapiens
acgtttcaccaacta

SEQ ID NO: 1431708 - DNA, 15 bp, Homo sapiens
aacgtttcaccaact

SEQ ID NO: 1431709 - DNA, 15 bp, Homo sapiens
caacgtttcaccaac

SEQ ID NO: 1431710 - DNA, 15 bp, Homo sapiens
gcaacgtttcaccaa

SEQ ID NO: 1431711 - DNA, 15 bp, Homo sapiens
agcaacgtttcacca

SEQ ID NO: 1431712 - DNA, 15 bp, Homo sapiens
tagcaacgtttcacc

SEQ ID NO: 1431713 - DNA, 15 bp, Homo sapiens
ttagcaacgtttcac

SEQ ID NO: 1431714 - DNA, 15 bp, Homo sapiens
attagcaacgtttca

SEQ ID NO: 1431715 - DNA, 15 bp, Homo sapiens
aattagcaacgtttc

SEQ ID NO: 1431716 - DNA, 15 bp, Homo sapiens
taattagcaacgttt

SEQ ID NO: 1431717 - DNA, 15 bp, Homo sapiens
ataattagcaacgtt

SEQ ID NO: 1431718 - DNA, 15 bp, Homo sapiens
aataattagcaacgt

SEQ ID NO: 1431719 - DNA, 15 bp, Homo sapiens
aaataattagcaacg

SEQ ID NO: 1431720 - DNA, 15 bp, Homo sapiens
aaaataattagcaac

SEQ ID NO: 1431721 - DNA, 15 bp, Homo sapiens
taaaataattagcaa

SEQ ID NO: 1431722 - DNA, 15 bp, Homo sapiens
ttaaaataattagca

SEQ ID NO: 1431723 - DNA, 15 bp, Homo sapiens
cttaaaataattagc

SEQ ID NO: 1431724 - DNA, 15 bp, Homo sapiens
tcttaaaataattag

SEQ ID NO: 1431725 - DNA, 15 bp, Homo sapiens
atcttaaaataatta

SEQ ID NO: 1431726 - DNA, 15 bp, Homo sapiens
tatcttaaaataatt

SEQ ID NO: 1431727 - DNA, 15 bp, Homo sapiens
ctatcttaaaataat

SEQ ID NO: 1431728 - DNA, 15 bp, Homo sapiens
actatcttaaaataa

SEQ ID NO: 1431729 - DNA, 15 bp, Homo sapiens
cactatcttaaaata

SEQ ID NO: 1431730 - DNA, 15 bp, Homo sapiens
ccactatcttaaaat

SEQ ID NO: 1431731 - DNA, 15 bp, Homo sapiens
accactatcttaaaa

SEQ ID NO: 1431732 - DNA, 15 bp, Homo sapiens
aaccactatcttaaa

SEQ ID NO: 1431733 - DNA, 15 bp, Homo sapiens
gaaccactatcttaa

SEQ ID NO: 1431734 - DNA, 15 bp, Homo sapiens
tgaaccactatctta

SEQ ID NO: 1431735 - DNA, 15 bp, Homo sapiens
ttgaaccactatctt

SEQ ID NO: 1431736 - DNA, 15 bp, Homo sapiens
cttgaaccactatct

SEQ ID NO: 1431737 - DNA, 15 bp, Homo sapiens
gcttgaaccactatc

SEQ ID NO: 1431738 - DNA, 15 bp, Homo sapiens
tgcttgaaccactat

SEQ ID NO: 1431739 - DNA, 15 bp, Homo sapiens
gtgcttgaaccacta

SEQ ID NO: 1431740 - DNA, 15 bp, Homo sapiens
agtgcttgaaccact

SEQ ID NO: 1431741 - DNA, 15 bp, Homo sapiens
tagtgcttgaaccac

SEQ ID NO: 1431742 - DNA, 15 bp, Homo sapiens
ttagtgcttgaacca

SEQ ID NO: 1431743 - DNA, 15 bp, Homo sapiens
attagtgcttgaacc

SEQ ID NO: 1431744 - DNA, 15 bp, Homo sapiens
tattagtgcttgaac

SEQ ID NO: 1431745 - DNA, 15 bp, Homo sapiens
ttattagtgcttgaa

SEQ ID NO: 1431746 - DNA, 15 bp, Homo sapiens
tttattagtgcttga

SEQ ID NO: 1431747 - DNA, 15 bp, Homo sapiens
atttattagtgcttg

SEQ ID NO: 1431748 - DNA, 15 bp, Homo sapiens
aatttattagtgctt

SEQ ID NO: 1431749 - DNA, 15 bp, Homo sapiens
aaatttattagtgct

SEQ ID NO: 1431750 - DNA, 15 bp, Homo sapiens
gaaatttattagtgc

SEQ ID NO: 1431751 - DNA, 15 bp, Homo sapiens
tgaaatttattagtg

SEQ ID NO: 1431752 - DNA, 15 bp, Homo sapiens
atgaaatttattagt

SEQ ID NO: 1431753 - DNA, 15 bp, Homo sapiens
tatgaaatttattag

SEQ ID NO: 1431754 - DNA, 15 bp, Homo sapiens
atatgaaatttatta

SEQ ID NO: 1431755 - DNA, 15 bp, Homo sapiens
gatatgaaatttatt

SEQ ID NO: 1431756 - DNA, 15 bp, Homo sapiens
agatatgaaatttat

SEQ ID NO: 1431757 - DNA, 15 bp, Homo sapiens
tagatatgaaattta

SEQ ID NO: 1431758 - DNA, 15 bp, Homo sapiens
atagatatgaaattt

SEQ ID NO: 1431759 - DNA, 15 bp, Homo sapiens
tatagatatgaaatt

SEQ ID NO: 1431760 - DNA, 15 bp, Homo sapiens
atatagatatgaaat

SEQ ID NO: 1431761 - DNA, 15 bp, Homo sapiens
tatatagatatgaaa

SEQ ID NO: 1431762 - DNA, 15 bp, Homo sapiens
atatatagatatgaa

SEQ ID NO: 1431763 - DNA, 15 bp, Homo sapiens
tatatatagatatga

SEQ ID NO: 1431764 - DNA, 15 bp, Homo sapiens
gtatatatagatatg

SEQ ID NO: 1431765 - DNA, 15 bp, Homo sapiens
tgtatatatagatat

SEQ ID NO: 1431766 - DNA, 15 bp, Homo sapiens
atgtatatatagata

SEQ ID NO: 1431767 - DNA, 15 bp, Homo sapiens
atatgtatatataga

SEQ ID NO: 1431768 - DNA, 15 bp, Homo sapiens
tatatgtatatatag

SEQ ID NO: 1431769 - DNA, 15 bp, Homo sapiens
catatatatgtatat

SEQ ID NO: 1431770 - DNA, 15 bp, Homo sapiens
gcatatatatgtata

SEQ ID NO: 1431771 - DNA, 15 bp, Homo sapiens
tgcatatatatgtat

SEQ ID NO: 1431772 - DNA, 15 bp, Homo sapiens
gtgcatatatatgta

SEQ ID NO: 1431773 - DNA, 15 bp, Homo sapiens
tgtgcatatatatgt

SEQ ID NO: 1431774 - DNA, 15 bp, Homo sapiens
gtgtgcatatatatg

SEQ ID NO: 1431775 - DNA, 15 bp, Homo sapiens
tgtgtgcatatatat

SEQ ID NO: 1431776 - DNA, 15 bp, Homo sapiens
gtgtgtgcatatata

SEQ ID NO: 1431777 - DNA, 15 bp, Homo sapiens
tgtgtgtgcatatat

SEQ ID NO: 1431778 - DNA, 15 bp, Homo sapiens
gtgtgtgtgcatata

SEQ ID NO: 1431779 - DNA, 15 bp, Homo sapiens
tgtgtgtgtgcatat

SEQ ID NO: 1431780 - DNA, 15 bp, Homo sapiens
atgtgtgtgtgcata

SEQ ID NO: 1431781 - DNA, 15 bp, Homo sapiens
aatgtgtgtgtgcat

SEQ ID NO: 1431782 - DNA, 15 bp, Homo sapiens
taatgtgtgtgtgca

SEQ ID NO: 1431783 - DNA, 15 bp, Homo sapiens
ttaatgtgtgtgtgc

SEQ ID NO: 1431784 - DNA, 15 bp, Homo sapiens
attaatgtgtgtgtg

SEQ ID NO: 1431785 - DNA, 15 bp, Homo sapiens
tattaatgtgtgtgt

SEQ ID NO: 1431786 - DNA, 15 bp, Homo sapiens
ttattaatgtgtgtg

SEQ ID NO: 1431787 - DNA, 15 bp, Homo sapiens
tttattaatgtgtgt

SEQ ID NO: 1431788 - DNA, 15 bp, Homo sapiens
atttattaatgtgtg

SEQ ID NO: 1431789 - DNA, 15 bp, Homo sapiens
catttattaatgtgt

SEQ ID NO: 1431790 - DNA, 15 bp, Homo sapiens
ccatttattaatgtg

SEQ ID NO: 1431791 - DNA, 15 bp, Homo sapiens
gccatttattaatgt

SEQ ID NO: 1431792 - DNA, 15 bp, Homo sapiens
agccatttattaatg

SEQ ID NO: 1431793 - DNA, 15 bp, Homo sapiens
tagccatttattaat

SEQ ID NO: 1431794 - DNA, 15 bp, Homo sapiens
ttagccatttattaa

SEQ ID NO: 1431795 - DNA, 15 bp, Homo sapiens
attagccatttatta

SEQ ID NO: 1431796 - DNA, 15 bp, Homo sapiens
tattagccatttatt

SEQ ID NO: 1431797 - DNA, 15 bp, Homo sapiens
atattagccatttat

SEQ ID NO: 1431798 - DNA, 15 bp, Homo sapiens
gatattagccattta

SEQ ID NO: 1431799 - DNA, 15 bp, Homo sapiens
agatattagccattt

SEQ ID NO: 1431800 - DNA, 15 bp, Homo sapiens
tagatattagccatt

SEQ ID NO: 1431801 - DNA, 15 bp, Homo sapiens
ttagatattagccat

SEQ ID NO: 1431802 - DNA, 15 bp, Homo sapiens
attagatattagcca

SEQ ID NO: 1431803 - DNA, 15 bp, Homo sapiens
gattagatattagcc

SEQ ID NO: 1431804 - DNA, 15 bp, Homo sapiens
tgattagatattagc

SEQ ID NO: 1431805 - DNA, 15 bp, Homo sapiens
ttgattagatattag

SEQ ID NO: 1431806 - DNA, 15 bp, Homo sapiens
cttgattagatatta

SEQ ID NO: 1431807 - DNA, 15 bp, Homo sapiens
tcttgattagatatt

SEQ ID NO: 1431808 - DNA, 15 bp, Homo sapiens
gtcttgattagatat

SEQ ID NO: 1431809 - DNA, 15 bp, Homo sapiens
tgtcttgattagata

SEQ ID NO: 1431810 - DNA, 15 bp, Homo sapiens
ttgtcttgattagat

SEQ ID NO: 1431811 - DNA, 15 bp, Homo sapiens
cttgtcttgattaga

SEQ ID NO: 1431812 - DNA, 15 bp, Homo sapiens
ccttgtcttgattag

SEQ ID NO: 1431813 - DNA, 15 bp, Homo sapiens
tccttgtcttgatta

SEQ ID NO: 1431814 - DNA, 15 bp, Homo sapiens
gtccttgtcttgatt

SEQ ID NO: 1431815 - DNA, 15 bp, Homo sapiens
tgtccttgtcttgat

SEQ ID NO: 1431816 - DNA, 15 bp, Homo sapiens
ttgtccttgtcttga

SEQ ID NO: 1431817 - DNA, 15 bp, Homo sapiens
tttgtccttgtcttg

SEQ ID NO: 1431818 - DNA, 15 bp, Homo sapiens
atttgtccttgtctt

SEQ ID NO: 1431819 - DNA, 15 bp, Homo sapiens
aatttgtccttgtct

SEQ ID NO: 1431820 - DNA, 15 bp, Homo sapiens
taatttgtccttgtc

SEQ ID NO: 1431821 - DNA, 15 bp, Homo sapiens
ataatttgtccttgt

SEQ ID NO: 1431822 - DNA, 15 bp, Homo sapiens
tataatttgtccttg

SEQ ID NO: 1431823 - DNA, 15 bp, Homo sapiens
ttataatttgtcctt

SEQ ID NO: 1431824 - DNA, 15 bp, Homo sapiens
attataatttgtcct

SEQ ID NO: 1431825 - DNA, 15 bp, Homo sapiens
aattataatttgtcc

SEQ ID NO: 1431826 - DNA, 15 bp, Homo sapiens
aaattataatttgtc

SEQ ID NO: 1431827 - DNA, 15 bp, Homo sapiens
taaattataatttgt

SEQ ID NO: 1431828 - DNA, 15 bp, Homo sapiens
ataaattataatttg

SEQ ID NO: 1431829 - DNA, 15 bp, Homo sapiens
aataaattataattt

SEQ ID NO: 1431830 - DNA, 15 bp, Homo sapiens
taataaattataatt

SEQ ID NO: 1431831 - DNA, 15 bp, Homo sapiens
gtaataaattataat

SEQ ID NO: 1431832 - DNA, 15 bp, Homo sapiens
tgtaataaattataa

SEQ ID NO: 1431833 - DNA, 15 bp, Homo sapiens
ttgtaataaattata

SEQ ID NO: 1431834 - DNA, 15 bp, Homo sapiens
tttgtaataaattat

SEQ ID NO: 1431835 - DNA, 15 bp, Homo sapiens
ttttgtaataaatta

SEQ ID NO: 1431836 - DNA, 15 bp, Homo sapiens
tttttgtaataaatt

SEQ ID NO: 1431837 - DNA, 15 bp, Homo sapiens
ctttttgtaataaat

SEQ ID NO: 1431838 - DNA, 15 bp, Homo sapiens
tctttttgtaataaa

SEQ ID NO: 1431839 - DNA, 15 bp, Homo sapiens
gtctttttgtaataa

SEQ ID NO: 1431840 - DNA, 15 bp, Homo sapiens
agtctttttgtaata

SEQ ID NO: 1431841 - DNA, 15 bp, Homo sapiens
cagtctttttgtaat

SEQ ID NO: 1431842 - DNA, 15 bp, Homo sapiens
gcagtctttttgtaa

SEQ ID NO: 1431843 - DNA, 15 bp, Homo sapiens
agcagtctttttgta

SEQ ID NO: 1431844 - DNA, 15 bp, Homo sapiens
aagcagtctttttgt

SEQ ID NO: 1431845 - DNA, 15 bp, Homo sapiens
gaagcagtctttttg

SEQ ID NO: 1431846 - DNA, 15 bp, Homo sapiens
tgaagcagtcttttt

SEQ ID NO: 1431847 - DNA, 15 bp, Homo sapiens
gtgaagcagtctttt

SEQ ID NO: 1431848 - DNA, 15 bp, Homo sapiens
tgtgaagcagtcttt

SEQ ID NO: 1431849 - DNA, 15 bp, Homo sapiens
ttgtgaagcagtctt

SEQ ID NO: 1431850 - DNA, 15 bp, Homo sapiens
attgtgaagcagtct

SEQ ID NO: 1431851 - DNA, 15 bp, Homo sapiens
aattgtgaagcagtc

SEQ ID NO: 1431852 - DNA, 15 bp, Homo sapiens
aaattgtgaagcagt

SEQ ID NO: 1431853 - DNA, 15 bp, Homo sapiens
aaaattgtgaagcag

SEQ ID NO: 1431854 - DNA, 15 bp, Homo sapiens
gaaaattgtgaagca

SEQ ID NO: 1431855 - DNA, 15 bp, Homo sapiens
tgaaaattgtgaagc

SEQ ID NO: 1431856 - DNA, 15 bp, Homo sapiens
ctgaaaattgtgaag

SEQ ID NO: 1431857 - DNA, 15 bp, Homo sapiens
cctgaaaattgtgaa

SEQ ID NO: 1431858 - DNA, 15 bp, Homo sapiens
gcctgaaaattgtga

SEQ ID NO: 1431859 - DNA, 15 bp, Homo sapiens
tgcctgaaaattgtg

SEQ ID NO: 1431860 - DNA, 15 bp, Homo sapiens
ctgcctgaaaattgt

SEQ ID NO: 1431861 - DNA, 15 bp, Homo sapiens
actgcctgaaaattg

SEQ ID NO: 1431862 - DNA, 15 bp, Homo sapiens
aactgcctgaaaatt

SEQ ID NO: 1431863 - DNA, 15 bp, Homo sapiens
aaactgcctgaaaat

SEQ ID NO: 1431864 - DNA, 15 bp, Homo sapiens
caaactgcctgaaaa

SEQ ID NO: 1431865 - DNA, 15 bp, Homo sapiens
tcaaactgcctgaaa

SEQ ID NO: 1431866 - DNA, 15 bp, Homo sapiens
ttcaaactgcctgaa

SEQ ID NO: 1431867 - DNA, 15 bp, Homo sapiens
cttcaaactgcctga

SEQ ID NO: 1431868 - DNA, 15 bp, Homo sapiens
acttcaaactgcctg

SEQ ID NO: 1431869 - DNA, 15 bp, Homo sapiens
tacttcaaactgcct

SEQ ID NO: 1431870 - DNA, 15 bp, Homo sapiens
atacttcaaactgcc

SEQ ID NO: 1431871 - DNA, 15 bp, Homo sapiens
gatacttcaaactgc

SEQ ID NO: 1431872 - DNA, 15 bp, Homo sapiens
agatacttcaaactg

SEQ ID NO: 1431873 - DNA, 15 bp, Homo sapiens
cagatacttcaaact

SEQ ID NO: 1431874 - DNA, 15 bp, Homo sapiens
ccagatacttcaaac

SEQ ID NO: 1431875 - DNA, 15 bp, Homo sapiens
gccagatacttcaaa

SEQ ID NO: 1431876 - DNA, 15 bp, Homo sapiens
tgccagatacttcaa

SEQ ID NO: 1431877 - DNA, 15 bp, Homo sapiens
ctgccagatacttca

SEQ ID NO: 1431878 - DNA, 15 bp, Homo sapiens
tctgccagatacttc

SEQ ID NO: 1431879 - DNA, 15 bp, Homo sapiens
ttctgccagatactt

SEQ ID NO: 1431880 - DNA, 15 bp, Homo sapiens
tttctgccagatact

SEQ ID NO: 1431881 - DNA, 15 bp, Homo sapiens
ttttctgccagatac

SEQ ID NO: 1431882 - DNA, 15 bp, Homo sapiens
tttttctgccagata

SEQ ID NO: 1431883 - DNA, 15 bp, Homo sapiens
ctttttctgccagat

SEQ ID NO: 1431884 - DNA, 15 bp, Homo sapiens
actttttctgccaga

SEQ ID NO: 1431885 - DNA, 15 bp, Homo sapiens
tactttttctgccag

SEQ ID NO: 1431886 - DNA, 15 bp, Homo sapiens
ttactttttctgcca

SEQ ID NO: 1431887 - DNA, 15 bp, Homo sapiens
tttactttttctgcc

SEQ ID NO: 1431888 - DNA, 15 bp, Homo sapiens
atttactttttctgc

SEQ ID NO: 1431889 - DNA, 15 bp, Homo sapiens
aatttactttttctg

SEQ ID NO: 1431890 - DNA, 15 bp, Homo sapiens
caatttactttttct

SEQ ID NO: 1431891 - DNA, 15 bp, Homo sapiens
tcaatttactttttc

SEQ ID NO: 1431892 - DNA, 15 bp, Homo sapiens
ttcaatttacttttt

SEQ ID NO: 1431893 - DNA, 15 bp, Homo sapiens
tttcaatttactttt

SEQ ID NO: 1431894 - DNA, 15 bp, Homo sapiens
atttcaatttacttt

SEQ ID NO: 1431895 - DNA, 15 bp, Homo sapiens
gatttcaatttactt

SEQ ID NO: 1431896 - DNA, 15 bp, Homo sapiens
tgatttcaatttact

SEQ ID NO: 1431897 - DNA, 15 bp, Homo sapiens
atgatttcaatttac

SEQ ID NO: 1431898 - DNA, 15 bp, Homo sapiens
aatgatttcaattta

SEQ ID NO: 1431899 - DNA, 15 bp, Homo sapiens
caatgatttcaattt

SEQ ID NO: 1431900 - DNA, 15 bp, Homo sapiens
ccaatgatttcaatt

SEQ ID NO: 1431901 - DNA, 15 bp, Homo sapiens
cccaatgatttcaat

SEQ ID NO: 1431902 - DNA, 15 bp, Homo sapiens
tcccaatgatttcaa

SEQ ID NO: 1431903 - DNA, 15 bp, Homo sapiens
gtcccaatgatttca

SEQ ID NO: 1431904 - DNA, 15 bp, Homo sapiens
cgtcccaatgatttc

SEQ ID NO: 1431905 - DNA, 15 bp, Homo sapiens
acgtcccaatgattt

SEQ ID NO: 1431906 - DNA, 15 bp, Homo sapiens
aacgtcccaatgatt

SEQ ID NO: 1431907 - DNA, 15 bp, Homo sapiens
caacgtcccaatgat

SEQ ID NO: 1431908 - DNA, 15 bp, Homo sapiens
tcaacgtcccaatga

SEQ ID NO: 1431909 - DNA, 15 bp, Homo sapiens
atcaacgtcccaatg

SEQ ID NO: 1431910 - DNA, 15 bp, Homo sapiens
aatcaacgtcccaat

SEQ ID NO: 1431911 - DNA, 15 bp, Homo sapiens
aaatcaacgtcccaa

SEQ ID NO: 1431912 - DNA, 15 bp, Homo sapiens
aaaatcaacgtccca

SEQ ID NO: 1431913 - DNA, 15 bp, Homo sapiens
aaaaatcaacgtccc

SEQ ID NO: 1431914 - DNA, 15 bp, Homo sapiens
taaaaatcaacgtcc

SEQ ID NO: 1431915 - DNA, 15 bp, Homo sapiens
ttaaaaatcaacgtc

SEQ ID NO: 1431916 - DNA, 15 bp, Homo sapiens
tttaaaaatcaacgt

SEQ ID NO: 1431917 - DNA, 15 bp, Homo sapiens
atttaaaaatcaacg

SEQ ID NO: 1431918 - DNA, 15 bp, Homo sapiens
aatttaaaaatcaac

SEQ ID NO: 1431919 - DNA, 15 bp, Homo sapiens
taatttaaaaatcaa

SEQ ID NO: 1431920 - DNA, 15 bp, Homo sapiens
gtaatttaaaaatca

SEQ ID NO: 1431921 - DNA, 15 bp, Homo sapiens
ggtaatttaaaaatc

SEQ ID NO: 1431922 - DNA, 15 bp, Homo sapiens
aggtaatttaaaaat

SEQ ID NO: 1431923 - DNA, 15 bp, Homo sapiens
taggtaatttaaaaa

SEQ ID NO: 1431924 - DNA, 15 bp, Homo sapiens
ctaggtaatttaaaa

SEQ ID NO: 1431925 - DNA, 15 bp, Homo sapiens
tctaggtaatttaaa

SEQ ID NO: 1431926 - DNA, 15 bp, Homo sapiens
ttctaggtaatttaa

SEQ ID NO: 1431927 - DNA, 15 bp, Homo sapiens
cttctaggtaattta

SEQ ID NO: 1431928 - DNA, 15 bp, Homo sapiens
gcttctaggtaattt

SEQ ID NO: 1431929 - DNA, 15 bp, Homo sapiens
tgcttctaggtaatt

SEQ ID NO: 1431930 - DNA, 15 bp, Homo sapiens
ttgcttctaggtaat

SEQ ID NO: 1431931 - DNA, 15 bp, Homo sapiens
attgcttctaggtaa

SEQ ID NO: 1431932 - DNA, 15 bp, Homo sapiens
gattgcttctaggta

SEQ ID NO: 1431933 - DNA, 15 bp, Homo sapiens
ggattgcttctaggt

SEQ ID NO: 1431934 - DNA, 15 bp, Homo sapiens
gggattgcttctagg

SEQ ID NO: 1431935 - DNA, 15 bp, Homo sapiens
tgggattgcttctag

SEQ ID NO: 1431936 - DNA, 15 bp, Homo sapiens
ttgggattgcttcta

SEQ ID NO: 1431937 - DNA, 15 bp, Homo sapiens
attgggattgcttct

SEQ ID NO: 1431938 - DNA, 15 bp, Homo sapiens
cattgggattgcttc

SEQ ID NO: 1431939 - DNA, 15 bp, Homo sapiens
gcattgggattgctt

SEQ ID NO: 1431940 - DNA, 15 bp, Homo sapiens
agcattgggattgct

SEQ ID NO: 1431941 - DNA, 15 bp, Homo sapiens
aagcattgggattgc

SEQ ID NO: 1431942 - DNA, 15 bp, Homo sapiens
aaagcattgggattg

SEQ ID NO: 1431943 - DNA, 15 bp, Homo sapiens
taaagcattgggatt

SEQ ID NO: 1431944 - DNA, 15 bp, Homo sapiens
ataaagcattgggat

SEQ ID NO: 1431945 - DNA, 15 bp, Homo sapiens
cataaagcattggga

SEQ ID NO: 1431946 - DNA, 15 bp, Homo sapiens
acataaagcattggg

SEQ ID NO: 1431947 - DNA, 15 bp, Homo sapiens
tacataaagcattgg

SEQ ID NO: 1431948 - DNA, 15 bp, Homo sapiens
ttacataaagcattg

SEQ ID NO: 1431949 - DNA, 15 bp, Homo sapiens
attacataaagcatt

SEQ ID NO: 1431950 - DNA, 15 bp, Homo sapiens
tattacataaagcat

SEQ ID NO: 1431951 - DNA, 15 bp, Homo sapiens
gtattacataaagca

SEQ ID NO: 1431952 - DNA, 15 bp, Homo sapiens
agtattacataaagc

SEQ ID NO: 1431953 - DNA, 15 bp, Homo sapiens
tagtattacataaag

SEQ ID NO: 1431954 - DNA, 15 bp, Homo sapiens
ttagtattacataaa

SEQ ID NO: 1431955 - DNA, 15 bp, Homo sapiens
tttagtattacataa

SEQ ID NO: 1431956 - DNA, 15 bp, Homo sapiens
ttttagtattacata

SEQ ID NO: 1431957 - DNA, 15 bp, Homo sapiens
attttagtattacat

SEQ ID NO: 1431958 - DNA, 15 bp, Homo sapiens
aattttagtattaca

SEQ ID NO: 1431959 - DNA, 15 bp, Homo sapiens
aaattttagtattac

SEQ ID NO: 1431960 - DNA, 15 bp, Homo sapiens
gaaattttagtatta

SEQ ID NO: 1431961 - DNA, 15 bp, Homo sapiens
agaaattttagtatt

SEQ ID NO: 1431962 - DNA, 15 bp, Homo sapiens
gagaaattttagtat

SEQ ID NO: 1431963 - DNA, 15 bp, Homo sapiens
ggagaaattttagta

SEQ ID NO: 1431964 - DNA, 15 bp, Homo sapiens
aggagaaattttagt

SEQ ID NO: 1431965 - DNA, 15 bp, Homo sapiens
gaggagaaattttag

SEQ ID NO: 1431966 - DNA, 15 bp, Homo sapiens
agaggagaaatttta

SEQ ID NO: 1431967 - DNA, 15 bp, Homo sapiens
gagaggagaaatttt

SEQ ID NO: 1431968 - DNA, 15 bp, Homo sapiens
agagaggagaaattt

SEQ ID NO: 1431969 - DNA, 15 bp, Homo sapiens
gagagaggagaaatt

SEQ ID NO: 1431970 - DNA, 15 bp, Homo sapiens
agagagaggagaaat

SEQ ID NO: 1431971 - DNA, 15 bp, Homo sapiens
aagagagaggagaaa

SEQ ID NO: 1431972 - DNA, 15 bp, Homo sapiens
aaagagagaggagaa

SEQ ID NO: 1431973 - DNA, 15 bp, Homo sapiens
aaaagagagaggaga

SEQ ID NO: 1431974 - DNA, 15 bp, Homo sapiens
gaaaagagagaggag

SEQ ID NO: 1431975 - DNA, 15 bp, Homo sapiens
agaaaagagagagga

SEQ ID NO: 1431976 - DNA, 15 bp, Homo sapiens
aagaaaagagagagg

SEQ ID NO: 1431977 - DNA, 15 bp, Homo sapiens
aaagaaaagagagag

SEQ ID NO: 1431978 - DNA, 15 bp, Homo sapiens
taaagaaaagagaga

SEQ ID NO: 1431979 - DNA, 15 bp, Homo sapiens
ataaagaaaagagag

SEQ ID NO: 1431980 - DNA, 15 bp, Homo sapiens
gataaagaaaagaga

SEQ ID NO: 1431981 - DNA, 15 bp, Homo sapiens
agataaagaaaagag

SEQ ID NO: 1431982 - DNA, 15 bp, Homo sapiens
gagataaagaaaaga

SEQ ID NO: 1431983 - DNA, 15 bp, Homo sapiens
agagataaagaaaag

SEQ ID NO: 1431984 - DNA, 15 bp, Homo sapiens
gagagataaagaaaa

SEQ ID NO: 1431985 - DNA, 15 bp, Homo sapiens
agagagataaagaaa

SEQ ID NO: 1431986 - DNA, 15 bp, Homo sapiens
gagagagataaagaa

SEQ ID NO: 1431987 - DNA, 15 bp, Homo sapiens
agagagagataaaga

SEQ ID NO: 1431988 - DNA, 15 bp, Homo sapiens
gagagagagataaag

SEQ ID NO: 1431989 - DNA, 15 bp, Homo sapiens
gggagagagagataa

SEQ ID NO: 1431990 - DNA, 15 bp, Homo sapiens
ggggagagagagata

SEQ ID NO: 1431991 - DNA, 15 bp, Homo sapiens
aggggagagagagat

SEQ ID NO: 1431992 - DNA, 15 bp, Homo sapiens
caggggagagagaga

SEQ ID NO: 1431993 - DNA, 15 bp, Homo sapiens
tcaggggagagagag

SEQ ID NO: 1431994 - DNA, 15 bp, Homo sapiens
ttcaggggagagaga

SEQ ID NO: 1431995 - DNA, 15 bp, Homo sapiens
tttcaggggagagag

SEQ ID NO: 1431996 - DNA, 15 bp, Homo sapiens
ttttcaggggagaga

SEQ ID NO: 1431997 - DNA, 15 bp, Homo sapiens
attttcaggggagag

SEQ ID NO: 1431998 - DNA, 15 bp, Homo sapiens
tattttcaggggaga

SEQ ID NO: 1431999 - DNA, 15 bp, Homo sapiens
ttattttcaggggag

SEQ ID NO: 1432000 - DNA, 15 bp, Homo sapiens
attattttcagggga

SEQ ID NO: 1432001 - DNA, 15 bp, Homo sapiens
gattattttcagggg

SEQ ID NO: 1432002 - DNA, 15 bp, Homo sapiens
tgattattttcaggg

SEQ ID NO: 1432003 - DNA, 15 bp, Homo sapiens
atgattattttcagg

SEQ ID NO: 1432004 - DNA, 15 bp, Homo sapiens
aatgattattttcag

SEQ ID NO: 1432005 - DNA, 15 bp, Homo sapiens
aaatgattattttca

SEQ ID NO: 1432006 - DNA, 15 bp, Homo sapiens
aaaatgattattttc

SEQ ID NO: 1432007 - DNA, 15 bp, Homo sapiens
aaaaatgattatttt

SEQ ID NO: 1432008 - DNA, 15 bp, Homo sapiens
aaaaaatgattattt

SEQ ID NO: 1432009 - DNA, 15 bp, Homo sapiens
aaaaaaatgattatt

SEQ ID NO: 1432010 - DNA, 15 bp, Homo sapiens
aaaaaaaatgattat

SEQ ID NO: 1432011 - DNA, 15 bp, Homo sapiens
gaaaaaaaatgatta

SEQ ID NO: 1432012 - DNA, 15 bp, Homo sapiens
ggaaaaaaaatgatt

SEQ ID NO: 1432013 - DNA, 15 bp, Homo sapiens
tggaaaaaaaatgat

SEQ ID NO: 1432014 - DNA, 15 bp, Homo sapiens
ctggaaaaaaaatga

SEQ ID NO: 1432015 - DNA, 15 bp, Homo sapiens
actggaaaaaaaatg

SEQ ID NO: 1432016 - DNA, 15 bp, Homo sapiens
cactggaaaaaaaat

SEQ ID NO: 1432017 - DNA, 15 bp, Homo sapiens
gcactggaaaaaaaa

SEQ ID NO: 1432018 - DNA, 15 bp, Homo sapiens
ggcactggaaaaaaa

SEQ ID NO: 1432019 - DNA, 15 bp, Homo sapiens
tggcactggaaaaaa

SEQ ID NO: 1432020 - DNA, 15 bp, Homo sapiens
ctggcactggaaaaa

SEQ ID NO: 1432021 - DNA, 15 bp, Homo sapiens
actggcactggaaaa

SEQ ID NO: 1432022 - DNA, 15 bp, Homo sapiens
aactggcactggaaa

SEQ ID NO: 1432023 - DNA, 15 bp, Homo sapiens
gaactggcactggaa

SEQ ID NO: 1432024 - DNA, 15 bp, Homo sapiens
tgaactggcactgga

SEQ ID NO: 1432025 - DNA, 15 bp, Homo sapiens
ctgaactggcactgg

SEQ ID NO: 1432026 - DNA, 15 bp, Homo sapiens
tctgaactggcactg

SEQ ID NO: 1432027 - DNA, 15 bp, Homo sapiens
atctgaactggcact

SEQ ID NO: 1432028 - DNA, 15 bp, Homo sapiens
gatctgaactggcac

SEQ ID NO: 1432029 - DNA, 15 bp, Homo sapiens
agatctgaactggca

SEQ ID NO: 1432030 - DNA, 15 bp, Homo sapiens
aagatctgaactggc

SEQ ID NO: 1432031 - DNA, 15 bp, Homo sapiens
caagatctgaactgg

SEQ ID NO: 1432032 - DNA, 15 bp, Homo sapiens
ccaagatctgaactg

SEQ ID NO: 1432033 - DNA, 15 bp, Homo sapiens
gccaagatctgaact

SEQ ID NO: 1432034 - DNA, 15 bp, Homo sapiens
tgccaagatctgaac

SEQ ID NO: 1432035 - DNA, 15 bp, Homo sapiens
ttgccaagatctgaa

SEQ ID NO: 1432036 - DNA, 15 bp, Homo sapiens
gttgccaagatctga

SEQ ID NO: 1432037 - DNA, 15 bp, Homo sapiens
tgttgccaagatctg

SEQ ID NO: 1432038 - DNA, 15 bp, Homo sapiens
ctgttgccaagatct

SEQ ID NO: 1432039 - DNA, 15 bp, Homo sapiens
actgttgccaagatc

SEQ ID NO: 1432040 - DNA, 15 bp, Homo sapiens
aactgttgccaagat

SEQ ID NO: 1432041 - DNA, 15 bp, Homo sapiens
caactgttgccaaga

SEQ ID NO: 1432042 - DNA, 15 bp, Homo sapiens
acaactgttgccaag

SEQ ID NO: 1432043 - DNA, 15 bp, Homo sapiens
aacaactgttgccaa

SEQ ID NO: 1432044 - DNA, 15 bp, Homo sapiens
aaacaactgttgcca

SEQ ID NO: 1432045 - DNA, 15 bp, Homo sapiens
aaaacaactgttgcc

SEQ ID NO: 1432046 - DNA, 15 bp, Homo sapiens
caaaacaactgttgc

SEQ ID NO: 1432047 - DNA, 15 bp, Homo sapiens
tcaaaacaactgttg

SEQ ID NO: 1432048 - DNA, 15 bp, Homo sapiens
ttcaaaacaactgtt

SEQ ID NO: 1432049 - DNA, 15 bp, Homo sapiens
tttcaaaacaactgt

SEQ ID NO: 1432050 - DNA, 15 bp, Homo sapiens
ttttcaaaacaactg

SEQ ID NO: 1432051 - DNA, 15 bp, Homo sapiens
tttttcaaaacaact

SEQ ID NO: 1432052 - DNA, 15 bp, Homo sapiens
ctttttcaaaacaac

SEQ ID NO: 1432053 - DNA, 15 bp, Homo sapiens
actttttcaaaacaa

SEQ ID NO: 1432054 - DNA, 15 bp, Homo sapiens
tactttttcaaaaca

SEQ ID NO: 1432055 - DNA, 15 bp, Homo sapiens
gtactttttcaaaac

SEQ ID NO: 1432056 - DNA, 15 bp, Homo sapiens
ggtactttttcaaaa

SEQ ID NO: 1432057 - DNA, 15 bp, Homo sapiens
aggtactttttcaaa

SEQ ID NO: 1432058 - DNA, 15 bp, Homo sapiens
caggtactttttcaa

SEQ ID NO: 1432059 - DNA, 15 bp, Homo sapiens
tcaggtactttttca

SEQ ID NO: 1432060 - DNA, 15 bp, Homo sapiens
ttcaggtactttttc

SEQ ID NO: 1432061 - DNA, 15 bp, Homo sapiens
gttcaggtacttttt

SEQ ID NO: 1432062 - DNA, 15 bp, Homo sapiens
tgttcaggtactttt

SEQ ID NO: 1432063 - DNA, 15 bp, Homo sapiens
ttgttcaggtacttt

SEQ ID NO: 1432064 - DNA, 15 bp, Homo sapiens
tttgttcaggtactt

SEQ ID NO: 1432065 - DNA, 15 bp, Homo sapiens
ttttgttcaggtact

SEQ ID NO: 1432066 - DNA, 15 bp, Homo sapiens
attttgttcaggtac

SEQ ID NO: 1432067 - DNA, 15 bp, Homo sapiens
tattttgttcaggta

SEQ ID NO: 1432068 - DNA, 15 bp, Homo sapiens
gtattttgttcaggt

SEQ ID NO: 1432069 - DNA, 15 bp, Homo sapiens
tgtattttgttcagg

SEQ ID NO: 1432070 - DNA, 15 bp, Homo sapiens
atgtattttgttcag

SEQ ID NO: 1432071 - DNA, 15 bp, Homo sapiens
aatgtattttgttca

SEQ ID NO: 1432072 - DNA, 15 bp, Homo sapiens
aaatgtattttgttc

SEQ ID NO: 1432073 - DNA, 15 bp, Homo sapiens
aaaatgtattttgtt

SEQ ID NO: 1432074 - DNA, 15 bp, Homo sapiens
taaaatgtattttgt

SEQ ID NO: 1432075 - DNA, 15 bp, Homo sapiens
ataaaatgtattttg

SEQ ID NO: 1432076 - DNA, 15 bp, Homo sapiens
tataaaatgtatttt

SEQ ID NO: 1432077 - DNA, 15 bp, Homo sapiens
ttataaaatgtattt

SEQ ID NO: 1432078 - DNA, 15 bp, Homo sapiens
tttataaaatgtatt

SEQ ID NO: 1432079 - DNA, 15 bp, Homo sapiens
ctttataaaatgtat

SEQ ID NO: 1432080 - DNA, 15 bp, Homo sapiens
actttataaaatgta

SEQ ID NO: 1432081 - DNA, 15 bp, Homo sapiens
tactttataaaatgt

SEQ ID NO: 1432082 - DNA, 15 bp, Homo sapiens
ttactttataaaatg

SEQ ID NO: 1432083 - DNA, 15 bp, Homo sapiens
tttactttataaaat

SEQ ID NO: 1432084 - DNA, 15 bp, Homo sapiens
ctttactttataaaa

SEQ ID NO: 1432085 - DNA, 15 bp, Homo sapiens
actttactttataaa

SEQ ID NO: 1432086 - DNA, 15 bp, Homo sapiens
tactttactttataa

SEQ ID NO: 1432087 - DNA, 15 bp, Homo sapiens
atactttactttata

SEQ ID NO: 1432088 - DNA, 15 bp, Homo sapiens
aatactttactttat

SEQ ID NO: 1432089 - DNA, 15 bp, Homo sapiens
gaatactttacttta

SEQ ID NO: 1432090 - DNA, 15 bp, Homo sapiens
tgaatactttacttt

SEQ ID NO: 1432091 - DNA, 15 bp, Homo sapiens
ctgaatactttactt

SEQ ID NO: 1432092 - DNA, 15 bp, Homo sapiens
cctgaatactttact

SEQ ID NO: 1432093 - DNA, 15 bp, Homo sapiens
tcctgaatactttac

SEQ ID NO: 1432094 - DNA, 15 bp, Homo sapiens
ttcctgaatacttta

SEQ ID NO: 1432095 - DNA, 15 bp, Homo sapiens
gttcctgaatacttt

SEQ ID NO: 1432096 - DNA, 15 bp, Homo sapiens
agttcctgaatactt

SEQ ID NO: 1432097 - DNA, 15 bp, Homo sapiens
cagttcctgaatact

SEQ ID NO: 1432098 - DNA, 15 bp, Homo sapiens
tcagttcctgaatac

SEQ ID NO: 1432099 - DNA, 15 bp, Homo sapiens
gtcagttcctgaata

SEQ ID NO: 1432100 - DNA, 15 bp, Homo sapiens
tgtcagttcctgaat

SEQ ID NO: 1432101 - DNA, 15 bp, Homo sapiens
ctgtcagttcctgaa

SEQ ID NO: 1432102 - DNA, 15 bp, Homo sapiens
tctgtcagttcctga

SEQ ID NO: 1432103 - DNA, 15 bp, Homo sapiens
ttctgtcagttcctg

SEQ ID NO: 1432104 - DNA, 15 bp, Homo sapiens
gttctgtcagttcct

SEQ ID NO: 1432105 - DNA, 15 bp, Homo sapiens
agttctgtcagttcc

SEQ ID NO: 1432106 - DNA, 15 bp, Homo sapiens
cagttctgtcagttc

SEQ ID NO: 1432107 - DNA, 15 bp, Homo sapiens
ccagttctgtcagtt

SEQ ID NO: 1432108 - DNA, 15 bp, Homo sapiens
tccagttctgtcagt

SEQ ID NO: 1432109 - DNA, 15 bp, Homo sapiens
ctccagttctgtcag

SEQ ID NO: 1432110 - DNA, 15 bp, Homo sapiens
tctccagttctgtca

SEQ ID NO: 1432111 - DNA, 15 bp, Homo sapiens
ttctccagttctgtc

SEQ ID NO: 1432112 - DNA, 15 bp, Homo sapiens
cttctccagttctgt

SEQ ID NO: 1432113 - DNA, 15 bp, Homo sapiens
tcttctccagttctg

SEQ ID NO: 1432114 - DNA, 15 bp, Homo sapiens
ttcttctccagttct

SEQ ID NO: 1432115 - DNA, 15 bp, Homo sapiens
attcttctccagttc

SEQ ID NO: 1432116 - DNA, 15 bp, Homo sapiens
tattcttctccagtt

SEQ ID NO: 1432117 - DNA, 15 bp, Homo sapiens
atattcttctccagt

SEQ ID NO: 1432118 - DNA, 15 bp, Homo sapiens
tatattcttctccag

SEQ ID NO: 1432119 - DNA, 15 bp, Homo sapiens
atatattcttctcca

SEQ ID NO: 1432120 - DNA, 15 bp, Homo sapiens
aatatattcttctcc

SEQ ID NO: 1432121 - DNA, 15 bp, Homo sapiens
aaatatattcttctc

SEQ ID NO: 1432122 - DNA, 15 bp, Homo sapiens
taaatatattcttct

SEQ ID NO: 1432123 - DNA, 15 bp, Homo sapiens
ataaatatattcttc

SEQ ID NO: 1432124 - DNA, 15 bp, Homo sapiens
cataaatatattctt

SEQ ID NO: 1432125 - DNA, 15 bp, Homo sapiens
acataaatatattct

SEQ ID NO: 1432126 - DNA, 15 bp, Homo sapiens
aacataaatatattc

SEQ ID NO: 1432127 - DNA, 15 bp, Homo sapiens
taacataaatatatt

SEQ ID NO: 1432128 - DNA, 15 bp, Homo sapiens
gtaacataaatatat

SEQ ID NO: 1432129 - DNA, 15 bp, Homo sapiens
tgtaacataaatata

SEQ ID NO: 1432130 - DNA, 15 bp, Homo sapiens
ctgtaacataaatat

SEQ ID NO: 1432131 - DNA, 15 bp, Homo sapiens
tctgtaacataaata

SEQ ID NO: 1432132 - DNA, 15 bp, Homo sapiens
ttctgtaacataaat

SEQ ID NO: 1432133 - DNA, 15 bp, Homo sapiens
cttctgtaacataaa

SEQ ID NO: 1432134 - DNA, 15 bp, Homo sapiens
acttctgtaacataa

SEQ ID NO: 1432135 - DNA, 15 bp, Homo sapiens
gacttctgtaacata

SEQ ID NO: 1432136 - DNA, 15 bp, Homo sapiens
tgacttctgtaacat

SEQ ID NO: 1432137 - DNA, 15 bp, Homo sapiens
atgacttctgtaaca

SEQ ID NO: 1432138 - DNA, 15 bp, Homo sapiens
catgacttctgtaac

SEQ ID NO: 1432139 - DNA, 15 bp, Homo sapiens
ccatgacttctgtaa

SEQ ID NO: 1432140 - DNA, 15 bp, Homo sapiens
tccatgacttctgta

SEQ ID NO: 1432141 - DNA, 15 bp, Homo sapiens
gtccatgacttctgt

SEQ ID NO: 1432142 - DNA, 15 bp, Homo sapiens
tgtccatgacttctg

SEQ ID NO: 1432143 - DNA, 15 bp, Homo sapiens
ttgtccatgacttct

SEQ ID NO: 1432144 - DNA, 15 bp, Homo sapiens
gttgtccatgacttc

SEQ ID NO: 1432145 - DNA, 15 bp, Homo sapiens
tgttgtccatgactt

SEQ ID NO: 1432146 - DNA, 15 bp, Homo sapiens
atgttgtccatgact

SEQ ID NO: 1432147 - DNA, 15 bp, Homo sapiens
gatgttgtccatgac

SEQ ID NO: 1432148 - DNA, 15 bp, Homo sapiens
ggatgttgtccatga

SEQ ID NO: 1432149 - DNA, 15 bp, Homo sapiens
aggatgttgtccatg

SEQ ID NO: 1432150 - DNA, 15 bp, Homo sapiens
taggatgttgtccat

SEQ ID NO: 1432151 - DNA, 15 bp, Homo sapiens
ataggatgttgtcca

SEQ ID NO: 1432152 - DNA, 15 bp, Homo sapiens
aataggatgttgtcc

SEQ ID NO: 1432153 - DNA, 15 bp, Homo sapiens
gaataggatgttgtc

SEQ ID NO: 1432154 - DNA, 15 bp, Homo sapiens
tgaataggatgttgt

SEQ ID NO: 1432155 - DNA, 15 bp, Homo sapiens
atgaataggatgttg

SEQ ID NO: 1432156 - DNA, 15 bp, Homo sapiens
aatgaataggatgtt

SEQ ID NO: 1432157 - DNA, 15 bp, Homo sapiens
aaatgaataggatgt

SEQ ID NO: 1432158 - DNA, 15 bp, Homo sapiens
aaaatgaataggatg

SEQ ID NO: 1432159 - DNA, 15 bp, Homo sapiens
taaaatgaataggat

SEQ ID NO: 1432160 - DNA, 15 bp, Homo sapiens
ctaaaatgaatagga

SEQ ID NO: 1432161 - DNA, 15 bp, Homo sapiens
actaaaatgaatagg

SEQ ID NO: 1432162 - DNA, 15 bp, Homo sapiens
gactaaaatgaatag

SEQ ID NO: 1432163 - DNA, 15 bp, Homo sapiens
tgactaaaatgaata

SEQ ID NO: 1432164 - DNA, 15 bp, Homo sapiens
ttgactaaaatgaat

SEQ ID NO: 1432165 - DNA, 15 bp, Homo sapiens
cttgactaaaatgaa

SEQ ID NO: 1432166 - DNA, 15 bp, Homo sapiens
ccttgactaaaatga

SEQ ID NO: 1432167 - DNA, 15 bp, Homo sapiens
accttgactaaaatg

SEQ ID NO: 1432168 - DNA, 15 bp, Homo sapiens
aaccttgactaaaat

SEQ ID NO: 1432169 - DNA, 15 bp, Homo sapiens
aaaccttgactaaaa

SEQ ID NO: 1432170 - DNA, 15 bp, Homo sapiens
aaaaccttgactaaa

SEQ ID NO: 1432171 - DNA, 15 bp, Homo sapiens
gaaaaccttgactaa

SEQ ID NO: 1432172 - DNA, 15 bp, Homo sapiens
agaaaaccttgacta

SEQ ID NO: 1432173 - DNA, 15 bp, Homo sapiens
gagaaaaccttgact

SEQ ID NO: 1432174 - DNA, 15 bp, Homo sapiens
tgagaaaaccttgac

SEQ ID NO: 1432175 - DNA, 15 bp, Homo sapiens
ctgagaaaaccttga

SEQ ID NO: 1432176 - DNA, 15 bp, Homo sapiens
gctgagaaaaccttg

SEQ ID NO: 1432177 - DNA, 15 bp, Homo sapiens
ggctgagaaaacctt

SEQ ID NO: 1432178 - DNA, 15 bp, Homo sapiens
tggctgagaaaacct

SEQ ID NO: 1432179 - DNA, 15 bp, Homo sapiens
ttggctgagaaaacc

SEQ ID NO: 1432180 - DNA, 15 bp, Homo sapiens
tttggctgagaaaac

SEQ ID NO: 1432181 - DNA, 15 bp, Homo sapiens
gtttggctgagaaaa

SEQ ID NO: 1432182 - DNA, 15 bp, Homo sapiens
ggtttggctgagaaa

SEQ ID NO: 1432183 - DNA, 15 bp, Homo sapiens
tggtttggctgagaa

SEQ ID NO: 1432184 - DNA, 15 bp, Homo sapiens
ttggtttggctgaga

SEQ ID NO: 1432185 - DNA, 15 bp, Homo sapiens
attggtttggctgag

SEQ ID NO: 1432186 - DNA, 15 bp, Homo sapiens
aattggtttggctga

SEQ ID NO: 1432187 - DNA, 15 bp, Homo sapiens
aaattggtttggctg

SEQ ID NO: 1432188 - DNA, 15 bp, Homo sapiens
taaattggtttggct

SEQ ID NO: 1432189 - DNA, 15 bp, Homo sapiens
ataaattggtttggc

SEQ ID NO: 1432190 - DNA, 15 bp, Homo sapiens
tataaattggtttgg

SEQ ID NO: 1432191 - DNA, 15 bp, Homo sapiens
atataaattggtttg

SEQ ID NO: 1432192 - DNA, 15 bp, Homo sapiens
gatataaattggttt

SEQ ID NO: 1432193 - DNA, 15 bp, Homo sapiens
agatataaattggtt

SEQ ID NO: 1432194 - DNA, 15 bp, Homo sapiens
gagatataaattggt

SEQ ID NO: 1432195 - DNA, 15 bp, Homo sapiens
agagatataaattgg

SEQ ID NO: 1432196 - DNA, 15 bp, Homo sapiens
aagagatataaattg

SEQ ID NO: 1432197 - DNA, 15 bp, Homo sapiens
aaagagatataaatt

SEQ ID NO: 1432198 - DNA, 15 bp, Homo sapiens
taaagagatataaat

SEQ ID NO: 1432199 - DNA, 15 bp, Homo sapiens
ataaagagatataaa

SEQ ID NO: 1432200 - DNA, 15 bp, Homo sapiens
gataaagagatataa

SEQ ID NO: 1432201 - DNA, 15 bp, Homo sapiens
ggataaagagatata

SEQ ID NO: 1432202 - DNA, 15 bp, Homo sapiens
tggataaagagatat

SEQ ID NO: 1432203 - DNA, 15 bp, Homo sapiens
ctggataaagagata

SEQ ID NO: 1432204 - DNA, 15 bp, Homo sapiens
tctggataaagagat

SEQ ID NO: 1432205 - DNA, 15 bp, Homo sapiens
atctggataaagaga

SEQ ID NO: 1432206 - DNA, 15 bp, Homo sapiens
aatctggataaagag

SEQ ID NO: 1432207 - DNA, 15 bp, Homo sapiens
taatctggataaaga

SEQ ID NO: 1432208 - DNA, 15 bp, Homo sapiens
ataatctggataaag

SEQ ID NO: 1432209 - DNA, 15 bp, Homo sapiens
tataatctggataaa

SEQ ID NO: 1432210 - DNA, 15 bp, Homo sapiens
ttataatctggataa

SEQ ID NO: 1432211 - DNA, 15 bp, Homo sapiens
attataatctggata

SEQ ID NO: 1432212 - DNA, 15 bp, Homo sapiens
aattataatctggat

SEQ ID NO: 1432213 - DNA, 15 bp, Homo sapiens
taattataatctgga

SEQ ID NO: 1432214 - DNA, 15 bp, Homo sapiens
ataattataatctgg

SEQ ID NO: 1432215 - DNA, 15 bp, Homo sapiens
cataattataatctg

SEQ ID NO: 1432216 - DNA, 15 bp, Homo sapiens
acataattataatct

SEQ ID NO: 1432217 - DNA, 15 bp, Homo sapiens
aacataattataatc

SEQ ID NO: 1432218 - DNA, 15 bp, Homo sapiens
caacataattataat

SEQ ID NO: 1432219 - DNA, 15 bp, Homo sapiens
acaacataattataa

SEQ ID NO: 1432220 - DNA, 15 bp, Homo sapiens
tacaacataattata

SEQ ID NO: 1432221 - DNA, 15 bp, Homo sapiens
atacaacataattat

SEQ ID NO: 1432222 - DNA, 15 bp, Homo sapiens
gatacaacataatta

SEQ ID NO: 1432223 - DNA, 15 bp, Homo sapiens
tgatacaacataatt

SEQ ID NO: 1432224 - DNA, 15 bp, Homo sapiens
atgatacaacataat

SEQ ID NO: 1432225 - DNA, 15 bp, Homo sapiens
aatgatacaacataa

SEQ ID NO: 1432226 - DNA, 15 bp, Homo sapiens
aaatgatacaacata

SEQ ID NO: 1432227 - DNA, 15 bp, Homo sapiens
taaatgatacaacat

SEQ ID NO: 1432228 - DNA, 15 bp, Homo sapiens
ataaatgatacaaca

SEQ ID NO: 1432229 - DNA, 15 bp, Homo sapiens
tataaatgatacaac

SEQ ID NO: 1432230 - DNA, 15 bp, Homo sapiens
ctataaatgatacaa

SEQ ID NO: 1432231 - DNA, 15 bp, Homo sapiens
tctataaatgataca

SEQ ID NO: 1432232 - DNA, 15 bp, Homo sapiens
gtctataaatgatac

SEQ ID NO: 1432233 - DNA, 15 bp, Homo sapiens
agtctataaatgata

SEQ ID NO: 1432234 - DNA, 15 bp, Homo sapiens
cagtctataaatgat

SEQ ID NO: 1432235 - DNA, 15 bp, Homo sapiens
acagtctataaatga

SEQ ID NO: 1432236 - DNA, 15 bp, Homo sapiens
tacagtctataaatg

SEQ ID NO: 1432237 - DNA, 15 bp, Homo sapiens
ttacagtctataaat

SEQ ID NO: 1432238 - DNA, 15 bp, Homo sapiens
cttacagtctataaa

SEQ ID NO: 1432239 - DNA, 15 bp, Homo sapiens
acttacagtctataa

SEQ ID NO: 1432240 - DNA, 15 bp, Homo sapiens
aacttacagtctata

SEQ ID NO: 1432241 - DNA, 15 bp, Homo sapiens
aaacttacagtctat

SEQ ID NO: 1432242 - DNA, 15 bp, Homo sapiens
caaacttacagtcta

SEQ ID NO: 1432243 - DNA, 15 bp, Homo sapiens
acaaacttacagtct

SEQ ID NO: 1432244 - DNA, 15 bp, Homo sapiens
aacaaacttacagtc

SEQ ID NO: 1432245 - DNA, 15 bp, Homo sapiens
gaacaaacttacagt

SEQ ID NO: 1432246 - DNA, 15 bp, Homo sapiens
agaacaaacttacag

SEQ ID NO: 1432247 - DNA, 15 bp, Homo sapiens
aagaacaaacttaca

SEQ ID NO: 1432248 - DNA, 15 bp, Homo sapiens
aaagaacaaacttac

SEQ ID NO: 1432249 - DNA, 15 bp, Homo sapiens
taaagaacaaactta

SEQ ID NO: 1432250 - DNA, 15 bp, Homo sapiens
ctaaagaacaaactt

SEQ ID NO: 1432251 - DNA, 15 bp, Homo sapiens
gctaaagaacaaact

SEQ ID NO: 1432252 - DNA, 15 bp, Homo sapiens
tgctaaagaacaaac

SEQ ID NO: 1432253 - DNA, 15 bp, Homo sapiens
atgctaaagaacaaa

SEQ ID NO: 1432254 - DNA, 15 bp, Homo sapiens
gatgctaaagaacaa

SEQ ID NO: 1432255 - DNA, 15 bp, Homo sapiens
tgatgctaaagaaca

SEQ ID NO: 1432256 - DNA, 15 bp, Homo sapiens
gtgatgctaaagaac

SEQ ID NO: 1432257 - DNA, 15 bp, Homo sapiens
ggtgatgctaaagaa

SEQ ID NO: 1432258 - DNA, 15 bp, Homo sapiens
aggtgatgctaaaga

SEQ ID NO: 1432259 - DNA, 15 bp, Homo sapiens
aaggtgatgctaaag

SEQ ID NO: 1432260 - DNA, 15 bp, Homo sapiens
aaaggtgatgctaaa

SEQ ID NO: 1432261 - DNA, 15 bp, Homo sapiens
gaaaggtgatgctaa

SEQ ID NO: 1432262 - DNA, 15 bp, Homo sapiens
agaaaggtgatgcta

SEQ ID NO: 1432263 - DNA, 15 bp, Homo sapiens
tagaaaggtgatgct

SEQ ID NO: 1432264 - DNA, 15 bp, Homo sapiens
atagaaaggtgatgc

SEQ ID NO: 1432265 - DNA, 15 bp, Homo sapiens
aatagaaaggtgatg

SEQ ID NO: 1432266 - DNA, 15 bp, Homo sapiens
aaatagaaaggtgat

SEQ ID NO: 1432267 - DNA, 15 bp, Homo sapiens
aaaatagaaaggtga

SEQ ID NO: 1432268 - DNA, 15 bp, Homo sapiens
aaaaatagaaaggtg

SEQ ID NO: 1432269 - DNA, 15 bp, Homo sapiens
caaaaatagaaaggt

SEQ ID NO: 1432270 - DNA, 15 bp, Homo sapiens
tcaaaaatagaaagg

SEQ ID NO: 1432271 - DNA, 15 bp, Homo sapiens
gtcaaaaatagaaag

SEQ ID NO: 1432272 - DNA, 15 bp, Homo sapiens
ggtcaaaaatagaaa

SEQ ID NO: 1432273 - DNA, 15 bp, Homo sapiens
tggtcaaaaatagaa

SEQ ID NO: 1432274 - DNA, 15 bp, Homo sapiens
ttggtcaaaaataga

SEQ ID NO: 1432275 - DNA, 15 bp, Homo sapiens
attggtcaaaaatag

SEQ ID NO: 1432276 - DNA, 15 bp, Homo sapiens
tattggtcaaaaata

SEQ ID NO: 1432277 - DNA, 15 bp, Homo sapiens
ttattggtcaaaaat

SEQ ID NO: 1432278 - DNA, 15 bp, Homo sapiens
tttattggtcaaaaa

SEQ ID NO: 1432279 - DNA, 15 bp, Homo sapiens
atttattggtcaaaa

SEQ ID NO: 1432280 - DNA, 15 bp, Homo sapiens
aatttattggtcaaa

SEQ ID NO: 1432281 - DNA, 15 bp, Homo sapiens
gaatttattggtcaa

SEQ ID NO: 1432282 - DNA, 15 bp, Homo sapiens
agaatttattggtca

SEQ ID NO: 1432283 - DNA, 15 bp, Homo sapiens
gagaatttattggtc

SEQ ID NO: 1432284 - DNA, 15 bp, Homo sapiens
tgagaatttattggt

SEQ ID NO: 1432285 - DNA, 15 bp, Homo sapiens
ttgagaatttattgg

SEQ ID NO: 1432286 - DNA, 15 bp, Homo sapiens
attgagaatttattg

SEQ ID NO: 1432287 - DNA, 15 bp, Homo sapiens
aattgagaatttatt

SEQ ID NO: 1432288 - DNA, 15 bp, Homo sapiens
aaattgagaatttat

SEQ ID NO: 1432289 - DNA, 15 bp, Homo sapiens
caaattgagaattta

SEQ ID NO: 1432290 - DNA, 15 bp, Homo sapiens
ccaaattgagaattt

SEQ ID NO: 1432291 - DNA, 15 bp, Homo sapiens
tccaaattgagaatt

SEQ ID NO: 1432292 - DNA, 15 bp, Homo sapiens
ttccaaattgagaat

SEQ ID NO: 1432293 - DNA, 15 bp, Homo sapiens
tttccaaattgagaa

SEQ ID NO: 1432294 - DNA, 15 bp, Homo sapiens
atttccaaattgaga

SEQ ID NO: 1432295 - DNA, 15 bp, Homo sapiens
aatttccaaattgag

SEQ ID NO: 1432296 - DNA, 15 bp, Homo sapiens
gaatttccaaattga

SEQ ID NO: 1432297 - DNA, 15 bp, Homo sapiens
agaatttccaaattg

SEQ ID NO: 1432298 - DNA, 15 bp, Homo sapiens
aagaatttccaaatt

SEQ ID NO: 1432299 - DNA, 15 bp, Homo sapiens
taagaatttccaaat

SEQ ID NO: 1432300 - DNA, 15 bp, Homo sapiens
ataagaatttccaaa

SEQ ID NO: 1432301 - DNA, 15 bp, Homo sapiens
tataagaatttccaa

SEQ ID NO: 1432302 - DNA, 15 bp, Homo sapiens
ctataagaatttcca

SEQ ID NO: 1432303 - DNA, 15 bp, Homo sapiens
cctataagaatttcc

SEQ ID NO: 1432304 - DNA, 15 bp, Homo sapiens
gcctataagaatttc

SEQ ID NO: 1432305 - DNA, 15 bp, Homo sapiens
tgcctataagaattt

SEQ ID NO: 1432306 - DNA, 15 bp, Homo sapiens
ctgcctataagaatt

SEQ ID NO: 1432307 - DNA, 15 bp, Homo sapiens
actgcctataagaat

SEQ ID NO: 1432308 - DNA, 15 bp, Homo sapiens
cactgcctataagaa

SEQ ID NO: 1432309 - DNA, 15 bp, Homo sapiens
acactgcctataaga

SEQ ID NO: 1432310 - DNA, 15 bp, Homo sapiens
cacactgcctataag

SEQ ID NO: 1432311 - DNA, 15 bp, Homo sapiens
tcacactgcctataa

SEQ ID NO: 1432312 - DNA, 15 bp, Homo sapiens
atcacactgcctata

SEQ ID NO: 1432313 - DNA, 15 bp, Homo sapiens
catcacactgcctat

SEQ ID NO: 1432314 - DNA, 15 bp, Homo sapiens
ccatcacactgccta

SEQ ID NO: 1432315 - DNA, 15 bp, Homo sapiens
tccatcacactgcct

SEQ ID NO: 1432316 - DNA, 15 bp, Homo sapiens
ttccatcacactgcc

SEQ ID NO: 1432317 - DNA, 15 bp, Homo sapiens
tttccatcacactgc

SEQ ID NO: 1432318 - DNA, 15 bp, Homo sapiens
ttttccatcacactg

SEQ ID NO: 1432319 - DNA, 15 bp, Homo sapiens
tttttccatcacact

SEQ ID NO: 1432320 - DNA, 15 bp, Homo sapiens
atttttccatcacac

SEQ ID NO: 1432321 - DNA, 15 bp, Homo sapiens
aatttttccatcaca

SEQ ID NO: 1432322 - DNA, 15 bp, Homo sapiens
gaatttttccatcac

SEQ ID NO: 1432323 - DNA, 15 bp, Homo sapiens
tgaatttttccatca

SEQ ID NO: 1432324 - DNA, 15 bp, Homo sapiens
ttgaatttttccatc

SEQ ID NO: 1432325 - DNA, 15 bp, Homo sapiens
attgaatttttccat

SEQ ID NO: 1432326 - DNA, 15 bp, Homo sapiens
cattgaatttttcca

SEQ ID NO: 1432327 - DNA, 15 bp, Homo sapiens
acattgaatttttcc

SEQ ID NO: 1432328 - DNA, 15 bp, Homo sapiens
tacattgaatttttc

SEQ ID NO: 1432329 - DNA, 15 bp, Homo sapiens
ttacattgaattttt

SEQ ID NO: 1432330 - DNA, 15 bp, Homo sapiens
attacattgaatttt

SEQ ID NO: 1432331 - DNA, 15 bp, Homo sapiens
tattacattgaattt

SEQ ID NO: 1432332 - DNA, 15 bp, Homo sapiens
ttattacattgaatt

SEQ ID NO: 1432333 - DNA, 15 bp, Homo sapiens
tttattacattgaat

SEQ ID NO: 1432334 - DNA, 15 bp, Homo sapiens
ttttattacattgaa

SEQ ID NO: 1432335 - DNA, 15 bp, Homo sapiens
tttttattacattga

SEQ ID NO: 1432336 - DNA, 15 bp, Homo sapiens
atttttattacattg

SEQ ID NO: 1432337 - DNA, 15 bp, Homo sapiens
tatttttattacatt

SEQ ID NO: 1432338 - DNA, 15 bp, Homo sapiens
atatttttattacat

SEQ ID NO: 1432339 - DNA, 15 bp, Homo sapiens
aatatttttattaca

SEQ ID NO: 1432340 - DNA, 15 bp, Homo sapiens
taatatttttattac

SEQ ID NO: 1432341 - DNA, 15 bp, Homo sapiens
cataatatttttatt

SEQ ID NO: 1432342 - DNA, 15 bp, Homo sapiens
gcataatatttttat

SEQ ID NO: 1432343 - DNA, 15 bp, Homo sapiens
ggcataatattttta

SEQ ID NO: 1432344 - DNA, 15 bp, Homo sapiens
tggcataatattttt

SEQ ID NO: 1432345 - DNA, 15 bp, Homo sapiens
ctggcataatatttt

SEQ ID NO: 1432346 - DNA, 15 bp, Homo sapiens
tctggcataatattt

SEQ ID NO: 1432347 - DNA, 15 bp, Homo sapiens
ctctggcataatatt

SEQ ID NO: 1432348 - DNA, 15 bp, Homo sapiens
actctggcataatat

SEQ ID NO: 1432349 - DNA, 15 bp, Homo sapiens
gactctggcataata

SEQ ID NO: 1432350 - DNA, 15 bp, Homo sapiens
tgactctggcataat

SEQ ID NO: 1432351 - DNA, 15 bp, Homo sapiens
atgactctggcataa

SEQ ID NO: 1432352 - DNA, 15 bp, Homo sapiens
catgactctggcata

SEQ ID NO: 1432353 - DNA, 15 bp, Homo sapiens
acatgactctggcat

SEQ ID NO: 1432354 - DNA, 15 bp, Homo sapiens
tacatgactctggca

SEQ ID NO: 1432355 - DNA, 15 bp, Homo sapiens
gtacatgactctggc

SEQ ID NO: 1432356 - DNA, 15 bp, Homo sapiens
tgtacatgactctgg

SEQ ID NO: 1432357 - DNA, 15 bp, Homo sapiens
atgtacatgactctg

SEQ ID NO: 1432358 - DNA, 15 bp, Homo sapiens
tatgtacatgactct

SEQ ID NO: 1432359 - DNA, 15 bp, Homo sapiens
ttatgtacatgactc

SEQ ID NO: 1432360 - DNA, 15 bp, Homo sapiens
cttatgtacatgact

SEQ ID NO: 1432361 - DNA, 15 bp, Homo sapiens
gcttatgtacatgac

SEQ ID NO: 1432362 - DNA, 15 bp, Homo sapiens
tgcttatgtacatga

SEQ ID NO: 1432363 - DNA, 15 bp, Homo sapiens
ctgcttatgtacatg

SEQ ID NO: 1432364 - DNA, 15 bp, Homo sapiens
tctgcttatgtacat

SEQ ID NO: 1432365 - DNA, 15 bp, Homo sapiens
ctctgcttatgtaca

SEQ ID NO: 1432366 - DNA, 15 bp, Homo sapiens
actctgcttatgtac

SEQ ID NO: 1432367 - DNA, 15 bp, Homo sapiens
cactctgcttatgta

SEQ ID NO: 1432368 - DNA, 15 bp, Homo sapiens
acactctgcttatgt

SEQ ID NO: 1432369 - DNA, 15 bp, Homo sapiens
aacactctgcttatg

SEQ ID NO: 1432370 - DNA, 15 bp, Homo sapiens
aaacactctgcttat

SEQ ID NO: 1432371 - DNA, 15 bp, Homo sapiens
gaaacactctgctta

SEQ ID NO: 1432372 - DNA, 15 bp, Homo sapiens
ggaaacactctgctt

SEQ ID NO: 1432373 - DNA, 15 bp, Homo sapiens
tggaaacactctgct

SEQ ID NO: 1432374 - DNA, 15 bp, Homo sapiens
gtggaaacactctgc

SEQ ID NO: 1432375 - DNA, 15 bp, Homo sapiens
tgtggaaacactctg

SEQ ID NO: 1432376 - DNA, 15 bp, Homo sapiens
ctgtggaaacactct

SEQ ID NO: 1432377 - DNA, 15 bp, Homo sapiens
actgtggaaacactc

SEQ ID NO: 1432378 - DNA, 15 bp, Homo sapiens
cactgtggaaacact

SEQ ID NO: 1432379 - DNA, 15 bp, Homo sapiens
acactgtggaaacac

SEQ ID NO: 1432380 - DNA, 15 bp, Homo sapiens
gacactgtggaaaca

SEQ ID NO: 1432381 - DNA, 15 bp, Homo sapiens
ggacactgtggaaac

SEQ ID NO: 1432382 - DNA, 15 bp, Homo sapiens
gggacactgtggaaa

SEQ ID NO: 1432383 - DNA, 15 bp, Homo sapiens
agggacactgtggaa

SEQ ID NO: 1432384 - DNA, 15 bp, Homo sapiens
cagggacactgtgga

SEQ ID NO: 1432385 - DNA, 15 bp, Homo sapiens
gcagggacactgtgg

SEQ ID NO: 1432386 - DNA, 15 bp, Homo sapiens
tgcagggacactgtg

SEQ ID NO: 1432387 - DNA, 15 bp, Homo sapiens
ttgcagggacactgt

SEQ ID NO: 1432388 - DNA, 15 bp, Homo sapiens
attgcagggacactg

SEQ ID NO: 1432389 - DNA, 15 bp, Homo sapiens
aattgcagggacact

SEQ ID NO: 1432390 - DNA, 15 bp, Homo sapiens
taattgcagggacac

SEQ ID NO: 1432391 - DNA, 15 bp, Homo sapiens
ctaattgcagggaca

SEQ ID NO: 1432392 - DNA, 15 bp, Homo sapiens
cctaattgcagggac

SEQ ID NO: 1432393 - DNA, 15 bp, Homo sapiens
gcctaattgcaggga

SEQ ID NO: 1432394 - DNA, 15 bp, Homo sapiens
tgcctaattgcaggg

SEQ ID NO: 1432395 - DNA, 15 bp, Homo sapiens
ttgcctaattgcagg

SEQ ID NO: 1432396 - DNA, 15 bp, Homo sapiens
attgcctaattgcag

SEQ ID NO: 1432397 - DNA, 15 bp, Homo sapiens
tattgcctaattgca

SEQ ID NO: 1432398 - DNA, 15 bp, Homo sapiens
gtattgcctaattgc

SEQ ID NO: 1432399 - DNA, 15 bp, Homo sapiens
ggtattgcctaattg

SEQ ID NO: 1432400 - DNA, 15 bp, Homo sapiens
gggtattgcctaatt

SEQ ID NO: 1432401 - DNA, 15 bp, Homo sapiens
tgggtattgcctaat

SEQ ID NO: 1432402 - DNA, 15 bp, Homo sapiens
atgggtattgcctaa

SEQ ID NO: 1432403 - DNA, 15 bp, Homo sapiens
aatgggtattgccta

SEQ ID NO: 1432404 - DNA, 15 bp, Homo sapiens
caatgggtattgcct

SEQ ID NO: 1432405 - DNA, 15 bp, Homo sapiens
acaatgggtattgcc

SEQ ID NO: 1432406 - DNA, 15 bp, Homo sapiens
gacaatgggtattgc

SEQ ID NO: 1432407 - DNA, 15 bp, Homo sapiens
ggacaatgggtattg

SEQ ID NO: 1432408 - DNA, 15 bp, Homo sapiens
tggacaatgggtatt

SEQ ID NO: 1432409 - DNA, 15 bp, Homo sapiens
atggacaatgggtat

SEQ ID NO: 1432410 - DNA, 15 bp, Homo sapiens
aatggacaatgggta

SEQ ID NO: 1432411 - DNA, 15 bp, Homo sapiens
gaatggacaatgggt

SEQ ID NO: 1432412 - DNA, 15 bp, Homo sapiens
ggaatggacaatggg

SEQ ID NO: 1432413 - DNA, 15 bp, Homo sapiens
aggaatggacaatgg

SEQ ID NO: 1432414 - DNA, 15 bp, Homo sapiens
caggaatggacaatg

SEQ ID NO: 1432415 - DNA, 15 bp, Homo sapiens
acaggaatggacaat

SEQ ID NO: 1432416 - DNA, 15 bp, Homo sapiens
aacaggaatggacaa

SEQ ID NO: 1432417 - DNA, 15 bp, Homo sapiens
caacaggaatggaca

SEQ ID NO: 1432418 - DNA, 15 bp, Homo sapiens
ccaacaggaatggac

SEQ ID NO: 1432419 - DNA, 15 bp, Homo sapiens
gccaacaggaatgga

SEQ ID NO: 1432420 - DNA, 15 bp, Homo sapiens
agccaacaggaatgg

SEQ ID NO: 1432421 - DNA, 15 bp, Homo sapiens
gagccaacaggaatg

SEQ ID NO: 1432422 - DNA, 15 bp, Homo sapiens
agagccaacaggaat

SEQ ID NO: 1432423 - DNA, 15 bp, Homo sapiens
aagagccaacaggaa

SEQ ID NO: 1432424 - DNA, 15 bp, Homo sapiens
caagagccaacagga

SEQ ID NO: 1432425 - DNA, 15 bp, Homo sapiens
ccaagagccaacagg

SEQ ID NO: 1432426 - DNA, 15 bp, Homo sapiens
gccaagagccaacag

SEQ ID NO: 1432427 - DNA, 15 bp, Homo sapiens
agccaagagccaaca

SEQ ID NO: 1432428 - DNA, 15 bp, Homo sapiens
cagccaagagccaac

SEQ ID NO: 1432429 - DNA, 15 bp, Homo sapiens
gcagccaagagccaa

SEQ ID NO: 1432430 - DNA, 15 bp, Homo sapiens
ggcagccaagagcca

SEQ ID NO: 1432431 - DNA, 15 bp, Homo sapiens
aggcagccaagagcc

SEQ ID NO: 1432432 - DNA, 15 bp, Homo sapiens
taggcagccaagagc

SEQ ID NO: 1432433 - DNA, 15 bp, Homo sapiens
ctaggcagccaagag

SEQ ID NO: 1432434 - DNA, 15 bp, Homo sapiens
tctaggcagccaaga

SEQ ID NO: 1432435 - DNA, 15 bp, Homo sapiens
atctaggcagccaag

SEQ ID NO: 1432436 - DNA, 15 bp, Homo sapiens
gatctaggcagccaa

SEQ ID NO: 1432437 - DNA, 15 bp, Homo sapiens
agatctaggcagcca

SEQ ID NO: 1432438 - DNA, 15 bp, Homo sapiens
aagatctaggcagcc

SEQ ID NO: 1432439 - DNA, 15 bp, Homo sapiens
aaagatctaggcagc

SEQ ID NO: 1432440 - DNA, 15 bp, Homo sapiens
aaaagatctaggcag

SEQ ID NO: 1432441 - DNA, 15 bp, Homo sapiens
gaaaagatctaggca

SEQ ID NO: 1432442 - DNA, 15 bp, Homo sapiens
agaaaagatctaggc

SEQ ID NO: 1432443 - DNA, 15 bp, Homo sapiens
aagaaaagatctagg

SEQ ID NO: 1432444 - DNA, 15 bp, Homo sapiens
aaagaaaagatctag

SEQ ID NO: 1432445 - DNA, 15 bp, Homo sapiens
caaagaaaagatcta

SEQ ID NO: 1432446 - DNA, 15 bp, Homo sapiens
gcaaagaaaagatct

SEQ ID NO: 1432447 - DNA, 15 bp, Homo sapiens
ggcaaagaaaagatc

SEQ ID NO: 1432448 - DNA, 15 bp, Homo sapiens
aggcaaagaaaagat

SEQ ID NO: 1432449 - DNA, 15 bp, Homo sapiens
aaggcaaagaaaaga

SEQ ID NO: 1432450 - DNA, 15 bp, Homo sapiens
taaggcaaagaaaag

SEQ ID NO: 1432451 - DNA, 15 bp, Homo sapiens
gtaaggcaaagaaaa

SEQ ID NO: 1432452 - DNA, 15 bp, Homo sapiens
agtaaggcaaagaaa

SEQ ID NO: 1432453 - DNA, 15 bp, Homo sapiens
aagtaaggcaaagaa

SEQ ID NO: 1432454 - DNA, 15 bp, Homo sapiens
aaagtaaggcaaaga

SEQ ID NO: 1432455 - DNA, 15 bp, Homo sapiens
taaagtaaggcaaag

SEQ ID NO: 1432456 - DNA, 15 bp, Homo sapiens
gtaaagtaaggcaaa

SEQ ID NO: 1432457 - DNA, 15 bp, Homo sapiens
ggtaaagtaaggcaa

SEQ ID NO: 1432458 - DNA, 15 bp, Homo sapiens
aggtaaagtaaggca

SEQ ID NO: 1432459 - DNA, 15 bp, Homo sapiens
gaggtaaagtaaggc

SEQ ID NO: 1432460 - DNA, 15 bp, Homo sapiens
agaggtaaagtaagg

SEQ ID NO: 1432461 - DNA, 15 bp, Homo sapiens
aagaggtaaagtaag

SEQ ID NO: 1432462 - DNA, 15 bp, Homo sapiens
aaagaggtaaagtaa

SEQ ID NO: 1432463 - DNA, 15 bp, Homo sapiens
taaagaggtaaagta

SEQ ID NO: 1432464 - DNA, 15 bp, Homo sapiens
ataaagaggtaaagt

SEQ ID NO: 1432465 - DNA, 15 bp, Homo sapiens
aataaagaggtaaag

SEQ ID NO: 1432466 - DNA, 15 bp, Homo sapiens
caataaagaggtaaa

SEQ ID NO: 1432467 - DNA, 15 bp, Homo sapiens
tcaataaagaggtaa

SEQ ID NO: 1432468 - DNA, 15 bp, Homo sapiens
ttcaataaagaggta

SEQ ID NO: 1432469 - DNA, 15 bp, Homo sapiens
cttcaataaagaggt

SEQ ID NO: 1432470 - DNA, 15 bp, Homo sapiens
ccttcaataaagagg

SEQ ID NO: 1432471 - DNA, 15 bp, Homo sapiens
gccttcaataaagag

SEQ ID NO: 1432472 - DNA, 15 bp, Homo sapiens
ggccttcaataaaga

SEQ ID NO: 1432473 - DNA, 15 bp, Homo sapiens
aggccttcaataaag

SEQ ID NO: 1432474 - DNA, 15 bp, Homo sapiens
taggccttcaataaa

SEQ ID NO: 1432475 - DNA, 15 bp, Homo sapiens
ataggccttcaataa

SEQ ID NO: 1432476 - DNA, 15 bp, Homo sapiens
cataggccttcaata

SEQ ID NO: 1432477 - DNA, 15 bp, Homo sapiens
gcataggccttcaat

SEQ ID NO: 1432478 - DNA, 15 bp, Homo sapiens
agcataggccttcaa

SEQ ID NO: 1432479 - DNA, 15 bp, Homo sapiens
aagcataggccttca

SEQ ID NO: 1432480 - DNA, 15 bp, Homo sapiens
gaagcataggccttc

SEQ ID NO: 1432481 - DNA, 15 bp, Homo sapiens
ggaagcataggcctt

SEQ ID NO: 1432482 - DNA, 15 bp, Homo sapiens
gggaagcataggcct

SEQ ID NO: 1432483 - DNA, 15 bp, Homo sapiens
ggggaagcataggcc

SEQ ID NO: 1432484 - DNA, 15 bp, Homo sapiens
aggggaagcataggc

SEQ ID NO: 1432485 - DNA, 15 bp, Homo sapiens
gaggggaagcatagg

SEQ ID NO: 1432486 - DNA, 15 bp, Homo sapiens
agaggggaagcatag

SEQ ID NO: 1432487 - DNA, 15 bp, Homo sapiens
cagaggggaagcata

SEQ ID NO: 1432488 - DNA, 15 bp, Homo sapiens
acagaggggaagcat

SEQ ID NO: 1432489 - DNA, 15 bp, Homo sapiens
aacagaggggaagca

SEQ ID NO: 1432490 - DNA, 15 bp, Homo sapiens
aaacagaggggaagc

SEQ ID NO: 1432491 - DNA, 15 bp, Homo sapiens
gaaacagaggggaag

SEQ ID NO: 1432492 - DNA, 15 bp, Homo sapiens
agaaacagaggggaa

SEQ ID NO: 1432493 - DNA, 15 bp, Homo sapiens
aagaaacagagggga

SEQ ID NO: 1432494 - DNA, 15 bp, Homo sapiens
aaagaaacagagggg

SEQ ID NO: 1432495 - DNA, 15 bp, Homo sapiens
caaagaaacagaggg

SEQ ID NO: 1432496 - DNA, 15 bp, Homo sapiens
acaaagaaacagagg

SEQ ID NO: 1432497 - DNA, 15 bp, Homo sapiens
tacaaagaaacagag

SEQ ID NO: 1432498 - DNA, 15 bp, Homo sapiens
ctacaaagaaacaga

SEQ ID NO: 1432499 - DNA, 15 bp, Homo sapiens
tctacaaagaaacag

SEQ ID NO: 1432500 - DNA, 15 bp, Homo sapiens
ttctacaaagaaaca

SEQ ID NO: 1432501 - DNA, 15 bp, Homo sapiens
attctacaaagaaac

SEQ ID NO: 1432502 - DNA, 15 bp, Homo sapiens
cattctacaaagaaa

SEQ ID NO: 1432503 - DNA, 15 bp, Homo sapiens
acattctacaaagaa

SEQ ID NO: 1432504 - DNA, 15 bp, Homo sapiens
gacattctacaaaga

SEQ ID NO: 1432505 - DNA, 15 bp, Homo sapiens
agacattctacaaag

SEQ ID NO: 1432506 - DNA, 15 bp, Homo sapiens
tagacattctacaaa

SEQ ID NO: 1432507 - DNA, 15 bp, Homo sapiens
ctagacattctacaa

SEQ ID NO: 1432508 - DNA, 15 bp, Homo sapiens
tctagacattctaca

SEQ ID NO: 1432509 - DNA, 15 bp, Homo sapiens
atctagacattctac

SEQ ID NO: 1432510 - DNA, 15 bp, Homo sapiens
aatctagacattcta

SEQ ID NO: 1432511 - DNA, 15 bp, Homo sapiens
gaatctagacattct

SEQ ID NO: 1432512 - DNA, 15 bp, Homo sapiens
ggaatctagacattc

SEQ ID NO: 1432513 - DNA, 15 bp, Homo sapiens
gggaatctagacatt

SEQ ID NO: 1432514 - DNA, 15 bp, Homo sapiens
tgggaatctagacat

SEQ ID NO: 1432515 - DNA, 15 bp, Homo sapiens
ttgggaatctagaca

SEQ ID NO: 1432516 - DNA, 15 bp, Homo sapiens
gttgggaatctagac

SEQ ID NO: 1432517 - DNA, 15 bp, Homo sapiens
tgttgggaatctaga

SEQ ID NO: 1432518 - DNA, 15 bp, Homo sapiens
ctgttgggaatctag

SEQ ID NO: 1432519 - DNA, 15 bp, Homo sapiens
actgttgggaatcta

SEQ ID NO: 1432520 - DNA, 15 bp, Homo sapiens
cactgttgggaatct

SEQ ID NO: 1432521 - DNA, 15 bp, Homo sapiens
acactgttgggaatc

SEQ ID NO: 1432522 - DNA, 15 bp, Homo sapiens
gacactgttgggaat

SEQ ID NO: 1432523 - DNA, 15 bp, Homo sapiens
agacactgttgggaa

SEQ ID NO: 1432524 - DNA, 15 bp, Homo sapiens
aagacactgttggga

SEQ ID NO: 1432525 - DNA, 15 bp, Homo sapiens
caagacactgttggg

SEQ ID NO: 1432526 - DNA, 15 bp, Homo sapiens
tcaagacactgttgg

SEQ ID NO: 1432527 - DNA, 15 bp, Homo sapiens
ttcaagacactgttg

SEQ ID NO: 1432528 - DNA, 15 bp, Homo sapiens
attcaagacactgtt

SEQ ID NO: 1432529 - DNA, 15 bp, Homo sapiens
gattcaagacactgt

SEQ ID NO: 1432530 - DNA, 15 bp, Homo sapiens
ggattcaagacactg

SEQ ID NO: 1432531 - DNA, 15 bp, Homo sapiens
gggattcaagacact

SEQ ID NO: 1432532 - DNA, 15 bp, Homo sapiens
tgggattcaagacac

SEQ ID NO: 1432533 - DNA, 15 bp, Homo sapiens
ctgggattcaagaca

SEQ ID NO: 1432534 - DNA, 15 bp, Homo sapiens
gctgggattcaagac

SEQ ID NO: 1432535 - DNA, 15 bp, Homo sapiens
ggctgggattcaaga

SEQ ID NO: 1432536 - DNA, 15 bp, Homo sapiens
cggctgggattcaag

SEQ ID NO: 1432537 - DNA, 15 bp, Homo sapiens
gcggctgggattcaa

SEQ ID NO: 1432538 - DNA, 15 bp, Homo sapiens
ggcggctgggattca

SEQ ID NO: 1432539 - DNA, 15 bp, Homo sapiens
aggcggctgggattc

SEQ ID NO: 1432540 - DNA, 15 bp, Homo sapiens
gaggcggctgggatt

SEQ ID NO: 1432541 - DNA, 15 bp, Homo sapiens
ggaggcggctgggat

SEQ ID NO: 1432542 - DNA, 15 bp, Homo sapiens
tggaggcggctggga

SEQ ID NO: 1432543 - DNA, 15 bp, Homo sapiens
ctggaggcggctggg

SEQ ID NO: 1432544 - DNA, 15 bp, Homo sapiens
cctggaggcggctgg

SEQ ID NO: 1432545 - DNA, 15 bp, Homo sapiens
gcctggaggcggctg

SEQ ID NO: 1432546 - DNA, 15 bp, Homo sapiens
agcctggaggcggct

SEQ ID NO: 1432547 - DNA, 15 bp, Homo sapiens
aagcctggaggcggc

SEQ ID NO: 1432548 - DNA, 15 bp, Homo sapiens
aaagcctggaggcgg

SEQ ID NO: 1432549 - DNA, 15 bp, Homo sapiens
aaaagcctggaggcg

SEQ ID NO: 1432550 - DNA, 15 bp, Homo sapiens
gaaaagcctggaggc

SEQ ID NO: 1432551 - DNA, 15 bp, Homo sapiens
agaaaagcctggagg

SEQ ID NO: 1432552 - DNA, 15 bp, Homo sapiens
aagaaaagcctggag

SEQ ID NO: 1432553 - DNA, 15 bp, Homo sapiens
gaagaaaagcctgga

SEQ ID NO: 1432554 - DNA, 15 bp, Homo sapiens
tgaagaaaagcctgg

SEQ ID NO: 1432555 - DNA, 15 bp, Homo sapiens
atgaagaaaagcctg

SEQ ID NO: 1432556 - DNA, 15 bp, Homo sapiens
catgaagaaaagcct

SEQ ID NO: 1432557 - DNA, 15 bp, Homo sapiens
tcatgaagaaaagcc

SEQ ID NO: 1432558 - DNA, 15 bp, Homo sapiens
gtcatgaagaaaagc

SEQ ID NO: 1432559 - DNA, 15 bp, Homo sapiens
ggtcatgaagaaaag

SEQ ID NO: 1432560 - DNA, 15 bp, Homo sapiens
gggtcatgaagaaaa

SEQ ID NO: 1432561 - DNA, 15 bp, Homo sapiens
tgggtcatgaagaaa

SEQ ID NO: 1432562 - DNA, 15 bp, Homo sapiens
gtgggtcatgaagaa

SEQ ID NO: 1432563 - DNA, 15 bp, Homo sapiens
ggtgggtcatgaaga

SEQ ID NO: 1432564 - DNA, 15 bp, Homo sapiens
tggtgggtcatgaag

SEQ ID NO: 1432565 - DNA, 15 bp, Homo sapiens
ttggtgggtcatgaa

SEQ ID NO: 1432566 - DNA, 15 bp, Homo sapiens
gttggtgggtcatga

SEQ ID NO: 1432567 - DNA, 15 bp, Homo sapiens
tgttggtgggtcatg

SEQ ID NO: 1432568 - DNA, 15 bp, Homo sapiens
gtgttggtgggtcat

SEQ ID NO: 1432569 - DNA, 15 bp, Homo sapiens
tgtgttggtgggtca

SEQ ID NO: 1432570 - DNA, 15 bp, Homo sapiens
ttgtgttggtgggtc

SEQ ID NO: 1432571 - DNA, 15 bp, Homo sapiens
cttgtgttggtgggt

SEQ ID NO: 1432572 - DNA, 15 bp, Homo sapiens
tcttgtgttggtggg

SEQ ID NO: 1432573 - DNA, 15 bp, Homo sapiens
ttcttgtgttggtgg

SEQ ID NO: 1432574 - DNA, 15 bp, Homo sapiens
tttcttgtgttggtg

SEQ ID NO: 1432575 - DNA, 15 bp, Homo sapiens
gtttcttgtgttggt

SEQ ID NO: 1432576 - DNA, 15 bp, Homo sapiens
ggtttcttgtgttgg

SEQ ID NO: 1432577 - DNA, 15 bp, Homo sapiens
tggtttcttgtgttg

SEQ ID NO: 1432578 - DNA, 15 bp, Homo sapiens
gtggtttcttgtgtt

SEQ ID NO: 1432579 - DNA, 15 bp, Homo sapiens
agtggtttcttgtgt

SEQ ID NO: 1432580 - DNA, 15 bp, Homo sapiens
aagtggtttcttgtg

SEQ ID NO: 1432581 - DNA, 15 bp, Homo sapiens
taagtggtttcttgt

SEQ ID NO: 1432582 - DNA, 15 bp, Homo sapiens
ctaagtggtttcttg

SEQ ID NO: 1432583 - DNA, 15 bp, Homo sapiens
cctaagtggtttctt

SEQ ID NO: 1432584 - DNA, 15 bp, Homo sapiens
tcctaagtggtttct

SEQ ID NO: 1432585 - DNA, 15 bp, Homo sapiens
ttcctaagtggtttc

SEQ ID NO: 1432586 - DNA, 15 bp, Homo sapiens
tttcctaagtggttt

SEQ ID NO: 1432587 - DNA, 15 bp, Homo sapiens
atttcctaagtggtt

SEQ ID NO: 1432588 - DNA, 15 bp, Homo sapiens
gatttcctaagtggt

SEQ ID NO: 1432589 - DNA, 15 bp, Homo sapiens
tgatttcctaagtgg

SEQ ID NO: 1432590 - DNA, 15 bp, Homo sapiens
gtgatttcctaagtg

SEQ ID NO: 1432591 - DNA, 15 bp, Homo sapiens
agtgatttcctaagt

SEQ ID NO: 1432592 - DNA, 15 bp, Homo sapiens
aagtgatttcctaag

SEQ ID NO: 1432593 - DNA, 15 bp, Homo sapiens
gaagtgatttcctaa

SEQ ID NO: 1432594 - DNA, 15 bp, Homo sapiens
agaagtgatttccta

SEQ ID NO: 1432595 - DNA, 15 bp, Homo sapiens
aagaagtgatttcct

SEQ ID NO: 1432596 - DNA, 15 bp, Homo sapiens
taagaagtgatttcc

SEQ ID NO: 1432597 - DNA, 15 bp, Homo sapiens
ctaagaagtgatttc

SEQ ID NO: 1432598 - DNA, 15 bp, Homo sapiens
tctaagaagtgattt

SEQ ID NO: 1432599 - DNA, 15 bp, Homo sapiens
ttctaagaagtgatt

SEQ ID NO: 1432600 - DNA, 15 bp, Homo sapiens
tttctaagaagtgat

SEQ ID NO: 1432601 - DNA, 15 bp, Homo sapiens
ttttctaagaagtga

SEQ ID NO: 1432602 - DNA, 15 bp, Homo sapiens
tttttctaagaagtg

SEQ ID NO: 1432603 - DNA, 15 bp, Homo sapiens
ttttttctaagaagt

SEQ ID NO: 1432604 - DNA, 15 bp, Homo sapiens
attttttctaagaag

SEQ ID NO: 1432605 - DNA, 15 bp, Homo sapiens
tattttttctaagaa

SEQ ID NO: 1432606 - DNA, 15 bp, Homo sapiens
ctattttttctaaga

SEQ ID NO: 1432607 - DNA, 15 bp, Homo sapiens
tctattttttctaag

SEQ ID NO: 1432608 - DNA, 15 bp, Homo sapiens
ttctattttttctaa

SEQ ID NO: 1432609 - DNA, 15 bp, Homo sapiens
attctattttttcta

SEQ ID NO: 1432610 - DNA, 15 bp, Homo sapiens
tattctattttttct

SEQ ID NO: 1432611 - DNA, 15 bp, Homo sapiens
ttattctattttttc

SEQ ID NO: 1432612 - DNA, 15 bp, Homo sapiens
cttattctatttttt

SEQ ID NO: 1432613 - DNA, 15 bp, Homo sapiens
ccttattctattttt

SEQ ID NO: 1432614 - DNA, 15 bp, Homo sapiens
tccttattctatttt

SEQ ID NO: 1432615 - DNA, 15 bp, Homo sapiens
ctccttattctattt

SEQ ID NO: 1432616 - DNA, 15 bp, Homo sapiens
actccttattctatt

SEQ ID NO: 1432617 - DNA, 15 bp, Homo sapiens
aactccttattctat

SEQ ID NO: 1432618 - DNA, 15 bp, Homo sapiens
aaactccttattcta

SEQ ID NO: 1432619 - DNA, 15 bp, Homo sapiens
aaaactccttattct

SEQ ID NO: 1432620 - DNA, 15 bp, Homo sapiens
aaaaactccttattc

SEQ ID NO: 1432621 - DNA, 15 bp, Homo sapiens
aaaaaactccttatt

SEQ ID NO: 1432622 - DNA, 15 bp, Homo sapiens
gaaaaaactccttat

SEQ ID NO: 1432623 - DNA, 15 bp, Homo sapiens
ggaaaaaactcctta

SEQ ID NO: 1432624 - DNA, 15 bp, Homo sapiens
aggaaaaaactcctt

SEQ ID NO: 1432625 - DNA, 15 bp, Homo sapiens
gaggaaaaaactcct

SEQ ID NO: 1432626 - DNA, 15 bp, Homo sapiens
agaggaaaaaactcc

SEQ ID NO: 1432627 - DNA, 15 bp, Homo sapiens
gagaggaaaaaactc

SEQ ID NO: 1432628 - DNA, 15 bp, Homo sapiens
ggagaggaaaaaact

SEQ ID NO: 1432629 - DNA, 15 bp, Homo sapiens
gggagaggaaaaaac

SEQ ID NO: 1432630 - DNA, 15 bp, Homo sapiens
agggagaggaaaaaa

SEQ ID NO: 1432631 - DNA, 15 bp, Homo sapiens
aagggagaggaaaaa

SEQ ID NO: 1432632 - DNA, 15 bp, Homo sapiens
caagggagaggaaaa

SEQ ID NO: 1432633 - DNA, 15 bp, Homo sapiens
tcaagggagaggaaa

SEQ ID NO: 1432634 - DNA, 15 bp, Homo sapiens
ctcaagggagaggaa

SEQ ID NO: 1432635 - DNA, 15 bp, Homo sapiens
actcaagggagagga

SEQ ID NO: 1432636 - DNA, 15 bp, Homo sapiens
aactcaagggagagg

SEQ ID NO: 1432637 - DNA, 15 bp, Homo sapiens
aaactcaagggagag

SEQ ID NO: 1432638 - DNA, 15 bp, Homo sapiens
gaaactcaagggaga

SEQ ID NO: 1432639 - DNA, 15 bp, Homo sapiens
ggaaactcaagggag

SEQ ID NO: 1432640 - DNA, 15 bp, Homo sapiens
aggaaactcaaggga

SEQ ID NO: 1432641 - DNA, 15 bp, Homo sapiens
caggaaactcaaggg

SEQ ID NO: 1432642 - DNA, 15 bp, Homo sapiens
gcaggaaactcaagg

SEQ ID NO: 1432643 - DNA, 15 bp, Homo sapiens
tgcaggaaactcaag

SEQ ID NO: 1432644 - DNA, 15 bp, Homo sapiens
atgcaggaaactcaa

SEQ ID NO: 1432645 - DNA, 15 bp, Homo sapiens
aatgcaggaaactca

SEQ ID NO: 1432646 - DNA, 15 bp, Homo sapiens
taatgcaggaaactc

SEQ ID NO: 1432647 - DNA, 15 bp, Homo sapiens
ttaatgcaggaaact

SEQ ID NO: 1432648 - DNA, 15 bp, Homo sapiens
attaatgcaggaaac

SEQ ID NO: 1432649 - DNA, 15 bp, Homo sapiens
aattaatgcaggaaa

SEQ ID NO: 1432650 - DNA, 15 bp, Homo sapiens
taattaatgcaggaa

SEQ ID NO: 1432651 - DNA, 15 bp, Homo sapiens
gtaattaatgcagga

SEQ ID NO: 1432652 - DNA, 15 bp, Homo sapiens
tgtaattaatgcagg

SEQ ID NO: 1432653 - DNA, 15 bp, Homo sapiens
ctgtaattaatgcag

SEQ ID NO: 1432654 - DNA, 15 bp, Homo sapiens
actgtaattaatgca

SEQ ID NO: 1432655 - DNA, 15 bp, Homo sapiens
tactgtaattaatgc

SEQ ID NO: 1432656 - DNA, 15 bp, Homo sapiens
ttactgtaattaatg

SEQ ID NO: 1432657 - DNA, 15 bp, Homo sapiens
cttactgtaattaat

SEQ ID NO: 1432658 - DNA, 15 bp, Homo sapiens
tcttactgtaattaa

SEQ ID NO: 1432659 - DNA, 15 bp, Homo sapiens
ctcttactgtaatta

SEQ ID NO: 1432660 - DNA, 15 bp, Homo sapiens
cctcttactgtaatt

SEQ ID NO: 1432661 - DNA, 15 bp, Homo sapiens
gcctcttactgtaat

SEQ ID NO: 1432662 - DNA, 15 bp, Homo sapiens
tgcctcttactgtaa

SEQ ID NO: 1432663 - DNA, 15 bp, Homo sapiens
ctgcctcttactgta

SEQ ID NO: 1432664 - DNA, 15 bp, Homo sapiens
cctgcctcttactgt

SEQ ID NO: 1432665 - DNA, 15 bp, Homo sapiens
tcctgcctcttactg

SEQ ID NO: 1432666 - DNA, 15 bp, Homo sapiens
ctcctgcctcttact

SEQ ID NO: 1432667 - DNA, 15 bp, Homo sapiens
tctcctgcctcttac

SEQ ID NO: 1432668 - DNA, 15 bp, Homo sapiens
ctctcctgcctctta

SEQ ID NO: 1432669 - DNA, 15 bp, Homo sapiens
cctctcctgcctctt

SEQ ID NO: 1432670 - DNA, 15 bp, Homo sapiens
ccctctcctgcctct

SEQ ID NO: 1432671 - DNA, 15 bp, Homo sapiens
tccctctcctgcctc

SEQ ID NO: 1432672 - DNA, 15 bp, Homo sapiens
ttccctctcctgcct

SEQ ID NO: 1432673 - DNA, 15 bp, Homo sapiens
tttccctctcctgcc

SEQ ID NO: 1432674 - DNA, 15 bp, Homo sapiens
ctttccctctcctgc

SEQ ID NO: 1432675 - DNA, 15 bp, Homo sapiens
tctttccctctcctg

SEQ ID NO: 1432676 - DNA, 15 bp, Homo sapiens
ttctttccctctcct

SEQ ID NO: 1432677 - DNA, 15 bp, Homo sapiens
attctttccctctcc

SEQ ID NO: 1432678 - DNA, 15 bp, Homo sapiens
tattctttccctctc

SEQ ID NO: 1432679 - DNA, 15 bp, Homo sapiens
gtattctttccctct

SEQ ID NO: 1432680 - DNA, 15 bp, Homo sapiens
tgtattctttccctc

SEQ ID NO: 1432681 - DNA, 15 bp, Homo sapiens
atgtattctttccct

SEQ ID NO: 1432682 - DNA, 15 bp, Homo sapiens
aatgtattctttccc

SEQ ID NO: 1432683 - DNA, 15 bp, Homo sapiens
caatgtattctttcc

SEQ ID NO: 1432684 - DNA, 15 bp, Homo sapiens
gcaatgtattctttc

SEQ ID NO: 1432685 - DNA, 15 bp, Homo sapiens
tgcaatgtattcttt

SEQ ID NO: 1432686 - DNA, 15 bp, Homo sapiens
ttgcaatgtattctt

SEQ ID NO: 1432687 - DNA, 15 bp, Homo sapiens
tttgcaatgtattct

SEQ ID NO: 1432688 - DNA, 15 bp, Homo sapiens
atttgcaatgtattc

SEQ ID NO: 1432689 - DNA, 15 bp, Homo sapiens
tatttgcaatgtatt

SEQ ID NO: 1432690 - DNA, 15 bp, Homo sapiens
gtatttgcaatgtat

SEQ ID NO: 1432691 - DNA, 15 bp, Homo sapiens
tgtatttgcaatgta

SEQ ID NO: 1432692 - DNA, 15 bp, Homo sapiens
ctgtatttgcaatgt

SEQ ID NO: 1432693 - DNA, 15 bp, Homo sapiens
tctgtatttgcaatg

SEQ ID NO: 1432694 - DNA, 15 bp, Homo sapiens
ttctgtatttgcaat

SEQ ID NO: 1432695 - DNA, 15 bp, Homo sapiens
attctgtatttgcaa

SEQ ID NO: 1432696 - DNA, 15 bp, Homo sapiens
aattctgtatttgca

SEQ ID NO: 1432697 - DNA, 15 bp, Homo sapiens
aaattctgtatttgc

SEQ ID NO: 1432698 - DNA, 15 bp, Homo sapiens
gaaattctgtatttg

SEQ ID NO: 1432699 - DNA, 15 bp, Homo sapiens
agaaattctgtattt

SEQ ID NO: 1432700 - DNA, 15 bp, Homo sapiens
aagaaattctgtatt

SEQ ID NO: 1432701 - DNA, 15 bp, Homo sapiens
taagaaattctgtat

SEQ ID NO: 1432702 - DNA, 15 bp, Homo sapiens
ttaagaaattctgta

SEQ ID NO: 1432703 - DNA, 15 bp, Homo sapiens
cttaagaaattctgt

SEQ ID NO: 1432704 - DNA, 15 bp, Homo sapiens
gcttaagaaattctg

SEQ ID NO: 1432705 - DNA, 15 bp, Homo sapiens
ggcttaagaaattct

SEQ ID NO: 1432706 - DNA, 15 bp, Homo sapiens
tggcttaagaaattc

SEQ ID NO: 1432707 - DNA, 15 bp, Homo sapiens
atggcttaagaaatt

SEQ ID NO: 1432708 - DNA, 15 bp, Homo sapiens
tatggcttaagaaat

SEQ ID NO: 1432709 - DNA, 15 bp, Homo sapiens
ttatggcttaagaaa

SEQ ID NO: 1432710 - DNA, 15 bp, Homo sapiens
cttatggcttaagaa

SEQ ID NO: 1432711 - DNA, 15 bp, Homo sapiens
gcttatggcttaaga

SEQ ID NO: 1432712 - DNA, 15 bp, Homo sapiens
agcttatggcttaag

SEQ ID NO: 1432713 - DNA, 15 bp, Homo sapiens
cagcttatggcttaa

SEQ ID NO: 1432714 - DNA, 15 bp, Homo sapiens
gcagcttatggctta

SEQ ID NO: 1432715 - DNA, 15 bp, Homo sapiens
agcagcttatggctt

SEQ ID NO: 1432716 - DNA, 15 bp, Homo sapiens
cagcagcttatggct

SEQ ID NO: 1432717 - DNA, 15 bp, Homo sapiens
tcagcagcttatggc

SEQ ID NO: 1432718 - DNA, 15 bp, Homo sapiens
ttcagcagcttatgg

SEQ ID NO: 1432719 - DNA, 15 bp, Homo sapiens
cttcagcagcttatg

SEQ ID NO: 1432720 - DNA, 15 bp, Homo sapiens
tcttcagcagcttat

SEQ ID NO: 1432721 - DNA, 15 bp, Homo sapiens
ttcttcagcagctta

SEQ ID NO: 1432722 - DNA, 15 bp, Homo sapiens
cttcttcagcagctt

SEQ ID NO: 1432723 - DNA, 15 bp, Homo sapiens
tcttcttcagcagct

SEQ ID NO: 1432724 - DNA, 15 bp, Homo sapiens
atcttcttcagcagc

SEQ ID NO: 1432725 - DNA, 15 bp, Homo sapiens
tatcttcttcagcag

SEQ ID NO: 1432726 - DNA, 15 bp, Homo sapiens
gtatcttcttcagca

SEQ ID NO: 1432727 - DNA, 15 bp, Homo sapiens
agtatcttcttcagc

SEQ ID NO: 1432728 - DNA, 15 bp, Homo sapiens
cagtatcttcttcag

SEQ ID NO: 1432729 - DNA, 15 bp, Homo sapiens
acagtatcttcttca

SEQ ID NO: 1432730 - DNA, 15 bp, Homo sapiens
cacagtatcttcttc

SEQ ID NO: 1432731 - DNA, 15 bp, Homo sapiens
tcacagtatcttctt

SEQ ID NO: 1432732 - DNA, 15 bp, Homo sapiens
ctcacagtatcttct

SEQ ID NO: 1432733 - DNA, 15 bp, Homo sapiens
actcacagtatcttc

SEQ ID NO: 1432734 - DNA, 15 bp, Homo sapiens
tactcacagtatctt

SEQ ID NO: 1432735 - DNA, 15 bp, Homo sapiens
ttactcacagtatct

SEQ ID NO: 1432736 - DNA, 15 bp, Homo sapiens
tttactcacagtatc

SEQ ID NO: 1432737 - DNA, 15 bp, Homo sapiens
atttactcacagtat

SEQ ID NO: 1432738 - DNA, 15 bp, Homo sapiens
aatttactcacagta

SEQ ID NO: 1432739 - DNA, 15 bp, Homo sapiens
aaatttactcacagt

SEQ ID NO: 1432740 - DNA, 15 bp, Homo sapiens
caaatttactcacag

SEQ ID NO: 1432741 - DNA, 15 bp, Homo sapiens
tcaaatttactcaca

SEQ ID NO: 1432742 - DNA, 15 bp, Homo sapiens
atcaaatttactcac

SEQ ID NO: 1432743 - DNA, 15 bp, Homo sapiens
gatcaaatttactca

SEQ ID NO: 1432744 - DNA, 15 bp, Homo sapiens
agatcaaatttactc

SEQ ID NO: 1432745 - DNA, 15 bp, Homo sapiens
aagatcaaatttact

SEQ ID NO: 1432746 - DNA, 15 bp, Homo sapiens
aaagatcaaatttac

SEQ ID NO: 1432747 - DNA, 15 bp, Homo sapiens
caaagatcaaattta

SEQ ID NO: 1432748 - DNA, 15 bp, Homo sapiens
tcaaagatcaaattt

SEQ ID NO: 1432749 - DNA, 15 bp, Homo sapiens
gtcaaagatcaaatt

SEQ ID NO: 1432750 - DNA, 15 bp, Homo sapiens
agtcaaagatcaaat

SEQ ID NO: 1432751 - DNA, 15 bp, Homo sapiens
tagtcaaagatcaaa

SEQ ID NO: 1432752 - DNA, 15 bp, Homo sapiens
ttagtcaaagatcaa

SEQ ID NO: 1432753 - DNA, 15 bp, Homo sapiens
attagtcaaagatca

SEQ ID NO: 1432754 - DNA, 15 bp, Homo sapiens
tattagtcaaagatc

SEQ ID NO: 1432755 - DNA, 15 bp, Homo sapiens
ttattagtcaaagat

SEQ ID NO: 1432756 - DNA, 15 bp, Homo sapiens
attattagtcaaaga

SEQ ID NO: 1432757 - DNA, 15 bp, Homo sapiens
aattattagtcaaag

SEQ ID NO: 1432758 - DNA, 15 bp, Homo sapiens
aaattattagtcaaa

SEQ ID NO: 1432759 - DNA, 15 bp, Homo sapiens
gaaattattagtcaa

SEQ ID NO: 1432760 - DNA, 15 bp, Homo sapiens
agaaattattagtca

SEQ ID NO: 1432761 - DNA, 15 bp, Homo sapiens
aagaaattattagtc

SEQ ID NO: 1432762 - DNA, 15 bp, Homo sapiens
aaagaaattattagt

SEQ ID NO: 1432763 - DNA, 15 bp, Homo sapiens
taaagaaattattag

SEQ ID NO: 1432764 - DNA, 15 bp, Homo sapiens
ttaaagaaattatta

SEQ ID NO: 1432765 - DNA, 15 bp, Homo sapiens
tttaaagaaattatt

SEQ ID NO: 1432766 - DNA, 15 bp, Homo sapiens
ttttaaagaaattat

SEQ ID NO: 1432767 - DNA, 15 bp, Homo sapiens
attttaaagaaatta

SEQ ID NO: 1432768 - DNA, 15 bp, Homo sapiens
tattttaaagaaatt

SEQ ID NO: 1432769 - DNA, 15 bp, Homo sapiens
gtattttaaagaaat

SEQ ID NO: 1432770 - DNA, 15 bp, Homo sapiens
ggtattttaaagaaa

SEQ ID NO: 1432771 - DNA, 15 bp, Homo sapiens
aggtattttaaagaa

SEQ ID NO: 1432772 - DNA, 15 bp, Homo sapiens
aaggtattttaaaga

SEQ ID NO: 1432773 - DNA, 15 bp, Homo sapiens
caaggtattttaaag

SEQ ID NO: 1432774 - DNA, 15 bp, Homo sapiens
tcaaggtattttaaa

SEQ ID NO: 1432775 - DNA, 15 bp, Homo sapiens
ctcaaggtattttaa

SEQ ID NO: 1432776 - DNA, 15 bp, Homo sapiens
actcaaggtatttta

SEQ ID NO: 1432777 - DNA, 15 bp, Homo sapiens
aactcaaggtatttt

SEQ ID NO: 1432778 - DNA, 15 bp, Homo sapiens
gaactcaaggtattt

SEQ ID NO: 1432779 - DNA, 15 bp, Homo sapiens
ggaactcaaggtatt

SEQ ID NO: 1432780 - DNA, 15 bp, Homo sapiens
aggaactcaaggtat

SEQ ID NO: 1432781 - DNA, 15 bp, Homo sapiens
taggaactcaaggta

SEQ ID NO: 1432782 - DNA, 15 bp, Homo sapiens
gtaggaactcaaggt

SEQ ID NO: 1432783 - DNA, 15 bp, Homo sapiens
agtaggaactcaagg

SEQ ID NO: 1432784 - DNA, 15 bp, Homo sapiens
cagtaggaactcaag

SEQ ID NO: 1432785 - DNA, 15 bp, Homo sapiens
tcagtaggaactcaa

SEQ ID NO: 1432786 - DNA, 15 bp, Homo sapiens
ttcagtaggaactca

SEQ ID NO: 1432787 - DNA, 15 bp, Homo sapiens
attcagtaggaactc

SEQ ID NO: 1432788 - DNA, 15 bp, Homo sapiens
aattcagtaggaact

SEQ ID NO: 1432789 - DNA, 15 bp, Homo sapiens
aaattcagtaggaac

SEQ ID NO: 1432790 - DNA, 15 bp, Homo sapiens
taaattcagtaggaa

SEQ ID NO: 1432791 - DNA, 15 bp, Homo sapiens
ataaattcagtagga

SEQ ID NO: 1432792 - DNA, 15 bp, Homo sapiens
aataaattcagtagg

SEQ ID NO: 1432793 - DNA, 15 bp, Homo sapiens
aaataaattcagtag

SEQ ID NO: 1432794 - DNA, 15 bp, Homo sapiens
caaataaattcagta

SEQ ID NO: 1432795 - DNA, 15 bp, Homo sapiens
acaaataaattcagt

SEQ ID NO: 1432796 - DNA, 15 bp, Homo sapiens
tacaaataaattcag

SEQ ID NO: 1432797 - DNA, 15 bp, Homo sapiens
atacaaataaattca

SEQ ID NO: 1432798 - DNA, 15 bp, Homo sapiens
aatacaaataaattc

SEQ ID NO: 1432799 - DNA, 15 bp, Homo sapiens
aaatacaaataaatt

SEQ ID NO: 1432800 - DNA, 15 bp, Homo sapiens
aaaatacaaataaat

SEQ ID NO: 1432801 - DNA, 15 bp, Homo sapiens
caaaatacaaataaa

SEQ ID NO: 1432802 - DNA, 15 bp, Homo sapiens
tcaaaatacaaataa

SEQ ID NO: 1432803 - DNA, 15 bp, Homo sapiens
ttcaaaatacaaata

SEQ ID NO: 1432804 - DNA, 15 bp, Homo sapiens
attcaaaatacaaat

SEQ ID NO: 1432805 - DNA, 15 bp, Homo sapiens
gattcaaaatacaaa

SEQ ID NO: 1432806 - DNA, 15 bp, Homo sapiens
tgattcaaaatacaa

SEQ ID NO: 1432807 - DNA, 15 bp, Homo sapiens
atgattcaaaataca

SEQ ID NO: 1432808 - DNA, 15 bp, Homo sapiens
tatgattcaaaatac

SEQ ID NO: 1432809 - DNA, 15 bp, Homo sapiens
atatgattcaaaata

SEQ ID NO: 1432810 - DNA, 15 bp, Homo sapiens
gatatgattcaaaat

SEQ ID NO: 1432811 - DNA, 15 bp, Homo sapiens
ggatatgattcaaaa

SEQ ID NO: 1432812 - DNA, 15 bp, Homo sapiens
aggatatgattcaaa

SEQ ID NO: 1432813 - DNA, 15 bp, Homo sapiens
aaggatatgattcaa

SEQ ID NO: 1432814 - DNA, 15 bp, Homo sapiens
taaggatatgattca

SEQ ID NO: 1432815 - DNA, 15 bp, Homo sapiens
ataaggatatgattc

SEQ ID NO: 1432816 - DNA, 15 bp, Homo sapiens
aataaggatatgatt

SEQ ID NO: 1432817 - DNA, 15 bp, Homo sapiens
caataaggatatgat

SEQ ID NO: 1432818 - DNA, 15 bp, Homo sapiens
acaataaggatatga

SEQ ID NO: 1432819 - DNA, 15 bp, Homo sapiens
gacaataaggatatg

SEQ ID NO: 1432820 - DNA, 15 bp, Homo sapiens
agacaataaggatat

SEQ ID NO: 1432821 - DNA, 15 bp, Homo sapiens
tagacaataaggata

SEQ ID NO: 1432822 - DNA, 15 bp, Homo sapiens
ttagacaataaggat

SEQ ID NO: 1432823 - DNA, 15 bp, Homo sapiens
tttagacaataagga

SEQ ID NO: 1432824 - DNA, 15 bp, Homo sapiens
ctttagacaataagg

SEQ ID NO: 1432825 - DNA, 15 bp, Homo sapiens
gctttagacaataag

SEQ ID NO: 1432826 - DNA, 15 bp, Homo sapiens
tgctttagacaataa

SEQ ID NO: 1432827 - DNA, 15 bp, Homo sapiens
ttgctttagacaata

SEQ ID NO: 1432828 - DNA, 15 bp, Homo sapiens
attgctttagacaat

SEQ ID NO: 1432829 - DNA, 15 bp, Homo sapiens
gattgctttagacaa

SEQ ID NO: 1432830 - DNA, 15 bp, Homo sapiens
tgattgctttagaca

SEQ ID NO: 1432831 - DNA, 15 bp, Homo sapiens
gtgattgctttagac

SEQ ID NO: 1432832 - DNA, 15 bp, Homo sapiens
agtgattgctttaga

SEQ ID NO: 1432833 - DNA, 15 bp, Homo sapiens
tagtgattgctttag

SEQ ID NO: 1432834 - DNA, 15 bp, Homo sapiens
atagtgattgcttta

SEQ ID NO: 1432835 - DNA, 15 bp, Homo sapiens
tatagtgattgcttt

SEQ ID NO: 1432836 - DNA, 15 bp, Homo sapiens
atatagtgattgctt

SEQ ID NO: 1432837 - DNA, 15 bp, Homo sapiens
gatatagtgattgct

SEQ ID NO: 1432838 - DNA, 15 bp, Homo sapiens
ggatatagtgattgc

SEQ ID NO: 1432839 - DNA, 15 bp, Homo sapiens
tggatatagtgattg

SEQ ID NO: 1432840 - DNA, 15 bp, Homo sapiens
ctggatatagtgatt

SEQ ID NO: 1432841 - DNA, 15 bp, Homo sapiens
actggatatagtgat

SEQ ID NO: 1432842 - DNA, 15 bp, Homo sapiens
gactggatatagtga

SEQ ID NO: 1432843 - DNA, 15 bp, Homo sapiens
agactggatatagtg

SEQ ID NO: 1432844 - DNA, 15 bp, Homo sapiens
aagactggatatagt

SEQ ID NO: 1432845 - DNA, 15 bp, Homo sapiens
caagactggatatag

SEQ ID NO: 1432846 - DNA, 15 bp, Homo sapiens
acaagactggatata

SEQ ID NO: 1432847 - DNA, 15 bp, Homo sapiens
tacaagactggatat

SEQ ID NO: 1432848 - DNA, 15 bp, Homo sapiens
ttacaagactggata

SEQ ID NO: 1432849 - DNA, 15 bp, Homo sapiens
attacaagactggat

SEQ ID NO: 1432850 - DNA, 15 bp, Homo sapiens
tattacaagactgga

SEQ ID NO: 1432851 - DNA, 15 bp, Homo sapiens
ctattacaagactgg

SEQ ID NO: 1432852 - DNA, 15 bp, Homo sapiens
tctattacaagactg

SEQ ID NO: 1432853 - DNA, 15 bp, Homo sapiens
ctctattacaagact

SEQ ID NO: 1432854 - DNA, 15 bp, Homo sapiens
actctattacaagac

SEQ ID NO: 1432855 - DNA, 15 bp, Homo sapiens
tactctattacaaga

SEQ ID NO: 1432856 - DNA, 15 bp, Homo sapiens
atactctattacaag

SEQ ID NO: 1432857 - DNA, 15 bp, Homo sapiens
aatactctattacaa

SEQ ID NO: 1432858 - DNA, 15 bp, Homo sapiens
gaatactctattaca

SEQ ID NO: 1432859 - DNA, 15 bp, Homo sapiens
tgaatactctattac

SEQ ID NO: 1432860 - DNA, 15 bp, Homo sapiens
ttgaatactctatta

SEQ ID NO: 1432861 - DNA, 15 bp, Homo sapiens
cttgaatactctatt

SEQ ID NO: 1432862 - DNA, 15 bp, Homo sapiens
ccttgaatactctat

SEQ ID NO: 1432863 - DNA, 15 bp, Homo sapiens
gccttgaatactcta

SEQ ID NO: 1432864 - DNA, 15 bp, Homo sapiens
tgccttgaatactct

SEQ ID NO: 1432865 - DNA, 15 bp, Homo sapiens
ttgccttgaatactc

SEQ ID NO: 1432866 - DNA, 15 bp, Homo sapiens
gttgccttgaatact

SEQ ID NO: 1432867 - DNA, 15 bp, Homo sapiens
tgttgccttgaatac

SEQ ID NO: 1432868 - DNA, 15 bp, Homo sapiens
ttgttgccttgaata

SEQ ID NO: 1432869 - DNA, 15 bp, Homo sapiens
tttgttgccttgaat

SEQ ID NO: 1432870 - DNA, 15 bp, Homo sapiens
atttgttgccttgaa

SEQ ID NO: 1432871 - DNA, 15 bp, Homo sapiens
aatttgttgccttga

SEQ ID NO: 1432872 - DNA, 15 bp, Homo sapiens
caatttgttgccttg

SEQ ID NO: 1432873 - DNA, 15 bp, Homo sapiens
acaatttgttgcctt

SEQ ID NO: 1432874 - DNA, 15 bp, Homo sapiens
gacaatttgttgcct

SEQ ID NO: 1432875 - DNA, 15 bp, Homo sapiens
ggacaatttgttgcc

SEQ ID NO: 1432876 - DNA, 15 bp, Homo sapiens
tggacaatttgttgc

SEQ ID NO: 1432877 - DNA, 15 bp, Homo sapiens
gtggacaatttgttg

SEQ ID NO: 1432878 - DNA, 15 bp, Homo sapiens
tgtggacaatttgtt

SEQ ID NO: 1432879 - DNA, 15 bp, Homo sapiens
ctgtggacaatttgt

SEQ ID NO: 1432880 - DNA, 15 bp, Homo sapiens
cctgtggacaatttg

SEQ ID NO: 1432881 - DNA, 15 bp, Homo sapiens
ccctgtggacaattt

SEQ ID NO: 1432882 - DNA, 15 bp, Homo sapiens
tccctgtggacaatt

SEQ ID NO: 1432883 - DNA, 15 bp, Homo sapiens
ctccctgtggacaat

SEQ ID NO: 1432884 - DNA, 15 bp, Homo sapiens
tctccctgtggacaa

SEQ ID NO: 1432885 - DNA, 15 bp, Homo sapiens
atctccctgtggaca

SEQ ID NO: 1432886 - DNA, 15 bp, Homo sapiens
aatctccctgtggac

SEQ ID NO: 1432887 - DNA, 15 bp, Homo sapiens
taatctccctgtgga

SEQ ID NO: 1432888 - DNA, 15 bp, Homo sapiens
ataatctccctgtgg

SEQ ID NO: 1432889 - DNA, 15 bp, Homo sapiens
gataatctccctgtg

SEQ ID NO: 1432890 - DNA, 15 bp, Homo sapiens
agataatctccctgt

SEQ ID NO: 1432891 - DNA, 15 bp, Homo sapiens
gagataatctccctg

SEQ ID NO: 1432892 - DNA, 15 bp, Homo sapiens
agagataatctccct

SEQ ID NO: 1432893 - DNA, 15 bp, Homo sapiens
cagagataatctccc

SEQ ID NO: 1432894 - DNA, 15 bp, Homo sapiens
acagagataatctcc

SEQ ID NO: 1432895 - DNA, 15 bp, Homo sapiens
cacagagataatctc

SEQ ID NO: 1432896 - DNA, 15 bp, Homo sapiens
ccacagagataatct

SEQ ID NO: 1432897 - DNA, 15 bp, Homo sapiens
tccacagagataatc

SEQ ID NO: 1432898 - DNA, 15 bp, Homo sapiens
atccacagagataat

SEQ ID NO: 1432899 - DNA, 15 bp, Homo sapiens
aatccacagagataa

SEQ ID NO: 1432900 - DNA, 15 bp, Homo sapiens
taatccacagagata

SEQ ID NO: 1432901 - DNA, 15 bp, Homo sapiens
ttaatccacagagat

SEQ ID NO: 1432902 - DNA, 15 bp, Homo sapiens
gttaatccacagaga

SEQ ID NO: 1432903 - DNA, 15 bp, Homo sapiens
ggttaatccacagag

SEQ ID NO: 1432904 - DNA, 15 bp, Homo sapiens
tggttaatccacaga

SEQ ID NO: 1432905 - DNA, 15 bp, Homo sapiens
atggttaatccacag

SEQ ID NO: 1432906 - DNA, 15 bp, Homo sapiens
tatggttaatccaca

SEQ ID NO: 1432907 - DNA, 15 bp, Homo sapiens
ctatggttaatccac

SEQ ID NO: 1432908 - DNA, 15 bp, Homo sapiens
gctatggttaatcca

SEQ ID NO: 1432909 - DNA, 15 bp, Homo sapiens
tgctatggttaatcc

SEQ ID NO: 1432910 - DNA, 15 bp, Homo sapiens
ttgctatggttaatc

SEQ ID NO: 1432911 - DNA, 15 bp, Homo sapiens
tttgctatggttaat

SEQ ID NO: 1432912 - DNA, 15 bp, Homo sapiens
ttttgctatggttaa

SEQ ID NO: 1432913 - DNA, 15 bp, Homo sapiens
attttgctatggtta

SEQ ID NO: 1432914 - DNA, 15 bp, Homo sapiens
gattttgctatggtt

SEQ ID NO: 1432915 - DNA, 15 bp, Homo sapiens
agattttgctatggt

SEQ ID NO: 1432916 - DNA, 15 bp, Homo sapiens
tagattttgctatgg

SEQ ID NO: 1432917 - DNA, 15 bp, Homo sapiens
ttagattttgctatg

SEQ ID NO: 1432918 - DNA, 15 bp, Homo sapiens
tttagattttgctat

SEQ ID NO: 1432919 - DNA, 15 bp, Homo sapiens
atttagattttgcta

SEQ ID NO: 1432920 - DNA, 15 bp, Homo sapiens
aatttagattttgct

SEQ ID NO: 1432921 - DNA, 15 bp, Homo sapiens
gaatttagattttgc

SEQ ID NO: 1432922 - DNA, 15 bp, Homo sapiens
cgaatttagattttg

SEQ ID NO: 1432923 - DNA, 15 bp, Homo sapiens
ccgaatttagatttt

SEQ ID NO: 1432924 - DNA, 15 bp, Homo sapiens
cccgaatttagattt

SEQ ID NO: 1432925 - DNA, 15 bp, Homo sapiens
ccccgaatttagatt

SEQ ID NO: 1432926 - DNA, 15 bp, Homo sapiens
accccgaatttagat

SEQ ID NO: 1432927 - DNA, 15 bp, Homo sapiens
gaccccgaatttaga

SEQ ID NO: 1432928 - DNA, 15 bp, Homo sapiens
tgaccccgaatttag

SEQ ID NO: 1432929 - DNA, 15 bp, Homo sapiens
ttgaccccgaattta

SEQ ID NO: 1432930 - DNA, 15 bp, Homo sapiens
gttgaccccgaattt

SEQ ID NO: 1432931 - DNA, 15 bp, Homo sapiens
agttgaccccgaatt

SEQ ID NO: 1432932 - DNA, 15 bp, Homo sapiens
aagttgaccccgaat

SEQ ID NO: 1432933 - DNA, 15 bp, Homo sapiens
gaagttgaccccgaa

SEQ ID NO: 1432934 - DNA, 15 bp, Homo sapiens
ggaagttgaccccga

SEQ ID NO: 1432935 - DNA, 15 bp, Homo sapiens
aggaagttgaccccg

SEQ ID NO: 1432936 - DNA, 15 bp, Homo sapiens
gaggaagttgacccc

SEQ ID NO: 1432937 - DNA, 15 bp, Homo sapiens
agaggaagttgaccc

SEQ ID NO: 1432938 - DNA, 15 bp, Homo sapiens
aagaggaagttgacc

SEQ ID NO: 1432939 - DNA, 15 bp, Homo sapiens
caagaggaagttgac

SEQ ID NO: 1432940 - DNA, 15 bp, Homo sapiens
gcaagaggaagttga

SEQ ID NO: 1432941 - DNA, 15 bp, Homo sapiens
agcaagaggaagttg

SEQ ID NO: 1432942 - DNA, 15 bp, Homo sapiens
tagcaagaggaagtt

SEQ ID NO: 1432943 - DNA, 15 bp, Homo sapiens
gtagcaagaggaagt

SEQ ID NO: 1432944 - DNA, 15 bp, Homo sapiens
agtagcaagaggaag

SEQ ID NO: 1432945 - DNA, 15 bp, Homo sapiens
tagtagcaagaggaa

SEQ ID NO: 1432946 - DNA, 15 bp, Homo sapiens
atagtagcaagagga

SEQ ID NO: 1432947 - DNA, 15 bp, Homo sapiens
aatagtagcaagagg

SEQ ID NO: 1432948 - DNA, 15 bp, Homo sapiens
gaatagtagcaagag

SEQ ID NO: 1432949 - DNA, 15 bp, Homo sapiens
ggaatagtagcaaga

SEQ ID NO: 1432950 - DNA, 15 bp, Homo sapiens
tggaatagtagcaag

SEQ ID NO: 1432951 - DNA, 15 bp, Homo sapiens
ctggaatagtagcaa

SEQ ID NO: 1432952 - DNA, 15 bp, Homo sapiens
actggaatagtagca

SEQ ID NO: 1432953 - DNA, 15 bp, Homo sapiens
gactggaatagtagc

SEQ ID NO: 1432954 - DNA, 15 bp, Homo sapiens
tgactggaatagtag

SEQ ID NO: 1432955 - DNA, 15 bp, Homo sapiens
gtgactggaatagta

SEQ ID NO: 1432956 - DNA, 15 bp, Homo sapiens
agtgactggaatagt

SEQ ID NO: 1432957 - DNA, 15 bp, Homo sapiens
cagtgactggaatag

SEQ ID NO: 1432958 - DNA, 15 bp, Homo sapiens
gcagtgactggaata

SEQ ID NO: 1432959 - DNA, 15 bp, Homo sapiens
tgcagtgactggaat

SEQ ID NO: 1432960 - DNA, 15 bp, Homo sapiens
gtgcagtgactggaa

SEQ ID NO: 1432961 - DNA, 15 bp, Homo sapiens
agtgcagtgactgga

SEQ ID NO: 1432962 - DNA, 15 bp, Homo sapiens
tagtgcagtgactgg

SEQ ID NO: 1432963 - DNA, 15 bp, Homo sapiens
atagtgcagtgactg

SEQ ID NO: 1432964 - DNA, 15 bp, Homo sapiens
gatagtgcagtgact

SEQ ID NO: 1432965 - DNA, 15 bp, Homo sapiens
agatagtgcagtgac

SEQ ID NO: 1432966 - DNA, 15 bp, Homo sapiens
gagatagtgcagtga

SEQ ID NO: 1432967 - DNA, 15 bp, Homo sapiens
agagatagtgcagtg

SEQ ID NO: 1432968 - DNA, 15 bp, Homo sapiens
aagagatagtgcagt

SEQ ID NO: 1432969 - DNA, 15 bp, Homo sapiens
caagagatagtgcag

SEQ ID NO: 1432970 - DNA, 15 bp, Homo sapiens
ccaagagatagtgca

SEQ ID NO: 1432971 - DNA, 15 bp, Homo sapiens
accaagagatagtgc

SEQ ID NO: 1432972 - DNA, 15 bp, Homo sapiens
caccaagagatagtg

SEQ ID NO: 1432973 - DNA, 15 bp, Homo sapiens
tcaccaagagatagt

SEQ ID NO: 1432974 - DNA, 15 bp, Homo sapiens
gtcaccaagagatag

SEQ ID NO: 1432975 - DNA, 15 bp, Homo sapiens
agtcaccaagagata

SEQ ID NO: 1432976 - DNA, 15 bp, Homo sapiens
gagtcaccaagagat

SEQ ID NO: 1432977 - DNA, 15 bp, Homo sapiens
tgagtcaccaagaga

SEQ ID NO: 1432978 - DNA, 15 bp, Homo sapiens
gtgagtcaccaagag

SEQ ID NO: 1432979 - DNA, 15 bp, Homo sapiens
tgtgagtcaccaaga

SEQ ID NO: 1432980 - DNA, 15 bp, Homo sapiens
ctgtgagtcaccaag

SEQ ID NO: 1432981 - DNA, 15 bp, Homo sapiens
actgtgagtcaccaa

SEQ ID NO: 1432982 - DNA, 15 bp, Homo sapiens
aactgtgagtcacca

SEQ ID NO: 1432983 - DNA, 15 bp, Homo sapiens
caactgtgagtcacc

SEQ ID NO: 1432984 - DNA, 15 bp, Homo sapiens
acaactgtgagtcac

SEQ ID NO: 1432985 - DNA, 15 bp, Homo sapiens
tacaactgtgagtca

SEQ ID NO: 1432986 - DNA, 15 bp, Homo sapiens
atacaactgtgagtc

SEQ ID NO: 1432987 - DNA, 15 bp, Homo sapiens
tatacaactgtgagt

SEQ ID NO: 1432988 - DNA, 15 bp, Homo sapiens
atatacaactgtgag

SEQ ID NO: 1432989 - DNA, 15 bp, Homo sapiens
catatacaactgtga

SEQ ID NO: 1432990 - DNA, 15 bp, Homo sapiens
gcatatacaactgtg

SEQ ID NO: 1432991 - DNA, 15 bp, Homo sapiens
agcatatacaactgt

SEQ ID NO: 1432992 - DNA, 15 bp, Homo sapiens
tagcatatacaactg

SEQ ID NO: 1432993 - DNA, 15 bp, Homo sapiens
ctagcatatacaact

SEQ ID NO: 1432994 - DNA, 15 bp, Homo sapiens
cctagcatatacaac

SEQ ID NO: 1432995 - DNA, 15 bp, Homo sapiens
tcctagcatatacaa

SEQ ID NO: 1432996 - DNA, 15 bp, Homo sapiens
ctcctagcatataca

SEQ ID NO: 1432997 - DNA, 15 bp, Homo sapiens
gctcctagcatatac

SEQ ID NO: 1432998 - DNA, 15 bp, Homo sapiens
agctcctagcatata

SEQ ID NO: 1432999 - DNA, 15 bp, Homo sapiens
aagctcctagcatat

SEQ ID NO: 1433000 - DNA, 15 bp, Homo sapiens
aaagctcctagcata

SEQ ID NO: 1433001 - DNA, 15 bp, Homo sapiens
caaagctcctagcat

SEQ ID NO: 1433002 - DNA, 15 bp, Homo sapiens
ccaaagctcctagca

SEQ ID NO: 1433003 - DNA, 15 bp, Homo sapiens
accaaagctcctagc

SEQ ID NO: 1433004 - DNA, 15 bp, Homo sapiens
aaccaaagctcctag

SEQ ID NO: 1433005 - DNA, 15 bp, Homo sapiens
gaaccaaagctccta

SEQ ID NO: 1433006 - DNA, 15 bp, Homo sapiens
agaaccaaagctcct

SEQ ID NO: 1433007 - DNA, 15 bp, Homo sapiens
gagaaccaaagctcc

SEQ ID NO: 1433008 - DNA, 15 bp, Homo sapiens
tgagaaccaaagctc

SEQ ID NO: 1433009 - DNA, 15 bp, Homo sapiens
gtgagaaccaaagct

SEQ ID NO: 1433010 - DNA, 15 bp, Homo sapiens
ggtgagaaccaaagc

SEQ ID NO: 1433011 - DNA, 15 bp, Homo sapiens
aggtgagaaccaaag

SEQ ID NO: 1433012 - DNA, 15 bp, Homo sapiens
taggtgagaaccaaa

SEQ ID NO: 1433013 - DNA, 15 bp, Homo sapiens
ataggtgagaaccaa

SEQ ID NO: 1433014 - DNA, 15 bp, Homo sapiens
cataggtgagaacca

SEQ ID NO: 1433015 - DNA, 15 bp, Homo sapiens
ccataggtgagaacc

SEQ ID NO: 1433016 - DNA, 15 bp, Homo sapiens
gccataggtgagaac

SEQ ID NO: 1433017 - DNA, 15 bp, Homo sapiens
agccataggtgagaa

SEQ ID NO: 1433018 - DNA, 15 bp, Homo sapiens
cagccataggtgaga

SEQ ID NO: 1433019 - DNA, 15 bp, Homo sapiens
acagccataggtgag

SEQ ID NO: 1433020 - DNA, 15 bp, Homo sapiens
tacagccataggtga

SEQ ID NO: 1433021 - DNA, 15 bp, Homo sapiens
gtacagccataggtg

SEQ ID NO: 1433022 - DNA, 15 bp, Homo sapiens
ggtacagccataggt

SEQ ID NO: 1433023 - DNA, 15 bp, Homo sapiens
aggtacagccatagg

SEQ ID NO: 1433024 - DNA, 15 bp, Homo sapiens
aaggtacagccatag

SEQ ID NO: 1433025 - DNA, 15 bp, Homo sapiens
taaggtacagccata

SEQ ID NO: 1433026 - DNA, 15 bp, Homo sapiens
ctaaggtacagccat

SEQ ID NO: 1433027 - DNA, 15 bp, Homo sapiens
tctaaggtacagcca

SEQ ID NO: 1433028 - DNA, 15 bp, Homo sapiens
ttctaaggtacagcc

SEQ ID NO: 1433029 - DNA, 15 bp, Homo sapiens
attctaaggtacagc

SEQ ID NO: 1433030 - DNA, 15 bp, Homo sapiens
gattctaaggtacag

SEQ ID NO: 1433031 - DNA, 15 bp, Homo sapiens
tgattctaaggtaca

SEQ ID NO: 1433032 - DNA, 15 bp, Homo sapiens
gtgattctaaggtac

SEQ ID NO: 1433033 - DNA, 15 bp, Homo sapiens
ggtgattctaaggta

SEQ ID NO: 1433034 - DNA, 15 bp, Homo sapiens
tggtgattctaaggt

SEQ ID NO: 1433035 - DNA, 15 bp, Homo sapiens
ctggtgattctaagg

SEQ ID NO: 1433036 - DNA, 15 bp, Homo sapiens
cctggtgattctaag

SEQ ID NO: 1433037 - DNA, 15 bp, Homo sapiens
ccctggtgattctaa

SEQ ID NO: 1433038 - DNA, 15 bp, Homo sapiens
cccctggtgattcta

SEQ ID NO: 1433039 - DNA, 15 bp, Homo sapiens
tcccctggtgattct

SEQ ID NO: 1433040 - DNA, 15 bp, Homo sapiens
ttcccctggtgattc

SEQ ID NO: 1433041 - DNA, 15 bp, Homo sapiens
gttcccctggtgatt

SEQ ID NO: 1433042 - DNA, 15 bp, Homo sapiens
agttcccctggtgat

SEQ ID NO: 1433043 - DNA, 15 bp, Homo sapiens
aagttcccctggtga

SEQ ID NO: 1433044 - DNA, 15 bp, Homo sapiens
aaagttcccctggtg

SEQ ID NO: 1433045 - DNA, 15 bp, Homo sapiens
taaagttcccctggt

SEQ ID NO: 1433046 - DNA, 15 bp, Homo sapiens
ttaaagttcccctgg

SEQ ID NO: 1433047 - DNA, 15 bp, Homo sapiens
tttaaagttcccctg

SEQ ID NO: 1433048 - DNA, 15 bp, Homo sapiens
ttttaaagttcccct

SEQ ID NO: 1433049 - DNA, 15 bp, Homo sapiens
tttttaaagttcccc

SEQ ID NO: 1433050 - DNA, 15 bp, Homo sapiens
ctttttaaagttccc

SEQ ID NO: 1433051 - DNA, 15 bp, Homo sapiens
tctttttaaagttcc

SEQ ID NO: 1433052 - DNA, 15 bp, Homo sapiens
ttctttttaaagttc

SEQ ID NO: 1433053 - DNA, 15 bp, Homo sapiens
cttctttttaaagtt

SEQ ID NO: 1433054 - DNA, 15 bp, Homo sapiens
acttctttttaaagt

SEQ ID NO: 1433055 - DNA, 15 bp, Homo sapiens
aacttctttttaaag

SEQ ID NO: 1433056 - DNA, 15 bp, Homo sapiens
gaacttctttttaaa

SEQ ID NO: 1433057 - DNA, 15 bp, Homo sapiens
agaacttctttttaa

SEQ ID NO: 1433058 - DNA, 15 bp, Homo sapiens
aagaacttcttttta

SEQ ID NO: 1433059 - DNA, 15 bp, Homo sapiens
taagaacttcttttt

SEQ ID NO: 1433060 - DNA, 15 bp, Homo sapiens
ataagaacttctttt

SEQ ID NO: 1433061 - DNA, 15 bp, Homo sapiens
cataagaacttcttt

SEQ ID NO: 1433062 - DNA, 15 bp, Homo sapiens
ccataagaacttctt

SEQ ID NO: 1433063 - DNA, 15 bp, Homo sapiens
gccataagaacttct

SEQ ID NO: 1433064 - DNA, 15 bp, Homo sapiens
agccataagaacttc

SEQ ID NO: 1433065 - DNA, 15 bp, Homo sapiens
cagccataagaactt

SEQ ID NO: 1433066 - DNA, 15 bp, Homo sapiens
ccagccataagaact

SEQ ID NO: 1433067 - DNA, 15 bp, Homo sapiens
cccagccataagaac

SEQ ID NO: 1433068 - DNA, 15 bp, Homo sapiens
acccagccataagaa

SEQ ID NO: 1433069 - DNA, 15 bp, Homo sapiens
gacccagccataaga

SEQ ID NO: 1433070 - DNA, 15 bp, Homo sapiens
ggacccagccataag

SEQ ID NO: 1433071 - DNA, 15 bp, Homo sapiens
tggacccagccataa

SEQ ID NO: 1433072 - DNA, 15 bp, Homo sapiens
ttggacccagccata

SEQ ID NO: 1433073 - DNA, 15 bp, Homo sapiens
gttggacccagccat

SEQ ID NO: 1433074 - DNA, 15 bp, Homo sapiens
agttggacccagcca

SEQ ID NO: 1433075 - DNA, 15 bp, Homo sapiens
gagttggacccagcc

SEQ ID NO: 1433076 - DNA, 15 bp, Homo sapiens
agagttggacccagc

SEQ ID NO: 1433077 - DNA, 15 bp, Homo sapiens
gagagttggacccag

SEQ ID NO: 1433078 - DNA, 15 bp, Homo sapiens
ggagagttggaccca

SEQ ID NO: 1433079 - DNA, 15 bp, Homo sapiens
tggagagttggaccc

SEQ ID NO: 1433080 - DNA, 15 bp, Homo sapiens
ttggagagttggacc

SEQ ID NO: 1433081 - DNA, 15 bp, Homo sapiens
cttggagagttggac

SEQ ID NO: 1433082 - DNA, 15 bp, Homo sapiens
tcttggagagttgga

SEQ ID NO: 1433083 - DNA, 15 bp, Homo sapiens
atcttggagagttgg

SEQ ID NO: 1433084 - DNA, 15 bp, Homo sapiens
aatcttggagagttg

SEQ ID NO: 1433085 - DNA, 15 bp, Homo sapiens
gaatcttggagagtt

SEQ ID NO: 1433086 - DNA, 15 bp, Homo sapiens
agaatcttggagagt

SEQ ID NO: 1433087 - DNA, 15 bp, Homo sapiens
cagaatcttggagag

SEQ ID NO: 1433088 - DNA, 15 bp, Homo sapiens
tcagaatcttggaga

SEQ ID NO: 1433089 - DNA, 15 bp, Homo sapiens
atcagaatcttggag

SEQ ID NO: 1433090 - DNA, 15 bp, Homo sapiens
aatcagaatcttgga

SEQ ID NO: 1433091 - DNA, 15 bp, Homo sapiens
aaatcagaatcttgg

SEQ ID NO: 1433092 - DNA, 15 bp, Homo sapiens
caaatcagaatcttg

SEQ ID NO: 1433093 - DNA, 15 bp, Homo sapiens
ccaaatcagaatctt

SEQ ID NO: 1433094 - DNA, 15 bp, Homo sapiens
accaaatcagaatct

SEQ ID NO: 1433095 - DNA, 15 bp, Homo sapiens
gaccaaatcagaatc

SEQ ID NO: 1433096 - DNA, 15 bp, Homo sapiens
agaccaaatcagaat

SEQ ID NO: 1433097 - DNA, 15 bp, Homo sapiens
aagaccaaatcagaa

SEQ ID NO: 1433098 - DNA, 15 bp, Homo sapiens
caagaccaaatcaga

SEQ ID NO: 1433099 - DNA, 15 bp, Homo sapiens
ccaagaccaaatcag

SEQ ID NO: 1433100 - DNA, 15 bp, Homo sapiens
cccaagaccaaatca

SEQ ID NO: 1433101 - DNA, 15 bp, Homo sapiens
acccaagaccaaatc

SEQ ID NO: 1433102 - DNA, 15 bp, Homo sapiens
cacccaagaccaaat

SEQ ID NO: 1433103 - DNA, 15 bp, Homo sapiens
ccacccaagaccaaa

SEQ ID NO: 1433104 - DNA, 15 bp, Homo sapiens
cccacccaagaccaa

SEQ ID NO: 1433105 - DNA, 15 bp, Homo sapiens
ccccacccaagacca

SEQ ID NO: 1433106 - DNA, 15 bp, Homo sapiens
gccccacccaagacc

SEQ ID NO: 1433107 - DNA, 15 bp, Homo sapiens
ggccccacccaagac

SEQ ID NO: 1433108 - DNA, 15 bp, Homo sapiens
aggccccacccaaga

SEQ ID NO: 1433109 - DNA, 15 bp, Homo sapiens
caggccccacccaag

SEQ ID NO: 1433110 - DNA, 15 bp, Homo sapiens
ccaggccccacccaa

SEQ ID NO: 1433111 - DNA, 15 bp, Homo sapiens
cccaggccccaccca

SEQ ID NO: 1433112 - DNA, 15 bp, Homo sapiens
gcccaggccccaccc

SEQ ID NO: 1433113 - DNA, 15 bp, Homo sapiens
tgcccaggccccacc

SEQ ID NO: 1433114 - DNA, 15 bp, Homo sapiens
atgcccaggccccac

SEQ ID NO: 1433115 - DNA, 15 bp, Homo sapiens
aatgcccaggcccca

SEQ ID NO: 1433116 - DNA, 15 bp, Homo sapiens
caatgcccaggcccc

SEQ ID NO: 1433117 - DNA, 15 bp, Homo sapiens
tcaatgcccaggccc

SEQ ID NO: 1433118 - DNA, 15 bp, Homo sapiens
atcaatgcccaggcc

SEQ ID NO: 1433119 - DNA, 15 bp, Homo sapiens
catcaatgcccaggc

SEQ ID NO: 1433120 - DNA, 15 bp, Homo sapiens
acatcaatgcccagg

SEQ ID NO: 1433121 - DNA, 15 bp, Homo sapiens
aacatcaatgcccag

SEQ ID NO: 1433122 - DNA, 15 bp, Homo sapiens
aaacatcaatgccca

SEQ ID NO: 1433123 - DNA, 15 bp, Homo sapiens
aaaacatcaatgccc

SEQ ID NO: 1433124 - DNA, 15 bp, Homo sapiens
aaaaacatcaatgcc

SEQ ID NO: 1433125 - DNA, 15 bp, Homo sapiens
aaaaaacatcaatgc

SEQ ID NO: 1433126 - DNA, 15 bp, Homo sapiens
taaaaaacatcaatg

SEQ ID NO: 1433127 - DNA, 15 bp, Homo sapiens
ttaaaaaacatcaat

SEQ ID NO: 1433128 - DNA, 15 bp, Homo sapiens
tttaaaaaacatcaa

SEQ ID NO: 1433129 - DNA, 15 bp, Homo sapiens
ttttaaaaaacatca

SEQ ID NO: 1433130 - DNA, 15 bp, Homo sapiens
cttttaaaaaacatc

SEQ ID NO: 1433131 - DNA, 15 bp, Homo sapiens
acttttaaaaaacat

SEQ ID NO: 1433132 - DNA, 15 bp, Homo sapiens
aacttttaaaaaaca

SEQ ID NO: 1433133 - DNA, 15 bp, Homo sapiens
gaacttttaaaaaac

SEQ ID NO: 1433134 - DNA, 15 bp, Homo sapiens
agaacttttaaaaaa

SEQ ID NO: 1433135 - DNA, 15 bp, Homo sapiens
cagaacttttaaaaa

SEQ ID NO: 1433136 - DNA, 15 bp, Homo sapiens
acagaacttttaaaa

SEQ ID NO: 1433137 - DNA, 15 bp, Homo sapiens
cacagaacttttaaa

SEQ ID NO: 1433138 - DNA, 15 bp, Homo sapiens
tcacagaacttttaa

SEQ ID NO: 1433139 - DNA, 15 bp, Homo sapiens
atcacagaactttta

SEQ ID NO: 1433140 - DNA, 15 bp, Homo sapiens
catcacagaactttt

SEQ ID NO: 1433141 - DNA, 15 bp, Homo sapiens
tcatcacagaacttt

SEQ ID NO: 1433142 - DNA, 15 bp, Homo sapiens
atcatcacagaactt

SEQ ID NO: 1433143 - DNA, 15 bp, Homo sapiens
aatcatcacagaact

SEQ ID NO: 1433144 - DNA, 15 bp, Homo sapiens
gaatcatcacagaac

SEQ ID NO: 1433145 - DNA, 15 bp, Homo sapiens
agaatcatcacagaa

SEQ ID NO: 1433146 - DNA, 15 bp, Homo sapiens
tagaatcatcacaga

SEQ ID NO: 1433147 - DNA, 15 bp, Homo sapiens
ttagaatcatcacag

SEQ ID NO: 1433148 - DNA, 15 bp, Homo sapiens
attagaatcatcaca

SEQ ID NO: 1433149 - DNA, 15 bp, Homo sapiens
cattagaatcatcac

SEQ ID NO: 1433150 - DNA, 15 bp, Homo sapiens
acattagaatcatca

SEQ ID NO: 1433151 - DNA, 15 bp, Homo sapiens
cacattagaatcatc

SEQ ID NO: 1433152 - DNA, 15 bp, Homo sapiens
tcacattagaatcat

SEQ ID NO: 1433153 - DNA, 15 bp, Homo sapiens
ttcacattagaatca

SEQ ID NO: 1433154 - DNA, 15 bp, Homo sapiens
cttcacattagaatc

SEQ ID NO: 1433155 - DNA, 15 bp, Homo sapiens
tcttcacattagaat

SEQ ID NO: 1433156 - DNA, 15 bp, Homo sapiens
gtcttcacattagaa

SEQ ID NO: 1433157 - DNA, 15 bp, Homo sapiens
tgtcttcacattaga

SEQ ID NO: 1433158 - DNA, 15 bp, Homo sapiens
ttgtcttcacattag

SEQ ID NO: 1433159 - DNA, 15 bp, Homo sapiens
cttgtcttcacatta

SEQ ID NO: 1433160 - DNA, 15 bp, Homo sapiens
tcttgtcttcacatt

SEQ ID NO: 1433161 - DNA, 15 bp, Homo sapiens
atcttgtcttcacat

SEQ ID NO: 1433162 - DNA, 15 bp, Homo sapiens
aatcttgtcttcaca

SEQ ID NO: 1433163 - DNA, 15 bp, Homo sapiens
gaatcttgtcttcac

SEQ ID NO: 1433164 - DNA, 15 bp, Homo sapiens
tgaatcttgtcttca

SEQ ID NO: 1433165 - DNA, 15 bp, Homo sapiens
ttgaatcttgtcttc

SEQ ID NO: 1433166 - DNA, 15 bp, Homo sapiens
tttgaatcttgtctt

SEQ ID NO: 1433167 - DNA, 15 bp, Homo sapiens
ttttgaatcttgtct

SEQ ID NO: 1433168 - DNA, 15 bp, Homo sapiens
tttttgaatcttgtc

SEQ ID NO: 1433169 - DNA, 15 bp, Homo sapiens
gtttttgaatcttgt

SEQ ID NO: 1433170 - DNA, 15 bp, Homo sapiens
ggtttttgaatcttg

SEQ ID NO: 1433171 - DNA, 15 bp, Homo sapiens
tggtttttgaatctt

SEQ ID NO: 1433172 - DNA, 15 bp, Homo sapiens
gtggtttttgaatct

SEQ ID NO: 1433173 - DNA, 15 bp, Homo sapiens
agtggtttttgaatc

SEQ ID NO: 1433174 - DNA, 15 bp, Homo sapiens
cagtggtttttgaat

SEQ ID NO: 1433175 - DNA, 15 bp, Homo sapiens
acagtggtttttgaa

SEQ ID NO: 1433176 - DNA, 15 bp, Homo sapiens
gacagtggtttttga

SEQ ID NO: 1433177 - DNA, 15 bp, Homo sapiens
agacagtggtttttg

SEQ ID NO: 1433178 - DNA, 15 bp, Homo sapiens
aagacagtggttttt

SEQ ID NO: 1433179 - DNA, 15 bp, Homo sapiens
taagacagtggtttt

SEQ ID NO: 1433180 - DNA, 15 bp, Homo sapiens
ctaagacagtggttt

SEQ ID NO: 1433181 - DNA, 15 bp, Homo sapiens
tctaagacagtggtt

SEQ ID NO: 1433182 - DNA, 15 bp, Homo sapiens
ttctaagacagtggt

SEQ ID NO: 1433183 - DNA, 15 bp, Homo sapiens
tttctaagacagtgg

SEQ ID NO: 1433184 - DNA, 15 bp, Homo sapiens
ttttctaagacagtg

SEQ ID NO: 1433185 - DNA, 15 bp, Homo sapiens
attttctaagacagt

SEQ ID NO: 1433186 - DNA, 15 bp, Homo sapiens
cattttctaagacag

SEQ ID NO: 1433187 - DNA, 15 bp, Homo sapiens
acattttctaagaca

SEQ ID NO: 1433188 - DNA, 15 bp, Homo sapiens
aacattttctaagac

SEQ ID NO: 1433189 - DNA, 15 bp, Homo sapiens
gaacattttctaaga

SEQ ID NO: 1433190 - DNA, 15 bp, Homo sapiens
agaacattttctaag

SEQ ID NO: 1433191 - DNA, 15 bp, Homo sapiens
gagaacattttctaa

SEQ ID NO: 1433192 - DNA, 15 bp, Homo sapiens
tgagaacattttcta

SEQ ID NO: 1433193 - DNA, 15 bp, Homo sapiens
atgagaacattttct

SEQ ID NO: 1433194 - DNA, 15 bp, Homo sapiens
gatgagaacattttc

SEQ ID NO: 1433195 - DNA, 15 bp, Homo sapiens
agatgagaacatttt

SEQ ID NO: 1433196 - DNA, 15 bp, Homo sapiens
cagatgagaacattt

SEQ ID NO: 1433197 - DNA, 15 bp, Homo sapiens
gcagatgagaacatt

SEQ ID NO: 1433198 - DNA, 15 bp, Homo sapiens
agcagatgagaacat

SEQ ID NO: 1433199 - DNA, 15 bp, Homo sapiens
cagcagatgagaaca

SEQ ID NO: 1433200 - DNA, 15 bp, Homo sapiens
acagcagatgagaac

SEQ ID NO: 1433201 - DNA, 15 bp, Homo sapiens
cacagcagatgagaa

SEQ ID NO: 1433202 - DNA, 15 bp, Homo sapiens
gcacagcagatgaga

SEQ ID NO: 1433203 - DNA, 15 bp, Homo sapiens
tgcacagcagatgag

SEQ ID NO: 1433204 - DNA, 15 bp, Homo sapiens
ttgcacagcagatga

SEQ ID NO: 1433205 - DNA, 15 bp, Homo sapiens
cttgcacagcagatg

SEQ ID NO: 1433206 - DNA, 15 bp, Homo sapiens
tcttgcacagcagat

SEQ ID NO: 1433207 - DNA, 15 bp, Homo sapiens
ttcttgcacagcaga

SEQ ID NO: 1433208 - DNA, 15 bp, Homo sapiens
tttcttgcacagcag

SEQ ID NO: 1433209 - DNA, 15 bp, Homo sapiens
ttttcttgcacagca

SEQ ID NO: 1433210 - DNA, 15 bp, Homo sapiens
tttttcttgcacagc

SEQ ID NO: 1433211 - DNA, 15 bp, Homo sapiens
gtttttcttgcacag

SEQ ID NO: 1433212 - DNA, 15 bp, Homo sapiens
tgtttttcttgcaca

SEQ ID NO: 1433213 - DNA, 15 bp, Homo sapiens
ttgtttttcttgcac

SEQ ID NO: 1433214 - DNA, 15 bp, Homo sapiens
gttgtttttcttgca

SEQ ID NO: 1433215 - DNA, 15 bp, Homo sapiens
ggttgtttttcttgc

SEQ ID NO: 1433216 - DNA, 15 bp, Homo sapiens
aggttgtttttcttg

SEQ ID NO: 1433217 - DNA, 15 bp, Homo sapiens
caggttgtttttctt

SEQ ID NO: 1433218 - DNA, 15 bp, Homo sapiens
tcaggttgtttttct

SEQ ID NO: 1433219 - DNA, 15 bp, Homo sapiens
ctcaggttgtttttc

SEQ ID NO: 1433220 - DNA, 15 bp, Homo sapiens
tctcaggttgttttt

SEQ ID NO: 1433221 - DNA, 15 bp, Homo sapiens
ttctcaggttgtttt

SEQ ID NO: 1433222 - DNA, 15 bp, Homo sapiens
gttctcaggttgttt

SEQ ID NO: 1433223 - DNA, 15 bp, Homo sapiens
ggttctcaggttgtt

SEQ ID NO: 1433224 - DNA, 15 bp, Homo sapiens
tggttctcaggttgt

SEQ ID NO: 1433225 - DNA, 15 bp, Homo sapiens
ttggttctcaggttg

SEQ ID NO: 1433226 - DNA, 15 bp, Homo sapiens
tttggttctcaggtt

SEQ ID NO: 1433227 - DNA, 15 bp, Homo sapiens
ttttggttctcaggt

SEQ ID NO: 1433228 - DNA, 15 bp, Homo sapiens
tttttggttctcagg

SEQ ID NO: 1433229 - DNA, 15 bp, Homo sapiens
ctttttggttctcag

SEQ ID NO: 1433230 - DNA, 15 bp, Homo sapiens
cctttttggttctca

SEQ ID NO: 1433231 - DNA, 15 bp, Homo sapiens
tcctttttggttctc

SEQ ID NO: 1433232 - DNA, 15 bp, Homo sapiens
ctcctttttggttct

SEQ ID NO: 1433233 - DNA, 15 bp, Homo sapiens
actcctttttggttc

SEQ ID NO: 1433234 - DNA, 15 bp, Homo sapiens
gactcctttttggtt

SEQ ID NO: 1433235 - DNA, 15 bp, Homo sapiens
tgactcctttttggt

SEQ ID NO: 1433236 - DNA, 15 bp, Homo sapiens
atgactcctttttgg

SEQ ID NO: 1433237 - DNA, 15 bp, Homo sapiens
aatgactcctttttg

SEQ ID NO: 1433238 - DNA, 15 bp, Homo sapiens
caatgactccttttt

SEQ ID NO: 1433239 - DNA, 15 bp, Homo sapiens
acaatgactcctttt

SEQ ID NO: 1433240 - DNA, 15 bp, Homo sapiens
cacaatgactccttt

SEQ ID NO: 1433241 - DNA, 15 bp, Homo sapiens
tcacaatgactcctt

SEQ ID NO: 1433242 - DNA, 15 bp, Homo sapiens
atcacaatgactcct

SEQ ID NO: 1433243 - DNA, 15 bp, Homo sapiens
aatcacaatgactcc

SEQ ID NO: 1433244 - DNA, 15 bp, Homo sapiens
taatcacaatgactc

SEQ ID NO: 1433245 - DNA, 15 bp, Homo sapiens
ttaatcacaatgact

SEQ ID NO: 1433246 - DNA, 15 bp, Homo sapiens
attaatcacaatgac

SEQ ID NO: 1433247 - DNA, 15 bp, Homo sapiens
tattaatcacaatga

SEQ ID NO: 1433248 - DNA, 15 bp, Homo sapiens
atattaatcacaatg

SEQ ID NO: 1433249 - DNA, 15 bp, Homo sapiens
aatattaatcacaat

SEQ ID NO: 1433250 - DNA, 15 bp, Homo sapiens
aaatattaatcacaa

SEQ ID NO: 1433251 - DNA, 15 bp, Homo sapiens
caaatattaatcaca

SEQ ID NO: 1433252 - DNA, 15 bp, Homo sapiens
acaaatattaatcac

SEQ ID NO: 1433253 - DNA, 15 bp, Homo sapiens
cacaaatattaatca

SEQ ID NO: 1433254 - DNA, 15 bp, Homo sapiens
acacaaatattaatc

SEQ ID NO: 1433255 - DNA, 15 bp, Homo sapiens
aacacaaatattaat

SEQ ID NO: 1433256 - DNA, 15 bp, Homo sapiens
aaacacaaatattaa

SEQ ID NO: 1433257 - DNA, 15 bp, Homo sapiens
aaaacacaaatatta

SEQ ID NO: 1433258 - DNA, 15 bp, Homo sapiens
gaaaacacaaatatt

SEQ ID NO: 1433259 - DNA, 15 bp, Homo sapiens
tgaaaacacaaatat

SEQ ID NO: 1433260 - DNA, 15 bp, Homo sapiens
ctgaaaacacaaata

SEQ ID NO: 1433261 - DNA, 15 bp, Homo sapiens
tctgaaaacacaaat

SEQ ID NO: 1433262 - DNA, 15 bp, Homo sapiens
atctgaaaacacaaa

SEQ ID NO: 1433263 - DNA, 15 bp, Homo sapiens
aatctgaaaacacaa

SEQ ID NO: 1433264 - DNA, 15 bp, Homo sapiens
taatctgaaaacaca

SEQ ID NO: 1433265 - DNA, 15 bp, Homo sapiens
ttaatctgaaaacac

SEQ ID NO: 1433266 - DNA, 15 bp, Homo sapiens
tttaatctgaaaaca

SEQ ID NO: 1433267 - DNA, 15 bp, Homo sapiens
ttttaatctgaaaac

SEQ ID NO: 1433268 - DNA, 15 bp, Homo sapiens
cttttaatctgaaaa

SEQ ID NO: 1433269 - DNA, 15 bp, Homo sapiens
tcttttaatctgaaa

SEQ ID NO: 1433270 - DNA, 15 bp, Homo sapiens
atcttttaatctgaa

SEQ ID NO: 1433271 - DNA, 15 bp, Homo sapiens
tatcttttaatctga

SEQ ID NO: 1433272 - DNA, 15 bp, Homo sapiens
atatcttttaatctg

SEQ ID NO: 1433273 - DNA, 15 bp, Homo sapiens
aatatcttttaatct

SEQ ID NO: 1433274 - DNA, 15 bp, Homo sapiens
caatatcttttaatc

SEQ ID NO: 1433275 - DNA, 15 bp, Homo sapiens
acaatatcttttaat

SEQ ID NO: 1433276 - DNA, 15 bp, Homo sapiens
aacaatatcttttaa

SEQ ID NO: 1433277 - DNA, 15 bp, Homo sapiens
caacaatatctttta

SEQ ID NO: 1433278 - DNA, 15 bp, Homo sapiens
ccaacaatatctttt

SEQ ID NO: 1433279 - DNA, 15 bp, Homo sapiens
accaacaatatcttt

SEQ ID NO: 1433280 - DNA, 15 bp, Homo sapiens
caccaacaatatctt

SEQ ID NO: 1433281 - DNA, 15 bp, Homo sapiens
gcaccaacaatatct

SEQ ID NO: 1433282 - DNA, 15 bp, Homo sapiens
agcaccaacaatatc

SEQ ID NO: 1433283 - DNA, 15 bp, Homo sapiens
tagcaccaacaatat

SEQ ID NO: 1433284 - DNA, 15 bp, Homo sapiens
gtagcaccaacaata

SEQ ID NO: 1433285 - DNA, 15 bp, Homo sapiens
agtagcaccaacaat

SEQ ID NO: 1433286 - DNA, 15 bp, Homo sapiens
cagtagcaccaacaa

SEQ ID NO: 1433287 - DNA, 15 bp, Homo sapiens
tcagtagcaccaaca

SEQ ID NO: 1433288 - DNA, 15 bp, Homo sapiens
ttcagtagcaccaac

SEQ ID NO: 1433289 - DNA, 15 bp, Homo sapiens
attcagtagcaccaa

SEQ ID NO: 1433290 - DNA, 15 bp, Homo sapiens
aattcagtagcacca

SEQ ID NO: 1433291 - DNA, 15 bp, Homo sapiens
aaattcagtagcacc

SEQ ID NO: 1433292 - DNA, 15 bp, Homo sapiens
aaaattcagtagcac

SEQ ID NO: 1433293 - DNA, 15 bp, Homo sapiens
aaaaattcagtagca

SEQ ID NO: 1433294 - DNA, 15 bp, Homo sapiens
aaaaaattcagtagc

SEQ ID NO: 1433295 - DNA, 15 bp, Homo sapiens
caaaaaattcagtag

SEQ ID NO: 1433296 - DNA, 15 bp, Homo sapiens
acaaaaaattcagta

SEQ ID NO: 1433297 - DNA, 15 bp, Homo sapiens
aacaaaaaattcagt

SEQ ID NO: 1433298 - DNA, 15 bp, Homo sapiens
aaacaaaaaattcag

SEQ ID NO: 1433299 - DNA, 15 bp, Homo sapiens
aaaacaaaaaattca

SEQ ID NO: 1433300 - DNA, 15 bp, Homo sapiens
aaaaacaaaaaattc

SEQ ID NO: 1433301 - DNA, 15 bp, Homo sapiens
aaaaaacaaaaaatt

SEQ ID NO: 1433302 - DNA, 15 bp, Homo sapiens
aaaaaaacaaaaaat

SEQ ID NO: 1433303 - DNA, 15 bp, Homo sapiens
aaacaaaaaaaaaca

SEQ ID NO: 1433304 - DNA, 15 bp, Homo sapiens
atgcactccagcctg

SEQ ID NO: 1433305 - DNA, 15 bp, Homo sapiens
aatgcactccagcct

SEQ ID NO: 1433306 - DNA, 15 bp, Homo sapiens
caatgcactccagcc

SEQ ID NO: 1433307 - DNA, 15 bp, Homo sapiens
ccaatgcactccagc

SEQ ID NO: 1433308 - DNA, 15 bp, Homo sapiens
gccaatgcactccag

SEQ ID NO: 1433309 - DNA, 15 bp, Homo sapiens
tgccaatgcactcca

SEQ ID NO: 1433310 - DNA, 15 bp, Homo sapiens
atgccaatgcactcc

SEQ ID NO: 1433311 - DNA, 15 bp, Homo sapiens
catgccaatgcactc

SEQ ID NO: 1433312 - DNA, 15 bp, Homo sapiens
tcatgccaatgcact

SEQ ID NO: 1433313 - DNA, 15 bp, Homo sapiens
atcatgccaatgcac

SEQ ID NO: 1433314 - DNA, 15 bp, Homo sapiens
gatcatgccaatgca

SEQ ID NO: 1433315 - DNA, 15 bp, Homo sapiens
agatcatgccaatgc

SEQ ID NO: 1433316 - DNA, 15 bp, Homo sapiens
gagatcatgccaatg

SEQ ID NO: 1433317 - DNA, 15 bp, Homo sapiens
cgagatcatgccaat

SEQ ID NO: 1433318 - DNA, 15 bp, Homo sapiens
ccgagatcatgccaa

SEQ ID NO: 1433319 - DNA, 15 bp, Homo sapiens
agggaggcggagctt

SEQ ID NO: 1433320 - DNA, 15 bp, Homo sapiens
cagggaggcggagct

SEQ ID NO: 1433321 - DNA, 15 bp, Homo sapiens
ccagggaggcggagc

SEQ ID NO: 1433322 - DNA, 15 bp, Homo sapiens
accagggaggcggag

SEQ ID NO: 1433323 - DNA, 15 bp, Homo sapiens
aaccagggaggcgga

SEQ ID NO: 1433324 - DNA, 15 bp, Homo sapiens
gaaccagggaggcgg

SEQ ID NO: 1433325 - DNA, 15 bp, Homo sapiens
tgaaccagggaggcg

SEQ ID NO: 1433326 - DNA, 15 bp, Homo sapiens
atgaaccagggaggc

SEQ ID NO: 1433327 - DNA, 15 bp, Homo sapiens
catgaaccagggagg

SEQ ID NO: 1433328 - DNA, 15 bp, Homo sapiens
gcatgaaccagggag

SEQ ID NO: 1433329 - DNA, 15 bp, Homo sapiens
ggcatgaaccaggga

SEQ ID NO: 1433330 - DNA, 15 bp, Homo sapiens
tggcatgaaccaggg

SEQ ID NO: 1433331 - DNA, 15 bp, Homo sapiens
atggcatgaaccagg

SEQ ID NO: 1433332 - DNA, 15 bp, Homo sapiens
aatggcatgaaccag

SEQ ID NO: 1433333 - DNA, 15 bp, Homo sapiens
gaatggcatgaacca

SEQ ID NO: 1433334 - DNA, 15 bp, Homo sapiens
tgggcgcctgtagtc

SEQ ID NO: 1433335 - DNA, 15 bp, Homo sapiens
gtgggcgcctgtagt

SEQ ID NO: 1433336 - DNA, 15 bp, Homo sapiens
ggtgggcgcctgtag

SEQ ID NO: 1433337 - DNA, 15 bp, Homo sapiens
gaaaaaattagccag

SEQ ID NO: 1433338 - DNA, 15 bp, Homo sapiens
agaaaaaattagcca

SEQ ID NO: 1433339 - DNA, 15 bp, Homo sapiens
tagaaaaaattagcc

SEQ ID NO: 1433340 - DNA, 15 bp, Homo sapiens
atagaaaaaattagc

SEQ ID NO: 1433341 - DNA, 15 bp, Homo sapiens
aatagaaaaaattag

SEQ ID NO: 1433342 - DNA, 15 bp, Homo sapiens
aaatagaaaaaatta

SEQ ID NO: 1433343 - DNA, 15 bp, Homo sapiens
aaaatagaaaaaatt

SEQ ID NO: 1433344 - DNA, 15 bp, Homo sapiens
aaaaatagaaaaaat

SEQ ID NO: 1433345 - DNA, 15 bp, Homo sapiens
taaaaatagaaaaaa

SEQ ID NO: 1433346 - DNA, 15 bp, Homo sapiens
ctaaaaatagaaaaa

SEQ ID NO: 1433347 - DNA, 15 bp, Homo sapiens
actaaaaatagaaaa

SEQ ID NO: 1433348 - DNA, 15 bp, Homo sapiens
cactaaaaatagaaa

SEQ ID NO: 1433349 - DNA, 15 bp, Homo sapiens
tcactaaaaatagaa

SEQ ID NO: 1433350 - DNA, 15 bp, Homo sapiens
ctcactaaaaataga

SEQ ID NO: 1433351 - DNA, 15 bp, Homo sapiens
tctcactaaaaatag

SEQ ID NO: 1433352 - DNA, 15 bp, Homo sapiens
atctcactaaaaata

SEQ ID NO: 1433353 - DNA, 15 bp, Homo sapiens
catctcactaaaaat

SEQ ID NO: 1433354 - DNA, 15 bp, Homo sapiens
tcatctcactaaaaa

SEQ ID NO: 1433355 - DNA, 15 bp, Homo sapiens
ctcatctcactaaaa

SEQ ID NO: 1433356 - DNA, 15 bp, Homo sapiens
cctcatctcactaaa

SEQ ID NO: 1433357 - DNA, 15 bp, Homo sapiens
acctcatctcactaa

SEQ ID NO: 1433358 - DNA, 15 bp, Homo sapiens
aacctcatctcacta

SEQ ID NO: 1433359 - DNA, 15 bp, Homo sapiens
aaacctcatctcact

SEQ ID NO: 1433360 - DNA, 15 bp, Homo sapiens
gaaacctcatctcac

SEQ ID NO: 1433361 - DNA, 15 bp, Homo sapiens
tgaaacctcatctca

SEQ ID NO: 1433362 - DNA, 15 bp, Homo sapiens
gtgaaacctcatctc

SEQ ID NO: 1433363 - DNA, 15 bp, Homo sapiens
ggtgaaacctcatct

SEQ ID NO: 1433364 - DNA, 15 bp, Homo sapiens
tggtgaaacctcatc

SEQ ID NO: 1433365 - DNA, 15 bp, Homo sapiens
atggtgaaacctcat

SEQ ID NO: 1433366 - DNA, 15 bp, Homo sapiens
catggtgaaacctca

SEQ ID NO: 1433367 - DNA, 15 bp, Homo sapiens
ggggtggatcacgag

SEQ ID NO: 1433368 - DNA, 15 bp, Homo sapiens
aggggtggatcacga

SEQ ID NO: 1433369 - DNA, 15 bp, Homo sapiens
caggggtggatcacg

SEQ ID NO: 1433370 - DNA, 15 bp, Homo sapiens
gcaggggtggatcac

SEQ ID NO: 1433371 - DNA, 15 bp, Homo sapiens
ggcaggggtggatca

SEQ ID NO: 1433372 - DNA, 15 bp, Homo sapiens
aggcaggggtggatc

SEQ ID NO: 1433373 - DNA, 15 bp, Homo sapiens
aaggcaggggtggat

SEQ ID NO: 1433374 - DNA, 15 bp, Homo sapiens
caaggcaggggtgga

SEQ ID NO: 1433375 - DNA, 15 bp, Homo sapiens
ccaaggcaggggtgg

SEQ ID NO: 1433376 - DNA, 15 bp, Homo sapiens
gccaaggcaggggtg

SEQ ID NO: 1433377 - DNA, 15 bp, Homo sapiens
ggccaaggcaggggt

SEQ ID NO: 1433378 - DNA, 15 bp, Homo sapiens
aggccaaggcagggg

SEQ ID NO: 1433379 - DNA, 15 bp, Homo sapiens
gaggccaaggcaggg

SEQ ID NO: 1433380 - DNA, 15 bp, Homo sapiens
cctttgggaggccaa

SEQ ID NO: 1433381 - DNA, 15 bp, Homo sapiens
ccctttgggaggcca

SEQ ID NO: 1433382 - DNA, 15 bp, Homo sapiens
gccctttgggaggcc

SEQ ID NO: 1433383 - DNA, 15 bp, Homo sapiens
actggccgggcgcgg

SEQ ID NO: 1433384 - DNA, 15 bp, Homo sapiens
cactggccgggcgcg

SEQ ID NO: 1433385 - DNA, 15 bp, Homo sapiens
gcactggccgggcgc

SEQ ID NO: 1433386 - DNA, 15 bp, Homo sapiens
agcactggccgggcg

SEQ ID NO: 1433387 - DNA, 15 bp, Homo sapiens
tagcactggccgggc

SEQ ID NO: 1433388 - DNA, 15 bp, Homo sapiens
gtagcactggccggg

SEQ ID NO: 1433389 - DNA, 15 bp, Homo sapiens
agtagcactggccgg

SEQ ID NO: 1433390 - DNA, 15 bp, Homo sapiens
cagtagcactggccg

SEQ ID NO: 1433391 - DNA, 15 bp, Homo sapiens
tcagtagcactggcc

SEQ ID NO: 1433392 - DNA, 15 bp, Homo sapiens
ttcagtagcactggc

SEQ ID NO: 1433393 - DNA, 15 bp, Homo sapiens
attcagtagcactgg

SEQ ID NO: 1433394 - DNA, 15 bp, Homo sapiens
aattcagtagcactg

SEQ ID NO: 1433395 - DNA, 15 bp, Homo sapiens
aaattcagtagcact

SEQ ID NO: 1433396 - DNA, 15 bp, Homo sapiens
taaattcagtagcac

SEQ ID NO: 1433397 - DNA, 15 bp, Homo sapiens
ctaaattcagtagca

SEQ ID NO: 1433398 - DNA, 15 bp, Homo sapiens
cctaaattcagtagc

SEQ ID NO: 1433399 - DNA, 15 bp, Homo sapiens
ccctaaattcagtag

SEQ ID NO: 1433400 - DNA, 15 bp, Homo sapiens
tccctaaattcagta

SEQ ID NO: 1433401 - DNA, 15 bp, Homo sapiens
ctccctaaattcagt

SEQ ID NO: 1433402 - DNA, 15 bp, Homo sapiens
actccctaaattcag

SEQ ID NO: 1433403 - DNA, 15 bp, Homo sapiens
gactccctaaattca

SEQ ID NO: 1433404 - DNA, 15 bp, Homo sapiens
cgactccctaaattc

SEQ ID NO: 1433405 - DNA, 15 bp, Homo sapiens
ccgactccctaaatt

SEQ ID NO: 1433406 - DNA, 15 bp, Homo sapiens
accgactccctaaat

SEQ ID NO: 1433407 - DNA, 15 bp, Homo sapiens
taccgactccctaaa

SEQ ID NO: 1433408 - DNA, 15 bp, Homo sapiens
ataccgactccctaa

SEQ ID NO: 1433409 - DNA, 15 bp, Homo sapiens
tataccgactcccta

SEQ ID NO: 1433410 - DNA, 15 bp, Homo sapiens
ttataccgactccct

SEQ ID NO: 1433411 - DNA, 15 bp, Homo sapiens
tttataccgactccc

SEQ ID NO: 1433412 - DNA, 15 bp, Homo sapiens
ttttataccgactcc

SEQ ID NO: 1433413 - DNA, 15 bp, Homo sapiens
cttttataccgactc

SEQ ID NO: 1433414 - DNA, 15 bp, Homo sapiens
ccttttataccgact

SEQ ID NO: 1433415 - DNA, 15 bp, Homo sapiens
tccttttataccgac

SEQ ID NO: 1433416 - DNA, 15 bp, Homo sapiens
ttccttttataccga

SEQ ID NO: 1433417 - DNA, 15 bp, Homo sapiens
tttccttttataccg

SEQ ID NO: 1433418 - DNA, 15 bp, Homo sapiens
atttccttttatacc

SEQ ID NO: 1433419 - DNA, 15 bp, Homo sapiens
aatttccttttatac

SEQ ID NO: 1433420 - DNA, 15 bp, Homo sapiens
gaatttccttttata

SEQ ID NO: 1433421 - DNA, 15 bp, Homo sapiens
agaatttccttttat

SEQ ID NO: 1433422 - DNA, 15 bp, Homo sapiens
cagaatttcctttta

SEQ ID NO: 1433423 - DNA, 15 bp, Homo sapiens
tcagaatttcctttt

SEQ ID NO: 1433424 - DNA, 15 bp, Homo sapiens
ttcagaatttccttt

SEQ ID NO: 1433425 - DNA, 15 bp, Homo sapiens
cttcagaatttcctt

SEQ ID NO: 1433426 - DNA, 15 bp, Homo sapiens
ccttcagaatttcct

SEQ ID NO: 1433427 - DNA, 15 bp, Homo sapiens
tccttcagaatttcc

SEQ ID NO: 1433428 - DNA, 15 bp, Homo sapiens
ttccttcagaatttc

SEQ ID NO: 1433429 - DNA, 15 bp, Homo sapiens
tttccttcagaattt

SEQ ID NO: 1433430 - DNA, 15 bp, Homo sapiens
ctttccttcagaatt

SEQ ID NO: 1433431 - DNA, 15 bp, Homo sapiens
cctttccttcagaat

SEQ ID NO: 1433432 - DNA, 15 bp, Homo sapiens
ccctttccttcagaa

SEQ ID NO: 1433433 - DNA, 15 bp, Homo sapiens
tccctttccttcaga

SEQ ID NO: 1433434 - DNA, 15 bp, Homo sapiens
ctccctttccttcag

SEQ ID NO: 1433435 - DNA, 15 bp, Homo sapiens
tctccctttccttca

SEQ ID NO: 1433436 - DNA, 15 bp, Homo sapiens
ctctccctttccttc

SEQ ID NO: 1433437 - DNA, 15 bp, Homo sapiens
actctccctttcctt

SEQ ID NO: 1433438 - DNA, 15 bp, Homo sapiens
tactctccctttcct

SEQ ID NO: 1433439 - DNA, 15 bp, Homo sapiens
atactctccctttcc

SEQ ID NO: 1433440 - DNA, 15 bp, Homo sapiens
aatactctccctttc

SEQ ID NO: 1433441 - DNA, 15 bp, Homo sapiens
taatactctcccttt

SEQ ID NO: 1433442 - DNA, 15 bp, Homo sapiens
ataatactctccctt

SEQ ID NO: 1433443 - DNA, 15 bp, Homo sapiens
aataatactctccct

SEQ ID NO: 1433444 - DNA, 15 bp, Homo sapiens
aaataatactctccc

SEQ ID NO: 1433445 - DNA, 15 bp, Homo sapiens
taaataatactctcc

SEQ ID NO: 1433446 - DNA, 15 bp, Homo sapiens
ttaaataatactctc

SEQ ID NO: 1433447 - DNA, 15 bp, Homo sapiens
tttaaataatactct

SEQ ID NO: 1433448 - DNA, 15 bp, Homo sapiens
ttttaaataatactc

SEQ ID NO: 1433449 - DNA, 15 bp, Homo sapiens
attttaaataatact

SEQ ID NO: 1433450 - DNA, 15 bp, Homo sapiens
aattttaaataatac

SEQ ID NO: 1433451 - DNA, 15 bp, Homo sapiens
taattttaaataata

SEQ ID NO: 1433452 - DNA, 15 bp, Homo sapiens
ataattttaaataat

SEQ ID NO: 1433453 - DNA, 15 bp, Homo sapiens
aataattttaaataa

SEQ ID NO: 1433454 - DNA, 15 bp, Homo sapiens
taataattttaaata

SEQ ID NO: 1433455 - DNA, 15 bp, Homo sapiens
ataataattttaaat

SEQ ID NO: 1433456 - DNA, 15 bp, Homo sapiens
cataataattttaaa

SEQ ID NO: 1433457 - DNA, 15 bp, Homo sapiens
acataataattttaa

SEQ ID NO: 1433458 - DNA, 15 bp, Homo sapiens
tacataataatttta

SEQ ID NO: 1433459 - DNA, 15 bp, Homo sapiens
ttacataataatttt

SEQ ID NO: 1433460 - DNA, 15 bp, Homo sapiens
tttacataataattt

SEQ ID NO: 1433461 - DNA, 15 bp, Homo sapiens
atttacataataatt

SEQ ID NO: 1433462 - DNA, 15 bp, Homo sapiens
tatttacataataat

SEQ ID NO: 1433463 - DNA, 15 bp, Homo sapiens
ttatttacataataa

SEQ ID NO: 1433464 - DNA, 15 bp, Homo sapiens
attatttacataata

SEQ ID NO: 1433465 - DNA, 15 bp, Homo sapiens
tattatttacataat

SEQ ID NO: 1433466 - DNA, 15 bp, Homo sapiens
ctattatttacataa

SEQ ID NO: 1433467 - DNA, 15 bp, Homo sapiens
actattatttacata

SEQ ID NO: 1433468 - DNA, 15 bp, Homo sapiens
aactattatttacat

SEQ ID NO: 1433469 - DNA, 15 bp, Homo sapiens
aaactattatttaca

SEQ ID NO: 1433470 - DNA, 15 bp, Homo sapiens
taaactattatttac

SEQ ID NO: 1433471 - DNA, 15 bp, Homo sapiens
ttaaactattattta

SEQ ID NO: 1433472 - DNA, 15 bp, Homo sapiens
tttaaactattattt

SEQ ID NO: 1433473 - DNA, 15 bp, Homo sapiens
ttttaaactattatt

SEQ ID NO: 1433474 - DNA, 15 bp, Homo sapiens
gttttaaactattat

SEQ ID NO: 1433475 - DNA, 15 bp, Homo sapiens
ggttttaaactatta

SEQ ID NO: 1433476 - DNA, 15 bp, Homo sapiens
tggttttaaactatt

SEQ ID NO: 1433477 - DNA, 15 bp, Homo sapiens
ttggttttaaactat

SEQ ID NO: 1433478 - DNA, 15 bp, Homo sapiens
attggttttaaacta

SEQ ID NO: 1433479 - DNA, 15 bp, Homo sapiens
tattggttttaaact

SEQ ID NO: 1433480 - DNA, 15 bp, Homo sapiens
ttattggttttaaac

SEQ ID NO: 1433481 - DNA, 15 bp, Homo sapiens
cttattggttttaaa

SEQ ID NO: 1433482 - DNA, 15 bp, Homo sapiens
acttattggttttaa

SEQ ID NO: 1433483 - DNA, 15 bp, Homo sapiens
aacttattggtttta

SEQ ID NO: 1433484 - DNA, 15 bp, Homo sapiens
aaacttattggtttt

SEQ ID NO: 1433485 - DNA, 15 bp, Homo sapiens
taaacttattggttt

SEQ ID NO: 1433486 - DNA, 15 bp, Homo sapiens
ttaaacttattggtt

SEQ ID NO: 1433487 - DNA, 15 bp, Homo sapiens
tttaaacttattggt

SEQ ID NO: 1433488 - DNA, 15 bp, Homo sapiens
atttaaacttattgg

SEQ ID NO: 1433489 - DNA, 15 bp, Homo sapiens
catttaaacttattg

SEQ ID NO: 1433490 - DNA, 15 bp, Homo sapiens
tcatttaaacttatt

SEQ ID NO: 1433491 - DNA, 15 bp, Homo sapiens
ttcatttaaacttat

SEQ ID NO: 1433492 - DNA, 15 bp, Homo sapiens
tttcatttaaactta

SEQ ID NO: 1433493 - DNA, 15 bp, Homo sapiens
atttcatttaaactt

SEQ ID NO: 1433494 - DNA, 15 bp, Homo sapiens
catttcatttaaact

SEQ ID NO: 1433495 - DNA, 15 bp, Homo sapiens
tcatttcatttaaac

SEQ ID NO: 1433496 - DNA, 15 bp, Homo sapiens
ttcatttcatttaaa

SEQ ID NO: 1433497 - DNA, 15 bp, Homo sapiens
gttcatttcatttaa

SEQ ID NO: 1433498 - DNA, 15 bp, Homo sapiens
agttcatttcattta

SEQ ID NO: 1433499 - DNA, 15 bp, Homo sapiens
aagttcatttcattt

SEQ ID NO: 1433500 - DNA, 15 bp, Homo sapiens
caagttcatttcatt

SEQ ID NO: 1433501 - DNA, 15 bp, Homo sapiens
tcaagttcatttcat

SEQ ID NO: 1433502 - DNA, 15 bp, Homo sapiens
atcaagttcatttca

SEQ ID NO: 1433503 - DNA, 15 bp, Homo sapiens
aatcaagttcatttc

SEQ ID NO: 1433504 - DNA, 15 bp, Homo sapiens
gaatcaagttcattt

SEQ ID NO: 1433505 - DNA, 15 bp, Homo sapiens
ggaatcaagttcatt

SEQ ID NO: 1433506 - DNA, 15 bp, Homo sapiens
tggaatcaagttcat

SEQ ID NO: 1433507 - DNA, 15 bp, Homo sapiens
ctggaatcaagttca

SEQ ID NO: 1433508 - DNA, 15 bp, Homo sapiens
tctggaatcaagttc

SEQ ID NO: 1433509 - DNA, 15 bp, Homo sapiens
gtctggaatcaagtt

SEQ ID NO: 1433510 - DNA, 15 bp, Homo sapiens
tgtctggaatcaagt

SEQ ID NO: 1433511 - DNA, 15 bp, Homo sapiens
atgtctggaatcaag

SEQ ID NO: 1433512 - DNA, 15 bp, Homo sapiens
aatgtctggaatcaa

SEQ ID NO: 1433513 - DNA, 15 bp, Homo sapiens
aaatgtctggaatca

SEQ ID NO: 1433514 - DNA, 15 bp, Homo sapiens
caaatgtctggaatc

SEQ ID NO: 1433515 - DNA, 15 bp, Homo sapiens
gcaaatgtctggaat

SEQ ID NO: 1433516 - DNA, 15 bp, Homo sapiens
tgcaaatgtctggaa

SEQ ID NO: 1433517 - DNA, 15 bp, Homo sapiens
atgcaaatgtctgga

SEQ ID NO: 1433518 - DNA, 15 bp, Homo sapiens
aatgcaaatgtctgg

SEQ ID NO: 1433519 - DNA, 15 bp, Homo sapiens
aaatgcaaatgtctg

SEQ ID NO: 1433520 - DNA, 15 bp, Homo sapiens
caaatgcaaatgtct

SEQ ID NO: 1433521 - DNA, 15 bp, Homo sapiens
gcaaatgcaaatgtc

SEQ ID NO: 1433522 - DNA, 15 bp, Homo sapiens
tgcaaatgcaaatgt

SEQ ID NO: 1433523 - DNA, 15 bp, Homo sapiens
atgcaaatgcaaatg

SEQ ID NO: 1433524 - DNA, 15 bp, Homo sapiens
tatgcaaatgcaaat

SEQ ID NO: 1433525 - DNA, 15 bp, Homo sapiens
ttatgcaaatgcaaa

SEQ ID NO: 1433526 - DNA, 15 bp, Homo sapiens
attatgcaaatgcaa

SEQ ID NO: 1433527 - DNA, 15 bp, Homo sapiens
aattatgcaaatgca

SEQ ID NO: 1433528 - DNA, 15 bp, Homo sapiens
taattatgcaaatgc

SEQ ID NO: 1433529 - DNA, 15 bp, Homo sapiens
ataattatgcaaatg

SEQ ID NO: 1433530 - DNA, 15 bp, Homo sapiens
tataattatgcaaat

SEQ ID NO: 1433531 - DNA, 15 bp, Homo sapiens
atataattatgcaaa

SEQ ID NO: 1433532 - DNA, 15 bp, Homo sapiens
tatataattatgcaa

SEQ ID NO: 1433533 - DNA, 15 bp, Homo sapiens
gtatataattatgca

SEQ ID NO: 1433534 - DNA, 15 bp, Homo sapiens
tgtatataattatgc

SEQ ID NO: 1433535 - DNA, 15 bp, Homo sapiens
atgtatataattatg

SEQ ID NO: 1433536 - DNA, 15 bp, Homo sapiens
aatgtatataattat

SEQ ID NO: 1433537 - DNA, 15 bp, Homo sapiens
caatgtatataatta

SEQ ID NO: 1433538 - DNA, 15 bp, Homo sapiens
ccaatgtatataatt

SEQ ID NO: 1433539 - DNA, 15 bp, Homo sapiens
tccaatgtatataat

SEQ ID NO: 1433540 - DNA, 15 bp, Homo sapiens
atccaatgtatataa

SEQ ID NO: 1433541 - DNA, 15 bp, Homo sapiens
catccaatgtatata

SEQ ID NO: 1433542 - DNA, 15 bp, Homo sapiens
ccatccaatgtatat

SEQ ID NO: 1433543 - DNA, 15 bp, Homo sapiens
gccatccaatgtata

SEQ ID NO: 1433544 - DNA, 15 bp, Homo sapiens
ggccatccaatgtat

SEQ ID NO: 1433545 - DNA, 15 bp, Homo sapiens
tggccatccaatgta

SEQ ID NO: 1433546 - DNA, 15 bp, Homo sapiens
ttggccatccaatgt

SEQ ID NO: 1433547 - DNA, 15 bp, Homo sapiens
tttggccatccaatg

SEQ ID NO: 1433548 - DNA, 15 bp, Homo sapiens
ttttggccatccaat

SEQ ID NO: 1433549 - DNA, 15 bp, Homo sapiens
tttttggccatccaa

SEQ ID NO: 1433550 - DNA, 15 bp, Homo sapiens
ttttttggccatcca

SEQ ID NO: 1433551 - DNA, 15 bp, Homo sapiens
tttttttggccatcc

SEQ ID NO: 1433552 - DNA, 15 bp, Homo sapiens
ttttttttggccatc

SEQ ID NO: 1433553 - DNA, 15 bp, Homo sapiens
tttttttttggccat

SEQ ID NO: 1433554 - DNA, 15 bp, Homo sapiens
ttttttttttggcca

SEQ ID NO: 1433555 - DNA, 15 bp, Homo sapiens
tttttttttttggcc

SEQ ID NO: 1433556 - DNA, 15 bp, Homo sapiens
caccttttttttttt

SEQ ID NO: 1433557 - DNA, 15 bp, Homo sapiens
tcacctttttttttt

SEQ ID NO: 1433558 - DNA, 15 bp, Homo sapiens
ctcaccttttttttt

SEQ ID NO: 1433559 - DNA, 15 bp, Homo sapiens
actcacctttttttt

SEQ ID NO: 1433560 - DNA, 15 bp, Homo sapiens
aactcaccttttttt

SEQ ID NO: 1433561 - DNA, 15 bp, Homo sapiens
aaactcacctttttt

SEQ ID NO: 1433562 - DNA, 15 bp, Homo sapiens
aaaactcaccttttt

SEQ ID NO: 1433563 - DNA, 15 bp, Homo sapiens
aaaaactcacctttt

SEQ ID NO: 1433564 - DNA, 15 bp, Homo sapiens
taaaaactcaccttt

SEQ ID NO: 1433565 - DNA, 15 bp, Homo sapiens
ttaaaaactcacctt

SEQ ID NO: 1433566 - DNA, 15 bp, Homo sapiens
tttaaaaactcacct

SEQ ID NO: 1433567 - DNA, 15 bp, Homo sapiens
ttttaaaaactcacc

SEQ ID NO: 1433568 - DNA, 15 bp, Homo sapiens
gttttaaaaactcac

SEQ ID NO: 1433569 - DNA, 15 bp, Homo sapiens
agttttaaaaactca

SEQ ID NO: 1433570 - DNA, 15 bp, Homo sapiens
cagttttaaaaactc

SEQ ID NO: 1433571 - DNA, 15 bp, Homo sapiens
gcagttttaaaaact

SEQ ID NO: 1433572 - DNA, 15 bp, Homo sapiens
ggcagttttaaaaac

SEQ ID NO: 1433573 - DNA, 15 bp, Homo sapiens
gggcagttttaaaaa

SEQ ID NO: 1433574 - DNA, 15 bp, Homo sapiens
agggcagttttaaaa

SEQ ID NO: 1433575 - DNA, 15 bp, Homo sapiens
gagggcagttttaaa

SEQ ID NO: 1433576 - DNA, 15 bp, Homo sapiens
agagggcagttttaa

SEQ ID NO: 1433577 - DNA, 15 bp, Homo sapiens
aagagggcagtttta

SEQ ID NO: 1433578 - DNA, 15 bp, Homo sapiens
caagagggcagtttt

SEQ ID NO: 1433579 - DNA, 15 bp, Homo sapiens
acaagagggcagttt

SEQ ID NO: 1433580 - DNA, 15 bp, Homo sapiens
tacaagagggcagtt

SEQ ID NO: 1433581 - DNA, 15 bp, Homo sapiens
atacaagagggcagt

SEQ ID NO: 1433582 - DNA, 15 bp, Homo sapiens
catacaagagggcag

SEQ ID NO: 1433583 - DNA, 15 bp, Homo sapiens
acatacaagagggca

SEQ ID NO: 1433584 - DNA, 15 bp, Homo sapiens
cacatacaagagggc

SEQ ID NO: 1433585 - DNA, 15 bp, Homo sapiens
tcacatacaagaggg

SEQ ID NO: 1433586 - DNA, 15 bp, Homo sapiens
ctcacatacaagagg

SEQ ID NO: 1433587 - DNA, 15 bp, Homo sapiens
tctcacatacaagag

SEQ ID NO: 1433588 - DNA, 15 bp, Homo sapiens
gtctcacatacaaga

SEQ ID NO: 1433589 - DNA, 15 bp, Homo sapiens
tgtctcacatacaag

SEQ ID NO: 1433590 - DNA, 15 bp, Homo sapiens
ttgtctcacatacaa

SEQ ID NO: 1433591 - DNA, 15 bp, Homo sapiens
cttgtctcacataca

SEQ ID NO: 1433592 - DNA, 15 bp, Homo sapiens
tcttgtctcacatac

SEQ ID NO: 1433593 - DNA, 15 bp, Homo sapiens
gtcttgtctcacata

SEQ ID NO: 1433594 - DNA, 15 bp, Homo sapiens
tgtcttgtctcacat

SEQ ID NO: 1433595 - DNA, 15 bp, Homo sapiens
ctgtcttgtctcaca

SEQ ID NO: 1433596 - DNA, 15 bp, Homo sapiens
tctgtcttgtctcac

SEQ ID NO: 1433597 - DNA, 15 bp, Homo sapiens
ctctgtcttgtctca

SEQ ID NO: 1433598 - DNA, 15 bp, Homo sapiens
actctgtcttgtctc

SEQ ID NO: 1433599 - DNA, 15 bp, Homo sapiens
cactctgtcttgtct

SEQ ID NO: 1433600 - DNA, 15 bp, Homo sapiens
tcactctgtcttgtc

SEQ ID NO: 1433601 - DNA, 15 bp, Homo sapiens
ctcactctgtcttgt

SEQ ID NO: 1433602 - DNA, 15 bp, Homo sapiens
actcactctgtcttg

SEQ ID NO: 1433603 - DNA, 15 bp, Homo sapiens
cactcactctgtctt

SEQ ID NO: 1433604 - DNA, 15 bp, Homo sapiens
tcactcactctgtct

SEQ ID NO: 1433605 - DNA, 15 bp, Homo sapiens
atcactcactctgtc

SEQ ID NO: 1433606 - DNA, 15 bp, Homo sapiens
aatcactcactctgt

SEQ ID NO: 1433607 - DNA, 15 bp, Homo sapiens
taatcactcactctg

SEQ ID NO: 1433608 - DNA, 15 bp, Homo sapiens
ctaatcactcactct

SEQ ID NO: 1433609 - DNA, 15 bp, Homo sapiens
tctaatcactcactc

SEQ ID NO: 1433610 - DNA, 15 bp, Homo sapiens
ctctaatcactcact

SEQ ID NO: 1433611 - DNA, 15 bp, Homo sapiens
tctctaatcactcac

SEQ ID NO: 1433612 - DNA, 15 bp, Homo sapiens
atctctaatcactca

SEQ ID NO: 1433613 - DNA, 15 bp, Homo sapiens
tatctctaatcactc

SEQ ID NO: 1433614 - DNA, 15 bp, Homo sapiens
ttatctctaatcact

SEQ ID NO: 1433615 - DNA, 15 bp, Homo sapiens
attatctctaatcac

SEQ ID NO: 1433616 - DNA, 15 bp, Homo sapiens
tattatctctaatca

SEQ ID NO: 1433617 - DNA, 15 bp, Homo sapiens
atattatctctaatc

SEQ ID NO: 1433618 - DNA, 15 bp, Homo sapiens
catattatctctaat

SEQ ID NO: 1433619 - DNA, 15 bp, Homo sapiens
ccatattatctctaa

SEQ ID NO: 1433620 - DNA, 15 bp, Homo sapiens
accatattatctcta

SEQ ID NO: 1433621 - DNA, 15 bp, Homo sapiens
aaccatattatctct

SEQ ID NO: 1433622 - DNA, 15 bp, Homo sapiens
taaccatattatctc

SEQ ID NO: 1433623 - DNA, 15 bp, Homo sapiens
ataaccatattatct

SEQ ID NO: 1433624 - DNA, 15 bp, Homo sapiens
aataaccatattatc

SEQ ID NO: 1433625 - DNA, 15 bp, Homo sapiens
aaataaccatattat

SEQ ID NO: 1433626 - DNA, 15 bp, Homo sapiens
gaaataaccatatta

SEQ ID NO: 1433627 - DNA, 15 bp, Homo sapiens
tgaaataaccatatt

SEQ ID NO: 1433628 - DNA, 15 bp, Homo sapiens
atgaaataaccatat

SEQ ID NO: 1433629 - DNA, 15 bp, Homo sapiens
aatgaaataaccata

SEQ ID NO: 1433630 - DNA, 15 bp, Homo sapiens
aaatgaaataaccat

SEQ ID NO: 1433631 - DNA, 15 bp, Homo sapiens
taaatgaaataacca

SEQ ID NO: 1433632 - DNA, 15 bp, Homo sapiens
ataaatgaaataacc

SEQ ID NO: 1433633 - DNA, 15 bp, Homo sapiens
aataaatgaaataac

SEQ ID NO: 1433634 - DNA, 15 bp, Homo sapiens
aaataaatgaaataa

SEQ ID NO: 1433635 - DNA, 15 bp, Homo sapiens
taaataaatgaaata

SEQ ID NO: 1433636 - DNA, 15 bp, Homo sapiens
ataaataaatgaaat

SEQ ID NO: 1433637 - DNA, 15 bp, Homo sapiens
aataaataaatgaaa

SEQ ID NO: 1433638 - DNA, 15 bp, Homo sapiens
aaataaataaatgaa

SEQ ID NO: 1433639 - DNA, 15 bp, Homo sapiens
taaataaataaatga

SEQ ID NO: 1433640 - DNA, 15 bp, Homo sapiens
caaaaataaataaat

SEQ ID NO: 1433641 - DNA, 15 bp, Homo sapiens
actcaaaaataaata

SEQ ID NO: 1433642 - DNA, 15 bp, Homo sapiens
gactcaaaaataaat

SEQ ID NO: 1433643 - DNA, 15 bp, Homo sapiens
agactcaaaaataaa

SEQ ID NO: 1433644 - DNA, 15 bp, Homo sapiens
gagactcaaaaataa

SEQ ID NO: 1433645 - DNA, 15 bp, Homo sapiens
tgagactcaaaaata

SEQ ID NO: 1433646 - DNA, 15 bp, Homo sapiens
atgagactcaaaaat

SEQ ID NO: 1433647 - DNA, 15 bp, Homo sapiens
aatgagactcaaaaa

SEQ ID NO: 1433648 - DNA, 15 bp, Homo sapiens
gaatgagactcaaaa

SEQ ID NO: 1433649 - DNA, 15 bp, Homo sapiens
agaatgagactcaaa

SEQ ID NO: 1433650 - DNA, 15 bp, Homo sapiens
cagaatgagactcaa

SEQ ID NO: 1433651 - DNA, 15 bp, Homo sapiens
acagaatgagactca

SEQ ID NO: 1433652 - DNA, 15 bp, Homo sapiens
aacagaatgagactc

SEQ ID NO: 1433653 - DNA, 15 bp, Homo sapiens
caacagaatgagact

SEQ ID NO: 1433654 - DNA, 15 bp, Homo sapiens
acaacagaatgagac

SEQ ID NO: 1433655 - DNA, 15 bp, Homo sapiens
gacaacagaatgaga

SEQ ID NO: 1433656 - DNA, 15 bp, Homo sapiens
ggacaacagaatgag

SEQ ID NO: 1433657 - DNA, 15 bp, Homo sapiens
tggacaacagaatga

SEQ ID NO: 1433658 - DNA, 15 bp, Homo sapiens
ctggacaacagaatg

SEQ ID NO: 1433659 - DNA, 15 bp, Homo sapiens
cctggacaacagaat

SEQ ID NO: 1433660 - DNA, 15 bp, Homo sapiens
gcctggacaacagaa

SEQ ID NO: 1433661 - DNA, 15 bp, Homo sapiens
agcctggacaacaga

SEQ ID NO: 1433662 - DNA, 15 bp, Homo sapiens
cagcctggacaacag

SEQ ID NO: 1433663 - DNA, 15 bp, Homo sapiens
agttgcagtgagctg

SEQ ID NO: 1433664 - DNA, 15 bp, Homo sapiens
aagttgcagtgagct

SEQ ID NO: 1433665 - DNA, 15 bp, Homo sapiens
gaagttgcagtgagc

SEQ ID NO: 1433666 - DNA, 15 bp, Homo sapiens
ggaagttgcagtgag

SEQ ID NO: 1433667 - DNA, 15 bp, Homo sapiens
cggaagttgcagtga

SEQ ID NO: 1433668 - DNA, 15 bp, Homo sapiens
gcggaagttgcagtg

SEQ ID NO: 1433669 - DNA, 15 bp, Homo sapiens
ggcggaagttgcagt

SEQ ID NO: 1433670 - DNA, 15 bp, Homo sapiens
aggcggaagttgcag

SEQ ID NO: 1433671 - DNA, 15 bp, Homo sapiens
gaggcggaagttgca

SEQ ID NO: 1433672 - DNA, 15 bp, Homo sapiens
ggaggcggaagttgc

SEQ ID NO: 1433673 - DNA, 15 bp, Homo sapiens
aggaggcggaagttg

SEQ ID NO: 1433674 - DNA, 15 bp, Homo sapiens
caggaggcggaagtt

SEQ ID NO: 1433675 - DNA, 15 bp, Homo sapiens
ccaggaggcggaagt

SEQ ID NO: 1433676 - DNA, 15 bp, Homo sapiens
cccaggaggcggaag

SEQ ID NO: 1433677 - DNA, 15 bp, Homo sapiens
acccaggaggcggaa

SEQ ID NO: 1433678 - DNA, 15 bp, Homo sapiens
tgcaggggaattgct

SEQ ID NO: 1433679 - DNA, 15 bp, Homo sapiens
atgcaggggaattgc

SEQ ID NO: 1433680 - DNA, 15 bp, Homo sapiens
gatgcaggggaattg

SEQ ID NO: 1433681 - DNA, 15 bp, Homo sapiens
tgatgcaggggaatt

SEQ ID NO: 1433682 - DNA, 15 bp, Homo sapiens
ctgatgcaggggaat

SEQ ID NO: 1433683 - DNA, 15 bp, Homo sapiens
gctgatgcaggggaa

SEQ ID NO: 1433684 - DNA, 15 bp, Homo sapiens
ggctgatgcagggga

SEQ ID NO: 1433685 - DNA, 15 bp, Homo sapiens
tggctgatgcagggg

SEQ ID NO: 1433686 - DNA, 15 bp, Homo sapiens
gtggctgatgcaggg

SEQ ID NO: 1433687 - DNA, 15 bp, Homo sapiens
ggtggctgatgcagg

SEQ ID NO: 1433688 - DNA, 15 bp, Homo sapiens
gggtggctgatgcag

SEQ ID NO: 1433689 - DNA, 15 bp, Homo sapiens
tgggtggctgatgca

SEQ ID NO: 1433690 - DNA, 15 bp, Homo sapiens
ttgggtggctgatgc

SEQ ID NO: 1433691 - DNA, 15 bp, Homo sapiens
cttgggtggctgatg

SEQ ID NO: 1433692 - DNA, 15 bp, Homo sapiens
acttgggtggctgat

SEQ ID NO: 1433693 - DNA, 15 bp, Homo sapiens
tacttgggtggctga

SEQ ID NO: 1433694 - DNA, 15 bp, Homo sapiens
ctacttgggtggctg

SEQ ID NO: 1433695 - DNA, 15 bp, Homo sapiens
gctacttgggtggct

SEQ ID NO: 1433696 - DNA, 15 bp, Homo sapiens
agctacttgggtggc

SEQ ID NO: 1433697 - DNA, 15 bp, Homo sapiens
cagctacttgggtgg

SEQ ID NO: 1433698 - DNA, 15 bp, Homo sapiens
ccagctacttgggtg

SEQ ID NO: 1433699 - DNA, 15 bp, Homo sapiens
cccagctacttgggt

SEQ ID NO: 1433700 - DNA, 15 bp, Homo sapiens
gcccagctacttggg

SEQ ID NO: 1433701 - DNA, 15 bp, Homo sapiens
agcccagctacttgg

SEQ ID NO: 1433702 - DNA, 15 bp, Homo sapiens
aagcccagctacttg

SEQ ID NO: 1433703 - DNA, 15 bp, Homo sapiens
taagcccagctactt

SEQ ID NO: 1433704 - DNA, 15 bp, Homo sapiens
cgtaagcccagctac

SEQ ID NO: 1433705 - DNA, 15 bp, Homo sapiens
ccgtaagcccagcta

SEQ ID NO: 1433706 - DNA, 15 bp, Homo sapiens
cccgtaagcccagct

SEQ ID NO: 1433707 - DNA, 15 bp, Homo sapiens
gcccgtaagcccagc

SEQ ID NO: 1433708 - DNA, 15 bp, Homo sapiens
tgcccgtaagcccag

SEQ ID NO: 1433709 - DNA, 15 bp, Homo sapiens
atgcccgtaagccca

SEQ ID NO: 1433710 - DNA, 15 bp, Homo sapiens
catgcccgtaagccc

SEQ ID NO: 1433711 - DNA, 15 bp, Homo sapiens
acatgcccgtaagcc

SEQ ID NO: 1433712 - DNA, 15 bp, Homo sapiens
cacatgcccgtaagc

SEQ ID NO: 1433713 - DNA, 15 bp, Homo sapiens
gcacatgcccgtaag

SEQ ID NO: 1433714 - DNA, 15 bp, Homo sapiens
agcacatgcccgtaa

SEQ ID NO: 1433715 - DNA, 15 bp, Homo sapiens
tagcacatgcccgta

SEQ ID NO: 1433716 - DNA, 15 bp, Homo sapiens
gtagcacatgcccgt

SEQ ID NO: 1433717 - DNA, 15 bp, Homo sapiens
ggtagcacatgcccg

SEQ ID NO: 1433718 - DNA, 15 bp, Homo sapiens
tggtagcacatgccc

SEQ ID NO: 1433719 - DNA, 15 bp, Homo sapiens
gtggtagcacatgcc

SEQ ID NO: 1433720 - DNA, 15 bp, Homo sapiens
tgtggtagcacatgc

SEQ ID NO: 1433721 - DNA, 15 bp, Homo sapiens
gtgtggtagcacatg

SEQ ID NO: 1433722 - DNA, 15 bp, Homo sapiens
ggtgtggtagcacat

SEQ ID NO: 1433723 - DNA, 15 bp, Homo sapiens
gggtgtggtagcaca

SEQ ID NO: 1433724 - DNA, 15 bp, Homo sapiens
tgggtgtggtagcac

SEQ ID NO: 1433725 - DNA, 15 bp, Homo sapiens
ctgggtgtggtagca

SEQ ID NO: 1433726 - DNA, 15 bp, Homo sapiens
gctgggtgtggtagc

SEQ ID NO: 1433727 - DNA, 15 bp, Homo sapiens
agctgggtgtggtag

SEQ ID NO: 1433728 - DNA, 15 bp, Homo sapiens
tagctgggtgtggta

SEQ ID NO: 1433729 - DNA, 15 bp, Homo sapiens
tatacaaaaattagc

SEQ ID NO: 1433730 - DNA, 15 bp, Homo sapiens
atatacaaaaattag

SEQ ID NO: 1433731 - DNA, 15 bp, Homo sapiens
aaatatacaaaaatt

SEQ ID NO: 1433732 - DNA, 15 bp, Homo sapiens
taaatatacaaaaat

SEQ ID NO: 1433733 - DNA, 15 bp, Homo sapiens
ctaaatatacaaaaa

SEQ ID NO: 1433734 - DNA, 15 bp, Homo sapiens
actaaatatacaaaa

SEQ ID NO: 1433735 - DNA, 15 bp, Homo sapiens
tactaaatatacaaa

SEQ ID NO: 1433736 - DNA, 15 bp, Homo sapiens
ctactaaatatacaa

SEQ ID NO: 1433737 - DNA, 15 bp, Homo sapiens
tctactaaatataca

SEQ ID NO: 1433738 - DNA, 15 bp, Homo sapiens
ctctactaaatatac

SEQ ID NO: 1433739 - DNA, 15 bp, Homo sapiens
tctctactaaatata

SEQ ID NO: 1433740 - DNA, 15 bp, Homo sapiens
gtctctactaaatat

SEQ ID NO: 1433741 - DNA, 15 bp, Homo sapiens
tgtctctactaaata

SEQ ID NO: 1433742 - DNA, 15 bp, Homo sapiens
ctgtctctactaaat

SEQ ID NO: 1433743 - DNA, 15 bp, Homo sapiens
cgcctggccaacata

SEQ ID NO: 1433744 - DNA, 15 bp, Homo sapiens
ccgcctggccaacat

SEQ ID NO: 1433745 - DNA, 15 bp, Homo sapiens
cccgcctggccaaca

SEQ ID NO: 1433746 - DNA, 15 bp, Homo sapiens
acccgcctggccaac

SEQ ID NO: 1433747 - DNA, 15 bp, Homo sapiens
gacccgcctggccaa

SEQ ID NO: 1433748 - DNA, 15 bp, Homo sapiens
agacccgcctggcca

SEQ ID NO: 1433749 - DNA, 15 bp, Homo sapiens
gagacccgcctggcc

SEQ ID NO: 1433750 - DNA, 15 bp, Homo sapiens
ggagacccgcctggc

SEQ ID NO: 1433751 - DNA, 15 bp, Homo sapiens
tggagacccgcctgg

SEQ ID NO: 1433752 - DNA, 15 bp, Homo sapiens
ttggagacccgcctg

SEQ ID NO: 1433753 - DNA, 15 bp, Homo sapiens
gttggagacccgcct

SEQ ID NO: 1433754 - DNA, 15 bp, Homo sapiens
agttggagacccgcc

SEQ ID NO: 1433755 - DNA, 15 bp, Homo sapiens
gagttggagacccgc

SEQ ID NO: 1433756 - DNA, 15 bp, Homo sapiens
ggagttggagacccg

SEQ ID NO: 1433757 - DNA, 15 bp, Homo sapiens
aggagttggagaccc

SEQ ID NO: 1433758 - DNA, 15 bp, Homo sapiens
agggggatcacttga

SEQ ID NO: 1433759 - DNA, 15 bp, Homo sapiens
cagggggatcacttg

SEQ ID NO: 1433760 - DNA, 15 bp, Homo sapiens
gcagggggatcactt

SEQ ID NO: 1433761 - DNA, 15 bp, Homo sapiens
ggcagggggatcact

SEQ ID NO: 1433762 - DNA, 15 bp, Homo sapiens
aggcagggggatcac

SEQ ID NO: 1433763 - DNA, 15 bp, Homo sapiens
gaggcagggggatca

SEQ ID NO: 1433764 - DNA, 15 bp, Homo sapiens
tgaggcagggggatc

SEQ ID NO: 1433765 - DNA, 15 bp, Homo sapiens
ctgaggcagggggat

SEQ ID NO: 1433766 - DNA, 15 bp, Homo sapiens
gctgaggcaggggga

SEQ ID NO: 1433767 - DNA, 15 bp, Homo sapiens
ggctgaggcaggggg

SEQ ID NO: 1433768 - DNA, 15 bp, Homo sapiens
gttggctcacgcctg

SEQ ID NO: 1433769 - DNA, 15 bp, Homo sapiens
tgttggctcacgcct

SEQ ID NO: 1433770 - DNA, 15 bp, Homo sapiens
gtgttggctcacgcc

SEQ ID NO: 1433771 - DNA, 15 bp, Homo sapiens
cgtgttggctcacgc

SEQ ID NO: 1433772 - DNA, 15 bp, Homo sapiens
gcgtgttggctcacg

SEQ ID NO: 1433773 - DNA, 15 bp, Homo sapiens
ggcgtgttggctcac

SEQ ID NO: 1433774 - DNA, 15 bp, Homo sapiens
gggcgtgttggctca

SEQ ID NO: 1433775 - DNA, 15 bp, Homo sapiens
cgggcgtgttggctc

SEQ ID NO: 1433776 - DNA, 15 bp, Homo sapiens
ccgggcgtgttggct

SEQ ID NO: 1433777 - DNA, 15 bp, Homo sapiens
accgggcgtgttggc

SEQ ID NO: 1433778 - DNA, 15 bp, Homo sapiens
gaccgggcgtgttgg

SEQ ID NO: 1433779 - DNA, 15 bp, Homo sapiens
agaccgggcgtgttg

SEQ ID NO: 1433780 - DNA, 15 bp, Homo sapiens
tagaccgggcgtgtt

SEQ ID NO: 1433781 - DNA, 15 bp, Homo sapiens
atagaccgggcgtgt

SEQ ID NO: 1433782 - DNA, 15 bp, Homo sapiens
tatagaccgggcgtg

SEQ ID NO: 1433783 - DNA, 15 bp, Homo sapiens
atatagaccgggcgt

SEQ ID NO: 1433784 - DNA, 15 bp, Homo sapiens
catatagaccgggcg

SEQ ID NO: 1433785 - DNA, 15 bp, Homo sapiens
acatatagaccgggc

SEQ ID NO: 1433786 - DNA, 15 bp, Homo sapiens
aacatatagaccggg

SEQ ID NO: 1433787 - DNA, 15 bp, Homo sapiens
aaacatatagaccgg

SEQ ID NO: 1433788 - DNA, 15 bp, Homo sapiens
taaacatatagaccg

SEQ ID NO: 1433789 - DNA, 15 bp, Homo sapiens
ataaacatatagacc

SEQ ID NO: 1433790 - DNA, 15 bp, Homo sapiens
aataaacatatagac

SEQ ID NO: 1433791 - DNA, 15 bp, Homo sapiens
aaataaacatataga

SEQ ID NO: 1433792 - DNA, 15 bp, Homo sapiens
aaaataaacatatag

SEQ ID NO: 1433793 - DNA, 15 bp, Homo sapiens
aaaaataaacatata

SEQ ID NO: 1433794 - DNA, 15 bp, Homo sapiens
taaaaataaacatat

SEQ ID NO: 1433795 - DNA, 15 bp, Homo sapiens
ataaaaataaacata

SEQ ID NO: 1433796 - DNA, 15 bp, Homo sapiens
aataaaaataaacat

SEQ ID NO: 1433797 - DNA, 15 bp, Homo sapiens
aaaataaaaataaac

SEQ ID NO: 1433798 - DNA, 15 bp, Homo sapiens
actcaaaataaaaat

SEQ ID NO: 1433799 - DNA, 15 bp, Homo sapiens
aactcaaaataaaaa

SEQ ID NO: 1433800 - DNA, 15 bp, Homo sapiens
aaactcaaaataaaa

SEQ ID NO: 1433801 - DNA, 15 bp, Homo sapiens
aaaactcaaaataaa

SEQ ID NO: 1433802 - DNA, 15 bp, Homo sapiens
aaaaactcaaaataa

SEQ ID NO: 1433803 - DNA, 15 bp, Homo sapiens
aaaaaactcaaaata

SEQ ID NO: 1433804 - DNA, 15 bp, Homo sapiens
aaaaaaactcaaaat

SEQ ID NO: 1433805 - DNA, 15 bp, Homo sapiens
aaaaaaaactcaaaa

SEQ ID NO: 1433806 - DNA, 15 bp, Homo sapiens
aaaaaaaaactcaaa

SEQ ID NO: 1433807 - DNA, 15 bp, Homo sapiens
gaaaaaaaaactcaa

SEQ ID NO: 1433808 - DNA, 15 bp, Homo sapiens
ggaaaaaaaaactca

SEQ ID NO: 1433809 - DNA, 15 bp, Homo sapiens
gggaaaaaaaaactc

SEQ ID NO: 1433810 - DNA, 15 bp, Homo sapiens
ggggaaaaaaaaact

SEQ ID NO: 1433811 - DNA, 15 bp, Homo sapiens
aggggaaaaaaaaac

SEQ ID NO: 1433812 - DNA, 15 bp, Homo sapiens
aaggggaaaaaaaaa

SEQ ID NO: 1433813 - DNA, 15 bp, Homo sapiens
gaaggggaaaaaaaa

SEQ ID NO: 1433814 - DNA, 15 bp, Homo sapiens
ggaaggggaaaaaaa

SEQ ID NO: 1433815 - DNA, 15 bp, Homo sapiens
aggaaggggaaaaaa

SEQ ID NO: 1433816 - DNA, 15 bp, Homo sapiens
gaggaaggggaaaaa

SEQ ID NO: 1433817 - DNA, 15 bp, Homo sapiens
agaggaaggggaaaa

SEQ ID NO: 1433818 - DNA, 15 bp, Homo sapiens
tagaggaaggggaaa

SEQ ID NO: 1433819 - DNA, 15 bp, Homo sapiens
ttagaggaaggggaa

SEQ ID NO: 1433820 - DNA, 15 bp, Homo sapiens
attagaggaagggga

SEQ ID NO: 1433821 - DNA, 15 bp, Homo sapiens
tattagaggaagggg

SEQ ID NO: 1433822 - DNA, 15 bp, Homo sapiens
ttattagaggaaggg

SEQ ID NO: 1433823 - DNA, 15 bp, Homo sapiens
attattagaggaagg

SEQ ID NO: 1433824 - DNA, 15 bp, Homo sapiens
tattattagaggaag

SEQ ID NO: 1433825 - DNA, 15 bp, Homo sapiens
ttattattagaggaa

SEQ ID NO: 1433826 - DNA, 15 bp, Homo sapiens
tttattattagagga

SEQ ID NO: 1433827 - DNA, 15 bp, Homo sapiens
ttttattattagagg

SEQ ID NO: 1433828 - DNA, 15 bp, Homo sapiens
tttttattattagag

SEQ ID NO: 1433829 - DNA, 15 bp, Homo sapiens
gtttttattattaga

SEQ ID NO: 1433830 - DNA, 15 bp, Homo sapiens
ggtttttattattag

SEQ ID NO: 1433831 - DNA, 15 bp, Homo sapiens
aggtttttattatta

SEQ ID NO: 1433832 - DNA, 15 bp, Homo sapiens
taggtttttattatt

SEQ ID NO: 1433833 - DNA, 15 bp, Homo sapiens
ctaggtttttattat

SEQ ID NO: 1433834 - DNA, 15 bp, Homo sapiens
tctaggtttttatta

SEQ ID NO: 1433835 - DNA, 15 bp, Homo sapiens
ttctaggtttttatt

SEQ ID NO: 1433836 - DNA, 15 bp, Homo sapiens
tttctaggtttttat

SEQ ID NO: 1433837 - DNA, 15 bp, Homo sapiens
gtttctaggttttta

SEQ ID NO: 1433838 - DNA, 15 bp, Homo sapiens
tgtttctaggttttt

SEQ ID NO: 1433839 - DNA, 15 bp, Homo sapiens
ttgtttctaggtttt

SEQ ID NO: 1433840 - DNA, 15 bp, Homo sapiens
tttgtttctaggttt

SEQ ID NO: 1433841 - DNA, 15 bp, Homo sapiens
ctttgtttctaggtt

SEQ ID NO: 1433842 - DNA, 15 bp, Homo sapiens
cctttgtttctaggt

SEQ ID NO: 1433843 - DNA, 15 bp, Homo sapiens
tcctttgtttctagg

SEQ ID NO: 1433844 - DNA, 15 bp, Homo sapiens
atcctttgtttctag

SEQ ID NO: 1433845 - DNA, 15 bp, Homo sapiens
tatcctttgtttcta

SEQ ID NO: 1433846 - DNA, 15 bp, Homo sapiens
ttatcctttgtttct

SEQ ID NO: 1433847 - DNA, 15 bp, Homo sapiens
tttatcctttgtttc

SEQ ID NO: 1433848 - DNA, 15 bp, Homo sapiens
ttttatcctttgttt

SEQ ID NO: 1433849 - DNA, 15 bp, Homo sapiens
cttttatcctttgtt

SEQ ID NO: 1433850 - DNA, 15 bp, Homo sapiens
ccttttatcctttgt

SEQ ID NO: 1433851 - DNA, 15 bp, Homo sapiens
gccttttatcctttg

SEQ ID NO: 1433852 - DNA, 15 bp, Homo sapiens
agccttttatccttt

SEQ ID NO: 1433853 - DNA, 15 bp, Homo sapiens
gagccttttatcctt

SEQ ID NO: 1433854 - DNA, 15 bp, Homo sapiens
ggagccttttatcct

SEQ ID NO: 1433855 - DNA, 15 bp, Homo sapiens
aggagccttttatcc

SEQ ID NO: 1433856 - DNA, 15 bp, Homo sapiens
aaggagccttttatc

SEQ ID NO: 1433857 - DNA, 15 bp, Homo sapiens
gaaggagccttttat

SEQ ID NO: 1433858 - DNA, 15 bp, Homo sapiens
agaaggagcctttta

SEQ ID NO: 1433859 - DNA, 15 bp, Homo sapiens
tagaaggagcctttt

SEQ ID NO: 1433860 - DNA, 15 bp, Homo sapiens
ttagaaggagccttt

SEQ ID NO: 1433861 - DNA, 15 bp, Homo sapiens
cttagaaggagcctt

SEQ ID NO: 1433862 - DNA, 15 bp, Homo sapiens
tcttagaaggagcct

SEQ ID NO: 1433863 - DNA, 15 bp, Homo sapiens
ttcttagaaggagcc

SEQ ID NO: 1433864 - DNA, 15 bp, Homo sapiens
tttcttagaaggagc

SEQ ID NO: 1433865 - DNA, 15 bp, Homo sapiens
gtttcttagaaggag

SEQ ID NO: 1433866 - DNA, 15 bp, Homo sapiens
ggtttcttagaagga

SEQ ID NO: 1433867 - DNA, 15 bp, Homo sapiens
tggtttcttagaagg

SEQ ID NO: 1433868 - DNA, 15 bp, Homo sapiens
ctggtttcttagaag

SEQ ID NO: 1433869 - DNA, 15 bp, Homo sapiens
actggtttcttagaa

SEQ ID NO: 1433870 - DNA, 15 bp, Homo sapiens
tactggtttcttaga

SEQ ID NO: 1433871 - DNA, 15 bp, Homo sapiens
gtactggtttcttag

SEQ ID NO: 1433872 - DNA, 15 bp, Homo sapiens
agtactggtttctta

SEQ ID NO: 1433873 - DNA, 15 bp, Homo sapiens
gagtactggtttctt

SEQ ID NO: 1433874 - DNA, 15 bp, Homo sapiens
agagtactggtttct

SEQ ID NO: 1433875 - DNA, 15 bp, Homo sapiens
tagagtactggtttc

SEQ ID NO: 1433876 - DNA, 15 bp, Homo sapiens
ctagagtactggttt

SEQ ID NO: 1433877 - DNA, 15 bp, Homo sapiens
tctagagtactggtt

SEQ ID NO: 1433878 - DNA, 15 bp, Homo sapiens
ttctagagtactggt

SEQ ID NO: 1433879 - DNA, 15 bp, Homo sapiens
cttctagagtactgg

SEQ ID NO: 1433880 - DNA, 15 bp, Homo sapiens
acttctagagtactg

SEQ ID NO: 1433881 - DNA, 15 bp, Homo sapiens
cacttctagagtact

SEQ ID NO: 1433882 - DNA, 15 bp, Homo sapiens
tcacttctagagtac

SEQ ID NO: 1433883 - DNA, 15 bp, Homo sapiens
ctcacttctagagta

SEQ ID NO: 1433884 - DNA, 15 bp, Homo sapiens
tctcacttctagagt

SEQ ID NO: 1433885 - DNA, 15 bp, Homo sapiens
ctctcacttctagag

SEQ ID NO: 1433886 - DNA, 15 bp, Homo sapiens
tctctcacttctaga

SEQ ID NO: 1433887 - DNA, 15 bp, Homo sapiens
ttctctcacttctag

SEQ ID NO: 1433888 - DNA, 15 bp, Homo sapiens
tttctctcacttcta

SEQ ID NO: 1433889 - DNA, 15 bp, Homo sapiens
atttctctcacttct

SEQ ID NO: 1433890 - DNA, 15 bp, Homo sapiens
catttctctcacttc

SEQ ID NO: 1433891 - DNA, 15 bp, Homo sapiens
gcatttctctcactt

SEQ ID NO: 1433892 - DNA, 15 bp, Homo sapiens
tgcatttctctcact

SEQ ID NO: 1433893 - DNA, 15 bp, Homo sapiens
atgcatttctctcac

SEQ ID NO: 1433894 - DNA, 15 bp, Homo sapiens
aatgcatttctctca

SEQ ID NO: 1433895 - DNA, 15 bp, Homo sapiens
taatgcatttctctc

SEQ ID NO: 1433896 - DNA, 15 bp, Homo sapiens
ttaatgcatttctct

SEQ ID NO: 1433897 - DNA, 15 bp, Homo sapiens
cttaatgcatttctc

SEQ ID NO: 1433898 - DNA, 15 bp, Homo sapiens
ccttaatgcatttct

SEQ ID NO: 1433899 - DNA, 15 bp, Homo sapiens
tccttaatgcatttc

SEQ ID NO: 1433900 - DNA, 15 bp, Homo sapiens
ctccttaatgcattt

SEQ ID NO: 1433901 - DNA, 15 bp, Homo sapiens
tctccttaatgcatt

SEQ ID NO: 1433902 - DNA, 15 bp, Homo sapiens
ttctccttaatgcat

SEQ ID NO: 1433903 - DNA, 15 bp, Homo sapiens
cttctccttaatgca

SEQ ID NO: 1433904 - DNA, 15 bp, Homo sapiens
tcttctccttaatgc

SEQ ID NO: 1433905 - DNA, 15 bp, Homo sapiens
ttcttctccttaatg

SEQ ID NO: 1433906 - DNA, 15 bp, Homo sapiens
tttcttctccttaat

SEQ ID NO: 1433907 - DNA, 15 bp, Homo sapiens
ttttcttctccttaa

SEQ ID NO: 1433908 - DNA, 15 bp, Homo sapiens
tttttcttctcctta

SEQ ID NO: 1433909 - DNA, 15 bp, Homo sapiens
gtttttcttctcctt

SEQ ID NO: 1433910 - DNA, 15 bp, Homo sapiens
agtttttcttctcct

SEQ ID NO: 1433911 - DNA, 15 bp, Homo sapiens
aagtttttcttctcc

SEQ ID NO: 1433912 - DNA, 15 bp, Homo sapiens
taagtttttcttctc

SEQ ID NO: 1433913 - DNA, 15 bp, Homo sapiens
ctaagtttttcttct

SEQ ID NO: 1433914 - DNA, 15 bp, Homo sapiens
cctaagtttttcttc

SEQ ID NO: 1433915 - DNA, 15 bp, Homo sapiens
acctaagtttttctt

SEQ ID NO: 1433916 - DNA, 15 bp, Homo sapiens
cacctaagtttttct

SEQ ID NO: 1433917 - DNA, 15 bp, Homo sapiens
ccacctaagtttttc

SEQ ID NO: 1433918 - DNA, 15 bp, Homo sapiens
cccacctaagttttt

SEQ ID NO: 1433919 - DNA, 15 bp, Homo sapiens
tcccacctaagtttt

SEQ ID NO: 1433920 - DNA, 15 bp, Homo sapiens
gtcccacctaagttt

SEQ ID NO: 1433921 - DNA, 15 bp, Homo sapiens
agtcccacctaagtt

SEQ ID NO: 1433922 - DNA, 15 bp, Homo sapiens
cagtcccacctaagt

SEQ ID NO: 1433923 - DNA, 15 bp, Homo sapiens
tcagtcccacctaag

SEQ ID NO: 1433924 - DNA, 15 bp, Homo sapiens
ttcagtcccacctaa

SEQ ID NO: 1433925 - DNA, 15 bp, Homo sapiens
attcagtcccaccta

SEQ ID NO: 1433926 - DNA, 15 bp, Homo sapiens
tattcagtcccacct

SEQ ID NO: 1433927 - DNA, 15 bp, Homo sapiens
ttattcagtcccacc

SEQ ID NO: 1433928 - DNA, 15 bp, Homo sapiens
cttattcagtcccac

SEQ ID NO: 1433929 - DNA, 15 bp, Homo sapiens
ccttattcagtccca

SEQ ID NO: 1433930 - DNA, 15 bp, Homo sapiens
gccttattcagtccc

SEQ ID NO: 1433931 - DNA, 15 bp, Homo sapiens
agccttattcagtcc

SEQ ID NO: 1433932 - DNA, 15 bp, Homo sapiens
aagccttattcagtc

SEQ ID NO: 1433933 - DNA, 15 bp, Homo sapiens
gaagccttattcagt

SEQ ID NO: 1433934 - DNA, 15 bp, Homo sapiens
tgaagccttattcag

SEQ ID NO: 1433935 - DNA, 15 bp, Homo sapiens
ctgaagccttattca

SEQ ID NO: 1433936 - DNA, 15 bp, Homo sapiens
cctgaagccttattc

SEQ ID NO: 1433937 - DNA, 15 bp, Homo sapiens
gcctgaagccttatt

SEQ ID NO: 1433938 - DNA, 15 bp, Homo sapiens
tgcctgaagccttat

SEQ ID NO: 1433939 - DNA, 15 bp, Homo sapiens
atgcctgaagcctta

SEQ ID NO: 1433940 - DNA, 15 bp, Homo sapiens
aatgcctgaagcctt

SEQ ID NO: 1433941 - DNA, 15 bp, Homo sapiens
taatgcctgaagcct

SEQ ID NO: 1433942 - DNA, 15 bp, Homo sapiens
gtaatgcctgaagcc

SEQ ID NO: 1433943 - DNA, 15 bp, Homo sapiens
cgtaatgcctgaagc

SEQ ID NO: 1433944 - DNA, 15 bp, Homo sapiens
acgtaatgcctgaag

SEQ ID NO: 1433945 - DNA, 15 bp, Homo sapiens
aacgtaatgcctgaa

SEQ ID NO: 1433946 - DNA, 15 bp, Homo sapiens
aaacgtaatgcctga

SEQ ID NO: 1433947 - DNA, 15 bp, Homo sapiens
caaacgtaatgcctg

SEQ ID NO: 1433948 - DNA, 15 bp, Homo sapiens
gcaaacgtaatgcct

SEQ ID NO: 1433949 - DNA, 15 bp, Homo sapiens
agcaaacgtaatgcc

SEQ ID NO: 1433950 - DNA, 15 bp, Homo sapiens
cagcaaacgtaatgc

SEQ ID NO: 1433951 - DNA, 15 bp, Homo sapiens
tcagcaaacgtaatg

SEQ ID NO: 1433952 - DNA, 15 bp, Homo sapiens
ttcagcaaacgtaat

SEQ ID NO: 1433953 - DNA, 15 bp, Homo sapiens
cttcagcaaacgtaa

SEQ ID NO: 1433954 - DNA, 15 bp, Homo sapiens
acttcagcaaacgta

SEQ ID NO: 1433955 - DNA, 15 bp, Homo sapiens
aacttcagcaaacgt

SEQ ID NO: 1433956 - DNA, 15 bp, Homo sapiens
caacttcagcaaacg

SEQ ID NO: 1433957 - DNA, 15 bp, Homo sapiens
ccaacttcagcaaac

SEQ ID NO: 1433958 - DNA, 15 bp, Homo sapiens
tccaacttcagcaaa

SEQ ID NO: 1433959 - DNA, 15 bp, Homo sapiens
atccaacttcagcaa

SEQ ID NO: 1433960 - DNA, 15 bp, Homo sapiens
catccaacttcagca

SEQ ID NO: 1433961 - DNA, 15 bp, Homo sapiens
acatccaacttcagc

SEQ ID NO: 1433962 - DNA, 15 bp, Homo sapiens
tacatccaacttcag

SEQ ID NO: 1433963 - DNA, 15 bp, Homo sapiens
gtacatccaacttca

SEQ ID NO: 1433964 - DNA, 15 bp, Homo sapiens
ggtacatccaacttc

SEQ ID NO: 1433965 - DNA, 15 bp, Homo sapiens
aggtacatccaactt

SEQ ID NO: 1433966 - DNA, 15 bp, Homo sapiens
taggtacatccaact

SEQ ID NO: 1433967 - DNA, 15 bp, Homo sapiens
ttaggtacatccaac

SEQ ID NO: 1433968 - DNA, 15 bp, Homo sapiens
gttaggtacatccaa

SEQ ID NO: 1433969 - DNA, 15 bp, Homo sapiens
agttaggtacatcca

SEQ ID NO: 1433970 - DNA, 15 bp, Homo sapiens
tagttaggtacatcc

SEQ ID NO: 1433971 - DNA, 15 bp, Homo sapiens
gtagttaggtacatc

SEQ ID NO: 1433972 - DNA, 15 bp, Homo sapiens
tgtagttaggtacat

SEQ ID NO: 1433973 - DNA, 15 bp, Homo sapiens
ctgtagttaggtaca

SEQ ID NO: 1433974 - DNA, 15 bp, Homo sapiens
cctgtagttaggtac

SEQ ID NO: 1433975 - DNA, 15 bp, Homo sapiens
ccctgtagttaggta

SEQ ID NO: 1433976 - DNA, 15 bp, Homo sapiens
gccctgtagttaggt

SEQ ID NO: 1433977 - DNA, 15 bp, Homo sapiens
cgccctgtagttagg

SEQ ID NO: 1433978 - DNA, 15 bp, Homo sapiens
acgccctgtagttag

SEQ ID NO: 1433979 - DNA, 15 bp, Homo sapiens
cacgccctgtagtta

SEQ ID NO: 1433980 - DNA, 15 bp, Homo sapiens
ccacgccctgtagtt

SEQ ID NO: 1433981 - DNA, 15 bp, Homo sapiens
accacgccctgtagt

SEQ ID NO: 1433982 - DNA, 15 bp, Homo sapiens
caccacgccctgtag

SEQ ID NO: 1433983 - DNA, 15 bp, Homo sapiens
ccaccacgccctgta

SEQ ID NO: 1433984 - DNA, 15 bp, Homo sapiens
gccaccacgccctgt

SEQ ID NO: 1433985 - DNA, 15 bp, Homo sapiens
agccaccacgccctg

SEQ ID NO: 1433986 - DNA, 15 bp, Homo sapiens
gagccaccacgccct

SEQ ID NO: 1433987 - DNA, 15 bp, Homo sapiens
tgtgagccaccacgc

SEQ ID NO: 1433988 - DNA, 15 bp, Homo sapiens
ctgtgagccaccacg

SEQ ID NO: 1433989 - DNA, 15 bp, Homo sapiens
actgtgagccaccac

SEQ ID NO: 1433990 - DNA, 15 bp, Homo sapiens
gactgtgagccacca

SEQ ID NO: 1433991 - DNA, 15 bp, Homo sapiens
tgactgtgagccacc

SEQ ID NO: 1433992 - DNA, 15 bp, Homo sapiens
gtgactgtgagccac

SEQ ID NO: 1433993 - DNA, 15 bp, Homo sapiens
ggtgactgtgagcca

SEQ ID NO: 1433994 - DNA, 15 bp, Homo sapiens
aggtgactgtgagcc

SEQ ID NO: 1433995 - DNA, 15 bp, Homo sapiens
taggtgactgtgagc

SEQ ID NO: 1433996 - DNA, 15 bp, Homo sapiens
ctaggtgactgtgag

SEQ ID NO: 1433997 - DNA, 15 bp, Homo sapiens
cctaggtgactgtga

SEQ ID NO: 1433998 - DNA, 15 bp, Homo sapiens
gcctaggtgactgtg

SEQ ID NO: 1433999 - DNA, 15 bp, Homo sapiens
ggcctaggtgactgt

SEQ ID NO: 1434000 - DNA, 15 bp, Homo sapiens
gggcctaggtgactg

SEQ ID NO: 1434001 - DNA, 15 bp, Homo sapiens
agggcctaggtgact

SEQ ID NO: 1434002 - DNA, 15 bp, Homo sapiens
gagggcctaggtgac

SEQ ID NO: 1434003 - DNA, 15 bp, Homo sapiens
agagggcctaggtga

SEQ ID NO: 1434004 - DNA, 15 bp, Homo sapiens
gagagggcctaggtg

SEQ ID NO: 1434005 - DNA, 15 bp, Homo sapiens
ggagagggcctaggt

SEQ ID NO: 1434006 - DNA, 15 bp, Homo sapiens
tggagagggcctagg

SEQ ID NO: 1434007 - DNA, 15 bp, Homo sapiens
gtggagagggcctag

SEQ ID NO: 1434008 - DNA, 15 bp, Homo sapiens
tgtggagagggccta

SEQ ID NO: 1434009 - DNA, 15 bp, Homo sapiens
atgtggagagggcct

SEQ ID NO: 1434010 - DNA, 15 bp, Homo sapiens
gatgtggagagggcc

SEQ ID NO: 1434011 - DNA, 15 bp, Homo sapiens
ggatgtggagagggc

SEQ ID NO: 1434012 - DNA, 15 bp, Homo sapiens
tggatgtggagaggg

SEQ ID NO: 1434013 - DNA, 15 bp, Homo sapiens
gtggatgtggagagg

SEQ ID NO: 1434014 - DNA, 15 bp, Homo sapiens
agtggatgtggagag

SEQ ID NO: 1434015 - DNA, 15 bp, Homo sapiens
gagtggatgtggaga

SEQ ID NO: 1434016 - DNA, 15 bp, Homo sapiens
tgagtggatgtggag

SEQ ID NO: 1434017 - DNA, 15 bp, Homo sapiens
atgagtggatgtgga

SEQ ID NO: 1434018 - DNA, 15 bp, Homo sapiens
catgagtggatgtgg

SEQ ID NO: 1434019 - DNA, 15 bp, Homo sapiens
acatgagtggatgtg

SEQ ID NO: 1434020 - DNA, 15 bp, Homo sapiens
tacatgagtggatgt

SEQ ID NO: 1434021 - DNA, 15 bp, Homo sapiens
gtacatgagtggatg

SEQ ID NO: 1434022 - DNA, 15 bp, Homo sapiens
ggtacatgagtggat

SEQ ID NO: 1434023 - DNA, 15 bp, Homo sapiens
gggtacatgagtgga

SEQ ID NO: 1434024 - DNA, 15 bp, Homo sapiens
agggtacatgagtgg

SEQ ID NO: 1434025 - DNA, 15 bp, Homo sapiens
cagggtacatgagtg

SEQ ID NO: 1434026 - DNA, 15 bp, Homo sapiens
acagggtacatgagt

SEQ ID NO: 1434027 - DNA, 15 bp, Homo sapiens
gacagggtacatgag

SEQ ID NO: 1434028 - DNA, 15 bp, Homo sapiens
ggacagggtacatga

SEQ ID NO: 1434029 - DNA, 15 bp, Homo sapiens
gggacagggtacatg

SEQ ID NO: 1434030 - DNA, 15 bp, Homo sapiens
tgggacagggtacat

SEQ ID NO: 1434031 - DNA, 15 bp, Homo sapiens
ctgggacagggtaca

SEQ ID NO: 1434032 - DNA, 15 bp, Homo sapiens
actgggacagggtac

SEQ ID NO: 1434033 - DNA, 15 bp, Homo sapiens
cactgggacagggta

SEQ ID NO: 1434034 - DNA, 15 bp, Homo sapiens
gcactgggacagggt

SEQ ID NO: 1434035 - DNA, 15 bp, Homo sapiens
tgcactgggacaggg

SEQ ID NO: 1434036 - DNA, 15 bp, Homo sapiens
gtgcactgggacagg

SEQ ID NO: 1434037 - DNA, 15 bp, Homo sapiens
agtgcactgggacag

SEQ ID NO: 1434038 - DNA, 15 bp, Homo sapiens
cagtgcactgggaca

SEQ ID NO: 1434039 - DNA, 15 bp, Homo sapiens
acagtgcactgggac

SEQ ID NO: 1434040 - DNA, 15 bp, Homo sapiens
tacagtgcactggga

SEQ ID NO: 1434041 - DNA, 15 bp, Homo sapiens
ctacagtgcactggg

SEQ ID NO: 1434042 - DNA, 15 bp, Homo sapiens
cctacagtgcactgg

SEQ ID NO: 1434043 - DNA, 15 bp, Homo sapiens
tcctacagtgcactg

SEQ ID NO: 1434044 - DNA, 15 bp, Homo sapiens
ctcctacagtgcact

SEQ ID NO: 1434045 - DNA, 15 bp, Homo sapiens
tctcctacagtgcac

SEQ ID NO: 1434046 - DNA, 15 bp, Homo sapiens
ctctcctacagtgca

SEQ ID NO: 1434047 - DNA, 15 bp, Homo sapiens
cctctcctacagtgc

SEQ ID NO: 1434048 - DNA, 15 bp, Homo sapiens
gcctctcctacagtg

SEQ ID NO: 1434049 - DNA, 15 bp, Homo sapiens
tgcctctcctacagt

SEQ ID NO: 1434050 - DNA, 15 bp, Homo sapiens
ctgcctctcctacag

SEQ ID NO: 1434051 - DNA, 15 bp, Homo sapiens
actgcctctcctaca

SEQ ID NO: 1434052 - DNA, 15 bp, Homo sapiens
cactgcctctcctac

SEQ ID NO: 1434053 - DNA, 15 bp, Homo sapiens
acactgcctctccta

SEQ ID NO: 1434054 - DNA, 15 bp, Homo sapiens
cacactgcctctcct

SEQ ID NO: 1434055 - DNA, 15 bp, Homo sapiens
ccacactgcctctcc

SEQ ID NO: 1434056 - DNA, 15 bp, Homo sapiens
gccacactgcctctc

SEQ ID NO: 1434057 - DNA, 15 bp, Homo sapiens
ggccacactgcctct

SEQ ID NO: 1434058 - DNA, 15 bp, Homo sapiens
aggccacactgcctc

SEQ ID NO: 1434059 - DNA, 15 bp, Homo sapiens
caggccacactgcct

SEQ ID NO: 1434060 - DNA, 15 bp, Homo sapiens
gcaggccacactgcc

SEQ ID NO: 1434061 - DNA, 15 bp, Homo sapiens
ggcaggccacactgc

SEQ ID NO: 1434062 - DNA, 15 bp, Homo sapiens
aggcaggccacactg

SEQ ID NO: 1434063 - DNA, 15 bp, Homo sapiens
caggcaggccacact

SEQ ID NO: 1434064 - DNA, 15 bp, Homo sapiens
ccaggcaggccacac

SEQ ID NO: 1434065 - DNA, 15 bp, Homo sapiens
tccaggcaggccaca

SEQ ID NO: 1434066 - DNA, 15 bp, Homo sapiens
ttccaggcaggccac

SEQ ID NO: 1434067 - DNA, 15 bp, Homo sapiens
attccaggcaggcca

SEQ ID NO: 1434068 - DNA, 15 bp, Homo sapiens
aattccaggcaggcc

SEQ ID NO: 1434069 - DNA, 15 bp, Homo sapiens
tactgagataattat

SEQ ID NO: 1434070 - DNA, 15 bp, Homo sapiens
atactgagataatta

SEQ ID NO: 1434071 - DNA, 15 bp, Homo sapiens
tatactgagataatt

SEQ ID NO: 1434072 - DNA, 15 bp, Homo sapiens
atatactgagataat

SEQ ID NO: 1434073 - DNA, 15 bp, Homo sapiens
catatactgagataa

SEQ ID NO: 1434074 - DNA, 15 bp, Homo sapiens
ccatatactgagata

SEQ ID NO: 1434075 - DNA, 15 bp, Homo sapiens
tccatatactgagat

SEQ ID NO: 1434076 - DNA, 15 bp, Homo sapiens
ctccatatactgaga

SEQ ID NO: 1434077 - DNA, 15 bp, Homo sapiens
tctccatatactgag

SEQ ID NO: 1434078 - DNA, 15 bp, Homo sapiens
ttctccatatactga

SEQ ID NO: 1434079 - DNA, 15 bp, Homo sapiens
tttctccatatactg

SEQ ID NO: 1434080 - DNA, 15 bp, Homo sapiens
ttttctccatatact

SEQ ID NO: 1434081 - DNA, 15 bp, Homo sapiens
tttttctccatatac

SEQ ID NO: 1434082 - DNA, 15 bp, Homo sapiens
ttttttctccatata

SEQ ID NO: 1434083 - DNA, 15 bp, Homo sapiens
tttttttctccatat

SEQ ID NO: 1434084 - DNA, 15 bp, Homo sapiens
gtttttttctccata

SEQ ID NO: 1434085 - DNA, 15 bp, Homo sapiens
tgtttttttctccat

SEQ ID NO: 1434086 - DNA, 15 bp, Homo sapiens
atgtttttttctcca

SEQ ID NO: 1434087 - DNA, 15 bp, Homo sapiens
aatgtttttttctcc

SEQ ID NO: 1434088 - DNA, 15 bp, Homo sapiens
caatgtttttttctc

SEQ ID NO: 1434089 - DNA, 15 bp, Homo sapiens
tcaatgtttttttct

SEQ ID NO: 1434090 - DNA, 15 bp, Homo sapiens
gtcaatgtttttttc

SEQ ID NO: 1434091 - DNA, 15 bp, Homo sapiens
tgtcaatgttttttt

SEQ ID NO: 1434092 - DNA, 15 bp, Homo sapiens
ttgtcaatgtttttt

SEQ ID NO: 1434093 - DNA, 15 bp, Homo sapiens
tttgtcaatgttttt

SEQ ID NO: 1434094 - DNA, 15 bp, Homo sapiens
ttttgtcaatgtttt

SEQ ID NO: 1434095 - DNA, 15 bp, Homo sapiens
attttgtcaatgttt

SEQ ID NO: 1434096 - DNA, 15 bp, Homo sapiens
aattttgtcaatgtt

SEQ ID NO: 1434097 - DNA, 15 bp, Homo sapiens
aaattttgtcaatgt

SEQ ID NO: 1434098 - DNA, 15 bp, Homo sapiens
taaattttgtcaatg

SEQ ID NO: 1434099 - DNA, 15 bp, Homo sapiens
ttaaattttgtcaat

SEQ ID NO: 1434100 - DNA, 15 bp, Homo sapiens
gttaaattttgtcaa

SEQ ID NO: 1434101 - DNA, 15 bp, Homo sapiens
tgttaaattttgtca

SEQ ID NO: 1434102 - DNA, 15 bp, Homo sapiens
ttgttaaattttgtc

SEQ ID NO: 1434103 - DNA, 15 bp, Homo sapiens
attgttaaattttgt

SEQ ID NO: 1434104 - DNA, 15 bp, Homo sapiens
gattgttaaattttg

SEQ ID NO: 1434105 - DNA, 15 bp, Homo sapiens
ggattgttaaatttt

SEQ ID NO: 1434106 - DNA, 15 bp, Homo sapiens
aggattgttaaattt

SEQ ID NO: 1434107 - DNA, 15 bp, Homo sapiens
aaggattgttaaatt

SEQ ID NO: 1434108 - DNA, 15 bp, Homo sapiens
gaaaggattgttaaa

SEQ ID NO: 1434109 - DNA, 15 bp, Homo sapiens
tgaaaggattgttaa

SEQ ID NO: 1434110 - DNA, 15 bp, Homo sapiens
atgaaaggattgtta

SEQ ID NO: 1434111 - DNA, 15 bp, Homo sapiens
catgaaaggattgtt

SEQ ID NO: 1434112 - DNA, 15 bp, Homo sapiens
tcatgaaaggattgt

SEQ ID NO: 1434113 - DNA, 15 bp, Homo sapiens
atcatgaaaggattg

SEQ ID NO: 1434114 - DNA, 15 bp, Homo sapiens
tatcatgaaaggatt

SEQ ID NO: 1434115 - DNA, 15 bp, Homo sapiens
ttatcatgaaaggat

SEQ ID NO: 1434116 - DNA, 15 bp, Homo sapiens
tttatcatgaaagga

SEQ ID NO: 1434117 - DNA, 15 bp, Homo sapiens
ttttatcatgaaagg

SEQ ID NO: 1434118 - DNA, 15 bp, Homo sapiens
tttttatcatgaaag

SEQ ID NO: 1434119 - DNA, 15 bp, Homo sapiens
ttttttatcatgaaa

SEQ ID NO: 1434120 - DNA, 15 bp, Homo sapiens
tttttttatcatgaa

SEQ ID NO: 1434121 - DNA, 15 bp, Homo sapiens
ttttttttatcatga

SEQ ID NO: 1434122 - DNA, 15 bp, Homo sapiens
tttttttttatcatg

SEQ ID NO: 1434123 - DNA, 15 bp, Homo sapiens
ttttttttttatcat

SEQ ID NO: 1434124 - DNA, 15 bp, Homo sapiens
tttttttttttatca

SEQ ID NO: 1434125 - DNA, 15 bp, Homo sapiens
ttggttttttttttt

SEQ ID NO: 1434126 - DNA, 15 bp, Homo sapiens
gttggtttttttttt

SEQ ID NO: 1434127 - DNA, 15 bp, Homo sapiens
tgttggttttttttt

SEQ ID NO: 1434128 - DNA, 15 bp, Homo sapiens
ttgttggtttttttt

SEQ ID NO: 1434129 - DNA, 15 bp, Homo sapiens
tttgttggttttttt

SEQ ID NO: 1434130 - DNA, 15 bp, Homo sapiens
atttgttggtttttt

SEQ ID NO: 1434131 - DNA, 15 bp, Homo sapiens
aatttgttggttttt

SEQ ID NO: 1434132 - DNA, 15 bp, Homo sapiens
taatttgttggtttt

SEQ ID NO: 1434133 - DNA, 15 bp, Homo sapiens
ctaatttgttggttt

SEQ ID NO: 1434134 - DNA, 15 bp, Homo sapiens
cctaatttgttggtt

SEQ ID NO: 1434135 - DNA, 15 bp, Homo sapiens
tcctaatttgttggt

SEQ ID NO: 1434136 - DNA, 15 bp, Homo sapiens
ttcctaatttgttgg

SEQ ID NO: 1434137 - DNA, 15 bp, Homo sapiens
attcctaatttgttg

SEQ ID NO: 1434138 - DNA, 15 bp, Homo sapiens
tattcctaatttgtt

SEQ ID NO: 1434139 - DNA, 15 bp, Homo sapiens
ctattcctaatttgt

SEQ ID NO: 1434140 - DNA, 15 bp, Homo sapiens
tctattcctaatttg

SEQ ID NO: 1434141 - DNA, 15 bp, Homo sapiens
ttctattcctaattt

SEQ ID NO: 1434142 - DNA, 15 bp, Homo sapiens
cttctattcctaatt

SEQ ID NO: 1434143 - DNA, 15 bp, Homo sapiens
ccttctattcctaat

SEQ ID NO: 1434144 - DNA, 15 bp, Homo sapiens
cccttctattcctaa

SEQ ID NO: 1434145 - DNA, 15 bp, Homo sapiens
tcccttctattccta

SEQ ID NO: 1434146 - DNA, 15 bp, Homo sapiens
ttcccttctattcct

SEQ ID NO: 1434147 - DNA, 15 bp, Homo sapiens
gttcccttctattcc

SEQ ID NO: 1434148 - DNA, 15 bp, Homo sapiens
agttcccttctattc

SEQ ID NO: 1434149 - DNA, 15 bp, Homo sapiens
aagttcccttctatt

SEQ ID NO: 1434150 - DNA, 15 bp, Homo sapiens
gaagttcccttctat

SEQ ID NO: 1434151 - DNA, 15 bp, Homo sapiens
agaagttcccttcta

SEQ ID NO: 1434152 - DNA, 15 bp, Homo sapiens
gagaagttcccttct

SEQ ID NO: 1434153 - DNA, 15 bp, Homo sapiens
tgagaagttcccttc

SEQ ID NO: 1434154 - DNA, 15 bp, Homo sapiens
ttgagaagttccctt

SEQ ID NO: 1434155 - DNA, 15 bp, Homo sapiens
gttgagaagttccct

SEQ ID NO: 1434156 - DNA, 15 bp, Homo sapiens
ggttgagaagttccc

SEQ ID NO: 1434157 - DNA, 15 bp, Homo sapiens
aggttgagaagttcc

SEQ ID NO: 1434158 - DNA, 15 bp, Homo sapiens
caggttgagaagttc

SEQ ID NO: 1434159 - DNA, 15 bp, Homo sapiens
tcaggttgagaagtt

SEQ ID NO: 1434160 - DNA, 15 bp, Homo sapiens
ttcaggttgagaagt

SEQ ID NO: 1434161 - DNA, 15 bp, Homo sapiens
tttcaggttgagaag

SEQ ID NO: 1434162 - DNA, 15 bp, Homo sapiens
ttttcaggttgagaa

SEQ ID NO: 1434163 - DNA, 15 bp, Homo sapiens
tttttcaggttgaga

SEQ ID NO: 1434164 - DNA, 15 bp, Homo sapiens
ctttttcaggttgag

SEQ ID NO: 1434165 - DNA, 15 bp, Homo sapiens
cctttttcaggttga

SEQ ID NO: 1434166 - DNA, 15 bp, Homo sapiens
tcctttttcaggttg

SEQ ID NO: 1434167 - DNA, 15 bp, Homo sapiens
gtcctttttcaggtt

SEQ ID NO: 1434168 - DNA, 15 bp, Homo sapiens
tgtcctttttcaggt

SEQ ID NO: 1434169 - DNA, 15 bp, Homo sapiens
gtgtcctttttcagg

SEQ ID NO: 1434170 - DNA, 15 bp, Homo sapiens
ggtgtcctttttcag

SEQ ID NO: 1434171 - DNA, 15 bp, Homo sapiens
aggtgtcctttttca

SEQ ID NO: 1434172 - DNA, 15 bp, Homo sapiens
taggtgtcctttttc

SEQ ID NO: 1434173 - DNA, 15 bp, Homo sapiens
ataggtgtccttttt

SEQ ID NO: 1434174 - DNA, 15 bp, Homo sapiens
cataggtgtcctttt

SEQ ID NO: 1434175 - DNA, 15 bp, Homo sapiens
tcataggtgtccttt

SEQ ID NO: 1434176 - DNA, 15 bp, Homo sapiens
ttcataggtgtcctt

SEQ ID NO: 1434177 - DNA, 15 bp, Homo sapiens
tttcataggtgtcct

SEQ ID NO: 1434178 - DNA, 15 bp, Homo sapiens
ttttcataggtgtcc

SEQ ID NO: 1434179 - DNA, 15 bp, Homo sapiens
tttttcataggtgtc

SEQ ID NO: 1434180 - DNA, 15 bp, Homo sapiens
ctttttcataggtgt

SEQ ID NO: 1434181 - DNA, 15 bp, Homo sapiens
gctttttcataggtg

SEQ ID NO: 1434182 - DNA, 15 bp, Homo sapiens
ggctttttcataggt

SEQ ID NO: 1434183 - DNA, 15 bp, Homo sapiens
aggctttttcatagg

SEQ ID NO: 1434184 - DNA, 15 bp, Homo sapiens
gaggctttttcatag

SEQ ID NO: 1434185 - DNA, 15 bp, Homo sapiens
tgaggctttttcata

SEQ ID NO: 1434186 - DNA, 15 bp, Homo sapiens
ctgaggctttttcat

SEQ ID NO: 1434187 - DNA, 15 bp, Homo sapiens
gctgaggctttttca

SEQ ID NO: 1434188 - DNA, 15 bp, Homo sapiens
agctgaggctttttc

SEQ ID NO: 1434189 - DNA, 15 bp, Homo sapiens
tagctgaggcttttt

SEQ ID NO: 1434190 - DNA, 15 bp, Homo sapiens
ttagctgaggctttt

SEQ ID NO: 1434191 - DNA, 15 bp, Homo sapiens
attagctgaggcttt

SEQ ID NO: 1434192 - DNA, 15 bp, Homo sapiens
tattagctgaggctt

SEQ ID NO: 1434193 - DNA, 15 bp, Homo sapiens
atattagctgaggct

SEQ ID NO: 1434194 - DNA, 15 bp, Homo sapiens
gatattagctgaggc

SEQ ID NO: 1434195 - DNA, 15 bp, Homo sapiens
tgatattagctgagg

SEQ ID NO: 1434196 - DNA, 15 bp, Homo sapiens
atgatattagctgag

SEQ ID NO: 1434197 - DNA, 15 bp, Homo sapiens
tatgatattagctga

SEQ ID NO: 1434198 - DNA, 15 bp, Homo sapiens
gtatgatattagctg

SEQ ID NO: 1434199 - DNA, 15 bp, Homo sapiens
agtatgatattagct

SEQ ID NO: 1434200 - DNA, 15 bp, Homo sapiens
aagtatgatattagc

SEQ ID NO: 1434201 - DNA, 15 bp, Homo sapiens
taagtatgatattag

SEQ ID NO: 1434202 - DNA, 15 bp, Homo sapiens
ttaagtatgatatta

SEQ ID NO: 1434203 - DNA, 15 bp, Homo sapiens
attaagtatgatatt

SEQ ID NO: 1434204 - DNA, 15 bp, Homo sapiens
cattaagtatgatat

SEQ ID NO: 1434205 - DNA, 15 bp, Homo sapiens
tcattaagtatgata

SEQ ID NO: 1434206 - DNA, 15 bp, Homo sapiens
atcattaagtatgat

SEQ ID NO: 1434207 - DNA, 15 bp, Homo sapiens
catcattaagtatga

SEQ ID NO: 1434208 - DNA, 15 bp, Homo sapiens
tcatcattaagtatg

SEQ ID NO: 1434209 - DNA, 15 bp, Homo sapiens
ttcatcattaagtat

SEQ ID NO: 1434210 - DNA, 15 bp, Homo sapiens
tttcatcattaagta

SEQ ID NO: 1434211 - DNA, 15 bp, Homo sapiens
gtttcatcattaagt

SEQ ID NO: 1434212 - DNA, 15 bp, Homo sapiens
tgtttcatcattaag

SEQ ID NO: 1434213 - DNA, 15 bp, Homo sapiens
atgtttcatcattaa

SEQ ID NO: 1434214 - DNA, 15 bp, Homo sapiens
aatgtttcatcatta

SEQ ID NO: 1434215 - DNA, 15 bp, Homo sapiens
caatgtttcatcatt

SEQ ID NO: 1434216 - DNA, 15 bp, Homo sapiens
tcaatgtttcatcat

SEQ ID NO: 1434217 - DNA, 15 bp, Homo sapiens
ttcaatgtttcatca

SEQ ID NO: 1434218 - DNA, 15 bp, Homo sapiens
tttcaatgtttcatc

SEQ ID NO: 1434219 - DNA, 15 bp, Homo sapiens
ctttcaatgtttcat

SEQ ID NO: 1434220 - DNA, 15 bp, Homo sapiens
gctttcaatgtttca

SEQ ID NO: 1434221 - DNA, 15 bp, Homo sapiens
agctttcaatgtttc

SEQ ID NO: 1434222 - DNA, 15 bp, Homo sapiens
aagctttcaatgttt

SEQ ID NO: 1434223 - DNA, 15 bp, Homo sapiens
aaagctttcaatgtt

SEQ ID NO: 1434224 - DNA, 15 bp, Homo sapiens
taaagctttcaatgt

SEQ ID NO: 1434225 - DNA, 15 bp, Homo sapiens
gtaaagctttcaatg

SEQ ID NO: 1434226 - DNA, 15 bp, Homo sapiens
ggtaaagctttcaat

SEQ ID NO: 1434227 - DNA, 15 bp, Homo sapiens
gggtaaagctttcaa

SEQ ID NO: 1434228 - DNA, 15 bp, Homo sapiens
ggggtaaagctttca

SEQ ID NO: 1434229 - DNA, 15 bp, Homo sapiens
aggggtaaagctttc

SEQ ID NO: 1434230 - DNA, 15 bp, Homo sapiens
taggggtaaagcttt

SEQ ID NO: 1434231 - DNA, 15 bp, Homo sapiens
ttaggggtaaagctt

SEQ ID NO: 1434232 - DNA, 15 bp, Homo sapiens
cttaggggtaaagct

SEQ ID NO: 1434233 - DNA, 15 bp, Homo sapiens
tcttaggggtaaagc

SEQ ID NO: 1434234 - DNA, 15 bp, Homo sapiens
atcttaggggtaaag

SEQ ID NO: 1434235 - DNA, 15 bp, Homo sapiens
gatcttaggggtaaa

SEQ ID NO: 1434236 - DNA, 15 bp, Homo sapiens
tgatcttaggggtaa

SEQ ID NO: 1434237 - DNA, 15 bp, Homo sapiens
ttgatcttaggggta

SEQ ID NO: 1434238 - DNA, 15 bp, Homo sapiens
cttgatcttaggggt

SEQ ID NO: 1434239 - DNA, 15 bp, Homo sapiens
tcttgatcttagggg

SEQ ID NO: 1434240 - DNA, 15 bp, Homo sapiens
ttcttgatcttaggg

SEQ ID NO: 1434241 - DNA, 15 bp, Homo sapiens
cttcttgatcttagg

SEQ ID NO: 1434242 - DNA, 15 bp, Homo sapiens
tcttcttgatcttag

SEQ ID NO: 1434243 - DNA, 15 bp, Homo sapiens
ttcttcttgatctta

SEQ ID NO: 1434244 - DNA, 15 bp, Homo sapiens
cttcttcttgatctt

SEQ ID NO: 1434245 - DNA, 15 bp, Homo sapiens
tcttcttcttgatct

SEQ ID NO: 1434246 - DNA, 15 bp, Homo sapiens
gtcttcttcttgatc

SEQ ID NO: 1434247 - DNA, 15 bp, Homo sapiens
cgtcttcttcttgat

SEQ ID NO: 1434248 - DNA, 15 bp, Homo sapiens
tcgtcttcttcttga

SEQ ID NO: 1434249 - DNA, 15 bp, Homo sapiens
ctcgtcttcttcttg

SEQ ID NO: 1434250 - DNA, 15 bp, Homo sapiens
cctcgtcttcttctt

SEQ ID NO: 1434251 - DNA, 15 bp, Homo sapiens
tcctcgtcttcttct

SEQ ID NO: 1434252 - DNA, 15 bp, Homo sapiens
atcctcgtcttcttc

SEQ ID NO: 1434253 - DNA, 15 bp, Homo sapiens
catcctcgtcttctt

SEQ ID NO: 1434254 - DNA, 15 bp, Homo sapiens
acatcctcgtcttct

SEQ ID NO: 1434255 - DNA, 15 bp, Homo sapiens
gacatcctcgtcttc

SEQ ID NO: 1434256 - DNA, 15 bp, Homo sapiens
ggacatcctcgtctt

SEQ ID NO: 1434257 - DNA, 15 bp, Homo sapiens
tggacatcctcgtct

SEQ ID NO: 1434258 - DNA, 15 bp, Homo sapiens
gtggacatcctcgtc

SEQ ID NO: 1434259 - DNA, 15 bp, Homo sapiens
agtggacatcctcgt

SEQ ID NO: 1434260 - DNA, 15 bp, Homo sapiens
gagtggacatcctcg

SEQ ID NO: 1434261 - DNA, 15 bp, Homo sapiens
agagtggacatcctc

SEQ ID NO: 1434262 - DNA, 15 bp, Homo sapiens
aagagtggacatcct

SEQ ID NO: 1434263 - DNA, 15 bp, Homo sapiens
taagagtggacatcc

SEQ ID NO: 1434264 - DNA, 15 bp, Homo sapiens
gtaagagtggacatc

SEQ ID NO: 1434265 - DNA, 15 bp, Homo sapiens
ggtaagagtggacat

SEQ ID NO: 1434266 - DNA, 15 bp, Homo sapiens
tggtaagagtggaca

SEQ ID NO: 1434267 - DNA, 15 bp, Homo sapiens
gtggtaagagtggac

SEQ ID NO: 1434268 - DNA, 15 bp, Homo sapiens
agtggtaagagtgga

SEQ ID NO: 1434269 - DNA, 15 bp, Homo sapiens
gagtggtaagagtgg

SEQ ID NO: 1434270 - DNA, 15 bp, Homo sapiens
agagtggtaagagtg

SEQ ID NO: 1434271 - DNA, 15 bp, Homo sapiens
aagagtggtaagagt

SEQ ID NO: 1434272 - DNA, 15 bp, Homo sapiens
caagagtggtaagag

SEQ ID NO: 1434273 - DNA, 15 bp, Homo sapiens
acaagagtggtaaga

SEQ ID NO: 1434274 - DNA, 15 bp, Homo sapiens
aacaagagtggtaag

SEQ ID NO: 1434275 - DNA, 15 bp, Homo sapiens
gaacaagagtggtaa

SEQ ID NO: 1434276 - DNA, 15 bp, Homo sapiens
tgaacaagagtggta

SEQ ID NO: 1434277 - DNA, 15 bp, Homo sapiens
ttgaacaagagtggt

SEQ ID NO: 1434278 - DNA, 15 bp, Homo sapiens
gttgaacaagagtgg

SEQ ID NO: 1434279 - DNA, 15 bp, Homo sapiens
tgttgaacaagagtg

SEQ ID NO: 1434280 - DNA, 15 bp, Homo sapiens
atgttgaacaagagt

SEQ ID NO: 1434281 - DNA, 15 bp, Homo sapiens
aatgttgaacaagag

SEQ ID NO: 1434282 - DNA, 15 bp, Homo sapiens
caatgttgaacaaga

SEQ ID NO: 1434283 - DNA, 15 bp, Homo sapiens
acaatgttgaacaag

SEQ ID NO: 1434284 - DNA, 15 bp, Homo sapiens
tacaatgttgaacaa

SEQ ID NO: 1434285 - DNA, 15 bp, Homo sapiens
ctacaatgttgaaca

SEQ ID NO: 1434286 - DNA, 15 bp, Homo sapiens
actacaatgttgaac

SEQ ID NO: 1434287 - DNA, 15 bp, Homo sapiens
cactacaatgttgaa

SEQ ID NO: 1434288 - DNA, 15 bp, Homo sapiens
ccactacaatgttga

SEQ ID NO: 1434289 - DNA, 15 bp, Homo sapiens
gccactacaatgttg

SEQ ID NO: 1434290 - DNA, 15 bp, Homo sapiens
tgccactacaatgtt

SEQ ID NO: 1434291 - DNA, 15 bp, Homo sapiens
ctgccactacaatgt

SEQ ID NO: 1434292 - DNA, 15 bp, Homo sapiens
actgccactacaatg

SEQ ID NO: 1434293 - DNA, 15 bp, Homo sapiens
aactgccactacaat

SEQ ID NO: 1434294 - DNA, 15 bp, Homo sapiens
gaactgccactacaa

SEQ ID NO: 1434295 - DNA, 15 bp, Homo sapiens
agaactgccactaca

SEQ ID NO: 1434296 - DNA, 15 bp, Homo sapiens
tagaactgccactac

SEQ ID NO: 1434297 - DNA, 15 bp, Homo sapiens
ctagaactgccacta

SEQ ID NO: 1434298 - DNA, 15 bp, Homo sapiens
gctagaactgccact

SEQ ID NO: 1434299 - DNA, 15 bp, Homo sapiens
ggctagaactgccac

SEQ ID NO: 1434300 - DNA, 15 bp, Homo sapiens
tggctagaactgcca

SEQ ID NO: 1434301 - DNA, 15 bp, Homo sapiens
ctggctagaactgcc

SEQ ID NO: 1434302 - DNA, 15 bp, Homo sapiens
cctggctagaactgc

SEQ ID NO: 1434303 - DNA, 15 bp, Homo sapiens
ccctggctagaactg

SEQ ID NO: 1434304 - DNA, 15 bp, Homo sapiens
cccctggctagaact

SEQ ID NO: 1434305 - DNA, 15 bp, Homo sapiens
gcccctggctagaac

SEQ ID NO: 1434306 - DNA, 15 bp, Homo sapiens
tgcccctggctagaa

SEQ ID NO: 1434307 - DNA, 15 bp, Homo sapiens
ctgcccctggctaga

SEQ ID NO: 1434308 - DNA, 15 bp, Homo sapiens
actgcccctggctag

SEQ ID NO: 1434309 - DNA, 15 bp, Homo sapiens
aactgcccctggcta

SEQ ID NO: 1434310 - DNA, 15 bp, Homo sapiens
taactgcccctggct

SEQ ID NO: 1434311 - DNA, 15 bp, Homo sapiens
ttaactgcccctggc

SEQ ID NO: 1434312 - DNA, 15 bp, Homo sapiens
cttaactgcccctgg

SEQ ID NO: 1434313 - DNA, 15 bp, Homo sapiens
gcttaactgcccctg

SEQ ID NO: 1434314 - DNA, 15 bp, Homo sapiens
tgcttaactgcccct

SEQ ID NO: 1434315 - DNA, 15 bp, Homo sapiens
ttgcttaactgcccc

SEQ ID NO: 1434316 - DNA, 15 bp, Homo sapiens
cttgcttaactgccc

SEQ ID NO: 1434317 - DNA, 15 bp, Homo sapiens
tcttgcttaactgcc

SEQ ID NO: 1434318 - DNA, 15 bp, Homo sapiens
ttcttgcttaactgc

SEQ ID NO: 1434319 - DNA, 15 bp, Homo sapiens
tttcttgcttaactg

SEQ ID NO: 1434320 - DNA, 15 bp, Homo sapiens
ttttcttgcttaact

SEQ ID NO: 1434321 - DNA, 15 bp, Homo sapiens
tttttcttgcttaac

SEQ ID NO: 1434322 - DNA, 15 bp, Homo sapiens
ctttttcttgcttaa

SEQ ID NO: 1434323 - DNA, 15 bp, Homo sapiens
tctttttcttgctta

SEQ ID NO: 1434324 - DNA, 15 bp, Homo sapiens
ttctttttcttgctt

SEQ ID NO: 1434325 - DNA, 15 bp, Homo sapiens
tttctttttcttgct

SEQ ID NO: 1434326 - DNA, 15 bp, Homo sapiens
atttctttttcttgc

SEQ ID NO: 1434327 - DNA, 15 bp, Homo sapiens
tatttctttttcttg

SEQ ID NO: 1434328 - DNA, 15 bp, Homo sapiens
ttatttctttttctt

SEQ ID NO: 1434329 - DNA, 15 bp, Homo sapiens
tttatttctttttct

SEQ ID NO: 1434330 - DNA, 15 bp, Homo sapiens
ttttatttctttttc

SEQ ID NO: 1434331 - DNA, 15 bp, Homo sapiens
cttttatttcttttt

SEQ ID NO: 1434332 - DNA, 15 bp, Homo sapiens
ccttttatttctttt

SEQ ID NO: 1434333 - DNA, 15 bp, Homo sapiens
gccttttatttcttt

SEQ ID NO: 1434334 - DNA, 15 bp, Homo sapiens
tgccttttatttctt

SEQ ID NO: 1434335 - DNA, 15 bp, Homo sapiens
ttgccttttatttct

SEQ ID NO: 1434336 - DNA, 15 bp, Homo sapiens
gttgccttttatttc

SEQ ID NO: 1434337 - DNA, 15 bp, Homo sapiens
ggttgccttttattt

SEQ ID NO: 1434338 - DNA, 15 bp, Homo sapiens
tggttgccttttatt

SEQ ID NO: 1434339 - DNA, 15 bp, Homo sapiens
ctggttgccttttat

SEQ ID NO: 1434340 - DNA, 15 bp, Homo sapiens
tctggttgcctttta

SEQ ID NO: 1434341 - DNA, 15 bp, Homo sapiens
atctggttgcctttt

SEQ ID NO: 1434342 - DNA, 15 bp, Homo sapiens
aatctggttgccttt

SEQ ID NO: 1434343 - DNA, 15 bp, Homo sapiens
caatctggttgcctt

SEQ ID NO: 1434344 - DNA, 15 bp, Homo sapiens
ccaatctggttgcct

SEQ ID NO: 1434345 - DNA, 15 bp, Homo sapiens
tccaatctggttgcc

SEQ ID NO: 1434346 - DNA, 15 bp, Homo sapiens
ttccaatctggttgc

SEQ ID NO: 1434347 - DNA, 15 bp, Homo sapiens
tttccaatctggttg

SEQ ID NO: 1434348 - DNA, 15 bp, Homo sapiens
ctttccaatctggtt

SEQ ID NO: 1434349 - DNA, 15 bp, Homo sapiens
cctttccaatctggt

SEQ ID NO: 1434350 - DNA, 15 bp, Homo sapiens
tcctttccaatctgg

SEQ ID NO: 1434351 - DNA, 15 bp, Homo sapiens
ttcctttccaatctg

SEQ ID NO: 1434352 - DNA, 15 bp, Homo sapiens
tttcctttccaatct

SEQ ID NO: 1434353 - DNA, 15 bp, Homo sapiens
ttttcctttccaatc

SEQ ID NO: 1434354 - DNA, 15 bp, Homo sapiens
tttttcctttccaat

SEQ ID NO: 1434355 - DNA, 15 bp, Homo sapiens
atttttcctttccaa

SEQ ID NO: 1434356 - DNA, 15 bp, Homo sapiens
tatttttcctttcca

SEQ ID NO: 1434357 - DNA, 15 bp, Homo sapiens
ttatttttcctttcc

SEQ ID NO: 1434358 - DNA, 15 bp, Homo sapiens
tttatttttcctttc

SEQ ID NO: 1434359 - DNA, 15 bp, Homo sapiens
gttttatttttcctt

SEQ ID NO: 1434360 - DNA, 15 bp, Homo sapiens
agttttatttttcct

SEQ ID NO: 1434361 - DNA, 15 bp, Homo sapiens
tagttttatttttcc

SEQ ID NO: 1434362 - DNA, 15 bp, Homo sapiens
atagttttatttttc

SEQ ID NO: 1434363 - DNA, 15 bp, Homo sapiens
aatagttttattttt

SEQ ID NO: 1434364 - DNA, 15 bp, Homo sapiens
aaatagttttatttt

SEQ ID NO: 1434365 - DNA, 15 bp, Homo sapiens
aaaatagttttattt

SEQ ID NO: 1434366 - DNA, 15 bp, Homo sapiens
gaaaatagttttatt

SEQ ID NO: 1434367 - DNA, 15 bp, Homo sapiens
tgaaaatagttttat

SEQ ID NO: 1434368 - DNA, 15 bp, Homo sapiens
ctgaaaatagtttta

SEQ ID NO: 1434369 - DNA, 15 bp, Homo sapiens
tctgaaaatagtttt

SEQ ID NO: 1434370 - DNA, 15 bp, Homo sapiens
ttctgaaaatagttt

SEQ ID NO: 1434371 - DNA, 15 bp, Homo sapiens
tttctgaaaatagtt

SEQ ID NO: 1434372 - DNA, 15 bp, Homo sapiens
atttctgaaaatagt

SEQ ID NO: 1434373 - DNA, 15 bp, Homo sapiens
gatttctgaaaatag

SEQ ID NO: 1434374 - DNA, 15 bp, Homo sapiens
tgatttctgaaaata

SEQ ID NO: 1434375 - DNA, 15 bp, Homo sapiens
gtgatttctgaaaat

SEQ ID NO: 1434376 - DNA, 15 bp, Homo sapiens
tgtgatttctgaaaa

SEQ ID NO: 1434377 - DNA, 15 bp, Homo sapiens
atgtgatttctgaaa

SEQ ID NO: 1434378 - DNA, 15 bp, Homo sapiens
catgtgatttctgaa

SEQ ID NO: 1434379 - DNA, 15 bp, Homo sapiens
tcatgtgatttctga

SEQ ID NO: 1434380 - DNA, 15 bp, Homo sapiens
atcatgtgatttctg

SEQ ID NO: 1434381 - DNA, 15 bp, Homo sapiens
gatcatgtgatttct

SEQ ID NO: 1434382 - DNA, 15 bp, Homo sapiens
agatcatgtgatttc

SEQ ID NO: 1434383 - DNA, 15 bp, Homo sapiens
aagatcatgtgattt

SEQ ID NO: 1434384 - DNA, 15 bp, Homo sapiens
taagatcatgtgatt

SEQ ID NO: 1434385 - DNA, 15 bp, Homo sapiens
ataagatcatgtgat

SEQ ID NO: 1434386 - DNA, 15 bp, Homo sapiens
tataagatcatgtga

SEQ ID NO: 1434387 - DNA, 15 bp, Homo sapiens
atataagatcatgtg

SEQ ID NO: 1434388 - DNA, 15 bp, Homo sapiens
tatataagatcatgt

SEQ ID NO: 1434389 - DNA, 15 bp, Homo sapiens
atatataagatcatg

SEQ ID NO: 1434390 - DNA, 15 bp, Homo sapiens
tatatataagatcat

SEQ ID NO: 1434391 - DNA, 15 bp, Homo sapiens
ctatatataagatca

SEQ ID NO: 1434392 - DNA, 15 bp, Homo sapiens
actatatataagatc

SEQ ID NO: 1434393 - DNA, 15 bp, Homo sapiens
tactatatataagat

SEQ ID NO: 1434394 - DNA, 15 bp, Homo sapiens
ttactatatataaga

SEQ ID NO: 1434395 - DNA, 15 bp, Homo sapiens
gttactatatataag

SEQ ID NO: 1434396 - DNA, 15 bp, Homo sapiens
agttactatatataa

SEQ ID NO: 1434397 - DNA, 15 bp, Homo sapiens
gagttactatatata

SEQ ID NO: 1434398 - DNA, 15 bp, Homo sapiens
ggagttactatatat

SEQ ID NO: 1434399 - DNA, 15 bp, Homo sapiens
aggagttactatata

SEQ ID NO: 1434400 - DNA, 15 bp, Homo sapiens
taggagttactatat

SEQ ID NO: 1434401 - DNA, 15 bp, Homo sapiens
ttaggagttactata

SEQ ID NO: 1434402 - DNA, 15 bp, Homo sapiens
tttaggagttactat

SEQ ID NO: 1434403 - DNA, 15 bp, Homo sapiens
ctttaggagttacta

SEQ ID NO: 1434404 - DNA, 15 bp, Homo sapiens
tctttaggagttact

SEQ ID NO: 1434405 - DNA, 15 bp, Homo sapiens
ttctttaggagttac

SEQ ID NO: 1434406 - DNA, 15 bp, Homo sapiens
gttctttaggagtta

SEQ ID NO: 1434407 - DNA, 15 bp, Homo sapiens
ggttctttaggagtt

SEQ ID NO: 1434408 - DNA, 15 bp, Homo sapiens
aggttctttaggagt

SEQ ID NO: 1434409 - DNA, 15 bp, Homo sapiens
gaggttctttaggag

SEQ ID NO: 1434410 - DNA, 15 bp, Homo sapiens
ggaggttctttagga

SEQ ID NO: 1434411 - DNA, 15 bp, Homo sapiens
gggaggttctttagg

SEQ ID NO: 1434412 - DNA, 15 bp, Homo sapiens
ggggaggttctttag

SEQ ID NO: 1434413 - DNA, 15 bp, Homo sapiens
aggggaggttcttta

SEQ ID NO: 1434414 - DNA, 15 bp, Homo sapiens
taggggaggttcttt

SEQ ID NO: 1434415 - DNA, 15 bp, Homo sapiens
ttaggggaggttctt

SEQ ID NO: 1434416 - DNA, 15 bp, Homo sapiens
tttaggggaggttct

SEQ ID NO: 1434417 - DNA, 15 bp, Homo sapiens
ttttaggggaggttc

SEQ ID NO: 1434418 - DNA, 15 bp, Homo sapiens
attttaggggaggtt

SEQ ID NO: 1434419 - DNA, 15 bp, Homo sapiens
aattttaggggaggt

SEQ ID NO: 1434420 - DNA, 15 bp, Homo sapiens
aaattttaggggagg

SEQ ID NO: 1434421 - DNA, 15 bp, Homo sapiens
taaattttaggggag

SEQ ID NO: 1434422 - DNA, 15 bp, Homo sapiens
ataaattttagggga

SEQ ID NO: 1434423 - DNA, 15 bp, Homo sapiens
aataaattttagggg

SEQ ID NO: 1434424 - DNA, 15 bp, Homo sapiens
taataaattttaggg

SEQ ID NO: 1434425 - DNA, 15 bp, Homo sapiens
ctaataaattttagg

SEQ ID NO: 1434426 - DNA, 15 bp, Homo sapiens
tctaataaattttag

SEQ ID NO: 1434427 - DNA, 15 bp, Homo sapiens
ctctaataaatttta

SEQ ID NO: 1434428 - DNA, 15 bp, Homo sapiens
gctctaataaatttt

SEQ ID NO: 1434429 - DNA, 15 bp, Homo sapiens
agctctaataaattt

SEQ ID NO: 1434430 - DNA, 15 bp, Homo sapiens
tagctctaataaatt

SEQ ID NO: 1434431 - DNA, 15 bp, Homo sapiens
ttagctctaataaat

SEQ ID NO: 1434432 - DNA, 15 bp, Homo sapiens
attagctctaataaa

SEQ ID NO: 1434433 - DNA, 15 bp, Homo sapiens
tattagctctaataa

SEQ ID NO: 1434434 - DNA, 15 bp, Homo sapiens
ttattagctctaata

SEQ ID NO: 1434435 - DNA, 15 bp, Homo sapiens
tttattagctctaat

SEQ ID NO: 1434436 - DNA, 15 bp, Homo sapiens
atttattagctctaa

SEQ ID NO: 1434437 - DNA, 15 bp, Homo sapiens
catttattagctcta

SEQ ID NO: 1434438 - DNA, 15 bp, Homo sapiens
tcatttattagctct

SEQ ID NO: 1434439 - DNA, 15 bp, Homo sapiens
ttcatttattagctc

SEQ ID NO: 1434440 - DNA, 15 bp, Homo sapiens
attcatttattagct

SEQ ID NO: 1434441 - DNA, 15 bp, Homo sapiens
aattcatttattagc

SEQ ID NO: 1434442 - DNA, 15 bp, Homo sapiens
gaattcatttattag

SEQ ID NO: 1434443 - DNA, 15 bp, Homo sapiens
tgaattcatttatta

SEQ ID NO: 1434444 - DNA, 15 bp, Homo sapiens
ctgaattcatttatt

SEQ ID NO: 1434445 - DNA, 15 bp, Homo sapiens
gctgaattcatttat

SEQ ID NO: 1434446 - DNA, 15 bp, Homo sapiens
tgctgaattcattta

SEQ ID NO: 1434447 - DNA, 15 bp, Homo sapiens
ttgctgaattcattt

SEQ ID NO: 1434448 - DNA, 15 bp, Homo sapiens
tttgctgaattcatt

SEQ ID NO: 1434449 - DNA, 15 bp, Homo sapiens
ctttgctgaattcat

SEQ ID NO: 1434450 - DNA, 15 bp, Homo sapiens
actttgctgaattca

SEQ ID NO: 1434451 - DNA, 15 bp, Homo sapiens
aactttgctgaattc

SEQ ID NO: 1434452 - DNA, 15 bp, Homo sapiens
caactttgctgaatt

SEQ ID NO: 1434453 - DNA, 15 bp, Homo sapiens
gcaactttgctgaat

SEQ ID NO: 1434454 - DNA, 15 bp, Homo sapiens
tgcaactttgctgaa

SEQ ID NO: 1434455 - DNA, 15 bp, Homo sapiens
ctgcaactttgctga

SEQ ID NO: 1434456 - DNA, 15 bp, Homo sapiens
cctgcaactttgctg

SEQ ID NO: 1434457 - DNA, 15 bp, Homo sapiens
tcctgcaactttgct

SEQ ID NO: 1434458 - DNA, 15 bp, Homo sapiens
atcctgcaactttgc

SEQ ID NO: 1434459 - DNA, 15 bp, Homo sapiens
tatcctgcaactttg

SEQ ID NO: 1434460 - DNA, 15 bp, Homo sapiens
gtatcctgcaacttt

SEQ ID NO: 1434461 - DNA, 15 bp, Homo sapiens
tgtatcctgcaactt

SEQ ID NO: 1434462 - DNA, 15 bp, Homo sapiens
ttgtatcctgcaact

SEQ ID NO: 1434463 - DNA, 15 bp, Homo sapiens
attgtatcctgcaac

SEQ ID NO: 1434464 - DNA, 15 bp, Homo sapiens
tattgtatcctgcaa

SEQ ID NO: 1434465 - DNA, 15 bp, Homo sapiens
atattgtatcctgca

SEQ ID NO: 1434466 - DNA, 15 bp, Homo sapiens
gatattgtatcctgc

SEQ ID NO: 1434467 - DNA, 15 bp, Homo sapiens
tgatattgtatcctg

SEQ ID NO: 1434468 - DNA, 15 bp, Homo sapiens
ttgatattgtatcct

SEQ ID NO: 1434469 - DNA, 15 bp, Homo sapiens
attgatattgtatcc

SEQ ID NO: 1434470 - DNA, 15 bp, Homo sapiens
tattgatattgtatc

SEQ ID NO: 1434471 - DNA, 15 bp, Homo sapiens
atattgatattgtat

SEQ ID NO: 1434472 - DNA, 15 bp, Homo sapiens
tatattgatattgta

SEQ ID NO: 1434473 - DNA, 15 bp, Homo sapiens
gtatattgatattgt

SEQ ID NO: 1434474 - DNA, 15 bp, Homo sapiens
tgtatattgatattg

SEQ ID NO: 1434475 - DNA, 15 bp, Homo sapiens
ttgtatattgatatt

SEQ ID NO: 1434476 - DNA, 15 bp, Homo sapiens
tttgtatattgatat

SEQ ID NO: 1434477 - DNA, 15 bp, Homo sapiens
ttttgtatattgata

SEQ ID NO: 1434478 - DNA, 15 bp, Homo sapiens
tttttgtatattgat

SEQ ID NO: 1434479 - DNA, 15 bp, Homo sapiens
atttttgtatattga

SEQ ID NO: 1434480 - DNA, 15 bp, Homo sapiens
aatttttgtatattg

SEQ ID NO: 1434481 - DNA, 15 bp, Homo sapiens
taatttttgtatatt

SEQ ID NO: 1434482 - DNA, 15 bp, Homo sapiens
ttaatttttgtatat

SEQ ID NO: 1434483 - DNA, 15 bp, Homo sapiens
attaatttttgtata

SEQ ID NO: 1434484 - DNA, 15 bp, Homo sapiens
aattaatttttgtat

SEQ ID NO: 1434485 - DNA, 15 bp, Homo sapiens
taattaatttttgta

SEQ ID NO: 1434486 - DNA, 15 bp, Homo sapiens
ataattaatttttgt

SEQ ID NO: 1434487 - DNA, 15 bp, Homo sapiens
tataattaatttttg

SEQ ID NO: 1434488 - DNA, 15 bp, Homo sapiens
atataattaattttt

SEQ ID NO: 1434489 - DNA, 15 bp, Homo sapiens
aatataattaatttt

SEQ ID NO: 1434490 - DNA, 15 bp, Homo sapiens
aaatataattaattt

SEQ ID NO: 1434491 - DNA, 15 bp, Homo sapiens
aaaatataattaatt

SEQ ID NO: 1434492 - DNA, 15 bp, Homo sapiens
aaaaatataattaat

SEQ ID NO: 1434493 - DNA, 15 bp, Homo sapiens
taaaaatataattaa

SEQ ID NO: 1434494 - DNA, 15 bp, Homo sapiens
ataaaaatataatta

SEQ ID NO: 1434495 - DNA, 15 bp, Homo sapiens
tataaaaatataatt

SEQ ID NO: 1434496 - DNA, 15 bp, Homo sapiens
gtataaaaatataat

SEQ ID NO: 1434497 - DNA, 15 bp, Homo sapiens
tgtataaaaatataa

SEQ ID NO: 1434498 - DNA, 15 bp, Homo sapiens
gtgtataaaaatata

SEQ ID NO: 1434499 - DNA, 15 bp, Homo sapiens
agtgtataaaaatat

SEQ ID NO: 1434500 - DNA, 15 bp, Homo sapiens
tagtgtataaaaata

SEQ ID NO: 1434501 - DNA, 15 bp, Homo sapiens
ctagtgtataaaaat

SEQ ID NO: 1434502 - DNA, 15 bp, Homo sapiens
cctagtgtataaaaa

SEQ ID NO: 1434503 - DNA, 15 bp, Homo sapiens
tcctagtgtataaaa

SEQ ID NO: 1434504 - DNA, 15 bp, Homo sapiens
ttcctagtgtataaa

SEQ ID NO: 1434505 - DNA, 15 bp, Homo sapiens
attcctagtgtataa

SEQ ID NO: 1434506 - DNA, 15 bp, Homo sapiens
cattcctagtgtata

SEQ ID NO: 1434507 - DNA, 15 bp, Homo sapiens
tcattcctagtgtat

SEQ ID NO: 1434508 - DNA, 15 bp, Homo sapiens
ttcattcctagtgta

SEQ ID NO: 1434509 - DNA, 15 bp, Homo sapiens
gttcattcctagtgt

SEQ ID NO: 1434510 - DNA, 15 bp, Homo sapiens
tgttcattcctagtg

SEQ ID NO: 1434511 - DNA, 15 bp, Homo sapiens
ttgttcattcctagt

SEQ ID NO: 1434512 - DNA, 15 bp, Homo sapiens
attgttcattcctag

SEQ ID NO: 1434513 - DNA, 15 bp, Homo sapiens
gattgttcattccta

SEQ ID NO: 1434514 - DNA, 15 bp, Homo sapiens
ggattgttcattcct

SEQ ID NO: 1434515 - DNA, 15 bp, Homo sapiens
aggattgttcattcc

SEQ ID NO: 1434516 - DNA, 15 bp, Homo sapiens
taggattgttcattc

SEQ ID NO: 1434517 - DNA, 15 bp, Homo sapiens
ttaggattgttcatt

SEQ ID NO: 1434518 - DNA, 15 bp, Homo sapiens
tttaggattgttcat

SEQ ID NO: 1434519 - DNA, 15 bp, Homo sapiens
ttttaggattgttca

SEQ ID NO: 1434520 - DNA, 15 bp, Homo sapiens
attttaggattgttc

SEQ ID NO: 1434521 - DNA, 15 bp, Homo sapiens
cattttaggattgtt

SEQ ID NO: 1434522 - DNA, 15 bp, Homo sapiens
tcattttaggattgt

SEQ ID NO: 1434523 - DNA, 15 bp, Homo sapiens
ttcattttaggattg

SEQ ID NO: 1434524 - DNA, 15 bp, Homo sapiens
tttcattttaggatt

SEQ ID NO: 1434525 - DNA, 15 bp, Homo sapiens
atttcattttaggat

SEQ ID NO: 1434526 - DNA, 15 bp, Homo sapiens
aatttcattttagga

SEQ ID NO: 1434527 - DNA, 15 bp, Homo sapiens
taatttcattttagg

SEQ ID NO: 1434528 - DNA, 15 bp, Homo sapiens
ttaatttcattttag

SEQ ID NO: 1434529 - DNA, 15 bp, Homo sapiens
cttaatttcatttta

SEQ ID NO: 1434530 - DNA, 15 bp, Homo sapiens
tcttaatttcatttt

SEQ ID NO: 1434531 - DNA, 15 bp, Homo sapiens
ttcttaatttcattt

SEQ ID NO: 1434532 - DNA, 15 bp, Homo sapiens
gttcttaatttcatt

SEQ ID NO: 1434533 - DNA, 15 bp, Homo sapiens
tgttcttaatttcat

SEQ ID NO: 1434534 - DNA, 15 bp, Homo sapiens
gtgttcttaatttca

SEQ ID NO: 1434535 - DNA, 15 bp, Homo sapiens
tgtgttcttaatttc

SEQ ID NO: 1434536 - DNA, 15 bp, Homo sapiens
ttgtgttcttaattt

SEQ ID NO: 1434537 - DNA, 15 bp, Homo sapiens
attgtgttcttaatt

SEQ ID NO: 1434538 - DNA, 15 bp, Homo sapiens
aattgtgttcttaat

SEQ ID NO: 1434539 - DNA, 15 bp, Homo sapiens
gaattgtgttcttaa

SEQ ID NO: 1434540 - DNA, 15 bp, Homo sapiens
agaattgtgttctta

SEQ ID NO: 1434541 - DNA, 15 bp, Homo sapiens
cagaattgtgttctt

SEQ ID NO: 1434542 - DNA, 15 bp, Homo sapiens
ccagaattgtgttct

SEQ ID NO: 1434543 - DNA, 15 bp, Homo sapiens
gccagaattgtgttc

SEQ ID NO: 1434544 - DNA, 15 bp, Homo sapiens
agccagaattgtgtt

SEQ ID NO: 1434545 - DNA, 15 bp, Homo sapiens
cagccagaattgtgt

SEQ ID NO: 1434546 - DNA, 15 bp, Homo sapiens
ccagccagaattgtg

SEQ ID NO: 1434547 - DNA, 15 bp, Homo sapiens
cccagccagaattgt

SEQ ID NO: 1434548 - DNA, 15 bp, Homo sapiens
gcccagccagaattg

SEQ ID NO: 1434549 - DNA, 15 bp, Homo sapiens
tgcccagccagaatt

SEQ ID NO: 1434550 - DNA, 15 bp, Homo sapiens
atgcccagccagaat

SEQ ID NO: 1434551 - DNA, 15 bp, Homo sapiens
catgcccagccagaa

SEQ ID NO: 1434552 - DNA, 15 bp, Homo sapiens
tcatgcccagccaga

SEQ ID NO: 1434553 - DNA, 15 bp, Homo sapiens
atcatgcccagccag

SEQ ID NO: 1434554 - DNA, 15 bp, Homo sapiens
catcatgcccagcca

SEQ ID NO: 1434555 - DNA, 15 bp, Homo sapiens
acatcatgcccagcc

SEQ ID NO: 1434556 - DNA, 15 bp, Homo sapiens
gacatcatgcccagc

SEQ ID NO: 1434557 - DNA, 15 bp, Homo sapiens
agacatcatgcccag

SEQ ID NO: 1434558 - DNA, 15 bp, Homo sapiens
gagacatcatgccca

SEQ ID NO: 1434559 - DNA, 15 bp, Homo sapiens
tgagacatcatgccc

SEQ ID NO: 1434560 - DNA, 15 bp, Homo sapiens
gtgagacatcatgcc

SEQ ID NO: 1434561 - DNA, 15 bp, Homo sapiens
cgtgagacatcatgc

SEQ ID NO: 1434562 - DNA, 15 bp, Homo sapiens
gcgtgagacatcatg

SEQ ID NO: 1434563 - DNA, 15 bp, Homo sapiens
ggcgtgagacatcat

SEQ ID NO: 1434564 - DNA, 15 bp, Homo sapiens
aggcgtgagacatca

SEQ ID NO: 1434565 - DNA, 15 bp, Homo sapiens
caggcgtgagacatc

SEQ ID NO: 1434566 - DNA, 15 bp, Homo sapiens
acaggcgtgagacat

SEQ ID NO: 1434567 - DNA, 15 bp, Homo sapiens
tacaggcgtgagaca

SEQ ID NO: 1434568 - DNA, 15 bp, Homo sapiens
ttacaggcgtgagac

SEQ ID NO: 1434569 - DNA, 15 bp, Homo sapiens
tttggcctcccaaag

SEQ ID NO: 1434570 - DNA, 15 bp, Homo sapiens
ctttggcctcccaaa

SEQ ID NO: 1434571 - DNA, 15 bp, Homo sapiens
gctttggcctcccaa

SEQ ID NO: 1434572 - DNA, 15 bp, Homo sapiens
tgctttggcctccca

SEQ ID NO: 1434573 - DNA, 15 bp, Homo sapiens
ctgctttggcctccc

SEQ ID NO: 1434574 - DNA, 15 bp, Homo sapiens
cctgctttggcctcc

SEQ ID NO: 1434575 - DNA, 15 bp, Homo sapiens
tcctgctttggcctc

SEQ ID NO: 1434576 - DNA, 15 bp, Homo sapiens
ctcctgctttggcct

SEQ ID NO: 1434577 - DNA, 15 bp, Homo sapiens
cctcctgctttggcc

SEQ ID NO: 1434578 - DNA, 15 bp, Homo sapiens
tcctcctgctttggc

SEQ ID NO: 1434579 - DNA, 15 bp, Homo sapiens
gtcctcctgctttgg

SEQ ID NO: 1434580 - DNA, 15 bp, Homo sapiens
ggtcctcctgctttg

SEQ ID NO: 1434581 - DNA, 15 bp, Homo sapiens
cggtcctcctgcttt

SEQ ID NO: 1434582 - DNA, 15 bp, Homo sapiens
gcggtcctcctgctt

SEQ ID NO: 1434583 - DNA, 15 bp, Homo sapiens
agcggtcctcctgct

SEQ ID NO: 1434584 - DNA, 15 bp, Homo sapiens
aagcggtcctcctgc

SEQ ID NO: 1434585 - DNA, 15 bp, Homo sapiens
taagcggtcctcctg

SEQ ID NO: 1434586 - DNA, 15 bp, Homo sapiens
ctaagcggtcctcct

SEQ ID NO: 1434587 - DNA, 15 bp, Homo sapiens
gctaagcggtcctcc

SEQ ID NO: 1434588 - DNA, 15 bp, Homo sapiens
ggctaagcggtcctc

SEQ ID NO: 1434589 - DNA, 15 bp, Homo sapiens
gggctaagcggtcct

SEQ ID NO: 1434590 - DNA, 15 bp, Homo sapiens
cgggctaagcggtcc

SEQ ID NO: 1434591 - DNA, 15 bp, Homo sapiens
ccgggctaagcggtc

SEQ ID NO: 1434592 - DNA, 15 bp, Homo sapiens
cccgggctaagcggt

SEQ ID NO: 1434593 - DNA, 15 bp, Homo sapiens
tcccgggctaagcgg

SEQ ID NO: 1434594 - DNA, 15 bp, Homo sapiens
ctcccgggctaagcg

SEQ ID NO: 1434595 - DNA, 15 bp, Homo sapiens
actcccgggctaagc

SEQ ID NO: 1434596 - DNA, 15 bp, Homo sapiens
aactcccgggctaag

SEQ ID NO: 1434597 - DNA, 15 bp, Homo sapiens
aaactcccgggctaa

SEQ ID NO: 1434598 - DNA, 15 bp, Homo sapiens
taaactcccgggcta

SEQ ID NO: 1434599 - DNA, 15 bp, Homo sapiens
ttaaactcccgggct

SEQ ID NO: 1434600 - DNA, 15 bp, Homo sapiens
cttaaactcccgggc

SEQ ID NO: 1434601 - DNA, 15 bp, Homo sapiens
tcttaaactcccggg

SEQ ID NO: 1434602 - DNA, 15 bp, Homo sapiens
gtcttaaactcccgg

SEQ ID NO: 1434603 - DNA, 15 bp, Homo sapiens
ggtcttaaactcccg

SEQ ID NO: 1434604 - DNA, 15 bp, Homo sapiens
tggtcttaaactccc

SEQ ID NO: 1434605 - DNA, 15 bp, Homo sapiens
taggctggtcttaaa

SEQ ID NO: 1434606 - DNA, 15 bp, Homo sapiens
ctaggctggtcttaa

SEQ ID NO: 1434607 - DNA, 15 bp, Homo sapiens
cctaggctggtctta

SEQ ID NO: 1434608 - DNA, 15 bp, Homo sapiens
gcctaggctggtctt

SEQ ID NO: 1434609 - DNA, 15 bp, Homo sapiens
tgcctaggctggtct

SEQ ID NO: 1434610 - DNA, 15 bp, Homo sapiens
ttgcctaggctggtc

SEQ ID NO: 1434611 - DNA, 15 bp, Homo sapiens
gttgcctaggctggt

SEQ ID NO: 1434612 - DNA, 15 bp, Homo sapiens
tgttgcctaggctgg

SEQ ID NO: 1434613 - DNA, 15 bp, Homo sapiens
atgttgcctaggctg

SEQ ID NO: 1434614 - DNA, 15 bp, Homo sapiens
catgttgcctaggct

SEQ ID NO: 1434615 - DNA, 15 bp, Homo sapiens
ccatgttgcctaggc

SEQ ID NO: 1434616 - DNA, 15 bp, Homo sapiens
accatgttgcctagg

SEQ ID NO: 1434617 - DNA, 15 bp, Homo sapiens
caccatgttgcctag

SEQ ID NO: 1434618 - DNA, 15 bp, Homo sapiens
tcaccatgttgccta

SEQ ID NO: 1434619 - DNA, 15 bp, Homo sapiens
ttcaccatgttgcct

SEQ ID NO: 1434620 - DNA, 15 bp, Homo sapiens
agaggtggggtttca

SEQ ID NO: 1434621 - DNA, 15 bp, Homo sapiens
tagaggtggggtttc

SEQ ID NO: 1434622 - DNA, 15 bp, Homo sapiens
gtagaggtggggttt

SEQ ID NO: 1434623 - DNA, 15 bp, Homo sapiens
atttttgtagaggtg

SEQ ID NO: 1434624 - DNA, 15 bp, Homo sapiens
aatttttgtagaggt

SEQ ID NO: 1434625 - DNA, 15 bp, Homo sapiens
taatttttgtagagg

SEQ ID NO: 1434626 - DNA, 15 bp, Homo sapiens
gtttttttttaattt

SEQ ID NO: 1434627 - DNA, 15 bp, Homo sapiens
tgtttttttttaatt

SEQ ID NO: 1434628 - DNA, 15 bp, Homo sapiens
ttgtttttttttaat

SEQ ID NO: 1434629 - DNA, 15 bp, Homo sapiens
tttgtttttttttaa

SEQ ID NO: 1434630 - DNA, 15 bp, Homo sapiens
ttttgttttttttta

SEQ ID NO: 1434631 - DNA, 15 bp, Homo sapiens
cgttttgtttttttt

SEQ ID NO: 1434632 - DNA, 15 bp, Homo sapiens
gcgttttgttttttt

SEQ ID NO: 1434633 - DNA, 15 bp, Homo sapiens
ggcgttttgtttttt

SEQ ID NO: 1434634 - DNA, 15 bp, Homo sapiens
tggcgttttgttttt

SEQ ID NO: 1434635 - DNA, 15 bp, Homo sapiens
ctggcgttttgtttt

SEQ ID NO: 1434636 - DNA, 15 bp, Homo sapiens
tctggcgttttgttt

SEQ ID NO: 1434637 - DNA, 15 bp, Homo sapiens
atctggcgttttgtt

SEQ ID NO: 1434638 - DNA, 15 bp, Homo sapiens
catctggcgttttgt

SEQ ID NO: 1434639 - DNA, 15 bp, Homo sapiens
acatctggcgttttg

SEQ ID NO: 1434640 - DNA, 15 bp, Homo sapiens
gacatctggcgtttt

SEQ ID NO: 1434641 - DNA, 15 bp, Homo sapiens
tgacatctggcgttt

SEQ ID NO: 1434642 - DNA, 15 bp, Homo sapiens
atgacatctggcgtt

SEQ ID NO: 1434643 - DNA, 15 bp, Homo sapiens
catgacatctggcgt

SEQ ID NO: 1434644 - DNA, 15 bp, Homo sapiens
ccatgacatctggcg

SEQ ID NO: 1434645 - DNA, 15 bp, Homo sapiens
gccatgacatctggc

SEQ ID NO: 1434646 - DNA, 15 bp, Homo sapiens
tgccatgacatctgg

SEQ ID NO: 1434647 - DNA, 15 bp, Homo sapiens
gtgccatgacatctg

SEQ ID NO: 1434648 - DNA, 15 bp, Homo sapiens
cgtgccatgacatct

SEQ ID NO: 1434649 - DNA, 15 bp, Homo sapiens
acgtgccatgacatc

SEQ ID NO: 1434650 - DNA, 15 bp, Homo sapiens
cacgtgccatgacat

SEQ ID NO: 1434651 - DNA, 15 bp, Homo sapiens
gcacgtgccatgaca

SEQ ID NO: 1434652 - DNA, 15 bp, Homo sapiens
ggcacgtgccatgac

SEQ ID NO: 1434653 - DNA, 15 bp, Homo sapiens
aggcacgtgccatga

SEQ ID NO: 1434654 - DNA, 15 bp, Homo sapiens
caggcacgtgccatg

SEQ ID NO: 1434655 - DNA, 15 bp, Homo sapiens
acaggcacgtgccat

SEQ ID NO: 1434656 - DNA, 15 bp, Homo sapiens
tacaggcacgtgcca

SEQ ID NO: 1434657 - DNA, 15 bp, Homo sapiens
actacaggcacgtgc

SEQ ID NO: 1434658 - DNA, 15 bp, Homo sapiens
gactacaggcacgtg

SEQ ID NO: 1434659 - DNA, 15 bp, Homo sapiens
ggactacaggcacgt

SEQ ID NO: 1434660 - DNA, 15 bp, Homo sapiens
gggactacaggcacg

SEQ ID NO: 1434661 - DNA, 15 bp, Homo sapiens
ttgctgggactacag

SEQ ID NO: 1434662 - DNA, 15 bp, Homo sapiens
gttgctgggactaca

SEQ ID NO: 1434663 - DNA, 15 bp, Homo sapiens
agttgctgggactac

SEQ ID NO: 1434664 - DNA, 15 bp, Homo sapiens
aagttgctgggacta

SEQ ID NO: 1434665 - DNA, 15 bp, Homo sapiens
caagttgctgggact

SEQ ID NO: 1434666 - DNA, 15 bp, Homo sapiens
ccaagttgctgggac

SEQ ID NO: 1434667 - DNA, 15 bp, Homo sapiens
cccaagttgctggga

SEQ ID NO: 1434668 - DNA, 15 bp, Homo sapiens
tcccaagttgctggg

SEQ ID NO: 1434669 - DNA, 15 bp, Homo sapiens
ctcccaagttgctgg

SEQ ID NO: 1434670 - DNA, 15 bp, Homo sapiens
cctcccaagttgctg

SEQ ID NO: 1434671 - DNA, 15 bp, Homo sapiens
ttcagcctcccaagt

SEQ ID NO: 1434672 - DNA, 15 bp, Homo sapiens
cttcagcctcccaag

SEQ ID NO: 1434673 - DNA, 15 bp, Homo sapiens
acttcagcctcccaa

SEQ ID NO: 1434674 - DNA, 15 bp, Homo sapiens
cacttcagcctccca

SEQ ID NO: 1434675 - DNA, 15 bp, Homo sapiens
ccacttcagcctccc

SEQ ID NO: 1434676 - DNA, 15 bp, Homo sapiens
cccacttcagcctcc

SEQ ID NO: 1434677 - DNA, 15 bp, Homo sapiens
tcccacttcagcctc

SEQ ID NO: 1434678 - DNA, 15 bp, Homo sapiens
ctcccacttcagcct

SEQ ID NO: 1434679 - DNA, 15 bp, Homo sapiens
cctcccacttcagcc

SEQ ID NO: 1434680 - DNA, 15 bp, Homo sapiens
tcctcccacttcagc

SEQ ID NO: 1434681 - DNA, 15 bp, Homo sapiens
atcctcccacttcag

SEQ ID NO: 1434682 - DNA, 15 bp, Homo sapiens
gatcctcccacttca

SEQ ID NO: 1434683 - DNA, 15 bp, Homo sapiens
tgatcctcccacttc

SEQ ID NO: 1434684 - DNA, 15 bp, Homo sapiens
gtgatcctcccactt

SEQ ID NO: 1434685 - DNA, 15 bp, Homo sapiens
agtgatcctcccact

SEQ ID NO: 1434686 - DNA, 15 bp, Homo sapiens
atcaagtgatcctcc

SEQ ID NO: 1434687 - DNA, 15 bp, Homo sapiens
gatcaagtgatcctc

SEQ ID NO: 1434688 - DNA, 15 bp, Homo sapiens
ggatcaagtgatcct

SEQ ID NO: 1434689 - DNA, 15 bp, Homo sapiens
aggatcaagtgatcc

SEQ ID NO: 1434690 - DNA, 15 bp, Homo sapiens
caggatcaagtgatc

SEQ ID NO: 1434691 - DNA, 15 bp, Homo sapiens
ccaggatcaagtgat

SEQ ID NO: 1434692 - DNA, 15 bp, Homo sapiens
cccaggatcaagtga

SEQ ID NO: 1434693 - DNA, 15 bp, Homo sapiens
tcccaggatcaagtg

SEQ ID NO: 1434694 - DNA, 15 bp, Homo sapiens
ctcccaggatcaagt

SEQ ID NO: 1434695 - DNA, 15 bp, Homo sapiens
tctcccaggatcaag

SEQ ID NO: 1434696 - DNA, 15 bp, Homo sapiens
atctcccaggatcaa

SEQ ID NO: 1434697 - DNA, 15 bp, Homo sapiens
aatctcccaggatca

SEQ ID NO: 1434698 - DNA, 15 bp, Homo sapiens
taatctcccaggatc

SEQ ID NO: 1434699 - DNA, 15 bp, Homo sapiens
ttaatctcccaggat

SEQ ID NO: 1434700 - DNA, 15 bp, Homo sapiens
cttaatctcccagga

SEQ ID NO: 1434701 - DNA, 15 bp, Homo sapiens
ccttaatctcccagg

SEQ ID NO: 1434702 - DNA, 15 bp, Homo sapiens
gccttaatctcccag

SEQ ID NO: 1434703 - DNA, 15 bp, Homo sapiens
agccttaatctccca

SEQ ID NO: 1434704 - DNA, 15 bp, Homo sapiens
cagccttaatctccc

SEQ ID NO: 1434705 - DNA, 15 bp, Homo sapiens
gcagccttaatctcc

SEQ ID NO: 1434706 - DNA, 15 bp, Homo sapiens
tgcagccttaatctc

SEQ ID NO: 1434707 - DNA, 15 bp, Homo sapiens
ctgcagccttaatct

SEQ ID NO: 1434708 - DNA, 15 bp, Homo sapiens
actgcagccttaatc

SEQ ID NO: 1434709 - DNA, 15 bp, Homo sapiens
cactgcagccttaat

SEQ ID NO: 1434710 - DNA, 15 bp, Homo sapiens
tcactgcagccttaa

SEQ ID NO: 1434711 - DNA, 15 bp, Homo sapiens
ctcactgcagcctta

SEQ ID NO: 1434712 - DNA, 15 bp, Homo sapiens
atgatcacagctcac

SEQ ID NO: 1434713 - DNA, 15 bp, Homo sapiens
catgatcacagctca

SEQ ID NO: 1434714 - DNA, 15 bp, Homo sapiens
gcatgatcacagctc

SEQ ID NO: 1434715 - DNA, 15 bp, Homo sapiens
ggcatgatcacagct

SEQ ID NO: 1434716 - DNA, 15 bp, Homo sapiens
tggcatgatcacagc

SEQ ID NO: 1434717 - DNA, 15 bp, Homo sapiens
gtggcatgatcacag

SEQ ID NO: 1434718 - DNA, 15 bp, Homo sapiens
agtggcatgatcaca

SEQ ID NO: 1434719 - DNA, 15 bp, Homo sapiens
cagtggcatgatcac

SEQ ID NO: 1434720 - DNA, 15 bp, Homo sapiens
aggtctcactctgtt

SEQ ID NO: 1434721 - DNA, 15 bp, Homo sapiens
aaggtctcactctgt

SEQ ID NO: 1434722 - DNA, 15 bp, Homo sapiens
caaggtctcactctg

SEQ ID NO: 1434723 - DNA, 15 bp, Homo sapiens
acaaggtctcactct

SEQ ID NO: 1434724 - DNA, 15 bp, Homo sapiens
gacaaggtctcactc

SEQ ID NO: 1434725 - DNA, 15 bp, Homo sapiens
agacaaggtctcact

SEQ ID NO: 1434726 - DNA, 15 bp, Homo sapiens
gagacaaggtctcac

SEQ ID NO: 1434727 - DNA, 15 bp, Homo sapiens
tgagacaaggtctca

SEQ ID NO: 1434728 - DNA, 15 bp, Homo sapiens
ttgagacaaggtctc

SEQ ID NO: 1434729 - DNA, 15 bp, Homo sapiens
tttgagacaaggtct

SEQ ID NO: 1434730 - DNA, 15 bp, Homo sapiens
ttttgagacaaggtc

SEQ ID NO: 1434731 - DNA, 15 bp, Homo sapiens
tttttgagacaaggt

SEQ ID NO: 1434732 - DNA, 15 bp, Homo sapiens
ttttttgagacaagg

SEQ ID NO: 1434733 - DNA, 15 bp, Homo sapiens
tttttttgagacaag

SEQ ID NO: 1434734 - DNA, 15 bp, Homo sapiens
ttttttttgagacaa

SEQ ID NO: 1434735 - DNA, 15 bp, Homo sapiens
attcttttttctttt

SEQ ID NO: 1434736 - DNA, 15 bp, Homo sapiens
cattcttttttcttt

SEQ ID NO: 1434737 - DNA, 15 bp, Homo sapiens
acattcttttttctt

SEQ ID NO: 1434738 - DNA, 15 bp, Homo sapiens
tacattcttttttct

SEQ ID NO: 1434739 - DNA, 15 bp, Homo sapiens
ttacattcttttttc

SEQ ID NO: 1434740 - DNA, 15 bp, Homo sapiens
attacattctttttt

SEQ ID NO: 1434741 - DNA, 15 bp, Homo sapiens
aattacattcttttt

SEQ ID NO: 1434742 - DNA, 15 bp, Homo sapiens
aaattacattctttt

SEQ ID NO: 1434743 - DNA, 15 bp, Homo sapiens
aaaattacattcttt

SEQ ID NO: 1434744 - DNA, 15 bp, Homo sapiens
taaaattacattctt

SEQ ID NO: 1434745 - DNA, 15 bp, Homo sapiens
ataaaattacattct

SEQ ID NO: 1434746 - DNA, 15 bp, Homo sapiens
tataaaattacattc

SEQ ID NO: 1434747 - DNA, 15 bp, Homo sapiens
ttataaaattacatt

SEQ ID NO: 1434748 - DNA, 15 bp, Homo sapiens
attataaaattacat

SEQ ID NO: 1434749 - DNA, 15 bp, Homo sapiens
tattataaaattaca

SEQ ID NO: 1434750 - DNA, 15 bp, Homo sapiens
ttattataaaattac

SEQ ID NO: 1434751 - DNA, 15 bp, Homo sapiens
gttattataaaatta

SEQ ID NO: 1434752 - DNA, 15 bp, Homo sapiens
tgttattataaaatt

SEQ ID NO: 1434753 - DNA, 15 bp, Homo sapiens
atgttattataaaat

SEQ ID NO: 1434754 - DNA, 15 bp, Homo sapiens
tatgttattataaaa

SEQ ID NO: 1434755 - DNA, 15 bp, Homo sapiens
ttatgttattataaa

SEQ ID NO: 1434756 - DNA, 15 bp, Homo sapiens
tttatgttattataa

SEQ ID NO: 1434757 - DNA, 15 bp, Homo sapiens
tttttatgttattat

SEQ ID NO: 1434758 - DNA, 15 bp, Homo sapiens
atttttatgttatta

SEQ ID NO: 1434759 - DNA, 15 bp, Homo sapiens
tatttttatgttatt

SEQ ID NO: 1434760 - DNA, 15 bp, Homo sapiens
ttatttttatgttat

SEQ ID NO: 1434761 - DNA, 15 bp, Homo sapiens
tttatttttatgtta

SEQ ID NO: 1434762 - DNA, 15 bp, Homo sapiens
ttttatttttatgtt

SEQ ID NO: 1434763 - DNA, 15 bp, Homo sapiens
attttatttttatgt

SEQ ID NO: 1434764 - DNA, 15 bp, Homo sapiens
cattttatttttatg

SEQ ID NO: 1434765 - DNA, 15 bp, Homo sapiens
acattttatttttat

SEQ ID NO: 1434766 - DNA, 15 bp, Homo sapiens
gacattttattttta

SEQ ID NO: 1434767 - DNA, 15 bp, Homo sapiens
agacattttattttt

SEQ ID NO: 1434768 - DNA, 15 bp, Homo sapiens
aagacattttatttt

SEQ ID NO: 1434769 - DNA, 15 bp, Homo sapiens
caagacattttattt

SEQ ID NO: 1434770 - DNA, 15 bp, Homo sapiens
ccaagacattttatt

SEQ ID NO: 1434771 - DNA, 15 bp, Homo sapiens
ttccaagacatttta

SEQ ID NO: 1434772 - DNA, 15 bp, Homo sapiens
attccaagacatttt

SEQ ID NO: 1434773 - DNA, 15 bp, Homo sapiens
tattccaagacattt

SEQ ID NO: 1434774 - DNA, 15 bp, Homo sapiens
ttattccaagacatt

SEQ ID NO: 1434775 - DNA, 15 bp, Homo sapiens
tttattccaagacat

SEQ ID NO: 1434776 - DNA, 15 bp, Homo sapiens
atttattccaagaca

SEQ ID NO: 1434777 - DNA, 15 bp, Homo sapiens
aatttattccaagac

SEQ ID NO: 1434778 - DNA, 15 bp, Homo sapiens
aaatttattccaaga

SEQ ID NO: 1434779 - DNA, 15 bp, Homo sapiens
aaaatttattccaag

SEQ ID NO: 1434780 - DNA, 15 bp, Homo sapiens
taaaatttattccaa

SEQ ID NO: 1434781 - DNA, 15 bp, Homo sapiens
ataaaatttattcca

SEQ ID NO: 1434782 - DNA, 15 bp, Homo sapiens
tataaaatttattcc

SEQ ID NO: 1434783 - DNA, 15 bp, Homo sapiens
ttataaaatttattc

SEQ ID NO: 1434784 - DNA, 15 bp, Homo sapiens
tttataaaatttatt

SEQ ID NO: 1434785 - DNA, 15 bp, Homo sapiens
atttataaaatttat

SEQ ID NO: 1434786 - DNA, 15 bp, Homo sapiens
aatttataaaattta

SEQ ID NO: 1434787 - DNA, 15 bp, Homo sapiens
aaatttataaaattt

SEQ ID NO: 1434788 - DNA, 15 bp, Homo sapiens
taaatttataaaatt

SEQ ID NO: 1434789 - DNA, 15 bp, Homo sapiens
ttaaatttataaaat

SEQ ID NO: 1434790 - DNA, 15 bp, Homo sapiens
gttaaatttataaaa

SEQ ID NO: 1434791 - DNA, 15 bp, Homo sapiens
tgttaaatttataaa

SEQ ID NO: 1434792 - DNA, 15 bp, Homo sapiens
ttgttaaatttataa

SEQ ID NO: 1434793 - DNA, 15 bp, Homo sapiens
tttgttaaatttata

SEQ ID NO: 1434794 - DNA, 15 bp, Homo sapiens
ttttgttaaatttat

SEQ ID NO: 1434795 - DNA, 15 bp, Homo sapiens
cttttgttaaattta

SEQ ID NO: 1434796 - DNA, 15 bp, Homo sapiens
acttttgttaaattt

SEQ ID NO: 1434797 - DNA, 15 bp, Homo sapiens
tacttttgttaaatt

SEQ ID NO: 1434798 - DNA, 15 bp, Homo sapiens
gtacttttgttaaat

SEQ ID NO: 1434799 - DNA, 15 bp, Homo sapiens
tgtacttttgttaaa

SEQ ID NO: 1434800 - DNA, 15 bp, Homo sapiens
ttgtacttttgttaa

SEQ ID NO: 1434801 - DNA, 15 bp, Homo sapiens
cttgtacttttgtta

SEQ ID NO: 1434802 - DNA, 15 bp, Homo sapiens
tcttgtacttttgtt

SEQ ID NO: 1434803 - DNA, 15 bp, Homo sapiens
gtcttgtacttttgt

SEQ ID NO: 1434804 - DNA, 15 bp, Homo sapiens
ggtcttgtacttttg

SEQ ID NO: 1434805 - DNA, 15 bp, Homo sapiens
aggtcttgtactttt

SEQ ID NO: 1434806 - DNA, 15 bp, Homo sapiens
taggtcttgtacttt

SEQ ID NO: 1434807 - DNA, 15 bp, Homo sapiens
ataggtcttgtactt

SEQ ID NO: 1434808 - DNA, 15 bp, Homo sapiens
tataggtcttgtact

SEQ ID NO: 1434809 - DNA, 15 bp, Homo sapiens
ttataggtcttgtac

SEQ ID NO: 1434810 - DNA, 15 bp, Homo sapiens
gttataggtcttgta

SEQ ID NO: 1434811 - DNA, 15 bp, Homo sapiens
ggttataggtcttgt

SEQ ID NO: 1434812 - DNA, 15 bp, Homo sapiens
aggttataggtcttg

SEQ ID NO: 1434813 - DNA, 15 bp, Homo sapiens
caggttataggtctt

SEQ ID NO: 1434814 - DNA, 15 bp, Homo sapiens
tcaggttataggtct

SEQ ID NO: 1434815 - DNA, 15 bp, Homo sapiens
ttcaggttataggtc

SEQ ID NO: 1434816 - DNA, 15 bp, Homo sapiens
cttcaggttataggt

SEQ ID NO: 1434817 - DNA, 15 bp, Homo sapiens
tcttcaggttatagg

SEQ ID NO: 1434818 - DNA, 15 bp, Homo sapiens
gtcttcaggttatag

SEQ ID NO: 1434819 - DNA, 15 bp, Homo sapiens
agtcttcaggttata

SEQ ID NO: 1434820 - DNA, 15 bp, Homo sapiens
tagtcttcaggttat

SEQ ID NO: 1434821 - DNA, 15 bp, Homo sapiens
gtagtcttcaggtta

SEQ ID NO: 1434822 - DNA, 15 bp, Homo sapiens
tgtagtcttcaggtt

SEQ ID NO: 1434823 - DNA, 15 bp, Homo sapiens
ttgtagtcttcaggt

SEQ ID NO: 1434824 - DNA, 15 bp, Homo sapiens
tttgtagtcttcagg

SEQ ID NO: 1434825 - DNA, 15 bp, Homo sapiens
ctttgtagtcttcag

SEQ ID NO: 1434826 - DNA, 15 bp, Homo sapiens
gctttgtagtcttca

SEQ ID NO: 1434827 - DNA, 15 bp, Homo sapiens
tgctttgtagtcttc

SEQ ID NO: 1434828 - DNA, 15 bp, Homo sapiens
gtgctttgtagtctt

SEQ ID NO: 1434829 - DNA, 15 bp, Homo sapiens
agtgctttgtagtct

SEQ ID NO: 1434830 - DNA, 15 bp, Homo sapiens
cagtgctttgtagtc

SEQ ID NO: 1434831 - DNA, 15 bp, Homo sapiens
gcagtgctttgtagt

SEQ ID NO: 1434832 - DNA, 15 bp, Homo sapiens
agcagtgctttgtag

SEQ ID NO: 1434833 - DNA, 15 bp, Homo sapiens
cagcagtgctttgta

SEQ ID NO: 1434834 - DNA, 15 bp, Homo sapiens
tcagcagtgctttgt

SEQ ID NO: 1434835 - DNA, 15 bp, Homo sapiens
ctcagcagtgctttg

SEQ ID NO: 1434836 - DNA, 15 bp, Homo sapiens
tctcagcagtgcttt

SEQ ID NO: 1434837 - DNA, 15 bp, Homo sapiens
ttctcagcagtgctt

SEQ ID NO: 1434838 - DNA, 15 bp, Homo sapiens
tttctcagcagtgct

SEQ ID NO: 1434839 - DNA, 15 bp, Homo sapiens
ttttctcagcagtgc

SEQ ID NO: 1434840 - DNA, 15 bp, Homo sapiens
tttttctcagcagtg

SEQ ID NO: 1434841 - DNA, 15 bp, Homo sapiens
atttttctcagcagt

SEQ ID NO: 1434842 - DNA, 15 bp, Homo sapiens
aatttttctcagcag

SEQ ID NO: 1434843 - DNA, 15 bp, Homo sapiens
taatttttctcagca

SEQ ID NO: 1434844 - DNA, 15 bp, Homo sapiens
gtaatttttctcagc

SEQ ID NO: 1434845 - DNA, 15 bp, Homo sapiens
tgtaatttttctcag

SEQ ID NO: 1434846 - DNA, 15 bp, Homo sapiens
ctgtaatttttctca

SEQ ID NO: 1434847 - DNA, 15 bp, Homo sapiens
tctgtaatttttctc

SEQ ID NO: 1434848 - DNA, 15 bp, Homo sapiens
ttctgtaatttttct

SEQ ID NO: 1434849 - DNA, 15 bp, Homo sapiens
cttctgtaatttttc

SEQ ID NO: 1434850 - DNA, 15 bp, Homo sapiens
tcttctgtaattttt

SEQ ID NO: 1434851 - DNA, 15 bp, Homo sapiens
gtcttctgtaatttt

SEQ ID NO: 1434852 - DNA, 15 bp, Homo sapiens
aagtcttctgtaatt

SEQ ID NO: 1434853 - DNA, 15 bp, Homo sapiens
taagtcttctgtaat

SEQ ID NO: 1434854 - DNA, 15 bp, Homo sapiens
ctaagtcttctgtaa

SEQ ID NO: 1434855 - DNA, 15 bp, Homo sapiens
tctaagtcttctgta

SEQ ID NO: 1434856 - DNA, 15 bp, Homo sapiens
atctaagtcttctgt

SEQ ID NO: 1434857 - DNA, 15 bp, Homo sapiens
tatctaagtcttctg

SEQ ID NO: 1434858 - DNA, 15 bp, Homo sapiens
ttatctaagtcttct

SEQ ID NO: 1434859 - DNA, 15 bp, Homo sapiens
tttatctaagtcttc

SEQ ID NO: 1434860 - DNA, 15 bp, Homo sapiens
atttatctaagtctt

SEQ ID NO: 1434861 - DNA, 15 bp, Homo sapiens
catttatctaagtct

SEQ ID NO: 1434862 - DNA, 15 bp, Homo sapiens
ccatttatctaagtc

SEQ ID NO: 1434863 - DNA, 15 bp, Homo sapiens
tccatttatctaagt

SEQ ID NO: 1434864 - DNA, 15 bp, Homo sapiens
ttccatttatctaag

SEQ ID NO: 1434865 - DNA, 15 bp, Homo sapiens
tttccatttatctaa

SEQ ID NO: 1434866 - DNA, 15 bp, Homo sapiens
ctttccatttatcta

SEQ ID NO: 1434867 - DNA, 15 bp, Homo sapiens
tctttccatttatct

SEQ ID NO: 1434868 - DNA, 15 bp, Homo sapiens
gtctttccatttatc

SEQ ID NO: 1434869 - DNA, 15 bp, Homo sapiens
tgtctttccatttat

SEQ ID NO: 1434870 - DNA, 15 bp, Homo sapiens
atgtctttccattta

SEQ ID NO: 1434871 - DNA, 15 bp, Homo sapiens
gatgtctttccattt

SEQ ID NO: 1434872 - DNA, 15 bp, Homo sapiens
ggatgtctttccatt

SEQ ID NO: 1434873 - DNA, 15 bp, Homo sapiens
aggatgtctttccat

SEQ ID NO: 1434874 - DNA, 15 bp, Homo sapiens
aaggatgtctttcca

SEQ ID NO: 1434875 - DNA, 15 bp, Homo sapiens
aaaggatgtctttcc

SEQ ID NO: 1434876 - DNA, 15 bp, Homo sapiens
caaaggatgtctttc

SEQ ID NO: 1434877 - DNA, 15 bp, Homo sapiens
acaaaggatgtcttt

SEQ ID NO: 1434878 - DNA, 15 bp, Homo sapiens
aacaaaggatgtctt

SEQ ID NO: 1434879 - DNA, 15 bp, Homo sapiens
gaacaaaggatgtct

SEQ ID NO: 1434880 - DNA, 15 bp, Homo sapiens
ggaacaaaggatgtc

SEQ ID NO: 1434881 - DNA, 15 bp, Homo sapiens
aggaacaaaggatgt

SEQ ID NO: 1434882 - DNA, 15 bp, Homo sapiens
caggaacaaaggatg

SEQ ID NO: 1434883 - DNA, 15 bp, Homo sapiens
ccaggaacaaaggat

SEQ ID NO: 1434884 - DNA, 15 bp, Homo sapiens
tccaggaacaaagga

SEQ ID NO: 1434885 - DNA, 15 bp, Homo sapiens
atccaggaacaaagg

SEQ ID NO: 1434886 - DNA, 15 bp, Homo sapiens
tatccaggaacaaag

SEQ ID NO: 1434887 - DNA, 15 bp, Homo sapiens
ctatccaggaacaaa

SEQ ID NO: 1434888 - DNA, 15 bp, Homo sapiens
cctatccaggaacaa

SEQ ID NO: 1434889 - DNA, 15 bp, Homo sapiens
tcctatccaggaaca

SEQ ID NO: 1434890 - DNA, 15 bp, Homo sapiens
ttcctatccaggaac

SEQ ID NO: 1434891 - DNA, 15 bp, Homo sapiens
cttcctatccaggaa

SEQ ID NO: 1434892 - DNA, 15 bp, Homo sapiens
tcttcctatccagga

SEQ ID NO: 1434893 - DNA, 15 bp, Homo sapiens
gtcttcctatccagg

SEQ ID NO: 1434894 - DNA, 15 bp, Homo sapiens
ggtcttcctatccag

SEQ ID NO: 1434895 - DNA, 15 bp, Homo sapiens
gggtcttcctatcca

SEQ ID NO: 1434896 - DNA, 15 bp, Homo sapiens
tgggtcttcctatcc

SEQ ID NO: 1434897 - DNA, 15 bp, Homo sapiens
ttgggtcttcctatc

SEQ ID NO: 1434898 - DNA, 15 bp, Homo sapiens
attgggtcttcctat

SEQ ID NO: 1434899 - DNA, 15 bp, Homo sapiens
tattgggtcttccta

SEQ ID NO: 1434900 - DNA, 15 bp, Homo sapiens
atattgggtcttcct

SEQ ID NO: 1434901 - DNA, 15 bp, Homo sapiens
aatattgggtcttcc

SEQ ID NO: 1434902 - DNA, 15 bp, Homo sapiens
caatattgggtcttc

SEQ ID NO: 1434903 - DNA, 15 bp, Homo sapiens
acaatattgggtctt

SEQ ID NO: 1434904 - DNA, 15 bp, Homo sapiens
aacaatattgggtct

SEQ ID NO: 1434905 - DNA, 15 bp, Homo sapiens
taacaatattgggtc

SEQ ID NO: 1434906 - DNA, 15 bp, Homo sapiens
ttaacaatattgggt

SEQ ID NO: 1434907 - DNA, 15 bp, Homo sapiens
cttaacaatattggg

SEQ ID NO: 1434908 - DNA, 15 bp, Homo sapiens
tcttaacaatattgg

SEQ ID NO: 1434909 - DNA, 15 bp, Homo sapiens
atcttaacaatattg

SEQ ID NO: 1434910 - DNA, 15 bp, Homo sapiens
catcttaacaatatt

SEQ ID NO: 1434911 - DNA, 15 bp, Homo sapiens
ccatcttaacaatat

SEQ ID NO: 1434912 - DNA, 15 bp, Homo sapiens
gccatcttaacaata

SEQ ID NO: 1434913 - DNA, 15 bp, Homo sapiens
tgccatcttaacaat

SEQ ID NO: 1434914 - DNA, 15 bp, Homo sapiens
ctgccatcttaacaa

SEQ ID NO: 1434915 - DNA, 15 bp, Homo sapiens
actgccatcttaaca

SEQ ID NO: 1434916 - DNA, 15 bp, Homo sapiens
tactgccatcttaac

SEQ ID NO: 1434917 - DNA, 15 bp, Homo sapiens
atactgccatcttaa

SEQ ID NO: 1434918 - DNA, 15 bp, Homo sapiens
aatactgccatctta

SEQ ID NO: 1434919 - DNA, 15 bp, Homo sapiens
gaatactgccatctt

SEQ ID NO: 1434920 - DNA, 15 bp, Homo sapiens
ggaatactgccatct

SEQ ID NO: 1434921 - DNA, 15 bp, Homo sapiens
aggaatactgccatc

SEQ ID NO: 1434922 - DNA, 15 bp, Homo sapiens
gaggaatactgccat

SEQ ID NO: 1434923 - DNA, 15 bp, Homo sapiens
tgaggaatactgcca

SEQ ID NO: 1434924 - DNA, 15 bp, Homo sapiens
ctgaggaatactgcc

SEQ ID NO: 1434925 - DNA, 15 bp, Homo sapiens
cctgaggaatactgc

SEQ ID NO: 1434926 - DNA, 15 bp, Homo sapiens
acctgaggaatactg

SEQ ID NO: 1434927 - DNA, 15 bp, Homo sapiens
aacctgaggaatact

SEQ ID NO: 1434928 - DNA, 15 bp, Homo sapiens
caacctgaggaatac

SEQ ID NO: 1434929 - DNA, 15 bp, Homo sapiens
tcaacctgaggaata

SEQ ID NO: 1434930 - DNA, 15 bp, Homo sapiens
atcaacctgaggaat

SEQ ID NO: 1434931 - DNA, 15 bp, Homo sapiens
gatcaacctgaggaa

SEQ ID NO: 1434932 - DNA, 15 bp, Homo sapiens
agatcaacctgagga

SEQ ID NO: 1434933 - DNA, 15 bp, Homo sapiens
tagatcaacctgagg

SEQ ID NO: 1434934 - DNA, 15 bp, Homo sapiens
gtagatcaacctgag

SEQ ID NO: 1434935 - DNA, 15 bp, Homo sapiens
tgtagatcaacctga

SEQ ID NO: 1434936 - DNA, 15 bp, Homo sapiens
ctgtagatcaacctg

SEQ ID NO: 1434937 - DNA, 15 bp, Homo sapiens
tctgtagatcaacct

SEQ ID NO: 1434938 - DNA, 15 bp, Homo sapiens
atctgtagatcaacc

SEQ ID NO: 1434939 - DNA, 15 bp, Homo sapiens
aatctgtagatcaac

SEQ ID NO: 1434940 - DNA, 15 bp, Homo sapiens
gaatctgtagatcaa

SEQ ID NO: 1434941 - DNA, 15 bp, Homo sapiens
tgaatctgtagatca

SEQ ID NO: 1434942 - DNA, 15 bp, Homo sapiens
atgaatctgtagatc

SEQ ID NO: 1434943 - DNA, 15 bp, Homo sapiens
aatgaatctgtagat

SEQ ID NO: 1434944 - DNA, 15 bp, Homo sapiens
taatgaatctgtaga

SEQ ID NO: 1434945 - DNA, 15 bp, Homo sapiens
gtaatgaatctgtag

SEQ ID NO: 1434946 - DNA, 15 bp, Homo sapiens
tgtaatgaatctgta

SEQ ID NO: 1434947 - DNA, 15 bp, Homo sapiens
ctgtaatgaatctgt

SEQ ID NO: 1434948 - DNA, 15 bp, Homo sapiens
actgtaatgaatctg

SEQ ID NO: 1434949 - DNA, 15 bp, Homo sapiens
gactgtaatgaatct

SEQ ID NO: 1434950 - DNA, 15 bp, Homo sapiens
agactgtaatgaatc

SEQ ID NO: 1434951 - DNA, 15 bp, Homo sapiens
gagactgtaatgaat

SEQ ID NO: 1434952 - DNA, 15 bp, Homo sapiens
agagactgtaatgaa

SEQ ID NO: 1434953 - DNA, 15 bp, Homo sapiens
tagagactgtaatga

SEQ ID NO: 1434954 - DNA, 15 bp, Homo sapiens
ctagagactgtaatg

SEQ ID NO: 1434955 - DNA, 15 bp, Homo sapiens
gctagagactgtaat

SEQ ID NO: 1434956 - DNA, 15 bp, Homo sapiens
tgctagagactgtaa

SEQ ID NO: 1434957 - DNA, 15 bp, Homo sapiens
ttgctagagactgta

SEQ ID NO: 1434958 - DNA, 15 bp, Homo sapiens
tttgctagagactgt

SEQ ID NO: 1434959 - DNA, 15 bp, Homo sapiens
ttttgctagagactg

SEQ ID NO: 1434960 - DNA, 15 bp, Homo sapiens
gttttgctagagact

SEQ ID NO: 1434961 - DNA, 15 bp, Homo sapiens
ggttttgctagagac

SEQ ID NO: 1434962 - DNA, 15 bp, Homo sapiens
gggttttgctagaga

SEQ ID NO: 1434963 - DNA, 15 bp, Homo sapiens
ggggttttgctagag

SEQ ID NO: 1434964 - DNA, 15 bp, Homo sapiens
tggggttttgctaga

SEQ ID NO: 1434965 - DNA, 15 bp, Homo sapiens
ctggggttttgctag

SEQ ID NO: 1434966 - DNA, 15 bp, Homo sapiens
gctggggttttgcta

SEQ ID NO: 1434967 - DNA, 15 bp, Homo sapiens
agctggggttttgct

SEQ ID NO: 1434968 - DNA, 15 bp, Homo sapiens
cagctggggttttgc

SEQ ID NO: 1434969 - DNA, 15 bp, Homo sapiens
ccagctggggttttg

SEQ ID NO: 1434970 - DNA, 15 bp, Homo sapiens
tccagctggggtttt

SEQ ID NO: 1434971 - DNA, 15 bp, Homo sapiens
atccagctggggttt

SEQ ID NO: 1434972 - DNA, 15 bp, Homo sapiens
aatccagctggggtt

SEQ ID NO: 1434973 - DNA, 15 bp, Homo sapiens
taatccagctggggt

SEQ ID NO: 1434974 - DNA, 15 bp, Homo sapiens
ctaatccagctgggg

SEQ ID NO: 1434975 - DNA, 15 bp, Homo sapiens
actaatccagctggg

SEQ ID NO: 1434976 - DNA, 15 bp, Homo sapiens
aactaatccagctgg

SEQ ID NO: 1434977 - DNA, 15 bp, Homo sapiens
taactaatccagctg

SEQ ID NO: 1434978 - DNA, 15 bp, Homo sapiens
ataactaatccagct

SEQ ID NO: 1434979 - DNA, 15 bp, Homo sapiens
aataactaatccagc

SEQ ID NO: 1434980 - DNA, 15 bp, Homo sapiens
aaataactaatccag

SEQ ID NO: 1434981 - DNA, 15 bp, Homo sapiens
aaaataactaatcca

SEQ ID NO: 1434982 - DNA, 15 bp, Homo sapiens
aaaaataactaatcc

SEQ ID NO: 1434983 - DNA, 15 bp, Homo sapiens
aaaaaataactaatc

SEQ ID NO: 1434984 - DNA, 15 bp, Homo sapiens
aaaaaaataactaat

SEQ ID NO: 1434985 - DNA, 15 bp, Homo sapiens
gaaaaaaataactaa

SEQ ID NO: 1434986 - DNA, 15 bp, Homo sapiens
aaagaaaaaaataac

SEQ ID NO: 1434987 - DNA, 15 bp, Homo sapiens
aaaagaaaaaaataa

SEQ ID NO: 1434988 - DNA, 15 bp, Homo sapiens
aaaaagaaaaaaata

SEQ ID NO: 1434989 - DNA, 15 bp, Homo sapiens
caaaaagaaaaaaat

SEQ ID NO: 1434990 - DNA, 15 bp, Homo sapiens
gcaaaaagaaaaaaa

SEQ ID NO: 1434991 - DNA, 15 bp, Homo sapiens
tgcaaaaagaaaaaa

SEQ ID NO: 1434992 - DNA, 15 bp, Homo sapiens
atgcaaaaagaaaaa

SEQ ID NO: 1434993 - DNA, 15 bp, Homo sapiens
tatgcaaaaagaaaa

SEQ ID NO: 1434994 - DNA, 15 bp, Homo sapiens
ttatgcaaaaagaaa

SEQ ID NO: 1434995 - DNA, 15 bp, Homo sapiens
tttatgcaaaaagaa

SEQ ID NO: 1434996 - DNA, 15 bp, Homo sapiens
atttatgcaaaaaga

SEQ ID NO: 1434997 - DNA, 15 bp, Homo sapiens
aatttatgcaaaaag

SEQ ID NO: 1434998 - DNA, 15 bp, Homo sapiens
caatttatgcaaaaa

SEQ ID NO: 1434999 - DNA, 15 bp, Homo sapiens
tcaatttatgcaaaa

SEQ ID NO: 1435000 - DNA, 15 bp, Homo sapiens
gtcaatttatgcaaa

SEQ ID NO: 1435001 - DNA, 15 bp, Homo sapiens
cgtcaatttatgcaa

SEQ ID NO: 1435002 - DNA, 15 bp, Homo sapiens
tcgtcaatttatgca

SEQ ID NO: 1435003 - DNA, 15 bp, Homo sapiens
ctcgtcaatttatgc

SEQ ID NO: 1435004 - DNA, 15 bp, Homo sapiens
gctcgtcaatttatg

SEQ ID NO: 1435005 - DNA, 15 bp, Homo sapiens
agctcgtcaatttat

SEQ ID NO: 1435006 - DNA, 15 bp, Homo sapiens
cagctcgtcaattta

SEQ ID NO: 1435007 - DNA, 15 bp, Homo sapiens
tcagctcgtcaattt

SEQ ID NO: 1435008 - DNA, 15 bp, Homo sapiens
atcagctcgtcaatt

SEQ ID NO: 1435009 - DNA, 15 bp, Homo sapiens
aatcagctcgtcaat

SEQ ID NO: 1435010 - DNA, 15 bp, Homo sapiens
gaatcagctcgtcaa

SEQ ID NO: 1435011 - DNA, 15 bp, Homo sapiens
agaatcagctcgtca

SEQ ID NO: 1435012 - DNA, 15 bp, Homo sapiens
tagaatcagctcgtc

SEQ ID NO: 1435013 - DNA, 15 bp, Homo sapiens
ttagaatcagctcgt

SEQ ID NO: 1435014 - DNA, 15 bp, Homo sapiens
tttagaatcagctcg

SEQ ID NO: 1435015 - DNA, 15 bp, Homo sapiens
ttttagaatcagctc

SEQ ID NO: 1435016 - DNA, 15 bp, Homo sapiens
attttagaatcagct

SEQ ID NO: 1435017 - DNA, 15 bp, Homo sapiens
aattttagaatcagc

SEQ ID NO: 1435018 - DNA, 15 bp, Homo sapiens
gaattttagaatcag

SEQ ID NO: 1435019 - DNA, 15 bp, Homo sapiens
tgaattttagaatca

SEQ ID NO: 1435020 - DNA, 15 bp, Homo sapiens
gtgaattttagaatc

SEQ ID NO: 1435021 - DNA, 15 bp, Homo sapiens
tgtgaattttagaat

SEQ ID NO: 1435022 - DNA, 15 bp, Homo sapiens
gtgtgaattttagaa

SEQ ID NO: 1435023 - DNA, 15 bp, Homo sapiens
cgtgtgaattttaga

SEQ ID NO: 1435024 - DNA, 15 bp, Homo sapiens
ccgtgtgaattttag

SEQ ID NO: 1435025 - DNA, 15 bp, Homo sapiens
tccgtgtgaatttta

SEQ ID NO: 1435026 - DNA, 15 bp, Homo sapiens
ttccgtgtgaatttt

SEQ ID NO: 1435027 - DNA, 15 bp, Homo sapiens
tttccgtgtgaattt

SEQ ID NO: 1435028 - DNA, 15 bp, Homo sapiens
atttccgtgtgaatt

SEQ ID NO: 1435029 - DNA, 15 bp, Homo sapiens
catttccgtgtgaat

SEQ ID NO: 1435030 - DNA, 15 bp, Homo sapiens
gcatttccgtgtgaa

SEQ ID NO: 1435031 - DNA, 15 bp, Homo sapiens
tgcatttccgtgtga

SEQ ID NO: 1435032 - DNA, 15 bp, Homo sapiens
ttgcatttccgtgtg

SEQ ID NO: 1435033 - DNA, 15 bp, Homo sapiens
cttgcatttccgtgt

SEQ ID NO: 1435034 - DNA, 15 bp, Homo sapiens
tcttgcatttccgtg

SEQ ID NO: 1435035 - DNA, 15 bp, Homo sapiens
ctcttgcatttccgt

SEQ ID NO: 1435036 - DNA, 15 bp, Homo sapiens
tctcttgcatttccg

SEQ ID NO: 1435037 - DNA, 15 bp, Homo sapiens
ttctcttgcatttcc

SEQ ID NO: 1435038 - DNA, 15 bp, Homo sapiens
gttctcttgcatttc

SEQ ID NO: 1435039 - DNA, 15 bp, Homo sapiens
ggttctcttgcattt

SEQ ID NO: 1435040 - DNA, 15 bp, Homo sapiens
tggttctcttgcatt

SEQ ID NO: 1435041 - DNA, 15 bp, Homo sapiens
atggttctcttgcat

SEQ ID NO: 1435042 - DNA, 15 bp, Homo sapiens
tatggttctcttgca

SEQ ID NO: 1435043 - DNA, 15 bp, Homo sapiens
ttatggttctcttgc

SEQ ID NO: 1435044 - DNA, 15 bp, Homo sapiens
attatggttctcttg

SEQ ID NO: 1435045 - DNA, 15 bp, Homo sapiens
tattatggttctctt

SEQ ID NO: 1435046 - DNA, 15 bp, Homo sapiens
ttattatggttctct

SEQ ID NO: 1435047 - DNA, 15 bp, Homo sapiens
tttattatggttctc

SEQ ID NO: 1435048 - DNA, 15 bp, Homo sapiens
gtttattatggttct

SEQ ID NO: 1435049 - DNA, 15 bp, Homo sapiens
tgtttattatggttc

SEQ ID NO: 1435050 - DNA, 15 bp, Homo sapiens
ttgtttattatggtt

SEQ ID NO: 1435051 - DNA, 15 bp, Homo sapiens
tttgtttattatggt

SEQ ID NO: 1435052 - DNA, 15 bp, Homo sapiens
ttttgtttattatgg

SEQ ID NO: 1435053 - DNA, 15 bp, Homo sapiens
gttttgtttattatg

SEQ ID NO: 1435054 - DNA, 15 bp, Homo sapiens
ggttttgtttattat

SEQ ID NO: 1435055 - DNA, 15 bp, Homo sapiens
tggttttgtttatta

SEQ ID NO: 1435056 - DNA, 15 bp, Homo sapiens
atggttttgtttatt

SEQ ID NO: 1435057 - DNA, 15 bp, Homo sapiens
gatggttttgtttat

SEQ ID NO: 1435058 - DNA, 15 bp, Homo sapiens
agatggttttgttta

SEQ ID NO: 1435059 - DNA, 15 bp, Homo sapiens
aagatggttttgttt

SEQ ID NO: 1435060 - DNA, 15 bp, Homo sapiens
caagatggttttgtt

SEQ ID NO: 1435061 - DNA, 15 bp, Homo sapiens
tcaagatggttttgt

SEQ ID NO: 1435062 - DNA, 15 bp, Homo sapiens
ttcaagatggttttg

SEQ ID NO: 1435063 - DNA, 15 bp, Homo sapiens
tttcaagatggtttt

SEQ ID NO: 1435064 - DNA, 15 bp, Homo sapiens
ttttcaagatggttt

SEQ ID NO: 1435065 - DNA, 15 bp, Homo sapiens
tttttcaagatggtt

SEQ ID NO: 1435066 - DNA, 15 bp, Homo sapiens
ttttttcaagatggt

SEQ ID NO: 1435067 - DNA, 15 bp, Homo sapiens
cttttttcaagatgg

SEQ ID NO: 1435068 - DNA, 15 bp, Homo sapiens
tcttttttcaagatg

SEQ ID NO: 1435069 - DNA, 15 bp, Homo sapiens
ctcttttttcaagat

SEQ ID NO: 1435070 - DNA, 15 bp, Homo sapiens
tctcttttttcaaga

SEQ ID NO: 1435071 - DNA, 15 bp, Homo sapiens
ttctcttttttcaag

SEQ ID NO: 1435072 - DNA, 15 bp, Homo sapiens
gttctcttttttcaa

SEQ ID NO: 1435073 - DNA, 15 bp, Homo sapiens
tgttctcttttttca

SEQ ID NO: 1435074 - DNA, 15 bp, Homo sapiens
ttgttctcttttttc

SEQ ID NO: 1435075 - DNA, 15 bp, Homo sapiens
tttgttctctttttt

SEQ ID NO: 1435076 - DNA, 15 bp, Homo sapiens
ttttgttctcttttt

SEQ ID NO: 1435077 - DNA, 15 bp, Homo sapiens
attttgttctctttt

SEQ ID NO: 1435078 - DNA, 15 bp, Homo sapiens
cattttgttctcttt

SEQ ID NO: 1435079 - DNA, 15 bp, Homo sapiens
ccattttgttctctt

SEQ ID NO: 1435080 - DNA, 15 bp, Homo sapiens
tccattttgttctct

SEQ ID NO: 1435081 - DNA, 15 bp, Homo sapiens
ttccattttgttctc

SEQ ID NO: 1435082 - DNA, 15 bp, Homo sapiens
tttccattttgttct

SEQ ID NO: 1435083 - DNA, 15 bp, Homo sapiens
ctttccattttgttc

SEQ ID NO: 1435084 - DNA, 15 bp, Homo sapiens
tctttccattttgtt

SEQ ID NO: 1435085 - DNA, 15 bp, Homo sapiens
atctttccattttgt

SEQ ID NO: 1435086 - DNA, 15 bp, Homo sapiens
aatctttccattttg

SEQ ID NO: 1435087 - DNA, 15 bp, Homo sapiens
gaatctttccatttt

SEQ ID NO: 1435088 - DNA, 15 bp, Homo sapiens
tgaatctttccattt

SEQ ID NO: 1435089 - DNA, 15 bp, Homo sapiens
gtgaatctttccatt

SEQ ID NO: 1435090 - DNA, 15 bp, Homo sapiens
tgtgaatctttccat

SEQ ID NO: 1435091 - DNA, 15 bp, Homo sapiens
atgtgaatctttcca

SEQ ID NO: 1435092 - DNA, 15 bp, Homo sapiens
aatgtgaatctttcc

SEQ ID NO: 1435093 - DNA, 15 bp, Homo sapiens
aaatgtgaatctttc

SEQ ID NO: 1435094 - DNA, 15 bp, Homo sapiens
gaaatgtgaatcttt

SEQ ID NO: 1435095 - DNA, 15 bp, Homo sapiens
ggaaatgtgaatctt

SEQ ID NO: 1435096 - DNA, 15 bp, Homo sapiens
aggaaatgtgaatct

SEQ ID NO: 1435097 - DNA, 15 bp, Homo sapiens
caggaaatgtgaatc

SEQ ID NO: 1435098 - DNA, 15 bp, Homo sapiens
tcaggaaatgtgaat

SEQ ID NO: 1435099 - DNA, 15 bp, Homo sapiens
ctcaggaaatgtgaa

SEQ ID NO: 1435100 - DNA, 15 bp, Homo sapiens
tctcaggaaatgtga

SEQ ID NO: 1435101 - DNA, 15 bp, Homo sapiens
atctcaggaaatgtg

SEQ ID NO: 1435102 - DNA, 15 bp, Homo sapiens
tatctcaggaaatgt

SEQ ID NO: 1435103 - DNA, 15 bp, Homo sapiens
gtatctcaggaaatg

SEQ ID NO: 1435104 - DNA, 15 bp, Homo sapiens
tgtatctcaggaaat

SEQ ID NO: 1435105 - DNA, 15 bp, Homo sapiens
gtgtatctcaggaaa

SEQ ID NO: 1435106 - DNA, 15 bp, Homo sapiens
agtgtatctcaggaa

SEQ ID NO: 1435107 - DNA, 15 bp, Homo sapiens
cagtgtatctcagga

SEQ ID NO: 1435108 - DNA, 15 bp, Homo sapiens
ccagtgtatctcagg

SEQ ID NO: 1435109 - DNA, 15 bp, Homo sapiens
tccagtgtatctcag

SEQ ID NO: 1435110 - DNA, 15 bp, Homo sapiens
ttccagtgtatctca

SEQ ID NO: 1435111 - DNA, 15 bp, Homo sapiens
tttccagtgtatctc

SEQ ID NO: 1435112 - DNA, 15 bp, Homo sapiens
atttccagtgtatct

SEQ ID NO: 1435113 - DNA, 15 bp, Homo sapiens
tatttccagtgtatc

SEQ ID NO: 1435114 - DNA, 15 bp, Homo sapiens
atatttccagtgtat

SEQ ID NO: 1435115 - DNA, 15 bp, Homo sapiens
aatatttccagtgta

SEQ ID NO: 1435116 - DNA, 15 bp, Homo sapiens
caatatttccagtgt

SEQ ID NO: 1435117 - DNA, 15 bp, Homo sapiens
gcaatatttccagtg

SEQ ID NO: 1435118 - DNA, 15 bp, Homo sapiens
tgcaatatttccagt

SEQ ID NO: 1435119 - DNA, 15 bp, Homo sapiens
ctgcaatatttccag

SEQ ID NO: 1435120 - DNA, 15 bp, Homo sapiens
tctgcaatatttcca

SEQ ID NO: 1435121 - DNA, 15 bp, Homo sapiens
atctgcaatatttcc

SEQ ID NO: 1435122 - DNA, 15 bp, Homo sapiens
aatctgcaatatttc

SEQ ID NO: 1435123 - DNA, 15 bp, Homo sapiens
aaatctgcaatattt

SEQ ID NO: 1435124 - DNA, 15 bp, Homo sapiens
caaatctgcaatatt

SEQ ID NO: 1435125 - DNA, 15 bp, Homo sapiens
ccaaatctgcaatat

SEQ ID NO: 1435126 - DNA, 15 bp, Homo sapiens
accaaatctgcaata

SEQ ID NO: 1435127 - DNA, 15 bp, Homo sapiens
aaccaaatctgcaat

SEQ ID NO: 1435128 - DNA, 15 bp, Homo sapiens
gaaccaaatctgcaa

SEQ ID NO: 1435129 - DNA, 15 bp, Homo sapiens
ggaaccaaatctgca

SEQ ID NO: 1435130 - DNA, 15 bp, Homo sapiens
tggaaccaaatctgc

SEQ ID NO: 1435131 - DNA, 15 bp, Homo sapiens
ctggaaccaaatctg

SEQ ID NO: 1435132 - DNA, 15 bp, Homo sapiens
tctggaaccaaatct

SEQ ID NO: 1435133 - DNA, 15 bp, Homo sapiens
gtctggaaccaaatc

SEQ ID NO: 1435134 - DNA, 15 bp, Homo sapiens
ggtctggaaccaaat

SEQ ID NO: 1435135 - DNA, 15 bp, Homo sapiens
tggtctggaaccaaa

SEQ ID NO: 1435136 - DNA, 15 bp, Homo sapiens
gtggtctggaaccaa

SEQ ID NO: 1435137 - DNA, 15 bp, Homo sapiens
agtggtctggaacca

SEQ ID NO: 1435138 - DNA, 15 bp, Homo sapiens
aagtggtctggaacc

SEQ ID NO: 1435139 - DNA, 15 bp, Homo sapiens
gaagtggtctggaac

SEQ ID NO: 1435140 - DNA, 15 bp, Homo sapiens
tgaagtggtctggaa

SEQ ID NO: 1435141 - DNA, 15 bp, Homo sapiens
ttgaagtggtctgga

SEQ ID NO: 1435142 - DNA, 15 bp, Homo sapiens
gttgaagtggtctgg

SEQ ID NO: 1435143 - DNA, 15 bp, Homo sapiens
tgttgaagtggtctg

SEQ ID NO: 1435144 - DNA, 15 bp, Homo sapiens
ttgttgaagtggtct

SEQ ID NO: 1435145 - DNA, 15 bp, Homo sapiens
tttgttgaagtggtc

SEQ ID NO: 1435146 - DNA, 15 bp, Homo sapiens
ctttgttgaagtggt

SEQ ID NO: 1435147 - DNA, 15 bp, Homo sapiens
gctttgttgaagtgg

SEQ ID NO: 1435148 - DNA, 15 bp, Homo sapiens
ggctttgttgaagtg

SEQ ID NO: 1435149 - DNA, 15 bp, Homo sapiens
tggctttgttgaagt

SEQ ID NO: 1435150 - DNA, 15 bp, Homo sapiens
ttggctttgttgaag

SEQ ID NO: 1435151 - DNA, 15 bp, Homo sapiens
attggctttgttgaa

SEQ ID NO: 1435152 - DNA, 15 bp, Homo sapiens
tattggctttgttga

SEQ ID NO: 1435153 - DNA, 15 bp, Homo sapiens
atattggctttgttg

SEQ ID NO: 1435154 - DNA, 15 bp, Homo sapiens
aatattggctttgtt

SEQ ID NO: 1435155 - DNA, 15 bp, Homo sapiens
taatattggctttgt

SEQ ID NO: 1435156 - DNA, 15 bp, Homo sapiens
gtaatattggctttg

SEQ ID NO: 1435157 - DNA, 15 bp, Homo sapiens
cgtaatattggcttt

SEQ ID NO: 1435158 - DNA, 15 bp, Homo sapiens
tcgtaatattggctt

SEQ ID NO: 1435159 - DNA, 15 bp, Homo sapiens
atcgtaatattggct

SEQ ID NO: 1435160 - DNA, 15 bp, Homo sapiens
tatcgtaatattggc

SEQ ID NO: 1435161 - DNA, 15 bp, Homo sapiens
ttatcgtaatattgg

SEQ ID NO: 1435162 - DNA, 15 bp, Homo sapiens
tttatcgtaatattg

SEQ ID NO: 1435163 - DNA, 15 bp, Homo sapiens
ttttatcgtaatatt

SEQ ID NO: 1435164 - DNA, 15 bp, Homo sapiens
cttttatcgtaatat

SEQ ID NO: 1435165 - DNA, 15 bp, Homo sapiens
tcttttatcgtaata

SEQ ID NO: 1435166 - DNA, 15 bp, Homo sapiens
ctcttttatcgtaat

SEQ ID NO: 1435167 - DNA, 15 bp, Homo sapiens
actcttttatcgtaa

SEQ ID NO: 1435168 - DNA, 15 bp, Homo sapiens
gactcttttatcgta

SEQ ID NO: 1435169 - DNA, 15 bp, Homo sapiens
tgactcttttatcgt

SEQ ID NO: 1435170 - DNA, 15 bp, Homo sapiens
gtgactcttttatcg

SEQ ID NO: 1435171 - DNA, 15 bp, Homo sapiens
tgtgactcttttatc

SEQ ID NO: 1435172 - DNA, 15 bp, Homo sapiens
gtgtgactcttttat

SEQ ID NO: 1435173 - DNA, 15 bp, Homo sapiens
tgtgtgactctttta

SEQ ID NO: 1435174 - DNA, 15 bp, Homo sapiens
ttgtgtgactctttt

SEQ ID NO: 1435175 - DNA, 15 bp, Homo sapiens
tttgtgtgactcttt

SEQ ID NO: 1435176 - DNA, 15 bp, Homo sapiens
atttgtgtgactctt

SEQ ID NO: 1435177 - DNA, 15 bp, Homo sapiens
aatttgtgtgactct

SEQ ID NO: 1435178 - DNA, 15 bp, Homo sapiens
aaatttgtgtgactc

SEQ ID NO: 1435179 - DNA, 15 bp, Homo sapiens
aaaatttgtgtgact

SEQ ID NO: 1435180 - DNA, 15 bp, Homo sapiens
aaaaatttgtgtgac

SEQ ID NO: 1435181 - DNA, 15 bp, Homo sapiens
aaaaaatttgtgtga

SEQ ID NO: 1435182 - DNA, 15 bp, Homo sapiens
taaaaaatttgtgtg

SEQ ID NO: 1435183 - DNA, 15 bp, Homo sapiens
ctaaaaaatttgtgt

SEQ ID NO: 1435184 - DNA, 15 bp, Homo sapiens
actaaaaaatttgtg

SEQ ID NO: 1435185 - DNA, 15 bp, Homo sapiens
aactaaaaaatttgt

SEQ ID NO: 1435186 - DNA, 15 bp, Homo sapiens
aaactaaaaaatttg

SEQ ID NO: 1435187 - DNA, 15 bp, Homo sapiens
gaaactaaaaaattt

SEQ ID NO: 1435188 - DNA, 15 bp, Homo sapiens
ggaaactaaaaaatt

SEQ ID NO: 1435189 - DNA, 15 bp, Homo sapiens
gggaaactaaaaaat

SEQ ID NO: 1435190 - DNA, 15 bp, Homo sapiens
tgggaaactaaaaaa

SEQ ID NO: 1435191 - DNA, 15 bp, Homo sapiens
ctgggaaactaaaaa

SEQ ID NO: 1435192 - DNA, 15 bp, Homo sapiens
actgggaaactaaaa

SEQ ID NO: 1435193 - DNA, 15 bp, Homo sapiens
tactgggaaactaaa

SEQ ID NO: 1435194 - DNA, 15 bp, Homo sapiens
gtactgggaaactaa

SEQ ID NO: 1435195 - DNA, 15 bp, Homo sapiens
tgtactgggaaacta

SEQ ID NO: 1435196 - DNA, 15 bp, Homo sapiens
atgtactgggaaact

SEQ ID NO: 1435197 - DNA, 15 bp, Homo sapiens
tatgtactgggaaac

SEQ ID NO: 1435198 - DNA, 15 bp, Homo sapiens
atatgtactgggaaa

SEQ ID NO: 1435199 - DNA, 15 bp, Homo sapiens
tatatgtactgggaa

SEQ ID NO: 1435200 - DNA, 15 bp, Homo sapiens
ttatatgtactggga

SEQ ID NO: 1435201 - DNA, 15 bp, Homo sapiens
tttatatgtactggg

SEQ ID NO: 1435202 - DNA, 15 bp, Homo sapiens
ttttatatgtactgg

SEQ ID NO: 1435203 - DNA, 15 bp, Homo sapiens
tttttatatgtactg

SEQ ID NO: 1435204 - DNA, 15 bp, Homo sapiens
atttttatatgtact

SEQ ID NO: 1435205 - DNA, 15 bp, Homo sapiens
aatttttatatgtac

SEQ ID NO: 1435206 - DNA, 15 bp, Homo sapiens
taatttttatatgta

SEQ ID NO: 1435207 - DNA, 15 bp, Homo sapiens
gtaatttttatatgt

SEQ ID NO: 1435208 - DNA, 15 bp, Homo sapiens
tgtaatttttatatg

SEQ ID NO: 1435209 - DNA, 15 bp, Homo sapiens
atgtaatttttatat

SEQ ID NO: 1435210 - DNA, 15 bp, Homo sapiens
aatgtaatttttata

SEQ ID NO: 1435211 - DNA, 15 bp, Homo sapiens
aaatgtaatttttat

SEQ ID NO: 1435212 - DNA, 15 bp, Homo sapiens
taaatgtaattttta

SEQ ID NO: 1435213 - DNA, 15 bp, Homo sapiens
ataaatgtaattttt

SEQ ID NO: 1435214 - DNA, 15 bp, Homo sapiens
tataaatgtaatttt

SEQ ID NO: 1435215 - DNA, 15 bp, Homo sapiens
gtataaatgtaattt

SEQ ID NO: 1435216 - DNA, 15 bp, Homo sapiens
agtataaatgtaatt

SEQ ID NO: 1435217 - DNA, 15 bp, Homo sapiens
tagtataaatgtaat

SEQ ID NO: 1435218 - DNA, 15 bp, Homo sapiens
atagtataaatgtaa

SEQ ID NO: 1435219 - DNA, 15 bp, Homo sapiens
tatagtataaatgta

SEQ ID NO: 1435220 - DNA, 15 bp, Homo sapiens
atatagtataaatgt

SEQ ID NO: 1435221 - DNA, 15 bp, Homo sapiens
aatatagtataaatg

SEQ ID NO: 1435222 - DNA, 15 bp, Homo sapiens
taatatagtataaat

SEQ ID NO: 1435223 - DNA, 15 bp, Homo sapiens
ttaatatagtataaa

SEQ ID NO: 1435224 - DNA, 15 bp, Homo sapiens
attaatatagtataa

SEQ ID NO: 1435225 - DNA, 15 bp, Homo sapiens
cattaatatagtata

SEQ ID NO: 1435226 - DNA, 15 bp, Homo sapiens
acattaatatagtat

SEQ ID NO: 1435227 - DNA, 15 bp, Homo sapiens
cacattaatatagta

SEQ ID NO: 1435228 - DNA, 15 bp, Homo sapiens
gcacattaatatagt

SEQ ID NO: 1435229 - DNA, 15 bp, Homo sapiens
tgcacattaatatag

SEQ ID NO: 1435230 - DNA, 15 bp, Homo sapiens
ctgcacattaatata

SEQ ID NO: 1435231 - DNA, 15 bp, Homo sapiens
actgcacattaatat

SEQ ID NO: 1435232 - DNA, 15 bp, Homo sapiens
tactgcacattaata

SEQ ID NO: 1435233 - DNA, 15 bp, Homo sapiens
gtactgcacattaat

SEQ ID NO: 1435234 - DNA, 15 bp, Homo sapiens
ggtactgcacattaa

SEQ ID NO: 1435235 - DNA, 15 bp, Homo sapiens
tggtactgcacatta

SEQ ID NO: 1435236 - DNA, 15 bp, Homo sapiens
atggtactgcacatt

SEQ ID NO: 1435237 - DNA, 15 bp, Homo sapiens
aatggtactgcacat

SEQ ID NO: 1435238 - DNA, 15 bp, Homo sapiens
taatggtactgcaca

SEQ ID NO: 1435239 - DNA, 15 bp, Homo sapiens
ataatggtactgcac

SEQ ID NO: 1435240 - DNA, 15 bp, Homo sapiens
cataatggtactgca

SEQ ID NO: 1435241 - DNA, 15 bp, Homo sapiens
acataatggtactgc

SEQ ID NO: 1435242 - DNA, 15 bp, Homo sapiens
gacataatggtactg

SEQ ID NO: 1435243 - DNA, 15 bp, Homo sapiens
agacataatggtact

SEQ ID NO: 1435244 - DNA, 15 bp, Homo sapiens
aagacataatggtac

SEQ ID NO: 1435245 - DNA, 15 bp, Homo sapiens
taagacataatggta

SEQ ID NO: 1435246 - DNA, 15 bp, Homo sapiens
ttaagacataatggt

SEQ ID NO: 1435247 - DNA, 15 bp, Homo sapiens
tttaagacataatgg

SEQ ID NO: 1435248 - DNA, 15 bp, Homo sapiens
ttttaagacataatg

SEQ ID NO: 1435249 - DNA, 15 bp, Homo sapiens
tttttaagacataat

SEQ ID NO: 1435250 - DNA, 15 bp, Homo sapiens
atttttaagacataa

SEQ ID NO: 1435251 - DNA, 15 bp, Homo sapiens
catttttaagacata

SEQ ID NO: 1435252 - DNA, 15 bp, Homo sapiens
acatttttaagacat

SEQ ID NO: 1435253 - DNA, 15 bp, Homo sapiens
tacatttttaagaca

SEQ ID NO: 1435254 - DNA, 15 bp, Homo sapiens
gtacatttttaagac

SEQ ID NO: 1435255 - DNA, 15 bp, Homo sapiens
tgtacatttttaaga

SEQ ID NO: 1435256 - DNA, 15 bp, Homo sapiens
atgtacatttttaag

SEQ ID NO: 1435257 - DNA, 15 bp, Homo sapiens
tatgtacatttttaa

SEQ ID NO: 1435258 - DNA, 15 bp, Homo sapiens
gtatgtacattttta

SEQ ID NO: 1435259 - DNA, 15 bp, Homo sapiens
ggtatgtacattttt

SEQ ID NO: 1435260 - DNA, 15 bp, Homo sapiens
aggtatgtacatttt

SEQ ID NO: 1435261 - DNA, 15 bp, Homo sapiens
aaggtatgtacattt

SEQ ID NO: 1435262 - DNA, 15 bp, Homo sapiens
taaggtatgtacatt

SEQ ID NO: 1435263 - DNA, 15 bp, Homo sapiens
ttaaggtatgtacat

SEQ ID NO: 1435264 - DNA, 15 bp, Homo sapiens
attaaggtatgtaca

SEQ ID NO: 1435265 - DNA, 15 bp, Homo sapiens
aattaaggtatgtac

SEQ ID NO: 1435266 - DNA, 15 bp, Homo sapiens
aaattaaggtatgta

SEQ ID NO: 1435267 - DNA, 15 bp, Homo sapiens
taaattaaggtatgt

SEQ ID NO: 1435268 - DNA, 15 bp, Homo sapiens
ttaaattaaggtatg

SEQ ID NO: 1435269 - DNA, 15 bp, Homo sapiens
tttaaattaaggtat

SEQ ID NO: 1435270 - DNA, 15 bp, Homo sapiens
ttttaaattaaggta

SEQ ID NO: 1435271 - DNA, 15 bp, Homo sapiens
tttttaaattaaggt

SEQ ID NO: 1435272 - DNA, 15 bp, Homo sapiens
atttttaaattaagg

SEQ ID NO: 1435273 - DNA, 15 bp, Homo sapiens
tatttttaaattaag

SEQ ID NO: 1435274 - DNA, 15 bp, Homo sapiens
atatttttaaattaa

SEQ ID NO: 1435275 - DNA, 15 bp, Homo sapiens
aatatttttaaatta

SEQ ID NO: 1435276 - DNA, 15 bp, Homo sapiens
aaatatttttaaatt

SEQ ID NO: 1435277 - DNA, 15 bp, Homo sapiens
aaaatatttttaaat

SEQ ID NO: 1435278 - DNA, 15 bp, Homo sapiens
taaaatatttttaaa

SEQ ID NO: 1435279 - DNA, 15 bp, Homo sapiens
ataaaatatttttaa

SEQ ID NO: 1435280 - DNA, 15 bp, Homo sapiens
aataaaatattttta

SEQ ID NO: 1435281 - DNA, 15 bp, Homo sapiens
taataaaatattttt

SEQ ID NO: 1435282 - DNA, 15 bp, Homo sapiens
gtaataaaatatttt

SEQ ID NO: 1435283 - DNA, 15 bp, Homo sapiens
agtaataaaatattt

SEQ ID NO: 1435284 - DNA, 15 bp, Homo sapiens
cagtaataaaatatt

SEQ ID NO: 1435285 - DNA, 15 bp, Homo sapiens
tcagtaataaaatat

SEQ ID NO: 1435286 - DNA, 15 bp, Homo sapiens
ttcagtaataaaata

SEQ ID NO: 1435287 - DNA, 15 bp, Homo sapiens
tttcagtaataaaat

SEQ ID NO: 1435288 - DNA, 15 bp, Homo sapiens
ttttcagtaataaaa

SEQ ID NO: 1435289 - DNA, 15 bp, Homo sapiens
tttttcagtaataaa

SEQ ID NO: 1435290 - DNA, 15 bp, Homo sapiens
atttttcagtaataa

SEQ ID NO: 1435291 - DNA, 15 bp, Homo sapiens
catttttcagtaata

SEQ ID NO: 1435292 - DNA, 15 bp, Homo sapiens
gcatttttcagtaat

SEQ ID NO: 1435293 - DNA, 15 bp, Homo sapiens
agcatttttcagtaa

SEQ ID NO: 1435294 - DNA, 15 bp, Homo sapiens
tagcatttttcagta

SEQ ID NO: 1435295 - DNA, 15 bp, Homo sapiens
ctagcatttttcagt

SEQ ID NO: 1435296 - DNA, 15 bp, Homo sapiens
actagcatttttcag

SEQ ID NO: 1435297 - DNA, 15 bp, Homo sapiens
tactagcatttttca

SEQ ID NO: 1435298 - DNA, 15 bp, Homo sapiens
ttactagcatttttc

SEQ ID NO: 1435299 - DNA, 15 bp, Homo sapiens
attactagcattttt

SEQ ID NO: 1435300 - DNA, 15 bp, Homo sapiens
cattactagcatttt

SEQ ID NO: 1435301 - DNA, 15 bp, Homo sapiens
tcattactagcattt

SEQ ID NO: 1435302 - DNA, 15 bp, Homo sapiens
atcattactagcatt

SEQ ID NO: 1435303 - DNA, 15 bp, Homo sapiens
gatcattactagcat

SEQ ID NO: 1435304 - DNA, 15 bp, Homo sapiens
agatcattactagca

SEQ ID NO: 1435305 - DNA, 15 bp, Homo sapiens
cagatcattactagc

SEQ ID NO: 1435306 - DNA, 15 bp, Homo sapiens
tcagatcattactag

SEQ ID NO: 1435307 - DNA, 15 bp, Homo sapiens
ctcagatcattacta

SEQ ID NO: 1435308 - DNA, 15 bp, Homo sapiens
gctcagatcattact

SEQ ID NO: 1435309 - DNA, 15 bp, Homo sapiens
tgctcagatcattac

SEQ ID NO: 1435310 - DNA, 15 bp, Homo sapiens
atgctcagatcatta

SEQ ID NO: 1435311 - DNA, 15 bp, Homo sapiens
aatgctcagatcatt

SEQ ID NO: 1435312 - DNA, 15 bp, Homo sapiens
aaatgctcagatcat

SEQ ID NO: 1435313 - DNA, 15 bp, Homo sapiens
taaatgctcagatca

SEQ ID NO: 1435314 - DNA, 15 bp, Homo sapiens
ctaaatgctcagatc

SEQ ID NO: 1435315 - DNA, 15 bp, Homo sapiens
tctaaatgctcagat

SEQ ID NO: 1435316 - DNA, 15 bp, Homo sapiens
ttctaaatgctcaga

SEQ ID NO: 1435317 - DNA, 15 bp, Homo sapiens
tttctaaatgctcag

SEQ ID NO: 1435318 - DNA, 15 bp, Homo sapiens
ctttctaaatgctca

SEQ ID NO: 1435319 - DNA, 15 bp, Homo sapiens
actttctaaatgctc

SEQ ID NO: 1435320 - DNA, 15 bp, Homo sapiens
gactttctaaatgct

SEQ ID NO: 1435321 - DNA, 15 bp, Homo sapiens
tgactttctaaatgc

SEQ ID NO: 1435322 - DNA, 15 bp, Homo sapiens
atgactttctaaatg

SEQ ID NO: 1435323 - DNA, 15 bp, Homo sapiens
tatgactttctaaat

SEQ ID NO: 1435324 - DNA, 15 bp, Homo sapiens
ttatgactttctaaa

SEQ ID NO: 1435325 - DNA, 15 bp, Homo sapiens
attatgactttctaa

SEQ ID NO: 1435326 - DNA, 15 bp, Homo sapiens
gattatgactttcta

SEQ ID NO: 1435327 - DNA, 15 bp, Homo sapiens
tgattatgactttct

SEQ ID NO: 1435328 - DNA, 15 bp, Homo sapiens
atgattatgactttc

SEQ ID NO: 1435329 - DNA, 15 bp, Homo sapiens
aatgattatgacttt

SEQ ID NO: 1435330 - DNA, 15 bp, Homo sapiens
aaatgattatgactt

SEQ ID NO: 1435331 - DNA, 15 bp, Homo sapiens
aaaatgattatgact

SEQ ID NO: 1435332 - DNA, 15 bp, Homo sapiens
caaaatgattatgac

SEQ ID NO: 1435333 - DNA, 15 bp, Homo sapiens
gcaaaatgattatga

SEQ ID NO: 1435334 - DNA, 15 bp, Homo sapiens
cgcaaaatgattatg

SEQ ID NO: 1435335 - DNA, 15 bp, Homo sapiens
ccgcaaaatgattat

SEQ ID NO: 1435336 - DNA, 15 bp, Homo sapiens
cccgcaaaatgatta

SEQ ID NO: 1435337 - DNA, 15 bp, Homo sapiens
acccgcaaaatgatt

SEQ ID NO: 1435338 - DNA, 15 bp, Homo sapiens
cacccgcaaaatgat

SEQ ID NO: 1435339 - DNA, 15 bp, Homo sapiens
ccacccgcaaaatga

SEQ ID NO: 1435340 - DNA, 15 bp, Homo sapiens
tccacccgcaaaatg

SEQ ID NO: 1435341 - DNA, 15 bp, Homo sapiens
ctccacccgcaaaat

SEQ ID NO: 1435342 - DNA, 15 bp, Homo sapiens
cctccacccgcaaaa

SEQ ID NO: 1435343 - DNA, 15 bp, Homo sapiens
tcctccacccgcaaa

SEQ ID NO: 1435344 - DNA, 15 bp, Homo sapiens
atcctccacccgcaa

SEQ ID NO: 1435345 - DNA, 15 bp, Homo sapiens
gatcctccacccgca

SEQ ID NO: 1435346 - DNA, 15 bp, Homo sapiens
tgatcctccacccgc

SEQ ID NO: 1435347 - DNA, 15 bp, Homo sapiens
atgatcctccacccg

SEQ ID NO: 1435348 - DNA, 15 bp, Homo sapiens
catgatcctccaccc

SEQ ID NO: 1435349 - DNA, 15 bp, Homo sapiens
gcatgatcctccacc

SEQ ID NO: 1435350 - DNA, 15 bp, Homo sapiens
ggcatgatcctccac

SEQ ID NO: 1435351 - DNA, 15 bp, Homo sapiens
aggcatgatcctcca

SEQ ID NO: 1435352 - DNA, 15 bp, Homo sapiens
gaggcatgatcctcc

SEQ ID NO: 1435353 - DNA, 15 bp, Homo sapiens
cgaggcatgatcctc

SEQ ID NO: 1435354 - DNA, 15 bp, Homo sapiens
tcgaggcatgatcct

SEQ ID NO: 1435355 - DNA, 15 bp, Homo sapiens
atcgaggcatgatcc

SEQ ID NO: 1435356 - DNA, 15 bp, Homo sapiens
catcgaggcatgatc

SEQ ID NO: 1435357 - DNA, 15 bp, Homo sapiens
acatcgaggcatgat

SEQ ID NO: 1435358 - DNA, 15 bp, Homo sapiens
aacatcgaggcatga

SEQ ID NO: 1435359 - DNA, 15 bp, Homo sapiens
caacatcgaggcatg

SEQ ID NO: 1435360 - DNA, 15 bp, Homo sapiens
tcaacatcgaggcat

SEQ ID NO: 1435361 - DNA, 15 bp, Homo sapiens
atcaacatcgaggca

SEQ ID NO: 1435362 - DNA, 15 bp, Homo sapiens
catcaacatcgaggc

SEQ ID NO: 1435363 - DNA, 15 bp, Homo sapiens
ccatcaacatcgagg

SEQ ID NO: 1435364 - DNA, 15 bp, Homo sapiens
accatcaacatcgag

SEQ ID NO: 1435365 - DNA, 15 bp, Homo sapiens
aaccatcaacatcga

SEQ ID NO: 1435366 - DNA, 15 bp, Homo sapiens
caaccatcaacatcg

SEQ ID NO: 1435367 - DNA, 15 bp, Homo sapiens
gcaaccatcaacatc

SEQ ID NO: 1435368 - DNA, 15 bp, Homo sapiens
agcaaccatcaacat

SEQ ID NO: 1435369 - DNA, 15 bp, Homo sapiens
cagcaaccatcaaca

SEQ ID NO: 1435370 - DNA, 15 bp, Homo sapiens
tcagcaaccatcaac

SEQ ID NO: 1435371 - DNA, 15 bp, Homo sapiens
gtcagcaaccatcaa

SEQ ID NO: 1435372 - DNA, 15 bp, Homo sapiens
agtcagcaaccatca

SEQ ID NO: 1435373 - DNA, 15 bp, Homo sapiens
tagtcagcaaccatc

SEQ ID NO: 1435374 - DNA, 15 bp, Homo sapiens
ttagtcagcaaccat

SEQ ID NO: 1435375 - DNA, 15 bp, Homo sapiens
attagtcagcaacca

SEQ ID NO: 1435376 - DNA, 15 bp, Homo sapiens
gattagtcagcaacc

SEQ ID NO: 1435377 - DNA, 15 bp, Homo sapiens
tgattagtcagcaac

SEQ ID NO: 1435378 - DNA, 15 bp, Homo sapiens
ctgattagtcagcaa

SEQ ID NO: 1435379 - DNA, 15 bp, Homo sapiens
cctgattagtcagca

SEQ ID NO: 1435380 - DNA, 15 bp, Homo sapiens
ccctgattagtcagc

SEQ ID NO: 1435381 - DNA, 15 bp, Homo sapiens
accctgattagtcag

SEQ ID NO: 1435382 - DNA, 15 bp, Homo sapiens
caccctgattagtca

SEQ ID NO: 1435383 - DNA, 15 bp, Homo sapiens
ccaccctgattagtc

SEQ ID NO: 1435384 - DNA, 15 bp, Homo sapiens
accaccctgattagt

SEQ ID NO: 1435385 - DNA, 15 bp, Homo sapiens
caccaccctgattag

SEQ ID NO: 1435386 - DNA, 15 bp, Homo sapiens
ccaccaccctgatta

SEQ ID NO: 1435387 - DNA, 15 bp, Homo sapiens
accaccaccctgatt

SEQ ID NO: 1435388 - DNA, 15 bp, Homo sapiens
aaccaccaccctgat

SEQ ID NO: 1435389 - DNA, 15 bp, Homo sapiens
caaccaccaccctga

SEQ ID NO: 1435390 - DNA, 15 bp, Homo sapiens
gcaaccaccaccctg

SEQ ID NO: 1435391 - DNA, 15 bp, Homo sapiens
agcaaccaccaccct

SEQ ID NO: 1435392 - DNA, 15 bp, Homo sapiens
cagcaaccaccaccc

SEQ ID NO: 1435393 - DNA, 15 bp, Homo sapiens
tcagcaaccaccacc

SEQ ID NO: 1435394 - DNA, 15 bp, Homo sapiens
ttcagcaaccaccac

SEQ ID NO: 1435395 - DNA, 15 bp, Homo sapiens
cttcagcaaccacca

SEQ ID NO: 1435396 - DNA, 15 bp, Homo sapiens
ccttcagcaaccacc

SEQ ID NO: 1435397 - DNA, 15 bp, Homo sapiens
accttcagcaaccac

SEQ ID NO: 1435398 - DNA, 15 bp, Homo sapiens
aaccttcagcaacca

SEQ ID NO: 1435399 - DNA, 15 bp, Homo sapiens
caaccttcagcaacc

SEQ ID NO: 1435400 - DNA, 15 bp, Homo sapiens
tcaaccttcagcaac

SEQ ID NO: 1435401 - DNA, 15 bp, Homo sapiens
ctcaaccttcagcaa

SEQ ID NO: 1435402 - DNA, 15 bp, Homo sapiens
acctcaaccttcagc

SEQ ID NO: 1435403 - DNA, 15 bp, Homo sapiens
cacctcaaccttcag

SEQ ID NO: 1435404 - DNA, 15 bp, Homo sapiens
ccacctcaaccttca

SEQ ID NO: 1435405 - DNA, 15 bp, Homo sapiens
gccacctcaaccttc

SEQ ID NO: 1435406 - DNA, 15 bp, Homo sapiens
agccacctcaacctt

SEQ ID NO: 1435407 - DNA, 15 bp, Homo sapiens
cagccacctcaacct

SEQ ID NO: 1435408 - DNA, 15 bp, Homo sapiens
acagccacctcaacc

SEQ ID NO: 1435409 - DNA, 15 bp, Homo sapiens
cacagccacctcaac

SEQ ID NO: 1435410 - DNA, 15 bp, Homo sapiens
ccacagccacctcaa

SEQ ID NO: 1435411 - DNA, 15 bp, Homo sapiens
tccacagccacctca

SEQ ID NO: 1435412 - DNA, 15 bp, Homo sapiens
ttccacagccacctc

SEQ ID NO: 1435413 - DNA, 15 bp, Homo sapiens
tttccacagccacct

SEQ ID NO: 1435414 - DNA, 15 bp, Homo sapiens
atttccacagccacc

SEQ ID NO: 1435415 - DNA, 15 bp, Homo sapiens
aatttccacagccac

SEQ ID NO: 1435416 - DNA, 15 bp, Homo sapiens
taatttccacagcca

SEQ ID NO: 1435417 - DNA, 15 bp, Homo sapiens
gtaatttccacagcc

SEQ ID NO: 1435418 - DNA, 15 bp, Homo sapiens
agtaatttccacagc

SEQ ID NO: 1435419 - DNA, 15 bp, Homo sapiens
aagtaatttccacag

SEQ ID NO: 1435420 - DNA, 15 bp, Homo sapiens
taagtaatttccaca

SEQ ID NO: 1435421 - DNA, 15 bp, Homo sapiens
ttaagtaatttccac

SEQ ID NO: 1435422 - DNA, 15 bp, Homo sapiens
cttaagtaatttcca

SEQ ID NO: 1435423 - DNA, 15 bp, Homo sapiens
gcttaagtaatttcc

SEQ ID NO: 1435424 - DNA, 15 bp, Homo sapiens
agcttaagtaatttc

SEQ ID NO: 1435425 - DNA, 15 bp, Homo sapiens
tagcttaagtaattt

SEQ ID NO: 1435426 - DNA, 15 bp, Homo sapiens
ttagcttaagtaatt

SEQ ID NO: 1435427 - DNA, 15 bp, Homo sapiens
cttagcttaagtaat

SEQ ID NO: 1435428 - DNA, 15 bp, Homo sapiens
tcttagcttaagtaa

SEQ ID NO: 1435429 - DNA, 15 bp, Homo sapiens
gtcttagcttaagta

SEQ ID NO: 1435430 - DNA, 15 bp, Homo sapiens
tgtcttagcttaagt

SEQ ID NO: 1435431 - DNA, 15 bp, Homo sapiens
ttgtcttagcttaag

SEQ ID NO: 1435432 - DNA, 15 bp, Homo sapiens
gttgtcttagcttaa

SEQ ID NO: 1435433 - DNA, 15 bp, Homo sapiens
cgttgtcttagctta

SEQ ID NO: 1435434 - DNA, 15 bp, Homo sapiens
tcgttgtcttagctt

SEQ ID NO: 1435435 - DNA, 15 bp, Homo sapiens
ttcgttgtcttagct

SEQ ID NO: 1435436 - DNA, 15 bp, Homo sapiens
cttcgttgtcttagc

SEQ ID NO: 1435437 - DNA, 15 bp, Homo sapiens
acttcgttgtcttag

SEQ ID NO: 1435438 - DNA, 15 bp, Homo sapiens
aacttcgttgtctta

SEQ ID NO: 1435439 - DNA, 15 bp, Homo sapiens
aaacttcgttgtctt

SEQ ID NO: 1435440 - DNA, 15 bp, Homo sapiens
gaaacttcgttgtct

SEQ ID NO: 1435441 - DNA, 15 bp, Homo sapiens
ggaaacttcgttgtc

SEQ ID NO: 1435442 - DNA, 15 bp, Homo sapiens
aggaaacttcgttgt

SEQ ID NO: 1435443 - DNA, 15 bp, Homo sapiens
caggaaacttcgttg

SEQ ID NO: 1435444 - DNA, 15 bp, Homo sapiens
gcaggaaacttcgtt

SEQ ID NO: 1435445 - DNA, 15 bp, Homo sapiens
tgcaggaaacttcgt

SEQ ID NO: 1435446 - DNA, 15 bp, Homo sapiens
atgcaggaaacttcg

SEQ ID NO: 1435447 - DNA, 15 bp, Homo sapiens
gatgcaggaaacttc

SEQ ID NO: 1435448 - DNA, 15 bp, Homo sapiens
tgatgcaggaaactt

SEQ ID NO: 1435449 - DNA, 15 bp, Homo sapiens
ttgatgcaggaaact

SEQ ID NO: 1435450 - DNA, 15 bp, Homo sapiens
attgatgcaggaaac

SEQ ID NO: 1435451 - DNA, 15 bp, Homo sapiens
aattgatgcaggaaa

SEQ ID NO: 1435452 - DNA, 15 bp, Homo sapiens
caattgatgcaggaa

SEQ ID NO: 1435453 - DNA, 15 bp, Homo sapiens
tcaattgatgcagga

SEQ ID NO: 1435454 - DNA, 15 bp, Homo sapiens
gtcaattgatgcagg

SEQ ID NO: 1435455 - DNA, 15 bp, Homo sapiens
agtcaattgatgcag

SEQ ID NO: 1435456 - DNA, 15 bp, Homo sapiens
gagtcaattgatgca

SEQ ID NO: 1435457 - DNA, 15 bp, Homo sapiens
agagtcaattgatgc

SEQ ID NO: 1435458 - DNA, 15 bp, Homo sapiens
aagagtcaattgatg

SEQ ID NO: 1435459 - DNA, 15 bp, Homo sapiens
gaagagtcaattgat

SEQ ID NO: 1435460 - DNA, 15 bp, Homo sapiens
ggaagagtcaattga

SEQ ID NO: 1435461 - DNA, 15 bp, Homo sapiens
tggaagagtcaattg

SEQ ID NO: 1435462 - DNA, 15 bp, Homo sapiens
gtggaagagtcaatt

SEQ ID NO: 1435463 - DNA, 15 bp, Homo sapiens
tgtggaagagtcaat

SEQ ID NO: 1435464 - DNA, 15 bp, Homo sapiens
ttgtggaagagtcaa

SEQ ID NO: 1435465 - DNA, 15 bp, Homo sapiens
tttgtggaagagtca

SEQ ID NO: 1435466 - DNA, 15 bp, Homo sapiens
ttttgtggaagagtc

SEQ ID NO: 1435467 - DNA, 15 bp, Homo sapiens
attttgtggaagagt

SEQ ID NO: 1435468 - DNA, 15 bp, Homo sapiens
cattttgtggaagag

SEQ ID NO: 1435469 - DNA, 15 bp, Homo sapiens
acattttgtggaaga

SEQ ID NO: 1435470 - DNA, 15 bp, Homo sapiens
aacattttgtggaag

SEQ ID NO: 1435471 - DNA, 15 bp, Homo sapiens
aaacattttgtggaa

SEQ ID NO: 1435472 - DNA, 15 bp, Homo sapiens
gaaacattttgtgga

SEQ ID NO: 1435473 - DNA, 15 bp, Homo sapiens
agaaacattttgtgg

SEQ ID NO: 1435474 - DNA, 15 bp, Homo sapiens
gagaaacattttgtg

SEQ ID NO: 1435475 - DNA, 15 bp, Homo sapiens
agagaaacattttgt

SEQ ID NO: 1435476 - DNA, 15 bp, Homo sapiens
cagagaaacattttg

SEQ ID NO: 1435477 - DNA, 15 bp, Homo sapiens
acagagaaacatttt

SEQ ID NO: 1435478 - DNA, 15 bp, Homo sapiens
aacagagaaacattt

SEQ ID NO: 1435479 - DNA, 15 bp, Homo sapiens
caacagagaaacatt

SEQ ID NO: 1435480 - DNA, 15 bp, Homo sapiens
gcaacagagaaacat

SEQ ID NO: 1435481 - DNA, 15 bp, Homo sapiens
tgcaacagagaaaca

SEQ ID NO: 1435482 - DNA, 15 bp, Homo sapiens
atgcaacagagaaac

SEQ ID NO: 1435483 - DNA, 15 bp, Homo sapiens
catgcaacagagaaa

SEQ ID NO: 1435484 - DNA, 15 bp, Homo sapiens
acatgcaacagagaa

SEQ ID NO: 1435485 - DNA, 15 bp, Homo sapiens
cacatgcaacagaga

SEQ ID NO: 1435486 - DNA, 15 bp, Homo sapiens
tcacatgcaacagag

SEQ ID NO: 1435487 - DNA, 15 bp, Homo sapiens
atcacatgcaacaga

SEQ ID NO: 1435488 - DNA, 15 bp, Homo sapiens
catcacatgcaacag

SEQ ID NO: 1435489 - DNA, 15 bp, Homo sapiens
gcatcacatgcaaca

SEQ ID NO: 1435490 - DNA, 15 bp, Homo sapiens
agcatcacatgcaac

SEQ ID NO: 1435491 - DNA, 15 bp, Homo sapiens
tagcatcacatgcaa

SEQ ID NO: 1435492 - DNA, 15 bp, Homo sapiens
atagcatcacatgca

SEQ ID NO: 1435493 - DNA, 15 bp, Homo sapiens
aatagcatcacatgc

SEQ ID NO: 1435494 - DNA, 15 bp, Homo sapiens
aaatagcatcacatg

SEQ ID NO: 1435495 - DNA, 15 bp, Homo sapiens
taaatagcatcacat

SEQ ID NO: 1435496 - DNA, 15 bp, Homo sapiens
ttaaatagcatcaca

SEQ ID NO: 1435497 - DNA, 15 bp, Homo sapiens
attaaatagcatcac

SEQ ID NO: 1435498 - DNA, 15 bp, Homo sapiens
tattaaatagcatca

SEQ ID NO: 1435499 - DNA, 15 bp, Homo sapiens
ctattaaatagcatc

SEQ ID NO: 1435500 - DNA, 15 bp, Homo sapiens
gctattaaatagcat

SEQ ID NO: 1435501 - DNA, 15 bp, Homo sapiens
tgctattaaatagca

SEQ ID NO: 1435502 - DNA, 15 bp, Homo sapiens
atgctattaaatagc

SEQ ID NO: 1435503 - DNA, 15 bp, Homo sapiens
aatgctattaaatag

SEQ ID NO: 1435504 - DNA, 15 bp, Homo sapiens
aaatgctattaaata

SEQ ID NO: 1435505 - DNA, 15 bp, Homo sapiens
aaaatgctattaaat

SEQ ID NO: 1435506 - DNA, 15 bp, Homo sapiens
taaaatgctattaaa

SEQ ID NO: 1435507 - DNA, 15 bp, Homo sapiens
gtaaaatgctattaa

SEQ ID NO: 1435508 - DNA, 15 bp, Homo sapiens
agtaaaatgctatta

SEQ ID NO: 1435509 - DNA, 15 bp, Homo sapiens
aagtaaaatgctatt

SEQ ID NO: 1435510 - DNA, 15 bp, Homo sapiens
taagtaaaatgctat

SEQ ID NO: 1435511 - DNA, 15 bp, Homo sapiens
gtaagtaaaatgcta

SEQ ID NO: 1435512 - DNA, 15 bp, Homo sapiens
tgtaagtaaaatgct

SEQ ID NO: 1435513 - DNA, 15 bp, Homo sapiens
ctgtaagtaaaatgc

SEQ ID NO: 1435514 - DNA, 15 bp, Homo sapiens
actgtaagtaaaatg

SEQ ID NO: 1435515 - DNA, 15 bp, Homo sapiens
tactgtaagtaaaat

SEQ ID NO: 1435516 - DNA, 15 bp, Homo sapiens
ctactgtaagtaaaa

SEQ ID NO: 1435517 - DNA, 15 bp, Homo sapiens
tctactgtaagtaaa

SEQ ID NO: 1435518 - DNA, 15 bp, Homo sapiens
ttctactgtaagtaa

SEQ ID NO: 1435519 - DNA, 15 bp, Homo sapiens
gttctactgtaagta

SEQ ID NO: 1435520 - DNA, 15 bp, Homo sapiens
agttctactgtaagt

SEQ ID NO: 1435521 - DNA, 15 bp, Homo sapiens
gagttctactgtaag

SEQ ID NO: 1435522 - DNA, 15 bp, Homo sapiens
ggagttctactgtaa

SEQ ID NO: 1435523 - DNA, 15 bp, Homo sapiens
aggagttctactgta

SEQ ID NO: 1435524 - DNA, 15 bp, Homo sapiens
aaggagttctactgt

SEQ ID NO: 1435525 - DNA, 15 bp, Homo sapiens
aaaggagttctactg

SEQ ID NO: 1435526 - DNA, 15 bp, Homo sapiens
gaaaggagttctact

SEQ ID NO: 1435527 - DNA, 15 bp, Homo sapiens
tgaaaggagttctac

SEQ ID NO: 1435528 - DNA, 15 bp, Homo sapiens
ttgaaaggagttcta

SEQ ID NO: 1435529 - DNA, 15 bp, Homo sapiens
tttgaaaggagttct

SEQ ID NO: 1435530 - DNA, 15 bp, Homo sapiens
ttttgaaaggagttc

SEQ ID NO: 1435531 - DNA, 15 bp, Homo sapiens
attttgaaaggagtt

SEQ ID NO: 1435532 - DNA, 15 bp, Homo sapiens
aattttgaaaggagt

SEQ ID NO: 1435533 - DNA, 15 bp, Homo sapiens
caattttgaaaggag

SEQ ID NO: 1435534 - DNA, 15 bp, Homo sapiens
ccaattttgaaagga

SEQ ID NO: 1435535 - DNA, 15 bp, Homo sapiens
tccaattttgaaagg

SEQ ID NO: 1435536 - DNA, 15 bp, Homo sapiens
ctccaattttgaaag

SEQ ID NO: 1435537 - DNA, 15 bp, Homo sapiens
actccaattttgaaa

SEQ ID NO: 1435538 - DNA, 15 bp, Homo sapiens
gactccaattttgaa

SEQ ID NO: 1435539 - DNA, 15 bp, Homo sapiens
tgactccaattttga

SEQ ID NO: 1435540 - DNA, 15 bp, Homo sapiens
ctgactccaattttg

SEQ ID NO: 1435541 - DNA, 15 bp, Homo sapiens
actgactccaatttt

SEQ ID NO: 1435542 - DNA, 15 bp, Homo sapiens
gactgactccaattt

SEQ ID NO: 1435543 - DNA, 15 bp, Homo sapiens
ggactgactccaatt

SEQ ID NO: 1435544 - DNA, 15 bp, Homo sapiens
aggactgactccaat

SEQ ID NO: 1435545 - DNA, 15 bp, Homo sapiens
gaggactgactccaa

SEQ ID NO: 1435546 - DNA, 15 bp, Homo sapiens
agaggactgactcca

SEQ ID NO: 1435547 - DNA, 15 bp, Homo sapiens
gagaggactgactcc

SEQ ID NO: 1435548 - DNA, 15 bp, Homo sapiens
tgagaggactgactc

SEQ ID NO: 1435549 - DNA, 15 bp, Homo sapiens
ttgagaggactgact

SEQ ID NO: 1435550 - DNA, 15 bp, Homo sapiens
tttgagaggactgac

SEQ ID NO: 1435551 - DNA, 15 bp, Homo sapiens
atttgagaggactga

SEQ ID NO: 1435552 - DNA, 15 bp, Homo sapiens
gatttgagaggactg

SEQ ID NO: 1435553 - DNA, 15 bp, Homo sapiens
ggatttgagaggact

SEQ ID NO: 1435554 - DNA, 15 bp, Homo sapiens
gggatttgagaggac

SEQ ID NO: 1435555 - DNA, 15 bp, Homo sapiens
agggatttgagagga

SEQ ID NO: 1435556 - DNA, 15 bp, Homo sapiens
gagggatttgagagg

SEQ ID NO: 1435557 - DNA, 15 bp, Homo sapiens
ggagggatttgagag

SEQ ID NO: 1435558 - DNA, 15 bp, Homo sapiens
tggagggatttgaga

SEQ ID NO: 1435559 - DNA, 15 bp, Homo sapiens
gtggagggatttgag

SEQ ID NO: 1435560 - DNA, 15 bp, Homo sapiens
agtggagggatttga

SEQ ID NO: 1435561 - DNA, 15 bp, Homo sapiens
cagtggagggatttg

SEQ ID NO: 1435562 - DNA, 15 bp, Homo sapiens
gcagtggagggattt

SEQ ID NO: 1435563 - DNA, 15 bp, Homo sapiens
agcagtggagggatt

SEQ ID NO: 1435564 - DNA, 15 bp, Homo sapiens
aagcagtggagggat

SEQ ID NO: 1435565 - DNA, 15 bp, Homo sapiens
aaagcagtggaggga

SEQ ID NO: 1435566 - DNA, 15 bp, Homo sapiens
taaagcagtggaggg

SEQ ID NO: 1435567 - DNA, 15 bp, Homo sapiens
ataaagcagtggagg

SEQ ID NO: 1435568 - DNA, 15 bp, Homo sapiens
gataaagcagtggag

SEQ ID NO: 1435569 - DNA, 15 bp, Homo sapiens
tgataaagcagtgga

SEQ ID NO: 1435570 - DNA, 15 bp, Homo sapiens
ttgataaagcagtgg

SEQ ID NO: 1435571 - DNA, 15 bp, Homo sapiens
gttgataaagcagtg

SEQ ID NO: 1435572 - DNA, 15 bp, Homo sapiens
agttgataaagcagt

SEQ ID NO: 1435573 - DNA, 15 bp, Homo sapiens
gagttgataaagcag

SEQ ID NO: 1435574 - DNA, 15 bp, Homo sapiens
tgagttgataaagca

SEQ ID NO: 1435575 - DNA, 15 bp, Homo sapiens
ctgagttgataaagc

SEQ ID NO: 1435576 - DNA, 15 bp, Homo sapiens
actgagttgataaag

SEQ ID NO: 1435577 - DNA, 15 bp, Homo sapiens
aactgagttgataaa

SEQ ID NO: 1435578 - DNA, 15 bp, Homo sapiens
aaactgagttgataa

SEQ ID NO: 1435579 - DNA, 15 bp, Homo sapiens
taaactgagttgata

SEQ ID NO: 1435580 - DNA, 15 bp, Homo sapiens
ctaaactgagttgat

SEQ ID NO: 1435581 - DNA, 15 bp, Homo sapiens
cctaaactgagttga

SEQ ID NO: 1435582 - DNA, 15 bp, Homo sapiens
acctaaactgagttg

SEQ ID NO: 1435583 - DNA, 15 bp, Homo sapiens
tacctaaactgagtt

SEQ ID NO: 1435584 - DNA, 15 bp, Homo sapiens
ttacctaaactgagt

SEQ ID NO: 1435585 - DNA, 15 bp, Homo sapiens
attacctaaactgag

SEQ ID NO: 1435586 - DNA, 15 bp, Homo sapiens
tattacctaaactga

SEQ ID NO: 1435587 - DNA, 15 bp, Homo sapiens
atattacctaaactg

SEQ ID NO: 1435588 - DNA, 15 bp, Homo sapiens
gatattacctaaact

SEQ ID NO: 1435589 - DNA, 15 bp, Homo sapiens
agatattacctaaac

SEQ ID NO: 1435590 - DNA, 15 bp, Homo sapiens
tagatattacctaaa

SEQ ID NO: 1435591 - DNA, 15 bp, Homo sapiens
ctagatattacctaa

SEQ ID NO: 1435592 - DNA, 15 bp, Homo sapiens
cctagatattaccta

SEQ ID NO: 1435593 - DNA, 15 bp, Homo sapiens
acctagatattacct

SEQ ID NO: 1435594 - DNA, 15 bp, Homo sapiens
aacctagatattacc

SEQ ID NO: 1435595 - DNA, 15 bp, Homo sapiens
taacctagatattac

SEQ ID NO: 1435596 - DNA, 15 bp, Homo sapiens
ttaacctagatatta

SEQ ID NO: 1435597 - DNA, 15 bp, Homo sapiens
attaacctagatatt

SEQ ID NO: 1435598 - DNA, 15 bp, Homo sapiens
aattaacctagatat

SEQ ID NO: 1435599 - DNA, 15 bp, Homo sapiens
caattaacctagata

SEQ ID NO: 1435600 - DNA, 15 bp, Homo sapiens
acaattaacctagat

SEQ ID NO: 1435601 - DNA, 15 bp, Homo sapiens
aacaattaacctaga

SEQ ID NO: 1435602 - DNA, 15 bp, Homo sapiens
caacaattaacctag

SEQ ID NO: 1435603 - DNA, 15 bp, Homo sapiens
acaacaattaaccta

SEQ ID NO: 1435604 - DNA, 15 bp, Homo sapiens
gacaacaattaacct

SEQ ID NO: 1435605 - DNA, 15 bp, Homo sapiens
tgacaacaattaacc

SEQ ID NO: 1435606 - DNA, 15 bp, Homo sapiens
atgacaacaattaac

SEQ ID NO: 1435607 - DNA, 15 bp, Homo sapiens
aatgacaacaattaa

SEQ ID NO: 1435608 - DNA, 15 bp, Homo sapiens
aaatgacaacaatta

SEQ ID NO: 1435609 - DNA, 15 bp, Homo sapiens
caaatgacaacaatt

SEQ ID NO: 1435610 - DNA, 15 bp, Homo sapiens
acaaatgacaacaat

SEQ ID NO: 1435611 - DNA, 15 bp, Homo sapiens
gacaaatgacaacaa

SEQ ID NO: 1435612 - DNA, 15 bp, Homo sapiens
tgacaaatgacaaca

SEQ ID NO: 1435613 - DNA, 15 bp, Homo sapiens
atgacaaatgacaac

SEQ ID NO: 1435614 - DNA, 15 bp, Homo sapiens
aatgacaaatgacaa

SEQ ID NO: 1435615 - DNA, 15 bp, Homo sapiens
aaatgacaaatgaca

SEQ ID NO: 1435616 - DNA, 15 bp, Homo sapiens
gaaatgacaaatgac

SEQ ID NO: 1435617 - DNA, 15 bp, Homo sapiens
tgaaatgacaaatga

SEQ ID NO: 1435618 - DNA, 15 bp, Homo sapiens
ttgaaatgacaaatg

SEQ ID NO: 1435619 - DNA, 15 bp, Homo sapiens
gttgaaatgacaaat

SEQ ID NO: 1435620 - DNA, 15 bp, Homo sapiens
tgttgaaatgacaaa

SEQ ID NO: 1435621 - DNA, 15 bp, Homo sapiens
ctgttgaaatgacaa

SEQ ID NO: 1435622 - DNA, 15 bp, Homo sapiens
actgttgaaatgaca

SEQ ID NO: 1435623 - DNA, 15 bp, Homo sapiens
cactgttgaaatgac

SEQ ID NO: 1435624 - DNA, 15 bp, Homo sapiens
acactgttgaaatga

SEQ ID NO: 1435625 - DNA, 15 bp, Homo sapiens
aacactgttgaaatg

SEQ ID NO: 1435626 - DNA, 15 bp, Homo sapiens
gaacactgttgaaat

SEQ ID NO: 1435627 - DNA, 15 bp, Homo sapiens
tgaacactgttgaaa

SEQ ID NO: 1435628 - DNA, 15 bp, Homo sapiens
gtgaacactgttgaa

SEQ ID NO: 1435629 - DNA, 15 bp, Homo sapiens
tgtgaacactgttga

SEQ ID NO: 1435630 - DNA, 15 bp, Homo sapiens
ctgtgaacactgttg

SEQ ID NO: 1435631 - DNA, 15 bp, Homo sapiens
gctgtgaacactgtt

SEQ ID NO: 1435632 - DNA, 15 bp, Homo sapiens
tgctgtgaacactgt

SEQ ID NO: 1435633 - DNA, 15 bp, Homo sapiens
atgctgtgaacactg

SEQ ID NO: 1435634 - DNA, 15 bp, Homo sapiens
aatgctgtgaacact

SEQ ID NO: 1435635 - DNA, 15 bp, Homo sapiens
aaatgctgtgaacac

SEQ ID NO: 1435636 - DNA, 15 bp, Homo sapiens
aaaatgctgtgaaca

SEQ ID NO: 1435637 - DNA, 15 bp, Homo sapiens
gaaaatgctgtgaac

SEQ ID NO: 1435638 - DNA, 15 bp, Homo sapiens
tgaaaatgctgtgaa

SEQ ID NO: 1435639 - DNA, 15 bp, Homo sapiens
gtgaaaatgctgtga

SEQ ID NO: 1435640 - DNA, 15 bp, Homo sapiens
ggtgaaaatgctgtg

SEQ ID NO: 1435641 - DNA, 15 bp, Homo sapiens
tggtgaaaatgctgt

SEQ ID NO: 1435642 - DNA, 15 bp, Homo sapiens
ctggtgaaaatgctg

SEQ ID NO: 1435643 - DNA, 15 bp, Homo sapiens
tctggtgaaaatgct

SEQ ID NO: 1435644 - DNA, 15 bp, Homo sapiens
ttctggtgaaaatgc

SEQ ID NO: 1435645 - DNA, 15 bp, Homo sapiens
cttctggtgaaaatg

SEQ ID NO: 1435646 - DNA, 15 bp, Homo sapiens
acttctggtgaaaat

SEQ ID NO: 1435647 - DNA, 15 bp, Homo sapiens
cacttctggtgaaaa

SEQ ID NO: 1435648 - DNA, 15 bp, Homo sapiens
ccacttctggtgaaa

SEQ ID NO: 1435649 - DNA, 15 bp, Homo sapiens
tccacttctggtgaa

SEQ ID NO: 1435650 - DNA, 15 bp, Homo sapiens
ctccacttctggtga

SEQ ID NO: 1435651 - DNA, 15 bp, Homo sapiens
actccacttctggtg

SEQ ID NO: 1435652 - DNA, 15 bp, Homo sapiens
gactccacttctggt

SEQ ID NO: 1435653 - DNA, 15 bp, Homo sapiens
ggactccacttctgg

SEQ ID NO: 1435654 - DNA, 15 bp, Homo sapiens
tggactccacttctg

SEQ ID NO: 1435655 - DNA, 15 bp, Homo sapiens
atggactccacttct

SEQ ID NO: 1435656 - DNA, 15 bp, Homo sapiens
gatggactccacttc

SEQ ID NO: 1435657 - DNA, 15 bp, Homo sapiens
agatggactccactt

SEQ ID NO: 1435658 - DNA, 15 bp, Homo sapiens
gagatggactccact

SEQ ID NO: 1435659 - DNA, 15 bp, Homo sapiens
tgagatggactccac

SEQ ID NO: 1435660 - DNA, 15 bp, Homo sapiens
ttgagatggactcca

SEQ ID NO: 1435661 - DNA, 15 bp, Homo sapiens
cttgagatggactcc

SEQ ID NO: 1435662 - DNA, 15 bp, Homo sapiens
tcttgagatggactc

SEQ ID NO: 1435663 - DNA, 15 bp, Homo sapiens
ttcttgagatggact

SEQ ID NO: 1435664 - DNA, 15 bp, Homo sapiens
tttcttgagatggac

SEQ ID NO: 1435665 - DNA, 15 bp, Homo sapiens
gtttcttgagatgga

SEQ ID NO: 1435666 - DNA, 15 bp, Homo sapiens
ggtttcttgagatgg

SEQ ID NO: 1435667 - DNA, 15 bp, Homo sapiens
tggtttcttgagatg

SEQ ID NO: 1435668 - DNA, 15 bp, Homo sapiens
gtggtttcttgagat

SEQ ID NO: 1435669 - DNA, 15 bp, Homo sapiens
agtggtttcttgaga

SEQ ID NO: 1435670 - DNA, 15 bp, Homo sapiens
aagtggtttcttgag

SEQ ID NO: 1435671 - DNA, 15 bp, Homo sapiens
aaagtggtttcttga

SEQ ID NO: 1435672 - DNA, 15 bp, Homo sapiens
gaaagtggtttcttg

SEQ ID NO: 1435673 - DNA, 15 bp, Homo sapiens
agaaagtggtttctt

SEQ ID NO: 1435674 - DNA, 15 bp, Homo sapiens
aagaaagtggtttct

SEQ ID NO: 1435675 - DNA, 15 bp, Homo sapiens
aaagaaagtggtttc

SEQ ID NO: 1435676 - DNA, 15 bp, Homo sapiens
caaagaaagtggttt

SEQ ID NO: 1435677 - DNA, 15 bp, Homo sapiens
gcaaagaaagtggtt

SEQ ID NO: 1435678 - DNA, 15 bp, Homo sapiens
agcaaagaaagtggt

SEQ ID NO: 1435679 - DNA, 15 bp, Homo sapiens
gagcaaagaaagtgg

SEQ ID NO: 1435680 - DNA, 15 bp, Homo sapiens
tgagcaaagaaagtg

SEQ ID NO: 1435681 - DNA, 15 bp, Homo sapiens
atgagcaaagaaagt

SEQ ID NO: 1435682 - DNA, 15 bp, Homo sapiens
gatgagcaaagaaag

SEQ ID NO: 1435683 - DNA, 15 bp, Homo sapiens
ggatgagcaaagaaa

SEQ ID NO: 1435684 - DNA, 15 bp, Homo sapiens
tggatgagcaaagaa

SEQ ID NO: 1435685 - DNA, 15 bp, Homo sapiens
ttggatgagcaaaga

SEQ ID NO: 1435686 - DNA, 15 bp, Homo sapiens
tttggatgagcaaag

SEQ ID NO: 1435687 - DNA, 15 bp, Homo sapiens
atttggatgagcaaa

SEQ ID NO: 1435688 - DNA, 15 bp, Homo sapiens
catttggatgagcaa

SEQ ID NO: 1435689 - DNA, 15 bp, Homo sapiens
tcatttggatgagca

SEQ ID NO: 1435690 - DNA, 15 bp, Homo sapiens
ctcatttggatgagc

SEQ ID NO: 1435691 - DNA, 15 bp, Homo sapiens
cctcatttggatgag

SEQ ID NO: 1435692 - DNA, 15 bp, Homo sapiens
tcctcatttggatga

SEQ ID NO: 1435693 - DNA, 15 bp, Homo sapiens
atcctcatttggatg

SEQ ID NO: 1435694 - DNA, 15 bp, Homo sapiens
aatcctcatttggat

SEQ ID NO: 1435695 - DNA, 15 bp, Homo sapiens
aaatcctcatttgga

SEQ ID NO: 1435696 - DNA, 15 bp, Homo sapiens
caaatcctcatttgg

SEQ ID NO: 1435697 - DNA, 15 bp, Homo sapiens
gcaaatcctcatttg

SEQ ID NO: 1435698 - DNA, 15 bp, Homo sapiens
tgcaaatcctcattt

SEQ ID NO: 1435699 - DNA, 15 bp, Homo sapiens
ttgcaaatcctcatt

SEQ ID NO: 1435700 - DNA, 15 bp, Homo sapiens
tttgcaaatcctcat

SEQ ID NO: 1435701 - DNA, 15 bp, Homo sapiens
atttgcaaatcctca

SEQ ID NO: 1435702 - DNA, 15 bp, Homo sapiens
gatttgcaaatcctc

SEQ ID NO: 1435703 - DNA, 15 bp, Homo sapiens
ggatttgcaaatcct

SEQ ID NO: 1435704 - DNA, 15 bp, Homo sapiens
aggatttgcaaatcc

SEQ ID NO: 1435705 - DNA, 15 bp, Homo sapiens
gaggatttgcaaatc

SEQ ID NO: 1435706 - DNA, 15 bp, Homo sapiens
tgaggatttgcaaat

SEQ ID NO: 1435707 - DNA, 15 bp, Homo sapiens
gtgaggatttgcaaa

SEQ ID NO: 1435708 - DNA, 15 bp, Homo sapiens
agtgaggatttgcaa

SEQ ID NO: 1435709 - DNA, 15 bp, Homo sapiens
aagtgaggatttgca

SEQ ID NO: 1435710 - DNA, 15 bp, Homo sapiens
caagtgaggatttgc

SEQ ID NO: 1435711 - DNA, 15 bp, Homo sapiens
acaagtgaggatttg

SEQ ID NO: 1435712 - DNA, 15 bp, Homo sapiens
aacaagtgaggattt

SEQ ID NO: 1435713 - DNA, 15 bp, Homo sapiens
gaacaagtgaggatt

SEQ ID NO: 1435714 - DNA, 15 bp, Homo sapiens
tgaacaagtgaggat

SEQ ID NO: 1435715 - DNA, 15 bp, Homo sapiens
ttgaacaagtgagga

SEQ ID NO: 1435716 - DNA, 15 bp, Homo sapiens
tttgaacaagtgagg

SEQ ID NO: 1435717 - DNA, 15 bp, Homo sapiens
atttgaacaagtgag

SEQ ID NO: 1435718 - DNA, 15 bp, Homo sapiens
aatttgaacaagtga

SEQ ID NO: 1435719 - DNA, 15 bp, Homo sapiens
aaatttgaacaagtg

SEQ ID NO: 1435720 - DNA, 15 bp, Homo sapiens
aaaatttgaacaagt

SEQ ID NO: 1435721 - DNA, 15 bp, Homo sapiens
taaaatttgaacaag

SEQ ID NO: 1435722 - DNA, 15 bp, Homo sapiens
ataaaatttgaacaa

SEQ ID NO: 1435723 - DNA, 15 bp, Homo sapiens
gataaaatttgaaca

SEQ ID NO: 1435724 - DNA, 15 bp, Homo sapiens
tgataaaatttgaac

SEQ ID NO: 1435725 - DNA, 15 bp, Homo sapiens
atgataaaatttgaa

SEQ ID NO: 1435726 - DNA, 15 bp, Homo sapiens
catgataaaatttga

SEQ ID NO: 1435727 - DNA, 15 bp, Homo sapiens
ccatgataaaatttg

SEQ ID NO: 1435728 - DNA, 15 bp, Homo sapiens
cccatgataaaattt

SEQ ID NO: 1435729 - DNA, 15 bp, Homo sapiens
tcccatgataaaatt

SEQ ID NO: 1435730 - DNA, 15 bp, Homo sapiens
atcccatgataaaat

SEQ ID NO: 1435731 - DNA, 15 bp, Homo sapiens
aatcccatgataaaa

SEQ ID NO: 1435732 - DNA, 15 bp, Homo sapiens
gaatcccatgataaa

SEQ ID NO: 1435733 - DNA, 15 bp, Homo sapiens
ggaatcccatgataa

SEQ ID NO: 1435734 - DNA, 15 bp, Homo sapiens
tggaatcccatgata

SEQ ID NO: 1435735 - DNA, 15 bp, Homo sapiens
ctggaatcccatgat

SEQ ID NO: 1435736 - DNA, 15 bp, Homo sapiens
tctggaatcccatga

SEQ ID NO: 1435737 - DNA, 15 bp, Homo sapiens
ttctggaatcccatg

SEQ ID NO: 1435738 - DNA, 15 bp, Homo sapiens
tttctggaatcccat

SEQ ID NO: 1435739 - DNA, 15 bp, Homo sapiens
atttctggaatccca

SEQ ID NO: 1435740 - DNA, 15 bp, Homo sapiens
aatttctggaatccc

SEQ ID NO: 1435741 - DNA, 15 bp, Homo sapiens
gaatttctggaatcc

SEQ ID NO: 1435742 - DNA, 15 bp, Homo sapiens
tgaatttctggaatc

SEQ ID NO: 1435743 - DNA, 15 bp, Homo sapiens
ttgaatttctggaat

SEQ ID NO: 1435744 - DNA, 15 bp, Homo sapiens
cttgaatttctggaa

SEQ ID NO: 1435745 - DNA, 15 bp, Homo sapiens
gcttgaatttctgga

SEQ ID NO: 1435746 - DNA, 15 bp, Homo sapiens
agcttgaatttctgg

SEQ ID NO: 1435747 - DNA, 15 bp, Homo sapiens
tagcttgaatttctg

SEQ ID NO: 1435748 - DNA, 15 bp, Homo sapiens
atagcttgaatttct

SEQ ID NO: 1435749 - DNA, 15 bp, Homo sapiens
tatagcttgaatttc

SEQ ID NO: 1435750 - DNA, 15 bp, Homo sapiens
gtatagcttgaattt

SEQ ID NO: 1435751 - DNA, 15 bp, Homo sapiens
agtatagcttgaatt

SEQ ID NO: 1435752 - DNA, 15 bp, Homo sapiens
aagtatagcttgaat

SEQ ID NO: 1435753 - DNA, 15 bp, Homo sapiens
gaagtatagcttgaa

SEQ ID NO: 1435754 - DNA, 15 bp, Homo sapiens
agaagtatagcttga

SEQ ID NO: 1435755 - DNA, 15 bp, Homo sapiens
tagaagtatagcttg

SEQ ID NO: 1435756 - DNA, 15 bp, Homo sapiens
ttagaagtatagctt

SEQ ID NO: 1435757 - DNA, 15 bp, Homo sapiens
attagaagtatagct

SEQ ID NO: 1435758 - DNA, 15 bp, Homo sapiens
aattagaagtatagc

SEQ ID NO: 1435759 - DNA, 15 bp, Homo sapiens
gaattagaagtatag

SEQ ID NO: 1435760 - DNA, 15 bp, Homo sapiens
agaattagaagtata

SEQ ID NO: 1435761 - DNA, 15 bp, Homo sapiens
tagaattagaagtat

SEQ ID NO: 1435762 - DNA, 15 bp, Homo sapiens
ctagaattagaagta

SEQ ID NO: 1435763 - DNA, 15 bp, Homo sapiens
actagaattagaagt

SEQ ID NO: 1435764 - DNA, 15 bp, Homo sapiens
tactagaattagaag

SEQ ID NO: 1435765 - DNA, 15 bp, Homo sapiens
ctactagaattagaa

SEQ ID NO: 1435766 - DNA, 15 bp, Homo sapiens
tctactagaattaga

SEQ ID NO: 1435767 - DNA, 15 bp, Homo sapiens
ttctactagaattag

SEQ ID NO: 1435768 - DNA, 15 bp, Homo sapiens
attctactagaatta

SEQ ID NO: 1435769 - DNA, 15 bp, Homo sapiens
gattctactagaatt

SEQ ID NO: 1435770 - DNA, 15 bp, Homo sapiens
agattctactagaat

SEQ ID NO: 1435771 - DNA, 15 bp, Homo sapiens
gagattctactagaa

SEQ ID NO: 1435772 - DNA, 15 bp, Homo sapiens
agagattctactaga

SEQ ID NO: 1435773 - DNA, 15 bp, Homo sapiens
aagagattctactag

SEQ ID NO: 1435774 - DNA, 15 bp, Homo sapiens
gaagagattctacta

SEQ ID NO: 1435775 - DNA, 15 bp, Homo sapiens
tgaagagattctact

SEQ ID NO: 1435776 - DNA, 15 bp, Homo sapiens
ttgaagagattctac

SEQ ID NO: 1435777 - DNA, 15 bp, Homo sapiens
cttgaagagattcta

SEQ ID NO: 1435778 - DNA, 15 bp, Homo sapiens
gcttgaagagattct

SEQ ID NO: 1435779 - DNA, 15 bp, Homo sapiens
agcttgaagagattc

SEQ ID NO: 1435780 - DNA, 15 bp, Homo sapiens
gagcttgaagagatt

SEQ ID NO: 1435781 - DNA, 15 bp, Homo sapiens
agagcttgaagagat

SEQ ID NO: 1435782 - DNA, 15 bp, Homo sapiens
tagagcttgaagaga

SEQ ID NO: 1435783 - DNA, 15 bp, Homo sapiens
gtagagcttgaagag

SEQ ID NO: 1435784 - DNA, 15 bp, Homo sapiens
agtagagcttgaaga

SEQ ID NO: 1435785 - DNA, 15 bp, Homo sapiens
aagtagagcttgaag

SEQ ID NO: 1435786 - DNA, 15 bp, Homo sapiens
gaagtagagcttgaa

SEQ ID NO: 1435787 - DNA, 15 bp, Homo sapiens
agaagtagagcttga

SEQ ID NO: 1435788 - DNA, 15 bp, Homo sapiens
aagaagtagagcttg

SEQ ID NO: 1435789 - DNA, 15 bp, Homo sapiens
aaagaagtagagctt

SEQ ID NO: 1435790 - DNA, 15 bp, Homo sapiens
aaaagaagtagagct

SEQ ID NO: 1435791 - DNA, 15 bp, Homo sapiens
aaaaagaagtagagc

SEQ ID NO: 1435792 - DNA, 15 bp, Homo sapiens
aaaaaagaagtagag

SEQ ID NO: 1435793 - DNA, 15 bp, Homo sapiens
aaaaaaagaagtaga

SEQ ID NO: 1435794 - DNA, 15 bp, Homo sapiens
aaaaaaaagaagtag

SEQ ID NO: 1435795 - DNA, 15 bp, Homo sapiens
aaaaaaaaagaagta

SEQ ID NO: 1435796 - DNA, 15 bp, Homo sapiens
aaaaaaaaaagaagt

SEQ ID NO: 1435797 - DNA, 15 bp, Homo sapiens
ggcaagactccatct

SEQ ID NO: 1435798 - DNA, 15 bp, Homo sapiens
gggcaagactccatc

SEQ ID NO: 1435799 - DNA, 15 bp, Homo sapiens
agggcaagactccat

SEQ ID NO: 1435800 - DNA, 15 bp, Homo sapiens
cagggcaagactcca

SEQ ID NO: 1435801 - DNA, 15 bp, Homo sapiens
acagggcaagactcc

SEQ ID NO: 1435802 - DNA, 15 bp, Homo sapiens
aacagggcaagactc

SEQ ID NO: 1435803 - DNA, 15 bp, Homo sapiens
caacagggcaagact

SEQ ID NO: 1435804 - DNA, 15 bp, Homo sapiens
gcaacagggcaagac

SEQ ID NO: 1435805 - DNA, 15 bp, Homo sapiens
ggcaacagggcaaga

SEQ ID NO: 1435806 - DNA, 15 bp, Homo sapiens
gggcaacagggcaag

SEQ ID NO: 1435807 - DNA, 15 bp, Homo sapiens
tgggcaacagggcaa

SEQ ID NO: 1435808 - DNA, 15 bp, Homo sapiens
ctgggcaacagggca

SEQ ID NO: 1435809 - DNA, 15 bp, Homo sapiens
cctgggcaacagggc

SEQ ID NO: 1435810 - DNA, 15 bp, Homo sapiens
gcctgggcaacaggg

SEQ ID NO: 1435811 - DNA, 15 bp, Homo sapiens
agcctgggcaacagg

SEQ ID NO: 1435812 - DNA, 15 bp, Homo sapiens
tacaccactgcactc

SEQ ID NO: 1435813 - DNA, 15 bp, Homo sapiens
ttacaccactgcact

SEQ ID NO: 1435814 - DNA, 15 bp, Homo sapiens
attacaccactgcac

SEQ ID NO: 1435815 - DNA, 15 bp, Homo sapiens
gattacaccactgca

SEQ ID NO: 1435816 - DNA, 15 bp, Homo sapiens
agattacaccactgc

SEQ ID NO: 1435817 - DNA, 15 bp, Homo sapiens
gagattacaccactg

SEQ ID NO: 1435818 - DNA, 15 bp, Homo sapiens
cgagattacaccact

SEQ ID NO: 1435819 - DNA, 15 bp, Homo sapiens
acgagattacaccac

SEQ ID NO: 1435820 - DNA, 15 bp, Homo sapiens
gacgagattacacca

SEQ ID NO: 1435821 - DNA, 15 bp, Homo sapiens
agacgagattacacc

SEQ ID NO: 1435822 - DNA, 15 bp, Homo sapiens
gagacgagattacac

SEQ ID NO: 1435823 - DNA, 15 bp, Homo sapiens
tgagacgagattaca

SEQ ID NO: 1435824 - DNA, 15 bp, Homo sapiens
gtgagacgagattac

SEQ ID NO: 1435825 - DNA, 15 bp, Homo sapiens
agtgagacgagatta

SEQ ID NO: 1435826 - DNA, 15 bp, Homo sapiens
cagtgagacgagatt

SEQ ID NO: 1435827 - DNA, 15 bp, Homo sapiens
gcagtgagacgagat

SEQ ID NO: 1435828 - DNA, 15 bp, Homo sapiens
tgcagtgagacgaga

SEQ ID NO: 1435829 - DNA, 15 bp, Homo sapiens
ctgcagtgagacgag

SEQ ID NO: 1435830 - DNA, 15 bp, Homo sapiens
gctgcagtgagacga

SEQ ID NO: 1435831 - DNA, 15 bp, Homo sapiens
ggctgcagtgagacg

SEQ ID NO: 1435832 - DNA, 15 bp, Homo sapiens
aggctgcagtgagac

SEQ ID NO: 1435833 - DNA, 15 bp, Homo sapiens
gaggctgcagtgaga

SEQ ID NO: 1435834 - DNA, 15 bp, Homo sapiens
cgaggtggaggctgc

SEQ ID NO: 1435835 - DNA, 15 bp, Homo sapiens
gcgaggtggaggctg

SEQ ID NO: 1435836 - DNA, 15 bp, Homo sapiens
cgcgaggtggaggct

SEQ ID NO: 1435837 - DNA, 15 bp, Homo sapiens
tcgcgaggtggaggc

SEQ ID NO: 1435838 - DNA, 15 bp, Homo sapiens
ctcgcgaggtggagg

SEQ ID NO: 1435839 - DNA, 15 bp, Homo sapiens
actcgcgaggtggag

SEQ ID NO: 1435840 - DNA, 15 bp, Homo sapiens
aactcgcgaggtgga

SEQ ID NO: 1435841 - DNA, 15 bp, Homo sapiens
gaactcgcgaggtgg

SEQ ID NO: 1435842 - DNA, 15 bp, Homo sapiens
tgaactcgcgaggtg

SEQ ID NO: 1435843 - DNA, 15 bp, Homo sapiens
ttgaactcgcgaggt

SEQ ID NO: 1435844 - DNA, 15 bp, Homo sapiens
cttgaactcgcgagg

SEQ ID NO: 1435845 - DNA, 15 bp, Homo sapiens
acttgaactcgcgag

SEQ ID NO: 1435846 - DNA, 15 bp, Homo sapiens
cacttgaactcgcga

SEQ ID NO: 1435847 - DNA, 15 bp, Homo sapiens
tcacttgaactcgcg

SEQ ID NO: 1435848 - DNA, 15 bp, Homo sapiens
gtcacttgaactcgc

SEQ ID NO: 1435849 - DNA, 15 bp, Homo sapiens
agtcacttgaactcg

SEQ ID NO: 1435850 - DNA, 15 bp, Homo sapiens
gagtcacttgaactc

SEQ ID NO: 1435851 - DNA, 15 bp, Homo sapiens
agagtcacttgaact

SEQ ID NO: 1435852 - DNA, 15 bp, Homo sapiens
gagagtcacttgaac

SEQ ID NO: 1435853 - DNA, 15 bp, Homo sapiens
ggagagtcacttgaa

SEQ ID NO: 1435854 - DNA, 15 bp, Homo sapiens
aggagagtcacttga

SEQ ID NO: 1435855 - DNA, 15 bp, Homo sapiens
caggagagtcacttg

SEQ ID NO: 1435856 - DNA, 15 bp, Homo sapiens
gcaggagagtcactt

SEQ ID NO: 1435857 - DNA, 15 bp, Homo sapiens
cgcaggagagtcact

SEQ ID NO: 1435858 - DNA, 15 bp, Homo sapiens
acgcaggagagtcac

SEQ ID NO: 1435859 - DNA, 15 bp, Homo sapiens
gacgcaggagagtca

SEQ ID NO: 1435860 - DNA, 15 bp, Homo sapiens
tgacgcaggagagtc

SEQ ID NO: 1435861 - DNA, 15 bp, Homo sapiens
ctgacgcaggagagt

SEQ ID NO: 1435862 - DNA, 15 bp, Homo sapiens
gctgacgcaggagag

SEQ ID NO: 1435863 - DNA, 15 bp, Homo sapiens
aggaggctgacgcag

SEQ ID NO: 1435864 - DNA, 15 bp, Homo sapiens
caggaggctgacgca

SEQ ID NO: 1435865 - DNA, 15 bp, Homo sapiens
tcaggaggctgacgc

SEQ ID NO: 1435866 - DNA, 15 bp, Homo sapiens
ctcaggaggctgacg

SEQ ID NO: 1435867 - DNA, 15 bp, Homo sapiens
actcaggaggctgac

SEQ ID NO: 1435868 - DNA, 15 bp, Homo sapiens
atctcagctactcag

SEQ ID NO: 1435869 - DNA, 15 bp, Homo sapiens
aatctcagctactca

SEQ ID NO: 1435870 - DNA, 15 bp, Homo sapiens
taatctcagctactc

SEQ ID NO: 1435871 - DNA, 15 bp, Homo sapiens
gtaatctcagctact

SEQ ID NO: 1435872 - DNA, 15 bp, Homo sapiens
tgtaatctcagctac

SEQ ID NO: 1435873 - DNA, 15 bp, Homo sapiens
ctgtaatctcagcta

SEQ ID NO: 1435874 - DNA, 15 bp, Homo sapiens
cctgtaatctcagct

SEQ ID NO: 1435875 - DNA, 15 bp, Homo sapiens
gcatgcctgtaatct

SEQ ID NO: 1435876 - DNA, 15 bp, Homo sapiens
gtggtggtgcatgcc

SEQ ID NO: 1435877 - DNA, 15 bp, Homo sapiens
tgtggtggtgcatgc

SEQ ID NO: 1435878 - DNA, 15 bp, Homo sapiens
gtgtggtggtgcatg

SEQ ID NO: 1435879 - DNA, 15 bp, Homo sapiens
ggtgtggtggtgcat

SEQ ID NO: 1435880 - DNA, 15 bp, Homo sapiens
aaaaaaaattagctg

SEQ ID NO: 1435881 - DNA, 15 bp, Homo sapiens
aaaaaaaaattagct

SEQ ID NO: 1435882 - DNA, 15 bp, Homo sapiens
gaaaaaaaaattagc

SEQ ID NO: 1435883 - DNA, 15 bp, Homo sapiens
agaaaaaaaaattag

SEQ ID NO: 1435884 - DNA, 15 bp, Homo sapiens
cagaaaaaaaaatta

SEQ ID NO: 1435885 - DNA, 15 bp, Homo sapiens
acagaaaaaaaaatt

SEQ ID NO: 1435886 - DNA, 15 bp, Homo sapiens
tacagaaaaaaaaat

SEQ ID NO: 1435887 - DNA, 15 bp, Homo sapiens
atacagaaaaaaaaa

SEQ ID NO: 1435888 - DNA, 15 bp, Homo sapiens
aatacagaaaaaaaa

SEQ ID NO: 1435889 - DNA, 15 bp, Homo sapiens
caatacagaaaaaaa

SEQ ID NO: 1435890 - DNA, 15 bp, Homo sapiens
ccaatacagaaaaaa

SEQ ID NO: 1435891 - DNA, 15 bp, Homo sapiens
accaatacagaaaaa

SEQ ID NO: 1435892 - DNA, 15 bp, Homo sapiens
taccaatacagaaaa

SEQ ID NO: 1435893 - DNA, 15 bp, Homo sapiens
ctaccaatacagaaa

SEQ ID NO: 1435894 - DNA, 15 bp, Homo sapiens
actaccaatacagaa

SEQ ID NO: 1435895 - DNA, 15 bp, Homo sapiens
tactaccaatacaga

SEQ ID NO: 1435896 - DNA, 15 bp, Homo sapiens
ctactaccaatacag

SEQ ID NO: 1435897 - DNA, 15 bp, Homo sapiens
tctactaccaataca

SEQ ID NO: 1435898 - DNA, 15 bp, Homo sapiens
ctctactaccaatac

SEQ ID NO: 1435899 - DNA, 15 bp, Homo sapiens
tctctactaccaata

SEQ ID NO: 1435900 - DNA, 15 bp, Homo sapiens
gtctctactaccaat

SEQ ID NO: 1435901 - DNA, 15 bp, Homo sapiens
tgtctctactaccaa

SEQ ID NO: 1435902 - DNA, 15 bp, Homo sapiens
ctgtctctactacca

SEQ ID NO: 1435903 - DNA, 15 bp, Homo sapiens
cctgtctctactacc

SEQ ID NO: 1435904 - DNA, 15 bp, Homo sapiens
ccctgtctctactac

SEQ ID NO: 1435905 - DNA, 15 bp, Homo sapiens
accaacatgatgaaa

SEQ ID NO: 1435906 - DNA, 15 bp, Homo sapiens
gaccaacatgatgaa

SEQ ID NO: 1435907 - DNA, 15 bp, Homo sapiens
tgaccaacatgatga

SEQ ID NO: 1435908 - DNA, 15 bp, Homo sapiens
ctgaccaacatgatg

SEQ ID NO: 1435909 - DNA, 15 bp, Homo sapiens
cctgaccaacatgat

SEQ ID NO: 1435910 - DNA, 15 bp, Homo sapiens
gcctgaccaacatga

SEQ ID NO: 1435911 - DNA, 15 bp, Homo sapiens
agatcatttgaggtc

SEQ ID NO: 1435912 - DNA, 15 bp, Homo sapiens
cagatcatttgaggt

SEQ ID NO: 1435913 - DNA, 15 bp, Homo sapiens
gcagatcatttgagg

SEQ ID NO: 1435914 - DNA, 15 bp, Homo sapiens
ggcagatcatttgag

SEQ ID NO: 1435915 - DNA, 15 bp, Homo sapiens
aggcagatcatttga

SEQ ID NO: 1435916 - DNA, 15 bp, Homo sapiens
caggcagatcatttg

SEQ ID NO: 1435917 - DNA, 15 bp, Homo sapiens
gcaggcagatcattt

SEQ ID NO: 1435918 - DNA, 15 bp, Homo sapiens
ggcaggcagatcatt

SEQ ID NO: 1435919 - DNA, 15 bp, Homo sapiens
tagcactttgggagg

SEQ ID NO: 1435920 - DNA, 15 bp, Homo sapiens
ttagcactttgggag

SEQ ID NO: 1435921 - DNA, 15 bp, Homo sapiens
cttagcactttggga

SEQ ID NO: 1435922 - DNA, 15 bp, Homo sapiens
tcttagcactttggg

SEQ ID NO: 1435923 - DNA, 15 bp, Homo sapiens
atcttagcactttgg

SEQ ID NO: 1435924 - DNA, 15 bp, Homo sapiens
aatcttagcactttg

SEQ ID NO: 1435925 - DNA, 15 bp, Homo sapiens
taatcttagcacttt

SEQ ID NO: 1435926 - DNA, 15 bp, Homo sapiens
gtaatcttagcactt

SEQ ID NO: 1435927 - DNA, 15 bp, Homo sapiens
tgtaatcttagcact

SEQ ID NO: 1435928 - DNA, 15 bp, Homo sapiens
ttgtaatcttagcac

SEQ ID NO: 1435929 - DNA, 15 bp, Homo sapiens
cttgtaatcttagca

SEQ ID NO: 1435930 - DNA, 15 bp, Homo sapiens
gcttgtaatcttagc

SEQ ID NO: 1435931 - DNA, 15 bp, Homo sapiens
tgcttgtaatcttag

SEQ ID NO: 1435932 - DNA, 15 bp, Homo sapiens
atgcttgtaatctta

SEQ ID NO: 1435933 - DNA, 15 bp, Homo sapiens
catgcttgtaatctt

SEQ ID NO: 1435934 - DNA, 15 bp, Homo sapiens
tcatgcttgtaatct

SEQ ID NO: 1435935 - DNA, 15 bp, Homo sapiens
cggtggctcatgctt

SEQ ID NO: 1435936 - DNA, 15 bp, Homo sapiens
gcggtggctcatgct

SEQ ID NO: 1435937 - DNA, 15 bp, Homo sapiens
aaggccgggcgcggt

SEQ ID NO: 1435938 - DNA, 15 bp, Homo sapiens
gaaggccgggcgcgg

SEQ ID NO: 1435939 - DNA, 15 bp, Homo sapiens
tgaaggccgggcgcg

SEQ ID NO: 1435940 - DNA, 15 bp, Homo sapiens
ttgaaggccgggcgc

SEQ ID NO: 1435941 - DNA, 15 bp, Homo sapiens
cttgaaggccgggcg

SEQ ID NO: 1435942 - DNA, 15 bp, Homo sapiens
gcttgaaggccgggc

SEQ ID NO: 1435943 - DNA, 15 bp, Homo sapiens
agcttgaaggccggg

SEQ ID NO: 1435944 - DNA, 15 bp, Homo sapiens
gagcttgaaggccgg

SEQ ID NO: 1435945 - DNA, 15 bp, Homo sapiens
agagcttgaaggccg

SEQ ID NO: 1435946 - DNA, 15 bp, Homo sapiens
tagagcttgaaggcc

SEQ ID NO: 1435947 - DNA, 15 bp, Homo sapiens
gtagagcttgaaggc

SEQ ID NO: 1435948 - DNA, 15 bp, Homo sapiens
agtagagcttgaagg

SEQ ID NO: 1435949 - DNA, 15 bp, Homo sapiens
tagaagtagagcttg

SEQ ID NO: 1435950 - DNA, 15 bp, Homo sapiens
ttagaagtagagctt

SEQ ID NO: 1435951 - DNA, 15 bp, Homo sapiens
attagaagtagagct

SEQ ID NO: 1435952 - DNA, 15 bp, Homo sapiens
aattagaagtagagc

SEQ ID NO: 1435953 - DNA, 15 bp, Homo sapiens
gaattagaagtagag

SEQ ID NO: 1435954 - DNA, 15 bp, Homo sapiens
agaattagaagtaga

SEQ ID NO: 1435955 - DNA, 15 bp, Homo sapiens
tagaattagaagtag

SEQ ID NO: 1435956 - DNA, 15 bp, Homo sapiens
aactagaattagaag

SEQ ID NO: 1435957 - DNA, 15 bp, Homo sapiens
gaactagaattagaa

SEQ ID NO: 1435958 - DNA, 15 bp, Homo sapiens
agaactagaattaga

SEQ ID NO: 1435959 - DNA, 15 bp, Homo sapiens
aagaactagaattag

SEQ ID NO: 1435960 - DNA, 15 bp, Homo sapiens
aaagaactagaatta

SEQ ID NO: 1435961 - DNA, 15 bp, Homo sapiens
gaaagaactagaatt

SEQ ID NO: 1435962 - DNA, 15 bp, Homo sapiens
ggaaagaactagaat

SEQ ID NO: 1435963 - DNA, 15 bp, Homo sapiens
aggaaagaactagaa

SEQ ID NO: 1435964 - DNA, 15 bp, Homo sapiens
taggaaagaactaga

SEQ ID NO: 1435965 - DNA, 15 bp, Homo sapiens
ataggaaagaactag

SEQ ID NO: 1435966 - DNA, 15 bp, Homo sapiens
aataggaaagaacta

SEQ ID NO: 1435967 - DNA, 15 bp, Homo sapiens
aaataggaaagaact

SEQ ID NO: 1435968 - DNA, 15 bp, Homo sapiens
gaaataggaaagaac

SEQ ID NO: 1435969 - DNA, 15 bp, Homo sapiens
tagaaataggaaaga

SEQ ID NO: 1435970 - DNA, 15 bp, Homo sapiens
gtagaaataggaaag

SEQ ID NO: 1435971 - DNA, 15 bp, Homo sapiens
ggtagaaataggaaa

SEQ ID NO: 1435972 - DNA, 15 bp, Homo sapiens
tggtagaaataggaa

SEQ ID NO: 1435973 - DNA, 15 bp, Homo sapiens
gtggtagaaatagga

SEQ ID NO: 1435974 - DNA, 15 bp, Homo sapiens
tgtggtagaaatagg

SEQ ID NO: 1435975 - DNA, 15 bp, Homo sapiens
atgtggtagaaatag

SEQ ID NO: 1435976 - DNA, 15 bp, Homo sapiens
gatgtggtagaaata

SEQ ID NO: 1435977 - DNA, 15 bp, Homo sapiens
agatgtggtagaaat

SEQ ID NO: 1435978 - DNA, 15 bp, Homo sapiens
cagatgtggtagaaa

SEQ ID NO: 1435979 - DNA, 15 bp, Homo sapiens
acagatgtggtagaa

SEQ ID NO: 1435980 - DNA, 15 bp, Homo sapiens
tacagatgtggtaga

SEQ ID NO: 1435981 - DNA, 15 bp, Homo sapiens
ctacagatgtggtag

SEQ ID NO: 1435982 - DNA, 15 bp, Homo sapiens
actacagatgtggta

SEQ ID NO: 1435983 - DNA, 15 bp, Homo sapiens
aactacagatgtggt

SEQ ID NO: 1435984 - DNA, 15 bp, Homo sapiens
taactacagatgtgg

SEQ ID NO: 1435985 - DNA, 15 bp, Homo sapiens
gtaactacagatgtg

SEQ ID NO: 1435986 - DNA, 15 bp, Homo sapiens
agtaactacagatgt

SEQ ID NO: 1435987 - DNA, 15 bp, Homo sapiens
aagtaactacagatg

SEQ ID NO: 1435988 - DNA, 15 bp, Homo sapiens
aaagtaactacagat

SEQ ID NO: 1435989 - DNA, 15 bp, Homo sapiens
gaaagtaactacaga

SEQ ID NO: 1435990 - DNA, 15 bp, Homo sapiens
agaaagtaactacag

SEQ ID NO: 1435991 - DNA, 15 bp, Homo sapiens
gagaaagtaactaca

SEQ ID NO: 1435992 - DNA, 15 bp, Homo sapiens
ggagaaagtaactac

SEQ ID NO: 1435993 - DNA, 15 bp, Homo sapiens
tggagaaagtaacta

SEQ ID NO: 1435994 - DNA, 15 bp, Homo sapiens
atggagaaagtaact

SEQ ID NO: 1435995 - DNA, 15 bp, Homo sapiens
aatggagaaagtaac

SEQ ID NO: 1435996 - DNA, 15 bp, Homo sapiens
caatggagaaagtaa

SEQ ID NO: 1435997 - DNA, 15 bp, Homo sapiens
tcaatggagaaagta

SEQ ID NO: 1435998 - DNA, 15 bp, Homo sapiens
atcaatggagaaagt

SEQ ID NO: 1435999 - DNA, 15 bp, Homo sapiens
catcaatggagaaag

SEQ ID NO: 1436000 - DNA, 15 bp, Homo sapiens
acatcaatggagaaa

SEQ ID NO: 1436001 - DNA, 15 bp, Homo sapiens
gacatcaatggagaa

SEQ ID NO: 1436002 - DNA, 15 bp, Homo sapiens
agacatcaatggaga

SEQ ID NO: 1436003 - DNA, 15 bp, Homo sapiens
aagacatcaatggag

SEQ ID NO: 1436004 - DNA, 15 bp, Homo sapiens
caagacatcaatgga

SEQ ID NO: 1436005 - DNA, 15 bp, Homo sapiens
tcaagacatcaatgg

SEQ ID NO: 1436006 - DNA, 15 bp, Homo sapiens
ttcaagacatcaatg

SEQ ID NO: 1436007 - DNA, 15 bp, Homo sapiens
gttcaagacatcaat

SEQ ID NO: 1436008 - DNA, 15 bp, Homo sapiens
tgttcaagacatcaa

SEQ ID NO: 1436009 - DNA, 15 bp, Homo sapiens
gtgttcaagacatca

SEQ ID NO: 1436010 - DNA, 15 bp, Homo sapiens
ggtgttcaagacatc

SEQ ID NO: 1436011 - DNA, 15 bp, Homo sapiens
tggtgttcaagacat

SEQ ID NO: 1436012 - DNA, 15 bp, Homo sapiens
gtggtgttcaagaca

SEQ ID NO: 1436013 - DNA, 15 bp, Homo sapiens
tgtggtgttcaagac

SEQ ID NO: 1436014 - DNA, 15 bp, Homo sapiens
ttgtggtgttcaaga

SEQ ID NO: 1436015 - DNA, 15 bp, Homo sapiens
cttgtggtgttcaag

SEQ ID NO: 1436016 - DNA, 15 bp, Homo sapiens
acttgtggtgttcaa

SEQ ID NO: 1436017 - DNA, 15 bp, Homo sapiens
gacttgtggtgttca

SEQ ID NO: 1436018 - DNA, 15 bp, Homo sapiens
tgacttgtggtgttc

SEQ ID NO: 1436019 - DNA, 15 bp, Homo sapiens
atgacttgtggtgtt

SEQ ID NO: 1436020 - DNA, 15 bp, Homo sapiens
gatgacttgtggtgt

SEQ ID NO: 1436021 - DNA, 15 bp, Homo sapiens
ggatgacttgtggtg

SEQ ID NO: 1436022 - DNA, 15 bp, Homo sapiens
tggatgacttgtggt

SEQ ID NO: 1436023 - DNA, 15 bp, Homo sapiens
atggatgacttgtgg

SEQ ID NO: 1436024 - DNA, 15 bp, Homo sapiens
catggatgacttgtg

SEQ ID NO: 1436025 - DNA, 15 bp, Homo sapiens
tcatggatgacttgt

SEQ ID NO: 1436026 - DNA, 15 bp, Homo sapiens
ctcatggatgacttg

SEQ ID NO: 1436027 - DNA, 15 bp, Homo sapiens
cctcatggatgactt

SEQ ID NO: 1436028 - DNA, 15 bp, Homo sapiens
ccctcatggatgact

SEQ ID NO: 1436029 - DNA, 15 bp, Homo sapiens
accctcatggatgac

SEQ ID NO: 1436030 - DNA, 15 bp, Homo sapiens
aaccctcatggatga

SEQ ID NO: 1436031 - DNA, 15 bp, Homo sapiens
caaccctcatggatg

SEQ ID NO: 1436032 - DNA, 15 bp, Homo sapiens
ccaaccctcatggat

SEQ ID NO: 1436033 - DNA, 15 bp, Homo sapiens
tccaaccctcatgga

SEQ ID NO: 1436034 - DNA, 15 bp, Homo sapiens
ttccaaccctcatgg

SEQ ID NO: 1436035 - DNA, 15 bp, Homo sapiens
attccaaccctcatg

SEQ ID NO: 1436036 - DNA, 15 bp, Homo sapiens
gattccaaccctcat

SEQ ID NO: 1436037 - DNA, 15 bp, Homo sapiens
tgattccaaccctca

SEQ ID NO: 1436038 - DNA, 15 bp, Homo sapiens
ttgattccaaccctc

SEQ ID NO: 1436039 - DNA, 15 bp, Homo sapiens
gttgattccaaccct

SEQ ID NO: 1436040 - DNA, 15 bp, Homo sapiens
agttgattccaaccc

SEQ ID NO: 1436041 - DNA, 15 bp, Homo sapiens
aagttgattccaacc

SEQ ID NO: 1436042 - DNA, 15 bp, Homo sapiens
gaagttgattccaac

SEQ ID NO: 1436043 - DNA, 15 bp, Homo sapiens
agaagttgattccaa

SEQ ID NO: 1436044 - DNA, 15 bp, Homo sapiens
aagaagttgattcca

SEQ ID NO: 1436045 - DNA, 15 bp, Homo sapiens
gaagaagttgattcc

SEQ ID NO: 1436046 - DNA, 15 bp, Homo sapiens
ggaagaagttgattc

SEQ ID NO: 1436047 - DNA, 15 bp, Homo sapiens
tggaagaagttgatt

SEQ ID NO: 1436048 - DNA, 15 bp, Homo sapiens
ttggaagaagttgat

SEQ ID NO: 1436049 - DNA, 15 bp, Homo sapiens
tttggaagaagttga

SEQ ID NO: 1436050 - DNA, 15 bp, Homo sapiens
gtttggaagaagttg

SEQ ID NO: 1436051 - DNA, 15 bp, Homo sapiens
agtttggaagaagtt

SEQ ID NO: 1436052 - DNA, 15 bp, Homo sapiens
gagtttggaagaagt

SEQ ID NO: 1436053 - DNA, 15 bp, Homo sapiens
ggagtttggaagaag

SEQ ID NO: 1436054 - DNA, 15 bp, Homo sapiens
aggagtttggaagaa

SEQ ID NO: 1436055 - DNA, 15 bp, Homo sapiens
taggagtttggaaga

SEQ ID NO: 1436056 - DNA, 15 bp, Homo sapiens
ataggagtttggaag

SEQ ID NO: 1436057 - DNA, 15 bp, Homo sapiens
tataggagtttggaa

SEQ ID NO: 1436058 - DNA, 15 bp, Homo sapiens
ttataggagtttgga

SEQ ID NO: 1436059 - DNA, 15 bp, Homo sapiens
attataggagtttgg

SEQ ID NO: 1436060 - DNA, 15 bp, Homo sapiens
cattataggagtttg

SEQ ID NO: 1436061 - DNA, 15 bp, Homo sapiens
acattataggagttt

SEQ ID NO: 1436062 - DNA, 15 bp, Homo sapiens
aacattataggagtt

SEQ ID NO: 1436063 - DNA, 15 bp, Homo sapiens
taacattataggagt

SEQ ID NO: 1436064 - DNA, 15 bp, Homo sapiens
ataacattataggag

SEQ ID NO: 1436065 - DNA, 15 bp, Homo sapiens
aataacattatagga

SEQ ID NO: 1436066 - DNA, 15 bp, Homo sapiens
aaataacattatagg

SEQ ID NO: 1436067 - DNA, 15 bp, Homo sapiens
aaaataacattatag

SEQ ID NO: 1436068 - DNA, 15 bp, Homo sapiens
taaaataacattata

SEQ ID NO: 1436069 - DNA, 15 bp, Homo sapiens
ttaaaataacattat

SEQ ID NO: 1436070 - DNA, 15 bp, Homo sapiens
gttaaaataacatta

SEQ ID NO: 1436071 - DNA, 15 bp, Homo sapiens
ggttaaaataacatt

SEQ ID NO: 1436072 - DNA, 15 bp, Homo sapiens
aggttaaaataacat

SEQ ID NO: 1436073 - DNA, 15 bp, Homo sapiens
gaggttaaaataaca

SEQ ID NO: 1436074 - DNA, 15 bp, Homo sapiens
ggaggttaaaataac

SEQ ID NO: 1436075 - DNA, 15 bp, Homo sapiens
cggaggttaaaataa

SEQ ID NO: 1436076 - DNA, 15 bp, Homo sapiens
acggaggttaaaata

SEQ ID NO: 1436077 - DNA, 15 bp, Homo sapiens
aacggaggttaaaat

SEQ ID NO: 1436078 - DNA, 15 bp, Homo sapiens
gaacggaggttaaaa

SEQ ID NO: 1436079 - DNA, 15 bp, Homo sapiens
tgaacggaggttaaa

SEQ ID NO: 1436080 - DNA, 15 bp, Homo sapiens
atgaacggaggttaa

SEQ ID NO: 1436081 - DNA, 15 bp, Homo sapiens
catgaacggaggtta

SEQ ID NO: 1436082 - DNA, 15 bp, Homo sapiens
tcatgaacggaggtt

SEQ ID NO: 1436083 - DNA, 15 bp, Homo sapiens
atcatgaacggaggt

SEQ ID NO: 1436084 - DNA, 15 bp, Homo sapiens
aatcatgaacggagg

SEQ ID NO: 1436085 - DNA, 15 bp, Homo sapiens
aaatcatgaacggag

SEQ ID NO: 1436086 - DNA, 15 bp, Homo sapiens
taaatcatgaacgga

SEQ ID NO: 1436087 - DNA, 15 bp, Homo sapiens
gtaaatcatgaacgg

SEQ ID NO: 1436088 - DNA, 15 bp, Homo sapiens
agtaaatcatgaacg

SEQ ID NO: 1436089 - DNA, 15 bp, Homo sapiens
tagtaaatcatgaac

SEQ ID NO: 1436090 - DNA, 15 bp, Homo sapiens
ttagtaaatcatgaa

SEQ ID NO: 1436091 - DNA, 15 bp, Homo sapiens
attagtaaatcatga

SEQ ID NO: 1436092 - DNA, 15 bp, Homo sapiens
cattagtaaatcatg

SEQ ID NO: 1436093 - DNA, 15 bp, Homo sapiens
acattagtaaatcat

SEQ ID NO: 1436094 - DNA, 15 bp, Homo sapiens
aacattagtaaatca

SEQ ID NO: 1436095 - DNA, 15 bp, Homo sapiens
gaacattagtaaatc

SEQ ID NO: 1436096 - DNA, 15 bp, Homo sapiens
tgaacattagtaaat

SEQ ID NO: 1436097 - DNA, 15 bp, Homo sapiens
atgaacattagtaaa

SEQ ID NO: 1436098 - DNA, 15 bp, Homo sapiens
tatgaacattagtaa

SEQ ID NO: 1436099 - DNA, 15 bp, Homo sapiens
ttatgaacattagta

SEQ ID NO: 1436100 - DNA, 15 bp, Homo sapiens
attatgaacattagt

SEQ ID NO: 1436101 - DNA, 15 bp, Homo sapiens
cattatgaacattag

SEQ ID NO: 1436102 - DNA, 15 bp, Homo sapiens
ccattatgaacatta

SEQ ID NO: 1436103 - DNA, 15 bp, Homo sapiens
gccattatgaacatt

SEQ ID NO: 1436104 - DNA, 15 bp, Homo sapiens
tgccattatgaacat

SEQ ID NO: 1436105 - DNA, 15 bp, Homo sapiens
atgccattatgaaca

SEQ ID NO: 1436106 - DNA, 15 bp, Homo sapiens
gatgccattatgaac

SEQ ID NO: 1436107 - DNA, 15 bp, Homo sapiens
tgatgccattatgaa

SEQ ID NO: 1436108 - DNA, 15 bp, Homo sapiens
ttgatgccattatga

SEQ ID NO: 1436109 - DNA, 15 bp, Homo sapiens
tttgatgccattatg

SEQ ID NO: 1436110 - DNA, 15 bp, Homo sapiens
atttgatgccattat

SEQ ID NO: 1436111 - DNA, 15 bp, Homo sapiens
aatttgatgccatta

SEQ ID NO: 1436112 - DNA, 15 bp, Homo sapiens
caatttgatgccatt

SEQ ID NO: 1436113 - DNA, 15 bp, Homo sapiens
acaatttgatgccat

SEQ ID NO: 1436114 - DNA, 15 bp, Homo sapiens
aacaatttgatgcca

SEQ ID NO: 1436115 - DNA, 15 bp, Homo sapiens
caacaatttgatgcc

SEQ ID NO: 1436116 - DNA, 15 bp, Homo sapiens
tcaacaatttgatgc

SEQ ID NO: 1436117 - DNA, 15 bp, Homo sapiens
ttcaacaatttgatg

SEQ ID NO: 1436118 - DNA, 15 bp, Homo sapiens
attcaacaatttgat

SEQ ID NO: 1436119 - DNA, 15 bp, Homo sapiens
gattcaacaatttga

SEQ ID NO: 1436120 - DNA, 15 bp, Homo sapiens
ggattcaacaatttg

SEQ ID NO: 1436121 - DNA, 15 bp, Homo sapiens
gggattcaacaattt

SEQ ID NO: 1436122 - DNA, 15 bp, Homo sapiens
agggattcaacaatt

SEQ ID NO: 1436123 - DNA, 15 bp, Homo sapiens
aagggattcaacaat

SEQ ID NO: 1436124 - DNA, 15 bp, Homo sapiens
gaagggattcaacaa

SEQ ID NO: 1436125 - DNA, 15 bp, Homo sapiens
ggaagggattcaaca

SEQ ID NO: 1436126 - DNA, 15 bp, Homo sapiens
tggaagggattcaac

SEQ ID NO: 1436127 - DNA, 15 bp, Homo sapiens
ctggaagggattcaa

SEQ ID NO: 1436128 - DNA, 15 bp, Homo sapiens
tctggaagggattca

SEQ ID NO: 1436129 - DNA, 15 bp, Homo sapiens
ttctggaagggattc

SEQ ID NO: 1436130 - DNA, 15 bp, Homo sapiens
tttctggaagggatt

SEQ ID NO: 1436131 - DNA, 15 bp, Homo sapiens
ctttctggaagggat

SEQ ID NO: 1436132 - DNA, 15 bp, Homo sapiens
actttctggaaggga

SEQ ID NO: 1436133 - DNA, 15 bp, Homo sapiens
aactttctggaaggg

SEQ ID NO: 1436134 - DNA, 15 bp, Homo sapiens
aaactttctggaagg

SEQ ID NO: 1436135 - DNA, 15 bp, Homo sapiens
aaaactttctggaag

SEQ ID NO: 1436136 - DNA, 15 bp, Homo sapiens
aaaaactttctggaa

SEQ ID NO: 1436137 - DNA, 15 bp, Homo sapiens
gaaaaactttctgga

SEQ ID NO: 1436138 - DNA, 15 bp, Homo sapiens
tgaaaaactttctgg

SEQ ID NO: 1436139 - DNA, 15 bp, Homo sapiens
atgaaaaactttctg

SEQ ID NO: 1436140 - DNA, 15 bp, Homo sapiens
aatgaaaaactttct

SEQ ID NO: 1436141 - DNA, 15 bp, Homo sapiens
aaatgaaaaactttc

SEQ ID NO: 1436142 - DNA, 15 bp, Homo sapiens
taaatgaaaaacttt

SEQ ID NO: 1436143 - DNA, 15 bp, Homo sapiens
gtaaatgaaaaactt

SEQ ID NO: 1436144 - DNA, 15 bp, Homo sapiens
agtaaatgaaaaact

SEQ ID NO: 1436145 - DNA, 15 bp, Homo sapiens
aagtaaatgaaaaac

SEQ ID NO: 1436146 - DNA, 15 bp, Homo sapiens
aaagtaaatgaaaaa

SEQ ID NO: 1436147 - DNA, 15 bp, Homo sapiens
caaagtaaatgaaaa

SEQ ID NO: 1436148 - DNA, 15 bp, Homo sapiens
gcaaagtaaatgaaa

SEQ ID NO: 1436149 - DNA, 15 bp, Homo sapiens
ggcaaagtaaatgaa

SEQ ID NO: 1436150 - DNA, 15 bp, Homo sapiens
gggcaaagtaaatga

SEQ ID NO: 1436151 - DNA, 15 bp, Homo sapiens
tgggcaaagtaaatg

SEQ ID NO: 1436152 - DNA, 15 bp, Homo sapiens
ctgggcaaagtaaat

SEQ ID NO: 1436153 - DNA, 15 bp, Homo sapiens
tctgggcaaagtaaa

SEQ ID NO: 1436154 - DNA, 15 bp, Homo sapiens
atctgggcaaagtaa

SEQ ID NO: 1436155 - DNA, 15 bp, Homo sapiens
gatctgggcaaagta

SEQ ID NO: 1436156 - DNA, 15 bp, Homo sapiens
ggatctgggcaaagt

SEQ ID NO: 1436157 - DNA, 15 bp, Homo sapiens
tggatctgggcaaag

SEQ ID NO: 1436158 - DNA, 15 bp, Homo sapiens
atggatctgggcaaa

SEQ ID NO: 1436159 - DNA, 15 bp, Homo sapiens
gatggatctgggcaa

SEQ ID NO: 1436160 - DNA, 15 bp, Homo sapiens
tgatggatctgggca

SEQ ID NO: 1436161 - DNA, 15 bp, Homo sapiens
ctgatggatctgggc

SEQ ID NO: 1436162 - DNA, 15 bp, Homo sapiens
tctgatggatctggg

SEQ ID NO: 1436163 - DNA, 15 bp, Homo sapiens
ctctgatggatctgg

SEQ ID NO: 1436164 - DNA, 15 bp, Homo sapiens
cctctgatggatctg

SEQ ID NO: 1436165 - DNA, 15 bp, Homo sapiens
tcctctgatggatct

SEQ ID NO: 1436166 - DNA, 15 bp, Homo sapiens
ttcctctgatggatc

SEQ ID NO: 1436167 - DNA, 15 bp, Homo sapiens
attcctctgatggat

SEQ ID NO: 1436168 - DNA, 15 bp, Homo sapiens
gattcctctgatgga

SEQ ID NO: 1436169 - DNA, 15 bp, Homo sapiens
tgattcctctgatgg

SEQ ID NO: 1436170 - DNA, 15 bp, Homo sapiens
gtgattcctctgatg

SEQ ID NO: 1436171 - DNA, 15 bp, Homo sapiens
agtgattcctctgat

SEQ ID NO: 1436172 - DNA, 15 bp, Homo sapiens
tagtgattcctctga

SEQ ID NO: 1436173 - DNA, 15 bp, Homo sapiens
atagtgattcctctg

SEQ ID NO: 1436174 - DNA, 15 bp, Homo sapiens
tatagtgattcctct

SEQ ID NO: 1436175 - DNA, 15 bp, Homo sapiens
ctatagtgattcctc

SEQ ID NO: 1436176 - DNA, 15 bp, Homo sapiens
gctatagtgattcct

SEQ ID NO: 1436177 - DNA, 15 bp, Homo sapiens
agctatagtgattcc

SEQ ID NO: 1436178 - DNA, 15 bp, Homo sapiens
tagctatagtgattc

SEQ ID NO: 1436179 - DNA, 15 bp, Homo sapiens
gtagctatagtgatt

SEQ ID NO: 1436180 - DNA, 15 bp, Homo sapiens
tgtagctatagtgat

SEQ ID NO: 1436181 - DNA, 15 bp, Homo sapiens
ctgtagctatagtga

SEQ ID NO: 1436182 - DNA, 15 bp, Homo sapiens
gctgtagctatagtg

SEQ ID NO: 1436183 - DNA, 15 bp, Homo sapiens
agctgtagctatagt

SEQ ID NO: 1436184 - DNA, 15 bp, Homo sapiens
aagctgtagctatag

SEQ ID NO: 1436185 - DNA, 15 bp, Homo sapiens
aaagctgtagctata

SEQ ID NO: 1436186 - DNA, 15 bp, Homo sapiens
taaagctgtagctat

SEQ ID NO: 1436187 - DNA, 15 bp, Homo sapiens
ataaagctgtagcta

SEQ ID NO: 1436188 - DNA, 15 bp, Homo sapiens
cataaagctgtagct

SEQ ID NO: 1436189 - DNA, 15 bp, Homo sapiens
tcataaagctgtagc

SEQ ID NO: 1436190 - DNA, 15 bp, Homo sapiens
ttcataaagctgtag

SEQ ID NO: 1436191 - DNA, 15 bp, Homo sapiens
cttcataaagctgta

SEQ ID NO: 1436192 - DNA, 15 bp, Homo sapiens
acttcataaagctgt

SEQ ID NO: 1436193 - DNA, 15 bp, Homo sapiens
cacttcataaagctg

SEQ ID NO: 1436194 - DNA, 15 bp, Homo sapiens
acacttcataaagct

SEQ ID NO: 1436195 - DNA, 15 bp, Homo sapiens
tacacttcataaagc

SEQ ID NO: 1436196 - DNA, 15 bp, Homo sapiens
atacacttcataaag

SEQ ID NO: 1436197 - DNA, 15 bp, Homo sapiens
aatacacttcataaa

SEQ ID NO: 1436198 - DNA, 15 bp, Homo sapiens
aaatacacttcataa

SEQ ID NO: 1436199 - DNA, 15 bp, Homo sapiens
aaaatacacttcata

SEQ ID NO: 1436200 - DNA, 15 bp, Homo sapiens
aaaaatacacttcat

SEQ ID NO: 1436201 - DNA, 15 bp, Homo sapiens
aaaaaatacacttca

SEQ ID NO: 1436202 - DNA, 15 bp, Homo sapiens
taaaaaatacacttc

SEQ ID NO: 1436203 - DNA, 15 bp, Homo sapiens
ataaaaaatacactt

SEQ ID NO: 1436204 - DNA, 15 bp, Homo sapiens
aataaaaaatacact

SEQ ID NO: 1436205 - DNA, 15 bp, Homo sapiens
aaataaaaaatacac

SEQ ID NO: 1436206 - DNA, 15 bp, Homo sapiens
aaaataaaaaataca

SEQ ID NO: 1436207 - DNA, 15 bp, Homo sapiens
aaaaataaaaaatac

SEQ ID NO: 1436208 - DNA, 15 bp, Homo sapiens
taaaataaaaaataa

SEQ ID NO: 1436209 - DNA, 15 bp, Homo sapiens
ataaaataaaaaata

SEQ ID NO: 1436210 - DNA, 15 bp, Homo sapiens
aataaaataaaaaat

SEQ ID NO: 1436211 - DNA, 15 bp, Homo sapiens
taaataaaataaaaa

SEQ ID NO: 1436212 - DNA, 15 bp, Homo sapiens
ataaataaaataaaa

SEQ ID NO: 1436213 - DNA, 15 bp, Homo sapiens
gtaaataaataaaat

SEQ ID NO: 1436214 - DNA, 15 bp, Homo sapiens
agtaaataaataaaa

SEQ ID NO: 1436215 - DNA, 15 bp, Homo sapiens
aaagtaaataaataa

SEQ ID NO: 1436216 - DNA, 15 bp, Homo sapiens
aaaagtaaataaata

SEQ ID NO: 1436217 - DNA, 15 bp, Homo sapiens
aaaaagtaaataaat

SEQ ID NO: 1436218 - DNA, 15 bp, Homo sapiens
caaaaagtaaataaa

SEQ ID NO: 1436219 - DNA, 15 bp, Homo sapiens
tcaaaaagtaaataa

SEQ ID NO: 1436220 - DNA, 15 bp, Homo sapiens
ctcaaaaagtaaata

SEQ ID NO: 1436221 - DNA, 15 bp, Homo sapiens
tctcaaaaagtaaat

SEQ ID NO: 1436222 - DNA, 15 bp, Homo sapiens
atctcaaaaagtaaa

SEQ ID NO: 1436223 - DNA, 15 bp, Homo sapiens
catctcaaaaagtaa

SEQ ID NO: 1436224 - DNA, 15 bp, Homo sapiens
ccatctcaaaaagta

SEQ ID NO: 1436225 - DNA, 15 bp, Homo sapiens
tccatctcaaaaagt

SEQ ID NO: 1436226 - DNA, 15 bp, Homo sapiens
cagcgagactccatc

SEQ ID NO: 1436227 - DNA, 15 bp, Homo sapiens
acagcgagactccat

SEQ ID NO: 1436228 - DNA, 15 bp, Homo sapiens
cacagcgagactcca

SEQ ID NO: 1436229 - DNA, 15 bp, Homo sapiens
gcacagcgagactcc

SEQ ID NO: 1436230 - DNA, 15 bp, Homo sapiens
ggcacagcgagactc

SEQ ID NO: 1436231 - DNA, 15 bp, Homo sapiens
tggcacagcgagact

SEQ ID NO: 1436232 - DNA, 15 bp, Homo sapiens
gtggcacagcgagac

SEQ ID NO: 1436233 - DNA, 15 bp, Homo sapiens
ggtggcacagcgaga

SEQ ID NO: 1436234 - DNA, 15 bp, Homo sapiens
gggtggcacagcgag

SEQ ID NO: 1436235 - DNA, 15 bp, Homo sapiens
tgggtggcacagcga

SEQ ID NO: 1436236 - DNA, 15 bp, Homo sapiens
ctgggtggcacagcg

SEQ ID NO: 1436237 - DNA, 15 bp, Homo sapiens
cctgggtggcacagc

SEQ ID NO: 1436238 - DNA, 15 bp, Homo sapiens
gcctgggtggcacag

SEQ ID NO: 1436239 - DNA, 15 bp, Homo sapiens
agcctgggtggcaca

SEQ ID NO: 1436240 - DNA, 15 bp, Homo sapiens
gagcctgggtggcac

SEQ ID NO: 1436241 - DNA, 15 bp, Homo sapiens
cgagcctgggtggca

SEQ ID NO: 1436242 - DNA, 15 bp, Homo sapiens
tcgagcctgggtggc

SEQ ID NO: 1436243 - DNA, 15 bp, Homo sapiens
ctcgagcctgggtgg

SEQ ID NO: 1436244 - DNA, 15 bp, Homo sapiens
actcgagcctgggtg

SEQ ID NO: 1436245 - DNA, 15 bp, Homo sapiens
tactcgagcctgggt

SEQ ID NO: 1436246 - DNA, 15 bp, Homo sapiens
gtactcgagcctggg

SEQ ID NO: 1436247 - DNA, 15 bp, Homo sapiens
tgtactcgagcctgg

SEQ ID NO: 1436248 - DNA, 15 bp, Homo sapiens
ttgtactcgagcctg

SEQ ID NO: 1436249 - DNA, 15 bp, Homo sapiens
attgtactcgagcct

SEQ ID NO: 1436250 - DNA, 15 bp, Homo sapiens
cattgtactcgagcc

SEQ ID NO: 1436251 - DNA, 15 bp, Homo sapiens
ccattgtactcgagc

SEQ ID NO: 1436252 - DNA, 15 bp, Homo sapiens
accattgtactcgag

SEQ ID NO: 1436253 - DNA, 15 bp, Homo sapiens
caccattgtactcga

SEQ ID NO: 1436254 - DNA, 15 bp, Homo sapiens
acaccattgtactcg

SEQ ID NO: 1436255 - DNA, 15 bp, Homo sapiens
cacaccattgtactc

SEQ ID NO: 1436256 - DNA, 15 bp, Homo sapiens
ccacaccattgtact

SEQ ID NO: 1436257 - DNA, 15 bp, Homo sapiens
accacaccattgtac

SEQ ID NO: 1436258 - DNA, 15 bp, Homo sapiens
gaccacaccattgta

SEQ ID NO: 1436259 - DNA, 15 bp, Homo sapiens
agaccacaccattgt

SEQ ID NO: 1436260 - DNA, 15 bp, Homo sapiens
aagaccacaccattg

SEQ ID NO: 1436261 - DNA, 15 bp, Homo sapiens
caagaccacaccatt

SEQ ID NO: 1436262 - DNA, 15 bp, Homo sapiens
ccaagaccacaccat

SEQ ID NO: 1436263 - DNA, 15 bp, Homo sapiens
gccaagaccacacca

SEQ ID NO: 1436264 - DNA, 15 bp, Homo sapiens
agccaagaccacacc

SEQ ID NO: 1436265 - DNA, 15 bp, Homo sapiens
gagccaagaccacac

SEQ ID NO: 1436266 - DNA, 15 bp, Homo sapiens
cgagccaagaccaca

SEQ ID NO: 1436267 - DNA, 15 bp, Homo sapiens
gcgagccaagaccac

SEQ ID NO: 1436268 - DNA, 15 bp, Homo sapiens
agcgagccaagacca

SEQ ID NO: 1436269 - DNA, 15 bp, Homo sapiens
aagcgagccaagacc

SEQ ID NO: 1436270 - DNA, 15 bp, Homo sapiens
gaagcgagccaagac

SEQ ID NO: 1436271 - DNA, 15 bp, Homo sapiens
tgaagcgagccaaga

SEQ ID NO: 1436272 - DNA, 15 bp, Homo sapiens
gtgaagcgagccaag

SEQ ID NO: 1436273 - DNA, 15 bp, Homo sapiens
ggtgaagcgagccaa

SEQ ID NO: 1436274 - DNA, 15 bp, Homo sapiens
gggtgaagcgagcca

SEQ ID NO: 1436275 - DNA, 15 bp, Homo sapiens
agggtgaagcgagcc

SEQ ID NO: 1436276 - DNA, 15 bp, Homo sapiens
gagggtgaagcgagc

SEQ ID NO: 1436277 - DNA, 15 bp, Homo sapiens
agagggtgaagcgag

SEQ ID NO: 1436278 - DNA, 15 bp, Homo sapiens
cagagggtgaagcga

SEQ ID NO: 1436279 - DNA, 15 bp, Homo sapiens
gcagagggtgaagcg

SEQ ID NO: 1436280 - DNA, 15 bp, Homo sapiens
ggcagagggtgaagc

SEQ ID NO: 1436281 - DNA, 15 bp, Homo sapiens
aggcagagggtgaag

SEQ ID NO: 1436282 - DNA, 15 bp, Homo sapiens
gaggcagagggtgaa

SEQ ID NO: 1436283 - DNA, 15 bp, Homo sapiens
ggaggcagagggtga

SEQ ID NO: 1436284 - DNA, 15 bp, Homo sapiens
aggaggcagagggtg

SEQ ID NO: 1436285 - DNA, 15 bp, Homo sapiens
caggaggcagagggt

SEQ ID NO: 1436286 - DNA, 15 bp, Homo sapiens
ccaggaggcagaggg

SEQ ID NO: 1436287 - DNA, 15 bp, Homo sapiens
actgtagtcccagct

SEQ ID NO: 1436288 - DNA, 15 bp, Homo sapiens
aactgtagtcccagc

SEQ ID NO: 1436289 - DNA, 15 bp, Homo sapiens
caactgtagtcccag

SEQ ID NO: 1436290 - DNA, 15 bp, Homo sapiens
gcaactgtagtccca

SEQ ID NO: 1436291 - DNA, 15 bp, Homo sapiens
gtgcaactgtagtcc

SEQ ID NO: 1436292 - DNA, 15 bp, Homo sapiens
cgtgcaactgtagtc

SEQ ID NO: 1436293 - DNA, 15 bp, Homo sapiens
gcgtgcaactgtagt

SEQ ID NO: 1436294 - DNA, 15 bp, Homo sapiens
ggcgtgcaactgtag

SEQ ID NO: 1436295 - DNA, 15 bp, Homo sapiens
tggcgtgcaactgta

SEQ ID NO: 1436296 - DNA, 15 bp, Homo sapiens
gtggcgtgcaactgt

SEQ ID NO: 1436297 - DNA, 15 bp, Homo sapiens
ggtggcgtgcaactg

SEQ ID NO: 1436298 - DNA, 15 bp, Homo sapiens
tggtggcgtgcaact

SEQ ID NO: 1436299 - DNA, 15 bp, Homo sapiens
atggtggcgtgcaac

SEQ ID NO: 1436300 - DNA, 15 bp, Homo sapiens
catggtggcgtgcaa

SEQ ID NO: 1436301 - DNA, 15 bp, Homo sapiens
gggcatggtggcgtg

SEQ ID NO: 1436302 - DNA, 15 bp, Homo sapiens
cgggcatggtggcgt

SEQ ID NO: 1436303 - DNA, 15 bp, Homo sapiens
ccgggcatggtggcg

SEQ ID NO: 1436304 - DNA, 15 bp, Homo sapiens
gccttgtctctacta

SEQ ID NO: 1436305 - DNA, 15 bp, Homo sapiens
agccttgtctctact

SEQ ID NO: 1436306 - DNA, 15 bp, Homo sapiens
tgaagccttgtctct

SEQ ID NO: 1436307 - DNA, 15 bp, Homo sapiens
gtgaagccttgtctc

SEQ ID NO: 1436308 - DNA, 15 bp, Homo sapiens
ggtgaagccttgtct

SEQ ID NO: 1436309 - DNA, 15 bp, Homo sapiens
tggtgaagccttgtc

SEQ ID NO: 1436310 - DNA, 15 bp, Homo sapiens
atggtgaagccttgt

SEQ ID NO: 1436311 - DNA, 15 bp, Homo sapiens
catggtgaagccttg

SEQ ID NO: 1436312 - DNA, 15 bp, Homo sapiens
acatggtgaagcctt

SEQ ID NO: 1436313 - DNA, 15 bp, Homo sapiens
aacatggtgaagcct

SEQ ID NO: 1436314 - DNA, 15 bp, Homo sapiens
aagaccagcctgatc

SEQ ID NO: 1436315 - DNA, 15 bp, Homo sapiens
caagaccagcctgat

SEQ ID NO: 1436316 - DNA, 15 bp, Homo sapiens
gaatcacttgaggtc

SEQ ID NO: 1436317 - DNA, 15 bp, Homo sapiens
tgaatcacttgaggt

SEQ ID NO: 1436318 - DNA, 15 bp, Homo sapiens
gtgaatcacttgagg

SEQ ID NO: 1436319 - DNA, 15 bp, Homo sapiens
ggtgaatcacttgag

SEQ ID NO: 1436320 - DNA, 15 bp, Homo sapiens
gggtgaatcacttga

SEQ ID NO: 1436321 - DNA, 15 bp, Homo sapiens
tgggtgaatcacttg

SEQ ID NO: 1436322 - DNA, 15 bp, Homo sapiens
atgggtgaatcactt

SEQ ID NO: 1436323 - DNA, 15 bp, Homo sapiens
gatgggtgaatcact

SEQ ID NO: 1436324 - DNA, 15 bp, Homo sapiens
agatgggtgaatcac

SEQ ID NO: 1436325 - DNA, 15 bp, Homo sapiens
gagatgggtgaatca

SEQ ID NO: 1436326 - DNA, 15 bp, Homo sapiens
cgagatgggtgaatc

SEQ ID NO: 1436327 - DNA, 15 bp, Homo sapiens
ccgagatgggtgaat

SEQ ID NO: 1436328 - DNA, 15 bp, Homo sapiens
gccgagatgggtgaa

SEQ ID NO: 1436329 - DNA, 15 bp, Homo sapiens
ggccgagatgggtga

SEQ ID NO: 1436330 - DNA, 15 bp, Homo sapiens
aggccgagatgggtg

SEQ ID NO: 1436331 - DNA, 15 bp, Homo sapiens
gaggccgagatgggt

SEQ ID NO: 1436332 - DNA, 15 bp, Homo sapiens
ggaggccgagatggg

SEQ ID NO: 1436333 - DNA, 15 bp, Homo sapiens
gggaggccgagatgg

SEQ ID NO: 1436334 - DNA, 15 bp, Homo sapiens
tgggaggccgagatg

SEQ ID NO: 1436335 - DNA, 15 bp, Homo sapiens
ttgggaggccgagat

SEQ ID NO: 1436336 - DNA, 15 bp, Homo sapiens
tttgggaggccgaga

SEQ ID NO: 1436337 - DNA, 15 bp, Homo sapiens
tggtggcttacacct

SEQ ID NO: 1436338 - DNA, 15 bp, Homo sapiens
gtggtggcttacacc

SEQ ID NO: 1436339 - DNA, 15 bp, Homo sapiens
gtgtggtggcttaca

SEQ ID NO: 1436340 - DNA, 15 bp, Homo sapiens
ggtgtggtggcttac

SEQ ID NO: 1436341 - DNA, 15 bp, Homo sapiens
gggtgtggtggctta

SEQ ID NO: 1436342 - DNA, 15 bp, Homo sapiens
tgggtgtggtggctt

SEQ ID NO: 1436343 - DNA, 15 bp, Homo sapiens
gggctgggtgtggtg

SEQ ID NO: 1436344 - DNA, 15 bp, Homo sapiens
tgggctgggtgtggt

SEQ ID NO: 1436345 - DNA, 15 bp, Homo sapiens
ttgggctgggtgtgg

SEQ ID NO: 1436346 - DNA, 15 bp, Homo sapiens
tttgggctgggtgtg

SEQ ID NO: 1436347 - DNA, 15 bp, Homo sapiens
ctttgggctgggtgt

SEQ ID NO: 1436348 - DNA, 15 bp, Homo sapiens
actttgggctgggtg

SEQ ID NO: 1436349 - DNA, 15 bp, Homo sapiens
cactttgggctgggt

SEQ ID NO: 1436350 - DNA, 15 bp, Homo sapiens
acactttgggctggg

SEQ ID NO: 1436351 - DNA, 15 bp, Homo sapiens
tacactttgggctgg

SEQ ID NO: 1436352 - DNA, 15 bp, Homo sapiens
atacactttgggctg

SEQ ID NO: 1436353 - DNA, 15 bp, Homo sapiens
aatacactttgggct

SEQ ID NO: 1436354 - DNA, 15 bp, Homo sapiens
aaatacactttgggc

SEQ ID NO: 1436355 - DNA, 15 bp, Homo sapiens
aaaatacactttggg

SEQ ID NO: 1436356 - DNA, 15 bp, Homo sapiens
aaaaatacactttgg

SEQ ID NO: 1436357 - DNA, 15 bp, Homo sapiens
aaaaaatacactttg

SEQ ID NO: 1436358 - DNA, 15 bp, Homo sapiens
taaaaaatacacttt

SEQ ID NO: 1436359 - DNA, 15 bp, Homo sapiens
ttaaaaaatacactt

SEQ ID NO: 1436360 - DNA, 15 bp, Homo sapiens
tttaaaaaatacact

SEQ ID NO: 1436361 - DNA, 15 bp, Homo sapiens
atttaaaaaatacac

SEQ ID NO: 1436362 - DNA, 15 bp, Homo sapiens
tatttaaaaaataca

SEQ ID NO: 1436363 - DNA, 15 bp, Homo sapiens
ttatttaaaaaatac

SEQ ID NO: 1436364 - DNA, 15 bp, Homo sapiens
attatttaaaaaata

SEQ ID NO: 1436365 - DNA, 15 bp, Homo sapiens
tattatttaaaaaat

SEQ ID NO: 1436366 - DNA, 15 bp, Homo sapiens
ttattatttaaaaaa

SEQ ID NO: 1436367 - DNA, 15 bp, Homo sapiens
cttattatttaaaaa

SEQ ID NO: 1436368 - DNA, 15 bp, Homo sapiens
tcttattatttaaaa

SEQ ID NO: 1436369 - DNA, 15 bp, Homo sapiens
gtcttattatttaaa

SEQ ID NO: 1436370 - DNA, 15 bp, Homo sapiens
tgtcttattatttaa

SEQ ID NO: 1436371 - DNA, 15 bp, Homo sapiens
atgtcttattattta

SEQ ID NO: 1436372 - DNA, 15 bp, Homo sapiens
catgtcttattattt

SEQ ID NO: 1436373 - DNA, 15 bp, Homo sapiens
tcatgtcttattatt

SEQ ID NO: 1436374 - DNA, 15 bp, Homo sapiens
ttcatgtcttattat

SEQ ID NO: 1436375 - DNA, 15 bp, Homo sapiens
tttcatgtcttatta

SEQ ID NO: 1436376 - DNA, 15 bp, Homo sapiens
ctttcatgtcttatt

SEQ ID NO: 1436377 - DNA, 15 bp, Homo sapiens
actttcatgtcttat

SEQ ID NO: 1436378 - DNA, 15 bp, Homo sapiens
gactttcatgtctta

SEQ ID NO: 1436379 - DNA, 15 bp, Homo sapiens
cgactttcatgtctt

SEQ ID NO: 1436380 - DNA, 15 bp, Homo sapiens
tcgactttcatgtct

SEQ ID NO: 1436381 - DNA, 15 bp, Homo sapiens
ttcgactttcatgtc

SEQ ID NO: 1436382 - DNA, 15 bp, Homo sapiens
gttcgactttcatgt

SEQ ID NO: 1436383 - DNA, 15 bp, Homo sapiens
agttcgactttcatg

SEQ ID NO: 1436384 - DNA, 15 bp, Homo sapiens
aagttcgactttcat

SEQ ID NO: 1436385 - DNA, 15 bp, Homo sapiens
taagttcgactttca

SEQ ID NO: 1436386 - DNA, 15 bp, Homo sapiens
gtaagttcgactttc

SEQ ID NO: 1436387 - DNA, 15 bp, Homo sapiens
agtaagttcgacttt

SEQ ID NO: 1436388 - DNA, 15 bp, Homo sapiens
gagtaagttcgactt

SEQ ID NO: 1436389 - DNA, 15 bp, Homo sapiens
ggagtaagttcgact

SEQ ID NO: 1436390 - DNA, 15 bp, Homo sapiens
gggagtaagttcgac

SEQ ID NO: 1436391 - DNA, 15 bp, Homo sapiens
agggagtaagttcga

SEQ ID NO: 1436392 - DNA, 15 bp, Homo sapiens
cagggagtaagttcg

SEQ ID NO: 1436393 - DNA, 15 bp, Homo sapiens
tcagggagtaagttc

SEQ ID NO: 1436394 - DNA, 15 bp, Homo sapiens
atcagggagtaagtt

SEQ ID NO: 1436395 - DNA, 15 bp, Homo sapiens
gatcagggagtaagt

SEQ ID NO: 1436396 - DNA, 15 bp, Homo sapiens
ggatcagggagtaag

SEQ ID NO: 1436397 - DNA, 15 bp, Homo sapiens
tggatcagggagtaa

SEQ ID NO: 1436398 - DNA, 15 bp, Homo sapiens
atggatcagggagta

SEQ ID NO: 1436399 - DNA, 15 bp, Homo sapiens
catggatcagggagt

SEQ ID NO: 1436400 - DNA, 15 bp, Homo sapiens
ccatggatcagggag

SEQ ID NO: 1436401 - DNA, 15 bp, Homo sapiens
cccatggatcaggga

SEQ ID NO: 1436402 - DNA, 15 bp, Homo sapiens
gcccatggatcaggg

SEQ ID NO: 1436403 - DNA, 15 bp, Homo sapiens
agcccatggatcagg

SEQ ID NO: 1436404 - DNA, 15 bp, Homo sapiens
cagcccatggatcag

SEQ ID NO: 1436405 - DNA, 15 bp, Homo sapiens
gcagcccatggatca

SEQ ID NO: 1436406 - DNA, 15 bp, Homo sapiens
tgcagcccatggatc

SEQ ID NO: 1436407 - DNA, 15 bp, Homo sapiens
ctgcagcccatggat

SEQ ID NO: 1436408 - DNA, 15 bp, Homo sapiens
actgcagcccatgga

SEQ ID NO: 1436409 - DNA, 15 bp, Homo sapiens
tactgcagcccatgg

SEQ ID NO: 1436410 - DNA, 15 bp, Homo sapiens
atactgcagcccatg

SEQ ID NO: 1436411 - DNA, 15 bp, Homo sapiens
catactgcagcccat

SEQ ID NO: 1436412 - DNA, 15 bp, Homo sapiens
ccatactgcagccca

SEQ ID NO: 1436413 - DNA, 15 bp, Homo sapiens
tccatactgcagccc

SEQ ID NO: 1436414 - DNA, 15 bp, Homo sapiens
atccatactgcagcc

SEQ ID NO: 1436415 - DNA, 15 bp, Homo sapiens
catccatactgcagc

SEQ ID NO: 1436416 - DNA, 15 bp, Homo sapiens
acatccatactgcag

SEQ ID NO: 1436417 - DNA, 15 bp, Homo sapiens
gacatccatactgca

SEQ ID NO: 1436418 - DNA, 15 bp, Homo sapiens
tgacatccatactgc

SEQ ID NO: 1436419 - DNA, 15 bp, Homo sapiens
atgacatccatactg

SEQ ID NO: 1436420 - DNA, 15 bp, Homo sapiens
catgacatccatact

SEQ ID NO: 1436421 - DNA, 15 bp, Homo sapiens
acatgacatccatac

SEQ ID NO: 1436422 - DNA, 15 bp, Homo sapiens
aacatgacatccata

SEQ ID NO: 1436423 - DNA, 15 bp, Homo sapiens
taacatgacatccat

SEQ ID NO: 1436424 - DNA, 15 bp, Homo sapiens
ctaacatgacatcca

SEQ ID NO: 1436425 - DNA, 15 bp, Homo sapiens
gctaacatgacatcc

SEQ ID NO: 1436426 - DNA, 15 bp, Homo sapiens
tgctaacatgacatc

SEQ ID NO: 1436427 - DNA, 15 bp, Homo sapiens
ctgctaacatgacat

SEQ ID NO: 1436428 - DNA, 15 bp, Homo sapiens
cctgctaacatgaca

SEQ ID NO: 1436429 - DNA, 15 bp, Homo sapiens
gcctgctaacatgac

SEQ ID NO: 1436430 - DNA, 15 bp, Homo sapiens
tgcctgctaacatga

SEQ ID NO: 1436431 - DNA, 15 bp, Homo sapiens
atgcctgctaacatg

SEQ ID NO: 1436432 - DNA, 15 bp, Homo sapiens
catgcctgctaacat

SEQ ID NO: 1436433 - DNA, 15 bp, Homo sapiens
tcatgcctgctaaca

SEQ ID NO: 1436434 - DNA, 15 bp, Homo sapiens
ttcatgcctgctaac

SEQ ID NO: 1436435 - DNA, 15 bp, Homo sapiens
tttcatgcctgctaa

SEQ ID NO: 1436436 - DNA, 15 bp, Homo sapiens
ttttcatgcctgcta

SEQ ID NO: 1436437 - DNA, 15 bp, Homo sapiens
gttttcatgcctgct

SEQ ID NO: 1436438 - DNA, 15 bp, Homo sapiens
tgttttcatgcctgc

SEQ ID NO: 1436439 - DNA, 15 bp, Homo sapiens
ttgttttcatgcctg

SEQ ID NO: 1436440 - DNA, 15 bp, Homo sapiens
gttgttttcatgcct

SEQ ID NO: 1436441 - DNA, 15 bp, Homo sapiens
tgttgttttcatgcc

SEQ ID NO: 1436442 - DNA, 15 bp, Homo sapiens
atgttgttttcatgc

SEQ ID NO: 1436443 - DNA, 15 bp, Homo sapiens
aatgttgttttcatg

SEQ ID NO: 1436444 - DNA, 15 bp, Homo sapiens
taatgttgttttcat

SEQ ID NO: 1436445 - DNA, 15 bp, Homo sapiens
ttaatgttgttttca

SEQ ID NO: 1436446 - DNA, 15 bp, Homo sapiens
attaatgttgttttc

SEQ ID NO: 1436447 - DNA, 15 bp, Homo sapiens
gattaatgttgtttt

SEQ ID NO: 1436448 - DNA, 15 bp, Homo sapiens
agattaatgttgttt

SEQ ID NO: 1436449 - DNA, 15 bp, Homo sapiens
gagattaatgttgtt

SEQ ID NO: 1436450 - DNA, 15 bp, Homo sapiens
ggagattaatgttgt

SEQ ID NO: 1436451 - DNA, 15 bp, Homo sapiens
aggagattaatgttg

SEQ ID NO: 1436452 - DNA, 15 bp, Homo sapiens
gaggagattaatgtt

SEQ ID NO: 1436453 - DNA, 15 bp, Homo sapiens
tgaggagattaatgt

SEQ ID NO: 1436454 - DNA, 15 bp, Homo sapiens
atgaggagattaatg

SEQ ID NO: 1436455 - DNA, 15 bp, Homo sapiens
tatgaggagattaat

SEQ ID NO: 1436456 - DNA, 15 bp, Homo sapiens
gtatgaggagattaa

SEQ ID NO: 1436457 - DNA, 15 bp, Homo sapiens
tgtatgaggagatta

SEQ ID NO: 1436458 - DNA, 15 bp, Homo sapiens
atgtatgaggagatt

SEQ ID NO: 1436459 - DNA, 15 bp, Homo sapiens
gatgtatgaggagat

SEQ ID NO: 1436460 - DNA, 15 bp, Homo sapiens
agatgtatgaggaga

SEQ ID NO: 1436461 - DNA, 15 bp, Homo sapiens
gagatgtatgaggag

SEQ ID NO: 1436462 - DNA, 15 bp, Homo sapiens
ggagatgtatgagga

SEQ ID NO: 1436463 - DNA, 15 bp, Homo sapiens
tggagatgtatgagg

SEQ ID NO: 1436464 - DNA, 15 bp, Homo sapiens
atggagatgtatgag

SEQ ID NO: 1436465 - DNA, 15 bp, Homo sapiens
gatggagatgtatga

SEQ ID NO: 1436466 - DNA, 15 bp, Homo sapiens
tgatggagatgtatg

SEQ ID NO: 1436467 - DNA, 15 bp, Homo sapiens
ctgatggagatgtat

SEQ ID NO: 1436468 - DNA, 15 bp, Homo sapiens
tctgatggagatgta

SEQ ID NO: 1436469 - DNA, 15 bp, Homo sapiens
ctctgatggagatgt

SEQ ID NO: 1436470 - DNA, 15 bp, Homo sapiens
gctctgatggagatg

SEQ ID NO: 1436471 - DNA, 15 bp, Homo sapiens
agctctgatggagat

SEQ ID NO: 1436472 - DNA, 15 bp, Homo sapiens
gagctctgatggaga

SEQ ID NO: 1436473 - DNA, 15 bp, Homo sapiens
agagctctgatggag

SEQ ID NO: 1436474 - DNA, 15 bp, Homo sapiens
aagagctctgatgga

SEQ ID NO: 1436475 - DNA, 15 bp, Homo sapiens
caagagctctgatgg

SEQ ID NO: 1436476 - DNA, 15 bp, Homo sapiens
ccaagagctctgatg

SEQ ID NO: 1436477 - DNA, 15 bp, Homo sapiens
cccaagagctctgat

SEQ ID NO: 1436478 - DNA, 15 bp, Homo sapiens
acccaagagctctga

SEQ ID NO: 1436479 - DNA, 15 bp, Homo sapiens
cacccaagagctctg

SEQ ID NO: 1436480 - DNA, 15 bp, Homo sapiens
tcacccaagagctct

SEQ ID NO: 1436481 - DNA, 15 bp, Homo sapiens
atcacccaagagctc

SEQ ID NO: 1436482 - DNA, 15 bp, Homo sapiens
catcacccaagagct

SEQ ID NO: 1436483 - DNA, 15 bp, Homo sapiens
tcatcacccaagagc

SEQ ID NO: 1436484 - DNA, 15 bp, Homo sapiens
ctcatcacccaagag

SEQ ID NO: 1436485 - DNA, 15 bp, Homo sapiens
cctcatcacccaaga

SEQ ID NO: 1436486 - DNA, 15 bp, Homo sapiens
acctcatcacccaag

SEQ ID NO: 1436487 - DNA, 15 bp, Homo sapiens
tacctcatcacccaa

SEQ ID NO: 1436488 - DNA, 15 bp, Homo sapiens
gtacctcatcaccca

SEQ ID NO: 1436489 - DNA, 15 bp, Homo sapiens
tgtacctcatcaccc

SEQ ID NO: 1436490 - DNA, 15 bp, Homo sapiens
gtgtacctcatcacc

SEQ ID NO: 1436491 - DNA, 15 bp, Homo sapiens
agtgtacctcatcac

SEQ ID NO: 1436492 - DNA, 15 bp, Homo sapiens
cagtgtacctcatca

SEQ ID NO: 1436493 - DNA, 15 bp, Homo sapiens
acagtgtacctcatc

SEQ ID NO: 1436494 - DNA, 15 bp, Homo sapiens
gacagtgtacctcat

SEQ ID NO: 1436495 - DNA, 15 bp, Homo sapiens
tgacagtgtacctca

SEQ ID NO: 1436496 - DNA, 15 bp, Homo sapiens
ctgacagtgtacctc

SEQ ID NO: 1436497 - DNA, 15 bp, Homo sapiens
actgacagtgtacct

SEQ ID NO: 1436498 - DNA, 15 bp, Homo sapiens
aactgacagtgtacc

SEQ ID NO: 1436499 - DNA, 15 bp, Homo sapiens
taactgacagtgtac

SEQ ID NO: 1436500 - DNA, 15 bp, Homo sapiens
ctaactgacagtgta

SEQ ID NO: 1436501 - DNA, 15 bp, Homo sapiens
gctaactgacagtgt

SEQ ID NO: 1436502 - DNA, 15 bp, Homo sapiens
tgctaactgacagtg

SEQ ID NO: 1436503 - DNA, 15 bp, Homo sapiens
ctgctaactgacagt

SEQ ID NO: 1436504 - DNA, 15 bp, Homo sapiens
actgctaactgacag

SEQ ID NO: 1436505 - DNA, 15 bp, Homo sapiens
tactgctaactgaca

SEQ ID NO: 1436506 - DNA, 15 bp, Homo sapiens
ctactgctaactgac

SEQ ID NO: 1436507 - DNA, 15 bp, Homo sapiens
actactgctaactga

SEQ ID NO: 1436508 - DNA, 15 bp, Homo sapiens
tactactgctaactg

SEQ ID NO: 1436509 - DNA, 15 bp, Homo sapiens
atactactgctaact

SEQ ID NO: 1436510 - DNA, 15 bp, Homo sapiens
aatactactgctaac

SEQ ID NO: 1436511 - DNA, 15 bp, Homo sapiens
aaatactactgctaa

SEQ ID NO: 1436512 - DNA, 15 bp, Homo sapiens
aaaatactactgcta

SEQ ID NO: 1436513 - DNA, 15 bp, Homo sapiens
caaaatactactgct

SEQ ID NO: 1436514 - DNA, 15 bp, Homo sapiens
tcaaaatactactgc

SEQ ID NO: 1436515 - DNA, 15 bp, Homo sapiens
ttcaaaatactactg

SEQ ID NO: 1436516 - DNA, 15 bp, Homo sapiens
tttcaaaatactact

SEQ ID NO: 1436517 - DNA, 15 bp, Homo sapiens
ctttcaaaatactac

SEQ ID NO: 1436518 - DNA, 15 bp, Homo sapiens
cctttcaaaatacta

SEQ ID NO: 1436519 - DNA, 15 bp, Homo sapiens
tcctttcaaaatact

SEQ ID NO: 1436520 - DNA, 15 bp, Homo sapiens
ttcctttcaaaatac

SEQ ID NO: 1436521 - DNA, 15 bp, Homo sapiens
attcctttcaaaata

SEQ ID NO: 1436522 - DNA, 15 bp, Homo sapiens
gattcctttcaaaat

SEQ ID NO: 1436523 - DNA, 15 bp, Homo sapiens
agattcctttcaaaa

SEQ ID NO: 1436524 - DNA, 15 bp, Homo sapiens
aagattcctttcaaa

SEQ ID NO: 1436525 - DNA, 15 bp, Homo sapiens
aaagattcctttcaa

SEQ ID NO: 1436526 - DNA, 15 bp, Homo sapiens
aaaagattcctttca

SEQ ID NO: 1436527 - DNA, 15 bp, Homo sapiens
aaaaagattcctttc

SEQ ID NO: 1436528 - DNA, 15 bp, Homo sapiens
aaaaaagattccttt

SEQ ID NO: 1436529 - DNA, 15 bp, Homo sapiens
aaaaaaagattcctt

SEQ ID NO: 1436530 - DNA, 15 bp, Homo sapiens
gaaaaaaagattcct

SEQ ID NO: 1436531 - DNA, 15 bp, Homo sapiens
agaaaaaaagattcc

SEQ ID NO: 1436532 - DNA, 15 bp, Homo sapiens
cagaaaaaaagattc

SEQ ID NO: 1436533 - DNA, 15 bp, Homo sapiens
tcagaaaaaaagatt

SEQ ID NO: 1436534 - DNA, 15 bp, Homo sapiens
ttcagaaaaaaagat

SEQ ID NO: 1436535 - DNA, 15 bp, Homo sapiens
gttcagaaaaaaaga

SEQ ID NO: 1436536 - DNA, 15 bp, Homo sapiens
tgttcagaaaaaaag

SEQ ID NO: 1436537 - DNA, 15 bp, Homo sapiens
ctgttcagaaaaaaa

SEQ ID NO: 1436538 - DNA, 15 bp, Homo sapiens
actgttcagaaaaaa

SEQ ID NO: 1436539 - DNA, 15 bp, Homo sapiens
tactgttcagaaaaa

SEQ ID NO: 1436540 - DNA, 15 bp, Homo sapiens
ctactgttcagaaaa

SEQ ID NO: 1436541 - DNA, 15 bp, Homo sapiens
cctactgttcagaaa

SEQ ID NO: 1436542 - DNA, 15 bp, Homo sapiens
acctactgttcagaa

SEQ ID NO: 1436543 - DNA, 15 bp, Homo sapiens
gacctactgttcaga

SEQ ID NO: 1436544 - DNA, 15 bp, Homo sapiens
agacctactgttcag

SEQ ID NO: 1436545 - DNA, 15 bp, Homo sapiens
gagacctactgttca

SEQ ID NO: 1436546 - DNA, 15 bp, Homo sapiens
tgagacctactgttc

SEQ ID NO: 1436547 - DNA, 15 bp, Homo sapiens
ttgagacctactgtt

SEQ ID NO: 1436548 - DNA, 15 bp, Homo sapiens
gttgagacctactgt

SEQ ID NO: 1436549 - DNA, 15 bp, Homo sapiens
tgttgagacctactg

SEQ ID NO: 1436550 - DNA, 15 bp, Homo sapiens
ctgttgagacctact

SEQ ID NO: 1436551 - DNA, 15 bp, Homo sapiens
actgttgagacctac

SEQ ID NO: 1436552 - DNA, 15 bp, Homo sapiens
cactgttgagaccta

SEQ ID NO: 1436553 - DNA, 15 bp, Homo sapiens
ccactgttgagacct

SEQ ID NO: 1436554 - DNA, 15 bp, Homo sapiens
cccactgttgagacc

SEQ ID NO: 1436555 - DNA, 15 bp, Homo sapiens
gcccactgttgagac

SEQ ID NO: 1436556 - DNA, 15 bp, Homo sapiens
agcccactgttgaga

SEQ ID NO: 1436557 - DNA, 15 bp, Homo sapiens
aagcccactgttgag

SEQ ID NO: 1436558 - DNA, 15 bp, Homo sapiens
aaagcccactgttga

SEQ ID NO: 1436559 - DNA, 15 bp, Homo sapiens
taaagcccactgttg

SEQ ID NO: 1436560 - DNA, 15 bp, Homo sapiens
ttaaagcccactgtt

SEQ ID NO: 1436561 - DNA, 15 bp, Homo sapiens
tttaaagcccactgt

SEQ ID NO: 1436562 - DNA, 15 bp, Homo sapiens
atttaaagcccactg

SEQ ID NO: 1436563 - DNA, 15 bp, Homo sapiens
tatttaaagcccact

SEQ ID NO: 1436564 - DNA, 15 bp, Homo sapiens
atatttaaagcccac

SEQ ID NO: 1436565 - DNA, 15 bp, Homo sapiens
aatatttaaagccca

SEQ ID NO: 1436566 - DNA, 15 bp, Homo sapiens
gaatatttaaagccc

SEQ ID NO: 1436567 - DNA, 15 bp, Homo sapiens
tgaatatttaaagcc

SEQ ID NO: 1436568 - DNA, 15 bp, Homo sapiens
ctgaatatttaaagc

SEQ ID NO: 1436569 - DNA, 15 bp, Homo sapiens
actgaatatttaaag

SEQ ID NO: 1436570 - DNA, 15 bp, Homo sapiens
tactgaatatttaaa

SEQ ID NO: 1436571 - DNA, 15 bp, Homo sapiens
ttactgaatatttaa

SEQ ID NO: 1436572 - DNA, 15 bp, Homo sapiens
tttactgaatattta

SEQ ID NO: 1436573 - DNA, 15 bp, Homo sapiens
gtttactgaatattt

SEQ ID NO: 1436574 - DNA, 15 bp, Homo sapiens
ggtttactgaatatt

SEQ ID NO: 1436575 - DNA, 15 bp, Homo sapiens
tggtttactgaatat

SEQ ID NO: 1436576 - DNA, 15 bp, Homo sapiens
atggtttactgaata

SEQ ID NO: 1436577 - DNA, 15 bp, Homo sapiens
catggtttactgaat

SEQ ID NO: 1436578 - DNA, 15 bp, Homo sapiens
gcatggtttactgaa

SEQ ID NO: 1436579 - DNA, 15 bp, Homo sapiens
agcatggtttactga

SEQ ID NO: 1436580 - DNA, 15 bp, Homo sapiens
cagcatggtttactg

SEQ ID NO: 1436581 - DNA, 15 bp, Homo sapiens
acagcatggtttact

SEQ ID NO: 1436582 - DNA, 15 bp, Homo sapiens
tacagcatggtttac

SEQ ID NO: 1436583 - DNA, 15 bp, Homo sapiens
ttacagcatggttta

SEQ ID NO: 1436584 - DNA, 15 bp, Homo sapiens
tttacagcatggttt

SEQ ID NO: 1436585 - DNA, 15 bp, Homo sapiens
gtttacagcatggtt

SEQ ID NO: 1436586 - DNA, 15 bp, Homo sapiens
agtttacagcatggt

SEQ ID NO: 1436587 - DNA, 15 bp, Homo sapiens
cagtttacagcatgg

SEQ ID NO: 1436588 - DNA, 15 bp, Homo sapiens
tcagtttacagcatg

SEQ ID NO: 1436589 - DNA, 15 bp, Homo sapiens
atcagtttacagcat

SEQ ID NO: 1436590 - DNA, 15 bp, Homo sapiens
catcagtttacagca

SEQ ID NO: 1436591 - DNA, 15 bp, Homo sapiens
acatcagtttacagc

SEQ ID NO: 1436592 - DNA, 15 bp, Homo sapiens
cacatcagtttacag

SEQ ID NO: 1436593 - DNA, 15 bp, Homo sapiens
gcacatcagtttaca

SEQ ID NO: 1436594 - DNA, 15 bp, Homo sapiens
agcacatcagtttac

SEQ ID NO: 1436595 - DNA, 15 bp, Homo sapiens
tagcacatcagttta

SEQ ID NO: 1436596 - DNA, 15 bp, Homo sapiens
atagcacatcagttt

SEQ ID NO: 1436597 - DNA, 15 bp, Homo sapiens
gatagcacatcagtt

SEQ ID NO: 1436598 - DNA, 15 bp, Homo sapiens
tgatagcacatcagt

SEQ ID NO: 1436599 - DNA, 15 bp, Homo sapiens
atgatagcacatcag

SEQ ID NO: 1436600 - DNA, 15 bp, Homo sapiens
gatgatagcacatca

SEQ ID NO: 1436601 - DNA, 15 bp, Homo sapiens
ggatgatagcacatc

SEQ ID NO: 1436602 - DNA, 15 bp, Homo sapiens
tggatgatagcacat

SEQ ID NO: 1436603 - DNA, 15 bp, Homo sapiens
ctggatgatagcaca

SEQ ID NO: 1436604 - DNA, 15 bp, Homo sapiens
cctggatgatagcac

SEQ ID NO: 1436605 - DNA, 15 bp, Homo sapiens
gcctggatgatagca

SEQ ID NO: 1436606 - DNA, 15 bp, Homo sapiens
agcctggatgatagc

SEQ ID NO: 1436607 - DNA, 15 bp, Homo sapiens
aagcctggatgatag

SEQ ID NO: 1436608 - DNA, 15 bp, Homo sapiens
aaagcctggatgata

SEQ ID NO: 1436609 - DNA, 15 bp, Homo sapiens
gaaagcctggatgat

SEQ ID NO: 1436610 - DNA, 15 bp, Homo sapiens
agaaagcctggatga

SEQ ID NO: 1436611 - DNA, 15 bp, Homo sapiens
aagaaagcctggatg

SEQ ID NO: 1436612 - DNA, 15 bp, Homo sapiens
caagaaagcctggat

SEQ ID NO: 1436613 - DNA, 15 bp, Homo sapiens
acaagaaagcctgga

SEQ ID NO: 1436614 - DNA, 15 bp, Homo sapiens
aacaagaaagcctgg

SEQ ID NO: 1436615 - DNA, 15 bp, Homo sapiens
gaacaagaaagcctg

SEQ ID NO: 1436616 - DNA, 15 bp, Homo sapiens
ggaacaagaaagcct

SEQ ID NO: 1436617 - DNA, 15 bp, Homo sapiens
tggaacaagaaagcc

SEQ ID NO: 1436618 - DNA, 15 bp, Homo sapiens
atggaacaagaaagc

SEQ ID NO: 1436619 - DNA, 15 bp, Homo sapiens
aatggaacaagaaag

SEQ ID NO: 1436620 - DNA, 15 bp, Homo sapiens
aaatggaacaagaaa

SEQ ID NO: 1436621 - DNA, 15 bp, Homo sapiens
gaaatggaacaagaa

SEQ ID NO: 1436622 - DNA, 15 bp, Homo sapiens
agaaatggaacaaga

SEQ ID NO: 1436623 - DNA, 15 bp, Homo sapiens
tagaaatggaacaag

SEQ ID NO: 1436624 - DNA, 15 bp, Homo sapiens
ttagaaatggaacaa

SEQ ID NO: 1436625 - DNA, 15 bp, Homo sapiens
tttagaaatggaaca

SEQ ID NO: 1436626 - DNA, 15 bp, Homo sapiens
ctttagaaatggaac

SEQ ID NO: 1436627 - DNA, 15 bp, Homo sapiens
gctttagaaatggaa

SEQ ID NO: 1436628 - DNA, 15 bp, Homo sapiens
tgctttagaaatgga

SEQ ID NO: 1436629 - DNA, 15 bp, Homo sapiens
gtgctttagaaatgg

SEQ ID NO: 1436630 - DNA, 15 bp, Homo sapiens
tgtgctttagaaatg

SEQ ID NO: 1436631 - DNA, 15 bp, Homo sapiens
ctgtgctttagaaat

SEQ ID NO: 1436632 - DNA, 15 bp, Homo sapiens
cctgtgctttagaaa

SEQ ID NO: 1436633 - DNA, 15 bp, Homo sapiens
gcctgtgctttagaa

SEQ ID NO: 1436634 - DNA, 15 bp, Homo sapiens
tgcctgtgctttaga

SEQ ID NO: 1436635 - DNA, 15 bp, Homo sapiens
ctgcctgtgctttag

SEQ ID NO: 1436636 - DNA, 15 bp, Homo sapiens
tctgcctgtgcttta

SEQ ID NO: 1436637 - DNA, 15 bp, Homo sapiens
ctctgcctgtgcttt

SEQ ID NO: 1436638 - DNA, 15 bp, Homo sapiens
actctgcctgtgctt

SEQ ID NO: 1436639 - DNA, 15 bp, Homo sapiens
gtctactctgcctgt

SEQ ID NO: 1436640 - DNA, 15 bp, Homo sapiens
agtctactctgcctg

SEQ ID NO: 1436641 - DNA, 15 bp, Homo sapiens
aagtctactctgcct

SEQ ID NO: 1436642 - DNA, 15 bp, Homo sapiens
taagtctactctgcc

SEQ ID NO: 1436643 - DNA, 15 bp, Homo sapiens
ctaagtctactctgc

SEQ ID NO: 1436644 - DNA, 15 bp, Homo sapiens
gctaagtctactctg

SEQ ID NO: 1436645 - DNA, 15 bp, Homo sapiens
tgctaagtctactct

SEQ ID NO: 1436646 - DNA, 15 bp, Homo sapiens
gtgctaagtctactc

SEQ ID NO: 1436647 - DNA, 15 bp, Homo sapiens
tgtgctaagtctact

SEQ ID NO: 1436648 - DNA, 15 bp, Homo sapiens
ttgtgctaagtctac

SEQ ID NO: 1436649 - DNA, 15 bp, Homo sapiens
attgtgctaagtcta

SEQ ID NO: 1436650 - DNA, 15 bp, Homo sapiens
aattgtgctaagtct

SEQ ID NO: 1436651 - DNA, 15 bp, Homo sapiens
aaattgtgctaagtc

SEQ ID NO: 1436652 - DNA, 15 bp, Homo sapiens
aaaattgtgctaagt

SEQ ID NO: 1436653 - DNA, 15 bp, Homo sapiens
aaaaattgtgctaag

SEQ ID NO: 1436654 - DNA, 15 bp, Homo sapiens
taaaaattgtgctaa

SEQ ID NO: 1436655 - DNA, 15 bp, Homo sapiens
ttaaaaattgtgcta

SEQ ID NO: 1436656 - DNA, 15 bp, Homo sapiens
cttaaaaattgtgct

SEQ ID NO: 1436657 - DNA, 15 bp, Homo sapiens
ccttaaaaattgtgc

SEQ ID NO: 1436658 - DNA, 15 bp, Homo sapiens
cccttaaaaattgtg

SEQ ID NO: 1436659 - DNA, 15 bp, Homo sapiens
gcccttaaaaattgt

SEQ ID NO: 1436660 - DNA, 15 bp, Homo sapiens
ggcccttaaaaattg

SEQ ID NO: 1436661 - DNA, 15 bp, Homo sapiens
cggcccttaaaaatt

SEQ ID NO: 1436662 - DNA, 15 bp, Homo sapiens
acggcccttaaaaat

SEQ ID NO: 1436663 - DNA, 15 bp, Homo sapiens
tacggcccttaaaaa

SEQ ID NO: 1436664 - DNA, 15 bp, Homo sapiens
ctacggcccttaaaa

SEQ ID NO: 1436665 - DNA, 15 bp, Homo sapiens
cctacggcccttaaa

SEQ ID NO: 1436666 - DNA, 15 bp, Homo sapiens
tcctacggcccttaa

SEQ ID NO: 1436667 - DNA, 15 bp, Homo sapiens
atcctacggccctta

SEQ ID NO: 1436668 - DNA, 15 bp, Homo sapiens
gatcctacggccctt

SEQ ID NO: 1436669 - DNA, 15 bp, Homo sapiens
agatcctacggccct

SEQ ID NO: 1436670 - DNA, 15 bp, Homo sapiens
aagatcctacggccc

SEQ ID NO: 1436671 - DNA, 15 bp, Homo sapiens
aaagatcctacggcc

SEQ ID NO: 1436672 - DNA, 15 bp, Homo sapiens
caaagatcctacggc

SEQ ID NO: 1436673 - DNA, 15 bp, Homo sapiens
tcaaagatcctacgg

SEQ ID NO: 1436674 - DNA, 15 bp, Homo sapiens
ttcaaagatcctacg

SEQ ID NO: 1436675 - DNA, 15 bp, Homo sapiens
tttcaaagatcctac

SEQ ID NO: 1436676 - DNA, 15 bp, Homo sapiens
atttcaaagatccta

SEQ ID NO: 1436677 - DNA, 15 bp, Homo sapiens
catttcaaagatcct

SEQ ID NO: 1436678 - DNA, 15 bp, Homo sapiens
ccatttcaaagatcc

SEQ ID NO: 1436679 - DNA, 15 bp, Homo sapiens
accatttcaaagatc

SEQ ID NO: 1436680 - DNA, 15 bp, Homo sapiens
taccatttcaaagat

SEQ ID NO: 1436681 - DNA, 15 bp, Homo sapiens
ttaccatttcaaaga

SEQ ID NO: 1436682 - DNA, 15 bp, Homo sapiens
tttaccatttcaaag

SEQ ID NO: 1436683 - DNA, 15 bp, Homo sapiens
atttaccatttcaaa

SEQ ID NO: 1436684 - DNA, 15 bp, Homo sapiens
catttaccatttcaa

SEQ ID NO: 1436685 - DNA, 15 bp, Homo sapiens
tcatttaccatttca

SEQ ID NO: 1436686 - DNA, 15 bp, Homo sapiens
ctcatttaccatttc

SEQ ID NO: 1436687 - DNA, 15 bp, Homo sapiens
gctcatttaccattt

SEQ ID NO: 1436688 - DNA, 15 bp, Homo sapiens
tgctcatttaccatt

SEQ ID NO: 1436689 - DNA, 15 bp, Homo sapiens
gtgctcatttaccat

SEQ ID NO: 1436690 - DNA, 15 bp, Homo sapiens
agtgctcatttacca

SEQ ID NO: 1436691 - DNA, 15 bp, Homo sapiens
cagtgctcatttacc

SEQ ID NO: 1436692 - DNA, 15 bp, Homo sapiens
ccagtgctcatttac

SEQ ID NO: 1436693 - DNA, 15 bp, Homo sapiens
gccagtgctcattta

SEQ ID NO: 1436694 - DNA, 15 bp, Homo sapiens
agccagtgctcattt

SEQ ID NO: 1436695 - DNA, 15 bp, Homo sapiens
aagccagtgctcatt

SEQ ID NO: 1436696 - DNA, 15 bp, Homo sapiens
gaagccagtgctcat

SEQ ID NO: 1436697 - DNA, 15 bp, Homo sapiens
tgaagccagtgctca

SEQ ID NO: 1436698 - DNA, 15 bp, Homo sapiens
ctgaagccagtgctc

SEQ ID NO: 1436699 - DNA, 15 bp, Homo sapiens
gctgaagccagtgct

SEQ ID NO: 1436700 - DNA, 15 bp, Homo sapiens
agctgaagccagtgc

SEQ ID NO: 1436701 - DNA, 15 bp, Homo sapiens
aagctgaagccagtg

SEQ ID NO: 1436702 - DNA, 15 bp, Homo sapiens
taagctgaagccagt

SEQ ID NO: 1436703 - DNA, 15 bp, Homo sapiens
ttaagctgaagccag

SEQ ID NO: 1436704 - DNA, 15 bp, Homo sapiens
tttaagctgaagcca

SEQ ID NO: 1436705 - DNA, 15 bp, Homo sapiens
ctttaagctgaagcc

SEQ ID NO: 1436706 - DNA, 15 bp, Homo sapiens
actttaagctgaagc

SEQ ID NO: 1436707 - DNA, 15 bp, Homo sapiens
gactttaagctgaag

SEQ ID NO: 1436708 - DNA, 15 bp, Homo sapiens
tgactttaagctgaa

SEQ ID NO: 1436709 - DNA, 15 bp, Homo sapiens
gtgactttaagctga

SEQ ID NO: 1436710 - DNA, 15 bp, Homo sapiens
ggtgactttaagctg

SEQ ID NO: 1436711 - DNA, 15 bp, Homo sapiens
tggtgactttaagct

SEQ ID NO: 1436712 - DNA, 15 bp, Homo sapiens
ctggtgactttaagc

SEQ ID NO: 1436713 - DNA, 15 bp, Homo sapiens
tagctggtgacttta

SEQ ID NO: 1436714 - DNA, 15 bp, Homo sapiens
gtagctggtgacttt

SEQ ID NO: 1436715 - DNA, 15 bp, Homo sapiens
tgtagctggtgactt

SEQ ID NO: 1436716 - DNA, 15 bp, Homo sapiens
gtgtagctggtgact

SEQ ID NO: 1436717 - DNA, 15 bp, Homo sapiens
agtgtagctggtgac

SEQ ID NO: 1436718 - DNA, 15 bp, Homo sapiens
tagtgtagctggtga

SEQ ID NO: 1436719 - DNA, 15 bp, Homo sapiens
ctagtgtagctggtg

SEQ ID NO: 1436720 - DNA, 15 bp, Homo sapiens
gctagtgtagctggt

SEQ ID NO: 1436721 - DNA, 15 bp, Homo sapiens
ggctagtgtagctgg

SEQ ID NO: 1436722 - DNA, 15 bp, Homo sapiens
aggctagtgtagctg

SEQ ID NO: 1436723 - DNA, 15 bp, Homo sapiens
gaggctagtgtagct

SEQ ID NO: 1436724 - DNA, 15 bp, Homo sapiens
agaggctagtgtagc

SEQ ID NO: 1436725 - DNA, 15 bp, Homo sapiens
tagaggctagtgtag

SEQ ID NO: 1436726 - DNA, 15 bp, Homo sapiens
ttagaggctagtgta

SEQ ID NO: 1436727 - DNA, 15 bp, Homo sapiens
gttagaggctagtgt

SEQ ID NO: 1436728 - DNA, 15 bp, Homo sapiens
tgttagaggctagtg

SEQ ID NO: 1436729 - DNA, 15 bp, Homo sapiens
ttgttagaggctagt

SEQ ID NO: 1436730 - DNA, 15 bp, Homo sapiens
cttgttagaggctag

SEQ ID NO: 1436731 - DNA, 15 bp, Homo sapiens
tcttgttagaggcta

SEQ ID NO: 1436732 - DNA, 15 bp, Homo sapiens
ctcttgttagaggct

SEQ ID NO: 1436733 - DNA, 15 bp, Homo sapiens
actcttgttagaggc

SEQ ID NO: 1436734 - DNA, 15 bp, Homo sapiens
gactcttgttagagg

SEQ ID NO: 1436735 - DNA, 15 bp, Homo sapiens
tgactcttgttagag

SEQ ID NO: 1436736 - DNA, 15 bp, Homo sapiens
ctgactcttgttaga

SEQ ID NO: 1436737 - DNA, 15 bp, Homo sapiens
gctgactcttgttag

SEQ ID NO: 1436738 - DNA, 15 bp, Homo sapiens
ggctgactcttgtta

SEQ ID NO: 1436739 - DNA, 15 bp, Homo sapiens
aggctgactcttgtt

SEQ ID NO: 1436740 - DNA, 15 bp, Homo sapiens
caggctgactcttgt

SEQ ID NO: 1436741 - DNA, 15 bp, Homo sapiens
acaggctgactcttg

SEQ ID NO: 1436742 - DNA, 15 bp, Homo sapiens
aacaggctgactctt

SEQ ID NO: 1436743 - DNA, 15 bp, Homo sapiens
gaacaggctgactct

SEQ ID NO: 1436744 - DNA, 15 bp, Homo sapiens
agaacaggctgactc

SEQ ID NO: 1436745 - DNA, 15 bp, Homo sapiens
aagaacaggctgact

SEQ ID NO: 1436746 - DNA, 15 bp, Homo sapiens
aaagaacaggctgac

SEQ ID NO: 1436747 - DNA, 15 bp, Homo sapiens
caaagaacaggctga

SEQ ID NO: 1436748 - DNA, 15 bp, Homo sapiens
tcaaagaacaggctg

SEQ ID NO: 1436749 - DNA, 15 bp, Homo sapiens
ttcaaagaacaggct

SEQ ID NO: 1436750 - DNA, 15 bp, Homo sapiens
tttcaaagaacaggc

SEQ ID NO: 1436751 - DNA, 15 bp, Homo sapiens
gtttcaaagaacagg

SEQ ID NO: 1436752 - DNA, 15 bp, Homo sapiens
agtttcaaagaacag

SEQ ID NO: 1436753 - DNA, 15 bp, Homo sapiens
aagtttcaaagaaca

SEQ ID NO: 1436754 - DNA, 15 bp, Homo sapiens
aaagtttcaaagaac

SEQ ID NO: 1436755 - DNA, 15 bp, Homo sapiens
caaagtttcaaagaa

SEQ ID NO: 1436756 - DNA, 15 bp, Homo sapiens
tcaaagtttcaaaga

SEQ ID NO: 1436757 - DNA, 15 bp, Homo sapiens
ttcaaagtttcaaag

SEQ ID NO: 1436758 - DNA, 15 bp, Homo sapiens
cttcaaagtttcaaa

SEQ ID NO: 1436759 - DNA, 15 bp, Homo sapiens
gcttcaaagtttcaa

SEQ ID NO: 1436760 - DNA, 15 bp, Homo sapiens
ggcttcaaagtttca

SEQ ID NO: 1436761 - DNA, 15 bp, Homo sapiens
aggcttcaaagtttc

SEQ ID NO: 1436762 - DNA, 15 bp, Homo sapiens
caggcttcaaagttt

SEQ ID NO: 1436763 - DNA, 15 bp, Homo sapiens
ccaggcttcaaagtt

SEQ ID NO: 1436764 - DNA, 15 bp, Homo sapiens
tccaggcttcaaagt

SEQ ID NO: 1436765 - DNA, 15 bp, Homo sapiens
gtccaggcttcaaag

SEQ ID NO: 1436766 - DNA, 15 bp, Homo sapiens
agtccaggcttcaaa

SEQ ID NO: 1436767 - DNA, 15 bp, Homo sapiens
aagtccaggcttcaa

SEQ ID NO: 1436768 - DNA, 15 bp, Homo sapiens
aaagtccaggcttca

SEQ ID NO: 1436769 - DNA, 15 bp, Homo sapiens
taaagtccaggcttc

SEQ ID NO: 1436770 - DNA, 15 bp, Homo sapiens
ataaagtccaggctt

SEQ ID NO: 1436771 - DNA, 15 bp, Homo sapiens
tataaagtccaggct

SEQ ID NO: 1436772 - DNA, 15 bp, Homo sapiens
ctataaagtccaggc

SEQ ID NO: 1436773 - DNA, 15 bp, Homo sapiens
gctataaagtccagg

SEQ ID NO: 1436774 - DNA, 15 bp, Homo sapiens
agctataaagtccag

SEQ ID NO: 1436775 - DNA, 15 bp, Homo sapiens
tagctataaagtcca

SEQ ID NO: 1436776 - DNA, 15 bp, Homo sapiens
atagctataaagtcc

SEQ ID NO: 1436777 - DNA, 15 bp, Homo sapiens
catagctataaagtc

SEQ ID NO: 1436778 - DNA, 15 bp, Homo sapiens
tcatagctataaagt

SEQ ID NO: 1436779 - DNA, 15 bp, Homo sapiens
ttcatagctataaag

SEQ ID NO: 1436780 - DNA, 15 bp, Homo sapiens
tttcatagctataaa

SEQ ID NO: 1436781 - DNA, 15 bp, Homo sapiens
ctttcatagctataa

SEQ ID NO: 1436782 - DNA, 15 bp, Homo sapiens
actttcatagctata

SEQ ID NO: 1436783 - DNA, 15 bp, Homo sapiens
gactttcatagctat

SEQ ID NO: 1436784 - DNA, 15 bp, Homo sapiens
ggactttcatagcta

SEQ ID NO: 1436785 - DNA, 15 bp, Homo sapiens
aggactttcatagct

SEQ ID NO: 1436786 - DNA, 15 bp, Homo sapiens
taggactttcatagc

SEQ ID NO: 1436787 - DNA, 15 bp, Homo sapiens
ctaggactttcatag

SEQ ID NO: 1436788 - DNA, 15 bp, Homo sapiens
tctaggactttcata

SEQ ID NO: 1436789 - DNA, 15 bp, Homo sapiens
atctaggactttcat

SEQ ID NO: 1436790 - DNA, 15 bp, Homo sapiens
gatctaggactttca

SEQ ID NO: 1436791 - DNA, 15 bp, Homo sapiens
agatctaggactttc

SEQ ID NO: 1436792 - DNA, 15 bp, Homo sapiens
aagatctaggacttt

SEQ ID NO: 1436793 - DNA, 15 bp, Homo sapiens
gaagatctaggactt

SEQ ID NO: 1436794 - DNA, 15 bp, Homo sapiens
agaagatctaggact

SEQ ID NO: 1436795 - DNA, 15 bp, Homo sapiens
aagaagatctaggac

SEQ ID NO: 1436796 - DNA, 15 bp, Homo sapiens
gaagaagatctagga

SEQ ID NO: 1436797 - DNA, 15 bp, Homo sapiens
ggaagaagatctagg

SEQ ID NO: 1436798 - DNA, 15 bp, Homo sapiens
tggaagaagatctag

SEQ ID NO: 1436799 - DNA, 15 bp, Homo sapiens
ttggaagaagatcta

SEQ ID NO: 1436800 - DNA, 15 bp, Homo sapiens
attggaagaagatct

SEQ ID NO: 1436801 - DNA, 15 bp, Homo sapiens
tattggaagaagatc

SEQ ID NO: 1436802 - DNA, 15 bp, Homo sapiens
ctattggaagaagat

SEQ ID NO: 1436803 - DNA, 15 bp, Homo sapiens
tctattggaagaaga

SEQ ID NO: 1436804 - DNA, 15 bp, Homo sapiens
ctctattggaagaag

SEQ ID NO: 1436805 - DNA, 15 bp, Homo sapiens
cctctattggaagaa

SEQ ID NO: 1436806 - DNA, 15 bp, Homo sapiens
ccctctattggaaga

SEQ ID NO: 1436807 - DNA, 15 bp, Homo sapiens
gccctctattggaag

SEQ ID NO: 1436808 - DNA, 15 bp, Homo sapiens
agccctctattggaa

SEQ ID NO: 1436809 - DNA, 15 bp, Homo sapiens
cagccctctattgga

SEQ ID NO: 1436810 - DNA, 15 bp, Homo sapiens
acagccctctattgg

SEQ ID NO: 1436811 - DNA, 15 bp, Homo sapiens
aacagccctctattg

SEQ ID NO: 1436812 - DNA, 15 bp, Homo sapiens
aaacagccctctatt

SEQ ID NO: 1436813 - DNA, 15 bp, Homo sapiens
gaaacagccctctat

SEQ ID NO: 1436814 - DNA, 15 bp, Homo sapiens
tgaaacagccctcta

SEQ ID NO: 1436815 - DNA, 15 bp, Homo sapiens
atgaaacagccctct

SEQ ID NO: 1436816 - DNA, 15 bp, Homo sapiens
gatgaaacagccctc

SEQ ID NO: 1436817 - DNA, 15 bp, Homo sapiens
ggatgaaacagccct

SEQ ID NO: 1436818 - DNA, 15 bp, Homo sapiens
tggatgaaacagccc

SEQ ID NO: 1436819 - DNA, 15 bp, Homo sapiens
atggatgaaacagcc

SEQ ID NO: 1436820 - DNA, 15 bp, Homo sapiens
catggatgaaacagc

SEQ ID NO: 1436821 - DNA, 15 bp, Homo sapiens
ccatggatgaaacag

SEQ ID NO: 1436822 - DNA, 15 bp, Homo sapiens
accatggatgaaaca

SEQ ID NO: 1436823 - DNA, 15 bp, Homo sapiens
caccatggatgaaac

SEQ ID NO: 1436824 - DNA, 15 bp, Homo sapiens
tcaccatggatgaaa

SEQ ID NO: 1436825 - DNA, 15 bp, Homo sapiens
ttcaccatggatgaa

SEQ ID NO: 1436826 - DNA, 15 bp, Homo sapiens
tttcaccatggatga

SEQ ID NO: 1436827 - DNA, 15 bp, Homo sapiens
ttttcaccatggatg

SEQ ID NO: 1436828 - DNA, 15 bp, Homo sapiens
attttcaccatggat

SEQ ID NO: 1436829 - DNA, 15 bp, Homo sapiens
gattttcaccatgga

SEQ ID NO: 1436830 - DNA, 15 bp, Homo sapiens
agattttcaccatgg

SEQ ID NO: 1436831 - DNA, 15 bp, Homo sapiens
cagattttcaccatg

SEQ ID NO: 1436832 - DNA, 15 bp, Homo sapiens
acagattttcaccat

SEQ ID NO: 1436833 - DNA, 15 bp, Homo sapiens
aacagattttcacca

SEQ ID NO: 1436834 - DNA, 15 bp, Homo sapiens
caacagattttcacc

SEQ ID NO: 1436835 - DNA, 15 bp, Homo sapiens
acaacagattttcac

SEQ ID NO: 1436836 - DNA, 15 bp, Homo sapiens
aacaacagattttca

SEQ ID NO: 1436837 - DNA, 15 bp, Homo sapiens
aaacaacagattttc

SEQ ID NO: 1436838 - DNA, 15 bp, Homo sapiens
taaacaacagatttt

SEQ ID NO: 1436839 - DNA, 15 bp, Homo sapiens
ctaaacaacagattt

SEQ ID NO: 1436840 - DNA, 15 bp, Homo sapiens
actaaacaacagatt

SEQ ID NO: 1436841 - DNA, 15 bp, Homo sapiens
cactaaacaacagat

SEQ ID NO: 1436842 - DNA, 15 bp, Homo sapiens
acactaaacaacaga

SEQ ID NO: 1436843 - DNA, 15 bp, Homo sapiens
tacactaaacaacag

SEQ ID NO: 1436844 - DNA, 15 bp, Homo sapiens
ctacactaaacaaca

SEQ ID NO: 1436845 - DNA, 15 bp, Homo sapiens
gctacactaaacaac

SEQ ID NO: 1436846 - DNA, 15 bp, Homo sapiens
ggctacactaaacaa

SEQ ID NO: 1436847 - DNA, 15 bp, Homo sapiens
tggctacactaaaca

SEQ ID NO: 1436848 - DNA, 15 bp, Homo sapiens
gtggctacactaaac

SEQ ID NO: 1436849 - DNA, 15 bp, Homo sapiens
ggtggctacactaaa

SEQ ID NO: 1436850 - DNA, 15 bp, Homo sapiens
aggtggctacactaa

SEQ ID NO: 1436851 - DNA, 15 bp, Homo sapiens
aaggtggctacacta

SEQ ID NO: 1436852 - DNA, 15 bp, Homo sapiens
aaaggtggctacact

SEQ ID NO: 1436853 - DNA, 15 bp, Homo sapiens
taaaggtggctacac

SEQ ID NO: 1436854 - DNA, 15 bp, Homo sapiens
ataaaggtggctaca

SEQ ID NO: 1436855 - DNA, 15 bp, Homo sapiens
tataaaggtggctac

SEQ ID NO: 1436856 - DNA, 15 bp, Homo sapiens
ttataaaggtggcta

SEQ ID NO: 1436857 - DNA, 15 bp, Homo sapiens
tttataaaggtggct

SEQ ID NO: 1436858 - DNA, 15 bp, Homo sapiens
atttataaaggtggc

SEQ ID NO: 1436859 - DNA, 15 bp, Homo sapiens
aatttataaaggtgg

SEQ ID NO: 1436860 - DNA, 15 bp, Homo sapiens
taatttataaaggtg

SEQ ID NO: 1436861 - DNA, 15 bp, Homo sapiens
ataatttataaaggt

SEQ ID NO: 1436862 - DNA, 15 bp, Homo sapiens
gataatttataaagg

SEQ ID NO: 1436863 - DNA, 15 bp, Homo sapiens
agataatttataaag

SEQ ID NO: 1436864 - DNA, 15 bp, Homo sapiens
tagataatttataaa

SEQ ID NO: 1436865 - DNA, 15 bp, Homo sapiens
ttagataatttataa

SEQ ID NO: 1436866 - DNA, 15 bp, Homo sapiens
cttagataatttata

SEQ ID NO: 1436867 - DNA, 15 bp, Homo sapiens
gcttagataatttat

SEQ ID NO: 1436868 - DNA, 15 bp, Homo sapiens
agcttagataattta

SEQ ID NO: 1436869 - DNA, 15 bp, Homo sapiens
tagcttagataattt

SEQ ID NO: 1436870 - DNA, 15 bp, Homo sapiens
ctagcttagataatt

SEQ ID NO: 1436871 - DNA, 15 bp, Homo sapiens
tctagcttagataat

SEQ ID NO: 1436872 - DNA, 15 bp, Homo sapiens
atctagcttagataa

SEQ ID NO: 1436873 - DNA, 15 bp, Homo sapiens
gatctagcttagata

SEQ ID NO: 1436874 - DNA, 15 bp, Homo sapiens
agatctagcttagat

SEQ ID NO: 1436875 - DNA, 15 bp, Homo sapiens
aagatctagcttaga

SEQ ID NO: 1436876 - DNA, 15 bp, Homo sapiens
gaagatctagcttag

SEQ ID NO: 1436877 - DNA, 15 bp, Homo sapiens
agaagatctagctta

SEQ ID NO: 1436878 - DNA, 15 bp, Homo sapiens
tagaagatctagctt

SEQ ID NO: 1436879 - DNA, 15 bp, Homo sapiens
ctagaagatctagct

SEQ ID NO: 1436880 - DNA, 15 bp, Homo sapiens
tctagaagatctagc

SEQ ID NO: 1436881 - DNA, 15 bp, Homo sapiens
atctagaagatctag

SEQ ID NO: 1436882 - DNA, 15 bp, Homo sapiens
tatctagaagatcta

SEQ ID NO: 1436883 - DNA, 15 bp, Homo sapiens
ttatctagaagatct

SEQ ID NO: 1436884 - DNA, 15 bp, Homo sapiens
gttatctagaagatc

SEQ ID NO: 1436885 - DNA, 15 bp, Homo sapiens
agttatctagaagat

SEQ ID NO: 1436886 - DNA, 15 bp, Homo sapiens
aagttatctagaaga

SEQ ID NO: 1436887 - DNA, 15 bp, Homo sapiens
caagttatctagaag

SEQ ID NO: 1436888 - DNA, 15 bp, Homo sapiens
gcaagttatctagaa

SEQ ID NO: 1436889 - DNA, 15 bp, Homo sapiens
tgcaagttatctaga

SEQ ID NO: 1436890 - DNA, 15 bp, Homo sapiens
ctgcaagttatctag

SEQ ID NO: 1436891 - DNA, 15 bp, Homo sapiens
gctgcaagttatcta

SEQ ID NO: 1436892 - DNA, 15 bp, Homo sapiens
agctgcaagttatct

SEQ ID NO: 1436893 - DNA, 15 bp, Homo sapiens
aagctgcaagttatc

SEQ ID NO: 1436894 - DNA, 15 bp, Homo sapiens
gaagctgcaagttat

SEQ ID NO: 1436895 - DNA, 15 bp, Homo sapiens
agaagctgcaagtta

SEQ ID NO: 1436896 - DNA, 15 bp, Homo sapiens
tagaagctgcaagtt

SEQ ID NO: 1436897 - DNA, 15 bp, Homo sapiens
gtagaagctgcaagt

SEQ ID NO: 1436898 - DNA, 15 bp, Homo sapiens
tgtagaagctgcaag

SEQ ID NO: 1436899 - DNA, 15 bp, Homo sapiens
atgtagaagctgcaa

SEQ ID NO: 1436900 - DNA, 15 bp, Homo sapiens
catgtagaagctgca

SEQ ID NO: 1436901 - DNA, 15 bp, Homo sapiens
tcatgtagaagctgc

SEQ ID NO: 1436902 - DNA, 15 bp, Homo sapiens
ctcatgtagaagctg

SEQ ID NO: 1436903 - DNA, 15 bp, Homo sapiens
gctcatgtagaagct

SEQ ID NO: 1436904 - DNA, 15 bp, Homo sapiens
tgctcatgtagaagc

SEQ ID NO: 1436905 - DNA, 15 bp, Homo sapiens
gtgctcatgtagaag

SEQ ID NO: 1436906 - DNA, 15 bp, Homo sapiens
agtgctcatgtagaa

SEQ ID NO: 1436907 - DNA, 15 bp, Homo sapiens
aagtgctcatgtaga

SEQ ID NO: 1436908 - DNA, 15 bp, Homo sapiens
caagtgctcatgtag

SEQ ID NO: 1436909 - DNA, 15 bp, Homo sapiens
gcaagtgctcatgta

SEQ ID NO: 1436910 - DNA, 15 bp, Homo sapiens
agcaagtgctcatgt

SEQ ID NO: 1436911 - DNA, 15 bp, Homo sapiens
cagcaagtgctcatg

SEQ ID NO: 1436912 - DNA, 15 bp, Homo sapiens
gcagcaagtgctcat

SEQ ID NO: 1436913 - DNA, 15 bp, Homo sapiens
agcagcaagtgctca

SEQ ID NO: 1436914 - DNA, 15 bp, Homo sapiens
aagcagcaagtgctc

SEQ ID NO: 1436915 - DNA, 15 bp, Homo sapiens
gaagcagcaagtgct

SEQ ID NO: 1436916 - DNA, 15 bp, Homo sapiens
tgaagcagcaagtgc

SEQ ID NO: 1436917 - DNA, 15 bp, Homo sapiens
gtgaagcagcaagtg

SEQ ID NO: 1436918 - DNA, 15 bp, Homo sapiens
agtgaagcagcaagt

SEQ ID NO: 1436919 - DNA, 15 bp, Homo sapiens
aagtgaagcagcaag

SEQ ID NO: 1436920 - DNA, 15 bp, Homo sapiens
aaagtgaagcagcaa

SEQ ID NO: 1436921 - DNA, 15 bp, Homo sapiens
caaagtgaagcagca

SEQ ID NO: 1436922 - DNA, 15 bp, Homo sapiens
gcaaagtgaagcagc

SEQ ID NO: 1436923 - DNA, 15 bp, Homo sapiens
tgcaaagtgaagcag

SEQ ID NO: 1436924 - DNA, 15 bp, Homo sapiens
gtgcaaagtgaagca

SEQ ID NO: 1436925 - DNA, 15 bp, Homo sapiens
agtgcaaagtgaagc

SEQ ID NO: 1436926 - DNA, 15 bp, Homo sapiens
aagtgcaaagtgaag

SEQ ID NO: 1436927 - DNA, 15 bp, Homo sapiens
aaagtgcaaagtgaa

SEQ ID NO: 1436928 - DNA, 15 bp, Homo sapiens
aaaagtgcaaagtga

SEQ ID NO: 1436929 - DNA, 15 bp, Homo sapiens
aaaaagtgcaaagtg

SEQ ID NO: 1436930 - DNA, 15 bp, Homo sapiens
aaaaaagtgcaaagt

SEQ ID NO: 1436931 - DNA, 15 bp, Homo sapiens
aaaaaaagtgcaaag

SEQ ID NO: 1436932 - DNA, 15 bp, Homo sapiens
aaaaaaaagtgcaaa

SEQ ID NO: 1436933 - DNA, 15 bp, Homo sapiens
aaaaaaaaagtgcaa

SEQ ID NO: 1436934 - DNA, 15 bp, Homo sapiens
gaaaaaaaaagtgca

SEQ ID NO: 1436935 - DNA, 15 bp, Homo sapiens
agaaaaaaaaagtgc

SEQ ID NO: 1436936 - DNA, 15 bp, Homo sapiens
aagaaaaaaaaagtg

SEQ ID NO: 1436937 - DNA, 15 bp, Homo sapiens
aaaagaaaaaaaaag

SEQ ID NO: 1436938 - DNA, 15 bp, Homo sapiens
caaaaagaaaaaaaa

SEQ ID NO: 1436939 - DNA, 15 bp, Homo sapiens
tcaaaaagaaaaaaa

SEQ ID NO: 1436940 - DNA, 15 bp, Homo sapiens
tgtctcaaaaagaaa

SEQ ID NO: 1436941 - DNA, 15 bp, Homo sapiens
ttgtctcaaaaagaa

SEQ ID NO: 1436942 - DNA, 15 bp, Homo sapiens
cttgtctcaaaaaga

SEQ ID NO: 1436943 - DNA, 15 bp, Homo sapiens
ccttgtctcaaaaag

SEQ ID NO: 1436944 - DNA, 15 bp, Homo sapiens
cagaccttgtctcaa

SEQ ID NO: 1436945 - DNA, 15 bp, Homo sapiens
ccagaccttgtctca

SEQ ID NO: 1436946 - DNA, 15 bp, Homo sapiens
gccagaccttgtctc

SEQ ID NO: 1436947 - DNA, 15 bp, Homo sapiens
agccagaccttgtct

SEQ ID NO: 1436948 - DNA, 15 bp, Homo sapiens
cagccagaccttgtc

SEQ ID NO: 1436949 - DNA, 15 bp, Homo sapiens
acagccagaccttgt

SEQ ID NO: 1436950 - DNA, 15 bp, Homo sapiens
gacagccagaccttg

SEQ ID NO: 1436951 - DNA, 15 bp, Homo sapiens
tgacagccagacctt

SEQ ID NO: 1436952 - DNA, 15 bp, Homo sapiens
gtgacagccagacct

SEQ ID NO: 1436953 - DNA, 15 bp, Homo sapiens
ggtgacagccagacc

SEQ ID NO: 1436954 - DNA, 15 bp, Homo sapiens
gggtgacagccagac

SEQ ID NO: 1436955 - DNA, 15 bp, Homo sapiens
tgggtgacagccaga

SEQ ID NO: 1436956 - DNA, 15 bp, Homo sapiens
ctgggtgacagccag

SEQ ID NO: 1436957 - DNA, 15 bp, Homo sapiens
cctgggtgacagcca

SEQ ID NO: 1436958 - DNA, 15 bp, Homo sapiens
gcctgggtgacagcc

SEQ ID NO: 1436959 - DNA, 15 bp, Homo sapiens
agcctgggtgacagc

SEQ ID NO: 1436960 - DNA, 15 bp, Homo sapiens
agagatcacaccact

SEQ ID NO: 1436961 - DNA, 15 bp, Homo sapiens
cagagatcacaccac

SEQ ID NO: 1436962 - DNA, 15 bp, Homo sapiens
gcagagatcacacca

SEQ ID NO: 1436963 - DNA, 15 bp, Homo sapiens
agcagagatcacacc

SEQ ID NO: 1436964 - DNA, 15 bp, Homo sapiens
gagcagagatcacac

SEQ ID NO: 1436965 - DNA, 15 bp, Homo sapiens
tgagcagagatcaca

SEQ ID NO: 1436966 - DNA, 15 bp, Homo sapiens
gtgagcagagatcac

SEQ ID NO: 1436967 - DNA, 15 bp, Homo sapiens
agtgagcagagatca

SEQ ID NO: 1436968 - DNA, 15 bp, Homo sapiens
tagtgagcagagatc

SEQ ID NO: 1436969 - DNA, 15 bp, Homo sapiens
gtagtgagcagagat

SEQ ID NO: 1436970 - DNA, 15 bp, Homo sapiens
tgtagtgagcagaga

SEQ ID NO: 1436971 - DNA, 15 bp, Homo sapiens
ttgtagtgagcagag

SEQ ID NO: 1436972 - DNA, 15 bp, Homo sapiens
gttgtagtgagcaga

SEQ ID NO: 1436973 - DNA, 15 bp, Homo sapiens
ggttgtagtgagcag

SEQ ID NO: 1436974 - DNA, 15 bp, Homo sapiens
aggttgtagtgagca

SEQ ID NO: 1436975 - DNA, 15 bp, Homo sapiens
gaggttgtagtgagc

SEQ ID NO: 1436976 - DNA, 15 bp, Homo sapiens
tggaggttgtagtga

SEQ ID NO: 1436977 - DNA, 15 bp, Homo sapiens
gtggaggttgtagtg

SEQ ID NO: 1436978 - DNA, 15 bp, Homo sapiens
ggtggaggttgtagt

SEQ ID NO: 1436979 - DNA, 15 bp, Homo sapiens
gggtggaggttgtag

SEQ ID NO: 1436980 - DNA, 15 bp, Homo sapiens
ggggtggaggttgta

SEQ ID NO: 1436981 - DNA, 15 bp, Homo sapiens
tggggtggaggttgt

SEQ ID NO: 1436982 - DNA, 15 bp, Homo sapiens
ttggggtggaggttg

SEQ ID NO: 1436983 - DNA, 15 bp, Homo sapiens
cttggggtggaggtt

SEQ ID NO: 1436984 - DNA, 15 bp, Homo sapiens
gcttggggtggaggt

SEQ ID NO: 1436985 - DNA, 15 bp, Homo sapiens
agcttggggtggagg

SEQ ID NO: 1436986 - DNA, 15 bp, Homo sapiens
gagcttggggtggag

SEQ ID NO: 1436987 - DNA, 15 bp, Homo sapiens
tgagcttggggtgga

SEQ ID NO: 1436988 - DNA, 15 bp, Homo sapiens
ttgagcttggggtgg

SEQ ID NO: 1436989 - DNA, 15 bp, Homo sapiens
cttgagcttggggtg

SEQ ID NO: 1436990 - DNA, 15 bp, Homo sapiens
gcttgagcttggggt

SEQ ID NO: 1436991 - DNA, 15 bp, Homo sapiens
ggcttgagcttgggg

SEQ ID NO: 1436992 - DNA, 15 bp, Homo sapiens
tggcttgagcttggg

SEQ ID NO: 1436993 - DNA, 15 bp, Homo sapiens
atggcttgagcttgg

SEQ ID NO: 1436994 - DNA, 15 bp, Homo sapiens
gatggcttgagcttg

SEQ ID NO: 1436995 - DNA, 15 bp, Homo sapiens
ggatggcttgagctt

SEQ ID NO: 1436996 - DNA, 15 bp, Homo sapiens
aggatggcttgagct

SEQ ID NO: 1436997 - DNA, 15 bp, Homo sapiens
gaggatggcttgagc

SEQ ID NO: 1436998 - DNA, 15 bp, Homo sapiens
ggaggatggcttgag

SEQ ID NO: 1436999 - DNA, 15 bp, Homo sapiens
gggaggatggcttga

SEQ ID NO: 1437000 - DNA, 15 bp, Homo sapiens
tgggaggatggcttg

SEQ ID NO: 1437001 - DNA, 15 bp, Homo sapiens
gaggtgggaggatgg

SEQ ID NO: 1437002 - DNA, 15 bp, Homo sapiens
tgaggtgggaggatg

SEQ ID NO: 1437003 - DNA, 15 bp, Homo sapiens
tgcacctgtagtcct

SEQ ID NO: 1437004 - DNA, 15 bp, Homo sapiens
gtgcacctgtagtcc

SEQ ID NO: 1437005 - DNA, 15 bp, Homo sapiens
agtgcacctgtagtc

SEQ ID NO: 1437006 - DNA, 15 bp, Homo sapiens
gagtgcacctgtagt

SEQ ID NO: 1437007 - DNA, 15 bp, Homo sapiens
agagtgcacctgtag

SEQ ID NO: 1437008 - DNA, 15 bp, Homo sapiens
tagagtgcacctgta

SEQ ID NO: 1437009 - DNA, 15 bp, Homo sapiens
gtagagtgcacctgt

SEQ ID NO: 1437010 - DNA, 15 bp, Homo sapiens
ggtagagtgcacctg

SEQ ID NO: 1437011 - DNA, 15 bp, Homo sapiens
tggtagagtgcacct

SEQ ID NO: 1437012 - DNA, 15 bp, Homo sapiens
gtggtagagtgcacc

SEQ ID NO: 1437013 - DNA, 15 bp, Homo sapiens
tgtggtagagtgcac

SEQ ID NO: 1437014 - DNA, 15 bp, Homo sapiens
gtgtggtagagtgca

SEQ ID NO: 1437015 - DNA, 15 bp, Homo sapiens
ggtgtggtagagtgc

SEQ ID NO: 1437016 - DNA, 15 bp, Homo sapiens
aggtgtggtagagtg

SEQ ID NO: 1437017 - DNA, 15 bp, Homo sapiens
caggtgtggtagagt

SEQ ID NO: 1437018 - DNA, 15 bp, Homo sapiens
ccaggtgtggtagag

SEQ ID NO: 1437019 - DNA, 15 bp, Homo sapiens
gccaggtgtggtaga

SEQ ID NO: 1437020 - DNA, 15 bp, Homo sapiens
cattagccaggtgtg

SEQ ID NO: 1437021 - DNA, 15 bp, Homo sapiens
acattagccaggtgt

SEQ ID NO: 1437022 - DNA, 15 bp, Homo sapiens
aacattagccaggtg

SEQ ID NO: 1437023 - DNA, 15 bp, Homo sapiens
aaacattagccaggt

SEQ ID NO: 1437024 - DNA, 15 bp, Homo sapiens
caaacattagccagg

SEQ ID NO: 1437025 - DNA, 15 bp, Homo sapiens
acaaacattagccag

SEQ ID NO: 1437026 - DNA, 15 bp, Homo sapiens
tacaaacattagcca

SEQ ID NO: 1437027 - DNA, 15 bp, Homo sapiens
atacaaacattagcc

SEQ ID NO: 1437028 - DNA, 15 bp, Homo sapiens
aaaaaatacaaacat

SEQ ID NO: 1437029 - DNA, 15 bp, Homo sapiens
caaaaaatacaaaca

SEQ ID NO: 1437030 - DNA, 15 bp, Homo sapiens
acaaaaaatacaaac

SEQ ID NO: 1437031 - DNA, 15 bp, Homo sapiens
catctctacaaaaaa

SEQ ID NO: 1437032 - DNA, 15 bp, Homo sapiens
caaaccccatctcta

SEQ ID NO: 1437033 - DNA, 15 bp, Homo sapiens
ccaaaccccatctct

SEQ ID NO: 1437034 - DNA, 15 bp, Homo sapiens
gccaaaccccatctc

SEQ ID NO: 1437035 - DNA, 15 bp, Homo sapiens
ggccaaaccccatct

SEQ ID NO: 1437036 - DNA, 15 bp, Homo sapiens
tggccaaaccccatc

SEQ ID NO: 1437037 - DNA, 15 bp, Homo sapiens
atggccaaaccccat

SEQ ID NO: 1437038 - DNA, 15 bp, Homo sapiens
catggccaaacccca

SEQ ID NO: 1437039 - DNA, 15 bp, Homo sapiens
acatggccaaacccc

SEQ ID NO: 1437040 - DNA, 15 bp, Homo sapiens
aacatggccaaaccc

SEQ ID NO: 1437041 - DNA, 15 bp, Homo sapiens
aaacatggccaaacc

SEQ ID NO: 1437042 - DNA, 15 bp, Homo sapiens
gaaacatggccaaac

SEQ ID NO: 1437043 - DNA, 15 bp, Homo sapiens
ggaaacatggccaaa

SEQ ID NO: 1437044 - DNA, 15 bp, Homo sapiens
gggaaacatggccaa

SEQ ID NO: 1437045 - DNA, 15 bp, Homo sapiens
tgggaaacatggcca

SEQ ID NO: 1437046 - DNA, 15 bp, Homo sapiens
ctgggaaacatggcc

SEQ ID NO: 1437047 - DNA, 15 bp, Homo sapiens
cctgggaaacatggc

SEQ ID NO: 1437048 - DNA, 15 bp, Homo sapiens
gcctgggaaacatgg

SEQ ID NO: 1437049 - DNA, 15 bp, Homo sapiens
agcctgggaaacatg

SEQ ID NO: 1437050 - DNA, 15 bp, Homo sapiens
cagcctgggaaacat

SEQ ID NO: 1437051 - DNA, 15 bp, Homo sapiens
ccagcctgggaaaca

SEQ ID NO: 1437052 - DNA, 15 bp, Homo sapiens
accagcctgggaaac

SEQ ID NO: 1437053 - DNA, 15 bp, Homo sapiens
gaccagcctgggaaa

SEQ ID NO: 1437054 - DNA, 15 bp, Homo sapiens
agaccagcctgggaa

SEQ ID NO: 1437055 - DNA, 15 bp, Homo sapiens
aagaccagcctggga

SEQ ID NO: 1437056 - DNA, 15 bp, Homo sapiens
aaattcaagaccagc

SEQ ID NO: 1437057 - DNA, 15 bp, Homo sapiens
caaattcaagaccag

SEQ ID NO: 1437058 - DNA, 15 bp, Homo sapiens
gcaaattcaagacca

SEQ ID NO: 1437059 - DNA, 15 bp, Homo sapiens
agcaaattcaagacc

SEQ ID NO: 1437060 - DNA, 15 bp, Homo sapiens
gagcaaattcaagac

SEQ ID NO: 1437061 - DNA, 15 bp, Homo sapiens
tgagcaaattcaaga

SEQ ID NO: 1437062 - DNA, 15 bp, Homo sapiens
ttgagcaaattcaag

SEQ ID NO: 1437063 - DNA, 15 bp, Homo sapiens
cttgagcaaattcaa

SEQ ID NO: 1437064 - DNA, 15 bp, Homo sapiens
acttgagcaaattca

SEQ ID NO: 1437065 - DNA, 15 bp, Homo sapiens
cacttgagcaaattc

SEQ ID NO: 1437066 - DNA, 15 bp, Homo sapiens
tcacttgagcaaatt

SEQ ID NO: 1437067 - DNA, 15 bp, Homo sapiens
atcacttgagcaaat

SEQ ID NO: 1437068 - DNA, 15 bp, Homo sapiens
gatcacttgagcaaa

SEQ ID NO: 1437069 - DNA, 15 bp, Homo sapiens
agatcacttgagcaa

SEQ ID NO: 1437070 - DNA, 15 bp, Homo sapiens
cagatcacttgagca

SEQ ID NO: 1437071 - DNA, 15 bp, Homo sapiens
gcagatcacttgagc

SEQ ID NO: 1437072 - DNA, 15 bp, Homo sapiens
aaggcagatcacttg

SEQ ID NO: 1437073 - DNA, 15 bp, Homo sapiens
gaaggcagatcactt

SEQ ID NO: 1437074 - DNA, 15 bp, Homo sapiens
agaaggcagatcact

SEQ ID NO: 1437075 - DNA, 15 bp, Homo sapiens
aagaaggcagatcac

SEQ ID NO: 1437076 - DNA, 15 bp, Homo sapiens
gaagaaggcagatca

SEQ ID NO: 1437077 - DNA, 15 bp, Homo sapiens
agaagaaggcagatc

SEQ ID NO: 1437078 - DNA, 15 bp, Homo sapiens
gagaagaaggcagat

SEQ ID NO: 1437079 - DNA, 15 bp, Homo sapiens
ggagaagaaggcaga

SEQ ID NO: 1437080 - DNA, 15 bp, Homo sapiens
aagggagaagaaggc

SEQ ID NO: 1437081 - DNA, 15 bp, Homo sapiens
gaagggagaagaagg

SEQ ID NO: 1437082 - DNA, 15 bp, Homo sapiens
tgaagggagaagaag

SEQ ID NO: 1437083 - DNA, 15 bp, Homo sapiens
ctgaagggagaagaa

SEQ ID NO: 1437084 - DNA, 15 bp, Homo sapiens
tctgaagggagaaga

SEQ ID NO: 1437085 - DNA, 15 bp, Homo sapiens
ttctgaagggagaag

SEQ ID NO: 1437086 - DNA, 15 bp, Homo sapiens
attctgaagggagaa

SEQ ID NO: 1437087 - DNA, 15 bp, Homo sapiens
gcattctgaagggag

SEQ ID NO: 1437088 - DNA, 15 bp, Homo sapiens
agcattctgaaggga

SEQ ID NO: 1437089 - DNA, 15 bp, Homo sapiens
cagcattctgaaggg

SEQ ID NO: 1437090 - DNA, 15 bp, Homo sapiens
ccagcattctgaagg

SEQ ID NO: 1437091 - DNA, 15 bp, Homo sapiens
cccagcattctgaag

SEQ ID NO: 1437092 - DNA, 15 bp, Homo sapiens
tcccagcattctgaa

SEQ ID NO: 1437093 - DNA, 15 bp, Homo sapiens
atcccagcattctga

SEQ ID NO: 1437094 - DNA, 15 bp, Homo sapiens
aatcccagcattctg

SEQ ID NO: 1437095 - DNA, 15 bp, Homo sapiens
taatcccagcattct

SEQ ID NO: 1437096 - DNA, 15 bp, Homo sapiens
gtaatcccagcattc

SEQ ID NO: 1437097 - DNA, 15 bp, Homo sapiens
gggctgggcatggtg

SEQ ID NO: 1437098 - DNA, 15 bp, Homo sapiens
tgggctgggcatggt

SEQ ID NO: 1437099 - DNA, 15 bp, Homo sapiens
atgggctgggcatgg

SEQ ID NO: 1437100 - DNA, 15 bp, Homo sapiens
aatgggctgggcatg

SEQ ID NO: 1437101 - DNA, 15 bp, Homo sapiens
aaatgggctgggcat

SEQ ID NO: 1437102 - DNA, 15 bp, Homo sapiens
aaaatgggctgggca

SEQ ID NO: 1437103 - DNA, 15 bp, Homo sapiens
caaaatgggctgggc

SEQ ID NO: 1437104 - DNA, 15 bp, Homo sapiens
gcaaaatgggctggg

SEQ ID NO: 1437105 - DNA, 15 bp, Homo sapiens
tgcaaaatgggctgg

SEQ ID NO: 1437106 - DNA, 15 bp, Homo sapiens
gtgcaaaatgggctg

SEQ ID NO: 1437107 - DNA, 15 bp, Homo sapiens
agtgcaaaatgggct

SEQ ID NO: 1437108 - DNA, 15 bp, Homo sapiens
aagtgcaaaatgggc

SEQ ID NO: 1437109 - DNA, 15 bp, Homo sapiens
aaagtgcaaaatggg

SEQ ID NO: 1437110 - DNA, 15 bp, Homo sapiens
aaaagtgcaaaatgg

SEQ ID NO: 1437111 - DNA, 15 bp, Homo sapiens
taaaagtgcaaaatg

SEQ ID NO: 1437112 - DNA, 15 bp, Homo sapiens
ataaaagtgcaaaat

SEQ ID NO: 1437113 - DNA, 15 bp, Homo sapiens
cataaaagtgcaaaa

SEQ ID NO: 1437114 - DNA, 15 bp, Homo sapiens
acataaaagtgcaaa

SEQ ID NO: 1437115 - DNA, 15 bp, Homo sapiens
aacataaaagtgcaa

SEQ ID NO: 1437116 - DNA, 15 bp, Homo sapiens
taacataaaagtgca

SEQ ID NO: 1437117 - DNA, 15 bp, Homo sapiens
ataacataaaagtgc

SEQ ID NO: 1437118 - DNA, 15 bp, Homo sapiens
cataacataaaagtg

SEQ ID NO: 1437119 - DNA, 15 bp, Homo sapiens
tcataacataaaagt

SEQ ID NO: 1437120 - DNA, 15 bp, Homo sapiens
ttcataacataaaag

SEQ ID NO: 1437121 - DNA, 15 bp, Homo sapiens
cttcataacataaaa

SEQ ID NO: 1437122 - DNA, 15 bp, Homo sapiens
tcttcataacataaa

SEQ ID NO: 1437123 - DNA, 15 bp, Homo sapiens
atcttcataacataa

SEQ ID NO: 1437124 - DNA, 15 bp, Homo sapiens
catcttcataacata

SEQ ID NO: 1437125 - DNA, 15 bp, Homo sapiens
ccatcttcataacat

SEQ ID NO: 1437126 - DNA, 15 bp, Homo sapiens
gccatcttcataaca

SEQ ID NO: 1437127 - DNA, 15 bp, Homo sapiens
agccatcttcataac

SEQ ID NO: 1437128 - DNA, 15 bp, Homo sapiens
aagccatcttcataa

SEQ ID NO: 1437129 - DNA, 15 bp, Homo sapiens
gaagccatcttcata

SEQ ID NO: 1437130 - DNA, 15 bp, Homo sapiens
agaagccatcttcat

SEQ ID NO: 1437131 - DNA, 15 bp, Homo sapiens
aagaagccatcttca

SEQ ID NO: 1437132 - DNA, 15 bp, Homo sapiens
aaagaagccatcttc

SEQ ID NO: 1437133 - DNA, 15 bp, Homo sapiens
aaaagaagccatctt

SEQ ID NO: 1437134 - DNA, 15 bp, Homo sapiens
gaaaagaagccatct

SEQ ID NO: 1437135 - DNA, 15 bp, Homo sapiens
agaaaagaagccatc

SEQ ID NO: 1437136 - DNA, 15 bp, Homo sapiens
aagaaaagaagccat

SEQ ID NO: 1437137 - DNA, 15 bp, Homo sapiens
taagaaaagaagcca

SEQ ID NO: 1437138 - DNA, 15 bp, Homo sapiens
ttaagaaaagaagcc

SEQ ID NO: 1437139 - DNA, 15 bp, Homo sapiens
tttaagaaaagaagc

SEQ ID NO: 1437140 - DNA, 15 bp, Homo sapiens
gtttaagaaaagaag

SEQ ID NO: 1437141 - DNA, 15 bp, Homo sapiens
ggtttaagaaaagaa

SEQ ID NO: 1437142 - DNA, 15 bp, Homo sapiens
aggtttaagaaaaga

SEQ ID NO: 1437143 - DNA, 15 bp, Homo sapiens
gaggtttaagaaaag

SEQ ID NO: 1437144 - DNA, 15 bp, Homo sapiens
tgaggtttaagaaaa

SEQ ID NO: 1437145 - DNA, 15 bp, Homo sapiens
atgaggtttaagaaa

SEQ ID NO: 1437146 - DNA, 15 bp, Homo sapiens
catgaggtttaagaa

SEQ ID NO: 1437147 - DNA, 15 bp, Homo sapiens
tcatgaggtttaaga

SEQ ID NO: 1437148 - DNA, 15 bp, Homo sapiens
ttcatgaggtttaag

SEQ ID NO: 1437149 - DNA, 15 bp, Homo sapiens
attcatgaggtttaa

SEQ ID NO: 1437150 - DNA, 15 bp, Homo sapiens
cattcatgaggttta

SEQ ID NO: 1437151 - DNA, 15 bp, Homo sapiens
tcattcatgaggttt

SEQ ID NO: 1437152 - DNA, 15 bp, Homo sapiens
ttcattcatgaggtt

SEQ ID NO: 1437153 - DNA, 15 bp, Homo sapiens
gttcattcatgaggt

SEQ ID NO: 1437154 - DNA, 15 bp, Homo sapiens
ggttcattcatgagg

SEQ ID NO: 1437155 - DNA, 15 bp, Homo sapiens
aggttcattcatgag

SEQ ID NO: 1437156 - DNA, 15 bp, Homo sapiens
gaggttcattcatga

SEQ ID NO: 1437157 - DNA, 15 bp, Homo sapiens
agaggttcattcatg

SEQ ID NO: 1437158 - DNA, 15 bp, Homo sapiens
cagaggttcattcat

SEQ ID NO: 1437159 - DNA, 15 bp, Homo sapiens
acagaggttcattca

SEQ ID NO: 1437160 - DNA, 15 bp, Homo sapiens
aacagaggttcattc

SEQ ID NO: 1437161 - DNA, 15 bp, Homo sapiens
taacagaggttcatt

SEQ ID NO: 1437162 - DNA, 15 bp, Homo sapiens
ctaacagaggttcat

SEQ ID NO: 1437163 - DNA, 15 bp, Homo sapiens
gctaacagaggttca

SEQ ID NO: 1437164 - DNA, 15 bp, Homo sapiens
agctaacagaggttc

SEQ ID NO: 1437165 - DNA, 15 bp, Homo sapiens
aagctaacagaggtt

SEQ ID NO: 1437166 - DNA, 15 bp, Homo sapiens
gaagctaacagaggt

SEQ ID NO: 1437167 - DNA, 15 bp, Homo sapiens
agaagctaacagagg

SEQ ID NO: 1437168 - DNA, 15 bp, Homo sapiens
cagaagctaacagag

SEQ ID NO: 1437169 - DNA, 15 bp, Homo sapiens
acagaagctaacaga

SEQ ID NO: 1437170 - DNA, 15 bp, Homo sapiens
tacagaagctaacag

SEQ ID NO: 1437171 - DNA, 15 bp, Homo sapiens
ctacagaagctaaca

SEQ ID NO: 1437172 - DNA, 15 bp, Homo sapiens
gctacagaagctaac

SEQ ID NO: 1437173 - DNA, 15 bp, Homo sapiens
agctacagaagctaa

SEQ ID NO: 1437174 - DNA, 15 bp, Homo sapiens
aagctacagaagcta

SEQ ID NO: 1437175 - DNA, 15 bp, Homo sapiens
gaagctacagaagct

SEQ ID NO: 1437176 - DNA, 15 bp, Homo sapiens
ggaagctacagaagc

SEQ ID NO: 1437177 - DNA, 15 bp, Homo sapiens
aggaagctacagaag

SEQ ID NO: 1437178 - DNA, 15 bp, Homo sapiens
gaggaagctacagaa

SEQ ID NO: 1437179 - DNA, 15 bp, Homo sapiens
tgaggaagctacaga

SEQ ID NO: 1437180 - DNA, 15 bp, Homo sapiens
gtgaggaagctacag

SEQ ID NO: 1437181 - DNA, 15 bp, Homo sapiens
agtgaggaagctaca

SEQ ID NO: 1437182 - DNA, 15 bp, Homo sapiens
aagtgaggaagctac

SEQ ID NO: 1437183 - DNA, 15 bp, Homo sapiens
gaagtgaggaagcta

SEQ ID NO: 1437184 - DNA, 15 bp, Homo sapiens
agaagtgaggaagct

SEQ ID NO: 1437185 - DNA, 15 bp, Homo sapiens
cagaagtgaggaagc

SEQ ID NO: 1437186 - DNA, 15 bp, Homo sapiens
ccagaagtgaggaag

SEQ ID NO: 1437187 - DNA, 15 bp, Homo sapiens
gccagaagtgaggaa

SEQ ID NO: 1437188 - DNA, 15 bp, Homo sapiens
tgccagaagtgagga

SEQ ID NO: 1437189 - DNA, 15 bp, Homo sapiens
ctgccagaagtgagg

SEQ ID NO: 1437190 - DNA, 15 bp, Homo sapiens
gctgccagaagtgag

SEQ ID NO: 1437191 - DNA, 15 bp, Homo sapiens
ggctgccagaagtga

SEQ ID NO: 1437192 - DNA, 15 bp, Homo sapiens
aggctgccagaagtg

SEQ ID NO: 1437193 - DNA, 15 bp, Homo sapiens
aaggctgccagaagt

SEQ ID NO: 1437194 - DNA, 15 bp, Homo sapiens
gaaggctgccagaag

SEQ ID NO: 1437195 - DNA, 15 bp, Homo sapiens
tgaaggctgccagaa

SEQ ID NO: 1437196 - DNA, 15 bp, Homo sapiens
atgaaggctgccaga

SEQ ID NO: 1437197 - DNA, 15 bp, Homo sapiens
tatgaaggctgccag

SEQ ID NO: 1437198 - DNA, 15 bp, Homo sapiens
ttatgaaggctgcca

SEQ ID NO: 1437199 - DNA, 15 bp, Homo sapiens
tttatgaaggctgcc

SEQ ID NO: 1437200 - DNA, 15 bp, Homo sapiens
ttttatgaaggctgc

SEQ ID NO: 1437201 - DNA, 15 bp, Homo sapiens
attttatgaaggctg

SEQ ID NO: 1437202 - DNA, 15 bp, Homo sapiens
aattttatgaaggct

SEQ ID NO: 1437203 - DNA, 15 bp, Homo sapiens
taattttatgaaggc

SEQ ID NO: 1437204 - DNA, 15 bp, Homo sapiens
ttaattttatgaagg

SEQ ID NO: 1437205 - DNA, 15 bp, Homo sapiens
tttaattttatgaag

SEQ ID NO: 1437206 - DNA, 15 bp, Homo sapiens
ctttaattttatgaa

SEQ ID NO: 1437207 - DNA, 15 bp, Homo sapiens
tctttaattttatga

SEQ ID NO: 1437208 - DNA, 15 bp, Homo sapiens
ctctttaattttatg

SEQ ID NO: 1437209 - DNA, 15 bp, Homo sapiens
cctctttaattttat

SEQ ID NO: 1437210 - DNA, 15 bp, Homo sapiens
ccctctttaatttta

SEQ ID NO: 1437211 - DNA, 15 bp, Homo sapiens
accctctttaatttt

SEQ ID NO: 1437212 - DNA, 15 bp, Homo sapiens
taccctctttaattt

SEQ ID NO: 1437213 - DNA, 15 bp, Homo sapiens
ctaccctctttaatt

SEQ ID NO: 1437214 - DNA, 15 bp, Homo sapiens
tctaccctctttaat

SEQ ID NO: 1437215 - DNA, 15 bp, Homo sapiens
ctctaccctctttaa

SEQ ID NO: 1437216 - DNA, 15 bp, Homo sapiens
gctctaccctcttta

SEQ ID NO: 1437217 - DNA, 15 bp, Homo sapiens
tgctctaccctcttt

SEQ ID NO: 1437218 - DNA, 15 bp, Homo sapiens
atgctctaccctctt

SEQ ID NO: 1437219 - DNA, 15 bp, Homo sapiens
aatgctctaccctct

SEQ ID NO: 1437220 - DNA, 15 bp, Homo sapiens
caatgctctaccctc

SEQ ID NO: 1437221 - DNA, 15 bp, Homo sapiens
gcaatgctctaccct

SEQ ID NO: 1437222 - DNA, 15 bp, Homo sapiens
agcaatgctctaccc

SEQ ID NO: 1437223 - DNA, 15 bp, Homo sapiens
gagcaatgctctacc

SEQ ID NO: 1437224 - DNA, 15 bp, Homo sapiens
agagcaatgctctac

SEQ ID NO: 1437225 - DNA, 15 bp, Homo sapiens
cagagcaatgctcta

SEQ ID NO: 1437226 - DNA, 15 bp, Homo sapiens
ccagagcaatgctct

SEQ ID NO: 1437227 - DNA, 15 bp, Homo sapiens
tccagagcaatgctc

SEQ ID NO: 1437228 - DNA, 15 bp, Homo sapiens
atccagagcaatgct

SEQ ID NO: 1437229 - DNA, 15 bp, Homo sapiens
aatccagagcaatgc

SEQ ID NO: 1437230 - DNA, 15 bp, Homo sapiens
taatccagagcaatg

SEQ ID NO: 1437231 - DNA, 15 bp, Homo sapiens
ctaatccagagcaat

SEQ ID NO: 1437232 - DNA, 15 bp, Homo sapiens
cctaatccagagcaa

SEQ ID NO: 1437233 - DNA, 15 bp, Homo sapiens
gcctaatccagagca

SEQ ID NO: 1437234 - DNA, 15 bp, Homo sapiens
agcctaatccagagc

SEQ ID NO: 1437235 - DNA, 15 bp, Homo sapiens
aagcctaatccagag

SEQ ID NO: 1437236 - DNA, 15 bp, Homo sapiens
aaagcctaatccaga

SEQ ID NO: 1437237 - DNA, 15 bp, Homo sapiens
caaagcctaatccag

SEQ ID NO: 1437238 - DNA, 15 bp, Homo sapiens
ccaaagcctaatcca

SEQ ID NO: 1437239 - DNA, 15 bp, Homo sapiens
gccaaagcctaatcc

SEQ ID NO: 1437240 - DNA, 15 bp, Homo sapiens
agccaaagcctaatc

SEQ ID NO: 1437241 - DNA, 15 bp, Homo sapiens
aagccaaagcctaat

SEQ ID NO: 1437242 - DNA, 15 bp, Homo sapiens
taagccaaagcctaa

SEQ ID NO: 1437243 - DNA, 15 bp, Homo sapiens
ttaagccaaagccta

SEQ ID NO: 1437244 - DNA, 15 bp, Homo sapiens
tttaagccaaagcct

SEQ ID NO: 1437245 - DNA, 15 bp, Homo sapiens
ctttaagccaaagcc

SEQ ID NO: 1437246 - DNA, 15 bp, Homo sapiens
tctttaagccaaagc

SEQ ID NO: 1437247 - DNA, 15 bp, Homo sapiens
ttctttaagccaaag

SEQ ID NO: 1437248 - DNA, 15 bp, Homo sapiens
tttctttaagccaaa

SEQ ID NO: 1437249 - DNA, 15 bp, Homo sapiens
atttctttaagccaa

SEQ ID NO: 1437250 - DNA, 15 bp, Homo sapiens
catttctttaagcca

SEQ ID NO: 1437251 - DNA, 15 bp, Homo sapiens
acatttctttaagcc

SEQ ID NO: 1437252 - DNA, 15 bp, Homo sapiens
aacatttctttaagc

SEQ ID NO: 1437253 - DNA, 15 bp, Homo sapiens
caacatttctttaag

SEQ ID NO: 1437254 - DNA, 15 bp, Homo sapiens
acaacatttctttaa

SEQ ID NO: 1437255 - DNA, 15 bp, Homo sapiens
cacaacatttcttta

SEQ ID NO: 1437256 - DNA, 15 bp, Homo sapiens
ccacaacatttcttt

SEQ ID NO: 1437257 - DNA, 15 bp, Homo sapiens
gccacaacatttctt

SEQ ID NO: 1437258 - DNA, 15 bp, Homo sapiens
agccacaacatttct

SEQ ID NO: 1437259 - DNA, 15 bp, Homo sapiens
cagccacaacatttc

SEQ ID NO: 1437260 - DNA, 15 bp, Homo sapiens
ccagccacaacattt

SEQ ID NO: 1437261 - DNA, 15 bp, Homo sapiens
accagccacaacatt

SEQ ID NO: 1437262 - DNA, 15 bp, Homo sapiens
aaccagccacaacat

SEQ ID NO: 1437263 - DNA, 15 bp, Homo sapiens
aaaccagccacaaca

SEQ ID NO: 1437264 - DNA, 15 bp, Homo sapiens
caaaccagccacaac

SEQ ID NO: 1437265 - DNA, 15 bp, Homo sapiens
tcaaaccagccacaa

SEQ ID NO: 1437266 - DNA, 15 bp, Homo sapiens
atcaaaccagccaca

SEQ ID NO: 1437267 - DNA, 15 bp, Homo sapiens
gatcaaaccagccac

SEQ ID NO: 1437268 - DNA, 15 bp, Homo sapiens
ggatcaaaccagcca

SEQ ID NO: 1437269 - DNA, 15 bp, Homo sapiens
aggatcaaaccagcc

SEQ ID NO: 1437270 - DNA, 15 bp, Homo sapiens
gaggatcaaaccagc

SEQ ID NO: 1437271 - DNA, 15 bp, Homo sapiens
agaggatcaaaccag

SEQ ID NO: 1437272 - DNA, 15 bp, Homo sapiens
tagaggatcaaacca

SEQ ID NO: 1437273 - DNA, 15 bp, Homo sapiens
atagaggatcaaacc

SEQ ID NO: 1437274 - DNA, 15 bp, Homo sapiens
gatagaggatcaaac

SEQ ID NO: 1437275 - DNA, 15 bp, Homo sapiens
ggatagaggatcaaa

SEQ ID NO: 1437276 - DNA, 15 bp, Homo sapiens
tggatagaggatcaa

SEQ ID NO: 1437277 - DNA, 15 bp, Homo sapiens
ctggatagaggatca

SEQ ID NO: 1437278 - DNA, 15 bp, Homo sapiens
tctggatagaggatc

SEQ ID NO: 1437279 - DNA, 15 bp, Homo sapiens
gtctggatagaggat

SEQ ID NO: 1437280 - DNA, 15 bp, Homo sapiens
ggtctggatagagga

SEQ ID NO: 1437281 - DNA, 15 bp, Homo sapiens
tggtctggatagagg

SEQ ID NO: 1437282 - DNA, 15 bp, Homo sapiens
gtggtctggatagag

SEQ ID NO: 1437283 - DNA, 15 bp, Homo sapiens
agtggtctggataga

SEQ ID NO: 1437284 - DNA, 15 bp, Homo sapiens
tagtggtctggatag

SEQ ID NO: 1437285 - DNA, 15 bp, Homo sapiens
ttagtggtctggata

SEQ ID NO: 1437286 - DNA, 15 bp, Homo sapiens
tttagtggtctggat

SEQ ID NO: 1437287 - DNA, 15 bp, Homo sapiens
gtttagtggtctgga

SEQ ID NO: 1437288 - DNA, 15 bp, Homo sapiens
ggtttagtggtctgg

SEQ ID NO: 1437289 - DNA, 15 bp, Homo sapiens
aggtttagtggtctg

SEQ ID NO: 1437290 - DNA, 15 bp, Homo sapiens
aaggtttagtggtct

SEQ ID NO: 1437291 - DNA, 15 bp, Homo sapiens
aaaggtttagtggtc

SEQ ID NO: 1437292 - DNA, 15 bp, Homo sapiens
gaaaggtttagtggt

SEQ ID NO: 1437293 - DNA, 15 bp, Homo sapiens
agaaaggtttagtgg

SEQ ID NO: 1437294 - DNA, 15 bp, Homo sapiens
gagaaaggtttagtg

SEQ ID NO: 1437295 - DNA, 15 bp, Homo sapiens
ggagaaaggtttagt

SEQ ID NO: 1437296 - DNA, 15 bp, Homo sapiens
tggagaaaggtttag

SEQ ID NO: 1437297 - DNA, 15 bp, Homo sapiens
atggagaaaggttta

SEQ ID NO: 1437298 - DNA, 15 bp, Homo sapiens
tatggagaaaggttt

SEQ ID NO: 1437299 - DNA, 15 bp, Homo sapiens
atatggagaaaggtt

SEQ ID NO: 1437300 - DNA, 15 bp, Homo sapiens
gatatggagaaaggt

SEQ ID NO: 1437301 - DNA, 15 bp, Homo sapiens
tgatatggagaaagg

SEQ ID NO: 1437302 - DNA, 15 bp, Homo sapiens
ctgatatggagaaag

SEQ ID NO: 1437303 - DNA, 15 bp, Homo sapiens
gctgatatggagaaa

SEQ ID NO: 1437304 - DNA, 15 bp, Homo sapiens
tgctgatatggagaa

SEQ ID NO: 1437305 - DNA, 15 bp, Homo sapiens
ttgctgatatggaga

SEQ ID NO: 1437306 - DNA, 15 bp, Homo sapiens
attgctgatatggag

SEQ ID NO: 1437307 - DNA, 15 bp, Homo sapiens
tattgctgatatgga

SEQ ID NO: 1437308 - DNA, 15 bp, Homo sapiens
ttattgctgatatgg

SEQ ID NO: 1437309 - DNA, 15 bp, Homo sapiens
cttattgctgatatg

SEQ ID NO: 1437310 - DNA, 15 bp, Homo sapiens
ccttattgctgatat

SEQ ID NO: 1437311 - DNA, 15 bp, Homo sapiens
gccttattgctgata

SEQ ID NO: 1437312 - DNA, 15 bp, Homo sapiens
agccttattgctgat

SEQ ID NO: 1437313 - DNA, 15 bp, Homo sapiens
cagccttattgctga

SEQ ID NO: 1437314 - DNA, 15 bp, Homo sapiens
acagccttattgctg

SEQ ID NO: 1437315 - DNA, 15 bp, Homo sapiens
aacagccttattgct

SEQ ID NO: 1437316 - DNA, 15 bp, Homo sapiens
aaacagccttattgc

SEQ ID NO: 1437317 - DNA, 15 bp, Homo sapiens
gaaacagccttattg

SEQ ID NO: 1437318 - DNA, 15 bp, Homo sapiens
tgaaacagccttatt

SEQ ID NO: 1437319 - DNA, 15 bp, Homo sapiens
gtgaaacagccttat

SEQ ID NO: 1437320 - DNA, 15 bp, Homo sapiens
agtgaaacagcctta

SEQ ID NO: 1437321 - DNA, 15 bp, Homo sapiens
aagtgaaacagcctt

SEQ ID NO: 1437322 - DNA, 15 bp, Homo sapiens
aaagtgaaacagcct

SEQ ID NO: 1437323 - DNA, 15 bp, Homo sapiens
gaaagtgaaacagcc

SEQ ID NO: 1437324 - DNA, 15 bp, Homo sapiens
agaaagtgaaacagc

SEQ ID NO: 1437325 - DNA, 15 bp, Homo sapiens
aagaaagtgaaacag

SEQ ID NO: 1437326 - DNA, 15 bp, Homo sapiens
taagaaagtgaaaca

SEQ ID NO: 1437327 - DNA, 15 bp, Homo sapiens
ataagaaagtgaaac

SEQ ID NO: 1437328 - DNA, 15 bp, Homo sapiens
gataagaaagtgaaa

SEQ ID NO: 1437329 - DNA, 15 bp, Homo sapiens
tgataagaaagtgaa

SEQ ID NO: 1437330 - DNA, 15 bp, Homo sapiens
atgataagaaagtga

SEQ ID NO: 1437331 - DNA, 15 bp, Homo sapiens
aatgataagaaagtg

SEQ ID NO: 1437332 - DNA, 15 bp, Homo sapiens
gaatgataagaaagt

SEQ ID NO: 1437333 - DNA, 15 bp, Homo sapiens
cgaatgataagaaag

SEQ ID NO: 1437334 - DNA, 15 bp, Homo sapiens
acgaatgataagaaa

SEQ ID NO: 1437335 - DNA, 15 bp, Homo sapiens
cacgaatgataagaa

SEQ ID NO: 1437336 - DNA, 15 bp, Homo sapiens
acacgaatgataaga

SEQ ID NO: 1437337 - DNA, 15 bp, Homo sapiens
cacacgaatgataag

SEQ ID NO: 1437338 - DNA, 15 bp, Homo sapiens
acacacgaatgataa

SEQ ID NO: 1437339 - DNA, 15 bp, Homo sapiens
aacacacgaatgata

SEQ ID NO: 1437340 - DNA, 15 bp, Homo sapiens
gaacacacgaatgat

SEQ ID NO: 1437341 - DNA, 15 bp, Homo sapiens
tgaacacacgaatga

SEQ ID NO: 1437342 - DNA, 15 bp, Homo sapiens
gtgaacacacgaatg

SEQ ID NO: 1437343 - DNA, 15 bp, Homo sapiens
agtgaacacacgaat

SEQ ID NO: 1437344 - DNA, 15 bp, Homo sapiens
tagtgaacacacgaa

SEQ ID NO: 1437345 - DNA, 15 bp, Homo sapiens
ctagtgaacacacga

SEQ ID NO: 1437346 - DNA, 15 bp, Homo sapiens
tctagtgaacacacg

SEQ ID NO: 1437347 - DNA, 15 bp, Homo sapiens
ctctagtgaacacac

SEQ ID NO: 1437348 - DNA, 15 bp, Homo sapiens
actctagtgaacaca

SEQ ID NO: 1437349 - DNA, 15 bp, Homo sapiens
tactctagtgaacac

SEQ ID NO: 1437350 - DNA, 15 bp, Homo sapiens
ctactctagtgaaca

SEQ ID NO: 1437351 - DNA, 15 bp, Homo sapiens
gctactctagtgaac

SEQ ID NO: 1437352 - DNA, 15 bp, Homo sapiens
tgctactctagtgaa

SEQ ID NO: 1437353 - DNA, 15 bp, Homo sapiens
gtgctactctagtga

SEQ ID NO: 1437354 - DNA, 15 bp, Homo sapiens
agtgctactctagtg

SEQ ID NO: 1437355 - DNA, 15 bp, Homo sapiens
aagtgctactctagt

SEQ ID NO: 1437356 - DNA, 15 bp, Homo sapiens
aaagtgctactctag

SEQ ID NO: 1437357 - DNA, 15 bp, Homo sapiens
caaagtgctactcta

SEQ ID NO: 1437358 - DNA, 15 bp, Homo sapiens
tcaaagtgctactct

SEQ ID NO: 1437359 - DNA, 15 bp, Homo sapiens
ttcaaagtgctactc

SEQ ID NO: 1437360 - DNA, 15 bp, Homo sapiens
attcaaagtgctact

SEQ ID NO: 1437361 - DNA, 15 bp, Homo sapiens
aattcaaagtgctac

SEQ ID NO: 1437362 - DNA, 15 bp, Homo sapiens
aaattcaaagtgcta

SEQ ID NO: 1437363 - DNA, 15 bp, Homo sapiens
aaaattcaaagtgct

SEQ ID NO: 1437364 - DNA, 15 bp, Homo sapiens
aaaaattcaaagtgc

SEQ ID NO: 1437365 - DNA, 15 bp, Homo sapiens
aaaaaattcaaagtg

SEQ ID NO: 1437366 - DNA, 15 bp, Homo sapiens
aaaaaaattcaaagt

SEQ ID NO: 1437367 - DNA, 15 bp, Homo sapiens
caaaaaaattcaaag

SEQ ID NO: 1437368 - DNA, 15 bp, Homo sapiens
gcaaaaaaattcaaa

SEQ ID NO: 1437369 - DNA, 15 bp, Homo sapiens
tgcaaaaaaattcaa

SEQ ID NO: 1437370 - DNA, 15 bp, Homo sapiens
ctgcaaaaaaattca

SEQ ID NO: 1437371 - DNA, 15 bp, Homo sapiens
tctgcaaaaaaattc

SEQ ID NO: 1437372 - DNA, 15 bp, Homo sapiens
ttctgcaaaaaaatt

SEQ ID NO: 1437373 - DNA, 15 bp, Homo sapiens
gcttctgcaaaaaaa

SEQ ID NO: 1437374 - DNA, 15 bp, Homo sapiens
agcttctgcaaaaaa

SEQ ID NO: 1437375 - DNA, 15 bp, Homo sapiens
aagcttctgcaaaaa

SEQ ID NO: 1437376 - DNA, 15 bp, Homo sapiens
aaagcttctgcaaaa

SEQ ID NO: 1437377 - DNA, 15 bp, Homo sapiens
aaaagcttctgcaaa

SEQ ID NO: 1437378 - DNA, 15 bp, Homo sapiens
gaaaagcttctgcaa

SEQ ID NO: 1437379 - DNA, 15 bp, Homo sapiens
ggaaaagcttctgca

SEQ ID NO: 1437380 - DNA, 15 bp, Homo sapiens
aggaaaagcttctgc

SEQ ID NO: 1437381 - DNA, 15 bp, Homo sapiens
gaggaaaagcttctg

SEQ ID NO: 1437382 - DNA, 15 bp, Homo sapiens
agaggaaaagcttct

SEQ ID NO: 1437383 - DNA, 15 bp, Homo sapiens
cagaggaaaagcttc

SEQ ID NO: 1437384 - DNA, 15 bp, Homo sapiens
gcagaggaaaagctt

SEQ ID NO: 1437385 - DNA, 15 bp, Homo sapiens
tgcagaggaaaagct

SEQ ID NO: 1437386 - DNA, 15 bp, Homo sapiens
atgcagaggaaaagc

SEQ ID NO: 1437387 - DNA, 15 bp, Homo sapiens
aatgcagaggaaaag

SEQ ID NO: 1437388 - DNA, 15 bp, Homo sapiens
gaatgcagaggaaaa

SEQ ID NO: 1437389 - DNA, 15 bp, Homo sapiens
tgaatgcagaggaaa

SEQ ID NO: 1437390 - DNA, 15 bp, Homo sapiens
gtgaatgcagaggaa

SEQ ID NO: 1437391 - DNA, 15 bp, Homo sapiens
tgtgaatgcagagga

SEQ ID NO: 1437392 - DNA, 15 bp, Homo sapiens
ttgtgaatgcagagg

SEQ ID NO: 1437393 - DNA, 15 bp, Homo sapiens
gttgtgaatgcagag

SEQ ID NO: 1437394 - DNA, 15 bp, Homo sapiens
agttgtgaatgcaga

SEQ ID NO: 1437395 - DNA, 15 bp, Homo sapiens
aagttgtgaatgcag

SEQ ID NO: 1437396 - DNA, 15 bp, Homo sapiens
caagttgtgaatgca

SEQ ID NO: 1437397 - DNA, 15 bp, Homo sapiens
ccaagttgtgaatgc

SEQ ID NO: 1437398 - DNA, 15 bp, Homo sapiens
gccaagttgtgaatg

SEQ ID NO: 1437399 - DNA, 15 bp, Homo sapiens
agccaagttgtgaat

SEQ ID NO: 1437400 - DNA, 15 bp, Homo sapiens
cagccaagttgtgaa

SEQ ID NO: 1437401 - DNA, 15 bp, Homo sapiens
acagccaagttgtga

SEQ ID NO: 1437402 - DNA, 15 bp, Homo sapiens
aacagccaagttgtg

SEQ ID NO: 1437403 - DNA, 15 bp, Homo sapiens
aaacagccaagttgt

SEQ ID NO: 1437404 - DNA, 15 bp, Homo sapiens
caaacagccaagttg

SEQ ID NO: 1437405 - DNA, 15 bp, Homo sapiens
ccaaacagccaagtt

SEQ ID NO: 1437406 - DNA, 15 bp, Homo sapiens
gccaaacagccaagt

SEQ ID NO: 1437407 - DNA, 15 bp, Homo sapiens
tgccaaacagccaag

SEQ ID NO: 1437408 - DNA, 15 bp, Homo sapiens
ctgccaaacagccaa

SEQ ID NO: 1437409 - DNA, 15 bp, Homo sapiens
tctgccaaacagcca

SEQ ID NO: 1437410 - DNA, 15 bp, Homo sapiens
ttctgccaaacagcc

SEQ ID NO: 1437411 - DNA, 15 bp, Homo sapiens
cttctgccaaacagc

SEQ ID NO: 1437412 - DNA, 15 bp, Homo sapiens
tcttctgccaaacag

SEQ ID NO: 1437413 - DNA, 15 bp, Homo sapiens
ctcttctgccaaaca

SEQ ID NO: 1437414 - DNA, 15 bp, Homo sapiens
cctcttctgccaaac

SEQ ID NO: 1437415 - DNA, 15 bp, Homo sapiens
gcctcttctgccaaa

SEQ ID NO: 1437416 - DNA, 15 bp, Homo sapiens
ggcctcttctgccaa

SEQ ID NO: 1437417 - DNA, 15 bp, Homo sapiens
aggcctcttctgcca

SEQ ID NO: 1437418 - DNA, 15 bp, Homo sapiens
taggcctcttctgcc

SEQ ID NO: 1437419 - DNA, 15 bp, Homo sapiens
gtaggcctcttctgc

SEQ ID NO: 1437420 - DNA, 15 bp, Homo sapiens
ggtaggcctcttctg

SEQ ID NO: 1437421 - DNA, 15 bp, Homo sapiens
aggtaggcctcttct

SEQ ID NO: 1437422 - DNA, 15 bp, Homo sapiens
aaggtaggcctcttc

SEQ ID NO: 1437423 - DNA, 15 bp, Homo sapiens
aaaggtaggcctctt

SEQ ID NO: 1437424 - DNA, 15 bp, Homo sapiens
gaaaggtaggcctct

SEQ ID NO: 1437425 - DNA, 15 bp, Homo sapiens
tgaaaggtaggcctc

SEQ ID NO: 1437426 - DNA, 15 bp, Homo sapiens
ctgaaaggtaggcct

SEQ ID NO: 1437427 - DNA, 15 bp, Homo sapiens
gctgaaaggtaggcc

SEQ ID NO: 1437428 - DNA, 15 bp, Homo sapiens
ggctgaaaggtaggc

SEQ ID NO: 1437429 - DNA, 15 bp, Homo sapiens
aggctgaaaggtagg

SEQ ID NO: 1437430 - DNA, 15 bp, Homo sapiens
caggctgaaaggtag

SEQ ID NO: 1437431 - DNA, 15 bp, Homo sapiens
acaggctgaaaggta

SEQ ID NO: 1437432 - DNA, 15 bp, Homo sapiens
gacaggctgaaaggt

SEQ ID NO: 1437433 - DNA, 15 bp, Homo sapiens
agacaggctgaaagg

SEQ ID NO: 1437434 - DNA, 15 bp, Homo sapiens
gagacaggctgaaag

SEQ ID NO: 1437435 - DNA, 15 bp, Homo sapiens
tgagacaggctgaaa

SEQ ID NO: 1437436 - DNA, 15 bp, Homo sapiens
ctgagacaggctgaa

SEQ ID NO: 1437437 - DNA, 15 bp, Homo sapiens
gctgagacaggctga

SEQ ID NO: 1437438 - DNA, 15 bp, Homo sapiens
agctgagacaggctg

SEQ ID NO: 1437439 - DNA, 15 bp, Homo sapiens
aagctgagacaggct

SEQ ID NO: 1437440 - DNA, 15 bp, Homo sapiens
aaagctgagacaggc

SEQ ID NO: 1437441 - DNA, 15 bp, Homo sapiens
aaaagctgagacagg

SEQ ID NO: 1437442 - DNA, 15 bp, Homo sapiens
caaaagctgagacag

SEQ ID NO: 1437443 - DNA, 15 bp, Homo sapiens
tcaaaagctgagaca

SEQ ID NO: 1437444 - DNA, 15 bp, Homo sapiens
atcaaaagctgagac

SEQ ID NO: 1437445 - DNA, 15 bp, Homo sapiens
catcaaaagctgaga

SEQ ID NO: 1437446 - DNA, 15 bp, Homo sapiens
acatcaaaagctgag

SEQ ID NO: 1437447 - DNA, 15 bp, Homo sapiens
cacatcaaaagctga

SEQ ID NO: 1437448 - DNA, 15 bp, Homo sapiens
gcacatcaaaagctg

SEQ ID NO: 1437449 - DNA, 15 bp, Homo sapiens
agcacatcaaaagct

SEQ ID NO: 1437450 - DNA, 15 bp, Homo sapiens
gagcacatcaaaagc

SEQ ID NO: 1437451 - DNA, 15 bp, Homo sapiens
agagcacatcaaaag

SEQ ID NO: 1437452 - DNA, 15 bp, Homo sapiens
gagagcacatcaaaa

SEQ ID NO: 1437453 - DNA, 15 bp, Homo sapiens
ggagagcacatcaaa

SEQ ID NO: 1437454 - DNA, 15 bp, Homo sapiens
aggagagcacatcaa

SEQ ID NO: 1437455 - DNA, 15 bp, Homo sapiens
gaggagagcacatca

SEQ ID NO: 1437456 - DNA, 15 bp, Homo sapiens
tgaggagagcacatc

SEQ ID NO: 1437457 - DNA, 15 bp, Homo sapiens
atgaggagagcacat

SEQ ID NO: 1437458 - DNA, 15 bp, Homo sapiens
aatgaggagagcaca

SEQ ID NO: 1437459 - DNA, 15 bp, Homo sapiens
taatgaggagagcac

SEQ ID NO: 1437460 - DNA, 15 bp, Homo sapiens
ttaatgaggagagca

SEQ ID NO: 1437461 - DNA, 15 bp, Homo sapiens
cttaatgaggagagc

SEQ ID NO: 1437462 - DNA, 15 bp, Homo sapiens
gcttaatgaggagag

SEQ ID NO: 1437463 - DNA, 15 bp, Homo sapiens
agcttaatgaggaga

SEQ ID NO: 1437464 - DNA, 15 bp, Homo sapiens
aagcttaatgaggag

SEQ ID NO: 1437465 - DNA, 15 bp, Homo sapiens
taagcttaatgagga

SEQ ID NO: 1437466 - DNA, 15 bp, Homo sapiens
ctaagcttaatgagg

SEQ ID NO: 1437467 - DNA, 15 bp, Homo sapiens
actaagcttaatgag

SEQ ID NO: 1437468 - DNA, 15 bp, Homo sapiens
gactaagcttaatga

SEQ ID NO: 1437469 - DNA, 15 bp, Homo sapiens
tgactaagcttaatg

SEQ ID NO: 1437470 - DNA, 15 bp, Homo sapiens
atgactaagcttaat

SEQ ID NO: 1437471 - DNA, 15 bp, Homo sapiens
aatgactaagcttaa

SEQ ID NO: 1437472 - DNA, 15 bp, Homo sapiens
aaatgactaagctta

SEQ ID NO: 1437473 - DNA, 15 bp, Homo sapiens
gaaatgactaagctt

SEQ ID NO: 1437474 - DNA, 15 bp, Homo sapiens
agaaatgactaagct

SEQ ID NO: 1437475 - DNA, 15 bp, Homo sapiens
tagaaatgactaagc

SEQ ID NO: 1437476 - DNA, 15 bp, Homo sapiens
ctagaaatgactaag

SEQ ID NO: 1437477 - DNA, 15 bp, Homo sapiens
actagaaatgactaa

SEQ ID NO: 1437478 - DNA, 15 bp, Homo sapiens
aactagaaatgacta

SEQ ID NO: 1437479 - DNA, 15 bp, Homo sapiens
aaactagaaatgact

SEQ ID NO: 1437480 - DNA, 15 bp, Homo sapiens
aaaactagaaatgac

SEQ ID NO: 1437481 - DNA, 15 bp, Homo sapiens
aaaaactagaaatga

SEQ ID NO: 1437482 - DNA, 15 bp, Homo sapiens
taaaaactagaaatg

SEQ ID NO: 1437483 - DNA, 15 bp, Homo sapiens
ttaaaaactagaaat

SEQ ID NO: 1437484 - DNA, 15 bp, Homo sapiens
attaaaaactagaaa

SEQ ID NO: 1437485 - DNA, 15 bp, Homo sapiens
aattaaaaactagaa

SEQ ID NO: 1437486 - DNA, 15 bp, Homo sapiens
aaattaaaaactaga

SEQ ID NO: 1437487 - DNA, 15 bp, Homo sapiens
taaattaaaaactag

SEQ ID NO: 1437488 - DNA, 15 bp, Homo sapiens
ctaaattaaaaacta

SEQ ID NO: 1437489 - DNA, 15 bp, Homo sapiens
tctaaattaaaaact

SEQ ID NO: 1437490 - DNA, 15 bp, Homo sapiens
ctctaaattaaaaac

SEQ ID NO: 1437491 - DNA, 15 bp, Homo sapiens
actctaaattaaaaa

SEQ ID NO: 1437492 - DNA, 15 bp, Homo sapiens
cactctaaattaaaa

SEQ ID NO: 1437493 - DNA, 15 bp, Homo sapiens
tcactctaaattaaa

SEQ ID NO: 1437494 - DNA, 15 bp, Homo sapiens
ctcactctaaattaa

SEQ ID NO: 1437495 - DNA, 15 bp, Homo sapiens
tctcactctaaatta

SEQ ID NO: 1437496 - DNA, 15 bp, Homo sapiens
ctctcactctaaatt

SEQ ID NO: 1437497 - DNA, 15 bp, Homo sapiens
tctctcactctaaat

SEQ ID NO: 1437498 - DNA, 15 bp, Homo sapiens
gtctctcactctaaa

SEQ ID NO: 1437499 - DNA, 15 bp, Homo sapiens
tgtctctcactctaa

SEQ ID NO: 1437500 - DNA, 15 bp, Homo sapiens
ttgtctctcactcta

SEQ ID NO: 1437501 - DNA, 15 bp, Homo sapiens
attgtctctcactct

SEQ ID NO: 1437502 - DNA, 15 bp, Homo sapiens
cattgtctctcactc

SEQ ID NO: 1437503 - DNA, 15 bp, Homo sapiens
tcattgtctctcact

SEQ ID NO: 1437504 - DNA, 15 bp, Homo sapiens
gtcattgtctctcac

SEQ ID NO: 1437505 - DNA, 15 bp, Homo sapiens
agtcattgtctctca

SEQ ID NO: 1437506 - DNA, 15 bp, Homo sapiens
gagtcattgtctctc

SEQ ID NO: 1437507 - DNA, 15 bp, Homo sapiens
agagtcattgtctct

SEQ ID NO: 1437508 - DNA, 15 bp, Homo sapiens
aagagtcattgtctc

SEQ ID NO: 1437509 - DNA, 15 bp, Homo sapiens
gaagagtcattgtct

SEQ ID NO: 1437510 - DNA, 15 bp, Homo sapiens
ggaagagtcattgtc

SEQ ID NO: 1437511 - DNA, 15 bp, Homo sapiens
aggaagagtcattgt

SEQ ID NO: 1437512 - DNA, 15 bp, Homo sapiens
aaggaagagtcattg

SEQ ID NO: 1437513 - DNA, 15 bp, Homo sapiens
aaaggaagagtcatt

SEQ ID NO: 1437514 - DNA, 15 bp, Homo sapiens
gaaaggaagagtcat

SEQ ID NO: 1437515 - DNA, 15 bp, Homo sapiens
tgaaaggaagagtca

SEQ ID NO: 1437516 - DNA, 15 bp, Homo sapiens
gtgaaaggaagagtc

SEQ ID NO: 1437517 - DNA, 15 bp, Homo sapiens
agtgaaaggaagagt

SEQ ID NO: 1437518 - DNA, 15 bp, Homo sapiens
aagtgaaaggaagag

SEQ ID NO: 1437519 - DNA, 15 bp, Homo sapiens
caagtgaaaggaaga

SEQ ID NO: 1437520 - DNA, 15 bp, Homo sapiens
tcaagtgaaaggaag

SEQ ID NO: 1437521 - DNA, 15 bp, Homo sapiens
ttcaagtgaaaggaa

SEQ ID NO: 1437522 - DNA, 15 bp, Homo sapiens
gttcaagtgaaagga

SEQ ID NO: 1437523 - DNA, 15 bp, Homo sapiens
tgttcaagtgaaagg

SEQ ID NO: 1437524 - DNA, 15 bp, Homo sapiens
gtgttcaagtgaaag

SEQ ID NO: 1437525 - DNA, 15 bp, Homo sapiens
agtgttcaagtgaaa

SEQ ID NO: 1437526 - DNA, 15 bp, Homo sapiens
aagtgttcaagtgaa

SEQ ID NO: 1437527 - DNA, 15 bp, Homo sapiens
taagtgttcaagtga

SEQ ID NO: 1437528 - DNA, 15 bp, Homo sapiens
ctaagtgttcaagtg

SEQ ID NO: 1437529 - DNA, 15 bp, Homo sapiens
tctaagtgttcaagt

SEQ ID NO: 1437530 - DNA, 15 bp, Homo sapiens
ctctaagtgttcaag

SEQ ID NO: 1437531 - DNA, 15 bp, Homo sapiens
cctctaagtgttcaa

SEQ ID NO: 1437532 - DNA, 15 bp, Homo sapiens
gcctctaagtgttca

SEQ ID NO: 1437533 - DNA, 15 bp, Homo sapiens
agcctctaagtgttc

SEQ ID NO: 1437534 - DNA, 15 bp, Homo sapiens
cagcctctaagtgtt

SEQ ID NO: 1437535 - DNA, 15 bp, Homo sapiens
acagcctctaagtgt

SEQ ID NO: 1437536 - DNA, 15 bp, Homo sapiens
aacagcctctaagtg

SEQ ID NO: 1437537 - DNA, 15 bp, Homo sapiens
caacagcctctaagt

SEQ ID NO: 1437538 - DNA, 15 bp, Homo sapiens
acaacagcctctaag

SEQ ID NO: 1437539 - DNA, 15 bp, Homo sapiens
tacaacagcctctaa

SEQ ID NO: 1437540 - DNA, 15 bp, Homo sapiens
ctacaacagcctcta

SEQ ID NO: 1437541 - DNA, 15 bp, Homo sapiens
tctacaacagcctct

SEQ ID NO: 1437542 - DNA, 15 bp, Homo sapiens
ctctacaacagcctc

SEQ ID NO: 1437543 - DNA, 15 bp, Homo sapiens
cctctacaacagcct

SEQ ID NO: 1437544 - DNA, 15 bp, Homo sapiens
acctctacaacagcc

SEQ ID NO: 1437545 - DNA, 15 bp, Homo sapiens
tacctctacaacagc

SEQ ID NO: 1437546 - DNA, 15 bp, Homo sapiens
atacctctacaacag

SEQ ID NO: 1437547 - DNA, 15 bp, Homo sapiens
aatacctctacaaca

SEQ ID NO: 1437548 - DNA, 15 bp, Homo sapiens
taatacctctacaac

SEQ ID NO: 1437549 - DNA, 15 bp, Homo sapiens
ttaatacctctacaa

SEQ ID NO: 1437550 - DNA, 15 bp, Homo sapiens
aaaaaaacaacaaac

SEQ ID NO: 1437551 - DNA, 15 bp, Homo sapiens
aaaaaaaacaacaaa

SEQ ID NO: 1437552 - DNA, 15 bp, Homo sapiens
aaaaaaaaacaacaa

SEQ ID NO: 1437553 - DNA, 15 bp, Homo sapiens
aaaaaaaaaacaaca

SEQ ID NO: 1437554 - DNA, 15 bp, Homo sapiens
ccttaaaaaaaaaaa

SEQ ID NO: 1437555 - DNA, 15 bp, Homo sapiens
tccttaaaaaaaaaa

SEQ ID NO: 1437556 - DNA, 15 bp, Homo sapiens
ctccttaaaaaaaaa

SEQ ID NO: 1437557 - DNA, 15 bp, Homo sapiens
tctccttaaaaaaaa

SEQ ID NO: 1437558 - DNA, 15 bp, Homo sapiens
atctccttaaaaaaa

SEQ ID NO: 1437559 - DNA, 15 bp, Homo sapiens
catctccttaaaaaa

SEQ ID NO: 1437560 - DNA, 15 bp, Homo sapiens
ccatctccttaaaaa

SEQ ID NO: 1437561 - DNA, 15 bp, Homo sapiens
cccatctccttaaaa

SEQ ID NO: 1437562 - DNA, 15 bp, Homo sapiens
ccccatctccttaaa

SEQ ID NO: 1437563 - DNA, 15 bp, Homo sapiens
tccccatctccttaa

SEQ ID NO: 1437564 - DNA, 15 bp, Homo sapiens
ttccccatctcctta

SEQ ID NO: 1437565 - DNA, 15 bp, Homo sapiens
tttccccatctcctt

SEQ ID NO: 1437566 - DNA, 15 bp, Homo sapiens
ctttccccatctcct

SEQ ID NO: 1437567 - DNA, 15 bp, Homo sapiens
cctttccccatctcc

SEQ ID NO: 1437568 - DNA, 15 bp, Homo sapiens
acctttccccatctc

SEQ ID NO: 1437569 - DNA, 15 bp, Homo sapiens
cacctttccccatct

SEQ ID NO: 1437570 - DNA, 15 bp, Homo sapiens
gcacctttccccatc

SEQ ID NO: 1437571 - DNA, 15 bp, Homo sapiens
agcacctttccccat

SEQ ID NO: 1437572 - DNA, 15 bp, Homo sapiens
aagcacctttcccca

SEQ ID NO: 1437573 - DNA, 15 bp, Homo sapiens
aaagcacctttcccc

SEQ ID NO: 1437574 - DNA, 15 bp, Homo sapiens
gaaagcacctttccc

SEQ ID NO: 1437575 - DNA, 15 bp, Homo sapiens
tgaaagcacctttcc

SEQ ID NO: 1437576 - DNA, 15 bp, Homo sapiens
atgaaagcacctttc

SEQ ID NO: 1437577 - DNA, 15 bp, Homo sapiens
catgaaagcaccttt

SEQ ID NO: 1437578 - DNA, 15 bp, Homo sapiens
tcatgaaagcacctt

SEQ ID NO: 1437579 - DNA, 15 bp, Homo sapiens
ttcatgaaagcacct

SEQ ID NO: 1437580 - DNA, 15 bp, Homo sapiens
gttcatgaaagcacc

SEQ ID NO: 1437581 - DNA, 15 bp, Homo sapiens
agttcatgaaagcac

SEQ ID NO: 1437582 - DNA, 15 bp, Homo sapiens
gagttcatgaaagca

SEQ ID NO: 1437583 - DNA, 15 bp, Homo sapiens
agagttcatgaaagc

SEQ ID NO: 1437584 - DNA, 15 bp, Homo sapiens
gagagttcatgaaag

SEQ ID NO: 1437585 - DNA, 15 bp, Homo sapiens
tgagagttcatgaaa

SEQ ID NO: 1437586 - DNA, 15 bp, Homo sapiens
atgagagttcatgaa

SEQ ID NO: 1437587 - DNA, 15 bp, Homo sapiens
catgagagttcatga

SEQ ID NO: 1437588 - DNA, 15 bp, Homo sapiens
gcatgagagttcatg

SEQ ID NO: 1437589 - DNA, 15 bp, Homo sapiens
tgcatgagagttcat

SEQ ID NO: 1437590 - DNA, 15 bp, Homo sapiens
ctgcatgagagttca

SEQ ID NO: 1437591 - DNA, 15 bp, Homo sapiens
cctgcatgagagttc

SEQ ID NO: 1437592 - DNA, 15 bp, Homo sapiens
acctgcatgagagtt

SEQ ID NO: 1437593 - DNA, 15 bp, Homo sapiens
aacctgcatgagagt

SEQ ID NO: 1437594 - DNA, 15 bp, Homo sapiens
gaacctgcatgagag

SEQ ID NO: 1437595 - DNA, 15 bp, Homo sapiens
agaacctgcatgaga

SEQ ID NO: 1437596 - DNA, 15 bp, Homo sapiens
aagaacctgcatgag

SEQ ID NO: 1437597 - DNA, 15 bp, Homo sapiens
aaagaacctgcatga

SEQ ID NO: 1437598 - DNA, 15 bp, Homo sapiens
caaagaacctgcatg

SEQ ID NO: 1437599 - DNA, 15 bp, Homo sapiens
ccaaagaacctgcat

SEQ ID NO: 1437600 - DNA, 15 bp, Homo sapiens
tccaaagaacctgca

SEQ ID NO: 1437601 - DNA, 15 bp, Homo sapiens
ttccaaagaacctgc

SEQ ID NO: 1437602 - DNA, 15 bp, Homo sapiens
attccaaagaacctg

SEQ ID NO: 1437603 - DNA, 15 bp, Homo sapiens
tattccaaagaacct

SEQ ID NO: 1437604 - DNA, 15 bp, Homo sapiens
gtattccaaagaacc

SEQ ID NO: 1437605 - DNA, 15 bp, Homo sapiens
ggtattccaaagaac

SEQ ID NO: 1437606 - DNA, 15 bp, Homo sapiens
tggtattccaaagaa

SEQ ID NO: 1437607 - DNA, 15 bp, Homo sapiens
atggtattccaaaga

SEQ ID NO: 1437608 - DNA, 15 bp, Homo sapiens
tatggtattccaaag

SEQ ID NO: 1437609 - DNA, 15 bp, Homo sapiens
ttatggtattccaaa

SEQ ID NO: 1437610 - DNA, 15 bp, Homo sapiens
attatggtattccaa

SEQ ID NO: 1437611 - DNA, 15 bp, Homo sapiens
aattatggtattcca

SEQ ID NO: 1437612 - DNA, 15 bp, Homo sapiens
taattatggtattcc

SEQ ID NO: 1437613 - DNA, 15 bp, Homo sapiens
gtaattatggtattc

SEQ ID NO: 1437614 - DNA, 15 bp, Homo sapiens
tgtaattatggtatt

SEQ ID NO: 1437615 - DNA, 15 bp, Homo sapiens
ctgtaattatggtat

SEQ ID NO: 1437616 - DNA, 15 bp, Homo sapiens
actgtaattatggta

SEQ ID NO: 1437617 - DNA, 15 bp, Homo sapiens
aactgtaattatggt

SEQ ID NO: 1437618 - DNA, 15 bp, Homo sapiens
aaactgtaattatgg

SEQ ID NO: 1437619 - DNA, 15 bp, Homo sapiens
aaaactgtaattatg

SEQ ID NO: 1437620 - DNA, 15 bp, Homo sapiens
aaaaactgtaattat

SEQ ID NO: 1437621 - DNA, 15 bp, Homo sapiens
caaaaactgtaatta

SEQ ID NO: 1437622 - DNA, 15 bp, Homo sapiens
tcaaaaactgtaatt

SEQ ID NO: 1437623 - DNA, 15 bp, Homo sapiens
ttcaaaaactgtaat

SEQ ID NO: 1437624 - DNA, 15 bp, Homo sapiens
tttcaaaaactgtaa

SEQ ID NO: 1437625 - DNA, 15 bp, Homo sapiens
ttttcaaaaactgta

SEQ ID NO: 1437626 - DNA, 15 bp, Homo sapiens
attttcaaaaactgt

SEQ ID NO: 1437627 - DNA, 15 bp, Homo sapiens
tattttcaaaaactg

SEQ ID NO: 1437628 - DNA, 15 bp, Homo sapiens
gtattttcaaaaact

SEQ ID NO: 1437629 - DNA, 15 bp, Homo sapiens
tgtattttcaaaaac

SEQ ID NO: 1437630 - DNA, 15 bp, Homo sapiens
atgtattttcaaaaa

SEQ ID NO: 1437631 - DNA, 15 bp, Homo sapiens
catgtattttcaaaa

SEQ ID NO: 1437632 - DNA, 15 bp, Homo sapiens
gcatgtattttcaaa

SEQ ID NO: 1437633 - DNA, 15 bp, Homo sapiens
ggcatgtattttcaa

SEQ ID NO: 1437634 - DNA, 15 bp, Homo sapiens
tggcatgtattttca

SEQ ID NO: 1437635 - DNA, 15 bp, Homo sapiens
ctggcatgtattttc

SEQ ID NO: 1437636 - DNA, 15 bp, Homo sapiens
gctggcatgtatttt

SEQ ID NO: 1437637 - DNA, 15 bp, Homo sapiens
agctggcatgtattt

SEQ ID NO: 1437638 - DNA, 15 bp, Homo sapiens
aagctggcatgtatt

SEQ ID NO: 1437639 - DNA, 15 bp, Homo sapiens
aaagctggcatgtat

SEQ ID NO: 1437640 - DNA, 15 bp, Homo sapiens
aaaagctggcatgta

SEQ ID NO: 1437641 - DNA, 15 bp, Homo sapiens
taaaagctggcatgt

SEQ ID NO: 1437642 - DNA, 15 bp, Homo sapiens
ataaaagctggcatg

SEQ ID NO: 1437643 - DNA, 15 bp, Homo sapiens
aataaaagctggcat

SEQ ID NO: 1437644 - DNA, 15 bp, Homo sapiens
gaataaaagctggca

SEQ ID NO: 1437645 - DNA, 15 bp, Homo sapiens
ggaataaaagctggc

SEQ ID NO: 1437646 - DNA, 15 bp, Homo sapiens
aggaataaaagctgg

SEQ ID NO: 1437647 - DNA, 15 bp, Homo sapiens
caggaataaaagctg

SEQ ID NO: 1437648 - DNA, 15 bp, Homo sapiens
acaggaataaaagct

SEQ ID NO: 1437649 - DNA, 15 bp, Homo sapiens
aacaggaataaaagc

SEQ ID NO: 1437650 - DNA, 15 bp, Homo sapiens
gaacaggaataaaag

SEQ ID NO: 1437651 - DNA, 15 bp, Homo sapiens
agaacaggaataaaa

SEQ ID NO: 1437652 - DNA, 15 bp, Homo sapiens
gagaacaggaataaa

SEQ ID NO: 1437653 - DNA, 15 bp, Homo sapiens
tgagaacaggaataa

SEQ ID NO: 1437654 - DNA, 15 bp, Homo sapiens
gtgagaacaggaata

SEQ ID NO: 1437655 - DNA, 15 bp, Homo sapiens
tgtgagaacaggaat

SEQ ID NO: 1437656 - DNA, 15 bp, Homo sapiens
gtgtgagaacaggaa

SEQ ID NO: 1437657 - DNA, 15 bp, Homo sapiens
tgtgtgagaacagga

SEQ ID NO: 1437658 - DNA, 15 bp, Homo sapiens
atgtgtgagaacagg

SEQ ID NO: 1437659 - DNA, 15 bp, Homo sapiens
catgtgtgagaacag

SEQ ID NO: 1437660 - DNA, 15 bp, Homo sapiens
acatgtgtgagaaca

SEQ ID NO: 1437661 - DNA, 15 bp, Homo sapiens
cacatgtgtgagaac

SEQ ID NO: 1437662 - DNA, 15 bp, Homo sapiens
acacatgtgtgagaa

SEQ ID NO: 1437663 - DNA, 15 bp, Homo sapiens
cacacatgtgtgaga

SEQ ID NO: 1437664 - DNA, 15 bp, Homo sapiens
gcacacatgtgtgag

SEQ ID NO: 1437665 - DNA, 15 bp, Homo sapiens
tgcacacatgtgtga

SEQ ID NO: 1437666 - DNA, 15 bp, Homo sapiens
atgcacacatgtgtg

SEQ ID NO: 1437667 - DNA, 15 bp, Homo sapiens
tatgcacacatgtgt

SEQ ID NO: 1437668 - DNA, 15 bp, Homo sapiens
ctatgcacacatgtg

SEQ ID NO: 1437669 - DNA, 15 bp, Homo sapiens
tctatgcacacatgt

SEQ ID NO: 1437670 - DNA, 15 bp, Homo sapiens
atctatgcacacatg

SEQ ID NO: 1437671 - DNA, 15 bp, Homo sapiens
catctatgcacacat

SEQ ID NO: 1437672 - DNA, 15 bp, Homo sapiens
gcatctatgcacaca

SEQ ID NO: 1437673 - DNA, 15 bp, Homo sapiens
agcatctatgcacac

SEQ ID NO: 1437674 - DNA, 15 bp, Homo sapiens
cagcatctatgcaca

SEQ ID NO: 1437675 - DNA, 15 bp, Homo sapiens
ccagcatctatgcac

SEQ ID NO: 1437676 - DNA, 15 bp, Homo sapiens
accagcatctatgca

SEQ ID NO: 1437677 - DNA, 15 bp, Homo sapiens
taccagcatctatgc

SEQ ID NO: 1437678 - DNA, 15 bp, Homo sapiens
gtaccagcatctatg

SEQ ID NO: 1437679 - DNA, 15 bp, Homo sapiens
tgtaccagcatctat

SEQ ID NO: 1437680 - DNA, 15 bp, Homo sapiens
ttgtaccagcatcta

SEQ ID NO: 1437681 - DNA, 15 bp, Homo sapiens
cttgtaccagcatct

SEQ ID NO: 1437682 - DNA, 15 bp, Homo sapiens
ccttgtaccagcatc

SEQ ID NO: 1437683 - DNA, 15 bp, Homo sapiens
tccttgtaccagcat

SEQ ID NO: 1437684 - DNA, 15 bp, Homo sapiens
ttccttgtaccagca

SEQ ID NO: 1437685 - DNA, 15 bp, Homo sapiens
cttccttgtaccagc

SEQ ID NO: 1437686 - DNA, 15 bp, Homo sapiens
acttccttgtaccag

SEQ ID NO: 1437687 - DNA, 15 bp, Homo sapiens
aacttccttgtacca

SEQ ID NO: 1437688 - DNA, 15 bp, Homo sapiens
aaacttccttgtacc

SEQ ID NO: 1437689 - DNA, 15 bp, Homo sapiens
caaacttccttgtac

SEQ ID NO: 1437690 - DNA, 15 bp, Homo sapiens
acaaacttccttgta

SEQ ID NO: 1437691 - DNA, 15 bp, Homo sapiens
aacaaacttccttgt

SEQ ID NO: 1437692 - DNA, 15 bp, Homo sapiens
caacaaacttccttg

SEQ ID NO: 1437693 - DNA, 15 bp, Homo sapiens
gcaacaaacttcctt

SEQ ID NO: 1437694 - DNA, 15 bp, Homo sapiens
agcaacaaacttcct

SEQ ID NO: 1437695 - DNA, 15 bp, Homo sapiens
gagcaacaaacttcc

SEQ ID NO: 1437696 - DNA, 15 bp, Homo sapiens
agagcaacaaacttc

SEQ ID NO: 1437697 - DNA, 15 bp, Homo sapiens
aagagcaacaaactt

SEQ ID NO: 1437698 - DNA, 15 bp, Homo sapiens
aaagagcaacaaact

SEQ ID NO: 1437699 - DNA, 15 bp, Homo sapiens
aaaagagcaacaaac

SEQ ID NO: 1437700 - DNA, 15 bp, Homo sapiens
caaaagagcaacaaa

SEQ ID NO: 1437701 - DNA, 15 bp, Homo sapiens
acaaaagagcaacaa

SEQ ID NO: 1437702 - DNA, 15 bp, Homo sapiens
aacaaaagagcaaca

SEQ ID NO: 1437703 - DNA, 15 bp, Homo sapiens
aaacaaaagagcaac

SEQ ID NO: 1437704 - DNA, 15 bp, Homo sapiens
caaacaaaagagcaa

SEQ ID NO: 1437705 - DNA, 15 bp, Homo sapiens
acaaacaaaagagca

SEQ ID NO: 1437706 - DNA, 15 bp, Homo sapiens
tacaaacaaaagagc

SEQ ID NO: 1437707 - DNA, 15 bp, Homo sapiens
ttacaaacaaaagag

SEQ ID NO: 1437708 - DNA, 15 bp, Homo sapiens
attacaaacaaaaga

SEQ ID NO: 1437709 - DNA, 15 bp, Homo sapiens
aattacaaacaaaag

SEQ ID NO: 1437710 - DNA, 15 bp, Homo sapiens
caattacaaacaaaa

SEQ ID NO: 1437711 - DNA, 15 bp, Homo sapiens
gcaattacaaacaaa

SEQ ID NO: 1437712 - DNA, 15 bp, Homo sapiens
tgcaattacaaacaa

SEQ ID NO: 1437713 - DNA, 15 bp, Homo sapiens
ttgcaattacaaaca

SEQ ID NO: 1437714 - DNA, 15 bp, Homo sapiens
tttgcaattacaaac

SEQ ID NO: 1437715 - DNA, 15 bp, Homo sapiens
cttttgcaattacaa

SEQ ID NO: 1437716 - DNA, 15 bp, Homo sapiens
tcttttgcaattaca

SEQ ID NO: 1437717 - DNA, 15 bp, Homo sapiens
gtcttttgcaattac

SEQ ID NO: 1437718 - DNA, 15 bp, Homo sapiens
agtcttttgcaatta

SEQ ID NO: 1437719 - DNA, 15 bp, Homo sapiens
tagtcttttgcaatt

SEQ ID NO: 1437720 - DNA, 15 bp, Homo sapiens
ctagtcttttgcaat

SEQ ID NO: 1437721 - DNA, 15 bp, Homo sapiens
tctagtcttttgcaa

SEQ ID NO: 1437722 - DNA, 15 bp, Homo sapiens
ttctagtcttttgca

SEQ ID NO: 1437723 - DNA, 15 bp, Homo sapiens
tttctagtcttttgc

SEQ ID NO: 1437724 - DNA, 15 bp, Homo sapiens
gtttctagtcttttg

SEQ ID NO: 1437725 - DNA, 15 bp, Homo sapiens
agtttctagtctttt

SEQ ID NO: 1437726 - DNA, 15 bp, Homo sapiens
aagtttctagtcttt

SEQ ID NO: 1437727 - DNA, 15 bp, Homo sapiens
gaagtttctagtctt

SEQ ID NO: 1437728 - DNA, 15 bp, Homo sapiens
agaagtttctagtct

SEQ ID NO: 1437729 - DNA, 15 bp, Homo sapiens
tagaagtttctagtc

SEQ ID NO: 1437730 - DNA, 15 bp, Homo sapiens
atagaagtttctagt

SEQ ID NO: 1437731 - DNA, 15 bp, Homo sapiens
tatagaagtttctag

SEQ ID NO: 1437732 - DNA, 15 bp, Homo sapiens
ttatagaagtttcta

SEQ ID NO: 1437733 - DNA, 15 bp, Homo sapiens
attatagaagtttct

SEQ ID NO: 1437734 - DNA, 15 bp, Homo sapiens
cattatagaagtttc

SEQ ID NO: 1437735 - DNA, 15 bp, Homo sapiens
acattatagaagttt

SEQ ID NO: 1437736 - DNA, 15 bp, Homo sapiens
aacattatagaagtt

SEQ ID NO: 1437737 - DNA, 15 bp, Homo sapiens
aaacattatagaagt

SEQ ID NO: 1437738 - DNA, 15 bp, Homo sapiens
aaaacattatagaag

SEQ ID NO: 1437739 - DNA, 15 bp, Homo sapiens
aaaaacattatagaa

SEQ ID NO: 1437740 - DNA, 15 bp, Homo sapiens
gaaaaacattataga

SEQ ID NO: 1437741 - DNA, 15 bp, Homo sapiens
tgaaaaacattatag

SEQ ID NO: 1437742 - DNA, 15 bp, Homo sapiens
atgaaaaacattata

SEQ ID NO: 1437743 - DNA, 15 bp, Homo sapiens
aatgaaaaacattat

SEQ ID NO: 1437744 - DNA, 15 bp, Homo sapiens
taatgaaaaacatta

SEQ ID NO: 1437745 - DNA, 15 bp, Homo sapiens
ctaatgaaaaacatt

SEQ ID NO: 1437746 - DNA, 15 bp, Homo sapiens
tctaatgaaaaacat

SEQ ID NO: 1437747 - DNA, 15 bp, Homo sapiens
ctctaatgaaaaaca

SEQ ID NO: 1437748 - DNA, 15 bp, Homo sapiens
cctctaatgaaaaac

SEQ ID NO: 1437749 - DNA, 15 bp, Homo sapiens
tcctctaatgaaaaa

SEQ ID NO: 1437750 - DNA, 15 bp, Homo sapiens
gtcctctaatgaaaa

SEQ ID NO: 1437751 - DNA, 15 bp, Homo sapiens
ggtcctctaatgaaa

SEQ ID NO: 1437752 - DNA, 15 bp, Homo sapiens
tggtcctctaatgaa

SEQ ID NO: 1437753 - DNA, 15 bp, Homo sapiens
ttggtcctctaatga

SEQ ID NO: 1437754 - DNA, 15 bp, Homo sapiens
gttggtcctctaatg

SEQ ID NO: 1437755 - DNA, 15 bp, Homo sapiens
agttggtcctctaat

SEQ ID NO: 1437756 - DNA, 15 bp, Homo sapiens
cagttggtcctctaa

SEQ ID NO: 1437757 - DNA, 15 bp, Homo sapiens
tcagttggtcctcta

SEQ ID NO: 1437758 - DNA, 15 bp, Homo sapiens
atcagttggtcctct

SEQ ID NO: 1437759 - DNA, 15 bp, Homo sapiens
tatcagttggtcctc

SEQ ID NO: 1437760 - DNA, 15 bp, Homo sapiens
tttatcagttggtcc

SEQ ID NO: 1437761 - DNA, 15 bp, Homo sapiens
atttatcagttggtc

SEQ ID NO: 1437762 - DNA, 15 bp, Homo sapiens
aatttatcagttggt

SEQ ID NO: 1437763 - DNA, 15 bp, Homo sapiens
aaatttatcagttgg

SEQ ID NO: 1437764 - DNA, 15 bp, Homo sapiens
aaaatttatcagttg

SEQ ID NO: 1437765 - DNA, 15 bp, Homo sapiens
caaaatttatcagtt

SEQ ID NO: 1437766 - DNA, 15 bp, Homo sapiens
tcaaaatttatcagt

SEQ ID NO: 1437767 - DNA, 15 bp, Homo sapiens
gtcaaaatttatcag

SEQ ID NO: 1437768 - DNA, 15 bp, Homo sapiens
tgtcaaaatttatca

SEQ ID NO: 1437769 - DNA, 15 bp, Homo sapiens
gtgtcaaaatttatc

SEQ ID NO: 1437770 - DNA, 15 bp, Homo sapiens
tgtgtcaaaatttat

SEQ ID NO: 1437771 - DNA, 15 bp, Homo sapiens
ctgtgtcaaaattta

SEQ ID NO: 1437772 - DNA, 15 bp, Homo sapiens
gctgtgtcaaaattt

SEQ ID NO: 1437773 - DNA, 15 bp, Homo sapiens
agctgtgtcaaaatt

SEQ ID NO: 1437774 - DNA, 15 bp, Homo sapiens
tagctgtgtcaaaat

SEQ ID NO: 1437775 - DNA, 15 bp, Homo sapiens
atagctgtgtcaaaa

SEQ ID NO: 1437776 - DNA, 15 bp, Homo sapiens
catagctgtgtcaaa

SEQ ID NO: 1437777 - DNA, 15 bp, Homo sapiens
gcatagctgtgtcaa

SEQ ID NO: 1437778 - DNA, 15 bp, Homo sapiens
tgcatagctgtgtca

SEQ ID NO: 1437779 - DNA, 15 bp, Homo sapiens
ctgcatagctgtgtc

SEQ ID NO: 1437780 - DNA, 15 bp, Homo sapiens
actgcatagctgtgt

SEQ ID NO: 1437781 - DNA, 15 bp, Homo sapiens
cactgcatagctgtg

SEQ ID NO: 1437782 - DNA, 15 bp, Homo sapiens
tcactgcatagctgt

SEQ ID NO: 1437783 - DNA, 15 bp, Homo sapiens
ctcactgcatagctg

SEQ ID NO: 1437784 - DNA, 15 bp, Homo sapiens
gctcactgcatagct

SEQ ID NO: 1437785 - DNA, 15 bp, Homo sapiens
tgctcactgcatagc

SEQ ID NO: 1437786 - DNA, 15 bp, Homo sapiens
atgctcactgcatag

SEQ ID NO: 1437787 - DNA, 15 bp, Homo sapiens
aatgctcactgcata

SEQ ID NO: 1437788 - DNA, 15 bp, Homo sapiens
gaatgctcactgcat

SEQ ID NO: 1437789 - DNA, 15 bp, Homo sapiens
tgaatgctcactgca

SEQ ID NO: 1437790 - DNA, 15 bp, Homo sapiens
ttgaatgctcactgc

SEQ ID NO: 1437791 - DNA, 15 bp, Homo sapiens
tttgaatgctcactg

SEQ ID NO: 1437792 - DNA, 15 bp, Homo sapiens
ttttgaatgctcact

SEQ ID NO: 1437793 - DNA, 15 bp, Homo sapiens
cttttgaatgctcac

SEQ ID NO: 1437794 - DNA, 15 bp, Homo sapiens
tcttttgaatgctca

SEQ ID NO: 1437795 - DNA, 15 bp, Homo sapiens
ttcttttgaatgctc

SEQ ID NO: 1437796 - DNA, 15 bp, Homo sapiens
attcttttgaatgct

SEQ ID NO: 1437797 - DNA, 15 bp, Homo sapiens
cattcttttgaatgc

SEQ ID NO: 1437798 - DNA, 15 bp, Homo sapiens
tcattcttttgaatg

SEQ ID NO: 1437799 - DNA, 15 bp, Homo sapiens
ctcattcttttgaat

SEQ ID NO: 1437800 - DNA, 15 bp, Homo sapiens
tctcattcttttgaa

SEQ ID NO: 1437801 - DNA, 15 bp, Homo sapiens
gtctcattcttttga

SEQ ID NO: 1437802 - DNA, 15 bp, Homo sapiens
ggtctcattcttttg

SEQ ID NO: 1437803 - DNA, 15 bp, Homo sapiens
aggtctcattctttt

SEQ ID NO: 1437804 - DNA, 15 bp, Homo sapiens
gaggtctcattcttt

SEQ ID NO: 1437805 - DNA, 15 bp, Homo sapiens
agaggtctcattctt

SEQ ID NO: 1437806 - DNA, 15 bp, Homo sapiens
tagaggtctcattct

SEQ ID NO: 1437807 - DNA, 15 bp, Homo sapiens
atagaggtctcattc

SEQ ID NO: 1437808 - DNA, 15 bp, Homo sapiens
gatagaggtctcatt

SEQ ID NO: 1437809 - DNA, 15 bp, Homo sapiens
agatagaggtctcat

SEQ ID NO: 1437810 - DNA, 15 bp, Homo sapiens
cagatagaggtctca

SEQ ID NO: 1437811 - DNA, 15 bp, Homo sapiens
acagatagaggtctc

SEQ ID NO: 1437812 - DNA, 15 bp, Homo sapiens
tacagatagaggtct

SEQ ID NO: 1437813 - DNA, 15 bp, Homo sapiens
gtacagatagaggtc

SEQ ID NO: 1437814 - DNA, 15 bp, Homo sapiens
tgtacagatagaggt

SEQ ID NO: 1437815 - DNA, 15 bp, Homo sapiens
gtgtacagatagagg

SEQ ID NO: 1437816 - DNA, 15 bp, Homo sapiens
tgtgtacagatagag

SEQ ID NO: 1437817 - DNA, 15 bp, Homo sapiens
atgtgtacagataga

SEQ ID NO: 1437818 - DNA, 15 bp, Homo sapiens
catgtgtacagatag

SEQ ID NO: 1437819 - DNA, 15 bp, Homo sapiens
tcatgtgtacagata

SEQ ID NO: 1437820 - DNA, 15 bp, Homo sapiens
ctcatgtgtacagat

SEQ ID NO: 1437821 - DNA, 15 bp, Homo sapiens
tctcatgtgtacaga

SEQ ID NO: 1437822 - DNA, 15 bp, Homo sapiens
ctctcatgtgtacag

SEQ ID NO: 1437823 - DNA, 15 bp, Homo sapiens
gctctcatgtgtaca

SEQ ID NO: 1437824 - DNA, 15 bp, Homo sapiens
tgctctcatgtgtac

SEQ ID NO: 1437825 - DNA, 15 bp, Homo sapiens
gtgctctcatgtgta

SEQ ID NO: 1437826 - DNA, 15 bp, Homo sapiens
agtgctctcatgtgt

SEQ ID NO: 1437827 - DNA, 15 bp, Homo sapiens
tagtgctctcatgtg

SEQ ID NO: 1437828 - DNA, 15 bp, Homo sapiens
ttagtgctctcatgt

SEQ ID NO: 1437829 - DNA, 15 bp, Homo sapiens
cttagtgctctcatg

SEQ ID NO: 1437830 - DNA, 15 bp, Homo sapiens
tcttagtgctctcat

SEQ ID NO: 1437831 - DNA, 15 bp, Homo sapiens
atcttagtgctctca

SEQ ID NO: 1437832 - DNA, 15 bp, Homo sapiens
tatcttagtgctctc

SEQ ID NO: 1437833 - DNA, 15 bp, Homo sapiens
atatcttagtgctct

SEQ ID NO: 1437834 - DNA, 15 bp, Homo sapiens
aatatcttagtgctc

SEQ ID NO: 1437835 - DNA, 15 bp, Homo sapiens
aaatatcttagtgct

SEQ ID NO: 1437836 - DNA, 15 bp, Homo sapiens
aaaatatcttagtgc

SEQ ID NO: 1437837 - DNA, 15 bp, Homo sapiens
caaaatatcttagtg

SEQ ID NO: 1437838 - DNA, 15 bp, Homo sapiens
ccaaaatatcttagt

SEQ ID NO: 1437839 - DNA, 15 bp, Homo sapiens
accaaaatatcttag

SEQ ID NO: 1437840 - DNA, 15 bp, Homo sapiens
aaccaaaatatctta

SEQ ID NO: 1437841 - DNA, 15 bp, Homo sapiens
taaccaaaatatctt

SEQ ID NO: 1437842 - DNA, 15 bp, Homo sapiens
ctaaccaaaatatct

SEQ ID NO: 1437843 - DNA, 15 bp, Homo sapiens
actaaccaaaatatc

SEQ ID NO: 1437844 - DNA, 15 bp, Homo sapiens
cactaaccaaaatat

SEQ ID NO: 1437845 - DNA, 15 bp, Homo sapiens
tcactaaccaaaata

SEQ ID NO: 1437846 - DNA, 15 bp, Homo sapiens
ttcactaaccaaaat

SEQ ID NO: 1437847 - DNA, 15 bp, Homo sapiens
tttcactaaccaaaa

SEQ ID NO: 1437848 - DNA, 15 bp, Homo sapiens
ctttcactaaccaaa

SEQ ID NO: 1437849 - DNA, 15 bp, Homo sapiens
tctttcactaaccaa

SEQ ID NO: 1437850 - DNA, 15 bp, Homo sapiens
ttctttcactaacca

SEQ ID NO: 1437851 - DNA, 15 bp, Homo sapiens
gttctttcactaacc

SEQ ID NO: 1437852 - DNA, 15 bp, Homo sapiens
tgttctttcactaac

SEQ ID NO: 1437853 - DNA, 15 bp, Homo sapiens
ttgttctttcactaa

SEQ ID NO: 1437854 - DNA, 15 bp, Homo sapiens
tttgttctttcacta

SEQ ID NO: 1437855 - DNA, 15 bp, Homo sapiens
ctttgttctttcact

SEQ ID NO: 1437856 - DNA, 15 bp, Homo sapiens
gctttgttctttcac

SEQ ID NO: 1437857 - DNA, 15 bp, Homo sapiens
tgctttgttctttca

SEQ ID NO: 1437858 - DNA, 15 bp, Homo sapiens
ttgctttgttctttc

SEQ ID NO: 1437859 - DNA, 15 bp, Homo sapiens
attgctttgttcttt

SEQ ID NO: 1437860 - DNA, 15 bp, Homo sapiens
tattgctttgttctt

SEQ ID NO: 1437861 - DNA, 15 bp, Homo sapiens
ttattgctttgttct

SEQ ID NO: 1437862 - DNA, 15 bp, Homo sapiens
tttattgctttgttc

SEQ ID NO: 1437863 - DNA, 15 bp, Homo sapiens
gtttattgctttgtt

SEQ ID NO: 1437864 - DNA, 15 bp, Homo sapiens
tgtttattgctttgt

SEQ ID NO: 1437865 - DNA, 15 bp, Homo sapiens
ctgtttattgctttg

SEQ ID NO: 1437866 - DNA, 15 bp, Homo sapiens
tctgtttattgcttt

SEQ ID NO: 1437867 - DNA, 15 bp, Homo sapiens
ttctgtttattgctt

SEQ ID NO: 1437868 - DNA, 15 bp, Homo sapiens
cttctgtttattgct

SEQ ID NO: 1437869 - DNA, 15 bp, Homo sapiens
tcttctgtttattgc

SEQ ID NO: 1437870 - DNA, 15 bp, Homo sapiens
ctcttctgtttattg

SEQ ID NO: 1437871 - DNA, 15 bp, Homo sapiens
actcttctgtttatt

SEQ ID NO: 1437872 - DNA, 15 bp, Homo sapiens
cactcttctgtttat

SEQ ID NO: 1437873 - DNA, 15 bp, Homo sapiens
acactcttctgttta

SEQ ID NO: 1437874 - DNA, 15 bp, Homo sapiens
cacactcttctgttt

SEQ ID NO: 1437875 - DNA, 15 bp, Homo sapiens
gcacactcttctgtt

SEQ ID NO: 1437876 - DNA, 15 bp, Homo sapiens
agcacactcttctgt

SEQ ID NO: 1437877 - DNA, 15 bp, Homo sapiens
gagcacactcttctg

SEQ ID NO: 1437878 - DNA, 15 bp, Homo sapiens
tgagcacactcttct

SEQ ID NO: 1437879 - DNA, 15 bp, Homo sapiens
gtgagcacactcttc

SEQ ID NO: 1437880 - DNA, 15 bp, Homo sapiens
tgtgagcacactctt

SEQ ID NO: 1437881 - DNA, 15 bp, Homo sapiens
atgtgagcacactct

SEQ ID NO: 1437882 - DNA, 15 bp, Homo sapiens
aatgtgagcacactc

SEQ ID NO: 1437883 - DNA, 15 bp, Homo sapiens
gaatgtgagcacact

SEQ ID NO: 1437884 - DNA, 15 bp, Homo sapiens
agaatgtgagcacac

SEQ ID NO: 1437885 - DNA, 15 bp, Homo sapiens
aagaatgtgagcaca

SEQ ID NO: 1437886 - DNA, 15 bp, Homo sapiens
caagaatgtgagcac

SEQ ID NO: 1437887 - DNA, 15 bp, Homo sapiens
acaagaatgtgagca

SEQ ID NO: 1437888 - DNA, 15 bp, Homo sapiens
aacaagaatgtgagc

SEQ ID NO: 1437889 - DNA, 15 bp, Homo sapiens
taacaagaatgtgag

SEQ ID NO: 1437890 - DNA, 15 bp, Homo sapiens
ttaacaagaatgtga

SEQ ID NO: 1437891 - DNA, 15 bp, Homo sapiens
cttaacaagaatgtg

SEQ ID NO: 1437892 - DNA, 15 bp, Homo sapiens
tcttaacaagaatgt

SEQ ID NO: 1437893 - DNA, 15 bp, Homo sapiens
atcttaacaagaatg

SEQ ID NO: 1437894 - DNA, 15 bp, Homo sapiens
tatcttaacaagaat

SEQ ID NO: 1437895 - DNA, 15 bp, Homo sapiens
ctatcttaacaagaa

SEQ ID NO: 1437896 - DNA, 15 bp, Homo sapiens
tctatcttaacaaga

SEQ ID NO: 1437897 - DNA, 15 bp, Homo sapiens
ctctatcttaacaag

SEQ ID NO: 1437898 - DNA, 15 bp, Homo sapiens
actctatcttaacaa

SEQ ID NO: 1437899 - DNA, 15 bp, Homo sapiens
tactctatcttaaca

SEQ ID NO: 1437900 - DNA, 15 bp, Homo sapiens
atactctatcttaac

SEQ ID NO: 1437901 - DNA, 15 bp, Homo sapiens
tatactctatcttaa

SEQ ID NO: 1437902 - DNA, 15 bp, Homo sapiens
ctatactctatctta

SEQ ID NO: 1437903 - DNA, 15 bp, Homo sapiens
tctatactctatctt

SEQ ID NO: 1437904 - DNA, 15 bp, Homo sapiens
ctctatactctatct

SEQ ID NO: 1437905 - DNA, 15 bp, Homo sapiens
tctctatactctatc

SEQ ID NO: 1437906 - DNA, 15 bp, Homo sapiens
ttctctatactctat

SEQ ID NO: 1437907 - DNA, 15 bp, Homo sapiens
attctctatactcta

SEQ ID NO: 1437908 - DNA, 15 bp, Homo sapiens
tattctctatactct

SEQ ID NO: 1437909 - DNA, 15 bp, Homo sapiens
atattctctatactc

SEQ ID NO: 1437910 - DNA, 15 bp, Homo sapiens
gatattctctatact

SEQ ID NO: 1437911 - DNA, 15 bp, Homo sapiens
agatattctctatac

SEQ ID NO: 1437912 - DNA, 15 bp, Homo sapiens
cagatattctctata

SEQ ID NO: 1437913 - DNA, 15 bp, Homo sapiens
ccagatattctctat

SEQ ID NO: 1437914 - DNA, 15 bp, Homo sapiens
tccagatattctcta

SEQ ID NO: 1437915 - DNA, 15 bp, Homo sapiens
ttccagatattctct

SEQ ID NO: 1437916 - DNA, 15 bp, Homo sapiens
cttccagatattctc

SEQ ID NO: 1437917 - DNA, 15 bp, Homo sapiens
tcttccagatattct

SEQ ID NO: 1437918 - DNA, 15 bp, Homo sapiens
ttcttccagatattc

SEQ ID NO: 1437919 - DNA, 15 bp, Homo sapiens
attcttccagatatt

SEQ ID NO: 1437920 - DNA, 15 bp, Homo sapiens
cattcttccagatat

SEQ ID NO: 1437921 - DNA, 15 bp, Homo sapiens
gcattcttccagata

SEQ ID NO: 1437922 - DNA, 15 bp, Homo sapiens
tgcattcttccagat

SEQ ID NO: 1437923 - DNA, 15 bp, Homo sapiens
gtgcattcttccaga

SEQ ID NO: 1437924 - DNA, 15 bp, Homo sapiens
tgtgcattcttccag

SEQ ID NO: 1437925 - DNA, 15 bp, Homo sapiens
ttgtgcattcttcca

SEQ ID NO: 1437926 - DNA, 15 bp, Homo sapiens
attgtgcattcttcc

SEQ ID NO: 1437927 - DNA, 15 bp, Homo sapiens
cattgtgcattcttc

SEQ ID NO: 1437928 - DNA, 15 bp, Homo sapiens
tcattgtgcattctt

SEQ ID NO: 1437929 - DNA, 15 bp, Homo sapiens
gtcattgtgcattct

SEQ ID NO: 1437930 - DNA, 15 bp, Homo sapiens
agtcattgtgcattc

SEQ ID NO: 1437931 - DNA, 15 bp, Homo sapiens
cagtcattgtgcatt

SEQ ID NO: 1437932 - DNA, 15 bp, Homo sapiens
acagtcattgtgcat

SEQ ID NO: 1437933 - DNA, 15 bp, Homo sapiens
aacagtcattgtgca

SEQ ID NO: 1437934 - DNA, 15 bp, Homo sapiens
taacagtcattgtgc

SEQ ID NO: 1437935 - DNA, 15 bp, Homo sapiens
ttaacagtcattgtg

SEQ ID NO: 1437936 - DNA, 15 bp, Homo sapiens
cttaacagtcattgt

SEQ ID NO: 1437937 - DNA, 15 bp, Homo sapiens
gcttaacagtcattg

SEQ ID NO: 1437938 - DNA, 15 bp, Homo sapiens
tgcttaacagtcatt

SEQ ID NO: 1437939 - DNA, 15 bp, Homo sapiens
atgcttaacagtcat

SEQ ID NO: 1437940 - DNA, 15 bp, Homo sapiens
tatgcttaacagtca

SEQ ID NO: 1437941 - DNA, 15 bp, Homo sapiens
ttatgcttaacagtc

SEQ ID NO: 1437942 - DNA, 15 bp, Homo sapiens
gttatgcttaacagt

SEQ ID NO: 1437943 - DNA, 15 bp, Homo sapiens
agttatgcttaacag

SEQ ID NO: 1437944 - DNA, 15 bp, Homo sapiens
cagttatgcttaaca

SEQ ID NO: 1437945 - DNA, 15 bp, Homo sapiens
gcagttatgcttaac

SEQ ID NO: 1437946 - DNA, 15 bp, Homo sapiens
ggcagttatgcttaa

SEQ ID NO: 1437947 - DNA, 15 bp, Homo sapiens
aggcagttatgctta

SEQ ID NO: 1437948 - DNA, 15 bp, Homo sapiens
caggcagttatgctt

SEQ ID NO: 1437949 - DNA, 15 bp, Homo sapiens
ccaggcagttatgct

SEQ ID NO: 1437950 - DNA, 15 bp, Homo sapiens
cccaggcagttatgc

SEQ ID NO: 1437951 - DNA, 15 bp, Homo sapiens
ccccaggcagttatg

SEQ ID NO: 1437952 - DNA, 15 bp, Homo sapiens
accccaggcagttat

SEQ ID NO: 1437953 - DNA, 15 bp, Homo sapiens
taccccaggcagtta

SEQ ID NO: 1437954 - DNA, 15 bp, Homo sapiens
ttaccccaggcagtt

SEQ ID NO: 1437955 - DNA, 15 bp, Homo sapiens
cttaccccaggcagt

SEQ ID NO: 1437956 - DNA, 15 bp, Homo sapiens
ccttaccccaggcag

SEQ ID NO: 1437957 - DNA, 15 bp, Homo sapiens
cccttaccccaggca

SEQ ID NO: 1437958 - DNA, 15 bp, Homo sapiens
acccttaccccaggc

SEQ ID NO: 1437959 - DNA, 15 bp, Homo sapiens
gacccttaccccagg

SEQ ID NO: 1437960 - DNA, 15 bp, Homo sapiens
tgacccttaccccag

SEQ ID NO: 1437961 - DNA, 15 bp, Homo sapiens
ctgacccttacccca

SEQ ID NO: 1437962 - DNA, 15 bp, Homo sapiens
actgacccttacccc

SEQ ID NO: 1437963 - DNA, 15 bp, Homo sapiens
gactgacccttaccc

SEQ ID NO: 1437964 - DNA, 15 bp, Homo sapiens
tgactgacccttacc

SEQ ID NO: 1437965 - DNA, 15 bp, Homo sapiens
ctgactgacccttac

SEQ ID NO: 1437966 - DNA, 15 bp, Homo sapiens
tctgactgaccctta

SEQ ID NO: 1437967 - DNA, 15 bp, Homo sapiens
ctctgactgaccctt

SEQ ID NO: 1437968 - DNA, 15 bp, Homo sapiens
cctctgactgaccct

SEQ ID NO: 1437969 - DNA, 15 bp, Homo sapiens
ccctctgactgaccc

SEQ ID NO: 1437970 - DNA, 15 bp, Homo sapiens
tccctctgactgacc

SEQ ID NO: 1437971 - DNA, 15 bp, Homo sapiens
ctccctctgactgac

SEQ ID NO: 1437972 - DNA, 15 bp, Homo sapiens
tctccctctgactga

SEQ ID NO: 1437973 - DNA, 15 bp, Homo sapiens
gtctccctctgactg

SEQ ID NO: 1437974 - DNA, 15 bp, Homo sapiens
tgtctccctctgact

SEQ ID NO: 1437975 - DNA, 15 bp, Homo sapiens
atgtctccctctgac

SEQ ID NO: 1437976 - DNA, 15 bp, Homo sapiens
aatgtctccctctga

SEQ ID NO: 1437977 - DNA, 15 bp, Homo sapiens
aaatgtctccctctg

SEQ ID NO: 1437978 - DNA, 15 bp, Homo sapiens
gaaatgtctccctct

SEQ ID NO: 1437979 - DNA, 15 bp, Homo sapiens
tgaaatgtctccctc

SEQ ID NO: 1437980 - DNA, 15 bp, Homo sapiens
atgaaatgtctccct

SEQ ID NO: 1437981 - DNA, 15 bp, Homo sapiens
aatgaaatgtctccc

SEQ ID NO: 1437982 - DNA, 15 bp, Homo sapiens
aaatgaaatgtctcc

SEQ ID NO: 1437983 - DNA, 15 bp, Homo sapiens
aaaatgaaatgtctc

SEQ ID NO: 1437984 - DNA, 15 bp, Homo sapiens
caaaatgaaatgtct

SEQ ID NO: 1437985 - DNA, 15 bp, Homo sapiens
acaaaatgaaatgtc

SEQ ID NO: 1437986 - DNA, 15 bp, Homo sapiens
tacaaaatgaaatgt

SEQ ID NO: 1437987 - DNA, 15 bp, Homo sapiens
ttacaaaatgaaatg

SEQ ID NO: 1437988 - DNA, 15 bp, Homo sapiens
gttacaaaatgaaat

SEQ ID NO: 1437989 - DNA, 15 bp, Homo sapiens
ggttacaaaatgaaa

SEQ ID NO: 1437990 - DNA, 15 bp, Homo sapiens
aggttacaaaatgaa

SEQ ID NO: 1437991 - DNA, 15 bp, Homo sapiens
aaggttacaaaatga

SEQ ID NO: 1437992 - DNA, 15 bp, Homo sapiens
aaaggttacaaaatg

SEQ ID NO: 1437993 - DNA, 15 bp, Homo sapiens
gaaaggttacaaaat

SEQ ID NO: 1437994 - DNA, 15 bp, Homo sapiens
ggaaaggttacaaaa

SEQ ID NO: 1437995 - DNA, 15 bp, Homo sapiens
gggaaaggttacaaa

SEQ ID NO: 1437996 - DNA, 15 bp, Homo sapiens
tgggaaaggttacaa

SEQ ID NO: 1437997 - DNA, 15 bp, Homo sapiens
gtgggaaaggttaca

SEQ ID NO: 1437998 - DNA, 15 bp, Homo sapiens
agtgggaaaggttac

SEQ ID NO: 1437999 - DNA, 15 bp, Homo sapiens
cagtgggaaaggtta

SEQ ID NO: 1438000 - DNA, 15 bp, Homo sapiens
acagtgggaaaggtt

SEQ ID NO: 1438001 - DNA, 15 bp, Homo sapiens
aacagtgggaaaggt

SEQ ID NO: 1438002 - DNA, 15 bp, Homo sapiens
aaacagtgggaaagg

SEQ ID NO: 1438003 - DNA, 15 bp, Homo sapiens
caaacagtgggaaag

SEQ ID NO: 1438004 - DNA, 15 bp, Homo sapiens
gcaaacagtgggaaa

SEQ ID NO: 1438005 - DNA, 15 bp, Homo sapiens
tgcaaacagtgggaa

SEQ ID NO: 1438006 - DNA, 15 bp, Homo sapiens
atgcaaacagtggga

SEQ ID NO: 1438007 - DNA, 15 bp, Homo sapiens
aatgcaaacagtggg

SEQ ID NO: 1438008 - DNA, 15 bp, Homo sapiens
aaatgcaaacagtgg

SEQ ID NO: 1438009 - DNA, 15 bp, Homo sapiens
aaaatgcaaacagtg

SEQ ID NO: 1438010 - DNA, 15 bp, Homo sapiens
aaaaatgcaaacagt

SEQ ID NO: 1438011 - DNA, 15 bp, Homo sapiens
taaaaatgcaaacag

SEQ ID NO: 1438012 - DNA, 15 bp, Homo sapiens
gtaaaaatgcaaaca

SEQ ID NO: 1438013 - DNA, 15 bp, Homo sapiens
cgtaaaaatgcaaac

SEQ ID NO: 1438014 - DNA, 15 bp, Homo sapiens
acgtaaaaatgcaaa

SEQ ID NO: 1438015 - DNA, 15 bp, Homo sapiens
aacgtaaaaatgcaa

SEQ ID NO: 1438016 - DNA, 15 bp, Homo sapiens
caacgtaaaaatgca

SEQ ID NO: 1438017 - DNA, 15 bp, Homo sapiens
acaacgtaaaaatgc

SEQ ID NO: 1438018 - DNA, 15 bp, Homo sapiens
cacaacgtaaaaatg

SEQ ID NO: 1438019 - DNA, 15 bp, Homo sapiens
acacaacgtaaaaat

SEQ ID NO: 1438020 - DNA, 15 bp, Homo sapiens
cacacaacgtaaaaa

SEQ ID NO: 1438021 - DNA, 15 bp, Homo sapiens
acacacaacgtaaaa

SEQ ID NO: 1438022 - DNA, 15 bp, Homo sapiens
gacacacaacgtaaa

SEQ ID NO: 1438023 - DNA, 15 bp, Homo sapiens
agacacacaacgtaa

SEQ ID NO: 1438024 - DNA, 15 bp, Homo sapiens
tagacacacaacgta

SEQ ID NO: 1438025 - DNA, 15 bp, Homo sapiens
atagacacacaacgt

SEQ ID NO: 1438026 - DNA, 15 bp, Homo sapiens
aatagacacacaacg

SEQ ID NO: 1438027 - DNA, 15 bp, Homo sapiens
taatagacacacaac

SEQ ID NO: 1438028 - DNA, 15 bp, Homo sapiens
ataatagacacacaa

SEQ ID NO: 1438029 - DNA, 15 bp, Homo sapiens
cataatagacacaca

SEQ ID NO: 1438030 - DNA, 15 bp, Homo sapiens
gcataatagacacac

SEQ ID NO: 1438031 - DNA, 15 bp, Homo sapiens
agcataatagacaca

SEQ ID NO: 1438032 - DNA, 15 bp, Homo sapiens
aagcataatagacac

SEQ ID NO: 1438033 - DNA, 15 bp, Homo sapiens
aaagcataatagaca

SEQ ID NO: 1438034 - DNA, 15 bp, Homo sapiens
taaagcataatagac

SEQ ID NO: 1438035 - DNA, 15 bp, Homo sapiens
ataaagcataataga

SEQ ID NO: 1438036 - DNA, 15 bp, Homo sapiens
aataaagcataatag

SEQ ID NO: 1438037 - DNA, 15 bp, Homo sapiens
aaataaagcataata

SEQ ID NO: 1438038 - DNA, 15 bp, Homo sapiens
aaaataaagcataat

SEQ ID NO: 1438039 - DNA, 15 bp, Homo sapiens
aaaaataaagcataa

SEQ ID NO: 1438040 - DNA, 15 bp, Homo sapiens
caaaaataaagcata

SEQ ID NO: 1438041 - DNA, 15 bp, Homo sapiens
acaaaaataaagcat

SEQ ID NO: 1438042 - DNA, 15 bp, Homo sapiens
aacaaaaataaagca

SEQ ID NO: 1438043 - DNA, 15 bp, Homo sapiens
caacaaaaataaagc

SEQ ID NO: 1438044 - DNA, 15 bp, Homo sapiens
acaacaaaaataaag

SEQ ID NO: 1438045 - DNA, 15 bp, Homo sapiens
aacaacaaaaataaa

SEQ ID NO: 1438046 - DNA, 15 bp, Homo sapiens
aaacaacaaaaataa

SEQ ID NO: 1438047 - DNA, 15 bp, Homo sapiens
aaaacaacaaaaata

SEQ ID NO: 1438048 - DNA, 15 bp, Homo sapiens
aaaaacaacaaaaat

SEQ ID NO: 1438049 - DNA, 15 bp, Homo sapiens
aaaaaacaacaaaaa

SEQ ID NO: 1438050 - DNA, 15 bp, Homo sapiens
caaaaaaaaaacaac

SEQ ID NO: 1438051 - DNA, 15 bp, Homo sapiens
ttcaaaaaaaaaaca

SEQ ID NO: 1438052 - DNA, 15 bp, Homo sapiens
cttcaaaaaaaaaac

SEQ ID NO: 1438053 - DNA, 15 bp, Homo sapiens
ttcccttcaaaaaaa

SEQ ID NO: 1438054 - DNA, 15 bp, Homo sapiens
tttcccttcaaaaaa

SEQ ID NO: 1438055 - DNA, 15 bp, Homo sapiens
gtttcccttcaaaaa

SEQ ID NO: 1438056 - DNA, 15 bp, Homo sapiens
tgtttcccttcaaaa

SEQ ID NO: 1438057 - DNA, 15 bp, Homo sapiens
ttgtttcccttcaaa

SEQ ID NO: 1438058 - DNA, 15 bp, Homo sapiens
tttgtttcccttcaa

SEQ ID NO: 1438059 - DNA, 15 bp, Homo sapiens
ctttgtttcccttca

SEQ ID NO: 1438060 - DNA, 15 bp, Homo sapiens
gctttgtttcccttc

SEQ ID NO: 1438061 - DNA, 15 bp, Homo sapiens
agctttgtttccctt

SEQ ID NO: 1438062 - DNA, 15 bp, Homo sapiens
aagctttgtttccct

SEQ ID NO: 1438063 - DNA, 15 bp, Homo sapiens
taagctttgtttccc

SEQ ID NO: 1438064 - DNA, 15 bp, Homo sapiens
ataagctttgtttcc

SEQ ID NO: 1438065 - DNA, 15 bp, Homo sapiens
aataagctttgtttc

SEQ ID NO: 1438066 - DNA, 15 bp, Homo sapiens
caataagctttgttt

SEQ ID NO: 1438067 - DNA, 15 bp, Homo sapiens
gcaataagctttgtt

SEQ ID NO: 1438068 - DNA, 15 bp, Homo sapiens
agcaataagctttgt

SEQ ID NO: 1438069 - DNA, 15 bp, Homo sapiens
aagcaataagctttg

SEQ ID NO: 1438070 - DNA, 15 bp, Homo sapiens
aaagcaataagcttt

SEQ ID NO: 1438071 - DNA, 15 bp, Homo sapiens
gaaagcaataagctt

SEQ ID NO: 1438072 - DNA, 15 bp, Homo sapiens
agaaagcaataagct

SEQ ID NO: 1438073 - DNA, 15 bp, Homo sapiens
aagaaagcaataagc

SEQ ID NO: 1438074 - DNA, 15 bp, Homo sapiens
taagaaagcaataag

SEQ ID NO: 1438075 - DNA, 15 bp, Homo sapiens
ttaagaaagcaataa

SEQ ID NO: 1438076 - DNA, 15 bp, Homo sapiens
cttaagaaagcaata

SEQ ID NO: 1438077 - DNA, 15 bp, Homo sapiens
gcttaagaaagcaat

SEQ ID NO: 1438078 - DNA, 15 bp, Homo sapiens
agcttaagaaagcaa

SEQ ID NO: 1438079 - DNA, 15 bp, Homo sapiens
aagcttaagaaagca

SEQ ID NO: 1438080 - DNA, 15 bp, Homo sapiens
aaagcttaagaaagc

SEQ ID NO: 1438081 - DNA, 15 bp, Homo sapiens
aaaagcttaagaaag

SEQ ID NO: 1438082 - DNA, 15 bp, Homo sapiens
taaaagcttaagaaa

SEQ ID NO: 1438083 - DNA, 15 bp, Homo sapiens
ataaaagcttaagaa

SEQ ID NO: 1438084 - DNA, 15 bp, Homo sapiens
gataaaagcttaaga

SEQ ID NO: 1438085 - DNA, 15 bp, Homo sapiens
tgataaaagcttaag

SEQ ID NO: 1438086 - DNA, 15 bp, Homo sapiens
atgataaaagcttaa

SEQ ID NO: 1438087 - DNA, 15 bp, Homo sapiens
tatgataaaagctta

SEQ ID NO: 1438088 - DNA, 15 bp, Homo sapiens
atatgataaaagctt

SEQ ID NO: 1438089 - DNA, 15 bp, Homo sapiens
tatatgataaaagct

SEQ ID NO: 1438090 - DNA, 15 bp, Homo sapiens
atatatgataaaagc

SEQ ID NO: 1438091 - DNA, 15 bp, Homo sapiens
aatatatgataaaag

SEQ ID NO: 1438092 - DNA, 15 bp, Homo sapiens
aaatatatgataaaa

SEQ ID NO: 1438093 - DNA, 15 bp, Homo sapiens
gaaatatatgataaa

SEQ ID NO: 1438094 - DNA, 15 bp, Homo sapiens
ggaaatatatgataa

SEQ ID NO: 1438095 - DNA, 15 bp, Homo sapiens
tggaaatatatgata

SEQ ID NO: 1438096 - DNA, 15 bp, Homo sapiens
ttggaaatatatgat

SEQ ID NO: 1438097 - DNA, 15 bp, Homo sapiens
tttggaaatatatga

SEQ ID NO: 1438098 - DNA, 15 bp, Homo sapiens
atttggaaatatatg

SEQ ID NO: 1438099 - DNA, 15 bp, Homo sapiens
aatttggaaatatat

SEQ ID NO: 1438100 - DNA, 15 bp, Homo sapiens
taatttggaaatata

SEQ ID NO: 1438101 - DNA, 15 bp, Homo sapiens
ataatttggaaatat

SEQ ID NO: 1438102 - DNA, 15 bp, Homo sapiens
tataatttggaaata

SEQ ID NO: 1438103 - DNA, 15 bp, Homo sapiens
gtataatttggaaat

SEQ ID NO: 1438104 - DNA, 15 bp, Homo sapiens
agtataatttggaaa

SEQ ID NO: 1438105 - DNA, 15 bp, Homo sapiens
tagtataatttggaa

SEQ ID NO: 1438106 - DNA, 15 bp, Homo sapiens
ttagtataatttgga

SEQ ID NO: 1438107 - DNA, 15 bp, Homo sapiens
tttagtataatttgg

SEQ ID NO: 1438108 - DNA, 15 bp, Homo sapiens
atttagtataatttg

SEQ ID NO: 1438109 - DNA, 15 bp, Homo sapiens
tatttagtataattt

SEQ ID NO: 1438110 - DNA, 15 bp, Homo sapiens
ttatttagtataatt

SEQ ID NO: 1438111 - DNA, 15 bp, Homo sapiens
cttatttagtataat

SEQ ID NO: 1438112 - DNA, 15 bp, Homo sapiens
acttatttagtataa

SEQ ID NO: 1438113 - DNA, 15 bp, Homo sapiens
tacttatttagtata

SEQ ID NO: 1438114 - DNA, 15 bp, Homo sapiens
ttacttatttagtat

SEQ ID NO: 1438115 - DNA, 15 bp, Homo sapiens
attacttatttagta

SEQ ID NO: 1438116 - DNA, 15 bp, Homo sapiens
tattacttatttagt

SEQ ID NO: 1438117 - DNA, 15 bp, Homo sapiens
ttattacttatttag

SEQ ID NO: 1438118 - DNA, 15 bp, Homo sapiens
tttattacttattta

SEQ ID NO: 1438119 - DNA, 15 bp, Homo sapiens
ttttattacttattt

SEQ ID NO: 1438120 - DNA, 15 bp, Homo sapiens
tttttattacttatt

SEQ ID NO: 1438121 - DNA, 15 bp, Homo sapiens
atttttattacttat

SEQ ID NO: 1438122 - DNA, 15 bp, Homo sapiens
catttttattactta

SEQ ID NO: 1438123 - DNA, 15 bp, Homo sapiens
acatttttattactt

SEQ ID NO: 1438124 - DNA, 15 bp, Homo sapiens
tacatttttattact

SEQ ID NO: 1438125 - DNA, 15 bp, Homo sapiens
atacatttttattac

SEQ ID NO: 1438126 - DNA, 15 bp, Homo sapiens
gatacatttttatta

SEQ ID NO: 1438127 - DNA, 15 bp, Homo sapiens
tgatacatttttatt

SEQ ID NO: 1438128 - DNA, 15 bp, Homo sapiens
atgatacatttttat

SEQ ID NO: 1438129 - DNA, 15 bp, Homo sapiens
aatgatacattttta

SEQ ID NO: 1438130 - DNA, 15 bp, Homo sapiens
gaatgatacattttt

SEQ ID NO: 1438131 - DNA, 15 bp, Homo sapiens
ggaatgatacatttt

SEQ ID NO: 1438132 - DNA, 15 bp, Homo sapiens
cggaatgatacattt

SEQ ID NO: 1438133 - DNA, 15 bp, Homo sapiens
tcggaatgatacatt

SEQ ID NO: 1438134 - DNA, 15 bp, Homo sapiens
gtcggaatgatacat

SEQ ID NO: 1438135 - DNA, 15 bp, Homo sapiens
tgtcggaatgataca

SEQ ID NO: 1438136 - DNA, 15 bp, Homo sapiens
ctgtcggaatgatac

SEQ ID NO: 1438137 - DNA, 15 bp, Homo sapiens
gctgtcggaatgata

SEQ ID NO: 1438138 - DNA, 15 bp, Homo sapiens
agctgtcggaatgat

SEQ ID NO: 1438139 - DNA, 15 bp, Homo sapiens
cagctgtcggaatga

SEQ ID NO: 1438140 - DNA, 15 bp, Homo sapiens
acagctgtcggaatg

SEQ ID NO: 1438141 - DNA, 15 bp, Homo sapiens
cacagctgtcggaat

SEQ ID NO: 1438142 - DNA, 15 bp, Homo sapiens
acacagctgtcggaa

SEQ ID NO: 1438143 - DNA, 15 bp, Homo sapiens
cacacagctgtcgga

SEQ ID NO: 1438144 - DNA, 15 bp, Homo sapiens
acacacagctgtcgg

SEQ ID NO: 1438145 - DNA, 15 bp, Homo sapiens
cacacacagctgtcg

SEQ ID NO: 1438146 - DNA, 15 bp, Homo sapiens
tcacacacagctgtc

SEQ ID NO: 1438147 - DNA, 15 bp, Homo sapiens
ttcacacacagctgt

SEQ ID NO: 1438148 - DNA, 15 bp, Homo sapiens
tttcacacacagctg

SEQ ID NO: 1438149 - DNA, 15 bp, Homo sapiens
ctttcacacacagct

SEQ ID NO: 1438150 - DNA, 15 bp, Homo sapiens
tctttcacacacagc

SEQ ID NO: 1438151 - DNA, 15 bp, Homo sapiens
ctctttcacacacag

SEQ ID NO: 1438152 - DNA, 15 bp, Homo sapiens
gctctttcacacaca

SEQ ID NO: 1438153 - DNA, 15 bp, Homo sapiens
ggctctttcacacac

SEQ ID NO: 1438154 - DNA, 15 bp, Homo sapiens
aggctctttcacaca

SEQ ID NO: 1438155 - DNA, 15 bp, Homo sapiens
taggctctttcacac

SEQ ID NO: 1438156 - DNA, 15 bp, Homo sapiens
ataggctctttcaca

SEQ ID NO: 1438157 - DNA, 15 bp, Homo sapiens
aataggctctttcac

SEQ ID NO: 1438158 - DNA, 15 bp, Homo sapiens
aaataggctctttca

SEQ ID NO: 1438159 - DNA, 15 bp, Homo sapiens
aaaataggctctttc

SEQ ID NO: 1438160 - DNA, 15 bp, Homo sapiens
aaaaataggctcttt

SEQ ID NO: 1438161 - DNA, 15 bp, Homo sapiens
aaaaaataggctctt

SEQ ID NO: 1438162 - DNA, 15 bp, Homo sapiens
caaaaaataggctct

SEQ ID NO: 1438163 - DNA, 15 bp, Homo sapiens
gcaaaaaataggctc

SEQ ID NO: 1438164 - DNA, 15 bp, Homo sapiens
tgcaaaaaataggct

SEQ ID NO: 1438165 - DNA, 15 bp, Homo sapiens
ctgcaaaaaataggc

SEQ ID NO: 1438166 - DNA, 15 bp, Homo sapiens
tctgcaaaaaatagg

SEQ ID NO: 1438167 - DNA, 15 bp, Homo sapiens
atctgcaaaaaatag

SEQ ID NO: 1438168 - DNA, 15 bp, Homo sapiens
tatctgcaaaaaata

SEQ ID NO: 1438169 - DNA, 15 bp, Homo sapiens
gtatctgcaaaaaat

SEQ ID NO: 1438170 - DNA, 15 bp, Homo sapiens
agtatctgcaaaaaa

SEQ ID NO: 1438171 - DNA, 15 bp, Homo sapiens
aagtatctgcaaaaa

SEQ ID NO: 1438172 - DNA, 15 bp, Homo sapiens
caagtatctgcaaaa

SEQ ID NO: 1438173 - DNA, 15 bp, Homo sapiens
acaagtatctgcaaa

SEQ ID NO: 1438174 - DNA, 15 bp, Homo sapiens
gacaagtatctgcaa

SEQ ID NO: 1438175 - DNA, 15 bp, Homo sapiens
agacaagtatctgca

SEQ ID NO: 1438176 - DNA, 15 bp, Homo sapiens
cagacaagtatctgc

SEQ ID NO: 1438177 - DNA, 15 bp, Homo sapiens
gcagacaagtatctg

SEQ ID NO: 1438178 - DNA, 15 bp, Homo sapiens
tgcagacaagtatct

SEQ ID NO: 1438179 - DNA, 15 bp, Homo sapiens
gtgcagacaagtatc

SEQ ID NO: 1438180 - DNA, 15 bp, Homo sapiens
cgtgcagacaagtat

SEQ ID NO: 1438181 - DNA, 15 bp, Homo sapiens
ccgtgcagacaagta

SEQ ID NO: 1438182 - DNA, 15 bp, Homo sapiens
cccgtgcagacaagt

SEQ ID NO: 1438183 - DNA, 15 bp, Homo sapiens
tcccgtgcagacaag

SEQ ID NO: 1438184 - DNA, 15 bp, Homo sapiens
atcccgtgcagacaa

SEQ ID NO: 1438185 - DNA, 15 bp, Homo sapiens
tatcccgtgcagaca

SEQ ID NO: 1438186 - DNA, 15 bp, Homo sapiens
atatcccgtgcagac

SEQ ID NO: 1438187 - DNA, 15 bp, Homo sapiens
aatatcccgtgcaga

SEQ ID NO: 1438188 - DNA, 15 bp, Homo sapiens
caatatcccgtgcag

SEQ ID NO: 1438189 - DNA, 15 bp, Homo sapiens
ccaatatcccgtgca

SEQ ID NO: 1438190 - DNA, 15 bp, Homo sapiens
gccaatatcccgtgc

SEQ ID NO: 1438191 - DNA, 15 bp, Homo sapiens
agccaatatcccgtg

SEQ ID NO: 1438192 - DNA, 15 bp, Homo sapiens
cagccaatatcccgt

SEQ ID NO: 1438193 - DNA, 15 bp, Homo sapiens
acagccaatatcccg

SEQ ID NO: 1438194 - DNA, 15 bp, Homo sapiens
cacagccaatatccc

SEQ ID NO: 1438195 - DNA, 15 bp, Homo sapiens
tcacagccaatatcc

SEQ ID NO: 1438196 - DNA, 15 bp, Homo sapiens
atcacagccaatatc

SEQ ID NO: 1438197 - DNA, 15 bp, Homo sapiens
aatcacagccaatat

SEQ ID NO: 1438198 - DNA, 15 bp, Homo sapiens
aaatcacagccaata

SEQ ID NO: 1438199 - DNA, 15 bp, Homo sapiens
aaaatcacagccaat

SEQ ID NO: 1438200 - DNA, 15 bp, Homo sapiens
gaaaatcacagccaa

SEQ ID NO: 1438201 - DNA, 15 bp, Homo sapiens
tgaaaatcacagcca

SEQ ID NO: 1438202 - DNA, 15 bp, Homo sapiens
atgaaaatcacagcc

SEQ ID NO: 1438203 - DNA, 15 bp, Homo sapiens
aatgaaaatcacagc

SEQ ID NO: 1438204 - DNA, 15 bp, Homo sapiens
aaatgaaaatcacag

SEQ ID NO: 1438205 - DNA, 15 bp, Homo sapiens
aaaatgaaaatcaca

SEQ ID NO: 1438206 - DNA, 15 bp, Homo sapiens
aaaaatgaaaatcac

SEQ ID NO: 1438207 - DNA, 15 bp, Homo sapiens
taaaaatgaaaatca

SEQ ID NO: 1438208 - DNA, 15 bp, Homo sapiens
ctaaaaatgaaaatc

SEQ ID NO: 1438209 - DNA, 15 bp, Homo sapiens
ctgctaaaaatgaaa

SEQ ID NO: 1438210 - DNA, 15 bp, Homo sapiens
actgctaaaaatgaa

SEQ ID NO: 1438211 - DNA, 15 bp, Homo sapiens
aactgctaaaaatga

SEQ ID NO: 1438212 - DNA, 15 bp, Homo sapiens
aaactgctaaaaatg

SEQ ID NO: 1438213 - DNA, 15 bp, Homo sapiens
taaactgctaaaaat

SEQ ID NO: 1438214 - DNA, 15 bp, Homo sapiens
ttaaactgctaaaaa

SEQ ID NO: 1438215 - DNA, 15 bp, Homo sapiens
attaaactgctaaaa

SEQ ID NO: 1438216 - DNA, 15 bp, Homo sapiens
aattaaactgctaaa

SEQ ID NO: 1438217 - DNA, 15 bp, Homo sapiens
aaattaaactgctaa

SEQ ID NO: 1438218 - DNA, 15 bp, Homo sapiens
aaaattaaactgcta

SEQ ID NO: 1438219 - DNA, 15 bp, Homo sapiens
caaaattaaactgct

SEQ ID NO: 1438220 - DNA, 15 bp, Homo sapiens
gcaaaattaaactgc

SEQ ID NO: 1438221 - DNA, 15 bp, Homo sapiens
ggcaaaattaaactg

SEQ ID NO: 1438222 - DNA, 15 bp, Homo sapiens
ctggcaaaattaaac

SEQ ID NO: 1438223 - DNA, 15 bp, Homo sapiens
gctggcaaaattaaa

SEQ ID NO: 1438224 - DNA, 15 bp, Homo sapiens
tgctggcaaaattaa

SEQ ID NO: 1438225 - DNA, 15 bp, Homo sapiens
gtgctggcaaaatta

SEQ ID NO: 1438226 - DNA, 15 bp, Homo sapiens
ggtgctggcaaaatt

SEQ ID NO: 1438227 - DNA, 15 bp, Homo sapiens
aggtgctggcaaaat

SEQ ID NO: 1438228 - DNA, 15 bp, Homo sapiens
aaggtgctggcaaaa

SEQ ID NO: 1438229 - DNA, 15 bp, Homo sapiens
aaaggtgctggcaaa

SEQ ID NO: 1438230 - DNA, 15 bp, Homo sapiens
caaaggtgctggcaa

SEQ ID NO: 1438231 - DNA, 15 bp, Homo sapiens
ccaaaggtgctggca

SEQ ID NO: 1438232 - DNA, 15 bp, Homo sapiens
accaaaggtgctggc

SEQ ID NO: 1438233 - DNA, 15 bp, Homo sapiens
taccaaaggtgctgg

SEQ ID NO: 1438234 - DNA, 15 bp, Homo sapiens
ataccaaaggtgctg

SEQ ID NO: 1438235 - DNA, 15 bp, Homo sapiens
gataccaaaggtgct

SEQ ID NO: 1438236 - DNA, 15 bp, Homo sapiens
agataccaaaggtgc

SEQ ID NO: 1438237 - DNA, 15 bp, Homo sapiens
tagataccaaaggtg

SEQ ID NO: 1438238 - DNA, 15 bp, Homo sapiens
ctagataccaaaggt

SEQ ID NO: 1438239 - DNA, 15 bp, Homo sapiens
actagataccaaagg

SEQ ID NO: 1438240 - DNA, 15 bp, Homo sapiens
aactagataccaaag

SEQ ID NO: 1438241 - DNA, 15 bp, Homo sapiens
aaactagataccaaa

SEQ ID NO: 1438242 - DNA, 15 bp, Homo sapiens
caaactagataccaa

SEQ ID NO: 1438243 - DNA, 15 bp, Homo sapiens
acaaactagatacca

SEQ ID NO: 1438244 - DNA, 15 bp, Homo sapiens
aacaaactagatacc

SEQ ID NO: 1438245 - DNA, 15 bp, Homo sapiens
aaacaaactagatac

SEQ ID NO: 1438246 - DNA, 15 bp, Homo sapiens
caaacaaactagata

SEQ ID NO: 1438247 - DNA, 15 bp, Homo sapiens
tcaaacaaactagat

SEQ ID NO: 1438248 - DNA, 15 bp, Homo sapiens
ttcaaacaaactaga

SEQ ID NO: 1438249 - DNA, 15 bp, Homo sapiens
gttcaaacaaactag

SEQ ID NO: 1438250 - DNA, 15 bp, Homo sapiens
tgttcaaacaaacta

SEQ ID NO: 1438251 - DNA, 15 bp, Homo sapiens
atgttcaaacaaact

SEQ ID NO: 1438252 - DNA, 15 bp, Homo sapiens
aatgttcaaacaaac

SEQ ID NO: 1438253 - DNA, 15 bp, Homo sapiens
aaatgttcaaacaaa

SEQ ID NO: 1438254 - DNA, 15 bp, Homo sapiens
gaaatgttcaaacaa

SEQ ID NO: 1438255 - DNA, 15 bp, Homo sapiens
tgaaatgttcaaaca

SEQ ID NO: 1438256 - DNA, 15 bp, Homo sapiens
atgaaatgttcaaac

SEQ ID NO: 1438257 - DNA, 15 bp, Homo sapiens
gatgaaatgttcaaa

SEQ ID NO: 1438258 - DNA, 15 bp, Homo sapiens
tgatgaaatgttcaa

SEQ ID NO: 1438259 - DNA, 15 bp, Homo sapiens
gtgatgaaatgttca

SEQ ID NO: 1438260 - DNA, 15 bp, Homo sapiens
tgtgatgaaatgttc

SEQ ID NO: 1438261 - DNA, 15 bp, Homo sapiens
atgtgatgaaatgtt

SEQ ID NO: 1438262 - DNA, 15 bp, Homo sapiens
tatgtgatgaaatgt

SEQ ID NO: 1438263 - DNA, 15 bp, Homo sapiens
atatgtgatgaaatg

SEQ ID NO: 1438264 - DNA, 15 bp, Homo sapiens
aatatgtgatgaaat

SEQ ID NO: 1438265 - DNA, 15 bp, Homo sapiens
aaatatgtgatgaaa

SEQ ID NO: 1438266 - DNA, 15 bp, Homo sapiens
caaatatgtgatgaa

SEQ ID NO: 1438267 - DNA, 15 bp, Homo sapiens
acaaatatgtgatga

SEQ ID NO: 1438268 - DNA, 15 bp, Homo sapiens
cacaaatatgtgatg

SEQ ID NO: 1438269 - DNA, 15 bp, Homo sapiens
ccacaaatatgtgat

SEQ ID NO: 1438270 - DNA, 15 bp, Homo sapiens
cccacaaatatgtga

SEQ ID NO: 1438271 - DNA, 15 bp, Homo sapiens
gcccacaaatatgtg

SEQ ID NO: 1438272 - DNA, 15 bp, Homo sapiens
ggcccacaaatatgt

SEQ ID NO: 1438273 - DNA, 15 bp, Homo sapiens
tggcccacaaatatg

SEQ ID NO: 1438274 - DNA, 15 bp, Homo sapiens
atggcccacaaatat

SEQ ID NO: 1438275 - DNA, 15 bp, Homo sapiens
aatggcccacaaata

SEQ ID NO: 1438276 - DNA, 15 bp, Homo sapiens
aaatggcccacaaat

SEQ ID NO: 1438277 - DNA, 15 bp, Homo sapiens
aaaatggcccacaaa

SEQ ID NO: 1438278 - DNA, 15 bp, Homo sapiens
taaaatggcccacaa

SEQ ID NO: 1438279 - DNA, 15 bp, Homo sapiens
ataaaatggcccaca

SEQ ID NO: 1438280 - DNA, 15 bp, Homo sapiens
aataaaatggcccac

SEQ ID NO: 1438281 - DNA, 15 bp, Homo sapiens
aaataaaatggccca

SEQ ID NO: 1438282 - DNA, 15 bp, Homo sapiens
gaaataaaatggccc

SEQ ID NO: 1438283 - DNA, 15 bp, Homo sapiens
agaaataaaatggcc

SEQ ID NO: 1438284 - DNA, 15 bp, Homo sapiens
aagaaataaaatggc

SEQ ID NO: 1438285 - DNA, 15 bp, Homo sapiens
gaagaaataaaatgg

SEQ ID NO: 1438286 - DNA, 15 bp, Homo sapiens
tgaagaaataaaatg

SEQ ID NO: 1438287 - DNA, 15 bp, Homo sapiens
atgaagaaataaaat

SEQ ID NO: 1438288 - DNA, 15 bp, Homo sapiens
aatgaagaaataaaa

SEQ ID NO: 1438289 - DNA, 15 bp, Homo sapiens
aaatgaagaaataaa

SEQ ID NO: 1438290 - DNA, 15 bp, Homo sapiens
caaatgaagaaataa

SEQ ID NO: 1438291 - DNA, 15 bp, Homo sapiens
acaaatgaagaaata

SEQ ID NO: 1438292 - DNA, 15 bp, Homo sapiens
cacaaatgaagaaat

SEQ ID NO: 1438293 - DNA, 15 bp, Homo sapiens
tcacaaatgaagaaa

SEQ ID NO: 1438294 - DNA, 15 bp, Homo sapiens
gtcacaaatgaagaa

SEQ ID NO: 1438295 - DNA, 15 bp, Homo sapiens
agtcacaaatgaaga

SEQ ID NO: 1438296 - DNA, 15 bp, Homo sapiens
gagtcacaaatgaag

SEQ ID NO: 1438297 - DNA, 15 bp, Homo sapiens
tgagtcacaaatgaa

SEQ ID NO: 1438298 - DNA, 15 bp, Homo sapiens
gtgagtcacaaatga

SEQ ID NO: 1438299 - DNA, 15 bp, Homo sapiens
agtgagtcacaaatg

SEQ ID NO: 1438300 - DNA, 15 bp, Homo sapiens
cagtgagtcacaaat

SEQ ID NO: 1438301 - DNA, 15 bp, Homo sapiens
tcagtgagtcacaaa

SEQ ID NO: 1438302 - DNA, 15 bp, Homo sapiens
atcagtgagtcacaa

SEQ ID NO: 1438303 - DNA, 15 bp, Homo sapiens
aatcagtgagtcaca

SEQ ID NO: 1438304 - DNA, 15 bp, Homo sapiens
gaatcagtgagtcac

SEQ ID NO: 1438305 - DNA, 15 bp, Homo sapiens
cgaatcagtgagtca

SEQ ID NO: 1438306 - DNA, 15 bp, Homo sapiens
acgaatcagtgagtc

SEQ ID NO: 1438307 - DNA, 15 bp, Homo sapiens
gacgaatcagtgagt

SEQ ID NO: 1438308 - DNA, 15 bp, Homo sapiens
agacgaatcagtgag

SEQ ID NO: 1438309 - DNA, 15 bp, Homo sapiens
aagacgaatcagtga

SEQ ID NO: 1438310 - DNA, 15 bp, Homo sapiens
aaagacgaatcagtg

SEQ ID NO: 1438311 - DNA, 15 bp, Homo sapiens
aaaagacgaatcagt

SEQ ID NO: 1438312 - DNA, 15 bp, Homo sapiens
aaaaagacgaatcag

SEQ ID NO: 1438313 - DNA, 15 bp, Homo sapiens
aaaaaagacgaatca

SEQ ID NO: 1438314 - DNA, 15 bp, Homo sapiens
taaaaaagacgaatc

SEQ ID NO: 1438315 - DNA, 15 bp, Homo sapiens
ttaaaaaagacgaat

SEQ ID NO: 1438316 - DNA, 15 bp, Homo sapiens
tttaaaaaagacgaa

SEQ ID NO: 1438317 - DNA, 15 bp, Homo sapiens
atttaaaaaagacga

SEQ ID NO: 1438318 - DNA, 15 bp, Homo sapiens
aatttaaaaaagacg

SEQ ID NO: 1438319 - DNA, 15 bp, Homo sapiens
aaatttaaaaaagac

SEQ ID NO: 1438320 - DNA, 15 bp, Homo sapiens
aaaatttaaaaaaga

SEQ ID NO: 1438321 - DNA, 15 bp, Homo sapiens
aaaaatttaaaaaag

SEQ ID NO: 1438322 - DNA, 15 bp, Homo sapiens
aaaaaatttaaaaaa

SEQ ID NO: 1438323 - DNA, 15 bp, Homo sapiens
taaaaaatttaaaaa

SEQ ID NO: 1438324 - DNA, 15 bp, Homo sapiens
ttaaaaaatttaaaa

SEQ ID NO: 1438325 - DNA, 15 bp, Homo sapiens
attaaaaaatttaaa

SEQ ID NO: 1438326 - DNA, 15 bp, Homo sapiens
aattaaaaaatttaa

SEQ ID NO: 1438327 - DNA, 15 bp, Homo sapiens
aaattaaaaaattta

SEQ ID NO: 1438328 - DNA, 15 bp, Homo sapiens
aaaattaaaaaattt

SEQ ID NO: 1438329 - DNA, 15 bp, Homo sapiens
aaaaattaaaaaatt

SEQ ID NO: 1438330 - DNA, 15 bp, Homo sapiens
aaaaaattaaaaaat

SEQ ID NO: 1438331 - DNA, 15 bp, Homo sapiens
atctcacaaaaaaaa

SEQ ID NO: 1438332 - DNA, 15 bp, Homo sapiens
catctcacaaaaaaa

SEQ ID NO: 1438333 - DNA, 15 bp, Homo sapiens
ccatctcacaaaaaa

SEQ ID NO: 1438334 - DNA, 15 bp, Homo sapiens
tccatctcacaaaaa

SEQ ID NO: 1438335 - DNA, 15 bp, Homo sapiens
ctccatctcacaaaa

SEQ ID NO: 1438336 - DNA, 15 bp, Homo sapiens
actccatctcacaaa

SEQ ID NO: 1438337 - DNA, 15 bp, Homo sapiens
aactccatctcacaa

SEQ ID NO: 1438338 - DNA, 15 bp, Homo sapiens
aaactccatctcaca

SEQ ID NO: 1438339 - DNA, 15 bp, Homo sapiens
aaaactccatctcac

SEQ ID NO: 1438340 - DNA, 15 bp, Homo sapiens
acaagagcaaaactc

SEQ ID NO: 1438341 - DNA, 15 bp, Homo sapiens
aacaagagcaaaact

SEQ ID NO: 1438342 - DNA, 15 bp, Homo sapiens
caacaagagcaaaac

SEQ ID NO: 1438343 - DNA, 15 bp, Homo sapiens
gcaacaagagcaaaa

SEQ ID NO: 1438344 - DNA, 15 bp, Homo sapiens
ggcaacaagagcaaa

SEQ ID NO: 1438345 - DNA, 15 bp, Homo sapiens
gggcaacaagagcaa

SEQ ID NO: 1438346 - DNA, 15 bp, Homo sapiens
tgggcaacaagagca

SEQ ID NO: 1438347 - DNA, 15 bp, Homo sapiens
acactctagcctggg

SEQ ID NO: 1438348 - DNA, 15 bp, Homo sapiens
cacactctagcctgg

SEQ ID NO: 1438349 - DNA, 15 bp, Homo sapiens
ccacactctagcctg

SEQ ID NO: 1438350 - DNA, 15 bp, Homo sapiens
accacactctagcct

SEQ ID NO: 1438351 - DNA, 15 bp, Homo sapiens
caccacactctagcc

SEQ ID NO: 1438352 - DNA, 15 bp, Homo sapiens
ccaccacactctagc

SEQ ID NO: 1438353 - DNA, 15 bp, Homo sapiens
accaccacactctag

SEQ ID NO: 1438354 - DNA, 15 bp, Homo sapiens
taccaccacactcta

SEQ ID NO: 1438355 - DNA, 15 bp, Homo sapiens
gtaccaccacactct

SEQ ID NO: 1438356 - DNA, 15 bp, Homo sapiens
tgtaccaccacactc

SEQ ID NO: 1438357 - DNA, 15 bp, Homo sapiens
ctgtaccaccacact

SEQ ID NO: 1438358 - DNA, 15 bp, Homo sapiens
actgtaccaccacac

SEQ ID NO: 1438359 - DNA, 15 bp, Homo sapiens
gactgtaccaccaca

SEQ ID NO: 1438360 - DNA, 15 bp, Homo sapiens
agactgtaccaccac

SEQ ID NO: 1438361 - DNA, 15 bp, Homo sapiens
aagactgtaccacca

SEQ ID NO: 1438362 - DNA, 15 bp, Homo sapiens
caagactgtaccacc

SEQ ID NO: 1438363 - DNA, 15 bp, Homo sapiens
ccaagactgtaccac

SEQ ID NO: 1438364 - DNA, 15 bp, Homo sapiens
gccaagactgtacca

SEQ ID NO: 1438365 - DNA, 15 bp, Homo sapiens
agccaagactgtacc

SEQ ID NO: 1438366 - DNA, 15 bp, Homo sapiens
gagccaagactgtac

SEQ ID NO: 1438367 - DNA, 15 bp, Homo sapiens
tgagccaagactgta

SEQ ID NO: 1438368 - DNA, 15 bp, Homo sapiens
gtgagccaagactgt

SEQ ID NO: 1438369 - DNA, 15 bp, Homo sapiens
aaggaggttgcagtg

SEQ ID NO: 1438370 - DNA, 15 bp, Homo sapiens
gaaggaggttgcagt

SEQ ID NO: 1438371 - DNA, 15 bp, Homo sapiens
agaaggaggttgcag

SEQ ID NO: 1438372 - DNA, 15 bp, Homo sapiens
tagaaggaggttgca

SEQ ID NO: 1438373 - DNA, 15 bp, Homo sapiens
gtagaaggaggttgc

SEQ ID NO: 1438374 - DNA, 15 bp, Homo sapiens
ggtagaaggaggttg

SEQ ID NO: 1438375 - DNA, 15 bp, Homo sapiens
tggtagaaggaggtt

SEQ ID NO: 1438376 - DNA, 15 bp, Homo sapiens
ctggtagaaggaggt

SEQ ID NO: 1438377 - DNA, 15 bp, Homo sapiens
actggtagaaggagg

SEQ ID NO: 1438378 - DNA, 15 bp, Homo sapiens
aactggtagaaggag

SEQ ID NO: 1438379 - DNA, 15 bp, Homo sapiens
aaactggtagaagga

SEQ ID NO: 1438380 - DNA, 15 bp, Homo sapiens
gaaactggtagaagg

SEQ ID NO: 1438381 - DNA, 15 bp, Homo sapiens
tgaaactggtagaag

SEQ ID NO: 1438382 - DNA, 15 bp, Homo sapiens
ttgaaactggtagaa

SEQ ID NO: 1438383 - DNA, 15 bp, Homo sapiens
cttgaaactggtaga

SEQ ID NO: 1438384 - DNA, 15 bp, Homo sapiens
gcttgaaactggtag

SEQ ID NO: 1438385 - DNA, 15 bp, Homo sapiens
tgcttgaaactggta

SEQ ID NO: 1438386 - DNA, 15 bp, Homo sapiens
ttgcttgaaactggt

SEQ ID NO: 1438387 - DNA, 15 bp, Homo sapiens
attgcttgaaactgg

SEQ ID NO: 1438388 - DNA, 15 bp, Homo sapiens
aattgcttgaaactg

SEQ ID NO: 1438389 - DNA, 15 bp, Homo sapiens
gaattgcttgaaact

SEQ ID NO: 1438390 - DNA, 15 bp, Homo sapiens
atggtggtgcacgcc

SEQ ID NO: 1438391 - DNA, 15 bp, Homo sapiens
catggtggtgcacgc

SEQ ID NO: 1438392 - DNA, 15 bp, Homo sapiens
gcatggtggtgcacg

SEQ ID NO: 1438393 - DNA, 15 bp, Homo sapiens
tgggcatggtggtgc

SEQ ID NO: 1438394 - DNA, 15 bp, Homo sapiens
tggctgggcatggtg

SEQ ID NO: 1438395 - DNA, 15 bp, Homo sapiens
ttggctgggcatggt

SEQ ID NO: 1438396 - DNA, 15 bp, Homo sapiens
attggctgggcatgg

SEQ ID NO: 1438397 - DNA, 15 bp, Homo sapiens
aattggctgggcatg

SEQ ID NO: 1438398 - DNA, 15 bp, Homo sapiens
aaattggctgggcat

SEQ ID NO: 1438399 - DNA, 15 bp, Homo sapiens
aaaattggctgggca

SEQ ID NO: 1438400 - DNA, 15 bp, Homo sapiens
caaaattggctgggc

SEQ ID NO: 1438401 - DNA, 15 bp, Homo sapiens
acaaaattggctggg

SEQ ID NO: 1438402 - DNA, 15 bp, Homo sapiens
tacaaaattggctgg

SEQ ID NO: 1438403 - DNA, 15 bp, Homo sapiens
atacaaaattggctg

SEQ ID NO: 1438404 - DNA, 15 bp, Homo sapiens
aatacaaaattggct

SEQ ID NO: 1438405 - DNA, 15 bp, Homo sapiens
ccgtctgtactaaaa

SEQ ID NO: 1438406 - DNA, 15 bp, Homo sapiens
cccgtctgtactaaa

SEQ ID NO: 1438407 - DNA, 15 bp, Homo sapiens
ccccgtctgtactaa

SEQ ID NO: 1438408 - DNA, 15 bp, Homo sapiens
accccgtctgtacta

SEQ ID NO: 1438409 - DNA, 15 bp, Homo sapiens
aaccccgtctgtact

SEQ ID NO: 1438410 - DNA, 15 bp, Homo sapiens
aaaccccgtctgtac

SEQ ID NO: 1438411 - DNA, 15 bp, Homo sapiens
aaaaccccgtctgta

SEQ ID NO: 1438412 - DNA, 15 bp, Homo sapiens
taaaaccccgtctgt

SEQ ID NO: 1438413 - DNA, 15 bp, Homo sapiens
gtaaaaccccgtctg

SEQ ID NO: 1438414 - DNA, 15 bp, Homo sapiens
ggtaaaaccccgtct

SEQ ID NO: 1438415 - DNA, 15 bp, Homo sapiens
tggtaaaaccccgtc

SEQ ID NO: 1438416 - DNA, 15 bp, Homo sapiens
atggtaaaaccccgt

SEQ ID NO: 1438417 - DNA, 15 bp, Homo sapiens
accaacatggtaaaa

SEQ ID NO: 1438418 - DNA, 15 bp, Homo sapiens
taccaacatggtaaa

SEQ ID NO: 1438419 - DNA, 15 bp, Homo sapiens
ttaccaacatggtaa

SEQ ID NO: 1438420 - DNA, 15 bp, Homo sapiens
cttaccaacatggta

SEQ ID NO: 1438421 - DNA, 15 bp, Homo sapiens
ccttaccaacatggt

SEQ ID NO: 1438422 - DNA, 15 bp, Homo sapiens
gccttaccaacatgg

SEQ ID NO: 1438423 - DNA, 15 bp, Homo sapiens
agccttaccaacatg

SEQ ID NO: 1438424 - DNA, 15 bp, Homo sapiens
cagccttaccaacat

SEQ ID NO: 1438425 - DNA, 15 bp, Homo sapiens
ccagccttaccaaca

SEQ ID NO: 1438426 - DNA, 15 bp, Homo sapiens
accagccttaccaac

SEQ ID NO: 1438427 - DNA, 15 bp, Homo sapiens
caccagccttaccaa

SEQ ID NO: 1438428 - DNA, 15 bp, Homo sapiens
acaccagccttacca

SEQ ID NO: 1438429 - DNA, 15 bp, Homo sapiens
gacaccagccttacc

SEQ ID NO: 1438430 - DNA, 15 bp, Homo sapiens
tgacaccagccttac

SEQ ID NO: 1438431 - DNA, 15 bp, Homo sapiens
ttgacaccagcctta

SEQ ID NO: 1438432 - DNA, 15 bp, Homo sapiens
tttgacaccagcctt

SEQ ID NO: 1438433 - DNA, 15 bp, Homo sapiens
gtttgacaccagcct

SEQ ID NO: 1438434 - DNA, 15 bp, Homo sapiens
agtttgacaccagcc

SEQ ID NO: 1438435 - DNA, 15 bp, Homo sapiens
gagtttgacaccagc

SEQ ID NO: 1438436 - DNA, 15 bp, Homo sapiens
ggagtttgacaccag

SEQ ID NO: 1438437 - DNA, 15 bp, Homo sapiens
aggagtttgacacca

SEQ ID NO: 1438438 - DNA, 15 bp, Homo sapiens
caggagtttgacacc

SEQ ID NO: 1438439 - DNA, 15 bp, Homo sapiens
tcaggagtttgacac

SEQ ID NO: 1438440 - DNA, 15 bp, Homo sapiens
gtcaggagtttgaca

SEQ ID NO: 1438441 - DNA, 15 bp, Homo sapiens
ggtcaggagtttgac

SEQ ID NO: 1438442 - DNA, 15 bp, Homo sapiens
gacttgaggtcagga

SEQ ID NO: 1438443 - DNA, 15 bp, Homo sapiens
tgacttgaggtcagg

SEQ ID NO: 1438444 - DNA, 15 bp, Homo sapiens
ctgacttgaggtcag

SEQ ID NO: 1438445 - DNA, 15 bp, Homo sapiens
gctgacttgaggtca

SEQ ID NO: 1438446 - DNA, 15 bp, Homo sapiens
ggctgacttgaggtc

SEQ ID NO: 1438447 - DNA, 15 bp, Homo sapiens
tggctgacttgaggt

SEQ ID NO: 1438448 - DNA, 15 bp, Homo sapiens
gtggctgacttgagg

SEQ ID NO: 1438449 - DNA, 15 bp, Homo sapiens
ggtggctgacttgag

SEQ ID NO: 1438450 - DNA, 15 bp, Homo sapiens
tggtggctgacttga

SEQ ID NO: 1438451 - DNA, 15 bp, Homo sapiens
atggtggctgacttg

SEQ ID NO: 1438452 - DNA, 15 bp, Homo sapiens
catggtggctgactt

SEQ ID NO: 1438453 - DNA, 15 bp, Homo sapiens
gcatggtggctgact

SEQ ID NO: 1438454 - DNA, 15 bp, Homo sapiens
ggcatggtggctgac

SEQ ID NO: 1438455 - DNA, 15 bp, Homo sapiens
aggcatggtggctga

SEQ ID NO: 1438456 - DNA, 15 bp, Homo sapiens
caggcatggtggctg

SEQ ID NO: 1438457 - DNA, 15 bp, Homo sapiens
ctccaggcatggtgg

SEQ ID NO: 1438458 - DNA, 15 bp, Homo sapiens
actccaggcatggtg

SEQ ID NO: 1438459 - DNA, 15 bp, Homo sapiens
cactccaggcatggt

SEQ ID NO: 1438460 - DNA, 15 bp, Homo sapiens
acactccaggcatgg

SEQ ID NO: 1438461 - DNA, 15 bp, Homo sapiens
aacactccaggcatg

SEQ ID NO: 1438462 - DNA, 15 bp, Homo sapiens
caacactccaggcat

SEQ ID NO: 1438463 - DNA, 15 bp, Homo sapiens
acaacactccaggca

SEQ ID NO: 1438464 - DNA, 15 bp, Homo sapiens
aacaacactccaggc

SEQ ID NO: 1438465 - DNA, 15 bp, Homo sapiens
aaacaacactccagg

SEQ ID NO: 1438466 - DNA, 15 bp, Homo sapiens
aaaacaacactccag

SEQ ID NO: 1438467 - DNA, 15 bp, Homo sapiens
aaaaacaacactcca

SEQ ID NO: 1438468 - DNA, 15 bp, Homo sapiens
aaaaaacaacactcc

SEQ ID NO: 1438469 - DNA, 15 bp, Homo sapiens
aaaaaaacaacactc

SEQ ID NO: 1438470 - DNA, 15 bp, Homo sapiens
aaaaaaaacaacact

SEQ ID NO: 1438471 - DNA, 15 bp, Homo sapiens
aaaaaaaaacaacac

SEQ ID NO: 1438472 - DNA, 15 bp, Homo sapiens
taaaaaaaaacaaca

SEQ ID NO: 1438473 - DNA, 15 bp, Homo sapiens
ttaaaaaaaaacaac

SEQ ID NO: 1438474 - DNA, 15 bp, Homo sapiens
attaaaaaaaaacaa

SEQ ID NO: 1438475 - DNA, 15 bp, Homo sapiens
aattaaaaaaaaaca

SEQ ID NO: 1438476 - DNA, 15 bp, Homo sapiens
caattaaaaaaaaac

SEQ ID NO: 1438477 - DNA, 15 bp, Homo sapiens
acaattaaaaaaaaa

SEQ ID NO: 1438478 - DNA, 15 bp, Homo sapiens
aacaattaaaaaaaa

SEQ ID NO: 1438479 - DNA, 15 bp, Homo sapiens
aaacaattaaaaaaa

SEQ ID NO: 1438480 - DNA, 15 bp, Homo sapiens
aaaacaattaaaaaa

SEQ ID NO: 1438481 - DNA, 15 bp, Homo sapiens
taaaacaattaaaaa

SEQ ID NO: 1438482 - DNA, 15 bp, Homo sapiens
ttaaaacaattaaaa

SEQ ID NO: 1438483 - DNA, 15 bp, Homo sapiens
attaaaacaattaaa

SEQ ID NO: 1438484 - DNA, 15 bp, Homo sapiens
aattaaaacaattaa

SEQ ID NO: 1438485 - DNA, 15 bp, Homo sapiens
aaattaaaacaatta

SEQ ID NO: 1438486 - DNA, 15 bp, Homo sapiens
aaaattaaaacaatt

SEQ ID NO: 1438487 - DNA, 15 bp, Homo sapiens
aaaaattaaaacaat

SEQ ID NO: 1438488 - DNA, 15 bp, Homo sapiens
caaaaattaaaacaa

SEQ ID NO: 1438489 - DNA, 15 bp, Homo sapiens
acaaaaattaaaaca

SEQ ID NO: 1438490 - DNA, 15 bp, Homo sapiens
cacaaaaattaaaac

SEQ ID NO: 1438491 - DNA, 15 bp, Homo sapiens
tccacaaaaattaaa

SEQ ID NO: 1438492 - DNA, 15 bp, Homo sapiens
atccacaaaaattaa

SEQ ID NO: 1438493 - DNA, 15 bp, Homo sapiens
tatccacaaaaatta

SEQ ID NO: 1438494 - DNA, 15 bp, Homo sapiens
gtatccacaaaaatt

SEQ ID NO: 1438495 - DNA, 15 bp, Homo sapiens
tgtatccacaaaaat

SEQ ID NO: 1438496 - DNA, 15 bp, Homo sapiens
atgtatccacaaaaa

SEQ ID NO: 1438497 - DNA, 15 bp, Homo sapiens
tatgtatccacaaaa

SEQ ID NO: 1438498 - DNA, 15 bp, Homo sapiens
ctatgtatccacaaa

SEQ ID NO: 1438499 - DNA, 15 bp, Homo sapiens
actatgtatccacaa

SEQ ID NO: 1438500 - DNA, 15 bp, Homo sapiens
tactatgtatccaca

SEQ ID NO: 1438501 - DNA, 15 bp, Homo sapiens
ctactatgtatccac

SEQ ID NO: 1438502 - DNA, 15 bp, Homo sapiens
cctactatgtatcca

SEQ ID NO: 1438503 - DNA, 15 bp, Homo sapiens
acctactatgtatcc

SEQ ID NO: 1438504 - DNA, 15 bp, Homo sapiens
tacctactatgtatc

SEQ ID NO: 1438505 - DNA, 15 bp, Homo sapiens
atacctactatgtat

SEQ ID NO: 1438506 - DNA, 15 bp, Homo sapiens
tatacctactatgta

SEQ ID NO: 1438507 - DNA, 15 bp, Homo sapiens
atatacctactatgt

SEQ ID NO: 1438508 - DNA, 15 bp, Homo sapiens
tatatacctactatg

SEQ ID NO: 1438509 - DNA, 15 bp, Homo sapiens
atatatacctactat

SEQ ID NO: 1438510 - DNA, 15 bp, Homo sapiens
tatatatacctacta

SEQ ID NO: 1438511 - DNA, 15 bp, Homo sapiens
atatatatacctact

SEQ ID NO: 1438512 - DNA, 15 bp, Homo sapiens
aatatatatacctac

SEQ ID NO: 1438513 - DNA, 15 bp, Homo sapiens
aaatatatataccta

SEQ ID NO: 1438514 - DNA, 15 bp, Homo sapiens
taaatatatatacct

SEQ ID NO: 1438515 - DNA, 15 bp, Homo sapiens
ttaaatatatatacc

SEQ ID NO: 1438516 - DNA, 15 bp, Homo sapiens
cttaaatatatatac

SEQ ID NO: 1438517 - DNA, 15 bp, Homo sapiens
tcttaaatatatata

SEQ ID NO: 1438518 - DNA, 15 bp, Homo sapiens
ctcttaaatatatat

SEQ ID NO: 1438519 - DNA, 15 bp, Homo sapiens
cctcttaaatatata

SEQ ID NO: 1438520 - DNA, 15 bp, Homo sapiens
acctcttaaatatat

SEQ ID NO: 1438521 - DNA, 15 bp, Homo sapiens
tacctcttaaatata

SEQ ID NO: 1438522 - DNA, 15 bp, Homo sapiens
gtacctcttaaatat

SEQ ID NO: 1438523 - DNA, 15 bp, Homo sapiens
tgtacctcttaaata

SEQ ID NO: 1438524 - DNA, 15 bp, Homo sapiens
atgtacctcttaaat

SEQ ID NO: 1438525 - DNA, 15 bp, Homo sapiens
catgtacctcttaaa

SEQ ID NO: 1438526 - DNA, 15 bp, Homo sapiens
tcatgtacctcttaa

SEQ ID NO: 1438527 - DNA, 15 bp, Homo sapiens
ctcatgtacctctta

SEQ ID NO: 1438528 - DNA, 15 bp, Homo sapiens
tctcatgtacctctt

SEQ ID NO: 1438529 - DNA, 15 bp, Homo sapiens
atctcatgtacctct

SEQ ID NO: 1438530 - DNA, 15 bp, Homo sapiens
catctcatgtacctc

SEQ ID NO: 1438531 - DNA, 15 bp, Homo sapiens
tcatctcatgtacct

SEQ ID NO: 1438532 - DNA, 15 bp, Homo sapiens
ctcatctcatgtacc

SEQ ID NO: 1438533 - DNA, 15 bp, Homo sapiens
actcatctcatgtac

SEQ ID NO: 1438534 - DNA, 15 bp, Homo sapiens
aactcatctcatgta

SEQ ID NO: 1438535 - DNA, 15 bp, Homo sapiens
aaactcatctcatgt

SEQ ID NO: 1438536 - DNA, 15 bp, Homo sapiens
aaaactcatctcatg

SEQ ID NO: 1438537 - DNA, 15 bp, Homo sapiens
caaaactcatctcat

SEQ ID NO: 1438538 - DNA, 15 bp, Homo sapiens
tcaaaactcatctca

SEQ ID NO: 1438539 - DNA, 15 bp, Homo sapiens
atcaaaactcatctc

SEQ ID NO: 1438540 - DNA, 15 bp, Homo sapiens
catcaaaactcatct

SEQ ID NO: 1438541 - DNA, 15 bp, Homo sapiens
gcatcaaaactcatc

SEQ ID NO: 1438542 - DNA, 15 bp, Homo sapiens
tgcatcaaaactcat

SEQ ID NO: 1438543 - DNA, 15 bp, Homo sapiens
ctgcatcaaaactca

SEQ ID NO: 1438544 - DNA, 15 bp, Homo sapiens
cctgcatcaaaactc

SEQ ID NO: 1438545 - DNA, 15 bp, Homo sapiens
gcctgcatcaaaact

SEQ ID NO: 1438546 - DNA, 15 bp, Homo sapiens
tgcctgcatcaaaac

SEQ ID NO: 1438547 - DNA, 15 bp, Homo sapiens
atgcctgcatcaaaa

SEQ ID NO: 1438548 - DNA, 15 bp, Homo sapiens
catgcctgcatcaaa

SEQ ID NO: 1438549 - DNA, 15 bp, Homo sapiens
gcatgcctgcatcaa

SEQ ID NO: 1438550 - DNA, 15 bp, Homo sapiens
tgcatgcctgcatca

SEQ ID NO: 1438551 - DNA, 15 bp, Homo sapiens
ttgcatgcctgcatc

SEQ ID NO: 1438552 - DNA, 15 bp, Homo sapiens
tttgcatgcctgcat

SEQ ID NO: 1438553 - DNA, 15 bp, Homo sapiens
ctttgcatgcctgca

SEQ ID NO: 1438554 - DNA, 15 bp, Homo sapiens
actttgcatgcctgc

SEQ ID NO: 1438555 - DNA, 15 bp, Homo sapiens
cactttgcatgcctg

SEQ ID NO: 1438556 - DNA, 15 bp, Homo sapiens
tcactttgcatgcct

SEQ ID NO: 1438557 - DNA, 15 bp, Homo sapiens
gtcactttgcatgcc

SEQ ID NO: 1438558 - DNA, 15 bp, Homo sapiens
tgtcactttgcatgc

SEQ ID NO: 1438559 - DNA, 15 bp, Homo sapiens
atgtcactttgcatg

SEQ ID NO: 1438560 - DNA, 15 bp, Homo sapiens
tatgtcactttgcat

SEQ ID NO: 1438561 - DNA, 15 bp, Homo sapiens
ttatgtcactttgca

SEQ ID NO: 1438562 - DNA, 15 bp, Homo sapiens
cttatgtcactttgc

SEQ ID NO: 1438563 - DNA, 15 bp, Homo sapiens
gcttatgtcactttg

SEQ ID NO: 1438564 - DNA, 15 bp, Homo sapiens
tgcttatgtcacttt

SEQ ID NO: 1438565 - DNA, 15 bp, Homo sapiens
gtgcttatgtcactt

SEQ ID NO: 1438566 - DNA, 15 bp, Homo sapiens
tgtgcttatgtcact

SEQ ID NO: 1438567 - DNA, 15 bp, Homo sapiens
atgtgcttatgtcac

SEQ ID NO: 1438568 - DNA, 15 bp, Homo sapiens
gatgtgcttatgtca

SEQ ID NO: 1438569 - DNA, 15 bp, Homo sapiens
tgatgtgcttatgtc

SEQ ID NO: 1438570 - DNA, 15 bp, Homo sapiens
atgatgtgcttatgt

SEQ ID NO: 1438571 - DNA, 15 bp, Homo sapiens
catgatgtgcttatg

SEQ ID NO: 1438572 - DNA, 15 bp, Homo sapiens
ttctccatgatgtgc

SEQ ID NO: 1438573 - DNA, 15 bp, Homo sapiens
tccccattctccatg

SEQ ID NO: 1438574 - DNA, 15 bp, Homo sapiens
ttccccattctccat

SEQ ID NO: 1438575 - DNA, 15 bp, Homo sapiens
attccccattctcca

SEQ ID NO: 1438576 - DNA, 15 bp, Homo sapiens
gattccccattctcc

SEQ ID NO: 1438577 - DNA, 15 bp, Homo sapiens
agattccccattctc

SEQ ID NO: 1438578 - DNA, 15 bp, Homo sapiens
tagattccccattct

SEQ ID NO: 1438579 - DNA, 15 bp, Homo sapiens
atagattccccattc

SEQ ID NO: 1438580 - DNA, 15 bp, Homo sapiens
gatagattccccatt

SEQ ID NO: 1438581 - DNA, 15 bp, Homo sapiens
ggatagattccccat

SEQ ID NO: 1438582 - DNA, 15 bp, Homo sapiens
gggatagattcccca

SEQ ID NO: 1438583 - DNA, 15 bp, Homo sapiens
ggggatagattcccc

SEQ ID NO: 1438584 - DNA, 15 bp, Homo sapiens
aggggatagattccc

SEQ ID NO: 1438585 - DNA, 15 bp, Homo sapiens
gaggggatagattcc

SEQ ID NO: 1438586 - DNA, 15 bp, Homo sapiens
tgaggggatagattc

SEQ ID NO: 1438587 - DNA, 15 bp, Homo sapiens
ttgaggggatagatt

SEQ ID NO: 1438588 - DNA, 15 bp, Homo sapiens
cttgaggggatagat

SEQ ID NO: 1438589 - DNA, 15 bp, Homo sapiens
gcttgaggggataga

SEQ ID NO: 1438590 - DNA, 15 bp, Homo sapiens
tgcttgaggggatag

SEQ ID NO: 1438591 - DNA, 15 bp, Homo sapiens
atgcttgaggggata

SEQ ID NO: 1438592 - DNA, 15 bp, Homo sapiens
aatgcttgaggggat

SEQ ID NO: 1438593 - DNA, 15 bp, Homo sapiens
aaatgcttgagggga

SEQ ID NO: 1438594 - DNA, 15 bp, Homo sapiens
taaatgcttgagggg

SEQ ID NO: 1438595 - DNA, 15 bp, Homo sapiens
ataaatgcttgaggg

SEQ ID NO: 1438596 - DNA, 15 bp, Homo sapiens
ataactggattgttt

SEQ ID NO: 1438597 - DNA, 15 bp, Homo sapiens
tataactggattgtt

SEQ ID NO: 1438598 - DNA, 15 bp, Homo sapiens
gtataactggattgt

SEQ ID NO: 1438599 - DNA, 15 bp, Homo sapiens
agtataactggattg

SEQ ID NO: 1438600 - DNA, 15 bp, Homo sapiens
gagtataactggatt

SEQ ID NO: 1438601 - DNA, 15 bp, Homo sapiens
agagtataactggat

SEQ ID NO: 1438602 - DNA, 15 bp, Homo sapiens
aagagtataactgga

SEQ ID NO: 1438603 - DNA, 15 bp, Homo sapiens
aaagagtataactgg

SEQ ID NO: 1438604 - DNA, 15 bp, Homo sapiens
taaagagtataactg

SEQ ID NO: 1438605 - DNA, 15 bp, Homo sapiens
ttaaagagtataact

SEQ ID NO: 1438606 - DNA, 15 bp, Homo sapiens
cttaaagagtataac

SEQ ID NO: 1438607 - DNA, 15 bp, Homo sapiens
acttaaagagtataa

SEQ ID NO: 1438608 - DNA, 15 bp, Homo sapiens
aacttaaagagtata

SEQ ID NO: 1438609 - DNA, 15 bp, Homo sapiens
taacttaaagagtat

SEQ ID NO: 1438610 - DNA, 15 bp, Homo sapiens
ataacttaaagagta

SEQ ID NO: 1438611 - DNA, 15 bp, Homo sapiens
aataacttaaagagt

SEQ ID NO: 1438612 - DNA, 15 bp, Homo sapiens
aaataacttaaagag

SEQ ID NO: 1438613 - DNA, 15 bp, Homo sapiens
cattttaaaataact

SEQ ID NO: 1438614 - DNA, 15 bp, Homo sapiens
caacttaattgtaca

SEQ ID NO: 1438615 - DNA, 15 bp, Homo sapiens
acaacttaattgtac

SEQ ID NO: 1438616 - DNA, 15 bp, Homo sapiens
aacaacttaattgta

SEQ ID NO: 1438617 - DNA, 15 bp, Homo sapiens
taacaacttaattgt

SEQ ID NO: 1438618 - DNA, 15 bp, Homo sapiens
ataacaacttaattg

SEQ ID NO: 1438619 - DNA, 15 bp, Homo sapiens
aataacaacttaatt

SEQ ID NO: 1438620 - DNA, 15 bp, Homo sapiens
caataacaacttaat

SEQ ID NO: 1438621 - DNA, 15 bp, Homo sapiens
tcaataacaacttaa

SEQ ID NO: 1438622 - DNA, 15 bp, Homo sapiens
gtcaataacaactta

SEQ ID NO: 1438623 - DNA, 15 bp, Homo sapiens
agtcaataacaactt

SEQ ID NO: 1438624 - DNA, 15 bp, Homo sapiens
tagtcaataacaact

SEQ ID NO: 1438625 - DNA, 15 bp, Homo sapiens
ctagtcaataacaac

SEQ ID NO: 1438626 - DNA, 15 bp, Homo sapiens
tctagtcaataacaa

SEQ ID NO: 1438627 - DNA, 15 bp, Homo sapiens
ctctagtcaataaca

SEQ ID NO: 1438628 - DNA, 15 bp, Homo sapiens
actctagtcaataac

SEQ ID NO: 1438629 - DNA, 15 bp, Homo sapiens
gactctagtcaataa

SEQ ID NO: 1438630 - DNA, 15 bp, Homo sapiens
tgactctagtcaata

SEQ ID NO: 1438631 - DNA, 15 bp, Homo sapiens
gtgactctagtcaat

SEQ ID NO: 1438632 - DNA, 15 bp, Homo sapiens
ggtgactctagtcaa

SEQ ID NO: 1438633 - DNA, 15 bp, Homo sapiens
gggtgactctagtca

SEQ ID NO: 1438634 - DNA, 15 bp, Homo sapiens
agggtgactctagtc

SEQ ID NO: 1438635 - DNA, 15 bp, Homo sapiens
tagggtgactctagt

SEQ ID NO: 1438636 - DNA, 15 bp, Homo sapiens
gtagggtgactctag

SEQ ID NO: 1438637 - DNA, 15 bp, Homo sapiens
agtagggtgactcta

SEQ ID NO: 1438638 - DNA, 15 bp, Homo sapiens
cagtagggtgactct

SEQ ID NO: 1438639 - DNA, 15 bp, Homo sapiens
acagtagggtgactc

SEQ ID NO: 1438640 - DNA, 15 bp, Homo sapiens
cacagtagggtgact

SEQ ID NO: 1438641 - DNA, 15 bp, Homo sapiens
gcacagtagggtgac

SEQ ID NO: 1438642 - DNA, 15 bp, Homo sapiens
agcacagtagggtga

SEQ ID NO: 1438643 - DNA, 15 bp, Homo sapiens
tagcacagtagggtg

SEQ ID NO: 1438644 - DNA, 15 bp, Homo sapiens
atagcacagtagggt

SEQ ID NO: 1438645 - DNA, 15 bp, Homo sapiens
gatagcacagtaggg

SEQ ID NO: 1438646 - DNA, 15 bp, Homo sapiens
tgatagcacagtagg

SEQ ID NO: 1438647 - DNA, 15 bp, Homo sapiens
ttgatagcacagtag

SEQ ID NO: 1438648 - DNA, 15 bp, Homo sapiens
tttgatagcacagta

SEQ ID NO: 1438649 - DNA, 15 bp, Homo sapiens
atttgatagcacagt

SEQ ID NO: 1438650 - DNA, 15 bp, Homo sapiens
tatttgatagcacag

SEQ ID NO: 1438651 - DNA, 15 bp, Homo sapiens
ttatttgatagcaca

SEQ ID NO: 1438652 - DNA, 15 bp, Homo sapiens
attatttgatagcac

SEQ ID NO: 1438653 - DNA, 15 bp, Homo sapiens
tattatttgatagca

SEQ ID NO: 1438654 - DNA, 15 bp, Homo sapiens
ctattatttgatagc

SEQ ID NO: 1438655 - DNA, 15 bp, Homo sapiens
cctattatttgatag

SEQ ID NO: 1438656 - DNA, 15 bp, Homo sapiens
acctattatttgata

SEQ ID NO: 1438657 - DNA, 15 bp, Homo sapiens
gacctattatttgat

SEQ ID NO: 1438658 - DNA, 15 bp, Homo sapiens
agacctattatttga

SEQ ID NO: 1438659 - DNA, 15 bp, Homo sapiens
aagacctattatttg

SEQ ID NO: 1438660 - DNA, 15 bp, Homo sapiens
taagacctattattt

SEQ ID NO: 1438661 - DNA, 15 bp, Homo sapiens
ataagacctattatt

SEQ ID NO: 1438662 - DNA, 15 bp, Homo sapiens
aataagacctattat

SEQ ID NO: 1438663 - DNA, 15 bp, Homo sapiens
gaataagacctatta

SEQ ID NO: 1438664 - DNA, 15 bp, Homo sapiens
tgaataagacctatt

SEQ ID NO: 1438665 - DNA, 15 bp, Homo sapiens
atgaataagacctat

SEQ ID NO: 1438666 - DNA, 15 bp, Homo sapiens
aaaagaatgaataag

SEQ ID NO: 1438667 - DNA, 15 bp, Homo sapiens
aaaaagaatgaataa

SEQ ID NO: 1438668 - DNA, 15 bp, Homo sapiens
taaaaagaatgaata

SEQ ID NO: 1438669 - DNA, 15 bp, Homo sapiens
ataaaaagaatgaat

SEQ ID NO: 1438670 - DNA, 15 bp, Homo sapiens
aataaaaagaatgaa

SEQ ID NO: 1438671 - DNA, 15 bp, Homo sapiens
aaataaaaagaatga

SEQ ID NO: 1438672 - DNA, 15 bp, Homo sapiens
aaaataaaaagaatg

SEQ ID NO: 1438673 - DNA, 15 bp, Homo sapiens
tacaaaaaataaaaa

SEQ ID NO: 1438674 - DNA, 15 bp, Homo sapiens
gtacaaaaaataaaa

SEQ ID NO: 1438675 - DNA, 15 bp, Homo sapiens
agtacaaaaaataaa

SEQ ID NO: 1438676 - DNA, 15 bp, Homo sapiens
gagtacaaaaaataa

SEQ ID NO: 1438677 - DNA, 15 bp, Homo sapiens
tgagtacaaaaaata

SEQ ID NO: 1438678 - DNA, 15 bp, Homo sapiens
atgagtacaaaaaat

SEQ ID NO: 1438679 - DNA, 15 bp, Homo sapiens
aatgagtacaaaaaa

SEQ ID NO: 1438680 - DNA, 15 bp, Homo sapiens
taatgagtacaaaaa

SEQ ID NO: 1438681 - DNA, 15 bp, Homo sapiens
ttaatgagtacaaaa

SEQ ID NO: 1438682 - DNA, 15 bp, Homo sapiens
gttaatgagtacaaa

SEQ ID NO: 1438683 - DNA, 15 bp, Homo sapiens
ggttaatgagtacaa

SEQ ID NO: 1438684 - DNA, 15 bp, Homo sapiens
tggttaatgagtaca

SEQ ID NO: 1438685 - DNA, 15 bp, Homo sapiens
atggttaatgagtac

SEQ ID NO: 1438686 - DNA, 15 bp, Homo sapiens
gatggttaatgagta

SEQ ID NO: 1438687 - DNA, 15 bp, Homo sapiens
ggatggttaatgagt

SEQ ID NO: 1438688 - DNA, 15 bp, Homo sapiens
gggatggttaatgag

SEQ ID NO: 1438689 - DNA, 15 bp, Homo sapiens
ggggatggttaatga

SEQ ID NO: 1438690 - DNA, 15 bp, Homo sapiens
tggggatggttaatg

SEQ ID NO: 1438691 - DNA, 15 bp, Homo sapiens
gtggggatggttaat

SEQ ID NO: 1438692 - DNA, 15 bp, Homo sapiens
ggtggggatggttaa

SEQ ID NO: 1438693 - DNA, 15 bp, Homo sapiens
aggtggggatggtta

SEQ ID NO: 1438694 - DNA, 15 bp, Homo sapiens
gaggtggggatggtt

SEQ ID NO: 1438695 - DNA, 15 bp, Homo sapiens
gggggaggtggggat

SEQ ID NO: 1438696 - DNA, 15 bp, Homo sapiens
tgggggaggtgggga

SEQ ID NO: 1438697 - DNA, 15 bp, Homo sapiens
gtgggggaggtgggg

SEQ ID NO: 1438698 - DNA, 15 bp, Homo sapiens
tgtgggggaggtggg

SEQ ID NO: 1438699 - DNA, 15 bp, Homo sapiens
ctgtgggggaggtgg

SEQ ID NO: 1438700 - DNA, 15 bp, Homo sapiens
gctgtgggggaggtg

SEQ ID NO: 1438701 - DNA, 15 bp, Homo sapiens
ggctgtgggggaggt

SEQ ID NO: 1438702 - DNA, 15 bp, Homo sapiens
gggctgtgggggagg

SEQ ID NO: 1438703 - DNA, 15 bp, Homo sapiens
agggctgtgggggag

SEQ ID NO: 1438704 - DNA, 15 bp, Homo sapiens
gagggctgtggggga

SEQ ID NO: 1438705 - DNA, 15 bp, Homo sapiens
ggagggctgtggggg

SEQ ID NO: 1438706 - DNA, 15 bp, Homo sapiens
tggagggctgtgggg

SEQ ID NO: 1438707 - DNA, 15 bp, Homo sapiens
gtggagggctgtggg

SEQ ID NO: 1438708 - DNA, 15 bp, Homo sapiens
agtggagggctgtgg

SEQ ID NO: 1438709 - DNA, 15 bp, Homo sapiens
tagtggagggctgtg

SEQ ID NO: 1438710 - DNA, 15 bp, Homo sapiens
gtagtggagggctgt

SEQ ID NO: 1438711 - DNA, 15 bp, Homo sapiens
ggtagtggagggctg

SEQ ID NO: 1438712 - DNA, 15 bp, Homo sapiens
gggtagtggagggct

SEQ ID NO: 1438713 - DNA, 15 bp, Homo sapiens
agggtagtggagggc

SEQ ID NO: 1438714 - DNA, 15 bp, Homo sapiens
aagggtagtggaggg

SEQ ID NO: 1438715 - DNA, 15 bp, Homo sapiens
gaagggtagtggagg

SEQ ID NO: 1438716 - DNA, 15 bp, Homo sapiens
ggaagggtagtggag

SEQ ID NO: 1438717 - DNA, 15 bp, Homo sapiens
aggaagggtagtgga

SEQ ID NO: 1438718 - DNA, 15 bp, Homo sapiens
taggaagggtagtgg

SEQ ID NO: 1438719 - DNA, 15 bp, Homo sapiens
ctaggaagggtagtg

SEQ ID NO: 1438720 - DNA, 15 bp, Homo sapiens
gctaggaagggtagt

SEQ ID NO: 1438721 - DNA, 15 bp, Homo sapiens
agctaggaagggtag

SEQ ID NO: 1438722 - DNA, 15 bp, Homo sapiens
aagctaggaagggta

SEQ ID NO: 1438723 - DNA, 15 bp, Homo sapiens
gaagctaggaagggt

SEQ ID NO: 1438724 - DNA, 15 bp, Homo sapiens
agaagctaggaaggg

SEQ ID NO: 1438725 - DNA, 15 bp, Homo sapiens
cagaagctaggaagg

SEQ ID NO: 1438726 - DNA, 15 bp, Homo sapiens
ccagaagctaggaag

SEQ ID NO: 1438727 - DNA, 15 bp, Homo sapiens
accagaagctaggaa

SEQ ID NO: 1438728 - DNA, 15 bp, Homo sapiens
taccagaagctagga

SEQ ID NO: 1438729 - DNA, 15 bp, Homo sapiens
ttaccagaagctagg

SEQ ID NO: 1438730 - DNA, 15 bp, Homo sapiens
gttaccagaagctag

SEQ ID NO: 1438731 - DNA, 15 bp, Homo sapiens
ggttaccagaagcta

SEQ ID NO: 1438732 - DNA, 15 bp, Homo sapiens
tggttaccagaagct

SEQ ID NO: 1438733 - DNA, 15 bp, Homo sapiens
atggttaccagaagc

SEQ ID NO: 1438734 - DNA, 15 bp, Homo sapiens
gatggttaccagaag

SEQ ID NO: 1438735 - DNA, 15 bp, Homo sapiens
ggatggttaccagaa

SEQ ID NO: 1438736 - DNA, 15 bp, Homo sapiens
aggatggttaccaga

SEQ ID NO: 1438737 - DNA, 15 bp, Homo sapiens
aaggatggttaccag

SEQ ID NO: 1438738 - DNA, 15 bp, Homo sapiens
gaaggatggttacca

SEQ ID NO: 1438739 - DNA, 15 bp, Homo sapiens
agaaggatggttacc

SEQ ID NO: 1438740 - DNA, 15 bp, Homo sapiens
tagaaggatggttac

SEQ ID NO: 1438741 - DNA, 15 bp, Homo sapiens
gtagaaggatggtta

SEQ ID NO: 1438742 - DNA, 15 bp, Homo sapiens
agtagaaggatggtt

SEQ ID NO: 1438743 - DNA, 15 bp, Homo sapiens
gagtagaaggatggt

SEQ ID NO: 1438744 - DNA, 15 bp, Homo sapiens
agagtagaaggatgg

SEQ ID NO: 1438745 - DNA, 15 bp, Homo sapiens
gagagtagaaggatg

SEQ ID NO: 1438746 - DNA, 15 bp, Homo sapiens
agagagtagaaggat

SEQ ID NO: 1438747 - DNA, 15 bp, Homo sapiens
tagagagtagaagga

SEQ ID NO: 1438748 - DNA, 15 bp, Homo sapiens
atagagagtagaagg

SEQ ID NO: 1438749 - DNA, 15 bp, Homo sapiens
gatagagagtagaag

SEQ ID NO: 1438750 - DNA, 15 bp, Homo sapiens
ggatagagagtagaa

SEQ ID NO: 1438751 - DNA, 15 bp, Homo sapiens
tggatagagagtaga

SEQ ID NO: 1438752 - DNA, 15 bp, Homo sapiens
atggatagagagtag

SEQ ID NO: 1438753 - DNA, 15 bp, Homo sapiens
catggatagagagta

SEQ ID NO: 1438754 - DNA, 15 bp, Homo sapiens
tcatggatagagagt

SEQ ID NO: 1438755 - DNA, 15 bp, Homo sapiens
ctcatggatagagag

SEQ ID NO: 1438756 - DNA, 15 bp, Homo sapiens
actcatggatagaga

SEQ ID NO: 1438757 - DNA, 15 bp, Homo sapiens
aactcatggatagag

SEQ ID NO: 1438758 - DNA, 15 bp, Homo sapiens
gaactcatggataga

SEQ ID NO: 1438759 - DNA, 15 bp, Homo sapiens
tgaactcatggatag

SEQ ID NO: 1438760 - DNA, 15 bp, Homo sapiens
ttgaactcatggata

SEQ ID NO: 1438761 - DNA, 15 bp, Homo sapiens
attgaactcatggat

SEQ ID NO: 1438762 - DNA, 15 bp, Homo sapiens
aaacaattgaactca

SEQ ID NO: 1438763 - DNA, 15 bp, Homo sapiens
aaaacaattgaactc

SEQ ID NO: 1438764 - DNA, 15 bp, Homo sapiens
caaaacaattgaact

SEQ ID NO: 1438765 - DNA, 15 bp, Homo sapiens
tcaaaacaattgaac

SEQ ID NO: 1438766 - DNA, 15 bp, Homo sapiens
atcaaaacaattgaa

SEQ ID NO: 1438767 - DNA, 15 bp, Homo sapiens
aatcaaaacaattga

SEQ ID NO: 1438768 - DNA, 15 bp, Homo sapiens
aaatcaaaacaattg

SEQ ID NO: 1438769 - DNA, 15 bp, Homo sapiens
aaaatcaaaacaatt

SEQ ID NO: 1438770 - DNA, 15 bp, Homo sapiens
aaaaatcaaaacaat

SEQ ID NO: 1438771 - DNA, 15 bp, Homo sapiens
taaaaatcaaaacaa

SEQ ID NO: 1438772 - DNA, 15 bp, Homo sapiens
ctaaaaatcaaaaca

SEQ ID NO: 1438773 - DNA, 15 bp, Homo sapiens
tctaaaaatcaaaac

SEQ ID NO: 1438774 - DNA, 15 bp, Homo sapiens
atctaaaaatcaaaa

SEQ ID NO: 1438775 - DNA, 15 bp, Homo sapiens
gatctaaaaatcaaa

SEQ ID NO: 1438776 - DNA, 15 bp, Homo sapiens
agatctaaaaatcaa

SEQ ID NO: 1438777 - DNA, 15 bp, Homo sapiens
gagatctaaaaatca

SEQ ID NO: 1438778 - DNA, 15 bp, Homo sapiens
agagatctaaaaatc

SEQ ID NO: 1438779 - DNA, 15 bp, Homo sapiens
gagagatctaaaaat

SEQ ID NO: 1438780 - DNA, 15 bp, Homo sapiens
tgagagatctaaaaa

SEQ ID NO: 1438781 - DNA, 15 bp, Homo sapiens
ttgagagatctaaaa

SEQ ID NO: 1438782 - DNA, 15 bp, Homo sapiens
tttgagagatctaaa

SEQ ID NO: 1438783 - DNA, 15 bp, Homo sapiens
atttgagagatctaa

SEQ ID NO: 1438784 - DNA, 15 bp, Homo sapiens
tatttgagagatcta

SEQ ID NO: 1438785 - DNA, 15 bp, Homo sapiens
ttatttgagagatct

SEQ ID NO: 1438786 - DNA, 15 bp, Homo sapiens
cttatttgagagatc

SEQ ID NO: 1438787 - DNA, 15 bp, Homo sapiens
acttatttgagagat

SEQ ID NO: 1438788 - DNA, 15 bp, Homo sapiens
cacttatttgagaga

SEQ ID NO: 1438789 - DNA, 15 bp, Homo sapiens
tcacttatttgagag

SEQ ID NO: 1438790 - DNA, 15 bp, Homo sapiens
ctcacttatttgaga

SEQ ID NO: 1438791 - DNA, 15 bp, Homo sapiens
tctcacttatttgag

SEQ ID NO: 1438792 - DNA, 15 bp, Homo sapiens
ttctcacttatttga

SEQ ID NO: 1438793 - DNA, 15 bp, Homo sapiens
gttctcacttatttg

SEQ ID NO: 1438794 - DNA, 15 bp, Homo sapiens
tgttctcacttattt

SEQ ID NO: 1438795 - DNA, 15 bp, Homo sapiens
atgttctcacttatt

SEQ ID NO: 1438796 - DNA, 15 bp, Homo sapiens
tacatgttctcactt

SEQ ID NO: 1438797 - DNA, 15 bp, Homo sapiens
ttacatgttctcact

SEQ ID NO: 1438798 - DNA, 15 bp, Homo sapiens
gttacatgttctcac

SEQ ID NO: 1438799 - DNA, 15 bp, Homo sapiens
ggttacatgttctca

SEQ ID NO: 1438800 - DNA, 15 bp, Homo sapiens
tggttacatgttctc

SEQ ID NO: 1438801 - DNA, 15 bp, Homo sapiens
atggttacatgttct

SEQ ID NO: 1438802 - DNA, 15 bp, Homo sapiens
aatggttacatgttc

SEQ ID NO: 1438803 - DNA, 15 bp, Homo sapiens
caatggttacatgtt

SEQ ID NO: 1438804 - DNA, 15 bp, Homo sapiens
acaatggttacatgt

SEQ ID NO: 1438805 - DNA, 15 bp, Homo sapiens
gacaatggttacatg

SEQ ID NO: 1438806 - DNA, 15 bp, Homo sapiens
agacaatggttacat

SEQ ID NO: 1438807 - DNA, 15 bp, Homo sapiens
aagacaatggttaca

SEQ ID NO: 1438808 - DNA, 15 bp, Homo sapiens
aaagacaatggttac

SEQ ID NO: 1438809 - DNA, 15 bp, Homo sapiens
gaaagacaatggtta

SEQ ID NO: 1438810 - DNA, 15 bp, Homo sapiens
agaaagacaatggtt

SEQ ID NO: 1438811 - DNA, 15 bp, Homo sapiens
tagaaagacaatggt

SEQ ID NO: 1438812 - DNA, 15 bp, Homo sapiens
atagaaagacaatgg

SEQ ID NO: 1438813 - DNA, 15 bp, Homo sapiens
catagaaagacaatg

SEQ ID NO: 1438814 - DNA, 15 bp, Homo sapiens
gcatagaaagacaat

SEQ ID NO: 1438815 - DNA, 15 bp, Homo sapiens
ggcatagaaagacaa

SEQ ID NO: 1438816 - DNA, 15 bp, Homo sapiens
aggcatagaaagaca

SEQ ID NO: 1438817 - DNA, 15 bp, Homo sapiens
aaggcatagaaagac

SEQ ID NO: 1438818 - DNA, 15 bp, Homo sapiens
caaggcatagaaaga

SEQ ID NO: 1438819 - DNA, 15 bp, Homo sapiens
gcaaggcatagaaag

SEQ ID NO: 1438820 - DNA, 15 bp, Homo sapiens
agcaaggcatagaaa

SEQ ID NO: 1438821 - DNA, 15 bp, Homo sapiens
aagcaaggcatagaa

SEQ ID NO: 1438822 - DNA, 15 bp, Homo sapiens
taagcaaggcataga

SEQ ID NO: 1438823 - DNA, 15 bp, Homo sapiens
ataagcaaggcatag

SEQ ID NO: 1438824 - DNA, 15 bp, Homo sapiens
aataagcaaggcata

SEQ ID NO: 1438825 - DNA, 15 bp, Homo sapiens
aaataagcaaggcat

SEQ ID NO: 1438826 - DNA, 15 bp, Homo sapiens
gaaataagcaaggca

SEQ ID NO: 1438827 - DNA, 15 bp, Homo sapiens
tgaaataagcaaggc

SEQ ID NO: 1438828 - DNA, 15 bp, Homo sapiens
gtgaaataagcaagg

SEQ ID NO: 1438829 - DNA, 15 bp, Homo sapiens
agtgaaataagcaag

SEQ ID NO: 1438830 - DNA, 15 bp, Homo sapiens
aagtgaaataagcaa

SEQ ID NO: 1438831 - DNA, 15 bp, Homo sapiens
taagtgaaataagca

SEQ ID NO: 1438832 - DNA, 15 bp, Homo sapiens
ttaagtgaaataagc

SEQ ID NO: 1438833 - DNA, 15 bp, Homo sapiens
gttaagtgaaataag

SEQ ID NO: 1438834 - DNA, 15 bp, Homo sapiens
agttaagtgaaataa

SEQ ID NO: 1438835 - DNA, 15 bp, Homo sapiens
aagttaagtgaaata

SEQ ID NO: 1438836 - DNA, 15 bp, Homo sapiens
taagttaagtgaaat

SEQ ID NO: 1438837 - DNA, 15 bp, Homo sapiens
ttaagttaagtgaaa

SEQ ID NO: 1438838 - DNA, 15 bp, Homo sapiens
attaagttaagtgaa

SEQ ID NO: 1438839 - DNA, 15 bp, Homo sapiens
cattaagttaagtga

SEQ ID NO: 1438840 - DNA, 15 bp, Homo sapiens
tcattaagttaagtg

SEQ ID NO: 1438841 - DNA, 15 bp, Homo sapiens
atcattaagttaagt

SEQ ID NO: 1438842 - DNA, 15 bp, Homo sapiens
gatcattaagttaag

SEQ ID NO: 1438843 - DNA, 15 bp, Homo sapiens
agatcattaagttaa

SEQ ID NO: 1438844 - DNA, 15 bp, Homo sapiens
gagatcattaagtta

SEQ ID NO: 1438845 - DNA, 15 bp, Homo sapiens
ggagatcattaagtt

SEQ ID NO: 1438846 - DNA, 15 bp, Homo sapiens
tggagatcattaagt

SEQ ID NO: 1438847 - DNA, 15 bp, Homo sapiens
ctggagatcattaag

SEQ ID NO: 1438848 - DNA, 15 bp, Homo sapiens
actggagatcattaa

SEQ ID NO: 1438849 - DNA, 15 bp, Homo sapiens
aactggagatcatta

SEQ ID NO: 1438850 - DNA, 15 bp, Homo sapiens
gaactggagatcatt

SEQ ID NO: 1438851 - DNA, 15 bp, Homo sapiens
ggaactggagatcat

SEQ ID NO: 1438852 - DNA, 15 bp, Homo sapiens
cggaactggagatca

SEQ ID NO: 1438853 - DNA, 15 bp, Homo sapiens
acggaactggagatc

SEQ ID NO: 1438854 - DNA, 15 bp, Homo sapiens
gacggaactggagat

SEQ ID NO: 1438855 - DNA, 15 bp, Homo sapiens
ggacggaactggaga

SEQ ID NO: 1438856 - DNA, 15 bp, Homo sapiens
tggacggaactggag

SEQ ID NO: 1438857 - DNA, 15 bp, Homo sapiens
atggacggaactgga

SEQ ID NO: 1438858 - DNA, 15 bp, Homo sapiens
catggacggaactgg

SEQ ID NO: 1438859 - DNA, 15 bp, Homo sapiens
tcatggacggaactg

SEQ ID NO: 1438860 - DNA, 15 bp, Homo sapiens
atcatggacggaact

SEQ ID NO: 1438861 - DNA, 15 bp, Homo sapiens
catcatggacggaac

SEQ ID NO: 1438862 - DNA, 15 bp, Homo sapiens
acatcatggacggaa

SEQ ID NO: 1438863 - DNA, 15 bp, Homo sapiens
aacatcatggacgga

SEQ ID NO: 1438864 - DNA, 15 bp, Homo sapiens
caacatcatggacgg

SEQ ID NO: 1438865 - DNA, 15 bp, Homo sapiens
gcaacatcatggacg

SEQ ID NO: 1438866 - DNA, 15 bp, Homo sapiens
tgcaacatcatggac

SEQ ID NO: 1438867 - DNA, 15 bp, Homo sapiens
ttgcaacatcatgga

SEQ ID NO: 1438868 - DNA, 15 bp, Homo sapiens
tttgcaacatcatgg

SEQ ID NO: 1438869 - DNA, 15 bp, Homo sapiens
atttgcaacatcatg

SEQ ID NO: 1438870 - DNA, 15 bp, Homo sapiens
catttgcaacatcat

SEQ ID NO: 1438871 - DNA, 15 bp, Homo sapiens
tcatttgcaacatca

SEQ ID NO: 1438872 - DNA, 15 bp, Homo sapiens
atcatttgcaacatc

SEQ ID NO: 1438873 - DNA, 15 bp, Homo sapiens
catcatttgcaacat

SEQ ID NO: 1438874 - DNA, 15 bp, Homo sapiens
ccatcatttgcaaca

SEQ ID NO: 1438875 - DNA, 15 bp, Homo sapiens
cccatcatttgcaac

SEQ ID NO: 1438876 - DNA, 15 bp, Homo sapiens
tcccatcatttgcaa

SEQ ID NO: 1438877 - DNA, 15 bp, Homo sapiens
atcccatcatttgca

SEQ ID NO: 1438878 - DNA, 15 bp, Homo sapiens
gatcccatcatttgc

SEQ ID NO: 1438879 - DNA, 15 bp, Homo sapiens
agatcccatcatttg

SEQ ID NO: 1438880 - DNA, 15 bp, Homo sapiens
gagatcccatcattt

SEQ ID NO: 1438881 - DNA, 15 bp, Homo sapiens
tgagatcccatcatt

SEQ ID NO: 1438882 - DNA, 15 bp, Homo sapiens
atgagatcccatcat

SEQ ID NO: 1438883 - DNA, 15 bp, Homo sapiens
aatgagatcccatca

SEQ ID NO: 1438884 - DNA, 15 bp, Homo sapiens
gaatgagatcccatc

SEQ ID NO: 1438885 - DNA, 15 bp, Homo sapiens
agaatgagatcccat

SEQ ID NO: 1438886 - DNA, 15 bp, Homo sapiens
aagaatgagatccca

SEQ ID NO: 1438887 - DNA, 15 bp, Homo sapiens
aaagaatgagatccc

SEQ ID NO: 1438888 - DNA, 15 bp, Homo sapiens
aaaagaatgagatcc

SEQ ID NO: 1438889 - DNA, 15 bp, Homo sapiens
aaaaaagaatgagat

SEQ ID NO: 1438890 - DNA, 15 bp, Homo sapiens
taaaaaagaatgaga

SEQ ID NO: 1438891 - DNA, 15 bp, Homo sapiens
ataaaaaagaatgag

SEQ ID NO: 1438892 - DNA, 15 bp, Homo sapiens
tataaaaaagaatga

SEQ ID NO: 1438893 - DNA, 15 bp, Homo sapiens
ctataaaaaagaatg

SEQ ID NO: 1438894 - DNA, 15 bp, Homo sapiens
gctataaaaaagaat

SEQ ID NO: 1438895 - DNA, 15 bp, Homo sapiens
agctataaaaaagaa

SEQ ID NO: 1438896 - DNA, 15 bp, Homo sapiens
gagctataaaaaaga

SEQ ID NO: 1438897 - DNA, 15 bp, Homo sapiens
tgagctataaaaaag

SEQ ID NO: 1438898 - DNA, 15 bp, Homo sapiens
ttgagctataaaaaa

SEQ ID NO: 1438899 - DNA, 15 bp, Homo sapiens
attgagctataaaaa

SEQ ID NO: 1438900 - DNA, 15 bp, Homo sapiens
tattgagctataaaa

SEQ ID NO: 1438901 - DNA, 15 bp, Homo sapiens
ctattgagctataaa

SEQ ID NO: 1438902 - DNA, 15 bp, Homo sapiens
actattgagctataa

SEQ ID NO: 1438903 - DNA, 15 bp, Homo sapiens
tactattgagctata

SEQ ID NO: 1438904 - DNA, 15 bp, Homo sapiens
gtactattgagctat

SEQ ID NO: 1438905 - DNA, 15 bp, Homo sapiens
agtactattgagcta

SEQ ID NO: 1438906 - DNA, 15 bp, Homo sapiens
gagtactattgagct

SEQ ID NO: 1438907 - DNA, 15 bp, Homo sapiens
agagtactattgagc

SEQ ID NO: 1438908 - DNA, 15 bp, Homo sapiens
tagagtactattgag

SEQ ID NO: 1438909 - DNA, 15 bp, Homo sapiens
atagagtactattga

SEQ ID NO: 1438910 - DNA, 15 bp, Homo sapiens
aatagagtactattg

SEQ ID NO: 1438911 - DNA, 15 bp, Homo sapiens
caatagagtactatt

SEQ ID NO: 1438912 - DNA, 15 bp, Homo sapiens
acaatagagtactat

SEQ ID NO: 1438913 - DNA, 15 bp, Homo sapiens
tacaatagagtacta

SEQ ID NO: 1438914 - DNA, 15 bp, Homo sapiens
atacaatagagtact

SEQ ID NO: 1438915 - DNA, 15 bp, Homo sapiens
tatacaatagagtac

SEQ ID NO: 1438916 - DNA, 15 bp, Homo sapiens
atatacaatagagta

SEQ ID NO: 1438917 - DNA, 15 bp, Homo sapiens
tatatacaatagagt

SEQ ID NO: 1438918 - DNA, 15 bp, Homo sapiens
atatatacaatagag

SEQ ID NO: 1438919 - DNA, 15 bp, Homo sapiens
catatatacaataga

SEQ ID NO: 1438920 - DNA, 15 bp, Homo sapiens
acatatatacaatag

SEQ ID NO: 1438921 - DNA, 15 bp, Homo sapiens
tacatatatacaata

SEQ ID NO: 1438922 - DNA, 15 bp, Homo sapiens
gtacatatatacaat

SEQ ID NO: 1438923 - DNA, 15 bp, Homo sapiens
ggtacatatatacaa

SEQ ID NO: 1438924 - DNA, 15 bp, Homo sapiens
gggtacatatataca

SEQ ID NO: 1438925 - DNA, 15 bp, Homo sapiens
ggggtacatatatac

SEQ ID NO: 1438926 - DNA, 15 bp, Homo sapiens
tggggtacatatata

SEQ ID NO: 1438927 - DNA, 15 bp, Homo sapiens
atggggtacatatat

SEQ ID NO: 1438928 - DNA, 15 bp, Homo sapiens
aatggggtacatata

SEQ ID NO: 1438929 - DNA, 15 bp, Homo sapiens
aaatggggtacatat

SEQ ID NO: 1438930 - DNA, 15 bp, Homo sapiens
aaaatggggtacata

SEQ ID NO: 1438931 - DNA, 15 bp, Homo sapiens
gaaaatggggtacat

SEQ ID NO: 1438932 - DNA, 15 bp, Homo sapiens
agaaaatggggtaca

SEQ ID NO: 1438933 - DNA, 15 bp, Homo sapiens
aagaaaatggggtac

SEQ ID NO: 1438934 - DNA, 15 bp, Homo sapiens
aaagaaaatggggta

SEQ ID NO: 1438935 - DNA, 15 bp, Homo sapiens
taaagaaaatggggt

SEQ ID NO: 1438936 - DNA, 15 bp, Homo sapiens
ataaagaaaatgggg

SEQ ID NO: 1438937 - DNA, 15 bp, Homo sapiens
gataaagaaaatggg

SEQ ID NO: 1438938 - DNA, 15 bp, Homo sapiens
ggataaagaaaatgg

SEQ ID NO: 1438939 - DNA, 15 bp, Homo sapiens
atggataaagaaaat

SEQ ID NO: 1438940 - DNA, 15 bp, Homo sapiens
aatggataaagaaaa

SEQ ID NO: 1438941 - DNA, 15 bp, Homo sapiens
gaatggataaagaaa

SEQ ID NO: 1438942 - DNA, 15 bp, Homo sapiens
tgaatggataaagaa

SEQ ID NO: 1438943 - DNA, 15 bp, Homo sapiens
atgaatggataaaga

SEQ ID NO: 1438944 - DNA, 15 bp, Homo sapiens
gatgaatggataaag

SEQ ID NO: 1438945 - DNA, 15 bp, Homo sapiens
agatgaatggataaa

SEQ ID NO: 1438946 - DNA, 15 bp, Homo sapiens
cagatgaatggataa

SEQ ID NO: 1438947 - DNA, 15 bp, Homo sapiens
acagatgaatggata

SEQ ID NO: 1438948 - DNA, 15 bp, Homo sapiens
aacagatgaatggat

SEQ ID NO: 1438949 - DNA, 15 bp, Homo sapiens
caacagatgaatgga

SEQ ID NO: 1438950 - DNA, 15 bp, Homo sapiens
tcaacagatgaatgg

SEQ ID NO: 1438951 - DNA, 15 bp, Homo sapiens
atcaacagatgaatg

SEQ ID NO: 1438952 - DNA, 15 bp, Homo sapiens
catcaacagatgaat

SEQ ID NO: 1438953 - DNA, 15 bp, Homo sapiens
ccatcaacagatgaa

SEQ ID NO: 1438954 - DNA, 15 bp, Homo sapiens
tccatcaacagatga

SEQ ID NO: 1438955 - DNA, 15 bp, Homo sapiens
gtccatcaacagatg

SEQ ID NO: 1438956 - DNA, 15 bp, Homo sapiens
gacctaagtgtccat

SEQ ID NO: 1438957 - DNA, 15 bp, Homo sapiens
tgacctaagtgtcca

SEQ ID NO: 1438958 - DNA, 15 bp, Homo sapiens
gtgacctaagtgtcc

SEQ ID NO: 1438959 - DNA, 15 bp, Homo sapiens
agtgacctaagtgtc

SEQ ID NO: 1438960 - DNA, 15 bp, Homo sapiens
aagtgacctaagtgt

SEQ ID NO: 1438961 - DNA, 15 bp, Homo sapiens
gaagtgacctaagtg

SEQ ID NO: 1438962 - DNA, 15 bp, Homo sapiens
ggaagtgacctaagt

SEQ ID NO: 1438963 - DNA, 15 bp, Homo sapiens
tggaagtgacctaag

SEQ ID NO: 1438964 - DNA, 15 bp, Homo sapiens
ttggaagtgacctaa

SEQ ID NO: 1438965 - DNA, 15 bp, Homo sapiens
tttggaagtgaccta

SEQ ID NO: 1438966 - DNA, 15 bp, Homo sapiens
atttggaagtgacct

SEQ ID NO: 1438967 - DNA, 15 bp, Homo sapiens
gatttggaagtgacc

SEQ ID NO: 1438968 - DNA, 15 bp, Homo sapiens
agatttggaagtgac

SEQ ID NO: 1438969 - DNA, 15 bp, Homo sapiens
aagatttggaagtga

SEQ ID NO: 1438970 - DNA, 15 bp, Homo sapiens
taagatttggaagtg

SEQ ID NO: 1438971 - DNA, 15 bp, Homo sapiens
gtaagatttggaagt

SEQ ID NO: 1438972 - DNA, 15 bp, Homo sapiens
ggtaagatttggaag

SEQ ID NO: 1438973 - DNA, 15 bp, Homo sapiens
aggtaagatttggaa

SEQ ID NO: 1438974 - DNA, 15 bp, Homo sapiens
taggtaagatttgga

SEQ ID NO: 1438975 - DNA, 15 bp, Homo sapiens
ataggtaagatttgg

SEQ ID NO: 1438976 - DNA, 15 bp, Homo sapiens
aataggtaagatttg

SEQ ID NO: 1438977 - DNA, 15 bp, Homo sapiens
caataggtaagattt

SEQ ID NO: 1438978 - DNA, 15 bp, Homo sapiens
tcaataggtaagatt

SEQ ID NO: 1438979 - DNA, 15 bp, Homo sapiens
ttcaataggtaagat

SEQ ID NO: 1438980 - DNA, 15 bp, Homo sapiens
tttcaataggtaaga

SEQ ID NO: 1438981 - DNA, 15 bp, Homo sapiens
ttttcaataggtaag

SEQ ID NO: 1438982 - DNA, 15 bp, Homo sapiens
gttttcaataggtaa

SEQ ID NO: 1438983 - DNA, 15 bp, Homo sapiens
tgttttcaataggta

SEQ ID NO: 1438984 - DNA, 15 bp, Homo sapiens
ctgttttcaataggt

SEQ ID NO: 1438985 - DNA, 15 bp, Homo sapiens
actgttttcaatagg

SEQ ID NO: 1438986 - DNA, 15 bp, Homo sapiens
cactgttttcaatag

SEQ ID NO: 1438987 - DNA, 15 bp, Homo sapiens
gcactgttttcaata

SEQ ID NO: 1438988 - DNA, 15 bp, Homo sapiens
agcactgttttcaat

SEQ ID NO: 1438989 - DNA, 15 bp, Homo sapiens
cagcactgttttcaa

SEQ ID NO: 1438990 - DNA, 15 bp, Homo sapiens
gcagcactgttttca

SEQ ID NO: 1438991 - DNA, 15 bp, Homo sapiens
tgcagcactgttttc

SEQ ID NO: 1438992 - DNA, 15 bp, Homo sapiens
ttgcagcactgtttt

SEQ ID NO: 1438993 - DNA, 15 bp, Homo sapiens
gttgcagcactgttt

SEQ ID NO: 1438994 - DNA, 15 bp, Homo sapiens
tgttgcagcactgtt

SEQ ID NO: 1438995 - DNA, 15 bp, Homo sapiens
ttgttgcagcactgt

SEQ ID NO: 1438996 - DNA, 15 bp, Homo sapiens
tttgttgcagcactg

SEQ ID NO: 1438997 - DNA, 15 bp, Homo sapiens
atttgttgcagcact

SEQ ID NO: 1438998 - DNA, 15 bp, Homo sapiens
tatttgttgcagcac

SEQ ID NO: 1438999 - DNA, 15 bp, Homo sapiens
gtatttgttgcagca

SEQ ID NO: 1439000 - DNA, 15 bp, Homo sapiens
tgtatttgttgcagc

SEQ ID NO: 1439001 - DNA, 15 bp, Homo sapiens
ctgtatttgttgcag

SEQ ID NO: 1439002 - DNA, 15 bp, Homo sapiens
cctgtatttgttgca

SEQ ID NO: 1439003 - DNA, 15 bp, Homo sapiens
tcctgtatttgttgc

SEQ ID NO: 1439004 - DNA, 15 bp, Homo sapiens
ctcctgtatttgttg

SEQ ID NO: 1439005 - DNA, 15 bp, Homo sapiens
actcctgtatttgtt

SEQ ID NO: 1439006 - DNA, 15 bp, Homo sapiens
cactcctgtatttgt

SEQ ID NO: 1439007 - DNA, 15 bp, Homo sapiens
gcactcctgtatttg

SEQ ID NO: 1439008 - DNA, 15 bp, Homo sapiens
tgcactcctgtattt

SEQ ID NO: 1439009 - DNA, 15 bp, Homo sapiens
ctgcactcctgtatt

SEQ ID NO: 1439010 - DNA, 15 bp, Homo sapiens
tctgcactcctgtat

SEQ ID NO: 1439011 - DNA, 15 bp, Homo sapiens
gtctgcactcctgta

SEQ ID NO: 1439012 - DNA, 15 bp, Homo sapiens
cgtctgcactcctgt

SEQ ID NO: 1439013 - DNA, 15 bp, Homo sapiens
acgtctgcactcctg

SEQ ID NO: 1439014 - DNA, 15 bp, Homo sapiens
aacgtctgcactcct

SEQ ID NO: 1439015 - DNA, 15 bp, Homo sapiens
aaacgtctgcactcc

SEQ ID NO: 1439016 - DNA, 15 bp, Homo sapiens
gaaacgtctgcactc

SEQ ID NO: 1439017 - DNA, 15 bp, Homo sapiens
agaaacgtctgcact

SEQ ID NO: 1439018 - DNA, 15 bp, Homo sapiens
aagaaacgtctgcac

SEQ ID NO: 1439019 - DNA, 15 bp, Homo sapiens
aaagaaacgtctgca

SEQ ID NO: 1439020 - DNA, 15 bp, Homo sapiens
caaagaaacgtctgc

SEQ ID NO: 1439021 - DNA, 15 bp, Homo sapiens
tcaaagaaacgtctg

SEQ ID NO: 1439022 - DNA, 15 bp, Homo sapiens
atcaaagaaacgtct

SEQ ID NO: 1439023 - DNA, 15 bp, Homo sapiens
tatcaaagaaacgtc

SEQ ID NO: 1439024 - DNA, 15 bp, Homo sapiens
atatcaaagaaacgt

SEQ ID NO: 1439025 - DNA, 15 bp, Homo sapiens
tatatcaaagaaacg

SEQ ID NO: 1439026 - DNA, 15 bp, Homo sapiens
gtatatcaaagaaac

SEQ ID NO: 1439027 - DNA, 15 bp, Homo sapiens
agtatatcaaagaaa

SEQ ID NO: 1439028 - DNA, 15 bp, Homo sapiens
cagtatatcaaagaa

SEQ ID NO: 1439029 - DNA, 15 bp, Homo sapiens
tcagtatatcaaaga

SEQ ID NO: 1439030 - DNA, 15 bp, Homo sapiens
atcagtatatcaaag

SEQ ID NO: 1439031 - DNA, 15 bp, Homo sapiens
aatcagtatatcaaa

SEQ ID NO: 1439032 - DNA, 15 bp, Homo sapiens
aaatcagtatatcaa

SEQ ID NO: 1439033 - DNA, 15 bp, Homo sapiens
gaaatcagtatatca

SEQ ID NO: 1439034 - DNA, 15 bp, Homo sapiens
agaaatcagtatatc

SEQ ID NO: 1439035 - DNA, 15 bp, Homo sapiens
aagaaatcagtatat

SEQ ID NO: 1439036 - DNA, 15 bp, Homo sapiens
aaagaaatcagtata

SEQ ID NO: 1439037 - DNA, 15 bp, Homo sapiens
aaaagaaatcagtat

SEQ ID NO: 1439038 - DNA, 15 bp, Homo sapiens
gaaaagaaatcagta

SEQ ID NO: 1439039 - DNA, 15 bp, Homo sapiens
agaaaagaaatcagt

SEQ ID NO: 1439040 - DNA, 15 bp, Homo sapiens
aagaaaagaaatcag

SEQ ID NO: 1439041 - DNA, 15 bp, Homo sapiens
aaagaaaagaaatca

SEQ ID NO: 1439042 - DNA, 15 bp, Homo sapiens
aaaagaaaagaaatc

SEQ ID NO: 1439043 - DNA, 15 bp, Homo sapiens
caaaagaaaagaaat

SEQ ID NO: 1439044 - DNA, 15 bp, Homo sapiens
ccaaaagaaaagaaa

SEQ ID NO: 1439045 - DNA, 15 bp, Homo sapiens
cccaaaagaaaagaa

SEQ ID NO: 1439046 - DNA, 15 bp, Homo sapiens
acccaaaagaaaaga

SEQ ID NO: 1439047 - DNA, 15 bp, Homo sapiens
tacccaaaagaaaag

SEQ ID NO: 1439048 - DNA, 15 bp, Homo sapiens
atacccaaaagaaaa

SEQ ID NO: 1439049 - DNA, 15 bp, Homo sapiens
tatacccaaaagaaa

SEQ ID NO: 1439050 - DNA, 15 bp, Homo sapiens
atatacccaaaagaa

SEQ ID NO: 1439051 - DNA, 15 bp, Homo sapiens
tatatacccaaaaga

SEQ ID NO: 1439052 - DNA, 15 bp, Homo sapiens
gtatatacccaaaag

SEQ ID NO: 1439053 - DNA, 15 bp, Homo sapiens
ggtatatacccaaaa

SEQ ID NO: 1439054 - DNA, 15 bp, Homo sapiens
gctgggtatataccc

SEQ ID NO: 1439055 - DNA, 15 bp, Homo sapiens
tgctgggtatatacc

SEQ ID NO: 1439056 - DNA, 15 bp, Homo sapiens
ctgctgggtatatac

SEQ ID NO: 1439057 - DNA, 15 bp, Homo sapiens
actgctgggtatata

SEQ ID NO: 1439058 - DNA, 15 bp, Homo sapiens
cactgctgggtatat

SEQ ID NO: 1439059 - DNA, 15 bp, Homo sapiens
ccactgctgggtata

SEQ ID NO: 1439060 - DNA, 15 bp, Homo sapiens
cccactgctgggtat

SEQ ID NO: 1439061 - DNA, 15 bp, Homo sapiens
tcccactgctgggta

SEQ ID NO: 1439062 - DNA, 15 bp, Homo sapiens
atcccactgctgggt

SEQ ID NO: 1439063 - DNA, 15 bp, Homo sapiens
tcagcaatcccactg

SEQ ID NO: 1439064 - DNA, 15 bp, Homo sapiens
ttcagcaatcccact

SEQ ID NO: 1439065 - DNA, 15 bp, Homo sapiens
attcagcaatcccac

SEQ ID NO: 1439066 - DNA, 15 bp, Homo sapiens
gattcagcaatccca

SEQ ID NO: 1439067 - DNA, 15 bp, Homo sapiens
cgattcagcaatccc

SEQ ID NO: 1439068 - DNA, 15 bp, Homo sapiens
ccgattcagcaatcc

SEQ ID NO: 1439069 - DNA, 15 bp, Homo sapiens
tccgattcagcaatc

SEQ ID NO: 1439070 - DNA, 15 bp, Homo sapiens
atccgattcagcaat

SEQ ID NO: 1439071 - DNA, 15 bp, Homo sapiens
catccgattcagcaa

SEQ ID NO: 1439072 - DNA, 15 bp, Homo sapiens
ccatccgattcagca

SEQ ID NO: 1439073 - DNA, 15 bp, Homo sapiens
accatccgattcagc

SEQ ID NO: 1439074 - DNA, 15 bp, Homo sapiens
taccatccgattcag

SEQ ID NO: 1439075 - DNA, 15 bp, Homo sapiens
ctaccatccgattca

SEQ ID NO: 1439076 - DNA, 15 bp, Homo sapiens
gctaccatccgattc

SEQ ID NO: 1439077 - DNA, 15 bp, Homo sapiens
agctaccatccgatt

SEQ ID NO: 1439078 - DNA, 15 bp, Homo sapiens
tagctaccatccgat

SEQ ID NO: 1439079 - DNA, 15 bp, Homo sapiens
ttagctaccatccga

SEQ ID NO: 1439080 - DNA, 15 bp, Homo sapiens
tttagctaccatccg

SEQ ID NO: 1439081 - DNA, 15 bp, Homo sapiens
atttagctaccatcc

SEQ ID NO: 1439082 - DNA, 15 bp, Homo sapiens
aatttagctaccatc

SEQ ID NO: 1439083 - DNA, 15 bp, Homo sapiens
aaatttagctaccat

SEQ ID NO: 1439084 - DNA, 15 bp, Homo sapiens
aaaatttagctacca

SEQ ID NO: 1439085 - DNA, 15 bp, Homo sapiens
aaaaatttagctacc

SEQ ID NO: 1439086 - DNA, 15 bp, Homo sapiens
taaaaatttagctac

SEQ ID NO: 1439087 - DNA, 15 bp, Homo sapiens
ctaaaaatttagcta

SEQ ID NO: 1439088 - DNA, 15 bp, Homo sapiens
actaaaaatttagct

SEQ ID NO: 1439089 - DNA, 15 bp, Homo sapiens
aactaaaaatttagc

SEQ ID NO: 1439090 - DNA, 15 bp, Homo sapiens
aaaactaaaaattta

SEQ ID NO: 1439091 - DNA, 15 bp, Homo sapiens
aaaaactaaaaattt

SEQ ID NO: 1439092 - DNA, 15 bp, Homo sapiens
aaaaaactaaaaatt

SEQ ID NO: 1439093 - DNA, 15 bp, Homo sapiens
caaaaaactaaaaat

SEQ ID NO: 1439094 - DNA, 15 bp, Homo sapiens
tcaaaaaactaaaaa

SEQ ID NO: 1439095 - DNA, 15 bp, Homo sapiens
ctcaaaaaactaaaa

SEQ ID NO: 1439096 - DNA, 15 bp, Homo sapiens
actcaaaaaactaaa

SEQ ID NO: 1439097 - DNA, 15 bp, Homo sapiens
tactcaaaaaactaa

SEQ ID NO: 1439098 - DNA, 15 bp, Homo sapiens
ttactcaaaaaacta

SEQ ID NO: 1439099 - DNA, 15 bp, Homo sapiens
gttactcaaaaaact

SEQ ID NO: 1439100 - DNA, 15 bp, Homo sapiens
agttactcaaaaaac

SEQ ID NO: 1439101 - DNA, 15 bp, Homo sapiens
tagttactcaaaaaa

SEQ ID NO: 1439102 - DNA, 15 bp, Homo sapiens
gtagttactcaaaaa

SEQ ID NO: 1439103 - DNA, 15 bp, Homo sapiens
tgtagttactcaaaa

SEQ ID NO: 1439104 - DNA, 15 bp, Homo sapiens
atgtagttactcaaa

SEQ ID NO: 1439105 - DNA, 15 bp, Homo sapiens
aatgtagttactcaa

SEQ ID NO: 1439106 - DNA, 15 bp, Homo sapiens
caatgtagttactca

SEQ ID NO: 1439107 - DNA, 15 bp, Homo sapiens
acaatgtagttactc

SEQ ID NO: 1439108 - DNA, 15 bp, Homo sapiens
aacaatgtagttact

SEQ ID NO: 1439109 - DNA, 15 bp, Homo sapiens
gaacaatgtagttac

SEQ ID NO: 1439110 - DNA, 15 bp, Homo sapiens
agaacaatgtagtta

SEQ ID NO: 1439111 - DNA, 15 bp, Homo sapiens
gagaacaatgtagtt

SEQ ID NO: 1439112 - DNA, 15 bp, Homo sapiens
ggagaacaatgtagt

SEQ ID NO: 1439113 - DNA, 15 bp, Homo sapiens
tggagaacaatgtag

SEQ ID NO: 1439114 - DNA, 15 bp, Homo sapiens
ctggagaacaatgta

SEQ ID NO: 1439115 - DNA, 15 bp, Homo sapiens
actggagaacaatgt

SEQ ID NO: 1439116 - DNA, 15 bp, Homo sapiens
aactggagaacaatg

SEQ ID NO: 1439117 - DNA, 15 bp, Homo sapiens
aaactggagaacaat

SEQ ID NO: 1439118 - DNA, 15 bp, Homo sapiens
taaactggagaacaa

SEQ ID NO: 1439119 - DNA, 15 bp, Homo sapiens
ctaaactggagaaca

SEQ ID NO: 1439120 - DNA, 15 bp, Homo sapiens
actaaactggagaac

SEQ ID NO: 1439121 - DNA, 15 bp, Homo sapiens
aactaaactggagaa

SEQ ID NO: 1439122 - DNA, 15 bp, Homo sapiens
taactaaactggaga

SEQ ID NO: 1439123 - DNA, 15 bp, Homo sapiens
gtaactaaactggag

SEQ ID NO: 1439124 - DNA, 15 bp, Homo sapiens
agtaactaaactgga

SEQ ID NO: 1439125 - DNA, 15 bp, Homo sapiens
gagtaactaaactgg

SEQ ID NO: 1439126 - DNA, 15 bp, Homo sapiens
tgagtaactaaactg

SEQ ID NO: 1439127 - DNA, 15 bp, Homo sapiens
ttgagtaactaaact

SEQ ID NO: 1439128 - DNA, 15 bp, Homo sapiens
tttgagtaactaaac

SEQ ID NO: 1439129 - DNA, 15 bp, Homo sapiens
ttttgagtaactaaa

SEQ ID NO: 1439130 - DNA, 15 bp, Homo sapiens
gttttgagtaactaa

SEQ ID NO: 1439131 - DNA, 15 bp, Homo sapiens
agttttgagtaacta

SEQ ID NO: 1439132 - DNA, 15 bp, Homo sapiens
cagttttgagtaact

SEQ ID NO: 1439133 - DNA, 15 bp, Homo sapiens
acagttttgagtaac

SEQ ID NO: 1439134 - DNA, 15 bp, Homo sapiens
aacagttttgagtaa

SEQ ID NO: 1439135 - DNA, 15 bp, Homo sapiens
gaacagttttgagta

SEQ ID NO: 1439136 - DNA, 15 bp, Homo sapiens
agaacagttttgagt

SEQ ID NO: 1439137 - DNA, 15 bp, Homo sapiens
gagaacagttttgag

SEQ ID NO: 1439138 - DNA, 15 bp, Homo sapiens
ggagaacagttttga

SEQ ID NO: 1439139 - DNA, 15 bp, Homo sapiens
tggagaacagttttg

SEQ ID NO: 1439140 - DNA, 15 bp, Homo sapiens
ttggagaacagtttt

SEQ ID NO: 1439141 - DNA, 15 bp, Homo sapiens
tttggagaacagttt

SEQ ID NO: 1439142 - DNA, 15 bp, Homo sapiens
gtttggagaacagtt

SEQ ID NO: 1439143 - DNA, 15 bp, Homo sapiens
agtttggagaacagt

SEQ ID NO: 1439144 - DNA, 15 bp, Homo sapiens
cagtttggagaacag

SEQ ID NO: 1439145 - DNA, 15 bp, Homo sapiens
acagtttggagaaca

SEQ ID NO: 1439146 - DNA, 15 bp, Homo sapiens
aacagtttggagaac

SEQ ID NO: 1439147 - DNA, 15 bp, Homo sapiens
gaacagtttggagaa

SEQ ID NO: 1439148 - DNA, 15 bp, Homo sapiens
agaacagtttggaga

SEQ ID NO: 1439149 - DNA, 15 bp, Homo sapiens
gagaacagtttggag

SEQ ID NO: 1439150 - DNA, 15 bp, Homo sapiens
ggagaacagtttgga

SEQ ID NO: 1439151 - DNA, 15 bp, Homo sapiens
gggagaacagtttgg

SEQ ID NO: 1439152 - DNA, 15 bp, Homo sapiens
agggagaacagtttg

SEQ ID NO: 1439153 - DNA, 15 bp, Homo sapiens
tagggagaacagttt

SEQ ID NO: 1439154 - DNA, 15 bp, Homo sapiens
ctagggagaacagtt

SEQ ID NO: 1439155 - DNA, 15 bp, Homo sapiens
actagggagaacagt

SEQ ID NO: 1439156 - DNA, 15 bp, Homo sapiens
cactagggagaacag

SEQ ID NO: 1439157 - DNA, 15 bp, Homo sapiens
ccactagggagaaca

SEQ ID NO: 1439158 - DNA, 15 bp, Homo sapiens
accactagggagaac

SEQ ID NO: 1439159 - DNA, 15 bp, Homo sapiens
aaccactagggagaa

SEQ ID NO: 1439160 - DNA, 15 bp, Homo sapiens
caaccactagggaga

SEQ ID NO: 1439161 - DNA, 15 bp, Homo sapiens
acaaccactagggag

SEQ ID NO: 1439162 - DNA, 15 bp, Homo sapiens
tacaaccactaggga

SEQ ID NO: 1439163 - DNA, 15 bp, Homo sapiens
gtacaaccactaggg

SEQ ID NO: 1439164 - DNA, 15 bp, Homo sapiens
agtacaaccactagg

SEQ ID NO: 1439165 - DNA, 15 bp, Homo sapiens
tagtacaaccactag

SEQ ID NO: 1439166 - DNA, 15 bp, Homo sapiens
ttagtacaaccacta

SEQ ID NO: 1439167 - DNA, 15 bp, Homo sapiens
attagtacaaccact

SEQ ID NO: 1439168 - DNA, 15 bp, Homo sapiens
aattagtacaaccac

SEQ ID NO: 1439169 - DNA, 15 bp, Homo sapiens
aaattagtacaacca

SEQ ID NO: 1439170 - DNA, 15 bp, Homo sapiens
gtgtaaattagtaca

SEQ ID NO: 1439171 - DNA, 15 bp, Homo sapiens
agtgtaaattagtac

SEQ ID NO: 1439172 - DNA, 15 bp, Homo sapiens
gagtgtaaattagta

SEQ ID NO: 1439173 - DNA, 15 bp, Homo sapiens
ggagtgtaaattagt

SEQ ID NO: 1439174 - DNA, 15 bp, Homo sapiens
gggagtgtaaattag

SEQ ID NO: 1439175 - DNA, 15 bp, Homo sapiens
ggtgggagtgtaaat

SEQ ID NO: 1439176 - DNA, 15 bp, Homo sapiens
tggtgggagtgtaaa

SEQ ID NO: 1439177 - DNA, 15 bp, Homo sapiens
ttggtgggagtgtaa

SEQ ID NO: 1439178 - DNA, 15 bp, Homo sapiens
cttggtgggagtgta

SEQ ID NO: 1439179 - DNA, 15 bp, Homo sapiens
tcttggtgggagtgt

SEQ ID NO: 1439180 - DNA, 15 bp, Homo sapiens
ctcttggtgggagtg

SEQ ID NO: 1439181 - DNA, 15 bp, Homo sapiens
actcttggtgggagt

SEQ ID NO: 1439182 - DNA, 15 bp, Homo sapiens
cactcttggtgggag

SEQ ID NO: 1439183 - DNA, 15 bp, Homo sapiens
acactcttggtggga

SEQ ID NO: 1439184 - DNA, 15 bp, Homo sapiens
tacactcttggtggg

SEQ ID NO: 1439185 - DNA, 15 bp, Homo sapiens
gtacactcttggtgg

SEQ ID NO: 1439186 - DNA, 15 bp, Homo sapiens
tgtacactcttggtg

SEQ ID NO: 1439187 - DNA, 15 bp, Homo sapiens
ttgtacactcttggt

SEQ ID NO: 1439188 - DNA, 15 bp, Homo sapiens
cttgtacactcttgg

SEQ ID NO: 1439189 - DNA, 15 bp, Homo sapiens
ccttgtacactcttg

SEQ ID NO: 1439190 - DNA, 15 bp, Homo sapiens
tccttgtacactctt

SEQ ID NO: 1439191 - DNA, 15 bp, Homo sapiens
atccttgtacactct

SEQ ID NO: 1439192 - DNA, 15 bp, Homo sapiens
aatccttgtacactc

SEQ ID NO: 1439193 - DNA, 15 bp, Homo sapiens
gaatccttgtacact

SEQ ID NO: 1439194 - DNA, 15 bp, Homo sapiens
ggaatccttgtacac

SEQ ID NO: 1439195 - DNA, 15 bp, Homo sapiens
gggaatccttgtaca

SEQ ID NO: 1439196 - DNA, 15 bp, Homo sapiens
agggaatccttgtac

SEQ ID NO: 1439197 - DNA, 15 bp, Homo sapiens
aagggaatccttgta

SEQ ID NO: 1439198 - DNA, 15 bp, Homo sapiens
aaagggaatccttgt

SEQ ID NO: 1439199 - DNA, 15 bp, Homo sapiens
aaaagggaatccttg

SEQ ID NO: 1439200 - DNA, 15 bp, Homo sapiens
gaaaagggaatcctt

SEQ ID NO: 1439201 - DNA, 15 bp, Homo sapiens
agaaaagggaatcct

SEQ ID NO: 1439202 - DNA, 15 bp, Homo sapiens
gagaaaagggaatcc

SEQ ID NO: 1439203 - DNA, 15 bp, Homo sapiens
agagaaaagggaatc

SEQ ID NO: 1439204 - DNA, 15 bp, Homo sapiens
tagagaaaagggaat

SEQ ID NO: 1439205 - DNA, 15 bp, Homo sapiens
gtagagaaaagggaa

SEQ ID NO: 1439206 - DNA, 15 bp, Homo sapiens
tgtagagaaaaggga

SEQ ID NO: 1439207 - DNA, 15 bp, Homo sapiens
atgtagagaaaaggg

SEQ ID NO: 1439208 - DNA, 15 bp, Homo sapiens
gatgtagagaaaagg

SEQ ID NO: 1439209 - DNA, 15 bp, Homo sapiens
ggatgtagagaaaag

SEQ ID NO: 1439210 - DNA, 15 bp, Homo sapiens
aggatgtagagaaaa

SEQ ID NO: 1439211 - DNA, 15 bp, Homo sapiens
aaggatgtagagaaa

SEQ ID NO: 1439212 - DNA, 15 bp, Homo sapiens
caaggatgtagagaa

SEQ ID NO: 1439213 - DNA, 15 bp, Homo sapiens
gcaaggatgtagaga

SEQ ID NO: 1439214 - DNA, 15 bp, Homo sapiens
ggcaaggatgtagag

SEQ ID NO: 1439215 - DNA, 15 bp, Homo sapiens
tggcaaggatgtaga

SEQ ID NO: 1439216 - DNA, 15 bp, Homo sapiens
ctggcaaggatgtag

SEQ ID NO: 1439217 - DNA, 15 bp, Homo sapiens
gctggcaaggatgta

SEQ ID NO: 1439218 - DNA, 15 bp, Homo sapiens
tgctggcaaggatgt

SEQ ID NO: 1439219 - DNA, 15 bp, Homo sapiens
atgctggcaaggatg

SEQ ID NO: 1439220 - DNA, 15 bp, Homo sapiens
aatgctggcaaggat

SEQ ID NO: 1439221 - DNA, 15 bp, Homo sapiens
aaatgctggcaagga

SEQ ID NO: 1439222 - DNA, 15 bp, Homo sapiens
caaatgctggcaagg

SEQ ID NO: 1439223 - DNA, 15 bp, Homo sapiens
acaaatgctggcaag

SEQ ID NO: 1439224 - DNA, 15 bp, Homo sapiens
aacaaatgctggcaa

SEQ ID NO: 1439225 - DNA, 15 bp, Homo sapiens
taacaaatgctggca

SEQ ID NO: 1439226 - DNA, 15 bp, Homo sapiens
acaataacaaatgct

SEQ ID NO: 1439227 - DNA, 15 bp, Homo sapiens
gacaataacaaatgc

SEQ ID NO: 1439228 - DNA, 15 bp, Homo sapiens
agacaataacaaatg

SEQ ID NO: 1439229 - DNA, 15 bp, Homo sapiens
cagacaataacaaat

SEQ ID NO: 1439230 - DNA, 15 bp, Homo sapiens
acagacaataacaaa

SEQ ID NO: 1439231 - DNA, 15 bp, Homo sapiens
gacagacaataacaa

SEQ ID NO: 1439232 - DNA, 15 bp, Homo sapiens
agacagacaataaca

SEQ ID NO: 1439233 - DNA, 15 bp, Homo sapiens
aagacagacaataac

SEQ ID NO: 1439234 - DNA, 15 bp, Homo sapiens
aaagacagacaataa

SEQ ID NO: 1439235 - DNA, 15 bp, Homo sapiens
aaaagacagacaata

SEQ ID NO: 1439236 - DNA, 15 bp, Homo sapiens
caaaagacagacaat

SEQ ID NO: 1439237 - DNA, 15 bp, Homo sapiens
tcaaaagacagacaa

SEQ ID NO: 1439238 - DNA, 15 bp, Homo sapiens
ttcaaaagacagaca

SEQ ID NO: 1439239 - DNA, 15 bp, Homo sapiens
attcaaaagacagac

SEQ ID NO: 1439240 - DNA, 15 bp, Homo sapiens
tattcaaaagacaga

SEQ ID NO: 1439241 - DNA, 15 bp, Homo sapiens
ttattcaaaagacag

SEQ ID NO: 1439242 - DNA, 15 bp, Homo sapiens
tttattcaaaagaca

SEQ ID NO: 1439243 - DNA, 15 bp, Homo sapiens
ttttattcaaaagac

SEQ ID NO: 1439244 - DNA, 15 bp, Homo sapiens
cttttattcaaaaga

SEQ ID NO: 1439245 - DNA, 15 bp, Homo sapiens
gcttttattcaaaag

SEQ ID NO: 1439246 - DNA, 15 bp, Homo sapiens
ggcttttattcaaaa

SEQ ID NO: 1439247 - DNA, 15 bp, Homo sapiens
tggcttttattcaaa

SEQ ID NO: 1439248 - DNA, 15 bp, Homo sapiens
atggcttttattcaa

SEQ ID NO: 1439249 - DNA, 15 bp, Homo sapiens
aatggcttttattca

SEQ ID NO: 1439250 - DNA, 15 bp, Homo sapiens
aaatggcttttattc

SEQ ID NO: 1439251 - DNA, 15 bp, Homo sapiens
aaaatggcttttatt

SEQ ID NO: 1439252 - DNA, 15 bp, Homo sapiens
taaaatggcttttat

SEQ ID NO: 1439253 - DNA, 15 bp, Homo sapiens
ttaaaatggctttta

SEQ ID NO: 1439254 - DNA, 15 bp, Homo sapiens
gttaaaatggctttt

SEQ ID NO: 1439255 - DNA, 15 bp, Homo sapiens
agttaaaatggcttt

SEQ ID NO: 1439256 - DNA, 15 bp, Homo sapiens
cagttaaaatggctt

SEQ ID NO: 1439257 - DNA, 15 bp, Homo sapiens
ccagttaaaatggct

SEQ ID NO: 1439258 - DNA, 15 bp, Homo sapiens
cccagttaaaatggc

SEQ ID NO: 1439259 - DNA, 15 bp, Homo sapiens
ccccagttaaaatgg

SEQ ID NO: 1439260 - DNA, 15 bp, Homo sapiens
accccagttaaaatg

SEQ ID NO: 1439261 - DNA, 15 bp, Homo sapiens
caccccagttaaaat

SEQ ID NO: 1439262 - DNA, 15 bp, Homo sapiens
tcaccccagttaaaa

SEQ ID NO: 1439263 - DNA, 15 bp, Homo sapiens
ctcaccccagttaaa

SEQ ID NO: 1439264 - DNA, 15 bp, Homo sapiens
tctcaccccagttaa

SEQ ID NO: 1439265 - DNA, 15 bp, Homo sapiens
atctcaccccagtta

SEQ ID NO: 1439266 - DNA, 15 bp, Homo sapiens
catctcaccccagtt

SEQ ID NO: 1439267 - DNA, 15 bp, Homo sapiens
tcatctcaccccagt

SEQ ID NO: 1439268 - DNA, 15 bp, Homo sapiens
atcatctcaccccag

SEQ ID NO: 1439269 - DNA, 15 bp, Homo sapiens
tatcatctcacccca

SEQ ID NO: 1439270 - DNA, 15 bp, Homo sapiens
atatcatctcacccc

SEQ ID NO: 1439271 - DNA, 15 bp, Homo sapiens
gatatcatctcaccc

SEQ ID NO: 1439272 - DNA, 15 bp, Homo sapiens
agatatcatctcacc

SEQ ID NO: 1439273 - DNA, 15 bp, Homo sapiens
gagatatcatctcac

SEQ ID NO: 1439274 - DNA, 15 bp, Homo sapiens
tgagatatcatctca

SEQ ID NO: 1439275 - DNA, 15 bp, Homo sapiens
atgagatatcatctc

SEQ ID NO: 1439276 - DNA, 15 bp, Homo sapiens
aatgagatatcatct

SEQ ID NO: 1439277 - DNA, 15 bp, Homo sapiens
caatgagatatcatc

SEQ ID NO: 1439278 - DNA, 15 bp, Homo sapiens
acaatgagatatcat

SEQ ID NO: 1439279 - DNA, 15 bp, Homo sapiens
tacaatgagatatca

SEQ ID NO: 1439280 - DNA, 15 bp, Homo sapiens
ctacaatgagatatc

SEQ ID NO: 1439281 - DNA, 15 bp, Homo sapiens
actacaatgagatat

SEQ ID NO: 1439282 - DNA, 15 bp, Homo sapiens
aactacaatgagata

SEQ ID NO: 1439283 - DNA, 15 bp, Homo sapiens
aaactacaatgagat

SEQ ID NO: 1439284 - DNA, 15 bp, Homo sapiens
aaaactacaatgaga

SEQ ID NO: 1439285 - DNA, 15 bp, Homo sapiens
caaaactacaatgag

SEQ ID NO: 1439286 - DNA, 15 bp, Homo sapiens
tcaaaactacaatga

SEQ ID NO: 1439287 - DNA, 15 bp, Homo sapiens
atcaaaactacaatg

SEQ ID NO: 1439288 - DNA, 15 bp, Homo sapiens
aatcaaaactacaat

SEQ ID NO: 1439289 - DNA, 15 bp, Homo sapiens
aaatcaaaactacaa

SEQ ID NO: 1439290 - DNA, 15 bp, Homo sapiens
caaatcaaaactaca

SEQ ID NO: 1439291 - DNA, 15 bp, Homo sapiens
gcaaatcaaaactac

SEQ ID NO: 1439292 - DNA, 15 bp, Homo sapiens
tgcaaatcaaaacta

SEQ ID NO: 1439293 - DNA, 15 bp, Homo sapiens
atgcaaatcaaaact

SEQ ID NO: 1439294 - DNA, 15 bp, Homo sapiens
tatcactgatcatca

SEQ ID NO: 1439295 - DNA, 15 bp, Homo sapiens
atatcactgatcatc

SEQ ID NO: 1439296 - DNA, 15 bp, Homo sapiens
aatatcactgatcat

SEQ ID NO: 1439297 - DNA, 15 bp, Homo sapiens
caatatcactgatca

SEQ ID NO: 1439298 - DNA, 15 bp, Homo sapiens
tcaatatcactgatc

SEQ ID NO: 1439299 - DNA, 15 bp, Homo sapiens
ctcaatatcactgat

SEQ ID NO: 1439300 - DNA, 15 bp, Homo sapiens
actcaatatcactga

SEQ ID NO: 1439301 - DNA, 15 bp, Homo sapiens
tactcaatatcactg

SEQ ID NO: 1439302 - DNA, 15 bp, Homo sapiens
gtactcaatatcact

SEQ ID NO: 1439303 - DNA, 15 bp, Homo sapiens
ggtactcaatatcac

SEQ ID NO: 1439304 - DNA, 15 bp, Homo sapiens
aggtactcaatatca

SEQ ID NO: 1439305 - DNA, 15 bp, Homo sapiens
aaggtactcaatatc

SEQ ID NO: 1439306 - DNA, 15 bp, Homo sapiens
aaaggtactcaatat

SEQ ID NO: 1439307 - DNA, 15 bp, Homo sapiens
aaaaggtactcaata

SEQ ID NO: 1439308 - DNA, 15 bp, Homo sapiens
gaaaaggtactcaat

SEQ ID NO: 1439309 - DNA, 15 bp, Homo sapiens
tgaaaaggtactcaa

SEQ ID NO: 1439310 - DNA, 15 bp, Homo sapiens
atgaaaaggtactca

SEQ ID NO: 1439311 - DNA, 15 bp, Homo sapiens
tatgaaaaggtactc

SEQ ID NO: 1439312 - DNA, 15 bp, Homo sapiens
atatgaaaaggtact

SEQ ID NO: 1439313 - DNA, 15 bp, Homo sapiens
catatgaaaaggtac

SEQ ID NO: 1439314 - DNA, 15 bp, Homo sapiens
gcatatgaaaaggta

SEQ ID NO: 1439315 - DNA, 15 bp, Homo sapiens
ggcatatgaaaaggt

SEQ ID NO: 1439316 - DNA, 15 bp, Homo sapiens
aggcatatgaaaagg

SEQ ID NO: 1439317 - DNA, 15 bp, Homo sapiens
caggcatatgaaaag

SEQ ID NO: 1439318 - DNA, 15 bp, Homo sapiens
acaggcatatgaaaa

SEQ ID NO: 1439319 - DNA, 15 bp, Homo sapiens
aacaggcatatgaaa

SEQ ID NO: 1439320 - DNA, 15 bp, Homo sapiens
aaacaggcatatgaa

SEQ ID NO: 1439321 - DNA, 15 bp, Homo sapiens
caaacaggcatatga

SEQ ID NO: 1439322 - DNA, 15 bp, Homo sapiens
gcaaacaggcatatg

SEQ ID NO: 1439323 - DNA, 15 bp, Homo sapiens
ggcaaacaggcatat

SEQ ID NO: 1439324 - DNA, 15 bp, Homo sapiens
tggcaaacaggcata

SEQ ID NO: 1439325 - DNA, 15 bp, Homo sapiens
atggcaaacaggcat

SEQ ID NO: 1439326 - DNA, 15 bp, Homo sapiens
aatggcaaacaggca

SEQ ID NO: 1439327 - DNA, 15 bp, Homo sapiens
aaatggcaaacaggc

SEQ ID NO: 1439328 - DNA, 15 bp, Homo sapiens
caaatggcaaacagg

SEQ ID NO: 1439329 - DNA, 15 bp, Homo sapiens
acaaatggcaaacag

SEQ ID NO: 1439330 - DNA, 15 bp, Homo sapiens
tacaaatggcaaaca

SEQ ID NO: 1439331 - DNA, 15 bp, Homo sapiens
atacaaatggcaaac

SEQ ID NO: 1439332 - DNA, 15 bp, Homo sapiens
catacaaatggcaaa

SEQ ID NO: 1439333 - DNA, 15 bp, Homo sapiens
acatacaaatggcaa

SEQ ID NO: 1439334 - DNA, 15 bp, Homo sapiens
gacatacaaatggca

SEQ ID NO: 1439335 - DNA, 15 bp, Homo sapiens
agacatacaaatggc

SEQ ID NO: 1439336 - DNA, 15 bp, Homo sapiens
aagacatacaaatgg

SEQ ID NO: 1439337 - DNA, 15 bp, Homo sapiens
caagacatacaaatg

SEQ ID NO: 1439338 - DNA, 15 bp, Homo sapiens
tcaagacatacaaat

SEQ ID NO: 1439339 - DNA, 15 bp, Homo sapiens
atcaagacatacaaa

SEQ ID NO: 1439340 - DNA, 15 bp, Homo sapiens
aatcaagacatacaa

SEQ ID NO: 1439341 - DNA, 15 bp, Homo sapiens
taatcaagacataca

SEQ ID NO: 1439342 - DNA, 15 bp, Homo sapiens
ataatcaagacatac

SEQ ID NO: 1439343 - DNA, 15 bp, Homo sapiens
aataatcaagacata

SEQ ID NO: 1439344 - DNA, 15 bp, Homo sapiens
taataatcaagacat

SEQ ID NO: 1439345 - DNA, 15 bp, Homo sapiens
ttaataatcaagaca

SEQ ID NO: 1439346 - DNA, 15 bp, Homo sapiens
attaataatcaagac

SEQ ID NO: 1439347 - DNA, 15 bp, Homo sapiens
aattaataatcaaga

SEQ ID NO: 1439348 - DNA, 15 bp, Homo sapiens
aaattaataatcaag

SEQ ID NO: 1439349 - DNA, 15 bp, Homo sapiens
aaaattaataatcaa

SEQ ID NO: 1439350 - DNA, 15 bp, Homo sapiens
aaaaattaataatca

SEQ ID NO: 1439351 - DNA, 15 bp, Homo sapiens
taaaaattaataatc

SEQ ID NO: 1439352 - DNA, 15 bp, Homo sapiens
ttaaaaattaataat

SEQ ID NO: 1439353 - DNA, 15 bp, Homo sapiens
attaaaaattaataa

SEQ ID NO: 1439354 - DNA, 15 bp, Homo sapiens
aattaaaaattaata

SEQ ID NO: 1439355 - DNA, 15 bp, Homo sapiens
taattaaaaattaat

SEQ ID NO: 1439356 - DNA, 15 bp, Homo sapiens
ctaattaaaaattaa

SEQ ID NO: 1439357 - DNA, 15 bp, Homo sapiens
tctaattaaaaatta

SEQ ID NO: 1439358 - DNA, 15 bp, Homo sapiens
ttctaattaaaaatt

SEQ ID NO: 1439359 - DNA, 15 bp, Homo sapiens
attctaattaaaaat

SEQ ID NO: 1439360 - DNA, 15 bp, Homo sapiens
tattctaattaaaaa

SEQ ID NO: 1439361 - DNA, 15 bp, Homo sapiens
ctattctaattaaaa

SEQ ID NO: 1439362 - DNA, 15 bp, Homo sapiens
gctattctaattaaa

SEQ ID NO: 1439363 - DNA, 15 bp, Homo sapiens
tgctattctaattaa

SEQ ID NO: 1439364 - DNA, 15 bp, Homo sapiens
ctgctattctaatta

SEQ ID NO: 1439365 - DNA, 15 bp, Homo sapiens
actgctattctaatt

SEQ ID NO: 1439366 - DNA, 15 bp, Homo sapiens
cactgctattctaat

SEQ ID NO: 1439367 - DNA, 15 bp, Homo sapiens
acactgctattctaa

SEQ ID NO: 1439368 - DNA, 15 bp, Homo sapiens
cacactgctattcta

SEQ ID NO: 1439369 - DNA, 15 bp, Homo sapiens
tcacactgctattct

SEQ ID NO: 1439370 - DNA, 15 bp, Homo sapiens
gtcacactgctattc

SEQ ID NO: 1439371 - DNA, 15 bp, Homo sapiens
agtcacactgctatt

SEQ ID NO: 1439372 - DNA, 15 bp, Homo sapiens
aagtcacactgctat

SEQ ID NO: 1439373 - DNA, 15 bp, Homo sapiens
gaagtcacactgcta

SEQ ID NO: 1439374 - DNA, 15 bp, Homo sapiens
tgaagtcacactgct

SEQ ID NO: 1439375 - DNA, 15 bp, Homo sapiens
ctgaagtcacactgc

SEQ ID NO: 1439376 - DNA, 15 bp, Homo sapiens
tctgaagtcacactg

SEQ ID NO: 1439377 - DNA, 15 bp, Homo sapiens
atctgaagtcacact

SEQ ID NO: 1439378 - DNA, 15 bp, Homo sapiens
catctgaagtcacac

SEQ ID NO: 1439379 - DNA, 15 bp, Homo sapiens
acatctgaagtcaca

SEQ ID NO: 1439380 - DNA, 15 bp, Homo sapiens
cacatctgaagtcac

SEQ ID NO: 1439381 - DNA, 15 bp, Homo sapiens
gcacatctgaagtca

SEQ ID NO: 1439382 - DNA, 15 bp, Homo sapiens
ggcacatctgaagtc

SEQ ID NO: 1439383 - DNA, 15 bp, Homo sapiens
aggcacatctgaagt

SEQ ID NO: 1439384 - DNA, 15 bp, Homo sapiens
gaggcacatctgaag

SEQ ID NO: 1439385 - DNA, 15 bp, Homo sapiens
tgaggcacatctgaa

SEQ ID NO: 1439386 - DNA, 15 bp, Homo sapiens
ctgaggcacatctga

SEQ ID NO: 1439387 - DNA, 15 bp, Homo sapiens
actgaggcacatctg

SEQ ID NO: 1439388 - DNA, 15 bp, Homo sapiens
aactgaggcacatct

SEQ ID NO: 1439389 - DNA, 15 bp, Homo sapiens
gaactgaggcacatc

SEQ ID NO: 1439390 - DNA, 15 bp, Homo sapiens
ggaactgaggcacat

SEQ ID NO: 1439391 - DNA, 15 bp, Homo sapiens
gggaactgaggcaca

SEQ ID NO: 1439392 - DNA, 15 bp, Homo sapiens
agggaactgaggcac

SEQ ID NO: 1439393 - DNA, 15 bp, Homo sapiens
gagggaactgaggca

SEQ ID NO: 1439394 - DNA, 15 bp, Homo sapiens
tgagggaactgaggc

SEQ ID NO: 1439395 - DNA, 15 bp, Homo sapiens
gtgagggaactgagg

SEQ ID NO: 1439396 - DNA, 15 bp, Homo sapiens
aggtgagggaactga

SEQ ID NO: 1439397 - DNA, 15 bp, Homo sapiens
caggtgagggaactg

SEQ ID NO: 1439398 - DNA, 15 bp, Homo sapiens
acaggtgagggaact

SEQ ID NO: 1439399 - DNA, 15 bp, Homo sapiens
tacaggtgagggaac

SEQ ID NO: 1439400 - DNA, 15 bp, Homo sapiens
ttacaggtgagggaa

SEQ ID NO: 1439401 - DNA, 15 bp, Homo sapiens
tttacaggtgaggga

SEQ ID NO: 1439402 - DNA, 15 bp, Homo sapiens
ttttacaggtgaggg

SEQ ID NO: 1439403 - DNA, 15 bp, Homo sapiens
attttacaggtgagg

SEQ ID NO: 1439404 - DNA, 15 bp, Homo sapiens
tcattttacaggtga

SEQ ID NO: 1439405 - DNA, 15 bp, Homo sapiens
ctcattttacaggtg

SEQ ID NO: 1439406 - DNA, 15 bp, Homo sapiens
tctcattttacaggt

SEQ ID NO: 1439407 - DNA, 15 bp, Homo sapiens
ttctcattttacagg

SEQ ID NO: 1439408 - DNA, 15 bp, Homo sapiens
attctcattttacag

SEQ ID NO: 1439409 - DNA, 15 bp, Homo sapiens
aattctcattttaca

SEQ ID NO: 1439410 - DNA, 15 bp, Homo sapiens
taattctcattttac

SEQ ID NO: 1439411 - DNA, 15 bp, Homo sapiens
ataattctcatttta

SEQ ID NO: 1439412 - DNA, 15 bp, Homo sapiens
tataattctcatttt

SEQ ID NO: 1439413 - DNA, 15 bp, Homo sapiens
ttataattctcattt

SEQ ID NO: 1439414 - DNA, 15 bp, Homo sapiens
attataattctcatt

SEQ ID NO: 1439415 - DNA, 15 bp, Homo sapiens
tattataattctcat

SEQ ID NO: 1439416 - DNA, 15 bp, Homo sapiens
ctattataattctca

SEQ ID NO: 1439417 - DNA, 15 bp, Homo sapiens
tctattataattctc

SEQ ID NO: 1439418 - DNA, 15 bp, Homo sapiens
ctctattataattct

SEQ ID NO: 1439419 - DNA, 15 bp, Homo sapiens
gctctattataattc

SEQ ID NO: 1439420 - DNA, 15 bp, Homo sapiens
ggctctattataatt

SEQ ID NO: 1439421 - DNA, 15 bp, Homo sapiens
aggctctattataat

SEQ ID NO: 1439422 - DNA, 15 bp, Homo sapiens
caggctctattataa

SEQ ID NO: 1439423 - DNA, 15 bp, Homo sapiens
acaggctctattata

SEQ ID NO: 1439424 - DNA, 15 bp, Homo sapiens
gacaggctctattat

SEQ ID NO: 1439425 - DNA, 15 bp, Homo sapiens
agacaggctctatta

SEQ ID NO: 1439426 - DNA, 15 bp, Homo sapiens
gagacaggctctatt

SEQ ID NO: 1439427 - DNA, 15 bp, Homo sapiens
ggagacaggctctat

SEQ ID NO: 1439428 - DNA, 15 bp, Homo sapiens
aggagacaggctcta

SEQ ID NO: 1439429 - DNA, 15 bp, Homo sapiens
aaggagacaggctct

SEQ ID NO: 1439430 - DNA, 15 bp, Homo sapiens
caaggagacaggctc

SEQ ID NO: 1439431 - DNA, 15 bp, Homo sapiens
ccaaggagacaggct

SEQ ID NO: 1439432 - DNA, 15 bp, Homo sapiens
cccaaggagacaggc

SEQ ID NO: 1439433 - DNA, 15 bp, Homo sapiens
acccaaggagacagg

SEQ ID NO: 1439434 - DNA, 15 bp, Homo sapiens
aacccaaggagacag

SEQ ID NO: 1439435 - DNA, 15 bp, Homo sapiens
taacccaaggagaca

SEQ ID NO: 1439436 - DNA, 15 bp, Homo sapiens
ataacccaaggagac

SEQ ID NO: 1439437 - DNA, 15 bp, Homo sapiens
cataacccaaggaga

SEQ ID NO: 1439438 - DNA, 15 bp, Homo sapiens
tcataacccaaggag

SEQ ID NO: 1439439 - DNA, 15 bp, Homo sapiens
ctcataacccaagga

SEQ ID NO: 1439440 - DNA, 15 bp, Homo sapiens
cctcataacccaagg

SEQ ID NO: 1439441 - DNA, 15 bp, Homo sapiens
tcctcataacccaag

SEQ ID NO: 1439442 - DNA, 15 bp, Homo sapiens
ctcctcataacccaa

SEQ ID NO: 1439443 - DNA, 15 bp, Homo sapiens
actcctcataaccca

SEQ ID NO: 1439444 - DNA, 15 bp, Homo sapiens
tactcctcataaccc

SEQ ID NO: 1439445 - DNA, 15 bp, Homo sapiens
ttactcctcataacc

SEQ ID NO: 1439446 - DNA, 15 bp, Homo sapiens
attactcctcataac

SEQ ID NO: 1439447 - DNA, 15 bp, Homo sapiens
cattactcctcataa

SEQ ID NO: 1439448 - DNA, 15 bp, Homo sapiens
tcattactcctcata

SEQ ID NO: 1439449 - DNA, 15 bp, Homo sapiens
ctcattactcctcat

SEQ ID NO: 1439450 - DNA, 15 bp, Homo sapiens
actcattactcctca

SEQ ID NO: 1439451 - DNA, 15 bp, Homo sapiens
aactcattactcctc

SEQ ID NO: 1439452 - DNA, 15 bp, Homo sapiens
taactcattactcct

SEQ ID NO: 1439453 - DNA, 15 bp, Homo sapiens
ttaactcattactcc

SEQ ID NO: 1439454 - DNA, 15 bp, Homo sapiens
attaactcattactc

SEQ ID NO: 1439455 - DNA, 15 bp, Homo sapiens
tattaactcattact

SEQ ID NO: 1439456 - DNA, 15 bp, Homo sapiens
atattaactcattac

SEQ ID NO: 1439457 - DNA, 15 bp, Homo sapiens
tatattaactcatta

SEQ ID NO: 1439458 - DNA, 15 bp, Homo sapiens
atatattaactcatt

SEQ ID NO: 1439459 - DNA, 15 bp, Homo sapiens
catatattaactcat

SEQ ID NO: 1439460 - DNA, 15 bp, Homo sapiens
ccatatattaactca

SEQ ID NO: 1439461 - DNA, 15 bp, Homo sapiens
tccatatattaactc

SEQ ID NO: 1439462 - DNA, 15 bp, Homo sapiens
ttccatatattaact

SEQ ID NO: 1439463 - DNA, 15 bp, Homo sapiens
tttccatatattaac

SEQ ID NO: 1439464 - DNA, 15 bp, Homo sapiens
ctttccatatattaa

SEQ ID NO: 1439465 - DNA, 15 bp, Homo sapiens
gctttccatatatta

SEQ ID NO: 1439466 - DNA, 15 bp, Homo sapiens
agctttccatatatt

SEQ ID NO: 1439467 - DNA, 15 bp, Homo sapiens
gagctttccatatat

SEQ ID NO: 1439468 - DNA, 15 bp, Homo sapiens
ggagctttccatata

SEQ ID NO: 1439469 - DNA, 15 bp, Homo sapiens
aggagctttccatat

SEQ ID NO: 1439470 - DNA, 15 bp, Homo sapiens
taggagctttccata

SEQ ID NO: 1439471 - DNA, 15 bp, Homo sapiens
ctaggagctttccat

SEQ ID NO: 1439472 - DNA, 15 bp, Homo sapiens
cctaggagctttcca

SEQ ID NO: 1439473 - DNA, 15 bp, Homo sapiens
tcctaggagctttcc

SEQ ID NO: 1439474 - DNA, 15 bp, Homo sapiens
atcctaggagctttc

SEQ ID NO: 1439475 - DNA, 15 bp, Homo sapiens
tatcctaggagcttt

SEQ ID NO: 1439476 - DNA, 15 bp, Homo sapiens
ctatcctaggagctt

SEQ ID NO: 1439477 - DNA, 15 bp, Homo sapiens
actatcctaggagct

SEQ ID NO: 1439478 - DNA, 15 bp, Homo sapiens
aactatcctaggagc

SEQ ID NO: 1439479 - DNA, 15 bp, Homo sapiens
gaactatcctaggag

SEQ ID NO: 1439480 - DNA, 15 bp, Homo sapiens
ggaactatcctagga

SEQ ID NO: 1439481 - DNA, 15 bp, Homo sapiens
aggaactatcctagg

SEQ ID NO: 1439482 - DNA, 15 bp, Homo sapiens
aaggaactatcctag

SEQ ID NO: 1439483 - DNA, 15 bp, Homo sapiens
caaggaactatccta

SEQ ID NO: 1439484 - DNA, 15 bp, Homo sapiens
gcaaggaactatcct

SEQ ID NO: 1439485 - DNA, 15 bp, Homo sapiens
tgcaaggaactatcc

SEQ ID NO: 1439486 - DNA, 15 bp, Homo sapiens
atgcaaggaactatc

SEQ ID NO: 1439487 - DNA, 15 bp, Homo sapiens
tatgcaaggaactat

SEQ ID NO: 1439488 - DNA, 15 bp, Homo sapiens
atatgcaaggaacta

SEQ ID NO: 1439489 - DNA, 15 bp, Homo sapiens
catatgcaaggaact

SEQ ID NO: 1439490 - DNA, 15 bp, Homo sapiens
ccatatgcaaggaac

SEQ ID NO: 1439491 - DNA, 15 bp, Homo sapiens
accatatgcaaggaa

SEQ ID NO: 1439492 - DNA, 15 bp, Homo sapiens
taccatatgcaagga

SEQ ID NO: 1439493 - DNA, 15 bp, Homo sapiens
ttaccatatgcaagg

SEQ ID NO: 1439494 - DNA, 15 bp, Homo sapiens
cttaccatatgcaag

SEQ ID NO: 1439495 - DNA, 15 bp, Homo sapiens
gcttaccatatgcaa

SEQ ID NO: 1439496 - DNA, 15 bp, Homo sapiens
ggcttaccatatgca

SEQ ID NO: 1439497 - DNA, 15 bp, Homo sapiens
aggcttaccatatgc

SEQ ID NO: 1439498 - DNA, 15 bp, Homo sapiens
aaggcttaccatatg

SEQ ID NO: 1439499 - DNA, 15 bp, Homo sapiens
gaaggcttaccatat

SEQ ID NO: 1439500 - DNA, 15 bp, Homo sapiens
tgaaggcttaccata

SEQ ID NO: 1439501 - DNA, 15 bp, Homo sapiens
ctgaaggcttaccat

SEQ ID NO: 1439502 - DNA, 15 bp, Homo sapiens
actgaaggcttacca

SEQ ID NO: 1439503 - DNA, 15 bp, Homo sapiens
cactgaaggcttacc

SEQ ID NO: 1439504 - DNA, 15 bp, Homo sapiens
tcactgaaggcttac

SEQ ID NO: 1439505 - DNA, 15 bp, Homo sapiens
ttcactgaaggctta

SEQ ID NO: 1439506 - DNA, 15 bp, Homo sapiens
attcactgaaggctt

SEQ ID NO: 1439507 - DNA, 15 bp, Homo sapiens
cattcactgaaggct

SEQ ID NO: 1439508 - DNA, 15 bp, Homo sapiens
acattcactgaaggc

SEQ ID NO: 1439509 - DNA, 15 bp, Homo sapiens
aacattcactgaagg

SEQ ID NO: 1439510 - DNA, 15 bp, Homo sapiens
aaacattcactgaag

SEQ ID NO: 1439511 - DNA, 15 bp, Homo sapiens
caaacattcactgaa

SEQ ID NO: 1439512 - DNA, 15 bp, Homo sapiens
gcaaacattcactga

SEQ ID NO: 1439513 - DNA, 15 bp, Homo sapiens
agcaaacattcactg

SEQ ID NO: 1439514 - DNA, 15 bp, Homo sapiens
gagcaaacattcact

SEQ ID NO: 1439515 - DNA, 15 bp, Homo sapiens
agagcaaacattcac

SEQ ID NO: 1439516 - DNA, 15 bp, Homo sapiens
aagagcaaacattca

SEQ ID NO: 1439517 - DNA, 15 bp, Homo sapiens
caagagcaaacattc

SEQ ID NO: 1439518 - DNA, 15 bp, Homo sapiens
acaagagcaaacatt

SEQ ID NO: 1439519 - DNA, 15 bp, Homo sapiens
aacaagagcaaacat

SEQ ID NO: 1439520 - DNA, 15 bp, Homo sapiens
taacaagagcaaaca

SEQ ID NO: 1439521 - DNA, 15 bp, Homo sapiens
ataacaagagcaaac

SEQ ID NO: 1439522 - DNA, 15 bp, Homo sapiens
aataacaagagcaaa

SEQ ID NO: 1439523 - DNA, 15 bp, Homo sapiens
taataacaagagcaa

SEQ ID NO: 1439524 - DNA, 15 bp, Homo sapiens
ataataacaagagca

SEQ ID NO: 1439525 - DNA, 15 bp, Homo sapiens
cataataacaagagc

SEQ ID NO: 1439526 - DNA, 15 bp, Homo sapiens
tcataataacaagag

SEQ ID NO: 1439527 - DNA, 15 bp, Homo sapiens
ttcataataacaaga

SEQ ID NO: 1439528 - DNA, 15 bp, Homo sapiens
gttcataataacaag

SEQ ID NO: 1439529 - DNA, 15 bp, Homo sapiens
tgttcataataacaa

SEQ ID NO: 1439530 - DNA, 15 bp, Homo sapiens
atgttcataataaca

SEQ ID NO: 1439531 - DNA, 15 bp, Homo sapiens
tatgttcataataac

SEQ ID NO: 1439532 - DNA, 15 bp, Homo sapiens
ctatgttcataataa

SEQ ID NO: 1439533 - DNA, 15 bp, Homo sapiens
actatgttcataata

SEQ ID NO: 1439534 - DNA, 15 bp, Homo sapiens
aactatgttcataat

SEQ ID NO: 1439535 - DNA, 15 bp, Homo sapiens
aaactatgttcataa

SEQ ID NO: 1439536 - DNA, 15 bp, Homo sapiens
aaaactatgttcata

SEQ ID NO: 1439537 - DNA, 15 bp, Homo sapiens
caaaactatgttcat

SEQ ID NO: 1439538 - DNA, 15 bp, Homo sapiens
tcaaaactatgttca

SEQ ID NO: 1439539 - DNA, 15 bp, Homo sapiens
ttcaaaactatgttc

SEQ ID NO: 1439540 - DNA, 15 bp, Homo sapiens
tttcaaaactatgtt

SEQ ID NO: 1439541 - DNA, 15 bp, Homo sapiens
ttttcaaaactatgt

SEQ ID NO: 1439542 - DNA, 15 bp, Homo sapiens
attttcaaaactatg

SEQ ID NO: 1439543 - DNA, 15 bp, Homo sapiens
gattttcaaaactat

SEQ ID NO: 1439544 - DNA, 15 bp, Homo sapiens
tgattttcaaaacta

SEQ ID NO: 1439545 - DNA, 15 bp, Homo sapiens
ttgattttcaaaact

SEQ ID NO: 1439546 - DNA, 15 bp, Homo sapiens
tttgattttcaaaac

SEQ ID NO: 1439547 - DNA, 15 bp, Homo sapiens
atttgattttcaaaa

SEQ ID NO: 1439548 - DNA, 15 bp, Homo sapiens
aatttgattttcaaa

SEQ ID NO: 1439549 - DNA, 15 bp, Homo sapiens
caatttgattttcaa

SEQ ID NO: 1439550 - DNA, 15 bp, Homo sapiens
gcaatttgattttca

SEQ ID NO: 1439551 - DNA, 15 bp, Homo sapiens
tgcaatttgattttc

SEQ ID NO: 1439552 - DNA, 15 bp, Homo sapiens
gtgcaatttgatttt

SEQ ID NO: 1439553 - DNA, 15 bp, Homo sapiens
agtgcaatttgattt

SEQ ID NO: 1439554 - DNA, 15 bp, Homo sapiens
cagtgcaatttgatt

SEQ ID NO: 1439555 - DNA, 15 bp, Homo sapiens
acagtgcaatttgat

SEQ ID NO: 1439556 - DNA, 15 bp, Homo sapiens
tacagtgcaatttga

SEQ ID NO: 1439557 - DNA, 15 bp, Homo sapiens
gtacagtgcaatttg

SEQ ID NO: 1439558 - DNA, 15 bp, Homo sapiens
agtacagtgcaattt

SEQ ID NO: 1439559 - DNA, 15 bp, Homo sapiens
aagtacagtgcaatt

SEQ ID NO: 1439560 - DNA, 15 bp, Homo sapiens
aaagtacagtgcaat

SEQ ID NO: 1439561 - DNA, 15 bp, Homo sapiens
aaaagtacagtgcaa

SEQ ID NO: 1439562 - DNA, 15 bp, Homo sapiens
taaaagtacagtgca

SEQ ID NO: 1439563 - DNA, 15 bp, Homo sapiens
ataaaagtacagtgc

SEQ ID NO: 1439564 - DNA, 15 bp, Homo sapiens
aataaaagtacagtg

SEQ ID NO: 1439565 - DNA, 15 bp, Homo sapiens
aaataaaagtacagt

SEQ ID NO: 1439566 - DNA, 15 bp, Homo sapiens
caaataaaagtacag

SEQ ID NO: 1439567 - DNA, 15 bp, Homo sapiens
tcaaataaaagtaca

SEQ ID NO: 1439568 - DNA, 15 bp, Homo sapiens
ctcaaataaaagtac

SEQ ID NO: 1439569 - DNA, 15 bp, Homo sapiens
cctcaaataaaagta

SEQ ID NO: 1439570 - DNA, 15 bp, Homo sapiens
ccctcaaataaaagt

SEQ ID NO: 1439571 - DNA, 15 bp, Homo sapiens
accctcaaataaaag

SEQ ID NO: 1439572 - DNA, 15 bp, Homo sapiens
taccctcaaataaaa

SEQ ID NO: 1439573 - DNA, 15 bp, Homo sapiens
ttaccctcaaataaa

SEQ ID NO: 1439574 - DNA, 15 bp, Homo sapiens
cttaccctcaaataa

SEQ ID NO: 1439575 - DNA, 15 bp, Homo sapiens
ccttaccctcaaata

SEQ ID NO: 1439576 - DNA, 15 bp, Homo sapiens
tccttaccctcaaat

SEQ ID NO: 1439577 - DNA, 15 bp, Homo sapiens
ctccttaccctcaaa

SEQ ID NO: 1439578 - DNA, 15 bp, Homo sapiens
actccttaccctcaa

SEQ ID NO: 1439579 - DNA, 15 bp, Homo sapiens
tactccttaccctca

SEQ ID NO: 1439580 - DNA, 15 bp, Homo sapiens
ctactccttaccctc

SEQ ID NO: 1439581 - DNA, 15 bp, Homo sapiens
actactccttaccct

SEQ ID NO: 1439582 - DNA, 15 bp, Homo sapiens
tactactccttaccc

SEQ ID NO: 1439583 - DNA, 15 bp, Homo sapiens
gtactactccttacc

SEQ ID NO: 1439584 - DNA, 15 bp, Homo sapiens
agtactactccttac

SEQ ID NO: 1439585 - DNA, 15 bp, Homo sapiens
gagtactactcctta

SEQ ID NO: 1439586 - DNA, 15 bp, Homo sapiens
ggagtactactcctt

SEQ ID NO: 1439587 - DNA, 15 bp, Homo sapiens
tggagtactactcct

SEQ ID NO: 1439588 - DNA, 15 bp, Homo sapiens
gtggagtactactcc

SEQ ID NO: 1439589 - DNA, 15 bp, Homo sapiens
agtggagtactactc

SEQ ID NO: 1439590 - DNA, 15 bp, Homo sapiens
cagtggagtactact

SEQ ID NO: 1439591 - DNA, 15 bp, Homo sapiens
gcagtggagtactac

SEQ ID NO: 1439592 - DNA, 15 bp, Homo sapiens
agcagtggagtacta

SEQ ID NO: 1439593 - DNA, 15 bp, Homo sapiens
gagcagtggagtact

SEQ ID NO: 1439594 - DNA, 15 bp, Homo sapiens
ggagcagtggagtac

SEQ ID NO: 1439595 - DNA, 15 bp, Homo sapiens
tggagcagtggagta

SEQ ID NO: 1439596 - DNA, 15 bp, Homo sapiens
ttggagcagtggagt

SEQ ID NO: 1439597 - DNA, 15 bp, Homo sapiens
tttggagcagtggag

SEQ ID NO: 1439598 - DNA, 15 bp, Homo sapiens
gtttggagcagtgga

SEQ ID NO: 1439599 - DNA, 15 bp, Homo sapiens
ggtttggagcagtgg

SEQ ID NO: 1439600 - DNA, 15 bp, Homo sapiens
gggtttggagcagtg

SEQ ID NO: 1439601 - DNA, 15 bp, Homo sapiens
agggtttggagcagt

SEQ ID NO: 1439602 - DNA, 15 bp, Homo sapiens
aagggtttggagcag

SEQ ID NO: 1439603 - DNA, 15 bp, Homo sapiens
caagggtttggagca

SEQ ID NO: 1439604 - DNA, 15 bp, Homo sapiens
acaagggtttggagc

SEQ ID NO: 1439605 - DNA, 15 bp, Homo sapiens
cacaagggtttggag

SEQ ID NO: 1439606 - DNA, 15 bp, Homo sapiens
gcacaagggtttgga

SEQ ID NO: 1439607 - DNA, 15 bp, Homo sapiens
ggcacaagggtttgg

SEQ ID NO: 1439608 - DNA, 15 bp, Homo sapiens
tggcacaagggtttg

SEQ ID NO: 1439609 - DNA, 15 bp, Homo sapiens
gtggcacaagggttt

SEQ ID NO: 1439610 - DNA, 15 bp, Homo sapiens
ggtggcacaagggtt

SEQ ID NO: 1439611 - DNA, 15 bp, Homo sapiens
gggtggcacaagggt

SEQ ID NO: 1439612 - DNA, 15 bp, Homo sapiens
tgggtggcacaaggg

SEQ ID NO: 1439613 - DNA, 15 bp, Homo sapiens
ctgggtggcacaagg

SEQ ID NO: 1439614 - DNA, 15 bp, Homo sapiens
tctgggtggcacaag

SEQ ID NO: 1439615 - DNA, 15 bp, Homo sapiens
ctctgggtggcacaa

SEQ ID NO: 1439616 - DNA, 15 bp, Homo sapiens
tctctgggtggcaca

SEQ ID NO: 1439617 - DNA, 15 bp, Homo sapiens
atctctgggtggcac

SEQ ID NO: 1439618 - DNA, 15 bp, Homo sapiens
tatctctgggtggca

SEQ ID NO: 1439619 - DNA, 15 bp, Homo sapiens
ttatctctgggtggc

SEQ ID NO: 1439620 - DNA, 15 bp, Homo sapiens
gttatctctgggtgg

SEQ ID NO: 1439621 - DNA, 15 bp, Homo sapiens
agttatctctgggtg

SEQ ID NO: 1439622 - DNA, 15 bp, Homo sapiens
cagttatctctgggt

SEQ ID NO: 1439623 - DNA, 15 bp, Homo sapiens
ccagttatctctggg

SEQ ID NO: 1439624 - DNA, 15 bp, Homo sapiens
accagttatctctgg

SEQ ID NO: 1439625 - DNA, 15 bp, Homo sapiens
aaccagttatctctg

SEQ ID NO: 1439626 - DNA, 15 bp, Homo sapiens
aaaccagttatctct

SEQ ID NO: 1439627 - DNA, 15 bp, Homo sapiens
aaaaccagttatctc

SEQ ID NO: 1439628 - DNA, 15 bp, Homo sapiens
taaaaccagttatct

SEQ ID NO: 1439629 - DNA, 15 bp, Homo sapiens
ttaaaaccagttatc

SEQ ID NO: 1439630 - DNA, 15 bp, Homo sapiens
gttaaaaccagttat

SEQ ID NO: 1439631 - DNA, 15 bp, Homo sapiens
agttaaaaccagtta

SEQ ID NO: 1439632 - DNA, 15 bp, Homo sapiens
tagttaaaaccagtt

SEQ ID NO: 1439633 - DNA, 15 bp, Homo sapiens
atagttaaaaccagt

SEQ ID NO: 1439634 - DNA, 15 bp, Homo sapiens
aatagttaaaaccag

SEQ ID NO: 1439635 - DNA, 15 bp, Homo sapiens
aaatagttaaaacca

SEQ ID NO: 1439636 - DNA, 15 bp, Homo sapiens
aaaatagttaaaacc

SEQ ID NO: 1439637 - DNA, 15 bp, Homo sapiens
aaaaatagttaaaac

SEQ ID NO: 1439638 - DNA, 15 bp, Homo sapiens
taaaaatagttaaaa

SEQ ID NO: 1439639 - DNA, 15 bp, Homo sapiens
ctaaaaatagttaaa

SEQ ID NO: 1439640 - DNA, 15 bp, Homo sapiens
cctaaaaatagttaa

SEQ ID NO: 1439641 - DNA, 15 bp, Homo sapiens
ccctaaaaatagtta

SEQ ID NO: 1439642 - DNA, 15 bp, Homo sapiens
gccctaaaaatagtt

SEQ ID NO: 1439643 - DNA, 15 bp, Homo sapiens
agccctaaaaatagt

SEQ ID NO: 1439644 - DNA, 15 bp, Homo sapiens
aagccctaaaaatag

SEQ ID NO: 1439645 - DNA, 15 bp, Homo sapiens
aaagccctaaaaata

SEQ ID NO: 1439646 - DNA, 15 bp, Homo sapiens
aaaagccctaaaaat

SEQ ID NO: 1439647 - DNA, 15 bp, Homo sapiens
aaaaagccctaaaaa

SEQ ID NO: 1439648 - DNA, 15 bp, Homo sapiens
aaaaaagccctaaaa

SEQ ID NO: 1439649 - DNA, 15 bp, Homo sapiens
aaaaaaagccctaaa

SEQ ID NO: 1439650 - DNA, 15 bp, Homo sapiens
aaaaaaaagccctaa

SEQ ID NO: 1439651 - DNA, 15 bp, Homo sapiens
aaaaaaaaagcccta

SEQ ID NO: 1439652 - DNA, 15 bp, Homo sapiens
aaaaaaaaaagccct

SEQ ID NO: 1439653 - DNA, 15 bp, Homo sapiens
agaaaaaaaaaaaag

SEQ ID NO: 1439654 - DNA, 15 bp, Homo sapiens
accagaaaaaaaaaa

SEQ ID NO: 1439655 - DNA, 15 bp, Homo sapiens
aaccagaaaaaaaaa

SEQ ID NO: 1439656 - DNA, 15 bp, Homo sapiens
aaaccagaaaaaaaa

SEQ ID NO: 1439657 - DNA, 15 bp, Homo sapiens
aaaaccagaaaaaaa

SEQ ID NO: 1439658 - DNA, 15 bp, Homo sapiens
aaaaaccagaaaaaa

SEQ ID NO: 1439659 - DNA, 15 bp, Homo sapiens
taaaaaccagaaaaa

SEQ ID NO: 1439660 - DNA, 15 bp, Homo sapiens
gtaaaaaccagaaaa

SEQ ID NO: 1439661 - DNA, 15 bp, Homo sapiens
ggtaaaaaccagaaa

SEQ ID NO: 1439662 - DNA, 15 bp, Homo sapiens
aggtaaaaaccagaa

SEQ ID NO: 1439663 - DNA, 15 bp, Homo sapiens
gaggtaaaaaccaga

SEQ ID NO: 1439664 - DNA, 15 bp, Homo sapiens
agaggtaaaaaccag

SEQ ID NO: 1439665 - DNA, 15 bp, Homo sapiens
cagaggtaaaaacca

SEQ ID NO: 1439666 - DNA, 15 bp, Homo sapiens
acagaggtaaaaacc

SEQ ID NO: 1439667 - DNA, 15 bp, Homo sapiens
cacagaggtaaaaac

SEQ ID NO: 1439668 - DNA, 15 bp, Homo sapiens
acacagaggtaaaaa

SEQ ID NO: 1439669 - DNA, 15 bp, Homo sapiens
aacacagaggtaaaa

SEQ ID NO: 1439670 - DNA, 15 bp, Homo sapiens
aaacacagaggtaaa

SEQ ID NO: 1439671 - DNA, 15 bp, Homo sapiens
gaaacacagaggtaa

SEQ ID NO: 1439672 - DNA, 15 bp, Homo sapiens
agaaacacagaggta

SEQ ID NO: 1439673 - DNA, 15 bp, Homo sapiens
tagaaacacagaggt

SEQ ID NO: 1439674 - DNA, 15 bp, Homo sapiens
ttagaaacacagagg

SEQ ID NO: 1439675 - DNA, 15 bp, Homo sapiens
tttagaaacacagag

SEQ ID NO: 1439676 - DNA, 15 bp, Homo sapiens
gtttagaaacacaga

SEQ ID NO: 1439677 - DNA, 15 bp, Homo sapiens
tgtttagaaacacag

SEQ ID NO: 1439678 - DNA, 15 bp, Homo sapiens
ttgtttagaaacaca

SEQ ID NO: 1439679 - DNA, 15 bp, Homo sapiens
attgtttagaaacac

SEQ ID NO: 1439680 - DNA, 15 bp, Homo sapiens
tattgtttagaaaca

SEQ ID NO: 1439681 - DNA, 15 bp, Homo sapiens
ctattgtttagaaac

SEQ ID NO: 1439682 - DNA, 15 bp, Homo sapiens
cctattgtttagaaa

SEQ ID NO: 1439683 - DNA, 15 bp, Homo sapiens
acctattgtttagaa

SEQ ID NO: 1439684 - DNA, 15 bp, Homo sapiens
aacctattgtttaga

SEQ ID NO: 1439685 - DNA, 15 bp, Homo sapiens
aaacctattgtttag

SEQ ID NO: 1439686 - DNA, 15 bp, Homo sapiens
aaaacctattgttta

SEQ ID NO: 1439687 - DNA, 15 bp, Homo sapiens
gaaaacctattgttt

SEQ ID NO: 1439688 - DNA, 15 bp, Homo sapiens
agaaaacctattgtt

SEQ ID NO: 1439689 - DNA, 15 bp, Homo sapiens
cagaaaacctattgt

SEQ ID NO: 1439690 - DNA, 15 bp, Homo sapiens
tcagaaaacctattg

SEQ ID NO: 1439691 - DNA, 15 bp, Homo sapiens
atcagaaaacctatt

SEQ ID NO: 1439692 - DNA, 15 bp, Homo sapiens
catcagaaaacctat

SEQ ID NO: 1439693 - DNA, 15 bp, Homo sapiens
acatcagaaaaccta

SEQ ID NO: 1439694 - DNA, 15 bp, Homo sapiens
tacatcagaaaacct

SEQ ID NO: 1439695 - DNA, 15 bp, Homo sapiens
atacatcagaaaacc

SEQ ID NO: 1439696 - DNA, 15 bp, Homo sapiens
catacatcagaaaac

SEQ ID NO: 1439697 - DNA, 15 bp, Homo sapiens
gcatacatcagaaaa

SEQ ID NO: 1439698 - DNA, 15 bp, Homo sapiens
tgcatacatcagaaa

SEQ ID NO: 1439699 - DNA, 15 bp, Homo sapiens
ctgcatacatcagaa

SEQ ID NO: 1439700 - DNA, 15 bp, Homo sapiens
actgcatacatcaga

SEQ ID NO: 1439701 - DNA, 15 bp, Homo sapiens
aactgcatacatcag

SEQ ID NO: 1439702 - DNA, 15 bp, Homo sapiens
caactgcatacatca

SEQ ID NO: 1439703 - DNA, 15 bp, Homo sapiens
tcaactgcatacatc

SEQ ID NO: 1439704 - DNA, 15 bp, Homo sapiens
ctcaactgcatacat

SEQ ID NO: 1439705 - DNA, 15 bp, Homo sapiens
tctcaactgcataca

SEQ ID NO: 1439706 - DNA, 15 bp, Homo sapiens
atctcaactgcatac

SEQ ID NO: 1439707 - DNA, 15 bp, Homo sapiens
tatctcaactgcata

SEQ ID NO: 1439708 - DNA, 15 bp, Homo sapiens
gtatctcaactgcat

SEQ ID NO: 1439709 - DNA, 15 bp, Homo sapiens
agtatctcaactgca

SEQ ID NO: 1439710 - DNA, 15 bp, Homo sapiens
cagtatctcaactgc

SEQ ID NO: 1439711 - DNA, 15 bp, Homo sapiens
acagtatctcaactg

SEQ ID NO: 1439712 - DNA, 15 bp, Homo sapiens
aacagtatctcaact

SEQ ID NO: 1439713 - DNA, 15 bp, Homo sapiens
caacagtatctcaac

SEQ ID NO: 1439714 - DNA, 15 bp, Homo sapiens
tcaacagtatctcaa

SEQ ID NO: 1439715 - DNA, 15 bp, Homo sapiens
gtcaacagtatctca

SEQ ID NO: 1439716 - DNA, 15 bp, Homo sapiens
ggtcaacagtatctc

SEQ ID NO: 1439717 - DNA, 15 bp, Homo sapiens
tggtcaacagtatct

SEQ ID NO: 1439718 - DNA, 15 bp, Homo sapiens
gtggtcaacagtatc

SEQ ID NO: 1439719 - DNA, 15 bp, Homo sapiens
ggtggtcaacagtat

SEQ ID NO: 1439720 - DNA, 15 bp, Homo sapiens
aggtggtcaacagta

SEQ ID NO: 1439721 - DNA, 15 bp, Homo sapiens
taggtggtcaacagt

SEQ ID NO: 1439722 - DNA, 15 bp, Homo sapiens
ataggtggtcaacag

SEQ ID NO: 1439723 - DNA, 15 bp, Homo sapiens
cataggtggtcaaca

SEQ ID NO: 1439724 - DNA, 15 bp, Homo sapiens
tcataggtggtcaac

SEQ ID NO: 1439725 - DNA, 15 bp, Homo sapiens
atcataggtggtcaa

SEQ ID NO: 1439726 - DNA, 15 bp, Homo sapiens
catcataggtggtca

SEQ ID NO: 1439727 - DNA, 15 bp, Homo sapiens
ccatcataggtggtc

SEQ ID NO: 1439728 - DNA, 15 bp, Homo sapiens
tccatcataggtggt

SEQ ID NO: 1439729 - DNA, 15 bp, Homo sapiens
atccatcataggtgg

SEQ ID NO: 1439730 - DNA, 15 bp, Homo sapiens
aatccatcataggtg

SEQ ID NO: 1439731 - DNA, 15 bp, Homo sapiens
taatccatcataggt

SEQ ID NO: 1439732 - DNA, 15 bp, Homo sapiens
ataatccatcatagg

SEQ ID NO: 1439733 - DNA, 15 bp, Homo sapiens
tataatccatcatag

SEQ ID NO: 1439734 - DNA, 15 bp, Homo sapiens
atataatccatcata

SEQ ID NO: 1439735 - DNA, 15 bp, Homo sapiens
catataatccatcat

SEQ ID NO: 1439736 - DNA, 15 bp, Homo sapiens
ccatataatccatca

SEQ ID NO: 1439737 - DNA, 15 bp, Homo sapiens
tccatataatccatc

SEQ ID NO: 1439738 - DNA, 15 bp, Homo sapiens
gtccatataatccat

SEQ ID NO: 1439739 - DNA, 15 bp, Homo sapiens
agtccatataatcca

SEQ ID NO: 1439740 - DNA, 15 bp, Homo sapiens
aagtccatataatcc

SEQ ID NO: 1439741 - DNA, 15 bp, Homo sapiens
taagtccatataatc

SEQ ID NO: 1439742 - DNA, 15 bp, Homo sapiens
ctaagtccatataat

SEQ ID NO: 1439743 - DNA, 15 bp, Homo sapiens
gctaagtccatataa

SEQ ID NO: 1439744 - DNA, 15 bp, Homo sapiens
agctaagtccatata

SEQ ID NO: 1439745 - DNA, 15 bp, Homo sapiens
aagctaagtccatat

SEQ ID NO: 1439746 - DNA, 15 bp, Homo sapiens
aaagctaagtccata

SEQ ID NO: 1439747 - DNA, 15 bp, Homo sapiens
gaaagctaagtccat

SEQ ID NO: 1439748 - DNA, 15 bp, Homo sapiens
agaaagctaagtcca

SEQ ID NO: 1439749 - DNA, 15 bp, Homo sapiens
aagaaagctaagtcc

SEQ ID NO: 1439750 - DNA, 15 bp, Homo sapiens
caagaaagctaagtc

SEQ ID NO: 1439751 - DNA, 15 bp, Homo sapiens
gcaagaaagctaagt

SEQ ID NO: 1439752 - DNA, 15 bp, Homo sapiens
tgcaagaaagctaag

SEQ ID NO: 1439753 - DNA, 15 bp, Homo sapiens
gtgcaagaaagctaa

SEQ ID NO: 1439754 - DNA, 15 bp, Homo sapiens
ggtgcaagaaagcta

SEQ ID NO: 1439755 - DNA, 15 bp, Homo sapiens
tggtgcaagaaagct

SEQ ID NO: 1439756 - DNA, 15 bp, Homo sapiens
gtggtgcaagaaagc

SEQ ID NO: 1439757 - DNA, 15 bp, Homo sapiens
tgtggtgcaagaaag

SEQ ID NO: 1439758 - DNA, 15 bp, Homo sapiens
gtgtggtgcaagaaa

SEQ ID NO: 1439759 - DNA, 15 bp, Homo sapiens
ggtgtggtgcaagaa

SEQ ID NO: 1439760 - DNA, 15 bp, Homo sapiens
tggtgtggtgcaaga

SEQ ID NO: 1439761 - DNA, 15 bp, Homo sapiens
atggtgtggtgcaag

SEQ ID NO: 1439762 - DNA, 15 bp, Homo sapiens
gatggtgtggtgcaa

SEQ ID NO: 1439763 - DNA, 15 bp, Homo sapiens
ggatggtgtggtgca

SEQ ID NO: 1439764 - DNA, 15 bp, Homo sapiens
aggatggtgtggtgc

SEQ ID NO: 1439765 - DNA, 15 bp, Homo sapiens
taggatggtgtggtg

SEQ ID NO: 1439766 - DNA, 15 bp, Homo sapiens
gtaggatggtgtggt

SEQ ID NO: 1439767 - DNA, 15 bp, Homo sapiens
ggtaggatggtgtgg

SEQ ID NO: 1439768 - DNA, 15 bp, Homo sapiens
gggtaggatggtgtg

SEQ ID NO: 1439769 - DNA, 15 bp, Homo sapiens
ggggtaggatggtgt

SEQ ID NO: 1439770 - DNA, 15 bp, Homo sapiens
tggggtaggatggtg

SEQ ID NO: 1439771 - DNA, 15 bp, Homo sapiens
atggggtaggatggt

SEQ ID NO: 1439772 - DNA, 15 bp, Homo sapiens
aatggggtaggatgg

SEQ ID NO: 1439773 - DNA, 15 bp, Homo sapiens
aaatggggtaggatg

SEQ ID NO: 1439774 - DNA, 15 bp, Homo sapiens
aaaatggggtaggat

SEQ ID NO: 1439775 - DNA, 15 bp, Homo sapiens
gaaaatggggtagga

SEQ ID NO: 1439776 - DNA, 15 bp, Homo sapiens
ggaaaatggggtagg

SEQ ID NO: 1439777 - DNA, 15 bp, Homo sapiens
aggaaaatggggtag

SEQ ID NO: 1439778 - DNA, 15 bp, Homo sapiens
gaggaaaatggggta

SEQ ID NO: 1439779 - DNA, 15 bp, Homo sapiens
agaggaaaatggggt

SEQ ID NO: 1439780 - DNA, 15 bp, Homo sapiens
gagaggaaaatgggg

SEQ ID NO: 1439781 - DNA, 15 bp, Homo sapiens
agagaggaaaatggg

SEQ ID NO: 1439782 - DNA, 15 bp, Homo sapiens
aagagaggaaaatgg

SEQ ID NO: 1439783 - DNA, 15 bp, Homo sapiens
aaagagaggaaaatg

SEQ ID NO: 1439784 - DNA, 15 bp, Homo sapiens
taaagagaggaaaat

SEQ ID NO: 1439785 - DNA, 15 bp, Homo sapiens
ataaagagaggaaaa

SEQ ID NO: 1439786 - DNA, 15 bp, Homo sapiens
aataaagagaggaaa

SEQ ID NO: 1439787 - DNA, 15 bp, Homo sapiens
gaataaagagaggaa

SEQ ID NO: 1439788 - DNA, 15 bp, Homo sapiens
agaataaagagagga

SEQ ID NO: 1439789 - DNA, 15 bp, Homo sapiens
aagaataaagagagg

SEQ ID NO: 1439790 - DNA, 15 bp, Homo sapiens
aaagaataaagagag

SEQ ID NO: 1439791 - DNA, 15 bp, Homo sapiens
taaagaataaagaga

SEQ ID NO: 1439792 - DNA, 15 bp, Homo sapiens
ttaaagaataaagag

SEQ ID NO: 1439793 - DNA, 15 bp, Homo sapiens
tttaaagaataaaga

SEQ ID NO: 1439794 - DNA, 15 bp, Homo sapiens
atttaaagaataaag

SEQ ID NO: 1439795 - DNA, 15 bp, Homo sapiens
tatttaaagaataaa

SEQ ID NO: 1439796 - DNA, 15 bp, Homo sapiens
ttatttaaagaataa

SEQ ID NO: 1439797 - DNA, 15 bp, Homo sapiens
tttatttaaagaata

SEQ ID NO: 1439798 - DNA, 15 bp, Homo sapiens
atttatttaaagaat

SEQ ID NO: 1439799 - DNA, 15 bp, Homo sapiens
tatttatttaaagaa

SEQ ID NO: 1439800 - DNA, 15 bp, Homo sapiens
atatttatttaaaga

SEQ ID NO: 1439801 - DNA, 15 bp, Homo sapiens
catatttatttaaag

SEQ ID NO: 1439802 - DNA, 15 bp, Homo sapiens
tcatatttatttaaa

SEQ ID NO: 1439803 - DNA, 15 bp, Homo sapiens
atcatatttatttaa

SEQ ID NO: 1439804 - DNA, 15 bp, Homo sapiens
aatcatatttattta

SEQ ID NO: 1439805 - DNA, 15 bp, Homo sapiens
gaatcatatttattt

SEQ ID NO: 1439806 - DNA, 15 bp, Homo sapiens
agaatcatatttatt

SEQ ID NO: 1439807 - DNA, 15 bp, Homo sapiens
tagaatcatatttat

SEQ ID NO: 1439808 - DNA, 15 bp, Homo sapiens
atagaatcatattta

SEQ ID NO: 1439809 - DNA, 15 bp, Homo sapiens
gatagaatcatattt

SEQ ID NO: 1439810 - DNA, 15 bp, Homo sapiens
tgatagaatcatatt

SEQ ID NO: 1439811 - DNA, 15 bp, Homo sapiens
atgatagaatcatat

SEQ ID NO: 1439812 - DNA, 15 bp, Homo sapiens
tatgatagaatcata

SEQ ID NO: 1439813 - DNA, 15 bp, Homo sapiens
ttatgatagaatcat

SEQ ID NO: 1439814 - DNA, 15 bp, Homo sapiens
attatgatagaatca

SEQ ID NO: 1439815 - DNA, 15 bp, Homo sapiens
aattatgatagaatc

SEQ ID NO: 1439816 - DNA, 15 bp, Homo sapiens
aaattatgatagaat

SEQ ID NO: 1439817 - DNA, 15 bp, Homo sapiens
aaaattatgatagaa

SEQ ID NO: 1439818 - DNA, 15 bp, Homo sapiens
aaaaattatgataga

SEQ ID NO: 1439819 - DNA, 15 bp, Homo sapiens
caaaaattatgatag

SEQ ID NO: 1439820 - DNA, 15 bp, Homo sapiens
ccaaaaattatgata

SEQ ID NO: 1439821 - DNA, 15 bp, Homo sapiens
tccaaaaattatgat

SEQ ID NO: 1439822 - DNA, 15 bp, Homo sapiens
atccaaaaattatga

SEQ ID NO: 1439823 - DNA, 15 bp, Homo sapiens
tatccaaaaattatg

SEQ ID NO: 1439824 - DNA, 15 bp, Homo sapiens
ttatccaaaaattat

SEQ ID NO: 1439825 - DNA, 15 bp, Homo sapiens
tttatccaaaaatta

SEQ ID NO: 1439826 - DNA, 15 bp, Homo sapiens
atttatccaaaaatt

SEQ ID NO: 1439827 - DNA, 15 bp, Homo sapiens
aatttatccaaaaat

SEQ ID NO: 1439828 - DNA, 15 bp, Homo sapiens
taatttatccaaaaa

SEQ ID NO: 1439829 - DNA, 15 bp, Homo sapiens
ttaatttatccaaaa

SEQ ID NO: 1439830 - DNA, 15 bp, Homo sapiens
attaatttatccaaa

SEQ ID NO: 1439831 - DNA, 15 bp, Homo sapiens
tattaatttatccaa

SEQ ID NO: 1439832 - DNA, 15 bp, Homo sapiens
atattaatttatcca

SEQ ID NO: 1439833 - DNA, 15 bp, Homo sapiens
aatattaatttatcc

SEQ ID NO: 1439834 - DNA, 15 bp, Homo sapiens
caatattaatttatc

SEQ ID NO: 1439835 - DNA, 15 bp, Homo sapiens
tcaatattaatttat

SEQ ID NO: 1439836 - DNA, 15 bp, Homo sapiens
ctcaatattaattta

SEQ ID NO: 1439837 - DNA, 15 bp, Homo sapiens
actcaatattaattt

SEQ ID NO: 1439838 - DNA, 15 bp, Homo sapiens
cactcaatattaatt

SEQ ID NO: 1439839 - DNA, 15 bp, Homo sapiens
gcactcaatattaat

SEQ ID NO: 1439840 - DNA, 15 bp, Homo sapiens
agcactcaatattaa

SEQ ID NO: 1439841 - DNA, 15 bp, Homo sapiens
gagcactcaatatta

SEQ ID NO: 1439842 - DNA, 15 bp, Homo sapiens
tgagcactcaatatt

SEQ ID NO: 1439843 - DNA, 15 bp, Homo sapiens
ttgagcactcaatat

SEQ ID NO: 1439844 - DNA, 15 bp, Homo sapiens
gttgagcactcaata

SEQ ID NO: 1439845 - DNA, 15 bp, Homo sapiens
agttgagcactcaat

SEQ ID NO: 1439846 - DNA, 15 bp, Homo sapiens
aagttgagcactcaa

SEQ ID NO: 1439847 - DNA, 15 bp, Homo sapiens
taagttgagcactca

SEQ ID NO: 1439848 - DNA, 15 bp, Homo sapiens
gtaagttgagcactc

SEQ ID NO: 1439849 - DNA, 15 bp, Homo sapiens
agtaagttgagcact

SEQ ID NO: 1439850 - DNA, 15 bp, Homo sapiens
aagtaagttgagcac

SEQ ID NO: 1439851 - DNA, 15 bp, Homo sapiens
aaagtaagttgagca

SEQ ID NO: 1439852 - DNA, 15 bp, Homo sapiens
taaagtaagttgagc

SEQ ID NO: 1439853 - DNA, 15 bp, Homo sapiens
ttaaagtaagttgag

SEQ ID NO: 1439854 - DNA, 15 bp, Homo sapiens
gttaaagtaagttga

SEQ ID NO: 1439855 - DNA, 15 bp, Homo sapiens
agttaaagtaagttg

SEQ ID NO: 1439856 - DNA, 15 bp, Homo sapiens
tagttaaagtaagtt

SEQ ID NO: 1439857 - DNA, 15 bp, Homo sapiens
atagttaaagtaagt

SEQ ID NO: 1439858 - DNA, 15 bp, Homo sapiens
catagttaaagtaag

SEQ ID NO: 1439859 - DNA, 15 bp, Homo sapiens
acatagttaaagtaa

SEQ ID NO: 1439860 - DNA, 15 bp, Homo sapiens
tacatagttaaagta

SEQ ID NO: 1439861 - DNA, 15 bp, Homo sapiens
ttacatagttaaagt

SEQ ID NO: 1439862 - DNA, 15 bp, Homo sapiens
tttacatagttaaag

SEQ ID NO: 1439863 - DNA, 15 bp, Homo sapiens
ctttacatagttaaa

SEQ ID NO: 1439864 - DNA, 15 bp, Homo sapiens
actttacatagttaa

SEQ ID NO: 1439865 - DNA, 15 bp, Homo sapiens
tactttacatagtta

SEQ ID NO: 1439866 - DNA, 15 bp, Homo sapiens
gtactttacatagtt

SEQ ID NO: 1439867 - DNA, 15 bp, Homo sapiens
agtactttacatagt

SEQ ID NO: 1439868 - DNA, 15 bp, Homo sapiens
cagtactttacatag

SEQ ID NO: 1439869 - DNA, 15 bp, Homo sapiens
acagtactttacata

SEQ ID NO: 1439870 - DNA, 15 bp, Homo sapiens
aacagtactttacat

SEQ ID NO: 1439871 - DNA, 15 bp, Homo sapiens
gaacagtactttaca

SEQ ID NO: 1439872 - DNA, 15 bp, Homo sapiens
tgaacagtactttac

SEQ ID NO: 1439873 - DNA, 15 bp, Homo sapiens
gtgaacagtacttta

SEQ ID NO: 1439874 - DNA, 15 bp, Homo sapiens
agtgaacagtacttt

SEQ ID NO: 1439875 - DNA, 15 bp, Homo sapiens
aagtgaacagtactt

SEQ ID NO: 1439876 - DNA, 15 bp, Homo sapiens
gaagtgaacagtact

SEQ ID NO: 1439877 - DNA, 15 bp, Homo sapiens
agaagtgaacagtac

SEQ ID NO: 1439878 - DNA, 15 bp, Homo sapiens
tagaagtgaacagta

SEQ ID NO: 1439879 - DNA, 15 bp, Homo sapiens
atagaagtgaacagt

SEQ ID NO: 1439880 - DNA, 15 bp, Homo sapiens
tatagaagtgaacag

SEQ ID NO: 1439881 - DNA, 15 bp, Homo sapiens
ttatagaagtgaaca

SEQ ID NO: 1439882 - DNA, 15 bp, Homo sapiens
gttatagaagtgaac

SEQ ID NO: 1439883 - DNA, 15 bp, Homo sapiens
agttatagaagtgaa

SEQ ID NO: 1439884 - DNA, 15 bp, Homo sapiens
aagttatagaagtga

SEQ ID NO: 1439885 - DNA, 15 bp, Homo sapiens
taagttatagaagtg

SEQ ID NO: 1439886 - DNA, 15 bp, Homo sapiens
ataagttatagaagt

SEQ ID NO: 1439887 - DNA, 15 bp, Homo sapiens
aataagttatagaag

SEQ ID NO: 1439888 - DNA, 15 bp, Homo sapiens
aaataagttatagaa

SEQ ID NO: 1439889 - DNA, 15 bp, Homo sapiens
aaaataagttataga

SEQ ID NO: 1439890 - DNA, 15 bp, Homo sapiens
gaaaataagttatag

SEQ ID NO: 1439891 - DNA, 15 bp, Homo sapiens
ggaaaataagttata

SEQ ID NO: 1439892 - DNA, 15 bp, Homo sapiens
aggaaaataagttat

SEQ ID NO: 1439893 - DNA, 15 bp, Homo sapiens
aaggaaaataagtta

SEQ ID NO: 1439894 - DNA, 15 bp, Homo sapiens
caaggaaaataagtt

SEQ ID NO: 1439895 - DNA, 15 bp, Homo sapiens
tcaaggaaaataagt

SEQ ID NO: 1439896 - DNA, 15 bp, Homo sapiens
ctcaaggaaaataag

SEQ ID NO: 1439897 - DNA, 15 bp, Homo sapiens
cctcaaggaaaataa

SEQ ID NO: 1439898 - DNA, 15 bp, Homo sapiens
acctcaaggaaaata

SEQ ID NO: 1439899 - DNA, 15 bp, Homo sapiens
tacctcaaggaaaat

SEQ ID NO: 1439900 - DNA, 15 bp, Homo sapiens
ttacctcaaggaaaa

SEQ ID NO: 1439901 - DNA, 15 bp, Homo sapiens
cttacctcaaggaaa

SEQ ID NO: 1439902 - DNA, 15 bp, Homo sapiens
tcttacctcaaggaa

SEQ ID NO: 1439903 - DNA, 15 bp, Homo sapiens
ttcttacctcaagga

SEQ ID NO: 1439904 - DNA, 15 bp, Homo sapiens
attcttacctcaagg

SEQ ID NO: 1439905 - DNA, 15 bp, Homo sapiens
gattcttacctcaag

SEQ ID NO: 1439906 - DNA, 15 bp, Homo sapiens
tgattcttacctcaa

SEQ ID NO: 1439907 - DNA, 15 bp, Homo sapiens
atgattcttacctca

SEQ ID NO: 1439908 - DNA, 15 bp, Homo sapiens
gatgattcttacctc

SEQ ID NO: 1439909 - DNA, 15 bp, Homo sapiens
agatgattcttacct

SEQ ID NO: 1439910 - DNA, 15 bp, Homo sapiens
gagatgattcttacc

SEQ ID NO: 1439911 - DNA, 15 bp, Homo sapiens
ggagatgattcttac

SEQ ID NO: 1439912 - DNA, 15 bp, Homo sapiens
gggagatgattctta

SEQ ID NO: 1439913 - DNA, 15 bp, Homo sapiens
agggagatgattctt

SEQ ID NO: 1439914 - DNA, 15 bp, Homo sapiens
aagggagatgattct

SEQ ID NO: 1439915 - DNA, 15 bp, Homo sapiens
aaagggagatgattc

SEQ ID NO: 1439916 - DNA, 15 bp, Homo sapiens
aaaagggagatgatt

SEQ ID NO: 1439917 - DNA, 15 bp, Homo sapiens
aaaaagggagatgat

SEQ ID NO: 1439918 - DNA, 15 bp, Homo sapiens
aaaaaagggagatga

SEQ ID NO: 1439919 - DNA, 15 bp, Homo sapiens
taaaaaagggagatg

SEQ ID NO: 1439920 - DNA, 15 bp, Homo sapiens
ataaaaaagggagat

SEQ ID NO: 1439921 - DNA, 15 bp, Homo sapiens
aataaaaaagggaga

SEQ ID NO: 1439922 - DNA, 15 bp, Homo sapiens
aaataaaaaagggag

SEQ ID NO: 1439923 - DNA, 15 bp, Homo sapiens
aaaataaaaaaggga

SEQ ID NO: 1439924 - DNA, 15 bp, Homo sapiens
gaaaataaaaaaggg

SEQ ID NO: 1439925 - DNA, 15 bp, Homo sapiens
agaaaataaaaaagg

SEQ ID NO: 1439926 - DNA, 15 bp, Homo sapiens
aagaaaataaaaaag

SEQ ID NO: 1439927 - DNA, 15 bp, Homo sapiens
taagaaaataaaaaa

SEQ ID NO: 1439928 - DNA, 15 bp, Homo sapiens
gtaagaaaataaaaa

SEQ ID NO: 1439929 - DNA, 15 bp, Homo sapiens
agtaagaaaataaaa

SEQ ID NO: 1439930 - DNA, 15 bp, Homo sapiens
aagtaagaaaataaa

SEQ ID NO: 1439931 - DNA, 15 bp, Homo sapiens
aaagtaagaaaataa

SEQ ID NO: 1439932 - DNA, 15 bp, Homo sapiens
gaaagtaagaaaata

SEQ ID NO: 1439933 - DNA, 15 bp, Homo sapiens
ggaaagtaagaaaat

SEQ ID NO: 1439934 - DNA, 15 bp, Homo sapiens
aggaaagtaagaaaa

SEQ ID NO: 1439935 - DNA, 15 bp, Homo sapiens
caggaaagtaagaaa

SEQ ID NO: 1439936 - DNA, 15 bp, Homo sapiens
acaggaaagtaagaa

SEQ ID NO: 1439937 - DNA, 15 bp, Homo sapiens
tacaggaaagtaaga

SEQ ID NO: 1439938 - DNA, 15 bp, Homo sapiens
gtacaggaaagtaag

SEQ ID NO: 1439939 - DNA, 15 bp, Homo sapiens
ggtacaggaaagtaa

SEQ ID NO: 1439940 - DNA, 15 bp, Homo sapiens
aggtacaggaaagta

SEQ ID NO: 1439941 - DNA, 15 bp, Homo sapiens
aaggtacaggaaagt

SEQ ID NO: 1439942 - DNA, 15 bp, Homo sapiens
aaaggtacaggaaag

SEQ ID NO: 1439943 - DNA, 15 bp, Homo sapiens
gaaaggtacaggaaa

SEQ ID NO: 1439944 - DNA, 15 bp, Homo sapiens
ggaaaggtacaggaa

SEQ ID NO: 1439945 - DNA, 15 bp, Homo sapiens
aggaaaggtacagga

SEQ ID NO: 1439946 - DNA, 15 bp, Homo sapiens
caggaaaggtacagg

SEQ ID NO: 1439947 - DNA, 15 bp, Homo sapiens
acaggaaaggtacag

SEQ ID NO: 1439948 - DNA, 15 bp, Homo sapiens
cacaggaaaggtaca

SEQ ID NO: 1439949 - DNA, 15 bp, Homo sapiens
acacaggaaaggtac

SEQ ID NO: 1439950 - DNA, 15 bp, Homo sapiens
tacacaggaaaggta

SEQ ID NO: 1439951 - DNA, 15 bp, Homo sapiens
gtacacaggaaaggt

SEQ ID NO: 1439952 - DNA, 15 bp, Homo sapiens
ggtacacaggaaagg

SEQ ID NO: 1439953 - DNA, 15 bp, Homo sapiens
aggtacacaggaaag

SEQ ID NO: 1439954 - DNA, 15 bp, Homo sapiens
aaggtacacaggaaa

SEQ ID NO: 1439955 - DNA, 15 bp, Homo sapiens
aaaggtacacaggaa

SEQ ID NO: 1439956 - DNA, 15 bp, Homo sapiens
gaaaggtacacagga

SEQ ID NO: 1439957 - DNA, 15 bp, Homo sapiens
agaaaggtacacagg

SEQ ID NO: 1439958 - DNA, 15 bp, Homo sapiens
gagaaaggtacacag

SEQ ID NO: 1439959 - DNA, 15 bp, Homo sapiens
agagaaaggtacaca

SEQ ID NO: 1439960 - DNA, 15 bp, Homo sapiens
aagagaaaggtacac

SEQ ID NO: 1439961 - DNA, 15 bp, Homo sapiens
taagagaaaggtaca

SEQ ID NO: 1439962 - DNA, 15 bp, Homo sapiens
ataagagaaaggtac

SEQ ID NO: 1439963 - DNA, 15 bp, Homo sapiens
aataagagaaaggta

SEQ ID NO: 1439964 - DNA, 15 bp, Homo sapiens
aaataagagaaaggt

SEQ ID NO: 1439965 - DNA, 15 bp, Homo sapiens
aaaataagagaaagg

SEQ ID NO: 1439966 - DNA, 15 bp, Homo sapiens
aaaaataagagaaag

SEQ ID NO: 1439967 - DNA, 15 bp, Homo sapiens
gaaaaataagagaaa

SEQ ID NO: 1439968 - DNA, 15 bp, Homo sapiens
ggaaaaataagagaa

SEQ ID NO: 1439969 - DNA, 15 bp, Homo sapiens
tggaaaaataagaga

SEQ ID NO: 1439970 - DNA, 15 bp, Homo sapiens
ttggaaaaataagag

SEQ ID NO: 1439971 - DNA, 15 bp, Homo sapiens
tttggaaaaataaga

SEQ ID NO: 1439972 - DNA, 15 bp, Homo sapiens
ttttggaaaaataag

SEQ ID NO: 1439973 - DNA, 15 bp, Homo sapiens
attttggaaaaataa

SEQ ID NO: 1439974 - DNA, 15 bp, Homo sapiens
gaattttggaaaaat

SEQ ID NO: 1439975 - DNA, 15 bp, Homo sapiens
agaattttggaaaaa

SEQ ID NO: 1439976 - DNA, 15 bp, Homo sapiens
gagaattttggaaaa

SEQ ID NO: 1439977 - DNA, 15 bp, Homo sapiens
ggagaattttggaaa

SEQ ID NO: 1439978 - DNA, 15 bp, Homo sapiens
aggagaattttggaa

SEQ ID NO: 1439979 - DNA, 15 bp, Homo sapiens
caggagaattttgga

SEQ ID NO: 1439980 - DNA, 15 bp, Homo sapiens
gcaggagaattttgg

SEQ ID NO: 1439981 - DNA, 15 bp, Homo sapiens
tgcaggagaattttg

SEQ ID NO: 1439982 - DNA, 15 bp, Homo sapiens
ctgcaggagaatttt

SEQ ID NO: 1439983 - DNA, 15 bp, Homo sapiens
tctgcaggagaattt

SEQ ID NO: 1439984 - DNA, 15 bp, Homo sapiens
ttctgcaggagaatt

SEQ ID NO: 1439985 - DNA, 15 bp, Homo sapiens
attctgcaggagaat

SEQ ID NO: 1439986 - DNA, 15 bp, Homo sapiens
aattctgcaggagaa

SEQ ID NO: 1439987 - DNA, 15 bp, Homo sapiens
caattctgcaggaga

SEQ ID NO: 1439988 - DNA, 15 bp, Homo sapiens
acaattctgcaggag

SEQ ID NO: 1439989 - DNA, 15 bp, Homo sapiens
tacaattctgcagga

SEQ ID NO: 1439990 - DNA, 15 bp, Homo sapiens
ttacaattctgcagg

SEQ ID NO: 1439991 - DNA, 15 bp, Homo sapiens
tttacaattctgcag

SEQ ID NO: 1439992 - DNA, 15 bp, Homo sapiens
ttttacaattctgca

SEQ ID NO: 1439993 - DNA, 15 bp, Homo sapiens
gttttacaattctgc

SEQ ID NO: 1439994 - DNA, 15 bp, Homo sapiens
ggttttacaattctg

SEQ ID NO: 1439995 - DNA, 15 bp, Homo sapiens
gggttttacaattct

SEQ ID NO: 1439996 - DNA, 15 bp, Homo sapiens
tgggttttacaattc

SEQ ID NO: 1439997 - DNA, 15 bp, Homo sapiens
atgggttttacaatt

SEQ ID NO: 1439998 - DNA, 15 bp, Homo sapiens
aatgggttttacaat

SEQ ID NO: 1439999 - DNA, 15 bp, Homo sapiens
aaatgggttttacaa

SEQ ID NO: 1440000 - DNA, 15 bp, Homo sapiens
caaatgggttttaca

SEQ ID NO: 1440001 - DNA, 15 bp, Homo sapiens
acaaatgggttttac

SEQ ID NO: 1440002 - DNA, 15 bp, Homo sapiens
tacaaatgggtttta

SEQ ID NO: 1440003 - DNA, 15 bp, Homo sapiens
atacaaatgggtttt

SEQ ID NO: 1440004 - DNA, 15 bp, Homo sapiens
tatacaaatgggttt

SEQ ID NO: 1440005 - DNA, 15 bp, Homo sapiens
gtatacaaatgggtt

SEQ ID NO: 1440006 - DNA, 15 bp, Homo sapiens
agtatacaaatgggt

SEQ ID NO: 1440007 - DNA, 15 bp, Homo sapiens
cagtatacaaatggg

SEQ ID NO: 1440008 - DNA, 15 bp, Homo sapiens
acagtatacaaatgg

SEQ ID NO: 1440009 - DNA, 15 bp, Homo sapiens
aacagtatacaaatg

SEQ ID NO: 1440010 - DNA, 15 bp, Homo sapiens
aaacagtatacaaat

SEQ ID NO: 1440011 - DNA, 15 bp, Homo sapiens
caaacagtatacaaa

SEQ ID NO: 1440012 - DNA, 15 bp, Homo sapiens
acaaacagtatacaa

SEQ ID NO: 1440013 - DNA, 15 bp, Homo sapiens
gacaaacagtataca

SEQ ID NO: 1440014 - DNA, 15 bp, Homo sapiens
tgacaaacagtatac

SEQ ID NO: 1440015 - DNA, 15 bp, Homo sapiens
atgacaaacagtata

SEQ ID NO: 1440016 - DNA, 15 bp, Homo sapiens
tatgacaaacagtat

SEQ ID NO: 1440017 - DNA, 15 bp, Homo sapiens
atatgacaaacagta

SEQ ID NO: 1440018 - DNA, 15 bp, Homo sapiens
catatgacaaacagt

SEQ ID NO: 1440019 - DNA, 15 bp, Homo sapiens
tcatatgacaaacag

SEQ ID NO: 1440020 - DNA, 15 bp, Homo sapiens
gtcatatgacaaaca

SEQ ID NO: 1440021 - DNA, 15 bp, Homo sapiens
ggtcatatgacaaac

SEQ ID NO: 1440022 - DNA, 15 bp, Homo sapiens
tggtcatatgacaaa

SEQ ID NO: 1440023 - DNA, 15 bp, Homo sapiens
atggtcatatgacaa

SEQ ID NO: 1440024 - DNA, 15 bp, Homo sapiens
aatggtcatatgaca

SEQ ID NO: 1440025 - DNA, 15 bp, Homo sapiens
gaatggtcatatgac

SEQ ID NO: 1440026 - DNA, 15 bp, Homo sapiens
agaatggtcatatga

SEQ ID NO: 1440027 - DNA, 15 bp, Homo sapiens
gagaatggtcatatg

SEQ ID NO: 1440028 - DNA, 15 bp, Homo sapiens
tgagaatggtcatat

SEQ ID NO: 1440029 - DNA, 15 bp, Homo sapiens
ttgagaatggtcata

SEQ ID NO: 1440030 - DNA, 15 bp, Homo sapiens
attgagaatggtcat

SEQ ID NO: 1440031 - DNA, 15 bp, Homo sapiens
tattgagaatggtca

SEQ ID NO: 1440032 - DNA, 15 bp, Homo sapiens
ctattgagaatggtc

SEQ ID NO: 1440033 - DNA, 15 bp, Homo sapiens
cctattgagaatggt

SEQ ID NO: 1440034 - DNA, 15 bp, Homo sapiens
acctattgagaatgg

SEQ ID NO: 1440035 - DNA, 15 bp, Homo sapiens
tacctattgagaatg

SEQ ID NO: 1440036 - DNA, 15 bp, Homo sapiens
ctacctattgagaat

SEQ ID NO: 1440037 - DNA, 15 bp, Homo sapiens
actacctattgagaa

SEQ ID NO: 1440038 - DNA, 15 bp, Homo sapiens
gactacctattgaga

SEQ ID NO: 1440039 - DNA, 15 bp, Homo sapiens
tgactacctattgag

SEQ ID NO: 1440040 - DNA, 15 bp, Homo sapiens
atgactacctattga

SEQ ID NO: 1440041 - DNA, 15 bp, Homo sapiens
aatgactacctattg

SEQ ID NO: 1440042 - DNA, 15 bp, Homo sapiens
aaatgactacctatt

SEQ ID NO: 1440043 - DNA, 15 bp, Homo sapiens
taaatgactacctat

SEQ ID NO: 1440044 - DNA, 15 bp, Homo sapiens
ctaaatgactaccta

SEQ ID NO: 1440045 - DNA, 15 bp, Homo sapiens
actaaatgactacct

SEQ ID NO: 1440046 - DNA, 15 bp, Homo sapiens
aactaaatgactacc

SEQ ID NO: 1440047 - DNA, 15 bp, Homo sapiens
gaactaaatgactac

SEQ ID NO: 1440048 - DNA, 15 bp, Homo sapiens
ggaactaaatgacta

SEQ ID NO: 1440049 - DNA, 15 bp, Homo sapiens
tggaactaaatgact

SEQ ID NO: 1440050 - DNA, 15 bp, Homo sapiens
gtggaactaaatgac

SEQ ID NO: 1440051 - DNA, 15 bp, Homo sapiens
tgtggaactaaatga

SEQ ID NO: 1440052 - DNA, 15 bp, Homo sapiens
atgtggaactaaatg

SEQ ID NO: 1440053 - DNA, 15 bp, Homo sapiens
aatgtggaactaaat

SEQ ID NO: 1440054 - DNA, 15 bp, Homo sapiens
aaatgtggaactaaa

SEQ ID NO: 1440055 - DNA, 15 bp, Homo sapiens
gaaatgtggaactaa

SEQ ID NO: 1440056 - DNA, 15 bp, Homo sapiens
agaaatgtggaacta

SEQ ID NO: 1440057 - DNA, 15 bp, Homo sapiens
gagaaatgtggaact

SEQ ID NO: 1440058 - DNA, 15 bp, Homo sapiens
agagaaatgtggaac

SEQ ID NO: 1440059 - DNA, 15 bp, Homo sapiens
gagagaaatgtggaa

SEQ ID NO: 1440060 - DNA, 15 bp, Homo sapiens
tgagagaaatgtgga

SEQ ID NO: 1440061 - DNA, 15 bp, Homo sapiens
atgagagaaatgtgg

SEQ ID NO: 1440062 - DNA, 15 bp, Homo sapiens
aatgagagaaatgtg

SEQ ID NO: 1440063 - DNA, 15 bp, Homo sapiens
gaatgagagaaatgt

SEQ ID NO: 1440064 - DNA, 15 bp, Homo sapiens
agaatgagagaaatg

SEQ ID NO: 1440065 - DNA, 15 bp, Homo sapiens
aaaagaatgagagaa

SEQ ID NO: 1440066 - DNA, 15 bp, Homo sapiens
aaaaagaatgagaga

SEQ ID NO: 1440067 - DNA, 15 bp, Homo sapiens
taaaaagaatgagag

SEQ ID NO: 1440068 - DNA, 15 bp, Homo sapiens
ttaaaaagaatgaga

SEQ ID NO: 1440069 - DNA, 15 bp, Homo sapiens
tttaaaaagaatgag

SEQ ID NO: 1440070 - DNA, 15 bp, Homo sapiens
ttttaaaaagaatga

SEQ ID NO: 1440071 - DNA, 15 bp, Homo sapiens
tttttaaaaagaatg

SEQ ID NO: 1440072 - DNA, 15 bp, Homo sapiens
aatttttaaaaagaa

SEQ ID NO: 1440073 - DNA, 15 bp, Homo sapiens
aaatttttaaaaaga

SEQ ID NO: 1440074 - DNA, 15 bp, Homo sapiens
gaaatttttaaaaag

SEQ ID NO: 1440075 - DNA, 15 bp, Homo sapiens
agaaatttttaaaaa

SEQ ID NO: 1440076 - DNA, 15 bp, Homo sapiens
aagaaatttttaaaa

SEQ ID NO: 1440077 - DNA, 15 bp, Homo sapiens
taagaaatttttaaa

SEQ ID NO: 1440078 - DNA, 15 bp, Homo sapiens
ctaagaaatttttaa

SEQ ID NO: 1440079 - DNA, 15 bp, Homo sapiens
gctaagaaattttta

SEQ ID NO: 1440080 - DNA, 15 bp, Homo sapiens
ggctaagaaattttt

SEQ ID NO: 1440081 - DNA, 15 bp, Homo sapiens
tggctaagaaatttt

SEQ ID NO: 1440082 - DNA, 15 bp, Homo sapiens
ctggctaagaaattt

SEQ ID NO: 1440083 - DNA, 15 bp, Homo sapiens
cctggctaagaaatt

SEQ ID NO: 1440084 - DNA, 15 bp, Homo sapiens
gcctggctaagaaat

SEQ ID NO: 1440085 - DNA, 15 bp, Homo sapiens
tgcctggctaagaaa

SEQ ID NO: 1440086 - DNA, 15 bp, Homo sapiens
atgcctggctaagaa

SEQ ID NO: 1440087 - DNA, 15 bp, Homo sapiens
catgcctggctaaga

SEQ ID NO: 1440088 - DNA, 15 bp, Homo sapiens
ccatgcctggctaag

SEQ ID NO: 1440089 - DNA, 15 bp, Homo sapiens
ccaggcgtgagccac

SEQ ID NO: 1440090 - DNA, 15 bp, Homo sapiens
cccaggcgtgagcca

SEQ ID NO: 1440091 - DNA, 15 bp, Homo sapiens
tcccaggcgtgagcc

SEQ ID NO: 1440092 - DNA, 15 bp, Homo sapiens
atcccaggcgtgagc

SEQ ID NO: 1440093 - DNA, 15 bp, Homo sapiens
gatcccaggcgtgag

SEQ ID NO: 1440094 - DNA, 15 bp, Homo sapiens
ggatcccaggcgtga

SEQ ID NO: 1440095 - DNA, 15 bp, Homo sapiens
gggatcccaggcgtg

SEQ ID NO: 1440096 - DNA, 15 bp, Homo sapiens
tgggatcccaggcgt

SEQ ID NO: 1440097 - DNA, 15 bp, Homo sapiens
ctgggatcccaggcg

SEQ ID NO: 1440098 - DNA, 15 bp, Homo sapiens
gctgggatcccaggc

SEQ ID NO: 1440099 - DNA, 15 bp, Homo sapiens
tgctgggatcccagg

SEQ ID NO: 1440100 - DNA, 15 bp, Homo sapiens
gtgctgggatcccag

SEQ ID NO: 1440101 - DNA, 15 bp, Homo sapiens
agtgctgggatccca

SEQ ID NO: 1440102 - DNA, 15 bp, Homo sapiens
aagtgctgggatccc

SEQ ID NO: 1440103 - DNA, 15 bp, Homo sapiens
aaagtgctgggatcc

SEQ ID NO: 1440104 - DNA, 15 bp, Homo sapiens
gatctgcctgcctca

SEQ ID NO: 1440105 - DNA, 15 bp, Homo sapiens
ggatctgcctgcctc

SEQ ID NO: 1440106 - DNA, 15 bp, Homo sapiens
gggatctgcctgcct

SEQ ID NO: 1440107 - DNA, 15 bp, Homo sapiens
agggatctgcctgcc

SEQ ID NO: 1440108 - DNA, 15 bp, Homo sapiens
aagggatctgcctgc

SEQ ID NO: 1440109 - DNA, 15 bp, Homo sapiens
caagggatctgcctg

SEQ ID NO: 1440110 - DNA, 15 bp, Homo sapiens
tcaagggatctgcct

SEQ ID NO: 1440111 - DNA, 15 bp, Homo sapiens
ctcaagggatctgcc

SEQ ID NO: 1440112 - DNA, 15 bp, Homo sapiens
gctcaagggatctgc

SEQ ID NO: 1440113 - DNA, 15 bp, Homo sapiens
ggctcaagggatctg

SEQ ID NO: 1440114 - DNA, 15 bp, Homo sapiens
ctgggctcaagggat

SEQ ID NO: 1440115 - DNA, 15 bp, Homo sapiens
cctgggctcaaggga

SEQ ID NO: 1440116 - DNA, 15 bp, Homo sapiens
tcctgggctcaaggg

SEQ ID NO: 1440117 - DNA, 15 bp, Homo sapiens
ctcctgggctcaagg

SEQ ID NO: 1440118 - DNA, 15 bp, Homo sapiens
ccaaactcctgggct

SEQ ID NO: 1440119 - DNA, 15 bp, Homo sapiens
cccaaactcctgggc

SEQ ID NO: 1440120 - DNA, 15 bp, Homo sapiens
tcccaaactcctggg

SEQ ID NO: 1440121 - DNA, 15 bp, Homo sapiens
gtcccaaactcctgg

SEQ ID NO: 1440122 - DNA, 15 bp, Homo sapiens
ggtcccaaactcctg

SEQ ID NO: 1440123 - DNA, 15 bp, Homo sapiens
tggtcccaaactcct

SEQ ID NO: 1440124 - DNA, 15 bp, Homo sapiens
ctggtcccaaactcc

SEQ ID NO: 1440125 - DNA, 15 bp, Homo sapiens
gctggtcccaaactc

SEQ ID NO: 1440126 - DNA, 15 bp, Homo sapiens
ggctggtcccaaact

SEQ ID NO: 1440127 - DNA, 15 bp, Homo sapiens
aggctggtcccaaac

SEQ ID NO: 1440128 - DNA, 15 bp, Homo sapiens
caggctggtcccaaa

SEQ ID NO: 1440129 - DNA, 15 bp, Homo sapiens
ccaggctggtcccaa

SEQ ID NO: 1440130 - DNA, 15 bp, Homo sapiens
cccaggctggtccca

SEQ ID NO: 1440131 - DNA, 15 bp, Homo sapiens
gcccaggctggtccc

SEQ ID NO: 1440132 - DNA, 15 bp, Homo sapiens
tgcccaggctggtcc

SEQ ID NO: 1440133 - DNA, 15 bp, Homo sapiens
atatgttgcccaggc

SEQ ID NO: 1440134 - DNA, 15 bp, Homo sapiens
aatatgttgcccagg

SEQ ID NO: 1440135 - DNA, 15 bp, Homo sapiens
caatatgttgcccag

SEQ ID NO: 1440136 - DNA, 15 bp, Homo sapiens
tcaatatgttgccca

SEQ ID NO: 1440137 - DNA, 15 bp, Homo sapiens
ctcaatatgttgccc

SEQ ID NO: 1440138 - DNA, 15 bp, Homo sapiens
tctcaatatgttgcc

SEQ ID NO: 1440139 - DNA, 15 bp, Homo sapiens
ttctcaatatgttgc

SEQ ID NO: 1440140 - DNA, 15 bp, Homo sapiens
attctcaatatgttg

SEQ ID NO: 1440141 - DNA, 15 bp, Homo sapiens
gattctcaatatgtt

SEQ ID NO: 1440142 - DNA, 15 bp, Homo sapiens
agattctcaatatgt

SEQ ID NO: 1440143 - DNA, 15 bp, Homo sapiens
cagattctcaatatg

SEQ ID NO: 1440144 - DNA, 15 bp, Homo sapiens
acagattctcaatat

SEQ ID NO: 1440145 - DNA, 15 bp, Homo sapiens
gacagattctcaata

SEQ ID NO: 1440146 - DNA, 15 bp, Homo sapiens
agacagattctcaat

SEQ ID NO: 1440147 - DNA, 15 bp, Homo sapiens
gagacagattctcaa

SEQ ID NO: 1440148 - DNA, 15 bp, Homo sapiens
gtattttttgtagag

SEQ ID NO: 1440149 - DNA, 15 bp, Homo sapiens
tgtattttttgtaga

SEQ ID NO: 1440150 - DNA, 15 bp, Homo sapiens
ttgtattttttgtag

SEQ ID NO: 1440151 - DNA, 15 bp, Homo sapiens
atgctaccatgccca

SEQ ID NO: 1440152 - DNA, 15 bp, Homo sapiens
catgctaccatgccc

SEQ ID NO: 1440153 - DNA, 15 bp, Homo sapiens
acatgctaccatgcc

SEQ ID NO: 1440154 - DNA, 15 bp, Homo sapiens
cacatgctaccatgc

SEQ ID NO: 1440155 - DNA, 15 bp, Homo sapiens
gcacatgctaccatg

SEQ ID NO: 1440156 - DNA, 15 bp, Homo sapiens
ggcacatgctaccat

SEQ ID NO: 1440157 - DNA, 15 bp, Homo sapiens
aggcacatgctacca

SEQ ID NO: 1440158 - DNA, 15 bp, Homo sapiens
caggcacatgctacc

SEQ ID NO: 1440159 - DNA, 15 bp, Homo sapiens
acaggcacatgctac

SEQ ID NO: 1440160 - DNA, 15 bp, Homo sapiens
tacaggcacatgcta

SEQ ID NO: 1440161 - DNA, 15 bp, Homo sapiens
ctacaggcacatgct

SEQ ID NO: 1440162 - DNA, 15 bp, Homo sapiens
ccccaagtagctggg

SEQ ID NO: 1440163 - DNA, 15 bp, Homo sapiens
cccccaagtagctgg

SEQ ID NO: 1440164 - DNA, 15 bp, Homo sapiens
ccccccaagtagctg

SEQ ID NO: 1440165 - DNA, 15 bp, Homo sapiens
gccccccaagtagct

SEQ ID NO: 1440166 - DNA, 15 bp, Homo sapiens
agccccccaagtagc

SEQ ID NO: 1440167 - DNA, 15 bp, Homo sapiens
tagccccccaagtag

SEQ ID NO: 1440168 - DNA, 15 bp, Homo sapiens
ttagccccccaagta

SEQ ID NO: 1440169 - DNA, 15 bp, Homo sapiens
cttagccccccaagt

SEQ ID NO: 1440170 - DNA, 15 bp, Homo sapiens
ccttagccccccaag

SEQ ID NO: 1440171 - DNA, 15 bp, Homo sapiens
gccttagccccccaa

SEQ ID NO: 1440172 - DNA, 15 bp, Homo sapiens
tgccttagcccccca

SEQ ID NO: 1440173 - DNA, 15 bp, Homo sapiens
ctgccttagcccccc

SEQ ID NO: 1440174 - DNA, 15 bp, Homo sapiens
tctgccttagccccc

SEQ ID NO: 1440175 - DNA, 15 bp, Homo sapiens
ttctgccttagcccc

SEQ ID NO: 1440176 - DNA, 15 bp, Homo sapiens
cttctgccttagccc

SEQ ID NO: 1440177 - DNA, 15 bp, Homo sapiens
ccttctgccttagcc

SEQ ID NO: 1440178 - DNA, 15 bp, Homo sapiens
tccttctgccttagc

SEQ ID NO: 1440179 - DNA, 15 bp, Homo sapiens
atccttctgccttag

SEQ ID NO: 1440180 - DNA, 15 bp, Homo sapiens
gatccttctgcctta

SEQ ID NO: 1440181 - DNA, 15 bp, Homo sapiens
tgatccttctgcctt

SEQ ID NO: 1440182 - DNA, 15 bp, Homo sapiens
aggctcaagtgatcc

SEQ ID NO: 1440183 - DNA, 15 bp, Homo sapiens
ccaggctcaagtgat

SEQ ID NO: 1440184 - DNA, 15 bp, Homo sapiens
cccaggctcaagtga

SEQ ID NO: 1440185 - DNA, 15 bp, Homo sapiens
tcccaggctcaagtg

SEQ ID NO: 1440186 - DNA, 15 bp, Homo sapiens
ctcccaggctcaagt

SEQ ID NO: 1440187 - DNA, 15 bp, Homo sapiens
aacctcccaggctca

SEQ ID NO: 1440188 - DNA, 15 bp, Homo sapiens
caacctcccaggctc

SEQ ID NO: 1440189 - DNA, 15 bp, Homo sapiens
tcaacctcccaggct

SEQ ID NO: 1440190 - DNA, 15 bp, Homo sapiens
ctcaacctcccaggc

SEQ ID NO: 1440191 - DNA, 15 bp, Homo sapiens
cctcaacctcccagg

SEQ ID NO: 1440192 - DNA, 15 bp, Homo sapiens
agcctcaacctccca

SEQ ID NO: 1440193 - DNA, 15 bp, Homo sapiens
cagcctcaacctccc

SEQ ID NO: 1440194 - DNA, 15 bp, Homo sapiens
aagtgcagtggtgtg

SEQ ID NO: 1440195 - DNA, 15 bp, Homo sapiens
aaagtgcagtggtgt

SEQ ID NO: 1440196 - DNA, 15 bp, Homo sapiens
taaagtgcagtggtg

SEQ ID NO: 1440197 - DNA, 15 bp, Homo sapiens
ctaaagtgcagtggt

SEQ ID NO: 1440198 - DNA, 15 bp, Homo sapiens
gctaaagtgcagtgg

SEQ ID NO: 1440199 - DNA, 15 bp, Homo sapiens
ggctaaagtgcagtg

SEQ ID NO: 1440200 - DNA, 15 bp, Homo sapiens
aggctaaagtgcagt

SEQ ID NO: 1440201 - DNA, 15 bp, Homo sapiens
caggctaaagtgcag

SEQ ID NO: 1440202 - DNA, 15 bp, Homo sapiens
ccaggctaaagtgca

SEQ ID NO: 1440203 - DNA, 15 bp, Homo sapiens
cccaggctaaagtgc

SEQ ID NO: 1440204 - DNA, 15 bp, Homo sapiens
acccaggctaaagtg

SEQ ID NO: 1440205 - DNA, 15 bp, Homo sapiens
cacccaggctaaagt

SEQ ID NO: 1440206 - DNA, 15 bp, Homo sapiens
tcacccaggctaaag

SEQ ID NO: 1440207 - DNA, 15 bp, Homo sapiens
gtcacccaggctaaa

SEQ ID NO: 1440208 - DNA, 15 bp, Homo sapiens
tgtcacccaggctaa

SEQ ID NO: 1440209 - DNA, 15 bp, Homo sapiens
cacagggtctcactc

SEQ ID NO: 1440210 - DNA, 15 bp, Homo sapiens
acacagggtctcact

SEQ ID NO: 1440211 - DNA, 15 bp, Homo sapiens
gacacagggtctcac

SEQ ID NO: 1440212 - DNA, 15 bp, Homo sapiens
tgacacagggtctca

SEQ ID NO: 1440213 - DNA, 15 bp, Homo sapiens
ttgacacagggtctc

SEQ ID NO: 1440214 - DNA, 15 bp, Homo sapiens
tttgacacagggtct

SEQ ID NO: 1440215 - DNA, 15 bp, Homo sapiens
ttttgacacagggtc

SEQ ID NO: 1440216 - DNA, 15 bp, Homo sapiens
tttttgacacagggt

SEQ ID NO: 1440217 - DNA, 15 bp, Homo sapiens
ttttttgacacaggg

SEQ ID NO: 1440218 - DNA, 15 bp, Homo sapiens
tttttttgacacagg

SEQ ID NO: 1440219 - DNA, 15 bp, Homo sapiens
atttttttgacacag

SEQ ID NO: 1440220 - DNA, 15 bp, Homo sapiens
tatttttttgacaca

SEQ ID NO: 1440221 - DNA, 15 bp, Homo sapiens
ttatttttttgacac

SEQ ID NO: 1440222 - DNA, 15 bp, Homo sapiens
cttatttttttgaca

SEQ ID NO: 1440223 - DNA, 15 bp, Homo sapiens
tcttatttttttgac

SEQ ID NO: 1440224 - DNA, 15 bp, Homo sapiens
atcttatttttttga

SEQ ID NO: 1440225 - DNA, 15 bp, Homo sapiens
gatcttatttttttg

SEQ ID NO: 1440226 - DNA, 15 bp, Homo sapiens
tgatcttattttttt

SEQ ID NO: 1440227 - DNA, 15 bp, Homo sapiens
ttgatcttatttttt

SEQ ID NO: 1440228 - DNA, 15 bp, Homo sapiens
tttgatcttattttt

SEQ ID NO: 1440229 - DNA, 15 bp, Homo sapiens
atttgatcttatttt

SEQ ID NO: 1440230 - DNA, 15 bp, Homo sapiens
tatttgatcttattt

SEQ ID NO: 1440231 - DNA, 15 bp, Homo sapiens
ttatttgatcttatt

SEQ ID NO: 1440232 - DNA, 15 bp, Homo sapiens
tttatttgatcttat

SEQ ID NO: 1440233 - DNA, 15 bp, Homo sapiens
ttttatttgatctta

SEQ ID NO: 1440234 - DNA, 15 bp, Homo sapiens
tttttatttgatctt

SEQ ID NO: 1440235 - DNA, 15 bp, Homo sapiens
atttttatttgatct

SEQ ID NO: 1440236 - DNA, 15 bp, Homo sapiens
aatttttatttgatc

SEQ ID NO: 1440237 - DNA, 15 bp, Homo sapiens
aaatttttatttgat

SEQ ID NO: 1440238 - DNA, 15 bp, Homo sapiens
gaaatttttatttga

SEQ ID NO: 1440239 - DNA, 15 bp, Homo sapiens
cgaaatttttatttg

SEQ ID NO: 1440240 - DNA, 15 bp, Homo sapiens
acgaaatttttattt

SEQ ID NO: 1440241 - DNA, 15 bp, Homo sapiens
cacgaaatttttatt

SEQ ID NO: 1440242 - DNA, 15 bp, Homo sapiens
ccacgaaatttttat

SEQ ID NO: 1440243 - DNA, 15 bp, Homo sapiens
cccacgaaattttta

SEQ ID NO: 1440244 - DNA, 15 bp, Homo sapiens
tcccacgaaattttt

SEQ ID NO: 1440245 - DNA, 15 bp, Homo sapiens
gtcccacgaaatttt

SEQ ID NO: 1440246 - DNA, 15 bp, Homo sapiens
tgtcccacgaaattt

SEQ ID NO: 1440247 - DNA, 15 bp, Homo sapiens
gtgtcccacgaaatt

SEQ ID NO: 1440248 - DNA, 15 bp, Homo sapiens
ggtgtcccacgaaat

SEQ ID NO: 1440249 - DNA, 15 bp, Homo sapiens
gggtgtcccacgaaa

SEQ ID NO: 1440250 - DNA, 15 bp, Homo sapiens
agggtgtcccacgaa

SEQ ID NO: 1440251 - DNA, 15 bp, Homo sapiens
aagggtgtcccacga

SEQ ID NO: 1440252 - DNA, 15 bp, Homo sapiens
caagggtgtcccacg

SEQ ID NO: 1440253 - DNA, 15 bp, Homo sapiens
gcaagggtgtcccac

SEQ ID NO: 1440254 - DNA, 15 bp, Homo sapiens
agcaagggtgtccca

SEQ ID NO: 1440255 - DNA, 15 bp, Homo sapiens
cagcaagggtgtccc

SEQ ID NO: 1440256 - DNA, 15 bp, Homo sapiens
ccagcaagggtgtcc

SEQ ID NO: 1440257 - DNA, 15 bp, Homo sapiens
cccagcaagggtgtc

SEQ ID NO: 1440258 - DNA, 15 bp, Homo sapiens
gcccagcaagggtgt

SEQ ID NO: 1440259 - DNA, 15 bp, Homo sapiens
ggcccagcaagggtg

SEQ ID NO: 1440260 - DNA, 15 bp, Homo sapiens
gggcccagcaagggt

SEQ ID NO: 1440261 - DNA, 15 bp, Homo sapiens
ggggcccagcaaggg

SEQ ID NO: 1440262 - DNA, 15 bp, Homo sapiens
tggggcccagcaagg

SEQ ID NO: 1440263 - DNA, 15 bp, Homo sapiens
atggggcccagcaag

SEQ ID NO: 1440264 - DNA, 15 bp, Homo sapiens
gatggggcccagcaa

SEQ ID NO: 1440265 - DNA, 15 bp, Homo sapiens
agatggggcccagca

SEQ ID NO: 1440266 - DNA, 15 bp, Homo sapiens
cagatggggcccagc

SEQ ID NO: 1440267 - DNA, 15 bp, Homo sapiens
gcagatggggcccag

SEQ ID NO: 1440268 - DNA, 15 bp, Homo sapiens
ggcagatggggccca

SEQ ID NO: 1440269 - DNA, 15 bp, Homo sapiens
aggcagatggggccc

SEQ ID NO: 1440270 - DNA, 15 bp, Homo sapiens
taggcagatggggcc

SEQ ID NO: 1440271 - DNA, 15 bp, Homo sapiens
gtaggcagatggggc

SEQ ID NO: 1440272 - DNA, 15 bp, Homo sapiens
agtaggcagatgggg

SEQ ID NO: 1440273 - DNA, 15 bp, Homo sapiens
aagtaggcagatggg

SEQ ID NO: 1440274 - DNA, 15 bp, Homo sapiens
gaagtaggcagatgg

SEQ ID NO: 1440275 - DNA, 15 bp, Homo sapiens
agaagtaggcagatg

SEQ ID NO: 1440276 - DNA, 15 bp, Homo sapiens
gagaagtaggcagat

SEQ ID NO: 1440277 - DNA, 15 bp, Homo sapiens
tgagaagtaggcaga

SEQ ID NO: 1440278 - DNA, 15 bp, Homo sapiens
atgagaagtaggcag

SEQ ID NO: 1440279 - DNA, 15 bp, Homo sapiens
tatgagaagtaggca

SEQ ID NO: 1440280 - DNA, 15 bp, Homo sapiens
gtatgagaagtaggc

SEQ ID NO: 1440281 - DNA, 15 bp, Homo sapiens
agtatgagaagtagg

SEQ ID NO: 1440282 - DNA, 15 bp, Homo sapiens
cagtatgagaagtag

SEQ ID NO: 1440283 - DNA, 15 bp, Homo sapiens
tcagtatgagaagta

SEQ ID NO: 1440284 - DNA, 15 bp, Homo sapiens
ttcagtatgagaagt

SEQ ID NO: 1440285 - DNA, 15 bp, Homo sapiens
gttcagtatgagaag

SEQ ID NO: 1440286 - DNA, 15 bp, Homo sapiens
agttcagtatgagaa

SEQ ID NO: 1440287 - DNA, 15 bp, Homo sapiens
cagttcagtatgaga

SEQ ID NO: 1440288 - DNA, 15 bp, Homo sapiens
ccagttcagtatgag

SEQ ID NO: 1440289 - DNA, 15 bp, Homo sapiens
tccagttcagtatga

SEQ ID NO: 1440290 - DNA, 15 bp, Homo sapiens
atccagttcagtatg

SEQ ID NO: 1440291 - DNA, 15 bp, Homo sapiens
catccagttcagtat

SEQ ID NO: 1440292 - DNA, 15 bp, Homo sapiens
gcatccagttcagta

SEQ ID NO: 1440293 - DNA, 15 bp, Homo sapiens
tgcatccagttcagt

SEQ ID NO: 1440294 - DNA, 15 bp, Homo sapiens
gtgcatccagttcag

SEQ ID NO: 1440295 - DNA, 15 bp, Homo sapiens
ggtgcatccagttca

SEQ ID NO: 1440296 - DNA, 15 bp, Homo sapiens
aggtgcatccagttc

SEQ ID NO: 1440297 - DNA, 15 bp, Homo sapiens
aaggtgcatccagtt

SEQ ID NO: 1440298 - DNA, 15 bp, Homo sapiens
taaggtgcatccagt

SEQ ID NO: 1440299 - DNA, 15 bp, Homo sapiens
ctaaggtgcatccag

SEQ ID NO: 1440300 - DNA, 15 bp, Homo sapiens
cctaaggtgcatcca

SEQ ID NO: 1440301 - DNA, 15 bp, Homo sapiens
gcctaaggtgcatcc

SEQ ID NO: 1440302 - DNA, 15 bp, Homo sapiens
ggcctaaggtgcatc

SEQ ID NO: 1440303 - DNA, 15 bp, Homo sapiens
aggcctaaggtgcat

SEQ ID NO: 1440304 - DNA, 15 bp, Homo sapiens
caggcctaaggtgca

SEQ ID NO: 1440305 - DNA, 15 bp, Homo sapiens
gcaggcctaaggtgc

SEQ ID NO: 1440306 - DNA, 15 bp, Homo sapiens
agcaggcctaaggtg

SEQ ID NO: 1440307 - DNA, 15 bp, Homo sapiens
cagcaggcctaaggt

SEQ ID NO: 1440308 - DNA, 15 bp, Homo sapiens
gcagcaggcctaagg

SEQ ID NO: 1440309 - DNA, 15 bp, Homo sapiens
tgcagcaggcctaag

SEQ ID NO: 1440310 - DNA, 15 bp, Homo sapiens
atgcagcaggcctaa

SEQ ID NO: 1440311 - DNA, 15 bp, Homo sapiens
gatgcagcaggccta

SEQ ID NO: 1440312 - DNA, 15 bp, Homo sapiens
agatgcagcaggcct

SEQ ID NO: 1440313 - DNA, 15 bp, Homo sapiens
aagatgcagcaggcc

SEQ ID NO: 1440314 - DNA, 15 bp, Homo sapiens
aaagatgcagcaggc

SEQ ID NO: 1440315 - DNA, 15 bp, Homo sapiens
gaaagatgcagcagg

SEQ ID NO: 1440316 - DNA, 15 bp, Homo sapiens
agaaagatgcagcag

SEQ ID NO: 1440317 - DNA, 15 bp, Homo sapiens
aagaaagatgcagca

SEQ ID NO: 1440318 - DNA, 15 bp, Homo sapiens
caagaaagatgcagc

SEQ ID NO: 1440319 - DNA, 15 bp, Homo sapiens
acaagaaagatgcag

SEQ ID NO: 1440320 - DNA, 15 bp, Homo sapiens
cacaagaaagatgca

SEQ ID NO: 1440321 - DNA, 15 bp, Homo sapiens
acacaagaaagatgc

SEQ ID NO: 1440322 - DNA, 15 bp, Homo sapiens
aacacaagaaagatg

SEQ ID NO: 1440323 - DNA, 15 bp, Homo sapiens
caacacaagaaagat

SEQ ID NO: 1440324 - DNA, 15 bp, Homo sapiens
tcaacacaagaaaga

SEQ ID NO: 1440325 - DNA, 15 bp, Homo sapiens
ctcaacacaagaaag

SEQ ID NO: 1440326 - DNA, 15 bp, Homo sapiens
actcaacacaagaaa

SEQ ID NO: 1440327 - DNA, 15 bp, Homo sapiens
tactcaacacaagaa

SEQ ID NO: 1440328 - DNA, 15 bp, Homo sapiens
gtactcaacacaaga

SEQ ID NO: 1440329 - DNA, 15 bp, Homo sapiens
ggtactcaacacaag

SEQ ID NO: 1440330 - DNA, 15 bp, Homo sapiens
aggtactcaacacaa

SEQ ID NO: 1440331 - DNA, 15 bp, Homo sapiens
aaggtactcaacaca

SEQ ID NO: 1440332 - DNA, 15 bp, Homo sapiens
caaggtactcaacac

SEQ ID NO: 1440333 - DNA, 15 bp, Homo sapiens
acaaggtactcaaca

SEQ ID NO: 1440334 - DNA, 15 bp, Homo sapiens
aacaaggtactcaac

SEQ ID NO: 1440335 - DNA, 15 bp, Homo sapiens
aaacaaggtactcaa

SEQ ID NO: 1440336 - DNA, 15 bp, Homo sapiens
gaaacaaggtactca

SEQ ID NO: 1440337 - DNA, 15 bp, Homo sapiens
ggaaacaaggtactc

SEQ ID NO: 1440338 - DNA, 15 bp, Homo sapiens
aggaaacaaggtact

SEQ ID NO: 1440339 - DNA, 15 bp, Homo sapiens
aaggaaacaaggtac

SEQ ID NO: 1440340 - DNA, 15 bp, Homo sapiens
caaggaaacaaggta

SEQ ID NO: 1440341 - DNA, 15 bp, Homo sapiens
tcaaggaaacaaggt

SEQ ID NO: 1440342 - DNA, 15 bp, Homo sapiens
atcaaggaaacaagg

SEQ ID NO: 1440343 - DNA, 15 bp, Homo sapiens
gatcaaggaaacaag

SEQ ID NO: 1440344 - DNA, 15 bp, Homo sapiens
ggatcaaggaaacaa

SEQ ID NO: 1440345 - DNA, 15 bp, Homo sapiens
gggatcaaggaaaca

SEQ ID NO: 1440346 - DNA, 15 bp, Homo sapiens
tgggatcaaggaaac

SEQ ID NO: 1440347 - DNA, 15 bp, Homo sapiens
atgggatcaaggaaa

SEQ ID NO: 1440348 - DNA, 15 bp, Homo sapiens
catgggatcaaggaa

SEQ ID NO: 1440349 - DNA, 15 bp, Homo sapiens
gcatgggatcaagga

SEQ ID NO: 1440350 - DNA, 15 bp, Homo sapiens
ggcatgggatcaagg

SEQ ID NO: 1440351 - DNA, 15 bp, Homo sapiens
aggcatgggatcaag

SEQ ID NO: 1440352 - DNA, 15 bp, Homo sapiens
aaggcatgggatcaa

SEQ ID NO: 1440353 - DNA, 15 bp, Homo sapiens
gaaggcatgggatca

SEQ ID NO: 1440354 - DNA, 15 bp, Homo sapiens
ggaaggcatgggatc

SEQ ID NO: 1440355 - DNA, 15 bp, Homo sapiens
aggaaggcatgggat

SEQ ID NO: 1440356 - DNA, 15 bp, Homo sapiens
gaggaaggcatggga

SEQ ID NO: 1440357 - DNA, 15 bp, Homo sapiens
agaggaaggcatggg

SEQ ID NO: 1440358 - DNA, 15 bp, Homo sapiens
aagaggaaggcatgg

SEQ ID NO: 1440359 - DNA, 15 bp, Homo sapiens
aaagaggaaggcatg

SEQ ID NO: 1440360 - DNA, 15 bp, Homo sapiens
gaaagaggaaggcat

SEQ ID NO: 1440361 - DNA, 15 bp, Homo sapiens
agaaagaggaaggca

SEQ ID NO: 1440362 - DNA, 15 bp, Homo sapiens
aagaaagaggaaggc

SEQ ID NO: 1440363 - DNA, 15 bp, Homo sapiens
taagaaagaggaagg

SEQ ID NO: 1440364 - DNA, 15 bp, Homo sapiens
ttaagaaagaggaag

SEQ ID NO: 1440365 - DNA, 15 bp, Homo sapiens
attaagaaagaggaa

SEQ ID NO: 1440366 - DNA, 15 bp, Homo sapiens
aattaagaaagagga

SEQ ID NO: 1440367 - DNA, 15 bp, Homo sapiens
aaattaagaaagagg

SEQ ID NO: 1440368 - DNA, 15 bp, Homo sapiens
taaattaagaaagag

SEQ ID NO: 1440369 - DNA, 15 bp, Homo sapiens
ataaattaagaaaga

SEQ ID NO: 1440370 - DNA, 15 bp, Homo sapiens
aataaattaagaaag

SEQ ID NO: 1440371 - DNA, 15 bp, Homo sapiens
aaataaattaagaaa

SEQ ID NO: 1440372 - DNA, 15 bp, Homo sapiens
gaaataaattaagaa

SEQ ID NO: 1440373 - DNA, 15 bp, Homo sapiens
agaaataaattaaga

SEQ ID NO: 1440374 - DNA, 15 bp, Homo sapiens
aagaaataaattaag

SEQ ID NO: 1440375 - DNA, 15 bp, Homo sapiens
aaagaaataaattaa

SEQ ID NO: 1440376 - DNA, 15 bp, Homo sapiens
caaagaaataaatta

SEQ ID NO: 1440377 - DNA, 15 bp, Homo sapiens
acaaagaaataaatt

SEQ ID NO: 1440378 - DNA, 15 bp, Homo sapiens
aacaaagaaataaat

SEQ ID NO: 1440379 - DNA, 15 bp, Homo sapiens
aaacaaagaaataaa

SEQ ID NO: 1440380 - DNA, 15 bp, Homo sapiens
aaaacaaagaaataa

SEQ ID NO: 1440381 - DNA, 15 bp, Homo sapiens
caaaacaaagaaata

SEQ ID NO: 1440382 - DNA, 15 bp, Homo sapiens
acaaaacaaagaaat

SEQ ID NO: 1440383 - DNA, 15 bp, Homo sapiens
aacaaaacaaagaaa

SEQ ID NO: 1440384 - DNA, 15 bp, Homo sapiens
caacaaaacaaagaa

SEQ ID NO: 1440385 - DNA, 15 bp, Homo sapiens
ccaacaaaacaaaga

SEQ ID NO: 1440386 - DNA, 15 bp, Homo sapiens
tccaacaaaacaaag

SEQ ID NO: 1440387 - DNA, 15 bp, Homo sapiens
ctccaacaaaacaaa

SEQ ID NO: 1440388 - DNA, 15 bp, Homo sapiens
actccaacaaaacaa

SEQ ID NO: 1440389 - DNA, 15 bp, Homo sapiens
tactccaacaaaaca

SEQ ID NO: 1440390 - DNA, 15 bp, Homo sapiens
gtactccaacaaaac

SEQ ID NO: 1440391 - DNA, 15 bp, Homo sapiens
tgtactccaacaaaa

SEQ ID NO: 1440392 - DNA, 15 bp, Homo sapiens
atgtactccaacaaa

SEQ ID NO: 1440393 - DNA, 15 bp, Homo sapiens
gatgtactccaacaa

SEQ ID NO: 1440394 - DNA, 15 bp, Homo sapiens
ggatgtactccaaca

SEQ ID NO: 1440395 - DNA, 15 bp, Homo sapiens
aggatgtactccaac

SEQ ID NO: 1440396 - DNA, 15 bp, Homo sapiens
gaggatgtactccaa

SEQ ID NO: 1440397 - DNA, 15 bp, Homo sapiens
tgaggatgtactcca

SEQ ID NO: 1440398 - DNA, 15 bp, Homo sapiens
ttgaggatgtactcc

SEQ ID NO: 1440399 - DNA, 15 bp, Homo sapiens
tttgaggatgtactc

SEQ ID NO: 1440400 - DNA, 15 bp, Homo sapiens
atttgaggatgtact

SEQ ID NO: 1440401 - DNA, 15 bp, Homo sapiens
tatttgaggatgtac

SEQ ID NO: 1440402 - DNA, 15 bp, Homo sapiens
ctatttgaggatgta

SEQ ID NO: 1440403 - DNA, 15 bp, Homo sapiens
gctatttgaggatgt

SEQ ID NO: 1440404 - DNA, 15 bp, Homo sapiens
agctatttgaggatg

SEQ ID NO: 1440405 - DNA, 15 bp, Homo sapiens
aagctatttgaggat

SEQ ID NO: 1440406 - DNA, 15 bp, Homo sapiens
aaagctatttgagga

SEQ ID NO: 1440407 - DNA, 15 bp, Homo sapiens
gaaagctatttgagg

SEQ ID NO: 1440408 - DNA, 15 bp, Homo sapiens
ggaaagctatttgag

SEQ ID NO: 1440409 - DNA, 15 bp, Homo sapiens
cggaaagctatttga

SEQ ID NO: 1440410 - DNA, 15 bp, Homo sapiens
tcggaaagctatttg

SEQ ID NO: 1440411 - DNA, 15 bp, Homo sapiens
ctcggaaagctattt

SEQ ID NO: 1440412 - DNA, 15 bp, Homo sapiens
tctcggaaagctatt

SEQ ID NO: 1440413 - DNA, 15 bp, Homo sapiens
ttctcggaaagctat

SEQ ID NO: 1440414 - DNA, 15 bp, Homo sapiens
attctcggaaagcta

SEQ ID NO: 1440415 - DNA, 15 bp, Homo sapiens
cattctcggaaagct

SEQ ID NO: 1440416 - DNA, 15 bp, Homo sapiens
ccattctcggaaagc

SEQ ID NO: 1440417 - DNA, 15 bp, Homo sapiens
cccattctcggaaag

SEQ ID NO: 1440418 - DNA, 15 bp, Homo sapiens
acccattctcggaaa

SEQ ID NO: 1440419 - DNA, 15 bp, Homo sapiens
cacccattctcggaa

SEQ ID NO: 1440420 - DNA, 15 bp, Homo sapiens
tcacccattctcgga

SEQ ID NO: 1440421 - DNA, 15 bp, Homo sapiens
ttcacccattctcgg

SEQ ID NO: 1440422 - DNA, 15 bp, Homo sapiens
attcacccattctcg

SEQ ID NO: 1440423 - DNA, 15 bp, Homo sapiens
cattcacccattctc

SEQ ID NO: 1440424 - DNA, 15 bp, Homo sapiens
ccattcacccattct

SEQ ID NO: 1440425 - DNA, 15 bp, Homo sapiens
cccattcacccattc

SEQ ID NO: 1440426 - DNA, 15 bp, Homo sapiens
tcccattcacccatt

SEQ ID NO: 1440427 - DNA, 15 bp, Homo sapiens
ttcccattcacccat

SEQ ID NO: 1440428 - DNA, 15 bp, Homo sapiens
tttcccattcaccca

SEQ ID NO: 1440429 - DNA, 15 bp, Homo sapiens
atttcccattcaccc

SEQ ID NO: 1440430 - DNA, 15 bp, Homo sapiens
tatttcccattcacc

SEQ ID NO: 1440431 - DNA, 15 bp, Homo sapiens
ctatttcccattcac

SEQ ID NO: 1440432 - DNA, 15 bp, Homo sapiens
tctatttcccattca

SEQ ID NO: 1440433 - DNA, 15 bp, Homo sapiens
ttctatttcccattc

SEQ ID NO: 1440434 - DNA, 15 bp, Homo sapiens
attctatttcccatt

SEQ ID NO: 1440435 - DNA, 15 bp, Homo sapiens
aattctatttcccat

SEQ ID NO: 1440436 - DNA, 15 bp, Homo sapiens
aaattctatttccca

SEQ ID NO: 1440437 - DNA, 15 bp, Homo sapiens
caaattctatttccc

SEQ ID NO: 1440438 - DNA, 15 bp, Homo sapiens
acaaattctatttcc

SEQ ID NO: 1440439 - DNA, 15 bp, Homo sapiens
tacaaattctatttc

SEQ ID NO: 1440440 - DNA, 15 bp, Homo sapiens
ctacaaattctattt

SEQ ID NO: 1440441 - DNA, 15 bp, Homo sapiens
cctacaaattctatt

SEQ ID NO: 1440442 - DNA, 15 bp, Homo sapiens
gcctacaaattctat

SEQ ID NO: 1440443 - DNA, 15 bp, Homo sapiens
ggcctacaaattcta

SEQ ID NO: 1440444 - DNA, 15 bp, Homo sapiens
gggcctacaaattct

SEQ ID NO: 1440445 - DNA, 15 bp, Homo sapiens
tgggcctacaaattc

SEQ ID NO: 1440446 - DNA, 15 bp, Homo sapiens
atgggcctacaaatt

SEQ ID NO: 1440447 - DNA, 15 bp, Homo sapiens
catgggcctacaaat

SEQ ID NO: 1440448 - DNA, 15 bp, Homo sapiens
acatgggcctacaaa

SEQ ID NO: 1440449 - DNA, 15 bp, Homo sapiens
tacatgggcctacaa

SEQ ID NO: 1440450 - DNA, 15 bp, Homo sapiens
atacatgggcctaca

SEQ ID NO: 1440451 - DNA, 15 bp, Homo sapiens
tatacatgggcctac

SEQ ID NO: 1440452 - DNA, 15 bp, Homo sapiens
ctatacatgggccta

SEQ ID NO: 1440453 - DNA, 15 bp, Homo sapiens
tctatacatgggcct

SEQ ID NO: 1440454 - DNA, 15 bp, Homo sapiens
atctatacatgggcc

SEQ ID NO: 1440455 - DNA, 15 bp, Homo sapiens
gatctatacatgggc

SEQ ID NO: 1440456 - DNA, 15 bp, Homo sapiens
tgatctatacatggg

SEQ ID NO: 1440457 - DNA, 15 bp, Homo sapiens
ctgatctatacatgg

SEQ ID NO: 1440458 - DNA, 15 bp, Homo sapiens
tctgatctatacatg

SEQ ID NO: 1440459 - DNA, 15 bp, Homo sapiens
ctctgatctatacat

SEQ ID NO: 1440460 - DNA, 15 bp, Homo sapiens
actctgatctataca

SEQ ID NO: 1440461 - DNA, 15 bp, Homo sapiens
aactctgatctatac

SEQ ID NO: 1440462 - DNA, 15 bp, Homo sapiens
gaactctgatctata

SEQ ID NO: 1440463 - DNA, 15 bp, Homo sapiens
agaactctgatctat

SEQ ID NO: 1440464 - DNA, 15 bp, Homo sapiens
tagaactctgatcta

SEQ ID NO: 1440465 - DNA, 15 bp, Homo sapiens
atagaactctgatct

SEQ ID NO: 1440466 - DNA, 15 bp, Homo sapiens
aatagaactctgatc

SEQ ID NO: 1440467 - DNA, 15 bp, Homo sapiens
aaatagaactctgat

SEQ ID NO: 1440468 - DNA, 15 bp, Homo sapiens
gaaatagaactctga

SEQ ID NO: 1440469 - DNA, 15 bp, Homo sapiens
agaaatagaactctg

SEQ ID NO: 1440470 - DNA, 15 bp, Homo sapiens
cagaaatagaactct

SEQ ID NO: 1440471 - DNA, 15 bp, Homo sapiens
tcagaaatagaactc

SEQ ID NO: 1440472 - DNA, 15 bp, Homo sapiens
ctcagaaatagaact

SEQ ID NO: 1440473 - DNA, 15 bp, Homo sapiens
cctcagaaatagaac

SEQ ID NO: 1440474 - DNA, 15 bp, Homo sapiens
tcctcagaaatagaa

SEQ ID NO: 1440475 - DNA, 15 bp, Homo sapiens
atcctcagaaataga

SEQ ID NO: 1440476 - DNA, 15 bp, Homo sapiens
aatcctcagaaatag

SEQ ID NO: 1440477 - DNA, 15 bp, Homo sapiens
aaatcctcagaaata

SEQ ID NO: 1440478 - DNA, 15 bp, Homo sapiens
taaatcctcagaaat

SEQ ID NO: 1440479 - DNA, 15 bp, Homo sapiens
ttaaatcctcagaaa

SEQ ID NO: 1440480 - DNA, 15 bp, Homo sapiens
gttaaatcctcagaa

SEQ ID NO: 1440481 - DNA, 15 bp, Homo sapiens
tgttaaatcctcaga

SEQ ID NO: 1440482 - DNA, 15 bp, Homo sapiens
gtgttaaatcctcag

SEQ ID NO: 1440483 - DNA, 15 bp, Homo sapiens
tgtgttaaatcctca

SEQ ID NO: 1440484 - DNA, 15 bp, Homo sapiens
gtgtgttaaatcctc

SEQ ID NO: 1440485 - DNA, 15 bp, Homo sapiens
agtgtgttaaatcct

SEQ ID NO: 1440486 - DNA, 15 bp, Homo sapiens
gagtgtgttaaatcc

SEQ ID NO: 1440487 - DNA, 15 bp, Homo sapiens
agagtgtgttaaatc

SEQ ID NO: 1440488 - DNA, 15 bp, Homo sapiens
tagagtgtgttaaat

SEQ ID NO: 1440489 - DNA, 15 bp, Homo sapiens
ttagagtgtgttaaa

SEQ ID NO: 1440490 - DNA, 15 bp, Homo sapiens
attagagtgtgttaa

SEQ ID NO: 1440491 - DNA, 15 bp, Homo sapiens
gattagagtgtgtta

SEQ ID NO: 1440492 - DNA, 15 bp, Homo sapiens
tgattagagtgtgtt

SEQ ID NO: 1440493 - DNA, 15 bp, Homo sapiens
atgattagagtgtgt

SEQ ID NO: 1440494 - DNA, 15 bp, Homo sapiens
catgattagagtgtg

SEQ ID NO: 1440495 - DNA, 15 bp, Homo sapiens
acatgattagagtgt

SEQ ID NO: 1440496 - DNA, 15 bp, Homo sapiens
aacatgattagagtg

SEQ ID NO: 1440497 - DNA, 15 bp, Homo sapiens
taacatgattagagt

SEQ ID NO: 1440498 - DNA, 15 bp, Homo sapiens
gtaacatgattagag

SEQ ID NO: 1440499 - DNA, 15 bp, Homo sapiens
agtaacatgattaga

SEQ ID NO: 1440500 - DNA, 15 bp, Homo sapiens
aagtaacatgattag

SEQ ID NO: 1440501 - DNA, 15 bp, Homo sapiens
caagtaacatgatta

SEQ ID NO: 1440502 - DNA, 15 bp, Homo sapiens
tcaagtaacatgatt

SEQ ID NO: 1440503 - DNA, 15 bp, Homo sapiens
ttcaagtaacatgat

SEQ ID NO: 1440504 - DNA, 15 bp, Homo sapiens
tttcaagtaacatga

SEQ ID NO: 1440505 - DNA, 15 bp, Homo sapiens
gtttcaagtaacatg

SEQ ID NO: 1440506 - DNA, 15 bp, Homo sapiens
tgtttcaagtaacat

SEQ ID NO: 1440507 - DNA, 15 bp, Homo sapiens
ttgtttcaagtaaca

SEQ ID NO: 1440508 - DNA, 15 bp, Homo sapiens
cttgtttcaagtaac

SEQ ID NO: 1440509 - DNA, 15 bp, Homo sapiens
acttgtttcaagtaa

SEQ ID NO: 1440510 - DNA, 15 bp, Homo sapiens
aacttgtttcaagta

SEQ ID NO: 1440511 - DNA, 15 bp, Homo sapiens
aaacttgtttcaagt

SEQ ID NO: 1440512 - DNA, 15 bp, Homo sapiens
taaacttgtttcaag

SEQ ID NO: 1440513 - DNA, 15 bp, Homo sapiens
gtaaacttgtttcaa

SEQ ID NO: 1440514 - DNA, 15 bp, Homo sapiens
agtaaacttgtttca

SEQ ID NO: 1440515 - DNA, 15 bp, Homo sapiens
tagtaaacttgtttc

SEQ ID NO: 1440516 - DNA, 15 bp, Homo sapiens
atagtaaacttgttt

SEQ ID NO: 1440517 - DNA, 15 bp, Homo sapiens
aatagtaaacttgtt

SEQ ID NO: 1440518 - DNA, 15 bp, Homo sapiens
aaatagtaaacttgt

SEQ ID NO: 1440519 - DNA, 15 bp, Homo sapiens
caaatagtaaacttg

SEQ ID NO: 1440520 - DNA, 15 bp, Homo sapiens
acaaatagtaaactt

SEQ ID NO: 1440521 - DNA, 15 bp, Homo sapiens
aacaaatagtaaact

SEQ ID NO: 1440522 - DNA, 15 bp, Homo sapiens
taacaaatagtaaac

SEQ ID NO: 1440523 - DNA, 15 bp, Homo sapiens
ttaacaaatagtaaa

SEQ ID NO: 1440524 - DNA, 15 bp, Homo sapiens
gttaacaaatagtaa

SEQ ID NO: 1440525 - DNA, 15 bp, Homo sapiens
ggttaacaaatagta

SEQ ID NO: 1440526 - DNA, 15 bp, Homo sapiens
tggttaacaaatagt

SEQ ID NO: 1440527 - DNA, 15 bp, Homo sapiens
ctggttaacaaatag

SEQ ID NO: 1440528 - DNA, 15 bp, Homo sapiens
actggttaacaaata

SEQ ID NO: 1440529 - DNA, 15 bp, Homo sapiens
cactggttaacaaat

SEQ ID NO: 1440530 - DNA, 15 bp, Homo sapiens
acactggttaacaaa

SEQ ID NO: 1440531 - DNA, 15 bp, Homo sapiens
gacactggttaacaa

SEQ ID NO: 1440532 - DNA, 15 bp, Homo sapiens
ggacactggttaaca

SEQ ID NO: 1440533 - DNA, 15 bp, Homo sapiens
tggacactggttaac

SEQ ID NO: 1440534 - DNA, 15 bp, Homo sapiens
atggacactggttaa

SEQ ID NO: 1440535 - DNA, 15 bp, Homo sapiens
tatggacactggtta

SEQ ID NO: 1440536 - DNA, 15 bp, Homo sapiens
ttatggacactggtt

SEQ ID NO: 1440537 - DNA, 15 bp, Homo sapiens
tttatggacactggt

SEQ ID NO: 1440538 - DNA, 15 bp, Homo sapiens
ttttatggacactgg

SEQ ID NO: 1440539 - DNA, 15 bp, Homo sapiens
attttatggacactg

SEQ ID NO: 1440540 - DNA, 15 bp, Homo sapiens
tattttatggacact

SEQ ID NO: 1440541 - DNA, 15 bp, Homo sapiens
atattttatggacac

SEQ ID NO: 1440542 - DNA, 15 bp, Homo sapiens
aatattttatggaca

SEQ ID NO: 1440543 - DNA, 15 bp, Homo sapiens
caatattttatggac

SEQ ID NO: 1440544 - DNA, 15 bp, Homo sapiens
acaatattttatgga

SEQ ID NO: 1440545 - DNA, 15 bp, Homo sapiens
tacaatattttatgg

SEQ ID NO: 1440546 - DNA, 15 bp, Homo sapiens
ctacaatattttatg

SEQ ID NO: 1440547 - DNA, 15 bp, Homo sapiens
cctacaatattttat

SEQ ID NO: 1440548 - DNA, 15 bp, Homo sapiens
tcctacaatatttta

SEQ ID NO: 1440549 - DNA, 15 bp, Homo sapiens
gtcctacaatatttt

SEQ ID NO: 1440550 - DNA, 15 bp, Homo sapiens
agtcctacaatattt

SEQ ID NO: 1440551 - DNA, 15 bp, Homo sapiens
cagtcctacaatatt

SEQ ID NO: 1440552 - DNA, 15 bp, Homo sapiens
acagtcctacaatat

SEQ ID NO: 1440553 - DNA, 15 bp, Homo sapiens
tacagtcctacaata

SEQ ID NO: 1440554 - DNA, 15 bp, Homo sapiens
gtacagtcctacaat

SEQ ID NO: 1440555 - DNA, 15 bp, Homo sapiens
ggtacagtcctacaa

SEQ ID NO: 1440556 - DNA, 15 bp, Homo sapiens
aggtacagtcctaca

SEQ ID NO: 1440557 - DNA, 15 bp, Homo sapiens
gaggtacagtcctac

SEQ ID NO: 1440558 - DNA, 15 bp, Homo sapiens
ggaggtacagtccta

SEQ ID NO: 1440559 - DNA, 15 bp, Homo sapiens
tggaggtacagtcct

SEQ ID NO: 1440560 - DNA, 15 bp, Homo sapiens
atggaggtacagtcc

SEQ ID NO: 1440561 - DNA, 15 bp, Homo sapiens
gatggaggtacagtc

SEQ ID NO: 1440562 - DNA, 15 bp, Homo sapiens
tgatggaggtacagt

SEQ ID NO: 1440563 - DNA, 15 bp, Homo sapiens
atgatggaggtacag

SEQ ID NO: 1440564 - DNA, 15 bp, Homo sapiens
aatgatggaggtaca

SEQ ID NO: 1440565 - DNA, 15 bp, Homo sapiens
aaatgatggaggtac

SEQ ID NO: 1440566 - DNA, 15 bp, Homo sapiens
gaaatgatggaggta

SEQ ID NO: 1440567 - DNA, 15 bp, Homo sapiens
agaaatgatggaggt

SEQ ID NO: 1440568 - DNA, 15 bp, Homo sapiens
aagaaatgatggagg

SEQ ID NO: 1440569 - DNA, 15 bp, Homo sapiens
aaagaaatgatggag

SEQ ID NO: 1440570 - DNA, 15 bp, Homo sapiens
gaaagaaatgatgga

SEQ ID NO: 1440571 - DNA, 15 bp, Homo sapiens
tgaaagaaatgatgg

SEQ ID NO: 1440572 - DNA, 15 bp, Homo sapiens
ttgaaagaaatgatg

SEQ ID NO: 1440573 - DNA, 15 bp, Homo sapiens
cttgaaagaaatgat

SEQ ID NO: 1440574 - DNA, 15 bp, Homo sapiens
tcttgaaagaaatga

SEQ ID NO: 1440575 - DNA, 15 bp, Homo sapiens
ctcttgaaagaaatg

SEQ ID NO: 1440576 - DNA, 15 bp, Homo sapiens
tctcttgaaagaaat

SEQ ID NO: 1440577 - DNA, 15 bp, Homo sapiens
ttctcttgaaagaaa

SEQ ID NO: 1440578 - DNA, 15 bp, Homo sapiens
tttctcttgaaagaa

SEQ ID NO: 1440579 - DNA, 15 bp, Homo sapiens
atttctcttgaaaga

SEQ ID NO: 1440580 - DNA, 15 bp, Homo sapiens
tatttctcttgaaag

SEQ ID NO: 1440581 - DNA, 15 bp, Homo sapiens
ttatttctcttgaaa

SEQ ID NO: 1440582 - DNA, 15 bp, Homo sapiens
tttatttctcttgaa

SEQ ID NO: 1440583 - DNA, 15 bp, Homo sapiens
gtttatttctcttga

SEQ ID NO: 1440584 - DNA, 15 bp, Homo sapiens
tgtttatttctcttg

SEQ ID NO: 1440585 - DNA, 15 bp, Homo sapiens
ttgtttatttctctt

SEQ ID NO: 1440586 - DNA, 15 bp, Homo sapiens
attgtttatttctct

SEQ ID NO: 1440587 - DNA, 15 bp, Homo sapiens
gattgtttatttctc

SEQ ID NO: 1440588 - DNA, 15 bp, Homo sapiens
tgattgtttatttct

SEQ ID NO: 1440589 - DNA, 15 bp, Homo sapiens
ctgattgtttatttc

SEQ ID NO: 1440590 - DNA, 15 bp, Homo sapiens
tctgattgtttattt

SEQ ID NO: 1440591 - DNA, 15 bp, Homo sapiens
atctgattgtttatt

SEQ ID NO: 1440592 - DNA, 15 bp, Homo sapiens
catctgattgtttat

SEQ ID NO: 1440593 - DNA, 15 bp, Homo sapiens
acatctgattgttta

SEQ ID NO: 1440594 - DNA, 15 bp, Homo sapiens
aacatctgattgttt

SEQ ID NO: 1440595 - DNA, 15 bp, Homo sapiens
gaacatctgattgtt

SEQ ID NO: 1440596 - DNA, 15 bp, Homo sapiens
agaacatctgattgt

SEQ ID NO: 1440597 - DNA, 15 bp, Homo sapiens
cagaacatctgattg

SEQ ID NO: 1440598 - DNA, 15 bp, Homo sapiens
gcagaacatctgatt

SEQ ID NO: 1440599 - DNA, 15 bp, Homo sapiens
ggcagaacatctgat

SEQ ID NO: 1440600 - DNA, 15 bp, Homo sapiens
gggcagaacatctga

SEQ ID NO: 1440601 - DNA, 15 bp, Homo sapiens
tgggcagaacatctg

SEQ ID NO: 1440602 - DNA, 15 bp, Homo sapiens
ctgggcagaacatct

SEQ ID NO: 1440603 - DNA, 15 bp, Homo sapiens
tctgggcagaacatc

SEQ ID NO: 1440604 - DNA, 15 bp, Homo sapiens
ctctgggcagaacat

SEQ ID NO: 1440605 - DNA, 15 bp, Homo sapiens
actctgggcagaaca

SEQ ID NO: 1440606 - DNA, 15 bp, Homo sapiens
aactctgggcagaac

SEQ ID NO: 1440607 - DNA, 15 bp, Homo sapiens
taactctgggcagaa

SEQ ID NO: 1440608 - DNA, 15 bp, Homo sapiens
ataactctgggcaga

SEQ ID NO: 1440609 - DNA, 15 bp, Homo sapiens
cataactctgggcag

SEQ ID NO: 1440610 - DNA, 15 bp, Homo sapiens
gcataactctgggca

SEQ ID NO: 1440611 - DNA, 15 bp, Homo sapiens
agcataactctgggc

SEQ ID NO: 1440612 - DNA, 15 bp, Homo sapiens
gagcataactctggg

SEQ ID NO: 1440613 - DNA, 15 bp, Homo sapiens
tgagcataactctgg

SEQ ID NO: 1440614 - DNA, 15 bp, Homo sapiens
ttgagcataactctg

SEQ ID NO: 1440615 - DNA, 15 bp, Homo sapiens
attgagcataactct

SEQ ID NO: 1440616 - DNA, 15 bp, Homo sapiens
cattgagcataactc

SEQ ID NO: 1440617 - DNA, 15 bp, Homo sapiens
tcattgagcataact

SEQ ID NO: 1440618 - DNA, 15 bp, Homo sapiens
ctcattgagcataac

SEQ ID NO: 1440619 - DNA, 15 bp, Homo sapiens
gctcattgagcataa

SEQ ID NO: 1440620 - DNA, 15 bp, Homo sapiens
agctcattgagcata

SEQ ID NO: 1440621 - DNA, 15 bp, Homo sapiens
gagctcattgagcat

SEQ ID NO: 1440622 - DNA, 15 bp, Homo sapiens
tgagctcattgagca

SEQ ID NO: 1440623 - DNA, 15 bp, Homo sapiens
ttgagctcattgagc

SEQ ID NO: 1440624 - DNA, 15 bp, Homo sapiens
tttgagctcattgag

SEQ ID NO: 1440625 - DNA, 15 bp, Homo sapiens
atttgagctcattga

SEQ ID NO: 1440626 - DNA, 15 bp, Homo sapiens
aatttgagctcattg

SEQ ID NO: 1440627 - DNA, 15 bp, Homo sapiens
aaatttgagctcatt

SEQ ID NO: 1440628 - DNA, 15 bp, Homo sapiens
caaatttgagctcat

SEQ ID NO: 1440629 - DNA, 15 bp, Homo sapiens
gcaaatttgagctca

SEQ ID NO: 1440630 - DNA, 15 bp, Homo sapiens
agcaaatttgagctc

SEQ ID NO: 1440631 - DNA, 15 bp, Homo sapiens
gagcaaatttgagct

SEQ ID NO: 1440632 - DNA, 15 bp, Homo sapiens
tgagcaaatttgagc

SEQ ID NO: 1440633 - DNA, 15 bp, Homo sapiens
atgagcaaatttgag

SEQ ID NO: 1440634 - DNA, 15 bp, Homo sapiens
gatgagcaaatttga

SEQ ID NO: 1440635 - DNA, 15 bp, Homo sapiens
ggatgagcaaatttg

SEQ ID NO: 1440636 - DNA, 15 bp, Homo sapiens
tggatgagcaaattt

SEQ ID NO: 1440637 - DNA, 15 bp, Homo sapiens
atggatgagcaaatt

SEQ ID NO: 1440638 - DNA, 15 bp, Homo sapiens
gatggatgagcaaat

SEQ ID NO: 1440639 - DNA, 15 bp, Homo sapiens
tgatggatgagcaaa

SEQ ID NO: 1440640 - DNA, 15 bp, Homo sapiens
ttgatggatgagcaa

SEQ ID NO: 1440641 - DNA, 15 bp, Homo sapiens
tttgatggatgagca

SEQ ID NO: 1440642 - DNA, 15 bp, Homo sapiens
ttttgatggatgagc

SEQ ID NO: 1440643 - DNA, 15 bp, Homo sapiens
gttttgatggatgag

SEQ ID NO: 1440644 - DNA, 15 bp, Homo sapiens
agttttgatggatga

SEQ ID NO: 1440645 - DNA, 15 bp, Homo sapiens
cagttttgatggatg

SEQ ID NO: 1440646 - DNA, 15 bp, Homo sapiens
tcagttttgatggat

SEQ ID NO: 1440647 - DNA, 15 bp, Homo sapiens
atcagttttgatgga

SEQ ID NO: 1440648 - DNA, 15 bp, Homo sapiens
gatcagttttgatgg

SEQ ID NO: 1440649 - DNA, 15 bp, Homo sapiens
tgatcagttttgatg

SEQ ID NO: 1440650 - DNA, 15 bp, Homo sapiens
atgatcagttttgat

SEQ ID NO: 1440651 - DNA, 15 bp, Homo sapiens
tatgatcagttttga

SEQ ID NO: 1440652 - DNA, 15 bp, Homo sapiens
ctatgatcagttttg

SEQ ID NO: 1440653 - DNA, 15 bp, Homo sapiens
cctatgatcagtttt

SEQ ID NO: 1440654 - DNA, 15 bp, Homo sapiens
gcctatgatcagttt

SEQ ID NO: 1440655 - DNA, 15 bp, Homo sapiens
agcctatgatcagtt

SEQ ID NO: 1440656 - DNA, 15 bp, Homo sapiens
aagcctatgatcagt

SEQ ID NO: 1440657 - DNA, 15 bp, Homo sapiens
aaagcctatgatcag

SEQ ID NO: 1440658 - DNA, 15 bp, Homo sapiens
taaagcctatgatca

SEQ ID NO: 1440659 - DNA, 15 bp, Homo sapiens
ttaaagcctatgatc

SEQ ID NO: 1440660 - DNA, 15 bp, Homo sapiens
cttaaagcctatgat

SEQ ID NO: 1440661 - DNA, 15 bp, Homo sapiens
tcttaaagcctatga

SEQ ID NO: 1440662 - DNA, 15 bp, Homo sapiens
ttcttaaagcctatg

SEQ ID NO: 1440663 - DNA, 15 bp, Homo sapiens
gttcttaaagcctat

SEQ ID NO: 1440664 - DNA, 15 bp, Homo sapiens
ggttcttaaagccta

SEQ ID NO: 1440665 - DNA, 15 bp, Homo sapiens
aggttcttaaagcct

SEQ ID NO: 1440666 - DNA, 15 bp, Homo sapiens
gaggttcttaaagcc

SEQ ID NO: 1440667 - DNA, 15 bp, Homo sapiens
ggaggttcttaaagc

SEQ ID NO: 1440668 - DNA, 15 bp, Homo sapiens
aggaggttcttaaag

SEQ ID NO: 1440669 - DNA, 15 bp, Homo sapiens
caggaggttcttaaa

SEQ ID NO: 1440670 - DNA, 15 bp, Homo sapiens
ccaggaggttcttaa

SEQ ID NO: 1440671 - DNA, 15 bp, Homo sapiens
gccaggaggttctta

SEQ ID NO: 1440672 - DNA, 15 bp, Homo sapiens
tgccaggaggttctt

SEQ ID NO: 1440673 - DNA, 15 bp, Homo sapiens
gtgccaggaggttct

SEQ ID NO: 1440674 - DNA, 15 bp, Homo sapiens
tgtgccaggaggttc

SEQ ID NO: 1440675 - DNA, 15 bp, Homo sapiens
gtgtgccaggaggtt

SEQ ID NO: 1440676 - DNA, 15 bp, Homo sapiens
agtgtgccaggaggt

SEQ ID NO: 1440677 - DNA, 15 bp, Homo sapiens
cagtgtgccaggagg

SEQ ID NO: 1440678 - DNA, 15 bp, Homo sapiens
gcagtgtgccaggag

SEQ ID NO: 1440679 - DNA, 15 bp, Homo sapiens
tgcagtgtgccagga

SEQ ID NO: 1440680 - DNA, 15 bp, Homo sapiens
ctgcagtgtgccagg

SEQ ID NO: 1440681 - DNA, 15 bp, Homo sapiens
tctgcagtgtgccag

SEQ ID NO: 1440682 - DNA, 15 bp, Homo sapiens
ctctgcagtgtgcca

SEQ ID NO: 1440683 - DNA, 15 bp, Homo sapiens
actctgcagtgtgcc

SEQ ID NO: 1440684 - DNA, 15 bp, Homo sapiens
tactctgcagtgtgc

SEQ ID NO: 1440685 - DNA, 15 bp, Homo sapiens
atactctgcagtgtg

SEQ ID NO: 1440686 - DNA, 15 bp, Homo sapiens
aatactctgcagtgt

SEQ ID NO: 1440687 - DNA, 15 bp, Homo sapiens
gaatactctgcagtg

SEQ ID NO: 1440688 - DNA, 15 bp, Homo sapiens
ggaatactctgcagt

SEQ ID NO: 1440689 - DNA, 15 bp, Homo sapiens
aggaatactctgcag

SEQ ID NO: 1440690 - DNA, 15 bp, Homo sapiens
aaggaatactctgca

SEQ ID NO: 1440691 - DNA, 15 bp, Homo sapiens
caaggaatactctgc

SEQ ID NO: 1440692 - DNA, 15 bp, Homo sapiens
ccaaggaatactctg

SEQ ID NO: 1440693 - DNA, 15 bp, Homo sapiens
cccaaggaatactct

SEQ ID NO: 1440694 - DNA, 15 bp, Homo sapiens
ccccaaggaatactc

SEQ ID NO: 1440695 - DNA, 15 bp, Homo sapiens
accccaaggaatact

SEQ ID NO: 1440696 - DNA, 15 bp, Homo sapiens
gaccccaaggaatac

SEQ ID NO: 1440697 - DNA, 15 bp, Homo sapiens
agaccccaaggaata

SEQ ID NO: 1440698 - DNA, 15 bp, Homo sapiens
cagaccccaaggaat

SEQ ID NO: 1440699 - DNA, 15 bp, Homo sapiens
acagaccccaaggaa

SEQ ID NO: 1440700 - DNA, 15 bp, Homo sapiens
tacagaccccaagga

SEQ ID NO: 1440701 - DNA, 15 bp, Homo sapiens
atacagaccccaagg

SEQ ID NO: 1440702 - DNA, 15 bp, Homo sapiens
tatacagaccccaag

SEQ ID NO: 1440703 - DNA, 15 bp, Homo sapiens
atatacagaccccaa

SEQ ID NO: 1440704 - DNA, 15 bp, Homo sapiens
gatatacagacccca

SEQ ID NO: 1440705 - DNA, 15 bp, Homo sapiens
ggatatacagacccc

SEQ ID NO: 1440706 - DNA, 15 bp, Homo sapiens
gggatatacagaccc

SEQ ID NO: 1440707 - DNA, 15 bp, Homo sapiens
tgggatatacagacc

SEQ ID NO: 1440708 - DNA, 15 bp, Homo sapiens
ctgggatatacagac

SEQ ID NO: 1440709 - DNA, 15 bp, Homo sapiens
actgggatatacaga

SEQ ID NO: 1440710 - DNA, 15 bp, Homo sapiens
tactgggatatacag

SEQ ID NO: 1440711 - DNA, 15 bp, Homo sapiens
atactgggatataca

SEQ ID NO: 1440712 - DNA, 15 bp, Homo sapiens
catactgggatatac

SEQ ID NO: 1440713 - DNA, 15 bp, Homo sapiens
tcatactgggatata

SEQ ID NO: 1440714 - DNA, 15 bp, Homo sapiens
ctcatactgggatat

SEQ ID NO: 1440715 - DNA, 15 bp, Homo sapiens
cctcatactgggata

SEQ ID NO: 1440716 - DNA, 15 bp, Homo sapiens
tcctcatactgggat

SEQ ID NO: 1440717 - DNA, 15 bp, Homo sapiens
ttcctcatactggga

SEQ ID NO: 1440718 - DNA, 15 bp, Homo sapiens
tttcctcatactggg

SEQ ID NO: 1440719 - DNA, 15 bp, Homo sapiens
ttttcctcatactgg

SEQ ID NO: 1440720 - DNA, 15 bp, Homo sapiens
gttttcctcatactg

SEQ ID NO: 1440721 - DNA, 15 bp, Homo sapiens
ggttttcctcatact

SEQ ID NO: 1440722 - DNA, 15 bp, Homo sapiens
tggttttcctcatac

SEQ ID NO: 1440723 - DNA, 15 bp, Homo sapiens
ttggttttcctcata

SEQ ID NO: 1440724 - DNA, 15 bp, Homo sapiens
gttggttttcctcat

SEQ ID NO: 1440725 - DNA, 15 bp, Homo sapiens
ggttggttttcctca

SEQ ID NO: 1440726 - DNA, 15 bp, Homo sapiens
gggttggttttcctc

SEQ ID NO: 1440727 - DNA, 15 bp, Homo sapiens
tgggttggttttcct

SEQ ID NO: 1440728 - DNA, 15 bp, Homo sapiens
ctgggttggttttcc

SEQ ID NO: 1440729 - DNA, 15 bp, Homo sapiens
tctgggttggttttc

SEQ ID NO: 1440730 - DNA, 15 bp, Homo sapiens
atctgggttggtttt

SEQ ID NO: 1440731 - DNA, 15 bp, Homo sapiens
aatctgggttggttt

SEQ ID NO: 1440732 - DNA, 15 bp, Homo sapiens
taatctgggttggtt

SEQ ID NO: 1440733 - DNA, 15 bp, Homo sapiens
ttaatctgggttggt

SEQ ID NO: 1440734 - DNA, 15 bp, Homo sapiens
gttaatctgggttgg

SEQ ID NO: 1440735 - DNA, 15 bp, Homo sapiens
tgttaatctgggttg

SEQ ID NO: 1440736 - DNA, 15 bp, Homo sapiens
ttgttaatctgggtt

SEQ ID NO: 1440737 - DNA, 15 bp, Homo sapiens
gttgttaatctgggt

SEQ ID NO: 1440738 - DNA, 15 bp, Homo sapiens
agttgttaatctggg

SEQ ID NO: 1440739 - DNA, 15 bp, Homo sapiens
cagttgttaatctgg

SEQ ID NO: 1440740 - DNA, 15 bp, Homo sapiens
gcagttgttaatctg

SEQ ID NO: 1440741 - DNA, 15 bp, Homo sapiens
tgcagttgttaatct

SEQ ID NO: 1440742 - DNA, 15 bp, Homo sapiens
atgcagttgttaatc

SEQ ID NO: 1440743 - DNA, 15 bp, Homo sapiens
aatgcagttgttaat

SEQ ID NO: 1440744 - DNA, 15 bp, Homo sapiens
aaatgcagttgttaa

SEQ ID NO: 1440745 - DNA, 15 bp, Homo sapiens
aaaatgcagttgtta

SEQ ID NO: 1440746 - DNA, 15 bp, Homo sapiens
taaaatgcagttgtt

SEQ ID NO: 1440747 - DNA, 15 bp, Homo sapiens
ctaaaatgcagttgt

SEQ ID NO: 1440748 - DNA, 15 bp, Homo sapiens
gctaaaatgcagttg

SEQ ID NO: 1440749 - DNA, 15 bp, Homo sapiens
tgctaaaatgcagtt

SEQ ID NO: 1440750 - DNA, 15 bp, Homo sapiens
gtgctaaaatgcagt

SEQ ID NO: 1440751 - DNA, 15 bp, Homo sapiens
tgtgctaaaatgcag

SEQ ID NO: 1440752 - DNA, 15 bp, Homo sapiens
ttgtgctaaaatgca

SEQ ID NO: 1440753 - DNA, 15 bp, Homo sapiens
cttgtgctaaaatgc

SEQ ID NO: 1440754 - DNA, 15 bp, Homo sapiens
tcttgtgctaaaatg

SEQ ID NO: 1440755 - DNA, 15 bp, Homo sapiens
atcttgtgctaaaat

SEQ ID NO: 1440756 - DNA, 15 bp, Homo sapiens
catcttgtgctaaaa

SEQ ID NO: 1440757 - DNA, 15 bp, Homo sapiens
ccatcttgtgctaaa

SEQ ID NO: 1440758 - DNA, 15 bp, Homo sapiens
cccatcttgtgctaa

SEQ ID NO: 1440759 - DNA, 15 bp, Homo sapiens
ccccatcttgtgcta

SEQ ID NO: 1440760 - DNA, 15 bp, Homo sapiens
gccccatcttgtgct

SEQ ID NO: 1440761 - DNA, 15 bp, Homo sapiens
tgccccatcttgtgc

SEQ ID NO: 1440762 - DNA, 15 bp, Homo sapiens
ctgccccatcttgtg

SEQ ID NO: 1440763 - DNA, 15 bp, Homo sapiens
cctgccccatcttgt

SEQ ID NO: 1440764 - DNA, 15 bp, Homo sapiens
acctgccccatcttg

SEQ ID NO: 1440765 - DNA, 15 bp, Homo sapiens
cacctgccccatctt

SEQ ID NO: 1440766 - DNA, 15 bp, Homo sapiens
ccacctgccccatct

SEQ ID NO: 1440767 - DNA, 15 bp, Homo sapiens
accacctgccccatc

SEQ ID NO: 1440768 - DNA, 15 bp, Homo sapiens
caccacctgccccat

SEQ ID NO: 1440769 - DNA, 15 bp, Homo sapiens
ccaccacctgcccca

SEQ ID NO: 1440770 - DNA, 15 bp, Homo sapiens
accaccacctgcccc

SEQ ID NO: 1440771 - DNA, 15 bp, Homo sapiens
taccaccacctgccc

SEQ ID NO: 1440772 - DNA, 15 bp, Homo sapiens
ataccaccacctgcc

SEQ ID NO: 1440773 - DNA, 15 bp, Homo sapiens
tataccaccacctgc

SEQ ID NO: 1440774 - DNA, 15 bp, Homo sapiens
ttataccaccacctg

SEQ ID NO: 1440775 - DNA, 15 bp, Homo sapiens
tttataccaccacct

SEQ ID NO: 1440776 - DNA, 15 bp, Homo sapiens
ttttataccaccacc

SEQ ID NO: 1440777 - DNA, 15 bp, Homo sapiens
tttttataccaccac

SEQ ID NO: 1440778 - DNA, 15 bp, Homo sapiens
ctttttataccacca

SEQ ID NO: 1440779 - DNA, 15 bp, Homo sapiens
tctttttataccacc

SEQ ID NO: 1440780 - DNA, 15 bp, Homo sapiens
ctctttttataccac

SEQ ID NO: 1440781 - DNA, 15 bp, Homo sapiens
tctctttttatacca

SEQ ID NO: 1440782 - DNA, 15 bp, Homo sapiens
ttctctttttatacc

SEQ ID NO: 1440783 - DNA, 15 bp, Homo sapiens
cttctctttttatac

SEQ ID NO: 1440784 - DNA, 15 bp, Homo sapiens
ccttctctttttata

SEQ ID NO: 1440785 - DNA, 15 bp, Homo sapiens
accttctctttttat

SEQ ID NO: 1440786 - DNA, 15 bp, Homo sapiens
caccttctcttttta

SEQ ID NO: 1440787 - DNA, 15 bp, Homo sapiens
gcaccttctcttttt

SEQ ID NO: 1440788 - DNA, 15 bp, Homo sapiens
ggcaccttctctttt

SEQ ID NO: 1440789 - DNA, 15 bp, Homo sapiens
aggcaccttctcttt

SEQ ID NO: 1440790 - DNA, 15 bp, Homo sapiens
aaggcaccttctctt

SEQ ID NO: 1440791 - DNA, 15 bp, Homo sapiens
caaggcaccttctct

SEQ ID NO: 1440792 - DNA, 15 bp, Homo sapiens
ccaaggcaccttctc

SEQ ID NO: 1440793 - DNA, 15 bp, Homo sapiens
cccaaggcaccttct

SEQ ID NO: 1440794 - DNA, 15 bp, Homo sapiens
tcccaaggcaccttc

SEQ ID NO: 1440795 - DNA, 15 bp, Homo sapiens
ctcccaaggcacctt

SEQ ID NO: 1440796 - DNA, 15 bp, Homo sapiens
actcccaaggcacct

SEQ ID NO: 1440797 - DNA, 15 bp, Homo sapiens
cactcccaaggcacc

SEQ ID NO: 1440798 - DNA, 15 bp, Homo sapiens
acactcccaaggcac

SEQ ID NO: 1440799 - DNA, 15 bp, Homo sapiens
cacactcccaaggca

SEQ ID NO: 1440800 - DNA, 15 bp, Homo sapiens
tcacactcccaaggc

SEQ ID NO: 1440801 - DNA, 15 bp, Homo sapiens
ctcacactcccaagg

SEQ ID NO: 1440802 - DNA, 15 bp, Homo sapiens
gctcacactcccaag

SEQ ID NO: 1440803 - DNA, 15 bp, Homo sapiens
ggctcacactcccaa

SEQ ID NO: 1440804 - DNA, 15 bp, Homo sapiens
tggctcacactccca

SEQ ID NO: 1440805 - DNA, 15 bp, Homo sapiens
atggctcacactccc

SEQ ID NO: 1440806 - DNA, 15 bp, Homo sapiens
aatggctcacactcc

SEQ ID NO: 1440807 - DNA, 15 bp, Homo sapiens
aaatggctcacactc

SEQ ID NO: 1440808 - DNA, 15 bp, Homo sapiens
caaatggctcacact

SEQ ID NO: 1440809 - DNA, 15 bp, Homo sapiens
gcaaatggctcacac

SEQ ID NO: 1440810 - DNA, 15 bp, Homo sapiens
agcaaatggctcaca

SEQ ID NO: 1440811 - DNA, 15 bp, Homo sapiens
aagcaaatggctcac

SEQ ID NO: 1440812 - DNA, 15 bp, Homo sapiens
gaagcaaatggctca

SEQ ID NO: 1440813 - DNA, 15 bp, Homo sapiens
agaagcaaatggctc

SEQ ID NO: 1440814 - DNA, 15 bp, Homo sapiens
cagaagcaaatggct

SEQ ID NO: 1440815 - DNA, 15 bp, Homo sapiens
tcagaagcaaatggc

SEQ ID NO: 1440816 - DNA, 15 bp, Homo sapiens
ttcagaagcaaatgg

SEQ ID NO: 1440817 - DNA, 15 bp, Homo sapiens
tttcagaagcaaatg

SEQ ID NO: 1440818 - DNA, 15 bp, Homo sapiens
atttcagaagcaaat

SEQ ID NO: 1440819 - DNA, 15 bp, Homo sapiens
aatttcagaagcaaa

SEQ ID NO: 1440820 - DNA, 15 bp, Homo sapiens
aaatttcagaagcaa

SEQ ID NO: 1440821 - DNA, 15 bp, Homo sapiens
taaatttcagaagca

SEQ ID NO: 1440822 - DNA, 15 bp, Homo sapiens
ataaatttcagaagc

SEQ ID NO: 1440823 - DNA, 15 bp, Homo sapiens
aataaatttcagaag

SEQ ID NO: 1440824 - DNA, 15 bp, Homo sapiens
aaataaatttcagaa

SEQ ID NO: 1440825 - DNA, 15 bp, Homo sapiens
caaataaatttcaga

SEQ ID NO: 1440826 - DNA, 15 bp, Homo sapiens
gcaaataaatttcag

SEQ ID NO: 1440827 - DNA, 15 bp, Homo sapiens
ggcaaataaatttca

SEQ ID NO: 1440828 - DNA, 15 bp, Homo sapiens
tggcaaataaatttc

SEQ ID NO: 1440829 - DNA, 15 bp, Homo sapiens
ttggcaaataaattt

SEQ ID NO: 1440830 - DNA, 15 bp, Homo sapiens
gttggcaaataaatt

SEQ ID NO: 1440831 - DNA, 15 bp, Homo sapiens
tgttggcaaataaat

SEQ ID NO: 1440832 - DNA, 15 bp, Homo sapiens
ttgttggcaaataaa

SEQ ID NO: 1440833 - DNA, 15 bp, Homo sapiens
cttgttggcaaataa

SEQ ID NO: 1440834 - DNA, 15 bp, Homo sapiens
acttgttggcaaata

SEQ ID NO: 1440835 - DNA, 15 bp, Homo sapiens
gacttgttggcaaat

SEQ ID NO: 1440836 - DNA, 15 bp, Homo sapiens
ggacttgttggcaaa

SEQ ID NO: 1440837 - DNA, 15 bp, Homo sapiens
aggacttgttggcaa

SEQ ID NO: 1440838 - DNA, 15 bp, Homo sapiens
caggacttgttggca

SEQ ID NO: 1440839 - DNA, 15 bp, Homo sapiens
gcaggacttgttggc

SEQ ID NO: 1440840 - DNA, 15 bp, Homo sapiens
agcaggacttgttgg

SEQ ID NO: 1440841 - DNA, 15 bp, Homo sapiens
aagcaggacttgttg

SEQ ID NO: 1440842 - DNA, 15 bp, Homo sapiens
gaagcaggacttgtt

SEQ ID NO: 1440843 - DNA, 15 bp, Homo sapiens
tgaagcaggacttgt

SEQ ID NO: 1440844 - DNA, 15 bp, Homo sapiens
ctgaagcaggacttg

SEQ ID NO: 1440845 - DNA, 15 bp, Homo sapiens
gctgaagcaggactt

SEQ ID NO: 1440846 - DNA, 15 bp, Homo sapiens
ggctgaagcaggact

SEQ ID NO: 1440847 - DNA, 15 bp, Homo sapiens
gggctgaagcaggac

SEQ ID NO: 1440848 - DNA, 15 bp, Homo sapiens
agggctgaagcagga

SEQ ID NO: 1440849 - DNA, 15 bp, Homo sapiens
cagggctgaagcagg

SEQ ID NO: 1440850 - DNA, 15 bp, Homo sapiens
acagggctgaagcag

SEQ ID NO: 1440851 - DNA, 15 bp, Homo sapiens
tacagggctgaagca

SEQ ID NO: 1440852 - DNA, 15 bp, Homo sapiens
ttacagggctgaagc

SEQ ID NO: 1440853 - DNA, 15 bp, Homo sapiens
tttacagggctgaag

SEQ ID NO: 1440854 - DNA, 15 bp, Homo sapiens
atttacagggctgaa

SEQ ID NO: 1440855 - DNA, 15 bp, Homo sapiens
gatttacagggctga

SEQ ID NO: 1440856 - DNA, 15 bp, Homo sapiens
ggatttacagggctg

SEQ ID NO: 1440857 - DNA, 15 bp, Homo sapiens
gggatttacagggct

SEQ ID NO: 1440858 - DNA, 15 bp, Homo sapiens
tgggatttacagggc

SEQ ID NO: 1440859 - DNA, 15 bp, Homo sapiens
ttgggatttacaggg

SEQ ID NO: 1440860 - DNA, 15 bp, Homo sapiens
gttgggatttacagg

SEQ ID NO: 1440861 - DNA, 15 bp, Homo sapiens
agttgggatttacag

SEQ ID NO: 1440862 - DNA, 15 bp, Homo sapiens
aagttgggatttaca

SEQ ID NO: 1440863 - DNA, 15 bp, Homo sapiens
aaagttgggatttac

SEQ ID NO: 1440864 - DNA, 15 bp, Homo sapiens
taaagttgggattta

SEQ ID NO: 1440865 - DNA, 15 bp, Homo sapiens
ataaagttgggattt

SEQ ID NO: 1440866 - DNA, 15 bp, Homo sapiens
cataaagttgggatt

SEQ ID NO: 1440867 - DNA, 15 bp, Homo sapiens
acataaagttgggat

SEQ ID NO: 1440868 - DNA, 15 bp, Homo sapiens
aacataaagttggga

SEQ ID NO: 1440869 - DNA, 15 bp, Homo sapiens
aaacataaagttggg

SEQ ID NO: 1440870 - DNA, 15 bp, Homo sapiens
aaaacataaagttgg

SEQ ID NO: 1440871 - DNA, 15 bp, Homo sapiens
taaaacataaagttg

SEQ ID NO: 1440872 - DNA, 15 bp, Homo sapiens
ctaaaacataaagtt

SEQ ID NO: 1440873 - DNA, 15 bp, Homo sapiens
actaaaacataaagt

SEQ ID NO: 1440874 - DNA, 15 bp, Homo sapiens
cactaaaacataaag

SEQ ID NO: 1440875 - DNA, 15 bp, Homo sapiens
tcactaaaacataaa

SEQ ID NO: 1440876 - DNA, 15 bp, Homo sapiens
ctcactaaaacataa

SEQ ID NO: 1440877 - DNA, 15 bp, Homo sapiens
actcactaaaacata

SEQ ID NO: 1440878 - DNA, 15 bp, Homo sapiens
gactcactaaaacat

SEQ ID NO: 1440879 - DNA, 15 bp, Homo sapiens
tgactcactaaaaca

SEQ ID NO: 1440880 - DNA, 15 bp, Homo sapiens
ttgactcactaaaac

SEQ ID NO: 1440881 - DNA, 15 bp, Homo sapiens
tttgactcactaaaa

SEQ ID NO: 1440882 - DNA, 15 bp, Homo sapiens
ttttgactcactaaa

SEQ ID NO: 1440883 - DNA, 15 bp, Homo sapiens
attttgactcactaa

SEQ ID NO: 1440884 - DNA, 15 bp, Homo sapiens
tattttgactcacta

SEQ ID NO: 1440885 - DNA, 15 bp, Homo sapiens
ctattttgactcact

SEQ ID NO: 1440886 - DNA, 15 bp, Homo sapiens
gctattttgactcac

SEQ ID NO: 1440887 - DNA, 15 bp, Homo sapiens
ggctattttgactca

SEQ ID NO: 1440888 - DNA, 15 bp, Homo sapiens
gggctattttgactc

SEQ ID NO: 1440889 - DNA, 15 bp, Homo sapiens
tgggctattttgact

SEQ ID NO: 1440890 - DNA, 15 bp, Homo sapiens
ctgggctattttgac

SEQ ID NO: 1440891 - DNA, 15 bp, Homo sapiens
gctgggctattttga

SEQ ID NO: 1440892 - DNA, 15 bp, Homo sapiens
tgctgggctattttg

SEQ ID NO: 1440893 - DNA, 15 bp, Homo sapiens
atgctgggctatttt

SEQ ID NO: 1440894 - DNA, 15 bp, Homo sapiens
tatgctgggctattt

SEQ ID NO: 1440895 - DNA, 15 bp, Homo sapiens
gtatgctgggctatt

SEQ ID NO: 1440896 - DNA, 15 bp, Homo sapiens
tgtatgctgggctat

SEQ ID NO: 1440897 - DNA, 15 bp, Homo sapiens
ctgtatgctgggcta

SEQ ID NO: 1440898 - DNA, 15 bp, Homo sapiens
actgtatgctgggct

SEQ ID NO: 1440899 - DNA, 15 bp, Homo sapiens
cactgtatgctgggc

SEQ ID NO: 1440900 - DNA, 15 bp, Homo sapiens
ccactgtatgctggg

SEQ ID NO: 1440901 - DNA, 15 bp, Homo sapiens
cccactgtatgctgg

SEQ ID NO: 1440902 - DNA, 15 bp, Homo sapiens
acccactgtatgctg

SEQ ID NO: 1440903 - DNA, 15 bp, Homo sapiens
tacccactgtatgct

SEQ ID NO: 1440904 - DNA, 15 bp, Homo sapiens
ttacccactgtatgc

SEQ ID NO: 1440905 - DNA, 15 bp, Homo sapiens
tttacccactgtatg

SEQ ID NO: 1440906 - DNA, 15 bp, Homo sapiens
ttttacccactgtat

SEQ ID NO: 1440907 - DNA, 15 bp, Homo sapiens
attttacccactgta

SEQ ID NO: 1440908 - DNA, 15 bp, Homo sapiens
cattttacccactgt

SEQ ID NO: 1440909 - DNA, 15 bp, Homo sapiens
ccattttacccactg

SEQ ID NO: 1440910 - DNA, 15 bp, Homo sapiens
accattttacccact

SEQ ID NO: 1440911 - DNA, 15 bp, Homo sapiens
taccattttacccac

SEQ ID NO: 1440912 - DNA, 15 bp, Homo sapiens
ttaccattttaccca

SEQ ID NO: 1440913 - DNA, 15 bp, Homo sapiens
tttaccattttaccc

SEQ ID NO: 1440914 - DNA, 15 bp, Homo sapiens
atttaccattttacc

SEQ ID NO: 1440915 - DNA, 15 bp, Homo sapiens
aatttaccattttac

SEQ ID NO: 1440916 - DNA, 15 bp, Homo sapiens
caatttaccatttta

SEQ ID NO: 1440917 - DNA, 15 bp, Homo sapiens
tcaatttaccatttt

SEQ ID NO: 1440918 - DNA, 15 bp, Homo sapiens
atcaatttaccattt

SEQ ID NO: 1440919 - DNA, 15 bp, Homo sapiens
catcaatttaccatt

SEQ ID NO: 1440920 - DNA, 15 bp, Homo sapiens
acatcaatttaccat

SEQ ID NO: 1440921 - DNA, 15 bp, Homo sapiens
aacatcaatttacca

SEQ ID NO: 1440922 - DNA, 15 bp, Homo sapiens
caacatcaatttacc

SEQ ID NO: 1440923 - DNA, 15 bp, Homo sapiens
gcaacatcaatttac

SEQ ID NO: 1440924 - DNA, 15 bp, Homo sapiens
tgcaacatcaattta

SEQ ID NO: 1440925 - DNA, 15 bp, Homo sapiens
atgcaacatcaattt

SEQ ID NO: 1440926 - DNA, 15 bp, Homo sapiens
catgcaacatcaatt

SEQ ID NO: 1440927 - DNA, 15 bp, Homo sapiens
acatgcaacatcaat

SEQ ID NO: 1440928 - DNA, 15 bp, Homo sapiens
aacatgcaacatcaa

SEQ ID NO: 1440929 - DNA, 15 bp, Homo sapiens
gaacatgcaacatca

SEQ ID NO: 1440930 - DNA, 15 bp, Homo sapiens
tgaacatgcaacatc

SEQ ID NO: 1440931 - DNA, 15 bp, Homo sapiens
ctgaacatgcaacat

SEQ ID NO: 1440932 - DNA, 15 bp, Homo sapiens
cctgaacatgcaaca

SEQ ID NO: 1440933 - DNA, 15 bp, Homo sapiens
gcctgaacatgcaac

SEQ ID NO: 1440934 - DNA, 15 bp, Homo sapiens
tgcctgaacatgcaa

SEQ ID NO: 1440935 - DNA, 15 bp, Homo sapiens
atgcctgaacatgca

SEQ ID NO: 1440936 - DNA, 15 bp, Homo sapiens
aatgcctgaacatgc

SEQ ID NO: 1440937 - DNA, 15 bp, Homo sapiens
gaatgcctgaacatg

SEQ ID NO: 1440938 - DNA, 15 bp, Homo sapiens
tgaatgcctgaacat

SEQ ID NO: 1440939 - DNA, 15 bp, Homo sapiens
ctgaatgcctgaaca

SEQ ID NO: 1440940 - DNA, 15 bp, Homo sapiens
tctgaatgcctgaac

SEQ ID NO: 1440941 - DNA, 15 bp, Homo sapiens
gtctgaatgcctgaa

SEQ ID NO: 1440942 - DNA, 15 bp, Homo sapiens
ggtctgaatgcctga

SEQ ID NO: 1440943 - DNA, 15 bp, Homo sapiens
gggtctgaatgcctg

SEQ ID NO: 1440944 - DNA, 15 bp, Homo sapiens
agggtctgaatgcct

SEQ ID NO: 1440945 - DNA, 15 bp, Homo sapiens
tagggtctgaatgcc

SEQ ID NO: 1440946 - DNA, 15 bp, Homo sapiens
gtagggtctgaatgc

SEQ ID NO: 1440947 - DNA, 15 bp, Homo sapiens
agtagggtctgaatg

SEQ ID NO: 1440948 - DNA, 15 bp, Homo sapiens
cagtagggtctgaat

SEQ ID NO: 1440949 - DNA, 15 bp, Homo sapiens
ccagtagggtctgaa

SEQ ID NO: 1440950 - DNA, 15 bp, Homo sapiens
cccagtagggtctga

SEQ ID NO: 1440951 - DNA, 15 bp, Homo sapiens
tcccagtagggtctg

SEQ ID NO: 1440952 - DNA, 15 bp, Homo sapiens
gtcccagtagggtct

SEQ ID NO: 1440953 - DNA, 15 bp, Homo sapiens
ggtcccagtagggtc

SEQ ID NO: 1440954 - DNA, 15 bp, Homo sapiens
gggtcccagtagggt

SEQ ID NO: 1440955 - DNA, 15 bp, Homo sapiens
tgggtcccagtaggg

SEQ ID NO: 1440956 - DNA, 15 bp, Homo sapiens
ctgggtcccagtagg

SEQ ID NO: 1440957 - DNA, 15 bp, Homo sapiens
actgggtcccagtag

SEQ ID NO: 1440958 - DNA, 15 bp, Homo sapiens
tactgggtcccagta

SEQ ID NO: 1440959 - DNA, 15 bp, Homo sapiens
ttactgggtcccagt

SEQ ID NO: 1440960 - DNA, 15 bp, Homo sapiens
gttactgggtcccag

SEQ ID NO: 1440961 - DNA, 15 bp, Homo sapiens
tgttactgggtccca

SEQ ID NO: 1440962 - DNA, 15 bp, Homo sapiens
ttgttactgggtccc

SEQ ID NO: 1440963 - DNA, 15 bp, Homo sapiens
tttgttactgggtcc

SEQ ID NO: 1440964 - DNA, 15 bp, Homo sapiens
gtttgttactgggtc

SEQ ID NO: 1440965 - DNA, 15 bp, Homo sapiens
ggtttgttactgggt

SEQ ID NO: 1440966 - DNA, 15 bp, Homo sapiens
tggtttgttactggg

SEQ ID NO: 1440967 - DNA, 15 bp, Homo sapiens
gtggtttgttactgg

SEQ ID NO: 1440968 - DNA, 15 bp, Homo sapiens
agtggtttgttactg

SEQ ID NO: 1440969 - DNA, 15 bp, Homo sapiens
aagtggtttgttact

SEQ ID NO: 1440970 - DNA, 15 bp, Homo sapiens
caagtggtttgttac

SEQ ID NO: 1440971 - DNA, 15 bp, Homo sapiens
acaagtggtttgtta

SEQ ID NO: 1440972 - DNA, 15 bp, Homo sapiens
aacaagtggtttgtt

SEQ ID NO: 1440973 - DNA, 15 bp, Homo sapiens
aaacaagtggtttgt

SEQ ID NO: 1440974 - DNA, 15 bp, Homo sapiens
gaaacaagtggtttg

SEQ ID NO: 1440975 - DNA, 15 bp, Homo sapiens
agaaacaagtggttt

SEQ ID NO: 1440976 - DNA, 15 bp, Homo sapiens
gagaaacaagtggtt

SEQ ID NO: 1440977 - DNA, 15 bp, Homo sapiens
tgagaaacaagtggt

SEQ ID NO: 1440978 - DNA, 15 bp, Homo sapiens
ttgagaaacaagtgg

SEQ ID NO: 1440979 - DNA, 15 bp, Homo sapiens
tttgagaaacaagtg

SEQ ID NO: 1440980 - DNA, 15 bp, Homo sapiens
ttttgagaaacaagt

SEQ ID NO: 1440981 - DNA, 15 bp, Homo sapiens
cttttgagaaacaag

SEQ ID NO: 1440982 - DNA, 15 bp, Homo sapiens
ccttttgagaaacaa

SEQ ID NO: 1440983 - DNA, 15 bp, Homo sapiens
tccttttgagaaaca

SEQ ID NO: 1440984 - DNA, 15 bp, Homo sapiens
ctccttttgagaaac

SEQ ID NO: 1440985 - DNA, 15 bp, Homo sapiens
tctccttttgagaaa

SEQ ID NO: 1440986 - DNA, 15 bp, Homo sapiens
ttctccttttgagaa

SEQ ID NO: 1440987 - DNA, 15 bp, Homo sapiens
attctccttttgaga

SEQ ID NO: 1440988 - DNA, 15 bp, Homo sapiens
tattctccttttgag

SEQ ID NO: 1440989 - DNA, 15 bp, Homo sapiens
ctattctccttttga

SEQ ID NO: 1440990 - DNA, 15 bp, Homo sapiens
actattctccttttg

SEQ ID NO: 1440991 - DNA, 15 bp, Homo sapiens
gactattctcctttt

SEQ ID NO: 1440992 - DNA, 15 bp, Homo sapiens
tgactattctccttt

SEQ ID NO: 1440993 - DNA, 15 bp, Homo sapiens
gtgactattctcctt

SEQ ID NO: 1440994 - DNA, 15 bp, Homo sapiens
agtgactattctcct

SEQ ID NO: 1440995 - DNA, 15 bp, Homo sapiens
aagtgactattctcc

SEQ ID NO: 1440996 - DNA, 15 bp, Homo sapiens
caagtgactattctc

SEQ ID NO: 1440997 - DNA, 15 bp, Homo sapiens
gcaagtgactattct

SEQ ID NO: 1440998 - DNA, 15 bp, Homo sapiens
ggcaagtgactattc

SEQ ID NO: 1440999 - DNA, 15 bp, Homo sapiens
tggcaagtgactatt

SEQ ID NO: 1441000 - DNA, 15 bp, Homo sapiens
ttggcaagtgactat

SEQ ID NO: 1441001 - DNA, 15 bp, Homo sapiens
tttggcaagtgacta

SEQ ID NO: 1441002 - DNA, 15 bp, Homo sapiens
ctttggcaagtgact

SEQ ID NO: 1441003 - DNA, 15 bp, Homo sapiens
tctttggcaagtgac

SEQ ID NO: 1441004 - DNA, 15 bp, Homo sapiens
ttctttggcaagtga

SEQ ID NO: 1441005 - DNA, 15 bp, Homo sapiens
tttctttggcaagtg

SEQ ID NO: 1441006 - DNA, 15 bp, Homo sapiens
ctttctttggcaagt

SEQ ID NO: 1441007 - DNA, 15 bp, Homo sapiens
gctttctttggcaag

SEQ ID NO: 1441008 - DNA, 15 bp, Homo sapiens
tgctttctttggcaa

SEQ ID NO: 1441009 - DNA, 15 bp, Homo sapiens
atgctttctttggca

SEQ ID NO: 1441010 - DNA, 15 bp, Homo sapiens
catgctttctttggc

SEQ ID NO: 1441011 - DNA, 15 bp, Homo sapiens
ccatgctttctttgg

SEQ ID NO: 1441012 - DNA, 15 bp, Homo sapiens
cccatgctttctttg

SEQ ID NO: 1441013 - DNA, 15 bp, Homo sapiens
acccatgctttcttt

SEQ ID NO: 1441014 - DNA, 15 bp, Homo sapiens
aacccatgctttctt

SEQ ID NO: 1441015 - DNA, 15 bp, Homo sapiens
aaacccatgctttct

SEQ ID NO: 1441016 - DNA, 15 bp, Homo sapiens
caaacccatgctttc

SEQ ID NO: 1441017 - DNA, 15 bp, Homo sapiens
gcaaacccatgcttt

SEQ ID NO: 1441018 - DNA, 15 bp, Homo sapiens
agcaaacccatgctt

SEQ ID NO: 1441019 - DNA, 15 bp, Homo sapiens
aagcaaacccatgct

SEQ ID NO: 1441020 - DNA, 15 bp, Homo sapiens
aaagcaaacccatgc

SEQ ID NO: 1441021 - DNA, 15 bp, Homo sapiens
taaagcaaacccatg

SEQ ID NO: 1441022 - DNA, 15 bp, Homo sapiens
ataaagcaaacccat

SEQ ID NO: 1441023 - DNA, 15 bp, Homo sapiens
tataaagcaaaccca

SEQ ID NO: 1441024 - DNA, 15 bp, Homo sapiens
gtataaagcaaaccc

SEQ ID NO: 1441025 - DNA, 15 bp, Homo sapiens
ggtataaagcaaacc

SEQ ID NO: 1441026 - DNA, 15 bp, Homo sapiens
tggtataaagcaaac

SEQ ID NO: 1441027 - DNA, 15 bp, Homo sapiens
atggtataaagcaaa

SEQ ID NO: 1441028 - DNA, 15 bp, Homo sapiens
gatggtataaagcaa

SEQ ID NO: 1441029 - DNA, 15 bp, Homo sapiens
tgatggtataaagca

SEQ ID NO: 1441030 - DNA, 15 bp, Homo sapiens
ctgatggtataaagc

SEQ ID NO: 1441031 - DNA, 15 bp, Homo sapiens
cctgatggtataaag

SEQ ID NO: 1441032 - DNA, 15 bp, Homo sapiens
ccctgatggtataaa

SEQ ID NO: 1441033 - DNA, 15 bp, Homo sapiens
gccctgatggtataa

SEQ ID NO: 1441034 - DNA, 15 bp, Homo sapiens
agccctgatggtata

SEQ ID NO: 1441035 - DNA, 15 bp, Homo sapiens
gagccctgatggtat

SEQ ID NO: 1441036 - DNA, 15 bp, Homo sapiens
agagccctgatggta

SEQ ID NO: 1441037 - DNA, 15 bp, Homo sapiens
gagagccctgatggt

SEQ ID NO: 1441038 - DNA, 15 bp, Homo sapiens
agagagccctgatgg

SEQ ID NO: 1441039 - DNA, 15 bp, Homo sapiens
gagagagccctgatg

SEQ ID NO: 1441040 - DNA, 15 bp, Homo sapiens
agagagagccctgat

SEQ ID NO: 1441041 - DNA, 15 bp, Homo sapiens
cagagagagccctga

SEQ ID NO: 1441042 - DNA, 15 bp, Homo sapiens
ccagagagagccctg

SEQ ID NO: 1441043 - DNA, 15 bp, Homo sapiens
cccagagagagccct

SEQ ID NO: 1441044 - DNA, 15 bp, Homo sapiens
gcccagagagagccc

SEQ ID NO: 1441045 - DNA, 15 bp, Homo sapiens
agcccagagagagcc

SEQ ID NO: 1441046 - DNA, 15 bp, Homo sapiens
gagcccagagagagc

SEQ ID NO: 1441047 - DNA, 15 bp, Homo sapiens
ggagcccagagagag

SEQ ID NO: 1441048 - DNA, 15 bp, Homo sapiens
tggagcccagagaga

SEQ ID NO: 1441049 - DNA, 15 bp, Homo sapiens
atggagcccagagag

SEQ ID NO: 1441050 - DNA, 15 bp, Homo sapiens
tatggagcccagaga

SEQ ID NO: 1441051 - DNA, 15 bp, Homo sapiens
atatggagcccagag

SEQ ID NO: 1441052 - DNA, 15 bp, Homo sapiens
tatatggagcccaga

SEQ ID NO: 1441053 - DNA, 15 bp, Homo sapiens
atatatggagcccag

SEQ ID NO: 1441054 - DNA, 15 bp, Homo sapiens
gatatatggagccca

SEQ ID NO: 1441055 - DNA, 15 bp, Homo sapiens
ggatatatggagccc

SEQ ID NO: 1441056 - DNA, 15 bp, Homo sapiens
cggatatatggagcc

SEQ ID NO: 1441057 - DNA, 15 bp, Homo sapiens
gcggatatatggagc

SEQ ID NO: 1441058 - DNA, 15 bp, Homo sapiens
agcggatatatggag

SEQ ID NO: 1441059 - DNA, 15 bp, Homo sapiens
cagcggatatatgga

SEQ ID NO: 1441060 - DNA, 15 bp, Homo sapiens
tcagcggatatatgg

SEQ ID NO: 1441061 - DNA, 15 bp, Homo sapiens
atcagcggatatatg

SEQ ID NO: 1441062 - DNA, 15 bp, Homo sapiens
gatcagcggatatat

SEQ ID NO: 1441063 - DNA, 15 bp, Homo sapiens
agatcagcggatata

SEQ ID NO: 1441064 - DNA, 15 bp, Homo sapiens
cagatcagcggatat

SEQ ID NO: 1441065 - DNA, 15 bp, Homo sapiens
acagatcagcggata

SEQ ID NO: 1441066 - DNA, 15 bp, Homo sapiens
gacagatcagcggat

SEQ ID NO: 1441067 - DNA, 15 bp, Homo sapiens
tgacagatcagcgga

SEQ ID NO: 1441068 - DNA, 15 bp, Homo sapiens
atgacagatcagcgg

SEQ ID NO: 1441069 - DNA, 15 bp, Homo sapiens
tatgacagatcagcg

SEQ ID NO: 1441070 - DNA, 15 bp, Homo sapiens
ctatgacagatcagc

SEQ ID NO: 1441071 - DNA, 15 bp, Homo sapiens
tctatgacagatcag

SEQ ID NO: 1441072 - DNA, 15 bp, Homo sapiens
gtctatgacagatca

SEQ ID NO: 1441073 - DNA, 15 bp, Homo sapiens
agtctatgacagatc

SEQ ID NO: 1441074 - DNA, 15 bp, Homo sapiens
gagtctatgacagat

SEQ ID NO: 1441075 - DNA, 15 bp, Homo sapiens
agagtctatgacaga

SEQ ID NO: 1441076 - DNA, 15 bp, Homo sapiens
aagagtctatgacag

SEQ ID NO: 1441077 - DNA, 15 bp, Homo sapiens
caagagtctatgaca

SEQ ID NO: 1441078 - DNA, 15 bp, Homo sapiens
acaagagtctatgac

SEQ ID NO: 1441079 - DNA, 15 bp, Homo sapiens
aacaagagtctatga

SEQ ID NO: 1441080 - DNA, 15 bp, Homo sapiens
aaacaagagtctatg

SEQ ID NO: 1441081 - DNA, 15 bp, Homo sapiens
caaacaagagtctat

SEQ ID NO: 1441082 - DNA, 15 bp, Homo sapiens
acaaacaagagtcta

SEQ ID NO: 1441083 - DNA, 15 bp, Homo sapiens
aacaaacaagagtct

SEQ ID NO: 1441084 - DNA, 15 bp, Homo sapiens
taacaaacaagagtc

SEQ ID NO: 1441085 - DNA, 15 bp, Homo sapiens
ataacaaacaagagt

SEQ ID NO: 1441086 - DNA, 15 bp, Homo sapiens
aataacaaacaagag

SEQ ID NO: 1441087 - DNA, 15 bp, Homo sapiens
caataacaaacaaga

SEQ ID NO: 1441088 - DNA, 15 bp, Homo sapiens
tcaataacaaacaag

SEQ ID NO: 1441089 - DNA, 15 bp, Homo sapiens
ttcaataacaaacaa

SEQ ID NO: 1441090 - DNA, 15 bp, Homo sapiens
cttcaataacaaaca

SEQ ID NO: 1441091 - DNA, 15 bp, Homo sapiens
gcttcaataacaaac

SEQ ID NO: 1441092 - DNA, 15 bp, Homo sapiens
ggcttcaataacaaa

SEQ ID NO: 1441093 - DNA, 15 bp, Homo sapiens
tggcttcaataacaa

SEQ ID NO: 1441094 - DNA, 15 bp, Homo sapiens
gtggcttcaataaca

SEQ ID NO: 1441095 - DNA, 15 bp, Homo sapiens
agtggcttcaataac

SEQ ID NO: 1441096 - DNA, 15 bp, Homo sapiens
cagtggcttcaataa

SEQ ID NO: 1441097 - DNA, 15 bp, Homo sapiens
tcagtggcttcaata

SEQ ID NO: 1441098 - DNA, 15 bp, Homo sapiens
ctcagtggcttcaat

SEQ ID NO: 1441099 - DNA, 15 bp, Homo sapiens
gctcagtggcttcaa

SEQ ID NO: 1441100 - DNA, 15 bp, Homo sapiens
ggctcagtggcttca

SEQ ID NO: 1441101 - DNA, 15 bp, Homo sapiens
tggctcagtggcttc

SEQ ID NO: 1441102 - DNA, 15 bp, Homo sapiens
atggctcagtggctt

SEQ ID NO: 1441103 - DNA, 15 bp, Homo sapiens
tatggctcagtggct

SEQ ID NO: 1441104 - DNA, 15 bp, Homo sapiens
ctatggctcagtggc

SEQ ID NO: 1441105 - DNA, 15 bp, Homo sapiens
tctatggctcagtgg

SEQ ID NO: 1441106 - DNA, 15 bp, Homo sapiens
ctctatggctcagtg

SEQ ID NO: 1441107 - DNA, 15 bp, Homo sapiens
tctctatggctcagt

SEQ ID NO: 1441108 - DNA, 15 bp, Homo sapiens
atctctatggctcag

SEQ ID NO: 1441109 - DNA, 15 bp, Homo sapiens
catctctatggctca

SEQ ID NO: 1441110 - DNA, 15 bp, Homo sapiens
tcatctctatggctc

SEQ ID NO: 1441111 - DNA, 15 bp, Homo sapiens
ttcatctctatggct

SEQ ID NO: 1441112 - DNA, 15 bp, Homo sapiens
attcatctctatggc

SEQ ID NO: 1441113 - DNA, 15 bp, Homo sapiens
aattcatctctatgg

SEQ ID NO: 1441114 - DNA, 15 bp, Homo sapiens
caattcatctctatg

SEQ ID NO: 1441115 - DNA, 15 bp, Homo sapiens
tcaattcatctctat

SEQ ID NO: 1441116 - DNA, 15 bp, Homo sapiens
ctcaattcatctcta

SEQ ID NO: 1441117 - DNA, 15 bp, Homo sapiens
tctcaattcatctct

SEQ ID NO: 1441118 - DNA, 15 bp, Homo sapiens
gtctcaattcatctc

SEQ ID NO: 1441119 - DNA, 15 bp, Homo sapiens
tgtctcaattcatct

SEQ ID NO: 1441120 - DNA, 15 bp, Homo sapiens
ctgtctcaattcatc

SEQ ID NO: 1441121 - DNA, 15 bp, Homo sapiens
gctgtctcaattcat

SEQ ID NO: 1441122 - DNA, 15 bp, Homo sapiens
agctgtctcaattca

SEQ ID NO: 1441123 - DNA, 15 bp, Homo sapiens
aagctgtctcaattc

SEQ ID NO: 1441124 - DNA, 15 bp, Homo sapiens
gaagctgtctcaatt

SEQ ID NO: 1441125 - DNA, 15 bp, Homo sapiens
ggaagctgtctcaat

SEQ ID NO: 1441126 - DNA, 15 bp, Homo sapiens
aggaagctgtctcaa

SEQ ID NO: 1441127 - DNA, 15 bp, Homo sapiens
caggaagctgtctca

SEQ ID NO: 1441128 - DNA, 15 bp, Homo sapiens
gcaggaagctgtctc

SEQ ID NO: 1441129 - DNA, 15 bp, Homo sapiens
agcaggaagctgtct

SEQ ID NO: 1441130 - DNA, 15 bp, Homo sapiens
gagcaggaagctgtc

SEQ ID NO: 1441131 - DNA, 15 bp, Homo sapiens
agagcaggaagctgt

SEQ ID NO: 1441132 - DNA, 15 bp, Homo sapiens
cagagcaggaagctg

SEQ ID NO: 1441133 - DNA, 15 bp, Homo sapiens
acagagcaggaagct

SEQ ID NO: 1441134 - DNA, 15 bp, Homo sapiens
tacagagcaggaagc

SEQ ID NO: 1441135 - DNA, 15 bp, Homo sapiens
ctacagagcaggaag

SEQ ID NO: 1441136 - DNA, 15 bp, Homo sapiens
gctacagagcaggaa

SEQ ID NO: 1441137 - DNA, 15 bp, Homo sapiens
ggctacagagcagga

SEQ ID NO: 1441138 - DNA, 15 bp, Homo sapiens
aggctacagagcagg

SEQ ID NO: 1441139 - DNA, 15 bp, Homo sapiens
aaggctacagagcag

SEQ ID NO: 1441140 - DNA, 15 bp, Homo sapiens
caaggctacagagca

SEQ ID NO: 1441141 - DNA, 15 bp, Homo sapiens
tcaaggctacagagc

SEQ ID NO: 1441142 - DNA, 15 bp, Homo sapiens
ctcaaggctacagag

SEQ ID NO: 1441143 - DNA, 15 bp, Homo sapiens
gctcaaggctacaga

SEQ ID NO: 1441144 - DNA, 15 bp, Homo sapiens
tgctcaaggctacag

SEQ ID NO: 1441145 - DNA, 15 bp, Homo sapiens
ctgctcaaggctaca

SEQ ID NO: 1441146 - DNA, 15 bp, Homo sapiens
cctgctcaaggctac

SEQ ID NO: 1441147 - DNA, 15 bp, Homo sapiens
acctgctcaaggcta

SEQ ID NO: 1441148 - DNA, 15 bp, Homo sapiens
aacctgctcaaggct

SEQ ID NO: 1441149 - DNA, 15 bp, Homo sapiens
aaacctgctcaaggc

SEQ ID NO: 1441150 - DNA, 15 bp, Homo sapiens
aaaacctgctcaagg

SEQ ID NO: 1441151 - DNA, 15 bp, Homo sapiens
gaaaacctgctcaag

SEQ ID NO: 1441152 - DNA, 15 bp, Homo sapiens
ggaaaacctgctcaa

SEQ ID NO: 1441153 - DNA, 15 bp, Homo sapiens
aggaaaacctgctca

SEQ ID NO: 1441154 - DNA, 15 bp, Homo sapiens
caggaaaacctgctc

SEQ ID NO: 1441155 - DNA, 15 bp, Homo sapiens
gcaggaaaacctgct

SEQ ID NO: 1441156 - DNA, 15 bp, Homo sapiens
agcaggaaaacctgc

SEQ ID NO: 1441157 - DNA, 15 bp, Homo sapiens
gagcaggaaaacctg

SEQ ID NO: 1441158 - DNA, 15 bp, Homo sapiens
agagcaggaaaacct

SEQ ID NO: 1441159 - DNA, 15 bp, Homo sapiens
cagagcaggaaaacc

SEQ ID NO: 1441160 - DNA, 15 bp, Homo sapiens
tcagagcaggaaaac

SEQ ID NO: 1441161 - DNA, 15 bp, Homo sapiens
atcagagcaggaaaa

SEQ ID NO: 1441162 - DNA, 15 bp, Homo sapiens
aatcagagcaggaaa

SEQ ID NO: 1441163 - DNA, 15 bp, Homo sapiens
caatcagagcaggaa

SEQ ID NO: 1441164 - DNA, 15 bp, Homo sapiens
gcaatcagagcagga

SEQ ID NO: 1441165 - DNA, 15 bp, Homo sapiens
agcaatcagagcagg

SEQ ID NO: 1441166 - DNA, 15 bp, Homo sapiens
tagcaatcagagcag

SEQ ID NO: 1441167 - DNA, 15 bp, Homo sapiens
gtagcaatcagagca

SEQ ID NO: 1441168 - DNA, 15 bp, Homo sapiens
agtagcaatcagagc

SEQ ID NO: 1441169 - DNA, 15 bp, Homo sapiens
cagtagcaatcagag

SEQ ID NO: 1441170 - DNA, 15 bp, Homo sapiens
tcagtagcaatcaga

SEQ ID NO: 1441171 - DNA, 15 bp, Homo sapiens
ttcagtagcaatcag

SEQ ID NO: 1441172 - DNA, 15 bp, Homo sapiens
tttcagtagcaatca

SEQ ID NO: 1441173 - DNA, 15 bp, Homo sapiens
ctttcagtagcaatc

SEQ ID NO: 1441174 - DNA, 15 bp, Homo sapiens
gctttcagtagcaat

SEQ ID NO: 1441175 - DNA, 15 bp, Homo sapiens
agctttcagtagcaa

SEQ ID NO: 1441176 - DNA, 15 bp, Homo sapiens
cagctttcagtagca

SEQ ID NO: 1441177 - DNA, 15 bp, Homo sapiens
ccagctttcagtagc

SEQ ID NO: 1441178 - DNA, 15 bp, Homo sapiens
gccagctttcagtag

SEQ ID NO: 1441179 - DNA, 15 bp, Homo sapiens
tgccagctttcagta

SEQ ID NO: 1441180 - DNA, 15 bp, Homo sapiens
ctgccagctttcagt

SEQ ID NO: 1441181 - DNA, 15 bp, Homo sapiens
cctgccagctttcag

SEQ ID NO: 1441182 - DNA, 15 bp, Homo sapiens
acctgccagctttca

SEQ ID NO: 1441183 - DNA, 15 bp, Homo sapiens
aacctgccagctttc

SEQ ID NO: 1441184 - DNA, 15 bp, Homo sapiens
gaacctgccagcttt

SEQ ID NO: 1441185 - DNA, 15 bp, Homo sapiens
agaacctgccagctt

SEQ ID NO: 1441186 - DNA, 15 bp, Homo sapiens
cagaacctgccagct

SEQ ID NO: 1441187 - DNA, 15 bp, Homo sapiens
ccagaacctgccagc

SEQ ID NO: 1441188 - DNA, 15 bp, Homo sapiens
cccagaacctgccag

SEQ ID NO: 1441189 - DNA, 15 bp, Homo sapiens
acccagaacctgcca

SEQ ID NO: 1441190 - DNA, 15 bp, Homo sapiens
aacccagaacctgcc

SEQ ID NO: 1441191 - DNA, 15 bp, Homo sapiens
taacccagaacctgc

SEQ ID NO: 1441192 - DNA, 15 bp, Homo sapiens
gtaacccagaacctg

SEQ ID NO: 1441193 - DNA, 15 bp, Homo sapiens
agtaacccagaacct

SEQ ID NO: 1441194 - DNA, 15 bp, Homo sapiens
gagtaacccagaacc

SEQ ID NO: 1441195 - DNA, 15 bp, Homo sapiens
tgagtaacccagaac

SEQ ID NO: 1441196 - DNA, 15 bp, Homo sapiens
ctgagtaacccagaa

SEQ ID NO: 1441197 - DNA, 15 bp, Homo sapiens
actgagtaacccaga

SEQ ID NO: 1441198 - DNA, 15 bp, Homo sapiens
tactgagtaacccag

SEQ ID NO: 1441199 - DNA, 15 bp, Homo sapiens
atactgagtaaccca

SEQ ID NO: 1441200 - DNA, 15 bp, Homo sapiens
tatactgagtaaccc

SEQ ID NO: 1441201 - DNA, 15 bp, Homo sapiens
atatactgagtaacc

SEQ ID NO: 1441202 - DNA, 15 bp, Homo sapiens
aatatactgagtaac

SEQ ID NO: 1441203 - DNA, 15 bp, Homo sapiens
caatatactgagtaa

SEQ ID NO: 1441204 - DNA, 15 bp, Homo sapiens
tcaatatactgagta

SEQ ID NO: 1441205 - DNA, 15 bp, Homo sapiens
atcaatatactgagt

SEQ ID NO: 1441206 - DNA, 15 bp, Homo sapiens
gatcaatatactgag

SEQ ID NO: 1441207 - DNA, 15 bp, Homo sapiens
tgatcaatatactga

SEQ ID NO: 1441208 - DNA, 15 bp, Homo sapiens
ctgatcaatatactg

SEQ ID NO: 1441209 - DNA, 15 bp, Homo sapiens
tctgatcaatatact

SEQ ID NO: 1441210 - DNA, 15 bp, Homo sapiens
ctctgatcaatatac

SEQ ID NO: 1441211 - DNA, 15 bp, Homo sapiens
tctctgatcaatata

SEQ ID NO: 1441212 - DNA, 15 bp, Homo sapiens
ttctctgatcaatat

SEQ ID NO: 1441213 - DNA, 15 bp, Homo sapiens
cttctctgatcaata

SEQ ID NO: 1441214 - DNA, 15 bp, Homo sapiens
gcttctctgatcaat

SEQ ID NO: 1441215 - DNA, 15 bp, Homo sapiens
tgcttctctgatcaa

SEQ ID NO: 1441216 - DNA, 15 bp, Homo sapiens
ttgcttctctgatca

SEQ ID NO: 1441217 - DNA, 15 bp, Homo sapiens
attgcttctctgatc

SEQ ID NO: 1441218 - DNA, 15 bp, Homo sapiens
gattgcttctctgat

SEQ ID NO: 1441219 - DNA, 15 bp, Homo sapiens
ggattgcttctctga

SEQ ID NO: 1441220 - DNA, 15 bp, Homo sapiens
gggattgcttctctg

SEQ ID NO: 1441221 - DNA, 15 bp, Homo sapiens
tgggattgcttctct

SEQ ID NO: 1441222 - DNA, 15 bp, Homo sapiens
ttgggattgcttctc

SEQ ID NO: 1441223 - DNA, 15 bp, Homo sapiens
tttgggattgcttct

SEQ ID NO: 1441224 - DNA, 15 bp, Homo sapiens
atttgggattgcttc

SEQ ID NO: 1441225 - DNA, 15 bp, Homo sapiens
catttgggattgctt

SEQ ID NO: 1441226 - DNA, 15 bp, Homo sapiens
acatttgggattgct

SEQ ID NO: 1441227 - DNA, 15 bp, Homo sapiens
gacatttgggattgc

SEQ ID NO: 1441228 - DNA, 15 bp, Homo sapiens
tgacatttgggattg

SEQ ID NO: 1441229 - DNA, 15 bp, Homo sapiens
ctgacatttgggatt

SEQ ID NO: 1441230 - DNA, 15 bp, Homo sapiens
actgacatttgggat

SEQ ID NO: 1441231 - DNA, 15 bp, Homo sapiens
tactgacatttggga

SEQ ID NO: 1441232 - DNA, 15 bp, Homo sapiens
atactgacatttggg

SEQ ID NO: 1441233 - DNA, 15 bp, Homo sapiens
tatactgacatttgg

SEQ ID NO: 1441234 - DNA, 15 bp, Homo sapiens
atatactgacatttg

SEQ ID NO: 1441235 - DNA, 15 bp, Homo sapiens
catatactgacattt

SEQ ID NO: 1441236 - DNA, 15 bp, Homo sapiens
acatatactgacatt

SEQ ID NO: 1441237 - DNA, 15 bp, Homo sapiens
aacatatactgacat

SEQ ID NO: 1441238 - DNA, 15 bp, Homo sapiens
aaacatatactgaca

SEQ ID NO: 1441239 - DNA, 15 bp, Homo sapiens
gaaacatatactgac

SEQ ID NO: 1441240 - DNA, 15 bp, Homo sapiens
ggaaacatatactga

SEQ ID NO: 1441241 - DNA, 15 bp, Homo sapiens
aggaaacatatactg

SEQ ID NO: 1441242 - DNA, 15 bp, Homo sapiens
gaggaaacatatact

SEQ ID NO: 1441243 - DNA, 15 bp, Homo sapiens
ggaggaaacatatac

SEQ ID NO: 1441244 - DNA, 15 bp, Homo sapiens
tggaggaaacatata

SEQ ID NO: 1441245 - DNA, 15 bp, Homo sapiens
ttggaggaaacatat

SEQ ID NO: 1441246 - DNA, 15 bp, Homo sapiens
tttggaggaaacata

SEQ ID NO: 1441247 - DNA, 15 bp, Homo sapiens
ttttggaggaaacat

SEQ ID NO: 1441248 - DNA, 15 bp, Homo sapiens
attttggaggaaaca

SEQ ID NO: 1441249 - DNA, 15 bp, Homo sapiens
cattttggaggaaac

SEQ ID NO: 1441250 - DNA, 15 bp, Homo sapiens
acattttggaggaaa

SEQ ID NO: 1441251 - DNA, 15 bp, Homo sapiens
cacattttggaggaa

SEQ ID NO: 1441252 - DNA, 15 bp, Homo sapiens
tcacattttggagga

SEQ ID NO: 1441253 - DNA, 15 bp, Homo sapiens
ttcacattttggagg

SEQ ID NO: 1441254 - DNA, 15 bp, Homo sapiens
cttcacattttggag

SEQ ID NO: 1441255 - DNA, 15 bp, Homo sapiens
tcttcacattttgga

SEQ ID NO: 1441256 - DNA, 15 bp, Homo sapiens
gtcttcacattttgg

SEQ ID NO: 1441257 - DNA, 15 bp, Homo sapiens
cgtcttcacattttg

SEQ ID NO: 1441258 - DNA, 15 bp, Homo sapiens
gcgtcttcacatttt

SEQ ID NO: 1441259 - DNA, 15 bp, Homo sapiens
agcgtcttcacattt

SEQ ID NO: 1441260 - DNA, 15 bp, Homo sapiens
tagcgtcttcacatt

SEQ ID NO: 1441261 - DNA, 15 bp, Homo sapiens
atagcgtcttcacat

SEQ ID NO: 1441262 - DNA, 15 bp, Homo sapiens
tatagcgtcttcaca

SEQ ID NO: 1441263 - DNA, 15 bp, Homo sapiens
gtatagcgtcttcac

SEQ ID NO: 1441264 - DNA, 15 bp, Homo sapiens
agtatagcgtcttca

SEQ ID NO: 1441265 - DNA, 15 bp, Homo sapiens
aagtatagcgtcttc

SEQ ID NO: 1441266 - DNA, 15 bp, Homo sapiens
aaagtatagcgtctt

SEQ ID NO: 1441267 - DNA, 15 bp, Homo sapiens
gaaagtatagcgtct

SEQ ID NO: 1441268 - DNA, 15 bp, Homo sapiens
tgaaagtatagcgtc

SEQ ID NO: 1441269 - DNA, 15 bp, Homo sapiens
ctgaaagtatagcgt

SEQ ID NO: 1441270 - DNA, 15 bp, Homo sapiens
cctgaaagtatagcg

SEQ ID NO: 1441271 - DNA, 15 bp, Homo sapiens
tcctgaaagtatagc

SEQ ID NO: 1441272 - DNA, 15 bp, Homo sapiens
atcctgaaagtatag

SEQ ID NO: 1441273 - DNA, 15 bp, Homo sapiens
gatcctgaaagtata

SEQ ID NO: 1441274 - DNA, 15 bp, Homo sapiens
agatcctgaaagtat

SEQ ID NO: 1441275 - DNA, 15 bp, Homo sapiens
cagatcctgaaagta

SEQ ID NO: 1441276 - DNA, 15 bp, Homo sapiens
acagatcctgaaagt

SEQ ID NO: 1441277 - DNA, 15 bp, Homo sapiens
tacagatcctgaaag

SEQ ID NO: 1441278 - DNA, 15 bp, Homo sapiens
ctacagatcctgaaa

SEQ ID NO: 1441279 - DNA, 15 bp, Homo sapiens
cctacagatcctgaa

SEQ ID NO: 1441280 - DNA, 15 bp, Homo sapiens
tcctacagatcctga

SEQ ID NO: 1441281 - DNA, 15 bp, Homo sapiens
ttcctacagatcctg

SEQ ID NO: 1441282 - DNA, 15 bp, Homo sapiens
gttcctacagatcct

SEQ ID NO: 1441283 - DNA, 15 bp, Homo sapiens
tgttcctacagatcc

SEQ ID NO: 1441284 - DNA, 15 bp, Homo sapiens
ttgttcctacagatc

SEQ ID NO: 1441285 - DNA, 15 bp, Homo sapiens
attgttcctacagat

SEQ ID NO: 1441286 - DNA, 15 bp, Homo sapiens
gattgttcctacaga

SEQ ID NO: 1441287 - DNA, 15 bp, Homo sapiens
cgattgttcctacag

SEQ ID NO: 1441288 - DNA, 15 bp, Homo sapiens
acgattgttcctaca

SEQ ID NO: 1441289 - DNA, 15 bp, Homo sapiens
cacgattgttcctac

SEQ ID NO: 1441290 - DNA, 15 bp, Homo sapiens
tcacgattgttccta

SEQ ID NO: 1441291 - DNA, 15 bp, Homo sapiens
ttcacgattgttcct

SEQ ID NO: 1441292 - DNA, 15 bp, Homo sapiens
cttcacgattgttcc

SEQ ID NO: 1441293 - DNA, 15 bp, Homo sapiens
tcttcacgattgttc

SEQ ID NO: 1441294 - DNA, 15 bp, Homo sapiens
ctcttcacgattgtt

SEQ ID NO: 1441295 - DNA, 15 bp, Homo sapiens
tctcttcacgattgt

SEQ ID NO: 1441296 - DNA, 15 bp, Homo sapiens
ctctcttcacgattg

SEQ ID NO: 1441297 - DNA, 15 bp, Homo sapiens
actctcttcacgatt

SEQ ID NO: 1441298 - DNA, 15 bp, Homo sapiens
aactctcttcacgat

SEQ ID NO: 1441299 - DNA, 15 bp, Homo sapiens
gaactctcttcacga

SEQ ID NO: 1441300 - DNA, 15 bp, Homo sapiens
tgaactctcttcacg

SEQ ID NO: 1441301 - DNA, 15 bp, Homo sapiens
atgaactctcttcac

SEQ ID NO: 1441302 - DNA, 15 bp, Homo sapiens
catgaactctcttca

SEQ ID NO: 1441303 - DNA, 15 bp, Homo sapiens
ccatgaactctcttc

SEQ ID NO: 1441304 - DNA, 15 bp, Homo sapiens
tccatgaactctctt

SEQ ID NO: 1441305 - DNA, 15 bp, Homo sapiens
gtccatgaactctct

SEQ ID NO: 1441306 - DNA, 15 bp, Homo sapiens
agtccatgaactctc

SEQ ID NO: 1441307 - DNA, 15 bp, Homo sapiens
gagtccatgaactct

SEQ ID NO: 1441308 - DNA, 15 bp, Homo sapiens
ggagtccatgaactc

SEQ ID NO: 1441309 - DNA, 15 bp, Homo sapiens
gggagtccatgaact

SEQ ID NO: 1441310 - DNA, 15 bp, Homo sapiens
agggagtccatgaac

SEQ ID NO: 1441311 - DNA, 15 bp, Homo sapiens
cagggagtccatgaa

SEQ ID NO: 1441312 - DNA, 15 bp, Homo sapiens
ccagggagtccatga

SEQ ID NO: 1441313 - DNA, 15 bp, Homo sapiens
cccagggagtccatg

SEQ ID NO: 1441314 - DNA, 15 bp, Homo sapiens
gcccagggagtccat

SEQ ID NO: 1441315 - DNA, 15 bp, Homo sapiens
ggcccagggagtcca

SEQ ID NO: 1441316 - DNA, 15 bp, Homo sapiens
aggcccagggagtcc

SEQ ID NO: 1441317 - DNA, 15 bp, Homo sapiens
taggcccagggagtc

SEQ ID NO: 1441318 - DNA, 15 bp, Homo sapiens
ataggcccagggagt

SEQ ID NO: 1441319 - DNA, 15 bp, Homo sapiens
aataggcccagggag

SEQ ID NO: 1441320 - DNA, 15 bp, Homo sapiens
caataggcccaggga

SEQ ID NO: 1441321 - DNA, 15 bp, Homo sapiens
acaataggcccaggg

SEQ ID NO: 1441322 - DNA, 15 bp, Homo sapiens
cacaataggcccagg

SEQ ID NO: 1441323 - DNA, 15 bp, Homo sapiens
tcacaataggcccag

SEQ ID NO: 1441324 - DNA, 15 bp, Homo sapiens
gtcacaataggccca

SEQ ID NO: 1441325 - DNA, 15 bp, Homo sapiens
tgtcacaataggccc

SEQ ID NO: 1441326 - DNA, 15 bp, Homo sapiens
gtgtcacaataggcc

SEQ ID NO: 1441327 - DNA, 15 bp, Homo sapiens
agtgtcacaataggc

SEQ ID NO: 1441328 - DNA, 15 bp, Homo sapiens
tagtgtcacaatagg

SEQ ID NO: 1441329 - DNA, 15 bp, Homo sapiens
ttagtgtcacaatag

SEQ ID NO: 1441330 - DNA, 15 bp, Homo sapiens
gttagtgtcacaata

SEQ ID NO: 1441331 - DNA, 15 bp, Homo sapiens
agttagtgtcacaat

SEQ ID NO: 1441332 - DNA, 15 bp, Homo sapiens
aagttagtgtcacaa

SEQ ID NO: 1441333 - DNA, 15 bp, Homo sapiens
caagttagtgtcaca

SEQ ID NO: 1441334 - DNA, 15 bp, Homo sapiens
ccaagttagtgtcac

SEQ ID NO: 1441335 - DNA, 15 bp, Homo sapiens
tccaagttagtgtca

SEQ ID NO: 1441336 - DNA, 15 bp, Homo sapiens
gtccaagttagtgtc

SEQ ID NO: 1441337 - DNA, 15 bp, Homo sapiens
ggtccaagttagtgt

SEQ ID NO: 1441338 - DNA, 15 bp, Homo sapiens
tggtccaagttagtg

SEQ ID NO: 1441339 - DNA, 15 bp, Homo sapiens
ttggtccaagttagt

SEQ ID NO: 1441340 - DNA, 15 bp, Homo sapiens
tttggtccaagttag

SEQ ID NO: 1441341 - DNA, 15 bp, Homo sapiens
ttttggtccaagtta

SEQ ID NO: 1441342 - DNA, 15 bp, Homo sapiens
gttttggtccaagtt

SEQ ID NO: 1441343 - DNA, 15 bp, Homo sapiens
agttttggtccaagt

SEQ ID NO: 1441344 - DNA, 15 bp, Homo sapiens
aagttttggtccaag

SEQ ID NO: 1441345 - DNA, 15 bp, Homo sapiens
gaagttttggtccaa

SEQ ID NO: 1441346 - DNA, 15 bp, Homo sapiens
tgaagttttggtcca

SEQ ID NO: 1441347 - DNA, 15 bp, Homo sapiens
atgaagttttggtcc

SEQ ID NO: 1441348 - DNA, 15 bp, Homo sapiens
aatgaagttttggtc

SEQ ID NO: 1441349 - DNA, 15 bp, Homo sapiens
aaatgaagttttggt

SEQ ID NO: 1441350 - DNA, 15 bp, Homo sapiens
aaaatgaagttttgg

SEQ ID NO: 1441351 - DNA, 15 bp, Homo sapiens
gaaaatgaagttttg

SEQ ID NO: 1441352 - DNA, 15 bp, Homo sapiens
ggaaaatgaagtttt

SEQ ID NO: 1441353 - DNA, 15 bp, Homo sapiens
gggaaaatgaagttt

SEQ ID NO: 1441354 - DNA, 15 bp, Homo sapiens
ggggaaaatgaagtt

SEQ ID NO: 1441355 - DNA, 15 bp, Homo sapiens
aggggaaaatgaagt

SEQ ID NO: 1441356 - DNA, 15 bp, Homo sapiens
caggggaaaatgaag

SEQ ID NO: 1441357 - DNA, 15 bp, Homo sapiens
tcaggggaaaatgaa

SEQ ID NO: 1441358 - DNA, 15 bp, Homo sapiens
gtcaggggaaaatga

SEQ ID NO: 1441359 - DNA, 15 bp, Homo sapiens
ggtcaggggaaaatg

SEQ ID NO: 1441360 - DNA, 15 bp, Homo sapiens
gggtcaggggaaaat

SEQ ID NO: 1441361 - DNA, 15 bp, Homo sapiens
ggggtcaggggaaaa

SEQ ID NO: 1441362 - DNA, 15 bp, Homo sapiens
gggggtcaggggaaa

SEQ ID NO: 1441363 - DNA, 15 bp, Homo sapiens
tgggggtcaggggaa

SEQ ID NO: 1441364 - DNA, 15 bp, Homo sapiens
atgggggtcagggga

SEQ ID NO: 1441365 - DNA, 15 bp, Homo sapiens
catgggggtcagggg

SEQ ID NO: 1441366 - DNA, 15 bp, Homo sapiens
tcatgggggtcaggg

SEQ ID NO: 1441367 - DNA, 15 bp, Homo sapiens
ctcatgggggtcagg

SEQ ID NO: 1441368 - DNA, 15 bp, Homo sapiens
gctcatgggggtcag

SEQ ID NO: 1441369 - DNA, 15 bp, Homo sapiens
agctcatgggggtca

SEQ ID NO: 1441370 - DNA, 15 bp, Homo sapiens
gagctcatgggggtc

SEQ ID NO: 1441371 - DNA, 15 bp, Homo sapiens
agagctcatgggggt

SEQ ID NO: 1441372 - DNA, 15 bp, Homo sapiens
gagagctcatggggg

SEQ ID NO: 1441373 - DNA, 15 bp, Homo sapiens
tgagagctcatgggg

SEQ ID NO: 1441374 - DNA, 15 bp, Homo sapiens
atgagagctcatggg

SEQ ID NO: 1441375 - DNA, 15 bp, Homo sapiens
aatgagagctcatgg

SEQ ID NO: 1441376 - DNA, 15 bp, Homo sapiens
gaatgagagctcatg

SEQ ID NO: 1441377 - DNA, 15 bp, Homo sapiens
agaatgagagctcat

SEQ ID NO: 1441378 - DNA, 15 bp, Homo sapiens
tagaatgagagctca

SEQ ID NO: 1441379 - DNA, 15 bp, Homo sapiens
ttagaatgagagctc

SEQ ID NO: 1441380 - DNA, 15 bp, Homo sapiens
cttagaatgagagct

SEQ ID NO: 1441381 - DNA, 15 bp, Homo sapiens
gcttagaatgagagc

SEQ ID NO: 1441382 - DNA, 15 bp, Homo sapiens
tgcttagaatgagag

SEQ ID NO: 1441383 - DNA, 15 bp, Homo sapiens
gtgcttagaatgaga

SEQ ID NO: 1441384 - DNA, 15 bp, Homo sapiens
tgtgcttagaatgag

SEQ ID NO: 1441385 - DNA, 15 bp, Homo sapiens
ctgtgcttagaatga

SEQ ID NO: 1441386 - DNA, 15 bp, Homo sapiens
cctgtgcttagaatg

SEQ ID NO: 1441387 - DNA, 15 bp, Homo sapiens
acctgtgcttagaat

SEQ ID NO: 1441388 - DNA, 15 bp, Homo sapiens
cacctgtgcttagaa

SEQ ID NO: 1441389 - DNA, 15 bp, Homo sapiens
acacctgtgcttaga

SEQ ID NO: 1441390 - DNA, 15 bp, Homo sapiens
tacacctgtgcttag

SEQ ID NO: 1441391 - DNA, 15 bp, Homo sapiens
gtacacctgtgctta

SEQ ID NO: 1441392 - DNA, 15 bp, Homo sapiens
agtacacctgtgctt

SEQ ID NO: 1441393 - DNA, 15 bp, Homo sapiens
aagtacacctgtgct

SEQ ID NO: 1441394 - DNA, 15 bp, Homo sapiens
taagtacacctgtgc

SEQ ID NO: 1441395 - DNA, 15 bp, Homo sapiens
ctaagtacacctgtg

SEQ ID NO: 1441396 - DNA, 15 bp, Homo sapiens
tctaagtacacctgt

SEQ ID NO: 1441397 - DNA, 15 bp, Homo sapiens
ctctaagtacacctg

SEQ ID NO: 1441398 - DNA, 15 bp, Homo sapiens
actctaagtacacct

SEQ ID NO: 1441399 - DNA, 15 bp, Homo sapiens
gactctaagtacacc

SEQ ID NO: 1441400 - DNA, 15 bp, Homo sapiens
ggactctaagtacac

SEQ ID NO: 1441401 - DNA, 15 bp, Homo sapiens
gggactctaagtaca

SEQ ID NO: 1441402 - DNA, 15 bp, Homo sapiens
ggggactctaagtac

SEQ ID NO: 1441403 - DNA, 15 bp, Homo sapiens
tggggactctaagta

SEQ ID NO: 1441404 - DNA, 15 bp, Homo sapiens
ctggggactctaagt

SEQ ID NO: 1441405 - DNA, 15 bp, Homo sapiens
cctggggactctaag

SEQ ID NO: 1441406 - DNA, 15 bp, Homo sapiens
ccctggggactctaa

SEQ ID NO: 1441407 - DNA, 15 bp, Homo sapiens
tccctggggactcta

SEQ ID NO: 1441408 - DNA, 15 bp, Homo sapiens
atccctggggactct

SEQ ID NO: 1441409 - DNA, 15 bp, Homo sapiens
aatccctggggactc

SEQ ID NO: 1441410 - DNA, 15 bp, Homo sapiens
taatccctggggact

SEQ ID NO: 1441411 - DNA, 15 bp, Homo sapiens
ctaatccctggggac

SEQ ID NO: 1441412 - DNA, 15 bp, Homo sapiens
gctaatccctgggga

SEQ ID NO: 1441413 - DNA, 15 bp, Homo sapiens
tgctaatccctgggg

SEQ ID NO: 1441414 - DNA, 15 bp, Homo sapiens
atgctaatccctggg

SEQ ID NO: 1441415 - DNA, 15 bp, Homo sapiens
aatgctaatccctgg

SEQ ID NO: 1441416 - DNA, 15 bp, Homo sapiens
taatgctaatccctg

SEQ ID NO: 1441417 - DNA, 15 bp, Homo sapiens
ctaatgctaatccct

SEQ ID NO: 1441418 - DNA, 15 bp, Homo sapiens
gctaatgctaatccc

SEQ ID NO: 1441419 - DNA, 15 bp, Homo sapiens
cgctaatgctaatcc

SEQ ID NO: 1441420 - DNA, 15 bp, Homo sapiens
acgctaatgctaatc

SEQ ID NO: 1441421 - DNA, 15 bp, Homo sapiens
tacgctaatgctaat

SEQ ID NO: 1441422 - DNA, 15 bp, Homo sapiens
ctacgctaatgctaa

SEQ ID NO: 1441423 - DNA, 15 bp, Homo sapiens
tctacgctaatgcta

SEQ ID NO: 1441424 - DNA, 15 bp, Homo sapiens
ctctacgctaatgct

SEQ ID NO: 1441425 - DNA, 15 bp, Homo sapiens
gctctacgctaatgc

SEQ ID NO: 1441426 - DNA, 15 bp, Homo sapiens
ggctctacgctaatg

SEQ ID NO: 1441427 - DNA, 15 bp, Homo sapiens
tggctctacgctaat

SEQ ID NO: 1441428 - DNA, 15 bp, Homo sapiens
ctggctctacgctaa

SEQ ID NO: 1441429 - DNA, 15 bp, Homo sapiens
actggctctacgcta

SEQ ID NO: 1441430 - DNA, 15 bp, Homo sapiens
cactggctctacgct

SEQ ID NO: 1441431 - DNA, 15 bp, Homo sapiens
acactggctctacgc

SEQ ID NO: 1441432 - DNA, 15 bp, Homo sapiens
aacactggctctacg

SEQ ID NO: 1441433 - DNA, 15 bp, Homo sapiens
gaacactggctctac

SEQ ID NO: 1441434 - DNA, 15 bp, Homo sapiens
tgaacactggctcta

SEQ ID NO: 1441435 - DNA, 15 bp, Homo sapiens
ttgaacactggctct

SEQ ID NO: 1441436 - DNA, 15 bp, Homo sapiens
attgaacactggctc

SEQ ID NO: 1441437 - DNA, 15 bp, Homo sapiens
tattgaacactggct

SEQ ID NO: 1441438 - DNA, 15 bp, Homo sapiens
gtattgaacactggc

SEQ ID NO: 1441439 - DNA, 15 bp, Homo sapiens
agtattgaacactgg

SEQ ID NO: 1441440 - DNA, 15 bp, Homo sapiens
tagtattgaacactg

SEQ ID NO: 1441441 - DNA, 15 bp, Homo sapiens
atagtattgaacact

SEQ ID NO: 1441442 - DNA, 15 bp, Homo sapiens
aatagtattgaacac

SEQ ID NO: 1441443 - DNA, 15 bp, Homo sapiens
gaatagtattgaaca

SEQ ID NO: 1441444 - DNA, 15 bp, Homo sapiens
agaatagtattgaac

SEQ ID NO: 1441445 - DNA, 15 bp, Homo sapiens
cagaatagtattgaa

SEQ ID NO: 1441446 - DNA, 15 bp, Homo sapiens
tcagaatagtattga

SEQ ID NO: 1441447 - DNA, 15 bp, Homo sapiens
ttcagaatagtattg

SEQ ID NO: 1441448 - DNA, 15 bp, Homo sapiens
attcagaatagtatt

SEQ ID NO: 1441449 - DNA, 15 bp, Homo sapiens
tattcagaatagtat

SEQ ID NO: 1441450 - DNA, 15 bp, Homo sapiens
atattcagaatagta

SEQ ID NO: 1441451 - DNA, 15 bp, Homo sapiens
gatattcagaatagt

SEQ ID NO: 1441452 - DNA, 15 bp, Homo sapiens
agatattcagaatag

SEQ ID NO: 1441453 - DNA, 15 bp, Homo sapiens
cagatattcagaata

SEQ ID NO: 1441454 - DNA, 15 bp, Homo sapiens
gcagatattcagaat

SEQ ID NO: 1441455 - DNA, 15 bp, Homo sapiens
ggcagatattcagaa

SEQ ID NO: 1441456 - DNA, 15 bp, Homo sapiens
gggcagatattcaga

SEQ ID NO: 1441457 - DNA, 15 bp, Homo sapiens
agggcagatattcag

SEQ ID NO: 1441458 - DNA, 15 bp, Homo sapiens
aagggcagatattca

SEQ ID NO: 1441459 - DNA, 15 bp, Homo sapiens
aaagggcagatattc

SEQ ID NO: 1441460 - DNA, 15 bp, Homo sapiens
gaaagggcagatatt

SEQ ID NO: 1441461 - DNA, 15 bp, Homo sapiens
agaaagggcagatat

SEQ ID NO: 1441462 - DNA, 15 bp, Homo sapiens
cagaaagggcagata

SEQ ID NO: 1441463 - DNA, 15 bp, Homo sapiens
gcagaaagggcagat

SEQ ID NO: 1441464 - DNA, 15 bp, Homo sapiens
agcagaaagggcaga

SEQ ID NO: 1441465 - DNA, 15 bp, Homo sapiens
gagcagaaagggcag

SEQ ID NO: 1441466 - DNA, 15 bp, Homo sapiens
agagcagaaagggca

SEQ ID NO: 1441467 - DNA, 15 bp, Homo sapiens
tagagcagaaagggc

SEQ ID NO: 1441468 - DNA, 15 bp, Homo sapiens
atagagcagaaaggg

SEQ ID NO: 1441469 - DNA, 15 bp, Homo sapiens
tatagagcagaaagg

SEQ ID NO: 1441470 - DNA, 15 bp, Homo sapiens
gtatagagcagaaag

SEQ ID NO: 1441471 - DNA, 15 bp, Homo sapiens
agtatagagcagaaa

SEQ ID NO: 1441472 - DNA, 15 bp, Homo sapiens
tagtatagagcagaa

SEQ ID NO: 1441473 - DNA, 15 bp, Homo sapiens
gtagtatagagcaga

SEQ ID NO: 1441474 - DNA, 15 bp, Homo sapiens
agtagtatagagcag

SEQ ID NO: 1441475 - DNA, 15 bp, Homo sapiens
gagtagtatagagca

SEQ ID NO: 1441476 - DNA, 15 bp, Homo sapiens
agagtagtatagagc

SEQ ID NO: 1441477 - DNA, 15 bp, Homo sapiens
cagagtagtatagag

SEQ ID NO: 1441478 - DNA, 15 bp, Homo sapiens
gcagagtagtataga

SEQ ID NO: 1441479 - DNA, 15 bp, Homo sapiens
agcagagtagtatag

SEQ ID NO: 1441480 - DNA, 15 bp, Homo sapiens
tagcagagtagtata

SEQ ID NO: 1441481 - DNA, 15 bp, Homo sapiens
gtagcagagtagtat

SEQ ID NO: 1441482 - DNA, 15 bp, Homo sapiens
tgtagcagagtagta

SEQ ID NO: 1441483 - DNA, 15 bp, Homo sapiens
atgtagcagagtagt

SEQ ID NO: 1441484 - DNA, 15 bp, Homo sapiens
catgtagcagagtag

SEQ ID NO: 1441485 - DNA, 15 bp, Homo sapiens
acatgtagcagagta

SEQ ID NO: 1441486 - DNA, 15 bp, Homo sapiens
gacatgtagcagagt

SEQ ID NO: 1441487 - DNA, 15 bp, Homo sapiens
cgacatgtagcagag

SEQ ID NO: 1441488 - DNA, 15 bp, Homo sapiens
ccgacatgtagcaga

SEQ ID NO: 1441489 - DNA, 15 bp, Homo sapiens
gccgacatgtagcag

SEQ ID NO: 1441490 - DNA, 15 bp, Homo sapiens
tgccgacatgtagca

SEQ ID NO: 1441491 - DNA, 15 bp, Homo sapiens
atgccgacatgtagc

SEQ ID NO: 1441492 - DNA, 15 bp, Homo sapiens
catgccgacatgtag

SEQ ID NO: 1441493 - DNA, 15 bp, Homo sapiens
acatgccgacatgta

SEQ ID NO: 1441494 - DNA, 15 bp, Homo sapiens
aacatgccgacatgt

SEQ ID NO: 1441495 - DNA, 15 bp, Homo sapiens
gaacatgccgacatg

SEQ ID NO: 1441496 - DNA, 15 bp, Homo sapiens
agaacatgccgacat

SEQ ID NO: 1441497 - DNA, 15 bp, Homo sapiens
cagaacatgccgaca

SEQ ID NO: 1441498 - DNA, 15 bp, Homo sapiens
gcagaacatgccgac

SEQ ID NO: 1441499 - DNA, 15 bp, Homo sapiens
agcagaacatgccga

SEQ ID NO: 1441500 - DNA, 15 bp, Homo sapiens
cagcagaacatgccg

SEQ ID NO: 1441501 - DNA, 15 bp, Homo sapiens
ccagcagaacatgcc

SEQ ID NO: 1441502 - DNA, 15 bp, Homo sapiens
cccagcagaacatgc

SEQ ID NO: 1441503 - DNA, 15 bp, Homo sapiens
tcccagcagaacatg

SEQ ID NO: 1441504 - DNA, 15 bp, Homo sapiens
ttcccagcagaacat

SEQ ID NO: 1441505 - DNA, 15 bp, Homo sapiens
tttcccagcagaaca

SEQ ID NO: 1441506 - DNA, 15 bp, Homo sapiens
ctttcccagcagaac

SEQ ID NO: 1441507 - DNA, 15 bp, Homo sapiens
cctttcccagcagaa

SEQ ID NO: 1441508 - DNA, 15 bp, Homo sapiens
gcctttcccagcaga

SEQ ID NO: 1441509 - DNA, 15 bp, Homo sapiens
agcctttcccagcag

SEQ ID NO: 1441510 - DNA, 15 bp, Homo sapiens
tagcctttcccagca

SEQ ID NO: 1441511 - DNA, 15 bp, Homo sapiens
ctagcctttcccagc

SEQ ID NO: 1441512 - DNA, 15 bp, Homo sapiens
tctagcctttcccag

SEQ ID NO: 1441513 - DNA, 15 bp, Homo sapiens
atctagcctttccca

SEQ ID NO: 1441514 - DNA, 15 bp, Homo sapiens
aatctagcctttccc

SEQ ID NO: 1441515 - DNA, 15 bp, Homo sapiens
aaatctagcctttcc

SEQ ID NO: 1441516 - DNA, 15 bp, Homo sapiens
aaaatctagcctttc

SEQ ID NO: 1441517 - DNA, 15 bp, Homo sapiens
gaaaatctagccttt

SEQ ID NO: 1441518 - DNA, 15 bp, Homo sapiens
tgaaaatctagcctt

SEQ ID NO: 1441519 - DNA, 15 bp, Homo sapiens
ctgaaaatctagcct

SEQ ID NO: 1441520 - DNA, 15 bp, Homo sapiens
actgaaaatctagcc

SEQ ID NO: 1441521 - DNA, 15 bp, Homo sapiens
tactgaaaatctagc

SEQ ID NO: 1441522 - DNA, 15 bp, Homo sapiens
ctactgaaaatctag

SEQ ID NO: 1441523 - DNA, 15 bp, Homo sapiens
cctactgaaaatcta

SEQ ID NO: 1441524 - DNA, 15 bp, Homo sapiens
acctactgaaaatct

SEQ ID NO: 1441525 - DNA, 15 bp, Homo sapiens
tacctactgaaaatc

SEQ ID NO: 1441526 - DNA, 15 bp, Homo sapiens
ctacctactgaaaat

SEQ ID NO: 1441527 - DNA, 15 bp, Homo sapiens
cctacctactgaaaa

SEQ ID NO: 1441528 - DNA, 15 bp, Homo sapiens
tcctacctactgaaa

SEQ ID NO: 1441529 - DNA, 15 bp, Homo sapiens
gtcctacctactgaa

SEQ ID NO: 1441530 - DNA, 15 bp, Homo sapiens
agtcctacctactga

SEQ ID NO: 1441531 - DNA, 15 bp, Homo sapiens
aagtcctacctactg

SEQ ID NO: 1441532 - DNA, 15 bp, Homo sapiens
caagtcctacctact

SEQ ID NO: 1441533 - DNA, 15 bp, Homo sapiens
tcaagtcctacctac

SEQ ID NO: 1441534 - DNA, 15 bp, Homo sapiens
ctcaagtcctaccta

SEQ ID NO: 1441535 - DNA, 15 bp, Homo sapiens
cctcaagtcctacct

SEQ ID NO: 1441536 - DNA, 15 bp, Homo sapiens
acctcaagtcctacc

SEQ ID NO: 1441537 - DNA, 15 bp, Homo sapiens
aacctcaagtcctac

SEQ ID NO: 1441538 - DNA, 15 bp, Homo sapiens
gaacctcaagtccta

SEQ ID NO: 1441539 - DNA, 15 bp, Homo sapiens
agaacctcaagtcct

SEQ ID NO: 1441540 - DNA, 15 bp, Homo sapiens
tagaacctcaagtcc

SEQ ID NO: 1441541 - DNA, 15 bp, Homo sapiens
gtagaacctcaagtc

SEQ ID NO: 1441542 - DNA, 15 bp, Homo sapiens
ggtagaacctcaagt

SEQ ID NO: 1441543 - DNA, 15 bp, Homo sapiens
tggtagaacctcaag

SEQ ID NO: 1441544 - DNA, 15 bp, Homo sapiens
gtggtagaacctcaa

SEQ ID NO: 1441545 - DNA, 15 bp, Homo sapiens
tgtggtagaacctca

SEQ ID NO: 1441546 - DNA, 15 bp, Homo sapiens
ttgtggtagaacctc

SEQ ID NO: 1441547 - DNA, 15 bp, Homo sapiens
cttgtggtagaacct

SEQ ID NO: 1441548 - DNA, 15 bp, Homo sapiens
ccttgtggtagaacc

SEQ ID NO: 1441549 - DNA, 15 bp, Homo sapiens
cccttgtggtagaac

SEQ ID NO: 1441550 - DNA, 15 bp, Homo sapiens
gcccttgtggtagaa

SEQ ID NO: 1441551 - DNA, 15 bp, Homo sapiens
agcccttgtggtaga

SEQ ID NO: 1441552 - DNA, 15 bp, Homo sapiens
aagcccttgtggtag

SEQ ID NO: 1441553 - DNA, 15 bp, Homo sapiens
aaagcccttgtggta

SEQ ID NO: 1441554 - DNA, 15 bp, Homo sapiens
taaagcccttgtggt

SEQ ID NO: 1441555 - DNA, 15 bp, Homo sapiens
ttaaagcccttgtgg

SEQ ID NO: 1441556 - DNA, 15 bp, Homo sapiens
cttaaagcccttgtg

SEQ ID NO: 1441557 - DNA, 15 bp, Homo sapiens
acttaaagcccttgt

SEQ ID NO: 1441558 - DNA, 15 bp, Homo sapiens
tacttaaagcccttg

SEQ ID NO: 1441559 - DNA, 15 bp, Homo sapiens
atacttaaagccctt

SEQ ID NO: 1441560 - DNA, 15 bp, Homo sapiens
tatacttaaagccct

SEQ ID NO: 1441561 - DNA, 15 bp, Homo sapiens
ttatacttaaagccc

SEQ ID NO: 1441562 - DNA, 15 bp, Homo sapiens
tttatacttaaagcc

SEQ ID NO: 1441563 - DNA, 15 bp, Homo sapiens
gtttatacttaaagc

SEQ ID NO: 1441564 - DNA, 15 bp, Homo sapiens
ggtttatacttaaag

SEQ ID NO: 1441565 - DNA, 15 bp, Homo sapiens
tggtttatacttaaa

SEQ ID NO: 1441566 - DNA, 15 bp, Homo sapiens
ctggtttatacttaa

SEQ ID NO: 1441567 - DNA, 15 bp, Homo sapiens
gctggtttatactta

SEQ ID NO: 1441568 - DNA, 15 bp, Homo sapiens
ggctggtttatactt

SEQ ID NO: 1441569 - DNA, 15 bp, Homo sapiens
gggctggtttatact

SEQ ID NO: 1441570 - DNA, 15 bp, Homo sapiens
ggggctggtttatac

SEQ ID NO: 1441571 - DNA, 15 bp, Homo sapiens
gggggctggtttata

SEQ ID NO: 1441572 - DNA, 15 bp, Homo sapiens
agggggctggtttat

SEQ ID NO: 1441573 - DNA, 15 bp, Homo sapiens
gagggggctggttta

SEQ ID NO: 1441574 - DNA, 15 bp, Homo sapiens
tgagggggctggttt

SEQ ID NO: 1441575 - DNA, 15 bp, Homo sapiens
gtgagggggctggtt

SEQ ID NO: 1441576 - DNA, 15 bp, Homo sapiens
ggtgagggggctggt

SEQ ID NO: 1441577 - DNA, 15 bp, Homo sapiens
gggtgagggggctgg

SEQ ID NO: 1441578 - DNA, 15 bp, Homo sapiens
agggtgagggggctg

SEQ ID NO: 1441579 - DNA, 15 bp, Homo sapiens
aagggtgagggggct

SEQ ID NO: 1441580 - DNA, 15 bp, Homo sapiens
gaagggtgagggggc

SEQ ID NO: 1441581 - DNA, 15 bp, Homo sapiens
ggaagggtgaggggg

SEQ ID NO: 1441582 - DNA, 15 bp, Homo sapiens
gaggaagggtgaggg

SEQ ID NO: 1441583 - DNA, 15 bp, Homo sapiens
agaggaagggtgagg

SEQ ID NO: 1441584 - DNA, 15 bp, Homo sapiens
tagaggaagggtgag

SEQ ID NO: 1441585 - DNA, 15 bp, Homo sapiens
ttagaggaagggtga

SEQ ID NO: 1441586 - DNA, 15 bp, Homo sapiens
cttagaggaagggtg

SEQ ID NO: 1441587 - DNA, 15 bp, Homo sapiens
ccttagaggaagggt

SEQ ID NO: 1441588 - DNA, 15 bp, Homo sapiens
tccttagaggaaggg

SEQ ID NO: 1441589 - DNA, 15 bp, Homo sapiens
ctccttagaggaagg

SEQ ID NO: 1441590 - DNA, 15 bp, Homo sapiens
gctccttagaggaag

SEQ ID NO: 1441591 - DNA, 15 bp, Homo sapiens
agctccttagaggaa

SEQ ID NO: 1441592 - DNA, 15 bp, Homo sapiens
aagctccttagagga

SEQ ID NO: 1441593 - DNA, 15 bp, Homo sapiens
aaagctccttagagg

SEQ ID NO: 1441594 - DNA, 15 bp, Homo sapiens
caaagctccttagag

SEQ ID NO: 1441595 - DNA, 15 bp, Homo sapiens
ccaaagctccttaga

SEQ ID NO: 1441596 - DNA, 15 bp, Homo sapiens
cccaaagctccttag

SEQ ID NO: 1441597 - DNA, 15 bp, Homo sapiens
gcccaaagctcctta

SEQ ID NO: 1441598 - DNA, 15 bp, Homo sapiens
ggcccaaagctcctt

SEQ ID NO: 1441599 - DNA, 15 bp, Homo sapiens
aggcccaaagctcct

SEQ ID NO: 1441600 - DNA, 15 bp, Homo sapiens
caggcccaaagctcc

SEQ ID NO: 1441601 - DNA, 15 bp, Homo sapiens
ccaggcccaaagctc

SEQ ID NO: 1441602 - DNA, 15 bp, Homo sapiens
cccaggcccaaagct

SEQ ID NO: 1441603 - DNA, 15 bp, Homo sapiens
tcccaggcccaaagc

SEQ ID NO: 1441604 - DNA, 15 bp, Homo sapiens
atcccaggcccaaag

SEQ ID NO: 1441605 - DNA, 15 bp, Homo sapiens
aatcccaggcccaaa

SEQ ID NO: 1441606 - DNA, 15 bp, Homo sapiens
caatcccaggcccaa

SEQ ID NO: 1441607 - DNA, 15 bp, Homo sapiens
ccaatcccaggccca

SEQ ID NO: 1441608 - DNA, 15 bp, Homo sapiens
gccaatcccaggccc

SEQ ID NO: 1441609 - DNA, 15 bp, Homo sapiens
agccaatcccaggcc

SEQ ID NO: 1441610 - DNA, 15 bp, Homo sapiens
cagccaatcccaggc

SEQ ID NO: 1441611 - DNA, 15 bp, Homo sapiens
tcagccaatcccagg

SEQ ID NO: 1441612 - DNA, 15 bp, Homo sapiens
ctcagccaatcccag

SEQ ID NO: 1441613 - DNA, 15 bp, Homo sapiens
cctcagccaatccca

SEQ ID NO: 1441614 - DNA, 15 bp, Homo sapiens
tcctcagccaatccc

SEQ ID NO: 1441615 - DNA, 15 bp, Homo sapiens
ctcctcagccaatcc

SEQ ID NO: 1441616 - DNA, 15 bp, Homo sapiens
actcctcagccaatc

SEQ ID NO: 1441617 - DNA, 15 bp, Homo sapiens
gactcctcagccaat

SEQ ID NO: 1441618 - DNA, 15 bp, Homo sapiens
ggactcctcagccaa

SEQ ID NO: 1441619 - DNA, 15 bp, Homo sapiens
aggactcctcagcca

SEQ ID NO: 1441620 - DNA, 15 bp, Homo sapiens
taggactcctcagcc

SEQ ID NO: 1441621 - DNA, 15 bp, Homo sapiens
gtaggactcctcagc

SEQ ID NO: 1441622 - DNA, 15 bp, Homo sapiens
ggtaggactcctcag

SEQ ID NO: 1441623 - DNA, 15 bp, Homo sapiens
aggtaggactcctca

SEQ ID NO: 1441624 - DNA, 15 bp, Homo sapiens
aaggtaggactcctc

SEQ ID NO: 1441625 - DNA, 15 bp, Homo sapiens
taaggtaggactcct

SEQ ID NO: 1441626 - DNA, 15 bp, Homo sapiens
gtaaggtaggactcc

SEQ ID NO: 1441627 - DNA, 15 bp, Homo sapiens
tgtaaggtaggactc

SEQ ID NO: 1441628 - DNA, 15 bp, Homo sapiens
atgtaaggtaggact

SEQ ID NO: 1441629 - DNA, 15 bp, Homo sapiens
gatgtaaggtaggac

SEQ ID NO: 1441630 - DNA, 15 bp, Homo sapiens
tgatgtaaggtagga

SEQ ID NO: 1441631 - DNA, 15 bp, Homo sapiens
gtgatgtaaggtagg

SEQ ID NO: 1441632 - DNA, 15 bp, Homo sapiens
tgtgatgtaaggtag

SEQ ID NO: 1441633 - DNA, 15 bp, Homo sapiens
ctgtgatgtaaggta

SEQ ID NO: 1441634 - DNA, 15 bp, Homo sapiens
actgtgatgtaaggt

SEQ ID NO: 1441635 - DNA, 15 bp, Homo sapiens
cactgtgatgtaagg

SEQ ID NO: 1441636 - DNA, 15 bp, Homo sapiens
tcactgtgatgtaag

SEQ ID NO: 1441637 - DNA, 15 bp, Homo sapiens
gtcactgtgatgtaa

SEQ ID NO: 1441638 - DNA, 15 bp, Homo sapiens
agtcactgtgatgta

SEQ ID NO: 1441639 - DNA, 15 bp, Homo sapiens
gagtcactgtgatgt

SEQ ID NO: 1441640 - DNA, 15 bp, Homo sapiens
tgagtcactgtgatg

SEQ ID NO: 1441641 - DNA, 15 bp, Homo sapiens
atgagtcactgtgat

SEQ ID NO: 1441642 - DNA, 15 bp, Homo sapiens
tatgagtcactgtga

SEQ ID NO: 1441643 - DNA, 15 bp, Homo sapiens
ctatgagtcactgtg

SEQ ID NO: 1441644 - DNA, 15 bp, Homo sapiens
tctatgagtcactgt

SEQ ID NO: 1441645 - DNA, 15 bp, Homo sapiens
gtctatgagtcactg

SEQ ID NO: 1441646 - DNA, 15 bp, Homo sapiens
agtctatgagtcact

SEQ ID NO: 1441647 - DNA, 15 bp, Homo sapiens
aagtctatgagtcac

SEQ ID NO: 1441648 - DNA, 15 bp, Homo sapiens
gaagtctatgagtca

SEQ ID NO: 1441649 - DNA, 15 bp, Homo sapiens
tgaagtctatgagtc

SEQ ID NO: 1441650 - DNA, 15 bp, Homo sapiens
atgaagtctatgagt

SEQ ID NO: 1441651 - DNA, 15 bp, Homo sapiens
aatgaagtctatgag

SEQ ID NO: 1441652 - DNA, 15 bp, Homo sapiens
aaatgaagtctatga

SEQ ID NO: 1441653 - DNA, 15 bp, Homo sapiens
gaaatgaagtctatg

SEQ ID NO: 1441654 - DNA, 15 bp, Homo sapiens
tgaaatgaagtctat

SEQ ID NO: 1441655 - DNA, 15 bp, Homo sapiens
atgaaatgaagtcta

SEQ ID NO: 1441656 - DNA, 15 bp, Homo sapiens
gatgaaatgaagtct

SEQ ID NO: 1441657 - DNA, 15 bp, Homo sapiens
tgatgaaatgaagtc

SEQ ID NO: 1441658 - DNA, 15 bp, Homo sapiens
ttgatgaaatgaagt

SEQ ID NO: 1441659 - DNA, 15 bp, Homo sapiens
tttgatgaaatgaag

SEQ ID NO: 1441660 - DNA, 15 bp, Homo sapiens
gtttgatgaaatgaa

SEQ ID NO: 1441661 - DNA, 15 bp, Homo sapiens
ggtttgatgaaatga

SEQ ID NO: 1441662 - DNA, 15 bp, Homo sapiens
aggtttgatgaaatg

SEQ ID NO: 1441663 - DNA, 15 bp, Homo sapiens
gaggtttgatgaaat

SEQ ID NO: 1441664 - DNA, 15 bp, Homo sapiens
tgaggtttgatgaaa

SEQ ID NO: 1441665 - DNA, 15 bp, Homo sapiens
ttgaggtttgatgaa

SEQ ID NO: 1441666 - DNA, 15 bp, Homo sapiens
cttgaggtttgatga

SEQ ID NO: 1441667 - DNA, 15 bp, Homo sapiens
acttgaggtttgatg

SEQ ID NO: 1441668 - DNA, 15 bp, Homo sapiens
cacttgaggtttgat

SEQ ID NO: 1441669 - DNA, 15 bp, Homo sapiens
acacttgaggtttga

SEQ ID NO: 1441670 - DNA, 15 bp, Homo sapiens
aacacttgaggtttg

SEQ ID NO: 1441671 - DNA, 15 bp, Homo sapiens
aaacacttgaggttt

SEQ ID NO: 1441672 - DNA, 15 bp, Homo sapiens
aaaacacttgaggtt

SEQ ID NO: 1441673 - DNA, 15 bp, Homo sapiens
aaaaacacttgaggt

SEQ ID NO: 1441674 - DNA, 15 bp, Homo sapiens
taaaaacacttgagg

SEQ ID NO: 1441675 - DNA, 15 bp, Homo sapiens
ataaaaacacttgag

SEQ ID NO: 1441676 - DNA, 15 bp, Homo sapiens
tataaaaacacttga

SEQ ID NO: 1441677 - DNA, 15 bp, Homo sapiens
gtataaaaacacttg

SEQ ID NO: 1441678 - DNA, 15 bp, Homo sapiens
agtataaaaacactt

SEQ ID NO: 1441679 - DNA, 15 bp, Homo sapiens
aagtataaaaacact

SEQ ID NO: 1441680 - DNA, 15 bp, Homo sapiens
aaagtataaaaacac

SEQ ID NO: 1441681 - DNA, 15 bp, Homo sapiens
gaaagtataaaaaca

SEQ ID NO: 1441682 - DNA, 15 bp, Homo sapiens
tgaaagtataaaaac

SEQ ID NO: 1441683 - DNA, 15 bp, Homo sapiens
ctgaaagtataaaaa

SEQ ID NO: 1441684 - DNA, 15 bp, Homo sapiens
cctgaaagtataaaa

SEQ ID NO: 1441685 - DNA, 15 bp, Homo sapiens
acctgaaagtataaa

SEQ ID NO: 1441686 - DNA, 15 bp, Homo sapiens
tacctgaaagtataa

SEQ ID NO: 1441687 - DNA, 15 bp, Homo sapiens
atacctgaaagtata

SEQ ID NO: 1441688 - DNA, 15 bp, Homo sapiens
catacctgaaagtat

SEQ ID NO: 1441689 - DNA, 15 bp, Homo sapiens
acatacctgaaagta

SEQ ID NO: 1441690 - DNA, 15 bp, Homo sapiens
tacatacctgaaagt

SEQ ID NO: 1441691 - DNA, 15 bp, Homo sapiens
ttacatacctgaaag

SEQ ID NO: 1441692 - DNA, 15 bp, Homo sapiens
tttacatacctgaaa

SEQ ID NO: 1441693 - DNA, 15 bp, Homo sapiens
atttacatacctgaa

SEQ ID NO: 1441694 - DNA, 15 bp, Homo sapiens
tatttacatacctga

SEQ ID NO: 1441695 - DNA, 15 bp, Homo sapiens
ttatttacatacctg

SEQ ID NO: 1441696 - DNA, 15 bp, Homo sapiens
tttatttacatacct

SEQ ID NO: 1441697 - DNA, 15 bp, Homo sapiens
ctttatttacatacc

SEQ ID NO: 1441698 - DNA, 15 bp, Homo sapiens
tctttatttacatac

SEQ ID NO: 1441699 - DNA, 15 bp, Homo sapiens
ttctttatttacata

SEQ ID NO: 1441700 - DNA, 15 bp, Homo sapiens
cttctttatttacat

SEQ ID NO: 1441701 - DNA, 15 bp, Homo sapiens
tcttctttatttaca

SEQ ID NO: 1441702 - DNA, 15 bp, Homo sapiens
ttcttctttatttac

SEQ ID NO: 1441703 - DNA, 15 bp, Homo sapiens
gttcttctttattta

SEQ ID NO: 1441704 - DNA, 15 bp, Homo sapiens
ggttcttctttattt

SEQ ID NO: 1441705 - DNA, 15 bp, Homo sapiens
aggttcttctttatt

SEQ ID NO: 1441706 - DNA, 15 bp, Homo sapiens
aaggttcttctttat

SEQ ID NO: 1441707 - DNA, 15 bp, Homo sapiens
taaggttcttcttta

SEQ ID NO: 1441708 - DNA, 15 bp, Homo sapiens
ctaaggttcttcttt

SEQ ID NO: 1441709 - DNA, 15 bp, Homo sapiens
tctaaggttcttctt

SEQ ID NO: 1441710 - DNA, 15 bp, Homo sapiens
ttctaaggttcttct

SEQ ID NO: 1441711 - DNA, 15 bp, Homo sapiens
cttctaaggttcttc

SEQ ID NO: 1441712 - DNA, 15 bp, Homo sapiens
ccttctaaggttctt

SEQ ID NO: 1441713 - DNA, 15 bp, Homo sapiens
taaccttctaaggtt

SEQ ID NO: 1441714 - DNA, 15 bp, Homo sapiens
ataaccttctaaggt

SEQ ID NO: 1441715 - DNA, 15 bp, Homo sapiens
gataaccttctaagg

SEQ ID NO: 1441716 - DNA, 15 bp, Homo sapiens
agataaccttctaag

SEQ ID NO: 1441717 - DNA, 15 bp, Homo sapiens
tagataaccttctaa

SEQ ID NO: 1441718 - DNA, 15 bp, Homo sapiens
atagataaccttcta

SEQ ID NO: 1441719 - DNA, 15 bp, Homo sapiens
aatagataaccttct

SEQ ID NO: 1441720 - DNA, 15 bp, Homo sapiens
aaatagataaccttc

SEQ ID NO: 1441721 - DNA, 15 bp, Homo sapiens
taaatagataacctt

SEQ ID NO: 1441722 - DNA, 15 bp, Homo sapiens
ataaatagataacct

SEQ ID NO: 1441723 - DNA, 15 bp, Homo sapiens
aataaatagataacc

SEQ ID NO: 1441724 - DNA, 15 bp, Homo sapiens
aaataaatagataac

SEQ ID NO: 1441725 - DNA, 15 bp, Homo sapiens
aaaataaatagataa

SEQ ID NO: 1441726 - DNA, 15 bp, Homo sapiens
taaaataaatagata

SEQ ID NO: 1441727 - DNA, 15 bp, Homo sapiens
ttaaaataaatagat

SEQ ID NO: 1441728 - DNA, 15 bp, Homo sapiens
attaaaataaataga

SEQ ID NO: 1441729 - DNA, 15 bp, Homo sapiens
gattaaaataaatag

SEQ ID NO: 1441730 - DNA, 15 bp, Homo sapiens
agattaaaataaata

SEQ ID NO: 1441731 - DNA, 15 bp, Homo sapiens
aagattaaaataaat

SEQ ID NO: 1441732 - DNA, 15 bp, Homo sapiens
taagattaaaataaa

SEQ ID NO: 1441733 - DNA, 15 bp, Homo sapiens
ctaagattaaaataa

SEQ ID NO: 1441734 - DNA, 15 bp, Homo sapiens
tctaagattaaaata

SEQ ID NO: 1441735 - DNA, 15 bp, Homo sapiens
atctaagattaaaat

SEQ ID NO: 1441736 - DNA, 15 bp, Homo sapiens
catctaagattaaaa

SEQ ID NO: 1441737 - DNA, 15 bp, Homo sapiens
acatctaagattaaa

SEQ ID NO: 1441738 - DNA, 15 bp, Homo sapiens
gacatctaagattaa

SEQ ID NO: 1441739 - DNA, 15 bp, Homo sapiens
ggacatctaagatta

SEQ ID NO: 1441740 - DNA, 15 bp, Homo sapiens
aggacatctaagatt

SEQ ID NO: 1441741 - DNA, 15 bp, Homo sapiens
caggacatctaagat

SEQ ID NO: 1441742 - DNA, 15 bp, Homo sapiens
acaggacatctaaga

SEQ ID NO: 1441743 - DNA, 15 bp, Homo sapiens
cacaggacatctaag

SEQ ID NO: 1441744 - DNA, 15 bp, Homo sapiens
tcacaggacatctaa

SEQ ID NO: 1441745 - DNA, 15 bp, Homo sapiens
atcacaggacatcta

SEQ ID NO: 1441746 - DNA, 15 bp, Homo sapiens
gatcacaggacatct

SEQ ID NO: 1441747 - DNA, 15 bp, Homo sapiens
agatcacaggacatc

SEQ ID NO: 1441748 - DNA, 15 bp, Homo sapiens
gagatcacaggacat

SEQ ID NO: 1441749 - DNA, 15 bp, Homo sapiens
tgagatcacaggaca

SEQ ID NO: 1441750 - DNA, 15 bp, Homo sapiens
ctgagatcacaggac

SEQ ID NO: 1441751 - DNA, 15 bp, Homo sapiens
gctgagatcacagga

SEQ ID NO: 1441752 - DNA, 15 bp, Homo sapiens
ggctgagatcacagg

SEQ ID NO: 1441753 - DNA, 15 bp, Homo sapiens
tggctgagatcacag

SEQ ID NO: 1441754 - DNA, 15 bp, Homo sapiens
gtggctgagatcaca

SEQ ID NO: 1441755 - DNA, 15 bp, Homo sapiens
agtggctgagatcac

SEQ ID NO: 1441756 - DNA, 15 bp, Homo sapiens
cagtggctgagatca

SEQ ID NO: 1441757 - DNA, 15 bp, Homo sapiens
acagtggctgagatc

SEQ ID NO: 1441758 - DNA, 15 bp, Homo sapiens
gacagtggctgagat

SEQ ID NO: 1441759 - DNA, 15 bp, Homo sapiens
tgacagtggctgaga

SEQ ID NO: 1441760 - DNA, 15 bp, Homo sapiens
ttgacagtggctgag

SEQ ID NO: 1441761 - DNA, 15 bp, Homo sapiens
tttgacagtggctga

SEQ ID NO: 1441762 - DNA, 15 bp, Homo sapiens
ctttgacagtggctg

SEQ ID NO: 1441763 - DNA, 15 bp, Homo sapiens
tctttgacagtggct

SEQ ID NO: 1441764 - DNA, 15 bp, Homo sapiens
atctttgacagtggc

SEQ ID NO: 1441765 - DNA, 15 bp, Homo sapiens
gatctttgacagtgg

SEQ ID NO: 1441766 - DNA, 15 bp, Homo sapiens
ggatctttgacagtg

SEQ ID NO: 1441767 - DNA, 15 bp, Homo sapiens
gggatctttgacagt

SEQ ID NO: 1441768 - DNA, 15 bp, Homo sapiens
agggatctttgacag

SEQ ID NO: 1441769 - DNA, 15 bp, Homo sapiens
cagggatctttgaca

SEQ ID NO: 1441770 - DNA, 15 bp, Homo sapiens
acagggatctttgac

SEQ ID NO: 1441771 - DNA, 15 bp, Homo sapiens
cacagggatctttga

SEQ ID NO: 1441772 - DNA, 15 bp, Homo sapiens
ccacagggatctttg

SEQ ID NO: 1441773 - DNA, 15 bp, Homo sapiens
gccacagggatcttt

SEQ ID NO: 1441774 - DNA, 15 bp, Homo sapiens
agccacagggatctt

SEQ ID NO: 1441775 - DNA, 15 bp, Homo sapiens
gagccacagggatct

SEQ ID NO: 1441776 - DNA, 15 bp, Homo sapiens
tgagccacagggatc

SEQ ID NO: 1441777 - DNA, 15 bp, Homo sapiens
ttgagccacagggat

SEQ ID NO: 1441778 - DNA, 15 bp, Homo sapiens
cttgagccacaggga

SEQ ID NO: 1441779 - DNA, 15 bp, Homo sapiens
acttgagccacaggg

SEQ ID NO: 1441780 - DNA, 15 bp, Homo sapiens
gacttgagccacagg

SEQ ID NO: 1441781 - DNA, 15 bp, Homo sapiens
tgacttgagccacag

SEQ ID NO: 1441782 - DNA, 15 bp, Homo sapiens
atgacttgagccaca

SEQ ID NO: 1441783 - DNA, 15 bp, Homo sapiens
aatgacttgagccac

SEQ ID NO: 1441784 - DNA, 15 bp, Homo sapiens
aaatgacttgagcca

SEQ ID NO: 1441785 - DNA, 15 bp, Homo sapiens
aaaatgacttgagcc

SEQ ID NO: 1441786 - DNA, 15 bp, Homo sapiens
aaaaatgacttgagc

SEQ ID NO: 1441787 - DNA, 15 bp, Homo sapiens
gaaaaatgacttgag

SEQ ID NO: 1441788 - DNA, 15 bp, Homo sapiens
tgaaaaatgacttga

SEQ ID NO: 1441789 - DNA, 15 bp, Homo sapiens
atgaaaaatgacttg

SEQ ID NO: 1441790 - DNA, 15 bp, Homo sapiens
tatgaaaaatgactt

SEQ ID NO: 1441791 - DNA, 15 bp, Homo sapiens
atatgaaaaatgact

SEQ ID NO: 1441792 - DNA, 15 bp, Homo sapiens
catatgaaaaatgac

SEQ ID NO: 1441793 - DNA, 15 bp, Homo sapiens
acatatgaaaaatga

SEQ ID NO: 1441794 - DNA, 15 bp, Homo sapiens
aacatatgaaaaatg

SEQ ID NO: 1441795 - DNA, 15 bp, Homo sapiens
gaacatatgaaaaat

SEQ ID NO: 1441796 - DNA, 15 bp, Homo sapiens
tgaacatatgaaaaa

SEQ ID NO: 1441797 - DNA, 15 bp, Homo sapiens
gtgaacatatgaaaa

SEQ ID NO: 1441798 - DNA, 15 bp, Homo sapiens
tgtgaacatatgaaa

SEQ ID NO: 1441799 - DNA, 15 bp, Homo sapiens
gtgtgaacatatgaa

SEQ ID NO: 1441800 - DNA, 15 bp, Homo sapiens
tgtgtgaacatatga

SEQ ID NO: 1441801 - DNA, 15 bp, Homo sapiens
atgtgtgaacatatg

SEQ ID NO: 1441802 - DNA, 15 bp, Homo sapiens
aatgtgtgaacatat

SEQ ID NO: 1441803 - DNA, 15 bp, Homo sapiens
gaatgtgtgaacata

SEQ ID NO: 1441804 - DNA, 15 bp, Homo sapiens
agaatgtgtgaacat

SEQ ID NO: 1441805 - DNA, 15 bp, Homo sapiens
aagaatgtgtgaaca

SEQ ID NO: 1441806 - DNA, 15 bp, Homo sapiens
aaagaatgtgtgaac

SEQ ID NO: 1441807 - DNA, 15 bp, Homo sapiens
aaaagaatgtgtgaa

SEQ ID NO: 1441808 - DNA, 15 bp, Homo sapiens
taaaagaatgtgtga

SEQ ID NO: 1441809 - DNA, 15 bp, Homo sapiens
ataaaagaatgtgtg

SEQ ID NO: 1441810 - DNA, 15 bp, Homo sapiens
aataaaagaatgtgt

SEQ ID NO: 1441811 - DNA, 15 bp, Homo sapiens
aaataaaagaatgtg

SEQ ID NO: 1441812 - DNA, 15 bp, Homo sapiens
aaaataaaagaatgt

SEQ ID NO: 1441813 - DNA, 15 bp, Homo sapiens
aaaaataaaagaatg

SEQ ID NO: 1441814 - DNA, 15 bp, Homo sapiens
aaaaaataaaagaat

SEQ ID NO: 1441815 - DNA, 15 bp, Homo sapiens
taaaaaataaaagaa

SEQ ID NO: 1441816 - DNA, 15 bp, Homo sapiens
ataaaaaataaaaga

SEQ ID NO: 1441817 - DNA, 15 bp, Homo sapiens
aataaaaaataaaag

SEQ ID NO: 1441818 - DNA, 15 bp, Homo sapiens
taaataaaaaataaa

SEQ ID NO: 1441819 - DNA, 15 bp, Homo sapiens
ataaataaaaaataa

SEQ ID NO: 1441820 - DNA, 15 bp, Homo sapiens
aataaataaaaaata

SEQ ID NO: 1441821 - DNA, 15 bp, Homo sapiens
taataaataaaaaat

SEQ ID NO: 1441822 - DNA, 15 bp, Homo sapiens
ataataaataaaaaa

SEQ ID NO: 1441823 - DNA, 15 bp, Homo sapiens
aataataaataaaaa

SEQ ID NO: 1441824 - DNA, 15 bp, Homo sapiens
taataataaataaaa

SEQ ID NO: 1441825 - DNA, 15 bp, Homo sapiens
ataataataaataaa

SEQ ID NO: 1441826 - DNA, 15 bp, Homo sapiens
aaaaaaaaataataa

SEQ ID NO: 1441827 - DNA, 15 bp, Homo sapiens
taaaaaaaaataata

SEQ ID NO: 1441828 - DNA, 15 bp, Homo sapiens
ctaaaaaaaaataat

SEQ ID NO: 1441829 - DNA, 15 bp, Homo sapiens
tctaaaaaaaaataa

SEQ ID NO: 1441830 - DNA, 15 bp, Homo sapiens
ctctaaaaaaaaata

SEQ ID NO: 1441831 - DNA, 15 bp, Homo sapiens
tctctaaaaaaaaat

SEQ ID NO: 1441832 - DNA, 15 bp, Homo sapiens
tttctctaaaaaaaa

SEQ ID NO: 1441833 - DNA, 15 bp, Homo sapiens
ctttctctaaaaaaa

SEQ ID NO: 1441834 - DNA, 15 bp, Homo sapiens
cctttctctaaaaaa

SEQ ID NO: 1441835 - DNA, 15 bp, Homo sapiens
ccctttctctaaaaa

SEQ ID NO: 1441836 - DNA, 15 bp, Homo sapiens
accctttctctaaaa

SEQ ID NO: 1441837 - DNA, 15 bp, Homo sapiens
gaccctttctctaaa

SEQ ID NO: 1441838 - DNA, 15 bp, Homo sapiens
agaccctttctctaa

SEQ ID NO: 1441839 - DNA, 15 bp, Homo sapiens
aagaccctttctcta

SEQ ID NO: 1441840 - DNA, 15 bp, Homo sapiens
caagaccctttctct

SEQ ID NO: 1441841 - DNA, 15 bp, Homo sapiens
gcaagaccctttctc

SEQ ID NO: 1441842 - DNA, 15 bp, Homo sapiens
agcaagaccctttct

SEQ ID NO: 1441843 - DNA, 15 bp, Homo sapiens
gagcaagaccctttc

SEQ ID NO: 1441844 - DNA, 15 bp, Homo sapiens
agagcaagacccttt

SEQ ID NO: 1441845 - DNA, 15 bp, Homo sapiens
cagagcaagaccctt

SEQ ID NO: 1441846 - DNA, 15 bp, Homo sapiens
gacagagcaagaccc

SEQ ID NO: 1441847 - DNA, 15 bp, Homo sapiens
tgacagagcaagacc

SEQ ID NO: 1441848 - DNA, 15 bp, Homo sapiens
atgattgtgccactg

SEQ ID NO: 1441849 - DNA, 15 bp, Homo sapiens
tatgattgtgccact

SEQ ID NO: 1441850 - DNA, 15 bp, Homo sapiens
ctatgattgtgccac

SEQ ID NO: 1441851 - DNA, 15 bp, Homo sapiens
gctatgattgtgcca

SEQ ID NO: 1441852 - DNA, 15 bp, Homo sapiens
agctatgattgtgcc

SEQ ID NO: 1441853 - DNA, 15 bp, Homo sapiens
gagctatgattgtgc

SEQ ID NO: 1441854 - DNA, 15 bp, Homo sapiens
tgagctatgattgtg

SEQ ID NO: 1441855 - DNA, 15 bp, Homo sapiens
tgaggttacagtgag

SEQ ID NO: 1441856 - DNA, 15 bp, Homo sapiens
ttgaggttacagtga

SEQ ID NO: 1441857 - DNA, 15 bp, Homo sapiens
tttgaggttacagtg

SEQ ID NO: 1441858 - DNA, 15 bp, Homo sapiens
gtttgaggttacagt

SEQ ID NO: 1441859 - DNA, 15 bp, Homo sapiens
tggagtttgaggtta

SEQ ID NO: 1441860 - DNA, 15 bp, Homo sapiens
ctggagtttgaggtt

SEQ ID NO: 1441861 - DNA, 15 bp, Homo sapiens
cctggagtttgaggt

SEQ ID NO: 1441862 - DNA, 15 bp, Homo sapiens
ccctggagtttgagg

SEQ ID NO: 1441863 - DNA, 15 bp, Homo sapiens
gccctggagtttgag

SEQ ID NO: 1441864 - DNA, 15 bp, Homo sapiens
agccctggagtttga

SEQ ID NO: 1441865 - DNA, 15 bp, Homo sapiens
gagccctggagtttg

SEQ ID NO: 1441866 - DNA, 15 bp, Homo sapiens
agcttgagccctgga

SEQ ID NO: 1441867 - DNA, 15 bp, Homo sapiens
tagcttgagccctgg

SEQ ID NO: 1441868 - DNA, 15 bp, Homo sapiens
atagcttgagccctg

SEQ ID NO: 1441869 - DNA, 15 bp, Homo sapiens
gatagcttgagccct

SEQ ID NO: 1441870 - DNA, 15 bp, Homo sapiens
ggatagcttgagccc

SEQ ID NO: 1441871 - DNA, 15 bp, Homo sapiens
aggatagcttgagcc

SEQ ID NO: 1441872 - DNA, 15 bp, Homo sapiens
gaggatagcttgagc

SEQ ID NO: 1441873 - DNA, 15 bp, Homo sapiens
tgaggatagcttgag

SEQ ID NO: 1441874 - DNA, 15 bp, Homo sapiens
gtgaggatagcttga

SEQ ID NO: 1441875 - DNA, 15 bp, Homo sapiens
ggtgaggatagcttg

SEQ ID NO: 1441876 - DNA, 15 bp, Homo sapiens
aggtgaggatagctt

SEQ ID NO: 1441877 - DNA, 15 bp, Homo sapiens
gaggtgaggatagct

SEQ ID NO: 1441878 - DNA, 15 bp, Homo sapiens
agaggtgaggatagc

SEQ ID NO: 1441879 - DNA, 15 bp, Homo sapiens
gagaggtgaggatag

SEQ ID NO: 1441880 - DNA, 15 bp, Homo sapiens
tgagaggtgaggata

SEQ ID NO: 1441881 - DNA, 15 bp, Homo sapiens
ttgagaggtgaggat

SEQ ID NO: 1441882 - DNA, 15 bp, Homo sapiens
attgagaggtgagga

SEQ ID NO: 1441883 - DNA, 15 bp, Homo sapiens
gattgagaggtgagg

SEQ ID NO: 1441884 - DNA, 15 bp, Homo sapiens
agattgagaggtgag

SEQ ID NO: 1441885 - DNA, 15 bp, Homo sapiens
gagattgagaggtga

SEQ ID NO: 1441886 - DNA, 15 bp, Homo sapiens
ggagattgagaggtg

SEQ ID NO: 1441887 - DNA, 15 bp, Homo sapiens
aggagattgagaggt

SEQ ID NO: 1441888 - DNA, 15 bp, Homo sapiens
caggagattgagagg

SEQ ID NO: 1441889 - DNA, 15 bp, Homo sapiens
tcaggagattgagag

SEQ ID NO: 1441890 - DNA, 15 bp, Homo sapiens
agtcaggagattgag

SEQ ID NO: 1441891 - DNA, 15 bp, Homo sapiens
tagtcaggagattga

SEQ ID NO: 1441892 - DNA, 15 bp, Homo sapiens
ttagtcaggagattg

SEQ ID NO: 1441893 - DNA, 15 bp, Homo sapiens
gttagtcaggagatt

SEQ ID NO: 1441894 - DNA, 15 bp, Homo sapiens
agttagtcaggagat

SEQ ID NO: 1441895 - DNA, 15 bp, Homo sapiens
tagttagtcaggaga

SEQ ID NO: 1441896 - DNA, 15 bp, Homo sapiens
atagttagtcaggag

SEQ ID NO: 1441897 - DNA, 15 bp, Homo sapiens
catagttagtcagga

SEQ ID NO: 1441898 - DNA, 15 bp, Homo sapiens
tcatagttagtcagg

SEQ ID NO: 1441899 - DNA, 15 bp, Homo sapiens
gtcatagttagtcag

SEQ ID NO: 1441900 - DNA, 15 bp, Homo sapiens
agtcatagttagtca

SEQ ID NO: 1441901 - DNA, 15 bp, Homo sapiens
tagtcatagttagtc

SEQ ID NO: 1441902 - DNA, 15 bp, Homo sapiens
ttagtcatagttagt

SEQ ID NO: 1441903 - DNA, 15 bp, Homo sapiens
tttagtcatagttag

SEQ ID NO: 1441904 - DNA, 15 bp, Homo sapiens
ctttagtcatagtta

SEQ ID NO: 1441905 - DNA, 15 bp, Homo sapiens
tctttagtcatagtt

SEQ ID NO: 1441906 - DNA, 15 bp, Homo sapiens
gtctttagtcatagt

SEQ ID NO: 1441907 - DNA, 15 bp, Homo sapiens
tgtctttagtcatag

SEQ ID NO: 1441908 - DNA, 15 bp, Homo sapiens
atgtctttagtcata

SEQ ID NO: 1441909 - DNA, 15 bp, Homo sapiens
tatgtctttagtcat

SEQ ID NO: 1441910 - DNA, 15 bp, Homo sapiens
atatgtctttagtca

SEQ ID NO: 1441911 - DNA, 15 bp, Homo sapiens
tatatgtctttagtc

SEQ ID NO: 1441912 - DNA, 15 bp, Homo sapiens
gtatatgtctttagt

SEQ ID NO: 1441913 - DNA, 15 bp, Homo sapiens
ggtatatgtctttag

SEQ ID NO: 1441914 - DNA, 15 bp, Homo sapiens
tggtatatgtcttta

SEQ ID NO: 1441915 - DNA, 15 bp, Homo sapiens
ctggtatatgtcttt

SEQ ID NO: 1441916 - DNA, 15 bp, Homo sapiens
actggtatatgtctt

SEQ ID NO: 1441917 - DNA, 15 bp, Homo sapiens
tactggtatatgtct

SEQ ID NO: 1441918 - DNA, 15 bp, Homo sapiens
gtactggtatatgtc

SEQ ID NO: 1441919 - DNA, 15 bp, Homo sapiens
tgtactggtatatgt

SEQ ID NO: 1441920 - DNA, 15 bp, Homo sapiens
gtgtactggtatatg

SEQ ID NO: 1441921 - DNA, 15 bp, Homo sapiens
ggtgtactggtatat

SEQ ID NO: 1441922 - DNA, 15 bp, Homo sapiens
gggtgtactggtata

SEQ ID NO: 1441923 - DNA, 15 bp, Homo sapiens
tgggtgtactggtat

SEQ ID NO: 1441924 - DNA, 15 bp, Homo sapiens
ctgggtgtactggta

SEQ ID NO: 1441925 - DNA, 15 bp, Homo sapiens
gctgggtgtactggt

SEQ ID NO: 1441926 - DNA, 15 bp, Homo sapiens
agctgggtgtactgg

SEQ ID NO: 1441927 - DNA, 15 bp, Homo sapiens
tagctgggtgtactg

SEQ ID NO: 1441928 - DNA, 15 bp, Homo sapiens
ttagctgggtgtact

SEQ ID NO: 1441929 - DNA, 15 bp, Homo sapiens
attagctgggtgtac

SEQ ID NO: 1441930 - DNA, 15 bp, Homo sapiens
aattagctgggtgta

SEQ ID NO: 1441931 - DNA, 15 bp, Homo sapiens
taattagctgggtgt

SEQ ID NO: 1441932 - DNA, 15 bp, Homo sapiens
ttaattagctgggtg

SEQ ID NO: 1441933 - DNA, 15 bp, Homo sapiens
tttaattagctgggt

SEQ ID NO: 1441934 - DNA, 15 bp, Homo sapiens
atttttttaattagc

SEQ ID NO: 1441935 - DNA, 15 bp, Homo sapiens
tatttttttaattag

SEQ ID NO: 1441936 - DNA, 15 bp, Homo sapiens
atatttttttaatta

SEQ ID NO: 1441937 - DNA, 15 bp, Homo sapiens
catatttttttaatt

SEQ ID NO: 1441938 - DNA, 15 bp, Homo sapiens
acatatttttttaat

SEQ ID NO: 1441939 - DNA, 15 bp, Homo sapiens
aacatatttttttaa

SEQ ID NO: 1441940 - DNA, 15 bp, Homo sapiens
gaacatattttttta

SEQ ID NO: 1441941 - DNA, 15 bp, Homo sapiens
agaacatattttttt

SEQ ID NO: 1441942 - DNA, 15 bp, Homo sapiens
cagaacatatttttt

SEQ ID NO: 1441943 - DNA, 15 bp, Homo sapiens
acagaacatattttt

SEQ ID NO: 1441944 - DNA, 15 bp, Homo sapiens
tacagaacatatttt

SEQ ID NO: 1441945 - DNA, 15 bp, Homo sapiens
ctacagaacatattt

SEQ ID NO: 1441946 - DNA, 15 bp, Homo sapiens
tctacagaacatatt

SEQ ID NO: 1441947 - DNA, 15 bp, Homo sapiens
gtctacagaacatat

SEQ ID NO: 1441948 - DNA, 15 bp, Homo sapiens
tgtctacagaacata

SEQ ID NO: 1441949 - DNA, 15 bp, Homo sapiens
ctgtctacagaacat

SEQ ID NO: 1441950 - DNA, 15 bp, Homo sapiens
tctgtctacagaaca

SEQ ID NO: 1441951 - DNA, 15 bp, Homo sapiens
ctctgtctacagaac

SEQ ID NO: 1441952 - DNA, 15 bp, Homo sapiens
cctctgtctacagaa

SEQ ID NO: 1441953 - DNA, 15 bp, Homo sapiens
ccctctgtctacaga

SEQ ID NO: 1441954 - DNA, 15 bp, Homo sapiens
accctctgtctacag

SEQ ID NO: 1441955 - DNA, 15 bp, Homo sapiens
gaccctctgtctaca

SEQ ID NO: 1441956 - DNA, 15 bp, Homo sapiens
agaccctctgtctac

SEQ ID NO: 1441957 - DNA, 15 bp, Homo sapiens
aagaccctctgtcta

SEQ ID NO: 1441958 - DNA, 15 bp, Homo sapiens
caagaccctctgtct

SEQ ID NO: 1441959 - DNA, 15 bp, Homo sapiens
gcaagaccctctgtc

SEQ ID NO: 1441960 - DNA, 15 bp, Homo sapiens
agcaagaccctctgt

SEQ ID NO: 1441961 - DNA, 15 bp, Homo sapiens
tagcaagaccctctg

SEQ ID NO: 1441962 - DNA, 15 bp, Homo sapiens
atagcaagaccctct

SEQ ID NO: 1441963 - DNA, 15 bp, Homo sapiens
catagcaagaccctc

SEQ ID NO: 1441964 - DNA, 15 bp, Homo sapiens
acatagcaagaccct

SEQ ID NO: 1441965 - DNA, 15 bp, Homo sapiens
agggcaacatagcaa

SEQ ID NO: 1441966 - DNA, 15 bp, Homo sapiens
cagggcaacatagca

SEQ ID NO: 1441967 - DNA, 15 bp, Homo sapiens
ccagggcaacatagc

SEQ ID NO: 1441968 - DNA, 15 bp, Homo sapiens
gccagggcaacatag

SEQ ID NO: 1441969 - DNA, 15 bp, Homo sapiens
agccagggcaacata

SEQ ID NO: 1441970 - DNA, 15 bp, Homo sapiens
tagccagggcaacat

SEQ ID NO: 1441971 - DNA, 15 bp, Homo sapiens
ctagccagggcaaca

SEQ ID NO: 1441972 - DNA, 15 bp, Homo sapiens
actagccagggcaac

SEQ ID NO: 1441973 - DNA, 15 bp, Homo sapiens
gactagccagggcaa

SEQ ID NO: 1441974 - DNA, 15 bp, Homo sapiens
agactagccagggca

SEQ ID NO: 1441975 - DNA, 15 bp, Homo sapiens
gagactagccagggc

SEQ ID NO: 1441976 - DNA, 15 bp, Homo sapiens
cgagactagccaggg

SEQ ID NO: 1441977 - DNA, 15 bp, Homo sapiens
tcgagactagccagg

SEQ ID NO: 1441978 - DNA, 15 bp, Homo sapiens
ttcgagactagccag

SEQ ID NO: 1441979 - DNA, 15 bp, Homo sapiens
gttcgagactagcca

SEQ ID NO: 1441980 - DNA, 15 bp, Homo sapiens
acccaggagttcgag

SEQ ID NO: 1441981 - DNA, 15 bp, Homo sapiens
aacccaggagttcga

SEQ ID NO: 1441982 - DNA, 15 bp, Homo sapiens
gaacccaggagttcg

SEQ ID NO: 1441983 - DNA, 15 bp, Homo sapiens
ctgcttgaacccagg

SEQ ID NO: 1441984 - DNA, 15 bp, Homo sapiens
actgcttgaacccag

SEQ ID NO: 1441985 - DNA, 15 bp, Homo sapiens
gactgcttgaaccca

SEQ ID NO: 1441986 - DNA, 15 bp, Homo sapiens
ggactgcttgaaccc

SEQ ID NO: 1441987 - DNA, 15 bp, Homo sapiens
gggactgcttgaacc

SEQ ID NO: 1441988 - DNA, 15 bp, Homo sapiens
ggggactgcttgaac

SEQ ID NO: 1441989 - DNA, 15 bp, Homo sapiens
gggggactgcttgaa

SEQ ID NO: 1441990 - DNA, 15 bp, Homo sapiens
agggggactgcttga

SEQ ID NO: 1441991 - DNA, 15 bp, Homo sapiens
cagggggactgcttg

SEQ ID NO: 1441992 - DNA, 15 bp, Homo sapiens
gcagggggactgctt

SEQ ID NO: 1441993 - DNA, 15 bp, Homo sapiens
ggcagggggactgct

SEQ ID NO: 1441994 - DNA, 15 bp, Homo sapiens
aggcagggggactgc

SEQ ID NO: 1441995 - DNA, 15 bp, Homo sapiens
aaggcagggggactg

SEQ ID NO: 1441996 - DNA, 15 bp, Homo sapiens
caaggcagggggact

SEQ ID NO: 1441997 - DNA, 15 bp, Homo sapiens
ccaaggcagggggac

SEQ ID NO: 1441998 - DNA, 15 bp, Homo sapiens
gccaaggcaggggga

SEQ ID NO: 1441999 - DNA, 15 bp, Homo sapiens
ggccaaggcaggggg

SEQ ID NO: 1442000 - DNA, 15 bp, Homo sapiens
cggaggccaaggcag

SEQ ID NO: 1442001 - DNA, 15 bp, Homo sapiens
tcggaggccaaggca

SEQ ID NO: 1442002 - DNA, 15 bp, Homo sapiens
ttcggaggccaaggc

SEQ ID NO: 1442003 - DNA, 15 bp, Homo sapiens
cttcggaggccaagg

SEQ ID NO: 1442004 - DNA, 15 bp, Homo sapiens
ccttcggaggccaag

SEQ ID NO: 1442005 - DNA, 15 bp, Homo sapiens
gccttcggaggccaa

SEQ ID NO: 1442006 - DNA, 15 bp, Homo sapiens
agccttcggaggcca

SEQ ID NO: 1442007 - DNA, 15 bp, Homo sapiens
gagccttcggaggcc

SEQ ID NO: 1442008 - DNA, 15 bp, Homo sapiens
agagccttcggaggc

SEQ ID NO: 1442009 - DNA, 15 bp, Homo sapiens
tagagccttcggagg

SEQ ID NO: 1442010 - DNA, 15 bp, Homo sapiens
ctagagccttcggag

SEQ ID NO: 1442011 - DNA, 15 bp, Homo sapiens
cctagagccttcgga

SEQ ID NO: 1442012 - DNA, 15 bp, Homo sapiens
tcctagagccttcgg

SEQ ID NO: 1442013 - DNA, 15 bp, Homo sapiens
atcctagagccttcg

SEQ ID NO: 1442014 - DNA, 15 bp, Homo sapiens
aatcctagagccttc

SEQ ID NO: 1442015 - DNA, 15 bp, Homo sapiens
taatcctagagcctt

SEQ ID NO: 1442016 - DNA, 15 bp, Homo sapiens
gtaatcctagagcct

SEQ ID NO: 1442017 - DNA, 15 bp, Homo sapiens
tgtaatcctagagcc

SEQ ID NO: 1442018 - DNA, 15 bp, Homo sapiens
ctgtaatcctagagc

SEQ ID NO: 1442019 - DNA, 15 bp, Homo sapiens
cctgtaatcctagag

SEQ ID NO: 1442020 - DNA, 15 bp, Homo sapiens
acctgtaatcctaga

SEQ ID NO: 1442021 - DNA, 15 bp, Homo sapiens
cacctgtaatcctag

SEQ ID NO: 1442022 - DNA, 15 bp, Homo sapiens
aggcgcagtggctca

SEQ ID NO: 1442023 - DNA, 15 bp, Homo sapiens
caggcgcagtggctc

SEQ ID NO: 1442024 - DNA, 15 bp, Homo sapiens
ccaggcgcagtggct

SEQ ID NO: 1442025 - DNA, 15 bp, Homo sapiens
gccaggcgcagtggc

SEQ ID NO: 1442026 - DNA, 15 bp, Homo sapiens
ggccaggcgcagtgg

SEQ ID NO: 1442027 - DNA, 15 bp, Homo sapiens
aggccaggcgcagtg

SEQ ID NO: 1442028 - DNA, 15 bp, Homo sapiens
taggccaggcgcagt

SEQ ID NO: 1442029 - DNA, 15 bp, Homo sapiens
ataggccaggcgcag

SEQ ID NO: 1442030 - DNA, 15 bp, Homo sapiens
cataggccaggcgca

SEQ ID NO: 1442031 - DNA, 15 bp, Homo sapiens
acataggccaggcgc

SEQ ID NO: 1442032 - DNA, 15 bp, Homo sapiens
aacataggccaggcg

SEQ ID NO: 1442033 - DNA, 15 bp, Homo sapiens
gaacataggccaggc

SEQ ID NO: 1442034 - DNA, 15 bp, Homo sapiens
tgaacataggccagg

SEQ ID NO: 1442035 - DNA, 15 bp, Homo sapiens
gtgaacataggccag

SEQ ID NO: 1442036 - DNA, 15 bp, Homo sapiens
tgtgaacataggcca

SEQ ID NO: 1442037 - DNA, 15 bp, Homo sapiens
ttgtgaacataggcc

SEQ ID NO: 1442038 - DNA, 15 bp, Homo sapiens
tttgtgaacataggc

SEQ ID NO: 1442039 - DNA, 15 bp, Homo sapiens
atttgtgaacatagg

SEQ ID NO: 1442040 - DNA, 15 bp, Homo sapiens
aatttgtgaacatag

SEQ ID NO: 1442041 - DNA, 15 bp, Homo sapiens
gaatttgtgaacata

SEQ ID NO: 1442042 - DNA, 15 bp, Homo sapiens
agaatttgtgaacat

SEQ ID NO: 1442043 - DNA, 15 bp, Homo sapiens
cagaatttgtgaaca

SEQ ID NO: 1442044 - DNA, 15 bp, Homo sapiens
acagaatttgtgaac

SEQ ID NO: 1442045 - DNA, 15 bp, Homo sapiens
cacagaatttgtgaa

SEQ ID NO: 1442046 - DNA, 15 bp, Homo sapiens
ccacagaatttgtga

SEQ ID NO: 1442047 - DNA, 15 bp, Homo sapiens
cccacagaatttgtg

SEQ ID NO: 1442048 - DNA, 15 bp, Homo sapiens
acccacagaatttgt

SEQ ID NO: 1442049 - DNA, 15 bp, Homo sapiens
gacccacagaatttg

SEQ ID NO: 1442050 - DNA, 15 bp, Homo sapiens
tgacccacagaattt

SEQ ID NO: 1442051 - DNA, 15 bp, Homo sapiens
ctgacccacagaatt

SEQ ID NO: 1442052 - DNA, 15 bp, Homo sapiens
tctgacccacagaat

SEQ ID NO: 1442053 - DNA, 15 bp, Homo sapiens
ttctgacccacagaa

SEQ ID NO: 1442054 - DNA, 15 bp, Homo sapiens
tttctgacccacaga

SEQ ID NO: 1442055 - DNA, 15 bp, Homo sapiens
atttctgacccacag

SEQ ID NO: 1442056 - DNA, 15 bp, Homo sapiens
aatttctgacccaca

SEQ ID NO: 1442057 - DNA, 15 bp, Homo sapiens
aaatttctgacccac

SEQ ID NO: 1442058 - DNA, 15 bp, Homo sapiens
taaatttctgaccca

SEQ ID NO: 1442059 - DNA, 15 bp, Homo sapiens
ataaatttctgaccc

SEQ ID NO: 1442060 - DNA, 15 bp, Homo sapiens
tataaatttctgacc

SEQ ID NO: 1442061 - DNA, 15 bp, Homo sapiens
ttataaatttctgac

SEQ ID NO: 1442062 - DNA, 15 bp, Homo sapiens
tttataaatttctga

SEQ ID NO: 1442063 - DNA, 15 bp, Homo sapiens
ctttataaatttctg

SEQ ID NO: 1442064 - DNA, 15 bp, Homo sapiens
cctttataaatttct

SEQ ID NO: 1442065 - DNA, 15 bp, Homo sapiens
tcctttataaatttc

SEQ ID NO: 1442066 - DNA, 15 bp, Homo sapiens
gtcctttataaattt

SEQ ID NO: 1442067 - DNA, 15 bp, Homo sapiens
tgtcctttataaatt

SEQ ID NO: 1442068 - DNA, 15 bp, Homo sapiens
gtgtcctttataaat

SEQ ID NO: 1442069 - DNA, 15 bp, Homo sapiens
tgtgtcctttataaa

SEQ ID NO: 1442070 - DNA, 15 bp, Homo sapiens
ctgtgtcctttataa

SEQ ID NO: 1442071 - DNA, 15 bp, Homo sapiens
tctgtgtcctttata

SEQ ID NO: 1442072 - DNA, 15 bp, Homo sapiens
ctctgtgtcctttat

SEQ ID NO: 1442073 - DNA, 15 bp, Homo sapiens
tctctgtgtccttta

SEQ ID NO: 1442074 - DNA, 15 bp, Homo sapiens
ttctctgtgtccttt

SEQ ID NO: 1442075 - DNA, 15 bp, Homo sapiens
cttctctgtgtcctt

SEQ ID NO: 1442076 - DNA, 15 bp, Homo sapiens
tcttctctgtgtcct

SEQ ID NO: 1442077 - DNA, 15 bp, Homo sapiens
ttcttctctgtgtcc

SEQ ID NO: 1442078 - DNA, 15 bp, Homo sapiens
attcttctctgtgtc

SEQ ID NO: 1442079 - DNA, 15 bp, Homo sapiens
tattcttctctgtgt

SEQ ID NO: 1442080 - DNA, 15 bp, Homo sapiens
atattcttctctgtg

SEQ ID NO: 1442081 - DNA, 15 bp, Homo sapiens
tatattcttctctgt

SEQ ID NO: 1442082 - DNA, 15 bp, Homo sapiens
ctatattcttctctg

SEQ ID NO: 1442083 - DNA, 15 bp, Homo sapiens
actatattcttctct

SEQ ID NO: 1442084 - DNA, 15 bp, Homo sapiens
gactatattcttctc

SEQ ID NO: 1442085 - DNA, 15 bp, Homo sapiens
agactatattcttct

SEQ ID NO: 1442086 - DNA, 15 bp, Homo sapiens
cagactatattcttc

SEQ ID NO: 1442087 - DNA, 15 bp, Homo sapiens
tcagactatattctt

SEQ ID NO: 1442088 - DNA, 15 bp, Homo sapiens
ctcagactatattct

SEQ ID NO: 1442089 - DNA, 15 bp, Homo sapiens
cctcagactatattc

SEQ ID NO: 1442090 - DNA, 15 bp, Homo sapiens
acctcagactatatt

SEQ ID NO: 1442091 - DNA, 15 bp, Homo sapiens
gacctcagactatat

SEQ ID NO: 1442092 - DNA, 15 bp, Homo sapiens
ggacctcagactata

SEQ ID NO: 1442093 - DNA, 15 bp, Homo sapiens
aggacctcagactat

SEQ ID NO: 1442094 - DNA, 15 bp, Homo sapiens
gaggacctcagacta

SEQ ID NO: 1442095 - DNA, 15 bp, Homo sapiens
agaggacctcagact

SEQ ID NO: 1442096 - DNA, 15 bp, Homo sapiens
gagaggacctcagac

SEQ ID NO: 1442097 - DNA, 15 bp, Homo sapiens
ggagaggacctcaga

SEQ ID NO: 1442098 - DNA, 15 bp, Homo sapiens
tggagaggacctcag

SEQ ID NO: 1442099 - DNA, 15 bp, Homo sapiens
gtggagaggacctca

SEQ ID NO: 1442100 - DNA, 15 bp, Homo sapiens
tgtggagaggacctc

SEQ ID NO: 1442101 - DNA, 15 bp, Homo sapiens
atgtggagaggacct

SEQ ID NO: 1442102 - DNA, 15 bp, Homo sapiens
tatgtggagaggacc

SEQ ID NO: 1442103 - DNA, 15 bp, Homo sapiens
ctatgtggagaggac

SEQ ID NO: 1442104 - DNA, 15 bp, Homo sapiens
cctatgtggagagga

SEQ ID NO: 1442105 - DNA, 15 bp, Homo sapiens
gcctatgtggagagg

SEQ ID NO: 1442106 - DNA, 15 bp, Homo sapiens
ggcctatgtggagag

SEQ ID NO: 1442107 - DNA, 15 bp, Homo sapiens
aggcctatgtggaga

SEQ ID NO: 1442108 - DNA, 15 bp, Homo sapiens
aaggcctatgtggag

SEQ ID NO: 1442109 - DNA, 15 bp, Homo sapiens
aaaggcctatgtgga

SEQ ID NO: 1442110 - DNA, 15 bp, Homo sapiens
gaaaggcctatgtgg

SEQ ID NO: 1442111 - DNA, 15 bp, Homo sapiens
tgaaaggcctatgtg

SEQ ID NO: 1442112 - DNA, 15 bp, Homo sapiens
atgaaaggcctatgt

SEQ ID NO: 1442113 - DNA, 15 bp, Homo sapiens
catgaaaggcctatg

SEQ ID NO: 1442114 - DNA, 15 bp, Homo sapiens
acatgaaaggcctat

SEQ ID NO: 1442115 - DNA, 15 bp, Homo sapiens
cacatgaaaggccta

SEQ ID NO: 1442116 - DNA, 15 bp, Homo sapiens
tcacatgaaaggcct

SEQ ID NO: 1442117 - DNA, 15 bp, Homo sapiens
atcacatgaaaggcc

SEQ ID NO: 1442118 - DNA, 15 bp, Homo sapiens
gatcacatgaaaggc

SEQ ID NO: 1442119 - DNA, 15 bp, Homo sapiens
agatcacatgaaagg

SEQ ID NO: 1442120 - DNA, 15 bp, Homo sapiens
gagatcacatgaaag

SEQ ID NO: 1442121 - DNA, 15 bp, Homo sapiens
agagatcacatgaaa

SEQ ID NO: 1442122 - DNA, 15 bp, Homo sapiens
gagagatcacatgaa

SEQ ID NO: 1442123 - DNA, 15 bp, Homo sapiens
tgagagatcacatga

SEQ ID NO: 1442124 - DNA, 15 bp, Homo sapiens
atgagagatcacatg

SEQ ID NO: 1442125 - DNA, 15 bp, Homo sapiens
aatgagagatcacat

SEQ ID NO: 1442126 - DNA, 15 bp, Homo sapiens
taatgagagatcaca

SEQ ID NO: 1442127 - DNA, 15 bp, Homo sapiens
ataatgagagatcac

SEQ ID NO: 1442128 - DNA, 15 bp, Homo sapiens
cataatgagagatca

SEQ ID NO: 1442129 - DNA, 15 bp, Homo sapiens
ccataatgagagatc

SEQ ID NO: 1442130 - DNA, 15 bp, Homo sapiens
cccataatgagagat

SEQ ID NO: 1442131 - DNA, 15 bp, Homo sapiens
gcccataatgagaga

SEQ ID NO: 1442132 - DNA, 15 bp, Homo sapiens
ggcccataatgagag

SEQ ID NO: 1442133 - DNA, 15 bp, Homo sapiens
tggcccataatgaga

SEQ ID NO: 1442134 - DNA, 15 bp, Homo sapiens
ctggcccataatgag

SEQ ID NO: 1442135 - DNA, 15 bp, Homo sapiens
actggcccataatga

SEQ ID NO: 1442136 - DNA, 15 bp, Homo sapiens
aactggcccataatg

SEQ ID NO: 1442137 - DNA, 15 bp, Homo sapiens
aaactggcccataat

SEQ ID NO: 1442138 - DNA, 15 bp, Homo sapiens
caaactggcccataa

SEQ ID NO: 1442139 - DNA, 15 bp, Homo sapiens
ccaaactggcccata

SEQ ID NO: 1442140 - DNA, 15 bp, Homo sapiens
cccaaactggcccat

SEQ ID NO: 1442141 - DNA, 15 bp, Homo sapiens
acccaaactggccca

SEQ ID NO: 1442142 - DNA, 15 bp, Homo sapiens
aacccaaactggccc

SEQ ID NO: 1442143 - DNA, 15 bp, Homo sapiens
aaacccaaactggcc

SEQ ID NO: 1442144 - DNA, 15 bp, Homo sapiens
gaaacccaaactggc

SEQ ID NO: 1442145 - DNA, 15 bp, Homo sapiens
ggaaacccaaactgg

SEQ ID NO: 1442146 - DNA, 15 bp, Homo sapiens
aggaaacccaaactg

SEQ ID NO: 1442147 - DNA, 15 bp, Homo sapiens
aaggaaacccaaact

SEQ ID NO: 1442148 - DNA, 15 bp, Homo sapiens
caaggaaacccaaac

SEQ ID NO: 1442149 - DNA, 15 bp, Homo sapiens
acaaggaaacccaaa

SEQ ID NO: 1442150 - DNA, 15 bp, Homo sapiens
tacaaggaaacccaa

SEQ ID NO: 1442151 - DNA, 15 bp, Homo sapiens
ctacaaggaaaccca

SEQ ID NO: 1442152 - DNA, 15 bp, Homo sapiens
tctacaaggaaaccc

SEQ ID NO: 1442153 - DNA, 15 bp, Homo sapiens
ttctacaaggaaacc

SEQ ID NO: 1442154 - DNA, 15 bp, Homo sapiens
attctacaaggaaac

SEQ ID NO: 1442155 - DNA, 15 bp, Homo sapiens
tattctacaaggaaa

SEQ ID NO: 1442156 - DNA, 15 bp, Homo sapiens
gtattctacaaggaa

SEQ ID NO: 1442157 - DNA, 15 bp, Homo sapiens
agtattctacaagga

SEQ ID NO: 1442158 - DNA, 15 bp, Homo sapiens
cagtattctacaagg

SEQ ID NO: 1442159 - DNA, 15 bp, Homo sapiens
acagtattctacaag

SEQ ID NO: 1442160 - DNA, 15 bp, Homo sapiens
gacagtattctacaa

SEQ ID NO: 1442161 - DNA, 15 bp, Homo sapiens
agacagtattctaca

SEQ ID NO: 1442162 - DNA, 15 bp, Homo sapiens
cagacagtattctac

SEQ ID NO: 1442163 - DNA, 15 bp, Homo sapiens
ccagacagtattcta

SEQ ID NO: 1442164 - DNA, 15 bp, Homo sapiens
tccagacagtattct

SEQ ID NO: 1442165 - DNA, 15 bp, Homo sapiens
ctccagacagtattc

SEQ ID NO: 1442166 - DNA, 15 bp, Homo sapiens
tctccagacagtatt

SEQ ID NO: 1442167 - DNA, 15 bp, Homo sapiens
gtctccagacagtat

SEQ ID NO: 1442168 - DNA, 15 bp, Homo sapiens
ggtctccagacagta

SEQ ID NO: 1442169 - DNA, 15 bp, Homo sapiens
tggtctccagacagt

SEQ ID NO: 1442170 - DNA, 15 bp, Homo sapiens
ttggtctccagacag

SEQ ID NO: 1442171 - DNA, 15 bp, Homo sapiens
cttggtctccagaca

SEQ ID NO: 1442172 - DNA, 15 bp, Homo sapiens
ccttggtctccagac

SEQ ID NO: 1442173 - DNA, 15 bp, Homo sapiens
tccttggtctccaga

SEQ ID NO: 1442174 - DNA, 15 bp, Homo sapiens
atccttggtctccag

SEQ ID NO: 1442175 - DNA, 15 bp, Homo sapiens
catccttggtctcca

SEQ ID NO: 1442176 - DNA, 15 bp, Homo sapiens
tcatccttggtctcc

SEQ ID NO: 1442177 - DNA, 15 bp, Homo sapiens
ctcatccttggtctc

SEQ ID NO: 1442178 - DNA, 15 bp, Homo sapiens
gctcatccttggtct

SEQ ID NO: 1442179 - DNA, 15 bp, Homo sapiens
tgctcatccttggtc

SEQ ID NO: 1442180 - DNA, 15 bp, Homo sapiens
atgctcatccttggt

SEQ ID NO: 1442181 - DNA, 15 bp, Homo sapiens
aatgctcatccttgg

SEQ ID NO: 1442182 - DNA, 15 bp, Homo sapiens
gaatgctcatccttg

SEQ ID NO: 1442183 - DNA, 15 bp, Homo sapiens
agaatgctcatcctt

SEQ ID NO: 1442184 - DNA, 15 bp, Homo sapiens
gagaatgctcatcct

SEQ ID NO: 1442185 - DNA, 15 bp, Homo sapiens
cgagaatgctcatcc

SEQ ID NO: 1442186 - DNA, 15 bp, Homo sapiens
tcgagaatgctcatc

SEQ ID NO: 1442187 - DNA, 15 bp, Homo sapiens
ctcgagaatgctcat

SEQ ID NO: 1442188 - DNA, 15 bp, Homo sapiens
tctcgagaatgctca

SEQ ID NO: 1442189 - DNA, 15 bp, Homo sapiens
ctctcgagaatgctc

SEQ ID NO: 1442190 - DNA, 15 bp, Homo sapiens
tctctcgagaatgct

SEQ ID NO: 1442191 - DNA, 15 bp, Homo sapiens
ctctctcgagaatgc

SEQ ID NO: 1442192 - DNA, 15 bp, Homo sapiens
tctctctcgagaatg

SEQ ID NO: 1442193 - DNA, 15 bp, Homo sapiens
atctctctcgagaat

SEQ ID NO: 1442194 - DNA, 15 bp, Homo sapiens
catctctctcgagaa

SEQ ID NO: 1442195 - DNA, 15 bp, Homo sapiens
gcatctctctcgaga

SEQ ID NO: 1442196 - DNA, 15 bp, Homo sapiens
tgcatctctctcgag

SEQ ID NO: 1442197 - DNA, 15 bp, Homo sapiens
ttgcatctctctcga

SEQ ID NO: 1442198 - DNA, 15 bp, Homo sapiens
cttgcatctctctcg

SEQ ID NO: 1442199 - DNA, 15 bp, Homo sapiens
gcttgcatctctctc

SEQ ID NO: 1442200 - DNA, 15 bp, Homo sapiens
tgcttgcatctctct

SEQ ID NO: 1442201 - DNA, 15 bp, Homo sapiens
ctgcttgcatctctc

SEQ ID NO: 1442202 - DNA, 15 bp, Homo sapiens
cctgcttgcatctct

SEQ ID NO: 1442203 - DNA, 15 bp, Homo sapiens
acctgcttgcatctc

SEQ ID NO: 1442204 - DNA, 15 bp, Homo sapiens
cacctgcttgcatct

SEQ ID NO: 1442205 - DNA, 15 bp, Homo sapiens
gcacctgcttgcatc

SEQ ID NO: 1442206 - DNA, 15 bp, Homo sapiens
agcacctgcttgcat

SEQ ID NO: 1442207 - DNA, 15 bp, Homo sapiens
aagcacctgcttgca

SEQ ID NO: 1442208 - DNA, 15 bp, Homo sapiens
aaagcacctgcttgc

SEQ ID NO: 1442209 - DNA, 15 bp, Homo sapiens
taaagcacctgcttg

SEQ ID NO: 1442210 - DNA, 15 bp, Homo sapiens
ataaagcacctgctt

SEQ ID NO: 1442211 - DNA, 15 bp, Homo sapiens
gataaagcacctgct

SEQ ID NO: 1442212 - DNA, 15 bp, Homo sapiens
tgataaagcacctgc

SEQ ID NO: 1442213 - DNA, 15 bp, Homo sapiens
gtgataaagcacctg

SEQ ID NO: 1442214 - DNA, 15 bp, Homo sapiens
ggtgataaagcacct

SEQ ID NO: 1442215 - DNA, 15 bp, Homo sapiens
aggtgataaagcacc

SEQ ID NO: 1442216 - DNA, 15 bp, Homo sapiens
aaggtgataaagcac

SEQ ID NO: 1442217 - DNA, 15 bp, Homo sapiens
aaaggtgataaagca

SEQ ID NO: 1442218 - DNA, 15 bp, Homo sapiens
aaaaggtgataaagc

SEQ ID NO: 1442219 - DNA, 15 bp, Homo sapiens
gaaaaggtgataaag

SEQ ID NO: 1442220 - DNA, 15 bp, Homo sapiens
agaaaaggtgataaa

SEQ ID NO: 1442221 - DNA, 15 bp, Homo sapiens
cagaaaaggtgataa

SEQ ID NO: 1442222 - DNA, 15 bp, Homo sapiens
tcagaaaaggtgata

SEQ ID NO: 1442223 - DNA, 15 bp, Homo sapiens
atcagaaaaggtgat

SEQ ID NO: 1442224 - DNA, 15 bp, Homo sapiens
gatcagaaaaggtga

SEQ ID NO: 1442225 - DNA, 15 bp, Homo sapiens
agatcagaaaaggtg

SEQ ID NO: 1442226 - DNA, 15 bp, Homo sapiens
tagatcagaaaaggt

SEQ ID NO: 1442227 - DNA, 15 bp, Homo sapiens
ttagatcagaaaagg

SEQ ID NO: 1442228 - DNA, 15 bp, Homo sapiens
gttagatcagaaaag

SEQ ID NO: 1442229 - DNA, 15 bp, Homo sapiens
ggttagatcagaaaa

SEQ ID NO: 1442230 - DNA, 15 bp, Homo sapiens
aggttagatcagaaa

SEQ ID NO: 1442231 - DNA, 15 bp, Homo sapiens
aaggttagatcagaa

SEQ ID NO: 1442232 - DNA, 15 bp, Homo sapiens
caaggttagatcaga

SEQ ID NO: 1442233 - DNA, 15 bp, Homo sapiens
tcaaggttagatcag

SEQ ID NO: 1442234 - DNA, 15 bp, Homo sapiens
ttcaaggttagatca

SEQ ID NO: 1442235 - DNA, 15 bp, Homo sapiens
cttcaaggttagatc

SEQ ID NO: 1442236 - DNA, 15 bp, Homo sapiens
acttcaaggttagat

SEQ ID NO: 1442237 - DNA, 15 bp, Homo sapiens
gacttcaaggttaga

SEQ ID NO: 1442238 - DNA, 15 bp, Homo sapiens
tgacttcaaggttag

SEQ ID NO: 1442239 - DNA, 15 bp, Homo sapiens
gtgacttcaaggtta

SEQ ID NO: 1442240 - DNA, 15 bp, Homo sapiens
tgtgacttcaaggtt

SEQ ID NO: 1442241 - DNA, 15 bp, Homo sapiens
gtgtgacttcaaggt

SEQ ID NO: 1442242 - DNA, 15 bp, Homo sapiens
agtgtgacttcaagg

SEQ ID NO: 1442243 - DNA, 15 bp, Homo sapiens
cagtgtgacttcaag

SEQ ID NO: 1442244 - DNA, 15 bp, Homo sapiens
tcagtgtgacttcaa

SEQ ID NO: 1442245 - DNA, 15 bp, Homo sapiens
ttcagtgtgacttca

SEQ ID NO: 1442246 - DNA, 15 bp, Homo sapiens
attcagtgtgacttc

SEQ ID NO: 1442247 - DNA, 15 bp, Homo sapiens
gattcagtgtgactt

SEQ ID NO: 1442248 - DNA, 15 bp, Homo sapiens
tgattcagtgtgact

SEQ ID NO: 1442249 - DNA, 15 bp, Homo sapiens
atgattcagtgtgac

SEQ ID NO: 1442250 - DNA, 15 bp, Homo sapiens
aatgattcagtgtga

SEQ ID NO: 1442251 - DNA, 15 bp, Homo sapiens
caatgattcagtgtg

SEQ ID NO: 1442252 - DNA, 15 bp, Homo sapiens
gcaatgattcagtgt

SEQ ID NO: 1442253 - DNA, 15 bp, Homo sapiens
agcaatgattcagtg

SEQ ID NO: 1442254 - DNA, 15 bp, Homo sapiens
cagcaatgattcagt

SEQ ID NO: 1442255 - DNA, 15 bp, Homo sapiens
acagcaatgattcag

SEQ ID NO: 1442256 - DNA, 15 bp, Homo sapiens
tacagcaatgattca

SEQ ID NO: 1442257 - DNA, 15 bp, Homo sapiens
ttacagcaatgattc

SEQ ID NO: 1442258 - DNA, 15 bp, Homo sapiens
attacagcaatgatt

SEQ ID NO: 1442259 - DNA, 15 bp, Homo sapiens
gattacagcaatgat

SEQ ID NO: 1442260 - DNA, 15 bp, Homo sapiens
tgattacagcaatga

SEQ ID NO: 1442261 - DNA, 15 bp, Homo sapiens
ttgattacagcaatg

SEQ ID NO: 1442262 - DNA, 15 bp, Homo sapiens
attgattacagcaat

SEQ ID NO: 1442263 - DNA, 15 bp, Homo sapiens
cattgattacagcaa

SEQ ID NO: 1442264 - DNA, 15 bp, Homo sapiens
ccattgattacagca

SEQ ID NO: 1442265 - DNA, 15 bp, Homo sapiens
gccattgattacagc

SEQ ID NO: 1442266 - DNA, 15 bp, Homo sapiens
agccattgattacag

SEQ ID NO: 1442267 - DNA, 15 bp, Homo sapiens
gagccattgattaca

SEQ ID NO: 1442268 - DNA, 15 bp, Homo sapiens
tgagccattgattac

SEQ ID NO: 1442269 - DNA, 15 bp, Homo sapiens
atgagccattgatta

SEQ ID NO: 1442270 - DNA, 15 bp, Homo sapiens
aatgagccattgatt

SEQ ID NO: 1442271 - DNA, 15 bp, Homo sapiens
aaatgagccattgat

SEQ ID NO: 1442272 - DNA, 15 bp, Homo sapiens
taaatgagccattga

SEQ ID NO: 1442273 - DNA, 15 bp, Homo sapiens
ataaatgagccattg

SEQ ID NO: 1442274 - DNA, 15 bp, Homo sapiens
cataaatgagccatt

SEQ ID NO: 1442275 - DNA, 15 bp, Homo sapiens
acataaatgagccat

SEQ ID NO: 1442276 - DNA, 15 bp, Homo sapiens
cacataaatgagcca

SEQ ID NO: 1442277 - DNA, 15 bp, Homo sapiens
gcacataaatgagcc

SEQ ID NO: 1442278 - DNA, 15 bp, Homo sapiens
agcacataaatgagc

SEQ ID NO: 1442279 - DNA, 15 bp, Homo sapiens
tagcacataaatgag

SEQ ID NO: 1442280 - DNA, 15 bp, Homo sapiens
ttagcacataaatga

SEQ ID NO: 1442281 - DNA, 15 bp, Homo sapiens
cttagcacataaatg

SEQ ID NO: 1442282 - DNA, 15 bp, Homo sapiens
ccttagcacataaat

SEQ ID NO: 1442283 - DNA, 15 bp, Homo sapiens
tccttagcacataaa

SEQ ID NO: 1442284 - DNA, 15 bp, Homo sapiens
ttccttagcacataa

SEQ ID NO: 1442285 - DNA, 15 bp, Homo sapiens
cttccttagcacata

SEQ ID NO: 1442286 - DNA, 15 bp, Homo sapiens
tcttccttagcacat

SEQ ID NO: 1442287 - DNA, 15 bp, Homo sapiens
ctcttccttagcaca

SEQ ID NO: 1442288 - DNA, 15 bp, Homo sapiens
tctcttccttagcac

SEQ ID NO: 1442289 - DNA, 15 bp, Homo sapiens
ttctcttccttagca

SEQ ID NO: 1442290 - DNA, 15 bp, Homo sapiens
cttctcttccttagc

SEQ ID NO: 1442291 - DNA, 15 bp, Homo sapiens
gcttctcttccttag

SEQ ID NO: 1442292 - DNA, 15 bp, Homo sapiens
agcttctcttcctta

SEQ ID NO: 1442293 - DNA, 15 bp, Homo sapiens
tagcttctcttcctt

SEQ ID NO: 1442294 - DNA, 15 bp, Homo sapiens
ctagcttctcttcct

SEQ ID NO: 1442295 - DNA, 15 bp, Homo sapiens
tctagcttctcttcc

SEQ ID NO: 1442296 - DNA, 15 bp, Homo sapiens
gtctagcttctcttc

SEQ ID NO: 1442297 - DNA, 15 bp, Homo sapiens
ggtctagcttctctt

SEQ ID NO: 1442298 - DNA, 15 bp, Homo sapiens
aggtctagcttctct

SEQ ID NO: 1442299 - DNA, 15 bp, Homo sapiens
gaggtctagcttctc

SEQ ID NO: 1442300 - DNA, 15 bp, Homo sapiens
ggaggtctagcttct

SEQ ID NO: 1442301 - DNA, 15 bp, Homo sapiens
tggaggtctagcttc

SEQ ID NO: 1442302 - DNA, 15 bp, Homo sapiens
gtggaggtctagctt

SEQ ID NO: 1442303 - DNA, 15 bp, Homo sapiens
ggtggaggtctagct

SEQ ID NO: 1442304 - DNA, 15 bp, Homo sapiens
aggtggaggtctagc

SEQ ID NO: 1442305 - DNA, 15 bp, Homo sapiens
gaggtggaggtctag

SEQ ID NO: 1442306 - DNA, 15 bp, Homo sapiens
agaggtggaggtcta

SEQ ID NO: 1442307 - DNA, 15 bp, Homo sapiens
gagaggtggaggtct

SEQ ID NO: 1442308 - DNA, 15 bp, Homo sapiens
tgagaggtggaggtc

SEQ ID NO: 1442309 - DNA, 15 bp, Homo sapiens
ttgagaggtggaggt

SEQ ID NO: 1442310 - DNA, 15 bp, Homo sapiens
attgagaggtggagg

SEQ ID NO: 1442311 - DNA, 15 bp, Homo sapiens
aattgagaggtggag

SEQ ID NO: 1442312 - DNA, 15 bp, Homo sapiens
caattgagaggtgga

SEQ ID NO: 1442313 - DNA, 15 bp, Homo sapiens
tcaattgagaggtgg

SEQ ID NO: 1442314 - DNA, 15 bp, Homo sapiens
ctcaattgagaggtg

SEQ ID NO: 1442315 - DNA, 15 bp, Homo sapiens
cctcaattgagaggt

SEQ ID NO: 1442316 - DNA, 15 bp, Homo sapiens
tcctcaattgagagg

SEQ ID NO: 1442317 - DNA, 15 bp, Homo sapiens
ctcctcaattgagag

SEQ ID NO: 1442318 - DNA, 15 bp, Homo sapiens
actcctcaattgaga

SEQ ID NO: 1442319 - DNA, 15 bp, Homo sapiens
cactcctcaattgag

SEQ ID NO: 1442320 - DNA, 15 bp, Homo sapiens
gcactcctcaattga

SEQ ID NO: 1442321 - DNA, 15 bp, Homo sapiens
ggcactcctcaattg

SEQ ID NO: 1442322 - DNA, 15 bp, Homo sapiens
tggcactcctcaatt

SEQ ID NO: 1442323 - DNA, 15 bp, Homo sapiens
ttggcactcctcaat

SEQ ID NO: 1442324 - DNA, 15 bp, Homo sapiens
gttggcactcctcaa

SEQ ID NO: 1442325 - DNA, 15 bp, Homo sapiens
tgttggcactcctca

SEQ ID NO: 1442326 - DNA, 15 bp, Homo sapiens
atgttggcactcctc

SEQ ID NO: 1442327 - DNA, 15 bp, Homo sapiens
gatgttggcactcct

SEQ ID NO: 1442328 - DNA, 15 bp, Homo sapiens
tgatgttggcactcc

SEQ ID NO: 1442329 - DNA, 15 bp, Homo sapiens
gtgatgttggcactc

SEQ ID NO: 1442330 - DNA, 15 bp, Homo sapiens
tgtgatgttggcact

SEQ ID NO: 1442331 - DNA, 15 bp, Homo sapiens
atgtgatgttggcac

SEQ ID NO: 1442332 - DNA, 15 bp, Homo sapiens
aatgtgatgttggca

SEQ ID NO: 1442333 - DNA, 15 bp, Homo sapiens
caatgtgatgttggc

SEQ ID NO: 1442334 - DNA, 15 bp, Homo sapiens
acaatgtgatgttgg

SEQ ID NO: 1442335 - DNA, 15 bp, Homo sapiens
tacaatgtgatgttg

SEQ ID NO: 1442336 - DNA, 15 bp, Homo sapiens
ttacaatgtgatgtt

SEQ ID NO: 1442337 - DNA, 15 bp, Homo sapiens
cttacaatgtgatgt

SEQ ID NO: 1442338 - DNA, 15 bp, Homo sapiens
tcttacaatgtgatg

SEQ ID NO: 1442339 - DNA, 15 bp, Homo sapiens
ctcttacaatgtgat

SEQ ID NO: 1442340 - DNA, 15 bp, Homo sapiens
actcttacaatgtga

SEQ ID NO: 1442341 - DNA, 15 bp, Homo sapiens
tactcttacaatgtg

SEQ ID NO: 1442342 - DNA, 15 bp, Homo sapiens
atactcttacaatgt

SEQ ID NO: 1442343 - DNA, 15 bp, Homo sapiens
catactcttacaatg

SEQ ID NO: 1442344 - DNA, 15 bp, Homo sapiens
acatactcttacaat

SEQ ID NO: 1442345 - DNA, 15 bp, Homo sapiens
cacatactcttacaa

SEQ ID NO: 1442346 - DNA, 15 bp, Homo sapiens
tcacatactcttaca

SEQ ID NO: 1442347 - DNA, 15 bp, Homo sapiens
ttcacatactcttac

SEQ ID NO: 1442348 - DNA, 15 bp, Homo sapiens
tttcacatactctta

SEQ ID NO: 1442349 - DNA, 15 bp, Homo sapiens
atttcacatactctt

SEQ ID NO: 1442350 - DNA, 15 bp, Homo sapiens
catttcacatactct

SEQ ID NO: 1442351 - DNA, 15 bp, Homo sapiens
ccatttcacatactc

SEQ ID NO: 1442352 - DNA, 15 bp, Homo sapiens
cccatttcacatact

SEQ ID NO: 1442353 - DNA, 15 bp, Homo sapiens
tcccatttcacatac

SEQ ID NO: 1442354 - DNA, 15 bp, Homo sapiens
atcccatttcacata

SEQ ID NO: 1442355 - DNA, 15 bp, Homo sapiens
catcccatttcacat

SEQ ID NO: 1442356 - DNA, 15 bp, Homo sapiens
acatcccatttcaca

SEQ ID NO: 1442357 - DNA, 15 bp, Homo sapiens
tacatcccatttcac

SEQ ID NO: 1442358 - DNA, 15 bp, Homo sapiens
atacatcccatttca

SEQ ID NO: 1442359 - DNA, 15 bp, Homo sapiens
tatacatcccatttc

SEQ ID NO: 1442360 - DNA, 15 bp, Homo sapiens
atatacatcccattt

SEQ ID NO: 1442361 - DNA, 15 bp, Homo sapiens
aatatacatcccatt

SEQ ID NO: 1442362 - DNA, 15 bp, Homo sapiens
taatatacatcccat

SEQ ID NO: 1442363 - DNA, 15 bp, Homo sapiens
ttaatatacatccca

SEQ ID NO: 1442364 - DNA, 15 bp, Homo sapiens
attaatatacatccc

SEQ ID NO: 1442365 - DNA, 15 bp, Homo sapiens
cattaatatacatcc

SEQ ID NO: 1442366 - DNA, 15 bp, Homo sapiens
gcattaatatacatc

SEQ ID NO: 1442367 - DNA, 15 bp, Homo sapiens
tgcattaatatacat

SEQ ID NO: 1442368 - DNA, 15 bp, Homo sapiens
ctgcattaatataca

SEQ ID NO: 1442369 - DNA, 15 bp, Homo sapiens
gctgcattaatatac

SEQ ID NO: 1442370 - DNA, 15 bp, Homo sapiens
agctgcattaatata

SEQ ID NO: 1442371 - DNA, 15 bp, Homo sapiens
gagctgcattaatat

SEQ ID NO: 1442372 - DNA, 15 bp, Homo sapiens
agagctgcattaata

SEQ ID NO: 1442373 - DNA, 15 bp, Homo sapiens
gagagctgcattaat

SEQ ID NO: 1442374 - DNA, 15 bp, Homo sapiens
agagagctgcattaa

SEQ ID NO: 1442375 - DNA, 15 bp, Homo sapiens
aagagagctgcatta

SEQ ID NO: 1442376 - DNA, 15 bp, Homo sapiens
aaagagagctgcatt

SEQ ID NO: 1442377 - DNA, 15 bp, Homo sapiens
taaagagagctgcat

SEQ ID NO: 1442378 - DNA, 15 bp, Homo sapiens
ctaaagagagctgca

SEQ ID NO: 1442379 - DNA, 15 bp, Homo sapiens
tctaaagagagctgc

SEQ ID NO: 1442380 - DNA, 15 bp, Homo sapiens
ttctaaagagagctg

SEQ ID NO: 1442381 - DNA, 15 bp, Homo sapiens
tttctaaagagagct

SEQ ID NO: 1442382 - DNA, 15 bp, Homo sapiens
ttttctaaagagagc

SEQ ID NO: 1442383 - DNA, 15 bp, Homo sapiens
gttttctaaagagag

SEQ ID NO: 1442384 - DNA, 15 bp, Homo sapiens
tgttttctaaagaga

SEQ ID NO: 1442385 - DNA, 15 bp, Homo sapiens
atgttttctaaagag

SEQ ID NO: 1442386 - DNA, 15 bp, Homo sapiens
tatgttttctaaaga

SEQ ID NO: 1442387 - DNA, 15 bp, Homo sapiens
atatgttttctaaag

SEQ ID NO: 1442388 - DNA, 15 bp, Homo sapiens
aatatgttttctaaa

SEQ ID NO: 1442389 - DNA, 15 bp, Homo sapiens
gaatatgttttctaa

SEQ ID NO: 1442390 - DNA, 15 bp, Homo sapiens
agaatatgttttcta

SEQ ID NO: 1442391 - DNA, 15 bp, Homo sapiens
cagaatatgttttct

SEQ ID NO: 1442392 - DNA, 15 bp, Homo sapiens
gcagaatatgttttc

SEQ ID NO: 1442393 - DNA, 15 bp, Homo sapiens
agcagaatatgtttt

SEQ ID NO: 1442394 - DNA, 15 bp, Homo sapiens
tagcagaatatgttt

SEQ ID NO: 1442395 - DNA, 15 bp, Homo sapiens
gtagcagaatatgtt

SEQ ID NO: 1442396 - DNA, 15 bp, Homo sapiens
tgtagcagaatatgt

SEQ ID NO: 1442397 - DNA, 15 bp, Homo sapiens
ttgtagcagaatatg

SEQ ID NO: 1442398 - DNA, 15 bp, Homo sapiens
tttgtagcagaatat

SEQ ID NO: 1442399 - DNA, 15 bp, Homo sapiens
atttgtagcagaata

SEQ ID NO: 1442400 - DNA, 15 bp, Homo sapiens
tatttgtagcagaat

SEQ ID NO: 1442401 - DNA, 15 bp, Homo sapiens
ctatttgtagcagaa

SEQ ID NO: 1442402 - DNA, 15 bp, Homo sapiens
cctatttgtagcaga

SEQ ID NO: 1442403 - DNA, 15 bp, Homo sapiens
tcctatttgtagcag

SEQ ID NO: 1442404 - DNA, 15 bp, Homo sapiens
ttcctatttgtagca

SEQ ID NO: 1442405 - DNA, 15 bp, Homo sapiens
cttcctatttgtagc

SEQ ID NO: 1442406 - DNA, 15 bp, Homo sapiens
gcttcctatttgtag

SEQ ID NO: 1442407 - DNA, 15 bp, Homo sapiens
tgcttcctatttgta

SEQ ID NO: 1442408 - DNA, 15 bp, Homo sapiens
gtgcttcctatttgt

SEQ ID NO: 1442409 - DNA, 15 bp, Homo sapiens
ggtgcttcctatttg

SEQ ID NO: 1442410 - DNA, 15 bp, Homo sapiens
tggtgcttcctattt

SEQ ID NO: 1442411 - DNA, 15 bp, Homo sapiens
ctggtgcttcctatt

SEQ ID NO: 1442412 - DNA, 15 bp, Homo sapiens
actggtgcttcctat

SEQ ID NO: 1442413 - DNA, 15 bp, Homo sapiens
aactggtgcttccta

SEQ ID NO: 1442414 - DNA, 15 bp, Homo sapiens
aaactggtgcttcct

SEQ ID NO: 1442415 - DNA, 15 bp, Homo sapiens
aaaactggtgcttcc

SEQ ID NO: 1442416 - DNA, 15 bp, Homo sapiens
aaaaactggtgcttc

SEQ ID NO: 1442417 - DNA, 15 bp, Homo sapiens
aaaaaactggtgctt

SEQ ID NO: 1442418 - DNA, 15 bp, Homo sapiens
aaaaaaactggtgct

SEQ ID NO: 1442419 - DNA, 15 bp, Homo sapiens
aaaaaaaactggtgc

SEQ ID NO: 1442420 - DNA, 15 bp, Homo sapiens
taaaaaaaactggtg

SEQ ID NO: 1442421 - DNA, 15 bp, Homo sapiens
ataaaaaaaactggt

SEQ ID NO: 1442422 - DNA, 15 bp, Homo sapiens
gataaaaaaaactgg

SEQ ID NO: 1442423 - DNA, 15 bp, Homo sapiens
tgataaaaaaaactg

SEQ ID NO: 1442424 - DNA, 15 bp, Homo sapiens
atgataaaaaaaact

SEQ ID NO: 1442425 - DNA, 15 bp, Homo sapiens
gatgataaaaaaaac

SEQ ID NO: 1442426 - DNA, 15 bp, Homo sapiens
tgatgataaaaaaaa

SEQ ID NO: 1442427 - DNA, 15 bp, Homo sapiens
gtgatgataaaaaaa

SEQ ID NO: 1442428 - DNA, 15 bp, Homo sapiens
ggtgatgataaaaaa

SEQ ID NO: 1442429 - DNA, 15 bp, Homo sapiens
tggtgatgataaaaa

SEQ ID NO: 1442430 - DNA, 15 bp, Homo sapiens
atggtgatgataaaa

SEQ ID NO: 1442431 - DNA, 15 bp, Homo sapiens
tatggtgatgataaa

SEQ ID NO: 1442432 - DNA, 15 bp, Homo sapiens
gtatggtgatgataa

SEQ ID NO: 1442433 - DNA, 15 bp, Homo sapiens
agtatggtgatgata

SEQ ID NO: 1442434 - DNA, 15 bp, Homo sapiens
cagtatggtgatgat

SEQ ID NO: 1442435 - DNA, 15 bp, Homo sapiens
ccagtatggtgatga

SEQ ID NO: 1442436 - DNA, 15 bp, Homo sapiens
accagtatggtgatg

SEQ ID NO: 1442437 - DNA, 15 bp, Homo sapiens
aaccagtatggtgat

SEQ ID NO: 1442438 - DNA, 15 bp, Homo sapiens
gaaccagtatggtga

SEQ ID NO: 1442439 - DNA, 15 bp, Homo sapiens
agaaccagtatggtg

SEQ ID NO: 1442440 - DNA, 15 bp, Homo sapiens
tagaaccagtatggt

SEQ ID NO: 1442441 - DNA, 15 bp, Homo sapiens
ctagaaccagtatgg

SEQ ID NO: 1442442 - DNA, 15 bp, Homo sapiens
tctagaaccagtatg

SEQ ID NO: 1442443 - DNA, 15 bp, Homo sapiens
ctctagaaccagtat

SEQ ID NO: 1442444 - DNA, 15 bp, Homo sapiens
cctctagaaccagta

SEQ ID NO: 1442445 - DNA, 15 bp, Homo sapiens
tcctctagaaccagt

SEQ ID NO: 1442446 - DNA, 15 bp, Homo sapiens
gtcctctagaaccag

SEQ ID NO: 1442447 - DNA, 15 bp, Homo sapiens
agtcctctagaacca

SEQ ID NO: 1442448 - DNA, 15 bp, Homo sapiens
aagtcctctagaacc

SEQ ID NO: 1442449 - DNA, 15 bp, Homo sapiens
taagtcctctagaac

SEQ ID NO: 1442450 - DNA, 15 bp, Homo sapiens
gtaagtcctctagaa

SEQ ID NO: 1442451 - DNA, 15 bp, Homo sapiens
tgtaagtcctctaga

SEQ ID NO: 1442452 - DNA, 15 bp, Homo sapiens
ttgtaagtcctctag

SEQ ID NO: 1442453 - DNA, 15 bp, Homo sapiens
attgtaagtcctcta

SEQ ID NO: 1442454 - DNA, 15 bp, Homo sapiens
tattgtaagtcctct

SEQ ID NO: 1442455 - DNA, 15 bp, Homo sapiens
ctattgtaagtcctc

SEQ ID NO: 1442456 - DNA, 15 bp, Homo sapiens
tctattgtaagtcct

SEQ ID NO: 1442457 - DNA, 15 bp, Homo sapiens
gtctattgtaagtcc

SEQ ID NO: 1442458 - DNA, 15 bp, Homo sapiens
tgtctattgtaagtc

SEQ ID NO: 1442459 - DNA, 15 bp, Homo sapiens
ctgtctattgtaagt

SEQ ID NO: 1442460 - DNA, 15 bp, Homo sapiens
cctgtctattgtaag

SEQ ID NO: 1442461 - DNA, 15 bp, Homo sapiens
ccctgtctattgtaa

SEQ ID NO: 1442462 - DNA, 15 bp, Homo sapiens
gccctgtctattgta

SEQ ID NO: 1442463 - DNA, 15 bp, Homo sapiens
agccctgtctattgt

SEQ ID NO: 1442464 - DNA, 15 bp, Homo sapiens
aagccctgtctattg

SEQ ID NO: 1442465 - DNA, 15 bp, Homo sapiens
caagccctgtctatt

SEQ ID NO: 1442466 - DNA, 15 bp, Homo sapiens
acaagccctgtctat

SEQ ID NO: 1442467 - DNA, 15 bp, Homo sapiens
aacaagccctgtcta

SEQ ID NO: 1442468 - DNA, 15 bp, Homo sapiens
caacaagccctgtct

SEQ ID NO: 1442469 - DNA, 15 bp, Homo sapiens
tcaacaagccctgtc

SEQ ID NO: 1442470 - DNA, 15 bp, Homo sapiens
atcaacaagccctgt

SEQ ID NO: 1442471 - DNA, 15 bp, Homo sapiens
gatcaacaagccctg

SEQ ID NO: 1442472 - DNA, 15 bp, Homo sapiens
ggatcaacaagccct

SEQ ID NO: 1442473 - DNA, 15 bp, Homo sapiens
gggatcaacaagccc

SEQ ID NO: 1442474 - DNA, 15 bp, Homo sapiens
ggggatcaacaagcc

SEQ ID NO: 1442475 - DNA, 15 bp, Homo sapiens
aggggatcaacaagc

SEQ ID NO: 1442476 - DNA, 15 bp, Homo sapiens
aaggggatcaacaag

SEQ ID NO: 1442477 - DNA, 15 bp, Homo sapiens
gaaggggatcaacaa

SEQ ID NO: 1442478 - DNA, 15 bp, Homo sapiens
tgaaggggatcaaca

SEQ ID NO: 1442479 - DNA, 15 bp, Homo sapiens
atgaaggggatcaac

SEQ ID NO: 1442480 - DNA, 15 bp, Homo sapiens
catgaaggggatcaa

SEQ ID NO: 1442481 - DNA, 15 bp, Homo sapiens
gcatgaaggggatca

SEQ ID NO: 1442482 - DNA, 15 bp, Homo sapiens
tgcatgaaggggatc

SEQ ID NO: 1442483 - DNA, 15 bp, Homo sapiens
ctgcatgaaggggat

SEQ ID NO: 1442484 - DNA, 15 bp, Homo sapiens
tctgcatgaagggga

SEQ ID NO: 1442485 - DNA, 15 bp, Homo sapiens
ttctgcatgaagggg

SEQ ID NO: 1442486 - DNA, 15 bp, Homo sapiens
tttctgcatgaaggg

SEQ ID NO: 1442487 - DNA, 15 bp, Homo sapiens
atttctgcatgaagg

SEQ ID NO: 1442488 - DNA, 15 bp, Homo sapiens
catttctgcatgaag

SEQ ID NO: 1442489 - DNA, 15 bp, Homo sapiens
tcatttctgcatgaa

SEQ ID NO: 1442490 - DNA, 15 bp, Homo sapiens
atcatttctgcatga

SEQ ID NO: 1442491 - DNA, 15 bp, Homo sapiens
catcatttctgcatg

SEQ ID NO: 1442492 - DNA, 15 bp, Homo sapiens
ccatcatttctgcat

SEQ ID NO: 1442493 - DNA, 15 bp, Homo sapiens
accatcatttctgca

SEQ ID NO: 1442494 - DNA, 15 bp, Homo sapiens
aaccatcatttctgc

SEQ ID NO: 1442495 - DNA, 15 bp, Homo sapiens
caaccatcatttctg

SEQ ID NO: 1442496 - DNA, 15 bp, Homo sapiens
acaaccatcatttct

SEQ ID NO: 1442497 - DNA, 15 bp, Homo sapiens
tacaaccatcatttc

SEQ ID NO: 1442498 - DNA, 15 bp, Homo sapiens
ttacaaccatcattt

SEQ ID NO: 1442499 - DNA, 15 bp, Homo sapiens
attacaaccatcatt

SEQ ID NO: 1442500 - DNA, 15 bp, Homo sapiens
tattacaaccatcat

SEQ ID NO: 1442501 - DNA, 15 bp, Homo sapiens
atattacaaccatca

SEQ ID NO: 1442502 - DNA, 15 bp, Homo sapiens
aatattacaaccatc

SEQ ID NO: 1442503 - DNA, 15 bp, Homo sapiens
aaatattacaaccat

SEQ ID NO: 1442504 - DNA, 15 bp, Homo sapiens
gaaatattacaacca

SEQ ID NO: 1442505 - DNA, 15 bp, Homo sapiens
tgaaatattacaacc

SEQ ID NO: 1442506 - DNA, 15 bp, Homo sapiens
atgaaatattacaac

SEQ ID NO: 1442507 - DNA, 15 bp, Homo sapiens
aatgaaatattacaa

SEQ ID NO: 1442508 - DNA, 15 bp, Homo sapiens
caatgaaatattaca

SEQ ID NO: 1442509 - DNA, 15 bp, Homo sapiens
acaatgaaatattac

SEQ ID NO: 1442510 - DNA, 15 bp, Homo sapiens
tacaatgaaatatta

SEQ ID NO: 1442511 - DNA, 15 bp, Homo sapiens
atacaatgaaatatt

SEQ ID NO: 1442512 - DNA, 15 bp, Homo sapiens
tatacaatgaaatat

SEQ ID NO: 1442513 - DNA, 15 bp, Homo sapiens
atatacaatgaaata

SEQ ID NO: 1442514 - DNA, 15 bp, Homo sapiens
tatatacaatgaaat

SEQ ID NO: 1442515 - DNA, 15 bp, Homo sapiens
atatatacaatgaaa

SEQ ID NO: 1442516 - DNA, 15 bp, Homo sapiens
tatatatacaatgaa

SEQ ID NO: 1442517 - DNA, 15 bp, Homo sapiens
atatatatacaatga

SEQ ID NO: 1442518 - DNA, 15 bp, Homo sapiens
gatatatatacaatg

SEQ ID NO: 1442519 - DNA, 15 bp, Homo sapiens
ggatatatatacaat

SEQ ID NO: 1442520 - DNA, 15 bp, Homo sapiens
tggatatatatacaa

SEQ ID NO: 1442521 - DNA, 15 bp, Homo sapiens
atggatatatataca

SEQ ID NO: 1442522 - DNA, 15 bp, Homo sapiens
tatggatatatatac

SEQ ID NO: 1442523 - DNA, 15 bp, Homo sapiens
gtatggatatatata

SEQ ID NO: 1442524 - DNA, 15 bp, Homo sapiens
tgtatggatatatat

SEQ ID NO: 1442525 - DNA, 15 bp, Homo sapiens
atgtatggatatata

SEQ ID NO: 1442526 - DNA, 15 bp, Homo sapiens
tatgtatggatatat

SEQ ID NO: 1442527 - DNA, 15 bp, Homo sapiens
gtatgtatggatata

SEQ ID NO: 1442528 - DNA, 15 bp, Homo sapiens
tgtatgtatggatat

SEQ ID NO: 1442529 - DNA, 15 bp, Homo sapiens
gtgtatgtatggata

SEQ ID NO: 1442530 - DNA, 15 bp, Homo sapiens
tgtgtatgtatggat

SEQ ID NO: 1442531 - DNA, 15 bp, Homo sapiens
gtgtgtatgtatgga

SEQ ID NO: 1442532 - DNA, 15 bp, Homo sapiens
tgtgtgtatgtatgg

SEQ ID NO: 1442533 - DNA, 15 bp, Homo sapiens
atgtgtgtatgtatg

SEQ ID NO: 1442534 - DNA, 15 bp, Homo sapiens
aatgtgtgtatgtat

SEQ ID NO: 1442535 - DNA, 15 bp, Homo sapiens
caatgtgtgtatgta

SEQ ID NO: 1442536 - DNA, 15 bp, Homo sapiens
tcaatgtgtgtatgt

SEQ ID NO: 1442537 - DNA, 15 bp, Homo sapiens
ttcaatgtgtgtatg

SEQ ID NO: 1442538 - DNA, 15 bp, Homo sapiens
attcaatgtgtgtat

SEQ ID NO: 1442539 - DNA, 15 bp, Homo sapiens
aattcaatgtgtgta

SEQ ID NO: 1442540 - DNA, 15 bp, Homo sapiens
aaattcaatgtgtgt

SEQ ID NO: 1442541 - DNA, 15 bp, Homo sapiens
caaattcaatgtgtg

SEQ ID NO: 1442542 - DNA, 15 bp, Homo sapiens
acaaattcaatgtgt

SEQ ID NO: 1442543 - DNA, 15 bp, Homo sapiens
cacaaattcaatgtg

SEQ ID NO: 1442544 - DNA, 15 bp, Homo sapiens
acacaaattcaatgt

SEQ ID NO: 1442545 - DNA, 15 bp, Homo sapiens
tacacaaattcaatg

SEQ ID NO: 1442546 - DNA, 15 bp, Homo sapiens
gtacacaaattcaat

SEQ ID NO: 1442547 - DNA, 15 bp, Homo sapiens
ggtacacaaattcaa

SEQ ID NO: 1442548 - DNA, 15 bp, Homo sapiens
aggtacacaaattca

SEQ ID NO: 1442549 - DNA, 15 bp, Homo sapiens
aaggtacacaaattc

SEQ ID NO: 1442550 - DNA, 15 bp, Homo sapiens
taaggtacacaaatt

SEQ ID NO: 1442551 - DNA, 15 bp, Homo sapiens
gtaaggtacacaaat

SEQ ID NO: 1442552 - DNA, 15 bp, Homo sapiens
tgtaaggtacacaaa

SEQ ID NO: 1442553 - DNA, 15 bp, Homo sapiens
ctgtaaggtacacaa

SEQ ID NO: 1442554 - DNA, 15 bp, Homo sapiens
actgtaaggtacaca

SEQ ID NO: 1442555 - DNA, 15 bp, Homo sapiens
tactgtaaggtacac

SEQ ID NO: 1442556 - DNA, 15 bp, Homo sapiens
gtactgtaaggtaca

SEQ ID NO: 1442557 - DNA, 15 bp, Homo sapiens
tgtactgtaaggtac

SEQ ID NO: 1442558 - DNA, 15 bp, Homo sapiens
gtgtactgtaaggta

SEQ ID NO: 1442559 - DNA, 15 bp, Homo sapiens
tgtgtactgtaaggt

SEQ ID NO: 1442560 - DNA, 15 bp, Homo sapiens
ttgtgtactgtaagg

SEQ ID NO: 1442561 - DNA, 15 bp, Homo sapiens
attgtgtactgtaag

SEQ ID NO: 1442562 - DNA, 15 bp, Homo sapiens
tattgtgtactgtaa

SEQ ID NO: 1442563 - DNA, 15 bp, Homo sapiens
atattgtgtactgta

SEQ ID NO: 1442564 - DNA, 15 bp, Homo sapiens
tatattgtgtactgt

SEQ ID NO: 1442565 - DNA, 15 bp, Homo sapiens
ctatattgtgtactg

SEQ ID NO: 1442566 - DNA, 15 bp, Homo sapiens
gctatattgtgtact

SEQ ID NO: 1442567 - DNA, 15 bp, Homo sapiens
agctatattgtgtac

SEQ ID NO: 1442568 - DNA, 15 bp, Homo sapiens
tagctatattgtgta

SEQ ID NO: 1442569 - DNA, 15 bp, Homo sapiens
gtagctatattgtgt

SEQ ID NO: 1442570 - DNA, 15 bp, Homo sapiens
tgtagctatattgtg

SEQ ID NO: 1442571 - DNA, 15 bp, Homo sapiens
ttgtagctatattgt

SEQ ID NO: 1442572 - DNA, 15 bp, Homo sapiens
tttgtagctatattg

SEQ ID NO: 1442573 - DNA, 15 bp, Homo sapiens
atttgtagctatatt

SEQ ID NO: 1442574 - DNA, 15 bp, Homo sapiens
tatttgtagctatat

SEQ ID NO: 1442575 - DNA, 15 bp, Homo sapiens
ttatttgtagctata

SEQ ID NO: 1442576 - DNA, 15 bp, Homo sapiens
attatttgtagctat

SEQ ID NO: 1442577 - DNA, 15 bp, Homo sapiens
cattatttgtagcta

SEQ ID NO: 1442578 - DNA, 15 bp, Homo sapiens
gcattatttgtagct

SEQ ID NO: 1442579 - DNA, 15 bp, Homo sapiens
ggcattatttgtagc

SEQ ID NO: 1442580 - DNA, 15 bp, Homo sapiens
tggcattatttgtag

SEQ ID NO: 1442581 - DNA, 15 bp, Homo sapiens
atggcattatttgta

SEQ ID NO: 1442582 - DNA, 15 bp, Homo sapiens
gatggcattatttgt

SEQ ID NO: 1442583 - DNA, 15 bp, Homo sapiens
tgatggcattatttg

SEQ ID NO: 1442584 - DNA, 15 bp, Homo sapiens
ttgatggcattattt

SEQ ID NO: 1442585 - DNA, 15 bp, Homo sapiens
attgatggcattatt

SEQ ID NO: 1442586 - DNA, 15 bp, Homo sapiens
cattgatggcattat

SEQ ID NO: 1442587 - DNA, 15 bp, Homo sapiens
tcattgatggcatta

SEQ ID NO: 1442588 - DNA, 15 bp, Homo sapiens
ttcattgatggcatt

SEQ ID NO: 1442589 - DNA, 15 bp, Homo sapiens
cttcattgatggcat

SEQ ID NO: 1442590 - DNA, 15 bp, Homo sapiens
gcttcattgatggca

SEQ ID NO: 1442591 - DNA, 15 bp, Homo sapiens
ggcttcattgatggc

SEQ ID NO: 1442592 - DNA, 15 bp, Homo sapiens
tggcttcattgatgg

SEQ ID NO: 1442593 - DNA, 15 bp, Homo sapiens
atggcttcattgatg

SEQ ID NO: 1442594 - DNA, 15 bp, Homo sapiens
gatggcttcattgat

SEQ ID NO: 1442595 - DNA, 15 bp, Homo sapiens
agatggcttcattga

SEQ ID NO: 1442596 - DNA, 15 bp, Homo sapiens
cagatggcttcattg

SEQ ID NO: 1442597 - DNA, 15 bp, Homo sapiens
tcagatggcttcatt

SEQ ID NO: 1442598 - DNA, 15 bp, Homo sapiens
ttcagatggcttcat

SEQ ID NO: 1442599 - DNA, 15 bp, Homo sapiens
attcagatggcttca

SEQ ID NO: 1442600 - DNA, 15 bp, Homo sapiens
cattcagatggcttc

SEQ ID NO: 1442601 - DNA, 15 bp, Homo sapiens
acattcagatggctt

SEQ ID NO: 1442602 - DNA, 15 bp, Homo sapiens
cacattcagatggct

SEQ ID NO: 1442603 - DNA, 15 bp, Homo sapiens
acacattcagatggc

SEQ ID NO: 1442604 - DNA, 15 bp, Homo sapiens
cacacattcagatgg

SEQ ID NO: 1442605 - DNA, 15 bp, Homo sapiens
gcacacattcagatg

SEQ ID NO: 1442606 - DNA, 15 bp, Homo sapiens
tgcacacattcagat

SEQ ID NO: 1442607 - DNA, 15 bp, Homo sapiens
atgcacacattcaga

SEQ ID NO: 1442608 - DNA, 15 bp, Homo sapiens
catgcacacattcag

SEQ ID NO: 1442609 - DNA, 15 bp, Homo sapiens
tcatgcacacattca

SEQ ID NO: 1442610 - DNA, 15 bp, Homo sapiens
ttcatgcacacattc

SEQ ID NO: 1442611 - DNA, 15 bp, Homo sapiens
gttcatgcacacatt

SEQ ID NO: 1442612 - DNA, 15 bp, Homo sapiens
tgttcatgcacacat

SEQ ID NO: 1442613 - DNA, 15 bp, Homo sapiens
atgttcatgcacaca

SEQ ID NO: 1442614 - DNA, 15 bp, Homo sapiens
aatgttcatgcacac

SEQ ID NO: 1442615 - DNA, 15 bp, Homo sapiens
aaatgttcatgcaca

SEQ ID NO: 1442616 - DNA, 15 bp, Homo sapiens
taaatgttcatgcac

SEQ ID NO: 1442617 - DNA, 15 bp, Homo sapiens
ttaaatgttcatgca

SEQ ID NO: 1442618 - DNA, 15 bp, Homo sapiens
cttaaatgttcatgc

SEQ ID NO: 1442619 - DNA, 15 bp, Homo sapiens
tcttaaatgttcatg

SEQ ID NO: 1442620 - DNA, 15 bp, Homo sapiens
ttcttaaatgttcat

SEQ ID NO: 1442621 - DNA, 15 bp, Homo sapiens
tttcttaaatgttca

SEQ ID NO: 1442622 - DNA, 15 bp, Homo sapiens
ctttcttaaatgttc

SEQ ID NO: 1442623 - DNA, 15 bp, Homo sapiens
actttcttaaatgtt

SEQ ID NO: 1442624 - DNA, 15 bp, Homo sapiens
aactttcttaaatgt

SEQ ID NO: 1442625 - DNA, 15 bp, Homo sapiens
aaactttcttaaatg

SEQ ID NO: 1442626 - DNA, 15 bp, Homo sapiens
aaaactttcttaaat

SEQ ID NO: 1442627 - DNA, 15 bp, Homo sapiens
taaaactttcttaaa

SEQ ID NO: 1442628 - DNA, 15 bp, Homo sapiens
ataaaactttcttaa

SEQ ID NO: 1442629 - DNA, 15 bp, Homo sapiens
aataaaactttctta

SEQ ID NO: 1442630 - DNA, 15 bp, Homo sapiens
aaataaaactttctt

SEQ ID NO: 1442631 - DNA, 15 bp, Homo sapiens
gaaataaaactttct

SEQ ID NO: 1442632 - DNA, 15 bp, Homo sapiens
tgaaataaaactttc

SEQ ID NO: 1442633 - DNA, 15 bp, Homo sapiens
atgaaataaaacttt

SEQ ID NO: 1442634 - DNA, 15 bp, Homo sapiens
aatgaaataaaactt

SEQ ID NO: 1442635 - DNA, 15 bp, Homo sapiens
aaatgaaataaaact

SEQ ID NO: 1442636 - DNA, 15 bp, Homo sapiens
gaaatgaaataaaac

SEQ ID NO: 1442637 - DNA, 15 bp, Homo sapiens
tgaaatgaaataaaa

SEQ ID NO: 1442638 - DNA, 15 bp, Homo sapiens
ctgaaatgaaataaa

SEQ ID NO: 1442639 - DNA, 15 bp, Homo sapiens
actgaaatgaaataa

SEQ ID NO: 1442640 - DNA, 15 bp, Homo sapiens
cactgaaatgaaata

SEQ ID NO: 1442641 - DNA, 15 bp, Homo sapiens
acactgaaatgaaat

SEQ ID NO: 1442642 - DNA, 15 bp, Homo sapiens
gacactgaaatgaaa

SEQ ID NO: 1442643 - DNA, 15 bp, Homo sapiens
tgacactgaaatgaa

SEQ ID NO: 1442644 - DNA, 15 bp, Homo sapiens
atgacactgaaatga

SEQ ID NO: 1442645 - DNA, 15 bp, Homo sapiens
tatgacactgaaatg

SEQ ID NO: 1442646 - DNA, 15 bp, Homo sapiens
ttatgacactgaaat

SEQ ID NO: 1442647 - DNA, 15 bp, Homo sapiens
cttatgacactgaaa

SEQ ID NO: 1442648 - DNA, 15 bp, Homo sapiens
tcttatgacactgaa

SEQ ID NO: 1442649 - DNA, 15 bp, Homo sapiens
ctcttatgacactga

SEQ ID NO: 1442650 - DNA, 15 bp, Homo sapiens
actcttatgacactg

SEQ ID NO: 1442651 - DNA, 15 bp, Homo sapiens
tactcttatgacact

SEQ ID NO: 1442652 - DNA, 15 bp, Homo sapiens
atactcttatgacac

SEQ ID NO: 1442653 - DNA, 15 bp, Homo sapiens
aatactcttatgaca

SEQ ID NO: 1442654 - DNA, 15 bp, Homo sapiens
caatactcttatgac

SEQ ID NO: 1442655 - DNA, 15 bp, Homo sapiens
tcaatactcttatga

SEQ ID NO: 1442656 - DNA, 15 bp, Homo sapiens
gtcaatactcttatg

SEQ ID NO: 1442657 - DNA, 15 bp, Homo sapiens
ggtcaatactcttat

SEQ ID NO: 1442658 - DNA, 15 bp, Homo sapiens
tggtcaatactctta

SEQ ID NO: 1442659 - DNA, 15 bp, Homo sapiens
atggtcaatactctt

SEQ ID NO: 1442660 - DNA, 15 bp, Homo sapiens
gatggtcaatactct

SEQ ID NO: 1442661 - DNA, 15 bp, Homo sapiens
agatggtcaatactc

SEQ ID NO: 1442662 - DNA, 15 bp, Homo sapiens
gagatggtcaatact

SEQ ID NO: 1442663 - DNA, 15 bp, Homo sapiens
ggagatggtcaatac

SEQ ID NO: 1442664 - DNA, 15 bp, Homo sapiens
tggagatggtcaata

SEQ ID NO: 1442665 - DNA, 15 bp, Homo sapiens
atggagatggtcaat

SEQ ID NO: 1442666 - DNA, 15 bp, Homo sapiens
aatggagatggtcaa

SEQ ID NO: 1442667 - DNA, 15 bp, Homo sapiens
taatggagatggtca

SEQ ID NO: 1442668 - DNA, 15 bp, Homo sapiens
ctaatggagatggtc

SEQ ID NO: 1442669 - DNA, 15 bp, Homo sapiens
tctaatggagatggt

SEQ ID NO: 1442670 - DNA, 15 bp, Homo sapiens
ctctaatggagatgg

SEQ ID NO: 1442671 - DNA, 15 bp, Homo sapiens
tctctaatggagatg

SEQ ID NO: 1442672 - DNA, 15 bp, Homo sapiens
ttctctaatggagat

SEQ ID NO: 1442673 - DNA, 15 bp, Homo sapiens
tttctctaatggaga

SEQ ID NO: 1442674 - DNA, 15 bp, Homo sapiens
atttctctaatggag

SEQ ID NO: 1442675 - DNA, 15 bp, Homo sapiens
catttctctaatgga

SEQ ID NO: 1442676 - DNA, 15 bp, Homo sapiens
gcatttctctaatgg

SEQ ID NO: 1442677 - DNA, 15 bp, Homo sapiens
tgcatttctctaatg

SEQ ID NO: 1442678 - DNA, 15 bp, Homo sapiens
ttgcatttctctaat

SEQ ID NO: 1442679 - DNA, 15 bp, Homo sapiens
tttgcatttctctaa

SEQ ID NO: 1442680 - DNA, 15 bp, Homo sapiens
atttgcatttctcta

SEQ ID NO: 1442681 - DNA, 15 bp, Homo sapiens
gtggttttgatttgc

SEQ ID NO: 1442682 - DNA, 15 bp, Homo sapiens
tgtggttttgatttg

SEQ ID NO: 1442683 - DNA, 15 bp, Homo sapiens
ttgtggttttgattt

SEQ ID NO: 1442684 - DNA, 15 bp, Homo sapiens
attgtggttttgatt

SEQ ID NO: 1442685 - DNA, 15 bp, Homo sapiens
cattgtggttttgat

SEQ ID NO: 1442686 - DNA, 15 bp, Homo sapiens
tcattgtggttttga

SEQ ID NO: 1442687 - DNA, 15 bp, Homo sapiens
ctcattgtggttttg

SEQ ID NO: 1442688 - DNA, 15 bp, Homo sapiens
tctcattgtggtttt

SEQ ID NO: 1442689 - DNA, 15 bp, Homo sapiens
atctcattgtggttt

SEQ ID NO: 1442690 - DNA, 15 bp, Homo sapiens
tatctcattgtggtt

SEQ ID NO: 1442691 - DNA, 15 bp, Homo sapiens
gtatctcattgtggt

SEQ ID NO: 1442692 - DNA, 15 bp, Homo sapiens
ggtatctcattgtgg

SEQ ID NO: 1442693 - DNA, 15 bp, Homo sapiens
tggtatctcattgtg

SEQ ID NO: 1442694 - DNA, 15 bp, Homo sapiens
atggtatctcattgt

SEQ ID NO: 1442695 - DNA, 15 bp, Homo sapiens
gatggtatctcattg

SEQ ID NO: 1442696 - DNA, 15 bp, Homo sapiens
agatggtatctcatt

SEQ ID NO: 1442697 - DNA, 15 bp, Homo sapiens
gagatggtatctcat

SEQ ID NO: 1442698 - DNA, 15 bp, Homo sapiens
tgagatggtatctca

SEQ ID NO: 1442699 - DNA, 15 bp, Homo sapiens
gtgagatggtatctc

SEQ ID NO: 1442700 - DNA, 15 bp, Homo sapiens
tgtgagatggtatct

SEQ ID NO: 1442701 - DNA, 15 bp, Homo sapiens
gtgtgagatggtatc

SEQ ID NO: 1442702 - DNA, 15 bp, Homo sapiens
ggtgtgagatggtat

SEQ ID NO: 1442703 - DNA, 15 bp, Homo sapiens
tggtgtgagatggta

SEQ ID NO: 1442704 - DNA, 15 bp, Homo sapiens
ctggtgtgagatggt

SEQ ID NO: 1442705 - DNA, 15 bp, Homo sapiens
actggtgtgagatgg

SEQ ID NO: 1442706 - DNA, 15 bp, Homo sapiens
aactggtgtgagatg

SEQ ID NO: 1442707 - DNA, 15 bp, Homo sapiens
taactggtgtgagat

SEQ ID NO: 1442708 - DNA, 15 bp, Homo sapiens
ctaactggtgtgaga

SEQ ID NO: 1442709 - DNA, 15 bp, Homo sapiens
tctaactggtgtgag

SEQ ID NO: 1442710 - DNA, 15 bp, Homo sapiens
ttctaactggtgtga

SEQ ID NO: 1442711 - DNA, 15 bp, Homo sapiens
attctaactggtgtg

SEQ ID NO: 1442712 - DNA, 15 bp, Homo sapiens
cattctaactggtgt

SEQ ID NO: 1442713 - DNA, 15 bp, Homo sapiens
ccattctaactggtg

SEQ ID NO: 1442714 - DNA, 15 bp, Homo sapiens
gccattctaactggt

SEQ ID NO: 1442715 - DNA, 15 bp, Homo sapiens
tgccattctaactgg

SEQ ID NO: 1442716 - DNA, 15 bp, Homo sapiens
ctgccattctaactg

SEQ ID NO: 1442717 - DNA, 15 bp, Homo sapiens
actgccattctaact

SEQ ID NO: 1442718 - DNA, 15 bp, Homo sapiens
gactgccattctaac

SEQ ID NO: 1442719 - DNA, 15 bp, Homo sapiens
tgactgccattctaa

SEQ ID NO: 1442720 - DNA, 15 bp, Homo sapiens
atgactgccattcta

SEQ ID NO: 1442721 - DNA, 15 bp, Homo sapiens
aatgactgccattct

SEQ ID NO: 1442722 - DNA, 15 bp, Homo sapiens
taatgactgccattc

SEQ ID NO: 1442723 - DNA, 15 bp, Homo sapiens
ttaatgactgccatt

SEQ ID NO: 1442724 - DNA, 15 bp, Homo sapiens
tttaatgactgccat

SEQ ID NO: 1442725 - DNA, 15 bp, Homo sapiens
ttttaatgactgcca

SEQ ID NO: 1442726 - DNA, 15 bp, Homo sapiens
tttttaatgactgcc

SEQ ID NO: 1442727 - DNA, 15 bp, Homo sapiens
ctttttaatgactgc

SEQ ID NO: 1442728 - DNA, 15 bp, Homo sapiens
actttttaatgactg

SEQ ID NO: 1442729 - DNA, 15 bp, Homo sapiens
gactttttaatgact

SEQ ID NO: 1442730 - DNA, 15 bp, Homo sapiens
tgactttttaatgac

SEQ ID NO: 1442731 - DNA, 15 bp, Homo sapiens
ctgactttttaatga

SEQ ID NO: 1442732 - DNA, 15 bp, Homo sapiens
cctgactttttaatg

SEQ ID NO: 1442733 - DNA, 15 bp, Homo sapiens
tcctgactttttaat

SEQ ID NO: 1442734 - DNA, 15 bp, Homo sapiens
ttcctgactttttaa

SEQ ID NO: 1442735 - DNA, 15 bp, Homo sapiens
tttcctgacttttta

SEQ ID NO: 1442736 - DNA, 15 bp, Homo sapiens
atttcctgacttttt

SEQ ID NO: 1442737 - DNA, 15 bp, Homo sapiens
tatttcctgactttt

SEQ ID NO: 1442738 - DNA, 15 bp, Homo sapiens
ttatttcctgacttt

SEQ ID NO: 1442739 - DNA, 15 bp, Homo sapiens
gttatttcctgactt

SEQ ID NO: 1442740 - DNA, 15 bp, Homo sapiens
tgttatttcctgact

SEQ ID NO: 1442741 - DNA, 15 bp, Homo sapiens
ctgttatttcctgac

SEQ ID NO: 1442742 - DNA, 15 bp, Homo sapiens
tctgttatttcctga

SEQ ID NO: 1442743 - DNA, 15 bp, Homo sapiens
atctgttatttcctg

SEQ ID NO: 1442744 - DNA, 15 bp, Homo sapiens
catctgttatttcct

SEQ ID NO: 1442745 - DNA, 15 bp, Homo sapiens
gcatctgttatttcc

SEQ ID NO: 1442746 - DNA, 15 bp, Homo sapiens
agcatctgttatttc

SEQ ID NO: 1442747 - DNA, 15 bp, Homo sapiens
cagcatctgttattt

SEQ ID NO: 1442748 - DNA, 15 bp, Homo sapiens
ccagcatctgttatt

SEQ ID NO: 1442749 - DNA, 15 bp, Homo sapiens
tccagcatctgttat

SEQ ID NO: 1442750 - DNA, 15 bp, Homo sapiens
ctccagcatctgtta

SEQ ID NO: 1442751 - DNA, 15 bp, Homo sapiens
tctccagcatctgtt

SEQ ID NO: 1442752 - DNA, 15 bp, Homo sapiens
ctctccagcatctgt

SEQ ID NO: 1442753 - DNA, 15 bp, Homo sapiens
cctctccagcatctg

SEQ ID NO: 1442754 - DNA, 15 bp, Homo sapiens
tcctctccagcatct

SEQ ID NO: 1442755 - DNA, 15 bp, Homo sapiens
atcctctccagcatc

SEQ ID NO: 1442756 - DNA, 15 bp, Homo sapiens
catcctctccagcat

SEQ ID NO: 1442757 - DNA, 15 bp, Homo sapiens
acatcctctccagca

SEQ ID NO: 1442758 - DNA, 15 bp, Homo sapiens
cacatcctctccagc

SEQ ID NO: 1442759 - DNA, 15 bp, Homo sapiens
ccacatcctctccag

SEQ ID NO: 1442760 - DNA, 15 bp, Homo sapiens
tccacatcctctcca

SEQ ID NO: 1442761 - DNA, 15 bp, Homo sapiens
ctccacatcctctcc

SEQ ID NO: 1442762 - DNA, 15 bp, Homo sapiens
tctccacatcctctc

SEQ ID NO: 1442763 - DNA, 15 bp, Homo sapiens
ttctccacatcctct

SEQ ID NO: 1442764 - DNA, 15 bp, Homo sapiens
tatttctccacatcc

SEQ ID NO: 1442765 - DNA, 15 bp, Homo sapiens
ctatttctccacatc

SEQ ID NO: 1442766 - DNA, 15 bp, Homo sapiens
cctatttctccacat

SEQ ID NO: 1442767 - DNA, 15 bp, Homo sapiens
tcctatttctccaca

SEQ ID NO: 1442768 - DNA, 15 bp, Homo sapiens
ttcctatttctccac

SEQ ID NO: 1442769 - DNA, 15 bp, Homo sapiens
attcctatttctcca

SEQ ID NO: 1442770 - DNA, 15 bp, Homo sapiens
cattcctatttctcc

SEQ ID NO: 1442771 - DNA, 15 bp, Homo sapiens
gcattcctatttctc

SEQ ID NO: 1442772 - DNA, 15 bp, Homo sapiens
agcattcctatttct

SEQ ID NO: 1442773 - DNA, 15 bp, Homo sapiens
aagcattcctatttc

SEQ ID NO: 1442774 - DNA, 15 bp, Homo sapiens
aaagcattcctattt

SEQ ID NO: 1442775 - DNA, 15 bp, Homo sapiens
aaaagcattcctatt

SEQ ID NO: 1442776 - DNA, 15 bp, Homo sapiens
taaaagcattcctat

SEQ ID NO: 1442777 - DNA, 15 bp, Homo sapiens
gtaaaagcattccta

SEQ ID NO: 1442778 - DNA, 15 bp, Homo sapiens
tgtaaaagcattcct

SEQ ID NO: 1442779 - DNA, 15 bp, Homo sapiens
gtgtaaaagcattcc

SEQ ID NO: 1442780 - DNA, 15 bp, Homo sapiens
agtgtaaaagcattc

SEQ ID NO: 1442781 - DNA, 15 bp, Homo sapiens
cagtgtaaaagcatt

SEQ ID NO: 1442782 - DNA, 15 bp, Homo sapiens
acagtgtaaaagcat

SEQ ID NO: 1442783 - DNA, 15 bp, Homo sapiens
aacagtgtaaaagca

SEQ ID NO: 1442784 - DNA, 15 bp, Homo sapiens
ctcccaccaacagtg

SEQ ID NO: 1442785 - DNA, 15 bp, Homo sapiens
actcccaccaacagt

SEQ ID NO: 1442786 - DNA, 15 bp, Homo sapiens
cactcccaccaacag

SEQ ID NO: 1442787 - DNA, 15 bp, Homo sapiens
acactcccaccaaca

SEQ ID NO: 1442788 - DNA, 15 bp, Homo sapiens
tacactcccaccaac

SEQ ID NO: 1442789 - DNA, 15 bp, Homo sapiens
gtacactcccaccaa

SEQ ID NO: 1442790 - DNA, 15 bp, Homo sapiens
tgtacactcccacca

SEQ ID NO: 1442791 - DNA, 15 bp, Homo sapiens
atgtacactcccacc

SEQ ID NO: 1442792 - DNA, 15 bp, Homo sapiens
aatgtacactcccac

SEQ ID NO: 1442793 - DNA, 15 bp, Homo sapiens
taatgtacactccca

SEQ ID NO: 1442794 - DNA, 15 bp, Homo sapiens
ctaatgtacactccc

SEQ ID NO: 1442795 - DNA, 15 bp, Homo sapiens
actaatgtacactcc

SEQ ID NO: 1442796 - DNA, 15 bp, Homo sapiens
aactaatgtacactc

SEQ ID NO: 1442797 - DNA, 15 bp, Homo sapiens
gaactaatgtacact

SEQ ID NO: 1442798 - DNA, 15 bp, Homo sapiens
tgaactaatgtacac

SEQ ID NO: 1442799 - DNA, 15 bp, Homo sapiens
ttgaactaatgtaca

SEQ ID NO: 1442800 - DNA, 15 bp, Homo sapiens
gttgaactaatgtac

SEQ ID NO: 1442801 - DNA, 15 bp, Homo sapiens
ggttgaactaatgta

SEQ ID NO: 1442802 - DNA, 15 bp, Homo sapiens
tggttgaactaatgt

SEQ ID NO: 1442803 - DNA, 15 bp, Homo sapiens
atggttgaactaatg

SEQ ID NO: 1442804 - DNA, 15 bp, Homo sapiens
gtcttccacaatggt

SEQ ID NO: 1442805 - DNA, 15 bp, Homo sapiens
tgtcttccacaatgg

SEQ ID NO: 1442806 - DNA, 15 bp, Homo sapiens
ttgtcttccacaatg

SEQ ID NO: 1442807 - DNA, 15 bp, Homo sapiens
attgtcttccacaat

SEQ ID NO: 1442808 - DNA, 15 bp, Homo sapiens
cattgtcttccacaa

SEQ ID NO: 1442809 - DNA, 15 bp, Homo sapiens
acattgtcttccaca

SEQ ID NO: 1442810 - DNA, 15 bp, Homo sapiens
cacattgtcttccac

SEQ ID NO: 1442811 - DNA, 15 bp, Homo sapiens
ccacattgtcttcca

SEQ ID NO: 1442812 - DNA, 15 bp, Homo sapiens
accacattgtcttcc

SEQ ID NO: 1442813 - DNA, 15 bp, Homo sapiens
caccacattgtcttc

SEQ ID NO: 1442814 - DNA, 15 bp, Homo sapiens
tcaccacattgtctt

SEQ ID NO: 1442815 - DNA, 15 bp, Homo sapiens
atcaccacattgtct

SEQ ID NO: 1442816 - DNA, 15 bp, Homo sapiens
aatcaccacattgtc

SEQ ID NO: 1442817 - DNA, 15 bp, Homo sapiens
gaatcaccacattgt

SEQ ID NO: 1442818 - DNA, 15 bp, Homo sapiens
ggaatcaccacattg

SEQ ID NO: 1442819 - DNA, 15 bp, Homo sapiens
aggaatcaccacatt

SEQ ID NO: 1442820 - DNA, 15 bp, Homo sapiens
gaggaatcaccacat

SEQ ID NO: 1442821 - DNA, 15 bp, Homo sapiens
tgaggaatcaccaca

SEQ ID NO: 1442822 - DNA, 15 bp, Homo sapiens
ttgaggaatcaccac

SEQ ID NO: 1442823 - DNA, 15 bp, Homo sapiens
cttgaggaatcacca

SEQ ID NO: 1442824 - DNA, 15 bp, Homo sapiens
ccttgaggaatcacc

SEQ ID NO: 1442825 - DNA, 15 bp, Homo sapiens
ggtatttctggttct

SEQ ID NO: 1442826 - DNA, 15 bp, Homo sapiens
tggtatttctggttc

SEQ ID NO: 1442827 - DNA, 15 bp, Homo sapiens
atggtatttctggtt

SEQ ID NO: 1442828 - DNA, 15 bp, Homo sapiens
aatggtatttctggt

SEQ ID NO: 1442829 - DNA, 15 bp, Homo sapiens
aaatggtatttctgg

SEQ ID NO: 1442830 - DNA, 15 bp, Homo sapiens
caaatggtatttctg

SEQ ID NO: 1442831 - DNA, 15 bp, Homo sapiens
tcaaatggtatttct

SEQ ID NO: 1442832 - DNA, 15 bp, Homo sapiens
gtcaaatggtatttc

SEQ ID NO: 1442833 - DNA, 15 bp, Homo sapiens
ggtcaaatggtattt

SEQ ID NO: 1442834 - DNA, 15 bp, Homo sapiens
gggtcaaatggtatt

SEQ ID NO: 1442835 - DNA, 15 bp, Homo sapiens
tgggtcaaatggtat

SEQ ID NO: 1442836 - DNA, 15 bp, Homo sapiens
ctgggtcaaatggta

SEQ ID NO: 1442837 - DNA, 15 bp, Homo sapiens
gctgggtcaaatggt

SEQ ID NO: 1442838 - DNA, 15 bp, Homo sapiens
tgctgggtcaaatgg

SEQ ID NO: 1442839 - DNA, 15 bp, Homo sapiens
ttgctgggtcaaatg

SEQ ID NO: 1442840 - DNA, 15 bp, Homo sapiens
tttgctgggtcaaat

SEQ ID NO: 1442841 - DNA, 15 bp, Homo sapiens
atttgctgggtcaaa

SEQ ID NO: 1442842 - DNA, 15 bp, Homo sapiens
catttgctgggtcaa

SEQ ID NO: 1442843 - DNA, 15 bp, Homo sapiens
ccatttgctgggtca

SEQ ID NO: 1442844 - DNA, 15 bp, Homo sapiens
accatttgctgggtc

SEQ ID NO: 1442845 - DNA, 15 bp, Homo sapiens
taccatttgctgggt

SEQ ID NO: 1442846 - DNA, 15 bp, Homo sapiens
ataccatttgctggg

SEQ ID NO: 1442847 - DNA, 15 bp, Homo sapiens
tataccatttgctgg

SEQ ID NO: 1442848 - DNA, 15 bp, Homo sapiens
gtataccatttgctg

SEQ ID NO: 1442849 - DNA, 15 bp, Homo sapiens
agtataccatttgct

SEQ ID NO: 1442850 - DNA, 15 bp, Homo sapiens
cagtataccatttgc

SEQ ID NO: 1442851 - DNA, 15 bp, Homo sapiens
ccagtataccatttg

SEQ ID NO: 1442852 - DNA, 15 bp, Homo sapiens
cccagtataccattt

SEQ ID NO: 1442853 - DNA, 15 bp, Homo sapiens
acccagtataccatt

SEQ ID NO: 1442854 - DNA, 15 bp, Homo sapiens
tacccagtataccat

SEQ ID NO: 1442855 - DNA, 15 bp, Homo sapiens
atacccagtatacca

SEQ ID NO: 1442856 - DNA, 15 bp, Homo sapiens
tatacccagtatacc

SEQ ID NO: 1442857 - DNA, 15 bp, Homo sapiens
gtatacccagtatac

SEQ ID NO: 1442858 - DNA, 15 bp, Homo sapiens
agtatacccagtata

SEQ ID NO: 1442859 - DNA, 15 bp, Homo sapiens
cagtatacccagtat

SEQ ID NO: 1442860 - DNA, 15 bp, Homo sapiens
ccagtatacccagta

SEQ ID NO: 1442861 - DNA, 15 bp, Homo sapiens
cccagtatacccagt

SEQ ID NO: 1442862 - DNA, 15 bp, Homo sapiens
acccagtatacccag

SEQ ID NO: 1442863 - DNA, 15 bp, Homo sapiens
cacccagtataccca

SEQ ID NO: 1442864 - DNA, 15 bp, Homo sapiens
acacccagtataccc

SEQ ID NO: 1442865 - DNA, 15 bp, Homo sapiens
tacacccagtatacc

SEQ ID NO: 1442866 - DNA, 15 bp, Homo sapiens
atacacccagtatac

SEQ ID NO: 1442867 - DNA, 15 bp, Homo sapiens
tatacacccagtata

SEQ ID NO: 1442868 - DNA, 15 bp, Homo sapiens
gtatacacccagtat

SEQ ID NO: 1442869 - DNA, 15 bp, Homo sapiens
ggtatacacccagta

SEQ ID NO: 1442870 - DNA, 15 bp, Homo sapiens
gggtatacacccagt

SEQ ID NO: 1442871 - DNA, 15 bp, Homo sapiens
tgggtatacacccag

SEQ ID NO: 1442872 - DNA, 15 bp, Homo sapiens
ttgggtatacaccca

SEQ ID NO: 1442873 - DNA, 15 bp, Homo sapiens
tttgggtatacaccc

SEQ ID NO: 1442874 - DNA, 15 bp, Homo sapiens
ctttgggtatacacc

SEQ ID NO: 1442875 - DNA, 15 bp, Homo sapiens
cctttgggtatacac

SEQ ID NO: 1442876 - DNA, 15 bp, Homo sapiens
tcctttgggtataca

SEQ ID NO: 1442877 - DNA, 15 bp, Homo sapiens
atcctttgggtatac

SEQ ID NO: 1442878 - DNA, 15 bp, Homo sapiens
gatttataatccttt

SEQ ID NO: 1442879 - DNA, 15 bp, Homo sapiens
tgatttataatcctt

SEQ ID NO: 1442880 - DNA, 15 bp, Homo sapiens
atgatttataatcct

SEQ ID NO: 1442881 - DNA, 15 bp, Homo sapiens
aatgatttataatcc

SEQ ID NO: 1442882 - DNA, 15 bp, Homo sapiens
gaatgatttataatc

SEQ ID NO: 1442883 - DNA, 15 bp, Homo sapiens
agaatgatttataat

SEQ ID NO: 1442884 - DNA, 15 bp, Homo sapiens
tagaatgatttataa

SEQ ID NO: 1442885 - DNA, 15 bp, Homo sapiens
atagaatgatttata

SEQ ID NO: 1442886 - DNA, 15 bp, Homo sapiens
tatagaatgatttat

SEQ ID NO: 1442887 - DNA, 15 bp, Homo sapiens
ttatagaatgattta

SEQ ID NO: 1442888 - DNA, 15 bp, Homo sapiens
tttatagaatgattt

SEQ ID NO: 1442889 - DNA, 15 bp, Homo sapiens
ctttatagaatgatt

SEQ ID NO: 1442890 - DNA, 15 bp, Homo sapiens
tctttatagaatgat

SEQ ID NO: 1442891 - DNA, 15 bp, Homo sapiens
gtctttatagaatga

SEQ ID NO: 1442892 - DNA, 15 bp, Homo sapiens
tgtctttatagaatg

SEQ ID NO: 1442893 - DNA, 15 bp, Homo sapiens
gtgtctttatagaat

SEQ ID NO: 1442894 - DNA, 15 bp, Homo sapiens
tgtgtctttatagaa

SEQ ID NO: 1442895 - DNA, 15 bp, Homo sapiens
atgtgtctttataga

SEQ ID NO: 1442896 - DNA, 15 bp, Homo sapiens
catgtgtctttatag

SEQ ID NO: 1442897 - DNA, 15 bp, Homo sapiens
gcatgtgtctttata

SEQ ID NO: 1442898 - DNA, 15 bp, Homo sapiens
tgcatgtgtctttat

SEQ ID NO: 1442899 - DNA, 15 bp, Homo sapiens
gtgcatgtgtcttta

SEQ ID NO: 1442900 - DNA, 15 bp, Homo sapiens
tgtgcatgtgtcttt

SEQ ID NO: 1442901 - DNA, 15 bp, Homo sapiens
gtgtgcatgtgtctt

SEQ ID NO: 1442902 - DNA, 15 bp, Homo sapiens
cgtgtgcatgtgtct

SEQ ID NO: 1442903 - DNA, 15 bp, Homo sapiens
acgtgtgcatgtgtc

SEQ ID NO: 1442904 - DNA, 15 bp, Homo sapiens
aacgtgtgcatgtgt

SEQ ID NO: 1442905 - DNA, 15 bp, Homo sapiens
aaacgtgtgcatgtg

SEQ ID NO: 1442906 - DNA, 15 bp, Homo sapiens
caaacgtgtgcatgt

SEQ ID NO: 1442907 - DNA, 15 bp, Homo sapiens
acaaacgtgtgcatg

SEQ ID NO: 1442908 - DNA, 15 bp, Homo sapiens
aacaaacgtgtgcat

SEQ ID NO: 1442909 - DNA, 15 bp, Homo sapiens
aaacaaacgtgtgca

SEQ ID NO: 1442910 - DNA, 15 bp, Homo sapiens
taaacaaacgtgtgc

SEQ ID NO: 1442911 - DNA, 15 bp, Homo sapiens
ataaacaaacgtgtg

SEQ ID NO: 1442912 - DNA, 15 bp, Homo sapiens
aataaacaaacgtgt

SEQ ID NO: 1442913 - DNA, 15 bp, Homo sapiens
caataaacaaacgtg

SEQ ID NO: 1442914 - DNA, 15 bp, Homo sapiens
gcaataaacaaacgt

SEQ ID NO: 1442915 - DNA, 15 bp, Homo sapiens
tgcaataaacaaacg

SEQ ID NO: 1442916 - DNA, 15 bp, Homo sapiens
ctgcaataaacaaac

SEQ ID NO: 1442917 - DNA, 15 bp, Homo sapiens
gctgcaataaacaaa

SEQ ID NO: 1442918 - DNA, 15 bp, Homo sapiens
tgctgcaataaacaa

SEQ ID NO: 1442919 - DNA, 15 bp, Homo sapiens
gtgctgcaataaaca

SEQ ID NO: 1442920 - DNA, 15 bp, Homo sapiens
agtgctgcaataaac

SEQ ID NO: 1442921 - DNA, 15 bp, Homo sapiens
cagtgctgcaataaa

SEQ ID NO: 1442922 - DNA, 15 bp, Homo sapiens
acagtgctgcaataa

SEQ ID NO: 1442923 - DNA, 15 bp, Homo sapiens
aacagtgctgcaata

SEQ ID NO: 1442924 - DNA, 15 bp, Homo sapiens
gaacagtgctgcaat

SEQ ID NO: 1442925 - DNA, 15 bp, Homo sapiens
tgaacagtgctgcaa

SEQ ID NO: 1442926 - DNA, 15 bp, Homo sapiens
gtgaacagtgctgca

SEQ ID NO: 1442927 - DNA, 15 bp, Homo sapiens
tgtgaacagtgctgc

SEQ ID NO: 1442928 - DNA, 15 bp, Homo sapiens
ttgtgaacagtgctg

SEQ ID NO: 1442929 - DNA, 15 bp, Homo sapiens
attgtgaacagtgct

SEQ ID NO: 1442930 - DNA, 15 bp, Homo sapiens
tattgtgaacagtgc

SEQ ID NO: 1442931 - DNA, 15 bp, Homo sapiens
ctattgtgaacagtg

SEQ ID NO: 1442932 - DNA, 15 bp, Homo sapiens
gctattgtgaacagt

SEQ ID NO: 1442933 - DNA, 15 bp, Homo sapiens
tgctattgtgaacag

SEQ ID NO: 1442934 - DNA, 15 bp, Homo sapiens
ttgctattgtgaaca

SEQ ID NO: 1442935 - DNA, 15 bp, Homo sapiens
tttgctattgtgaac

SEQ ID NO: 1442936 - DNA, 15 bp, Homo sapiens
ttttgctattgtgaa

SEQ ID NO: 1442937 - DNA, 15 bp, Homo sapiens
tttttgctattgtga

SEQ ID NO: 1442938 - DNA, 15 bp, Homo sapiens
gtttttgctattgtg

SEQ ID NO: 1442939 - DNA, 15 bp, Homo sapiens
agtttttgctattgt

SEQ ID NO: 1442940 - DNA, 15 bp, Homo sapiens
aagtttttgctattg

SEQ ID NO: 1442941 - DNA, 15 bp, Homo sapiens
caagtttttgctatt

SEQ ID NO: 1442942 - DNA, 15 bp, Homo sapiens
ccaagtttttgctat

SEQ ID NO: 1442943 - DNA, 15 bp, Homo sapiens
tccaagtttttgcta

SEQ ID NO: 1442944 - DNA, 15 bp, Homo sapiens
ttccaagtttttgct

SEQ ID NO: 1442945 - DNA, 15 bp, Homo sapiens
gttccaagtttttgc

SEQ ID NO: 1442946 - DNA, 15 bp, Homo sapiens
ggttccaagtttttg

SEQ ID NO: 1442947 - DNA, 15 bp, Homo sapiens
tggttccaagttttt

SEQ ID NO: 1442948 - DNA, 15 bp, Homo sapiens
ttggttccaagtttt

SEQ ID NO: 1442949 - DNA, 15 bp, Homo sapiens
gttggttccaagttt

SEQ ID NO: 1442950 - DNA, 15 bp, Homo sapiens
ggttggttccaagtt

SEQ ID NO: 1442951 - DNA, 15 bp, Homo sapiens
aggttggttccaagt

SEQ ID NO: 1442952 - DNA, 15 bp, Homo sapiens
taggttggttccaag

SEQ ID NO: 1442953 - DNA, 15 bp, Homo sapiens
ttaggttggttccaa

SEQ ID NO: 1442954 - DNA, 15 bp, Homo sapiens
tttaggttggttcca

SEQ ID NO: 1442955 - DNA, 15 bp, Homo sapiens
atttaggttggttcc

SEQ ID NO: 1442956 - DNA, 15 bp, Homo sapiens
catttaggttggttc

SEQ ID NO: 1442957 - DNA, 15 bp, Homo sapiens
gcatttaggttggtt

SEQ ID NO: 1442958 - DNA, 15 bp, Homo sapiens
ggcatttaggttggt

SEQ ID NO: 1442959 - DNA, 15 bp, Homo sapiens
gggcatttaggttgg

SEQ ID NO: 1442960 - DNA, 15 bp, Homo sapiens
tgggcatttaggttg

SEQ ID NO: 1442961 - DNA, 15 bp, Homo sapiens
atgggcatttaggtt

SEQ ID NO: 1442962 - DNA, 15 bp, Homo sapiens
gatgggcatttaggt

SEQ ID NO: 1442963 - DNA, 15 bp, Homo sapiens
tgatgggcatttagg

SEQ ID NO: 1442964 - DNA, 15 bp, Homo sapiens
attgatgggcattta

SEQ ID NO: 1442965 - DNA, 15 bp, Homo sapiens
cattgatgggcattt

SEQ ID NO: 1442966 - DNA, 15 bp, Homo sapiens
tcattgatgggcatt

SEQ ID NO: 1442967 - DNA, 15 bp, Homo sapiens
atcattgatgggcat

SEQ ID NO: 1442968 - DNA, 15 bp, Homo sapiens
tatcattgatgggca

SEQ ID NO: 1442969 - DNA, 15 bp, Homo sapiens
ctatcattgatgggc

SEQ ID NO: 1442970 - DNA, 15 bp, Homo sapiens
tctatcattgatggg

SEQ ID NO: 1442971 - DNA, 15 bp, Homo sapiens
tccagtctatcattg

SEQ ID NO: 1442972 - DNA, 15 bp, Homo sapiens
atccagtctatcatt

SEQ ID NO: 1442973 - DNA, 15 bp, Homo sapiens
tatccagtctatcat

SEQ ID NO: 1442974 - DNA, 15 bp, Homo sapiens
ttatccagtctatca

SEQ ID NO: 1442975 - DNA, 15 bp, Homo sapiens
tttatccagtctatc

SEQ ID NO: 1442976 - DNA, 15 bp, Homo sapiens
ctttatccagtctat

SEQ ID NO: 1442977 - DNA, 15 bp, Homo sapiens
tctttatccagtcta

SEQ ID NO: 1442978 - DNA, 15 bp, Homo sapiens
ttctttatccagtct

SEQ ID NO: 1442979 - DNA, 15 bp, Homo sapiens
tttctttatccagtc

SEQ ID NO: 1442980 - DNA, 15 bp, Homo sapiens
ttttctttatccagt

SEQ ID NO: 1442981 - DNA, 15 bp, Homo sapiens
attttctttatccag

SEQ ID NO: 1442982 - DNA, 15 bp, Homo sapiens
cgtgccacattttct

SEQ ID NO: 1442983 - DNA, 15 bp, Homo sapiens
acgtgccacattttc

SEQ ID NO: 1442984 - DNA, 15 bp, Homo sapiens
tacgtgccacatttt

SEQ ID NO: 1442985 - DNA, 15 bp, Homo sapiens
atacgtgccacattt

SEQ ID NO: 1442986 - DNA, 15 bp, Homo sapiens
tatacgtgccacatt

SEQ ID NO: 1442987 - DNA, 15 bp, Homo sapiens
gtatacgtgccacat

SEQ ID NO: 1442988 - DNA, 15 bp, Homo sapiens
tgtatacgtgccaca

SEQ ID NO: 1442989 - DNA, 15 bp, Homo sapiens
gtgtatacgtgccac

SEQ ID NO: 1442990 - DNA, 15 bp, Homo sapiens
ggtgtatacgtgcca

SEQ ID NO: 1442991 - DNA, 15 bp, Homo sapiens
tggtgtatacgtgcc

SEQ ID NO: 1442992 - DNA, 15 bp, Homo sapiens
atggtgtatacgtgc

SEQ ID NO: 1442993 - DNA, 15 bp, Homo sapiens
catggtgtatacgtg

SEQ ID NO: 1442994 - DNA, 15 bp, Homo sapiens
ccatggtgtatacgt

SEQ ID NO: 1442995 - DNA, 15 bp, Homo sapiens
tccatggtgtatacg

SEQ ID NO: 1442996 - DNA, 15 bp, Homo sapiens
ttccatggtgtatac

SEQ ID NO: 1442997 - DNA, 15 bp, Homo sapiens
attccatggtgtata

SEQ ID NO: 1442998 - DNA, 15 bp, Homo sapiens
tattccatggtgtat

SEQ ID NO: 1442999 - DNA, 15 bp, Homo sapiens
gtattccatggtgta

SEQ ID NO: 1443000 - DNA, 15 bp, Homo sapiens
agtattccatggtgt

SEQ ID NO: 1443001 - DNA, 15 bp, Homo sapiens
tagtattccatggtg

SEQ ID NO: 1443002 - DNA, 15 bp, Homo sapiens
ttagtattccatggt

SEQ ID NO: 1443003 - DNA, 15 bp, Homo sapiens
attagtattccatgg

SEQ ID NO: 1443004 - DNA, 15 bp, Homo sapiens
cattagtattccatg

SEQ ID NO: 1443005 - DNA, 15 bp, Homo sapiens
gcattagtattccat

SEQ ID NO: 1443006 - DNA, 15 bp, Homo sapiens
tgcattagtattcca

SEQ ID NO: 1443007 - DNA, 15 bp, Homo sapiens
ctgcattagtattcc

SEQ ID NO: 1443008 - DNA, 15 bp, Homo sapiens
gctgcattagtattc

SEQ ID NO: 1443009 - DNA, 15 bp, Homo sapiens
ggctgcattagtatt

SEQ ID NO: 1443010 - DNA, 15 bp, Homo sapiens
tggctgcattagtat

SEQ ID NO: 1443011 - DNA, 15 bp, Homo sapiens
atggctgcattagta

SEQ ID NO: 1443012 - DNA, 15 bp, Homo sapiens
tatggctgcattagt

SEQ ID NO: 1443013 - DNA, 15 bp, Homo sapiens
ttatggctgcattag

SEQ ID NO: 1443014 - DNA, 15 bp, Homo sapiens
tttatggctgcatta

SEQ ID NO: 1443015 - DNA, 15 bp, Homo sapiens
ttttatggctgcatt

SEQ ID NO: 1443016 - DNA, 15 bp, Homo sapiens
tctttttttatggct

SEQ ID NO: 1443017 - DNA, 15 bp, Homo sapiens
atctttttttatggc

SEQ ID NO: 1443018 - DNA, 15 bp, Homo sapiens
catctttttttatgg

SEQ ID NO: 1443019 - DNA, 15 bp, Homo sapiens
tcatctttttttatg

SEQ ID NO: 1443020 - DNA, 15 bp, Homo sapiens
ctcatctttttttat

SEQ ID NO: 1443021 - DNA, 15 bp, Homo sapiens
actcatcttttttta

SEQ ID NO: 1443022 - DNA, 15 bp, Homo sapiens
aactcatcttttttt

SEQ ID NO: 1443023 - DNA, 15 bp, Homo sapiens
gaactcatctttttt

SEQ ID NO: 1443024 - DNA, 15 bp, Homo sapiens
tgaactcatcttttt

SEQ ID NO: 1443025 - DNA, 15 bp, Homo sapiens
atgaactcatctttt

SEQ ID NO: 1443026 - DNA, 15 bp, Homo sapiens
catgaactcatcttt

SEQ ID NO: 1443027 - DNA, 15 bp, Homo sapiens
acatgaactcatctt

SEQ ID NO: 1443028 - DNA, 15 bp, Homo sapiens
gacatgaactcatct

SEQ ID NO: 1443029 - DNA, 15 bp, Homo sapiens
aggacatgaactcat

SEQ ID NO: 1443030 - DNA, 15 bp, Homo sapiens
aaggacatgaactca

SEQ ID NO: 1443031 - DNA, 15 bp, Homo sapiens
aaaggacatgaactc

SEQ ID NO: 1443032 - DNA, 15 bp, Homo sapiens
caaaggacatgaact

SEQ ID NO: 1443033 - DNA, 15 bp, Homo sapiens
tgcaaaggacatgaa

SEQ ID NO: 1443034 - DNA, 15 bp, Homo sapiens
atccatgtccctgca

SEQ ID NO: 1443035 - DNA, 15 bp, Homo sapiens
catccatgtccctgc

SEQ ID NO: 1443036 - DNA, 15 bp, Homo sapiens
tcatccatgtccctg

SEQ ID NO: 1443037 - DNA, 15 bp, Homo sapiens
ttcatccatgtccct

SEQ ID NO: 1443038 - DNA, 15 bp, Homo sapiens
tggtttccagcttca

SEQ ID NO: 1443039 - DNA, 15 bp, Homo sapiens
atggtttccagcttc

SEQ ID NO: 1443040 - DNA, 15 bp, Homo sapiens
atgatggtttccagc

SEQ ID NO: 1443041 - DNA, 15 bp, Homo sapiens
aatgatggtttccag

SEQ ID NO: 1443042 - DNA, 15 bp, Homo sapiens
gaatgatggtttcca

SEQ ID NO: 1443043 - DNA, 15 bp, Homo sapiens
agaatgatggtttcc

SEQ ID NO: 1443044 - DNA, 15 bp, Homo sapiens
gagaatgatggtttc

SEQ ID NO: 1443045 - DNA, 15 bp, Homo sapiens
tgagaatgatggttt

SEQ ID NO: 1443046 - DNA, 15 bp, Homo sapiens
ctgagaatgatggtt

SEQ ID NO: 1443047 - DNA, 15 bp, Homo sapiens
gctgagaatgatggt

SEQ ID NO: 1443048 - DNA, 15 bp, Homo sapiens
tgctgagaatgatgg

SEQ ID NO: 1443049 - DNA, 15 bp, Homo sapiens
ttgctgagaatgatg

SEQ ID NO: 1443050 - DNA, 15 bp, Homo sapiens
tttgctgagaatgat

SEQ ID NO: 1443051 - DNA, 15 bp, Homo sapiens
ttagtttgctgagaa

SEQ ID NO: 1443052 - DNA, 15 bp, Homo sapiens
gttagtttgctgaga

SEQ ID NO: 1443053 - DNA, 15 bp, Homo sapiens
ttggttttctgttcc

SEQ ID NO: 1443054 - DNA, 15 bp, Homo sapiens
tttggttttctgttc

SEQ ID NO: 1443055 - DNA, 15 bp, Homo sapiens
gtttggttttctgtt

SEQ ID NO: 1443056 - DNA, 15 bp, Homo sapiens
tgtttggttttctgt

SEQ ID NO: 1443057 - DNA, 15 bp, Homo sapiens
gtgtttggttttctg

SEQ ID NO: 1443058 - DNA, 15 bp, Homo sapiens
agtgtttggttttct

SEQ ID NO: 1443059 - DNA, 15 bp, Homo sapiens
cagtgtttggttttc

SEQ ID NO: 1443060 - DNA, 15 bp, Homo sapiens
tccacttatgagtga

SEQ ID NO: 1443061 - DNA, 15 bp, Homo sapiens
ttccacttatgagtg

SEQ ID NO: 1443062 - DNA, 15 bp, Homo sapiens
cttccacttatgagt

SEQ ID NO: 1443063 - DNA, 15 bp, Homo sapiens
acttccacttatgag

SEQ ID NO: 1443064 - DNA, 15 bp, Homo sapiens
aacttccacttatga

SEQ ID NO: 1443065 - DNA, 15 bp, Homo sapiens
caacttccacttatg

SEQ ID NO: 1443066 - DNA, 15 bp, Homo sapiens
tcaacttccacttat

SEQ ID NO: 1443067 - DNA, 15 bp, Homo sapiens
ttcaacttccactta

SEQ ID NO: 1443068 - DNA, 15 bp, Homo sapiens
tttcaacttccactt

SEQ ID NO: 1443069 - DNA, 15 bp, Homo sapiens
ttttcaacttccact

SEQ ID NO: 1443070 - DNA, 15 bp, Homo sapiens
tttttcaacttccac

SEQ ID NO: 1443071 - DNA, 15 bp, Homo sapiens
atttttcaacttcca

SEQ ID NO: 1443072 - DNA, 15 bp, Homo sapiens
catttttcaacttcc

SEQ ID NO: 1443073 - DNA, 15 bp, Homo sapiens
tcatttttcaacttc

SEQ ID NO: 1443074 - DNA, 15 bp, Homo sapiens
ctcatttttcaactt

SEQ ID NO: 1443075 - DNA, 15 bp, Homo sapiens
tctcatttttcaact

SEQ ID NO: 1443076 - DNA, 15 bp, Homo sapiens
ttctcatttttcaac

SEQ ID NO: 1443077 - DNA, 15 bp, Homo sapiens
gttctcatttttcaa

SEQ ID NO: 1443078 - DNA, 15 bp, Homo sapiens
tgttctcatttttca

SEQ ID NO: 1443079 - DNA, 15 bp, Homo sapiens
atgttctcatttttc

SEQ ID NO: 1443080 - DNA, 15 bp, Homo sapiens
tatgttctcattttt

SEQ ID NO: 1443081 - DNA, 15 bp, Homo sapiens
ctatgttctcatttt

SEQ ID NO: 1443082 - DNA, 15 bp, Homo sapiens
cctatgttctcattt

SEQ ID NO: 1443083 - DNA, 15 bp, Homo sapiens
ccctatgttctcatt

SEQ ID NO: 1443084 - DNA, 15 bp, Homo sapiens
tccctatgttctcat

SEQ ID NO: 1443085 - DNA, 15 bp, Homo sapiens
gtccctatgttctca

SEQ ID NO: 1443086 - DNA, 15 bp, Homo sapiens
tgtccctatgttctc

SEQ ID NO: 1443087 - DNA, 15 bp, Homo sapiens
atgtccctatgttct

SEQ ID NO: 1443088 - DNA, 15 bp, Homo sapiens
tatgtccctatgttc

SEQ ID NO: 1443089 - DNA, 15 bp, Homo sapiens
ctatgtccctatgtt

SEQ ID NO: 1443090 - DNA, 15 bp, Homo sapiens
cctatgtccctatgt

SEQ ID NO: 1443091 - DNA, 15 bp, Homo sapiens
ccctatgtccctatg

SEQ ID NO: 1443092 - DNA, 15 bp, Homo sapiens
tccctatgtccctat

SEQ ID NO: 1443093 - DNA, 15 bp, Homo sapiens
ctccctatgtcccta

SEQ ID NO: 1443094 - DNA, 15 bp, Homo sapiens
cctccctatgtccct

SEQ ID NO: 1443095 - DNA, 15 bp, Homo sapiens
ccctccctatgtccc

SEQ ID NO: 1443096 - DNA, 15 bp, Homo sapiens
gccctccctatgtcc

SEQ ID NO: 1443097 - DNA, 15 bp, Homo sapiens
tgccctccctatgtc

SEQ ID NO: 1443098 - DNA, 15 bp, Homo sapiens
ttgccctccctatgt

SEQ ID NO: 1443099 - DNA, 15 bp, Homo sapiens
gttgccctccctatg

SEQ ID NO: 1443100 - DNA, 15 bp, Homo sapiens
tgttgccctccctat

SEQ ID NO: 1443101 - DNA, 15 bp, Homo sapiens
atgttgccctcccta

SEQ ID NO: 1443102 - DNA, 15 bp, Homo sapiens
gatgttgccctccct

SEQ ID NO: 1443103 - DNA, 15 bp, Homo sapiens
tgatgttgccctccc

SEQ ID NO: 1443104 - DNA, 15 bp, Homo sapiens
gtgatgttgccctcc

SEQ ID NO: 1443105 - DNA, 15 bp, Homo sapiens
tgtgatgttgccctc

SEQ ID NO: 1443106 - DNA, 15 bp, Homo sapiens
gtgtgatgttgccct

SEQ ID NO: 1443107 - DNA, 15 bp, Homo sapiens
tgtgtgatgttgccc

SEQ ID NO: 1443108 - DNA, 15 bp, Homo sapiens
gtgtgtgatgttgcc

SEQ ID NO: 1443109 - DNA, 15 bp, Homo sapiens
agtgtgtgatgttgc

SEQ ID NO: 1443110 - DNA, 15 bp, Homo sapiens
cagtgtgtgatgttg

SEQ ID NO: 1443111 - DNA, 15 bp, Homo sapiens
aacaggccccagtgt

SEQ ID NO: 1443112 - DNA, 15 bp, Homo sapiens
caacaggccccagtg

SEQ ID NO: 1443113 - DNA, 15 bp, Homo sapiens
ccaacaggccccagt

SEQ ID NO: 1443114 - DNA, 15 bp, Homo sapiens
cccaacaggccccag

SEQ ID NO: 1443115 - DNA, 15 bp, Homo sapiens
ccccaacaggcccca

SEQ ID NO: 1443116 - DNA, 15 bp, Homo sapiens
tccccaacaggcccc

SEQ ID NO: 1443117 - DNA, 15 bp, Homo sapiens
ctccccaacaggccc

SEQ ID NO: 1443118 - DNA, 15 bp, Homo sapiens
actccccaacaggcc

SEQ ID NO: 1443119 - DNA, 15 bp, Homo sapiens
cactccccaacaggc

SEQ ID NO: 1443120 - DNA, 15 bp, Homo sapiens
ccactccccaacagg

SEQ ID NO: 1443121 - DNA, 15 bp, Homo sapiens
cccactccccaacag

SEQ ID NO: 1443122 - DNA, 15 bp, Homo sapiens
tcccactccccaaca

SEQ ID NO: 1443123 - DNA, 15 bp, Homo sapiens
ttcccactccccaac

SEQ ID NO: 1443124 - DNA, 15 bp, Homo sapiens
tttcccactccccaa

SEQ ID NO: 1443125 - DNA, 15 bp, Homo sapiens
gtttcccactcccca

SEQ ID NO: 1443126 - DNA, 15 bp, Homo sapiens
agtttcccactcccc

SEQ ID NO: 1443127 - DNA, 15 bp, Homo sapiens
gagtttcccactccc

SEQ ID NO: 1443128 - DNA, 15 bp, Homo sapiens
cgagtttcccactcc

SEQ ID NO: 1443129 - DNA, 15 bp, Homo sapiens
ccgagtttcccactc

SEQ ID NO: 1443130 - DNA, 15 bp, Homo sapiens
cccgagtttcccact

SEQ ID NO: 1443131 - DNA, 15 bp, Homo sapiens
ccccgagtttcccac

SEQ ID NO: 1443132 - DNA, 15 bp, Homo sapiens
tccccgagtttccca

SEQ ID NO: 1443133 - DNA, 15 bp, Homo sapiens
ctccccgagtttccc

SEQ ID NO: 1443134 - DNA, 15 bp, Homo sapiens
tctccccgagtttcc

SEQ ID NO: 1443135 - DNA, 15 bp, Homo sapiens
ttctccccgagtttc

SEQ ID NO: 1443136 - DNA, 15 bp, Homo sapiens
tttctccccgagttt

SEQ ID NO: 1443137 - DNA, 15 bp, Homo sapiens
atttctccccgagtt

SEQ ID NO: 1443138 - DNA, 15 bp, Homo sapiens
tatttctccccgagt

SEQ ID NO: 1443139 - DNA, 15 bp, Homo sapiens
ctatttctccccgag

SEQ ID NO: 1443140 - DNA, 15 bp, Homo sapiens
gctatttctccccga

SEQ ID NO: 1443141 - DNA, 15 bp, Homo sapiens
tgctatttctccccg

SEQ ID NO: 1443142 - DNA, 15 bp, Homo sapiens
atgctatttctcccc

SEQ ID NO: 1443143 - DNA, 15 bp, Homo sapiens
aatgctatttctccc

SEQ ID NO: 1443144 - DNA, 15 bp, Homo sapiens
taatgctatttctcc

SEQ ID NO: 1443145 - DNA, 15 bp, Homo sapiens
ctaatgctatttctc

SEQ ID NO: 1443146 - DNA, 15 bp, Homo sapiens
cctaatgctatttct

SEQ ID NO: 1443147 - DNA, 15 bp, Homo sapiens
tcctaatgctatttc

SEQ ID NO: 1443148 - DNA, 15 bp, Homo sapiens
ctcctaatgctattt

SEQ ID NO: 1443149 - DNA, 15 bp, Homo sapiens
tctcctaatgctatt

SEQ ID NO: 1443150 - DNA, 15 bp, Homo sapiens
ttctcctaatgctat

SEQ ID NO: 1443151 - DNA, 15 bp, Homo sapiens
tttctcctaatgcta

SEQ ID NO: 1443152 - DNA, 15 bp, Homo sapiens
gtaggtatttctcct

SEQ ID NO: 1443153 - DNA, 15 bp, Homo sapiens
agtaggtatttctcc

SEQ ID NO: 1443154 - DNA, 15 bp, Homo sapiens
tagtaggtatttctc

SEQ ID NO: 1443155 - DNA, 15 bp, Homo sapiens
atagtaggtatttct

SEQ ID NO: 1443156 - DNA, 15 bp, Homo sapiens
tatagtaggtatttc

SEQ ID NO: 1443157 - DNA, 15 bp, Homo sapiens
ctatagtaggtattt

SEQ ID NO: 1443158 - DNA, 15 bp, Homo sapiens
tctatagtaggtatt

SEQ ID NO: 1443159 - DNA, 15 bp, Homo sapiens
atctatagtaggtat

SEQ ID NO: 1443160 - DNA, 15 bp, Homo sapiens
catctatagtaggta

SEQ ID NO: 1443161 - DNA, 15 bp, Homo sapiens
tcatctatagtaggt

SEQ ID NO: 1443162 - DNA, 15 bp, Homo sapiens
ctcatctatagtagg

SEQ ID NO: 1443163 - DNA, 15 bp, Homo sapiens
cctcatctatagtag

SEQ ID NO: 1443164 - DNA, 15 bp, Homo sapiens
ccctcatctatagta

SEQ ID NO: 1443165 - DNA, 15 bp, Homo sapiens
cccctcatctatagt

SEQ ID NO: 1443166 - DNA, 15 bp, Homo sapiens
acccctcatctatag

SEQ ID NO: 1443167 - DNA, 15 bp, Homo sapiens
aacccctcatctata

SEQ ID NO: 1443168 - DNA, 15 bp, Homo sapiens
caacccctcatctat

SEQ ID NO: 1443169 - DNA, 15 bp, Homo sapiens
tcaacccctcatcta

SEQ ID NO: 1443170 - DNA, 15 bp, Homo sapiens
atcaacccctcatct

SEQ ID NO: 1443171 - DNA, 15 bp, Homo sapiens
catcaacccctcatc

SEQ ID NO: 1443172 - DNA, 15 bp, Homo sapiens
ccatcaacccctcat

SEQ ID NO: 1443173 - DNA, 15 bp, Homo sapiens
cccatcaacccctca

SEQ ID NO: 1443174 - DNA, 15 bp, Homo sapiens
acccatcaacccctc

SEQ ID NO: 1443175 - DNA, 15 bp, Homo sapiens
cacccatcaacccct

SEQ ID NO: 1443176 - DNA, 15 bp, Homo sapiens
gcacccatcaacccc

SEQ ID NO: 1443177 - DNA, 15 bp, Homo sapiens
gtggtttgctgcacc

SEQ ID NO: 1443178 - DNA, 15 bp, Homo sapiens
atgtgccatggtggt

SEQ ID NO: 1443179 - DNA, 15 bp, Homo sapiens
catgtgccatggtgg

SEQ ID NO: 1443180 - DNA, 15 bp, Homo sapiens
acatgtgccatggtg

SEQ ID NO: 1443181 - DNA, 15 bp, Homo sapiens
tacatgtgccatggt

SEQ ID NO: 1443182 - DNA, 15 bp, Homo sapiens
atacatgtgccatgg

SEQ ID NO: 1443183 - DNA, 15 bp, Homo sapiens
catacatgtgccatg

SEQ ID NO: 1443184 - DNA, 15 bp, Homo sapiens
acatacatgtgccat

SEQ ID NO: 1443185 - DNA, 15 bp, Homo sapiens
gacatacatgtgcca

SEQ ID NO: 1443186 - DNA, 15 bp, Homo sapiens
agacatacatgtgcc

SEQ ID NO: 1443187 - DNA, 15 bp, Homo sapiens
tagacatacatgtgc

SEQ ID NO: 1443188 - DNA, 15 bp, Homo sapiens
atagacatacatgtg

SEQ ID NO: 1443189 - DNA, 15 bp, Homo sapiens
catagacatacatgt

SEQ ID NO: 1443190 - DNA, 15 bp, Homo sapiens
acatagacatacatg

SEQ ID NO: 1443191 - DNA, 15 bp, Homo sapiens
tacatagacatacat

SEQ ID NO: 1443192 - DNA, 15 bp, Homo sapiens
ttacatagacataca

SEQ ID NO: 1443193 - DNA, 15 bp, Homo sapiens
gttacatagacatac

SEQ ID NO: 1443194 - DNA, 15 bp, Homo sapiens
tgttacatagacata

SEQ ID NO: 1443195 - DNA, 15 bp, Homo sapiens
ttgttacatagacat

SEQ ID NO: 1443196 - DNA, 15 bp, Homo sapiens
tttgttacatagaca

SEQ ID NO: 1443197 - DNA, 15 bp, Homo sapiens
gtttgttacatagac

SEQ ID NO: 1443198 - DNA, 15 bp, Homo sapiens
ggtttgttacataga

SEQ ID NO: 1443199 - DNA, 15 bp, Homo sapiens
atgcaggtttgttac

SEQ ID NO: 1443200 - DNA, 15 bp, Homo sapiens
catgcaggtttgtta

SEQ ID NO: 1443201 - DNA, 15 bp, Homo sapiens
acatgcaggtttgtt

SEQ ID NO: 1443202 - DNA, 15 bp, Homo sapiens
aacatgcaggtttgt

SEQ ID NO: 1443203 - DNA, 15 bp, Homo sapiens
gaacatgcaggtttg

SEQ ID NO: 1443204 - DNA, 15 bp, Homo sapiens
agaacatgcaggttt

SEQ ID NO: 1443205 - DNA, 15 bp, Homo sapiens
cagaacatgcaggtt

SEQ ID NO: 1443206 - DNA, 15 bp, Homo sapiens
gcagaacatgcaggt

SEQ ID NO: 1443207 - DNA, 15 bp, Homo sapiens
tgcagaacatgcagg

SEQ ID NO: 1443208 - DNA, 15 bp, Homo sapiens
gtgcagaacatgcag

SEQ ID NO: 1443209 - DNA, 15 bp, Homo sapiens
tgtgcagaacatgca

SEQ ID NO: 1443210 - DNA, 15 bp, Homo sapiens
atgtgcagaacatgc

SEQ ID NO: 1443211 - DNA, 15 bp, Homo sapiens
catgtgcagaacatg

SEQ ID NO: 1443212 - DNA, 15 bp, Homo sapiens
acatgtgcagaacat

SEQ ID NO: 1443213 - DNA, 15 bp, Homo sapiens
tacatgtgcagaaca

SEQ ID NO: 1443214 - DNA, 15 bp, Homo sapiens
atacatgtgcagaac

SEQ ID NO: 1443215 - DNA, 15 bp, Homo sapiens
gatacatgtgcagaa

SEQ ID NO: 1443216 - DNA, 15 bp, Homo sapiens
ggatacatgtgcaga

SEQ ID NO: 1443217 - DNA, 15 bp, Homo sapiens
gggatacatgtgcag

SEQ ID NO: 1443218 - DNA, 15 bp, Homo sapiens
tgggatacatgtgca

SEQ ID NO: 1443219 - DNA, 15 bp, Homo sapiens
atgggatacatgtgc

SEQ ID NO: 1443220 - DNA, 15 bp, Homo sapiens
tatgggatacatgtg

SEQ ID NO: 1443221 - DNA, 15 bp, Homo sapiens
ttatgggatacatgt

SEQ ID NO: 1443222 - DNA, 15 bp, Homo sapiens
tttatgggatacatg

SEQ ID NO: 1443223 - DNA, 15 bp, Homo sapiens
ttttatgggatacat

SEQ ID NO: 1443224 - DNA, 15 bp, Homo sapiens
attttatgggataca

SEQ ID NO: 1443225 - DNA, 15 bp, Homo sapiens
tattttatgggatac

SEQ ID NO: 1443226 - DNA, 15 bp, Homo sapiens
atattttatgggata

SEQ ID NO: 1443227 - DNA, 15 bp, Homo sapiens
tatattttatgggat

SEQ ID NO: 1443228 - DNA, 15 bp, Homo sapiens
ttatattttatggga

SEQ ID NO: 1443229 - DNA, 15 bp, Homo sapiens
attatattttatggg

SEQ ID NO: 1443230 - DNA, 15 bp, Homo sapiens
tattatattttatgg

SEQ ID NO: 1443231 - DNA, 15 bp, Homo sapiens
ttattatattttatg

SEQ ID NO: 1443232 - DNA, 15 bp, Homo sapiens
tttattatattttat

SEQ ID NO: 1443233 - DNA, 15 bp, Homo sapiens
tttttattatatttt

SEQ ID NO: 1443234 - DNA, 15 bp, Homo sapiens
ttttttattatattt

SEQ ID NO: 1443235 - DNA, 15 bp, Homo sapiens
tttttttattatatt

SEQ ID NO: 1443236 - DNA, 15 bp, Homo sapiens
atttttttattatat

SEQ ID NO: 1443237 - DNA, 15 bp, Homo sapiens
tatttttttattata

SEQ ID NO: 1443238 - DNA, 15 bp, Homo sapiens
attatttttttatta

SEQ ID NO: 1443239 - DNA, 15 bp, Homo sapiens
tattatttttttatt

SEQ ID NO: 1443240 - DNA, 15 bp, Homo sapiens
ttattatttttttat

SEQ ID NO: 1443241 - DNA, 15 bp, Homo sapiens
tttattattttttta

SEQ ID NO: 1443242 - DNA, 15 bp, Homo sapiens
ttttattattttttt

SEQ ID NO: 1443243 - DNA, 15 bp, Homo sapiens
attttattatttttt

SEQ ID NO: 1443244 - DNA, 15 bp, Homo sapiens
aattttattattttt

SEQ ID NO: 1443245 - DNA, 15 bp, Homo sapiens
aaattttattatttt

SEQ ID NO: 1443246 - DNA, 15 bp, Homo sapiens
taaattttattattt

SEQ ID NO: 1443247 - DNA, 15 bp, Homo sapiens
ttaaattttattatt

SEQ ID NO: 1443248 - DNA, 15 bp, Homo sapiens
tttaaattttattat

SEQ ID NO: 1443249 - DNA, 15 bp, Homo sapiens
ctttaaattttatta

SEQ ID NO: 1443250 - DNA, 15 bp, Homo sapiens
tctttaaattttatt

SEQ ID NO: 1443251 - DNA, 15 bp, Homo sapiens
ttctttaaattttat

SEQ ID NO: 1443252 - DNA, 15 bp, Homo sapiens
tttctttaaatttta

SEQ ID NO: 1443253 - DNA, 15 bp, Homo sapiens
ctttctttaaatttt

SEQ ID NO: 1443254 - DNA, 15 bp, Homo sapiens
tctttctttaaattt

SEQ ID NO: 1443255 - DNA, 15 bp, Homo sapiens
ctctttctttaaatt

SEQ ID NO: 1443256 - DNA, 15 bp, Homo sapiens
actctttctttaaat

SEQ ID NO: 1443257 - DNA, 15 bp, Homo sapiens
tactctttctttaaa

SEQ ID NO: 1443258 - DNA, 15 bp, Homo sapiens
atactctttctttaa

SEQ ID NO: 1443259 - DNA, 15 bp, Homo sapiens
aatactctttcttta

SEQ ID NO: 1443260 - DNA, 15 bp, Homo sapiens
caatactctttcttt

SEQ ID NO: 1443261 - DNA, 15 bp, Homo sapiens
ccaatactctttctt

SEQ ID NO: 1443262 - DNA, 15 bp, Homo sapiens
gccaatactctttct

SEQ ID NO: 1443263 - DNA, 15 bp, Homo sapiens
ggccaatactctttc

SEQ ID NO: 1443264 - DNA, 15 bp, Homo sapiens
tggccaatactcttt

SEQ ID NO: 1443265 - DNA, 15 bp, Homo sapiens
atggccaatactctt

SEQ ID NO: 1443266 - DNA, 15 bp, Homo sapiens
gatggccaatactct

SEQ ID NO: 1443267 - DNA, 15 bp, Homo sapiens
agatggccaatactc

SEQ ID NO: 1443268 - DNA, 15 bp, Homo sapiens
gagatggccaatact

SEQ ID NO: 1443269 - DNA, 15 bp, Homo sapiens
ggagatggccaatac

SEQ ID NO: 1443270 - DNA, 15 bp, Homo sapiens
aggagatggccaata

SEQ ID NO: 1443271 - DNA, 15 bp, Homo sapiens
gaggagatggccaat

SEQ ID NO: 1443272 - DNA, 15 bp, Homo sapiens
tgaggagatggccaa

SEQ ID NO: 1443273 - DNA, 15 bp, Homo sapiens
ctgaggagatggcca

SEQ ID NO: 1443274 - DNA, 15 bp, Homo sapiens
cctgaggagatggcc

SEQ ID NO: 1443275 - DNA, 15 bp, Homo sapiens
tcctgaggagatggc

SEQ ID NO: 1443276 - DNA, 15 bp, Homo sapiens
atcctgaggagatgg

SEQ ID NO: 1443277 - DNA, 15 bp, Homo sapiens
aatcctgaggagatg

SEQ ID NO: 1443278 - DNA, 15 bp, Homo sapiens
aaatcctgaggagat

SEQ ID NO: 1443279 - DNA, 15 bp, Homo sapiens
aaaatcctgaggaga

SEQ ID NO: 1443280 - DNA, 15 bp, Homo sapiens
taaaatcctgaggag

SEQ ID NO: 1443281 - DNA, 15 bp, Homo sapiens
ttaaaatcctgagga

SEQ ID NO: 1443282 - DNA, 15 bp, Homo sapiens
tttaaaatcctgagg

SEQ ID NO: 1443283 - DNA, 15 bp, Homo sapiens
atttaaaatcctgag

SEQ ID NO: 1443284 - DNA, 15 bp, Homo sapiens
aatttaaaatcctga

SEQ ID NO: 1443285 - DNA, 15 bp, Homo sapiens
gaatttaaaatcctg

SEQ ID NO: 1443286 - DNA, 15 bp, Homo sapiens
agaatttaaaatcct

SEQ ID NO: 1443287 - DNA, 15 bp, Homo sapiens
cagaatttaaaatcc

SEQ ID NO: 1443288 - DNA, 15 bp, Homo sapiens
tcagaatttaaaatc

SEQ ID NO: 1443289 - DNA, 15 bp, Homo sapiens
atcagaatttaaaat

SEQ ID NO: 1443290 - DNA, 15 bp, Homo sapiens
gatcagaatttaaaa

SEQ ID NO: 1443291 - DNA, 15 bp, Homo sapiens
tgatcagaatttaaa

SEQ ID NO: 1443292 - DNA, 15 bp, Homo sapiens
ctgatcagaatttaa

SEQ ID NO: 1443293 - DNA, 15 bp, Homo sapiens
cctgatcagaattta

SEQ ID NO: 1443294 - DNA, 15 bp, Homo sapiens
tcctgatcagaattt

SEQ ID NO: 1443295 - DNA, 15 bp, Homo sapiens
ctcctgatcagaatt

SEQ ID NO: 1443296 - DNA, 15 bp, Homo sapiens
actcctgatcagaat

SEQ ID NO: 1443297 - DNA, 15 bp, Homo sapiens
aactcctgatcagaa

SEQ ID NO: 1443298 - DNA, 15 bp, Homo sapiens
taactcctgatcaga

SEQ ID NO: 1443299 - DNA, 15 bp, Homo sapiens
ataactcctgatcag

SEQ ID NO: 1443300 - DNA, 15 bp, Homo sapiens
aataactcctgatca

SEQ ID NO: 1443301 - DNA, 15 bp, Homo sapiens
taataactcctgatc

SEQ ID NO: 1443302 - DNA, 15 bp, Homo sapiens
ttaataactcctgat

SEQ ID NO: 1443303 - DNA, 15 bp, Homo sapiens
tttaataactcctga

SEQ ID NO: 1443304 - DNA, 15 bp, Homo sapiens
gtttaataactcctg

SEQ ID NO: 1443305 - DNA, 15 bp, Homo sapiens
tgtttaataactcct

SEQ ID NO: 1443306 - DNA, 15 bp, Homo sapiens
ttgtttaataactcc

SEQ ID NO: 1443307 - DNA, 15 bp, Homo sapiens
tttgtttaataactc

SEQ ID NO: 1443308 - DNA, 15 bp, Homo sapiens
atttgtttaataact

SEQ ID NO: 1443309 - DNA, 15 bp, Homo sapiens
catttgtttaataac

SEQ ID NO: 1443310 - DNA, 15 bp, Homo sapiens
acatttgtttaataa

SEQ ID NO: 1443311 - DNA, 15 bp, Homo sapiens
aacatttgtttaata

SEQ ID NO: 1443312 - DNA, 15 bp, Homo sapiens
aaacatttgtttaat

SEQ ID NO: 1443313 - DNA, 15 bp, Homo sapiens
taaacatttgtttaa

SEQ ID NO: 1443314 - DNA, 15 bp, Homo sapiens
tataaacatttgttt

SEQ ID NO: 1443315 - DNA, 15 bp, Homo sapiens
ctataaacatttgtt

SEQ ID NO: 1443316 - DNA, 15 bp, Homo sapiens
cctataaacatttgt

SEQ ID NO: 1443317 - DNA, 15 bp, Homo sapiens
gcctataaacatttg

SEQ ID NO: 1443318 - DNA, 15 bp, Homo sapiens
ggcctataaacattt

SEQ ID NO: 1443319 - DNA, 15 bp, Homo sapiens
gggcctataaacatt

SEQ ID NO: 1443320 - DNA, 15 bp, Homo sapiens
agggcctataaacat

SEQ ID NO: 1443321 - DNA, 15 bp, Homo sapiens
cagggcctataaaca

SEQ ID NO: 1443322 - DNA, 15 bp, Homo sapiens
acagggcctataaac

SEQ ID NO: 1443323 - DNA, 15 bp, Homo sapiens
gacagggcctataaa

SEQ ID NO: 1443324 - DNA, 15 bp, Homo sapiens
tgacagggcctataa

SEQ ID NO: 1443325 - DNA, 15 bp, Homo sapiens
atgacagggcctata

SEQ ID NO: 1443326 - DNA, 15 bp, Homo sapiens
catgacagggcctat

SEQ ID NO: 1443327 - DNA, 15 bp, Homo sapiens
acatgacagggccta

SEQ ID NO: 1443328 - DNA, 15 bp, Homo sapiens
aacatgacagggcct

SEQ ID NO: 1443329 - DNA, 15 bp, Homo sapiens
aaacatgacagggcc

SEQ ID NO: 1443330 - DNA, 15 bp, Homo sapiens
caaacatgacagggc

SEQ ID NO: 1443331 - DNA, 15 bp, Homo sapiens
acaaacatgacaggg

SEQ ID NO: 1443332 - DNA, 15 bp, Homo sapiens
aacaaacatgacagg

SEQ ID NO: 1443333 - DNA, 15 bp, Homo sapiens
taacaaacatgacag

SEQ ID NO: 1443334 - DNA, 15 bp, Homo sapiens
ataacaaacatgaca

SEQ ID NO: 1443335 - DNA, 15 bp, Homo sapiens
tataacaaacatgac

SEQ ID NO: 1443336 - DNA, 15 bp, Homo sapiens
ttataacaaacatga

SEQ ID NO: 1443337 - DNA, 15 bp, Homo sapiens
attataacaaacatg

SEQ ID NO: 1443338 - DNA, 15 bp, Homo sapiens
aattataacaaacat

SEQ ID NO: 1443339 - DNA, 15 bp, Homo sapiens
taattataacaaaca

SEQ ID NO: 1443340 - DNA, 15 bp, Homo sapiens
ataattataacaaac

SEQ ID NO: 1443341 - DNA, 15 bp, Homo sapiens
aataattataacaaa

SEQ ID NO: 1443342 - DNA, 15 bp, Homo sapiens
taataattataacaa

SEQ ID NO: 1443343 - DNA, 15 bp, Homo sapiens
ttaataattataaca

SEQ ID NO: 1443344 - DNA, 15 bp, Homo sapiens
attaataattataac

SEQ ID NO: 1443345 - DNA, 15 bp, Homo sapiens
tattaataattataa

SEQ ID NO: 1443346 - DNA, 15 bp, Homo sapiens
ttattaataattata

SEQ ID NO: 1443347 - DNA, 15 bp, Homo sapiens
gttattaataattat

SEQ ID NO: 1443348 - DNA, 15 bp, Homo sapiens
agttattaataatta

SEQ ID NO: 1443349 - DNA, 15 bp, Homo sapiens
tagttattaataatt

SEQ ID NO: 1443350 - DNA, 15 bp, Homo sapiens
atagttattaataat

SEQ ID NO: 1443351 - DNA, 15 bp, Homo sapiens
aatagttattaataa

SEQ ID NO: 1443352 - DNA, 15 bp, Homo sapiens
caatagttattaata

SEQ ID NO: 1443353 - DNA, 15 bp, Homo sapiens
tcaatagttattaat

SEQ ID NO: 1443354 - DNA, 15 bp, Homo sapiens
ttcaatagttattaa

SEQ ID NO: 1443355 - DNA, 15 bp, Homo sapiens
gttcaatagttatta

SEQ ID NO: 1443356 - DNA, 15 bp, Homo sapiens
agttcaatagttatt

SEQ ID NO: 1443357 - DNA, 15 bp, Homo sapiens
aagttcaatagttat

SEQ ID NO: 1443358 - DNA, 15 bp, Homo sapiens
gaagttcaatagtta

SEQ ID NO: 1443359 - DNA, 15 bp, Homo sapiens
agaagttcaatagtt

SEQ ID NO: 1443360 - DNA, 15 bp, Homo sapiens
aagaagttcaatagt

SEQ ID NO: 1443361 - DNA, 15 bp, Homo sapiens
gaagaagttcaatag

SEQ ID NO: 1443362 - DNA, 15 bp, Homo sapiens
ggaagaagttcaata

SEQ ID NO: 1443363 - DNA, 15 bp, Homo sapiens
tggaagaagttcaat

SEQ ID NO: 1443364 - DNA, 15 bp, Homo sapiens
ctggaagaagttcaa

SEQ ID NO: 1443365 - DNA, 15 bp, Homo sapiens
tctggaagaagttca

SEQ ID NO: 1443366 - DNA, 15 bp, Homo sapiens
atctggaagaagttc

SEQ ID NO: 1443367 - DNA, 15 bp, Homo sapiens
aatctggaagaagtt

SEQ ID NO: 1443368 - DNA, 15 bp, Homo sapiens
taatctggaagaagt

SEQ ID NO: 1443369 - DNA, 15 bp, Homo sapiens
ttaatctggaagaag

SEQ ID NO: 1443370 - DNA, 15 bp, Homo sapiens
tttaatctggaagaa

SEQ ID NO: 1443371 - DNA, 15 bp, Homo sapiens
ttttaatctggaaga

SEQ ID NO: 1443372 - DNA, 15 bp, Homo sapiens
attttaatctggaag

SEQ ID NO: 1443373 - DNA, 15 bp, Homo sapiens
aattttaatctggaa

SEQ ID NO: 1443374 - DNA, 15 bp, Homo sapiens
aaattttaatctgga

SEQ ID NO: 1443375 - DNA, 15 bp, Homo sapiens
gaaattttaatctgg

SEQ ID NO: 1443376 - DNA, 15 bp, Homo sapiens
agaaattttaatctg

SEQ ID NO: 1443377 - DNA, 15 bp, Homo sapiens
aagaaattttaatct

SEQ ID NO: 1443378 - DNA, 15 bp, Homo sapiens
caagaaattttaatc

SEQ ID NO: 1443379 - DNA, 15 bp, Homo sapiens
acaagaaattttaat

SEQ ID NO: 1443380 - DNA, 15 bp, Homo sapiens
aacaagaaattttaa

SEQ ID NO: 1443381 - DNA, 15 bp, Homo sapiens
aaacaagaaatttta

SEQ ID NO: 1443382 - DNA, 15 bp, Homo sapiens
aaaacaagaaatttt

SEQ ID NO: 1443383 - DNA, 15 bp, Homo sapiens
caaaacaagaaattt

SEQ ID NO: 1443384 - DNA, 15 bp, Homo sapiens
ccaaaacaagaaatt

SEQ ID NO: 1443385 - DNA, 15 bp, Homo sapiens
accaaaacaagaaat

SEQ ID NO: 1443386 - DNA, 15 bp, Homo sapiens
caccaaaacaagaaa

SEQ ID NO: 1443387 - DNA, 15 bp, Homo sapiens
acaccaaaacaagaa

SEQ ID NO: 1443388 - DNA, 15 bp, Homo sapiens
cacaccaaaacaaga

SEQ ID NO: 1443389 - DNA, 15 bp, Homo sapiens
tcacaccaaaacaag

SEQ ID NO: 1443390 - DNA, 15 bp, Homo sapiens
atcacaccaaaacaa

SEQ ID NO: 1443391 - DNA, 15 bp, Homo sapiens
aatcacaccaaaaca

SEQ ID NO: 1443392 - DNA, 15 bp, Homo sapiens
caatcacaccaaaac

SEQ ID NO: 1443393 - DNA, 15 bp, Homo sapiens
gcaatcacaccaaaa

SEQ ID NO: 1443394 - DNA, 15 bp, Homo sapiens
agcaatcacaccaaa

SEQ ID NO: 1443395 - DNA, 15 bp, Homo sapiens
aagcaatcacaccaa

SEQ ID NO: 1443396 - DNA, 15 bp, Homo sapiens
gaagcaatcacacca

SEQ ID NO: 1443397 - DNA, 15 bp, Homo sapiens
agaagcaatcacacc

SEQ ID NO: 1443398 - DNA, 15 bp, Homo sapiens
tagaagcaatcacac

SEQ ID NO: 1443399 - DNA, 15 bp, Homo sapiens
atagaagcaatcaca

SEQ ID NO: 1443400 - DNA, 15 bp, Homo sapiens
aatagaagcaatcac

SEQ ID NO: 1443401 - DNA, 15 bp, Homo sapiens
aaatagaagcaatca

SEQ ID NO: 1443402 - DNA, 15 bp, Homo sapiens
caaatagaagcaatc

SEQ ID NO: 1443403 - DNA, 15 bp, Homo sapiens
ccaaatagaagcaat

SEQ ID NO: 1443404 - DNA, 15 bp, Homo sapiens
tccaaatagaagcaa

SEQ ID NO: 1443405 - DNA, 15 bp, Homo sapiens
atccaaatagaagca

SEQ ID NO: 1443406 - DNA, 15 bp, Homo sapiens
aatccaaatagaagc

SEQ ID NO: 1443407 - DNA, 15 bp, Homo sapiens
gaatccaaatagaag

SEQ ID NO: 1443408 - DNA, 15 bp, Homo sapiens
tgaatccaaatagaa

SEQ ID NO: 1443409 - DNA, 15 bp, Homo sapiens
ttgaatccaaataga

SEQ ID NO: 1443410 - DNA, 15 bp, Homo sapiens
gttgaatccaaatag

SEQ ID NO: 1443411 - DNA, 15 bp, Homo sapiens
agttgaatccaaata

SEQ ID NO: 1443412 - DNA, 15 bp, Homo sapiens
aagttgaatccaaat

SEQ ID NO: 1443413 - DNA, 15 bp, Homo sapiens
gaagttgaatccaaa

SEQ ID NO: 1443414 - DNA, 15 bp, Homo sapiens
agaagttgaatccaa

SEQ ID NO: 1443415 - DNA, 15 bp, Homo sapiens
tagaagttgaatcca

SEQ ID NO: 1443416 - DNA, 15 bp, Homo sapiens
atagaagttgaatcc

SEQ ID NO: 1443417 - DNA, 15 bp, Homo sapiens
aatagaagttgaatc

SEQ ID NO: 1443418 - DNA, 15 bp, Homo sapiens
aaatagaagttgaat

SEQ ID NO: 1443419 - DNA, 15 bp, Homo sapiens
aaaatagaagttgaa

SEQ ID NO: 1443420 - DNA, 15 bp, Homo sapiens
aaaaatagaagttga

SEQ ID NO: 1443421 - DNA, 15 bp, Homo sapiens
caaaaatagaagttg

SEQ ID NO: 1443422 - DNA, 15 bp, Homo sapiens
ccaaaaatagaagtt

SEQ ID NO: 1443423 - DNA, 15 bp, Homo sapiens
gccaaaaatagaagt

SEQ ID NO: 1443424 - DNA, 15 bp, Homo sapiens
tgccaaaaatagaag

SEQ ID NO: 1443425 - DNA, 15 bp, Homo sapiens
ttgccaaaaatagaa

SEQ ID NO: 1443426 - DNA, 15 bp, Homo sapiens
tttgccaaaaataga

SEQ ID NO: 1443427 - DNA, 15 bp, Homo sapiens
ctttgccaaaaatag

SEQ ID NO: 1443428 - DNA, 15 bp, Homo sapiens
tctttgccaaaaata

SEQ ID NO: 1443429 - DNA, 15 bp, Homo sapiens
gtctttgccaaaaat

SEQ ID NO: 1443430 - DNA, 15 bp, Homo sapiens
agtctttgccaaaaa

SEQ ID NO: 1443431 - DNA, 15 bp, Homo sapiens
cagtctttgccaaaa

SEQ ID NO: 1443432 - DNA, 15 bp, Homo sapiens
acagtctttgccaaa

SEQ ID NO: 1443433 - DNA, 15 bp, Homo sapiens
cacagtctttgccaa

SEQ ID NO: 1443434 - DNA, 15 bp, Homo sapiens
acacagtctttgcca

SEQ ID NO: 1443435 - DNA, 15 bp, Homo sapiens
cacacagtctttgcc

SEQ ID NO: 1443436 - DNA, 15 bp, Homo sapiens
acacacagtctttgc

SEQ ID NO: 1443437 - DNA, 15 bp, Homo sapiens
aacacacagtctttg

SEQ ID NO: 1443438 - DNA, 15 bp, Homo sapiens
aaacacacagtcttt

SEQ ID NO: 1443439 - DNA, 15 bp, Homo sapiens
aaaacacacagtctt

SEQ ID NO: 1443440 - DNA, 15 bp, Homo sapiens
aaaaacacacagtct

SEQ ID NO: 1443441 - DNA, 15 bp, Homo sapiens
taaaaacacacagtc

SEQ ID NO: 1443442 - DNA, 15 bp, Homo sapiens
ataaaaacacacagt

SEQ ID NO: 1443443 - DNA, 15 bp, Homo sapiens
aataaaaacacacag

SEQ ID NO: 1443444 - DNA, 15 bp, Homo sapiens
aaataaaaacacaca

SEQ ID NO: 1443445 - DNA, 15 bp, Homo sapiens
aaaataaaaacacac

SEQ ID NO: 1443446 - DNA, 15 bp, Homo sapiens
taaaataaaaacaca

SEQ ID NO: 1443447 - DNA, 15 bp, Homo sapiens
ataaaataaaaacac

SEQ ID NO: 1443448 - DNA, 15 bp, Homo sapiens
taaataaaataaaat

SEQ ID NO: 1443449 - DNA, 15 bp, Homo sapiens
aaaataaataaaata

SEQ ID NO: 1443450 - DNA, 15 bp, Homo sapiens
taaaataaataaaat

SEQ ID NO: 1443451 - DNA, 15 bp, Homo sapiens
ataaaataaataaaa

SEQ ID NO: 1443452 - DNA, 15 bp, Homo sapiens
caaaaataaaataaa

SEQ ID NO: 1443453 - DNA, 15 bp, Homo sapiens
tcaaaaataaaataa

SEQ ID NO: 1443454 - DNA, 15 bp, Homo sapiens
ctcaaaaataaaata

SEQ ID NO: 1443455 - DNA, 15 bp, Homo sapiens
tctcaaaaataaaat

SEQ ID NO: 1443456 - DNA, 15 bp, Homo sapiens
ttctcaaaaataaaa

SEQ ID NO: 1443457 - DNA, 15 bp, Homo sapiens
tttctcaaaaataaa

SEQ ID NO: 1443458 - DNA, 15 bp, Homo sapiens
ctttctcaaaaataa

SEQ ID NO: 1443459 - DNA, 15 bp, Homo sapiens
tctttctcaaaaata

SEQ ID NO: 1443460 - DNA, 15 bp, Homo sapiens
ctctttctcaaaaat

SEQ ID NO: 1443461 - DNA, 15 bp, Homo sapiens
actctttctcaaaaa

SEQ ID NO: 1443462 - DNA, 15 bp, Homo sapiens
gactctttctcaaaa

SEQ ID NO: 1443463 - DNA, 15 bp, Homo sapiens
agactctttctcaaa

SEQ ID NO: 1443464 - DNA, 15 bp, Homo sapiens
gagactctttctcaa

SEQ ID NO: 1443465 - DNA, 15 bp, Homo sapiens
tgagactctttctca

SEQ ID NO: 1443466 - DNA, 15 bp, Homo sapiens
gtgagactctttctc

SEQ ID NO: 1443467 - DNA, 15 bp, Homo sapiens
agtgagactctttct

SEQ ID NO: 1443468 - DNA, 15 bp, Homo sapiens
gagtgagactctttc

SEQ ID NO: 1443469 - DNA, 15 bp, Homo sapiens
agagtgagactcttt

SEQ ID NO: 1443470 - DNA, 15 bp, Homo sapiens
cagagtgagactctt

SEQ ID NO: 1443471 - DNA, 15 bp, Homo sapiens
tctgggcgacagagt

SEQ ID NO: 1443472 - DNA, 15 bp, Homo sapiens
gtctgggcgacagag

SEQ ID NO: 1443473 - DNA, 15 bp, Homo sapiens
agtctgggcgacaga

SEQ ID NO: 1443474 - DNA, 15 bp, Homo sapiens
cagtctgggcgacag

SEQ ID NO: 1443475 - DNA, 15 bp, Homo sapiens
ccagtctgggcgaca

SEQ ID NO: 1443476 - DNA, 15 bp, Homo sapiens
tccagtctgggcgac

SEQ ID NO: 1443477 - DNA, 15 bp, Homo sapiens
ctccagtctgggcga

SEQ ID NO: 1443478 - DNA, 15 bp, Homo sapiens
actccagtctgggcg

SEQ ID NO: 1443479 - DNA, 15 bp, Homo sapiens
cgcgccactgcactc

SEQ ID NO: 1443480 - DNA, 15 bp, Homo sapiens
tcgcgccactgcact

SEQ ID NO: 1443481 - DNA, 15 bp, Homo sapiens
atcgcgccactgcac

SEQ ID NO: 1443482 - DNA, 15 bp, Homo sapiens
gatcgcgccactgca

SEQ ID NO: 1443483 - DNA, 15 bp, Homo sapiens
agatcgcgccactgc

SEQ ID NO: 1443484 - DNA, 15 bp, Homo sapiens
gagatcgcgccactg

SEQ ID NO: 1443485 - DNA, 15 bp, Homo sapiens
tagtgagccgagatc

SEQ ID NO: 1443486 - DNA, 15 bp, Homo sapiens
gtagtgagccgagat

SEQ ID NO: 1443487 - DNA, 15 bp, Homo sapiens
tgtagtgagccgaga

SEQ ID NO: 1443488 - DNA, 15 bp, Homo sapiens
aggttgtagtgagcc

SEQ ID NO: 1443489 - DNA, 15 bp, Homo sapiens
agaggttgtagtgag

SEQ ID NO: 1443490 - DNA, 15 bp, Homo sapiens
ccgggaggcagaggt

SEQ ID NO: 1443491 - DNA, 15 bp, Homo sapiens
cccgggaggcagagg

SEQ ID NO: 1443492 - DNA, 15 bp, Homo sapiens
ggagcctgtaatccc

SEQ ID NO: 1443493 - DNA, 15 bp, Homo sapiens
aggagcctgtaatcc

SEQ ID NO: 1443494 - DNA, 15 bp, Homo sapiens
caggagcctgtaatc

SEQ ID NO: 1443495 - DNA, 15 bp, Homo sapiens
gcaggagcctgtaat

SEQ ID NO: 1443496 - DNA, 15 bp, Homo sapiens
ggcaggagcctgtaa

SEQ ID NO: 1443497 - DNA, 15 bp, Homo sapiens
tggcaggagcctgta

SEQ ID NO: 1443498 - DNA, 15 bp, Homo sapiens
gtggcaggagcctgt

SEQ ID NO: 1443499 - DNA, 15 bp, Homo sapiens
ggtggcaggagcctg

SEQ ID NO: 1443500 - DNA, 15 bp, Homo sapiens
tggtggcaggagcct

SEQ ID NO: 1443501 - DNA, 15 bp, Homo sapiens
atggtggcaggagcc

SEQ ID NO: 1443502 - DNA, 15 bp, Homo sapiens
catggtggcaggagc

SEQ ID NO: 1443503 - DNA, 15 bp, Homo sapiens
gcatggtggcaggag

SEQ ID NO: 1443504 - DNA, 15 bp, Homo sapiens
ggcatggtggcagga

SEQ ID NO: 1443505 - DNA, 15 bp, Homo sapiens
taggcatggtggcag

SEQ ID NO: 1443506 - DNA, 15 bp, Homo sapiens
ctaggcatggtggca

SEQ ID NO: 1443507 - DNA, 15 bp, Homo sapiens
gctaggcatggtggc

SEQ ID NO: 1443508 - DNA, 15 bp, Homo sapiens
agctaggcatggtgg

SEQ ID NO: 1443509 - DNA, 15 bp, Homo sapiens
tagctaggcatggtg

SEQ ID NO: 1443510 - DNA, 15 bp, Homo sapiens
ttagctaggcatggt

SEQ ID NO: 1443511 - DNA, 15 bp, Homo sapiens
attagctaggcatgg

SEQ ID NO: 1443512 - DNA, 15 bp, Homo sapiens
aattagctaggcatg

SEQ ID NO: 1443513 - DNA, 15 bp, Homo sapiens
aaattagctaggcat

SEQ ID NO: 1443514 - DNA, 15 bp, Homo sapiens
aaaattagctaggca

SEQ ID NO: 1443515 - DNA, 15 bp, Homo sapiens
aaaaattagctaggc

SEQ ID NO: 1443516 - DNA, 15 bp, Homo sapiens
aacaaaaattagcta

SEQ ID NO: 1443517 - DNA, 15 bp, Homo sapiens
caacaaaaattagct

SEQ ID NO: 1443518 - DNA, 15 bp, Homo sapiens
acaacaaaaattagc

SEQ ID NO: 1443519 - DNA, 15 bp, Homo sapiens
aacaacaaaaattag

SEQ ID NO: 1443520 - DNA, 15 bp, Homo sapiens
aaacaacaaaaatta

SEQ ID NO: 1443521 - DNA, 15 bp, Homo sapiens
aaaacaacaaaaatt

SEQ ID NO: 1443522 - DNA, 15 bp, Homo sapiens
taaaacaacaaaaat

SEQ ID NO: 1443523 - DNA, 15 bp, Homo sapiens
ctaaaacaacaaaaa

SEQ ID NO: 1443524 - DNA, 15 bp, Homo sapiens
actaaaacaacaaaa

SEQ ID NO: 1443525 - DNA, 15 bp, Homo sapiens
tactaaaacaacaaa

SEQ ID NO: 1443526 - DNA, 15 bp, Homo sapiens
ctactaaaacaacaa

SEQ ID NO: 1443527 - DNA, 15 bp, Homo sapiens
tctactaaaacaaca

SEQ ID NO: 1443528 - DNA, 15 bp, Homo sapiens
ctctactaaaacaac

SEQ ID NO: 1443529 - DNA, 15 bp, Homo sapiens
tctctactaaaacaa

SEQ ID NO: 1443530 - DNA, 15 bp, Homo sapiens
ttctctactaaaaca

SEQ ID NO: 1443531 - DNA, 15 bp, Homo sapiens
cttctctactaaaac

SEQ ID NO: 1443532 - DNA, 15 bp, Homo sapiens
tccttctctactaaa

SEQ ID NO: 1443533 - DNA, 15 bp, Homo sapiens
ctccttctctactaa

SEQ ID NO: 1443534 - DNA, 15 bp, Homo sapiens
actccttctctacta

SEQ ID NO: 1443535 - DNA, 15 bp, Homo sapiens
aactccttctctact

SEQ ID NO: 1443536 - DNA, 15 bp, Homo sapiens
aaactccttctctac

SEQ ID NO: 1443537 - DNA, 15 bp, Homo sapiens
gaaactccttctcta

SEQ ID NO: 1443538 - DNA, 15 bp, Homo sapiens
tgaaactccttctct

SEQ ID NO: 1443539 - DNA, 15 bp, Homo sapiens
gtgaaactccttctc

SEQ ID NO: 1443540 - DNA, 15 bp, Homo sapiens
ggtgaaactccttct

SEQ ID NO: 1443541 - DNA, 15 bp, Homo sapiens
tggtgaaactccttc

SEQ ID NO: 1443542 - DNA, 15 bp, Homo sapiens
atggtgaaactcctt

SEQ ID NO: 1443543 - DNA, 15 bp, Homo sapiens
gatggtgaaactcct

SEQ ID NO: 1443544 - DNA, 15 bp, Homo sapiens
agatggtgaaactcc

SEQ ID NO: 1443545 - DNA, 15 bp, Homo sapiens
aagatggtgaaactc

SEQ ID NO: 1443546 - DNA, 15 bp, Homo sapiens
caagatggtgaaact

SEQ ID NO: 1443547 - DNA, 15 bp, Homo sapiens
gctggccaagatggt

SEQ ID NO: 1443548 - DNA, 15 bp, Homo sapiens
ggctggccaagatgg

SEQ ID NO: 1443549 - DNA, 15 bp, Homo sapiens
aggctggccaagatg

SEQ ID NO: 1443550 - DNA, 15 bp, Homo sapiens
caggctggccaagat

SEQ ID NO: 1443551 - DNA, 15 bp, Homo sapiens
tcaggctggccaaga

SEQ ID NO: 1443552 - DNA, 15 bp, Homo sapiens
atcaggctggccaag

SEQ ID NO: 1443553 - DNA, 15 bp, Homo sapiens
gatcaggctggccaa

SEQ ID NO: 1443554 - DNA, 15 bp, Homo sapiens
agatcaggctggcca

SEQ ID NO: 1443555 - DNA, 15 bp, Homo sapiens
aagatcaggctggcc

SEQ ID NO: 1443556 - DNA, 15 bp, Homo sapiens
caagatcaggctggc

SEQ ID NO: 1443557 - DNA, 15 bp, Homo sapiens
tcaagatcaggctgg

SEQ ID NO: 1443558 - DNA, 15 bp, Homo sapiens
ttcaagatcaggctg

SEQ ID NO: 1443559 - DNA, 15 bp, Homo sapiens
gttcaagatcaggct

SEQ ID NO: 1443560 - DNA, 15 bp, Homo sapiens
agttcaagatcaggc

SEQ ID NO: 1443561 - DNA, 15 bp, Homo sapiens
gagttcaagatcagg

SEQ ID NO: 1443562 - DNA, 15 bp, Homo sapiens
ggagttcaagatcag

SEQ ID NO: 1443563 - DNA, 15 bp, Homo sapiens
aggagttcaagatca

SEQ ID NO: 1443564 - DNA, 15 bp, Homo sapiens
caggagttcaagatc

SEQ ID NO: 1443565 - DNA, 15 bp, Homo sapiens
tcaggagttcaagat

SEQ ID NO: 1443566 - DNA, 15 bp, Homo sapiens
aaggtcaggagttca

SEQ ID NO: 1443567 - DNA, 15 bp, Homo sapiens
gtcacaaggtcagga

SEQ ID NO: 1443568 - DNA, 15 bp, Homo sapiens
ggtcacaaggtcagg

SEQ ID NO: 1443569 - DNA, 15 bp, Homo sapiens
gggtcacaaggtcag

SEQ ID NO: 1443570 - DNA, 15 bp, Homo sapiens
tgggtcacaaggtca

SEQ ID NO: 1443571 - DNA, 15 bp, Homo sapiens
gtgggtcacaaggtc

SEQ ID NO: 1443572 - DNA, 15 bp, Homo sapiens
ggtgggtcacaaggt

SEQ ID NO: 1443573 - DNA, 15 bp, Homo sapiens
gggtgggtcacaagg

SEQ ID NO: 1443574 - DNA, 15 bp, Homo sapiens
cgggtgggtcacaag

SEQ ID NO: 1443575 - DNA, 15 bp, Homo sapiens
gcgggtgggtcacaa

SEQ ID NO: 1443576 - DNA, 15 bp, Homo sapiens
ggcgggtgggtcaca

SEQ ID NO: 1443577 - DNA, 15 bp, Homo sapiens
aggcgggtgggtcac

SEQ ID NO: 1443578 - DNA, 15 bp, Homo sapiens
aaggcgggtgggtca

SEQ ID NO: 1443579 - DNA, 15 bp, Homo sapiens
caaggcgggtgggtc

SEQ ID NO: 1443580 - DNA, 15 bp, Homo sapiens
ccaaggcgggtgggt

SEQ ID NO: 1443581 - DNA, 15 bp, Homo sapiens
gccaaggcgggtggg

SEQ ID NO: 1443582 - DNA, 15 bp, Homo sapiens
gggccaaggcgggtg

SEQ ID NO: 1443583 - DNA, 15 bp, Homo sapiens
ggggccaaggcgggt

SEQ ID NO: 1443584 - DNA, 15 bp, Homo sapiens
gggggccaaggcggg

SEQ ID NO: 1443585 - DNA, 15 bp, Homo sapiens
ggggggccaaggcgg

SEQ ID NO: 1443586 - DNA, 15 bp, Homo sapiens
tggggggccaaggcg

SEQ ID NO: 1443587 - DNA, 15 bp, Homo sapiens
ttggggggccaaggc

SEQ ID NO: 1443588 - DNA, 15 bp, Homo sapiens
tttggggggccaagg

SEQ ID NO: 1443589 - DNA, 15 bp, Homo sapiens
ctttggggggccaag

SEQ ID NO: 1443590 - DNA, 15 bp, Homo sapiens
actttggggggccaa

SEQ ID NO: 1443591 - DNA, 15 bp, Homo sapiens
cactttggggggcca

SEQ ID NO: 1443592 - DNA, 15 bp, Homo sapiens
gcactttggggggcc

SEQ ID NO: 1443593 - DNA, 15 bp, Homo sapiens
agcactttggggggc

SEQ ID NO: 1443594 - DNA, 15 bp, Homo sapiens
cagcactttgggggg

SEQ ID NO: 1443595 - DNA, 15 bp, Homo sapiens
ccagcactttggggg

SEQ ID NO: 1443596 - DNA, 15 bp, Homo sapiens
cccagcactttgggg

SEQ ID NO: 1443597 - DNA, 15 bp, Homo sapiens
gtggtggctcacacc

SEQ ID NO: 1443598 - DNA, 15 bp, Homo sapiens
cgtggtggctcacac

SEQ ID NO: 1443599 - DNA, 15 bp, Homo sapiens
gcgtggtggctcaca

SEQ ID NO: 1443600 - DNA, 15 bp, Homo sapiens
ggggcgtggtggctc

SEQ ID NO: 1443601 - DNA, 15 bp, Homo sapiens
cggggcgtggtggct

SEQ ID NO: 1443602 - DNA, 15 bp, Homo sapiens
gcggggcgtggtggc

SEQ ID NO: 1443603 - DNA, 15 bp, Homo sapiens
ggcggggcgtggtgg

SEQ ID NO: 1443604 - DNA, 15 bp, Homo sapiens
cggcggggcgtggtg

SEQ ID NO: 1443605 - DNA, 15 bp, Homo sapiens
acggcggggcgtggt

SEQ ID NO: 1443606 - DNA, 15 bp, Homo sapiens
cacggcggggcgtgg

SEQ ID NO: 1443607 - DNA, 15 bp, Homo sapiens
acacggcggggcgtg

SEQ ID NO: 1443608 - DNA, 15 bp, Homo sapiens
aacacggcggggcgt

SEQ ID NO: 1443609 - DNA, 15 bp, Homo sapiens
aaacacggcggggcg

SEQ ID NO: 1443610 - DNA, 15 bp, Homo sapiens
aaaacacggcggggc

SEQ ID NO: 1443611 - DNA, 15 bp, Homo sapiens
aaaaacacggcgggg

SEQ ID NO: 1443612 - DNA, 15 bp, Homo sapiens
taaaaacacggcggg

SEQ ID NO: 1443613 - DNA, 15 bp, Homo sapiens
ataaaaacacggcgg

SEQ ID NO: 1443614 - DNA, 15 bp, Homo sapiens
aataaaaacacggcg

SEQ ID NO: 1443615 - DNA, 15 bp, Homo sapiens
aaataaaaacacggc

SEQ ID NO: 1443616 - DNA, 15 bp, Homo sapiens
aaaataaaaacacgg

SEQ ID NO: 1443617 - DNA, 15 bp, Homo sapiens
gaaaataaaaacacg

SEQ ID NO: 1443618 - DNA, 15 bp, Homo sapiens
agaaaataaaaacac

SEQ ID NO: 1443619 - DNA, 15 bp, Homo sapiens
tagaaaataaaaaca

SEQ ID NO: 1443620 - DNA, 15 bp, Homo sapiens
ttagaaaataaaaac

SEQ ID NO: 1443621 - DNA, 15 bp, Homo sapiens
gttagaaaataaaaa

SEQ ID NO: 1443622 - DNA, 15 bp, Homo sapiens
agttagaaaataaaa

SEQ ID NO: 1443623 - DNA, 15 bp, Homo sapiens
gagttagaaaataaa

SEQ ID NO: 1443624 - DNA, 15 bp, Homo sapiens
agagttagaaaataa

SEQ ID NO: 1443625 - DNA, 15 bp, Homo sapiens
tagagttagaaaata

SEQ ID NO: 1443626 - DNA, 15 bp, Homo sapiens
ttagagttagaaaat

SEQ ID NO: 1443627 - DNA, 15 bp, Homo sapiens
tttagagttagaaaa

SEQ ID NO: 1443628 - DNA, 15 bp, Homo sapiens
ttttagagttagaaa

SEQ ID NO: 1443629 - DNA, 15 bp, Homo sapiens
gttttagagttagaa

SEQ ID NO: 1443630 - DNA, 15 bp, Homo sapiens
agttttagagttaga

SEQ ID NO: 1443631 - DNA, 15 bp, Homo sapiens
tagttttagagttag

SEQ ID NO: 1443632 - DNA, 15 bp, Homo sapiens
ttagttttagagtta

SEQ ID NO: 1443633 - DNA, 15 bp, Homo sapiens
tttagttttagagtt

SEQ ID NO: 1443634 - DNA, 15 bp, Homo sapiens
atttagttttagagt

SEQ ID NO: 1443635 - DNA, 15 bp, Homo sapiens
catttagttttagag

SEQ ID NO: 1443636 - DNA, 15 bp, Homo sapiens
tcatttagttttaga

SEQ ID NO: 1443637 - DNA, 15 bp, Homo sapiens
ttcatttagttttag

SEQ ID NO: 1443638 - DNA, 15 bp, Homo sapiens
gttcatttagtttta

SEQ ID NO: 1443639 - DNA, 15 bp, Homo sapiens
agttcatttagtttt

SEQ ID NO: 1443640 - DNA, 15 bp, Homo sapiens
tagttcatttagttt

SEQ ID NO: 1443641 - DNA, 15 bp, Homo sapiens
atagttcatttagtt

SEQ ID NO: 1443642 - DNA, 15 bp, Homo sapiens
aatagttcatttagt

SEQ ID NO: 1443643 - DNA, 15 bp, Homo sapiens
aaatagttcatttag

SEQ ID NO: 1443644 - DNA, 15 bp, Homo sapiens
aaaatagttcattta

SEQ ID NO: 1443645 - DNA, 15 bp, Homo sapiens
caaaatagttcattt

SEQ ID NO: 1443646 - DNA, 15 bp, Homo sapiens
tcaaaatagttcatt

SEQ ID NO: 1443647 - DNA, 15 bp, Homo sapiens
ttcaaaatagttcat

SEQ ID NO: 1443648 - DNA, 15 bp, Homo sapiens
cttcaaaatagttca

SEQ ID NO: 1443649 - DNA, 15 bp, Homo sapiens
tcttcaaaatagttc

SEQ ID NO: 1443650 - DNA, 15 bp, Homo sapiens
atcttcaaaatagtt

SEQ ID NO: 1443651 - DNA, 15 bp, Homo sapiens
catcttcaaaatagt

SEQ ID NO: 1443652 - DNA, 15 bp, Homo sapiens
ccatcttcaaaatag

SEQ ID NO: 1443653 - DNA, 15 bp, Homo sapiens
tccatcttcaaaata

SEQ ID NO: 1443654 - DNA, 15 bp, Homo sapiens
ttccatcttcaaaat

SEQ ID NO: 1443655 - DNA, 15 bp, Homo sapiens
attccatcttcaaaa

SEQ ID NO: 1443656 - DNA, 15 bp, Homo sapiens
cattccatcttcaaa

SEQ ID NO: 1443657 - DNA, 15 bp, Homo sapiens
gcattccatcttcaa

SEQ ID NO: 1443658 - DNA, 15 bp, Homo sapiens
ggcattccatcttca

SEQ ID NO: 1443659 - DNA, 15 bp, Homo sapiens
tggcattccatcttc

SEQ ID NO: 1443660 - DNA, 15 bp, Homo sapiens
atggcattccatctt

SEQ ID NO: 1443661 - DNA, 15 bp, Homo sapiens
catggcattccatct

SEQ ID NO: 1443662 - DNA, 15 bp, Homo sapiens
gcatggcattccatc

SEQ ID NO: 1443663 - DNA, 15 bp, Homo sapiens
ggcatggcattccat

SEQ ID NO: 1443664 - DNA, 15 bp, Homo sapiens
cggcatggcattcca

SEQ ID NO: 1443665 - DNA, 15 bp, Homo sapiens
tcggcatggcattcc

SEQ ID NO: 1443666 - DNA, 15 bp, Homo sapiens
ttcggcatggcattc

SEQ ID NO: 1443667 - DNA, 15 bp, Homo sapiens
gttcggcatggcatt

SEQ ID NO: 1443668 - DNA, 15 bp, Homo sapiens
agttcggcatggcat

SEQ ID NO: 1443669 - DNA, 15 bp, Homo sapiens
aagttcggcatggca

SEQ ID NO: 1443670 - DNA, 15 bp, Homo sapiens
aaagttcggcatggc

SEQ ID NO: 1443671 - DNA, 15 bp, Homo sapiens
aaaagttcggcatgg

SEQ ID NO: 1443672 - DNA, 15 bp, Homo sapiens
gaaaagttcggcatg

SEQ ID NO: 1443673 - DNA, 15 bp, Homo sapiens
tgaaaagttcggcat

SEQ ID NO: 1443674 - DNA, 15 bp, Homo sapiens
ctgaaaagttcggca

SEQ ID NO: 1443675 - DNA, 15 bp, Homo sapiens
actgaaaagttcggc

SEQ ID NO: 1443676 - DNA, 15 bp, Homo sapiens
gactgaaaagttcgg

SEQ ID NO: 1443677 - DNA, 15 bp, Homo sapiens
agactgaaaagttcg

SEQ ID NO: 1443678 - DNA, 15 bp, Homo sapiens
aagactgaaaagttc

SEQ ID NO: 1443679 - DNA, 15 bp, Homo sapiens
taagactgaaaagtt

SEQ ID NO: 1443680 - DNA, 15 bp, Homo sapiens
ttaagactgaaaagt

SEQ ID NO: 1443681 - DNA, 15 bp, Homo sapiens
attaagactgaaaag

SEQ ID NO: 1443682 - DNA, 15 bp, Homo sapiens
tattaagactgaaaa

SEQ ID NO: 1443683 - DNA, 15 bp, Homo sapiens
ttattaagactgaaa

SEQ ID NO: 1443684 - DNA, 15 bp, Homo sapiens
attattaagactgaa

SEQ ID NO: 1443685 - DNA, 15 bp, Homo sapiens
tattattaagactga

SEQ ID NO: 1443686 - DNA, 15 bp, Homo sapiens
atattattaagactg

SEQ ID NO: 1443687 - DNA, 15 bp, Homo sapiens
tatattattaagact

SEQ ID NO: 1443688 - DNA, 15 bp, Homo sapiens
ttatattattaagac

SEQ ID NO: 1443689 - DNA, 15 bp, Homo sapiens
gttatattattaaga

SEQ ID NO: 1443690 - DNA, 15 bp, Homo sapiens
ggttatattattaag

SEQ ID NO: 1443691 - DNA, 15 bp, Homo sapiens
tggttatattattaa

SEQ ID NO: 1443692 - DNA, 15 bp, Homo sapiens
ttggttatattatta

SEQ ID NO: 1443693 - DNA, 15 bp, Homo sapiens
gttggttatattatt

SEQ ID NO: 1443694 - DNA, 15 bp, Homo sapiens
ggttggttatattat

SEQ ID NO: 1443695 - DNA, 15 bp, Homo sapiens
aggttggttatatta

SEQ ID NO: 1443696 - DNA, 15 bp, Homo sapiens
aaggttggttatatt

SEQ ID NO: 1443697 - DNA, 15 bp, Homo sapiens
taaggttggttatat

SEQ ID NO: 1443698 - DNA, 15 bp, Homo sapiens
ctaaggttggttata

SEQ ID NO: 1443699 - DNA, 15 bp, Homo sapiens
gctaaggttggttat

SEQ ID NO: 1443700 - DNA, 15 bp, Homo sapiens
tgctaaggttggtta

SEQ ID NO: 1443701 - DNA, 15 bp, Homo sapiens
ctgctaaggttggtt

SEQ ID NO: 1443702 - DNA, 15 bp, Homo sapiens
actgctaaggttggt

SEQ ID NO: 1443703 - DNA, 15 bp, Homo sapiens
gactgctaaggttgg

SEQ ID NO: 1443704 - DNA, 15 bp, Homo sapiens
agactgctaaggttg

SEQ ID NO: 1443705 - DNA, 15 bp, Homo sapiens
cagactgctaaggtt

SEQ ID NO: 1443706 - DNA, 15 bp, Homo sapiens
gcagactgctaaggt

SEQ ID NO: 1443707 - DNA, 15 bp, Homo sapiens
ggcagactgctaagg

SEQ ID NO: 1443708 - DNA, 15 bp, Homo sapiens
aggcagactgctaag

SEQ ID NO: 1443709 - DNA, 15 bp, Homo sapiens
caggcagactgctaa

SEQ ID NO: 1443710 - DNA, 15 bp, Homo sapiens
tcaggcagactgcta

SEQ ID NO: 1443711 - DNA, 15 bp, Homo sapiens
ttcaggcagactgct

SEQ ID NO: 1443712 - DNA, 15 bp, Homo sapiens
attcaggcagactgc

SEQ ID NO: 1443713 - DNA, 15 bp, Homo sapiens
cattcaggcagactg

SEQ ID NO: 1443714 - DNA, 15 bp, Homo sapiens
gcattcaggcagact

SEQ ID NO: 1443715 - DNA, 15 bp, Homo sapiens
tgcattcaggcagac

SEQ ID NO: 1443716 - DNA, 15 bp, Homo sapiens
ctgcattcaggcaga

SEQ ID NO: 1443717 - DNA, 15 bp, Homo sapiens
tctgcattcaggcag

SEQ ID NO: 1443718 - DNA, 15 bp, Homo sapiens
ttctgcattcaggca

SEQ ID NO: 1443719 - DNA, 15 bp, Homo sapiens
cttctgcattcaggc

SEQ ID NO: 1443720 - DNA, 15 bp, Homo sapiens
acttctgcattcagg

SEQ ID NO: 1443721 - DNA, 15 bp, Homo sapiens
aacttctgcattcag

SEQ ID NO: 1443722 - DNA, 15 bp, Homo sapiens
taacttctgcattca

SEQ ID NO: 1443723 - DNA, 15 bp, Homo sapiens
ttaacttctgcattc

SEQ ID NO: 1443724 - DNA, 15 bp, Homo sapiens
cttaacttctgcatt

SEQ ID NO: 1443725 - DNA, 15 bp, Homo sapiens
acttaacttctgcat

SEQ ID NO: 1443726 - DNA, 15 bp, Homo sapiens
cacttaacttctgca

SEQ ID NO: 1443727 - DNA, 15 bp, Homo sapiens
tcacttaacttctgc

SEQ ID NO: 1443728 - DNA, 15 bp, Homo sapiens
ttcacttaacttctg

SEQ ID NO: 1443729 - DNA, 15 bp, Homo sapiens
attcacttaacttct

SEQ ID NO: 1443730 - DNA, 15 bp, Homo sapiens
tattcacttaacttc

SEQ ID NO: 1443731 - DNA, 15 bp, Homo sapiens
atattcacttaactt

SEQ ID NO: 1443732 - DNA, 15 bp, Homo sapiens
aatattcacttaact

SEQ ID NO: 1443733 - DNA, 15 bp, Homo sapiens
taatattcacttaac

SEQ ID NO: 1443734 - DNA, 15 bp, Homo sapiens
ataatattcacttaa

SEQ ID NO: 1443735 - DNA, 15 bp, Homo sapiens
aataatattcactta

SEQ ID NO: 1443736 - DNA, 15 bp, Homo sapiens
taataatattcactt

SEQ ID NO: 1443737 - DNA, 15 bp, Homo sapiens
ttaataatattcact

SEQ ID NO: 1443738 - DNA, 15 bp, Homo sapiens
tttaataatattcac

SEQ ID NO: 1443739 - DNA, 15 bp, Homo sapiens
atttaataatattca

SEQ ID NO: 1443740 - DNA, 15 bp, Homo sapiens
aatttaataatattc

SEQ ID NO: 1443741 - DNA, 15 bp, Homo sapiens
gaatttaataatatt

SEQ ID NO: 1443742 - DNA, 15 bp, Homo sapiens
ggaatttaataatat

SEQ ID NO: 1443743 - DNA, 15 bp, Homo sapiens
tggaatttaataata

SEQ ID NO: 1443744 - DNA, 15 bp, Homo sapiens
ttggaatttaataat

SEQ ID NO: 1443745 - DNA, 15 bp, Homo sapiens
tttggaatttaataa

SEQ ID NO: 1443746 - DNA, 15 bp, Homo sapiens
ttttggaatttaata

SEQ ID NO: 1443747 - DNA, 15 bp, Homo sapiens
tttttggaatttaat

SEQ ID NO: 1443748 - DNA, 15 bp, Homo sapiens
atttttggaatttaa

SEQ ID NO: 1443749 - DNA, 15 bp, Homo sapiens
gatttttggaattta

SEQ ID NO: 1443750 - DNA, 15 bp, Homo sapiens
ggatttttggaattt

SEQ ID NO: 1443751 - DNA, 15 bp, Homo sapiens
tggatttttggaatt

SEQ ID NO: 1443752 - DNA, 15 bp, Homo sapiens
ctggatttttggaat

SEQ ID NO: 1443753 - DNA, 15 bp, Homo sapiens
tctggatttttggaa

SEQ ID NO: 1443754 - DNA, 15 bp, Homo sapiens
atctggatttttgga

SEQ ID NO: 1443755 - DNA, 15 bp, Homo sapiens
tatctggatttttgg

SEQ ID NO: 1443756 - DNA, 15 bp, Homo sapiens
atatctggatttttg

SEQ ID NO: 1443757 - DNA, 15 bp, Homo sapiens
gatatctggattttt

SEQ ID NO: 1443758 - DNA, 15 bp, Homo sapiens
tgatatctggatttt

SEQ ID NO: 1443759 - DNA, 15 bp, Homo sapiens
atgatatctggattt

SEQ ID NO: 1443760 - DNA, 15 bp, Homo sapiens
tatgatatctggatt

SEQ ID NO: 1443761 - DNA, 15 bp, Homo sapiens
atatgatatctggat

SEQ ID NO: 1443762 - DNA, 15 bp, Homo sapiens
gatatgatatctgga

SEQ ID NO: 1443763 - DNA, 15 bp, Homo sapiens
tgatatgatatctgg

SEQ ID NO: 1443764 - DNA, 15 bp, Homo sapiens
ttgatatgatatctg

SEQ ID NO: 1443765 - DNA, 15 bp, Homo sapiens
gttgatatgatatct

SEQ ID NO: 1443766 - DNA, 15 bp, Homo sapiens
tgttgatatgatatc

SEQ ID NO: 1443767 - DNA, 15 bp, Homo sapiens
atgttgatatgatat

SEQ ID NO: 1443768 - DNA, 15 bp, Homo sapiens
tatgttgatatgata

SEQ ID NO: 1443769 - DNA, 15 bp, Homo sapiens
atatgttgatatgat

SEQ ID NO: 1443770 - DNA, 15 bp, Homo sapiens
catatgttgatatga

SEQ ID NO: 1443771 - DNA, 15 bp, Homo sapiens
tcatatgttgatatg

SEQ ID NO: 1443772 - DNA, 15 bp, Homo sapiens
atcatatgttgatat

SEQ ID NO: 1443773 - DNA, 15 bp, Homo sapiens
tatcatatgttgata

SEQ ID NO: 1443774 - DNA, 15 bp, Homo sapiens
ctatcatatgttgat

SEQ ID NO: 1443775 - DNA, 15 bp, Homo sapiens
actatcatatgttga

SEQ ID NO: 1443776 - DNA, 15 bp, Homo sapiens
tactatcatatgttg

SEQ ID NO: 1443777 - DNA, 15 bp, Homo sapiens
ttactatcatatgtt

SEQ ID NO: 1443778 - DNA, 15 bp, Homo sapiens
tttactatcatatgt

SEQ ID NO: 1443779 - DNA, 15 bp, Homo sapiens
atttactatcatatg

SEQ ID NO: 1443780 - DNA, 15 bp, Homo sapiens
aatttactatcatat

SEQ ID NO: 1443781 - DNA, 15 bp, Homo sapiens
gaatttactatcata

SEQ ID NO: 1443782 - DNA, 15 bp, Homo sapiens
agaatttactatcat

SEQ ID NO: 1443783 - DNA, 15 bp, Homo sapiens
tagaatttactatca

SEQ ID NO: 1443784 - DNA, 15 bp, Homo sapiens
ttagaatttactatc

SEQ ID NO: 1443785 - DNA, 15 bp, Homo sapiens
gttagaatttactat

SEQ ID NO: 1443786 - DNA, 15 bp, Homo sapiens
agttagaatttacta

SEQ ID NO: 1443787 - DNA, 15 bp, Homo sapiens
tagttagaatttact

SEQ ID NO: 1443788 - DNA, 15 bp, Homo sapiens
ttagttagaatttac

SEQ ID NO: 1443789 - DNA, 15 bp, Homo sapiens
tttagttagaattta

SEQ ID NO: 1443790 - DNA, 15 bp, Homo sapiens
ttttagttagaattt

SEQ ID NO: 1443791 - DNA, 15 bp, Homo sapiens
tttttagttagaatt

SEQ ID NO: 1443792 - DNA, 15 bp, Homo sapiens
ttttttagttagaat

SEQ ID NO: 1443793 - DNA, 15 bp, Homo sapiens
tttttttagttagaa

SEQ ID NO: 1443794 - DNA, 15 bp, Homo sapiens
gtttttttagttaga

SEQ ID NO: 1443795 - DNA, 15 bp, Homo sapiens
agtttttttagttag

SEQ ID NO: 1443796 - DNA, 15 bp, Homo sapiens
tagtttttttagtta

SEQ ID NO: 1443797 - DNA, 15 bp, Homo sapiens
atagtttttttagtt

SEQ ID NO: 1443798 - DNA, 15 bp, Homo sapiens
catagtttttttagt

SEQ ID NO: 1443799 - DNA, 15 bp, Homo sapiens
gcatagtttttttag

SEQ ID NO: 1443800 - DNA, 15 bp, Homo sapiens
tgcatagttttttta

SEQ ID NO: 1443801 - DNA, 15 bp, Homo sapiens
atgcatagttttttt

SEQ ID NO: 1443802 - DNA, 15 bp, Homo sapiens
aatgcatagtttttt

SEQ ID NO: 1443803 - DNA, 15 bp, Homo sapiens
caatgcatagttttt

SEQ ID NO: 1443804 - DNA, 15 bp, Homo sapiens
ccaatgcatagtttt

SEQ ID NO: 1443805 - DNA, 15 bp, Homo sapiens
tccaatgcatagttt

SEQ ID NO: 1443806 - DNA, 15 bp, Homo sapiens
ctccaatgcatagtt

SEQ ID NO: 1443807 - DNA, 15 bp, Homo sapiens
gctccaatgcatagt

SEQ ID NO: 1443808 - DNA, 15 bp, Homo sapiens
cgctccaatgcatag

SEQ ID NO: 1443809 - DNA, 15 bp, Homo sapiens
acgctccaatgcata

SEQ ID NO: 1443810 - DNA, 15 bp, Homo sapiens
cacgctccaatgcat

SEQ ID NO: 1443811 - DNA, 15 bp, Homo sapiens
ccacgctccaatgca

SEQ ID NO: 1443812 - DNA, 15 bp, Homo sapiens
cccacgctccaatgc

SEQ ID NO: 1443813 - DNA, 15 bp, Homo sapiens
acccacgctccaatg

SEQ ID NO: 1443814 - DNA, 15 bp, Homo sapiens
cacccacgctccaat

SEQ ID NO: 1443815 - DNA, 15 bp, Homo sapiens
acacccacgctccaa

SEQ ID NO: 1443816 - DNA, 15 bp, Homo sapiens
tacacccacgctcca

SEQ ID NO: 1443817 - DNA, 15 bp, Homo sapiens
atacacccacgctcc

SEQ ID NO: 1443818 - DNA, 15 bp, Homo sapiens
aatacacccacgctc

SEQ ID NO: 1443819 - DNA, 15 bp, Homo sapiens
gaatacacccacgct

SEQ ID NO: 1443820 - DNA, 15 bp, Homo sapiens
agaatacacccacgc

SEQ ID NO: 1443821 - DNA, 15 bp, Homo sapiens
gagaatacacccacg

SEQ ID NO: 1443822 - DNA, 15 bp, Homo sapiens
agagaatacacccac

SEQ ID NO: 1443823 - DNA, 15 bp, Homo sapiens
cagagaatacaccca

SEQ ID NO: 1443824 - DNA, 15 bp, Homo sapiens
ccagagaatacaccc

SEQ ID NO: 1443825 - DNA, 15 bp, Homo sapiens
cccagagaatacacc

SEQ ID NO: 1443826 - DNA, 15 bp, Homo sapiens
tcccagagaatacac

SEQ ID NO: 1443827 - DNA, 15 bp, Homo sapiens
ctcccagagaataca

SEQ ID NO: 1443828 - DNA, 15 bp, Homo sapiens
cctcccagagaatac

SEQ ID NO: 1443829 - DNA, 15 bp, Homo sapiens
acctcccagagaata

SEQ ID NO: 1443830 - DNA, 15 bp, Homo sapiens
tacctcccagagaat

SEQ ID NO: 1443831 - DNA, 15 bp, Homo sapiens
ctacctcccagagaa

SEQ ID NO: 1443832 - DNA, 15 bp, Homo sapiens
actacctcccagaga

SEQ ID NO: 1443833 - DNA, 15 bp, Homo sapiens
cactacctcccagag

SEQ ID NO: 1443834 - DNA, 15 bp, Homo sapiens
tcactacctcccaga

SEQ ID NO: 1443835 - DNA, 15 bp, Homo sapiens
ctcactacctcccag

SEQ ID NO: 1443836 - DNA, 15 bp, Homo sapiens
gctcactacctccca

SEQ ID NO: 1443837 - DNA, 15 bp, Homo sapiens
tgctcactacctccc

SEQ ID NO: 1443838 - DNA, 15 bp, Homo sapiens
ttgctcactacctcc

SEQ ID NO: 1443839 - DNA, 15 bp, Homo sapiens
gttgctcactacctc

SEQ ID NO: 1443840 - DNA, 15 bp, Homo sapiens
agttgctcactacct

SEQ ID NO: 1443841 - DNA, 15 bp, Homo sapiens
aagttgctcactacc

SEQ ID NO: 1443842 - DNA, 15 bp, Homo sapiens
aaagttgctcactac

SEQ ID NO: 1443843 - DNA, 15 bp, Homo sapiens
aaaagttgctcacta

SEQ ID NO: 1443844 - DNA, 15 bp, Homo sapiens
aaaaagttgctcact

SEQ ID NO: 1443845 - DNA, 15 bp, Homo sapiens
taaaaagttgctcac

SEQ ID NO: 1443846 - DNA, 15 bp, Homo sapiens
gtaaaaagttgctca

SEQ ID NO: 1443847 - DNA, 15 bp, Homo sapiens
tgtaaaaagttgctc

SEQ ID NO: 1443848 - DNA, 15 bp, Homo sapiens
ctgtaaaaagttgct

SEQ ID NO: 1443849 - DNA, 15 bp, Homo sapiens
tctgtaaaaagttgc

SEQ ID NO: 1443850 - DNA, 15 bp, Homo sapiens
aagtacaaaggagaa

SEQ ID NO: 1443851 - DNA, 15 bp, Homo sapiens
aaagtacaaaggaga

SEQ ID NO: 1443852 - DNA, 15 bp, Homo sapiens
caaagtacaaaggag

SEQ ID NO: 1443853 - DNA, 15 bp, Homo sapiens
acaaagtacaaagga

SEQ ID NO: 1443854 - DNA, 15 bp, Homo sapiens
tacaaagtacaaagg

SEQ ID NO: 1443855 - DNA, 15 bp, Homo sapiens
ttacaaagtacaaag

SEQ ID NO: 1443856 - DNA, 15 bp, Homo sapiens
gttacaaagtacaaa

SEQ ID NO: 1443857 - DNA, 15 bp, Homo sapiens
ggttacaaagtacaa

SEQ ID NO: 1443858 - DNA, 15 bp, Homo sapiens
aggttacaaagtaca

SEQ ID NO: 1443859 - DNA, 15 bp, Homo sapiens
taggttacaaagtac

SEQ ID NO: 1443860 - DNA, 15 bp, Homo sapiens
ataggttacaaagta

SEQ ID NO: 1443861 - DNA, 15 bp, Homo sapiens
cataggttacaaagt

SEQ ID NO: 1443862 - DNA, 15 bp, Homo sapiens
acataggttacaaag

SEQ ID NO: 1443863 - DNA, 15 bp, Homo sapiens
gacataggttacaaa

SEQ ID NO: 1443864 - DNA, 15 bp, Homo sapiens
tgacataggttacaa

SEQ ID NO: 1443865 - DNA, 15 bp, Homo sapiens
gtgacataggttaca

SEQ ID NO: 1443866 - DNA, 15 bp, Homo sapiens
ggtgacataggttac

SEQ ID NO: 1443867 - DNA, 15 bp, Homo sapiens
tggtgacataggtta

SEQ ID NO: 1443868 - DNA, 15 bp, Homo sapiens
atggtgacataggtt

SEQ ID NO: 1443869 - DNA, 15 bp, Homo sapiens
gatggtgacataggt

SEQ ID NO: 1443870 - DNA, 15 bp, Homo sapiens
tgatggtgacatagg

SEQ ID NO: 1443871 - DNA, 15 bp, Homo sapiens
atgatggtgacatag

SEQ ID NO: 1443872 - DNA, 15 bp, Homo sapiens
catgatggtgacata

SEQ ID NO: 1443873 - DNA, 15 bp, Homo sapiens
acatgatggtgacat

SEQ ID NO: 1443874 - DNA, 15 bp, Homo sapiens
tacatgatggtgaca

SEQ ID NO: 1443875 - DNA, 15 bp, Homo sapiens
atacatgatggtgac

SEQ ID NO: 1443876 - DNA, 15 bp, Homo sapiens
aatacatgatggtga

SEQ ID NO: 1443877 - DNA, 15 bp, Homo sapiens
aaatacatgatggtg

SEQ ID NO: 1443878 - DNA, 15 bp, Homo sapiens
aaaatacatgatggt

SEQ ID NO: 1443879 - DNA, 15 bp, Homo sapiens
aaaaatacatgatgg

SEQ ID NO: 1443880 - DNA, 15 bp, Homo sapiens
caaaaatacatgatg

SEQ ID NO: 1443881 - DNA, 15 bp, Homo sapiens
acaaaaatacatgat

SEQ ID NO: 1443882 - DNA, 15 bp, Homo sapiens
aacaaaaatacatga

SEQ ID NO: 1443883 - DNA, 15 bp, Homo sapiens
aaacaaaaatacatg

SEQ ID NO: 1443884 - DNA, 15 bp, Homo sapiens
caaacaaaaatacat

SEQ ID NO: 1443885 - DNA, 15 bp, Homo sapiens
acaaacaaaaataca

SEQ ID NO: 1443886 - DNA, 15 bp, Homo sapiens
aacaaacaaaaatac

SEQ ID NO: 1443887 - DNA, 15 bp, Homo sapiens
aaacaaacaaaaata

SEQ ID NO: 1443888 - DNA, 15 bp, Homo sapiens
aaaacaaacaaaaat

SEQ ID NO: 1443889 - DNA, 15 bp, Homo sapiens
ctaaaaacaaacaaa

SEQ ID NO: 1443890 - DNA, 15 bp, Homo sapiens
tctaaaaacaaacaa

SEQ ID NO: 1443891 - DNA, 15 bp, Homo sapiens
gtctaaaaacaaaca

SEQ ID NO: 1443892 - DNA, 15 bp, Homo sapiens
tgtctaaaaacaaac

SEQ ID NO: 1443893 - DNA, 15 bp, Homo sapiens
ctgtctaaaaacaaa

SEQ ID NO: 1443894 - DNA, 15 bp, Homo sapiens
tctgtctaaaaacaa

SEQ ID NO: 1443895 - DNA, 15 bp, Homo sapiens
ctctgtctaaaaaca

SEQ ID NO: 1443896 - DNA, 15 bp, Homo sapiens
actctgtctaaaaac

SEQ ID NO: 1443897 - DNA, 15 bp, Homo sapiens
tgagactctgtctaa

SEQ ID NO: 1443898 - DNA, 15 bp, Homo sapiens
gtgagactctgtcta

SEQ ID NO: 1443899 - DNA, 15 bp, Homo sapiens
cgtcactgcactcca

SEQ ID NO: 1443900 - DNA, 15 bp, Homo sapiens
tcgtcactgcactcc

SEQ ID NO: 1443901 - DNA, 15 bp, Homo sapiens
ctcgtcactgcactc

SEQ ID NO: 1443902 - DNA, 15 bp, Homo sapiens
tctcgtcactgcact

SEQ ID NO: 1443903 - DNA, 15 bp, Homo sapiens
atctcgtcactgcac

SEQ ID NO: 1443904 - DNA, 15 bp, Homo sapiens
gatctcgtcactgca

SEQ ID NO: 1443905 - DNA, 15 bp, Homo sapiens
agatctcgtcactgc

SEQ ID NO: 1443906 - DNA, 15 bp, Homo sapiens
aagatctcgtcactg

SEQ ID NO: 1443907 - DNA, 15 bp, Homo sapiens
caagatctcgtcact

SEQ ID NO: 1443908 - DNA, 15 bp, Homo sapiens
ccaagatctcgtcac

SEQ ID NO: 1443909 - DNA, 15 bp, Homo sapiens
gccaagatctcgtca

SEQ ID NO: 1443910 - DNA, 15 bp, Homo sapiens
agccaagatctcgtc

SEQ ID NO: 1443911 - DNA, 15 bp, Homo sapiens
gagccaagatctcgt

SEQ ID NO: 1443912 - DNA, 15 bp, Homo sapiens
tgagccaagatctcg

SEQ ID NO: 1443913 - DNA, 15 bp, Homo sapiens
gtgagccaagatctc

SEQ ID NO: 1443914 - DNA, 15 bp, Homo sapiens
agtgagccaagatct

SEQ ID NO: 1443915 - DNA, 15 bp, Homo sapiens
gcaggctgcagtgag

SEQ ID NO: 1443916 - DNA, 15 bp, Homo sapiens
tgcaggctgcagtga

SEQ ID NO: 1443917 - DNA, 15 bp, Homo sapiens
gtgcaggctgcagtg

SEQ ID NO: 1443918 - DNA, 15 bp, Homo sapiens
ggtgcaggctgcagt

SEQ ID NO: 1443919 - DNA, 15 bp, Homo sapiens
aggtgcaggctgcag

SEQ ID NO: 1443920 - DNA, 15 bp, Homo sapiens
gaggtgcaggctgca

SEQ ID NO: 1443921 - DNA, 15 bp, Homo sapiens
ggaggtgcaggctgc

SEQ ID NO: 1443922 - DNA, 15 bp, Homo sapiens
gggaggtgcaggctg

SEQ ID NO: 1443923 - DNA, 15 bp, Homo sapiens
tgggaggtgcaggct

SEQ ID NO: 1443924 - DNA, 15 bp, Homo sapiens
ctgggaggtgcaggc

SEQ ID NO: 1443925 - DNA, 15 bp, Homo sapiens
cctgggaggtgcagg

SEQ ID NO: 1443926 - DNA, 15 bp, Homo sapiens
acctgggaggtgcag

SEQ ID NO: 1443927 - DNA, 15 bp, Homo sapiens
gacctgggaggtgca

SEQ ID NO: 1443928 - DNA, 15 bp, Homo sapiens
ggacctgggaggtgc

SEQ ID NO: 1443929 - DNA, 15 bp, Homo sapiens
tggacctgggaggtg

SEQ ID NO: 1443930 - DNA, 15 bp, Homo sapiens
ttggacctgggaggt

SEQ ID NO: 1443931 - DNA, 15 bp, Homo sapiens
cttggacctgggagg

SEQ ID NO: 1443932 - DNA, 15 bp, Homo sapiens
acttggacctgggag

SEQ ID NO: 1443933 - DNA, 15 bp, Homo sapiens
cacttggacctggga

SEQ ID NO: 1443934 - DNA, 15 bp, Homo sapiens
tcacttggacctggg

SEQ ID NO: 1443935 - DNA, 15 bp, Homo sapiens
atcacttggacctgg

SEQ ID NO: 1443936 - DNA, 15 bp, Homo sapiens
aatcacttggacctg

SEQ ID NO: 1443937 - DNA, 15 bp, Homo sapiens
gaatcacttggacct

SEQ ID NO: 1443938 - DNA, 15 bp, Homo sapiens
agaatcacttggacc

SEQ ID NO: 1443939 - DNA, 15 bp, Homo sapiens
aagaatcacttggac

SEQ ID NO: 1443940 - DNA, 15 bp, Homo sapiens
caagaatcacttgga

SEQ ID NO: 1443941 - DNA, 15 bp, Homo sapiens
acaagaatcacttgg

SEQ ID NO: 1443942 - DNA, 15 bp, Homo sapiens
gggaggctgaggcac

SEQ ID NO: 1443943 - DNA, 15 bp, Homo sapiens
ctgtggtggtgtgtg

SEQ ID NO: 1443944 - DNA, 15 bp, Homo sapiens
gctgtggtggtgtgt

SEQ ID NO: 1443945 - DNA, 15 bp, Homo sapiens
agctgtggtggtgtg

SEQ ID NO: 1443946 - DNA, 15 bp, Homo sapiens
cagctgtggtggtgt

SEQ ID NO: 1443947 - DNA, 15 bp, Homo sapiens
ccagctgtggtggtg

SEQ ID NO: 1443948 - DNA, 15 bp, Homo sapiens
gccagctgtggtggt

SEQ ID NO: 1443949 - DNA, 15 bp, Homo sapiens
agccagctgtggtgg

SEQ ID NO: 1443950 - DNA, 15 bp, Homo sapiens
tagccagctgtggtg

SEQ ID NO: 1443951 - DNA, 15 bp, Homo sapiens
ttagccagctgtggt

SEQ ID NO: 1443952 - DNA, 15 bp, Homo sapiens
attagccagctgtgg

SEQ ID NO: 1443953 - DNA, 15 bp, Homo sapiens
aattagccagctgtg

SEQ ID NO: 1443954 - DNA, 15 bp, Homo sapiens
gaattagccagctgt

SEQ ID NO: 1443955 - DNA, 15 bp, Homo sapiens
cgaattagccagctg

SEQ ID NO: 1443956 - DNA, 15 bp, Homo sapiens
acgaattagccagct

SEQ ID NO: 1443957 - DNA, 15 bp, Homo sapiens
cacgaattagccagc

SEQ ID NO: 1443958 - DNA, 15 bp, Homo sapiens
acacgaattagccag

SEQ ID NO: 1443959 - DNA, 15 bp, Homo sapiens
tacacgaattagcca

SEQ ID NO: 1443960 - DNA, 15 bp, Homo sapiens
atacacgaattagcc

SEQ ID NO: 1443961 - DNA, 15 bp, Homo sapiens
aatacacgaattagc

SEQ ID NO: 1443962 - DNA, 15 bp, Homo sapiens
aaatacacgaattag

SEQ ID NO: 1443963 - DNA, 15 bp, Homo sapiens
aaaatacacgaatta

SEQ ID NO: 1443964 - DNA, 15 bp, Homo sapiens
aaaaatacacgaatt

SEQ ID NO: 1443965 - DNA, 15 bp, Homo sapiens
taaaaatacacgaat

SEQ ID NO: 1443966 - DNA, 15 bp, Homo sapiens
ctaaaaatacacgaa

SEQ ID NO: 1443967 - DNA, 15 bp, Homo sapiens
actaaaaatacacga

SEQ ID NO: 1443968 - DNA, 15 bp, Homo sapiens
tactaaaaatacacg

SEQ ID NO: 1443969 - DNA, 15 bp, Homo sapiens
tcaacatggtgaaac

SEQ ID NO: 1443970 - DNA, 15 bp, Homo sapiens
gtcaacatggtgaaa

SEQ ID NO: 1443971 - DNA, 15 bp, Homo sapiens
ggtcaacatggtgaa

SEQ ID NO: 1443972 - DNA, 15 bp, Homo sapiens
tggtcaacatggtga

SEQ ID NO: 1443973 - DNA, 15 bp, Homo sapiens
ctggtcaacatggtg

SEQ ID NO: 1443974 - DNA, 15 bp, Homo sapiens
cctggtcaacatggt

SEQ ID NO: 1443975 - DNA, 15 bp, Homo sapiens
gcctggtcaacatgg

SEQ ID NO: 1443976 - DNA, 15 bp, Homo sapiens
agcctggtcaacatg

SEQ ID NO: 1443977 - DNA, 15 bp, Homo sapiens
cagcctggtcaacat

SEQ ID NO: 1443978 - DNA, 15 bp, Homo sapiens
taccagcctggtcaa

SEQ ID NO: 1443979 - DNA, 15 bp, Homo sapiens
ataccagcctggtca

SEQ ID NO: 1443980 - DNA, 15 bp, Homo sapiens
gataccagcctggtc

SEQ ID NO: 1443981 - DNA, 15 bp, Homo sapiens
agataccagcctggt

SEQ ID NO: 1443982 - DNA, 15 bp, Homo sapiens
tagataccagcctgg

SEQ ID NO: 1443983 - DNA, 15 bp, Homo sapiens
ttagataccagcctg

SEQ ID NO: 1443984 - DNA, 15 bp, Homo sapiens
gttagataccagcct

SEQ ID NO: 1443985 - DNA, 15 bp, Homo sapiens
agttagataccagcc

SEQ ID NO: 1443986 - DNA, 15 bp, Homo sapiens
gagttagataccagc

SEQ ID NO: 1443987 - DNA, 15 bp, Homo sapiens
ggagttagataccag

SEQ ID NO: 1443988 - DNA, 15 bp, Homo sapiens
aggagttagatacca

SEQ ID NO: 1443989 - DNA, 15 bp, Homo sapiens
caggagttagatacc

SEQ ID NO: 1443990 - DNA, 15 bp, Homo sapiens
tcaggagttagatac

SEQ ID NO: 1443991 - DNA, 15 bp, Homo sapiens
gtcaggagttagata

SEQ ID NO: 1443992 - DNA, 15 bp, Homo sapiens
ggtcaggagttagat

SEQ ID NO: 1443993 - DNA, 15 bp, Homo sapiens
ttcagcactttggga

SEQ ID NO: 1443994 - DNA, 15 bp, Homo sapiens
tttcagcactttggg

SEQ ID NO: 1443995 - DNA, 15 bp, Homo sapiens
atttcagcactttgg

SEQ ID NO: 1443996 - DNA, 15 bp, Homo sapiens
aatttcagcactttg

SEQ ID NO: 1443997 - DNA, 15 bp, Homo sapiens
taatttcagcacttt

SEQ ID NO: 1443998 - DNA, 15 bp, Homo sapiens
gtaatttcagcactt

SEQ ID NO: 1443999 - DNA, 15 bp, Homo sapiens
tgtaatttcagcact

SEQ ID NO: 1444000 - DNA, 15 bp, Homo sapiens
ctgtaatttcagcac

SEQ ID NO: 1444001 - DNA, 15 bp, Homo sapiens
cctgtaatttcagca

SEQ ID NO: 1444002 - DNA, 15 bp, Homo sapiens
cgcctgtaatttcag

SEQ ID NO: 1444003 - DNA, 15 bp, Homo sapiens
acgcctgtaatttca

SEQ ID NO: 1444004 - DNA, 15 bp, Homo sapiens
cacgcctgtaatttc

SEQ ID NO: 1444005 - DNA, 15 bp, Homo sapiens
tcacgcctgtaattt

SEQ ID NO: 1444006 - DNA, 15 bp, Homo sapiens
acacagtggctcacg

SEQ ID NO: 1444007 - DNA, 15 bp, Homo sapiens
gacacagtggctcac

SEQ ID NO: 1444008 - DNA, 15 bp, Homo sapiens
ggacacagtggctca

SEQ ID NO: 1444009 - DNA, 15 bp, Homo sapiens
tggacacagtggctc

SEQ ID NO: 1444010 - DNA, 15 bp, Homo sapiens
ttggacacagtggct

SEQ ID NO: 1444011 - DNA, 15 bp, Homo sapiens
gttggacacagtggc

SEQ ID NO: 1444012 - DNA, 15 bp, Homo sapiens
tgttggacacagtgg

SEQ ID NO: 1444013 - DNA, 15 bp, Homo sapiens
gtgttggacacagtg

SEQ ID NO: 1444014 - DNA, 15 bp, Homo sapiens
tgtgttggacacagt

SEQ ID NO: 1444015 - DNA, 15 bp, Homo sapiens
atgtgttggacacag

SEQ ID NO: 1444016 - DNA, 15 bp, Homo sapiens
gatgtgttggacaca

SEQ ID NO: 1444017 - DNA, 15 bp, Homo sapiens
tgatgtgttggacac

SEQ ID NO: 1444018 - DNA, 15 bp, Homo sapiens
atgatgtgttggaca

SEQ ID NO: 1444019 - DNA, 15 bp, Homo sapiens
catgatgtgttggac

SEQ ID NO: 1444020 - DNA, 15 bp, Homo sapiens
acatgatgtgttgga

SEQ ID NO: 1444021 - DNA, 15 bp, Homo sapiens
aacatgatgtgttgg

SEQ ID NO: 1444022 - DNA, 15 bp, Homo sapiens
caacatgatgtgttg

SEQ ID NO: 1444023 - DNA, 15 bp, Homo sapiens
tcaacatgatgtgtt

SEQ ID NO: 1444024 - DNA, 15 bp, Homo sapiens
atcaacatgatgtgt

SEQ ID NO: 1444025 - DNA, 15 bp, Homo sapiens
aatcaacatgatgtg

SEQ ID NO: 1444026 - DNA, 15 bp, Homo sapiens
aaatcaacatgatgt

SEQ ID NO: 1444027 - DNA, 15 bp, Homo sapiens
aaaatcaacatgatg

SEQ ID NO: 1444028 - DNA, 15 bp, Homo sapiens
aaaaatcaacatgat

SEQ ID NO: 1444029 - DNA, 15 bp, Homo sapiens
taaaaatcaacatga

SEQ ID NO: 1444030 - DNA, 15 bp, Homo sapiens
gtaaaaatcaacatg

SEQ ID NO: 1444031 - DNA, 15 bp, Homo sapiens
ggtaaaaatcaacat

SEQ ID NO: 1444032 - DNA, 15 bp, Homo sapiens
aggtaaaaatcaaca

SEQ ID NO: 1444033 - DNA, 15 bp, Homo sapiens
caggtaaaaatcaac

SEQ ID NO: 1444034 - DNA, 15 bp, Homo sapiens
acaggtaaaaatcaa

SEQ ID NO: 1444035 - DNA, 15 bp, Homo sapiens
tacaggtaaaaatca

SEQ ID NO: 1444036 - DNA, 15 bp, Homo sapiens
atacaggtaaaaatc

SEQ ID NO: 1444037 - DNA, 15 bp, Homo sapiens
gatacaggtaaaaat

SEQ ID NO: 1444038 - DNA, 15 bp, Homo sapiens
tgatacaggtaaaaa

SEQ ID NO: 1444039 - DNA, 15 bp, Homo sapiens
atgatacaggtaaaa

SEQ ID NO: 1444040 - DNA, 15 bp, Homo sapiens
catgatacaggtaaa

SEQ ID NO: 1444041 - DNA, 15 bp, Homo sapiens
tcatgatacaggtaa

SEQ ID NO: 1444042 - DNA, 15 bp, Homo sapiens
gtcatgatacaggta

SEQ ID NO: 1444043 - DNA, 15 bp, Homo sapiens
agtcatgatacaggt

SEQ ID NO: 1444044 - DNA, 15 bp, Homo sapiens
gagtcatgatacagg

SEQ ID NO: 1444045 - DNA, 15 bp, Homo sapiens
agagtcatgatacag

SEQ ID NO: 1444046 - DNA, 15 bp, Homo sapiens
aagagtcatgataca

SEQ ID NO: 1444047 - DNA, 15 bp, Homo sapiens
gaagagtcatgatac

SEQ ID NO: 1444048 - DNA, 15 bp, Homo sapiens
agaagagtcatgata

SEQ ID NO: 1444049 - DNA, 15 bp, Homo sapiens
gagaagagtcatgat

SEQ ID NO: 1444050 - DNA, 15 bp, Homo sapiens
agagaagagtcatga

SEQ ID NO: 1444051 - DNA, 15 bp, Homo sapiens
cagagaagagtcatg

SEQ ID NO: 1444052 - DNA, 15 bp, Homo sapiens
gcagagaagagtcat

SEQ ID NO: 1444053 - DNA, 15 bp, Homo sapiens
ggcagagaagagtca

SEQ ID NO: 1444054 - DNA, 15 bp, Homo sapiens
aggcagagaagagtc

SEQ ID NO: 1444055 - DNA, 15 bp, Homo sapiens
gaggcagagaagagt

SEQ ID NO: 1444056 - DNA, 15 bp, Homo sapiens
ggaggcagagaagag

SEQ ID NO: 1444057 - DNA, 15 bp, Homo sapiens
gggaggcagagaaga

SEQ ID NO: 1444058 - DNA, 15 bp, Homo sapiens
agtggggaggcagag

SEQ ID NO: 1444059 - DNA, 15 bp, Homo sapiens
tagtggggaggcaga

SEQ ID NO: 1444060 - DNA, 15 bp, Homo sapiens
atagtggggaggcag

SEQ ID NO: 1444061 - DNA, 15 bp, Homo sapiens
gatagtggggaggca

SEQ ID NO: 1444062 - DNA, 15 bp, Homo sapiens
tgatagtggggaggc

SEQ ID NO: 1444063 - DNA, 15 bp, Homo sapiens
gtgatagtggggagg

SEQ ID NO: 1444064 - DNA, 15 bp, Homo sapiens
agtgatagtggggag

SEQ ID NO: 1444065 - DNA, 15 bp, Homo sapiens
cagtgatagtgggga

SEQ ID NO: 1444066 - DNA, 15 bp, Homo sapiens
acagtgatagtgggg

SEQ ID NO: 1444067 - DNA, 15 bp, Homo sapiens
gacagtgatagtggg

SEQ ID NO: 1444068 - DNA, 15 bp, Homo sapiens
agacagtgatagtgg

SEQ ID NO: 1444069 - DNA, 15 bp, Homo sapiens
aagacagtgatagtg

SEQ ID NO: 1444070 - DNA, 15 bp, Homo sapiens
taagacagtgatagt

SEQ ID NO: 1444071 - DNA, 15 bp, Homo sapiens
ctaagacagtgatag

SEQ ID NO: 1444072 - DNA, 15 bp, Homo sapiens
actaagacagtgata

SEQ ID NO: 1444073 - DNA, 15 bp, Homo sapiens
aactaagacagtgat

SEQ ID NO: 1444074 - DNA, 15 bp, Homo sapiens
aaactaagacagtga

SEQ ID NO: 1444075 - DNA, 15 bp, Homo sapiens
taaactaagacagtg

SEQ ID NO: 1444076 - DNA, 15 bp, Homo sapiens
gtaaactaagacagt

SEQ ID NO: 1444077 - DNA, 15 bp, Homo sapiens
tgtaaactaagacag

SEQ ID NO: 1444078 - DNA, 15 bp, Homo sapiens
atgtaaactaagaca

SEQ ID NO: 1444079 - DNA, 15 bp, Homo sapiens
gatgtaaactaagac

SEQ ID NO: 1444080 - DNA, 15 bp, Homo sapiens
ggatgtaaactaaga

SEQ ID NO: 1444081 - DNA, 15 bp, Homo sapiens
tggatgtaaactaag

SEQ ID NO: 1444082 - DNA, 15 bp, Homo sapiens
ctggatgtaaactaa

SEQ ID NO: 1444083 - DNA, 15 bp, Homo sapiens
tctggatgtaaacta

SEQ ID NO: 1444084 - DNA, 15 bp, Homo sapiens
atctggatgtaaact

SEQ ID NO: 1444085 - DNA, 15 bp, Homo sapiens
aatctggatgtaaac

SEQ ID NO: 1444086 - DNA, 15 bp, Homo sapiens
aaatctggatgtaaa

SEQ ID NO: 1444087 - DNA, 15 bp, Homo sapiens
gaaatctggatgtaa

SEQ ID NO: 1444088 - DNA, 15 bp, Homo sapiens
agaaatctggatgta

SEQ ID NO: 1444089 - DNA, 15 bp, Homo sapiens
gagaaatctggatgt

SEQ ID NO: 1444090 - DNA, 15 bp, Homo sapiens
tgagaaatctggatg

SEQ ID NO: 1444091 - DNA, 15 bp, Homo sapiens
ctgagaaatctggat

SEQ ID NO: 1444092 - DNA, 15 bp, Homo sapiens
gctgagaaatctgga

SEQ ID NO: 1444093 - DNA, 15 bp, Homo sapiens
agctgagaaatctgg

SEQ ID NO: 1444094 - DNA, 15 bp, Homo sapiens
gagctgagaaatctg

SEQ ID NO: 1444095 - DNA, 15 bp, Homo sapiens
ggagctgagaaatct

SEQ ID NO: 1444096 - DNA, 15 bp, Homo sapiens
tggagctgagaaatc

SEQ ID NO: 1444097 - DNA, 15 bp, Homo sapiens
atggagctgagaaat

SEQ ID NO: 1444098 - DNA, 15 bp, Homo sapiens
aatggagctgagaaa

SEQ ID NO: 1444099 - DNA, 15 bp, Homo sapiens
taatggagctgagaa

SEQ ID NO: 1444100 - DNA, 15 bp, Homo sapiens
ttaatggagctgaga

SEQ ID NO: 1444101 - DNA, 15 bp, Homo sapiens
gttaatggagctgag

SEQ ID NO: 1444102 - DNA, 15 bp, Homo sapiens
cgttaatggagctga

SEQ ID NO: 1444103 - DNA, 15 bp, Homo sapiens
gcgttaatggagctg

SEQ ID NO: 1444104 - DNA, 15 bp, Homo sapiens
tgcgttaatggagct

SEQ ID NO: 1444105 - DNA, 15 bp, Homo sapiens
ttgcgttaatggagc

SEQ ID NO: 1444106 - DNA, 15 bp, Homo sapiens
attgcgttaatggag

SEQ ID NO: 1444107 - DNA, 15 bp, Homo sapiens
tattgcgttaatgga

SEQ ID NO: 1444108 - DNA, 15 bp, Homo sapiens
ctattgcgttaatgg

SEQ ID NO: 1444109 - DNA, 15 bp, Homo sapiens
actattgcgttaatg

SEQ ID NO: 1444110 - DNA, 15 bp, Homo sapiens
gactattgcgttaat

SEQ ID NO: 1444111 - DNA, 15 bp, Homo sapiens
agactattgcgttaa

SEQ ID NO: 1444112 - DNA, 15 bp, Homo sapiens
aagactattgcgtta

SEQ ID NO: 1444113 - DNA, 15 bp, Homo sapiens
caagactattgcgtt

SEQ ID NO: 1444114 - DNA, 15 bp, Homo sapiens
acaagactattgcgt

SEQ ID NO: 1444115 - DNA, 15 bp, Homo sapiens
tacaagactattgcg

SEQ ID NO: 1444116 - DNA, 15 bp, Homo sapiens
ttacaagactattgc

SEQ ID NO: 1444117 - DNA, 15 bp, Homo sapiens
gttacaagactattg

SEQ ID NO: 1444118 - DNA, 15 bp, Homo sapiens
tgttacaagactatt

SEQ ID NO: 1444119 - DNA, 15 bp, Homo sapiens
ttgttacaagactat

SEQ ID NO: 1444120 - DNA, 15 bp, Homo sapiens
cttgttacaagacta

SEQ ID NO: 1444121 - DNA, 15 bp, Homo sapiens
acttgttacaagact

SEQ ID NO: 1444122 - DNA, 15 bp, Homo sapiens
gacttgttacaagac

SEQ ID NO: 1444123 - DNA, 15 bp, Homo sapiens
agacttgttacaaga

SEQ ID NO: 1444124 - DNA, 15 bp, Homo sapiens
aagacttgttacaag

SEQ ID NO: 1444125 - DNA, 15 bp, Homo sapiens
gaagacttgttacaa

SEQ ID NO: 1444126 - DNA, 15 bp, Homo sapiens
ggaagacttgttaca

SEQ ID NO: 1444127 - DNA, 15 bp, Homo sapiens
cggaagacttgttac

SEQ ID NO: 1444128 - DNA, 15 bp, Homo sapiens
gcggaagacttgtta

SEQ ID NO: 1444129 - DNA, 15 bp, Homo sapiens
ggcggaagacttgtt

SEQ ID NO: 1444130 - DNA, 15 bp, Homo sapiens
aggcggaagacttgt

SEQ ID NO: 1444131 - DNA, 15 bp, Homo sapiens
gaggcggaagacttg

SEQ ID NO: 1444132 - DNA, 15 bp, Homo sapiens
ggaggcggaagactt

SEQ ID NO: 1444133 - DNA, 15 bp, Homo sapiens
tggaggcggaagact

SEQ ID NO: 1444134 - DNA, 15 bp, Homo sapiens
gtggaggcggaagac

SEQ ID NO: 1444135 - DNA, 15 bp, Homo sapiens
ggtggaggcggaaga

SEQ ID NO: 1444136 - DNA, 15 bp, Homo sapiens
cggtggaggcggaag

SEQ ID NO: 1444137 - DNA, 15 bp, Homo sapiens
acggtggaggcggaa

SEQ ID NO: 1444138 - DNA, 15 bp, Homo sapiens
cacggtggaggcgga

SEQ ID NO: 1444139 - DNA, 15 bp, Homo sapiens
ccacggtggaggcgg

SEQ ID NO: 1444140 - DNA, 15 bp, Homo sapiens
tccacggtggaggcg

SEQ ID NO: 1444141 - DNA, 15 bp, Homo sapiens
gtccacggtggaggc

SEQ ID NO: 1444142 - DNA, 15 bp, Homo sapiens
ggtccacggtggagg

SEQ ID NO: 1444143 - DNA, 15 bp, Homo sapiens
gggtccacggtggag

SEQ ID NO: 1444144 - DNA, 15 bp, Homo sapiens
tgggtccacggtgga

SEQ ID NO: 1444145 - DNA, 15 bp, Homo sapiens
gtgggtccacggtgg

SEQ ID NO: 1444146 - DNA, 15 bp, Homo sapiens
agtgggtccacggtg

SEQ ID NO: 1444147 - DNA, 15 bp, Homo sapiens
gagtgggtccacggt

SEQ ID NO: 1444148 - DNA, 15 bp, Homo sapiens
ggagtgggtccacgg

SEQ ID NO: 1444149 - DNA, 15 bp, Homo sapiens
tggagtgggtccacg

SEQ ID NO: 1444150 - DNA, 15 bp, Homo sapiens
ttggagtgggtccac

SEQ ID NO: 1444151 - DNA, 15 bp, Homo sapiens
gtagtaagccactac

SEQ ID NO: 1444152 - DNA, 15 bp, Homo sapiens
tgtagtaagccacta

SEQ ID NO: 1444153 - DNA, 15 bp, Homo sapiens
ctgtagtaagccact

SEQ ID NO: 1444154 - DNA, 15 bp, Homo sapiens
gctgtagtaagccac

SEQ ID NO: 1444155 - DNA, 15 bp, Homo sapiens
tgctgtagtaagcca

SEQ ID NO: 1444156 - DNA, 15 bp, Homo sapiens
ttgctgtagtaagcc

SEQ ID NO: 1444157 - DNA, 15 bp, Homo sapiens
attgctgtagtaagc

SEQ ID NO: 1444158 - DNA, 15 bp, Homo sapiens
cattgctgtagtaag

SEQ ID NO: 1444159 - DNA, 15 bp, Homo sapiens
tcattgctgtagtaa

SEQ ID NO: 1444160 - DNA, 15 bp, Homo sapiens
gtcattgctgtagta

SEQ ID NO: 1444161 - DNA, 15 bp, Homo sapiens
tgtcattgctgtagt

SEQ ID NO: 1444162 - DNA, 15 bp, Homo sapiens
gtgtcattgctgtag

SEQ ID NO: 1444163 - DNA, 15 bp, Homo sapiens
agtgtcattgctgta

SEQ ID NO: 1444164 - DNA, 15 bp, Homo sapiens
aagtgtcattgctgt

SEQ ID NO: 1444165 - DNA, 15 bp, Homo sapiens
aaagtgtcattgctg

SEQ ID NO: 1444166 - DNA, 15 bp, Homo sapiens
aaaagtgtcattgct

SEQ ID NO: 1444167 - DNA, 15 bp, Homo sapiens
aaaaagtgtcattgc

SEQ ID NO: 1444168 - DNA, 15 bp, Homo sapiens
aaaaaagtgtcattg

SEQ ID NO: 1444169 - DNA, 15 bp, Homo sapiens
aaaaaaagtgtcatt

SEQ ID NO: 1444170 - DNA, 15 bp, Homo sapiens
aaaaaaaagtgtcat

SEQ ID NO: 1444171 - DNA, 15 bp, Homo sapiens
aaaaaaaaagtgtca

SEQ ID NO: 1444172 - DNA, 15 bp, Homo sapiens
aaaaaaaaaagtgtc

SEQ ID NO: 1444173 - DNA, 15 bp, Homo sapiens
cataaaaaaaaaaaa

SEQ ID NO: 1444174 - DNA, 15 bp, Homo sapiens
tcataaaaaaaaaaa

SEQ ID NO: 1444175 - DNA, 15 bp, Homo sapiens
atcataaaaaaaaaa

SEQ ID NO: 1444176 - DNA, 15 bp, Homo sapiens
aatcataaaaaaaaa

SEQ ID NO: 1444177 - DNA, 15 bp, Homo sapiens
gaatcataaaaaaaa

SEQ ID NO: 1444178 - DNA, 15 bp, Homo sapiens
agaatcataaaaaaa

SEQ ID NO: 1444179 - DNA, 15 bp, Homo sapiens
cagaatcataaaaaa

SEQ ID NO: 1444180 - DNA, 15 bp, Homo sapiens
acagaatcataaaaa

SEQ ID NO: 1444181 - DNA, 15 bp, Homo sapiens
cacagaatcataaaa

SEQ ID NO: 1444182 - DNA, 15 bp, Homo sapiens
ccacagaatcataaa

SEQ ID NO: 1444183 - DNA, 15 bp, Homo sapiens
cccacagaatcataa

SEQ ID NO: 1444184 - DNA, 15 bp, Homo sapiens
acccacagaatcata

SEQ ID NO: 1444185 - DNA, 15 bp, Homo sapiens
aacccacagaatcat

SEQ ID NO: 1444186 - DNA, 15 bp, Homo sapiens
caacccacagaatca

SEQ ID NO: 1444187 - DNA, 15 bp, Homo sapiens
ccaacccacagaatc

SEQ ID NO: 1444188 - DNA, 15 bp, Homo sapiens
gccaacccacagaat

SEQ ID NO: 1444189 - DNA, 15 bp, Homo sapiens
agccaacccacagaa

SEQ ID NO: 1444190 - DNA, 15 bp, Homo sapiens
cagccaacccacaga

SEQ ID NO: 1444191 - DNA, 15 bp, Homo sapiens
acagccaacccacag

SEQ ID NO: 1444192 - DNA, 15 bp, Homo sapiens
cacagccaacccaca

SEQ ID NO: 1444193 - DNA, 15 bp, Homo sapiens
gcacagccaacccac

SEQ ID NO: 1444194 - DNA, 15 bp, Homo sapiens
agcacagccaaccca

SEQ ID NO: 1444195 - DNA, 15 bp, Homo sapiens
gagcacagccaaccc

SEQ ID NO: 1444196 - DNA, 15 bp, Homo sapiens
tgagcacagccaacc

SEQ ID NO: 1444197 - DNA, 15 bp, Homo sapiens
atgagcacagccaac

SEQ ID NO: 1444198 - DNA, 15 bp, Homo sapiens
aatgagcacagccaa

SEQ ID NO: 1444199 - DNA, 15 bp, Homo sapiens
aaatgagcacagcca

SEQ ID NO: 1444200 - DNA, 15 bp, Homo sapiens
caaatgagcacagcc

SEQ ID NO: 1444201 - DNA, 15 bp, Homo sapiens
acaaatgagcacagc

SEQ ID NO: 1444202 - DNA, 15 bp, Homo sapiens
tacaaatgagcacag

SEQ ID NO: 1444203 - DNA, 15 bp, Homo sapiens
ctacaaatgagcaca

SEQ ID NO: 1444204 - DNA, 15 bp, Homo sapiens
actacaaatgagcac

SEQ ID NO: 1444205 - DNA, 15 bp, Homo sapiens
gactacaaatgagca

SEQ ID NO: 1444206 - DNA, 15 bp, Homo sapiens
cgactacaaatgagc

SEQ ID NO: 1444207 - DNA, 15 bp, Homo sapiens
ccgactacaaatgag

SEQ ID NO: 1444208 - DNA, 15 bp, Homo sapiens
tccgactacaaatga

SEQ ID NO: 1444209 - DNA, 15 bp, Homo sapiens
atccgactacaaatg

SEQ ID NO: 1444210 - DNA, 15 bp, Homo sapiens
catccgactacaaat

SEQ ID NO: 1444211 - DNA, 15 bp, Homo sapiens
tcatccgactacaaa

SEQ ID NO: 1444212 - DNA, 15 bp, Homo sapiens
atcatccgactacaa

SEQ ID NO: 1444213 - DNA, 15 bp, Homo sapiens
catcatccgactaca

SEQ ID NO: 1444214 - DNA, 15 bp, Homo sapiens
ccatcatccgactac

SEQ ID NO: 1444215 - DNA, 15 bp, Homo sapiens
gccatcatccgacta

SEQ ID NO: 1444216 - DNA, 15 bp, Homo sapiens
agccatcatccgact

SEQ ID NO: 1444217 - DNA, 15 bp, Homo sapiens
cagccatcatccgac

SEQ ID NO: 1444218 - DNA, 15 bp, Homo sapiens
tcagccatcatccga

SEQ ID NO: 1444219 - DNA, 15 bp, Homo sapiens
ttcagccatcatccg

SEQ ID NO: 1444220 - DNA, 15 bp, Homo sapiens
tttcagccatcatcc

SEQ ID NO: 1444221 - DNA, 15 bp, Homo sapiens
atttcagccatcatc

SEQ ID NO: 1444222 - DNA, 15 bp, Homo sapiens
tatttcagccatcat

SEQ ID NO: 1444223 - DNA, 15 bp, Homo sapiens
ctatttcagccatca

SEQ ID NO: 1444224 - DNA, 15 bp, Homo sapiens
gctatttcagccatc

SEQ ID NO: 1444225 - DNA, 15 bp, Homo sapiens
agctatttcagccat

SEQ ID NO: 1444226 - DNA, 15 bp, Homo sapiens
cagctatttcagcca

SEQ ID NO: 1444227 - DNA, 15 bp, Homo sapiens
gcagctatttcagcc

SEQ ID NO: 1444228 - DNA, 15 bp, Homo sapiens
tgcagctatttcagc

SEQ ID NO: 1444229 - DNA, 15 bp, Homo sapiens
atgcagctatttcag

SEQ ID NO: 1444230 - DNA, 15 bp, Homo sapiens
catgcagctatttca

SEQ ID NO: 1444231 - DNA, 15 bp, Homo sapiens
ccatgcagctatttc

SEQ ID NO: 1444232 - DNA, 15 bp, Homo sapiens
accatgcagctattt

SEQ ID NO: 1444233 - DNA, 15 bp, Homo sapiens
aaccatgcagctatt

SEQ ID NO: 1444234 - DNA, 15 bp, Homo sapiens
gaaccatgcagctat

SEQ ID NO: 1444235 - DNA, 15 bp, Homo sapiens
tgaaccatgcagcta

SEQ ID NO: 1444236 - DNA, 15 bp, Homo sapiens
ttgaaccatgcagct

SEQ ID NO: 1444237 - DNA, 15 bp, Homo sapiens
cttgaaccatgcagc

SEQ ID NO: 1444238 - DNA, 15 bp, Homo sapiens
tcttgaaccatgcag

SEQ ID NO: 1444239 - DNA, 15 bp, Homo sapiens
atcttgaaccatgca

SEQ ID NO: 1444240 - DNA, 15 bp, Homo sapiens
catcttgaaccatgc

SEQ ID NO: 1444241 - DNA, 15 bp, Homo sapiens
ccatcttgaaccatg

SEQ ID NO: 1444242 - DNA, 15 bp, Homo sapiens
gccatcttgaaccat

SEQ ID NO: 1444243 - DNA, 15 bp, Homo sapiens
ggccatcttgaacca

SEQ ID NO: 1444244 - DNA, 15 bp, Homo sapiens
aggccatcttgaacc

SEQ ID NO: 1444245 - DNA, 15 bp, Homo sapiens
gaggccatcttgaac

SEQ ID NO: 1444246 - DNA, 15 bp, Homo sapiens
ggaggccatcttgaa

SEQ ID NO: 1444247 - DNA, 15 bp, Homo sapiens
aggaggccatcttga

SEQ ID NO: 1444248 - DNA, 15 bp, Homo sapiens
gaggaggccatcttg

SEQ ID NO: 1444249 - DNA, 15 bp, Homo sapiens
ggaggaggccatctt

SEQ ID NO: 1444250 - DNA, 15 bp, Homo sapiens
gggaggaggccatct

SEQ ID NO: 1444251 - DNA, 15 bp, Homo sapiens
agggaggaggccatc

SEQ ID NO: 1444252 - DNA, 15 bp, Homo sapiens
gagggaggaggccat

SEQ ID NO: 1444253 - DNA, 15 bp, Homo sapiens
tgagggaggaggcca

SEQ ID NO: 1444254 - DNA, 15 bp, Homo sapiens
gtgagggaggaggcc

SEQ ID NO: 1444255 - DNA, 15 bp, Homo sapiens
tgtgagggaggaggc

SEQ ID NO: 1444256 - DNA, 15 bp, Homo sapiens
atgtgagggaggagg

SEQ ID NO: 1444257 - DNA, 15 bp, Homo sapiens
catgtgagggaggag

SEQ ID NO: 1444258 - DNA, 15 bp, Homo sapiens
gcatgtgagggagga

SEQ ID NO: 1444259 - DNA, 15 bp, Homo sapiens
ggcatgtgagggagg

SEQ ID NO: 1444260 - DNA, 15 bp, Homo sapiens
gggcatgtgagggag

SEQ ID NO: 1444261 - DNA, 15 bp, Homo sapiens
tgggcatgtgaggga

SEQ ID NO: 1444262 - DNA, 15 bp, Homo sapiens
ctgggcatgtgaggg

SEQ ID NO: 1444263 - DNA, 15 bp, Homo sapiens
gctgggcatgtgagg

SEQ ID NO: 1444264 - DNA, 15 bp, Homo sapiens
tgctgggcatgtgag

SEQ ID NO: 1444265 - DNA, 15 bp, Homo sapiens
ctgctgggcatgtga

SEQ ID NO: 1444266 - DNA, 15 bp, Homo sapiens
actgctgggcatgtg

SEQ ID NO: 1444267 - DNA, 15 bp, Homo sapiens
gactgctgggcatgt

SEQ ID NO: 1444268 - DNA, 15 bp, Homo sapiens
tgactgctgggcatg

SEQ ID NO: 1444269 - DNA, 15 bp, Homo sapiens
ctgactgctgggcat

SEQ ID NO: 1444270 - DNA, 15 bp, Homo sapiens
actgactgctgggca

SEQ ID NO: 1444271 - DNA, 15 bp, Homo sapiens
cactgactgctgggc

SEQ ID NO: 1444272 - DNA, 15 bp, Homo sapiens
gcactgactgctggg

SEQ ID NO: 1444273 - DNA, 15 bp, Homo sapiens
agcactgactgctgg

SEQ ID NO: 1444274 - DNA, 15 bp, Homo sapiens
cagcactgactgctg

SEQ ID NO: 1444275 - DNA, 15 bp, Homo sapiens
ccagcactgactgct

SEQ ID NO: 1444276 - DNA, 15 bp, Homo sapiens
gccagcactgactgc

SEQ ID NO: 1444277 - DNA, 15 bp, Homo sapiens
agccagcactgactg

SEQ ID NO: 1444278 - DNA, 15 bp, Homo sapiens
cagccagcactgact

SEQ ID NO: 1444279 - DNA, 15 bp, Homo sapiens
acagccagcactgac

SEQ ID NO: 1444280 - DNA, 15 bp, Homo sapiens
gacagccagcactga

SEQ ID NO: 1444281 - DNA, 15 bp, Homo sapiens
tgacagccagcactg

SEQ ID NO: 1444282 - DNA, 15 bp, Homo sapiens
ctgacagccagcact

SEQ ID NO: 1444283 - DNA, 15 bp, Homo sapiens
gctgacagccagcac

SEQ ID NO: 1444284 - DNA, 15 bp, Homo sapiens
cagctgacagccagc

SEQ ID NO: 1444285 - DNA, 15 bp, Homo sapiens
ccagctgacagccag

SEQ ID NO: 1444286 - DNA, 15 bp, Homo sapiens
cccagctgacagcca

SEQ ID NO: 1444287 - DNA, 15 bp, Homo sapiens
ccccagctgacagcc

SEQ ID NO: 1444288 - DNA, 15 bp, Homo sapiens
gccccagctgacagc

SEQ ID NO: 1444289 - DNA, 15 bp, Homo sapiens
cgccccagctgacag

SEQ ID NO: 1444290 - DNA, 15 bp, Homo sapiens
gcgccccagctgaca

SEQ ID NO: 1444291 - DNA, 15 bp, Homo sapiens
ggcgccccagctgac

SEQ ID NO: 1444292 - DNA, 15 bp, Homo sapiens
aggcgccccagctga

SEQ ID NO: 1444293 - DNA, 15 bp, Homo sapiens
gaggcgccccagctg

SEQ ID NO: 1444294 - DNA, 15 bp, Homo sapiens
tgaggcgccccagct

SEQ ID NO: 1444295 - DNA, 15 bp, Homo sapiens
ctgaggcgccccagc

SEQ ID NO: 1444296 - DNA, 15 bp, Homo sapiens
actgaggcgccccag

SEQ ID NO: 1444297 - DNA, 15 bp, Homo sapiens
tactgaggcgcccca

SEQ ID NO: 1444298 - DNA, 15 bp, Homo sapiens
atactgaggcgcccc

SEQ ID NO: 1444299 - DNA, 15 bp, Homo sapiens
gatactgaggcgccc

SEQ ID NO: 1444300 - DNA, 15 bp, Homo sapiens
ggatactgaggcgcc

SEQ ID NO: 1444301 - DNA, 15 bp, Homo sapiens
gggatactgaggcgc

SEQ ID NO: 1444302 - DNA, 15 bp, Homo sapiens
ggggatactgaggcg

SEQ ID NO: 1444303 - DNA, 15 bp, Homo sapiens
tggggatactgaggc

SEQ ID NO: 1444304 - DNA, 15 bp, Homo sapiens
gtggggatactgagg

SEQ ID NO: 1444305 - DNA, 15 bp, Homo sapiens
ggtggggatactgag

SEQ ID NO: 1444306 - DNA, 15 bp, Homo sapiens
tggtggggatactga

SEQ ID NO: 1444307 - DNA, 15 bp, Homo sapiens
gtggtggggatactg

SEQ ID NO: 1444308 - DNA, 15 bp, Homo sapiens
ggtggtggggatact

SEQ ID NO: 1444309 - DNA, 15 bp, Homo sapiens
aggtggtggggatac

SEQ ID NO: 1444310 - DNA, 15 bp, Homo sapiens
caggtggtggggata

SEQ ID NO: 1444311 - DNA, 15 bp, Homo sapiens
ccaggtggtggggat

SEQ ID NO: 1444312 - DNA, 15 bp, Homo sapiens
gccaggtggtgggga

SEQ ID NO: 1444313 - DNA, 15 bp, Homo sapiens
ggccaggtggtgggg

SEQ ID NO: 1444314 - DNA, 15 bp, Homo sapiens
aggccaggtggtggg

SEQ ID NO: 1444315 - DNA, 15 bp, Homo sapiens
gaggccaggtggtgg

SEQ ID NO: 1444316 - DNA, 15 bp, Homo sapiens
agaggccaggtggtg

SEQ ID NO: 1444317 - DNA, 15 bp, Homo sapiens
gagaggccaggtggt

SEQ ID NO: 1444318 - DNA, 15 bp, Homo sapiens
tgagaggccaggtgg

SEQ ID NO: 1444319 - DNA, 15 bp, Homo sapiens
atgagaggccaggtg

SEQ ID NO: 1444320 - DNA, 15 bp, Homo sapiens
aatgagaggccaggt

SEQ ID NO: 1444321 - DNA, 15 bp, Homo sapiens
gaatgagaggccagg

SEQ ID NO: 1444322 - DNA, 15 bp, Homo sapiens
agaatgagaggccag

SEQ ID NO: 1444323 - DNA, 15 bp, Homo sapiens
aagaatgagaggcca

SEQ ID NO: 1444324 - DNA, 15 bp, Homo sapiens
gaagaatgagaggcc

SEQ ID NO: 1444325 - DNA, 15 bp, Homo sapiens
tgaagaatgagaggc

SEQ ID NO: 1444326 - DNA, 15 bp, Homo sapiens
ctgaagaatgagagg

SEQ ID NO: 1444327 - DNA, 15 bp, Homo sapiens
actgaagaatgagag

SEQ ID NO: 1444328 - DNA, 15 bp, Homo sapiens
tactgaagaatgaga

SEQ ID NO: 1444329 - DNA, 15 bp, Homo sapiens
ctactgaagaatgag

SEQ ID NO: 1444330 - DNA, 15 bp, Homo sapiens
cctactgaagaatga

SEQ ID NO: 1444331 - DNA, 15 bp, Homo sapiens
gcctactgaagaatg

SEQ ID NO: 1444332 - DNA, 15 bp, Homo sapiens
agcctactgaagaat

SEQ ID NO: 1444333 - DNA, 15 bp, Homo sapiens
tagcctactgaagaa

SEQ ID NO: 1444334 - DNA, 15 bp, Homo sapiens
ctagcctactgaaga

SEQ ID NO: 1444335 - DNA, 15 bp, Homo sapiens
tctagcctactgaag

SEQ ID NO: 1444336 - DNA, 15 bp, Homo sapiens
atctagcctactgaa

SEQ ID NO: 1444337 - DNA, 15 bp, Homo sapiens
aatctagcctactga

SEQ ID NO: 1444338 - DNA, 15 bp, Homo sapiens
caatctagcctactg

SEQ ID NO: 1444339 - DNA, 15 bp, Homo sapiens
gcaatctagcctact

SEQ ID NO: 1444340 - DNA, 15 bp, Homo sapiens
ggcaatctagcctac

SEQ ID NO: 1444341 - DNA, 15 bp, Homo sapiens
aggcaatctagccta

SEQ ID NO: 1444342 - DNA, 15 bp, Homo sapiens
aaggcaatctagcct

SEQ ID NO: 1444343 - DNA, 15 bp, Homo sapiens
gaaggcaatctagcc

SEQ ID NO: 1444344 - DNA, 15 bp, Homo sapiens
ggaaggcaatctagc

SEQ ID NO: 1444345 - DNA, 15 bp, Homo sapiens
aggaaggcaatctag

SEQ ID NO: 1444346 - DNA, 15 bp, Homo sapiens
aaggaaggcaatcta

SEQ ID NO: 1444347 - DNA, 15 bp, Homo sapiens
taaggaaggcaatct

SEQ ID NO: 1444348 - DNA, 15 bp, Homo sapiens
gtaaggaaggcaatc

SEQ ID NO: 1444349 - DNA, 15 bp, Homo sapiens
tgtaaggaaggcaat

SEQ ID NO: 1444350 - DNA, 15 bp, Homo sapiens
ttgtaaggaaggcaa

SEQ ID NO: 1444351 - DNA, 15 bp, Homo sapiens
gttgtaaggaaggca

SEQ ID NO: 1444352 - DNA, 15 bp, Homo sapiens
cgttgtaaggaaggc

SEQ ID NO: 1444353 - DNA, 15 bp, Homo sapiens
acgttgtaaggaagg

SEQ ID NO: 1444354 - DNA, 15 bp, Homo sapiens
cacgttgtaaggaag

SEQ ID NO: 1444355 - DNA, 15 bp, Homo sapiens
ccacgttgtaaggaa

SEQ ID NO: 1444356 - DNA, 15 bp, Homo sapiens
gccacgttgtaagga

SEQ ID NO: 1444357 - DNA, 15 bp, Homo sapiens
tgccacgttgtaagg

SEQ ID NO: 1444358 - DNA, 15 bp, Homo sapiens
ctgccacgttgtaag

SEQ ID NO: 1444359 - DNA, 15 bp, Homo sapiens
gctgccacgttgtaa

SEQ ID NO: 1444360 - DNA, 15 bp, Homo sapiens
ggctgccacgttgta

SEQ ID NO: 1444361 - DNA, 15 bp, Homo sapiens
aggctgccacgttgt

SEQ ID NO: 1444362 - DNA, 15 bp, Homo sapiens
gaggctgccacgttg

SEQ ID NO: 1444363 - DNA, 15 bp, Homo sapiens
tgaggctgccacgtt

SEQ ID NO: 1444364 - DNA, 15 bp, Homo sapiens
ctgaggctgccacgt

SEQ ID NO: 1444365 - DNA, 15 bp, Homo sapiens
tctgaggctgccacg

SEQ ID NO: 1444366 - DNA, 15 bp, Homo sapiens
atctgaggctgccac

SEQ ID NO: 1444367 - DNA, 15 bp, Homo sapiens
tatctgaggctgcca

SEQ ID NO: 1444368 - DNA, 15 bp, Homo sapiens
ctatctgaggctgcc

SEQ ID NO: 1444369 - DNA, 15 bp, Homo sapiens
gctatctgaggctgc

SEQ ID NO: 1444370 - DNA, 15 bp, Homo sapiens
tgctatctgaggctg

SEQ ID NO: 1444371 - DNA, 15 bp, Homo sapiens
atgctatctgaggct

SEQ ID NO: 1444372 - DNA, 15 bp, Homo sapiens
aatgctatctgaggc

SEQ ID NO: 1444373 - DNA, 15 bp, Homo sapiens
aaatgctatctgagg

SEQ ID NO: 1444374 - DNA, 15 bp, Homo sapiens
gaaatgctatctgag

SEQ ID NO: 1444375 - DNA, 15 bp, Homo sapiens
tgaaatgctatctga

SEQ ID NO: 1444376 - DNA, 15 bp, Homo sapiens
ttgaaatgctatctg

SEQ ID NO: 1444377 - DNA, 15 bp, Homo sapiens
cttgaaatgctatct

SEQ ID NO: 1444378 - DNA, 15 bp, Homo sapiens
tcttgaaatgctatc

SEQ ID NO: 1444379 - DNA, 15 bp, Homo sapiens
ctcttgaaatgctat

SEQ ID NO: 1444380 - DNA, 15 bp, Homo sapiens
tctcttgaaatgcta

SEQ ID NO: 1444381 - DNA, 15 bp, Homo sapiens
ctctcttgaaatgct

SEQ ID NO: 1444382 - DNA, 15 bp, Homo sapiens
cctctcttgaaatgc

SEQ ID NO: 1444383 - DNA, 15 bp, Homo sapiens
acctctcttgaaatg

SEQ ID NO: 1444384 - DNA, 15 bp, Homo sapiens
tacctctcttgaaat

SEQ ID NO: 1444385 - DNA, 15 bp, Homo sapiens
ctacctctcttgaaa

SEQ ID NO: 1444386 - DNA, 15 bp, Homo sapiens
cctacctctcttgaa

SEQ ID NO: 1444387 - DNA, 15 bp, Homo sapiens
gcctacctctcttga

SEQ ID NO: 1444388 - DNA, 15 bp, Homo sapiens
ggcctacctctcttg

SEQ ID NO: 1444389 - DNA, 15 bp, Homo sapiens
aggcctacctctctt

SEQ ID NO: 1444390 - DNA, 15 bp, Homo sapiens
gaggcctacctctct

SEQ ID NO: 1444391 - DNA, 15 bp, Homo sapiens
cgaggcctacctctc

SEQ ID NO: 1444392 - DNA, 15 bp, Homo sapiens
ccgaggcctacctct

SEQ ID NO: 1444393 - DNA, 15 bp, Homo sapiens
gccgaggcctacctc

SEQ ID NO: 1444394 - DNA, 15 bp, Homo sapiens
agccgaggcctacct

SEQ ID NO: 1444395 - DNA, 15 bp, Homo sapiens
gagccgaggcctacc

SEQ ID NO: 1444396 - DNA, 15 bp, Homo sapiens
agagccgaggcctac

SEQ ID NO: 1444397 - DNA, 15 bp, Homo sapiens
cagagccgaggccta

SEQ ID NO: 1444398 - DNA, 15 bp, Homo sapiens
ccagagccgaggcct

SEQ ID NO: 1444399 - DNA, 15 bp, Homo sapiens
tccagagccgaggcc

SEQ ID NO: 1444400 - DNA, 15 bp, Homo sapiens
ttccagagccgaggc

SEQ ID NO: 1444401 - DNA, 15 bp, Homo sapiens
attccagagccgagg

SEQ ID NO: 1444402 - DNA, 15 bp, Homo sapiens
aattccagagccgag

SEQ ID NO: 1444403 - DNA, 15 bp, Homo sapiens
aaattccagagccga

SEQ ID NO: 1444404 - DNA, 15 bp, Homo sapiens
caaattccagagccg

SEQ ID NO: 1444405 - DNA, 15 bp, Homo sapiens
tcaaattccagagcc

SEQ ID NO: 1444406 - DNA, 15 bp, Homo sapiens
ttcaaattccagagc

SEQ ID NO: 1444407 - DNA, 15 bp, Homo sapiens
attcaaattccagag

SEQ ID NO: 1444408 - DNA, 15 bp, Homo sapiens
tattcaaattccaga

SEQ ID NO: 1444409 - DNA, 15 bp, Homo sapiens
ttattcaaattccag

SEQ ID NO: 1444410 - DNA, 15 bp, Homo sapiens
attattcaaattcca

SEQ ID NO: 1444411 - DNA, 15 bp, Homo sapiens
tattattcaaattcc

SEQ ID NO: 1444412 - DNA, 15 bp, Homo sapiens
atattattcaaattc

SEQ ID NO: 1444413 - DNA, 15 bp, Homo sapiens
gatattattcaaatt

SEQ ID NO: 1444414 - DNA, 15 bp, Homo sapiens
tgatattattcaaat

SEQ ID NO: 1444415 - DNA, 15 bp, Homo sapiens
gtgatattattcaaa

SEQ ID NO: 1444416 - DNA, 15 bp, Homo sapiens
agtgatattattcaa

SEQ ID NO: 1444417 - DNA, 15 bp, Homo sapiens
aagtgatattattca

SEQ ID NO: 1444418 - DNA, 15 bp, Homo sapiens
gaagtgatattattc

SEQ ID NO: 1444419 - DNA, 15 bp, Homo sapiens
agaagtgatattatt

SEQ ID NO: 1444420 - DNA, 15 bp, Homo sapiens
cagaagtgatattat

SEQ ID NO: 1444421 - DNA, 15 bp, Homo sapiens
tcagaagtgatatta

SEQ ID NO: 1444422 - DNA, 15 bp, Homo sapiens
gtcagaagtgatatt

SEQ ID NO: 1444423 - DNA, 15 bp, Homo sapiens
tgtcagaagtgatat

SEQ ID NO: 1444424 - DNA, 15 bp, Homo sapiens
gtgtcagaagtgata

SEQ ID NO: 1444425 - DNA, 15 bp, Homo sapiens
ggtgtcagaagtgat

SEQ ID NO: 1444426 - DNA, 15 bp, Homo sapiens
aggtgtcagaagtga

SEQ ID NO: 1444427 - DNA, 15 bp, Homo sapiens
aaggtgtcagaagtg

SEQ ID NO: 1444428 - DNA, 15 bp, Homo sapiens
gaaggtgtcagaagt

SEQ ID NO: 1444429 - DNA, 15 bp, Homo sapiens
agaaggtgtcagaag

SEQ ID NO: 1444430 - DNA, 15 bp, Homo sapiens
tagaaggtgtcagaa

SEQ ID NO: 1444431 - DNA, 15 bp, Homo sapiens
atagaaggtgtcaga

SEQ ID NO: 1444432 - DNA, 15 bp, Homo sapiens
aatagaaggtgtcag

SEQ ID NO: 1444433 - DNA, 15 bp, Homo sapiens
caatagaaggtgtca

SEQ ID NO: 1444434 - DNA, 15 bp, Homo sapiens
ccaatagaaggtgtc

SEQ ID NO: 1444435 - DNA, 15 bp, Homo sapiens
accaatagaaggtgt

SEQ ID NO: 1444436 - DNA, 15 bp, Homo sapiens
gaccaatagaaggtg

SEQ ID NO: 1444437 - DNA, 15 bp, Homo sapiens
tgaccaatagaaggt

SEQ ID NO: 1444438 - DNA, 15 bp, Homo sapiens
ttgaccaatagaagg

SEQ ID NO: 1444439 - DNA, 15 bp, Homo sapiens
tttgaccaatagaag

SEQ ID NO: 1444440 - DNA, 15 bp, Homo sapiens
ctttgaccaatagaa

SEQ ID NO: 1444441 - DNA, 15 bp, Homo sapiens
gctttgaccaataga

SEQ ID NO: 1444442 - DNA, 15 bp, Homo sapiens
tgctttgaccaatag

SEQ ID NO: 1444443 - DNA, 15 bp, Homo sapiens
ttgctttgaccaata

SEQ ID NO: 1444444 - DNA, 15 bp, Homo sapiens
cttgctttgaccaat

SEQ ID NO: 1444445 - DNA, 15 bp, Homo sapiens
acttgctttgaccaa

SEQ ID NO: 1444446 - DNA, 15 bp, Homo sapiens
gacttgctttgacca

SEQ ID NO: 1444447 - DNA, 15 bp, Homo sapiens
tgacttgctttgacc

SEQ ID NO: 1444448 - DNA, 15 bp, Homo sapiens
atgacttgctttgac

SEQ ID NO: 1444449 - DNA, 15 bp, Homo sapiens
catgacttgctttga

SEQ ID NO: 1444450 - DNA, 15 bp, Homo sapiens
tcatgacttgctttg

SEQ ID NO: 1444451 - DNA, 15 bp, Homo sapiens
ttcatgacttgcttt

SEQ ID NO: 1444452 - DNA, 15 bp, Homo sapiens
cttcatgacttgctt

SEQ ID NO: 1444453 - DNA, 15 bp, Homo sapiens
gcttcatgacttgct

SEQ ID NO: 1444454 - DNA, 15 bp, Homo sapiens
ggcttcatgacttgc

SEQ ID NO: 1444455 - DNA, 15 bp, Homo sapiens
tggcttcatgacttg

SEQ ID NO: 1444456 - DNA, 15 bp, Homo sapiens
ctggcttcatgactt

SEQ ID NO: 1444457 - DNA, 15 bp, Homo sapiens
gctggcttcatgact

SEQ ID NO: 1444458 - DNA, 15 bp, Homo sapiens
ggctggcttcatgac

SEQ ID NO: 1444459 - DNA, 15 bp, Homo sapiens
cggctggcttcatga

SEQ ID NO: 1444460 - DNA, 15 bp, Homo sapiens
acggctggcttcatg

SEQ ID NO: 1444461 - DNA, 15 bp, Homo sapiens
tacggctggcttcat

SEQ ID NO: 1444462 - DNA, 15 bp, Homo sapiens
atacggctggcttca

SEQ ID NO: 1444463 - DNA, 15 bp, Homo sapiens
aatacggctggcttc

SEQ ID NO: 1444464 - DNA, 15 bp, Homo sapiens
gaatacggctggctt

SEQ ID NO: 1444465 - DNA, 15 bp, Homo sapiens
tgaatacggctggct

SEQ ID NO: 1444466 - DNA, 15 bp, Homo sapiens
atgaatacggctggc

SEQ ID NO: 1444467 - DNA, 15 bp, Homo sapiens
catgaatacggctgg

SEQ ID NO: 1444468 - DNA, 15 bp, Homo sapiens
tcatgaatacggctg

SEQ ID NO: 1444469 - DNA, 15 bp, Homo sapiens
ctcatgaatacggct

SEQ ID NO: 1444470 - DNA, 15 bp, Homo sapiens
cctcatgaatacggc

SEQ ID NO: 1444471 - DNA, 15 bp, Homo sapiens
acctcatgaatacgg

SEQ ID NO: 1444472 - DNA, 15 bp, Homo sapiens
aacctcatgaatacg

SEQ ID NO: 1444473 - DNA, 15 bp, Homo sapiens
gaacctcatgaatac

SEQ ID NO: 1444474 - DNA, 15 bp, Homo sapiens
agaacctcatgaata

SEQ ID NO: 1444475 - DNA, 15 bp, Homo sapiens
cagaacctcatgaat

SEQ ID NO: 1444476 - DNA, 15 bp, Homo sapiens
ccagaacctcatgaa

SEQ ID NO: 1444477 - DNA, 15 bp, Homo sapiens
tccagaacctcatga

SEQ ID NO: 1444478 - DNA, 15 bp, Homo sapiens
ctccagaacctcatg

SEQ ID NO: 1444479 - DNA, 15 bp, Homo sapiens
actccagaacctcat

SEQ ID NO: 1444480 - DNA, 15 bp, Homo sapiens
tactccagaacctca

SEQ ID NO: 1444481 - DNA, 15 bp, Homo sapiens
ctactccagaacctc

SEQ ID NO: 1444482 - DNA, 15 bp, Homo sapiens
cctactccagaacct

SEQ ID NO: 1444483 - DNA, 15 bp, Homo sapiens
gcctactccagaacc

SEQ ID NO: 1444484 - DNA, 15 bp, Homo sapiens
agcctactccagaac

SEQ ID NO: 1444485 - DNA, 15 bp, Homo sapiens
aagcctactccagaa

SEQ ID NO: 1444486 - DNA, 15 bp, Homo sapiens
aaagcctactccaga

SEQ ID NO: 1444487 - DNA, 15 bp, Homo sapiens
caaagcctactccag

SEQ ID NO: 1444488 - DNA, 15 bp, Homo sapiens
gcaaagcctactcca

SEQ ID NO: 1444489 - DNA, 15 bp, Homo sapiens
ggcaaagcctactcc

SEQ ID NO: 1444490 - DNA, 15 bp, Homo sapiens
aggcaaagcctactc

SEQ ID NO: 1444491 - DNA, 15 bp, Homo sapiens
gaggcaaagcctact

SEQ ID NO: 1444492 - DNA, 15 bp, Homo sapiens
agaggcaaagcctac

SEQ ID NO: 1444493 - DNA, 15 bp, Homo sapiens
aagaggcaaagccta

SEQ ID NO: 1444494 - DNA, 15 bp, Homo sapiens
caagaggcaaagcct

SEQ ID NO: 1444495 - DNA, 15 bp, Homo sapiens
tcaagaggcaaagcc

SEQ ID NO: 1444496 - DNA, 15 bp, Homo sapiens
atcaagaggcaaagc

SEQ ID NO: 1444497 - DNA, 15 bp, Homo sapiens
tatcaagaggcaaag

SEQ ID NO: 1444498 - DNA, 15 bp, Homo sapiens
ctatcaagaggcaaa

SEQ ID NO: 1444499 - DNA, 15 bp, Homo sapiens
cctatcaagaggcaa

SEQ ID NO: 1444500 - DNA, 15 bp, Homo sapiens
tcctatcaagaggca

SEQ ID NO: 1444501 - DNA, 15 bp, Homo sapiens
ctcctatcaagaggc

SEQ ID NO: 1444502 - DNA, 15 bp, Homo sapiens
cctcctatcaagagg

SEQ ID NO: 1444503 - DNA, 15 bp, Homo sapiens
tcctcctatcaagag

SEQ ID NO: 1444504 - DNA, 15 bp, Homo sapiens
ctcctcctatcaaga

SEQ ID NO: 1444505 - DNA, 15 bp, Homo sapiens
gctcctcctatcaag

SEQ ID NO: 1444506 - DNA, 15 bp, Homo sapiens
agctcctcctatcaa

SEQ ID NO: 1444507 - DNA, 15 bp, Homo sapiens
cagctcctcctatca

SEQ ID NO: 1444508 - DNA, 15 bp, Homo sapiens
gcagctcctcctatc

SEQ ID NO: 1444509 - DNA, 15 bp, Homo sapiens
tgcagctcctcctat

SEQ ID NO: 1444510 - DNA, 15 bp, Homo sapiens
ttgcagctcctccta

SEQ ID NO: 1444511 - DNA, 15 bp, Homo sapiens
tttgcagctcctcct

SEQ ID NO: 1444512 - DNA, 15 bp, Homo sapiens
ttttgcagctcctcc

SEQ ID NO: 1444513 - DNA, 15 bp, Homo sapiens
gttttgcagctcctc

SEQ ID NO: 1444514 - DNA, 15 bp, Homo sapiens
tgttttgcagctcct

SEQ ID NO: 1444515 - DNA, 15 bp, Homo sapiens
atgttttgcagctcc

SEQ ID NO: 1444516 - DNA, 15 bp, Homo sapiens
aatgttttgcagctc

SEQ ID NO: 1444517 - DNA, 15 bp, Homo sapiens
aaatgttttgcagct

SEQ ID NO: 1444518 - DNA, 15 bp, Homo sapiens
caaatgttttgcagc

SEQ ID NO: 1444519 - DNA, 15 bp, Homo sapiens
acaaatgttttgcag

SEQ ID NO: 1444520 - DNA, 15 bp, Homo sapiens
gacaaatgttttgca

SEQ ID NO: 1444521 - DNA, 15 bp, Homo sapiens
tgacaaatgttttgc

SEQ ID NO: 1444522 - DNA, 15 bp, Homo sapiens
gtgacaaatgttttg

SEQ ID NO: 1444523 - DNA, 15 bp, Homo sapiens
ggtgacaaatgtttt

SEQ ID NO: 1444524 - DNA, 15 bp, Homo sapiens
tggtgacaaatgttt

SEQ ID NO: 1444525 - DNA, 15 bp, Homo sapiens
gtggtgacaaatgtt

SEQ ID NO: 1444526 - DNA, 15 bp, Homo sapiens
tgtggtgacaaatgt

SEQ ID NO: 1444527 - DNA, 15 bp, Homo sapiens
atgtggtgacaaatg

SEQ ID NO: 1444528 - DNA, 15 bp, Homo sapiens
aatgtggtgacaaat

SEQ ID NO: 1444529 - DNA, 15 bp, Homo sapiens
aaatgtggtgacaaa

SEQ ID NO: 1444530 - DNA, 15 bp, Homo sapiens
taaatgtggtgacaa

SEQ ID NO: 1444531 - DNA, 15 bp, Homo sapiens
ttaaatgtggtgaca

SEQ ID NO: 1444532 - DNA, 15 bp, Homo sapiens
attaaatgtggtgac

SEQ ID NO: 1444533 - DNA, 15 bp, Homo sapiens
gattaaatgtggtga

SEQ ID NO: 1444534 - DNA, 15 bp, Homo sapiens
agattaaatgtggtg

SEQ ID NO: 1444535 - DNA, 15 bp, Homo sapiens
tagattaaatgtggt

SEQ ID NO: 1444536 - DNA, 15 bp, Homo sapiens
gtagattaaatgtgg

SEQ ID NO: 1444537 - DNA, 15 bp, Homo sapiens
ggtagattaaatgtg

SEQ ID NO: 1444538 - DNA, 15 bp, Homo sapiens
tggtagattaaatgt

SEQ ID NO: 1444539 - DNA, 15 bp, Homo sapiens
gtggtagattaaatg

SEQ ID NO: 1444540 - DNA, 15 bp, Homo sapiens
tgtggtagattaaat

SEQ ID NO: 1444541 - DNA, 15 bp, Homo sapiens
ctgtggtagattaaa

SEQ ID NO: 1444542 - DNA, 15 bp, Homo sapiens
cctgtggtagattaa

SEQ ID NO: 1444543 - DNA, 15 bp, Homo sapiens
tcctgtggtagatta

SEQ ID NO: 1444544 - DNA, 15 bp, Homo sapiens
atcctgtggtagatt

SEQ ID NO: 1444545 - DNA, 15 bp, Homo sapiens
tatcctgtggtagat

SEQ ID NO: 1444546 - DNA, 15 bp, Homo sapiens
gtatcctgtggtaga

SEQ ID NO: 1444547 - DNA, 15 bp, Homo sapiens
tgtatcctgtggtag

SEQ ID NO: 1444548 - DNA, 15 bp, Homo sapiens
ttgtatcctgtggta

SEQ ID NO: 1444549 - DNA, 15 bp, Homo sapiens
cttgtatcctgtggt

SEQ ID NO: 1444550 - DNA, 15 bp, Homo sapiens
ccttgtatcctgtgg

SEQ ID NO: 1444551 - DNA, 15 bp, Homo sapiens
gccttgtatcctgtg

SEQ ID NO: 1444552 - DNA, 15 bp, Homo sapiens
agccttgtatcctgt

SEQ ID NO: 1444553 - DNA, 15 bp, Homo sapiens
aagccttgtatcctg

SEQ ID NO: 1444554 - DNA, 15 bp, Homo sapiens
gaagccttgtatcct

SEQ ID NO: 1444555 - DNA, 15 bp, Homo sapiens
agaagccttgtatcc

SEQ ID NO: 1444556 - DNA, 15 bp, Homo sapiens
gagaagccttgtatc

SEQ ID NO: 1444557 - DNA, 15 bp, Homo sapiens
tgagaagccttgtat

SEQ ID NO: 1444558 - DNA, 15 bp, Homo sapiens
ttgagaagccttgta

SEQ ID NO: 1444559 - DNA, 15 bp, Homo sapiens
cttgagaagccttgt

SEQ ID NO: 1444560 - DNA, 15 bp, Homo sapiens
tcttgagaagccttg

SEQ ID NO: 1444561 - DNA, 15 bp, Homo sapiens
atcttgagaagcctt

SEQ ID NO: 1444562 - DNA, 15 bp, Homo sapiens
gatcttgagaagcct

SEQ ID NO: 1444563 - DNA, 15 bp, Homo sapiens
agatcttgagaagcc

SEQ ID NO: 1444564 - DNA, 15 bp, Homo sapiens
aagatcttgagaagc

SEQ ID NO: 1444565 - DNA, 15 bp, Homo sapiens
caagatcttgagaag

SEQ ID NO: 1444566 - DNA, 15 bp, Homo sapiens
acaagatcttgagaa

SEQ ID NO: 1444567 - DNA, 15 bp, Homo sapiens
gacaagatcttgaga

SEQ ID NO: 1444568 - DNA, 15 bp, Homo sapiens
ggacaagatcttgag

SEQ ID NO: 1444569 - DNA, 15 bp, Homo sapiens
gggacaagatcttga

SEQ ID NO: 1444570 - DNA, 15 bp, Homo sapiens
tgggacaagatcttg

SEQ ID NO: 1444571 - DNA, 15 bp, Homo sapiens
ctgggacaagatctt

SEQ ID NO: 1444572 - DNA, 15 bp, Homo sapiens
tctgggacaagatct

SEQ ID NO: 1444573 - DNA, 15 bp, Homo sapiens
gtctgggacaagatc

SEQ ID NO: 1444574 - DNA, 15 bp, Homo sapiens
agtctgggacaagat

SEQ ID NO: 1444575 - DNA, 15 bp, Homo sapiens
cagtctgggacaaga

SEQ ID NO: 1444576 - DNA, 15 bp, Homo sapiens
acagtctgggacaag

SEQ ID NO: 1444577 - DNA, 15 bp, Homo sapiens
gacagtctgggacaa

SEQ ID NO: 1444578 - DNA, 15 bp, Homo sapiens
tgacagtctgggaca

SEQ ID NO: 1444579 - DNA, 15 bp, Homo sapiens
gtgacagtctgggac

SEQ ID NO: 1444580 - DNA, 15 bp, Homo sapiens
agtgacagtctggga

SEQ ID NO: 1444581 - DNA, 15 bp, Homo sapiens
aagtgacagtctggg

SEQ ID NO: 1444582 - DNA, 15 bp, Homo sapiens
gaagtgacagtctgg

SEQ ID NO: 1444583 - DNA, 15 bp, Homo sapiens
agaagtgacagtctg

SEQ ID NO: 1444584 - DNA, 15 bp, Homo sapiens
gagaagtgacagtct

SEQ ID NO: 1444585 - DNA, 15 bp, Homo sapiens
ggagaagtgacagtc

SEQ ID NO: 1444586 - DNA, 15 bp, Homo sapiens
tggagaagtgacagt

SEQ ID NO: 1444587 - DNA, 15 bp, Homo sapiens
ttggagaagtgacag

SEQ ID NO: 1444588 - DNA, 15 bp, Homo sapiens
gttggagaagtgaca

SEQ ID NO: 1444589 - DNA, 15 bp, Homo sapiens
ggttggagaagtgac

SEQ ID NO: 1444590 - DNA, 15 bp, Homo sapiens
aggttggagaagtga

SEQ ID NO: 1444591 - DNA, 15 bp, Homo sapiens
gaggttggagaagtg

SEQ ID NO: 1444592 - DNA, 15 bp, Homo sapiens
tgaggttggagaagt

SEQ ID NO: 1444593 - DNA, 15 bp, Homo sapiens
atgaggttggagaag

SEQ ID NO: 1444594 - DNA, 15 bp, Homo sapiens
aatgaggttggagaa

SEQ ID NO: 1444595 - DNA, 15 bp, Homo sapiens
aaatgaggttggaga

SEQ ID NO: 1444596 - DNA, 15 bp, Homo sapiens
gaaatgaggttggag

SEQ ID NO: 1444597 - DNA, 15 bp, Homo sapiens
ggaaatgaggttgga

SEQ ID NO: 1444598 - DNA, 15 bp, Homo sapiens
aggaaatgaggttgg

SEQ ID NO: 1444599 - DNA, 15 bp, Homo sapiens
aaggaaatgaggttg

SEQ ID NO: 1444600 - DNA, 15 bp, Homo sapiens
caaggaaatgaggtt

SEQ ID NO: 1444601 - DNA, 15 bp, Homo sapiens
gcaaggaaatgaggt

SEQ ID NO: 1444602 - DNA, 15 bp, Homo sapiens
agcaaggaaatgagg

SEQ ID NO: 1444603 - DNA, 15 bp, Homo sapiens
gagcaaggaaatgag

SEQ ID NO: 1444604 - DNA, 15 bp, Homo sapiens
tgagcaaggaaatga

SEQ ID NO: 1444605 - DNA, 15 bp, Homo sapiens
ttgagcaaggaaatg

SEQ ID NO: 1444606 - DNA, 15 bp, Homo sapiens
tttgagcaaggaaat

SEQ ID NO: 1444607 - DNA, 15 bp, Homo sapiens
gtttgagcaaggaaa

SEQ ID NO: 1444608 - DNA, 15 bp, Homo sapiens
agtttgagcaaggaa

SEQ ID NO: 1444609 - DNA, 15 bp, Homo sapiens
gagtttgagcaagga

SEQ ID NO: 1444610 - DNA, 15 bp, Homo sapiens
agagtttgagcaagg

SEQ ID NO: 1444611 - DNA, 15 bp, Homo sapiens
aagagtttgagcaag

SEQ ID NO: 1444612 - DNA, 15 bp, Homo sapiens
aaagagtttgagcaa

SEQ ID NO: 1444613 - DNA, 15 bp, Homo sapiens
caaagagtttgagca

SEQ ID NO: 1444614 - DNA, 15 bp, Homo sapiens
gcaaagagtttgagc

SEQ ID NO: 1444615 - DNA, 15 bp, Homo sapiens
tgcaaagagtttgag

SEQ ID NO: 1444616 - DNA, 15 bp, Homo sapiens
ttgcaaagagtttga

SEQ ID NO: 1444617 - DNA, 15 bp, Homo sapiens
attgcaaagagtttg

SEQ ID NO: 1444618 - DNA, 15 bp, Homo sapiens
tattgcaaagagttt

SEQ ID NO: 1444619 - DNA, 15 bp, Homo sapiens
ctattgcaaagagtt

SEQ ID NO: 1444620 - DNA, 15 bp, Homo sapiens
gctattgcaaagagt

SEQ ID NO: 1444621 - DNA, 15 bp, Homo sapiens
ggctattgcaaagag

SEQ ID NO: 1444622 - DNA, 15 bp, Homo sapiens
tggctattgcaaaga

SEQ ID NO: 1444623 - DNA, 15 bp, Homo sapiens
atggctattgcaaag

SEQ ID NO: 1444624 - DNA, 15 bp, Homo sapiens
aatggctattgcaaa

SEQ ID NO: 1444625 - DNA, 15 bp, Homo sapiens
gaatggctattgcaa

SEQ ID NO: 1444626 - DNA, 15 bp, Homo sapiens
agaatggctattgca

SEQ ID NO: 1444627 - DNA, 15 bp, Homo sapiens
cagaatggctattgc

SEQ ID NO: 1444628 - DNA, 15 bp, Homo sapiens
tcagaatggctattg

SEQ ID NO: 1444629 - DNA, 15 bp, Homo sapiens
ttcagaatggctatt

SEQ ID NO: 1444630 - DNA, 15 bp, Homo sapiens
gttcagaatggctat

SEQ ID NO: 1444631 - DNA, 15 bp, Homo sapiens
agttcagaatggcta

SEQ ID NO: 1444632 - DNA, 15 bp, Homo sapiens
tagttcagaatggct

SEQ ID NO: 1444633 - DNA, 15 bp, Homo sapiens
atagttcagaatggc

SEQ ID NO: 1444634 - DNA, 15 bp, Homo sapiens
catagttcagaatgg

SEQ ID NO: 1444635 - DNA, 15 bp, Homo sapiens
acatagttcagaatg

SEQ ID NO: 1444636 - DNA, 15 bp, Homo sapiens
cacatagttcagaat

SEQ ID NO: 1444637 - DNA, 15 bp, Homo sapiens
gcacatagttcagaa

SEQ ID NO: 1444638 - DNA, 15 bp, Homo sapiens
tgcacatagttcaga

SEQ ID NO: 1444639 - DNA, 15 bp, Homo sapiens
gtgcacatagttcag

SEQ ID NO: 1444640 - DNA, 15 bp, Homo sapiens
agtgcacatagttca

SEQ ID NO: 1444641 - DNA, 15 bp, Homo sapiens
aagtgcacatagttc

SEQ ID NO: 1444642 - DNA, 15 bp, Homo sapiens
gaagtgcacatagtt

SEQ ID NO: 1444643 - DNA, 15 bp, Homo sapiens
ggaagtgcacatagt

SEQ ID NO: 1444644 - DNA, 15 bp, Homo sapiens
gggaagtgcacatag

SEQ ID NO: 1444645 - DNA, 15 bp, Homo sapiens
tgggaagtgcacata

SEQ ID NO: 1444646 - DNA, 15 bp, Homo sapiens
ctgggaagtgcacat

SEQ ID NO: 1444647 - DNA, 15 bp, Homo sapiens
tctgggaagtgcaca

SEQ ID NO: 1444648 - DNA, 15 bp, Homo sapiens
ttctgggaagtgcac

SEQ ID NO: 1444649 - DNA, 15 bp, Homo sapiens
attctgggaagtgca

SEQ ID NO: 1444650 - DNA, 15 bp, Homo sapiens
tattctgggaagtgc

SEQ ID NO: 1444651 - DNA, 15 bp, Homo sapiens
atattctgggaagtg

SEQ ID NO: 1444652 - DNA, 15 bp, Homo sapiens
aatattctgggaagt

SEQ ID NO: 1444653 - DNA, 15 bp, Homo sapiens
aaatattctgggaag

SEQ ID NO: 1444654 - DNA, 15 bp, Homo sapiens
aaaatattctgggaa

SEQ ID NO: 1444655 - DNA, 15 bp, Homo sapiens
taaaatattctggga

SEQ ID NO: 1444656 - DNA, 15 bp, Homo sapiens
ataaaatattctggg

SEQ ID NO: 1444657 - DNA, 15 bp, Homo sapiens
tataaaatattctgg

SEQ ID NO: 1444658 - DNA, 15 bp, Homo sapiens
gtataaaatattctg

SEQ ID NO: 1444659 - DNA, 15 bp, Homo sapiens
agtataaaatattct

SEQ ID NO: 1444660 - DNA, 15 bp, Homo sapiens
aagtataaaatattc

SEQ ID NO: 1444661 - DNA, 15 bp, Homo sapiens
aaagtataaaatatt

SEQ ID NO: 1444662 - DNA, 15 bp, Homo sapiens
aaaagtataaaatat

SEQ ID NO: 1444663 - DNA, 15 bp, Homo sapiens
taaaagtataaaata

SEQ ID NO: 1444664 - DNA, 15 bp, Homo sapiens
catataaaagtataa

SEQ ID NO: 1444665 - DNA, 15 bp, Homo sapiens
acatataaaagtata

SEQ ID NO: 1444666 - DNA, 15 bp, Homo sapiens
tacatataaaagtat

SEQ ID NO: 1444667 - DNA, 15 bp, Homo sapiens
atacatataaaagta

SEQ ID NO: 1444668 - DNA, 15 bp, Homo sapiens
catacatataaaagt

SEQ ID NO: 1444669 - DNA, 15 bp, Homo sapiens
gcatacatataaaag

SEQ ID NO: 1444670 - DNA, 15 bp, Homo sapiens
ggcatacatataaaa

SEQ ID NO: 1444671 - DNA, 15 bp, Homo sapiens
aggcatacatataaa

SEQ ID NO: 1444672 - DNA, 15 bp, Homo sapiens
aaggcatacatataa

SEQ ID NO: 1444673 - DNA, 15 bp, Homo sapiens
aaaggcatacatata

SEQ ID NO: 1444674 - DNA, 15 bp, Homo sapiens
aaaaggcatacatat

SEQ ID NO: 1444675 - DNA, 15 bp, Homo sapiens
aaaaaggcatacata

SEQ ID NO: 1444676 - DNA, 15 bp, Homo sapiens
taaaaaggcatacat

SEQ ID NO: 1444677 - DNA, 15 bp, Homo sapiens
ataaaaaggcataca

SEQ ID NO: 1444678 - DNA, 15 bp, Homo sapiens
aataaaaaggcatac

SEQ ID NO: 1444679 - DNA, 15 bp, Homo sapiens
aaataaaaaggcata

SEQ ID NO: 1444680 - DNA, 15 bp, Homo sapiens
caaataaaaaggcat

SEQ ID NO: 1444681 - DNA, 15 bp, Homo sapiens
gcaaataaaaaggca

SEQ ID NO: 1444682 - DNA, 15 bp, Homo sapiens
agcaaataaaaaggc

SEQ ID NO: 1444683 - DNA, 15 bp, Homo sapiens
aagcaaataaaaagg

SEQ ID NO: 1444684 - DNA, 15 bp, Homo sapiens
aaagcaaataaaaag

SEQ ID NO: 1444685 - DNA, 15 bp, Homo sapiens
aaaagcaaataaaaa

SEQ ID NO: 1444686 - DNA, 15 bp, Homo sapiens
gaaaagcaaataaaa

SEQ ID NO: 1444687 - DNA, 15 bp, Homo sapiens
ggaaaagcaaataaa

SEQ ID NO: 1444688 - DNA, 15 bp, Homo sapiens
aggaaaagcaaataa

SEQ ID NO: 1444689 - DNA, 15 bp, Homo sapiens
caggaaaagcaaata

SEQ ID NO: 1444690 - DNA, 15 bp, Homo sapiens
gcaggaaaagcaaat

SEQ ID NO: 1444691 - DNA, 15 bp, Homo sapiens
agcaggaaaagcaaa

SEQ ID NO: 1444692 - DNA, 15 bp, Homo sapiens
aagcaggaaaagcaa

SEQ ID NO: 1444693 - DNA, 15 bp, Homo sapiens
gaagcaggaaaagca

SEQ ID NO: 1444694 - DNA, 15 bp, Homo sapiens
agaagcaggaaaagc

SEQ ID NO: 1444695 - DNA, 15 bp, Homo sapiens
aagaagcaggaaaag

SEQ ID NO: 1444696 - DNA, 15 bp, Homo sapiens
caagaagcaggaaaa

SEQ ID NO: 1444697 - DNA, 15 bp, Homo sapiens
ccaagaagcaggaaa

SEQ ID NO: 1444698 - DNA, 15 bp, Homo sapiens
gccaagaagcaggaa

SEQ ID NO: 1444699 - DNA, 15 bp, Homo sapiens
cgccaagaagcagga

SEQ ID NO: 1444700 - DNA, 15 bp, Homo sapiens
ccgccaagaagcagg

SEQ ID NO: 1444701 - DNA, 15 bp, Homo sapiens
gccgccaagaagcag

SEQ ID NO: 1444702 - DNA, 15 bp, Homo sapiens
ggccgccaagaagca

SEQ ID NO: 1444703 - DNA, 15 bp, Homo sapiens
tggccgccaagaagc

SEQ ID NO: 1444704 - DNA, 15 bp, Homo sapiens
atggccgccaagaag

SEQ ID NO: 1444705 - DNA, 15 bp, Homo sapiens
tatggccgccaagaa

SEQ ID NO: 1444706 - DNA, 15 bp, Homo sapiens
gtatggccgccaaga

SEQ ID NO: 1444707 - DNA, 15 bp, Homo sapiens
agtatggccgccaag

SEQ ID NO: 1444708 - DNA, 15 bp, Homo sapiens
cagtatggccgccaa

SEQ ID NO: 1444709 - DNA, 15 bp, Homo sapiens
ccagtatggccgcca

SEQ ID NO: 1444710 - DNA, 15 bp, Homo sapiens
tccagtatggccgcc

SEQ ID NO: 1444711 - DNA, 15 bp, Homo sapiens
ttccagtatggccgc

SEQ ID NO: 1444712 - DNA, 15 bp, Homo sapiens
tttccagtatggccg

SEQ ID NO: 1444713 - DNA, 15 bp, Homo sapiens
atttccagtatggcc

SEQ ID NO: 1444714 - DNA, 15 bp, Homo sapiens
aatttccagtatggc

SEQ ID NO: 1444715 - DNA, 15 bp, Homo sapiens
gaatttccagtatgg

SEQ ID NO: 1444716 - DNA, 15 bp, Homo sapiens
ggaatttccagtatg

SEQ ID NO: 1444717 - DNA, 15 bp, Homo sapiens
aggaatttccagtat

SEQ ID NO: 1444718 - DNA, 15 bp, Homo sapiens
gaggaatttccagta

SEQ ID NO: 1444719 - DNA, 15 bp, Homo sapiens
tgaggaatttccagt

SEQ ID NO: 1444720 - DNA, 15 bp, Homo sapiens
ctgaggaatttccag

SEQ ID NO: 1444721 - DNA, 15 bp, Homo sapiens
tctgaggaatttcca

SEQ ID NO: 1444722 - DNA, 15 bp, Homo sapiens
atctgaggaatttcc

SEQ ID NO: 1444723 - DNA, 15 bp, Homo sapiens
tatctgaggaatttc

SEQ ID NO: 1444724 - DNA, 15 bp, Homo sapiens
atatctgaggaattt

SEQ ID NO: 1444725 - DNA, 15 bp, Homo sapiens
gatatctgaggaatt

SEQ ID NO: 1444726 - DNA, 15 bp, Homo sapiens
tgatatctgaggaat

SEQ ID NO: 1444727 - DNA, 15 bp, Homo sapiens
gtgatatctgaggaa

SEQ ID NO: 1444728 - DNA, 15 bp, Homo sapiens
ggtgatatctgagga

SEQ ID NO: 1444729 - DNA, 15 bp, Homo sapiens
aggtgatatctgagg

SEQ ID NO: 1444730 - DNA, 15 bp, Homo sapiens
aaggtgatatctgag

SEQ ID NO: 1444731 - DNA, 15 bp, Homo sapiens
gaaggtgatatctga

SEQ ID NO: 1444732 - DNA, 15 bp, Homo sapiens
agaaggtgatatctg

SEQ ID NO: 1444733 - DNA, 15 bp, Homo sapiens
gagaaggtgatatct

SEQ ID NO: 1444734 - DNA, 15 bp, Homo sapiens
agagaaggtgatatc

SEQ ID NO: 1444735 - DNA, 15 bp, Homo sapiens
cagagaaggtgatat

SEQ ID NO: 1444736 - DNA, 15 bp, Homo sapiens
ccagagaaggtgata

SEQ ID NO: 1444737 - DNA, 15 bp, Homo sapiens
cccagagaaggtgat

SEQ ID NO: 1444738 - DNA, 15 bp, Homo sapiens
ccccagagaaggtga

SEQ ID NO: 1444739 - DNA, 15 bp, Homo sapiens
accccagagaaggtg

SEQ ID NO: 1444740 - DNA, 15 bp, Homo sapiens
caccccagagaaggt

SEQ ID NO: 1444741 - DNA, 15 bp, Homo sapiens
gcaccccagagaagg

SEQ ID NO: 1444742 - DNA, 15 bp, Homo sapiens
ggcaccccagagaag

SEQ ID NO: 1444743 - DNA, 15 bp, Homo sapiens
aggcaccccagagaa

SEQ ID NO: 1444744 - DNA, 15 bp, Homo sapiens
aaggcaccccagaga

SEQ ID NO: 1444745 - DNA, 15 bp, Homo sapiens
gaaggcaccccagag

SEQ ID NO: 1444746 - DNA, 15 bp, Homo sapiens
ggaaggcaccccaga

SEQ ID NO: 1444747 - DNA, 15 bp, Homo sapiens
aggaaggcaccccag

SEQ ID NO: 1444748 - DNA, 15 bp, Homo sapiens
aaggaaggcacccca

SEQ ID NO: 1444749 - DNA, 15 bp, Homo sapiens
caaggaaggcacccc

SEQ ID NO: 1444750 - DNA, 15 bp, Homo sapiens
tcaaggaaggcaccc

SEQ ID NO: 1444751 - DNA, 15 bp, Homo sapiens
atcaaggaaggcacc

SEQ ID NO: 1444752 - DNA, 15 bp, Homo sapiens
gatcaaggaaggcac

SEQ ID NO: 1444753 - DNA, 15 bp, Homo sapiens
ggatcaaggaaggca

SEQ ID NO: 1444754 - DNA, 15 bp, Homo sapiens
gggatcaaggaaggc

SEQ ID NO: 1444755 - DNA, 15 bp, Homo sapiens
ggggatcaaggaagg

SEQ ID NO: 1444756 - DNA, 15 bp, Homo sapiens
tggggatcaaggaag

SEQ ID NO: 1444757 - DNA, 15 bp, Homo sapiens
ttggggatcaaggaa

SEQ ID NO: 1444758 - DNA, 15 bp, Homo sapiens
attggggatcaagga

SEQ ID NO: 1444759 - DNA, 15 bp, Homo sapiens
aattggggatcaagg

SEQ ID NO: 1444760 - DNA, 15 bp, Homo sapiens
aaattggggatcaag

SEQ ID NO: 1444761 - DNA, 15 bp, Homo sapiens
aaaattggggatcaa

SEQ ID NO: 1444762 - DNA, 15 bp, Homo sapiens
caaaattggggatca

SEQ ID NO: 1444763 - DNA, 15 bp, Homo sapiens
tcaaaattggggatc

SEQ ID NO: 1444764 - DNA, 15 bp, Homo sapiens
atcaaaattggggat

SEQ ID NO: 1444765 - DNA, 15 bp, Homo sapiens
aatcaaaattgggga

SEQ ID NO: 1444766 - DNA, 15 bp, Homo sapiens
aaatcaaaattgggg

SEQ ID NO: 1444767 - DNA, 15 bp, Homo sapiens
taaatcaaaattggg

SEQ ID NO: 1444768 - DNA, 15 bp, Homo sapiens
ctaaatcaaaattgg

SEQ ID NO: 1444769 - DNA, 15 bp, Homo sapiens
actaaatcaaaattg

SEQ ID NO: 1444770 - DNA, 15 bp, Homo sapiens
aactaaatcaaaatt

SEQ ID NO: 1444771 - DNA, 15 bp, Homo sapiens
gaactaaatcaaaat

SEQ ID NO: 1444772 - DNA, 15 bp, Homo sapiens
agaactaaatcaaaa

SEQ ID NO: 1444773 - DNA, 15 bp, Homo sapiens
cagaactaaatcaaa

SEQ ID NO: 1444774 - DNA, 15 bp, Homo sapiens
acagaactaaatcaa

SEQ ID NO: 1444775 - DNA, 15 bp, Homo sapiens
tacagaactaaatca

SEQ ID NO: 1444776 - DNA, 15 bp, Homo sapiens
atacagaactaaatc

SEQ ID NO: 1444777 - DNA, 15 bp, Homo sapiens
gatacagaactaaat

SEQ ID NO: 1444778 - DNA, 15 bp, Homo sapiens
tgatacagaactaaa

SEQ ID NO: 1444779 - DNA, 15 bp, Homo sapiens
ctgatacagaactaa

SEQ ID NO: 1444780 - DNA, 15 bp, Homo sapiens
actgatacagaacta

SEQ ID NO: 1444781 - DNA, 15 bp, Homo sapiens
aactgatacagaact

SEQ ID NO: 1444782 - DNA, 15 bp, Homo sapiens
caactgatacagaac

SEQ ID NO: 1444783 - DNA, 15 bp, Homo sapiens
tcaactgatacagaa

SEQ ID NO: 1444784 - DNA, 15 bp, Homo sapiens
ctcaactgatacaga

SEQ ID NO: 1444785 - DNA, 15 bp, Homo sapiens
tctcaactgatacag

SEQ ID NO: 1444786 - DNA, 15 bp, Homo sapiens
atctcaactgataca

SEQ ID NO: 1444787 - DNA, 15 bp, Homo sapiens
catctcaactgatac

SEQ ID NO: 1444788 - DNA, 15 bp, Homo sapiens
acatctcaactgata

SEQ ID NO: 1444789 - DNA, 15 bp, Homo sapiens
cacatctcaactgat

SEQ ID NO: 1444790 - DNA, 15 bp, Homo sapiens
tcacatctcaactga

SEQ ID NO: 1444791 - DNA, 15 bp, Homo sapiens
atcacatctcaactg

SEQ ID NO: 1444792 - DNA, 15 bp, Homo sapiens
catcacatctcaact

SEQ ID NO: 1444793 - DNA, 15 bp, Homo sapiens
acatcacatctcaac

SEQ ID NO: 1444794 - DNA, 15 bp, Homo sapiens
cacatcacatctcaa

SEQ ID NO: 1444795 - DNA, 15 bp, Homo sapiens
acacatcacatctca

SEQ ID NO: 1444796 - DNA, 15 bp, Homo sapiens
aacacatcacatctc

SEQ ID NO: 1444797 - DNA, 15 bp, Homo sapiens
caacacatcacatct

SEQ ID NO: 1444798 - DNA, 15 bp, Homo sapiens
gcaacacatcacatc

SEQ ID NO: 1444799 - DNA, 15 bp, Homo sapiens
tgcaacacatcacat

SEQ ID NO: 1444800 - DNA, 15 bp, Homo sapiens
ctgcaacacatcaca

SEQ ID NO: 1444801 - DNA, 15 bp, Homo sapiens
cctgcaacacatcac

SEQ ID NO: 1444802 - DNA, 15 bp, Homo sapiens
acctgcaacacatca

SEQ ID NO: 1444803 - DNA, 15 bp, Homo sapiens
tacctgcaacacatc

SEQ ID NO: 1444804 - DNA, 15 bp, Homo sapiens
ttacctgcaacacat

SEQ ID NO: 1444805 - DNA, 15 bp, Homo sapiens
attacctgcaacaca

SEQ ID NO: 1444806 - DNA, 15 bp, Homo sapiens
gattacctgcaacac

SEQ ID NO: 1444807 - DNA, 15 bp, Homo sapiens
tgattacctgcaaca

SEQ ID NO: 1444808 - DNA, 15 bp, Homo sapiens
ctgattacctgcaac

SEQ ID NO: 1444809 - DNA, 15 bp, Homo sapiens
tctgattacctgcaa

SEQ ID NO: 1444810 - DNA, 15 bp, Homo sapiens
ttctgattacctgca

SEQ ID NO: 1444811 - DNA, 15 bp, Homo sapiens
attctgattacctgc

SEQ ID NO: 1444812 - DNA, 15 bp, Homo sapiens
aattctgattacctg

SEQ ID NO: 1444813 - DNA, 15 bp, Homo sapiens
aaattctgattacct

SEQ ID NO: 1444814 - DNA, 15 bp, Homo sapiens
aaaattctgattacc

SEQ ID NO: 1444815 - DNA, 15 bp, Homo sapiens
caaaattctgattac

SEQ ID NO: 1444816 - DNA, 15 bp, Homo sapiens
tcaaaattctgatta

SEQ ID NO: 1444817 - DNA, 15 bp, Homo sapiens
gtcaaaattctgatt

SEQ ID NO: 1444818 - DNA, 15 bp, Homo sapiens
agtcaaaattctgat

SEQ ID NO: 1444819 - DNA, 15 bp, Homo sapiens
gagtcaaaattctga

SEQ ID NO: 1444820 - DNA, 15 bp, Homo sapiens
tgagtcaaaattctg

SEQ ID NO: 1444821 - DNA, 15 bp, Homo sapiens
ttgagtcaaaattct

SEQ ID NO: 1444822 - DNA, 15 bp, Homo sapiens
tttgagtcaaaattc

SEQ ID NO: 1444823 - DNA, 15 bp, Homo sapiens
ctttgagtcaaaatt

SEQ ID NO: 1444824 - DNA, 15 bp, Homo sapiens
gctttgagtcaaaat

SEQ ID NO: 1444825 - DNA, 15 bp, Homo sapiens
tgctttgagtcaaaa

SEQ ID NO: 1444826 - DNA, 15 bp, Homo sapiens
atgctttgagtcaaa

SEQ ID NO: 1444827 - DNA, 15 bp, Homo sapiens
gatgctttgagtcaa

SEQ ID NO: 1444828 - DNA, 15 bp, Homo sapiens
tgatgctttgagtca

SEQ ID NO: 1444829 - DNA, 15 bp, Homo sapiens
atgatgctttgagtc

SEQ ID NO: 1444830 - DNA, 15 bp, Homo sapiens
tatgatgctttgagt

SEQ ID NO: 1444831 - DNA, 15 bp, Homo sapiens
ttatgatgctttgag

SEQ ID NO: 1444832 - DNA, 15 bp, Homo sapiens
tttatgatgctttga

SEQ ID NO: 1444833 - DNA, 15 bp, Homo sapiens
ctttatgatgctttg

SEQ ID NO: 1444834 - DNA, 15 bp, Homo sapiens
tctttatgatgcttt

SEQ ID NO: 1444835 - DNA, 15 bp, Homo sapiens
ttctttatgatgctt

SEQ ID NO: 1444836 - DNA, 15 bp, Homo sapiens
tttctttatgatgct

SEQ ID NO: 1444837 - DNA, 15 bp, Homo sapiens
atttctttatgatgc

SEQ ID NO: 1444838 - DNA, 15 bp, Homo sapiens
aatttctttatgatg

SEQ ID NO: 1444839 - DNA, 15 bp, Homo sapiens
taatttctttatgat

SEQ ID NO: 1444840 - DNA, 15 bp, Homo sapiens
ctaatttctttatga

SEQ ID NO: 1444841 - DNA, 15 bp, Homo sapiens
cctaatttctttatg

SEQ ID NO: 1444842 - DNA, 15 bp, Homo sapiens
tcctaatttctttat

SEQ ID NO: 1444843 - DNA, 15 bp, Homo sapiens
ttcctaatttcttta

SEQ ID NO: 1444844 - DNA, 15 bp, Homo sapiens
tttcctaatttcttt

SEQ ID NO: 1444845 - DNA, 15 bp, Homo sapiens
atttcctaatttctt

SEQ ID NO: 1444846 - DNA, 15 bp, Homo sapiens
catttcctaatttct

SEQ ID NO: 1444847 - DNA, 15 bp, Homo sapiens
acatttcctaatttc

SEQ ID NO: 1444848 - DNA, 15 bp, Homo sapiens
tacatttcctaattt

SEQ ID NO: 1444849 - DNA, 15 bp, Homo sapiens
atacatttcctaatt

SEQ ID NO: 1444850 - DNA, 15 bp, Homo sapiens
aatacatttcctaat

SEQ ID NO: 1444851 - DNA, 15 bp, Homo sapiens
taatacatttcctaa

SEQ ID NO: 1444852 - DNA, 15 bp, Homo sapiens
ataatacatttccta

SEQ ID NO: 1444853 - DNA, 15 bp, Homo sapiens
aataatacatttcct

SEQ ID NO: 1444854 - DNA, 15 bp, Homo sapiens
aaataatacatttcc

SEQ ID NO: 1444855 - DNA, 15 bp, Homo sapiens
aaaataatacatttc

SEQ ID NO: 1444856 - DNA, 15 bp, Homo sapiens
taaaataatacattt

SEQ ID NO: 1444857 - DNA, 15 bp, Homo sapiens
ataaaataatacatt

SEQ ID NO: 1444858 - DNA, 15 bp, Homo sapiens
tataaaataatacat

SEQ ID NO: 1444859 - DNA, 15 bp, Homo sapiens
gtataaaataataca

SEQ ID NO: 1444860 - DNA, 15 bp, Homo sapiens
tgtataaaataatac

SEQ ID NO: 1444861 - DNA, 15 bp, Homo sapiens
atgtataaaataata

SEQ ID NO: 1444862 - DNA, 15 bp, Homo sapiens
gatgtataaaataat

SEQ ID NO: 1444863 - DNA, 15 bp, Homo sapiens
tgatgtataaaataa

SEQ ID NO: 1444864 - DNA, 15 bp, Homo sapiens
ttgatgtataaaata

SEQ ID NO: 1444865 - DNA, 15 bp, Homo sapiens
cttgatgtataaaat

SEQ ID NO: 1444866 - DNA, 15 bp, Homo sapiens
tcttgatgtataaaa

SEQ ID NO: 1444867 - DNA, 15 bp, Homo sapiens
ttcttgatgtataaa

SEQ ID NO: 1444868 - DNA, 15 bp, Homo sapiens
tttcttgatgtataa

SEQ ID NO: 1444869 - DNA, 15 bp, Homo sapiens
atttcttgatgtata

SEQ ID NO: 1444870 - DNA, 15 bp, Homo sapiens
catttcttgatgtat

SEQ ID NO: 1444871 - DNA, 15 bp, Homo sapiens
gcatttcttgatgta

SEQ ID NO: 1444872 - DNA, 15 bp, Homo sapiens
tgcatttcttgatgt

SEQ ID NO: 1444873 - DNA, 15 bp, Homo sapiens
ttgcatttcttgatg

SEQ ID NO: 1444874 - DNA, 15 bp, Homo sapiens
cttgcatttcttgat

SEQ ID NO: 1444875 - DNA, 15 bp, Homo sapiens
ccttgcatttcttga

SEQ ID NO: 1444876 - DNA, 15 bp, Homo sapiens
gccttgcatttcttg

SEQ ID NO: 1444877 - DNA, 15 bp, Homo sapiens
ggccttgcatttctt

SEQ ID NO: 1444878 - DNA, 15 bp, Homo sapiens
tggccttgcatttct

SEQ ID NO: 1444879 - DNA, 15 bp, Homo sapiens
ctggccttgcatttc

SEQ ID NO: 1444880 - DNA, 15 bp, Homo sapiens
cctggccttgcattt

SEQ ID NO: 1444881 - DNA, 15 bp, Homo sapiens
gcctggccttgcatt

SEQ ID NO: 1444882 - DNA, 15 bp, Homo sapiens
tgcctggccttgcat

SEQ ID NO: 1444883 - DNA, 15 bp, Homo sapiens
atgcctggccttgca

SEQ ID NO: 1444884 - DNA, 15 bp, Homo sapiens
catgcctggccttgc

SEQ ID NO: 1444885 - DNA, 15 bp, Homo sapiens
ccatgcctggccttg

SEQ ID NO: 1444886 - DNA, 15 bp, Homo sapiens
accatgcctggcctt

SEQ ID NO: 1444887 - DNA, 15 bp, Homo sapiens
aaccaccatgcctgg

SEQ ID NO: 1444888 - DNA, 15 bp, Homo sapiens
gaaccaccatgcctg

SEQ ID NO: 1444889 - DNA, 15 bp, Homo sapiens
tgaaccaccatgcct

SEQ ID NO: 1444890 - DNA, 15 bp, Homo sapiens
gtgaaccaccatgcc

SEQ ID NO: 1444891 - DNA, 15 bp, Homo sapiens
cgtgaaccaccatgc

SEQ ID NO: 1444892 - DNA, 15 bp, Homo sapiens
caggcgtgaaccacc

SEQ ID NO: 1444893 - DNA, 15 bp, Homo sapiens
ttgggattacaggcg

SEQ ID NO: 1444894 - DNA, 15 bp, Homo sapiens
ggtgttgggattaca

SEQ ID NO: 1444895 - DNA, 15 bp, Homo sapiens
cggtgttgggattac

SEQ ID NO: 1444896 - DNA, 15 bp, Homo sapiens
acggtgttgggatta

SEQ ID NO: 1444897 - DNA, 15 bp, Homo sapiens
cacggtgttgggatt

SEQ ID NO: 1444898 - DNA, 15 bp, Homo sapiens
ccacggtgttgggat

SEQ ID NO: 1444899 - DNA, 15 bp, Homo sapiens
tccacggtgttggga

SEQ ID NO: 1444900 - DNA, 15 bp, Homo sapiens
ttccacggtgttggg

SEQ ID NO: 1444901 - DNA, 15 bp, Homo sapiens
cttccacggtgttgg

SEQ ID NO: 1444902 - DNA, 15 bp, Homo sapiens
tcttccacggtgttg

SEQ ID NO: 1444903 - DNA, 15 bp, Homo sapiens
gtcttccacggtgtt

SEQ ID NO: 1444904 - DNA, 15 bp, Homo sapiens
agtcttccacggtgt

SEQ ID NO: 1444905 - DNA, 15 bp, Homo sapiens
cagtcttccacggtg

SEQ ID NO: 1444906 - DNA, 15 bp, Homo sapiens
tcagtcttccacggt

SEQ ID NO: 1444907 - DNA, 15 bp, Homo sapiens
ctcagtcttccacgg

SEQ ID NO: 1444908 - DNA, 15 bp, Homo sapiens
cctcagtcttccacg

SEQ ID NO: 1444909 - DNA, 15 bp, Homo sapiens
gcctcagtcttccac

SEQ ID NO: 1444910 - DNA, 15 bp, Homo sapiens
cgcctcagtcttcca

SEQ ID NO: 1444911 - DNA, 15 bp, Homo sapiens
ccgcctcagtcttcc

SEQ ID NO: 1444912 - DNA, 15 bp, Homo sapiens
cccgcctcagtcttc

SEQ ID NO: 1444913 - DNA, 15 bp, Homo sapiens
tcccgcctcagtctt

SEQ ID NO: 1444914 - DNA, 15 bp, Homo sapiens
ctcccgcctcagtct

SEQ ID NO: 1444915 - DNA, 15 bp, Homo sapiens
cctcccgcctcagtc

SEQ ID NO: 1444916 - DNA, 15 bp, Homo sapiens
tcctcccgcctcagt

SEQ ID NO: 1444917 - DNA, 15 bp, Homo sapiens
tggccttgaactcct

SEQ ID NO: 1444918 - DNA, 15 bp, Homo sapiens
ctggccttgaactcc

SEQ ID NO: 1444919 - DNA, 15 bp, Homo sapiens
gctggccttgaactc

SEQ ID NO: 1444920 - DNA, 15 bp, Homo sapiens
ggctggccttgaact

SEQ ID NO: 1444921 - DNA, 15 bp, Homo sapiens
aggctggccttgaac

SEQ ID NO: 1444922 - DNA, 15 bp, Homo sapiens
caggctggccttgaa

SEQ ID NO: 1444923 - DNA, 15 bp, Homo sapiens
ccaggctggccttga

SEQ ID NO: 1444924 - DNA, 15 bp, Homo sapiens
cccaggctggccttg

SEQ ID NO: 1444925 - DNA, 15 bp, Homo sapiens
gcccaggctggcctt

SEQ ID NO: 1444926 - DNA, 15 bp, Homo sapiens
tgcccaggctggcct

SEQ ID NO: 1444927 - DNA, 15 bp, Homo sapiens
ctgcccaggctggcc

SEQ ID NO: 1444928 - DNA, 15 bp, Homo sapiens
gctgcccaggctggc

SEQ ID NO: 1444929 - DNA, 15 bp, Homo sapiens
cgctgcccaggctgg

SEQ ID NO: 1444930 - DNA, 15 bp, Homo sapiens
acgctgcccaggctg

SEQ ID NO: 1444931 - DNA, 15 bp, Homo sapiens
tacgctgcccaggct

SEQ ID NO: 1444932 - DNA, 15 bp, Homo sapiens
ctacgctgcccaggc

SEQ ID NO: 1444933 - DNA, 15 bp, Homo sapiens
cctacgctgcccagg

SEQ ID NO: 1444934 - DNA, 15 bp, Homo sapiens
ccctacgctgcccag

SEQ ID NO: 1444935 - DNA, 15 bp, Homo sapiens
tccctacgctgccca

SEQ ID NO: 1444936 - DNA, 15 bp, Homo sapiens
ctccctacgctgccc

SEQ ID NO: 1444937 - DNA, 15 bp, Homo sapiens
tctccctacgctgcc

SEQ ID NO: 1444938 - DNA, 15 bp, Homo sapiens
gtctccctacgctgc

SEQ ID NO: 1444939 - DNA, 15 bp, Homo sapiens
ggtctccctacgctg

SEQ ID NO: 1444940 - DNA, 15 bp, Homo sapiens
gggtctccctacgct

SEQ ID NO: 1444941 - DNA, 15 bp, Homo sapiens
agggtctccctacgc

SEQ ID NO: 1444942 - DNA, 15 bp, Homo sapiens
cagggtctccctacg

SEQ ID NO: 1444943 - DNA, 15 bp, Homo sapiens
acagggtctccctac

SEQ ID NO: 1444944 - DNA, 15 bp, Homo sapiens
aaaattttttgtaga

SEQ ID NO: 1444945 - DNA, 15 bp, Homo sapiens
taaaattttttgtag

SEQ ID NO: 1444946 - DNA, 15 bp, Homo sapiens
ttaaaattttttgta

SEQ ID NO: 1444947 - DNA, 15 bp, Homo sapiens
tttaaaattttttgt

SEQ ID NO: 1444948 - DNA, 15 bp, Homo sapiens
ttttaaaattttttg

SEQ ID NO: 1444949 - DNA, 15 bp, Homo sapiens
aatttttaaaatttt

SEQ ID NO: 1444950 - DNA, 15 bp, Homo sapiens
ctaatttttaaaatt

SEQ ID NO: 1444951 - DNA, 15 bp, Homo sapiens
gctaatttttaaaat

SEQ ID NO: 1444952 - DNA, 15 bp, Homo sapiens
ggctaatttttaaaa

SEQ ID NO: 1444953 - DNA, 15 bp, Homo sapiens
tggctaatttttaaa

SEQ ID NO: 1444954 - DNA, 15 bp, Homo sapiens
ctggctaatttttaa

SEQ ID NO: 1444955 - DNA, 15 bp, Homo sapiens
tcatcatgcctggct

SEQ ID NO: 1444956 - DNA, 15 bp, Homo sapiens
atcatcatgcctggc

SEQ ID NO: 1444957 - DNA, 15 bp, Homo sapiens
catcatcatgcctgg

SEQ ID NO: 1444958 - DNA, 15 bp, Homo sapiens
acatcatcatgcctg

SEQ ID NO: 1444959 - DNA, 15 bp, Homo sapiens
cacatcatcatgcct

SEQ ID NO: 1444960 - DNA, 15 bp, Homo sapiens
gcacatcatcatgcc

SEQ ID NO: 1444961 - DNA, 15 bp, Homo sapiens
tgcacatcatcatgc

SEQ ID NO: 1444962 - DNA, 15 bp, Homo sapiens
gtgcacatcatcatg

SEQ ID NO: 1444963 - DNA, 15 bp, Homo sapiens
ggtgcacatcatcat

SEQ ID NO: 1444964 - DNA, 15 bp, Homo sapiens
caggtgcacatcatc

SEQ ID NO: 1444965 - DNA, 15 bp, Homo sapiens
acaggtgcacatcat

SEQ ID NO: 1444966 - DNA, 15 bp, Homo sapiens
tacaggtgcacatca

SEQ ID NO: 1444967 - DNA, 15 bp, Homo sapiens
ctacaggtgcacatc

SEQ ID NO: 1444968 - DNA, 15 bp, Homo sapiens
actacaggtgcacat

SEQ ID NO: 1444969 - DNA, 15 bp, Homo sapiens
ttcctgagtagctgg

SEQ ID NO: 1444970 - DNA, 15 bp, Homo sapiens
cttcctgagtagctg

SEQ ID NO: 1444971 - DNA, 15 bp, Homo sapiens
gcttcctgagtagct

SEQ ID NO: 1444972 - DNA, 15 bp, Homo sapiens
agcttcctgagtagc

SEQ ID NO: 1444973 - DNA, 15 bp, Homo sapiens
tagcttcctgagtag

SEQ ID NO: 1444974 - DNA, 15 bp, Homo sapiens
ttagcttcctgagta

SEQ ID NO: 1444975 - DNA, 15 bp, Homo sapiens
gttagcttcctgagt

SEQ ID NO: 1444976 - DNA, 15 bp, Homo sapiens
tgttagcttcctgag

SEQ ID NO: 1444977 - DNA, 15 bp, Homo sapiens
atgttagcttcctga

SEQ ID NO: 1444978 - DNA, 15 bp, Homo sapiens
catgttagcttcctg

SEQ ID NO: 1444979 - DNA, 15 bp, Homo sapiens
ccatgttagcttcct

SEQ ID NO: 1444980 - DNA, 15 bp, Homo sapiens
cccatgttagcttcc

SEQ ID NO: 1444981 - DNA, 15 bp, Homo sapiens
tcccatgttagcttc

SEQ ID NO: 1444982 - DNA, 15 bp, Homo sapiens
ctcccatgttagctt

SEQ ID NO: 1444983 - DNA, 15 bp, Homo sapiens
cctcccatgttagct

SEQ ID NO: 1444984 - DNA, 15 bp, Homo sapiens
tcctcccatgttagc

SEQ ID NO: 1444985 - DNA, 15 bp, Homo sapiens
atcctcccatgttag

SEQ ID NO: 1444986 - DNA, 15 bp, Homo sapiens
gatcctcccatgtta

SEQ ID NO: 1444987 - DNA, 15 bp, Homo sapiens
cgatcctcccatgtt

SEQ ID NO: 1444988 - DNA, 15 bp, Homo sapiens
gcgatcctcccatgt

SEQ ID NO: 1444989 - DNA, 15 bp, Homo sapiens
agcgatcctcccatg

SEQ ID NO: 1444990 - DNA, 15 bp, Homo sapiens
aagcgatcctcccat

SEQ ID NO: 1444991 - DNA, 15 bp, Homo sapiens
ccaagcgatcctccc

SEQ ID NO: 1444992 - DNA, 15 bp, Homo sapiens
cccaagcgatcctcc

SEQ ID NO: 1444993 - DNA, 15 bp, Homo sapiens
acccaagcgatcctc

SEQ ID NO: 1444994 - DNA, 15 bp, Homo sapiens
gacccaagcgatcct

SEQ ID NO: 1444995 - DNA, 15 bp, Homo sapiens
ggacccaagcgatcc

SEQ ID NO: 1444996 - DNA, 15 bp, Homo sapiens
aggacccaagcgatc

SEQ ID NO: 1444997 - DNA, 15 bp, Homo sapiens
taggacccaagcgat

SEQ ID NO: 1444998 - DNA, 15 bp, Homo sapiens
gtaggacccaagcga

SEQ ID NO: 1444999 - DNA, 15 bp, Homo sapiens
agtaggacccaagcg

SEQ ID NO: 1445000 - DNA, 15 bp, Homo sapiens
tagtaggacccaagc

SEQ ID NO: 1445001 - DNA, 15 bp, Homo sapiens
ttagtaggacccaag

SEQ ID NO: 1445002 - DNA, 15 bp, Homo sapiens
cttagtaggacccaa

SEQ ID NO: 1445003 - DNA, 15 bp, Homo sapiens
gcttagtaggaccca

SEQ ID NO: 1445004 - DNA, 15 bp, Homo sapiens
ggcttagtaggaccc

SEQ ID NO: 1445005 - DNA, 15 bp, Homo sapiens
aggcttagtaggacc

SEQ ID NO: 1445006 - DNA, 15 bp, Homo sapiens
aaggcttagtaggac

SEQ ID NO: 1445007 - DNA, 15 bp, Homo sapiens
caaggcttagtagga

SEQ ID NO: 1445008 - DNA, 15 bp, Homo sapiens
ccaaggcttagtagg

SEQ ID NO: 1445009 - DNA, 15 bp, Homo sapiens
cccaaggcttagtag

SEQ ID NO: 1445010 - DNA, 15 bp, Homo sapiens
tcccaaggcttagta

SEQ ID NO: 1445011 - DNA, 15 bp, Homo sapiens
ctcccaaggcttagt

SEQ ID NO: 1445012 - DNA, 15 bp, Homo sapiens
cctcccaaggcttag

SEQ ID NO: 1445013 - DNA, 15 bp, Homo sapiens
acctcccaaggctta

SEQ ID NO: 1445014 - DNA, 15 bp, Homo sapiens
aacctcccaaggctt

SEQ ID NO: 1445015 - DNA, 15 bp, Homo sapiens
caacctcccaaggct

SEQ ID NO: 1445016 - DNA, 15 bp, Homo sapiens
tcaacctcccaaggc

SEQ ID NO: 1445017 - DNA, 15 bp, Homo sapiens
ctcaacctcccaagg

SEQ ID NO: 1445018 - DNA, 15 bp, Homo sapiens
ttgcagcctcaacct

SEQ ID NO: 1445019 - DNA, 15 bp, Homo sapiens
attgcagcctcaacc

SEQ ID NO: 1445020 - DNA, 15 bp, Homo sapiens
cattgcagcctcaac

SEQ ID NO: 1445021 - DNA, 15 bp, Homo sapiens
tcattgcagcctcaa

SEQ ID NO: 1445022 - DNA, 15 bp, Homo sapiens
ctcattgcagcctca

SEQ ID NO: 1445023 - DNA, 15 bp, Homo sapiens
gctcattgcagcctc

SEQ ID NO: 1445024 - DNA, 15 bp, Homo sapiens
ggctcattgcagcct

SEQ ID NO: 1445025 - DNA, 15 bp, Homo sapiens
tggctcattgcagcc

SEQ ID NO: 1445026 - DNA, 15 bp, Homo sapiens
atggctcattgcagc

SEQ ID NO: 1445027 - DNA, 15 bp, Homo sapiens
catggctcattgcag

SEQ ID NO: 1445028 - DNA, 15 bp, Homo sapiens
tcatggctcattgca

SEQ ID NO: 1445029 - DNA, 15 bp, Homo sapiens
atcatggctcattgc

SEQ ID NO: 1445030 - DNA, 15 bp, Homo sapiens
gatcatggctcattg

SEQ ID NO: 1445031 - DNA, 15 bp, Homo sapiens
tgatcatggctcatt

SEQ ID NO: 1445032 - DNA, 15 bp, Homo sapiens
gtgatcatggctcat

SEQ ID NO: 1445033 - DNA, 15 bp, Homo sapiens
tgtgatcatggctca

SEQ ID NO: 1445034 - DNA, 15 bp, Homo sapiens
gtgtgatcatggctc

SEQ ID NO: 1445035 - DNA, 15 bp, Homo sapiens
ggtgtgatcatggct

SEQ ID NO: 1445036 - DNA, 15 bp, Homo sapiens
tggtgtgatcatggc

SEQ ID NO: 1445037 - DNA, 15 bp, Homo sapiens
gtggtgtgatcatgg

SEQ ID NO: 1445038 - DNA, 15 bp, Homo sapiens
agtggtgtgatcatg

SEQ ID NO: 1445039 - DNA, 15 bp, Homo sapiens
ttgtcacccaggcta

SEQ ID NO: 1445040 - DNA, 15 bp, Homo sapiens
ttttgtcacccaggc

SEQ ID NO: 1445041 - DNA, 15 bp, Homo sapiens
attttgtcacccagg

SEQ ID NO: 1445042 - DNA, 15 bp, Homo sapiens
cattttgtcacccag

SEQ ID NO: 1445043 - DNA, 15 bp, Homo sapiens
tcattttgtcaccca

SEQ ID NO: 1445044 - DNA, 15 bp, Homo sapiens
ctcattttgtcaccc

SEQ ID NO: 1445045 - DNA, 15 bp, Homo sapiens
tctcattttgtcacc

SEQ ID NO: 1445046 - DNA, 15 bp, Homo sapiens
gtctcattttgtcac

SEQ ID NO: 1445047 - DNA, 15 bp, Homo sapiens
ggtctcattttgtca

SEQ ID NO: 1445048 - DNA, 15 bp, Homo sapiens
gggtctcattttgtc

SEQ ID NO: 1445049 - DNA, 15 bp, Homo sapiens
agggtctcattttgt

SEQ ID NO: 1445050 - DNA, 15 bp, Homo sapiens
cagggtctcattttg

SEQ ID NO: 1445051 - DNA, 15 bp, Homo sapiens
gcagggtctcatttt

SEQ ID NO: 1445052 - DNA, 15 bp, Homo sapiens
ggcagggtctcattt

SEQ ID NO: 1445053 - DNA, 15 bp, Homo sapiens
aggcagggtctcatt

SEQ ID NO: 1445054 - DNA, 15 bp, Homo sapiens
gaggcagggtctcat

SEQ ID NO: 1445055 - DNA, 15 bp, Homo sapiens
tgaggcagggtctca

SEQ ID NO: 1445056 - DNA, 15 bp, Homo sapiens
ttgaggcagggtctc

SEQ ID NO: 1445057 - DNA, 15 bp, Homo sapiens
tttgaggcagggtct

SEQ ID NO: 1445058 - DNA, 15 bp, Homo sapiens
ttttgaggcagggtc

SEQ ID NO: 1445059 - DNA, 15 bp, Homo sapiens
tttttgaggcagggt

SEQ ID NO: 1445060 - DNA, 15 bp, Homo sapiens
ttttttgaggcaggg

SEQ ID NO: 1445061 - DNA, 15 bp, Homo sapiens
tttttttgaggcagg

SEQ ID NO: 1445062 - DNA, 15 bp, Homo sapiens
tcttccttttttttt

SEQ ID NO: 1445063 - DNA, 15 bp, Homo sapiens
ttcttcctttttttt

SEQ ID NO: 1445064 - DNA, 15 bp, Homo sapiens
tttcttccttttttt

SEQ ID NO: 1445065 - DNA, 15 bp, Homo sapiens
ctttcttcctttttt

SEQ ID NO: 1445066 - DNA, 15 bp, Homo sapiens
tctttcttccttttt

SEQ ID NO: 1445067 - DNA, 15 bp, Homo sapiens
ttctttcttcctttt

SEQ ID NO: 1445068 - DNA, 15 bp, Homo sapiens
tttctttcttccttt

SEQ ID NO: 1445069 - DNA, 15 bp, Homo sapiens
ttttctttcttcctt

SEQ ID NO: 1445070 - DNA, 15 bp, Homo sapiens
tttttctttcttcct

SEQ ID NO: 1445071 - DNA, 15 bp, Homo sapiens
atttttttctttctt

SEQ ID NO: 1445072 - DNA, 15 bp, Homo sapiens
tcatttttttctttc

SEQ ID NO: 1445073 - DNA, 15 bp, Homo sapiens
ttcatttttttcttt

SEQ ID NO: 1445074 - DNA, 15 bp, Homo sapiens
tttcatttttttctt

SEQ ID NO: 1445075 - DNA, 15 bp, Homo sapiens
ttttcatttttttct

SEQ ID NO: 1445076 - DNA, 15 bp, Homo sapiens
cattttcattttttt

SEQ ID NO: 1445077 - DNA, 15 bp, Homo sapiens
tcattttcatttttt

SEQ ID NO: 1445078 - DNA, 15 bp, Homo sapiens
ttcattttcattttt

SEQ ID NO: 1445079 - DNA, 15 bp, Homo sapiens
cttcattttcatttt

SEQ ID NO: 1445080 - DNA, 15 bp, Homo sapiens
ccttcattttcattt

SEQ ID NO: 1445081 - DNA, 15 bp, Homo sapiens
tccttcattttcatt

SEQ ID NO: 1445082 - DNA, 15 bp, Homo sapiens
ctccttcattttcat

SEQ ID NO: 1445083 - DNA, 15 bp, Homo sapiens
tctccttcattttca

SEQ ID NO: 1445084 - DNA, 15 bp, Homo sapiens
ttctccttcattttc

SEQ ID NO: 1445085 - DNA, 15 bp, Homo sapiens
tttctccttcatttt

SEQ ID NO: 1445086 - DNA, 15 bp, Homo sapiens
atttctccttcattt

SEQ ID NO: 1445087 - DNA, 15 bp, Homo sapiens
catttctccttcatt

SEQ ID NO: 1445088 - DNA, 15 bp, Homo sapiens
gcatttctccttcat

SEQ ID NO: 1445089 - DNA, 15 bp, Homo sapiens
tgcatttctccttca

SEQ ID NO: 1445090 - DNA, 15 bp, Homo sapiens
gtgcatttctccttc

SEQ ID NO: 1445091 - DNA, 15 bp, Homo sapiens
tgtgcatttctcctt

SEQ ID NO: 1445092 - DNA, 15 bp, Homo sapiens
ctgtgcatttctcct

SEQ ID NO: 1445093 - DNA, 15 bp, Homo sapiens
cctgtgcatttctcc

SEQ ID NO: 1445094 - DNA, 15 bp, Homo sapiens
acctgtgcatttctc

SEQ ID NO: 1445095 - DNA, 15 bp, Homo sapiens
cacctgtgcatttct

SEQ ID NO: 1445096 - DNA, 15 bp, Homo sapiens
ccacctgtgcatttc

SEQ ID NO: 1445097 - DNA, 15 bp, Homo sapiens
tccacctgtgcattt

SEQ ID NO: 1445098 - DNA, 15 bp, Homo sapiens
gtccacctgtgcatt

SEQ ID NO: 1445099 - DNA, 15 bp, Homo sapiens
cgtccacctgtgcat

SEQ ID NO: 1445100 - DNA, 15 bp, Homo sapiens
ccgtccacctgtgca

SEQ ID NO: 1445101 - DNA, 15 bp, Homo sapiens
tccgtccacctgtgc

SEQ ID NO: 1445102 - DNA, 15 bp, Homo sapiens
atccgtccacctgtg

SEQ ID NO: 1445103 - DNA, 15 bp, Homo sapiens
catccgtccacctgt

SEQ ID NO: 1445104 - DNA, 15 bp, Homo sapiens
acatccgtccacctg

SEQ ID NO: 1445105 - DNA, 15 bp, Homo sapiens
gacatccgtccacct

SEQ ID NO: 1445106 - DNA, 15 bp, Homo sapiens
tgacatccgtccacc

SEQ ID NO: 1445107 - DNA, 15 bp, Homo sapiens
ctgacatccgtccac

SEQ ID NO: 1445108 - DNA, 15 bp, Homo sapiens
cctgacatccgtcca

SEQ ID NO: 1445109 - DNA, 15 bp, Homo sapiens
ccctgacatccgtcc

SEQ ID NO: 1445110 - DNA, 15 bp, Homo sapiens
accctgacatccgtc

SEQ ID NO: 1445111 - DNA, 15 bp, Homo sapiens
aaccctgacatccgt

SEQ ID NO: 1445112 - DNA, 15 bp, Homo sapiens
caaccctgacatccg

SEQ ID NO: 1445113 - DNA, 15 bp, Homo sapiens
acaaccctgacatcc

SEQ ID NO: 1445114 - DNA, 15 bp, Homo sapiens
aacaaccctgacatc

SEQ ID NO: 1445115 - DNA, 15 bp, Homo sapiens
aaacaaccctgacat

SEQ ID NO: 1445116 - DNA, 15 bp, Homo sapiens
caaacaaccctgaca

SEQ ID NO: 1445117 - DNA, 15 bp, Homo sapiens
tcaaacaaccctgac

SEQ ID NO: 1445118 - DNA, 15 bp, Homo sapiens
atcaaacaaccctga

SEQ ID NO: 1445119 - DNA, 15 bp, Homo sapiens
catcaaacaaccctg

SEQ ID NO: 1445120 - DNA, 15 bp, Homo sapiens
gcatcaaacaaccct

SEQ ID NO: 1445121 - DNA, 15 bp, Homo sapiens
tgcatcaaacaaccc

SEQ ID NO: 1445122 - DNA, 15 bp, Homo sapiens
ttgcatcaaacaacc

SEQ ID NO: 1445123 - DNA, 15 bp, Homo sapiens
attgcatcaaacaac

SEQ ID NO: 1445124 - DNA, 15 bp, Homo sapiens
cattgcatcaaacaa

SEQ ID NO: 1445125 - DNA, 15 bp, Homo sapiens
tcattgcatcaaaca

SEQ ID NO: 1445126 - DNA, 15 bp, Homo sapiens
gtcattgcatcaaac

SEQ ID NO: 1445127 - DNA, 15 bp, Homo sapiens
agtcattgcatcaaa

SEQ ID NO: 1445128 - DNA, 15 bp, Homo sapiens
aagtcattgcatcaa

SEQ ID NO: 1445129 - DNA, 15 bp, Homo sapiens
taagtcattgcatca

SEQ ID NO: 1445130 - DNA, 15 bp, Homo sapiens
ttaagtcattgcatc

SEQ ID NO: 1445131 - DNA, 15 bp, Homo sapiens
attaagtcattgcat

SEQ ID NO: 1445132 - DNA, 15 bp, Homo sapiens
tattaagtcattgca

SEQ ID NO: 1445133 - DNA, 15 bp, Homo sapiens
ctattaagtcattgc

SEQ ID NO: 1445134 - DNA, 15 bp, Homo sapiens
actattaagtcattg

SEQ ID NO: 1445135 - DNA, 15 bp, Homo sapiens
cactattaagtcatt

SEQ ID NO: 1445136 - DNA, 15 bp, Homo sapiens
acactattaagtcat

SEQ ID NO: 1445137 - DNA, 15 bp, Homo sapiens
aacactattaagtca

SEQ ID NO: 1445138 - DNA, 15 bp, Homo sapiens
taacactattaagtc

SEQ ID NO: 1445139 - DNA, 15 bp, Homo sapiens
gtaacactattaagt

SEQ ID NO: 1445140 - DNA, 15 bp, Homo sapiens
ggtaacactattaag

SEQ ID NO: 1445141 - DNA, 15 bp, Homo sapiens
tggtaacactattaa

SEQ ID NO: 1445142 - DNA, 15 bp, Homo sapiens
ttggtaacactatta

SEQ ID NO: 1445143 - DNA, 15 bp, Homo sapiens
tttggtaacactatt

SEQ ID NO: 1445144 - DNA, 15 bp, Homo sapiens
ttttggtaacactat

SEQ ID NO: 1445145 - DNA, 15 bp, Homo sapiens
gttttggtaacacta

SEQ ID NO: 1445146 - DNA, 15 bp, Homo sapiens
ggttttggtaacact

SEQ ID NO: 1445147 - DNA, 15 bp, Homo sapiens
gggttttggtaacac

SEQ ID NO: 1445148 - DNA, 15 bp, Homo sapiens
tgggttttggtaaca

SEQ ID NO: 1445149 - DNA, 15 bp, Homo sapiens
ctgggttttggtaac

SEQ ID NO: 1445150 - DNA, 15 bp, Homo sapiens
gctgggttttggtaa

SEQ ID NO: 1445151 - DNA, 15 bp, Homo sapiens
agctgggttttggta

SEQ ID NO: 1445152 - DNA, 15 bp, Homo sapiens
gagctgggttttggt

SEQ ID NO: 1445153 - DNA, 15 bp, Homo sapiens
ggagctgggttttgg

SEQ ID NO: 1445154 - DNA, 15 bp, Homo sapiens
aggagctgggttttg

SEQ ID NO: 1445155 - DNA, 15 bp, Homo sapiens
aaggagctgggtttt

SEQ ID NO: 1445156 - DNA, 15 bp, Homo sapiens
aaaggagctgggttt

SEQ ID NO: 1445157 - DNA, 15 bp, Homo sapiens
aaaaggagctgggtt

SEQ ID NO: 1445158 - DNA, 15 bp, Homo sapiens
gaaaaggagctgggt

SEQ ID NO: 1445159 - DNA, 15 bp, Homo sapiens
tgaaaaggagctggg

SEQ ID NO: 1445160 - DNA, 15 bp, Homo sapiens
ttgaaaaggagctgg

SEQ ID NO: 1445161 - DNA, 15 bp, Homo sapiens
tttgaaaaggagctg

SEQ ID NO: 1445162 - DNA, 15 bp, Homo sapiens
atttgaaaaggagct

SEQ ID NO: 1445163 - DNA, 15 bp, Homo sapiens
gatttgaaaaggagc

SEQ ID NO: 1445164 - DNA, 15 bp, Homo sapiens
agatttgaaaaggag

SEQ ID NO: 1445165 - DNA, 15 bp, Homo sapiens
cagatttgaaaagga

SEQ ID NO: 1445166 - DNA, 15 bp, Homo sapiens
ccagatttgaaaagg

SEQ ID NO: 1445167 - DNA, 15 bp, Homo sapiens
gccagatttgaaaag

SEQ ID NO: 1445168 - DNA, 15 bp, Homo sapiens
ggccagatttgaaaa

SEQ ID NO: 1445169 - DNA, 15 bp, Homo sapiens
aggccagatttgaaa

SEQ ID NO: 1445170 - DNA, 15 bp, Homo sapiens
gaggccagatttgaa

SEQ ID NO: 1445171 - DNA, 15 bp, Homo sapiens
tgaggccagatttga

SEQ ID NO: 1445172 - DNA, 15 bp, Homo sapiens
ttgaggccagatttg

SEQ ID NO: 1445173 - DNA, 15 bp, Homo sapiens
cttgaggccagattt

SEQ ID NO: 1445174 - DNA, 15 bp, Homo sapiens
ccttgaggccagatt

SEQ ID NO: 1445175 - DNA, 15 bp, Homo sapiens
accttgaggccagat

SEQ ID NO: 1445176 - DNA, 15 bp, Homo sapiens
caccttgaggccaga

SEQ ID NO: 1445177 - DNA, 15 bp, Homo sapiens
ccaccttgaggccag

SEQ ID NO: 1445178 - DNA, 15 bp, Homo sapiens
gccaccttgaggcca

SEQ ID NO: 1445179 - DNA, 15 bp, Homo sapiens
agccaccttgaggcc

SEQ ID NO: 1445180 - DNA, 15 bp, Homo sapiens
gagccaccttgaggc

SEQ ID NO: 1445181 - DNA, 15 bp, Homo sapiens
agagccaccttgagg

SEQ ID NO: 1445182 - DNA, 15 bp, Homo sapiens
aagagccaccttgag

SEQ ID NO: 1445183 - DNA, 15 bp, Homo sapiens
aaagagccaccttga

SEQ ID NO: 1445184 - DNA, 15 bp, Homo sapiens
aaaagagccaccttg

SEQ ID NO: 1445185 - DNA, 15 bp, Homo sapiens
gaaaagagccacctt

SEQ ID NO: 1445186 - DNA, 15 bp, Homo sapiens
tgaaaagagccacct

SEQ ID NO: 1445187 - DNA, 15 bp, Homo sapiens
gtgaaaagagccacc

SEQ ID NO: 1445188 - DNA, 15 bp, Homo sapiens
tgtgaaaagagccac

SEQ ID NO: 1445189 - DNA, 15 bp, Homo sapiens
ctgtgaaaagagcca

SEQ ID NO: 1445190 - DNA, 15 bp, Homo sapiens
actgtgaaaagagcc

SEQ ID NO: 1445191 - DNA, 15 bp, Homo sapiens
aactgtgaaaagagc

SEQ ID NO: 1445192 - DNA, 15 bp, Homo sapiens
taactgtgaaaagag

SEQ ID NO: 1445193 - DNA, 15 bp, Homo sapiens
ataactgtgaaaaga

SEQ ID NO: 1445194 - DNA, 15 bp, Homo sapiens
tataactgtgaaaag

SEQ ID NO: 1445195 - DNA, 15 bp, Homo sapiens
ttataactgtgaaaa

SEQ ID NO: 1445196 - DNA, 15 bp, Homo sapiens
attataactgtgaaa

SEQ ID NO: 1445197 - DNA, 15 bp, Homo sapiens
tattataactgtgaa

SEQ ID NO: 1445198 - DNA, 15 bp, Homo sapiens
atattataactgtga

SEQ ID NO: 1445199 - DNA, 15 bp, Homo sapiens
tatattataactgtg

SEQ ID NO: 1445200 - DNA, 15 bp, Homo sapiens
ctatattataactgt

SEQ ID NO: 1445201 - DNA, 15 bp, Homo sapiens
actatattataactg

SEQ ID NO: 1445202 - DNA, 15 bp, Homo sapiens
aactatattataact

SEQ ID NO: 1445203 - DNA, 15 bp, Homo sapiens
caactatattataac

SEQ ID NO: 1445204 - DNA, 15 bp, Homo sapiens
gcaactatattataa

SEQ ID NO: 1445205 - DNA, 15 bp, Homo sapiens
agcaactatattata

SEQ ID NO: 1445206 - DNA, 15 bp, Homo sapiens
aagcaactatattat

SEQ ID NO: 1445207 - DNA, 15 bp, Homo sapiens
gaagcaactatatta

SEQ ID NO: 1445208 - DNA, 15 bp, Homo sapiens
tgaagcaactatatt

SEQ ID NO: 1445209 - DNA, 15 bp, Homo sapiens
ctgaagcaactatat

SEQ ID NO: 1445210 - DNA, 15 bp, Homo sapiens
actgaagcaactata

SEQ ID NO: 1445211 - DNA, 15 bp, Homo sapiens
aactgaagcaactat

SEQ ID NO: 1445212 - DNA, 15 bp, Homo sapiens
gaactgaagcaacta

SEQ ID NO: 1445213 - DNA, 15 bp, Homo sapiens
ggaactgaagcaact

SEQ ID NO: 1445214 - DNA, 15 bp, Homo sapiens
tggaactgaagcaac

SEQ ID NO: 1445215 - DNA, 15 bp, Homo sapiens
ctggaactgaagcaa

SEQ ID NO: 1445216 - DNA, 15 bp, Homo sapiens
tctggaactgaagca

SEQ ID NO: 1445217 - DNA, 15 bp, Homo sapiens
atctggaactgaagc

SEQ ID NO: 1445218 - DNA, 15 bp, Homo sapiens
taatttggtttagct

SEQ ID NO: 1445219 - DNA, 15 bp, Homo sapiens
ataatttggtttagc

SEQ ID NO: 1445220 - DNA, 15 bp, Homo sapiens
tataatttggtttag

SEQ ID NO: 1445221 - DNA, 15 bp, Homo sapiens
atataatttggttta

SEQ ID NO: 1445222 - DNA, 15 bp, Homo sapiens
tatataatttggttt

SEQ ID NO: 1445223 - DNA, 15 bp, Homo sapiens
gtatataatttggtt

SEQ ID NO: 1445224 - DNA, 15 bp, Homo sapiens
agtatataatttggt

SEQ ID NO: 1445225 - DNA, 15 bp, Homo sapiens
tagtatataatttgg

SEQ ID NO: 1445226 - DNA, 15 bp, Homo sapiens
ttagtatataatttg

SEQ ID NO: 1445227 - DNA, 15 bp, Homo sapiens
tttagtatataattt

SEQ ID NO: 1445228 - DNA, 15 bp, Homo sapiens
ttttagtatataatt

SEQ ID NO: 1445229 - DNA, 15 bp, Homo sapiens
cttttagtatataat

SEQ ID NO: 1445230 - DNA, 15 bp, Homo sapiens
acttttagtatataa

SEQ ID NO: 1445231 - DNA, 15 bp, Homo sapiens
tacttttagtatata

SEQ ID NO: 1445232 - DNA, 15 bp, Homo sapiens
atacttttagtatat

SEQ ID NO: 1445233 - DNA, 15 bp, Homo sapiens
tatacttttagtata

SEQ ID NO: 1445234 - DNA, 15 bp, Homo sapiens
ttatacttttagtat

SEQ ID NO: 1445235 - DNA, 15 bp, Homo sapiens
tttatacttttagta

SEQ ID NO: 1445236 - DNA, 15 bp, Homo sapiens
ttttatacttttagt

SEQ ID NO: 1445237 - DNA, 15 bp, Homo sapiens
cttttatacttttag

SEQ ID NO: 1445238 - DNA, 15 bp, Homo sapiens
acttttatactttta

SEQ ID NO: 1445239 - DNA, 15 bp, Homo sapiens
tacttttatactttt

SEQ ID NO: 1445240 - DNA, 15 bp, Homo sapiens
atacttttatacttt

SEQ ID NO: 1445241 - DNA, 15 bp, Homo sapiens
aatacttttatactt

SEQ ID NO: 1445242 - DNA, 15 bp, Homo sapiens
aaatacttttatact

SEQ ID NO: 1445243 - DNA, 15 bp, Homo sapiens
aaaatacttttatac

SEQ ID NO: 1445244 - DNA, 15 bp, Homo sapiens
aaaaatacttttata

SEQ ID NO: 1445245 - DNA, 15 bp, Homo sapiens
aaaaaatacttttat

SEQ ID NO: 1445246 - DNA, 15 bp, Homo sapiens
aaaaaaatactttta

SEQ ID NO: 1445247 - DNA, 15 bp, Homo sapiens
caaaaaaatactttt

SEQ ID NO: 1445248 - DNA, 15 bp, Homo sapiens
acaaaaaaatacttt

SEQ ID NO: 1445249 - DNA, 15 bp, Homo sapiens
tacaaaaaaatactt

SEQ ID NO: 1445250 - DNA, 15 bp, Homo sapiens
gtacaaaaaaatact

SEQ ID NO: 1445251 - DNA, 15 bp, Homo sapiens
agtacaaaaaaatac

SEQ ID NO: 1445252 - DNA, 15 bp, Homo sapiens
gagtacaaaaaaata

SEQ ID NO: 1445253 - DNA, 15 bp, Homo sapiens
agagtacaaaaaaat

SEQ ID NO: 1445254 - DNA, 15 bp, Homo sapiens
gagagtacaaaaaaa

SEQ ID NO: 1445255 - DNA, 15 bp, Homo sapiens
cgagagtacaaaaaa

SEQ ID NO: 1445256 - DNA, 15 bp, Homo sapiens
gcgagagtacaaaaa

SEQ ID NO: 1445257 - DNA, 15 bp, Homo sapiens
tgcgagagtacaaaa

SEQ ID NO: 1445258 - DNA, 15 bp, Homo sapiens
ttgcgagagtacaaa

SEQ ID NO: 1445259 - DNA, 15 bp, Homo sapiens
gttgcgagagtacaa

SEQ ID NO: 1445260 - DNA, 15 bp, Homo sapiens
tgttgcgagagtaca

SEQ ID NO: 1445261 - DNA, 15 bp, Homo sapiens
ttgttgcgagagtac

SEQ ID NO: 1445262 - DNA, 15 bp, Homo sapiens
attgttgcgagagta

SEQ ID NO: 1445263 - DNA, 15 bp, Homo sapiens
aattgttgcgagagt

SEQ ID NO: 1445264 - DNA, 15 bp, Homo sapiens
gaattgttgcgagag

SEQ ID NO: 1445265 - DNA, 15 bp, Homo sapiens
agaattgttgcgaga

SEQ ID NO: 1445266 - DNA, 15 bp, Homo sapiens
cagaattgttgcgag

SEQ ID NO: 1445267 - DNA, 15 bp, Homo sapiens
tcagaattgttgcga

SEQ ID NO: 1445268 - DNA, 15 bp, Homo sapiens
gtcagaattgttgcg

SEQ ID NO: 1445269 - DNA, 15 bp, Homo sapiens
tgtcagaattgttgc

SEQ ID NO: 1445270 - DNA, 15 bp, Homo sapiens
gtgtcagaattgttg

SEQ ID NO: 1445271 - DNA, 15 bp, Homo sapiens
ggtgtcagaattgtt

SEQ ID NO: 1445272 - DNA, 15 bp, Homo sapiens
tggtgtcagaattgt

SEQ ID NO: 1445273 - DNA, 15 bp, Homo sapiens
ttggtgtcagaattg

SEQ ID NO: 1445274 - DNA, 15 bp, Homo sapiens
tttggtgtcagaatt

SEQ ID NO: 1445275 - DNA, 15 bp, Homo sapiens
atttggtgtcagaat

SEQ ID NO: 1445276 - DNA, 15 bp, Homo sapiens
catttggtgtcagaa

SEQ ID NO: 1445277 - DNA, 15 bp, Homo sapiens
acatttggtgtcaga

SEQ ID NO: 1445278 - DNA, 15 bp, Homo sapiens
cacatttggtgtcag

SEQ ID NO: 1445279 - DNA, 15 bp, Homo sapiens
acacatttggtgtca

SEQ ID NO: 1445280 - DNA, 15 bp, Homo sapiens
cacacatttggtgtc

SEQ ID NO: 1445281 - DNA, 15 bp, Homo sapiens
ccacacatttggtgt

SEQ ID NO: 1445282 - DNA, 15 bp, Homo sapiens
cccacacatttggtg

SEQ ID NO: 1445283 - DNA, 15 bp, Homo sapiens
ccccacacatttggt

SEQ ID NO: 1445284 - DNA, 15 bp, Homo sapiens
accccacacatttgg

SEQ ID NO: 1445285 - DNA, 15 bp, Homo sapiens
taccccacacatttg

SEQ ID NO: 1445286 - DNA, 15 bp, Homo sapiens
ataccccacacattt

SEQ ID NO: 1445287 - DNA, 15 bp, Homo sapiens
aataccccacacatt

SEQ ID NO: 1445288 - DNA, 15 bp, Homo sapiens
aaataccccacacat

SEQ ID NO: 1445289 - DNA, 15 bp, Homo sapiens
gaaataccccacaca

SEQ ID NO: 1445290 - DNA, 15 bp, Homo sapiens
ggaaataccccacac

SEQ ID NO: 1445291 - DNA, 15 bp, Homo sapiens
tggaaataccccaca

SEQ ID NO: 1445292 - DNA, 15 bp, Homo sapiens
gtggaaataccccac

SEQ ID NO: 1445293 - DNA, 15 bp, Homo sapiens
tgtggaaatacccca

SEQ ID NO: 1445294 - DNA, 15 bp, Homo sapiens
gtgtggaaatacccc

SEQ ID NO: 1445295 - DNA, 15 bp, Homo sapiens
ggtgtggaaataccc

SEQ ID NO: 1445296 - DNA, 15 bp, Homo sapiens
tggtgtggaaatacc

SEQ ID NO: 1445297 - DNA, 15 bp, Homo sapiens
ttggtgtggaaatac

SEQ ID NO: 1445298 - DNA, 15 bp, Homo sapiens
cttggtgtggaaata

SEQ ID NO: 1445299 - DNA, 15 bp, Homo sapiens
gcttggtgtggaaat

SEQ ID NO: 1445300 - DNA, 15 bp, Homo sapiens
tgcttggtgtggaaa

SEQ ID NO: 1445301 - DNA, 15 bp, Homo sapiens
ctgcttggtgtggaa

SEQ ID NO: 1445302 - DNA, 15 bp, Homo sapiens
actgcttggtgtgga

SEQ ID NO: 1445303 - DNA, 15 bp, Homo sapiens
aactgcttggtgtgg

SEQ ID NO: 1445304 - DNA, 15 bp, Homo sapiens
gaactgcttggtgtg

SEQ ID NO: 1445305 - DNA, 15 bp, Homo sapiens
tgaactgcttggtgt

SEQ ID NO: 1445306 - DNA, 15 bp, Homo sapiens
ctgaactgcttggtg

SEQ ID NO: 1445307 - DNA, 15 bp, Homo sapiens
actgaactgcttggt

SEQ ID NO: 1445308 - DNA, 15 bp, Homo sapiens
aactgaactgcttgg

SEQ ID NO: 1445309 - DNA, 15 bp, Homo sapiens
gaactgaactgcttg

SEQ ID NO: 1445310 - DNA, 15 bp, Homo sapiens
agaactgaactgctt

SEQ ID NO: 1445311 - DNA, 15 bp, Homo sapiens
gagaactgaactgct

SEQ ID NO: 1445312 - DNA, 15 bp, Homo sapiens
agagaactgaactgc

SEQ ID NO: 1445313 - DNA, 15 bp, Homo sapiens
cagagaactgaactg

SEQ ID NO: 1445314 - DNA, 15 bp, Homo sapiens
ccagagaactgaact

SEQ ID NO: 1445315 - DNA, 15 bp, Homo sapiens
accagagaactgaac

SEQ ID NO: 1445316 - DNA, 15 bp, Homo sapiens
caccagagaactgaa

SEQ ID NO: 1445317 - DNA, 15 bp, Homo sapiens
tcaccagagaactga

SEQ ID NO: 1445318 - DNA, 15 bp, Homo sapiens
gtcaccagagaactg

SEQ ID NO: 1445319 - DNA, 15 bp, Homo sapiens
tgtcaccagagaact

SEQ ID NO: 1445320 - DNA, 15 bp, Homo sapiens
gtgtcaccagagaac

SEQ ID NO: 1445321 - DNA, 15 bp, Homo sapiens
agtgtcaccagagaa

SEQ ID NO: 1445322 - DNA, 15 bp, Homo sapiens
tagtgtcaccagaga

SEQ ID NO: 1445323 - DNA, 15 bp, Homo sapiens
ctagtgtcaccagag

SEQ ID NO: 1445324 - DNA, 15 bp, Homo sapiens
gctagtgtcaccaga

SEQ ID NO: 1445325 - DNA, 15 bp, Homo sapiens
agctagtgtcaccag

SEQ ID NO: 1445326 - DNA, 15 bp, Homo sapiens
cagctagtgtcacca

SEQ ID NO: 1445327 - DNA, 15 bp, Homo sapiens
ccagctagtgtcacc

SEQ ID NO: 1445328 - DNA, 15 bp, Homo sapiens
accagctagtgtcac

SEQ ID NO: 1445329 - DNA, 15 bp, Homo sapiens
caccagctagtgtca

SEQ ID NO: 1445330 - DNA, 15 bp, Homo sapiens
acaccagctagtgtc

SEQ ID NO: 1445331 - DNA, 15 bp, Homo sapiens
gacaccagctagtgt

SEQ ID NO: 1445332 - DNA, 15 bp, Homo sapiens
ggacaccagctagtg

SEQ ID NO: 1445333 - DNA, 15 bp, Homo sapiens
aggacaccagctagt

SEQ ID NO: 1445334 - DNA, 15 bp, Homo sapiens
taggacaccagctag

SEQ ID NO: 1445335 - DNA, 15 bp, Homo sapiens
gtaggacaccagcta

SEQ ID NO: 1445336 - DNA, 15 bp, Homo sapiens
tgtaggacaccagct

SEQ ID NO: 1445337 - DNA, 15 bp, Homo sapiens
ctgtaggacaccagc

SEQ ID NO: 1445338 - DNA, 15 bp, Homo sapiens
actgtaggacaccag

SEQ ID NO: 1445339 - DNA, 15 bp, Homo sapiens
aactgtaggacacca

SEQ ID NO: 1445340 - DNA, 15 bp, Homo sapiens
gaactgtaggacacc

SEQ ID NO: 1445341 - DNA, 15 bp, Homo sapiens
tgaactgtaggacac

SEQ ID NO: 1445342 - DNA, 15 bp, Homo sapiens
ctgaactgtaggaca

SEQ ID NO: 1445343 - DNA, 15 bp, Homo sapiens
actgaactgtaggac

SEQ ID NO: 1445344 - DNA, 15 bp, Homo sapiens
aactgaactgtagga

SEQ ID NO: 1445345 - DNA, 15 bp, Homo sapiens
aaactgaactgtagg

SEQ ID NO: 1445346 - DNA, 15 bp, Homo sapiens
caaactgaactgtag

SEQ ID NO: 1445347 - DNA, 15 bp, Homo sapiens
acaaactgaactgta

SEQ ID NO: 1445348 - DNA, 15 bp, Homo sapiens
aacaaactgaactgt

SEQ ID NO: 1445349 - DNA, 15 bp, Homo sapiens
aaacaaactgaactg

SEQ ID NO: 1445350 - DNA, 15 bp, Homo sapiens
gaaacaaactgaact

SEQ ID NO: 1445351 - DNA, 15 bp, Homo sapiens
agaaacaaactgaac

SEQ ID NO: 1445352 - DNA, 15 bp, Homo sapiens
cagaaacaaactgaa

SEQ ID NO: 1445353 - DNA, 15 bp, Homo sapiens
ccagaaacaaactga

SEQ ID NO: 1445354 - DNA, 15 bp, Homo sapiens
tccagaaacaaactg

SEQ ID NO: 1445355 - DNA, 15 bp, Homo sapiens
ctccagaaacaaact

SEQ ID NO: 1445356 - DNA, 15 bp, Homo sapiens
actccagaaacaaac

SEQ ID NO: 1445357 - DNA, 15 bp, Homo sapiens
aactccagaaacaaa

SEQ ID NO: 1445358 - DNA, 15 bp, Homo sapiens
caactccagaaacaa

SEQ ID NO: 1445359 - DNA, 15 bp, Homo sapiens
ccaactccagaaaca

SEQ ID NO: 1445360 - DNA, 15 bp, Homo sapiens
gccaactccagaaac

SEQ ID NO: 1445361 - DNA, 15 bp, Homo sapiens
tgccaactccagaaa

SEQ ID NO: 1445362 - DNA, 15 bp, Homo sapiens
atgccaactccagaa

SEQ ID NO: 1445363 - DNA, 15 bp, Homo sapiens
gatgccaactccaga

SEQ ID NO: 1445364 - DNA, 15 bp, Homo sapiens
tgatgccaactccag

SEQ ID NO: 1445365 - DNA, 15 bp, Homo sapiens
ctgatgccaactcca

SEQ ID NO: 1445366 - DNA, 15 bp, Homo sapiens
tctgatgccaactcc

SEQ ID NO: 1445367 - DNA, 15 bp, Homo sapiens
atctgatgccaactc

SEQ ID NO: 1445368 - DNA, 15 bp, Homo sapiens
gatctgatgccaact

SEQ ID NO: 1445369 - DNA, 15 bp, Homo sapiens
ggatctgatgccaac

SEQ ID NO: 1445370 - DNA, 15 bp, Homo sapiens
gggatctgatgccaa

SEQ ID NO: 1445371 - DNA, 15 bp, Homo sapiens
tgggatctgatgcca

SEQ ID NO: 1445372 - DNA, 15 bp, Homo sapiens
gtgggatctgatgcc

SEQ ID NO: 1445373 - DNA, 15 bp, Homo sapiens
tgtgggatctgatgc

SEQ ID NO: 1445374 - DNA, 15 bp, Homo sapiens
ttgtgggatctgatg

SEQ ID NO: 1445375 - DNA, 15 bp, Homo sapiens
tttgtgggatctgat

SEQ ID NO: 1445376 - DNA, 15 bp, Homo sapiens
atttgtgggatctga

SEQ ID NO: 1445377 - DNA, 15 bp, Homo sapiens
aatttgtgggatctg

SEQ ID NO: 1445378 - DNA, 15 bp, Homo sapiens
taatttgtgggatct

SEQ ID NO: 1445379 - DNA, 15 bp, Homo sapiens
ttaatttgtgggatc

SEQ ID NO: 1445380 - DNA, 15 bp, Homo sapiens
tttaatttgtgggat

SEQ ID NO: 1445381 - DNA, 15 bp, Homo sapiens
ctttaatttgtggga

SEQ ID NO: 1445382 - DNA, 15 bp, Homo sapiens
cctttaatttgtggg

SEQ ID NO: 1445383 - DNA, 15 bp, Homo sapiens
ccctttaatttgtgg

SEQ ID NO: 1445384 - DNA, 15 bp, Homo sapiens
accctttaatttgtg

SEQ ID NO: 1445385 - DNA, 15 bp, Homo sapiens
gaccctttaatttgt

SEQ ID NO: 1445386 - DNA, 15 bp, Homo sapiens
ggaccctttaatttg

SEQ ID NO: 1445387 - DNA, 15 bp, Homo sapiens
tggaccctttaattt

SEQ ID NO: 1445388 - DNA, 15 bp, Homo sapiens
ctggaccctttaatt

SEQ ID NO: 1445389 - DNA, 15 bp, Homo sapiens
gctggaccctttaat

SEQ ID NO: 1445390 - DNA, 15 bp, Homo sapiens
ggctggaccctttaa

SEQ ID NO: 1445391 - DNA, 15 bp, Homo sapiens
gggctggacccttta

SEQ ID NO: 1445392 - DNA, 15 bp, Homo sapiens
ggggctggacccttt

SEQ ID NO: 1445393 - DNA, 15 bp, Homo sapiens
tggggctggaccctt

SEQ ID NO: 1445394 - DNA, 15 bp, Homo sapiens
gtggggctggaccct

SEQ ID NO: 1445395 - DNA, 15 bp, Homo sapiens
tgtggggctggaccc

SEQ ID NO: 1445396 - DNA, 15 bp, Homo sapiens
ttgtggggctggacc

SEQ ID NO: 1445397 - DNA, 15 bp, Homo sapiens
cttgtggggctggac

SEQ ID NO: 1445398 - DNA, 15 bp, Homo sapiens
tcttgtggggctgga

SEQ ID NO: 1445399 - DNA, 15 bp, Homo sapiens
atcttgtggggctgg

SEQ ID NO: 1445400 - DNA, 15 bp, Homo sapiens
catcttgtggggctg

SEQ ID NO: 1445401 - DNA, 15 bp, Homo sapiens
tcatcttgtggggct

SEQ ID NO: 1445402 - DNA, 15 bp, Homo sapiens
gtcatcttgtggggc

SEQ ID NO: 1445403 - DNA, 15 bp, Homo sapiens
ggtcatcttgtgggg

SEQ ID NO: 1445404 - DNA, 15 bp, Homo sapiens
gggtcatcttgtggg

SEQ ID NO: 1445405 - DNA, 15 bp, Homo sapiens
ggggtcatcttgtgg

SEQ ID NO: 1445406 - DNA, 15 bp, Homo sapiens
gggggtcatcttgtg

SEQ ID NO: 1445407 - DNA, 15 bp, Homo sapiens
tgggggtcatcttgt

SEQ ID NO: 1445408 - DNA, 15 bp, Homo sapiens
gtgggggtcatcttg

SEQ ID NO: 1445409 - DNA, 15 bp, Homo sapiens
agtgggggtcatctt

SEQ ID NO: 1445410 - DNA, 15 bp, Homo sapiens
aagtgggggtcatct

SEQ ID NO: 1445411 - DNA, 15 bp, Homo sapiens
gaagtgggggtcatc

SEQ ID NO: 1445412 - DNA, 15 bp, Homo sapiens
tgaagtgggggtcat

SEQ ID NO: 1445413 - DNA, 15 bp, Homo sapiens
ctgaagtgggggtca

SEQ ID NO: 1445414 - DNA, 15 bp, Homo sapiens
tctgaagtgggggtc

SEQ ID NO: 1445415 - DNA, 15 bp, Homo sapiens
atctgaagtgggggt

SEQ ID NO: 1445416 - DNA, 15 bp, Homo sapiens
catctgaagtggggg

SEQ ID NO: 1445417 - DNA, 15 bp, Homo sapiens
acatctgaagtgggg

SEQ ID NO: 1445418 - DNA, 15 bp, Homo sapiens
gacatctgaagtggg

SEQ ID NO: 1445419 - DNA, 15 bp, Homo sapiens
tgacatctgaagtgg

SEQ ID NO: 1445420 - DNA, 15 bp, Homo sapiens
ttgacatctgaagtg

SEQ ID NO: 1445421 - DNA, 15 bp, Homo sapiens
cttgacatctgaagt

SEQ ID NO: 1445422 - DNA, 15 bp, Homo sapiens
gcttgacatctgaag

SEQ ID NO: 1445423 - DNA, 15 bp, Homo sapiens
cgcttgacatctgaa

SEQ ID NO: 1445424 - DNA, 15 bp, Homo sapiens
gcgcttgacatctga

SEQ ID NO: 1445425 - DNA, 15 bp, Homo sapiens
tgcgcttgacatctg

SEQ ID NO: 1445426 - DNA, 15 bp, Homo sapiens
atgcgcttgacatct

SEQ ID NO: 1445427 - DNA, 15 bp, Homo sapiens
catgcgcttgacatc

SEQ ID NO: 1445428 - DNA, 15 bp, Homo sapiens
acatgcgcttgacat

SEQ ID NO: 1445429 - DNA, 15 bp, Homo sapiens
gacatgcgcttgaca

SEQ ID NO: 1445430 - DNA, 15 bp, Homo sapiens
ggacatgcgcttgac

SEQ ID NO: 1445431 - DNA, 15 bp, Homo sapiens
gggacatgcgcttga

SEQ ID NO: 1445432 - DNA, 15 bp, Homo sapiens
tgggacatgcgcttg

SEQ ID NO: 1445433 - DNA, 15 bp, Homo sapiens
ctgggacatgcgctt

SEQ ID NO: 1445434 - DNA, 15 bp, Homo sapiens
gctgggacatgcgct

SEQ ID NO: 1445435 - DNA, 15 bp, Homo sapiens
agctgggacatgcgc

SEQ ID NO: 1445436 - DNA, 15 bp, Homo sapiens
tagctgggacatgcg

SEQ ID NO: 1445437 - DNA, 15 bp, Homo sapiens
atagctgggacatgc

SEQ ID NO: 1445438 - DNA, 15 bp, Homo sapiens
gatagctgggacatg

SEQ ID NO: 1445439 - DNA, 15 bp, Homo sapiens
agatagctgggacat

SEQ ID NO: 1445440 - DNA, 15 bp, Homo sapiens
tagatagctgggaca

SEQ ID NO: 1445441 - DNA, 15 bp, Homo sapiens
gtagatagctgggac

SEQ ID NO: 1445442 - DNA, 15 bp, Homo sapiens
ggtagatagctggga

SEQ ID NO: 1445443 - DNA, 15 bp, Homo sapiens
aggtagatagctggg

SEQ ID NO: 1445444 - DNA, 15 bp, Homo sapiens
caggtagatagctgg

SEQ ID NO: 1445445 - DNA, 15 bp, Homo sapiens
acaggtagatagctg

SEQ ID NO: 1445446 - DNA, 15 bp, Homo sapiens
tacaggtagatagct

SEQ ID NO: 1445447 - DNA, 15 bp, Homo sapiens
gtacaggtagatagc

SEQ ID NO: 1445448 - DNA, 15 bp, Homo sapiens
agtacaggtagatag

SEQ ID NO: 1445449 - DNA, 15 bp, Homo sapiens
aagtacaggtagata

SEQ ID NO: 1445450 - DNA, 15 bp, Homo sapiens
gaagtacaggtagat

SEQ ID NO: 1445451 - DNA, 15 bp, Homo sapiens
agaagtacaggtaga

SEQ ID NO: 1445452 - DNA, 15 bp, Homo sapiens
cagaagtacaggtag

SEQ ID NO: 1445453 - DNA, 15 bp, Homo sapiens
ccagaagtacaggta

SEQ ID NO: 1445454 - DNA, 15 bp, Homo sapiens
gccagaagtacaggt

SEQ ID NO: 1445455 - DNA, 15 bp, Homo sapiens
agccagaagtacagg

SEQ ID NO: 1445456 - DNA, 15 bp, Homo sapiens
cagccagaagtacag

SEQ ID NO: 1445457 - DNA, 15 bp, Homo sapiens
tcagccagaagtaca

SEQ ID NO: 1445458 - DNA, 15 bp, Homo sapiens
gtcagccagaagtac

SEQ ID NO: 1445459 - DNA, 15 bp, Homo sapiens
ggtcagccagaagta

SEQ ID NO: 1445460 - DNA, 15 bp, Homo sapiens
aggtcagccagaagt

SEQ ID NO: 1445461 - DNA, 15 bp, Homo sapiens
aaggtcagccagaag

SEQ ID NO: 1445462 - DNA, 15 bp, Homo sapiens
gaaggtcagccagaa

SEQ ID NO: 1445463 - DNA, 15 bp, Homo sapiens
agaaggtcagccaga

SEQ ID NO: 1445464 - DNA, 15 bp, Homo sapiens
gagaaggtcagccag

SEQ ID NO: 1445465 - DNA, 15 bp, Homo sapiens
agagaaggtcagcca

SEQ ID NO: 1445466 - DNA, 15 bp, Homo sapiens
tagagaaggtcagcc

SEQ ID NO: 1445467 - DNA, 15 bp, Homo sapiens
ttagagaaggtcagc

SEQ ID NO: 1445468 - DNA, 15 bp, Homo sapiens
cttagagaaggtcag

SEQ ID NO: 1445469 - DNA, 15 bp, Homo sapiens
acttagagaaggtca

SEQ ID NO: 1445470 - DNA, 15 bp, Homo sapiens
gacttagagaaggtc

SEQ ID NO: 1445471 - DNA, 15 bp, Homo sapiens
tgacttagagaaggt

SEQ ID NO: 1445472 - DNA, 15 bp, Homo sapiens
ctgacttagagaagg

SEQ ID NO: 1445473 - DNA, 15 bp, Homo sapiens
cctgacttagagaag

SEQ ID NO: 1445474 - DNA, 15 bp, Homo sapiens
ccctgacttagagaa

SEQ ID NO: 1445475 - DNA, 15 bp, Homo sapiens
cccctgacttagaga

SEQ ID NO: 1445476 - DNA, 15 bp, Homo sapiens
acccctgacttagag

SEQ ID NO: 1445477 - DNA, 15 bp, Homo sapiens
aacccctgacttaga

SEQ ID NO: 1445478 - DNA, 15 bp, Homo sapiens
gaacccctgacttag

SEQ ID NO: 1445479 - DNA, 15 bp, Homo sapiens
ggaacccctgactta

SEQ ID NO: 1445480 - DNA, 15 bp, Homo sapiens
gggaacccctgactt

SEQ ID NO: 1445481 - DNA, 15 bp, Homo sapiens
tgggaacccctgact

SEQ ID NO: 1445482 - DNA, 15 bp, Homo sapiens
gtgggaacccctgac

SEQ ID NO: 1445483 - DNA, 15 bp, Homo sapiens
tgtgggaacccctga

SEQ ID NO: 1445484 - DNA, 15 bp, Homo sapiens
atgtgggaacccctg

SEQ ID NO: 1445485 - DNA, 15 bp, Homo sapiens
gatgtgggaacccct

SEQ ID NO: 1445486 - DNA, 15 bp, Homo sapiens
ggatgtgggaacccc

SEQ ID NO: 1445487 - DNA, 15 bp, Homo sapiens
aggatgtgggaaccc

SEQ ID NO: 1445488 - DNA, 15 bp, Homo sapiens
gaggatgtgggaacc

SEQ ID NO: 1445489 - DNA, 15 bp, Homo sapiens
ggaggatgtgggaac

SEQ ID NO: 1445490 - DNA, 15 bp, Homo sapiens
gggaggatgtgggaa

SEQ ID NO: 1445491 - DNA, 15 bp, Homo sapiens
agggaggatgtggga

SEQ ID NO: 1445492 - DNA, 15 bp, Homo sapiens
gagggaggatgtggg

SEQ ID NO: 1445493 - DNA, 15 bp, Homo sapiens
ggagggaggatgtgg

SEQ ID NO: 1445494 - DNA, 15 bp, Homo sapiens
aggagggaggatgtg

SEQ ID NO: 1445495 - DNA, 15 bp, Homo sapiens
aaggagggaggatgt

SEQ ID NO: 1445496 - DNA, 15 bp, Homo sapiens
caaggagggaggatg

SEQ ID NO: 1445497 - DNA, 15 bp, Homo sapiens
gcaaggagggaggat

SEQ ID NO: 1445498 - DNA, 15 bp, Homo sapiens
tgcaaggagggagga

SEQ ID NO: 1445499 - DNA, 15 bp, Homo sapiens
atgcaaggagggagg

SEQ ID NO: 1445500 - DNA, 15 bp, Homo sapiens
aatgcaaggagggag

SEQ ID NO: 1445501 - DNA, 15 bp, Homo sapiens
gaatgcaaggaggga

SEQ ID NO: 1445502 - DNA, 15 bp, Homo sapiens
tgaatgcaaggaggg

SEQ ID NO: 1445503 - DNA, 15 bp, Homo sapiens
ttgaatgcaaggagg

SEQ ID NO: 1445504 - DNA, 15 bp, Homo sapiens
attgaatgcaaggag

SEQ ID NO: 1445505 - DNA, 15 bp, Homo sapiens
tattgaatgcaagga

SEQ ID NO: 1445506 - DNA, 15 bp, Homo sapiens
ttattgaatgcaagg

SEQ ID NO: 1445507 - DNA, 15 bp, Homo sapiens
attattgaatgcaag

SEQ ID NO: 1445508 - DNA, 15 bp, Homo sapiens
aattattgaatgcaa

SEQ ID NO: 1445509 - DNA, 15 bp, Homo sapiens
aaattattgaatgca

SEQ ID NO: 1445510 - DNA, 15 bp, Homo sapiens
caaattattgaatgc

SEQ ID NO: 1445511 - DNA, 15 bp, Homo sapiens
gcaaattattgaatg

SEQ ID NO: 1445512 - DNA, 15 bp, Homo sapiens
agcaaattattgaat

SEQ ID NO: 1445513 - DNA, 15 bp, Homo sapiens
tagcaaattattgaa

SEQ ID NO: 1445514 - DNA, 15 bp, Homo sapiens
ctagcaaattattga

SEQ ID NO: 1445515 - DNA, 15 bp, Homo sapiens
tctagcaaattattg

SEQ ID NO: 1445516 - DNA, 15 bp, Homo sapiens
ttctagcaaattatt

SEQ ID NO: 1445517 - DNA, 15 bp, Homo sapiens
attctagcaaattat

SEQ ID NO: 1445518 - DNA, 15 bp, Homo sapiens
cattctagcaaatta

SEQ ID NO: 1445519 - DNA, 15 bp, Homo sapiens
ccattctagcaaatt

SEQ ID NO: 1445520 - DNA, 15 bp, Homo sapiens
gccattctagcaaat

SEQ ID NO: 1445521 - DNA, 15 bp, Homo sapiens
agccattctagcaaa

SEQ ID NO: 1445522 - DNA, 15 bp, Homo sapiens
gagccattctagcaa

SEQ ID NO: 1445523 - DNA, 15 bp, Homo sapiens
tgagccattctagca

SEQ ID NO: 1445524 - DNA, 15 bp, Homo sapiens
gtgagccattctagc

SEQ ID NO: 1445525 - DNA, 15 bp, Homo sapiens
tgtgagccattctag

SEQ ID NO: 1445526 - DNA, 15 bp, Homo sapiens
ctgtgagccattcta

SEQ ID NO: 1445527 - DNA, 15 bp, Homo sapiens
tctgtgagccattct

SEQ ID NO: 1445528 - DNA, 15 bp, Homo sapiens
ttctgtgagccattc

SEQ ID NO: 1445529 - DNA, 15 bp, Homo sapiens
gttctgtgagccatt

SEQ ID NO: 1445530 - DNA, 15 bp, Homo sapiens
tgttctgtgagccat

SEQ ID NO: 1445531 - DNA, 15 bp, Homo sapiens
gtgttctgtgagcca

SEQ ID NO: 1445532 - DNA, 15 bp, Homo sapiens
agtgttctgtgagcc

SEQ ID NO: 1445533 - DNA, 15 bp, Homo sapiens
tagtgttctgtgagc

SEQ ID NO: 1445534 - DNA, 15 bp, Homo sapiens
gtagtgttctgtgag

SEQ ID NO: 1445535 - DNA, 15 bp, Homo sapiens
agtagtgttctgtga

SEQ ID NO: 1445536 - DNA, 15 bp, Homo sapiens
aagtagtgttctgtg

SEQ ID NO: 1445537 - DNA, 15 bp, Homo sapiens
taagtagtgttctgt

SEQ ID NO: 1445538 - DNA, 15 bp, Homo sapiens
gtaagtagtgttctg

SEQ ID NO: 1445539 - DNA, 15 bp, Homo sapiens
agtaagtagtgttct

SEQ ID NO: 1445540 - DNA, 15 bp, Homo sapiens
tagtaagtagtgttc

SEQ ID NO: 1445541 - DNA, 15 bp, Homo sapiens
atagtaagtagtgtt

SEQ ID NO: 1445542 - DNA, 15 bp, Homo sapiens
aatagtaagtagtgt

SEQ ID NO: 1445543 - DNA, 15 bp, Homo sapiens
gaatagtaagtagtg

SEQ ID NO: 1445544 - DNA, 15 bp, Homo sapiens
ggaatagtaagtagt

SEQ ID NO: 1445545 - DNA, 15 bp, Homo sapiens
tggaatagtaagtag

SEQ ID NO: 1445546 - DNA, 15 bp, Homo sapiens
ctggaatagtaagta

SEQ ID NO: 1445547 - DNA, 15 bp, Homo sapiens
actggaatagtaagt

SEQ ID NO: 1445548 - DNA, 15 bp, Homo sapiens
aactggaatagtaag

SEQ ID NO: 1445549 - DNA, 15 bp, Homo sapiens
aaactggaatagtaa

SEQ ID NO: 1445550 - DNA, 15 bp, Homo sapiens
taaactggaatagta

SEQ ID NO: 1445551 - DNA, 15 bp, Homo sapiens
ataaactggaatagt

SEQ ID NO: 1445552 - DNA, 15 bp, Homo sapiens
aataaactggaatag

SEQ ID NO: 1445553 - DNA, 15 bp, Homo sapiens
taataaactggaata

SEQ ID NO: 1445554 - DNA, 15 bp, Homo sapiens
ataataaactggaat

SEQ ID NO: 1445555 - DNA, 15 bp, Homo sapiens
tataataaactggaa

SEQ ID NO: 1445556 - DNA, 15 bp, Homo sapiens
ttataataaactgga

SEQ ID NO: 1445557 - DNA, 15 bp, Homo sapiens
tttataataaactgg

SEQ ID NO: 1445558 - DNA, 15 bp, Homo sapiens
ctttataataaactg

SEQ ID NO: 1445559 - DNA, 15 bp, Homo sapiens
cctttataataaact

SEQ ID NO: 1445560 - DNA, 15 bp, Homo sapiens
tcctttataataaac

SEQ ID NO: 1445561 - DNA, 15 bp, Homo sapiens
gtcctttataataaa

SEQ ID NO: 1445562 - DNA, 15 bp, Homo sapiens
tgtcctttataataa

SEQ ID NO: 1445563 - DNA, 15 bp, Homo sapiens
gtgtcctttataata

SEQ ID NO: 1445564 - DNA, 15 bp, Homo sapiens
tgtgtcctttataat

SEQ ID NO: 1445565 - DNA, 15 bp, Homo sapiens
ttgtgtcctttataa

SEQ ID NO: 1445566 - DNA, 15 bp, Homo sapiens
gttgtgtcctttata

SEQ ID NO: 1445567 - DNA, 15 bp, Homo sapiens
agttgtgtcctttat

SEQ ID NO: 1445568 - DNA, 15 bp, Homo sapiens
gagttgtgtccttta

SEQ ID NO: 1445569 - DNA, 15 bp, Homo sapiens
tgagttgtgtccttt

SEQ ID NO: 1445570 - DNA, 15 bp, Homo sapiens
ctgagttgtgtcctt

SEQ ID NO: 1445571 - DNA, 15 bp, Homo sapiens
cctgagttgtgtcct

SEQ ID NO: 1445572 - DNA, 15 bp, Homo sapiens
tcctgagttgtgtcc

SEQ ID NO: 1445573 - DNA, 15 bp, Homo sapiens
ttcctgagttgtgtc

SEQ ID NO: 1445574 - DNA, 15 bp, Homo sapiens
gttcctgagttgtgt

SEQ ID NO: 1445575 - DNA, 15 bp, Homo sapiens
agttcctgagttgtg

SEQ ID NO: 1445576 - DNA, 15 bp, Homo sapiens
cagttcctgagttgt

SEQ ID NO: 1445577 - DNA, 15 bp, Homo sapiens
gcagttcctgagttg

SEQ ID NO: 1445578 - DNA, 15 bp, Homo sapiens
ggcagttcctgagtt

SEQ ID NO: 1445579 - DNA, 15 bp, Homo sapiens
tggcagttcctgagt

SEQ ID NO: 1445580 - DNA, 15 bp, Homo sapiens
ctggcagttcctgag

SEQ ID NO: 1445581 - DNA, 15 bp, Homo sapiens
tctggcagttcctga

SEQ ID NO: 1445582 - DNA, 15 bp, Homo sapiens
atctggcagttcctg

SEQ ID NO: 1445583 - DNA, 15 bp, Homo sapiens
catctggcagttcct

SEQ ID NO: 1445584 - DNA, 15 bp, Homo sapiens
ccatctggcagttcc

SEQ ID NO: 1445585 - DNA, 15 bp, Homo sapiens
tccatctggcagttc

SEQ ID NO: 1445586 - DNA, 15 bp, Homo sapiens
ttccatctggcagtt

SEQ ID NO: 1445587 - DNA, 15 bp, Homo sapiens
cttccatctggcagt

SEQ ID NO: 1445588 - DNA, 15 bp, Homo sapiens
tcttccatctggcag

SEQ ID NO: 1445589 - DNA, 15 bp, Homo sapiens
ctcttccatctggca

SEQ ID NO: 1445590 - DNA, 15 bp, Homo sapiens
tctcttccatctggc

SEQ ID NO: 1445591 - DNA, 15 bp, Homo sapiens
atctcttccatctgg

SEQ ID NO: 1445592 - DNA, 15 bp, Homo sapiens
catctcttccatctg

SEQ ID NO: 1445593 - DNA, 15 bp, Homo sapiens
gcatctcttccatct

SEQ ID NO: 1445594 - DNA, 15 bp, Homo sapiens
tgcatctcttccatc

SEQ ID NO: 1445595 - DNA, 15 bp, Homo sapiens
atgcatctcttccat

SEQ ID NO: 1445596 - DNA, 15 bp, Homo sapiens
aatgcatctcttcca

SEQ ID NO: 1445597 - DNA, 15 bp, Homo sapiens
caatgcatctcttcc

SEQ ID NO: 1445598 - DNA, 15 bp, Homo sapiens
tcaatgcatctcttc

SEQ ID NO: 1445599 - DNA, 15 bp, Homo sapiens
ctcaatgcatctctt

SEQ ID NO: 1445600 - DNA, 15 bp, Homo sapiens
gctcaatgcatctct

SEQ ID NO: 1445601 - DNA, 15 bp, Homo sapiens
tgctcaatgcatctc

SEQ ID NO: 1445602 - DNA, 15 bp, Homo sapiens
ttgctcaatgcatct

SEQ ID NO: 1445603 - DNA, 15 bp, Homo sapiens
cttgctcaatgcatc

SEQ ID NO: 1445604 - DNA, 15 bp, Homo sapiens
ccttgctcaatgcat

SEQ ID NO: 1445605 - DNA, 15 bp, Homo sapiens
cccttgctcaatgca

SEQ ID NO: 1445606 - DNA, 15 bp, Homo sapiens
ccccttgctcaatgc

SEQ ID NO: 1445607 - DNA, 15 bp, Homo sapiens
gccccttgctcaatg

SEQ ID NO: 1445608 - DNA, 15 bp, Homo sapiens
ggccccttgctcaat

SEQ ID NO: 1445609 - DNA, 15 bp, Homo sapiens
gggccccttgctcaa

SEQ ID NO: 1445610 - DNA, 15 bp, Homo sapiens
agggccccttgctca

SEQ ID NO: 1445611 - DNA, 15 bp, Homo sapiens
gagggccccttgctc

SEQ ID NO: 1445612 - DNA, 15 bp, Homo sapiens
agagggccccttgct

SEQ ID NO: 1445613 - DNA, 15 bp, Homo sapiens
gagagggccccttgc

SEQ ID NO: 1445614 - DNA, 15 bp, Homo sapiens
ggagagggccccttg

SEQ ID NO: 1445615 - DNA, 15 bp, Homo sapiens
tggagagggcccctt

SEQ ID NO: 1445616 - DNA, 15 bp, Homo sapiens
ctggagagggcccct

SEQ ID NO: 1445617 - DNA, 15 bp, Homo sapiens
cctggagagggcccc

SEQ ID NO: 1445618 - DNA, 15 bp, Homo sapiens
gcctggagagggccc

SEQ ID NO: 1445619 - DNA, 15 bp, Homo sapiens
tgcctggagagggcc

SEQ ID NO: 1445620 - DNA, 15 bp, Homo sapiens
gtgcctggagagggc

SEQ ID NO: 1445621 - DNA, 15 bp, Homo sapiens
tgtgcctggagaggg

SEQ ID NO: 1445622 - DNA, 15 bp, Homo sapiens
gtgtgcctggagagg

SEQ ID NO: 1445623 - DNA, 15 bp, Homo sapiens
ggtgtgcctggagag

SEQ ID NO: 1445624 - DNA, 15 bp, Homo sapiens
tggtgtgcctggaga

SEQ ID NO: 1445625 - DNA, 15 bp, Homo sapiens
gtggtgtgcctggag

SEQ ID NO: 1445626 - DNA, 15 bp, Homo sapiens
ggtggtgtgcctgga

SEQ ID NO: 1445627 - DNA, 15 bp, Homo sapiens
aggtggtgtgcctgg

SEQ ID NO: 1445628 - DNA, 15 bp, Homo sapiens
aaggtggtgtgcctg

SEQ ID NO: 1445629 - DNA, 15 bp, Homo sapiens
gaaggtggtgtgcct

SEQ ID NO: 1445630 - DNA, 15 bp, Homo sapiens
ggaaggtggtgtgcc

SEQ ID NO: 1445631 - DNA, 15 bp, Homo sapiens
gggaaggtggtgtgc

SEQ ID NO: 1445632 - DNA, 15 bp, Homo sapiens
tgggaaggtggtgtg

SEQ ID NO: 1445633 - DNA, 15 bp, Homo sapiens
ctgggaaggtggtgt

SEQ ID NO: 1445634 - DNA, 15 bp, Homo sapiens
gctgggaaggtggtg

SEQ ID NO: 1445635 - DNA, 15 bp, Homo sapiens
tgctgggaaggtggt

SEQ ID NO: 1445636 - DNA, 15 bp, Homo sapiens
gtgctgggaaggtgg

SEQ ID NO: 1445637 - DNA, 15 bp, Homo sapiens
ggtgctgggaaggtg

SEQ ID NO: 1445638 - DNA, 15 bp, Homo sapiens
aggtgctgggaaggt

SEQ ID NO: 1445639 - DNA, 15 bp, Homo sapiens
aaggtgctgggaagg

SEQ ID NO: 1445640 - DNA, 15 bp, Homo sapiens
caaggtgctgggaag

SEQ ID NO: 1445641 - DNA, 15 bp, Homo sapiens
tcaaggtgctgggaa

SEQ ID NO: 1445642 - DNA, 15 bp, Homo sapiens
atcaaggtgctggga

SEQ ID NO: 1445643 - DNA, 15 bp, Homo sapiens
catcaaggtgctggg

SEQ ID NO: 1445644 - DNA, 15 bp, Homo sapiens
acatcaaggtgctgg

SEQ ID NO: 1445645 - DNA, 15 bp, Homo sapiens
tacatcaaggtgctg

SEQ ID NO: 1445646 - DNA, 15 bp, Homo sapiens
atacatcaaggtgct

SEQ ID NO: 1445647 - DNA, 15 bp, Homo sapiens
catacatcaaggtgc

SEQ ID NO: 1445648 - DNA, 15 bp, Homo sapiens
gcatacatcaaggtg

SEQ ID NO: 1445649 - DNA, 15 bp, Homo sapiens
tgcatacatcaaggt

SEQ ID NO: 1445650 - DNA, 15 bp, Homo sapiens
gtgcatacatcaagg

SEQ ID NO: 1445651 - DNA, 15 bp, Homo sapiens
ggtgcatacatcaag

SEQ ID NO: 1445652 - DNA, 15 bp, Homo sapiens
tggtgcatacatcaa

SEQ ID NO: 1445653 - DNA, 15 bp, Homo sapiens
ttggtgcatacatca

SEQ ID NO: 1445654 - DNA, 15 bp, Homo sapiens
gttggtgcatacatc

SEQ ID NO: 1445655 - DNA, 15 bp, Homo sapiens
ggttggtgcatacat

SEQ ID NO: 1445656 - DNA, 15 bp, Homo sapiens
gggttggtgcataca

SEQ ID NO: 1445657 - DNA, 15 bp, Homo sapiens
tgggttggtgcatac

SEQ ID NO: 1445658 - DNA, 15 bp, Homo sapiens
ctgggttggtgcata

SEQ ID NO: 1445659 - DNA, 15 bp, Homo sapiens
cctgggttggtgcat

SEQ ID NO: 1445660 - DNA, 15 bp, Homo sapiens
tcctgggttggtgca

SEQ ID NO: 1445661 - DNA, 15 bp, Homo sapiens
ctcctgggttggtgc

SEQ ID NO: 1445662 - DNA, 15 bp, Homo sapiens
gctcctgggttggtg

SEQ ID NO: 1445663 - DNA, 15 bp, Homo sapiens
agctcctgggttggt

SEQ ID NO: 1445664 - DNA, 15 bp, Homo sapiens
gagctcctgggttgg

SEQ ID NO: 1445665 - DNA, 15 bp, Homo sapiens
agagctcctgggttg

SEQ ID NO: 1445666 - DNA, 15 bp, Homo sapiens
cagagctcctgggtt

SEQ ID NO: 1445667 - DNA, 15 bp, Homo sapiens
ccagagctcctgggt

SEQ ID NO: 1445668 - DNA, 15 bp, Homo sapiens
tccagagctcctggg

SEQ ID NO: 1445669 - DNA, 15 bp, Homo sapiens
ctccagagctcctgg

SEQ ID NO: 1445670 - DNA, 15 bp, Homo sapiens
actccagagctcctg

SEQ ID NO: 1445671 - DNA, 15 bp, Homo sapiens
aactccagagctcct

SEQ ID NO: 1445672 - DNA, 15 bp, Homo sapiens
caactccagagctcc

SEQ ID NO: 1445673 - DNA, 15 bp, Homo sapiens
acaactccagagctc

SEQ ID NO: 1445674 - DNA, 15 bp, Homo sapiens
aacaactccagagct

SEQ ID NO: 1445675 - DNA, 15 bp, Homo sapiens
taacaactccagagc

SEQ ID NO: 1445676 - DNA, 15 bp, Homo sapiens
ctaacaactccagag

SEQ ID NO: 1445677 - DNA, 15 bp, Homo sapiens
cctaacaactccaga

SEQ ID NO: 1445678 - DNA, 15 bp, Homo sapiens
ccctaacaactccag

SEQ ID NO: 1445679 - DNA, 15 bp, Homo sapiens
accctaacaactcca

SEQ ID NO: 1445680 - DNA, 15 bp, Homo sapiens
aaccctaacaactcc

SEQ ID NO: 1445681 - DNA, 15 bp, Homo sapiens
aaaccctaacaactc

SEQ ID NO: 1445682 - DNA, 15 bp, Homo sapiens
aaaaccctaacaact

SEQ ID NO: 1445683 - DNA, 15 bp, Homo sapiens
aaaaaccctaacaac

SEQ ID NO: 1445684 - DNA, 15 bp, Homo sapiens
taaaaaccctaacaa

SEQ ID NO: 1445685 - DNA, 15 bp, Homo sapiens
ataaaaaccctaaca

SEQ ID NO: 1445686 - DNA, 15 bp, Homo sapiens
cataaaaaccctaac

SEQ ID NO: 1445687 - DNA, 15 bp, Homo sapiens
ccataaaaaccctaa

SEQ ID NO: 1445688 - DNA, 15 bp, Homo sapiens
gccataaaaacccta

SEQ ID NO: 1445689 - DNA, 15 bp, Homo sapiens
agccataaaaaccct

SEQ ID NO: 1445690 - DNA, 15 bp, Homo sapiens
tagccataaaaaccc

SEQ ID NO: 1445691 - DNA, 15 bp, Homo sapiens
atagccataaaaacc

SEQ ID NO: 1445692 - DNA, 15 bp, Homo sapiens
aatagccataaaaac

SEQ ID NO: 1445693 - DNA, 15 bp, Homo sapiens
taatagccataaaaa

SEQ ID NO: 1445694 - DNA, 15 bp, Homo sapiens
gtaatagccataaaa

SEQ ID NO: 1445695 - DNA, 15 bp, Homo sapiens
tgtaatagccataaa

SEQ ID NO: 1445696 - DNA, 15 bp, Homo sapiens
atgtaatagccataa

SEQ ID NO: 1445697 - DNA, 15 bp, Homo sapiens
tatgtaatagccata

SEQ ID NO: 1445698 - DNA, 15 bp, Homo sapiens
ctatgtaatagccat

SEQ ID NO: 1445699 - DNA, 15 bp, Homo sapiens
cctatgtaatagcca

SEQ ID NO: 1445700 - DNA, 15 bp, Homo sapiens
gcctatgtaatagcc

SEQ ID NO: 1445701 - DNA, 15 bp, Homo sapiens
tgcctatgtaatagc

SEQ ID NO: 1445702 - DNA, 15 bp, Homo sapiens
gtgcctatgtaatag

SEQ ID NO: 1445703 - DNA, 15 bp, Homo sapiens
cgtgcctatgtaata

SEQ ID NO: 1445704 - DNA, 15 bp, Homo sapiens
tcgtgcctatgtaat

SEQ ID NO: 1445705 - DNA, 15 bp, Homo sapiens
atcgtgcctatgtaa

SEQ ID NO: 1445706 - DNA, 15 bp, Homo sapiens
aatcgtgcctatgta

SEQ ID NO: 1445707 - DNA, 15 bp, Homo sapiens
caatcgtgcctatgt

SEQ ID NO: 1445708 - DNA, 15 bp, Homo sapiens
tcaatcgtgcctatg

SEQ ID NO: 1445709 - DNA, 15 bp, Homo sapiens
atcaatcgtgcctat

SEQ ID NO: 1445710 - DNA, 15 bp, Homo sapiens
aatcaatcgtgccta

SEQ ID NO: 1445711 - DNA, 15 bp, Homo sapiens
taatcaatcgtgcct

SEQ ID NO: 1445712 - DNA, 15 bp, Homo sapiens
gtaatcaatcgtgcc

SEQ ID NO: 1445713 - DNA, 15 bp, Homo sapiens
tgtaatcaatcgtgc

SEQ ID NO: 1445714 - DNA, 15 bp, Homo sapiens
ctgtaatcaatcgtg

SEQ ID NO: 1445715 - DNA, 15 bp, Homo sapiens
gctgtaatcaatcgt

SEQ ID NO: 1445716 - DNA, 15 bp, Homo sapiens
tgctgtaatcaatcg

SEQ ID NO: 1445717 - DNA, 15 bp, Homo sapiens
atgctgtaatcaatc

SEQ ID NO: 1445718 - DNA, 15 bp, Homo sapiens
aatgctgtaatcaat

SEQ ID NO: 1445719 - DNA, 15 bp, Homo sapiens
caatgctgtaatcaa

SEQ ID NO: 1445720 - DNA, 15 bp, Homo sapiens
ccaatgctgtaatca

SEQ ID NO: 1445721 - DNA, 15 bp, Homo sapiens
gccaatgctgtaatc

SEQ ID NO: 1445722 - DNA, 15 bp, Homo sapiens
ggccaatgctgtaat

SEQ ID NO: 1445723 - DNA, 15 bp, Homo sapiens
gggccaatgctgtaa

SEQ ID NO: 1445724 - DNA, 15 bp, Homo sapiens
agggccaatgctgta

SEQ ID NO: 1445725 - DNA, 15 bp, Homo sapiens
aagggccaatgctgt

SEQ ID NO: 1445726 - DNA, 15 bp, Homo sapiens
caagggccaatgctg

SEQ ID NO: 1445727 - DNA, 15 bp, Homo sapiens
ccaagggccaatgct

SEQ ID NO: 1445728 - DNA, 15 bp, Homo sapiens
accaagggccaatgc

SEQ ID NO: 1445729 - DNA, 15 bp, Homo sapiens
caccaagggccaatg

SEQ ID NO: 1445730 - DNA, 15 bp, Homo sapiens
ccaccaagggccaat

SEQ ID NO: 1445731 - DNA, 15 bp, Homo sapiens
accaccaagggccaa

SEQ ID NO: 1445732 - DNA, 15 bp, Homo sapiens
aaccaccaagggcca

SEQ ID NO: 1445733 - DNA, 15 bp, Homo sapiens
caaccaccaagggcc

SEQ ID NO: 1445734 - DNA, 15 bp, Homo sapiens
tcaaccaccaagggc

SEQ ID NO: 1445735 - DNA, 15 bp, Homo sapiens
ctcaaccaccaaggg

SEQ ID NO: 1445736 - DNA, 15 bp, Homo sapiens
actcaaccaccaagg

SEQ ID NO: 1445737 - DNA, 15 bp, Homo sapiens
aactcaaccaccaag

SEQ ID NO: 1445738 - DNA, 15 bp, Homo sapiens
caactcaaccaccaa

SEQ ID NO: 1445739 - DNA, 15 bp, Homo sapiens
tcaactcaaccacca

SEQ ID NO: 1445740 - DNA, 15 bp, Homo sapiens
atcaactcaaccacc

SEQ ID NO: 1445741 - DNA, 15 bp, Homo sapiens
gatcaactcaaccac

SEQ ID NO: 1445742 - DNA, 15 bp, Homo sapiens
agatcaactcaacca

SEQ ID NO: 1445743 - DNA, 15 bp, Homo sapiens
gagatcaactcaacc

SEQ ID NO: 1445744 - DNA, 15 bp, Homo sapiens
agagatcaactcaac

SEQ ID NO: 1445745 - DNA, 15 bp, Homo sapiens
tagagatcaactcaa

SEQ ID NO: 1445746 - DNA, 15 bp, Homo sapiens
ctagagatcaactca

SEQ ID NO: 1445747 - DNA, 15 bp, Homo sapiens
gctagagatcaactc

SEQ ID NO: 1445748 - DNA, 15 bp, Homo sapiens
ggctagagatcaact

SEQ ID NO: 1445749 - DNA, 15 bp, Homo sapiens
tggctagagatcaac

SEQ ID NO: 1445750 - DNA, 15 bp, Homo sapiens
ttggctagagatcaa

SEQ ID NO: 1445751 - DNA, 15 bp, Homo sapiens
gttggctagagatca

SEQ ID NO: 1445752 - DNA, 15 bp, Homo sapiens
agttggctagagatc

SEQ ID NO: 1445753 - DNA, 15 bp, Homo sapiens
gagttggctagagat

SEQ ID NO: 1445754 - DNA, 15 bp, Homo sapiens
agagttggctagaga

SEQ ID NO: 1445755 - DNA, 15 bp, Homo sapiens
gagagttggctagag

SEQ ID NO: 1445756 - DNA, 15 bp, Homo sapiens
ggagagttggctaga

SEQ ID NO: 1445757 - DNA, 15 bp, Homo sapiens
gggagagttggctag

SEQ ID NO: 1445758 - DNA, 15 bp, Homo sapiens
agggagagttggcta

SEQ ID NO: 1445759 - DNA, 15 bp, Homo sapiens
aagggagagttggct

SEQ ID NO: 1445760 - DNA, 15 bp, Homo sapiens
caagggagagttggc

SEQ ID NO: 1445761 - DNA, 15 bp, Homo sapiens
gcaagggagagttgg

SEQ ID NO: 1445762 - DNA, 15 bp, Homo sapiens
ggcaagggagagttg

SEQ ID NO: 1445763 - DNA, 15 bp, Homo sapiens
aggcaagggagagtt

SEQ ID NO: 1445764 - DNA, 15 bp, Homo sapiens
caggcaagggagagt

SEQ ID NO: 1445765 - DNA, 15 bp, Homo sapiens
ccaggcaagggagag

SEQ ID NO: 1445766 - DNA, 15 bp, Homo sapiens
tccaggcaagggaga

SEQ ID NO: 1445767 - DNA, 15 bp, Homo sapiens
ctccaggcaagggag

SEQ ID NO: 1445768 - DNA, 15 bp, Homo sapiens
tctccaggcaaggga

SEQ ID NO: 1445769 - DNA, 15 bp, Homo sapiens
ctctccaggcaaggg

SEQ ID NO: 1445770 - DNA, 15 bp, Homo sapiens
acctctccaggcaag

SEQ ID NO: 1445771 - DNA, 15 bp, Homo sapiens
cacctctccaggcaa

SEQ ID NO: 1445772 - DNA, 15 bp, Homo sapiens
ccacctctccaggca

SEQ ID NO: 1445773 - DNA, 15 bp, Homo sapiens
gccacctctccaggc

SEQ ID NO: 1445774 - DNA, 15 bp, Homo sapiens
agccacctctccagg

SEQ ID NO: 1445775 - DNA, 15 bp, Homo sapiens
tagccacctctccag

SEQ ID NO: 1445776 - DNA, 15 bp, Homo sapiens
ctagccacctctcca

SEQ ID NO: 1445777 - DNA, 15 bp, Homo sapiens
tctagccacctctcc

SEQ ID NO: 1445778 - DNA, 15 bp, Homo sapiens
ctctagccacctctc

SEQ ID NO: 1445779 - DNA, 15 bp, Homo sapiens
tctctagccacctct

SEQ ID NO: 1445780 - DNA, 15 bp, Homo sapiens
ctctctagccacctc

SEQ ID NO: 1445781 - DNA, 15 bp, Homo sapiens
tctctctagccacct

SEQ ID NO: 1445782 - DNA, 15 bp, Homo sapiens
ctctctctagccacc

SEQ ID NO: 1445783 - DNA, 15 bp, Homo sapiens
cctctctctagccac

SEQ ID NO: 1445784 - DNA, 15 bp, Homo sapiens
acctctctctagcca

SEQ ID NO: 1445785 - DNA, 15 bp, Homo sapiens
cacctctctctagcc

SEQ ID NO: 1445786 - DNA, 15 bp, Homo sapiens
ccacctctctctagc

SEQ ID NO: 1445787 - DNA, 15 bp, Homo sapiens
accacctctctctag

SEQ ID NO: 1445788 - DNA, 15 bp, Homo sapiens
caccacctctctcta

SEQ ID NO: 1445789 - DNA, 15 bp, Homo sapiens
gcaccacctctctct

SEQ ID NO: 1445790 - DNA, 15 bp, Homo sapiens
agcaccacctctctc

SEQ ID NO: 1445791 - DNA, 15 bp, Homo sapiens
cagcaccacctctct

SEQ ID NO: 1445792 - DNA, 15 bp, Homo sapiens
tcagcaccacctctc

SEQ ID NO: 1445793 - DNA, 15 bp, Homo sapiens
ttcagcaccacctct

SEQ ID NO: 1445794 - DNA, 15 bp, Homo sapiens
attcagcaccacctc

SEQ ID NO: 1445795 - DNA, 15 bp, Homo sapiens
aattcagcaccacct

SEQ ID NO: 1445796 - DNA, 15 bp, Homo sapiens
gaattcagcaccacc

SEQ ID NO: 1445797 - DNA, 15 bp, Homo sapiens
agaattcagcaccac

SEQ ID NO: 1445798 - DNA, 15 bp, Homo sapiens
aagaattcagcacca

SEQ ID NO: 1445799 - DNA, 15 bp, Homo sapiens
aaagaattcagcacc

SEQ ID NO: 1445800 - DNA, 15 bp, Homo sapiens
aaaagaattcagcac

SEQ ID NO: 1445801 - DNA, 15 bp, Homo sapiens
aaaaagaattcagca

SEQ ID NO: 1445802 - DNA, 15 bp, Homo sapiens
aaaaaagaattcagc

SEQ ID NO: 1445803 - DNA, 15 bp, Homo sapiens
aagccactgcactcc

SEQ ID NO: 1445804 - DNA, 15 bp, Homo sapiens
caagccactgcactc

SEQ ID NO: 1445805 - DNA, 15 bp, Homo sapiens
tcaagccactgcact

SEQ ID NO: 1445806 - DNA, 15 bp, Homo sapiens
atcaagccactgcac

SEQ ID NO: 1445807 - DNA, 15 bp, Homo sapiens
gatcaagccactgca

SEQ ID NO: 1445808 - DNA, 15 bp, Homo sapiens
agatcaagccactgc

SEQ ID NO: 1445809 - DNA, 15 bp, Homo sapiens
gagatcaagccactg

SEQ ID NO: 1445810 - DNA, 15 bp, Homo sapiens
agagatcaagccact

SEQ ID NO: 1445811 - DNA, 15 bp, Homo sapiens
cagagatcaagccac

SEQ ID NO: 1445812 - DNA, 15 bp, Homo sapiens
gcagagatcaagcca

SEQ ID NO: 1445813 - DNA, 15 bp, Homo sapiens
agcagagatcaagcc

SEQ ID NO: 1445814 - DNA, 15 bp, Homo sapiens
gagcagagatcaagc

SEQ ID NO: 1445815 - DNA, 15 bp, Homo sapiens
tgagcagagatcaag

SEQ ID NO: 1445816 - DNA, 15 bp, Homo sapiens
gtgagcagagatcaa

SEQ ID NO: 1445817 - DNA, 15 bp, Homo sapiens
cttgcagtgagcaga

SEQ ID NO: 1445818 - DNA, 15 bp, Homo sapiens
gcttgcagtgagcag

SEQ ID NO: 1445819 - DNA, 15 bp, Homo sapiens
agcttgcagtgagca

SEQ ID NO: 1445820 - DNA, 15 bp, Homo sapiens
cgggtgtggtggcgg

SEQ ID NO: 1445821 - DNA, 15 bp, Homo sapiens
caggctgggcgcggt

SEQ ID NO: 1445822 - DNA, 15 bp, Homo sapiens
tcaggctgggcgcgg

SEQ ID NO: 1445823 - DNA, 15 bp, Homo sapiens
ctcaggctgggcgcg

SEQ ID NO: 1445824 - DNA, 15 bp, Homo sapiens
cctcaggctgggcgc

SEQ ID NO: 1445825 - DNA, 15 bp, Homo sapiens
acctcaggctgggcg

SEQ ID NO: 1445826 - DNA, 15 bp, Homo sapiens
cacctcaggctgggc

SEQ ID NO: 1445827 - DNA, 15 bp, Homo sapiens
ccacctcaggctggg

SEQ ID NO: 1445828 - DNA, 15 bp, Homo sapiens
accacctcaggctgg

SEQ ID NO: 1445829 - DNA, 15 bp, Homo sapiens
caccacctcaggctg

SEQ ID NO: 1445830 - DNA, 15 bp, Homo sapiens
gcaccacctcaggct

SEQ ID NO: 1445831 - DNA, 15 bp, Homo sapiens
agcaccacctcaggc

SEQ ID NO: 1445832 - DNA, 15 bp, Homo sapiens
cagcaccacctcagg

SEQ ID NO: 1445833 - DNA, 15 bp, Homo sapiens
tcagcaccacctcag

SEQ ID NO: 1445834 - DNA, 15 bp, Homo sapiens
ttcagcaccacctca

SEQ ID NO: 1445835 - DNA, 15 bp, Homo sapiens
tagaattcagcacca

SEQ ID NO: 1445836 - DNA, 15 bp, Homo sapiens
ttagaattcagcacc

SEQ ID NO: 1445837 - DNA, 15 bp, Homo sapiens
attagaattcagcac

SEQ ID NO: 1445838 - DNA, 15 bp, Homo sapiens
gattagaattcagca

SEQ ID NO: 1445839 - DNA, 15 bp, Homo sapiens
ggattagaattcagc

SEQ ID NO: 1445840 - DNA, 15 bp, Homo sapiens
aggattagaattcag

SEQ ID NO: 1445841 - DNA, 15 bp, Homo sapiens
gaggattagaattca

SEQ ID NO: 1445842 - DNA, 15 bp, Homo sapiens
agaggattagaattc

SEQ ID NO: 1445843 - DNA, 15 bp, Homo sapiens
tagaggattagaatt

SEQ ID NO: 1445844 - DNA, 15 bp, Homo sapiens
atagaggattagaat

SEQ ID NO: 1445845 - DNA, 15 bp, Homo sapiens
aatagaggattagaa

SEQ ID NO: 1445846 - DNA, 15 bp, Homo sapiens
gaatagaggattaga

SEQ ID NO: 1445847 - DNA, 15 bp, Homo sapiens
tgaatagaggattag

SEQ ID NO: 1445848 - DNA, 15 bp, Homo sapiens
gtgaatagaggatta

SEQ ID NO: 1445849 - DNA, 15 bp, Homo sapiens
tgtgaatagaggatt

SEQ ID NO: 1445850 - DNA, 15 bp, Homo sapiens
atgtgaatagaggat

SEQ ID NO: 1445851 - DNA, 15 bp, Homo sapiens
catgtgaatagagga

SEQ ID NO: 1445852 - DNA, 15 bp, Homo sapiens
ccatgtgaatagagg

SEQ ID NO: 1445853 - DNA, 15 bp, Homo sapiens
accatgtgaatagag

SEQ ID NO: 1445854 - DNA, 15 bp, Homo sapiens
aaccatgtgaataga

SEQ ID NO: 1445855 - DNA, 15 bp, Homo sapiens
caaccatgtgaatag

SEQ ID NO: 1445856 - DNA, 15 bp, Homo sapiens
ccaaccatgtgaata

SEQ ID NO: 1445857 - DNA, 15 bp, Homo sapiens
accaaccatgtgaat

SEQ ID NO: 1445858 - DNA, 15 bp, Homo sapiens
aaccaaccatgtgaa

SEQ ID NO: 1445859 - DNA, 15 bp, Homo sapiens
gaaccaaccatgtga

SEQ ID NO: 1445860 - DNA, 15 bp, Homo sapiens
agaaccaaccatgtg

SEQ ID NO: 1445861 - DNA, 15 bp, Homo sapiens
aagaaccaaccatgt

SEQ ID NO: 1445862 - DNA, 15 bp, Homo sapiens
gaagaaccaaccatg

SEQ ID NO: 1445863 - DNA, 15 bp, Homo sapiens
agaagaaccaaccat

SEQ ID NO: 1445864 - DNA, 15 bp, Homo sapiens
cagaagaaccaacca

SEQ ID NO: 1445865 - DNA, 15 bp, Homo sapiens
tcagaagaaccaacc

SEQ ID NO: 1445866 - DNA, 15 bp, Homo sapiens
gtcagaagaaccaac

SEQ ID NO: 1445867 - DNA, 15 bp, Homo sapiens
tgtcagaagaaccaa

SEQ ID NO: 1445868 - DNA, 15 bp, Homo sapiens
ttgtcagaagaacca

SEQ ID NO: 1445869 - DNA, 15 bp, Homo sapiens
gttgtcagaagaacc

SEQ ID NO: 1445870 - DNA, 15 bp, Homo sapiens
atttaaaccccttag

SEQ ID NO: 1445871 - DNA, 15 bp, Homo sapiens
aatttaaacccctta

SEQ ID NO: 1445872 - DNA, 15 bp, Homo sapiens
aaatttaaacccctt

SEQ ID NO: 1445873 - DNA, 15 bp, Homo sapiens
caaatttaaacccct

SEQ ID NO: 1445874 - DNA, 15 bp, Homo sapiens
acaaatttaaacccc

SEQ ID NO: 1445875 - DNA, 15 bp, Homo sapiens
gacaaatttaaaccc

SEQ ID NO: 1445876 - DNA, 15 bp, Homo sapiens
agacaaatttaaacc

SEQ ID NO: 1445877 - DNA, 15 bp, Homo sapiens
aagacaaatttaaac

SEQ ID NO: 1445878 - DNA, 15 bp, Homo sapiens
taagacaaatttaaa

SEQ ID NO: 1445879 - DNA, 15 bp, Homo sapiens
ttaagacaaatttaa

SEQ ID NO: 1445880 - DNA, 15 bp, Homo sapiens
cttaagacaaattta

SEQ ID NO: 1445881 - DNA, 15 bp, Homo sapiens
ccttaagacaaattt

SEQ ID NO: 1445882 - DNA, 15 bp, Homo sapiens
cccttaagacaaatt

SEQ ID NO: 1445883 - DNA, 15 bp, Homo sapiens
gcccttaagacaaat

SEQ ID NO: 1445884 - DNA, 15 bp, Homo sapiens
tgcccttaagacaaa

SEQ ID NO: 1445885 - DNA, 15 bp, Homo sapiens
ctgcccttaagacaa

SEQ ID NO: 1445886 - DNA, 15 bp, Homo sapiens
actgcccttaagaca

SEQ ID NO: 1445887 - DNA, 15 bp, Homo sapiens
cactgcccttaagac

SEQ ID NO: 1445888 - DNA, 15 bp, Homo sapiens
ccactgcccttaaga

SEQ ID NO: 1445889 - DNA, 15 bp, Homo sapiens
tccactgcccttaag

SEQ ID NO: 1445890 - DNA, 15 bp, Homo sapiens
ctccactgcccttaa

SEQ ID NO: 1445891 - DNA, 15 bp, Homo sapiens
cctccactgccctta

SEQ ID NO: 1445892 - DNA, 15 bp, Homo sapiens
tcctccactgccctt

SEQ ID NO: 1445893 - DNA, 15 bp, Homo sapiens
ctcctccactgccct

SEQ ID NO: 1445894 - DNA, 15 bp, Homo sapiens
actcctccactgccc

SEQ ID NO: 1445895 - DNA, 15 bp, Homo sapiens
cactcctccactgcc

SEQ ID NO: 1445896 - DNA, 15 bp, Homo sapiens
tcactcctccactgc

SEQ ID NO: 1445897 - DNA, 15 bp, Homo sapiens
gtcactcctccactg

SEQ ID NO: 1445898 - DNA, 15 bp, Homo sapiens
tgtcactcctccact

SEQ ID NO: 1445899 - DNA, 15 bp, Homo sapiens
ctgtcactcctccac

SEQ ID NO: 1445900 - DNA, 15 bp, Homo sapiens
actgtcactcctcca

SEQ ID NO: 1445901 - DNA, 15 bp, Homo sapiens
gactgtcactcctcc

SEQ ID NO: 1445902 - DNA, 15 bp, Homo sapiens
tgactgtcactcctc

SEQ ID NO: 1445903 - DNA, 15 bp, Homo sapiens
gtgactgtcactcct

SEQ ID NO: 1445904 - DNA, 15 bp, Homo sapiens
tgtgactgtcactcc

SEQ ID NO: 1445905 - DNA, 15 bp, Homo sapiens
atgtgactgtcactc

SEQ ID NO: 1445906 - DNA, 15 bp, Homo sapiens
aatgtgactgtcact

SEQ ID NO: 1445907 - DNA, 15 bp, Homo sapiens
aaatgtgactgtcac

SEQ ID NO: 1445908 - DNA, 15 bp, Homo sapiens
taaatgtgactgtca

SEQ ID NO: 1445909 - DNA, 15 bp, Homo sapiens
ttaaatgtgactgtc

SEQ ID NO: 1445910 - DNA, 15 bp, Homo sapiens
cttaaatgtgactgt

SEQ ID NO: 1445911 - DNA, 15 bp, Homo sapiens
acttaaatgtgactg

SEQ ID NO: 1445912 - DNA, 15 bp, Homo sapiens
aacttaaatgtgact

SEQ ID NO: 1445913 - DNA, 15 bp, Homo sapiens
aaacttaaatgtgac

SEQ ID NO: 1445914 - DNA, 15 bp, Homo sapiens
aaaacttaaatgtga

SEQ ID NO: 1445915 - DNA, 15 bp, Homo sapiens
taaaacttaaatgtg

SEQ ID NO: 1445916 - DNA, 15 bp, Homo sapiens
ctaaaacttaaatgt

SEQ ID NO: 1445917 - DNA, 15 bp, Homo sapiens
tctaaaacttaaatg

SEQ ID NO: 1445918 - DNA, 15 bp, Homo sapiens
ttctaaaacttaaat

SEQ ID NO: 1445919 - DNA, 15 bp, Homo sapiens
tttctaaaacttaaa

SEQ ID NO: 1445920 - DNA, 15 bp, Homo sapiens
ctttctaaaacttaa

SEQ ID NO: 1445921 - DNA, 15 bp, Homo sapiens
tctttctaaaactta

SEQ ID NO: 1445922 - DNA, 15 bp, Homo sapiens
atctttctaaaactt

SEQ ID NO: 1445923 - DNA, 15 bp, Homo sapiens
catctttctaaaact

SEQ ID NO: 1445924 - DNA, 15 bp, Homo sapiens
tcatctttctaaaac

SEQ ID NO: 1445925 - DNA, 15 bp, Homo sapiens
ctcatctttctaaaa

SEQ ID NO: 1445926 - DNA, 15 bp, Homo sapiens
actcatctttctaaa

SEQ ID NO: 1445927 - DNA, 15 bp, Homo sapiens
gactcatctttctaa

SEQ ID NO: 1445928 - DNA, 15 bp, Homo sapiens
agactcatctttcta

SEQ ID NO: 1445929 - DNA, 15 bp, Homo sapiens
tagactcatctttct

SEQ ID NO: 1445930 - DNA, 15 bp, Homo sapiens
ctagactcatctttc

SEQ ID NO: 1445931 - DNA, 15 bp, Homo sapiens
cactagactcatctt

SEQ ID NO: 1445932 - DNA, 15 bp, Homo sapiens
ccactagactcatct

SEQ ID NO: 1445933 - DNA, 15 bp, Homo sapiens
gccactagactcatc

SEQ ID NO: 1445934 - DNA, 15 bp, Homo sapiens
tgccactagactcat

SEQ ID NO: 1445935 - DNA, 15 bp, Homo sapiens
ctgccactagactca

SEQ ID NO: 1445936 - DNA, 15 bp, Homo sapiens
gctgccactagactc

SEQ ID NO: 1445937 - DNA, 15 bp, Homo sapiens
tgctgccactagact

SEQ ID NO: 1445938 - DNA, 15 bp, Homo sapiens
atgctgccactagac

SEQ ID NO: 1445939 - DNA, 15 bp, Homo sapiens
catgctgccactaga

SEQ ID NO: 1445940 - DNA, 15 bp, Homo sapiens
ccatgctgccactag

SEQ ID NO: 1445941 - DNA, 15 bp, Homo sapiens
tccatgctgccacta

SEQ ID NO: 1445942 - DNA, 15 bp, Homo sapiens
ctccatgctgccact

SEQ ID NO: 1445943 - DNA, 15 bp, Homo sapiens
cctccatgctgccac

SEQ ID NO: 1445944 - DNA, 15 bp, Homo sapiens
ccctccatgctgcca

SEQ ID NO: 1445945 - DNA, 15 bp, Homo sapiens
accctccatgctgcc

SEQ ID NO: 1445946 - DNA, 15 bp, Homo sapiens
taccctccatgctgc

SEQ ID NO: 1445947 - DNA, 15 bp, Homo sapiens
ctaccctccatgctg

SEQ ID NO: 1445948 - DNA, 15 bp, Homo sapiens
tctaccctccatgct

SEQ ID NO: 1445949 - DNA, 15 bp, Homo sapiens
atctaccctccatgc

SEQ ID NO: 1445950 - DNA, 15 bp, Homo sapiens
aatctaccctccatg

SEQ ID NO: 1445951 - DNA, 15 bp, Homo sapiens
caatctaccctccat

SEQ ID NO: 1445952 - DNA, 15 bp, Homo sapiens
tcaatctaccctcca

SEQ ID NO: 1445953 - DNA, 15 bp, Homo sapiens
atcaatctaccctcc

SEQ ID NO: 1445954 - DNA, 15 bp, Homo sapiens
tatcaatctaccctc

SEQ ID NO: 1445955 - DNA, 15 bp, Homo sapiens
ctatcaatctaccct

SEQ ID NO: 1445956 - DNA, 15 bp, Homo sapiens
tctatcaatctaccc

SEQ ID NO: 1445957 - DNA, 15 bp, Homo sapiens
ttctatcaatctacc

SEQ ID NO: 1445958 - DNA, 15 bp, Homo sapiens
cttctatcaatctac

SEQ ID NO: 1445959 - DNA, 15 bp, Homo sapiens
gcttctatcaatcta

SEQ ID NO: 1445960 - DNA, 15 bp, Homo sapiens
ggcttctatcaatct

SEQ ID NO: 1445961 - DNA, 15 bp, Homo sapiens
tggcttctatcaatc

SEQ ID NO: 1445962 - DNA, 15 bp, Homo sapiens
ttggcttctatcaat

SEQ ID NO: 1445963 - DNA, 15 bp, Homo sapiens
tttggcttctatcaa

SEQ ID NO: 1445964 - DNA, 15 bp, Homo sapiens
ctttggcttctatca

SEQ ID NO: 1445965 - DNA, 15 bp, Homo sapiens
gctttggcttctatc

SEQ ID NO: 1445966 - DNA, 15 bp, Homo sapiens
agctttggcttctat

SEQ ID NO: 1445967 - DNA, 15 bp, Homo sapiens
cagctttggcttcta

SEQ ID NO: 1445968 - DNA, 15 bp, Homo sapiens
ccagctttggcttct

SEQ ID NO: 1445969 - DNA, 15 bp, Homo sapiens
tccagctttggcttc

SEQ ID NO: 1445970 - DNA, 15 bp, Homo sapiens
ctccagctttggctt

SEQ ID NO: 1445971 - DNA, 15 bp, Homo sapiens
cctccagctttggct

SEQ ID NO: 1445972 - DNA, 15 bp, Homo sapiens
tcctccagctttggc

SEQ ID NO: 1445973 - DNA, 15 bp, Homo sapiens
atcctccagctttgg

SEQ ID NO: 1445974 - DNA, 15 bp, Homo sapiens
gatcctccagctttg

SEQ ID NO: 1445975 - DNA, 15 bp, Homo sapiens
ggatcctccagcttt

SEQ ID NO: 1445976 - DNA, 15 bp, Homo sapiens
tggatcctccagctt

SEQ ID NO: 1445977 - DNA, 15 bp, Homo sapiens
atggatcctccagct

SEQ ID NO: 1445978 - DNA, 15 bp, Homo sapiens
catggatcctccagc

SEQ ID NO: 1445979 - DNA, 15 bp, Homo sapiens
tcatggatcctccag

SEQ ID NO: 1445980 - DNA, 15 bp, Homo sapiens
ttcatggatcctcca

SEQ ID NO: 1445981 - DNA, 15 bp, Homo sapiens
gttcatggatcctcc

SEQ ID NO: 1445982 - DNA, 15 bp, Homo sapiens
tgttcatggatcctc

SEQ ID NO: 1445983 - DNA, 15 bp, Homo sapiens
ttgttcatggatcct

SEQ ID NO: 1445984 - DNA, 15 bp, Homo sapiens
attgttcatggatcc

SEQ ID NO: 1445985 - DNA, 15 bp, Homo sapiens
aattgttcatggatc

SEQ ID NO: 1445986 - DNA, 15 bp, Homo sapiens
aaattgttcatggat

SEQ ID NO: 1445987 - DNA, 15 bp, Homo sapiens
caaattgttcatgga

SEQ ID NO: 1445988 - DNA, 15 bp, Homo sapiens
ccaaattgttcatgg

SEQ ID NO: 1445989 - DNA, 15 bp, Homo sapiens
tccaaattgttcatg

SEQ ID NO: 1445990 - DNA, 15 bp, Homo sapiens
ctccaaattgttcat

SEQ ID NO: 1445991 - DNA, 15 bp, Homo sapiens
tctccaaattgttca

SEQ ID NO: 1445992 - DNA, 15 bp, Homo sapiens
gtctccaaattgttc

SEQ ID NO: 1445993 - DNA, 15 bp, Homo sapiens
agtctccaaattgtt

SEQ ID NO: 1445994 - DNA, 15 bp, Homo sapiens
cagtctccaaattgt

SEQ ID NO: 1445995 - DNA, 15 bp, Homo sapiens
acagtctccaaattg

SEQ ID NO: 1445996 - DNA, 15 bp, Homo sapiens
aacagtctccaaatt

SEQ ID NO: 1445997 - DNA, 15 bp, Homo sapiens
caacagtctccaaat

SEQ ID NO: 1445998 - DNA, 15 bp, Homo sapiens
acaacagtctccaaa

SEQ ID NO: 1445999 - DNA, 15 bp, Homo sapiens
tacaacagtctccaa

SEQ ID NO: 1446000 - DNA, 15 bp, Homo sapiens
gtacaacagtctcca

SEQ ID NO: 1446001 - DNA, 15 bp, Homo sapiens
ggtacaacagtctcc

SEQ ID NO: 1446002 - DNA, 15 bp, Homo sapiens
tggtacaacagtctc

SEQ ID NO: 1446003 - DNA, 15 bp, Homo sapiens
ctggtacaacagtct

SEQ ID NO: 1446004 - DNA, 15 bp, Homo sapiens
actggtacaacagtc

SEQ ID NO: 1446005 - DNA, 15 bp, Homo sapiens
gactggtacaacagt

SEQ ID NO: 1446006 - DNA, 15 bp, Homo sapiens
agactggtacaacag

SEQ ID NO: 1446007 - DNA, 15 bp, Homo sapiens
tagactggtacaaca

SEQ ID NO: 1446008 - DNA, 15 bp, Homo sapiens
ctagactggtacaac

SEQ ID NO: 1446009 - DNA, 15 bp, Homo sapiens
tctagactggtacaa

SEQ ID NO: 1446010 - DNA, 15 bp, Homo sapiens
gtctagactggtaca

SEQ ID NO: 1446011 - DNA, 15 bp, Homo sapiens
tgtctagactggtac

SEQ ID NO: 1446012 - DNA, 15 bp, Homo sapiens
ttgtctagactggta

SEQ ID NO: 1446013 - DNA, 15 bp, Homo sapiens
cttgtctagactggt

SEQ ID NO: 1446014 - DNA, 15 bp, Homo sapiens
ccttgtctagactgg

SEQ ID NO: 1446015 - DNA, 15 bp, Homo sapiens
cccttgtctagactg

SEQ ID NO: 1446016 - DNA, 15 bp, Homo sapiens
tcccttgtctagact

SEQ ID NO: 1446017 - DNA, 15 bp, Homo sapiens
atcccttgtctagac

SEQ ID NO: 1446018 - DNA, 15 bp, Homo sapiens
catcccttgtctaga

SEQ ID NO: 1446019 - DNA, 15 bp, Homo sapiens
ccatcccttgtctag

SEQ ID NO: 1446020 - DNA, 15 bp, Homo sapiens
accatcccttgtcta

SEQ ID NO: 1446021 - DNA, 15 bp, Homo sapiens
taccatcccttgtct

SEQ ID NO: 1446022 - DNA, 15 bp, Homo sapiens
ctaccatcccttgtc

SEQ ID NO: 1446023 - DNA, 15 bp, Homo sapiens
cctaccatcccttgt

SEQ ID NO: 1446024 - DNA, 15 bp, Homo sapiens
tcctaccatcccttg

SEQ ID NO: 1446025 - DNA, 15 bp, Homo sapiens
ctcctaccatccctt

SEQ ID NO: 1446026 - DNA, 15 bp, Homo sapiens
gctcctaccatccct

SEQ ID NO: 1446027 - DNA, 15 bp, Homo sapiens
agctcctaccatccc

SEQ ID NO: 1446028 - DNA, 15 bp, Homo sapiens
aagctcctaccatcc

SEQ ID NO: 1446029 - DNA, 15 bp, Homo sapiens
caagctcctaccatc

SEQ ID NO: 1446030 - DNA, 15 bp, Homo sapiens
ccaagctcctaccat

SEQ ID NO: 1446031 - DNA, 15 bp, Homo sapiens
tccaagctcctacca

SEQ ID NO: 1446032 - DNA, 15 bp, Homo sapiens
gtccaagctcctacc

SEQ ID NO: 1446033 - DNA, 15 bp, Homo sapiens
tgtccaagctcctac

SEQ ID NO: 1446034 - DNA, 15 bp, Homo sapiens
ttgtccaagctccta

SEQ ID NO: 1446035 - DNA, 15 bp, Homo sapiens
tttgtccaagctcct

SEQ ID NO: 1446036 - DNA, 15 bp, Homo sapiens
ctttgtccaagctcc

SEQ ID NO: 1446037 - DNA, 15 bp, Homo sapiens
cctttgtccaagctc

SEQ ID NO: 1446038 - DNA, 15 bp, Homo sapiens
acctttgtccaagct

SEQ ID NO: 1446039 - DNA, 15 bp, Homo sapiens
tacctttgtccaagc

SEQ ID NO: 1446040 - DNA, 15 bp, Homo sapiens
ctacctttgtccaag

SEQ ID NO: 1446041 - DNA, 15 bp, Homo sapiens
tctacctttgtccaa

SEQ ID NO: 1446042 - DNA, 15 bp, Homo sapiens
ttctacctttgtcca

SEQ ID NO: 1446043 - DNA, 15 bp, Homo sapiens
attctacctttgtcc

SEQ ID NO: 1446044 - DNA, 15 bp, Homo sapiens
aattctacctttgtc

SEQ ID NO: 1446045 - DNA, 15 bp, Homo sapiens
taattctacctttgt

SEQ ID NO: 1446046 - DNA, 15 bp, Homo sapiens
ctaattctacctttg

SEQ ID NO: 1446047 - DNA, 15 bp, Homo sapiens
actaattctaccttt

SEQ ID NO: 1446048 - DNA, 15 bp, Homo sapiens
cactaattctacctt

SEQ ID NO: 1446049 - DNA, 15 bp, Homo sapiens
ccactaattctacct

SEQ ID NO: 1446050 - DNA, 15 bp, Homo sapiens
tccactaattctacc

SEQ ID NO: 1446051 - DNA, 15 bp, Homo sapiens
ctccactaattctac

SEQ ID NO: 1446052 - DNA, 15 bp, Homo sapiens
cctccactaattcta

SEQ ID NO: 1446053 - DNA, 15 bp, Homo sapiens
tcctccactaattct

SEQ ID NO: 1446054 - DNA, 15 bp, Homo sapiens
ttcctccactaattc

SEQ ID NO: 1446055 - DNA, 15 bp, Homo sapiens
cttcctccactaatt

SEQ ID NO: 1446056 - DNA, 15 bp, Homo sapiens
tcttcctccactaat

SEQ ID NO: 1446057 - DNA, 15 bp, Homo sapiens
ttcttcctccactaa

SEQ ID NO: 1446058 - DNA, 15 bp, Homo sapiens
tttcttcctccacta

SEQ ID NO: 1446059 - DNA, 15 bp, Homo sapiens
ttttcttcctccact

SEQ ID NO: 1446060 - DNA, 15 bp, Homo sapiens
cttttcttcctccac

SEQ ID NO: 1446061 - DNA, 15 bp, Homo sapiens
ccttttcttcctcca

SEQ ID NO: 1446062 - DNA, 15 bp, Homo sapiens
tccttttcttcctcc

SEQ ID NO: 1446063 - DNA, 15 bp, Homo sapiens
ctccttttcttcctc

SEQ ID NO: 1446064 - DNA, 15 bp, Homo sapiens
cctccttttcttcct

SEQ ID NO: 1446065 - DNA, 15 bp, Homo sapiens
tcctccttttcttcc

SEQ ID NO: 1446066 - DNA, 15 bp, Homo sapiens
ttcctccttttcttc

SEQ ID NO: 1446067 - DNA, 15 bp, Homo sapiens
attcctccttttctt

SEQ ID NO: 1446068 - DNA, 15 bp, Homo sapiens
cattcctccttttct

SEQ ID NO: 1446069 - DNA, 15 bp, Homo sapiens
ccattcctccttttc

SEQ ID NO: 1446070 - DNA, 15 bp, Homo sapiens
tccattcctcctttt

SEQ ID NO: 1446071 - DNA, 15 bp, Homo sapiens
gtccattcctccttt

SEQ ID NO: 1446072 - DNA, 15 bp, Homo sapiens
tgtccattcctcctt

SEQ ID NO: 1446073 - DNA, 15 bp, Homo sapiens
atgtccattcctcct

SEQ ID NO: 1446074 - DNA, 15 bp, Homo sapiens
tatgtccattcctcc

SEQ ID NO: 1446075 - DNA, 15 bp, Homo sapiens
ctatgtccattcctc

SEQ ID NO: 1446076 - DNA, 15 bp, Homo sapiens
cctatgtccattcct

SEQ ID NO: 1446077 - DNA, 15 bp, Homo sapiens
tcctatgtccattcc

SEQ ID NO: 1446078 - DNA, 15 bp, Homo sapiens
gtcctatgtccattc

SEQ ID NO: 1446079 - DNA, 15 bp, Homo sapiens
agtcctatgtccatt

SEQ ID NO: 1446080 - DNA, 15 bp, Homo sapiens
aagtcctatgtccat

SEQ ID NO: 1446081 - DNA, 15 bp, Homo sapiens
caagtcctatgtcca

SEQ ID NO: 1446082 - DNA, 15 bp, Homo sapiens
tcaagtcctatgtcc

SEQ ID NO: 1446083 - DNA, 15 bp, Homo sapiens
ttcaagtcctatgtc

SEQ ID NO: 1446084 - DNA, 15 bp, Homo sapiens
cttcaagtcctatgt

SEQ ID NO: 1446085 - DNA, 15 bp, Homo sapiens
ccttcaagtcctatg

SEQ ID NO: 1446086 - DNA, 15 bp, Homo sapiens
tccttcaagtcctat

SEQ ID NO: 1446087 - DNA, 15 bp, Homo sapiens
ttccttcaagtccta

SEQ ID NO: 1446088 - DNA, 15 bp, Homo sapiens
cttccttcaagtcct

SEQ ID NO: 1446089 - DNA, 15 bp, Homo sapiens
acttccttcaagtcc

SEQ ID NO: 1446090 - DNA, 15 bp, Homo sapiens
cacttccttcaagtc

SEQ ID NO: 1446091 - DNA, 15 bp, Homo sapiens
ccacttccttcaagt

SEQ ID NO: 1446092 - DNA, 15 bp, Homo sapiens
tccacttccttcaag

SEQ ID NO: 1446093 - DNA, 15 bp, Homo sapiens
ttccacttccttcaa

SEQ ID NO: 1446094 - DNA, 15 bp, Homo sapiens
attccacttccttca

SEQ ID NO: 1446095 - DNA, 15 bp, Homo sapiens
gattccacttccttc

SEQ ID NO: 1446096 - DNA, 15 bp, Homo sapiens
agattccacttcctt

SEQ ID NO: 1446097 - DNA, 15 bp, Homo sapiens
cagattccacttcct

SEQ ID NO: 1446098 - DNA, 15 bp, Homo sapiens
gcagattccacttcc

SEQ ID NO: 1446099 - DNA, 15 bp, Homo sapiens
tgcagattccacttc

SEQ ID NO: 1446100 - DNA, 15 bp, Homo sapiens
ctgcagattccactt

SEQ ID NO: 1446101 - DNA, 15 bp, Homo sapiens
tctgcagattccact

SEQ ID NO: 1446102 - DNA, 15 bp, Homo sapiens
atctgcagattccac

SEQ ID NO: 1446103 - DNA, 15 bp, Homo sapiens
aatctgcagattcca

SEQ ID NO: 1446104 - DNA, 15 bp, Homo sapiens
aaatctgcagattcc

SEQ ID NO: 1446105 - DNA, 15 bp, Homo sapiens
taaatctgcagattc

SEQ ID NO: 1446106 - DNA, 15 bp, Homo sapiens
ctaaatctgcagatt

SEQ ID NO: 1446107 - DNA, 15 bp, Homo sapiens
tctaaatctgcagat

SEQ ID NO: 1446108 - DNA, 15 bp, Homo sapiens
ctctaaatctgcaga

SEQ ID NO: 1446109 - DNA, 15 bp, Homo sapiens
tctctaaatctgcag

SEQ ID NO: 1446110 - DNA, 15 bp, Homo sapiens
ttctctaaatctgca

SEQ ID NO: 1446111 - DNA, 15 bp, Homo sapiens
cttctctaaatctgc

SEQ ID NO: 1446112 - DNA, 15 bp, Homo sapiens
acttctctaaatctg

SEQ ID NO: 1446113 - DNA, 15 bp, Homo sapiens
tacttctctaaatct

SEQ ID NO: 1446114 - DNA, 15 bp, Homo sapiens
gtacttctctaaatc

SEQ ID NO: 1446115 - DNA, 15 bp, Homo sapiens
tgtacttctctaaat

SEQ ID NO: 1446116 - DNA, 15 bp, Homo sapiens
atgtacttctctaaa

SEQ ID NO: 1446117 - DNA, 15 bp, Homo sapiens
catgtacttctctaa

SEQ ID NO: 1446118 - DNA, 15 bp, Homo sapiens
tcatgtacttctcta

SEQ ID NO: 1446119 - DNA, 15 bp, Homo sapiens
atcatgtacttctct

SEQ ID NO: 1446120 - DNA, 15 bp, Homo sapiens
catcatgtacttctc

SEQ ID NO: 1446121 - DNA, 15 bp, Homo sapiens
gcatcatgtacttct

SEQ ID NO: 1446122 - DNA, 15 bp, Homo sapiens
agcatcatgtacttc

SEQ ID NO: 1446123 - DNA, 15 bp, Homo sapiens
aagcatcatgtactt

SEQ ID NO: 1446124 - DNA, 15 bp, Homo sapiens
caagcatcatgtact

SEQ ID NO: 1446125 - DNA, 15 bp, Homo sapiens
tcaagcatcatgtac

SEQ ID NO: 1446126 - DNA, 15 bp, Homo sapiens
atcaagcatcatgta

SEQ ID NO: 1446127 - DNA, 15 bp, Homo sapiens
tatcaagcatcatgt

SEQ ID NO: 1446128 - DNA, 15 bp, Homo sapiens
ctatcaagcatcatg

SEQ ID NO: 1446129 - DNA, 15 bp, Homo sapiens
cctatcaagcatcat

SEQ ID NO: 1446130 - DNA, 15 bp, Homo sapiens
ccctatcaagcatca

SEQ ID NO: 1446131 - DNA, 15 bp, Homo sapiens
cccctatcaagcatc

SEQ ID NO: 1446132 - DNA, 15 bp, Homo sapiens
acccctatcaagcat

SEQ ID NO: 1446133 - DNA, 15 bp, Homo sapiens
aacccctatcaagca

SEQ ID NO: 1446134 - DNA, 15 bp, Homo sapiens
caacccctatcaagc

SEQ ID NO: 1446135 - DNA, 15 bp, Homo sapiens
tcaacccctatcaag

SEQ ID NO: 1446136 - DNA, 15 bp, Homo sapiens
ctcaacccctatcaa

SEQ ID NO: 1446137 - DNA, 15 bp, Homo sapiens
cctcaacccctatca

SEQ ID NO: 1446138 - DNA, 15 bp, Homo sapiens
acctcaacccctatc

SEQ ID NO: 1446139 - DNA, 15 bp, Homo sapiens
aacctcaacccctat

SEQ ID NO: 1446140 - DNA, 15 bp, Homo sapiens
taacctcaaccccta

SEQ ID NO: 1446141 - DNA, 15 bp, Homo sapiens
ttaacctcaacccct

SEQ ID NO: 1446142 - DNA, 15 bp, Homo sapiens
cttaacctcaacccc

SEQ ID NO: 1446143 - DNA, 15 bp, Homo sapiens
tcttaacctcaaccc

SEQ ID NO: 1446144 - DNA, 15 bp, Homo sapiens
ttcttaacctcaacc

SEQ ID NO: 1446145 - DNA, 15 bp, Homo sapiens
gttcttaacctcaac

SEQ ID NO: 1446146 - DNA, 15 bp, Homo sapiens
agttcttaacctcaa

SEQ ID NO: 1446147 - DNA, 15 bp, Homo sapiens
cagttcttaacctca

SEQ ID NO: 1446148 - DNA, 15 bp, Homo sapiens
ccagttcttaacctc

SEQ ID NO: 1446149 - DNA, 15 bp, Homo sapiens
tccagttcttaacct

SEQ ID NO: 1446150 - DNA, 15 bp, Homo sapiens
atccagttcttaacc

SEQ ID NO: 1446151 - DNA, 15 bp, Homo sapiens
catccagttcttaac

SEQ ID NO: 1446152 - DNA, 15 bp, Homo sapiens
ccatccagttcttaa

SEQ ID NO: 1446153 - DNA, 15 bp, Homo sapiens
tccatccagttctta

SEQ ID NO: 1446154 - DNA, 15 bp, Homo sapiens
ttccatccagttctt

SEQ ID NO: 1446155 - DNA, 15 bp, Homo sapiens
attccatccagttct

SEQ ID NO: 1446156 - DNA, 15 bp, Homo sapiens
aattccatccagttc

SEQ ID NO: 1446157 - DNA, 15 bp, Homo sapiens
caattccatccagtt

SEQ ID NO: 1446158 - DNA, 15 bp, Homo sapiens
ccaattccatccagt

SEQ ID NO: 1446159 - DNA, 15 bp, Homo sapiens
tccaattccatccag

SEQ ID NO: 1446160 - DNA, 15 bp, Homo sapiens
atccaattccatcca

SEQ ID NO: 1446161 - DNA, 15 bp, Homo sapiens
gatccaattccatcc

SEQ ID NO: 1446162 - DNA, 15 bp, Homo sapiens
ggatccaattccatc

SEQ ID NO: 1446163 - DNA, 15 bp, Homo sapiens
tggatccaattccat

SEQ ID NO: 1446164 - DNA, 15 bp, Homo sapiens
ctggatccaattcca

SEQ ID NO: 1446165 - DNA, 15 bp, Homo sapiens
actggatccaattcc

SEQ ID NO: 1446166 - DNA, 15 bp, Homo sapiens
aactggatccaattc

SEQ ID NO: 1446167 - DNA, 15 bp, Homo sapiens
gaactggatccaatt

SEQ ID NO: 1446168 - DNA, 15 bp, Homo sapiens
agaactggatccaat

SEQ ID NO: 1446169 - DNA, 15 bp, Homo sapiens
cagaactggatccaa

SEQ ID NO: 1446170 - DNA, 15 bp, Homo sapiens
ccagaactggatcca

SEQ ID NO: 1446171 - DNA, 15 bp, Homo sapiens
gccagaactggatcc

SEQ ID NO: 1446172 - DNA, 15 bp, Homo sapiens
agccagaactggatc

SEQ ID NO: 1446173 - DNA, 15 bp, Homo sapiens
aagccagaactggat

SEQ ID NO: 1446174 - DNA, 15 bp, Homo sapiens
aaagccagaactgga

SEQ ID NO: 1446175 - DNA, 15 bp, Homo sapiens
gaaagccagaactgg

SEQ ID NO: 1446176 - DNA, 15 bp, Homo sapiens
agaaagccagaactg

SEQ ID NO: 1446177 - DNA, 15 bp, Homo sapiens
cagaaagccagaact

SEQ ID NO: 1446178 - DNA, 15 bp, Homo sapiens
acagaaagccagaac

SEQ ID NO: 1446179 - DNA, 15 bp, Homo sapiens
gacagaaagccagaa

SEQ ID NO: 1446180 - DNA, 15 bp, Homo sapiens
ggacagaaagccaga

SEQ ID NO: 1446181 - DNA, 15 bp, Homo sapiens
aggacagaaagccag

SEQ ID NO: 1446182 - DNA, 15 bp, Homo sapiens
caggacagaaagcca

SEQ ID NO: 1446183 - DNA, 15 bp, Homo sapiens
ccaggacagaaagcc

SEQ ID NO: 1446184 - DNA, 15 bp, Homo sapiens
cccaggacagaaagc

SEQ ID NO: 1446185 - DNA, 15 bp, Homo sapiens
acccaggacagaaag

SEQ ID NO: 1446186 - DNA, 15 bp, Homo sapiens
tacccaggacagaaa

SEQ ID NO: 1446187 - DNA, 15 bp, Homo sapiens
ttacccaggacagaa

SEQ ID NO: 1446188 - DNA, 15 bp, Homo sapiens
gttacccaggacaga

SEQ ID NO: 1446189 - DNA, 15 bp, Homo sapiens
agttacccaggacag

SEQ ID NO: 1446190 - DNA, 15 bp, Homo sapiens
cagttacccaggaca

SEQ ID NO: 1446191 - DNA, 15 bp, Homo sapiens
acagttacccaggac

SEQ ID NO: 1446192 - DNA, 15 bp, Homo sapiens
aacagttacccagga

SEQ ID NO: 1446193 - DNA, 15 bp, Homo sapiens
aaacagttacccagg

SEQ ID NO: 1446194 - DNA, 15 bp, Homo sapiens
aaaacagttacccag

SEQ ID NO: 1446195 - DNA, 15 bp, Homo sapiens
caaaacagttaccca

SEQ ID NO: 1446196 - DNA, 15 bp, Homo sapiens
ccaaaacagttaccc

SEQ ID NO: 1446197 - DNA, 15 bp, Homo sapiens
tccaaaacagttacc

SEQ ID NO: 1446198 - DNA, 15 bp, Homo sapiens
ctccaaaacagttac

SEQ ID NO: 1446199 - DNA, 15 bp, Homo sapiens
cctccaaaacagtta

SEQ ID NO: 1446200 - DNA, 15 bp, Homo sapiens
gcctccaaaacagtt

SEQ ID NO: 1446201 - DNA, 15 bp, Homo sapiens
tgcctccaaaacagt

SEQ ID NO: 1446202 - DNA, 15 bp, Homo sapiens
gtgcctccaaaacag

SEQ ID NO: 1446203 - DNA, 15 bp, Homo sapiens
ggtgcctccaaaaca

SEQ ID NO: 1446204 - DNA, 15 bp, Homo sapiens
tggtgcctccaaaac

SEQ ID NO: 1446205 - DNA, 15 bp, Homo sapiens
atggtgcctccaaaa

SEQ ID NO: 1446206 - DNA, 15 bp, Homo sapiens
aatggtgcctccaaa

SEQ ID NO: 1446207 - DNA, 15 bp, Homo sapiens
taatggtgcctccaa

SEQ ID NO: 1446208 - DNA, 15 bp, Homo sapiens
ttaatggtgcctcca

SEQ ID NO: 1446209 - DNA, 15 bp, Homo sapiens
gttaatggtgcctcc

SEQ ID NO: 1446210 - DNA, 15 bp, Homo sapiens
agttaatggtgcctc

SEQ ID NO: 1446211 - DNA, 15 bp, Homo sapiens
cagttaatggtgcct

SEQ ID NO: 1446212 - DNA, 15 bp, Homo sapiens
ccagttaatggtgcc

SEQ ID NO: 1446213 - DNA, 15 bp, Homo sapiens
tccagttaatggtgc

SEQ ID NO: 1446214 - DNA, 15 bp, Homo sapiens
ttccagttaatggtg

SEQ ID NO: 1446215 - DNA, 15 bp, Homo sapiens
attccagttaatggt

SEQ ID NO: 1446216 - DNA, 15 bp, Homo sapiens
cattccagttaatgg

SEQ ID NO: 1446217 - DNA, 15 bp, Homo sapiens
acattccagttaatg

SEQ ID NO: 1446218 - DNA, 15 bp, Homo sapiens
aacattccagttaat

SEQ ID NO: 1446219 - DNA, 15 bp, Homo sapiens
gaacattccagttaa

SEQ ID NO: 1446220 - DNA, 15 bp, Homo sapiens
agaacattccagtta

SEQ ID NO: 1446221 - DNA, 15 bp, Homo sapiens
cagaacattccagtt

SEQ ID NO: 1446222 - DNA, 15 bp, Homo sapiens
ccagaacattccagt

SEQ ID NO: 1446223 - DNA, 15 bp, Homo sapiens
cccagaacattccag

SEQ ID NO: 1446224 - DNA, 15 bp, Homo sapiens
tcccagaacattcca

SEQ ID NO: 1446225 - DNA, 15 bp, Homo sapiens
ttcccagaacattcc

SEQ ID NO: 1446226 - DNA, 15 bp, Homo sapiens
tttcccagaacattc

SEQ ID NO: 1446227 - DNA, 15 bp, Homo sapiens
ctttcccagaacatt

SEQ ID NO: 1446228 - DNA, 15 bp, Homo sapiens
gctttcccagaacat

SEQ ID NO: 1446229 - DNA, 15 bp, Homo sapiens
ggctttcccagaaca

SEQ ID NO: 1446230 - DNA, 15 bp, Homo sapiens
aggctttcccagaac

SEQ ID NO: 1446231 - DNA, 15 bp, Homo sapiens
aaggctttcccagaa

SEQ ID NO: 1446232 - DNA, 15 bp, Homo sapiens
aaaggctttcccaga

SEQ ID NO: 1446233 - DNA, 15 bp, Homo sapiens
caaaggctttcccag

SEQ ID NO: 1446234 - DNA, 15 bp, Homo sapiens
gcaaaggctttccca

SEQ ID NO: 1446235 - DNA, 15 bp, Homo sapiens
agcaaaggctttccc

SEQ ID NO: 1446236 - DNA, 15 bp, Homo sapiens
aagcaaaggctttcc

SEQ ID NO: 1446237 - DNA, 15 bp, Homo sapiens
aaagcaaaggctttc

SEQ ID NO: 1446238 - DNA, 15 bp, Homo sapiens
aaaagcaaaggcttt

SEQ ID NO: 1446239 - DNA, 15 bp, Homo sapiens
gaaaagcaaaggctt

SEQ ID NO: 1446240 - DNA, 15 bp, Homo sapiens
agaaaagcaaaggct

SEQ ID NO: 1446241 - DNA, 15 bp, Homo sapiens
cagaaaagcaaaggc

SEQ ID NO: 1446242 - DNA, 15 bp, Homo sapiens
tcagaaaagcaaagg

SEQ ID NO: 1446243 - DNA, 15 bp, Homo sapiens
atcagaaaagcaaag

SEQ ID NO: 1446244 - DNA, 15 bp, Homo sapiens
catcagaaaagcaaa

SEQ ID NO: 1446245 - DNA, 15 bp, Homo sapiens
acatcagaaaagcaa

SEQ ID NO: 1446246 - DNA, 15 bp, Homo sapiens
cacatcagaaaagca

SEQ ID NO: 1446247 - DNA, 15 bp, Homo sapiens
tcacatcagaaaagc

SEQ ID NO: 1446248 - DNA, 15 bp, Homo sapiens
ctcacatcagaaaag

SEQ ID NO: 1446249 - DNA, 15 bp, Homo sapiens
actcacatcagaaaa

SEQ ID NO: 1446250 - DNA, 15 bp, Homo sapiens
cactcacatcagaaa

SEQ ID NO: 1446251 - DNA, 15 bp, Homo sapiens
gcactcacatcagaa

SEQ ID NO: 1446252 - DNA, 15 bp, Homo sapiens
agcactcacatcaga

SEQ ID NO: 1446253 - DNA, 15 bp, Homo sapiens
cagcactcacatcag

SEQ ID NO: 1446254 - DNA, 15 bp, Homo sapiens
gcagcactcacatca

SEQ ID NO: 1446255 - DNA, 15 bp, Homo sapiens
agcagcactcacatc

SEQ ID NO: 1446256 - DNA, 15 bp, Homo sapiens
cagcagcactcacat

SEQ ID NO: 1446257 - DNA, 15 bp, Homo sapiens
gcagcagcactcaca

SEQ ID NO: 1446258 - DNA, 15 bp, Homo sapiens
ggcagcagcactcac

SEQ ID NO: 1446259 - DNA, 15 bp, Homo sapiens
aggcagcagcactca

SEQ ID NO: 1446260 - DNA, 15 bp, Homo sapiens
gaggcagcagcactc

SEQ ID NO: 1446261 - DNA, 15 bp, Homo sapiens
ggaggcagcagcact

SEQ ID NO: 1446262 - DNA, 15 bp, Homo sapiens
aggaggcagcagcac

SEQ ID NO: 1446263 - DNA, 15 bp, Homo sapiens
caggaggcagcagca

SEQ ID NO: 1446264 - DNA, 15 bp, Homo sapiens
gcaggaggcagcagc

SEQ ID NO: 1446265 - DNA, 15 bp, Homo sapiens
agcaggaggcagcag

SEQ ID NO: 1446266 - DNA, 15 bp, Homo sapiens
aagcaggaggcagca

SEQ ID NO: 1446267 - DNA, 15 bp, Homo sapiens
aaagcaggaggcagc

SEQ ID NO: 1446268 - DNA, 15 bp, Homo sapiens
gaaagcaggaggcag

SEQ ID NO: 1446269 - DNA, 15 bp, Homo sapiens
agaaagcaggaggca

SEQ ID NO: 1446270 - DNA, 15 bp, Homo sapiens
cagaaagcaggaggc

SEQ ID NO: 1446271 - DNA, 15 bp, Homo sapiens
tcagaaagcaggagg

SEQ ID NO: 1446272 - DNA, 15 bp, Homo sapiens
atcagaaagcaggag

SEQ ID NO: 1446273 - DNA, 15 bp, Homo sapiens
catcagaaagcagga

SEQ ID NO: 1446274 - DNA, 15 bp, Homo sapiens
gcatcagaaagcagg

SEQ ID NO: 1446275 - DNA, 15 bp, Homo sapiens
ggcatcagaaagcag

SEQ ID NO: 1446276 - DNA, 15 bp, Homo sapiens
tggcatcagaaagca

SEQ ID NO: 1446277 - DNA, 15 bp, Homo sapiens
gtggcatcagaaagc

SEQ ID NO: 1446278 - DNA, 15 bp, Homo sapiens
tgtggcatcagaaag

SEQ ID NO: 1446279 - DNA, 15 bp, Homo sapiens
ttgtggcatcagaaa

SEQ ID NO: 1446280 - DNA, 15 bp, Homo sapiens
gttgtggcatcagaa

SEQ ID NO: 1446281 - DNA, 15 bp, Homo sapiens
tgttgtggcatcaga

SEQ ID NO: 1446282 - DNA, 15 bp, Homo sapiens
ctgttgtggcatcag

SEQ ID NO: 1446283 - DNA, 15 bp, Homo sapiens
gctgttgtggcatca

SEQ ID NO: 1446284 - DNA, 15 bp, Homo sapiens
tgctgttgtggcatc

SEQ ID NO: 1446285 - DNA, 15 bp, Homo sapiens
ttgctgttgtggcat

SEQ ID NO: 1446286 - DNA, 15 bp, Homo sapiens
tttgctgttgtggca

SEQ ID NO: 1446287 - DNA, 15 bp, Homo sapiens
ttttgctgttgtggc

SEQ ID NO: 1446288 - DNA, 15 bp, Homo sapiens
cttttgctgttgtgg

SEQ ID NO: 1446289 - DNA, 15 bp, Homo sapiens
ccttttgctgttgtg

SEQ ID NO: 1446290 - DNA, 15 bp, Homo sapiens
gccttttgctgttgt

SEQ ID NO: 1446291 - DNA, 15 bp, Homo sapiens
tgccttttgctgttg

SEQ ID NO: 1446292 - DNA, 15 bp, Homo sapiens
atgccttttgctgtt

SEQ ID NO: 1446293 - DNA, 15 bp, Homo sapiens
gatgccttttgctgt

SEQ ID NO: 1446294 - DNA, 15 bp, Homo sapiens
tgatgccttttgctg

SEQ ID NO: 1446295 - DNA, 15 bp, Homo sapiens
atgatgccttttgct

SEQ ID NO: 1446296 - DNA, 15 bp, Homo sapiens
catgatgccttttgc

SEQ ID NO: 1446297 - DNA, 15 bp, Homo sapiens
gcatgatgccttttg

SEQ ID NO: 1446298 - DNA, 15 bp, Homo sapiens
tgcatgatgcctttt

SEQ ID NO: 1446299 - DNA, 15 bp, Homo sapiens
ctgcatgatgccttt

SEQ ID NO: 1446300 - DNA, 15 bp, Homo sapiens
gctgcatgatgcctt

SEQ ID NO: 1446301 - DNA, 15 bp, Homo sapiens
agctgcatgatgcct

SEQ ID NO: 1446302 - DNA, 15 bp, Homo sapiens
aagctgcatgatgcc

SEQ ID NO: 1446303 - DNA, 15 bp, Homo sapiens
aaagctgcatgatgc

SEQ ID NO: 1446304 - DNA, 15 bp, Homo sapiens
caaagctgcatgatg

SEQ ID NO: 1446305 - DNA, 15 bp, Homo sapiens
tcaaagctgcatgat

SEQ ID NO: 1446306 - DNA, 15 bp, Homo sapiens
ctcaaagctgcatga

SEQ ID NO: 1446307 - DNA, 15 bp, Homo sapiens
cctcaaagctgcatg

SEQ ID NO: 1446308 - DNA, 15 bp, Homo sapiens
acctcaaagctgcat

SEQ ID NO: 1446309 - DNA, 15 bp, Homo sapiens
cacctcaaagctgca

SEQ ID NO: 1446310 - DNA, 15 bp, Homo sapiens
tcacctcaaagctgc

SEQ ID NO: 1446311 - DNA, 15 bp, Homo sapiens
atcacctcaaagctg

SEQ ID NO: 1446312 - DNA, 15 bp, Homo sapiens
tatcacctcaaagct

SEQ ID NO: 1446313 - DNA, 15 bp, Homo sapiens
ttatcacctcaaagc

SEQ ID NO: 1446314 - DNA, 15 bp, Homo sapiens
tttatcacctcaaag

SEQ ID NO: 1446315 - DNA, 15 bp, Homo sapiens
gtttatcacctcaaa

SEQ ID NO: 1446316 - DNA, 15 bp, Homo sapiens
tgtttatcacctcaa

SEQ ID NO: 1446317 - DNA, 15 bp, Homo sapiens
ctgtttatcacctca

SEQ ID NO: 1446318 - DNA, 15 bp, Homo sapiens
cctgtttatcacctc

SEQ ID NO: 1446319 - DNA, 15 bp, Homo sapiens
tcctgtttatcacct

SEQ ID NO: 1446320 - DNA, 15 bp, Homo sapiens
ctcctgtttatcacc

SEQ ID NO: 1446321 - DNA, 15 bp, Homo sapiens
tctcctgtttatcac

SEQ ID NO: 1446322 - DNA, 15 bp, Homo sapiens
ctctcctgtttatca

SEQ ID NO: 1446323 - DNA, 15 bp, Homo sapiens
actctcctgtttatc

SEQ ID NO: 1446324 - DNA, 15 bp, Homo sapiens
cactctcctgtttat

SEQ ID NO: 1446325 - DNA, 15 bp, Homo sapiens
ccactctcctgttta

SEQ ID NO: 1446326 - DNA, 15 bp, Homo sapiens
tccactctcctgttt

SEQ ID NO: 1446327 - DNA, 15 bp, Homo sapiens
gtccactctcctgtt

SEQ ID NO: 1446328 - DNA, 15 bp, Homo sapiens
tgtccactctcctgt

SEQ ID NO: 1446329 - DNA, 15 bp, Homo sapiens
atgtccactctcctg

SEQ ID NO: 1446330 - DNA, 15 bp, Homo sapiens
gatgtccactctcct

SEQ ID NO: 1446331 - DNA, 15 bp, Homo sapiens
agatgtccactctcc

SEQ ID NO: 1446332 - DNA, 15 bp, Homo sapiens
tagatgtccactctc

SEQ ID NO: 1446333 - DNA, 15 bp, Homo sapiens
gtagatgtccactct

SEQ ID NO: 1446334 - DNA, 15 bp, Homo sapiens
tgtagatgtccactc

SEQ ID NO: 1446335 - DNA, 15 bp, Homo sapiens
gtgtagatgtccact

SEQ ID NO: 1446336 - DNA, 15 bp, Homo sapiens
tgtgtagatgtccac

SEQ ID NO: 1446337 - DNA, 15 bp, Homo sapiens
atgtgtagatgtcca

SEQ ID NO: 1446338 - DNA, 15 bp, Homo sapiens
aatgtgtagatgtcc

SEQ ID NO: 1446339 - DNA, 15 bp, Homo sapiens
taatgtgtagatgtc

SEQ ID NO: 1446340 - DNA, 15 bp, Homo sapiens
ctaatgtgtagatgt

SEQ ID NO: 1446341 - DNA, 15 bp, Homo sapiens
actaatgtgtagatg

SEQ ID NO: 1446342 - DNA, 15 bp, Homo sapiens
tactaatgtgtagat

SEQ ID NO: 1446343 - DNA, 15 bp, Homo sapiens
ttactaatgtgtaga

SEQ ID NO: 1446344 - DNA, 15 bp, Homo sapiens
cttactaatgtgtag

SEQ ID NO: 1446345 - DNA, 15 bp, Homo sapiens
tcttactaatgtgta

SEQ ID NO: 1446346 - DNA, 15 bp, Homo sapiens
ctcttactaatgtgt

SEQ ID NO: 1446347 - DNA, 15 bp, Homo sapiens
actcttactaatgtg

SEQ ID NO: 1446348 - DNA, 15 bp, Homo sapiens
cactcttactaatgt

SEQ ID NO: 1446349 - DNA, 15 bp, Homo sapiens
ccactcttactaatg

SEQ ID NO: 1446350 - DNA, 15 bp, Homo sapiens
tccactcttactaat

SEQ ID NO: 1446351 - DNA, 15 bp, Homo sapiens
ctccactcttactaa

SEQ ID NO: 1446352 - DNA, 15 bp, Homo sapiens
gctccactcttacta

SEQ ID NO: 1446353 - DNA, 15 bp, Homo sapiens
tgctccactcttact

SEQ ID NO: 1446354 - DNA, 15 bp, Homo sapiens
ttgctccactcttac

SEQ ID NO: 1446355 - DNA, 15 bp, Homo sapiens
tttgctccactctta

SEQ ID NO: 1446356 - DNA, 15 bp, Homo sapiens
ttttgctccactctt

SEQ ID NO: 1446357 - DNA, 15 bp, Homo sapiens
tttttgctccactct

SEQ ID NO: 1446358 - DNA, 15 bp, Homo sapiens
ctttttgctccactc

SEQ ID NO: 1446359 - DNA, 15 bp, Homo sapiens
tctttttgctccact

SEQ ID NO: 1446360 - DNA, 15 bp, Homo sapiens
ctctttttgctccac

SEQ ID NO: 1446361 - DNA, 15 bp, Homo sapiens
gctctttttgctcca

SEQ ID NO: 1446362 - DNA, 15 bp, Homo sapiens
ggctctttttgctcc

SEQ ID NO: 1446363 - DNA, 15 bp, Homo sapiens
tggctctttttgctc

SEQ ID NO: 1446364 - DNA, 15 bp, Homo sapiens
ctggctctttttgct

SEQ ID NO: 1446365 - DNA, 15 bp, Homo sapiens
gctggctctttttgc

SEQ ID NO: 1446366 - DNA, 15 bp, Homo sapiens
agctggctctttttg

SEQ ID NO: 1446367 - DNA, 15 bp, Homo sapiens
aagctggctcttttt

SEQ ID NO: 1446368 - DNA, 15 bp, Homo sapiens
gaagctggctctttt

SEQ ID NO: 1446369 - DNA, 15 bp, Homo sapiens
ggaagctggctcttt

SEQ ID NO: 1446370 - DNA, 15 bp, Homo sapiens
aggaagctggctctt

SEQ ID NO: 1446371 - DNA, 15 bp, Homo sapiens
caggaagctggctct

SEQ ID NO: 1446372 - DNA, 15 bp, Homo sapiens
ccaggaagctggctc

SEQ ID NO: 1446373 - DNA, 15 bp, Homo sapiens
gccaggaagctggct

SEQ ID NO: 1446374 - DNA, 15 bp, Homo sapiens
tgccaggaagctggc

SEQ ID NO: 1446375 - DNA, 15 bp, Homo sapiens
gtgccaggaagctgg

SEQ ID NO: 1446376 - DNA, 15 bp, Homo sapiens
agtgccaggaagctg

SEQ ID NO: 1446377 - DNA, 15 bp, Homo sapiens
gagtgccaggaagct

SEQ ID NO: 1446378 - DNA, 15 bp, Homo sapiens
agagtgccaggaagc

SEQ ID NO: 1446379 - DNA, 15 bp, Homo sapiens
aagagtgccaggaag

SEQ ID NO: 1446380 - DNA, 15 bp, Homo sapiens
caagagtgccaggaa

SEQ ID NO: 1446381 - DNA, 15 bp, Homo sapiens
acaagagtgccagga

SEQ ID NO: 1446382 - DNA, 15 bp, Homo sapiens
cacaagagtgccagg

SEQ ID NO: 1446383 - DNA, 15 bp, Homo sapiens
ccacaagagtgccag

SEQ ID NO: 1446384 - DNA, 15 bp, Homo sapiens
tccacaagagtgcca

SEQ ID NO: 1446385 - DNA, 15 bp, Homo sapiens
ttccacaagagtgcc

SEQ ID NO: 1446386 - DNA, 15 bp, Homo sapiens
attccacaagagtgc

SEQ ID NO: 1446387 - DNA, 15 bp, Homo sapiens
tattccacaagagtg

SEQ ID NO: 1446388 - DNA, 15 bp, Homo sapiens
ctattccacaagagt

SEQ ID NO: 1446389 - DNA, 15 bp, Homo sapiens
gctattccacaagag

SEQ ID NO: 1446390 - DNA, 15 bp, Homo sapiens
agctattccacaaga

SEQ ID NO: 1446391 - DNA, 15 bp, Homo sapiens
cagctattccacaag

SEQ ID NO: 1446392 - DNA, 15 bp, Homo sapiens
gcagctattccacaa

SEQ ID NO: 1446393 - DNA, 15 bp, Homo sapiens
ggcagctattccaca

SEQ ID NO: 1446394 - DNA, 15 bp, Homo sapiens
gggcagctattccac

SEQ ID NO: 1446395 - DNA, 15 bp, Homo sapiens
ggggcagctattcca

SEQ ID NO: 1446396 - DNA, 15 bp, Homo sapiens
aggggcagctattcc

SEQ ID NO: 1446397 - DNA, 15 bp, Homo sapiens
caggggcagctattc

SEQ ID NO: 1446398 - DNA, 15 bp, Homo sapiens
gcaggggcagctatt

SEQ ID NO: 1446399 - DNA, 15 bp, Homo sapiens
ggcaggggcagctat

SEQ ID NO: 1446400 - DNA, 15 bp, Homo sapiens
gggcaggggcagcta

SEQ ID NO: 1446401 - DNA, 15 bp, Homo sapiens
agggcaggggcagct

SEQ ID NO: 1446402 - DNA, 15 bp, Homo sapiens
cagggcaggggcagc

SEQ ID NO: 1446403 - DNA, 15 bp, Homo sapiens
ccagggcaggggcag

SEQ ID NO: 1446404 - DNA, 15 bp, Homo sapiens
gccagggcaggggca

SEQ ID NO: 1446405 - DNA, 15 bp, Homo sapiens
atggccagggcaggg

SEQ ID NO: 1446406 - DNA, 15 bp, Homo sapiens
catggccagggcagg

SEQ ID NO: 1446407 - DNA, 15 bp, Homo sapiens
gcatggccagggcag

SEQ ID NO: 1446408 - DNA, 15 bp, Homo sapiens
agcatggccagggca

SEQ ID NO: 1446409 - DNA, 15 bp, Homo sapiens
tagcatggccagggc

SEQ ID NO: 1446410 - DNA, 15 bp, Homo sapiens
gtagcatggccaggg

SEQ ID NO: 1446411 - DNA, 15 bp, Homo sapiens
ggtagcatggccagg

SEQ ID NO: 1446412 - DNA, 15 bp, Homo sapiens
aggtagcatggccag

SEQ ID NO: 1446413 - DNA, 15 bp, Homo sapiens
gaggtagcatggcca

SEQ ID NO: 1446414 - DNA, 15 bp, Homo sapiens
agaggtagcatggcc

SEQ ID NO: 1446415 - DNA, 15 bp, Homo sapiens
cagaggtagcatggc

SEQ ID NO: 1446416 - DNA, 15 bp, Homo sapiens
ccagaggtagcatgg

SEQ ID NO: 1446417 - DNA, 15 bp, Homo sapiens
tccagaggtagcatg

SEQ ID NO: 1446418 - DNA, 15 bp, Homo sapiens
atccagaggtagcat

SEQ ID NO: 1446419 - DNA, 15 bp, Homo sapiens
aatccagaggtagca

SEQ ID NO: 1446420 - DNA, 15 bp, Homo sapiens
aaatccagaggtagc

SEQ ID NO: 1446421 - DNA, 15 bp, Homo sapiens
gaaatccagaggtag

SEQ ID NO: 1446422 - DNA, 15 bp, Homo sapiens
agaaatccagaggta

SEQ ID NO: 1446423 - DNA, 15 bp, Homo sapiens
aagaaatccagaggt

SEQ ID NO: 1446424 - DNA, 15 bp, Homo sapiens
caagaaatccagagg

SEQ ID NO: 1446425 - DNA, 15 bp, Homo sapiens
acaagaaatccagag

SEQ ID NO: 1446426 - DNA, 15 bp, Homo sapiens
aacaagaaatccaga

SEQ ID NO: 1446427 - DNA, 15 bp, Homo sapiens
taacaagaaatccag

SEQ ID NO: 1446428 - DNA, 15 bp, Homo sapiens
ataacaagaaatcca

SEQ ID NO: 1446429 - DNA, 15 bp, Homo sapiens
cataacaagaaatcc

SEQ ID NO: 1446430 - DNA, 15 bp, Homo sapiens
acataacaagaaatc

SEQ ID NO: 1446431 - DNA, 15 bp, Homo sapiens
cacataacaagaaat

SEQ ID NO: 1446432 - DNA, 15 bp, Homo sapiens
acacataacaagaaa

SEQ ID NO: 1446433 - DNA, 15 bp, Homo sapiens
cacacataacaagaa

SEQ ID NO: 1446434 - DNA, 15 bp, Homo sapiens
tcacacataacaaga

SEQ ID NO: 1446435 - DNA, 15 bp, Homo sapiens
gtcacacataacaag

SEQ ID NO: 1446436 - DNA, 15 bp, Homo sapiens
tgtcacacataacaa

SEQ ID NO: 1446437 - DNA, 15 bp, Homo sapiens
ctgtcacacataaca

SEQ ID NO: 1446438 - DNA, 15 bp, Homo sapiens
tctgtcacacataac

SEQ ID NO: 1446439 - DNA, 15 bp, Homo sapiens
gtctgtcacacataa

SEQ ID NO: 1446440 - DNA, 15 bp, Homo sapiens
tgtctgtcacacata

SEQ ID NO: 1446441 - DNA, 15 bp, Homo sapiens
ttgtctgtcacacat

SEQ ID NO: 1446442 - DNA, 15 bp, Homo sapiens
gttgtctgtcacaca

SEQ ID NO: 1446443 - DNA, 15 bp, Homo sapiens
tgttgtctgtcacac

SEQ ID NO: 1446444 - DNA, 15 bp, Homo sapiens
gtgttgtctgtcaca

SEQ ID NO: 1446445 - DNA, 15 bp, Homo sapiens
agtgttgtctgtcac

SEQ ID NO: 1446446 - DNA, 15 bp, Homo sapiens
aagtgttgtctgtca

SEQ ID NO: 1446447 - DNA, 15 bp, Homo sapiens
taagtgttgtctgtc

SEQ ID NO: 1446448 - DNA, 15 bp, Homo sapiens
gtaagtgttgtctgt

SEQ ID NO: 1446449 - DNA, 15 bp, Homo sapiens
tgtaagtgttgtctg

SEQ ID NO: 1446450 - DNA, 15 bp, Homo sapiens
atgtaagtgttgtct

SEQ ID NO: 1446451 - DNA, 15 bp, Homo sapiens
catgtaagtgttgtc

SEQ ID NO: 1446452 - DNA, 15 bp, Homo sapiens
gcatgtaagtgttgt

SEQ ID NO: 1446453 - DNA, 15 bp, Homo sapiens
agcatgtaagtgttg

SEQ ID NO: 1446454 - DNA, 15 bp, Homo sapiens
aagcatgtaagtgtt

SEQ ID NO: 1446455 - DNA, 15 bp, Homo sapiens
taagcatgtaagtgt

SEQ ID NO: 1446456 - DNA, 15 bp, Homo sapiens
ctaagcatgtaagtg

SEQ ID NO: 1446457 - DNA, 15 bp, Homo sapiens
tctaagcatgtaagt

SEQ ID NO: 1446458 - DNA, 15 bp, Homo sapiens
ttctaagcatgtaag

SEQ ID NO: 1446459 - DNA, 15 bp, Homo sapiens
tttctaagcatgtaa

SEQ ID NO: 1446460 - DNA, 15 bp, Homo sapiens
atttctaagcatgta

SEQ ID NO: 1446461 - DNA, 15 bp, Homo sapiens
tatttctaagcatgt

SEQ ID NO: 1446462 - DNA, 15 bp, Homo sapiens
ctatttctaagcatg

SEQ ID NO: 1446463 - DNA, 15 bp, Homo sapiens
cctatttctaagcat

SEQ ID NO: 1446464 - DNA, 15 bp, Homo sapiens
gcctatttctaagca

SEQ ID NO: 1446465 - DNA, 15 bp, Homo sapiens
tgcctatttctaagc

SEQ ID NO: 1446466 - DNA, 15 bp, Homo sapiens
atgcctatttctaag

SEQ ID NO: 1446467 - DNA, 15 bp, Homo sapiens
gatgcctatttctaa

SEQ ID NO: 1446468 - DNA, 15 bp, Homo sapiens
agatgcctatttcta

SEQ ID NO: 1446469 - DNA, 15 bp, Homo sapiens
cagatgcctatttct

SEQ ID NO: 1446470 - DNA, 15 bp, Homo sapiens
tcagatgcctatttc

SEQ ID NO: 1446471 - DNA, 15 bp, Homo sapiens
ttcagatgcctattt

SEQ ID NO: 1446472 - DNA, 15 bp, Homo sapiens
attcagatgcctatt

SEQ ID NO: 1446473 - DNA, 15 bp, Homo sapiens
tattcagatgcctat

SEQ ID NO: 1446474 - DNA, 15 bp, Homo sapiens
atattcagatgccta

SEQ ID NO: 1446475 - DNA, 15 bp, Homo sapiens
catattcagatgcct

SEQ ID NO: 1446476 - DNA, 15 bp, Homo sapiens
acatattcagatgcc

SEQ ID NO: 1446477 - DNA, 15 bp, Homo sapiens
aacatattcagatgc

SEQ ID NO: 1446478 - DNA, 15 bp, Homo sapiens
aaacatattcagatg

SEQ ID NO: 1446479 - DNA, 15 bp, Homo sapiens
taaacatattcagat

SEQ ID NO: 1446480 - DNA, 15 bp, Homo sapiens
ataaacatattcaga

SEQ ID NO: 1446481 - DNA, 15 bp, Homo sapiens
tataaacatattcag

SEQ ID NO: 1446482 - DNA, 15 bp, Homo sapiens
ttataaacatattca

SEQ ID NO: 1446483 - DNA, 15 bp, Homo sapiens
gttataaacatattc

SEQ ID NO: 1446484 - DNA, 15 bp, Homo sapiens
ggttataaacatatt

SEQ ID NO: 1446485 - DNA, 15 bp, Homo sapiens
tggttataaacatat

SEQ ID NO: 1446486 - DNA, 15 bp, Homo sapiens
ttggttataaacata

SEQ ID NO: 1446487 - DNA, 15 bp, Homo sapiens
attggttataaacat

SEQ ID NO: 1446488 - DNA, 15 bp, Homo sapiens
tattggttataaaca

SEQ ID NO: 1446489 - DNA, 15 bp, Homo sapiens
ctattggttataaac

SEQ ID NO: 1446490 - DNA, 15 bp, Homo sapiens
tctattggttataaa

SEQ ID NO: 1446491 - DNA, 15 bp, Homo sapiens
ctctattggttataa

SEQ ID NO: 1446492 - DNA, 15 bp, Homo sapiens
actctattggttata

SEQ ID NO: 1446493 - DNA, 15 bp, Homo sapiens
cactctattggttat

SEQ ID NO: 1446494 - DNA, 15 bp, Homo sapiens
tcactctattggtta

SEQ ID NO: 1446495 - DNA, 15 bp, Homo sapiens
ttcactctattggtt

SEQ ID NO: 1446496 - DNA, 15 bp, Homo sapiens
tttcactctattggt

SEQ ID NO: 1446497 - DNA, 15 bp, Homo sapiens
ttttcactctattgg

SEQ ID NO: 1446498 - DNA, 15 bp, Homo sapiens
tttttcactctattg

SEQ ID NO: 1446499 - DNA, 15 bp, Homo sapiens
atttttcactctatt

SEQ ID NO: 1446500 - DNA, 15 bp, Homo sapiens
catttttcactctat

SEQ ID NO: 1446501 - DNA, 15 bp, Homo sapiens
tcatttttcactcta

SEQ ID NO: 1446502 - DNA, 15 bp, Homo sapiens
atcatttttcactct

SEQ ID NO: 1446503 - DNA, 15 bp, Homo sapiens
aatcatttttcactc

SEQ ID NO: 1446504 - DNA, 15 bp, Homo sapiens
caatcatttttcact

SEQ ID NO: 1446505 - DNA, 15 bp, Homo sapiens
ccaatcatttttcac

SEQ ID NO: 1446506 - DNA, 15 bp, Homo sapiens
accaatcatttttca

SEQ ID NO: 1446507 - DNA, 15 bp, Homo sapiens
gaccaatcatttttc

SEQ ID NO: 1446508 - DNA, 15 bp, Homo sapiens
tgaccaatcattttt

SEQ ID NO: 1446509 - DNA, 15 bp, Homo sapiens
ctgaccaatcatttt

SEQ ID NO: 1446510 - DNA, 15 bp, Homo sapiens
actgaccaatcattt

SEQ ID NO: 1446511 - DNA, 15 bp, Homo sapiens
aactgaccaatcatt

SEQ ID NO: 1446512 - DNA, 15 bp, Homo sapiens
caactgaccaatcat

SEQ ID NO: 1446513 - DNA, 15 bp, Homo sapiens
acaactgaccaatca

SEQ ID NO: 1446514 - DNA, 15 bp, Homo sapiens
tacaactgaccaatc

SEQ ID NO: 1446515 - DNA, 15 bp, Homo sapiens
ctacaactgaccaat

SEQ ID NO: 1446516 - DNA, 15 bp, Homo sapiens
actacaactgaccaa

SEQ ID NO: 1446517 - DNA, 15 bp, Homo sapiens
aactacaactgacca

SEQ ID NO: 1446518 - DNA, 15 bp, Homo sapiens
aaactacaactgacc

SEQ ID NO: 1446519 - DNA, 15 bp, Homo sapiens
taaactacaactgac

SEQ ID NO: 1446520 - DNA, 15 bp, Homo sapiens
ataaactacaactga

SEQ ID NO: 1446521 - DNA, 15 bp, Homo sapiens
aataaactacaactg

SEQ ID NO: 1446522 - DNA, 15 bp, Homo sapiens
aaataaactacaact

SEQ ID NO: 1446523 - DNA, 15 bp, Homo sapiens
aaaataaactacaac

SEQ ID NO: 1446524 - DNA, 15 bp, Homo sapiens
gaaaataaactacaa

SEQ ID NO: 1446525 - DNA, 15 bp, Homo sapiens
ggaaaataaactaca

SEQ ID NO: 1446526 - DNA, 15 bp, Homo sapiens
cggaaaataaactac

SEQ ID NO: 1446527 - DNA, 15 bp, Homo sapiens
ccggaaaataaacta

SEQ ID NO: 1446528 - DNA, 15 bp, Homo sapiens
tccggaaaataaact

SEQ ID NO: 1446529 - DNA, 15 bp, Homo sapiens
gtccggaaaataaac

SEQ ID NO: 1446530 - DNA, 15 bp, Homo sapiens
cgtccggaaaataaa

SEQ ID NO: 1446531 - DNA, 15 bp, Homo sapiens
acgtccggaaaataa

SEQ ID NO: 1446532 - DNA, 15 bp, Homo sapiens
gacgtccggaaaata

SEQ ID NO: 1446533 - DNA, 15 bp, Homo sapiens
agacgtccggaaaat

SEQ ID NO: 1446534 - DNA, 15 bp, Homo sapiens
aagacgtccggaaaa

SEQ ID NO: 1446535 - DNA, 15 bp, Homo sapiens
aaagacgtccggaaa

SEQ ID NO: 1446536 - DNA, 15 bp, Homo sapiens
caaagacgtccggaa

SEQ ID NO: 1446537 - DNA, 15 bp, Homo sapiens
gcaaagacgtccgga

SEQ ID NO: 1446538 - DNA, 15 bp, Homo sapiens
tgcaaagacgtccgg

SEQ ID NO: 1446539 - DNA, 15 bp, Homo sapiens
atgcaaagacgtccg

SEQ ID NO: 1446540 - DNA, 15 bp, Homo sapiens
aatgcaaagacgtcc

SEQ ID NO: 1446541 - DNA, 15 bp, Homo sapiens
gaatgcaaagacgtc

SEQ ID NO: 1446542 - DNA, 15 bp, Homo sapiens
agaatgcaaagacgt

SEQ ID NO: 1446543 - DNA, 15 bp, Homo sapiens
tagaatgcaaagacg

SEQ ID NO: 1446544 - DNA, 15 bp, Homo sapiens
ttagaatgcaaagac

SEQ ID NO: 1446545 - DNA, 15 bp, Homo sapiens
tttagaatgcaaaga

SEQ ID NO: 1446546 - DNA, 15 bp, Homo sapiens
ttttagaatgcaaag

SEQ ID NO: 1446547 - DNA, 15 bp, Homo sapiens
tttttagaatgcaaa

SEQ ID NO: 1446548 - DNA, 15 bp, Homo sapiens
gtttttagaatgcaa

SEQ ID NO: 1446549 - DNA, 15 bp, Homo sapiens
tgtttttagaatgca

SEQ ID NO: 1446550 - DNA, 15 bp, Homo sapiens
ctgtttttagaatgc

SEQ ID NO: 1446551 - DNA, 15 bp, Homo sapiens
tctgtttttagaatg

SEQ ID NO: 1446552 - DNA, 15 bp, Homo sapiens
atctgtttttagaat

SEQ ID NO: 1446553 - DNA, 15 bp, Homo sapiens
aatctgtttttagaa

SEQ ID NO: 1446554 - DNA, 15 bp, Homo sapiens
caatctgtttttaga

SEQ ID NO: 1446555 - DNA, 15 bp, Homo sapiens
tcaatctgtttttag

SEQ ID NO: 1446556 - DNA, 15 bp, Homo sapiens
ctcaatctgttttta

SEQ ID NO: 1446557 - DNA, 15 bp, Homo sapiens
gctcaatctgttttt

SEQ ID NO: 1446558 - DNA, 15 bp, Homo sapiens
agctcaatctgtttt

SEQ ID NO: 1446559 - DNA, 15 bp, Homo sapiens
gagctcaatctgttt

SEQ ID NO: 1446560 - DNA, 15 bp, Homo sapiens
agagctcaatctgtt

SEQ ID NO: 1446561 - DNA, 15 bp, Homo sapiens
tagagctcaatctgt

SEQ ID NO: 1446562 - DNA, 15 bp, Homo sapiens
ttagagctcaatctg

SEQ ID NO: 1446563 - DNA, 15 bp, Homo sapiens
tttagagctcaatct

SEQ ID NO: 1446564 - DNA, 15 bp, Homo sapiens
ttttagagctcaatc

SEQ ID NO: 1446565 - DNA, 15 bp, Homo sapiens
tttttagagctcaat

SEQ ID NO: 1446566 - DNA, 15 bp, Homo sapiens
gtttttagagctcaa

SEQ ID NO: 1446567 - DNA, 15 bp, Homo sapiens
tgtttttagagctca

SEQ ID NO: 1446568 - DNA, 15 bp, Homo sapiens
ctgtttttagagctc

SEQ ID NO: 1446569 - DNA, 15 bp, Homo sapiens
tctgtttttagagct

SEQ ID NO: 1446570 - DNA, 15 bp, Homo sapiens
atctgtttttagagc

SEQ ID NO: 1446571 - DNA, 15 bp, Homo sapiens
catctgtttttagag

SEQ ID NO: 1446572 - DNA, 15 bp, Homo sapiens
gcatctgtttttaga

SEQ ID NO: 1446573 - DNA, 15 bp, Homo sapiens
tgcatctgtttttag

SEQ ID NO: 1446574 - DNA, 15 bp, Homo sapiens
ttgcatctgttttta

SEQ ID NO: 1446575 - DNA, 15 bp, Homo sapiens
cttgcatctgttttt

SEQ ID NO: 1446576 - DNA, 15 bp, Homo sapiens
gcttgcatctgtttt

SEQ ID NO: 1446577 - DNA, 15 bp, Homo sapiens
agcttgcatctgttt

SEQ ID NO: 1446578 - DNA, 15 bp, Homo sapiens
gagcttgcatctgtt

SEQ ID NO: 1446579 - DNA, 15 bp, Homo sapiens
tgagcttgcatctgt

SEQ ID NO: 1446580 - DNA, 15 bp, Homo sapiens
ttgagcttgcatctg

SEQ ID NO: 1446581 - DNA, 15 bp, Homo sapiens
tttgagcttgcatct

SEQ ID NO: 1446582 - DNA, 15 bp, Homo sapiens
ttttgagcttgcatc

SEQ ID NO: 1446583 - DNA, 15 bp, Homo sapiens
tttttgagcttgcat

SEQ ID NO: 1446584 - DNA, 15 bp, Homo sapiens
ttttttgagcttgca

SEQ ID NO: 1446585 - DNA, 15 bp, Homo sapiens
tttttttgagcttgc

SEQ ID NO: 1446586 - DNA, 15 bp, Homo sapiens
ctttttttgagcttg

SEQ ID NO: 1446587 - DNA, 15 bp, Homo sapiens
tctttttttgagctt

SEQ ID NO: 1446588 - DNA, 15 bp, Homo sapiens
atctttttttgagct

SEQ ID NO: 1446589 - DNA, 15 bp, Homo sapiens
aatctttttttgagc

SEQ ID NO: 1446590 - DNA, 15 bp, Homo sapiens
aaatctttttttgag

SEQ ID NO: 1446591 - DNA, 15 bp, Homo sapiens
taaatctttttttga

SEQ ID NO: 1446592 - DNA, 15 bp, Homo sapiens
ataaatctttttttg

SEQ ID NO: 1446593 - DNA, 15 bp, Homo sapiens
aataaatcttttttt

SEQ ID NO: 1446594 - DNA, 15 bp, Homo sapiens
aaataaatctttttt

SEQ ID NO: 1446595 - DNA, 15 bp, Homo sapiens
aaaataaatcttttt

SEQ ID NO: 1446596 - DNA, 15 bp, Homo sapiens
taaaataaatctttt

SEQ ID NO: 1446597 - DNA, 15 bp, Homo sapiens
ttaaaataaatcttt

SEQ ID NO: 1446598 - DNA, 15 bp, Homo sapiens
attaaaataaatctt

SEQ ID NO: 1446599 - DNA, 15 bp, Homo sapiens
tattaaaataaatct

SEQ ID NO: 1446600 - DNA, 15 bp, Homo sapiens
atattaaaataaatc

SEQ ID NO: 1446601 - DNA, 15 bp, Homo sapiens
tatattaaaataaat

SEQ ID NO: 1446602 - DNA, 15 bp, Homo sapiens
atatattaaaataaa

SEQ ID NO: 1446603 - DNA, 15 bp, Homo sapiens
aatatattaaaataa

SEQ ID NO: 1446604 - DNA, 15 bp, Homo sapiens
aaatatattaaaata

SEQ ID NO: 1446605 - DNA, 15 bp, Homo sapiens
taaatatattaaaat

SEQ ID NO: 1446606 - DNA, 15 bp, Homo sapiens
ataaatatattaaaa

SEQ ID NO: 1446607 - DNA, 15 bp, Homo sapiens
tataaatatattaaa

SEQ ID NO: 1446608 - DNA, 15 bp, Homo sapiens
atataaatatattaa

SEQ ID NO: 1446609 - DNA, 15 bp, Homo sapiens
catataaatatatta

SEQ ID NO: 1446610 - DNA, 15 bp, Homo sapiens
acatataaatatatt

SEQ ID NO: 1446611 - DNA, 15 bp, Homo sapiens
aacatataaatatat

SEQ ID NO: 1446612 - DNA, 15 bp, Homo sapiens
caacatataaatata

SEQ ID NO: 1446613 - DNA, 15 bp, Homo sapiens
tcaacatataaatat

SEQ ID NO: 1446614 - DNA, 15 bp, Homo sapiens
ttcaacatataaata

SEQ ID NO: 1446615 - DNA, 15 bp, Homo sapiens
attcaacatataaat

SEQ ID NO: 1446616 - DNA, 15 bp, Homo sapiens
aattcaacatataaa

SEQ ID NO: 1446617 - DNA, 15 bp, Homo sapiens
aaattcaacatataa

SEQ ID NO: 1446618 - DNA, 15 bp, Homo sapiens
taaattcaacatata

SEQ ID NO: 1446619 - DNA, 15 bp, Homo sapiens
ttaaattcaacatat

SEQ ID NO: 1446620 - DNA, 15 bp, Homo sapiens
attaaattcaacata

SEQ ID NO: 1446621 - DNA, 15 bp, Homo sapiens
aattaaattcaacat

SEQ ID NO: 1446622 - DNA, 15 bp, Homo sapiens
caattaaattcaaca

SEQ ID NO: 1446623 - DNA, 15 bp, Homo sapiens
acaattaaattcaac

SEQ ID NO: 1446624 - DNA, 15 bp, Homo sapiens
tacaattaaattcaa

SEQ ID NO: 1446625 - DNA, 15 bp, Homo sapiens
gtacaattaaattca

SEQ ID NO: 1446626 - DNA, 15 bp, Homo sapiens
ggtacaattaaattc

SEQ ID NO: 1446627 - DNA, 15 bp, Homo sapiens
tggtacaattaaatt

SEQ ID NO: 1446628 - DNA, 15 bp, Homo sapiens
atggtacaattaaat

SEQ ID NO: 1446629 - DNA, 15 bp, Homo sapiens
aatggtacaattaaa

SEQ ID NO: 1446630 - DNA, 15 bp, Homo sapiens
caatggtacaattaa

SEQ ID NO: 1446631 - DNA, 15 bp, Homo sapiens
ccaatggtacaatta

SEQ ID NO: 1446632 - DNA, 15 bp, Homo sapiens
gccaatggtacaatt

SEQ ID NO: 1446633 - DNA, 15 bp, Homo sapiens
agccaatggtacaat

SEQ ID NO: 1446634 - DNA, 15 bp, Homo sapiens
aagccaatggtacaa

SEQ ID NO: 1446635 - DNA, 15 bp, Homo sapiens
gaagccaatggtaca

SEQ ID NO: 1446636 - DNA, 15 bp, Homo sapiens
agaagccaatggtac

SEQ ID NO: 1446637 - DNA, 15 bp, Homo sapiens
tagaagccaatggta

SEQ ID NO: 1446638 - DNA, 15 bp, Homo sapiens
ttagaagccaatggt

SEQ ID NO: 1446639 - DNA, 15 bp, Homo sapiens
cttagaagccaatgg

SEQ ID NO: 1446640 - DNA, 15 bp, Homo sapiens
acttagaagccaatg

SEQ ID NO: 1446641 - DNA, 15 bp, Homo sapiens
aacttagaagccaat

SEQ ID NO: 1446642 - DNA, 15 bp, Homo sapiens
aaacttagaagccaa

SEQ ID NO: 1446643 - DNA, 15 bp, Homo sapiens
aaaacttagaagcca

SEQ ID NO: 1446644 - DNA, 15 bp, Homo sapiens
aaaaacttagaagcc

SEQ ID NO: 1446645 - DNA, 15 bp, Homo sapiens
gaaaaacttagaagc

SEQ ID NO: 1446646 - DNA, 15 bp, Homo sapiens
agaaaaacttagaag

SEQ ID NO: 1446647 - DNA, 15 bp, Homo sapiens
aagaaaaacttagaa

SEQ ID NO: 1446648 - DNA, 15 bp, Homo sapiens
aaagaaaaacttaga

SEQ ID NO: 1446649 - DNA, 15 bp, Homo sapiens
aaaagaaaaacttag

SEQ ID NO: 1446650 - DNA, 15 bp, Homo sapiens
caaaagaaaaactta

SEQ ID NO: 1446651 - DNA, 15 bp, Homo sapiens
ccaaaagaaaaactt

SEQ ID NO: 1446652 - DNA, 15 bp, Homo sapiens
gccaaaagaaaaact

SEQ ID NO: 1446653 - DNA, 15 bp, Homo sapiens
agccaaaagaaaaac

SEQ ID NO: 1446654 - DNA, 15 bp, Homo sapiens
aagccaaaagaaaaa

SEQ ID NO: 1446655 - DNA, 15 bp, Homo sapiens
aaagccaaaagaaaa

SEQ ID NO: 1446656 - DNA, 15 bp, Homo sapiens
aaaagccaaaagaaa

SEQ ID NO: 1446657 - DNA, 15 bp, Homo sapiens
aaaaagccaaaagaa

SEQ ID NO: 1446658 - DNA, 15 bp, Homo sapiens
aaaaaagccaaaaga

SEQ ID NO: 1446659 - DNA, 15 bp, Homo sapiens
taaaaaagccaaaag

SEQ ID NO: 1446660 - DNA, 15 bp, Homo sapiens
ataaaaaagccaaaa

SEQ ID NO: 1446661 - DNA, 15 bp, Homo sapiens
tataaaaaagccaaa

SEQ ID NO: 1446662 - DNA, 15 bp, Homo sapiens
ctataaaaaagccaa

SEQ ID NO: 1446663 - DNA, 15 bp, Homo sapiens
tctataaaaaagcca

SEQ ID NO: 1446664 - DNA, 15 bp, Homo sapiens
ctctataaaaaagcc

SEQ ID NO: 1446665 - DNA, 15 bp, Homo sapiens
gctctataaaaaagc

SEQ ID NO: 1446666 - DNA, 15 bp, Homo sapiens
tgctctataaaaaag

SEQ ID NO: 1446667 - DNA, 15 bp, Homo sapiens
ttgctctataaaaaa

SEQ ID NO: 1446668 - DNA, 15 bp, Homo sapiens
tttgctctataaaaa

SEQ ID NO: 1446669 - DNA, 15 bp, Homo sapiens
atttgctctataaaa

SEQ ID NO: 1446670 - DNA, 15 bp, Homo sapiens
aatttgctctataaa

SEQ ID NO: 1446671 - DNA, 15 bp, Homo sapiens
taatttgctctataa

SEQ ID NO: 1446672 - DNA, 15 bp, Homo sapiens
gtaatttgctctata

SEQ ID NO: 1446673 - DNA, 15 bp, Homo sapiens
agtaatttgctctat

SEQ ID NO: 1446674 - DNA, 15 bp, Homo sapiens
tagtaatttgctcta

SEQ ID NO: 1446675 - DNA, 15 bp, Homo sapiens
ttagtaatttgctct

SEQ ID NO: 1446676 - DNA, 15 bp, Homo sapiens
tttagtaatttgctc

SEQ ID NO: 1446677 - DNA, 15 bp, Homo sapiens
ctttagtaatttgct

SEQ ID NO: 1446678 - DNA, 15 bp, Homo sapiens
tctttagtaatttgc

SEQ ID NO: 1446679 - DNA, 15 bp, Homo sapiens
ttctttagtaatttg

SEQ ID NO: 1446680 - DNA, 15 bp, Homo sapiens
tttctttagtaattt

SEQ ID NO: 1446681 - DNA, 15 bp, Homo sapiens
ttttctttagtaatt

SEQ ID NO: 1446682 - DNA, 15 bp, Homo sapiens
tttttctttagtaat

SEQ ID NO: 1446683 - DNA, 15 bp, Homo sapiens
ttttttctttagtaa

SEQ ID NO: 1446684 - DNA, 15 bp, Homo sapiens
gttttttctttagta

SEQ ID NO: 1446685 - DNA, 15 bp, Homo sapiens
agttttttctttagt

SEQ ID NO: 1446686 - DNA, 15 bp, Homo sapiens
aagttttttctttag

SEQ ID NO: 1446687 - DNA, 15 bp, Homo sapiens
aaagttttttcttta

SEQ ID NO: 1446688 - DNA, 15 bp, Homo sapiens
caaagttttttcttt

SEQ ID NO: 1446689 - DNA, 15 bp, Homo sapiens
acaaagttttttctt

SEQ ID NO: 1446690 - DNA, 15 bp, Homo sapiens
aacaaagttttttct

SEQ ID NO: 1446691 - DNA, 15 bp, Homo sapiens
aaacaaagttttttc

SEQ ID NO: 1446692 - DNA, 15 bp, Homo sapiens
aaaacaaagtttttt

SEQ ID NO: 1446693 - DNA, 15 bp, Homo sapiens
aaaaacaaagttttt

SEQ ID NO: 1446694 - DNA, 15 bp, Homo sapiens
taaaaacaaagtttt

SEQ ID NO: 1446695 - DNA, 15 bp, Homo sapiens
gtaaaaacaaagttt

SEQ ID NO: 1446696 - DNA, 15 bp, Homo sapiens
agtaaaaacaaagtt

SEQ ID NO: 1446697 - DNA, 15 bp, Homo sapiens
tagtaaaaacaaagt

SEQ ID NO: 1446698 - DNA, 15 bp, Homo sapiens
ctagtaaaaacaaag

SEQ ID NO: 1446699 - DNA, 15 bp, Homo sapiens
gctagtaaaaacaaa

SEQ ID NO: 1446700 - DNA, 15 bp, Homo sapiens
tgctagtaaaaacaa

SEQ ID NO: 1446701 - DNA, 15 bp, Homo sapiens
ctgctagtaaaaaca

SEQ ID NO: 1446702 - DNA, 15 bp, Homo sapiens
tctgctagtaaaaac

SEQ ID NO: 1446703 - DNA, 15 bp, Homo sapiens
gtctgctagtaaaaa

SEQ ID NO: 1446704 - DNA, 15 bp, Homo sapiens
ggtctgctagtaaaa

SEQ ID NO: 1446705 - DNA, 15 bp, Homo sapiens
aggtctgctagtaaa

SEQ ID NO: 1446706 - DNA, 15 bp, Homo sapiens
gaggtctgctagtaa

SEQ ID NO: 1446707 - DNA, 15 bp, Homo sapiens
agaggtctgctagta

SEQ ID NO: 1446708 - DNA, 15 bp, Homo sapiens
aagaggtctgctagt

SEQ ID NO: 1446709 - DNA, 15 bp, Homo sapiens
taagaggtctgctag

SEQ ID NO: 1446710 - DNA, 15 bp, Homo sapiens
ctaagaggtctgcta

SEQ ID NO: 1446711 - DNA, 15 bp, Homo sapiens
actaagaggtctgct

SEQ ID NO: 1446712 - DNA, 15 bp, Homo sapiens
tactaagaggtctgc

SEQ ID NO: 1446713 - DNA, 15 bp, Homo sapiens
atactaagaggtctg

SEQ ID NO: 1446714 - DNA, 15 bp, Homo sapiens
tatactaagaggtct

SEQ ID NO: 1446715 - DNA, 15 bp, Homo sapiens
gtatactaagaggtc

SEQ ID NO: 1446716 - DNA, 15 bp, Homo sapiens
tgtatactaagaggt

SEQ ID NO: 1446717 - DNA, 15 bp, Homo sapiens
ttgtatactaagagg

SEQ ID NO: 1446718 - DNA, 15 bp, Homo sapiens
tttgtatactaagag

SEQ ID NO: 1446719 - DNA, 15 bp, Homo sapiens
atttgtatactaaga

SEQ ID NO: 1446720 - DNA, 15 bp, Homo sapiens
catttgtatactaag

SEQ ID NO: 1446721 - DNA, 15 bp, Homo sapiens
ccatttgtatactaa

SEQ ID NO: 1446722 - DNA, 15 bp, Homo sapiens
cccatttgtatacta

SEQ ID NO: 1446723 - DNA, 15 bp, Homo sapiens
ccccatttgtatact

SEQ ID NO: 1446724 - DNA, 15 bp, Homo sapiens
tccccatttgtatac

SEQ ID NO: 1446725 - DNA, 15 bp, Homo sapiens
ttccccatttgtata

SEQ ID NO: 1446726 - DNA, 15 bp, Homo sapiens
tttccccatttgtat

SEQ ID NO: 1446727 - DNA, 15 bp, Homo sapiens
ttttccccatttgta

SEQ ID NO: 1446728 - DNA, 15 bp, Homo sapiens
attttccccatttgt

SEQ ID NO: 1446729 - DNA, 15 bp, Homo sapiens
cattttccccatttg

SEQ ID NO: 1446730 - DNA, 15 bp, Homo sapiens
acattttccccattt

SEQ ID NO: 1446731 - DNA, 15 bp, Homo sapiens
cacattttccccatt

SEQ ID NO: 1446732 - DNA, 15 bp, Homo sapiens
gcacattttccccat

SEQ ID NO: 1446733 - DNA, 15 bp, Homo sapiens
tgcacattttcccca

SEQ ID NO: 1446734 - DNA, 15 bp, Homo sapiens
atgcacattttcccc

SEQ ID NO: 1446735 - DNA, 15 bp, Homo sapiens
tatgcacattttccc

SEQ ID NO: 1446736 - DNA, 15 bp, Homo sapiens
atatgcacattttcc

SEQ ID NO: 1446737 - DNA, 15 bp, Homo sapiens
tatatgcacattttc

SEQ ID NO: 1446738 - DNA, 15 bp, Homo sapiens
ttatatgcacatttt

SEQ ID NO: 1446739 - DNA, 15 bp, Homo sapiens
tttatatgcacattt

SEQ ID NO: 1446740 - DNA, 15 bp, Homo sapiens
ctttatatgcacatt

SEQ ID NO: 1446741 - DNA, 15 bp, Homo sapiens
tctttatatgcacat

SEQ ID NO: 1446742 - DNA, 15 bp, Homo sapiens
atctttatatgcaca

SEQ ID NO: 1446743 - DNA, 15 bp, Homo sapiens
catctttatatgcac

SEQ ID NO: 1446744 - DNA, 15 bp, Homo sapiens
ccatctttatatgca

SEQ ID NO: 1446745 - DNA, 15 bp, Homo sapiens
cccatctttatatgc

SEQ ID NO: 1446746 - DNA, 15 bp, Homo sapiens
tcccatctttatatg

SEQ ID NO: 1446747 - DNA, 15 bp, Homo sapiens
gtcccatctttatat

SEQ ID NO: 1446748 - DNA, 15 bp, Homo sapiens
ggtcccatctttata

SEQ ID NO: 1446749 - DNA, 15 bp, Homo sapiens
aggtcccatctttat

SEQ ID NO: 1446750 - DNA, 15 bp, Homo sapiens
taggtcccatcttta

SEQ ID NO: 1446751 - DNA, 15 bp, Homo sapiens
ttaggtcccatcttt

SEQ ID NO: 1446752 - DNA, 15 bp, Homo sapiens
cttaggtcccatctt

SEQ ID NO: 1446753 - DNA, 15 bp, Homo sapiens
tcttaggtcccatct

SEQ ID NO: 1446754 - DNA, 15 bp, Homo sapiens
atcttaggtcccatc

SEQ ID NO: 1446755 - DNA, 15 bp, Homo sapiens
aatcttaggtcccat

SEQ ID NO: 1446756 - DNA, 15 bp, Homo sapiens
aaatcttaggtccca

SEQ ID NO: 1446757 - DNA, 15 bp, Homo sapiens
caaatcttaggtccc

SEQ ID NO: 1446758 - DNA, 15 bp, Homo sapiens
ccaaatcttaggtcc

SEQ ID NO: 1446759 - DNA, 15 bp, Homo sapiens
tccaaatcttaggtc

SEQ ID NO: 1446760 - DNA, 15 bp, Homo sapiens
ttccaaatcttaggt

SEQ ID NO: 1446761 - DNA, 15 bp, Homo sapiens
gttccaaatcttagg

SEQ ID NO: 1446762 - DNA, 15 bp, Homo sapiens
tgttccaaatcttag

SEQ ID NO: 1446763 - DNA, 15 bp, Homo sapiens
ttgttccaaatctta

SEQ ID NO: 1446764 - DNA, 15 bp, Homo sapiens
tttgttccaaatctt

SEQ ID NO: 1446765 - DNA, 15 bp, Homo sapiens
atttgttccaaatct

SEQ ID NO: 1446766 - DNA, 15 bp, Homo sapiens
aatttgttccaaatc

SEQ ID NO: 1446767 - DNA, 15 bp, Homo sapiens
gaatttgttccaaat

SEQ ID NO: 1446768 - DNA, 15 bp, Homo sapiens
ggaatttgttccaaa

SEQ ID NO: 1446769 - DNA, 15 bp, Homo sapiens
tggaatttgttccaa

SEQ ID NO: 1446770 - DNA, 15 bp, Homo sapiens
ctggaatttgttcca

SEQ ID NO: 1446771 - DNA, 15 bp, Homo sapiens
tctggaatttgttcc

SEQ ID NO: 1446772 - DNA, 15 bp, Homo sapiens
ctctggaatttgttc

SEQ ID NO: 1446773 - DNA, 15 bp, Homo sapiens
cctctggaatttgtt

SEQ ID NO: 1446774 - DNA, 15 bp, Homo sapiens
tcctctggaatttgt

SEQ ID NO: 1446775 - DNA, 15 bp, Homo sapiens
ttcctctggaatttg

SEQ ID NO: 1446776 - DNA, 15 bp, Homo sapiens
tttcctctggaattt

SEQ ID NO: 1446777 - DNA, 15 bp, Homo sapiens
ttttcctctggaatt

SEQ ID NO: 1446778 - DNA, 15 bp, Homo sapiens
attttcctctggaat

SEQ ID NO: 1446779 - DNA, 15 bp, Homo sapiens
aattttcctctggaa

SEQ ID NO: 1446780 - DNA, 15 bp, Homo sapiens
aaattttcctctgga

SEQ ID NO: 1446781 - DNA, 15 bp, Homo sapiens
aaaattttcctctgg

SEQ ID NO: 1446782 - DNA, 15 bp, Homo sapiens
caaaattttcctctg

SEQ ID NO: 1446783 - DNA, 15 bp, Homo sapiens
acaaaattttcctct

SEQ ID NO: 1446784 - DNA, 15 bp, Homo sapiens
aacaaaattttcctc

SEQ ID NO: 1446785 - DNA, 15 bp, Homo sapiens
caacaaaattttcct

SEQ ID NO: 1446786 - DNA, 15 bp, Homo sapiens
tcaacaaaattttcc

SEQ ID NO: 1446787 - DNA, 15 bp, Homo sapiens
gtcaacaaaattttc

SEQ ID NO: 1446788 - DNA, 15 bp, Homo sapiens
tgtcaacaaaatttt

SEQ ID NO: 1446789 - DNA, 15 bp, Homo sapiens
atgtcaacaaaattt

SEQ ID NO: 1446790 - DNA, 15 bp, Homo sapiens
aatgtcaacaaaatt

SEQ ID NO: 1446791 - DNA, 15 bp, Homo sapiens
caatgtcaacaaaat

SEQ ID NO: 1446792 - DNA, 15 bp, Homo sapiens
ccaatgtcaacaaaa

SEQ ID NO: 1446793 - DNA, 15 bp, Homo sapiens
tccaatgtcaacaaa

SEQ ID NO: 1446794 - DNA, 15 bp, Homo sapiens
ttccaatgtcaacaa

SEQ ID NO: 1446795 - DNA, 15 bp, Homo sapiens
attccaatgtcaaca

SEQ ID NO: 1446796 - DNA, 15 bp, Homo sapiens
cattccaatgtcaac

SEQ ID NO: 1446797 - DNA, 15 bp, Homo sapiens
tcattccaatgtcaa

SEQ ID NO: 1446798 - DNA, 15 bp, Homo sapiens
ttcattccaatgtca

SEQ ID NO: 1446799 - DNA, 15 bp, Homo sapiens
attcattccaatgtc

SEQ ID NO: 1446800 - DNA, 15 bp, Homo sapiens
aattcattccaatgt

SEQ ID NO: 1446801 - DNA, 15 bp, Homo sapiens
taattcattccaatg

SEQ ID NO: 1446802 - DNA, 15 bp, Homo sapiens
gtaattcattccaat

SEQ ID NO: 1446803 - DNA, 15 bp, Homo sapiens
agtaattcattccaa

SEQ ID NO: 1446804 - DNA, 15 bp, Homo sapiens
tagtaattcattcca

SEQ ID NO: 1446805 - DNA, 15 bp, Homo sapiens
ttagtaattcattcc

SEQ ID NO: 1446806 - DNA, 15 bp, Homo sapiens
tttagtaattcattc

SEQ ID NO: 1446807 - DNA, 15 bp, Homo sapiens
atttagtaattcatt

SEQ ID NO: 1446808 - DNA, 15 bp, Homo sapiens
tatttagtaattcat

SEQ ID NO: 1446809 - DNA, 15 bp, Homo sapiens
gtatttagtaattca

SEQ ID NO: 1446810 - DNA, 15 bp, Homo sapiens
agtatttagtaattc

SEQ ID NO: 1446811 - DNA, 15 bp, Homo sapiens
cagtatttagtaatt

SEQ ID NO: 1446812 - DNA, 15 bp, Homo sapiens
acagtatttagtaat

SEQ ID NO: 1446813 - DNA, 15 bp, Homo sapiens
cacagtatttagtaa

SEQ ID NO: 1446814 - DNA, 15 bp, Homo sapiens
acacagtatttagta

SEQ ID NO: 1446815 - DNA, 15 bp, Homo sapiens
aacacagtatttagt

SEQ ID NO: 1446816 - DNA, 15 bp, Homo sapiens
aaacacagtatttag

SEQ ID NO: 1446817 - DNA, 15 bp, Homo sapiens
caaacacagtattta

SEQ ID NO: 1446818 - DNA, 15 bp, Homo sapiens
tcaaacacagtattt

SEQ ID NO: 1446819 - DNA, 15 bp, Homo sapiens
atcaaacacagtatt

SEQ ID NO: 1446820 - DNA, 15 bp, Homo sapiens
tatcaaacacagtat

SEQ ID NO: 1446821 - DNA, 15 bp, Homo sapiens
atatcaaacacagta

SEQ ID NO: 1446822 - DNA, 15 bp, Homo sapiens
aatatcaaacacagt

SEQ ID NO: 1446823 - DNA, 15 bp, Homo sapiens
aaatatcaaacacag

SEQ ID NO: 1446824 - DNA, 15 bp, Homo sapiens
caaatatcaaacaca

SEQ ID NO: 1446825 - DNA, 15 bp, Homo sapiens
accaaatatcaaaca

SEQ ID NO: 1446826 - DNA, 15 bp, Homo sapiens
taccaaatatcaaac

SEQ ID NO: 1446827 - DNA, 15 bp, Homo sapiens
ttaccaaatatcaaa

SEQ ID NO: 1446828 - DNA, 15 bp, Homo sapiens
tttaccaaatatcaa

SEQ ID NO: 1446829 - DNA, 15 bp, Homo sapiens
ttttaccaaatatca

SEQ ID NO: 1446830 - DNA, 15 bp, Homo sapiens
tttttaccaaatatc

SEQ ID NO: 1446831 - DNA, 15 bp, Homo sapiens
atttttaccaaatat

SEQ ID NO: 1446832 - DNA, 15 bp, Homo sapiens
aatttttaccaaata

SEQ ID NO: 1446833 - DNA, 15 bp, Homo sapiens
taatttttaccaaat

SEQ ID NO: 1446834 - DNA, 15 bp, Homo sapiens
gtaatttttaccaaa

SEQ ID NO: 1446835 - DNA, 15 bp, Homo sapiens
agtaatttttaccaa

SEQ ID NO: 1446836 - DNA, 15 bp, Homo sapiens
aagtaatttttacca

SEQ ID NO: 1446837 - DNA, 15 bp, Homo sapiens
taagtaatttttacc

SEQ ID NO: 1446838 - DNA, 15 bp, Homo sapiens
ataagtaatttttac

SEQ ID NO: 1446839 - DNA, 15 bp, Homo sapiens
aataagtaattttta

SEQ ID NO: 1446840 - DNA, 15 bp, Homo sapiens
aaataagtaattttt

SEQ ID NO: 1446841 - DNA, 15 bp, Homo sapiens
aaaataagtaatttt

SEQ ID NO: 1446842 - DNA, 15 bp, Homo sapiens
aaaaataagtaattt

SEQ ID NO: 1446843 - DNA, 15 bp, Homo sapiens
caaaaataagtaatt

SEQ ID NO: 1446844 - DNA, 15 bp, Homo sapiens
acaaaaataagtaat

SEQ ID NO: 1446845 - DNA, 15 bp, Homo sapiens
gacaaaaataagtaa

SEQ ID NO: 1446846 - DNA, 15 bp, Homo sapiens
agacaaaaataagta

SEQ ID NO: 1446847 - DNA, 15 bp, Homo sapiens
aagacaaaaataagt

SEQ ID NO: 1446848 - DNA, 15 bp, Homo sapiens
gaagacaaaaataag

SEQ ID NO: 1446849 - DNA, 15 bp, Homo sapiens
agaagacaaaaataa

SEQ ID NO: 1446850 - DNA, 15 bp, Homo sapiens
tagaagacaaaaata

SEQ ID NO: 1446851 - DNA, 15 bp, Homo sapiens
gtagaagacaaaaat

SEQ ID NO: 1446852 - DNA, 15 bp, Homo sapiens
agtagaagacaaaaa

SEQ ID NO: 1446853 - DNA, 15 bp, Homo sapiens
gagtagaagacaaaa

SEQ ID NO: 1446854 - DNA, 15 bp, Homo sapiens
agagtagaagacaaa

SEQ ID NO: 1446855 - DNA, 15 bp, Homo sapiens
cagagtagaagacaa

SEQ ID NO: 1446856 - DNA, 15 bp, Homo sapiens
tcagagtagaagaca

SEQ ID NO: 1446857 - DNA, 15 bp, Homo sapiens
ctcagagtagaagac

SEQ ID NO: 1446858 - DNA, 15 bp, Homo sapiens
tctcagagtagaaga

SEQ ID NO: 1446859 - DNA, 15 bp, Homo sapiens
ttctcagagtagaag

SEQ ID NO: 1446860 - DNA, 15 bp, Homo sapiens
cttctcagagtagaa

SEQ ID NO: 1446861 - DNA, 15 bp, Homo sapiens
acttctcagagtaga

SEQ ID NO: 1446862 - DNA, 15 bp, Homo sapiens
tacttctcagagtag

SEQ ID NO: 1446863 - DNA, 15 bp, Homo sapiens
atacttctcagagta

SEQ ID NO: 1446864 - DNA, 15 bp, Homo sapiens
aatacttctcagagt

SEQ ID NO: 1446865 - DNA, 15 bp, Homo sapiens
aaatacttctcagag

SEQ ID NO: 1446866 - DNA, 15 bp, Homo sapiens
gaaatacttctcaga

SEQ ID NO: 1446867 - DNA, 15 bp, Homo sapiens
agaaatacttctcag

SEQ ID NO: 1446868 - DNA, 15 bp, Homo sapiens
aagaaatacttctca

SEQ ID NO: 1446869 - DNA, 15 bp, Homo sapiens
taagaaatacttctc

SEQ ID NO: 1446870 - DNA, 15 bp, Homo sapiens
gtaagaaatacttct

SEQ ID NO: 1446871 - DNA, 15 bp, Homo sapiens
tgtaagaaatacttc

SEQ ID NO: 1446872 - DNA, 15 bp, Homo sapiens
ctgtaagaaatactt

SEQ ID NO: 1446873 - DNA, 15 bp, Homo sapiens
actgtaagaaatact

SEQ ID NO: 1446874 - DNA, 15 bp, Homo sapiens
gactgtaagaaatac

SEQ ID NO: 1446875 - DNA, 15 bp, Homo sapiens
agactgtaagaaata

SEQ ID NO: 1446876 - DNA, 15 bp, Homo sapiens
aagactgtaagaaat

SEQ ID NO: 1446877 - DNA, 15 bp, Homo sapiens
taagactgtaagaaa

SEQ ID NO: 1446878 - DNA, 15 bp, Homo sapiens
ataagactgtaagaa

SEQ ID NO: 1446879 - DNA, 15 bp, Homo sapiens
gataagactgtaaga

SEQ ID NO: 1446880 - DNA, 15 bp, Homo sapiens
tgataagactgtaag

SEQ ID NO: 1446881 - DNA, 15 bp, Homo sapiens
atgataagactgtaa

SEQ ID NO: 1446882 - DNA, 15 bp, Homo sapiens
aatgataagactgta

SEQ ID NO: 1446883 - DNA, 15 bp, Homo sapiens
taatgataagactgt

SEQ ID NO: 1446884 - DNA, 15 bp, Homo sapiens
ctaatgataagactg

SEQ ID NO: 1446885 - DNA, 15 bp, Homo sapiens
tctaatgataagact

SEQ ID NO: 1446886 - DNA, 15 bp, Homo sapiens
ctctaatgataagac

SEQ ID NO: 1446887 - DNA, 15 bp, Homo sapiens
tctctaatgataaga

SEQ ID NO: 1446888 - DNA, 15 bp, Homo sapiens
ttctctaatgataag

SEQ ID NO: 1446889 - DNA, 15 bp, Homo sapiens
attctctaatgataa

SEQ ID NO: 1446890 - DNA, 15 bp, Homo sapiens
tattctctaatgata

SEQ ID NO: 1446891 - DNA, 15 bp, Homo sapiens
ctattctctaatgat

SEQ ID NO: 1446892 - DNA, 15 bp, Homo sapiens
tctattctctaatga

SEQ ID NO: 1446893 - DNA, 15 bp, Homo sapiens
gtctattctctaatg

SEQ ID NO: 1446894 - DNA, 15 bp, Homo sapiens
agtctattctctaat

SEQ ID NO: 1446895 - DNA, 15 bp, Homo sapiens
cagtctattctctaa

SEQ ID NO: 1446896 - DNA, 15 bp, Homo sapiens
ccagtctattctcta

SEQ ID NO: 1446897 - DNA, 15 bp, Homo sapiens
accagtctattctct

SEQ ID NO: 1446898 - DNA, 15 bp, Homo sapiens
aaccagtctattctc

SEQ ID NO: 1446899 - DNA, 15 bp, Homo sapiens
gaaccagtctattct

SEQ ID NO: 1446900 - DNA, 15 bp, Homo sapiens
agaaccagtctattc

SEQ ID NO: 1446901 - DNA, 15 bp, Homo sapiens
tagaaccagtctatt

SEQ ID NO: 1446902 - DNA, 15 bp, Homo sapiens
ttagaaccagtctat

SEQ ID NO: 1446903 - DNA, 15 bp, Homo sapiens
cttagaaccagtcta

SEQ ID NO: 1446904 - DNA, 15 bp, Homo sapiens
ccttagaaccagtct

SEQ ID NO: 1446905 - DNA, 15 bp, Homo sapiens
gccttagaaccagtc

SEQ ID NO: 1446906 - DNA, 15 bp, Homo sapiens
agccttagaaccagt

SEQ ID NO: 1446907 - DNA, 15 bp, Homo sapiens
tagccttagaaccag

SEQ ID NO: 1446908 - DNA, 15 bp, Homo sapiens
atagccttagaacca

SEQ ID NO: 1446909 - DNA, 15 bp, Homo sapiens
aatagccttagaacc

SEQ ID NO: 1446910 - DNA, 15 bp, Homo sapiens
aaatagccttagaac

SEQ ID NO: 1446911 - DNA, 15 bp, Homo sapiens
aaaatagccttagaa

SEQ ID NO: 1446912 - DNA, 15 bp, Homo sapiens
aaaaatagccttaga

SEQ ID NO: 1446913 - DNA, 15 bp, Homo sapiens
aaaaaatagccttag

SEQ ID NO: 1446914 - DNA, 15 bp, Homo sapiens
taaaaaatagcctta

SEQ ID NO: 1446915 - DNA, 15 bp, Homo sapiens
gtaaaaaatagcctt

SEQ ID NO: 1446916 - DNA, 15 bp, Homo sapiens
tgtaaaaaatagcct

SEQ ID NO: 1446917 - DNA, 15 bp, Homo sapiens
ctgtaaaaaatagcc

SEQ ID NO: 1446918 - DNA, 15 bp, Homo sapiens
cctgtaaaaaatagc

SEQ ID NO: 1446919 - DNA, 15 bp, Homo sapiens
tcctgtaaaaaatag

SEQ ID NO: 1446920 - DNA, 15 bp, Homo sapiens
ttcctgtaaaaaata

SEQ ID NO: 1446921 - DNA, 15 bp, Homo sapiens
gttcctgtaaaaaat

SEQ ID NO: 1446922 - DNA, 15 bp, Homo sapiens
tgttcctgtaaaaaa

SEQ ID NO: 1446923 - DNA, 15 bp, Homo sapiens
atgttcctgtaaaaa

SEQ ID NO: 1446924 - DNA, 15 bp, Homo sapiens
tatgttcctgtaaaa

SEQ ID NO: 1446925 - DNA, 15 bp, Homo sapiens
atatgttcctgtaaa

SEQ ID NO: 1446926 - DNA, 15 bp, Homo sapiens
aatatgttcctgtaa

SEQ ID NO: 1446927 - DNA, 15 bp, Homo sapiens
caatatgttcctgta

SEQ ID NO: 1446928 - DNA, 15 bp, Homo sapiens
ccaatatgttcctgt

SEQ ID NO: 1446929 - DNA, 15 bp, Homo sapiens
gccaatatgttcctg

SEQ ID NO: 1446930 - DNA, 15 bp, Homo sapiens
agccaatatgttcct

SEQ ID NO: 1446931 - DNA, 15 bp, Homo sapiens
aagccaatatgttcc

SEQ ID NO: 1446932 - DNA, 15 bp, Homo sapiens
aaagccaatatgttc

SEQ ID NO: 1446933 - DNA, 15 bp, Homo sapiens
aaaagccaatatgtt

SEQ ID NO: 1446934 - DNA, 15 bp, Homo sapiens
aaaaagccaatatgt

SEQ ID NO: 1446935 - DNA, 15 bp, Homo sapiens
gaaaaagccaatatg

SEQ ID NO: 1446936 - DNA, 15 bp, Homo sapiens
agaaaaagccaatat

SEQ ID NO: 1446937 - DNA, 15 bp, Homo sapiens
aagaaaaagccaata

SEQ ID NO: 1446938 - DNA, 15 bp, Homo sapiens
aaagaaaaagccaat

SEQ ID NO: 1446939 - DNA, 15 bp, Homo sapiens
taaagaaaaagccaa

SEQ ID NO: 1446940 - DNA, 15 bp, Homo sapiens
ctaaagaaaaagcca

SEQ ID NO: 1446941 - DNA, 15 bp, Homo sapiens
tctaaagaaaaagcc

SEQ ID NO: 1446942 - DNA, 15 bp, Homo sapiens
gtctaaagaaaaagc

SEQ ID NO: 1446943 - DNA, 15 bp, Homo sapiens
tgtctaaagaaaaag

SEQ ID NO: 1446944 - DNA, 15 bp, Homo sapiens
atgtctaaagaaaaa

SEQ ID NO: 1446945 - DNA, 15 bp, Homo sapiens
aatgtctaaagaaaa

SEQ ID NO: 1446946 - DNA, 15 bp, Homo sapiens
taatgtctaaagaaa

SEQ ID NO: 1446947 - DNA, 15 bp, Homo sapiens
ttaatgtctaaagaa

SEQ ID NO: 1446948 - DNA, 15 bp, Homo sapiens
tttaatgtctaaaga

SEQ ID NO: 1446949 - DNA, 15 bp, Homo sapiens
gtttaatgtctaaag

SEQ ID NO: 1446950 - DNA, 15 bp, Homo sapiens
ggtttaatgtctaaa

SEQ ID NO: 1446951 - DNA, 15 bp, Homo sapiens
gggtttaatgtctaa

SEQ ID NO: 1446952 - DNA, 15 bp, Homo sapiens
tgggtttaatgtcta

SEQ ID NO: 1446953 - DNA, 15 bp, Homo sapiens
ttgggtttaatgtct

SEQ ID NO: 1446954 - DNA, 15 bp, Homo sapiens
attgggtttaatgtc

SEQ ID NO: 1446955 - DNA, 15 bp, Homo sapiens
cattgggtttaatgt

SEQ ID NO: 1446956 - DNA, 15 bp, Homo sapiens
tcattgggtttaatg

SEQ ID NO: 1446957 - DNA, 15 bp, Homo sapiens
atcattgggtttaat

SEQ ID NO: 1446958 - DNA, 15 bp, Homo sapiens
tatcattgggtttaa

SEQ ID NO: 1446959 - DNA, 15 bp, Homo sapiens
atatcattgggttta

SEQ ID NO: 1446960 - DNA, 15 bp, Homo sapiens
tatatcattgggttt

SEQ ID NO: 1446961 - DNA, 15 bp, Homo sapiens
atatatcattgggtt

SEQ ID NO: 1446962 - DNA, 15 bp, Homo sapiens
gatatatcattgggt

SEQ ID NO: 1446963 - DNA, 15 bp, Homo sapiens
ggatatatcattggg

SEQ ID NO: 1446964 - DNA, 15 bp, Homo sapiens
aggatatatcattgg

SEQ ID NO: 1446965 - DNA, 15 bp, Homo sapiens
caggatatatcattg

SEQ ID NO: 1446966 - DNA, 15 bp, Homo sapiens
acaggatatatcatt

SEQ ID NO: 1446967 - DNA, 15 bp, Homo sapiens
tacaggatatatcat

SEQ ID NO: 1446968 - DNA, 15 bp, Homo sapiens
atacaggatatatca

SEQ ID NO: 1446969 - DNA, 15 bp, Homo sapiens
gatacaggatatatc

SEQ ID NO: 1446970 - DNA, 15 bp, Homo sapiens
agatacaggatatat

SEQ ID NO: 1446971 - DNA, 15 bp, Homo sapiens
aagatacaggatata

SEQ ID NO: 1446972 - DNA, 15 bp, Homo sapiens
taagatacaggatat

SEQ ID NO: 1446973 - DNA, 15 bp, Homo sapiens
ttaagatacaggata

SEQ ID NO: 1446974 - DNA, 15 bp, Homo sapiens
tttaagatacaggat

SEQ ID NO: 1446975 - DNA, 15 bp, Homo sapiens
ttttaagatacagga

SEQ ID NO: 1446976 - DNA, 15 bp, Homo sapiens
tttttaagatacagg

SEQ ID NO: 1446977 - DNA, 15 bp, Homo sapiens
ttttttaagatacag

SEQ ID NO: 1446978 - DNA, 15 bp, Homo sapiens
gttttttaagataca

SEQ ID NO: 1446979 - DNA, 15 bp, Homo sapiens
tgttttttaagatac

SEQ ID NO: 1446980 - DNA, 15 bp, Homo sapiens
ttgttttttaagata

SEQ ID NO: 1446981 - DNA, 15 bp, Homo sapiens
tttgttttttaagat

SEQ ID NO: 1446982 - DNA, 15 bp, Homo sapiens
ttttgttttttaaga

SEQ ID NO: 1446983 - DNA, 15 bp, Homo sapiens
gttttgttttttaag

SEQ ID NO: 1446984 - DNA, 15 bp, Homo sapiens
ctgttttgtttttta

SEQ ID NO: 1446985 - DNA, 15 bp, Homo sapiens
actgttttgtttttt

SEQ ID NO: 1446986 - DNA, 15 bp, Homo sapiens
tactgttttgttttt

SEQ ID NO: 1446987 - DNA, 15 bp, Homo sapiens
ttactgttttgtttt

SEQ ID NO: 1446988 - DNA, 15 bp, Homo sapiens
tttactgttttgttt

SEQ ID NO: 1446989 - DNA, 15 bp, Homo sapiens
atttactgttttgtt

SEQ ID NO: 1446990 - DNA, 15 bp, Homo sapiens
gatttactgttttgt

SEQ ID NO: 1446991 - DNA, 15 bp, Homo sapiens
agatttactgttttg

SEQ ID NO: 1446992 - DNA, 15 bp, Homo sapiens
cagatttactgtttt

SEQ ID NO: 1446993 - DNA, 15 bp, Homo sapiens
ccagatttactgttt

SEQ ID NO: 1446994 - DNA, 15 bp, Homo sapiens
tccagatttactgtt

SEQ ID NO: 1446995 - DNA, 15 bp, Homo sapiens
ttccagatttactgt

SEQ ID NO: 1446996 - DNA, 15 bp, Homo sapiens
attccagatttactg

SEQ ID NO: 1446997 - DNA, 15 bp, Homo sapiens
gattccagatttact

SEQ ID NO: 1446998 - DNA, 15 bp, Homo sapiens
agattccagatttac

SEQ ID NO: 1446999 - DNA, 15 bp, Homo sapiens
aagattccagattta

SEQ ID NO: 1447000 - DNA, 15 bp, Homo sapiens
taagattccagattt

SEQ ID NO: 1447001 - DNA, 15 bp, Homo sapiens
gtaagattccagatt

SEQ ID NO: 1447002 - DNA, 15 bp, Homo sapiens
ggtaagattccagat

SEQ ID NO: 1447003 - DNA, 15 bp, Homo sapiens
cggtaagattccaga

SEQ ID NO: 1447004 - DNA, 15 bp, Homo sapiens
tcggtaagattccag

SEQ ID NO: 1447005 - DNA, 15 bp, Homo sapiens
ttcggtaagattcca

SEQ ID NO: 1447006 - DNA, 15 bp, Homo sapiens
tttcggtaagattcc

SEQ ID NO: 1447007 - DNA, 15 bp, Homo sapiens
gtttcggtaagattc

SEQ ID NO: 1447008 - DNA, 15 bp, Homo sapiens
ggtttcggtaagatt

SEQ ID NO: 1447009 - DNA, 15 bp, Homo sapiens
tggtttcggtaagat

SEQ ID NO: 1447010 - DNA, 15 bp, Homo sapiens
ttggtttcggtaaga

SEQ ID NO: 1447011 - DNA, 15 bp, Homo sapiens
cttggtttcggtaag

SEQ ID NO: 1447012 - DNA, 15 bp, Homo sapiens
acttggtttcggtaa

SEQ ID NO: 1447013 - DNA, 15 bp, Homo sapiens
tacttggtttcggta

SEQ ID NO: 1447014 - DNA, 15 bp, Homo sapiens
atacttggtttcggt

SEQ ID NO: 1447015 - DNA, 15 bp, Homo sapiens
aatacttggtttcgg

SEQ ID NO: 1447016 - DNA, 15 bp, Homo sapiens
aaatacttggtttcg

SEQ ID NO: 1447017 - DNA, 15 bp, Homo sapiens
aaaatacttggtttc

SEQ ID NO: 1447018 - DNA, 15 bp, Homo sapiens
gaaaatacttggttt

SEQ ID NO: 1447019 - DNA, 15 bp, Homo sapiens
ggaaaatacttggtt

SEQ ID NO: 1447020 - DNA, 15 bp, Homo sapiens
tggaaaatacttggt

SEQ ID NO: 1447021 - DNA, 15 bp, Homo sapiens
atggaaaatacttgg

SEQ ID NO: 1447022 - DNA, 15 bp, Homo sapiens
tatggaaaatacttg

SEQ ID NO: 1447023 - DNA, 15 bp, Homo sapiens
atatggaaaatactt

SEQ ID NO: 1447024 - DNA, 15 bp, Homo sapiens
tatatggaaaatact

SEQ ID NO: 1447025 - DNA, 15 bp, Homo sapiens
gtatatggaaaatac

SEQ ID NO: 1447026 - DNA, 15 bp, Homo sapiens
tgtatatggaaaata

SEQ ID NO: 1447027 - DNA, 15 bp, Homo sapiens
atgtatatggaaaat

SEQ ID NO: 1447028 - DNA, 15 bp, Homo sapiens
aatgtatatggaaaa

SEQ ID NO: 1447029 - DNA, 15 bp, Homo sapiens
aaatgtatatggaaa

SEQ ID NO: 1447030 - DNA, 15 bp, Homo sapiens
caaatgtatatggaa

SEQ ID NO: 1447031 - DNA, 15 bp, Homo sapiens
acaaatgtatatgga

SEQ ID NO: 1447032 - DNA, 15 bp, Homo sapiens
cacaaatgtatatgg

SEQ ID NO: 1447033 - DNA, 15 bp, Homo sapiens
acacaaatgtatatg

SEQ ID NO: 1447034 - DNA, 15 bp, Homo sapiens
gacacaaatgtatat

SEQ ID NO: 1447035 - DNA, 15 bp, Homo sapiens
agacacaaatgtata

SEQ ID NO: 1447036 - DNA, 15 bp, Homo sapiens
cagacacaaatgtat

SEQ ID NO: 1447037 - DNA, 15 bp, Homo sapiens
acagacacaaatgta

SEQ ID NO: 1447038 - DNA, 15 bp, Homo sapiens
gacagacacaaatgt

SEQ ID NO: 1447039 - DNA, 15 bp, Homo sapiens
agacagacacaaatg

SEQ ID NO: 1447040 - DNA, 15 bp, Homo sapiens
gagacagacacaaat

SEQ ID NO: 1447041 - DNA, 15 bp, Homo sapiens
ggagacagacacaaa

SEQ ID NO: 1447042 - DNA, 15 bp, Homo sapiens
tggagacagacacaa

SEQ ID NO: 1447043 - DNA, 15 bp, Homo sapiens
atggagacagacaca

SEQ ID NO: 1447044 - DNA, 15 bp, Homo sapiens
tatggagacagacac

SEQ ID NO: 1447045 - DNA, 15 bp, Homo sapiens
atatggagacagaca

SEQ ID NO: 1447046 - DNA, 15 bp, Homo sapiens
aatatggagacagac

SEQ ID NO: 1447047 - DNA, 15 bp, Homo sapiens
taatatggagacaga

SEQ ID NO: 1447048 - DNA, 15 bp, Homo sapiens
ttaatatggagacag

SEQ ID NO: 1447049 - DNA, 15 bp, Homo sapiens
cttaatatggagaca

SEQ ID NO: 1447050 - DNA, 15 bp, Homo sapiens
tcttaatatggagac

SEQ ID NO: 1447051 - DNA, 15 bp, Homo sapiens
ctcttaatatggaga

SEQ ID NO: 1447052 - DNA, 15 bp, Homo sapiens
tctcttaatatggag

SEQ ID NO: 1447053 - DNA, 15 bp, Homo sapiens
ctctcttaatatgga

SEQ ID NO: 1447054 - DNA, 15 bp, Homo sapiens
tctctcttaatatgg

SEQ ID NO: 1447055 - DNA, 15 bp, Homo sapiens
atctctcttaatatg

SEQ ID NO: 1447056 - DNA, 15 bp, Homo sapiens
aatctctcttaatat

SEQ ID NO: 1447057 - DNA, 15 bp, Homo sapiens
taatctctcttaata

SEQ ID NO: 1447058 - DNA, 15 bp, Homo sapiens
gtaatctctcttaat

SEQ ID NO: 1447059 - DNA, 15 bp, Homo sapiens
tgtaatctctcttaa

SEQ ID NO: 1447060 - DNA, 15 bp, Homo sapiens
atgtaatctctctta

SEQ ID NO: 1447061 - DNA, 15 bp, Homo sapiens
gatgtaatctctctt

SEQ ID NO: 1447062 - DNA, 15 bp, Homo sapiens
tgatgtaatctctct

SEQ ID NO: 1447063 - DNA, 15 bp, Homo sapiens
ctgatgtaatctctc

SEQ ID NO: 1447064 - DNA, 15 bp, Homo sapiens
tctgatgtaatctct

SEQ ID NO: 1447065 - DNA, 15 bp, Homo sapiens
ctctgatgtaatctc

SEQ ID NO: 1447066 - DNA, 15 bp, Homo sapiens
actctgatgtaatct

SEQ ID NO: 1447067 - DNA, 15 bp, Homo sapiens
aactctgatgtaatc

SEQ ID NO: 1447068 - DNA, 15 bp, Homo sapiens
caactctgatgtaat

SEQ ID NO: 1447069 - DNA, 15 bp, Homo sapiens
tcaactctgatgtaa

SEQ ID NO: 1447070 - DNA, 15 bp, Homo sapiens
ttcaactctgatgta

SEQ ID NO: 1447071 - DNA, 15 bp, Homo sapiens
cttcaactctgatgt

SEQ ID NO: 1447072 - DNA, 15 bp, Homo sapiens
ccttcaactctgatg

SEQ ID NO: 1447073 - DNA, 15 bp, Homo sapiens
gccttcaactctgat

SEQ ID NO: 1447074 - DNA, 15 bp, Homo sapiens
agccttcaactctga

SEQ ID NO: 1447075 - DNA, 15 bp, Homo sapiens
aagccttcaactctg

SEQ ID NO: 1447076 - DNA, 15 bp, Homo sapiens
aaagccttcaactct

SEQ ID NO: 1447077 - DNA, 15 bp, Homo sapiens
gaaagccttcaactc

SEQ ID NO: 1447078 - DNA, 15 bp, Homo sapiens
agaaagccttcaact

SEQ ID NO: 1447079 - DNA, 15 bp, Homo sapiens
aagaaagccttcaac

SEQ ID NO: 1447080 - DNA, 15 bp, Homo sapiens
aaagaaagccttcaa

SEQ ID NO: 1447081 - DNA, 15 bp, Homo sapiens
caaagaaagccttca

SEQ ID NO: 1447082 - DNA, 15 bp, Homo sapiens
ccaaagaaagccttc

SEQ ID NO: 1447083 - DNA, 15 bp, Homo sapiens
accaaagaaagcctt

SEQ ID NO: 1447084 - DNA, 15 bp, Homo sapiens
gaccaaagaaagcct

SEQ ID NO: 1447085 - DNA, 15 bp, Homo sapiens
ggaccaaagaaagcc

SEQ ID NO: 1447086 - DNA, 15 bp, Homo sapiens
gggaccaaagaaagc

SEQ ID NO: 1447087 - DNA, 15 bp, Homo sapiens
tgggaccaaagaaag

SEQ ID NO: 1447088 - DNA, 15 bp, Homo sapiens
ttgggaccaaagaaa

SEQ ID NO: 1447089 - DNA, 15 bp, Homo sapiens
tttgggaccaaagaa

SEQ ID NO: 1447090 - DNA, 15 bp, Homo sapiens
ttttgggaccaaaga

SEQ ID NO: 1447091 - DNA, 15 bp, Homo sapiens
attttgggaccaaag

SEQ ID NO: 1447092 - DNA, 15 bp, Homo sapiens
gattttgggaccaaa

SEQ ID NO: 1447093 - DNA, 15 bp, Homo sapiens
agattttgggaccaa

SEQ ID NO: 1447094 - DNA, 15 bp, Homo sapiens
cagattttgggacca

SEQ ID NO: 1447095 - DNA, 15 bp, Homo sapiens
acagattttgggacc

SEQ ID NO: 1447096 - DNA, 15 bp, Homo sapiens
tacagattttgggac

SEQ ID NO: 1447097 - DNA, 15 bp, Homo sapiens
gtacagattttggga

SEQ ID NO: 1447098 - DNA, 15 bp, Homo sapiens
agtacagattttggg

SEQ ID NO: 1447099 - DNA, 15 bp, Homo sapiens
aagtacagattttgg

SEQ ID NO: 1447100 - DNA, 15 bp, Homo sapiens
aaagtacagattttg

SEQ ID NO: 1447101 - DNA, 15 bp, Homo sapiens
aaaagtacagatttt

SEQ ID NO: 1447102 - DNA, 15 bp, Homo sapiens
aaaaagtacagattt

SEQ ID NO: 1447103 - DNA, 15 bp, Homo sapiens
taaaaagtacagatt

SEQ ID NO: 1447104 - DNA, 15 bp, Homo sapiens
ttaaaaagtacagat

SEQ ID NO: 1447105 - DNA, 15 bp, Homo sapiens
tttaaaaagtacaga

SEQ ID NO: 1447106 - DNA, 15 bp, Homo sapiens
ttttaaaaagtacag

SEQ ID NO: 1447107 - DNA, 15 bp, Homo sapiens
tttttaaaaagtaca

SEQ ID NO: 1447108 - DNA, 15 bp, Homo sapiens
ttttttaaaaagtac

SEQ ID NO: 1447109 - DNA, 15 bp, Homo sapiens
tttttttaaaaagta

SEQ ID NO: 1447110 - DNA, 15 bp, Homo sapiens
ctttttttaaaaagt

SEQ ID NO: 1447111 - DNA, 15 bp, Homo sapiens
gctttttttaaaaag

SEQ ID NO: 1447112 - DNA, 15 bp, Homo sapiens
tgctttttttaaaaa

SEQ ID NO: 1447113 - DNA, 15 bp, Homo sapiens
ctgctttttttaaaa

SEQ ID NO: 1447114 - DNA, 15 bp, Homo sapiens
actgctttttttaaa

SEQ ID NO: 1447115 - DNA, 15 bp, Homo sapiens
cactgctttttttaa

SEQ ID NO: 1447116 - DNA, 15 bp, Homo sapiens
tcactgcttttttta

SEQ ID NO: 1447117 - DNA, 15 bp, Homo sapiens
atcactgcttttttt

SEQ ID NO: 1447118 - DNA, 15 bp, Homo sapiens
aatcactgctttttt

SEQ ID NO: 1447119 - DNA, 15 bp, Homo sapiens
caatcactgcttttt

SEQ ID NO: 1447120 - DNA, 15 bp, Homo sapiens
gcaatcactgctttt

SEQ ID NO: 1447121 - DNA, 15 bp, Homo sapiens
agcaatcactgcttt

SEQ ID NO: 1447122 - DNA, 15 bp, Homo sapiens
cagcaatcactgctt

SEQ ID NO: 1447123 - DNA, 15 bp, Homo sapiens
acagcaatcactgct

SEQ ID NO: 1447124 - DNA, 15 bp, Homo sapiens
cacagcaatcactgc

SEQ ID NO: 1447125 - DNA, 15 bp, Homo sapiens
ccacagcaatcactg

SEQ ID NO: 1447126 - DNA, 15 bp, Homo sapiens
gccacagcaatcact

SEQ ID NO: 1447127 - DNA, 15 bp, Homo sapiens
agccacagcaatcac

SEQ ID NO: 1447128 - DNA, 15 bp, Homo sapiens
aagccacagcaatca

SEQ ID NO: 1447129 - DNA, 15 bp, Homo sapiens
gaagccacagcaatc

SEQ ID NO: 1447130 - DNA, 15 bp, Homo sapiens
agaagccacagcaat

SEQ ID NO: 1447131 - DNA, 15 bp, Homo sapiens
gagaagccacagcaa

SEQ ID NO: 1447132 - DNA, 15 bp, Homo sapiens
ggagaagccacagca

SEQ ID NO: 1447133 - DNA, 15 bp, Homo sapiens
tggagaagccacagc

SEQ ID NO: 1447134 - DNA, 15 bp, Homo sapiens
ctggagaagccacag

SEQ ID NO: 1447135 - DNA, 15 bp, Homo sapiens
actggagaagccaca

SEQ ID NO: 1447136 - DNA, 15 bp, Homo sapiens
tactggagaagccac

SEQ ID NO: 1447137 - DNA, 15 bp, Homo sapiens
atactggagaagcca

SEQ ID NO: 1447138 - DNA, 15 bp, Homo sapiens
catactggagaagcc

SEQ ID NO: 1447139 - DNA, 15 bp, Homo sapiens
gcatactggagaagc

SEQ ID NO: 1447140 - DNA, 15 bp, Homo sapiens
agcatactggagaag

SEQ ID NO: 1447141 - DNA, 15 bp, Homo sapiens
cagcatactggagaa

SEQ ID NO: 1447142 - DNA, 15 bp, Homo sapiens
acagcatactggaga

SEQ ID NO: 1447143 - DNA, 15 bp, Homo sapiens
cacagcatactggag

SEQ ID NO: 1447144 - DNA, 15 bp, Homo sapiens
ccacagcatactgga

SEQ ID NO: 1447145 - DNA, 15 bp, Homo sapiens
tccacagcatactgg

SEQ ID NO: 1447146 - DNA, 15 bp, Homo sapiens
ttccacagcatactg

SEQ ID NO: 1447147 - DNA, 15 bp, Homo sapiens
attccacagcatact

SEQ ID NO: 1447148 - DNA, 15 bp, Homo sapiens
tattccacagcatac

SEQ ID NO: 1447149 - DNA, 15 bp, Homo sapiens
atattccacagcata

SEQ ID NO: 1447150 - DNA, 15 bp, Homo sapiens
tatattccacagcat

SEQ ID NO: 1447151 - DNA, 15 bp, Homo sapiens
atatattccacagca

SEQ ID NO: 1447152 - DNA, 15 bp, Homo sapiens
tatatattccacagc

SEQ ID NO: 1447153 - DNA, 15 bp, Homo sapiens
atatatattccacag

SEQ ID NO: 1447154 - DNA, 15 bp, Homo sapiens
catatatattccaca

SEQ ID NO: 1447155 - DNA, 15 bp, Homo sapiens
ccatatatattccac

SEQ ID NO: 1447156 - DNA, 15 bp, Homo sapiens
tccatatatattcca

SEQ ID NO: 1447157 - DNA, 15 bp, Homo sapiens
ttccatatatattcc

SEQ ID NO: 1447158 - DNA, 15 bp, Homo sapiens
cttccatatatattc

SEQ ID NO: 1447159 - DNA, 15 bp, Homo sapiens
acttccatatatatt

SEQ ID NO: 1447160 - DNA, 15 bp, Homo sapiens
aacttccatatatat

SEQ ID NO: 1447161 - DNA, 15 bp, Homo sapiens
taacttccatatata

SEQ ID NO: 1447162 - DNA, 15 bp, Homo sapiens
ataacttccatatat

SEQ ID NO: 1447163 - DNA, 15 bp, Homo sapiens
aataacttccatata

SEQ ID NO: 1447164 - DNA, 15 bp, Homo sapiens
gaataacttccatat

SEQ ID NO: 1447165 - DNA, 15 bp, Homo sapiens
ggaataacttccata

SEQ ID NO: 1447166 - DNA, 15 bp, Homo sapiens
tggaataacttccat

SEQ ID NO: 1447167 - DNA, 15 bp, Homo sapiens
ctggaataacttcca

SEQ ID NO: 1447168 - DNA, 15 bp, Homo sapiens
actggaataacttcc

SEQ ID NO: 1447169 - DNA, 15 bp, Homo sapiens
cactggaataacttc

SEQ ID NO: 1447170 - DNA, 15 bp, Homo sapiens
acactggaataactt

SEQ ID NO: 1447171 - DNA, 15 bp, Homo sapiens
aacactggaataact

SEQ ID NO: 1447172 - DNA, 15 bp, Homo sapiens
aaacactggaataac

SEQ ID NO: 1447173 - DNA, 15 bp, Homo sapiens
aaaacactggaataa

SEQ ID NO: 1447174 - DNA, 15 bp, Homo sapiens
aaaaacactggaata

SEQ ID NO: 1447175 - DNA, 15 bp, Homo sapiens
aaaaaacactggaat

SEQ ID NO: 1447176 - DNA, 15 bp, Homo sapiens
gaaaaaacactggaa

SEQ ID NO: 1447177 - DNA, 15 bp, Homo sapiens
agaaaaaacactgga

SEQ ID NO: 1447178 - DNA, 15 bp, Homo sapiens
gagaaaaaacactgg

SEQ ID NO: 1447179 - DNA, 15 bp, Homo sapiens
tgagaaaaaacactg

SEQ ID NO: 1447180 - DNA, 15 bp, Homo sapiens
ctgagaaaaaacact

SEQ ID NO: 1447181 - DNA, 15 bp, Homo sapiens
actgagaaaaaacac

SEQ ID NO: 1447182 - DNA, 15 bp, Homo sapiens
gactgagaaaaaaca

SEQ ID NO: 1447183 - DNA, 15 bp, Homo sapiens
agactgagaaaaaac

SEQ ID NO: 1447184 - DNA, 15 bp, Homo sapiens
cagactgagaaaaaa

SEQ ID NO: 1447185 - DNA, 15 bp, Homo sapiens
tcagactgagaaaaa

SEQ ID NO: 1447186 - DNA, 15 bp, Homo sapiens
gtcagactgagaaaa

SEQ ID NO: 1447187 - DNA, 15 bp, Homo sapiens
tgtcagactgagaaa

SEQ ID NO: 1447188 - DNA, 15 bp, Homo sapiens
atgtcagactgagaa

SEQ ID NO: 1447189 - DNA, 15 bp, Homo sapiens
gatgtcagactgaga

SEQ ID NO: 1447190 - DNA, 15 bp, Homo sapiens
ggatgtcagactgag

SEQ ID NO: 1447191 - DNA, 15 bp, Homo sapiens
tggatgtcagactga

SEQ ID NO: 1447192 - DNA, 15 bp, Homo sapiens
ttggatgtcagactg

SEQ ID NO: 1447193 - DNA, 15 bp, Homo sapiens
tttggatgtcagact

SEQ ID NO: 1447194 - DNA, 15 bp, Homo sapiens
atttggatgtcagac

SEQ ID NO: 1447195 - DNA, 15 bp, Homo sapiens
catttggatgtcaga

SEQ ID NO: 1447196 - DNA, 15 bp, Homo sapiens
ccatttggatgtcag

SEQ ID NO: 1447197 - DNA, 15 bp, Homo sapiens
gccatttggatgtca

SEQ ID NO: 1447198 - DNA, 15 bp, Homo sapiens
agccatttggatgtc

SEQ ID NO: 1447199 - DNA, 15 bp, Homo sapiens
cagccatttggatgt

SEQ ID NO: 1447200 - DNA, 15 bp, Homo sapiens
acagccatttggatg

SEQ ID NO: 1447201 - DNA, 15 bp, Homo sapiens
tacagccatttggat

SEQ ID NO: 1447202 - DNA, 15 bp, Homo sapiens
gtacagccatttgga

SEQ ID NO: 1447203 - DNA, 15 bp, Homo sapiens
tgtacagccatttgg

SEQ ID NO: 1447204 - DNA, 15 bp, Homo sapiens
atgtacagccatttg

SEQ ID NO: 1447205 - DNA, 15 bp, Homo sapiens
aatgtacagccattt

SEQ ID NO: 1447206 - DNA, 15 bp, Homo sapiens
taatgtacagccatt

SEQ ID NO: 1447207 - DNA, 15 bp, Homo sapiens
gtaatgtacagccat

SEQ ID NO: 1447208 - DNA, 15 bp, Homo sapiens
agtaatgtacagcca

SEQ ID NO: 1447209 - DNA, 15 bp, Homo sapiens
aagtaatgtacagcc

SEQ ID NO: 1447210 - DNA, 15 bp, Homo sapiens
taagtaatgtacagc

SEQ ID NO: 1447211 - DNA, 15 bp, Homo sapiens
ttaagtaatgtacag

SEQ ID NO: 1447212 - DNA, 15 bp, Homo sapiens
tttaagtaatgtaca

SEQ ID NO: 1447213 - DNA, 15 bp, Homo sapiens
ttttaagtaatgtac

SEQ ID NO: 1447214 - DNA, 15 bp, Homo sapiens
attttaagtaatgta

SEQ ID NO: 1447215 - DNA, 15 bp, Homo sapiens
gattttaagtaatgt

SEQ ID NO: 1447216 - DNA, 15 bp, Homo sapiens
agattttaagtaatg

SEQ ID NO: 1447217 - DNA, 15 bp, Homo sapiens
tagattttaagtaat

SEQ ID NO: 1447218 - DNA, 15 bp, Homo sapiens
gtagattttaagtaa

SEQ ID NO: 1447219 - DNA, 15 bp, Homo sapiens
tgtagattttaagta

SEQ ID NO: 1447220 - DNA, 15 bp, Homo sapiens
atgtagattttaagt

SEQ ID NO: 1447221 - DNA, 15 bp, Homo sapiens
aatgtagattttaag

SEQ ID NO: 1447222 - DNA, 15 bp, Homo sapiens
aaatgtagattttaa

SEQ ID NO: 1447223 - DNA, 15 bp, Homo sapiens
caaatgtagatttta

SEQ ID NO: 1447224 - DNA, 15 bp, Homo sapiens
tcaaatgtagatttt

SEQ ID NO: 1447225 - DNA, 15 bp, Homo sapiens
ctcaaatgtagattt

SEQ ID NO: 1447226 - DNA, 15 bp, Homo sapiens
tctcaaatgtagatt

SEQ ID NO: 1447227 - DNA, 15 bp, Homo sapiens
ctctcaaatgtagat

SEQ ID NO: 1447228 - DNA, 15 bp, Homo sapiens
actctcaaatgtaga

SEQ ID NO: 1447229 - DNA, 15 bp, Homo sapiens
gactctcaaatgtag

SEQ ID NO: 1447230 - DNA, 15 bp, Homo sapiens
agactctcaaatgta

SEQ ID NO: 1447231 - DNA, 15 bp, Homo sapiens
cagactctcaaatgt

SEQ ID NO: 1447232 - DNA, 15 bp, Homo sapiens
acagactctcaaatg

SEQ ID NO: 1447233 - DNA, 15 bp, Homo sapiens
aacagactctcaaat

SEQ ID NO: 1447234 - DNA, 15 bp, Homo sapiens
aaacagactctcaaa

SEQ ID NO: 1447235 - DNA, 15 bp, Homo sapiens
aaaacagactctcaa

SEQ ID NO: 1447236 - DNA, 15 bp, Homo sapiens
gaaaacagactctca

SEQ ID NO: 1447237 - DNA, 15 bp, Homo sapiens
agaaaacagactctc

SEQ ID NO: 1447238 - DNA, 15 bp, Homo sapiens
tagaaaacagactct

SEQ ID NO: 1447239 - DNA, 15 bp, Homo sapiens
ttagaaaacagactc

SEQ ID NO: 1447240 - DNA, 15 bp, Homo sapiens
attagaaaacagact

SEQ ID NO: 1447241 - DNA, 15 bp, Homo sapiens
cattagaaaacagac

SEQ ID NO: 1447242 - DNA, 15 bp, Homo sapiens
ccattagaaaacaga

SEQ ID NO: 1447243 - DNA, 15 bp, Homo sapiens
accattagaaaacag

SEQ ID NO: 1447244 - DNA, 15 bp, Homo sapiens
attaaccattagaaa

SEQ ID NO: 1447245 - DNA, 15 bp, Homo sapiens
gattaaccattagaa

SEQ ID NO: 1447246 - DNA, 15 bp, Homo sapiens
tgattaaccattaga

SEQ ID NO: 1447247 - DNA, 15 bp, Homo sapiens
ttgattaaccattag

SEQ ID NO: 1447248 - DNA, 15 bp, Homo sapiens
tttgattaaccatta

SEQ ID NO: 1447249 - DNA, 15 bp, Homo sapiens
ctttgattaaccatt

SEQ ID NO: 1447250 - DNA, 15 bp, Homo sapiens
actttgattaaccat

SEQ ID NO: 1447251 - DNA, 15 bp, Homo sapiens
cactttgattaacca

SEQ ID NO: 1447252 - DNA, 15 bp, Homo sapiens
acactttgattaacc

SEQ ID NO: 1447253 - DNA, 15 bp, Homo sapiens
aacactttgattaac

SEQ ID NO: 1447254 - DNA, 15 bp, Homo sapiens
aaacactttgattaa

SEQ ID NO: 1447255 - DNA, 15 bp, Homo sapiens
aaaacactttgatta

SEQ ID NO: 1447256 - DNA, 15 bp, Homo sapiens
gaaaacactttgatt

SEQ ID NO: 1447257 - DNA, 15 bp, Homo sapiens
tgaaaacactttgat

SEQ ID NO: 1447258 - DNA, 15 bp, Homo sapiens
atgaaaacactttga

SEQ ID NO: 1447259 - DNA, 15 bp, Homo sapiens
catgaaaacactttg

SEQ ID NO: 1447260 - DNA, 15 bp, Homo sapiens
gcatgaaaacacttt

SEQ ID NO: 1447261 - DNA, 15 bp, Homo sapiens
agcatgaaaacactt

SEQ ID NO: 1447262 - DNA, 15 bp, Homo sapiens
aagcatgaaaacact

SEQ ID NO: 1447263 - DNA, 15 bp, Homo sapiens
caagcatgaaaacac

SEQ ID NO: 1447264 - DNA, 15 bp, Homo sapiens
gcaagcatgaaaaca

SEQ ID NO: 1447265 - DNA, 15 bp, Homo sapiens
tgcaagcatgaaaac

SEQ ID NO: 1447266 - DNA, 15 bp, Homo sapiens
ttgcaagcatgaaaa

SEQ ID NO: 1447267 - DNA, 15 bp, Homo sapiens
tttgcaagcatgaaa

SEQ ID NO: 1447268 - DNA, 15 bp, Homo sapiens
atttgcaagcatgaa

SEQ ID NO: 1447269 - DNA, 15 bp, Homo sapiens
aatttgcaagcatga

SEQ ID NO: 1447270 - DNA, 15 bp, Homo sapiens
gaatttgcaagcatg

SEQ ID NO: 1447271 - DNA, 15 bp, Homo sapiens
tgaatttgcaagcat

SEQ ID NO: 1447272 - DNA, 15 bp, Homo sapiens
atgaatttgcaagca

SEQ ID NO: 1447273 - DNA, 15 bp, Homo sapiens
gatgaatttgcaagc

SEQ ID NO: 1447274 - DNA, 15 bp, Homo sapiens
agatgaatttgcaag

SEQ ID NO: 1447275 - DNA, 15 bp, Homo sapiens
aagatgaatttgcaa

SEQ ID NO: 1447276 - DNA, 15 bp, Homo sapiens
gaagatgaatttgca

SEQ ID NO: 1447277 - DNA, 15 bp, Homo sapiens
agaagatgaatttgc

SEQ ID NO: 1447278 - DNA, 15 bp, Homo sapiens
tagaagatgaatttg

SEQ ID NO: 1447279 - DNA, 15 bp, Homo sapiens
ttagaagatgaattt

SEQ ID NO: 1447280 - DNA, 15 bp, Homo sapiens
gttagaagatgaatt

SEQ ID NO: 1447281 - DNA, 15 bp, Homo sapiens
tgttagaagatgaat

SEQ ID NO: 1447282 - DNA, 15 bp, Homo sapiens
ctgttagaagatgaa

SEQ ID NO: 1447283 - DNA, 15 bp, Homo sapiens
gctgttagaagatga

SEQ ID NO: 1447284 - DNA, 15 bp, Homo sapiens
agctgttagaagatg

SEQ ID NO: 1447285 - DNA, 15 bp, Homo sapiens
aagctgttagaagat

SEQ ID NO: 1447286 - DNA, 15 bp, Homo sapiens
aaagctgttagaaga

SEQ ID NO: 1447287 - DNA, 15 bp, Homo sapiens
aaaagctgttagaag

SEQ ID NO: 1447288 - DNA, 15 bp, Homo sapiens
taaaagctgttagaa

SEQ ID NO: 1447289 - DNA, 15 bp, Homo sapiens
ataaaagctgttaga

SEQ ID NO: 1447290 - DNA, 15 bp, Homo sapiens
gataaaagctgttag

SEQ ID NO: 1447291 - DNA, 15 bp, Homo sapiens
tgataaaagctgtta

SEQ ID NO: 1447292 - DNA, 15 bp, Homo sapiens
atgataaaagctgtt

SEQ ID NO: 1447293 - DNA, 15 bp, Homo sapiens
gatgataaaagctgt

SEQ ID NO: 1447294 - DNA, 15 bp, Homo sapiens
cgatgataaaagctg

SEQ ID NO: 1447295 - DNA, 15 bp, Homo sapiens
acgatgataaaagct

SEQ ID NO: 1447296 - DNA, 15 bp, Homo sapiens
cacgatgataaaagc

SEQ ID NO: 1447297 - DNA, 15 bp, Homo sapiens
ccacgatgataaaag

SEQ ID NO: 1447298 - DNA, 15 bp, Homo sapiens
gccacgatgataaaa

SEQ ID NO: 1447299 - DNA, 15 bp, Homo sapiens
tgccacgatgataaa

SEQ ID NO: 1447300 - DNA, 15 bp, Homo sapiens
atgccacgatgataa

SEQ ID NO: 1447301 - DNA, 15 bp, Homo sapiens
aatgccacgatgata

SEQ ID NO: 1447302 - DNA, 15 bp, Homo sapiens
taatgccacgatgat

SEQ ID NO: 1447303 - DNA, 15 bp, Homo sapiens
ttaatgccacgatga

SEQ ID NO: 1447304 - DNA, 15 bp, Homo sapiens
tttaatgccacgatg

SEQ ID NO: 1447305 - DNA, 15 bp, Homo sapiens
ctttaatgccacgat

SEQ ID NO: 1447306 - DNA, 15 bp, Homo sapiens
actttaatgccacga

SEQ ID NO: 1447307 - DNA, 15 bp, Homo sapiens
aactttaatgccacg

SEQ ID NO: 1447308 - DNA, 15 bp, Homo sapiens
taactttaatgccac

SEQ ID NO: 1447309 - DNA, 15 bp, Homo sapiens
ttaactttaatgcca

SEQ ID NO: 1447310 - DNA, 15 bp, Homo sapiens
cttaactttaatgcc

SEQ ID NO: 1447311 - DNA, 15 bp, Homo sapiens
tcttaactttaatgc

SEQ ID NO: 1447312 - DNA, 15 bp, Homo sapiens
ttcttaactttaatg

SEQ ID NO: 1447313 - DNA, 15 bp, Homo sapiens
attcttaactttaat

SEQ ID NO: 1447314 - DNA, 15 bp, Homo sapiens
aattcttaactttaa

SEQ ID NO: 1447315 - DNA, 15 bp, Homo sapiens
aaattcttaacttta

SEQ ID NO: 1447316 - DNA, 15 bp, Homo sapiens
caaattcttaacttt

SEQ ID NO: 1447317 - DNA, 15 bp, Homo sapiens
tcaaattcttaactt

SEQ ID NO: 1447318 - DNA, 15 bp, Homo sapiens
atcaaattcttaact

SEQ ID NO: 1447319 - DNA, 15 bp, Homo sapiens
catcaaattcttaac

SEQ ID NO: 1447320 - DNA, 15 bp, Homo sapiens
taacatcaaattctt

SEQ ID NO: 1447321 - DNA, 15 bp, Homo sapiens
ataacatcaaattct

SEQ ID NO: 1447322 - DNA, 15 bp, Homo sapiens
aataacatcaaattc

SEQ ID NO: 1447323 - DNA, 15 bp, Homo sapiens
taataacatcaaatt

SEQ ID NO: 1447324 - DNA, 15 bp, Homo sapiens
ttaataacatcaaat

SEQ ID NO: 1447325 - DNA, 15 bp, Homo sapiens
tttaataacatcaaa

SEQ ID NO: 1447326 - DNA, 15 bp, Homo sapiens
atttaataacatcaa

SEQ ID NO: 1447327 - DNA, 15 bp, Homo sapiens
gatttaataacatca

SEQ ID NO: 1447328 - DNA, 15 bp, Homo sapiens
tgatttaataacatc

SEQ ID NO: 1447329 - DNA, 15 bp, Homo sapiens
gtgatttaataacat

SEQ ID NO: 1447330 - DNA, 15 bp, Homo sapiens
agtgatttaataaca

SEQ ID NO: 1447331 - DNA, 15 bp, Homo sapiens
aagtgatttaataac

SEQ ID NO: 1447332 - DNA, 15 bp, Homo sapiens
aaagtgatttaataa

SEQ ID NO: 1447333 - DNA, 15 bp, Homo sapiens
aaaagtgatttaata

SEQ ID NO: 1447334 - DNA, 15 bp, Homo sapiens
gaaaagtgatttaat

SEQ ID NO: 1447335 - DNA, 15 bp, Homo sapiens
tgaaaagtgatttaa

SEQ ID NO: 1447336 - DNA, 15 bp, Homo sapiens
atgaaaagtgattta

SEQ ID NO: 1447337 - DNA, 15 bp, Homo sapiens
aatgaaaagtgattt

SEQ ID NO: 1447338 - DNA, 15 bp, Homo sapiens
aaatgaaaagtgatt

SEQ ID NO: 1447339 - DNA, 15 bp, Homo sapiens
taaatgaaaagtgat

SEQ ID NO: 1447340 - DNA, 15 bp, Homo sapiens
ttaaatgaaaagtga

SEQ ID NO: 1447341 - DNA, 15 bp, Homo sapiens
cttaaatgaaaagtg

SEQ ID NO: 1447342 - DNA, 15 bp, Homo sapiens
tcttaaatgaaaagt

SEQ ID NO: 1447343 - DNA, 15 bp, Homo sapiens
atcttaaatgaaaag

SEQ ID NO: 1447344 - DNA, 15 bp, Homo sapiens
tatcttaaatgaaaa

SEQ ID NO: 1447345 - DNA, 15 bp, Homo sapiens
atatcttaaatgaaa

SEQ ID NO: 1447346 - DNA, 15 bp, Homo sapiens
aatatcttaaatgaa

SEQ ID NO: 1447347 - DNA, 15 bp, Homo sapiens
aaatatcttaaatga

SEQ ID NO: 1447348 - DNA, 15 bp, Homo sapiens
aaaatatcttaaatg

SEQ ID NO: 1447349 - DNA, 15 bp, Homo sapiens
taaaatatcttaaat

SEQ ID NO: 1447350 - DNA, 15 bp, Homo sapiens
ataaaatatcttaaa

SEQ ID NO: 1447351 - DNA, 15 bp, Homo sapiens
cataaaatatcttaa

SEQ ID NO: 1447352 - DNA, 15 bp, Homo sapiens
gcataaaatatctta

SEQ ID NO: 1447353 - DNA, 15 bp, Homo sapiens
tgcataaaatatctt

SEQ ID NO: 1447354 - DNA, 15 bp, Homo sapiens
ctgcataaaatatct

SEQ ID NO: 1447355 - DNA, 15 bp, Homo sapiens
gctgcataaaatatc

SEQ ID NO: 1447356 - DNA, 15 bp, Homo sapiens
ggctgcataaaatat

SEQ ID NO: 1447357 - DNA, 15 bp, Homo sapiens
aggctgcataaaata

SEQ ID NO: 1447358 - DNA, 15 bp, Homo sapiens
aaggctgcataaaat

SEQ ID NO: 1447359 - DNA, 15 bp, Homo sapiens
gaaggctgcataaaa

SEQ ID NO: 1447360 - DNA, 15 bp, Homo sapiens
tgaaggctgcataaa

SEQ ID NO: 1447361 - DNA, 15 bp, Homo sapiens
ttgaaggctgcataa

SEQ ID NO: 1447362 - DNA, 15 bp, Homo sapiens
tttgaaggctgcata

SEQ ID NO: 1447363 - DNA, 15 bp, Homo sapiens
gtttgaaggctgcat

SEQ ID NO: 1447364 - DNA, 15 bp, Homo sapiens
tgtttgaaggctgca

SEQ ID NO: 1447365 - DNA, 15 bp, Homo sapiens
ttgtttgaaggctgc

SEQ ID NO: 1447366 - DNA, 15 bp, Homo sapiens
tttgtttgaaggctg

SEQ ID NO: 1447367 - DNA, 15 bp, Homo sapiens
ctttgtttgaaggct

SEQ ID NO: 1447368 - DNA, 15 bp, Homo sapiens
gctttgtttgaaggc

SEQ ID NO: 1447369 - DNA, 15 bp, Homo sapiens
ggctttgtttgaagg

SEQ ID NO: 1447370 - DNA, 15 bp, Homo sapiens
gggctttgtttgaag

SEQ ID NO: 1447371 - DNA, 15 bp, Homo sapiens
agggctttgtttgaa

SEQ ID NO: 1447372 - DNA, 15 bp, Homo sapiens
cagggctttgtttga

SEQ ID NO: 1447373 - DNA, 15 bp, Homo sapiens
tcagggctttgtttg

SEQ ID NO: 1447374 - DNA, 15 bp, Homo sapiens
ctcagggctttgttt

SEQ ID NO: 1447375 - DNA, 15 bp, Homo sapiens
cctcagggctttgtt

SEQ ID NO: 1447376 - DNA, 15 bp, Homo sapiens
ccctcagggctttgt

SEQ ID NO: 1447377 - DNA, 15 bp, Homo sapiens
tccctcagggctttg

SEQ ID NO: 1447378 - DNA, 15 bp, Homo sapiens
ttccctcagggcttt

SEQ ID NO: 1447379 - DNA, 15 bp, Homo sapiens
attccctcagggctt

SEQ ID NO: 1447380 - DNA, 15 bp, Homo sapiens
aattccctcagggct

SEQ ID NO: 1447381 - DNA, 15 bp, Homo sapiens
aaattccctcagggc

SEQ ID NO: 1447382 - DNA, 15 bp, Homo sapiens
caaattccctcaggg

SEQ ID NO: 1447383 - DNA, 15 bp, Homo sapiens
ccaaattccctcagg

SEQ ID NO: 1447384 - DNA, 15 bp, Homo sapiens
cccaaattccctcag

SEQ ID NO: 1447385 - DNA, 15 bp, Homo sapiens
tcccaaattccctca

SEQ ID NO: 1447386 - DNA, 15 bp, Homo sapiens
ctcccaaattccctc

SEQ ID NO: 1447387 - DNA, 15 bp, Homo sapiens
cctcccaaattccct

SEQ ID NO: 1447388 - DNA, 15 bp, Homo sapiens
tcctcccaaattccc

SEQ ID NO: 1447389 - DNA, 15 bp, Homo sapiens
ttcctcccaaattcc

SEQ ID NO: 1447390 - DNA, 15 bp, Homo sapiens
tttcctcccaaattc

SEQ ID NO: 1447391 - DNA, 15 bp, Homo sapiens
ttttcctcccaaatt

SEQ ID NO: 1447392 - DNA, 15 bp, Homo sapiens
tttttcctcccaaat

SEQ ID NO: 1447393 - DNA, 15 bp, Homo sapiens
atttttcctcccaaa

SEQ ID NO: 1447394 - DNA, 15 bp, Homo sapiens
tatttttcctcccaa

SEQ ID NO: 1447395 - DNA, 15 bp, Homo sapiens
gtatttttcctccca

SEQ ID NO: 1447396 - DNA, 15 bp, Homo sapiens
tgtatttttcctccc

SEQ ID NO: 1447397 - DNA, 15 bp, Homo sapiens
ttgtatttttcctcc

SEQ ID NO: 1447398 - DNA, 15 bp, Homo sapiens
cttgtatttttcctc

SEQ ID NO: 1447399 - DNA, 15 bp, Homo sapiens
tcttgtatttttcct

SEQ ID NO: 1447400 - DNA, 15 bp, Homo sapiens
ttcttgtatttttcc

SEQ ID NO: 1447401 - DNA, 15 bp, Homo sapiens
gttcttgtatttttc

SEQ ID NO: 1447402 - DNA, 15 bp, Homo sapiens
ggttcttgtattttt

SEQ ID NO: 1447403 - DNA, 15 bp, Homo sapiens
cggttcttgtatttt

SEQ ID NO: 1447404 - DNA, 15 bp, Homo sapiens
acggttcttgtattt

SEQ ID NO: 1447405 - DNA, 15 bp, Homo sapiens
tacggttcttgtatt

SEQ ID NO: 1447406 - DNA, 15 bp, Homo sapiens
ctacggttcttgtat

SEQ ID NO: 1447407 - DNA, 15 bp, Homo sapiens
cctacggttcttgta

SEQ ID NO: 1447408 - DNA, 15 bp, Homo sapiens
tcctacggttcttgt

SEQ ID NO: 1447409 - DNA, 15 bp, Homo sapiens
gtcctacggttcttg

SEQ ID NO: 1447410 - DNA, 15 bp, Homo sapiens
tgtcctacggttctt

SEQ ID NO: 1447411 - DNA, 15 bp, Homo sapiens
ttgtcctacggttct

SEQ ID NO: 1447412 - DNA, 15 bp, Homo sapiens
cttgtcctacggttc

SEQ ID NO: 1447413 - DNA, 15 bp, Homo sapiens
acttgtcctacggtt

SEQ ID NO: 1447414 - DNA, 15 bp, Homo sapiens
tacttgtcctacggt

SEQ ID NO: 1447415 - DNA, 15 bp, Homo sapiens
ctacttgtcctacgg

SEQ ID NO: 1447416 - DNA, 15 bp, Homo sapiens
cctacttgtcctacg

SEQ ID NO: 1447417 - DNA, 15 bp, Homo sapiens
acctacttgtcctac

SEQ ID NO: 1447418 - DNA, 15 bp, Homo sapiens
gacctacttgtccta

SEQ ID NO: 1447419 - DNA, 15 bp, Homo sapiens
tgacctacttgtcct

SEQ ID NO: 1447420 - DNA, 15 bp, Homo sapiens
atgacctacttgtcc

SEQ ID NO: 1447421 - DNA, 15 bp, Homo sapiens
tatgacctacttgtc

SEQ ID NO: 1447422 - DNA, 15 bp, Homo sapiens
ctatgacctacttgt

SEQ ID NO: 1447423 - DNA, 15 bp, Homo sapiens
tctatgacctacttg

SEQ ID NO: 1447424 - DNA, 15 bp, Homo sapiens
ctctatgacctactt

SEQ ID NO: 1447425 - DNA, 15 bp, Homo sapiens
actctatgacctact

SEQ ID NO: 1447426 - DNA, 15 bp, Homo sapiens
cactctatgacctac

SEQ ID NO: 1447427 - DNA, 15 bp, Homo sapiens
gcactctatgaccta

SEQ ID NO: 1447428 - DNA, 15 bp, Homo sapiens
tgcactctatgacct

SEQ ID NO: 1447429 - DNA, 15 bp, Homo sapiens
ctgcactctatgacc

SEQ ID NO: 1447430 - DNA, 15 bp, Homo sapiens
gctgcactctatgac

SEQ ID NO: 1447431 - DNA, 15 bp, Homo sapiens
tgctgcactctatga

SEQ ID NO: 1447432 - DNA, 15 bp, Homo sapiens
atgctgcactctatg

SEQ ID NO: 1447433 - DNA, 15 bp, Homo sapiens
gatgctgcactctat

SEQ ID NO: 1447434 - DNA, 15 bp, Homo sapiens
tgatgctgcactcta

SEQ ID NO: 1447435 - DNA, 15 bp, Homo sapiens
atgatgctgcactct

SEQ ID NO: 1447436 - DNA, 15 bp, Homo sapiens
gatgatgctgcactc

SEQ ID NO: 1447437 - DNA, 15 bp, Homo sapiens
tgatgatgctgcact

SEQ ID NO: 1447438 - DNA, 15 bp, Homo sapiens
ctgatgatgctgcac

SEQ ID NO: 1447439 - DNA, 15 bp, Homo sapiens
tctgatgatgctgca

SEQ ID NO: 1447440 - DNA, 15 bp, Homo sapiens
atctgatgatgctgc

SEQ ID NO: 1447441 - DNA, 15 bp, Homo sapiens
catctgatgatgctg

SEQ ID NO: 1447442 - DNA, 15 bp, Homo sapiens
ccatctgatgatgct

SEQ ID NO: 1447443 - DNA, 15 bp, Homo sapiens
accatctgatgatgc

SEQ ID NO: 1447444 - DNA, 15 bp, Homo sapiens
caccatctgatgatg

SEQ ID NO: 1447445 - DNA, 15 bp, Homo sapiens
ccaccatctgatgat

SEQ ID NO: 1447446 - DNA, 15 bp, Homo sapiens
tccaccatctgatga

SEQ ID NO: 1447447 - DNA, 15 bp, Homo sapiens
ttccaccatctgatg

SEQ ID NO: 1447448 - DNA, 15 bp, Homo sapiens
attccaccatctgat

SEQ ID NO: 1447449 - DNA, 15 bp, Homo sapiens
cattccaccatctga

SEQ ID NO: 1447450 - DNA, 15 bp, Homo sapiens
gcattccaccatctg

SEQ ID NO: 1447451 - DNA, 15 bp, Homo sapiens
tgcattccaccatct

SEQ ID NO: 1447452 - DNA, 15 bp, Homo sapiens
ctgcattccaccatc

SEQ ID NO: 1447453 - DNA, 15 bp, Homo sapiens
cctgcattccaccat

SEQ ID NO: 1447454 - DNA, 15 bp, Homo sapiens
ccctgcattccacca

SEQ ID NO: 1447455 - DNA, 15 bp, Homo sapiens
gccctgcattccacc

SEQ ID NO: 1447456 - DNA, 15 bp, Homo sapiens
tgccctgcattccac

SEQ ID NO: 1447457 - DNA, 15 bp, Homo sapiens
ctgccctgcattcca

SEQ ID NO: 1447458 - DNA, 15 bp, Homo sapiens
cctgccctgcattcc

SEQ ID NO: 1447459 - DNA, 15 bp, Homo sapiens
ccctgccctgcattc

SEQ ID NO: 1447460 - DNA, 15 bp, Homo sapiens
gccctgccctgcatt

SEQ ID NO: 1447461 - DNA, 15 bp, Homo sapiens
agccctgccctgcat

SEQ ID NO: 1447462 - DNA, 15 bp, Homo sapiens
cagccctgccctgca

SEQ ID NO: 1447463 - DNA, 15 bp, Homo sapiens
acagccctgccctgc

SEQ ID NO: 1447464 - DNA, 15 bp, Homo sapiens
cacagccctgccctg

SEQ ID NO: 1447465 - DNA, 15 bp, Homo sapiens
gcacagccctgccct

SEQ ID NO: 1447466 - DNA, 15 bp, Homo sapiens
cgcacagccctgccc

SEQ ID NO: 1447467 - DNA, 15 bp, Homo sapiens
acgcacagccctgcc

SEQ ID NO: 1447468 - DNA, 15 bp, Homo sapiens
gacgcacagccctgc

SEQ ID NO: 1447469 - DNA, 15 bp, Homo sapiens
tgacgcacagccctg

SEQ ID NO: 1447470 - DNA, 15 bp, Homo sapiens
ctgacgcacagccct

SEQ ID NO: 1447471 - DNA, 15 bp, Homo sapiens
cctgacgcacagccc

SEQ ID NO: 1447472 - DNA, 15 bp, Homo sapiens
tcctgacgcacagcc

SEQ ID NO: 1447473 - DNA, 15 bp, Homo sapiens
ctcctgacgcacagc

SEQ ID NO: 1447474 - DNA, 15 bp, Homo sapiens
tctcctgacgcacag

SEQ ID NO: 1447475 - DNA, 15 bp, Homo sapiens
gtctcctgacgcaca

SEQ ID NO: 1447476 - DNA, 15 bp, Homo sapiens
agtctcctgacgcac

SEQ ID NO: 1447477 - DNA, 15 bp, Homo sapiens
gagtctcctgacgca

SEQ ID NO: 1447478 - DNA, 15 bp, Homo sapiens
ggagtctcctgacgc

SEQ ID NO: 1447479 - DNA, 15 bp, Homo sapiens
tggagtctcctgacg

SEQ ID NO: 1447480 - DNA, 15 bp, Homo sapiens
gtggagtctcctgac

SEQ ID NO: 1447481 - DNA, 15 bp, Homo sapiens
agtggagtctcctga

SEQ ID NO: 1447482 - DNA, 15 bp, Homo sapiens
gagtggagtctcctg

SEQ ID NO: 1447483 - DNA, 15 bp, Homo sapiens
ggagtggagtctcct

SEQ ID NO: 1447484 - DNA, 15 bp, Homo sapiens
tggagtggagtctcc

SEQ ID NO: 1447485 - DNA, 15 bp, Homo sapiens
atggagtggagtctc

SEQ ID NO: 1447486 - DNA, 15 bp, Homo sapiens
aatggagtggagtct

SEQ ID NO: 1447487 - DNA, 15 bp, Homo sapiens
aaatggagtggagtc

SEQ ID NO: 1447488 - DNA, 15 bp, Homo sapiens
gaaatggagtggagt

SEQ ID NO: 1447489 - DNA, 15 bp, Homo sapiens
agaaatggagtggag

SEQ ID NO: 1447490 - DNA, 15 bp, Homo sapiens
tagaaatggagtgga

SEQ ID NO: 1447491 - DNA, 15 bp, Homo sapiens
atagaaatggagtgg

SEQ ID NO: 1447492 - DNA, 15 bp, Homo sapiens
gatagaaatggagtg

SEQ ID NO: 1447493 - DNA, 15 bp, Homo sapiens
ggatagaaatggagt

SEQ ID NO: 1447494 - DNA, 15 bp, Homo sapiens
tggatagaaatggag

SEQ ID NO: 1447495 - DNA, 15 bp, Homo sapiens
atggatagaaatgga

SEQ ID NO: 1447496 - DNA, 15 bp, Homo sapiens
catggatagaaatgg

SEQ ID NO: 1447497 - DNA, 15 bp, Homo sapiens
ccatggatagaaatg

SEQ ID NO: 1447498 - DNA, 15 bp, Homo sapiens
gccatggatagaaat

SEQ ID NO: 1447499 - DNA, 15 bp, Homo sapiens
agccatggatagaaa

SEQ ID NO: 1447500 - DNA, 15 bp, Homo sapiens
gagccatggatagaa

SEQ ID NO: 1447501 - DNA, 15 bp, Homo sapiens
agagccatggataga

SEQ ID NO: 1447502 - DNA, 15 bp, Homo sapiens
gagagccatggatag

SEQ ID NO: 1447503 - DNA, 15 bp, Homo sapiens
agagagccatggata

SEQ ID NO: 1447504 - DNA, 15 bp, Homo sapiens
aagagagccatggat

SEQ ID NO: 1447505 - DNA, 15 bp, Homo sapiens
gaagagagccatgga

SEQ ID NO: 1447506 - DNA, 15 bp, Homo sapiens
cgaagagagccatgg

SEQ ID NO: 1447507 - DNA, 15 bp, Homo sapiens
acgaagagagccatg

SEQ ID NO: 1447508 - DNA, 15 bp, Homo sapiens
cacgaagagagccat

SEQ ID NO: 1447509 - DNA, 15 bp, Homo sapiens
tcacgaagagagcca

SEQ ID NO: 1447510 - DNA, 15 bp, Homo sapiens
gtcacgaagagagcc

SEQ ID NO: 1447511 - DNA, 15 bp, Homo sapiens
agtcacgaagagagc

SEQ ID NO: 1447512 - DNA, 15 bp, Homo sapiens
aagtcacgaagagag

SEQ ID NO: 1447513 - DNA, 15 bp, Homo sapiens
taagtcacgaagaga

SEQ ID NO: 1447514 - DNA, 15 bp, Homo sapiens
ctaagtcacgaagag

SEQ ID NO: 1447515 - DNA, 15 bp, Homo sapiens
actaagtcacgaaga

SEQ ID NO: 1447516 - DNA, 15 bp, Homo sapiens
cactaagtcacgaag

SEQ ID NO: 1447517 - DNA, 15 bp, Homo sapiens
tcactaagtcacgaa

SEQ ID NO: 1447518 - DNA, 15 bp, Homo sapiens
atcactaagtcacga

SEQ ID NO: 1447519 - DNA, 15 bp, Homo sapiens
aatcactaagtcacg

SEQ ID NO: 1447520 - DNA, 15 bp, Homo sapiens
caatcactaagtcac

SEQ ID NO: 1447521 - DNA, 15 bp, Homo sapiens
tcaatcactaagtca

SEQ ID NO: 1447522 - DNA, 15 bp, Homo sapiens
gtcaatcactaagtc

SEQ ID NO: 1447523 - DNA, 15 bp, Homo sapiens
ggtcaatcactaagt

SEQ ID NO: 1447524 - DNA, 15 bp, Homo sapiens
aggtcaatcactaag

SEQ ID NO: 1447525 - DNA, 15 bp, Homo sapiens
aaggtcaatcactaa

SEQ ID NO: 1447526 - DNA, 15 bp, Homo sapiens
caaggtcaatcacta

SEQ ID NO: 1447527 - DNA, 15 bp, Homo sapiens
ccaaggtcaatcact

SEQ ID NO: 1447528 - DNA, 15 bp, Homo sapiens
cccaaggtcaatcac

SEQ ID NO: 1447529 - DNA, 15 bp, Homo sapiens
gcccaaggtcaatca

SEQ ID NO: 1447530 - DNA, 15 bp, Homo sapiens
agcccaaggtcaatc

SEQ ID NO: 1447531 - DNA, 15 bp, Homo sapiens
tagcccaaggtcaat

SEQ ID NO: 1447532 - DNA, 15 bp, Homo sapiens
gtagcccaaggtcaa

SEQ ID NO: 1447533 - DNA, 15 bp, Homo sapiens
agtagcccaaggtca

SEQ ID NO: 1447534 - DNA, 15 bp, Homo sapiens
aagtagcccaaggtc

SEQ ID NO: 1447535 - DNA, 15 bp, Homo sapiens
taagtagcccaaggt

SEQ ID NO: 1447536 - DNA, 15 bp, Homo sapiens
ataagtagcccaagg

SEQ ID NO: 1447537 - DNA, 15 bp, Homo sapiens
gataagtagcccaag

SEQ ID NO: 1447538 - DNA, 15 bp, Homo sapiens
tgataagtagcccaa

SEQ ID NO: 1447539 - DNA, 15 bp, Homo sapiens
ttgataagtagccca

SEQ ID NO: 1447540 - DNA, 15 bp, Homo sapiens
tttgataagtagccc

SEQ ID NO: 1447541 - DNA, 15 bp, Homo sapiens
ctttgataagtagcc

SEQ ID NO: 1447542 - DNA, 15 bp, Homo sapiens
tctttgataagtagc

SEQ ID NO: 1447543 - DNA, 15 bp, Homo sapiens
ctctttgataagtag

SEQ ID NO: 1447544 - DNA, 15 bp, Homo sapiens
gctctttgataagta

SEQ ID NO: 1447545 - DNA, 15 bp, Homo sapiens
agctctttgataagt

SEQ ID NO: 1447546 - DNA, 15 bp, Homo sapiens
gagctctttgataag

SEQ ID NO: 1447547 - DNA, 15 bp, Homo sapiens
agagctctttgataa

SEQ ID NO: 1447548 - DNA, 15 bp, Homo sapiens
aagagctctttgata

SEQ ID NO: 1447549 - DNA, 15 bp, Homo sapiens
caagagctctttgat

SEQ ID NO: 1447550 - DNA, 15 bp, Homo sapiens
gcaagagctctttga

SEQ ID NO: 1447551 - DNA, 15 bp, Homo sapiens
ggcaagagctctttg

SEQ ID NO: 1447552 - DNA, 15 bp, Homo sapiens
aggcaagagctcttt

SEQ ID NO: 1447553 - DNA, 15 bp, Homo sapiens
gaggcaagagctctt

SEQ ID NO: 1447554 - DNA, 15 bp, Homo sapiens
tgaggcaagagctct

SEQ ID NO: 1447555 - DNA, 15 bp, Homo sapiens
ctgaggcaagagctc

SEQ ID NO: 1447556 - DNA, 15 bp, Homo sapiens
actgaggcaagagct

SEQ ID NO: 1447557 - DNA, 15 bp, Homo sapiens
aactgaggcaagagc

SEQ ID NO: 1447558 - DNA, 15 bp, Homo sapiens
aaactgaggcaagag

SEQ ID NO: 1447559 - DNA, 15 bp, Homo sapiens
gaaactgaggcaaga

SEQ ID NO: 1447560 - DNA, 15 bp, Homo sapiens
tgaaactgaggcaag

SEQ ID NO: 1447561 - DNA, 15 bp, Homo sapiens
atgaaactgaggcaa

SEQ ID NO: 1447562 - DNA, 15 bp, Homo sapiens
gatgaaactgaggca

SEQ ID NO: 1447563 - DNA, 15 bp, Homo sapiens
agatgaaactgaggc

SEQ ID NO: 1447564 - DNA, 15 bp, Homo sapiens
aagatgaaactgagg

SEQ ID NO: 1447565 - DNA, 15 bp, Homo sapiens
taagatgaaactgag

SEQ ID NO: 1447566 - DNA, 15 bp, Homo sapiens
ctaagatgaaactga

SEQ ID NO: 1447567 - DNA, 15 bp, Homo sapiens
tctaagatgaaactg

SEQ ID NO: 1447568 - DNA, 15 bp, Homo sapiens
atctaagatgaaact

SEQ ID NO: 1447569 - DNA, 15 bp, Homo sapiens
tatctaagatgaaac

SEQ ID NO: 1447570 - DNA, 15 bp, Homo sapiens
ttatctaagatgaaa

SEQ ID NO: 1447571 - DNA, 15 bp, Homo sapiens
tttatctaagatgaa

SEQ ID NO: 1447572 - DNA, 15 bp, Homo sapiens
ttttatctaagatga

SEQ ID NO: 1447573 - DNA, 15 bp, Homo sapiens
attttatctaagatg

SEQ ID NO: 1447574 - DNA, 15 bp, Homo sapiens
cattttatctaagat

SEQ ID NO: 1447575 - DNA, 15 bp, Homo sapiens
ccattttatctaaga

SEQ ID NO: 1447576 - DNA, 15 bp, Homo sapiens
cccattttatctaag

SEQ ID NO: 1447577 - DNA, 15 bp, Homo sapiens
ccccattttatctaa

SEQ ID NO: 1447578 - DNA, 15 bp, Homo sapiens
gccccattttatcta

SEQ ID NO: 1447579 - DNA, 15 bp, Homo sapiens
agccccattttatct

SEQ ID NO: 1447580 - DNA, 15 bp, Homo sapiens
tagccccattttatc

SEQ ID NO: 1447581 - DNA, 15 bp, Homo sapiens
ctagccccattttat

SEQ ID NO: 1447582 - DNA, 15 bp, Homo sapiens
tctagccccatttta

SEQ ID NO: 1447583 - DNA, 15 bp, Homo sapiens
ttctagccccatttt

SEQ ID NO: 1447584 - DNA, 15 bp, Homo sapiens
cttctagccccattt

SEQ ID NO: 1447585 - DNA, 15 bp, Homo sapiens
acttctagccccatt

SEQ ID NO: 1447586 - DNA, 15 bp, Homo sapiens
gacttctagccccat

SEQ ID NO: 1447587 - DNA, 15 bp, Homo sapiens
tgacttctagcccca

SEQ ID NO: 1447588 - DNA, 15 bp, Homo sapiens
gtgacttctagcccc

SEQ ID NO: 1447589 - DNA, 15 bp, Homo sapiens
ggtgacttctagccc

SEQ ID NO: 1447590 - DNA, 15 bp, Homo sapiens
cggtgacttctagcc

SEQ ID NO: 1447591 - DNA, 15 bp, Homo sapiens
ccggtgacttctagc

SEQ ID NO: 1447592 - DNA, 15 bp, Homo sapiens
tccggtgacttctag

SEQ ID NO: 1447593 - DNA, 15 bp, Homo sapiens
ttccggtgacttcta

SEQ ID NO: 1447594 - DNA, 15 bp, Homo sapiens
tttccggtgacttct

SEQ ID NO: 1447595 - DNA, 15 bp, Homo sapiens
gtttccggtgacttc

SEQ ID NO: 1447596 - DNA, 15 bp, Homo sapiens
tgtttccggtgactt

SEQ ID NO: 1447597 - DNA, 15 bp, Homo sapiens
gtgtttccggtgact

SEQ ID NO: 1447598 - DNA, 15 bp, Homo sapiens
tgtgtttccggtgac

SEQ ID NO: 1447599 - DNA, 15 bp, Homo sapiens
atgtgtttccggtga

SEQ ID NO: 1447600 - DNA, 15 bp, Homo sapiens
catgtgtttccggtg

SEQ ID NO: 1447601 - DNA, 15 bp, Homo sapiens
acatgtgtttccggt

SEQ ID NO: 1447602 - DNA, 15 bp, Homo sapiens
gacatgtgtttccgg

SEQ ID NO: 1447603 - DNA, 15 bp, Homo sapiens
tgacatgtgtttccg

SEQ ID NO: 1447604 - DNA, 15 bp, Homo sapiens
ttgacatgtgtttcc

SEQ ID NO: 1447605 - DNA, 15 bp, Homo sapiens
tttgacatgtgtttc

SEQ ID NO: 1447606 - DNA, 15 bp, Homo sapiens
atttgacatgtgttt

SEQ ID NO: 1447607 - DNA, 15 bp, Homo sapiens
catttgacatgtgtt

SEQ ID NO: 1447608 - DNA, 15 bp, Homo sapiens
acatttgacatgtgt

SEQ ID NO: 1447609 - DNA, 15 bp, Homo sapiens
tacatttgacatgtg

SEQ ID NO: 1447610 - DNA, 15 bp, Homo sapiens
atacatttgacatgt

SEQ ID NO: 1447611 - DNA, 15 bp, Homo sapiens
aatacatttgacatg

SEQ ID NO: 1447612 - DNA, 15 bp, Homo sapiens
caatacatttgacat

SEQ ID NO: 1447613 - DNA, 15 bp, Homo sapiens
acaatacatttgaca

SEQ ID NO: 1447614 - DNA, 15 bp, Homo sapiens
cacaatacatttgac

SEQ ID NO: 1447615 - DNA, 15 bp, Homo sapiens
ccacaatacatttga

SEQ ID NO: 1447616 - DNA, 15 bp, Homo sapiens
tccacaatacatttg

SEQ ID NO: 1447617 - DNA, 15 bp, Homo sapiens
ctccacaatacattt

SEQ ID NO: 1447618 - DNA, 15 bp, Homo sapiens
actccacaatacatt

SEQ ID NO: 1447619 - DNA, 15 bp, Homo sapiens
aactccacaatacat

SEQ ID NO: 1447620 - DNA, 15 bp, Homo sapiens
gaactccacaataca

SEQ ID NO: 1447621 - DNA, 15 bp, Homo sapiens
tgaactccacaatac

SEQ ID NO: 1447622 - DNA, 15 bp, Homo sapiens
gtgaactccacaata

SEQ ID NO: 1447623 - DNA, 15 bp, Homo sapiens
tgtgaactccacaat

SEQ ID NO: 1447624 - DNA, 15 bp, Homo sapiens
ctgtgaactccacaa

SEQ ID NO: 1447625 - DNA, 15 bp, Homo sapiens
tctgtgaactccaca

SEQ ID NO: 1447626 - DNA, 15 bp, Homo sapiens
gtctgtgaactccac

SEQ ID NO: 1447627 - DNA, 15 bp, Homo sapiens
agtctgtgaactcca

SEQ ID NO: 1447628 - DNA, 15 bp, Homo sapiens
gagtctgtgaactcc

SEQ ID NO: 1447629 - DNA, 15 bp, Homo sapiens
tgagtctgtgaactc

SEQ ID NO: 1447630 - DNA, 15 bp, Homo sapiens
atgagtctgtgaact

SEQ ID NO: 1447631 - DNA, 15 bp, Homo sapiens
tatgagtctgtgaac

SEQ ID NO: 1447632 - DNA, 15 bp, Homo sapiens
ctatgagtctgtgaa

SEQ ID NO: 1447633 - DNA, 15 bp, Homo sapiens
tctatgagtctgtga

SEQ ID NO: 1447634 - DNA, 15 bp, Homo sapiens
gtctatgagtctgtg

SEQ ID NO: 1447635 - DNA, 15 bp, Homo sapiens
agtctatgagtctgt

SEQ ID NO: 1447636 - DNA, 15 bp, Homo sapiens
cagtctatgagtctg

SEQ ID NO: 1447637 - DNA, 15 bp, Homo sapiens
acagtctatgagtct

SEQ ID NO: 1447638 - DNA, 15 bp, Homo sapiens
gacagtctatgagtc

SEQ ID NO: 1447639 - DNA, 15 bp, Homo sapiens
tgacagtctatgagt

SEQ ID NO: 1447640 - DNA, 15 bp, Homo sapiens
ttgacagtctatgag

SEQ ID NO: 1447641 - DNA, 15 bp, Homo sapiens
tttgacagtctatga

SEQ ID NO: 1447642 - DNA, 15 bp, Homo sapiens
atttgacagtctatg

SEQ ID NO: 1447643 - DNA, 15 bp, Homo sapiens
gatttgacagtctat

SEQ ID NO: 1447644 - DNA, 15 bp, Homo sapiens
agatttgacagtcta

SEQ ID NO: 1447645 - DNA, 15 bp, Homo sapiens
cagatttgacagtct

SEQ ID NO: 1447646 - DNA, 15 bp, Homo sapiens
ccagatttgacagtc

SEQ ID NO: 1447647 - DNA, 15 bp, Homo sapiens
cccagatttgacagt

SEQ ID NO: 1447648 - DNA, 15 bp, Homo sapiens
tcccagatttgacag

SEQ ID NO: 1447649 - DNA, 15 bp, Homo sapiens
ctcccagatttgaca

SEQ ID NO: 1447650 - DNA, 15 bp, Homo sapiens
tctcccagatttgac

SEQ ID NO: 1447651 - DNA, 15 bp, Homo sapiens
gtctcccagatttga

SEQ ID NO: 1447652 - DNA, 15 bp, Homo sapiens
tgtctcccagatttg

SEQ ID NO: 1447653 - DNA, 15 bp, Homo sapiens
gtgtctcccagattt

SEQ ID NO: 1447654 - DNA, 15 bp, Homo sapiens
agtgtctcccagatt

SEQ ID NO: 1447655 - DNA, 15 bp, Homo sapiens
aagtgtctcccagat

SEQ ID NO: 1447656 - DNA, 15 bp, Homo sapiens
aaagtgtctcccaga

SEQ ID NO: 1447657 - DNA, 15 bp, Homo sapiens
aaaagtgtctcccag

SEQ ID NO: 1447658 - DNA, 15 bp, Homo sapiens
gaaaagtgtctccca

SEQ ID NO: 1447659 - DNA, 15 bp, Homo sapiens
tgaaaagtgtctccc

SEQ ID NO: 1447660 - DNA, 15 bp, Homo sapiens
atgaaaagtgtctcc

SEQ ID NO: 1447661 - DNA, 15 bp, Homo sapiens
aatgaaaagtgtctc

SEQ ID NO: 1447662 - DNA, 15 bp, Homo sapiens
gaatgaaaagtgtct

SEQ ID NO: 1447663 - DNA, 15 bp, Homo sapiens
tgaatgaaaagtgtc

SEQ ID NO: 1447664 - DNA, 15 bp, Homo sapiens
atgaatgaaaagtgt

SEQ ID NO: 1447665 - DNA, 15 bp, Homo sapiens
aatgaatgaaaagtg

SEQ ID NO: 1447666 - DNA, 15 bp, Homo sapiens
aaatgaatgaaaagt

SEQ ID NO: 1447667 - DNA, 15 bp, Homo sapiens
caaatgaatgaaaag

SEQ ID NO: 1447668 - DNA, 15 bp, Homo sapiens
gcaaatgaatgaaaa

SEQ ID NO: 1447669 - DNA, 15 bp, Homo sapiens
agcaaatgaatgaaa

SEQ ID NO: 1447670 - DNA, 15 bp, Homo sapiens
cagcaaatgaatgaa

SEQ ID NO: 1447671 - DNA, 15 bp, Homo sapiens
tgcagcaaatgaatg

SEQ ID NO: 1447672 - DNA, 15 bp, Homo sapiens
ttgcagcaaatgaat

SEQ ID NO: 1447673 - DNA, 15 bp, Homo sapiens
gttgcagcaaatgaa

SEQ ID NO: 1447674 - DNA, 15 bp, Homo sapiens
ggttgcagcaaatga

SEQ ID NO: 1447675 - DNA, 15 bp, Homo sapiens
gggttgcagcaaatg

SEQ ID NO: 1447676 - DNA, 15 bp, Homo sapiens
tgggttgcagcaaat

SEQ ID NO: 1447677 - DNA, 15 bp, Homo sapiens
ttgggttgcagcaaa

SEQ ID NO: 1447678 - DNA, 15 bp, Homo sapiens
tttgggttgcagcaa

SEQ ID NO: 1447679 - DNA, 15 bp, Homo sapiens
ttttgggttgcagca

SEQ ID NO: 1447680 - DNA, 15 bp, Homo sapiens
attttgggttgcagc

SEQ ID NO: 1447681 - DNA, 15 bp, Homo sapiens
cattttgggttgcag

SEQ ID NO: 1447682 - DNA, 15 bp, Homo sapiens
tcattttgggttgca

SEQ ID NO: 1447683 - DNA, 15 bp, Homo sapiens
ttcattttgggttgc

SEQ ID NO: 1447684 - DNA, 15 bp, Homo sapiens
attcattttgggttg

SEQ ID NO: 1447685 - DNA, 15 bp, Homo sapiens
gattcattttgggtt

SEQ ID NO: 1447686 - DNA, 15 bp, Homo sapiens
ggattcattttgggt

SEQ ID NO: 1447687 - DNA, 15 bp, Homo sapiens
gggattcattttggg

SEQ ID NO: 1447688 - DNA, 15 bp, Homo sapiens
ggggattcattttgg

SEQ ID NO: 1447689 - DNA, 15 bp, Homo sapiens
tggggattcattttg

SEQ ID NO: 1447690 - DNA, 15 bp, Homo sapiens
gtggggattcatttt

SEQ ID NO: 1447691 - DNA, 15 bp, Homo sapiens
ggtggggattcattt

SEQ ID NO: 1447692 - DNA, 15 bp, Homo sapiens
tggtggggattcatt

SEQ ID NO: 1447693 - DNA, 15 bp, Homo sapiens
gtggtggggattcat

SEQ ID NO: 1447694 - DNA, 15 bp, Homo sapiens
tgtggtggggattca

SEQ ID NO: 1447695 - DNA, 15 bp, Homo sapiens
atgtggtggggattc

SEQ ID NO: 1447696 - DNA, 15 bp, Homo sapiens
tatgtggtggggatt

SEQ ID NO: 1447697 - DNA, 15 bp, Homo sapiens
ttatgtggtggggat

SEQ ID NO: 1447698 - DNA, 15 bp, Homo sapiens
attatgtggtgggga

SEQ ID NO: 1447699 - DNA, 15 bp, Homo sapiens
aattatgtggtgggg

SEQ ID NO: 1447700 - DNA, 15 bp, Homo sapiens
aaattatgtggtggg

SEQ ID NO: 1447701 - DNA, 15 bp, Homo sapiens
aaaattatgtggtgg

SEQ ID NO: 1447702 - DNA, 15 bp, Homo sapiens
aaaaattatgtggtg

SEQ ID NO: 1447703 - DNA, 15 bp, Homo sapiens
aaaaaattatgtggt

SEQ ID NO: 1447704 - DNA, 15 bp, Homo sapiens
caaaaaattatgtgg

SEQ ID NO: 1447705 - DNA, 15 bp, Homo sapiens
tcaaaaaattatgtg

SEQ ID NO: 1447706 - DNA, 15 bp, Homo sapiens
ttcaaaaaattatgt

SEQ ID NO: 1447707 - DNA, 15 bp, Homo sapiens
cttcaaaaaattatg

SEQ ID NO: 1447708 - DNA, 15 bp, Homo sapiens
acttcaaaaaattat

SEQ ID NO: 1447709 - DNA, 15 bp, Homo sapiens
cacttcaaaaaatta

SEQ ID NO: 1447710 - DNA, 15 bp, Homo sapiens
acacttcaaaaaatt

SEQ ID NO: 1447711 - DNA, 15 bp, Homo sapiens
aacacttcaaaaaat

SEQ ID NO: 1447712 - DNA, 15 bp, Homo sapiens
aaacacttcaaaaaa

SEQ ID NO: 1447713 - DNA, 15 bp, Homo sapiens
aaaacacttcaaaaa

SEQ ID NO: 1447714 - DNA, 15 bp, Homo sapiens
gaaaacacttcaaaa

SEQ ID NO: 1447715 - DNA, 15 bp, Homo sapiens
agaaaacacttcaaa

SEQ ID NO: 1447716 - DNA, 15 bp, Homo sapiens
cagaaaacacttcaa

SEQ ID NO: 1447717 - DNA, 15 bp, Homo sapiens
acagaaaacacttca

SEQ ID NO: 1447718 - DNA, 15 bp, Homo sapiens
aacagaaaacacttc

SEQ ID NO: 1447719 - DNA, 15 bp, Homo sapiens
gaacagaaaacactt

SEQ ID NO: 1447720 - DNA, 15 bp, Homo sapiens
agaacagaaaacact

SEQ ID NO: 1447721 - DNA, 15 bp, Homo sapiens
gagaacagaaaacac

SEQ ID NO: 1447722 - DNA, 15 bp, Homo sapiens
agagaacagaaaaca

SEQ ID NO: 1447723 - DNA, 15 bp, Homo sapiens
tagagaacagaaaac

SEQ ID NO: 1447724 - DNA, 15 bp, Homo sapiens
gtagagaacagaaaa

SEQ ID NO: 1447725 - DNA, 15 bp, Homo sapiens
agtagagaacagaaa

SEQ ID NO: 1447726 - DNA, 15 bp, Homo sapiens
aagtagagaacagaa

SEQ ID NO: 1447727 - DNA, 15 bp, Homo sapiens
caagtagagaacaga

SEQ ID NO: 1447728 - DNA, 15 bp, Homo sapiens
tcaagtagagaacag

SEQ ID NO: 1447729 - DNA, 15 bp, Homo sapiens
ttcaagtagagaaca

SEQ ID NO: 1447730 - DNA, 15 bp, Homo sapiens
gttcaagtagagaac

SEQ ID NO: 1447731 - DNA, 15 bp, Homo sapiens
cgttcaagtagagaa

SEQ ID NO: 1447732 - DNA, 15 bp, Homo sapiens
tcgttcaagtagaga

SEQ ID NO: 1447733 - DNA, 15 bp, Homo sapiens
gtcgttcaagtagag

SEQ ID NO: 1447734 - DNA, 15 bp, Homo sapiens
agtcgttcaagtaga

SEQ ID NO: 1447735 - DNA, 15 bp, Homo sapiens
gagtcgttcaagtag

SEQ ID NO: 1447736 - DNA, 15 bp, Homo sapiens
agagtcgttcaagta

SEQ ID NO: 1447737 - DNA, 15 bp, Homo sapiens
aagagtcgttcaagt

SEQ ID NO: 1447738 - DNA, 15 bp, Homo sapiens
caagagtcgttcaag

SEQ ID NO: 1447739 - DNA, 15 bp, Homo sapiens
acaagagtcgttcaa

SEQ ID NO: 1447740 - DNA, 15 bp, Homo sapiens
cacaagagtcgttca

SEQ ID NO: 1447741 - DNA, 15 bp, Homo sapiens
tcacaagagtcgttc

SEQ ID NO: 1447742 - DNA, 15 bp, Homo sapiens
gtcacaagagtcgtt

SEQ ID NO: 1447743 - DNA, 15 bp, Homo sapiens
tgtcacaagagtcgt

SEQ ID NO: 1447744 - DNA, 15 bp, Homo sapiens
ctgtcacaagagtcg

SEQ ID NO: 1447745 - DNA, 15 bp, Homo sapiens
actgtcacaagagtc

SEQ ID NO: 1447746 - DNA, 15 bp, Homo sapiens
cactgtcacaagagt

SEQ ID NO: 1447747 - DNA, 15 bp, Homo sapiens
ccactgtcacaagag

SEQ ID NO: 1447748 - DNA, 15 bp, Homo sapiens
tccactgtcacaaga

SEQ ID NO: 1447749 - DNA, 15 bp, Homo sapiens
gtccactgtcacaag

SEQ ID NO: 1447750 - DNA, 15 bp, Homo sapiens
tgtccactgtcacaa

SEQ ID NO: 1447751 - DNA, 15 bp, Homo sapiens
atgtccactgtcaca

SEQ ID NO: 1447752 - DNA, 15 bp, Homo sapiens
gatgtccactgtcac

SEQ ID NO: 1447753 - DNA, 15 bp, Homo sapiens
tgatgtccactgtca

SEQ ID NO: 1447754 - DNA, 15 bp, Homo sapiens
gtgatgtccactgtc

SEQ ID NO: 1447755 - DNA, 15 bp, Homo sapiens
ggtgatgtccactgt

SEQ ID NO: 1447756 - DNA, 15 bp, Homo sapiens
aggtgatgtccactg

SEQ ID NO: 1447757 - DNA, 15 bp, Homo sapiens
gaggtgatgtccact

SEQ ID NO: 1447758 - DNA, 15 bp, Homo sapiens
ggaggtgatgtccac

SEQ ID NO: 1447759 - DNA, 15 bp, Homo sapiens
aggaggtgatgtcca

SEQ ID NO: 1447760 - DNA, 15 bp, Homo sapiens
gaggaggtgatgtcc

SEQ ID NO: 1447761 - DNA, 15 bp, Homo sapiens
ggaggaggtgatgtc

SEQ ID NO: 1447762 - DNA, 15 bp, Homo sapiens
aggaggaggtgatgt

SEQ ID NO: 1447763 - DNA, 15 bp, Homo sapiens
caggaggaggtgatg

SEQ ID NO: 1447764 - DNA, 15 bp, Homo sapiens
tcaggaggaggtgat

SEQ ID NO: 1447765 - DNA, 15 bp, Homo sapiens
ttcaggaggaggtga

SEQ ID NO: 1447766 - DNA, 15 bp, Homo sapiens
cttcaggaggaggtg

SEQ ID NO: 1447767 - DNA, 15 bp, Homo sapiens
tcttcaggaggaggt

SEQ ID NO: 1447768 - DNA, 15 bp, Homo sapiens
ttcttcaggaggagg

SEQ ID NO: 1447769 - DNA, 15 bp, Homo sapiens
tttcttcaggaggag

SEQ ID NO: 1447770 - DNA, 15 bp, Homo sapiens
gtttcttcaggagga

SEQ ID NO: 1447771 - DNA, 15 bp, Homo sapiens
ggtttcttcaggagg

SEQ ID NO: 1447772 - DNA, 15 bp, Homo sapiens
gggtttcttcaggag

SEQ ID NO: 1447773 - DNA, 15 bp, Homo sapiens
tgggtttcttcagga

SEQ ID NO: 1447774 - DNA, 15 bp, Homo sapiens
gtgggtttcttcagg

SEQ ID NO: 1447775 - DNA, 15 bp, Homo sapiens
agtgggtttcttcag

SEQ ID NO: 1447776 - DNA, 15 bp, Homo sapiens
gagtgggtttcttca

SEQ ID NO: 1447777 - DNA, 15 bp, Homo sapiens
ggagtgggtttcttc

SEQ ID NO: 1447778 - DNA, 15 bp, Homo sapiens
tggagtgggtttctt

SEQ ID NO: 1447779 - DNA, 15 bp, Homo sapiens
atggagtgggtttct

SEQ ID NO: 1447780 - DNA, 15 bp, Homo sapiens
aatggagtgggtttc

SEQ ID NO: 1447781 - DNA, 15 bp, Homo sapiens
aaatggagtgggttt

SEQ ID NO: 1447782 - DNA, 15 bp, Homo sapiens
aaaatggagtgggtt

SEQ ID NO: 1447783 - DNA, 15 bp, Homo sapiens
aaaaatggagtgggt

SEQ ID NO: 1447784 - DNA, 15 bp, Homo sapiens
taaaaatggagtggg

SEQ ID NO: 1447785 - DNA, 15 bp, Homo sapiens
ttaaaaatggagtgg

SEQ ID NO: 1447786 - DNA, 15 bp, Homo sapiens
tttaaaaatggagtg

SEQ ID NO: 1447787 - DNA, 15 bp, Homo sapiens
gtttaaaaatggagt

SEQ ID NO: 1447788 - DNA, 15 bp, Homo sapiens
cgtttaaaaatggag

SEQ ID NO: 1447789 - DNA, 15 bp, Homo sapiens
acgtttaaaaatgga

SEQ ID NO: 1447790 - DNA, 15 bp, Homo sapiens
aacgtttaaaaatgg

SEQ ID NO: 1447791 - DNA, 15 bp, Homo sapiens
aaacgtttaaaaatg

SEQ ID NO: 1447792 - DNA, 15 bp, Homo sapiens
aaaacgtttaaaaat

SEQ ID NO: 1447793 - DNA, 15 bp, Homo sapiens
aaaaacgtttaaaaa

SEQ ID NO: 1447794 - DNA, 15 bp, Homo sapiens
ctaaaaacgtttaaa

SEQ ID NO: 1447795 - DNA, 15 bp, Homo sapiens
actaaaaacgtttaa

SEQ ID NO: 1447796 - DNA, 15 bp, Homo sapiens
aactaaaaacgttta

SEQ ID NO: 1447797 - DNA, 15 bp, Homo sapiens
caactaaaaacgttt

SEQ ID NO: 1447798 - DNA, 15 bp, Homo sapiens
acaactaaaaacgtt

SEQ ID NO: 1447799 - DNA, 15 bp, Homo sapiens
gacaactaaaaacgt

SEQ ID NO: 1447800 - DNA, 15 bp, Homo sapiens
tgacaactaaaaacg

SEQ ID NO: 1447801 - DNA, 15 bp, Homo sapiens
ttgacaactaaaaac

SEQ ID NO: 1447802 - DNA, 15 bp, Homo sapiens
cttgacaactaaaaa

SEQ ID NO: 1447803 - DNA, 15 bp, Homo sapiens
tcttgacaactaaaa

SEQ ID NO: 1447804 - DNA, 15 bp, Homo sapiens
ttcttgacaactaaa

SEQ ID NO: 1447805 - DNA, 15 bp, Homo sapiens
tttcttgacaactaa

SEQ ID NO: 1447806 - DNA, 15 bp, Homo sapiens
atttcttgacaacta

SEQ ID NO: 1447807 - DNA, 15 bp, Homo sapiens
aatttcttgacaact

SEQ ID NO: 1447808 - DNA, 15 bp, Homo sapiens
taatttcttgacaac

SEQ ID NO: 1447809 - DNA, 15 bp, Homo sapiens
ttaatttcttgacaa

SEQ ID NO: 1447810 - DNA, 15 bp, Homo sapiens
attaatttcttgaca

SEQ ID NO: 1447811 - DNA, 15 bp, Homo sapiens
gattaatttcttgac

SEQ ID NO: 1447812 - DNA, 15 bp, Homo sapiens
ggattaatttcttga

SEQ ID NO: 1447813 - DNA, 15 bp, Homo sapiens
aggattaatttcttg

SEQ ID NO: 1447814 - DNA, 15 bp, Homo sapiens
caggattaatttctt

SEQ ID NO: 1447815 - DNA, 15 bp, Homo sapiens
ccaggattaatttct

SEQ ID NO: 1447816 - DNA, 15 bp, Homo sapiens
cccaggattaatttc

SEQ ID NO: 1447817 - DNA, 15 bp, Homo sapiens
tcccaggattaattt

SEQ ID NO: 1447818 - DNA, 15 bp, Homo sapiens
ttcccaggattaatt

SEQ ID NO: 1447819 - DNA, 15 bp, Homo sapiens
tttcccaggattaat

SEQ ID NO: 1447820 - DNA, 15 bp, Homo sapiens
atttcccaggattaa

SEQ ID NO: 1447821 - DNA, 15 bp, Homo sapiens
tatttcccaggatta

SEQ ID NO: 1447822 - DNA, 15 bp, Homo sapiens
gtatttcccaggatt

SEQ ID NO: 1447823 - DNA, 15 bp, Homo sapiens
ggtatttcccaggat

SEQ ID NO: 1447824 - DNA, 15 bp, Homo sapiens
aggtatttcccagga

SEQ ID NO: 1447825 - DNA, 15 bp, Homo sapiens
taggtatttcccagg

SEQ ID NO: 1447826 - DNA, 15 bp, Homo sapiens
ttaggtatttcccag

SEQ ID NO: 1447827 - DNA, 15 bp, Homo sapiens
tttaggtatttccca

SEQ ID NO: 1447828 - DNA, 15 bp, Homo sapiens
ttttaggtatttccc

SEQ ID NO: 1447829 - DNA, 15 bp, Homo sapiens
attttaggtatttcc

SEQ ID NO: 1447830 - DNA, 15 bp, Homo sapiens
tattttaggtatttc

SEQ ID NO: 1447831 - DNA, 15 bp, Homo sapiens
ctattttaggtattt

SEQ ID NO: 1447832 - DNA, 15 bp, Homo sapiens
cctattttaggtatt

SEQ ID NO: 1447833 - DNA, 15 bp, Homo sapiens
gcctattttaggtat

SEQ ID NO: 1447834 - DNA, 15 bp, Homo sapiens
tgcctattttaggta

SEQ ID NO: 1447835 - DNA, 15 bp, Homo sapiens
ttgcctattttaggt

SEQ ID NO: 1447836 - DNA, 15 bp, Homo sapiens
tttgcctattttagg

SEQ ID NO: 1447837 - DNA, 15 bp, Homo sapiens
atttgcctattttag

SEQ ID NO: 1447838 - DNA, 15 bp, Homo sapiens
aatttgcctatttta

SEQ ID NO: 1447839 - DNA, 15 bp, Homo sapiens
gaatttgcctatttt

SEQ ID NO: 1447840 - DNA, 15 bp, Homo sapiens
tgaatttgcctattt

SEQ ID NO: 1447841 - DNA, 15 bp, Homo sapiens
atgaatttgcctatt

SEQ ID NO: 1447842 - DNA, 15 bp, Homo sapiens
tatgaatttgcctat

SEQ ID NO: 1447843 - DNA, 15 bp, Homo sapiens
ctatgaatttgccta

SEQ ID NO: 1447844 - DNA, 15 bp, Homo sapiens
tctatgaatttgcct

SEQ ID NO: 1447845 - DNA, 15 bp, Homo sapiens
ctctatgaatttgcc

SEQ ID NO: 1447846 - DNA, 15 bp, Homo sapiens
tctctatgaatttgc

SEQ ID NO: 1447847 - DNA, 15 bp, Homo sapiens
gtctctatgaatttg

SEQ ID NO: 1447848 - DNA, 15 bp, Homo sapiens
tgtctctatgaattt

SEQ ID NO: 1447849 - DNA, 15 bp, Homo sapiens
ctgtctctatgaatt

SEQ ID NO: 1447850 - DNA, 15 bp, Homo sapiens
tctgtctctatgaat

SEQ ID NO: 1447851 - DNA, 15 bp, Homo sapiens
ttctgtctctatgaa

SEQ ID NO: 1447852 - DNA, 15 bp, Homo sapiens
tttctgtctctatga

SEQ ID NO: 1447853 - DNA, 15 bp, Homo sapiens
actttctgtctctat

SEQ ID NO: 1447854 - DNA, 15 bp, Homo sapiens
tactttctgtctcta

SEQ ID NO: 1447855 - DNA, 15 bp, Homo sapiens
atactttctgtctct

SEQ ID NO: 1447856 - DNA, 15 bp, Homo sapiens
tatactttctgtctc

SEQ ID NO: 1447857 - DNA, 15 bp, Homo sapiens
atatactttctgtct

SEQ ID NO: 1447858 - DNA, 15 bp, Homo sapiens
aatatactttctgtc

SEQ ID NO: 1447859 - DNA, 15 bp, Homo sapiens
taatatactttctgt

SEQ ID NO: 1447860 - DNA, 15 bp, Homo sapiens
ttaatatactttctg

SEQ ID NO: 1447861 - DNA, 15 bp, Homo sapiens
cttaatatactttct

SEQ ID NO: 1447862 - DNA, 15 bp, Homo sapiens
acttaatatactttc

SEQ ID NO: 1447863 - DNA, 15 bp, Homo sapiens
aacttaatatacttt

SEQ ID NO: 1447864 - DNA, 15 bp, Homo sapiens
aaacttaatatactt

SEQ ID NO: 1447865 - DNA, 15 bp, Homo sapiens
taaacttaatatact

SEQ ID NO: 1447866 - DNA, 15 bp, Homo sapiens
ataaacttaatatac

SEQ ID NO: 1447867 - DNA, 15 bp, Homo sapiens
gataaacttaatata

SEQ ID NO: 1447868 - DNA, 15 bp, Homo sapiens
tgataaacttaatat

SEQ ID NO: 1447869 - DNA, 15 bp, Homo sapiens
ctgataaacttaata

SEQ ID NO: 1447870 - DNA, 15 bp, Homo sapiens
cctgataaacttaat

SEQ ID NO: 1447871 - DNA, 15 bp, Homo sapiens
ccctgataaacttaa

SEQ ID NO: 1447872 - DNA, 15 bp, Homo sapiens
tccctgataaactta

SEQ ID NO: 1447873 - DNA, 15 bp, Homo sapiens
gtccctgataaactt

SEQ ID NO: 1447874 - DNA, 15 bp, Homo sapiens
agtccctgataaact

SEQ ID NO: 1447875 - DNA, 15 bp, Homo sapiens
cagtccctgataaac

SEQ ID NO: 1447876 - DNA, 15 bp, Homo sapiens
tcagtccctgataaa

SEQ ID NO: 1447877 - DNA, 15 bp, Homo sapiens
ctcagtccctgataa

SEQ ID NO: 1447878 - DNA, 15 bp, Homo sapiens
cctcagtccctgata

SEQ ID NO: 1447879 - DNA, 15 bp, Homo sapiens
ccctcagtccctgat

SEQ ID NO: 1447880 - DNA, 15 bp, Homo sapiens
tccctcagtccctga

SEQ ID NO: 1447881 - DNA, 15 bp, Homo sapiens
ttccctcagtccctg

SEQ ID NO: 1447882 - DNA, 15 bp, Homo sapiens
cttccctcagtccct

SEQ ID NO: 1447883 - DNA, 15 bp, Homo sapiens
acttccctcagtccc

SEQ ID NO: 1447884 - DNA, 15 bp, Homo sapiens
cacttccctcagtcc

SEQ ID NO: 1447885 - DNA, 15 bp, Homo sapiens
ccacttccctcagtc

SEQ ID NO: 1447886 - DNA, 15 bp, Homo sapiens
tccacttccctcagt

SEQ ID NO: 1447887 - DNA, 15 bp, Homo sapiens
ttccacttccctcag

SEQ ID NO: 1447888 - DNA, 15 bp, Homo sapiens
tttccacttccctca

SEQ ID NO: 1447889 - DNA, 15 bp, Homo sapiens
ctttccacttccctc

SEQ ID NO: 1447890 - DNA, 15 bp, Homo sapiens
actttccacttccct

SEQ ID NO: 1447891 - DNA, 15 bp, Homo sapiens
cactttccacttccc

SEQ ID NO: 1447892 - DNA, 15 bp, Homo sapiens
ccactttccacttcc

SEQ ID NO: 1447893 - DNA, 15 bp, Homo sapiens
cccactttccacttc

SEQ ID NO: 1447894 - DNA, 15 bp, Homo sapiens
ccccactttccactt

SEQ ID NO: 1447895 - DNA, 15 bp, Homo sapiens
tccccactttccact

SEQ ID NO: 1447896 - DNA, 15 bp, Homo sapiens
ctccccactttccac

SEQ ID NO: 1447897 - DNA, 15 bp, Homo sapiens
gctccccactttcca

SEQ ID NO: 1447898 - DNA, 15 bp, Homo sapiens
agctccccactttcc

SEQ ID NO: 1447899 - DNA, 15 bp, Homo sapiens
tagctccccactttc

SEQ ID NO: 1447900 - DNA, 15 bp, Homo sapiens
atagctccccacttt

SEQ ID NO: 1447901 - DNA, 15 bp, Homo sapiens
aatagctccccactt

SEQ ID NO: 1447902 - DNA, 15 bp, Homo sapiens
caatagctccccact

SEQ ID NO: 1447903 - DNA, 15 bp, Homo sapiens
gcaatagctccccac

SEQ ID NO: 1447904 - DNA, 15 bp, Homo sapiens
agcaatagctcccca

SEQ ID NO: 1447905 - DNA, 15 bp, Homo sapiens
gagcaatagctcccc

SEQ ID NO: 1447906 - DNA, 15 bp, Homo sapiens
tgagcaatagctccc

SEQ ID NO: 1447907 - DNA, 15 bp, Homo sapiens
ttgagcaatagctcc

SEQ ID NO: 1447908 - DNA, 15 bp, Homo sapiens
attgagcaatagctc

SEQ ID NO: 1447909 - DNA, 15 bp, Homo sapiens
cattgagcaatagct

SEQ ID NO: 1447910 - DNA, 15 bp, Homo sapiens
ccattgagcaatagc

SEQ ID NO: 1447911 - DNA, 15 bp, Homo sapiens
gccattgagcaatag

SEQ ID NO: 1447912 - DNA, 15 bp, Homo sapiens
agccattgagcaata

SEQ ID NO: 1447913 - DNA, 15 bp, Homo sapiens
tagccattgagcaat

SEQ ID NO: 1447914 - DNA, 15 bp, Homo sapiens
ctagccattgagcaa

SEQ ID NO: 1447915 - DNA, 15 bp, Homo sapiens
tctagccattgagca

SEQ ID NO: 1447916 - DNA, 15 bp, Homo sapiens
ctctagccattgagc

SEQ ID NO: 1447917 - DNA, 15 bp, Homo sapiens
tctctagccattgag

SEQ ID NO: 1447918 - DNA, 15 bp, Homo sapiens
ctctctagccattga

SEQ ID NO: 1447919 - DNA, 15 bp, Homo sapiens
actctctagccattg

SEQ ID NO: 1447920 - DNA, 15 bp, Homo sapiens
aactctctagccatt

SEQ ID NO: 1447921 - DNA, 15 bp, Homo sapiens
aaactctctagccat

SEQ ID NO: 1447922 - DNA, 15 bp, Homo sapiens
gaaactctctagcca

SEQ ID NO: 1447923 - DNA, 15 bp, Homo sapiens
agaaactctctagcc

SEQ ID NO: 1447924 - DNA, 15 bp, Homo sapiens
cagaaactctctagc

SEQ ID NO: 1447925 - DNA, 15 bp, Homo sapiens
acagaaactctctag

SEQ ID NO: 1447926 - DNA, 15 bp, Homo sapiens
gacagaaactctcta

SEQ ID NO: 1447927 - DNA, 15 bp, Homo sapiens
agacagaaactctct

SEQ ID NO: 1447928 - DNA, 15 bp, Homo sapiens
cagacagaaactctc

SEQ ID NO: 1447929 - DNA, 15 bp, Homo sapiens
ccagacagaaactct

SEQ ID NO: 1447930 - DNA, 15 bp, Homo sapiens
accagacagaaactc

SEQ ID NO: 1447931 - DNA, 15 bp, Homo sapiens
caccagacagaaact

SEQ ID NO: 1447932 - DNA, 15 bp, Homo sapiens
tcaccagacagaaac

SEQ ID NO: 1447933 - DNA, 15 bp, Homo sapiens
ctcaccagacagaaa

SEQ ID NO: 1447934 - DNA, 15 bp, Homo sapiens
tctcaccagacagaa

SEQ ID NO: 1447935 - DNA, 15 bp, Homo sapiens
atctcaccagacaga

SEQ ID NO: 1447936 - DNA, 15 bp, Homo sapiens
aatctcaccagacag

SEQ ID NO: 1447937 - DNA, 15 bp, Homo sapiens
aaatctcaccagaca

SEQ ID NO: 1447938 - DNA, 15 bp, Homo sapiens
taaatctcaccagac

SEQ ID NO: 1447939 - DNA, 15 bp, Homo sapiens
ttaaatctcaccaga

SEQ ID NO: 1447940 - DNA, 15 bp, Homo sapiens
cttaaatctcaccag

SEQ ID NO: 1447941 - DNA, 15 bp, Homo sapiens
acttaaatctcacca

SEQ ID NO: 1447942 - DNA, 15 bp, Homo sapiens
aacttaaatctcacc

SEQ ID NO: 1447943 - DNA, 15 bp, Homo sapiens
aaacttaaatctcac

SEQ ID NO: 1447944 - DNA, 15 bp, Homo sapiens
aaaacttaaatctca

SEQ ID NO: 1447945 - DNA, 15 bp, Homo sapiens
caaaacttaaatctc

SEQ ID NO: 1447946 - DNA, 15 bp, Homo sapiens
ccaaaacttaaatct

SEQ ID NO: 1447947 - DNA, 15 bp, Homo sapiens
cccaaaacttaaatc

SEQ ID NO: 1447948 - DNA, 15 bp, Homo sapiens
gcccaaaacttaaat

SEQ ID NO: 1447949 - DNA, 15 bp, Homo sapiens
agcccaaaacttaaa

SEQ ID NO: 1447950 - DNA, 15 bp, Homo sapiens
cagcccaaaacttaa

SEQ ID NO: 1447951 - DNA, 15 bp, Homo sapiens
ccagcccaaaactta

SEQ ID NO: 1447952 - DNA, 15 bp, Homo sapiens
cccagcccaaaactt

SEQ ID NO: 1447953 - DNA, 15 bp, Homo sapiens
acccagcccaaaact

SEQ ID NO: 1447954 - DNA, 15 bp, Homo sapiens
cacccagcccaaaac

SEQ ID NO: 1447955 - DNA, 15 bp, Homo sapiens
cgcacccagcccaaa

SEQ ID NO: 1447956 - DNA, 15 bp, Homo sapiens
ccgcacccagcccaa

SEQ ID NO: 1447957 - DNA, 15 bp, Homo sapiens
accgcacccagccca

SEQ ID NO: 1447958 - DNA, 15 bp, Homo sapiens
gagccaccgcaccca

SEQ ID NO: 1447959 - DNA, 15 bp, Homo sapiens
tgagccaccgcaccc

SEQ ID NO: 1447960 - DNA, 15 bp, Homo sapiens
agtgtgagccaccgc

SEQ ID NO: 1447961 - DNA, 15 bp, Homo sapiens
aagtgtgagccaccg

SEQ ID NO: 1447962 - DNA, 15 bp, Homo sapiens
caagtgtgagccacc

SEQ ID NO: 1447963 - DNA, 15 bp, Homo sapiens
acaagtgtgagccac

SEQ ID NO: 1447964 - DNA, 15 bp, Homo sapiens
tacaagtgtgagcca

SEQ ID NO: 1447965 - DNA, 15 bp, Homo sapiens
ttacaagtgtgagcc

SEQ ID NO: 1447966 - DNA, 15 bp, Homo sapiens
attacaagtgtgagc

SEQ ID NO: 1447967 - DNA, 15 bp, Homo sapiens
gattacaagtgtgag

SEQ ID NO: 1447968 - DNA, 15 bp, Homo sapiens
ggattacaagtgtga

SEQ ID NO: 1447969 - DNA, 15 bp, Homo sapiens
gggattacaagtgtg

SEQ ID NO: 1447970 - DNA, 15 bp, Homo sapiens
tgggattacaagtgt

SEQ ID NO: 1447971 - DNA, 15 bp, Homo sapiens
ctgggattacaagtg

SEQ ID NO: 1447972 - DNA, 15 bp, Homo sapiens
tgatctgcctgcctc

SEQ ID NO: 1447973 - DNA, 15 bp, Homo sapiens
atgatctgcctgcct

SEQ ID NO: 1447974 - DNA, 15 bp, Homo sapiens
catgatctgcctgcc

SEQ ID NO: 1447975 - DNA, 15 bp, Homo sapiens
tcatgatctgcctgc

SEQ ID NO: 1447976 - DNA, 15 bp, Homo sapiens
ctcatgatctgcctg

SEQ ID NO: 1447977 - DNA, 15 bp, Homo sapiens
cctcatgatctgcct

SEQ ID NO: 1447978 - DNA, 15 bp, Homo sapiens
acctcatgatctgcc

SEQ ID NO: 1447979 - DNA, 15 bp, Homo sapiens
gacctcatgatctgc

SEQ ID NO: 1447980 - DNA, 15 bp, Homo sapiens
tgacctcatgatctg

SEQ ID NO: 1447981 - DNA, 15 bp, Homo sapiens
ttgacctcatgatct

SEQ ID NO: 1447982 - DNA, 15 bp, Homo sapiens
actcttgacctcatg

SEQ ID NO: 1447983 - DNA, 15 bp, Homo sapiens
aactcttgacctcat

SEQ ID NO: 1447984 - DNA, 15 bp, Homo sapiens
gaactcttgacctca

SEQ ID NO: 1447985 - DNA, 15 bp, Homo sapiens
cgaactcttgacctc

SEQ ID NO: 1447986 - DNA, 15 bp, Homo sapiens
tcgaactcttgacct

SEQ ID NO: 1447987 - DNA, 15 bp, Homo sapiens
ctcgaactcttgacc

SEQ ID NO: 1447988 - DNA, 15 bp, Homo sapiens
tctcgaactcttgac

SEQ ID NO: 1447989 - DNA, 15 bp, Homo sapiens
gtctcgaactcttga

SEQ ID NO: 1447990 - DNA, 15 bp, Homo sapiens
tcaggctggtctcga

SEQ ID NO: 1447991 - DNA, 15 bp, Homo sapiens
gtcaggctggtctcg

SEQ ID NO: 1447992 - DNA, 15 bp, Homo sapiens
ggtagagatggggtt

SEQ ID NO: 1447993 - DNA, 15 bp, Homo sapiens
tggtagagatggggt

SEQ ID NO: 1447994 - DNA, 15 bp, Homo sapiens
ttggtagagatgggg

SEQ ID NO: 1447995 - DNA, 15 bp, Homo sapiens
tttggtagagatggg

SEQ ID NO: 1447996 - DNA, 15 bp, Homo sapiens
ttttggtagagatgg

SEQ ID NO: 1447997 - DNA, 15 bp, Homo sapiens
tctctgcctcccggg

SEQ ID NO: 1447998 - DNA, 15 bp, Homo sapiens
atctctgcctcccgg

SEQ ID NO: 1447999 - DNA, 15 bp, Homo sapiens
aatctctgcctcccg

SEQ ID NO: 1448000 - DNA, 15 bp, Homo sapiens
caatctctgcctccc

SEQ ID NO: 1448001 - DNA, 15 bp, Homo sapiens
gcaatctctgcctcc

SEQ ID NO: 1448002 - DNA, 15 bp, Homo sapiens
tgcaatctctgcctc

SEQ ID NO: 1448003 - DNA, 15 bp, Homo sapiens
ctgcaatctctgcct

SEQ ID NO: 1448004 - DNA, 15 bp, Homo sapiens
actgcaatctctgcc

SEQ ID NO: 1448005 - DNA, 15 bp, Homo sapiens
cactgcaatctctgc

SEQ ID NO: 1448006 - DNA, 15 bp, Homo sapiens
tcactgcaatctctg

SEQ ID NO: 1448007 - DNA, 15 bp, Homo sapiens
ctcactgcaatctct

SEQ ID NO: 1448008 - DNA, 15 bp, Homo sapiens
gctcactgcaatctc

SEQ ID NO: 1448009 - DNA, 15 bp, Homo sapiens
agctcactgcaatct

SEQ ID NO: 1448010 - DNA, 15 bp, Homo sapiens
cagctcactgcaatc

SEQ ID NO: 1448011 - DNA, 15 bp, Homo sapiens
tcagctcactgcaat

SEQ ID NO: 1448012 - DNA, 15 bp, Homo sapiens
tgcgatctcagctca

SEQ ID NO: 1448013 - DNA, 15 bp, Homo sapiens
gtgcgatctcagctc

SEQ ID NO: 1448014 - DNA, 15 bp, Homo sapiens
ggtgcgatctcagct

SEQ ID NO: 1448015 - DNA, 15 bp, Homo sapiens
tggtgcgatctcagc

SEQ ID NO: 1448016 - DNA, 15 bp, Homo sapiens
gtggtgcgatctcag

SEQ ID NO: 1448017 - DNA, 15 bp, Homo sapiens
agtggtgcgatctca

SEQ ID NO: 1448018 - DNA, 15 bp, Homo sapiens
cagtggtgcgatctc

SEQ ID NO: 1448019 - DNA, 15 bp, Homo sapiens
acccaggctagagtg

SEQ ID NO: 1448020 - DNA, 15 bp, Homo sapiens
cacccaggctagagt

SEQ ID NO: 1448021 - DNA, 15 bp, Homo sapiens
tcacccaggctagag

SEQ ID NO: 1448022 - DNA, 15 bp, Homo sapiens
gtcacccaggctaga

SEQ ID NO: 1448023 - DNA, 15 bp, Homo sapiens
tgtcacccaggctag

SEQ ID NO: 1448024 - DNA, 15 bp, Homo sapiens
ctttttttttgagac

SEQ ID NO: 1448025 - DNA, 15 bp, Homo sapiens
tctttttttttgaga

SEQ ID NO: 1448026 - DNA, 15 bp, Homo sapiens
atctttttttttgag

SEQ ID NO: 1448027 - DNA, 15 bp, Homo sapiens
aatctttttttttga

SEQ ID NO: 1448028 - DNA, 15 bp, Homo sapiens
aaatctttttttttg

SEQ ID NO: 1448029 - DNA, 15 bp, Homo sapiens
aaaatcttttttttt

SEQ ID NO: 1448030 - DNA, 15 bp, Homo sapiens
caaaatctttttttt

SEQ ID NO: 1448031 - DNA, 15 bp, Homo sapiens
ccaaaatcttttttt

SEQ ID NO: 1448032 - DNA, 15 bp, Homo sapiens
tccaaaatctttttt

SEQ ID NO: 1448033 - DNA, 15 bp, Homo sapiens
ttccaaaatcttttt

SEQ ID NO: 1448034 - DNA, 15 bp, Homo sapiens
tttccaaaatctttt

SEQ ID NO: 1448035 - DNA, 15 bp, Homo sapiens
atttccaaaatcttt

SEQ ID NO: 1448036 - DNA, 15 bp, Homo sapiens
tatttccaaaatctt

SEQ ID NO: 1448037 - DNA, 15 bp, Homo sapiens
ttatttccaaaatct

SEQ ID NO: 1448038 - DNA, 15 bp, Homo sapiens
tttatttccaaaatc

SEQ ID NO: 1448039 - DNA, 15 bp, Homo sapiens
atttatttccaaaat

SEQ ID NO: 1448040 - DNA, 15 bp, Homo sapiens
taatttatttccaaa

SEQ ID NO: 1448041 - DNA, 15 bp, Homo sapiens
ataatttatttccaa

SEQ ID NO: 1448042 - DNA, 15 bp, Homo sapiens
cataatttatttcca

SEQ ID NO: 1448043 - DNA, 15 bp, Homo sapiens
acataatttatttcc

SEQ ID NO: 1448044 - DNA, 15 bp, Homo sapiens
cacataatttatttc

SEQ ID NO: 1448045 - DNA, 15 bp, Homo sapiens
tcacataatttattt

SEQ ID NO: 1448046 - DNA, 15 bp, Homo sapiens
ttcacataatttatt

SEQ ID NO: 1448047 - DNA, 15 bp, Homo sapiens
attcacataatttat

SEQ ID NO: 1448048 - DNA, 15 bp, Homo sapiens
gattcacataattta

SEQ ID NO: 1448049 - DNA, 15 bp, Homo sapiens
agattcacataattt

SEQ ID NO: 1448050 - DNA, 15 bp, Homo sapiens
tagattcacataatt

SEQ ID NO: 1448051 - DNA, 15 bp, Homo sapiens
ttagattcacataat

SEQ ID NO: 1448052 - DNA, 15 bp, Homo sapiens
attagattcacataa

SEQ ID NO: 1448053 - DNA, 15 bp, Homo sapiens
aattagattcacata

SEQ ID NO: 1448054 - DNA, 15 bp, Homo sapiens
taattagattcacat

SEQ ID NO: 1448055 - DNA, 15 bp, Homo sapiens
ttaattagattcaca

SEQ ID NO: 1448056 - DNA, 15 bp, Homo sapiens
attaattagattcac

SEQ ID NO: 1448057 - DNA, 15 bp, Homo sapiens
cattaattagattca

SEQ ID NO: 1448058 - DNA, 15 bp, Homo sapiens
gcattaattagattc

SEQ ID NO: 1448059 - DNA, 15 bp, Homo sapiens
ggcattaattagatt

SEQ ID NO: 1448060 - DNA, 15 bp, Homo sapiens
tggcattaattagat

SEQ ID NO: 1448061 - DNA, 15 bp, Homo sapiens
gtggcattaattaga

SEQ ID NO: 1448062 - DNA, 15 bp, Homo sapiens
agtggcattaattag

SEQ ID NO: 1448063 - DNA, 15 bp, Homo sapiens
tagtggcattaatta

SEQ ID NO: 1448064 - DNA, 15 bp, Homo sapiens
ttagtggcattaatt

SEQ ID NO: 1448065 - DNA, 15 bp, Homo sapiens
tttagtggcattaat

SEQ ID NO: 1448066 - DNA, 15 bp, Homo sapiens
atttagtggcattaa

SEQ ID NO: 1448067 - DNA, 15 bp, Homo sapiens
aatttagtggcatta

SEQ ID NO: 1448068 - DNA, 15 bp, Homo sapiens
caatttagtggcatt

SEQ ID NO: 1448069 - DNA, 15 bp, Homo sapiens
acaatttagtggcat

SEQ ID NO: 1448070 - DNA, 15 bp, Homo sapiens
cacaatttagtggca

SEQ ID NO: 1448071 - DNA, 15 bp, Homo sapiens
tcacaatttagtggc

SEQ ID NO: 1448072 - DNA, 15 bp, Homo sapiens
ctcacaatttagtgg

SEQ ID NO: 1448073 - DNA, 15 bp, Homo sapiens
actcacaatttagtg

SEQ ID NO: 1448074 - DNA, 15 bp, Homo sapiens
gactcacaatttagt

SEQ ID NO: 1448075 - DNA, 15 bp, Homo sapiens
agactcacaatttag

SEQ ID NO: 1448076 - DNA, 15 bp, Homo sapiens
tagactcacaattta

SEQ ID NO: 1448077 - DNA, 15 bp, Homo sapiens
ttagactcacaattt

SEQ ID NO: 1448078 - DNA, 15 bp, Homo sapiens
attagactcacaatt

SEQ ID NO: 1448079 - DNA, 15 bp, Homo sapiens
aattagactcacaat

SEQ ID NO: 1448080 - DNA, 15 bp, Homo sapiens
taattagactcacaa

SEQ ID NO: 1448081 - DNA, 15 bp, Homo sapiens
ttaattagactcaca

SEQ ID NO: 1448082 - DNA, 15 bp, Homo sapiens
attaattagactcac

SEQ ID NO: 1448083 - DNA, 15 bp, Homo sapiens
cattaattagactca

SEQ ID NO: 1448084 - DNA, 15 bp, Homo sapiens
gcattaattagactc

SEQ ID NO: 1448085 - DNA, 15 bp, Homo sapiens
ggcattaattagact

SEQ ID NO: 1448086 - DNA, 15 bp, Homo sapiens
tggcattaattagac

SEQ ID NO: 1448087 - DNA, 15 bp, Homo sapiens
gagtggcattaatta

SEQ ID NO: 1448088 - DNA, 15 bp, Homo sapiens
tgagtggcattaatt

SEQ ID NO: 1448089 - DNA, 15 bp, Homo sapiens
ctgagtggcattaat

SEQ ID NO: 1448090 - DNA, 15 bp, Homo sapiens
actgagtggcattaa

SEQ ID NO: 1448091 - DNA, 15 bp, Homo sapiens
aactgagtggcatta

SEQ ID NO: 1448092 - DNA, 15 bp, Homo sapiens
caactgagtggcatt

SEQ ID NO: 1448093 - DNA, 15 bp, Homo sapiens
acaactgagtggcat

SEQ ID NO: 1448094 - DNA, 15 bp, Homo sapiens
tacaactgagtggca

SEQ ID NO: 1448095 - DNA, 15 bp, Homo sapiens
atacaactgagtggc

SEQ ID NO: 1448096 - DNA, 15 bp, Homo sapiens
tatacaactgagtgg

SEQ ID NO: 1448097 - DNA, 15 bp, Homo sapiens
gtatacaactgagtg

SEQ ID NO: 1448098 - DNA, 15 bp, Homo sapiens
agtatacaactgagt

SEQ ID NO: 1448099 - DNA, 15 bp, Homo sapiens
aagtatacaactgag

SEQ ID NO: 1448100 - DNA, 15 bp, Homo sapiens
aaagtatacaactga

SEQ ID NO: 1448101 - DNA, 15 bp, Homo sapiens
taaagtatacaactg

SEQ ID NO: 1448102 - DNA, 15 bp, Homo sapiens
gtaaagtatacaact

SEQ ID NO: 1448103 - DNA, 15 bp, Homo sapiens
ggtaaagtatacaac

SEQ ID NO: 1448104 - DNA, 15 bp, Homo sapiens
tggtaaagtatacaa

SEQ ID NO: 1448105 - DNA, 15 bp, Homo sapiens
gtggtaaagtataca

SEQ ID NO: 1448106 - DNA, 15 bp, Homo sapiens
tgtggtaaagtatac

SEQ ID NO: 1448107 - DNA, 15 bp, Homo sapiens
ttgtggtaaagtata

SEQ ID NO: 1448108 - DNA, 15 bp, Homo sapiens
attgtggtaaagtat

SEQ ID NO: 1448109 - DNA, 15 bp, Homo sapiens
aattgtggtaaagta

SEQ ID NO: 1448110 - DNA, 15 bp, Homo sapiens
aaattgtggtaaagt

SEQ ID NO: 1448111 - DNA, 15 bp, Homo sapiens
aaaattgtggtaaag

SEQ ID NO: 1448112 - DNA, 15 bp, Homo sapiens
aaaaattgtggtaaa

SEQ ID NO: 1448113 - DNA, 15 bp, Homo sapiens
taaaaattgtggtaa

SEQ ID NO: 1448114 - DNA, 15 bp, Homo sapiens
ttaaaaattgtggta

SEQ ID NO: 1448115 - DNA, 15 bp, Homo sapiens
tttaaaaattgtggt

SEQ ID NO: 1448116 - DNA, 15 bp, Homo sapiens
ctttaaaaattgtgg

SEQ ID NO: 1448117 - DNA, 15 bp, Homo sapiens
tctttaaaaattgtg

SEQ ID NO: 1448118 - DNA, 15 bp, Homo sapiens
atctttaaaaattgt

SEQ ID NO: 1448119 - DNA, 15 bp, Homo sapiens
aatctttaaaaattg

SEQ ID NO: 1448120 - DNA, 15 bp, Homo sapiens
gaatctttaaaaatt

SEQ ID NO: 1448121 - DNA, 15 bp, Homo sapiens
tgaatctttaaaaat

SEQ ID NO: 1448122 - DNA, 15 bp, Homo sapiens
gtgaatctttaaaaa

SEQ ID NO: 1448123 - DNA, 15 bp, Homo sapiens
agtgaatctttaaaa

SEQ ID NO: 1448124 - DNA, 15 bp, Homo sapiens
cagtgaatctttaaa

SEQ ID NO: 1448125 - DNA, 15 bp, Homo sapiens
acagtgaatctttaa

SEQ ID NO: 1448126 - DNA, 15 bp, Homo sapiens
cacagtgaatcttta

SEQ ID NO: 1448127 - DNA, 15 bp, Homo sapiens
ccacagtgaatcttt

SEQ ID NO: 1448128 - DNA, 15 bp, Homo sapiens
accacagtgaatctt

SEQ ID NO: 1448129 - DNA, 15 bp, Homo sapiens
aaccacagtgaatct

SEQ ID NO: 1448130 - DNA, 15 bp, Homo sapiens
taaccacagtgaatc

SEQ ID NO: 1448131 - DNA, 15 bp, Homo sapiens
ctaaccacagtgaat

SEQ ID NO: 1448132 - DNA, 15 bp, Homo sapiens
actaaccacagtgaa

SEQ ID NO: 1448133 - DNA, 15 bp, Homo sapiens
aactaaccacagtga

SEQ ID NO: 1448134 - DNA, 15 bp, Homo sapiens
gaactaaccacagtg

SEQ ID NO: 1448135 - DNA, 15 bp, Homo sapiens
agaactaaccacagt

SEQ ID NO: 1448136 - DNA, 15 bp, Homo sapiens
tagaactaaccacag

SEQ ID NO: 1448137 - DNA, 15 bp, Homo sapiens
atagaactaaccaca

SEQ ID NO: 1448138 - DNA, 15 bp, Homo sapiens
tatagaactaaccac

SEQ ID NO: 1448139 - DNA, 15 bp, Homo sapiens
ttatagaactaacca

SEQ ID NO: 1448140 - DNA, 15 bp, Homo sapiens
attatagaactaacc

SEQ ID NO: 1448141 - DNA, 15 bp, Homo sapiens
gattatagaactaac

SEQ ID NO: 1448142 - DNA, 15 bp, Homo sapiens
agattatagaactaa

SEQ ID NO: 1448143 - DNA, 15 bp, Homo sapiens
gagattatagaacta

SEQ ID NO: 1448144 - DNA, 15 bp, Homo sapiens
tgagattatagaact

SEQ ID NO: 1448145 - DNA, 15 bp, Homo sapiens
ctgagattatagaac

SEQ ID NO: 1448146 - DNA, 15 bp, Homo sapiens
actgagattatagaa

SEQ ID NO: 1448147 - DNA, 15 bp, Homo sapiens
cactgagattataga

SEQ ID NO: 1448148 - DNA, 15 bp, Homo sapiens
acactgagattatag

SEQ ID NO: 1448149 - DNA, 15 bp, Homo sapiens
cacactgagattata

SEQ ID NO: 1448150 - DNA, 15 bp, Homo sapiens
ccacactgagattat

SEQ ID NO: 1448151 - DNA, 15 bp, Homo sapiens
tccacactgagatta

SEQ ID NO: 1448152 - DNA, 15 bp, Homo sapiens
ctccacactgagatt

SEQ ID NO: 1448153 - DNA, 15 bp, Homo sapiens
cctccacactgagat

SEQ ID NO: 1448154 - DNA, 15 bp, Homo sapiens
acctccacactgaga

SEQ ID NO: 1448155 - DNA, 15 bp, Homo sapiens
tacctccacactgag

SEQ ID NO: 1448156 - DNA, 15 bp, Homo sapiens
ctacctccacactga

SEQ ID NO: 1448157 - DNA, 15 bp, Homo sapiens
tctacctccacactg

SEQ ID NO: 1448158 - DNA, 15 bp, Homo sapiens
gtctacctccacact

SEQ ID NO: 1448159 - DNA, 15 bp, Homo sapiens
ggtctacctccacac

SEQ ID NO: 1448160 - DNA, 15 bp, Homo sapiens
tggtctacctccaca

SEQ ID NO: 1448161 - DNA, 15 bp, Homo sapiens
atggtctacctccac

SEQ ID NO: 1448162 - DNA, 15 bp, Homo sapiens
tatggtctacctcca

SEQ ID NO: 1448163 - DNA, 15 bp, Homo sapiens
atatggtctacctcc

SEQ ID NO: 1448164 - DNA, 15 bp, Homo sapiens
aatatggtctacctc

SEQ ID NO: 1448165 - DNA, 15 bp, Homo sapiens
caatatggtctacct

SEQ ID NO: 1448166 - DNA, 15 bp, Homo sapiens
acaatatggtctacc

SEQ ID NO: 1448167 - DNA, 15 bp, Homo sapiens
gacaatatggtctac

SEQ ID NO: 1448168 - DNA, 15 bp, Homo sapiens
ggacaatatggtcta

SEQ ID NO: 1448169 - DNA, 15 bp, Homo sapiens
tggacaatatggtct

SEQ ID NO: 1448170 - DNA, 15 bp, Homo sapiens
ttggacaatatggtc

SEQ ID NO: 1448171 - DNA, 15 bp, Homo sapiens
cttggacaatatggt

SEQ ID NO: 1448172 - DNA, 15 bp, Homo sapiens
acttggacaatatgg

SEQ ID NO: 1448173 - DNA, 15 bp, Homo sapiens
aacttggacaatatg

SEQ ID NO: 1448174 - DNA, 15 bp, Homo sapiens
aaacttggacaatat

SEQ ID NO: 1448175 - DNA, 15 bp, Homo sapiens
aaaacttggacaata

SEQ ID NO: 1448176 - DNA, 15 bp, Homo sapiens
taaaacttggacaat

SEQ ID NO: 1448177 - DNA, 15 bp, Homo sapiens
gtaaaacttggacaa

SEQ ID NO: 1448178 - DNA, 15 bp, Homo sapiens
tgtaaaacttggaca

SEQ ID NO: 1448179 - DNA, 15 bp, Homo sapiens
ctgtaaaacttggac

SEQ ID NO: 1448180 - DNA, 15 bp, Homo sapiens
tctgtaaaacttgga

SEQ ID NO: 1448181 - DNA, 15 bp, Homo sapiens
ttctgtaaaacttgg

SEQ ID NO: 1448182 - DNA, 15 bp, Homo sapiens
cttctgtaaaacttg

SEQ ID NO: 1448183 - DNA, 15 bp, Homo sapiens
tcttctgtaaaactt

SEQ ID NO: 1448184 - DNA, 15 bp, Homo sapiens
ctcttctgtaaaact

SEQ ID NO: 1448185 - DNA, 15 bp, Homo sapiens
tctcttctgtaaaac

SEQ ID NO: 1448186 - DNA, 15 bp, Homo sapiens
gtctcttctgtaaaa

SEQ ID NO: 1448187 - DNA, 15 bp, Homo sapiens
tgtctcttctgtaaa

SEQ ID NO: 1448188 - DNA, 15 bp, Homo sapiens
ttgtctcttctgtaa

SEQ ID NO: 1448189 - DNA, 15 bp, Homo sapiens
gttgtctcttctgta

SEQ ID NO: 1448190 - DNA, 15 bp, Homo sapiens
tgttgtctcttctgt

SEQ ID NO: 1448191 - DNA, 15 bp, Homo sapiens
ctgttgtctcttctg

SEQ ID NO: 1448192 - DNA, 15 bp, Homo sapiens
tctgttgtctcttct

SEQ ID NO: 1448193 - DNA, 15 bp, Homo sapiens
ctctgttgtctcttc

SEQ ID NO: 1448194 - DNA, 15 bp, Homo sapiens
cctctgttgtctctt

SEQ ID NO: 1448195 - DNA, 15 bp, Homo sapiens
gcctctgttgtctct

SEQ ID NO: 1448196 - DNA, 15 bp, Homo sapiens
agcctctgttgtctc

SEQ ID NO: 1448197 - DNA, 15 bp, Homo sapiens
aagcctctgttgtct

SEQ ID NO: 1448198 - DNA, 15 bp, Homo sapiens
aaagcctctgttgtc

SEQ ID NO: 1448199 - DNA, 15 bp, Homo sapiens
taaagcctctgttgt

SEQ ID NO: 1448200 - DNA, 15 bp, Homo sapiens
ttaaagcctctgttg

SEQ ID NO: 1448201 - DNA, 15 bp, Homo sapiens
cttaaagcctctgtt

SEQ ID NO: 1448202 - DNA, 15 bp, Homo sapiens
tcttaaagcctctgt

SEQ ID NO: 1448203 - DNA, 15 bp, Homo sapiens
atcttaaagcctctg

SEQ ID NO: 1448204 - DNA, 15 bp, Homo sapiens
gatcttaaagcctct

SEQ ID NO: 1448205 - DNA, 15 bp, Homo sapiens
tgatcttaaagcctc

SEQ ID NO: 1448206 - DNA, 15 bp, Homo sapiens
gtgatcttaaagcct

SEQ ID NO: 1448207 - DNA, 15 bp, Homo sapiens
tgtgatcttaaagcc

SEQ ID NO: 1448208 - DNA, 15 bp, Homo sapiens
atgtgatcttaaagc

SEQ ID NO: 1448209 - DNA, 15 bp, Homo sapiens
catgtgatcttaaag

SEQ ID NO: 1448210 - DNA, 15 bp, Homo sapiens
ccatgtgatcttaaa

SEQ ID NO: 1448211 - DNA, 15 bp, Homo sapiens
gccatgtgatcttaa

SEQ ID NO: 1448212 - DNA, 15 bp, Homo sapiens
agccatgtgatctta

SEQ ID NO: 1448213 - DNA, 15 bp, Homo sapiens
cctagccatgtgatc

SEQ ID NO: 1448214 - DNA, 15 bp, Homo sapiens
ccctagccatgtgat

SEQ ID NO: 1448215 - DNA, 15 bp, Homo sapiens
tccctagccatgtga

SEQ ID NO: 1448216 - DNA, 15 bp, Homo sapiens
ctccctagccatgtg

SEQ ID NO: 1448217 - DNA, 15 bp, Homo sapiens
cctccctagccatgt

SEQ ID NO: 1448218 - DNA, 15 bp, Homo sapiens
tcctccctagccatg

SEQ ID NO: 1448219 - DNA, 15 bp, Homo sapiens
ctcctccctagccat

SEQ ID NO: 1448220 - DNA, 15 bp, Homo sapiens
gctcctccctagcca

SEQ ID NO: 1448221 - DNA, 15 bp, Homo sapiens
tgctcctccctagcc

SEQ ID NO: 1448222 - DNA, 15 bp, Homo sapiens
ctgctcctccctagc

SEQ ID NO: 1448223 - DNA, 15 bp, Homo sapiens
actgctcctccctag

SEQ ID NO: 1448224 - DNA, 15 bp, Homo sapiens
cactgctcctcccta

SEQ ID NO: 1448225 - DNA, 15 bp, Homo sapiens
acactgctcctccct

SEQ ID NO: 1448226 - DNA, 15 bp, Homo sapiens
gacactgctcctccc

SEQ ID NO: 1448227 - DNA, 15 bp, Homo sapiens
tgacactgctcctcc

SEQ ID NO: 1448228 - DNA, 15 bp, Homo sapiens
ctgacactgctcctc

SEQ ID NO: 1448229 - DNA, 15 bp, Homo sapiens
cctgacactgctcct

SEQ ID NO: 1448230 - DNA, 15 bp, Homo sapiens
tcctgacactgctcc

SEQ ID NO: 1448231 - DNA, 15 bp, Homo sapiens
atcctgacactgctc

SEQ ID NO: 1448232 - DNA, 15 bp, Homo sapiens
gatcctgacactgct

SEQ ID NO: 1448233 - DNA, 15 bp, Homo sapiens
agatcctgacactgc

SEQ ID NO: 1448234 - DNA, 15 bp, Homo sapiens
cagatcctgacactg

SEQ ID NO: 1448235 - DNA, 15 bp, Homo sapiens
gcagatcctgacact

SEQ ID NO: 1448236 - DNA, 15 bp, Homo sapiens
tgcagatcctgacac

SEQ ID NO: 1448237 - DNA, 15 bp, Homo sapiens
gtgcagatcctgaca

SEQ ID NO: 1448238 - DNA, 15 bp, Homo sapiens
ggtgcagatcctgac

SEQ ID NO: 1448239 - DNA, 15 bp, Homo sapiens
aggtgcagatcctga

SEQ ID NO: 1448240 - DNA, 15 bp, Homo sapiens
caggtgcagatcctg

SEQ ID NO: 1448241 - DNA, 15 bp, Homo sapiens
tcaggtgcagatcct

SEQ ID NO: 1448242 - DNA, 15 bp, Homo sapiens
ctcaggtgcagatcc

SEQ ID NO: 1448243 - DNA, 15 bp, Homo sapiens
actcaggtgcagatc

SEQ ID NO: 1448244 - DNA, 15 bp, Homo sapiens
tactcaggtgcagat

SEQ ID NO: 1448245 - DNA, 15 bp, Homo sapiens
gtactcaggtgcaga

SEQ ID NO: 1448246 - DNA, 15 bp, Homo sapiens
agtactcaggtgcag

SEQ ID NO: 1448247 - DNA, 15 bp, Homo sapiens
aagtactcaggtgca

SEQ ID NO: 1448248 - DNA, 15 bp, Homo sapiens
caagtactcaggtgc

SEQ ID NO: 1448249 - DNA, 15 bp, Homo sapiens
tcaagtactcaggtg

SEQ ID NO: 1448250 - DNA, 15 bp, Homo sapiens
gtcaagtactcaggt

SEQ ID NO: 1448251 - DNA, 15 bp, Homo sapiens
ggtcaagtactcagg

SEQ ID NO: 1448252 - DNA, 15 bp, Homo sapiens
aggtcaagtactcag

SEQ ID NO: 1448253 - DNA, 15 bp, Homo sapiens
aaggtcaagtactca

SEQ ID NO: 1448254 - DNA, 15 bp, Homo sapiens
gaaggtcaagtactc

SEQ ID NO: 1448255 - DNA, 15 bp, Homo sapiens
tgaaggtcaagtact

SEQ ID NO: 1448256 - DNA, 15 bp, Homo sapiens
ctgaaggtcaagtac

SEQ ID NO: 1448257 - DNA, 15 bp, Homo sapiens
tctgaaggtcaagta

SEQ ID NO: 1448258 - DNA, 15 bp, Homo sapiens
gtctgaaggtcaagt

SEQ ID NO: 1448259 - DNA, 15 bp, Homo sapiens
agtctgaaggtcaag

SEQ ID NO: 1448260 - DNA, 15 bp, Homo sapiens
cagtctgaaggtcaa

SEQ ID NO: 1448261 - DNA, 15 bp, Homo sapiens
acagtctgaaggtca

SEQ ID NO: 1448262 - DNA, 15 bp, Homo sapiens
cacagtctgaaggtc

SEQ ID NO: 1448263 - DNA, 15 bp, Homo sapiens
ccacagtctgaaggt

SEQ ID NO: 1448264 - DNA, 15 bp, Homo sapiens
cccacagtctgaagg

SEQ ID NO: 1448265 - DNA, 15 bp, Homo sapiens
acccacagtctgaag

SEQ ID NO: 1448266 - DNA, 15 bp, Homo sapiens
cacccacagtctgaa

SEQ ID NO: 1448267 - DNA, 15 bp, Homo sapiens
acacccacagtctga

SEQ ID NO: 1448268 - DNA, 15 bp, Homo sapiens
gacacccacagtctg

SEQ ID NO: 1448269 - DNA, 15 bp, Homo sapiens
gtgacacccacagtc

SEQ ID NO: 1448270 - DNA, 15 bp, Homo sapiens
ggtgacacccacagt

SEQ ID NO: 1448271 - DNA, 15 bp, Homo sapiens
tggtgacacccacag

SEQ ID NO: 1448272 - DNA, 15 bp, Homo sapiens
ttggtgacacccaca

SEQ ID NO: 1448273 - DNA, 15 bp, Homo sapiens
cttggtgacacccac

SEQ ID NO: 1448274 - DNA, 15 bp, Homo sapiens
acttggtgacaccca

SEQ ID NO: 1448275 - DNA, 15 bp, Homo sapiens
aacttggtgacaccc

SEQ ID NO: 1448276 - DNA, 15 bp, Homo sapiens
gaacttggtgacacc

SEQ ID NO: 1448277 - DNA, 15 bp, Homo sapiens
tgaacttggtgacac

SEQ ID NO: 1448278 - DNA, 15 bp, Homo sapiens
atgaacttggtgaca

SEQ ID NO: 1448279 - DNA, 15 bp, Homo sapiens
tatgaacttggtgac

SEQ ID NO: 1448280 - DNA, 15 bp, Homo sapiens
atatgaacttggtga

SEQ ID NO: 1448281 - DNA, 15 bp, Homo sapiens
aatatgaacttggtg

SEQ ID NO: 1448282 - DNA, 15 bp, Homo sapiens
caatatgaacttggt

SEQ ID NO: 1448283 - DNA, 15 bp, Homo sapiens
gcaatatgaacttgg

SEQ ID NO: 1448284 - DNA, 15 bp, Homo sapiens
ggcaatatgaacttg

SEQ ID NO: 1448285 - DNA, 15 bp, Homo sapiens
tggcaatatgaactt

SEQ ID NO: 1448286 - DNA, 15 bp, Homo sapiens
atggcaatatgaact

SEQ ID NO: 1448287 - DNA, 15 bp, Homo sapiens
gatggcaatatgaac

SEQ ID NO: 1448288 - DNA, 15 bp, Homo sapiens
tgatggcaatatgaa

SEQ ID NO: 1448289 - DNA, 15 bp, Homo sapiens
gtgatggcaatatga

SEQ ID NO: 1448290 - DNA, 15 bp, Homo sapiens
agtgatggcaatatg

SEQ ID NO: 1448291 - DNA, 15 bp, Homo sapiens
cagtgatggcaatat

SEQ ID NO: 1448292 - DNA, 15 bp, Homo sapiens
acagtgatggcaata

SEQ ID NO: 1448293 - DNA, 15 bp, Homo sapiens
aacagtgatggcaat

SEQ ID NO: 1448294 - DNA, 15 bp, Homo sapiens
caacagtgatggcaa

SEQ ID NO: 1448295 - DNA, 15 bp, Homo sapiens
ccaacagtgatggca

SEQ ID NO: 1448296 - DNA, 15 bp, Homo sapiens
cccaacagtgatggc

SEQ ID NO: 1448297 - DNA, 15 bp, Homo sapiens
tcccaacagtgatgg

SEQ ID NO: 1448298 - DNA, 15 bp, Homo sapiens
ttcccaacagtgatg

SEQ ID NO: 1448299 - DNA, 15 bp, Homo sapiens
gttcccaacagtgat

SEQ ID NO: 1448300 - DNA, 15 bp, Homo sapiens
tgttcccaacagtga

SEQ ID NO: 1448301 - DNA, 15 bp, Homo sapiens
ctgttcccaacagtg

SEQ ID NO: 1448302 - DNA, 15 bp, Homo sapiens
tctgttcccaacagt

SEQ ID NO: 1448303 - DNA, 15 bp, Homo sapiens
atctgttcccaacag

SEQ ID NO: 1448304 - DNA, 15 bp, Homo sapiens
aatctgttcccaaca

SEQ ID NO: 1448305 - DNA, 15 bp, Homo sapiens
aaatctgttcccaac

SEQ ID NO: 1448306 - DNA, 15 bp, Homo sapiens
caaatctgttcccaa

SEQ ID NO: 1448307 - DNA, 15 bp, Homo sapiens
acaaatctgttccca

SEQ ID NO: 1448308 - DNA, 15 bp, Homo sapiens
aacaaatctgttccc

SEQ ID NO: 1448309 - DNA, 15 bp, Homo sapiens
gaacaaatctgttcc

SEQ ID NO: 1448310 - DNA, 15 bp, Homo sapiens
agaacaaatctgttc

SEQ ID NO: 1448311 - DNA, 15 bp, Homo sapiens
gagaacaaatctgtt

SEQ ID NO: 1448312 - DNA, 15 bp, Homo sapiens
tgagaacaaatctgt

SEQ ID NO: 1448313 - DNA, 15 bp, Homo sapiens
atgagaacaaatctg

SEQ ID NO: 1448314 - DNA, 15 bp, Homo sapiens
gatgagaacaaatct

SEQ ID NO: 1448315 - DNA, 15 bp, Homo sapiens
tgatgagaacaaatc

SEQ ID NO: 1448316 - DNA, 15 bp, Homo sapiens
atgatgagaacaaat

SEQ ID NO: 1448317 - DNA, 15 bp, Homo sapiens
aatgatgagaacaaa

SEQ ID NO: 1448318 - DNA, 15 bp, Homo sapiens
aaatgatgagaacaa

SEQ ID NO: 1448319 - DNA, 15 bp, Homo sapiens
caaatgatgagaaca

SEQ ID NO: 1448320 - DNA, 15 bp, Homo sapiens
ccaaatgatgagaac

SEQ ID NO: 1448321 - DNA, 15 bp, Homo sapiens
cccaaatgatgagaa

SEQ ID NO: 1448322 - DNA, 15 bp, Homo sapiens
tcccaaatgatgaga

SEQ ID NO: 1448323 - DNA, 15 bp, Homo sapiens
atcccaaatgatgag

SEQ ID NO: 1448324 - DNA, 15 bp, Homo sapiens
catcccaaatgatga

SEQ ID NO: 1448325 - DNA, 15 bp, Homo sapiens
gcatcccaaatgatg

SEQ ID NO: 1448326 - DNA, 15 bp, Homo sapiens
agcatcccaaatgat

SEQ ID NO: 1448327 - DNA, 15 bp, Homo sapiens
aagcatcccaaatga

SEQ ID NO: 1448328 - DNA, 15 bp, Homo sapiens
aaagcatcccaaatg

SEQ ID NO: 1448329 - DNA, 15 bp, Homo sapiens
aaaagcatcccaaat

SEQ ID NO: 1448330 - DNA, 15 bp, Homo sapiens
gaaaagcatcccaaa

SEQ ID NO: 1448331 - DNA, 15 bp, Homo sapiens
agaaaagcatcccaa

SEQ ID NO: 1448332 - DNA, 15 bp, Homo sapiens
aagaaaagcatccca

SEQ ID NO: 1448333 - DNA, 15 bp, Homo sapiens
taagaaaagcatccc

SEQ ID NO: 1448334 - DNA, 15 bp, Homo sapiens
gtaagaaaagcatcc

SEQ ID NO: 1448335 - DNA, 15 bp, Homo sapiens
agtaagaaaagcatc

SEQ ID NO: 1448336 - DNA, 15 bp, Homo sapiens
cagtaagaaaagcat

SEQ ID NO: 1448337 - DNA, 15 bp, Homo sapiens
acagtaagaaaagca

SEQ ID NO: 1448338 - DNA, 15 bp, Homo sapiens
cacagtaagaaaagc

SEQ ID NO: 1448339 - DNA, 15 bp, Homo sapiens
gcacagtaagaaaag

SEQ ID NO: 1448340 - DNA, 15 bp, Homo sapiens
ggcacagtaagaaaa

SEQ ID NO: 1448341 - DNA, 15 bp, Homo sapiens
gggcacagtaagaaa

SEQ ID NO: 1448342 - DNA, 15 bp, Homo sapiens
agggcacagtaagaa

SEQ ID NO: 1448343 - DNA, 15 bp, Homo sapiens
cagggcacagtaaga

SEQ ID NO: 1448344 - DNA, 15 bp, Homo sapiens
tcagggcacagtaag

SEQ ID NO: 1448345 - DNA, 15 bp, Homo sapiens
ctcagggcacagtaa

SEQ ID NO: 1448346 - DNA, 15 bp, Homo sapiens
gctcagggcacagta

SEQ ID NO: 1448347 - DNA, 15 bp, Homo sapiens
agctcagggcacagt

SEQ ID NO: 1448348 - DNA, 15 bp, Homo sapiens
cagctcagggcacag

SEQ ID NO: 1448349 - DNA, 15 bp, Homo sapiens
ccagctcagggcaca

SEQ ID NO: 1448350 - DNA, 15 bp, Homo sapiens
gccagctcagggcac

SEQ ID NO: 1448351 - DNA, 15 bp, Homo sapiens
ggccagctcagggca

SEQ ID NO: 1448352 - DNA, 15 bp, Homo sapiens
tggccagctcagggc

SEQ ID NO: 1448353 - DNA, 15 bp, Homo sapiens
ctggccagctcaggg

SEQ ID NO: 1448354 - DNA, 15 bp, Homo sapiens
actggccagctcagg

SEQ ID NO: 1448355 - DNA, 15 bp, Homo sapiens
cactggccagctcag

SEQ ID NO: 1448356 - DNA, 15 bp, Homo sapiens
gcactggccagctca

SEQ ID NO: 1448357 - DNA, 15 bp, Homo sapiens
tgcactggccagctc

SEQ ID NO: 1448358 - DNA, 15 bp, Homo sapiens
ctgcactggccagct

SEQ ID NO: 1448359 - DNA, 15 bp, Homo sapiens
tctgcactggccagc

SEQ ID NO: 1448360 - DNA, 15 bp, Homo sapiens
ctctgcactggccag

SEQ ID NO: 1448361 - DNA, 15 bp, Homo sapiens
cctctgcactggcca

SEQ ID NO: 1448362 - DNA, 15 bp, Homo sapiens
tcctctgcactggcc

SEQ ID NO: 1448363 - DNA, 15 bp, Homo sapiens
ttcctctgcactggc

SEQ ID NO: 1448364 - DNA, 15 bp, Homo sapiens
cttcctctgcactgg

SEQ ID NO: 1448365 - DNA, 15 bp, Homo sapiens
ccttcctctgcactg

SEQ ID NO: 1448366 - DNA, 15 bp, Homo sapiens
gccttcctctgcact

SEQ ID NO: 1448367 - DNA, 15 bp, Homo sapiens
tgccttcctctgcac

SEQ ID NO: 1448368 - DNA, 15 bp, Homo sapiens
ctgccttcctctgca

SEQ ID NO: 1448369 - DNA, 15 bp, Homo sapiens
tctgccttcctctgc

SEQ ID NO: 1448370 - DNA, 15 bp, Homo sapiens
ttctgccttcctctg

SEQ ID NO: 1448371 - DNA, 15 bp, Homo sapiens
gttctgccttcctct

SEQ ID NO: 1448372 - DNA, 15 bp, Homo sapiens
tgttctgccttcctc

SEQ ID NO: 1448373 - DNA, 15 bp, Homo sapiens
atgttctgccttcct

SEQ ID NO: 1448374 - DNA, 15 bp, Homo sapiens
aatgttctgccttcc

SEQ ID NO: 1448375 - DNA, 15 bp, Homo sapiens
aaatgttctgccttc

SEQ ID NO: 1448376 - DNA, 15 bp, Homo sapiens
gaaatgttctgcctt

SEQ ID NO: 1448377 - DNA, 15 bp, Homo sapiens
agaaatgttctgcct

SEQ ID NO: 1448378 - DNA, 15 bp, Homo sapiens
tagaaatgttctgcc

SEQ ID NO: 1448379 - DNA, 15 bp, Homo sapiens
gtagaaatgttctgc

SEQ ID NO: 1448380 - DNA, 15 bp, Homo sapiens
ggtagaaatgttctg

SEQ ID NO: 1448381 - DNA, 15 bp, Homo sapiens
tggtagaaatgttct

SEQ ID NO: 1448382 - DNA, 15 bp, Homo sapiens
gtggtagaaatgttc

SEQ ID NO: 1448383 - DNA, 15 bp, Homo sapiens
ggtggtagaaatgtt

SEQ ID NO: 1448384 - DNA, 15 bp, Homo sapiens
gggtggtagaaatgt

SEQ ID NO: 1448385 - DNA, 15 bp, Homo sapiens
agggtggtagaaatg

SEQ ID NO: 1448386 - DNA, 15 bp, Homo sapiens
aagggtggtagaaat

SEQ ID NO: 1448387 - DNA, 15 bp, Homo sapiens
caagggtggtagaaa

SEQ ID NO: 1448388 - DNA, 15 bp, Homo sapiens
tcaagggtggtagaa

SEQ ID NO: 1448389 - DNA, 15 bp, Homo sapiens
atcaagggtggtaga

SEQ ID NO: 1448390 - DNA, 15 bp, Homo sapiens
tatcaagggtggtag

SEQ ID NO: 1448391 - DNA, 15 bp, Homo sapiens
ttatcaagggtggta

SEQ ID NO: 1448392 - DNA, 15 bp, Homo sapiens
tttatcaagggtggt

SEQ ID NO: 1448393 - DNA, 15 bp, Homo sapiens
atttatcaagggtgg

SEQ ID NO: 1448394 - DNA, 15 bp, Homo sapiens
gatttatcaagggtg

SEQ ID NO: 1448395 - DNA, 15 bp, Homo sapiens
ggatttatcaagggt

SEQ ID NO: 1448396 - DNA, 15 bp, Homo sapiens
tggatttatcaaggg

SEQ ID NO: 1448397 - DNA, 15 bp, Homo sapiens
ctggatttatcaagg

SEQ ID NO: 1448398 - DNA, 15 bp, Homo sapiens
tctggatttatcaag

SEQ ID NO: 1448399 - DNA, 15 bp, Homo sapiens
ctctggatttatcaa

SEQ ID NO: 1448400 - DNA, 15 bp, Homo sapiens
tctctggatttatca

SEQ ID NO: 1448401 - DNA, 15 bp, Homo sapiens
gtctctggatttatc

SEQ ID NO: 1448402 - DNA, 15 bp, Homo sapiens
agtctctggatttat

SEQ ID NO: 1448403 - DNA, 15 bp, Homo sapiens
cagtctctggattta

SEQ ID NO: 1448404 - DNA, 15 bp, Homo sapiens
tcagtctctggattt

SEQ ID NO: 1448405 - DNA, 15 bp, Homo sapiens
ttcagtctctggatt

SEQ ID NO: 1448406 - DNA, 15 bp, Homo sapiens
tttcagtctctggat

SEQ ID NO: 1448407 - DNA, 15 bp, Homo sapiens
gtttcagtctctgga

SEQ ID NO: 1448408 - DNA, 15 bp, Homo sapiens
agtttcagtctctgg

SEQ ID NO: 1448409 - DNA, 15 bp, Homo sapiens
gagtttcagtctctg

SEQ ID NO: 1448410 - DNA, 15 bp, Homo sapiens
tgagtttcagtctct

SEQ ID NO: 1448411 - DNA, 15 bp, Homo sapiens
ctgagtttcagtctc

SEQ ID NO: 1448412 - DNA, 15 bp, Homo sapiens
actgagtttcagtct

SEQ ID NO: 1448413 - DNA, 15 bp, Homo sapiens
aactgagtttcagtc

SEQ ID NO: 1448414 - DNA, 15 bp, Homo sapiens
taactgagtttcagt

SEQ ID NO: 1448415 - DNA, 15 bp, Homo sapiens
ttaactgagtttcag

SEQ ID NO: 1448416 - DNA, 15 bp, Homo sapiens
gttaactgagtttca

SEQ ID NO: 1448417 - DNA, 15 bp, Homo sapiens
cgttaactgagtttc

SEQ ID NO: 1448418 - DNA, 15 bp, Homo sapiens
tcgttaactgagttt

SEQ ID NO: 1448419 - DNA, 15 bp, Homo sapiens
gtcgttaactgagtt

SEQ ID NO: 1448420 - DNA, 15 bp, Homo sapiens
tgtcgttaactgagt

SEQ ID NO: 1448421 - DNA, 15 bp, Homo sapiens
atgtcgttaactgag

SEQ ID NO: 1448422 - DNA, 15 bp, Homo sapiens
catgtcgttaactga

SEQ ID NO: 1448423 - DNA, 15 bp, Homo sapiens
ccatgtcgttaactg

SEQ ID NO: 1448424 - DNA, 15 bp, Homo sapiens
gccatgtcgttaact

SEQ ID NO: 1448425 - DNA, 15 bp, Homo sapiens
tgccatgtcgttaac

SEQ ID NO: 1448426 - DNA, 15 bp, Homo sapiens
atgccatgtcgttaa

SEQ ID NO: 1448427 - DNA, 15 bp, Homo sapiens
catgccatgtcgtta

SEQ ID NO: 1448428 - DNA, 15 bp, Homo sapiens
tcatgccatgtcgtt

SEQ ID NO: 1448429 - DNA, 15 bp, Homo sapiens
ctcatgccatgtcgt

SEQ ID NO: 1448430 - DNA, 15 bp, Homo sapiens
gctcatgccatgtcg

SEQ ID NO: 1448431 - DNA, 15 bp, Homo sapiens
agctcatgccatgtc

SEQ ID NO: 1448432 - DNA, 15 bp, Homo sapiens
aagctcatgccatgt

SEQ ID NO: 1448433 - DNA, 15 bp, Homo sapiens
aaagctcatgccatg

SEQ ID NO: 1448434 - DNA, 15 bp, Homo sapiens
aaaagctcatgccat

SEQ ID NO: 1448435 - DNA, 15 bp, Homo sapiens
aaaaagctcatgcca

SEQ ID NO: 1448436 - DNA, 15 bp, Homo sapiens
aaaaaagctcatgcc

SEQ ID NO: 1448437 - DNA, 15 bp, Homo sapiens
caaaaaagctcatgc

SEQ ID NO: 1448438 - DNA, 15 bp, Homo sapiens
ccaaaaaagctcatg

SEQ ID NO: 1448439 - DNA, 15 bp, Homo sapiens
gccaaaaaagctcat

SEQ ID NO: 1448440 - DNA, 15 bp, Homo sapiens
tgccaaaaaagctca

SEQ ID NO: 1448441 - DNA, 15 bp, Homo sapiens
ctgccaaaaaagctc

SEQ ID NO: 1448442 - DNA, 15 bp, Homo sapiens
gctgccaaaaaagct

SEQ ID NO: 1448443 - DNA, 15 bp, Homo sapiens
agctgccaaaaaagc

SEQ ID NO: 1448444 - DNA, 15 bp, Homo sapiens
tagctgccaaaaaag

SEQ ID NO: 1448445 - DNA, 15 bp, Homo sapiens
gtagctgccaaaaaa

SEQ ID NO: 1448446 - DNA, 15 bp, Homo sapiens
tgtagctgccaaaaa

SEQ ID NO: 1448447 - DNA, 15 bp, Homo sapiens
ctgtagctgccaaaa

SEQ ID NO: 1448448 - DNA, 15 bp, Homo sapiens
gtgctgtagctgcca

SEQ ID NO: 1448449 - DNA, 15 bp, Homo sapiens
tgtgctgtagctgcc

SEQ ID NO: 1448450 - DNA, 15 bp, Homo sapiens
gtgtgctgtagctgc

SEQ ID NO: 1448451 - DNA, 15 bp, Homo sapiens
agtgtgctgtagctg

SEQ ID NO: 1448452 - DNA, 15 bp, Homo sapiens
tagtgtgctgtagct

SEQ ID NO: 1448453 - DNA, 15 bp, Homo sapiens
atagtgtgctgtagc

SEQ ID NO: 1448454 - DNA, 15 bp, Homo sapiens
aatagtgtgctgtag

SEQ ID NO: 1448455 - DNA, 15 bp, Homo sapiens
caatagtgtgctgta

SEQ ID NO: 1448456 - DNA, 15 bp, Homo sapiens
tcaatagtgtgctgt

SEQ ID NO: 1448457 - DNA, 15 bp, Homo sapiens
atcaatagtgtgctg

SEQ ID NO: 1448458 - DNA, 15 bp, Homo sapiens
aatcaatagtgtgct

SEQ ID NO: 1448459 - DNA, 15 bp, Homo sapiens
gaatcaatagtgtgc

SEQ ID NO: 1448460 - DNA, 15 bp, Homo sapiens
tgaatcaatagtgtg

SEQ ID NO: 1448461 - DNA, 15 bp, Homo sapiens
atgaatcaatagtgt

SEQ ID NO: 1448462 - DNA, 15 bp, Homo sapiens
tatgaatcaatagtg

SEQ ID NO: 1448463 - DNA, 15 bp, Homo sapiens
atatgaatcaatagt

SEQ ID NO: 1448464 - DNA, 15 bp, Homo sapiens
catatgaatcaatag

SEQ ID NO: 1448465 - DNA, 15 bp, Homo sapiens
ccatatgaatcaata

SEQ ID NO: 1448466 - DNA, 15 bp, Homo sapiens
tccatatgaatcaat

SEQ ID NO: 1448467 - DNA, 15 bp, Homo sapiens
ctccatatgaatcaa

SEQ ID NO: 1448468 - DNA, 15 bp, Homo sapiens
gctccatatgaatca

SEQ ID NO: 1448469 - DNA, 15 bp, Homo sapiens
agctccatatgaatc

SEQ ID NO: 1448470 - DNA, 15 bp, Homo sapiens
aagctccatatgaat

SEQ ID NO: 1448471 - DNA, 15 bp, Homo sapiens
taagctccatatgaa

SEQ ID NO: 1448472 - DNA, 15 bp, Homo sapiens
ataagctccatatga

SEQ ID NO: 1448473 - DNA, 15 bp, Homo sapiens
tataagctccatatg

SEQ ID NO: 1448474 - DNA, 15 bp, Homo sapiens
gtataagctccatat

SEQ ID NO: 1448475 - DNA, 15 bp, Homo sapiens
agtataagctccata

SEQ ID NO: 1448476 - DNA, 15 bp, Homo sapiens
aagtataagctccat

SEQ ID NO: 1448477 - DNA, 15 bp, Homo sapiens
taagtataagctcca

SEQ ID NO: 1448478 - DNA, 15 bp, Homo sapiens
ttaagtataagctcc

SEQ ID NO: 1448479 - DNA, 15 bp, Homo sapiens
attaagtataagctc

SEQ ID NO: 1448480 - DNA, 15 bp, Homo sapiens
aattaagtataagct

SEQ ID NO: 1448481 - DNA, 15 bp, Homo sapiens
taattaagtataagc

SEQ ID NO: 1448482 - DNA, 15 bp, Homo sapiens
ttaattaagtataag

SEQ ID NO: 1448483 - DNA, 15 bp, Homo sapiens
tttaattaagtataa

SEQ ID NO: 1448484 - DNA, 15 bp, Homo sapiens
atttaattaagtata

SEQ ID NO: 1448485 - DNA, 15 bp, Homo sapiens
aatttaattaagtat

SEQ ID NO: 1448486 - DNA, 15 bp, Homo sapiens
aaatttaattaagta

SEQ ID NO: 1448487 - DNA, 15 bp, Homo sapiens
caaatttaattaagt

SEQ ID NO: 1448488 - DNA, 15 bp, Homo sapiens
gcaaatttaattaag

SEQ ID NO: 1448489 - DNA, 15 bp, Homo sapiens
agcaaatttaattaa

SEQ ID NO: 1448490 - DNA, 15 bp, Homo sapiens
gagcaaatttaatta

SEQ ID NO: 1448491 - DNA, 15 bp, Homo sapiens
agagcaaatttaatt

SEQ ID NO: 1448492 - DNA, 15 bp, Homo sapiens
gagagcaaatttaat

SEQ ID NO: 1448493 - DNA, 15 bp, Homo sapiens
ggagagcaaatttaa

SEQ ID NO: 1448494 - DNA, 15 bp, Homo sapiens
gggagagcaaattta

SEQ ID NO: 1448495 - DNA, 15 bp, Homo sapiens
tgggagagcaaattt

SEQ ID NO: 1448496 - DNA, 15 bp, Homo sapiens
ttgggagagcaaatt

SEQ ID NO: 1448497 - DNA, 15 bp, Homo sapiens
gttgggagagcaaat

SEQ ID NO: 1448498 - DNA, 15 bp, Homo sapiens
tgttgggagagcaaa

SEQ ID NO: 1448499 - DNA, 15 bp, Homo sapiens
atgttgggagagcaa

SEQ ID NO: 1448500 - DNA, 15 bp, Homo sapiens
aatgttgggagagca

SEQ ID NO: 1448501 - DNA, 15 bp, Homo sapiens
aaatgttgggagagc

SEQ ID NO: 1448502 - DNA, 15 bp, Homo sapiens
caaatgttgggagag

SEQ ID NO: 1448503 - DNA, 15 bp, Homo sapiens
tcaaatgttgggaga

SEQ ID NO: 1448504 - DNA, 15 bp, Homo sapiens
atcaaatgttgggag

SEQ ID NO: 1448505 - DNA, 15 bp, Homo sapiens
aatcaaatgttggga

SEQ ID NO: 1448506 - DNA, 15 bp, Homo sapiens
aaatcaaatgttggg

SEQ ID NO: 1448507 - DNA, 15 bp, Homo sapiens
taaatcaaatgttgg

SEQ ID NO: 1448508 - DNA, 15 bp, Homo sapiens
ataaatcaaatgttg

SEQ ID NO: 1448509 - DNA, 15 bp, Homo sapiens
tataaatcaaatgtt

SEQ ID NO: 1448510 - DNA, 15 bp, Homo sapiens
gtataaatcaaatgt

SEQ ID NO: 1448511 - DNA, 15 bp, Homo sapiens
tgtataaatcaaatg

SEQ ID NO: 1448512 - DNA, 15 bp, Homo sapiens
atgtataaatcaaat

SEQ ID NO: 1448513 - DNA, 15 bp, Homo sapiens
catgtataaatcaaa

SEQ ID NO: 1448514 - DNA, 15 bp, Homo sapiens
gcatgtataaatcaa

SEQ ID NO: 1448515 - DNA, 15 bp, Homo sapiens
agcatgtataaatca

SEQ ID NO: 1448516 - DNA, 15 bp, Homo sapiens
cagcatgtataaatc

SEQ ID NO: 1448517 - DNA, 15 bp, Homo sapiens
gcagcatgtataaat

SEQ ID NO: 1448518 - DNA, 15 bp, Homo sapiens
agcagcatgtataaa

SEQ ID NO: 1448519 - DNA, 15 bp, Homo sapiens
gagcagcatgtataa

SEQ ID NO: 1448520 - DNA, 15 bp, Homo sapiens
agagcagcatgtata

SEQ ID NO: 1448521 - DNA, 15 bp, Homo sapiens
aagagcagcatgtat

SEQ ID NO: 1448522 - DNA, 15 bp, Homo sapiens
aaagagcagcatgta

SEQ ID NO: 1448523 - DNA, 15 bp, Homo sapiens
taaagagcagcatgt

SEQ ID NO: 1448524 - DNA, 15 bp, Homo sapiens
ataaagagcagcatg

SEQ ID NO: 1448525 - DNA, 15 bp, Homo sapiens
aataaagagcagcat

SEQ ID NO: 1448526 - DNA, 15 bp, Homo sapiens
taataaagagcagca

SEQ ID NO: 1448527 - DNA, 15 bp, Homo sapiens
ttaataaagagcagc

SEQ ID NO: 1448528 - DNA, 15 bp, Homo sapiens
tttaataaagagcag

SEQ ID NO: 1448529 - DNA, 15 bp, Homo sapiens
ctttaataaagagca

SEQ ID NO: 1448530 - DNA, 15 bp, Homo sapiens
gctttaataaagagc

SEQ ID NO: 1448531 - DNA, 15 bp, Homo sapiens
tgctttaataaagag

SEQ ID NO: 1448532 - DNA, 15 bp, Homo sapiens
ctgctttaataaaga

SEQ ID NO: 1448533 - DNA, 15 bp, Homo sapiens
cctgctttaataaag

SEQ ID NO: 1448534 - DNA, 15 bp, Homo sapiens
acctgctttaataaa

SEQ ID NO: 1448535 - DNA, 15 bp, Homo sapiens
aacctgctttaataa

SEQ ID NO: 1448536 - DNA, 15 bp, Homo sapiens
gaacctgctttaata

SEQ ID NO: 1448537 - DNA, 15 bp, Homo sapiens
ggaacctgctttaat

SEQ ID NO: 1448538 - DNA, 15 bp, Homo sapiens
gggaacctgctttaa

SEQ ID NO: 1448539 - DNA, 15 bp, Homo sapiens
agggaacctgcttta

SEQ ID NO: 1448540 - DNA, 15 bp, Homo sapiens
gagggaacctgcttt

SEQ ID NO: 1448541 - DNA, 15 bp, Homo sapiens
ggagggaacctgctt

SEQ ID NO: 1448542 - DNA, 15 bp, Homo sapiens
tggagggaacctgct

SEQ ID NO: 1448543 - DNA, 15 bp, Homo sapiens
atggagggaacctgc

SEQ ID NO: 1448544 - DNA, 15 bp, Homo sapiens
aatggagggaacctg

SEQ ID NO: 1448545 - DNA, 15 bp, Homo sapiens
gaatggagggaacct

SEQ ID NO: 1448546 - DNA, 15 bp, Homo sapiens
agaatggagggaacc

SEQ ID NO: 1448547 - DNA, 15 bp, Homo sapiens
aagaatggagggaac

SEQ ID NO: 1448548 - DNA, 15 bp, Homo sapiens
taagaatggagggaa

SEQ ID NO: 1448549 - DNA, 15 bp, Homo sapiens
ttaagaatggaggga

SEQ ID NO: 1448550 - DNA, 15 bp, Homo sapiens
tttaagaatggaggg

SEQ ID NO: 1448551 - DNA, 15 bp, Homo sapiens
gtttaagaatggagg

SEQ ID NO: 1448552 - DNA, 15 bp, Homo sapiens
agtttaagaatggag

SEQ ID NO: 1448553 - DNA, 15 bp, Homo sapiens
cagtttaagaatgga

SEQ ID NO: 1448554 - DNA, 15 bp, Homo sapiens
acagtttaagaatgg

SEQ ID NO: 1448555 - DNA, 15 bp, Homo sapiens
aacagtttaagaatg

SEQ ID NO: 1448556 - DNA, 15 bp, Homo sapiens
caacagtttaagaat

SEQ ID NO: 1448557 - DNA, 15 bp, Homo sapiens
tcaacagtttaagaa

SEQ ID NO: 1448558 - DNA, 15 bp, Homo sapiens
ctcaacagtttaaga

SEQ ID NO: 1448559 - DNA, 15 bp, Homo sapiens
tctcaacagtttaag

SEQ ID NO: 1448560 - DNA, 15 bp, Homo sapiens
atctcaacagtttaa

SEQ ID NO: 1448561 - DNA, 15 bp, Homo sapiens
aatctcaacagttta

SEQ ID NO: 1448562 - DNA, 15 bp, Homo sapiens
aaatctcaacagttt

SEQ ID NO: 1448563 - DNA, 15 bp, Homo sapiens
caaatctcaacagtt

SEQ ID NO: 1448564 - DNA, 15 bp, Homo sapiens
acaaatctcaacagt

SEQ ID NO: 1448565 - DNA, 15 bp, Homo sapiens
cacaaatctcaacag

SEQ ID NO: 1448566 - DNA, 15 bp, Homo sapiens
acacaaatctcaaca

SEQ ID NO: 1448567 - DNA, 15 bp, Homo sapiens
tacacaaatctcaac

SEQ ID NO: 1448568 - DNA, 15 bp, Homo sapiens
ctacacaaatctcaa

SEQ ID NO: 1448569 - DNA, 15 bp, Homo sapiens
gctacacaaatctca

SEQ ID NO: 1448570 - DNA, 15 bp, Homo sapiens
tgctacacaaatctc

SEQ ID NO: 1448571 - DNA, 15 bp, Homo sapiens
atgctacacaaatct

SEQ ID NO: 1448572 - DNA, 15 bp, Homo sapiens
aatgctacacaaatc

SEQ ID NO: 1448573 - DNA, 15 bp, Homo sapiens
aaatgctacacaaat

SEQ ID NO: 1448574 - DNA, 15 bp, Homo sapiens
taaatgctacacaaa

SEQ ID NO: 1448575 - DNA, 15 bp, Homo sapiens
ttaaatgctacacaa

SEQ ID NO: 1448576 - DNA, 15 bp, Homo sapiens
tttaaatgctacaca

SEQ ID NO: 1448577 - DNA, 15 bp, Homo sapiens
atttaaatgctacac

SEQ ID NO: 1448578 - DNA, 15 bp, Homo sapiens
tatttaaatgctaca

SEQ ID NO: 1448579 - DNA, 15 bp, Homo sapiens
gtatttaaatgctac

SEQ ID NO: 1448580 - DNA, 15 bp, Homo sapiens
cgtatttaaatgcta

SEQ ID NO: 1448581 - DNA, 15 bp, Homo sapiens
gcgtatttaaatgct

SEQ ID NO: 1448582 - DNA, 15 bp, Homo sapiens
tgcgtatttaaatgc

SEQ ID NO: 1448583 - DNA, 15 bp, Homo sapiens
ttgcgtatttaaatg

SEQ ID NO: 1448584 - DNA, 15 bp, Homo sapiens
cttgcgtatttaaat

SEQ ID NO: 1448585 - DNA, 15 bp, Homo sapiens
tcttgcgtatttaaa

SEQ ID NO: 1448586 - DNA, 15 bp, Homo sapiens
ttcttgcgtatttaa

SEQ ID NO: 1448587 - DNA, 15 bp, Homo sapiens
attcttgcgtattta

SEQ ID NO: 1448588 - DNA, 15 bp, Homo sapiens
aattcttgcgtattt

SEQ ID NO: 1448589 - DNA, 15 bp, Homo sapiens
aaattcttgcgtatt

SEQ ID NO: 1448590 - DNA, 15 bp, Homo sapiens
taaattcttgcgtat

SEQ ID NO: 1448591 - DNA, 15 bp, Homo sapiens
ttaaattcttgcgta

SEQ ID NO: 1448592 - DNA, 15 bp, Homo sapiens
tttaaattcttgcgt

SEQ ID NO: 1448593 - DNA, 15 bp, Homo sapiens
ttttaaattcttgcg

SEQ ID NO: 1448594 - DNA, 15 bp, Homo sapiens
attttaaattcttgc

SEQ ID NO: 1448595 - DNA, 15 bp, Homo sapiens
aattttaaattcttg

SEQ ID NO: 1448596 - DNA, 15 bp, Homo sapiens
aaattttaaattctt

SEQ ID NO: 1448597 - DNA, 15 bp, Homo sapiens
taaattttaaattct

SEQ ID NO: 1448598 - DNA, 15 bp, Homo sapiens
ataaattttaaattc

SEQ ID NO: 1448599 - DNA, 15 bp, Homo sapiens
aataaattttaaatt

SEQ ID NO: 1448600 - DNA, 15 bp, Homo sapiens
gaataaattttaaat

SEQ ID NO: 1448601 - DNA, 15 bp, Homo sapiens
ggaataaattttaaa

SEQ ID NO: 1448602 - DNA, 15 bp, Homo sapiens
aggaataaattttaa

SEQ ID NO: 1448603 - DNA, 15 bp, Homo sapiens
taggaataaatttta

SEQ ID NO: 1448604 - DNA, 15 bp, Homo sapiens
ataggaataaatttt

SEQ ID NO: 1448605 - DNA, 15 bp, Homo sapiens
tataggaataaattt

SEQ ID NO: 1448606 - DNA, 15 bp, Homo sapiens
atataggaataaatt

SEQ ID NO: 1448607 - DNA, 15 bp, Homo sapiens
catataggaataaat

SEQ ID NO: 1448608 - DNA, 15 bp, Homo sapiens
acatataggaataaa

SEQ ID NO: 1448609 - DNA, 15 bp, Homo sapiens
cacatataggaataa

SEQ ID NO: 1448610 - DNA, 15 bp, Homo sapiens
tcacatataggaata

SEQ ID NO: 1448611 - DNA, 15 bp, Homo sapiens
gtcacatataggaat

SEQ ID NO: 1448612 - DNA, 15 bp, Homo sapiens
agtcacatataggaa

SEQ ID NO: 1448613 - DNA, 15 bp, Homo sapiens
tagtcacatatagga

SEQ ID NO: 1448614 - DNA, 15 bp, Homo sapiens
gtagtcacatatagg

SEQ ID NO: 1448615 - DNA, 15 bp, Homo sapiens
tgtagtcacatatag

SEQ ID NO: 1448616 - DNA, 15 bp, Homo sapiens
atgtagtcacatata

SEQ ID NO: 1448617 - DNA, 15 bp, Homo sapiens
gatgtagtcacatat

SEQ ID NO: 1448618 - DNA, 15 bp, Homo sapiens
agatgtagtcacata

SEQ ID NO: 1448619 - DNA, 15 bp, Homo sapiens
aagatgtagtcacat

SEQ ID NO: 1448620 - DNA, 15 bp, Homo sapiens
caagatgtagtcaca

SEQ ID NO: 1448621 - DNA, 15 bp, Homo sapiens
acaagatgtagtcac

SEQ ID NO: 1448622 - DNA, 15 bp, Homo sapiens
aacaagatgtagtca

SEQ ID NO: 1448623 - DNA, 15 bp, Homo sapiens
caacaagatgtagtc

SEQ ID NO: 1448624 - DNA, 15 bp, Homo sapiens
gcaacaagatgtagt

SEQ ID NO: 1448625 - DNA, 15 bp, Homo sapiens
agcaacaagatgtag

SEQ ID NO: 1448626 - DNA, 15 bp, Homo sapiens
aagcaacaagatgta

SEQ ID NO: 1448627 - DNA, 15 bp, Homo sapiens
aaagcaacaagatgt

SEQ ID NO: 1448628 - DNA, 15 bp, Homo sapiens
aaaagcaacaagatg

SEQ ID NO: 1448629 - DNA, 15 bp, Homo sapiens
caaaagcaacaagat

SEQ ID NO: 1448630 - DNA, 15 bp, Homo sapiens
tcaaaagcaacaaga

SEQ ID NO: 1448631 - DNA, 15 bp, Homo sapiens
gtcaaaagcaacaag

SEQ ID NO: 1448632 - DNA, 15 bp, Homo sapiens
ggtcaaaagcaacaa

SEQ ID NO: 1448633 - DNA, 15 bp, Homo sapiens
cggtcaaaagcaaca

SEQ ID NO: 1448634 - DNA, 15 bp, Homo sapiens
tcggtcaaaagcaac

SEQ ID NO: 1448635 - DNA, 15 bp, Homo sapiens
atcggtcaaaagcaa

SEQ ID NO: 1448636 - DNA, 15 bp, Homo sapiens
aatcggtcaaaagca

SEQ ID NO: 1448637 - DNA, 15 bp, Homo sapiens
caatcggtcaaaagc

SEQ ID NO: 1448638 - DNA, 15 bp, Homo sapiens
acaatcggtcaaaag

SEQ ID NO: 1448639 - DNA, 15 bp, Homo sapiens
aacaatcggtcaaaa

SEQ ID NO: 1448640 - DNA, 15 bp, Homo sapiens
gaacaatcggtcaaa

SEQ ID NO: 1448641 - DNA, 15 bp, Homo sapiens
ggaacaatcggtcaa

SEQ ID NO: 1448642 - DNA, 15 bp, Homo sapiens
tggaacaatcggtca

SEQ ID NO: 1448643 - DNA, 15 bp, Homo sapiens
ctggaacaatcggtc

SEQ ID NO: 1448644 - DNA, 15 bp, Homo sapiens
actggaacaatcggt

SEQ ID NO: 1448645 - DNA, 15 bp, Homo sapiens
gactggaacaatcgg

SEQ ID NO: 1448646 - DNA, 15 bp, Homo sapiens
agactggaacaatcg

SEQ ID NO: 1448647 - DNA, 15 bp, Homo sapiens
gagactggaacaatc

SEQ ID NO: 1448648 - DNA, 15 bp, Homo sapiens
tgagactggaacaat

SEQ ID NO: 1448649 - DNA, 15 bp, Homo sapiens
atgagactggaacaa

SEQ ID NO: 1448650 - DNA, 15 bp, Homo sapiens
catgagactggaaca

SEQ ID NO: 1448651 - DNA, 15 bp, Homo sapiens
tcatgagactggaac

SEQ ID NO: 1448652 - DNA, 15 bp, Homo sapiens
atcatgagactggaa

SEQ ID NO: 1448653 - DNA, 15 bp, Homo sapiens
aatcatgagactgga

SEQ ID NO: 1448654 - DNA, 15 bp, Homo sapiens
taatcatgagactgg

SEQ ID NO: 1448655 - DNA, 15 bp, Homo sapiens
ataatcatgagactg

SEQ ID NO: 1448656 - DNA, 15 bp, Homo sapiens
aataatcatgagact

SEQ ID NO: 1448657 - DNA, 15 bp, Homo sapiens
aaataatcatgagac

SEQ ID NO: 1448658 - DNA, 15 bp, Homo sapiens
aaaataatcatgaga

SEQ ID NO: 1448659 - DNA, 15 bp, Homo sapiens
caaaataatcatgag

SEQ ID NO: 1448660 - DNA, 15 bp, Homo sapiens
tcaaaataatcatga

SEQ ID NO: 1448661 - DNA, 15 bp, Homo sapiens
gtcaaaataatcatg

SEQ ID NO: 1448662 - DNA, 15 bp, Homo sapiens
agtcaaaataatcat

SEQ ID NO: 1448663 - DNA, 15 bp, Homo sapiens
gagtcaaaataatca

SEQ ID NO: 1448664 - DNA, 15 bp, Homo sapiens
agagtcaaaataatc

SEQ ID NO: 1448665 - DNA, 15 bp, Homo sapiens
aagagtcaaaataat

SEQ ID NO: 1448666 - DNA, 15 bp, Homo sapiens
caagagtcaaaataa

SEQ ID NO: 1448667 - DNA, 15 bp, Homo sapiens
tcaagagtcaaaata

SEQ ID NO: 1448668 - DNA, 15 bp, Homo sapiens
atcaagagtcaaaat

SEQ ID NO: 1448669 - DNA, 15 bp, Homo sapiens
aatcaagagtcaaaa

SEQ ID NO: 1448670 - DNA, 15 bp, Homo sapiens
taatcaagagtcaaa

SEQ ID NO: 1448671 - DNA, 15 bp, Homo sapiens
ataatcaagagtcaa

SEQ ID NO: 1448672 - DNA, 15 bp, Homo sapiens
cataatcaagagtca

SEQ ID NO: 1448673 - DNA, 15 bp, Homo sapiens
ccataatcaagagtc

SEQ ID NO: 1448674 - DNA, 15 bp, Homo sapiens
accataatcaagagt

SEQ ID NO: 1448675 - DNA, 15 bp, Homo sapiens
taccataatcaagag

SEQ ID NO: 1448676 - DNA, 15 bp, Homo sapiens
gtaccataatcaaga

SEQ ID NO: 1448677 - DNA, 15 bp, Homo sapiens
ggtaccataatcaag

SEQ ID NO: 1448678 - DNA, 15 bp, Homo sapiens
gggtaccataatcaa

SEQ ID NO: 1448679 - DNA, 15 bp, Homo sapiens
tgggtaccataatca

SEQ ID NO: 1448680 - DNA, 15 bp, Homo sapiens
atgggtaccataatc

SEQ ID NO: 1448681 - DNA, 15 bp, Homo sapiens
gatgggtaccataat

SEQ ID NO: 1448682 - DNA, 15 bp, Homo sapiens
tgatgggtaccataa

SEQ ID NO: 1448683 - DNA, 15 bp, Homo sapiens
atgatgggtaccata

SEQ ID NO: 1448684 - DNA, 15 bp, Homo sapiens
tatgatgggtaccat

SEQ ID NO: 1448685 - DNA, 15 bp, Homo sapiens
atatgatgggtacca

SEQ ID NO: 1448686 - DNA, 15 bp, Homo sapiens
aatatgatgggtacc

SEQ ID NO: 1448687 - DNA, 15 bp, Homo sapiens
aaatatgatgggtac

SEQ ID NO: 1448688 - DNA, 15 bp, Homo sapiens
caaatatgatgggta

SEQ ID NO: 1448689 - DNA, 15 bp, Homo sapiens
acaaatatgatgggt

SEQ ID NO: 1448690 - DNA, 15 bp, Homo sapiens
aacaaatatgatggg

SEQ ID NO: 1448691 - DNA, 15 bp, Homo sapiens
taacaaatatgatgg

SEQ ID NO: 1448692 - DNA, 15 bp, Homo sapiens
ataacaaatatgatg

SEQ ID NO: 1448693 - DNA, 15 bp, Homo sapiens
tataacaaatatgat

SEQ ID NO: 1448694 - DNA, 15 bp, Homo sapiens
atataacaaatatga

SEQ ID NO: 1448695 - DNA, 15 bp, Homo sapiens
gatataacaaatatg

SEQ ID NO: 1448696 - DNA, 15 bp, Homo sapiens
agatataacaaatat

SEQ ID NO: 1448697 - DNA, 15 bp, Homo sapiens
aagatataacaaata

SEQ ID NO: 1448698 - DNA, 15 bp, Homo sapiens
gaagatataacaaat

SEQ ID NO: 1448699 - DNA, 15 bp, Homo sapiens
ggaagatataacaaa

SEQ ID NO: 1448700 - DNA, 15 bp, Homo sapiens
tggaagatataacaa

SEQ ID NO: 1448701 - DNA, 15 bp, Homo sapiens
atggaagatataaca

SEQ ID NO: 1448702 - DNA, 15 bp, Homo sapiens
gatggaagatataac

SEQ ID NO: 1448703 - DNA, 15 bp, Homo sapiens
tgatggaagatataa

SEQ ID NO: 1448704 - DNA, 15 bp, Homo sapiens
atgatggaagatata

SEQ ID NO: 1448705 - DNA, 15 bp, Homo sapiens
tatgatggaagatat

SEQ ID NO: 1448706 - DNA, 15 bp, Homo sapiens
ttatgatggaagata

SEQ ID NO: 1448707 - DNA, 15 bp, Homo sapiens
attatgatggaagat

SEQ ID NO: 1448708 - DNA, 15 bp, Homo sapiens
aattatgatggaaga

SEQ ID NO: 1448709 - DNA, 15 bp, Homo sapiens
gaattatgatggaag

SEQ ID NO: 1448710 - DNA, 15 bp, Homo sapiens
agaattatgatggaa

SEQ ID NO: 1448711 - DNA, 15 bp, Homo sapiens
tagaattatgatgga

SEQ ID NO: 1448712 - DNA, 15 bp, Homo sapiens
atagaattatgatgg

SEQ ID NO: 1448713 - DNA, 15 bp, Homo sapiens
gatagaattatgatg

SEQ ID NO: 1448714 - DNA, 15 bp, Homo sapiens
agatagaattatgat

SEQ ID NO: 1448715 - DNA, 15 bp, Homo sapiens
aagatagaattatga

SEQ ID NO: 1448716 - DNA, 15 bp, Homo sapiens
taagatagaattatg

SEQ ID NO: 1448717 - DNA, 15 bp, Homo sapiens
ttaagatagaattat

SEQ ID NO: 1448718 - DNA, 15 bp, Homo sapiens
attaagatagaatta

SEQ ID NO: 1448719 - DNA, 15 bp, Homo sapiens
aattaagatagaatt

SEQ ID NO: 1448720 - DNA, 15 bp, Homo sapiens
caattaagatagaat

SEQ ID NO: 1448721 - DNA, 15 bp, Homo sapiens
acaattaagatagaa

SEQ ID NO: 1448722 - DNA, 15 bp, Homo sapiens
tacaattaagataga

SEQ ID NO: 1448723 - DNA, 15 bp, Homo sapiens
ttacaattaagatag

SEQ ID NO: 1448724 - DNA, 15 bp, Homo sapiens
cttacaattaagata

SEQ ID NO: 1448725 - DNA, 15 bp, Homo sapiens
acttacaattaagat

SEQ ID NO: 1448726 - DNA, 15 bp, Homo sapiens
gacttacaattaaga

SEQ ID NO: 1448727 - DNA, 15 bp, Homo sapiens
tgacttacaattaag

SEQ ID NO: 1448728 - DNA, 15 bp, Homo sapiens
ttgacttacaattaa

SEQ ID NO: 1448729 - DNA, 15 bp, Homo sapiens
tttgacttacaatta

SEQ ID NO: 1448730 - DNA, 15 bp, Homo sapiens
ttttgacttacaatt

SEQ ID NO: 1448731 - DNA, 15 bp, Homo sapiens
attttgacttacaat

SEQ ID NO: 1448732 - DNA, 15 bp, Homo sapiens
cattttgacttacaa

SEQ ID NO: 1448733 - DNA, 15 bp, Homo sapiens
ccattttgacttaca

SEQ ID NO: 1448734 - DNA, 15 bp, Homo sapiens
gccattttgacttac

SEQ ID NO: 1448735 - DNA, 15 bp, Homo sapiens
agccattttgactta

SEQ ID NO: 1448736 - DNA, 15 bp, Homo sapiens
aagccattttgactt

SEQ ID NO: 1448737 - DNA, 15 bp, Homo sapiens
aaagccattttgact

SEQ ID NO: 1448738 - DNA, 15 bp, Homo sapiens
caaagccattttgac

SEQ ID NO: 1448739 - DNA, 15 bp, Homo sapiens
tcaaagccattttga

SEQ ID NO: 1448740 - DNA, 15 bp, Homo sapiens
atcaaagccattttg

SEQ ID NO: 1448741 - DNA, 15 bp, Homo sapiens
aatcaaagccatttt

SEQ ID NO: 1448742 - DNA, 15 bp, Homo sapiens
aaatcaaagccattt

SEQ ID NO: 1448743 - DNA, 15 bp, Homo sapiens
aaaatcaaagccatt

SEQ ID NO: 1448744 - DNA, 15 bp, Homo sapiens
aaaaatcaaagccat

SEQ ID NO: 1448745 - DNA, 15 bp, Homo sapiens
gaaaaatcaaagcca

SEQ ID NO: 1448746 - DNA, 15 bp, Homo sapiens
agaaaaatcaaagcc

SEQ ID NO: 1448747 - DNA, 15 bp, Homo sapiens
gagaaaaatcaaagc

SEQ ID NO: 1448748 - DNA, 15 bp, Homo sapiens
tgagaaaaatcaaag

SEQ ID NO: 1448749 - DNA, 15 bp, Homo sapiens
atgagaaaaatcaaa

SEQ ID NO: 1448750 - DNA, 15 bp, Homo sapiens
gatgagaaaaatcaa

SEQ ID NO: 1448751 - DNA, 15 bp, Homo sapiens
ggatgagaaaaatca

SEQ ID NO: 1448752 - DNA, 15 bp, Homo sapiens
tggatgagaaaaatc

SEQ ID NO: 1448753 - DNA, 15 bp, Homo sapiens
ttggatgagaaaaat

SEQ ID NO: 1448754 - DNA, 15 bp, Homo sapiens
cttggatgagaaaaa

SEQ ID NO: 1448755 - DNA, 15 bp, Homo sapiens
acttggatgagaaaa

SEQ ID NO: 1448756 - DNA, 15 bp, Homo sapiens
aacttggatgagaaa

SEQ ID NO: 1448757 - DNA, 15 bp, Homo sapiens
taacttggatgagaa

SEQ ID NO: 1448758 - DNA, 15 bp, Homo sapiens
ataacttggatgaga

SEQ ID NO: 1448759 - DNA, 15 bp, Homo sapiens
gataacttggatgag

SEQ ID NO: 1448760 - DNA, 15 bp, Homo sapiens
cgataacttggatga

SEQ ID NO: 1448761 - DNA, 15 bp, Homo sapiens
tcgataacttggatg

SEQ ID NO: 1448762 - DNA, 15 bp, Homo sapiens
atcgataacttggat

SEQ ID NO: 1448763 - DNA, 15 bp, Homo sapiens
tatcgataacttgga

SEQ ID NO: 1448764 - DNA, 15 bp, Homo sapiens
ttatcgataacttgg

SEQ ID NO: 1448765 - DNA, 15 bp, Homo sapiens
tttatcgataacttg

SEQ ID NO: 1448766 - DNA, 15 bp, Homo sapiens
ttttatcgataactt

SEQ ID NO: 1448767 - DNA, 15 bp, Homo sapiens
tttttatcgataact

SEQ ID NO: 1448768 - DNA, 15 bp, Homo sapiens
atttttatcgataac

SEQ ID NO: 1448769 - DNA, 15 bp, Homo sapiens
catttttatcgataa

SEQ ID NO: 1448770 - DNA, 15 bp, Homo sapiens
gcatttttatcgata

SEQ ID NO: 1448771 - DNA, 15 bp, Homo sapiens
agcatttttatcgat

SEQ ID NO: 1448772 - DNA, 15 bp, Homo sapiens
cagcatttttatcga

SEQ ID NO: 1448773 - DNA, 15 bp, Homo sapiens
tcagcatttttatcg

SEQ ID NO: 1448774 - DNA, 15 bp, Homo sapiens
ttcagcatttttatc

SEQ ID NO: 1448775 - DNA, 15 bp, Homo sapiens
tttcagcatttttat

SEQ ID NO: 1448776 - DNA, 15 bp, Homo sapiens
ttttcagcattttta

SEQ ID NO: 1448777 - DNA, 15 bp, Homo sapiens
cttttcagcattttt

SEQ ID NO: 1448778 - DNA, 15 bp, Homo sapiens
ccttttcagcatttt

SEQ ID NO: 1448779 - DNA, 15 bp, Homo sapiens
tccttttcagcattt

SEQ ID NO: 1448780 - DNA, 15 bp, Homo sapiens
gtccttttcagcatt

SEQ ID NO: 1448781 - DNA, 15 bp, Homo sapiens
agtccttttcagcat

SEQ ID NO: 1448782 - DNA, 15 bp, Homo sapiens
tagtccttttcagca

SEQ ID NO: 1448783 - DNA, 15 bp, Homo sapiens
ctagtccttttcagc

SEQ ID NO: 1448784 - DNA, 15 bp, Homo sapiens
cctagtccttttcag

SEQ ID NO: 1448785 - DNA, 15 bp, Homo sapiens
tcctagtccttttca

SEQ ID NO: 1448786 - DNA, 15 bp, Homo sapiens
gtcctagtccttttc

SEQ ID NO: 1448787 - DNA, 15 bp, Homo sapiens
tgtcctagtcctttt

SEQ ID NO: 1448788 - DNA, 15 bp, Homo sapiens
atgtcctagtccttt

SEQ ID NO: 1448789 - DNA, 15 bp, Homo sapiens
tatgtcctagtcctt

SEQ ID NO: 1448790 - DNA, 15 bp, Homo sapiens
ctatgtcctagtcct

SEQ ID NO: 1448791 - DNA, 15 bp, Homo sapiens
tctatgtcctagtcc

SEQ ID NO: 1448792 - DNA, 15 bp, Homo sapiens
gtctatgtcctagtc

SEQ ID NO: 1448793 - DNA, 15 bp, Homo sapiens
ggtctatgtcctagt

SEQ ID NO: 1448794 - DNA, 15 bp, Homo sapiens
aggtctatgtcctag

SEQ ID NO: 1448795 - DNA, 15 bp, Homo sapiens
taggtctatgtccta

SEQ ID NO: 1448796 - DNA, 15 bp, Homo sapiens
ataggtctatgtcct

SEQ ID NO: 1448797 - DNA, 15 bp, Homo sapiens
aataggtctatgtcc

SEQ ID NO: 1448798 - DNA, 15 bp, Homo sapiens
aaataggtctatgtc

SEQ ID NO: 1448799 - DNA, 15 bp, Homo sapiens
gaaataggtctatgt

SEQ ID NO: 1448800 - DNA, 15 bp, Homo sapiens
tgaaataggtctatg

SEQ ID NO: 1448801 - DNA, 15 bp, Homo sapiens
gtgaaataggtctat

SEQ ID NO: 1448802 - DNA, 15 bp, Homo sapiens
agtgaaataggtcta

SEQ ID NO: 1448803 - DNA, 15 bp, Homo sapiens
cagtgaaataggtct

SEQ ID NO: 1448804 - DNA, 15 bp, Homo sapiens
gcagtgaaataggtc

SEQ ID NO: 1448805 - DNA, 15 bp, Homo sapiens
agcagtgaaataggt

SEQ ID NO: 1448806 - DNA, 15 bp, Homo sapiens
cagcagtgaaatagg

SEQ ID NO: 1448807 - DNA, 15 bp, Homo sapiens
tcagcagtgaaatag

SEQ ID NO: 1448808 - DNA, 15 bp, Homo sapiens
atcagcagtgaaata

SEQ ID NO: 1448809 - DNA, 15 bp, Homo sapiens
gatcagcagtgaaat

SEQ ID NO: 1448810 - DNA, 15 bp, Homo sapiens
agatcagcagtgaaa

SEQ ID NO: 1448811 - DNA, 15 bp, Homo sapiens
aagatcagcagtgaa

SEQ ID NO: 1448812 - DNA, 15 bp, Homo sapiens
gaagatcagcagtga

SEQ ID NO: 1448813 - DNA, 15 bp, Homo sapiens
ggaagatcagcagtg

SEQ ID NO: 1448814 - DNA, 15 bp, Homo sapiens
aggaagatcagcagt

SEQ ID NO: 1448815 - DNA, 15 bp, Homo sapiens
aaggaagatcagcag

SEQ ID NO: 1448816 - DNA, 15 bp, Homo sapiens
aaaggaagatcagca

SEQ ID NO: 1448817 - DNA, 15 bp, Homo sapiens
caaaggaagatcagc

SEQ ID NO: 1448818 - DNA, 15 bp, Homo sapiens
ccaaaggaagatcag

SEQ ID NO: 1448819 - DNA, 15 bp, Homo sapiens
gccaaaggaagatca

SEQ ID NO: 1448820 - DNA, 15 bp, Homo sapiens
ggccaaaggaagatc

SEQ ID NO: 1448821 - DNA, 15 bp, Homo sapiens
aggccaaaggaagat

SEQ ID NO: 1448822 - DNA, 15 bp, Homo sapiens
aaggccaaaggaaga

SEQ ID NO: 1448823 - DNA, 15 bp, Homo sapiens
aaaggccaaaggaag

SEQ ID NO: 1448824 - DNA, 15 bp, Homo sapiens
gaaaggccaaaggaa

SEQ ID NO: 1448825 - DNA, 15 bp, Homo sapiens
tgaaaggccaaagga

SEQ ID NO: 1448826 - DNA, 15 bp, Homo sapiens
atgaaaggccaaagg

SEQ ID NO: 1448827 - DNA, 15 bp, Homo sapiens
tatgaaaggccaaag

SEQ ID NO: 1448828 - DNA, 15 bp, Homo sapiens
ttatgaaaggccaaa

SEQ ID NO: 1448829 - DNA, 15 bp, Homo sapiens
attatgaaaggccaa

SEQ ID NO: 1448830 - DNA, 15 bp, Homo sapiens
tattatgaaaggcca

SEQ ID NO: 1448831 - DNA, 15 bp, Homo sapiens
ctattatgaaaggcc

SEQ ID NO: 1448832 - DNA, 15 bp, Homo sapiens
gctattatgaaaggc

SEQ ID NO: 1448833 - DNA, 15 bp, Homo sapiens
ggctattatgaaagg

SEQ ID NO: 1448834 - DNA, 15 bp, Homo sapiens
cggctattatgaaag

SEQ ID NO: 1448835 - DNA, 15 bp, Homo sapiens
tcggctattatgaaa

SEQ ID NO: 1448836 - DNA, 15 bp, Homo sapiens
atcggctattatgaa

SEQ ID NO: 1448837 - DNA, 15 bp, Homo sapiens
tatcggctattatga

SEQ ID NO: 1448838 - DNA, 15 bp, Homo sapiens
gtatcggctattatg

SEQ ID NO: 1448839 - DNA, 15 bp, Homo sapiens
ggtatcggctattat

SEQ ID NO: 1448840 - DNA, 15 bp, Homo sapiens
aggtatcggctatta

SEQ ID NO: 1448841 - DNA, 15 bp, Homo sapiens
caggtatcggctatt

SEQ ID NO: 1448842 - DNA, 15 bp, Homo sapiens
acaggtatcggctat

SEQ ID NO: 1448843 - DNA, 15 bp, Homo sapiens
aacaggtatcggcta

SEQ ID NO: 1448844 - DNA, 15 bp, Homo sapiens
aaacaggtatcggct

SEQ ID NO: 1448845 - DNA, 15 bp, Homo sapiens
taaacaggtatcggc

SEQ ID NO: 1448846 - DNA, 15 bp, Homo sapiens
gtaaacaggtatcgg

SEQ ID NO: 1448847 - DNA, 15 bp, Homo sapiens
ggtaaacaggtatcg

SEQ ID NO: 1448848 - DNA, 15 bp, Homo sapiens
tggtaaacaggtatc

SEQ ID NO: 1448849 - DNA, 15 bp, Homo sapiens
atggtaaacaggtat

SEQ ID NO: 1448850 - DNA, 15 bp, Homo sapiens
catggtaaacaggta

SEQ ID NO: 1448851 - DNA, 15 bp, Homo sapiens
gcatggtaaacaggt

SEQ ID NO: 1448852 - DNA, 15 bp, Homo sapiens
agcatggtaaacagg

SEQ ID NO: 1448853 - DNA, 15 bp, Homo sapiens
cagcatggtaaacag

SEQ ID NO: 1448854 - DNA, 15 bp, Homo sapiens
gcagcatggtaaaca

SEQ ID NO: 1448855 - DNA, 15 bp, Homo sapiens
ggcagcatggtaaac

SEQ ID NO: 1448856 - DNA, 15 bp, Homo sapiens
aggcagcatggtaaa

SEQ ID NO: 1448857 - DNA, 15 bp, Homo sapiens
gaggcagcatggtaa

SEQ ID NO: 1448858 - DNA, 15 bp, Homo sapiens
agaggcagcatggta

SEQ ID NO: 1448859 - DNA, 15 bp, Homo sapiens
cagaggcagcatggt

SEQ ID NO: 1448860 - DNA, 15 bp, Homo sapiens
acagaggcagcatgg

SEQ ID NO: 1448861 - DNA, 15 bp, Homo sapiens
tacagaggcagcatg

SEQ ID NO: 1448862 - DNA, 15 bp, Homo sapiens
gtacagaggcagcat

SEQ ID NO: 1448863 - DNA, 15 bp, Homo sapiens
ggtacagaggcagca

SEQ ID NO: 1448864 - DNA, 15 bp, Homo sapiens
tggtacagaggcagc

SEQ ID NO: 1448865 - DNA, 15 bp, Homo sapiens
ctggtacagaggcag

SEQ ID NO: 1448866 - DNA, 15 bp, Homo sapiens
tctggtacagaggca

SEQ ID NO: 1448867 - DNA, 15 bp, Homo sapiens
ttctggtacagaggc

SEQ ID NO: 1448868 - DNA, 15 bp, Homo sapiens
tttctggtacagagg

SEQ ID NO: 1448869 - DNA, 15 bp, Homo sapiens
gtttctggtacagag

SEQ ID NO: 1448870 - DNA, 15 bp, Homo sapiens
agtttctggtacaga

SEQ ID NO: 1448871 - DNA, 15 bp, Homo sapiens
tagtttctggtacag

SEQ ID NO: 1448872 - DNA, 15 bp, Homo sapiens
atagtttctggtaca

SEQ ID NO: 1448873 - DNA, 15 bp, Homo sapiens
aatagtttctggtac

SEQ ID NO: 1448874 - DNA, 15 bp, Homo sapiens
aaatagtttctggta

SEQ ID NO: 1448875 - DNA, 15 bp, Homo sapiens
taaatagtttctggt

SEQ ID NO: 1448876 - DNA, 15 bp, Homo sapiens
ttaaatagtttctgg

SEQ ID NO: 1448877 - DNA, 15 bp, Homo sapiens
tttaaatagtttctg

SEQ ID NO: 1448878 - DNA, 15 bp, Homo sapiens
atttaaatagtttct

SEQ ID NO: 1448879 - DNA, 15 bp, Homo sapiens
catttaaatagtttc

SEQ ID NO: 1448880 - DNA, 15 bp, Homo sapiens
acatttaaatagttt

SEQ ID NO: 1448881 - DNA, 15 bp, Homo sapiens
aacatttaaatagtt

SEQ ID NO: 1448882 - DNA, 15 bp, Homo sapiens
aaacatttaaatagt

SEQ ID NO: 1448883 - DNA, 15 bp, Homo sapiens
gtaaaaaacatttaa

SEQ ID NO: 1448884 - DNA, 15 bp, Homo sapiens
tgtaaaaaacattta

SEQ ID NO: 1448885 - DNA, 15 bp, Homo sapiens
atgtaaaaaacattt

SEQ ID NO: 1448886 - DNA, 15 bp, Homo sapiens
tatgtaaaaaacatt

SEQ ID NO: 1448887 - DNA, 15 bp, Homo sapiens
atatgtaaaaaacat

SEQ ID NO: 1448888 - DNA, 15 bp, Homo sapiens
aatatgtaaaaaaca

SEQ ID NO: 1448889 - DNA, 15 bp, Homo sapiens
taatatgtaaaaaac

SEQ ID NO: 1448890 - DNA, 15 bp, Homo sapiens
ttaatatgtaaaaaa

SEQ ID NO: 1448891 - DNA, 15 bp, Homo sapiens
gttaatatgtaaaaa

SEQ ID NO: 1448892 - DNA, 15 bp, Homo sapiens
agttaatatgtaaaa

SEQ ID NO: 1448893 - DNA, 15 bp, Homo sapiens
gagttaatatgtaaa

SEQ ID NO: 1448894 - DNA, 15 bp, Homo sapiens
tgagttaatatgtaa

SEQ ID NO: 1448895 - DNA, 15 bp, Homo sapiens
atgagttaatatgta

SEQ ID NO: 1448896 - DNA, 15 bp, Homo sapiens
aatgagttaatatgt

SEQ ID NO: 1448897 - DNA, 15 bp, Homo sapiens
caatgagttaatatg

SEQ ID NO: 1448898 - DNA, 15 bp, Homo sapiens
tcaatgagttaatat

SEQ ID NO: 1448899 - DNA, 15 bp, Homo sapiens
ttcaatgagttaata

SEQ ID NO: 1448900 - DNA, 15 bp, Homo sapiens
attcaatgagttaat

SEQ ID NO: 1448901 - DNA, 15 bp, Homo sapiens
gattcaatgagttaa

SEQ ID NO: 1448902 - DNA, 15 bp, Homo sapiens
agattcaatgagtta

SEQ ID NO: 1448903 - DNA, 15 bp, Homo sapiens
cagattcaatgagtt

SEQ ID NO: 1448904 - DNA, 15 bp, Homo sapiens
gcagattcaatgagt

SEQ ID NO: 1448905 - DNA, 15 bp, Homo sapiens
tgcagattcaatgag

SEQ ID NO: 1448906 - DNA, 15 bp, Homo sapiens
gtgcagattcaatga

SEQ ID NO: 1448907 - DNA, 15 bp, Homo sapiens
tgtgcagattcaatg

SEQ ID NO: 1448908 - DNA, 15 bp, Homo sapiens
ttgtgcagattcaat

SEQ ID NO: 1448909 - DNA, 15 bp, Homo sapiens
gttgtgcagattcaa

SEQ ID NO: 1448910 - DNA, 15 bp, Homo sapiens
tgttgtgcagattca

SEQ ID NO: 1448911 - DNA, 15 bp, Homo sapiens
gtgttgtgcagattc

SEQ ID NO: 1448912 - DNA, 15 bp, Homo sapiens
ggtgttgtgcagatt

SEQ ID NO: 1448913 - DNA, 15 bp, Homo sapiens
gggtgttgtgcagat

SEQ ID NO: 1448914 - DNA, 15 bp, Homo sapiens
ggggtgttgtgcaga

SEQ ID NO: 1448915 - DNA, 15 bp, Homo sapiens
aggggtgttgtgcag

SEQ ID NO: 1448916 - DNA, 15 bp, Homo sapiens
taggggtgttgtgca

SEQ ID NO: 1448917 - DNA, 15 bp, Homo sapiens
gtaggggtgttgtgc

SEQ ID NO: 1448918 - DNA, 15 bp, Homo sapiens
tgtaggggtgttgtg

SEQ ID NO: 1448919 - DNA, 15 bp, Homo sapiens
ttgtaggggtgttgt

SEQ ID NO: 1448920 - DNA, 15 bp, Homo sapiens
cttgtaggggtgttg

SEQ ID NO: 1448921 - DNA, 15 bp, Homo sapiens
ccttgtaggggtgtt

SEQ ID NO: 1448922 - DNA, 15 bp, Homo sapiens
gccttgtaggggtgt

SEQ ID NO: 1448923 - DNA, 15 bp, Homo sapiens
tgccttgtaggggtg

SEQ ID NO: 1448924 - DNA, 15 bp, Homo sapiens
atgccttgtaggggt

SEQ ID NO: 1448925 - DNA, 15 bp, Homo sapiens
aatgccttgtagggg

SEQ ID NO: 1448926 - DNA, 15 bp, Homo sapiens
taatgccttgtaggg

SEQ ID NO: 1448927 - DNA, 15 bp, Homo sapiens
ataatgccttgtagg

SEQ ID NO: 1448928 - DNA, 15 bp, Homo sapiens
aataatgccttgtag

SEQ ID NO: 1448929 - DNA, 15 bp, Homo sapiens
taataatgccttgta

SEQ ID NO: 1448930 - DNA, 15 bp, Homo sapiens
ttaataatgccttgt

SEQ ID NO: 1448931 - DNA, 15 bp, Homo sapiens
gttaataatgccttg

SEQ ID NO: 1448932 - DNA, 15 bp, Homo sapiens
tgttaataatgcctt

SEQ ID NO: 1448933 - DNA, 15 bp, Homo sapiens
gtgttaataatgcct

SEQ ID NO: 1448934 - DNA, 15 bp, Homo sapiens
tgtgttaataatgcc

SEQ ID NO: 1448935 - DNA, 15 bp, Homo sapiens
ttgtgttaataatgc

SEQ ID NO: 1448936 - DNA, 15 bp, Homo sapiens
attgtgttaataatg

SEQ ID NO: 1448937 - DNA, 15 bp, Homo sapiens
gattgtgttaataat

SEQ ID NO: 1448938 - DNA, 15 bp, Homo sapiens
ggattgtgttaataa

SEQ ID NO: 1448939 - DNA, 15 bp, Homo sapiens
aggattgtgttaata

SEQ ID NO: 1448940 - DNA, 15 bp, Homo sapiens
gaggattgtgttaat

SEQ ID NO: 1448941 - DNA, 15 bp, Homo sapiens
tgaggattgtgttaa

SEQ ID NO: 1448942 - DNA, 15 bp, Homo sapiens
atgaggattgtgtta

SEQ ID NO: 1448943 - DNA, 15 bp, Homo sapiens
aatgaggattgtgtt

SEQ ID NO: 1448944 - DNA, 15 bp, Homo sapiens
aaatgaggattgtgt

SEQ ID NO: 1448945 - DNA, 15 bp, Homo sapiens
aaaatgaggattgtg

SEQ ID NO: 1448946 - DNA, 15 bp, Homo sapiens
taaaatgaggattgt

SEQ ID NO: 1448947 - DNA, 15 bp, Homo sapiens
ataaaatgaggattg

SEQ ID NO: 1448948 - DNA, 15 bp, Homo sapiens
tataaaatgaggatt

SEQ ID NO: 1448949 - DNA, 15 bp, Homo sapiens
gtataaaatgaggat

SEQ ID NO: 1448950 - DNA, 15 bp, Homo sapiens
tgtataaaatgagga

SEQ ID NO: 1448951 - DNA, 15 bp, Homo sapiens
atgtataaaatgagg

SEQ ID NO: 1448952 - DNA, 15 bp, Homo sapiens
catgtataaaatgag

SEQ ID NO: 1448953 - DNA, 15 bp, Homo sapiens
tcatgtataaaatga

SEQ ID NO: 1448954 - DNA, 15 bp, Homo sapiens
ctcatgtataaaatg

SEQ ID NO: 1448955 - DNA, 15 bp, Homo sapiens
cctcatgtataaaat

SEQ ID NO: 1448956 - DNA, 15 bp, Homo sapiens
ccctcatgtataaaa

SEQ ID NO: 1448957 - DNA, 15 bp, Homo sapiens
tccctcatgtataaa

SEQ ID NO: 1448958 - DNA, 15 bp, Homo sapiens
ttccctcatgtataa

SEQ ID NO: 1448959 - DNA, 15 bp, Homo sapiens
gttccctcatgtata

SEQ ID NO: 1448960 - DNA, 15 bp, Homo sapiens
agttccctcatgtat

SEQ ID NO: 1448961 - DNA, 15 bp, Homo sapiens
cagttccctcatgta

SEQ ID NO: 1448962 - DNA, 15 bp, Homo sapiens
ccagttccctcatgt

SEQ ID NO: 1448963 - DNA, 15 bp, Homo sapiens
tccagttccctcatg

SEQ ID NO: 1448964 - DNA, 15 bp, Homo sapiens
ttccagttccctcat

SEQ ID NO: 1448965 - DNA, 15 bp, Homo sapiens
gttccagttccctca

SEQ ID NO: 1448966 - DNA, 15 bp, Homo sapiens
tgttccagttccctc

SEQ ID NO: 1448967 - DNA, 15 bp, Homo sapiens
gtgttccagttccct

SEQ ID NO: 1448968 - DNA, 15 bp, Homo sapiens
tgtgttccagttccc

SEQ ID NO: 1448969 - DNA, 15 bp, Homo sapiens
ctgtgttccagttcc

SEQ ID NO: 1448970 - DNA, 15 bp, Homo sapiens
tctgtgttccagttc

SEQ ID NO: 1448971 - DNA, 15 bp, Homo sapiens
ctctgtgttccagtt

SEQ ID NO: 1448972 - DNA, 15 bp, Homo sapiens
cctctgtgttccagt

SEQ ID NO: 1448973 - DNA, 15 bp, Homo sapiens
acctctgtgttccag

SEQ ID NO: 1448974 - DNA, 15 bp, Homo sapiens
aacctctgtgttcca

SEQ ID NO: 1448975 - DNA, 15 bp, Homo sapiens
taacctctgtgttcc

SEQ ID NO: 1448976 - DNA, 15 bp, Homo sapiens
ttaacctctgtgttc

SEQ ID NO: 1448977 - DNA, 15 bp, Homo sapiens
cttaacctctgtgtt

SEQ ID NO: 1448978 - DNA, 15 bp, Homo sapiens
gcttaacctctgtgt

SEQ ID NO: 1448979 - DNA, 15 bp, Homo sapiens
tgcttaacctctgtg

SEQ ID NO: 1448980 - DNA, 15 bp, Homo sapiens
ttgcttaacctctgt

SEQ ID NO: 1448981 - DNA, 15 bp, Homo sapiens
attgcttaacctctg

SEQ ID NO: 1448982 - DNA, 15 bp, Homo sapiens
tattgcttaacctct

SEQ ID NO: 1448983 - DNA, 15 bp, Homo sapiens
atattgcttaacctc

SEQ ID NO: 1448984 - DNA, 15 bp, Homo sapiens
catattgcttaacct

SEQ ID NO: 1448985 - DNA, 15 bp, Homo sapiens
tcatattgcttaacc

SEQ ID NO: 1448986 - DNA, 15 bp, Homo sapiens
gtcatattgcttaac

SEQ ID NO: 1448987 - DNA, 15 bp, Homo sapiens
ggtcatattgcttaa

SEQ ID NO: 1448988 - DNA, 15 bp, Homo sapiens
tggtcatattgctta

SEQ ID NO: 1448989 - DNA, 15 bp, Homo sapiens
ttggtcatattgctt

SEQ ID NO: 1448990 - DNA, 15 bp, Homo sapiens
tttggtcatattgct

SEQ ID NO: 1448991 - DNA, 15 bp, Homo sapiens
atttggtcatattgc

SEQ ID NO: 1448992 - DNA, 15 bp, Homo sapiens
gatttggtcatattg

SEQ ID NO: 1448993 - DNA, 15 bp, Homo sapiens
tgatttggtcatatt

SEQ ID NO: 1448994 - DNA, 15 bp, Homo sapiens
gtgatttggtcatat

SEQ ID NO: 1448995 - DNA, 15 bp, Homo sapiens
tgtgatttggtcata

SEQ ID NO: 1448996 - DNA, 15 bp, Homo sapiens
atgtgatttggtcat

SEQ ID NO: 1448997 - DNA, 15 bp, Homo sapiens
tatgtgatttggtca

SEQ ID NO: 1448998 - DNA, 15 bp, Homo sapiens
ctatgtgatttggtc

SEQ ID NO: 1448999 - DNA, 15 bp, Homo sapiens
gctatgtgatttggt

SEQ ID NO: 1449000 - DNA, 15 bp, Homo sapiens
agctatgtgatttgg

SEQ ID NO: 1449001 - DNA, 15 bp, Homo sapiens
cagctatgtgatttg

SEQ ID NO: 1449002 - DNA, 15 bp, Homo sapiens
ccagctatgtgattt

SEQ ID NO: 1449003 - DNA, 15 bp, Homo sapiens
gccagctatgtgatt

SEQ ID NO: 1449004 - DNA, 15 bp, Homo sapiens
tgccagctatgtgat

SEQ ID NO: 1449005 - DNA, 15 bp, Homo sapiens
ttgccagctatgtga

SEQ ID NO: 1449006 - DNA, 15 bp, Homo sapiens
cttgccagctatgtg

SEQ ID NO: 1449007 - DNA, 15 bp, Homo sapiens
acttgccagctatgt

SEQ ID NO: 1449008 - DNA, 15 bp, Homo sapiens
cacttgccagctatg

SEQ ID NO: 1449009 - DNA, 15 bp, Homo sapiens
tcacttgccagctat

SEQ ID NO: 1449010 - DNA, 15 bp, Homo sapiens
gtcacttgccagcta

SEQ ID NO: 1449011 - DNA, 15 bp, Homo sapiens
tgtcacttgccagct

SEQ ID NO: 1449012 - DNA, 15 bp, Homo sapiens
ctgtcacttgccagc

SEQ ID NO: 1449013 - DNA, 15 bp, Homo sapiens
tctgtcacttgccag

SEQ ID NO: 1449014 - DNA, 15 bp, Homo sapiens
ctctgtcacttgcca

SEQ ID NO: 1449015 - DNA, 15 bp, Homo sapiens
gctctgtcacttgcc

SEQ ID NO: 1449016 - DNA, 15 bp, Homo sapiens
ggctctgtcacttgc

SEQ ID NO: 1449017 - DNA, 15 bp, Homo sapiens
tggctctgtcacttg

SEQ ID NO: 1449018 - DNA, 15 bp, Homo sapiens
ctggctctgtcactt

SEQ ID NO: 1449019 - DNA, 15 bp, Homo sapiens
tcctggctctgtcac

SEQ ID NO: 1449020 - DNA, 15 bp, Homo sapiens
atcctggctctgtca

SEQ ID NO: 1449021 - DNA, 15 bp, Homo sapiens
aatcctggctctgtc

SEQ ID NO: 1449022 - DNA, 15 bp, Homo sapiens
gaatcctggctctgt

SEQ ID NO: 1449023 - DNA, 15 bp, Homo sapiens
tgaatcctggctctg

SEQ ID NO: 1449024 - DNA, 15 bp, Homo sapiens
ttgaatcctggctct

SEQ ID NO: 1449025 - DNA, 15 bp, Homo sapiens
tttgaatcctggctc

SEQ ID NO: 1449026 - DNA, 15 bp, Homo sapiens
gtttgaatcctggct

SEQ ID NO: 1449027 - DNA, 15 bp, Homo sapiens
ggtttgaatcctggc

SEQ ID NO: 1449028 - DNA, 15 bp, Homo sapiens
aggtttgaatcctgg

SEQ ID NO: 1449029 - DNA, 15 bp, Homo sapiens
gaggtttgaatcctg

SEQ ID NO: 1449030 - DNA, 15 bp, Homo sapiens
agaggtttgaatcct

SEQ ID NO: 1449031 - DNA, 15 bp, Homo sapiens
aagaggtttgaatcc

SEQ ID NO: 1449032 - DNA, 15 bp, Homo sapiens
taagaggtttgaatc

SEQ ID NO: 1449033 - DNA, 15 bp, Homo sapiens
ctaagaggtttgaat

SEQ ID NO: 1449034 - DNA, 15 bp, Homo sapiens
actaagaggtttgaa

SEQ ID NO: 1449035 - DNA, 15 bp, Homo sapiens
aactaagaggtttga

SEQ ID NO: 1449036 - DNA, 15 bp, Homo sapiens
gaactaagaggtttg

SEQ ID NO: 1449037 - DNA, 15 bp, Homo sapiens
ggaactaagaggttt

SEQ ID NO: 1449038 - DNA, 15 bp, Homo sapiens
tggaactaagaggtt

SEQ ID NO: 1449039 - DNA, 15 bp, Homo sapiens
ctggaactaagaggt

SEQ ID NO: 1449040 - DNA, 15 bp, Homo sapiens
tctggaactaagagg

SEQ ID NO: 1449041 - DNA, 15 bp, Homo sapiens
ttctggaactaagag

SEQ ID NO: 1449042 - DNA, 15 bp, Homo sapiens
cttctggaactaaga

SEQ ID NO: 1449043 - DNA, 15 bp, Homo sapiens
gcttctggaactaag

SEQ ID NO: 1449044 - DNA, 15 bp, Homo sapiens
ggcttctggaactaa

SEQ ID NO: 1449045 - DNA, 15 bp, Homo sapiens
aggcttctggaacta

SEQ ID NO: 1449046 - DNA, 15 bp, Homo sapiens
gaggcttctggaact

SEQ ID NO: 1449047 - DNA, 15 bp, Homo sapiens
agaggcttctggaac

SEQ ID NO: 1449048 - DNA, 15 bp, Homo sapiens
aagaggcttctggaa

SEQ ID NO: 1449049 - DNA, 15 bp, Homo sapiens
gaagaggcttctgga

SEQ ID NO: 1449050 - DNA, 15 bp, Homo sapiens
agaagaggcttctgg

SEQ ID NO: 1449051 - DNA, 15 bp, Homo sapiens
cagaagaggcttctg

SEQ ID NO: 1449052 - DNA, 15 bp, Homo sapiens
acagaagaggcttct

SEQ ID NO: 1449053 - DNA, 15 bp, Homo sapiens
tacagaagaggcttc

SEQ ID NO: 1449054 - DNA, 15 bp, Homo sapiens
ttacagaagaggctt

SEQ ID NO: 1449055 - DNA, 15 bp, Homo sapiens
tttacagaagaggct

SEQ ID NO: 1449056 - DNA, 15 bp, Homo sapiens
ttttacagaagaggc

SEQ ID NO: 1449057 - DNA, 15 bp, Homo sapiens
gttttacagaagagg

SEQ ID NO: 1449058 - DNA, 15 bp, Homo sapiens
agttttacagaagag

SEQ ID NO: 1449059 - DNA, 15 bp, Homo sapiens
aagttttacagaaga

SEQ ID NO: 1449060 - DNA, 15 bp, Homo sapiens
caagttttacagaag

SEQ ID NO: 1449061 - DNA, 15 bp, Homo sapiens
ccaagttttacagaa

SEQ ID NO: 1449062 - DNA, 15 bp, Homo sapiens
tccaagttttacaga

SEQ ID NO: 1449063 - DNA, 15 bp, Homo sapiens
gtccaagttttacag

SEQ ID NO: 1449064 - DNA, 15 bp, Homo sapiens
tgtccaagttttaca

SEQ ID NO: 1449065 - DNA, 15 bp, Homo sapiens
ttgtccaagttttac

SEQ ID NO: 1449066 - DNA, 15 bp, Homo sapiens
attgtccaagtttta

SEQ ID NO: 1449067 - DNA, 15 bp, Homo sapiens
tattgtccaagtttt

SEQ ID NO: 1449068 - DNA, 15 bp, Homo sapiens
atattgtccaagttt

SEQ ID NO: 1449069 - DNA, 15 bp, Homo sapiens
catattgtccaagtt

SEQ ID NO: 1449070 - DNA, 15 bp, Homo sapiens
ccatattgtccaagt

SEQ ID NO: 1449071 - DNA, 15 bp, Homo sapiens
accatattgtccaag

SEQ ID NO: 1449072 - DNA, 15 bp, Homo sapiens
gaccatattgtccaa

SEQ ID NO: 1449073 - DNA, 15 bp, Homo sapiens
agaccatattgtcca

SEQ ID NO: 1449074 - DNA, 15 bp, Homo sapiens
tagaccatattgtcc

SEQ ID NO: 1449075 - DNA, 15 bp, Homo sapiens
gtagaccatattgtc

SEQ ID NO: 1449076 - DNA, 15 bp, Homo sapiens
ggtagaccatattgt

SEQ ID NO: 1449077 - DNA, 15 bp, Homo sapiens
aggtagaccatattg

SEQ ID NO: 1449078 - DNA, 15 bp, Homo sapiens
gaggtagaccatatt

SEQ ID NO: 1449079 - DNA, 15 bp, Homo sapiens
ggaggtagaccatat

SEQ ID NO: 1449080 - DNA, 15 bp, Homo sapiens
tggaggtagaccata

SEQ ID NO: 1449081 - DNA, 15 bp, Homo sapiens
gtggaggtagaccat

SEQ ID NO: 1449082 - DNA, 15 bp, Homo sapiens
tgtggaggtagacca

SEQ ID NO: 1449083 - DNA, 15 bp, Homo sapiens
gtgtggaggtagacc

SEQ ID NO: 1449084 - DNA, 15 bp, Homo sapiens
agtgtggaggtagac

SEQ ID NO: 1449085 - DNA, 15 bp, Homo sapiens
cagtgtggaggtaga

SEQ ID NO: 1449086 - DNA, 15 bp, Homo sapiens
tcagtgtggaggtag

SEQ ID NO: 1449087 - DNA, 15 bp, Homo sapiens
ctcagtgtggaggta

SEQ ID NO: 1449088 - DNA, 15 bp, Homo sapiens
tctcagtgtggaggt

SEQ ID NO: 1449089 - DNA, 15 bp, Homo sapiens
atctcagtgtggagg

SEQ ID NO: 1449090 - DNA, 15 bp, Homo sapiens
aatctcagtgtggag

SEQ ID NO: 1449091 - DNA, 15 bp, Homo sapiens
taatctcagtgtgga

SEQ ID NO: 1449092 - DNA, 15 bp, Homo sapiens
gtaatctcagtgtgg

SEQ ID NO: 1449093 - DNA, 15 bp, Homo sapiens
tgtaatctcagtgtg

SEQ ID NO: 1449094 - DNA, 15 bp, Homo sapiens
ctgtaatctcagtgt

SEQ ID NO: 1449095 - DNA, 15 bp, Homo sapiens
tctgtaatctcagtg

SEQ ID NO: 1449096 - DNA, 15 bp, Homo sapiens
ttctgtaatctcagt

SEQ ID NO: 1449097 - DNA, 15 bp, Homo sapiens
gttctgtaatctcag

SEQ ID NO: 1449098 - DNA, 15 bp, Homo sapiens
agttctgtaatctca

SEQ ID NO: 1449099 - DNA, 15 bp, Homo sapiens
tagttctgtaatctc

SEQ ID NO: 1449100 - DNA, 15 bp, Homo sapiens
ttagttctgtaatct

SEQ ID NO: 1449101 - DNA, 15 bp, Homo sapiens
gttagttctgtaatc

SEQ ID NO: 1449102 - DNA, 15 bp, Homo sapiens
ggttagttctgtaat

SEQ ID NO: 1449103 - DNA, 15 bp, Homo sapiens
tggttagttctgtaa

SEQ ID NO: 1449104 - DNA, 15 bp, Homo sapiens
atggttagttctgta

SEQ ID NO: 1449105 - DNA, 15 bp, Homo sapiens
catggttagttctgt

SEQ ID NO: 1449106 - DNA, 15 bp, Homo sapiens
ccatggttagttctg

SEQ ID NO: 1449107 - DNA, 15 bp, Homo sapiens
accatggttagttct

SEQ ID NO: 1449108 - DNA, 15 bp, Homo sapiens
caccatggttagttc

SEQ ID NO: 1449109 - DNA, 15 bp, Homo sapiens
tcaccatggttagtt

SEQ ID NO: 1449110 - DNA, 15 bp, Homo sapiens
ttcaccatggttagt

SEQ ID NO: 1449111 - DNA, 15 bp, Homo sapiens
attcaccatggttag

SEQ ID NO: 1449112 - DNA, 15 bp, Homo sapiens
gattcaccatggtta

SEQ ID NO: 1449113 - DNA, 15 bp, Homo sapiens
agattcaccatggtt

SEQ ID NO: 1449114 - DNA, 15 bp, Homo sapiens
aagattcaccatggt

SEQ ID NO: 1449115 - DNA, 15 bp, Homo sapiens
aaagattcaccatgg

SEQ ID NO: 1449116 - DNA, 15 bp, Homo sapiens
taaagattcaccatg

SEQ ID NO: 1449117 - DNA, 15 bp, Homo sapiens
ttaaagattcaccat

SEQ ID NO: 1449118 - DNA, 15 bp, Homo sapiens
tttaaagattcacca

SEQ ID NO: 1449119 - DNA, 15 bp, Homo sapiens
ttttaaagattcacc

SEQ ID NO: 1449120 - DNA, 15 bp, Homo sapiens
tttttaaagattcac

SEQ ID NO: 1449121 - DNA, 15 bp, Homo sapiens
atttttaaagattca

SEQ ID NO: 1449122 - DNA, 15 bp, Homo sapiens
aatttttaaagattc

SEQ ID NO: 1449123 - DNA, 15 bp, Homo sapiens
caatttttaaagatt

SEQ ID NO: 1449124 - DNA, 15 bp, Homo sapiens
acaatttttaaagat

SEQ ID NO: 1449125 - DNA, 15 bp, Homo sapiens
cacaatttttaaaga

SEQ ID NO: 1449126 - DNA, 15 bp, Homo sapiens
ccacaatttttaaag

SEQ ID NO: 1449127 - DNA, 15 bp, Homo sapiens
accacaatttttaaa

SEQ ID NO: 1449128 - DNA, 15 bp, Homo sapiens
taccacaatttttaa

SEQ ID NO: 1449129 - DNA, 15 bp, Homo sapiens
ttaccacaattttta

SEQ ID NO: 1449130 - DNA, 15 bp, Homo sapiens
tttaccacaattttt

SEQ ID NO: 1449131 - DNA, 15 bp, Homo sapiens
ctttaccacaatttt

SEQ ID NO: 1449132 - DNA, 15 bp, Homo sapiens
actttaccacaattt

SEQ ID NO: 1449133 - DNA, 15 bp, Homo sapiens
cactttaccacaatt

SEQ ID NO: 1449134 - DNA, 15 bp, Homo sapiens
gcactttaccacaat

SEQ ID NO: 1449135 - DNA, 15 bp, Homo sapiens
tgcactttaccacaa

SEQ ID NO: 1449136 - DNA, 15 bp, Homo sapiens
gtgcactttaccaca

SEQ ID NO: 1449137 - DNA, 15 bp, Homo sapiens
tgtgcactttaccac

SEQ ID NO: 1449138 - DNA, 15 bp, Homo sapiens
ttgtgcactttacca

SEQ ID NO: 1449139 - DNA, 15 bp, Homo sapiens
attgtgcactttacc

SEQ ID NO: 1449140 - DNA, 15 bp, Homo sapiens
aattgtgcactttac

SEQ ID NO: 1449141 - DNA, 15 bp, Homo sapiens
taaattgtgcacttt

SEQ ID NO: 1449142 - DNA, 15 bp, Homo sapiens
ctaaattgtgcactt

SEQ ID NO: 1449143 - DNA, 15 bp, Homo sapiens
actaaattgtgcact

SEQ ID NO: 1449144 - DNA, 15 bp, Homo sapiens
cactaaattgtgcac

SEQ ID NO: 1449145 - DNA, 15 bp, Homo sapiens
ccactaaattgtgca

SEQ ID NO: 1449146 - DNA, 15 bp, Homo sapiens
gccactaaattgtgc

SEQ ID NO: 1449147 - DNA, 15 bp, Homo sapiens
tgccactaaattgtg

SEQ ID NO: 1449148 - DNA, 15 bp, Homo sapiens
atgccactaaattgt

SEQ ID NO: 1449149 - DNA, 15 bp, Homo sapiens
aatgccactaaattg

SEQ ID NO: 1449150 - DNA, 15 bp, Homo sapiens
taatgccactaaatt

SEQ ID NO: 1449151 - DNA, 15 bp, Homo sapiens
ttaatgccactaaat

SEQ ID NO: 1449152 - DNA, 15 bp, Homo sapiens
attaatgccactaaa

SEQ ID NO: 1449153 - DNA, 15 bp, Homo sapiens
aattaatgccactaa

SEQ ID NO: 1449154 - DNA, 15 bp, Homo sapiens
taattaatgccacta

SEQ ID NO: 1449155 - DNA, 15 bp, Homo sapiens
ctaattaatgccact

SEQ ID NO: 1449156 - DNA, 15 bp, Homo sapiens
tctaattaatgccac

SEQ ID NO: 1449157 - DNA, 15 bp, Homo sapiens
gtctaattaatgcca

SEQ ID NO: 1449158 - DNA, 15 bp, Homo sapiens
agtctaattaatgcc

SEQ ID NO: 1449159 - DNA, 15 bp, Homo sapiens
gagtctaattaatgc

SEQ ID NO: 1449160 - DNA, 15 bp, Homo sapiens
tgagtctaattaatg

SEQ ID NO: 1449161 - DNA, 15 bp, Homo sapiens
gtgagtctaattaat

SEQ ID NO: 1449162 - DNA, 15 bp, Homo sapiens
tgtgagtctaattaa

SEQ ID NO: 1449163 - DNA, 15 bp, Homo sapiens
ttgtgagtctaatta

SEQ ID NO: 1449164 - DNA, 15 bp, Homo sapiens
attgtgagtctaatt

SEQ ID NO: 1449165 - DNA, 15 bp, Homo sapiens
aattgtgagtctaat

SEQ ID NO: 1449166 - DNA, 15 bp, Homo sapiens
aaattgtgagtctaa

SEQ ID NO: 1449167 - DNA, 15 bp, Homo sapiens
taaattgtgagtcta

SEQ ID NO: 1449168 - DNA, 15 bp, Homo sapiens
ctaaattgtgagtct

SEQ ID NO: 1449169 - DNA, 15 bp, Homo sapiens
actaaattgtgagtc

SEQ ID NO: 1449170 - DNA, 15 bp, Homo sapiens
cactaaattgtgagt

SEQ ID NO: 1449171 - DNA, 15 bp, Homo sapiens
ccactaaattgtgag

SEQ ID NO: 1449172 - DNA, 15 bp, Homo sapiens
gccactaaattgtga

SEQ ID NO: 1449173 - DNA, 15 bp, Homo sapiens
atctaattaatgcca

SEQ ID NO: 1449174 - DNA, 15 bp, Homo sapiens
aatctaattaatgcc

SEQ ID NO: 1449175 - DNA, 15 bp, Homo sapiens
gaatctaattaatgc

SEQ ID NO: 1449176 - DNA, 15 bp, Homo sapiens
tgaatctaattaatg

SEQ ID NO: 1449177 - DNA, 15 bp, Homo sapiens
gtgaatctaattaat

SEQ ID NO: 1449178 - DNA, 15 bp, Homo sapiens
tgtgaatctaattaa

SEQ ID NO: 1449179 - DNA, 15 bp, Homo sapiens
ctgtgaatctaatta

SEQ ID NO: 1449180 - DNA, 15 bp, Homo sapiens
tctgtgaatctaatt

SEQ ID NO: 1449181 - DNA, 15 bp, Homo sapiens
ctctgtgaatctaat

SEQ ID NO: 1449182 - DNA, 15 bp, Homo sapiens
actctgtgaatctaa

SEQ ID NO: 1449183 - DNA, 15 bp, Homo sapiens
gactctgtgaatcta

SEQ ID NO: 1449184 - DNA, 15 bp, Homo sapiens
agactctgtgaatct

SEQ ID NO: 1449185 - DNA, 15 bp, Homo sapiens
cagactctgtgaatc

SEQ ID NO: 1449186 - DNA, 15 bp, Homo sapiens
acagactctgtgaat

SEQ ID NO: 1449187 - DNA, 15 bp, Homo sapiens
aacagactctgtgaa

SEQ ID NO: 1449188 - DNA, 15 bp, Homo sapiens
gaacagactctgtga

SEQ ID NO: 1449189 - DNA, 15 bp, Homo sapiens
agaacagactctgtg

SEQ ID NO: 1449190 - DNA, 15 bp, Homo sapiens
gagaacagactctgt

SEQ ID NO: 1449191 - DNA, 15 bp, Homo sapiens
agagaacagactctg

SEQ ID NO: 1449192 - DNA, 15 bp, Homo sapiens
aagagaacagactct

SEQ ID NO: 1449193 - DNA, 15 bp, Homo sapiens
taagagaacagactc

SEQ ID NO: 1449194 - DNA, 15 bp, Homo sapiens
ttaagagaacagact

SEQ ID NO: 1449195 - DNA, 15 bp, Homo sapiens
cttaagagaacagac

SEQ ID NO: 1449196 - DNA, 15 bp, Homo sapiens
gcttaagagaacaga

SEQ ID NO: 1449197 - DNA, 15 bp, Homo sapiens
tgcttaagagaacag

SEQ ID NO: 1449198 - DNA, 15 bp, Homo sapiens
atgcttaagagaaca

SEQ ID NO: 1449199 - DNA, 15 bp, Homo sapiens
aatgcttaagagaac

SEQ ID NO: 1449200 - DNA, 15 bp, Homo sapiens
gaatgcttaagagaa

SEQ ID NO: 1449201 - DNA, 15 bp, Homo sapiens
agaatgcttaagaga

SEQ ID NO: 1449202 - DNA, 15 bp, Homo sapiens
cagaatgcttaagag

SEQ ID NO: 1449203 - DNA, 15 bp, Homo sapiens
gcagaatgcttaaga

SEQ ID NO: 1449204 - DNA, 15 bp, Homo sapiens
agcagaatgcttaag

SEQ ID NO: 1449205 - DNA, 15 bp, Homo sapiens
gagcagaatgcttaa

SEQ ID NO: 1449206 - DNA, 15 bp, Homo sapiens
agagcagaatgctta

SEQ ID NO: 1449207 - DNA, 15 bp, Homo sapiens
cagagcagaatgctt

SEQ ID NO: 1449208 - DNA, 15 bp, Homo sapiens
ccagagcagaatgct

SEQ ID NO: 1449209 - DNA, 15 bp, Homo sapiens
accagagcagaatgc

SEQ ID NO: 1449210 - DNA, 15 bp, Homo sapiens
caccagagcagaatg

SEQ ID NO: 1449211 - DNA, 15 bp, Homo sapiens
gcaccagagcagaat

SEQ ID NO: 1449212 - DNA, 15 bp, Homo sapiens
agcaccagagcagaa

SEQ ID NO: 1449213 - DNA, 15 bp, Homo sapiens
cagcaccagagcaga

SEQ ID NO: 1449214 - DNA, 15 bp, Homo sapiens
gcagcaccagagcag

SEQ ID NO: 1449215 - DNA, 15 bp, Homo sapiens
agcagcaccagagca

SEQ ID NO: 1449216 - DNA, 15 bp, Homo sapiens
tagcagcaccagagc

SEQ ID NO: 1449217 - DNA, 15 bp, Homo sapiens
ttagcagcaccagag

SEQ ID NO: 1449218 - DNA, 15 bp, Homo sapiens
gttagcagcaccaga

SEQ ID NO: 1449219 - DNA, 15 bp, Homo sapiens
tgttagcagcaccag

SEQ ID NO: 1449220 - DNA, 15 bp, Homo sapiens
atgttagcagcacca

SEQ ID NO: 1449221 - DNA, 15 bp, Homo sapiens
gatgttagcagcacc

SEQ ID NO: 1449222 - DNA, 15 bp, Homo sapiens
tgatgttagcagcac

SEQ ID NO: 1449223 - DNA, 15 bp, Homo sapiens
ctgatgttagcagca

SEQ ID NO: 1449224 - DNA, 15 bp, Homo sapiens
gctgatgttagcagc

SEQ ID NO: 1449225 - DNA, 15 bp, Homo sapiens
ggctgatgttagcag

SEQ ID NO: 1449226 - DNA, 15 bp, Homo sapiens
tggctgatgttagca

SEQ ID NO: 1449227 - DNA, 15 bp, Homo sapiens
ctggctgatgttagc

SEQ ID NO: 1449228 - DNA, 15 bp, Homo sapiens
cctggctgatgttag

SEQ ID NO: 1449229 - DNA, 15 bp, Homo sapiens
tcctggctgatgtta

SEQ ID NO: 1449230 - DNA, 15 bp, Homo sapiens
atcctggctgatgtt

SEQ ID NO: 1449231 - DNA, 15 bp, Homo sapiens
aatcctggctgatgt

SEQ ID NO: 1449232 - DNA, 15 bp, Homo sapiens
gaatcctggctgatg

SEQ ID NO: 1449233 - DNA, 15 bp, Homo sapiens
agaatcctggctgat

SEQ ID NO: 1449234 - DNA, 15 bp, Homo sapiens
tagaatcctggctga

SEQ ID NO: 1449235 - DNA, 15 bp, Homo sapiens
ctagaatcctggctg

SEQ ID NO: 1449236 - DNA, 15 bp, Homo sapiens
actagaatcctggct

SEQ ID NO: 1449237 - DNA, 15 bp, Homo sapiens
gactagaatcctggc

SEQ ID NO: 1449238 - DNA, 15 bp, Homo sapiens
ggactagaatcctgg

SEQ ID NO: 1449239 - DNA, 15 bp, Homo sapiens
tggactagaatcctg

SEQ ID NO: 1449240 - DNA, 15 bp, Homo sapiens
atggactagaatcct

SEQ ID NO: 1449241 - DNA, 15 bp, Homo sapiens
tatggactagaatcc

SEQ ID NO: 1449242 - DNA, 15 bp, Homo sapiens
atatggactagaatc

SEQ ID NO: 1449243 - DNA, 15 bp, Homo sapiens
aatatggactagaat

SEQ ID NO: 1449244 - DNA, 15 bp, Homo sapiens
caatatggactagaa

SEQ ID NO: 1449245 - DNA, 15 bp, Homo sapiens
ccaatatggactaga

SEQ ID NO: 1449246 - DNA, 15 bp, Homo sapiens
cccaatatggactag

SEQ ID NO: 1449247 - DNA, 15 bp, Homo sapiens
acccaatatggacta

SEQ ID NO: 1449248 - DNA, 15 bp, Homo sapiens
aacccaatatggact

SEQ ID NO: 1449249 - DNA, 15 bp, Homo sapiens
taacccaatatggac

SEQ ID NO: 1449250 - DNA, 15 bp, Homo sapiens
ctaacccaatatgga

SEQ ID NO: 1449251 - DNA, 15 bp, Homo sapiens
cctaacccaatatgg

SEQ ID NO: 1449252 - DNA, 15 bp, Homo sapiens
tcctaacccaatatg

SEQ ID NO: 1449253 - DNA, 15 bp, Homo sapiens
atcctaacccaatat

SEQ ID NO: 1449254 - DNA, 15 bp, Homo sapiens
tatcctaacccaata

SEQ ID NO: 1449255 - DNA, 15 bp, Homo sapiens
ttatcctaacccaat

SEQ ID NO: 1449256 - DNA, 15 bp, Homo sapiens
gttatcctaacccaa

SEQ ID NO: 1449257 - DNA, 15 bp, Homo sapiens
tgttatcctaaccca

SEQ ID NO: 1449258 - DNA, 15 bp, Homo sapiens
atgttatcctaaccc

SEQ ID NO: 1449259 - DNA, 15 bp, Homo sapiens
tatgttatcctaacc

SEQ ID NO: 1449260 - DNA, 15 bp, Homo sapiens
ttatgttatcctaac

SEQ ID NO: 1449261 - DNA, 15 bp, Homo sapiens
cttatgttatcctaa

SEQ ID NO: 1449262 - DNA, 15 bp, Homo sapiens
ccttatgttatccta

SEQ ID NO: 1449263 - DNA, 15 bp, Homo sapiens
cccttatgttatcct

SEQ ID NO: 1449264 - DNA, 15 bp, Homo sapiens
tcccttatgttatcc

SEQ ID NO: 1449265 - DNA, 15 bp, Homo sapiens
gtcccttatgttatc

SEQ ID NO: 1449266 - DNA, 15 bp, Homo sapiens
agtcccttatgttat

SEQ ID NO: 1449267 - DNA, 15 bp, Homo sapiens
cagtcccttatgtta

SEQ ID NO: 1449268 - DNA, 15 bp, Homo sapiens
acagtcccttatgtt

SEQ ID NO: 1449269 - DNA, 15 bp, Homo sapiens
tacagtcccttatgt

SEQ ID NO: 1449270 - DNA, 15 bp, Homo sapiens
atacagtcccttatg

SEQ ID NO: 1449271 - DNA, 15 bp, Homo sapiens
aatacagtcccttat

SEQ ID NO: 1449272 - DNA, 15 bp, Homo sapiens
taatacagtccctta

SEQ ID NO: 1449273 - DNA, 15 bp, Homo sapiens
ttaatacagtccctt

SEQ ID NO: 1449274 - DNA, 15 bp, Homo sapiens
tttaatacagtccct

SEQ ID NO: 1449275 - DNA, 15 bp, Homo sapiens
atttaatacagtccc

SEQ ID NO: 1449276 - DNA, 15 bp, Homo sapiens
gatttaatacagtcc

SEQ ID NO: 1449277 - DNA, 15 bp, Homo sapiens
agatttaatacagtc

SEQ ID NO: 1449278 - DNA, 15 bp, Homo sapiens
tagatttaatacagt

SEQ ID NO: 1449279 - DNA, 15 bp, Homo sapiens
ttagatttaatacag

SEQ ID NO: 1449280 - DNA, 15 bp, Homo sapiens
attagatttaataca

SEQ ID NO: 1449281 - DNA, 15 bp, Homo sapiens
aattagatttaatac

SEQ ID NO: 1449282 - DNA, 15 bp, Homo sapiens
taattagatttaata

SEQ ID NO: 1449283 - DNA, 15 bp, Homo sapiens
ttaattagatttaat

SEQ ID NO: 1449284 - DNA, 15 bp, Homo sapiens
attaattagatttaa

SEQ ID NO: 1449285 - DNA, 15 bp, Homo sapiens
tattaattagattta

SEQ ID NO: 1449286 - DNA, 15 bp, Homo sapiens
ttattaattagattt

SEQ ID NO: 1449287 - DNA, 15 bp, Homo sapiens
cttattaattagatt

SEQ ID NO: 1449288 - DNA, 15 bp, Homo sapiens
tcttattaattagat

SEQ ID NO: 1449289 - DNA, 15 bp, Homo sapiens
atcttattaattaga

SEQ ID NO: 1449290 - DNA, 15 bp, Homo sapiens
aatcttattaattag

SEQ ID NO: 1449291 - DNA, 15 bp, Homo sapiens
caatcttattaatta

SEQ ID NO: 1449292 - DNA, 15 bp, Homo sapiens
gcaatcttattaatt

SEQ ID NO: 1449293 - DNA, 15 bp, Homo sapiens
agcaatcttattaat

SEQ ID NO: 1449294 - DNA, 15 bp, Homo sapiens
tagcaatcttattaa

SEQ ID NO: 1449295 - DNA, 15 bp, Homo sapiens
atagcaatcttatta

SEQ ID NO: 1449296 - DNA, 15 bp, Homo sapiens
aatagcaatcttatt

SEQ ID NO: 1449297 - DNA, 15 bp, Homo sapiens
taatagcaatcttat

SEQ ID NO: 1449298 - DNA, 15 bp, Homo sapiens
tataatagcaatctt

SEQ ID NO: 1449299 - DNA, 15 bp, Homo sapiens
ttataatagcaatct

SEQ ID NO: 1449300 - DNA, 15 bp, Homo sapiens
gttataatagcaatc

SEQ ID NO: 1449301 - DNA, 15 bp, Homo sapiens
tgttataatagcaat

SEQ ID NO: 1449302 - DNA, 15 bp, Homo sapiens
atgttataatagcaa

SEQ ID NO: 1449303 - DNA, 15 bp, Homo sapiens
aatgttataatagca

SEQ ID NO: 1449304 - DNA, 15 bp, Homo sapiens
aaatgttataatagc

SEQ ID NO: 1449305 - DNA, 15 bp, Homo sapiens
aaaatgttataatag

SEQ ID NO: 1449306 - DNA, 15 bp, Homo sapiens
aaaaatgttataata

SEQ ID NO: 1449307 - DNA, 15 bp, Homo sapiens
aaaaaatgttataat

SEQ ID NO: 1449308 - DNA, 15 bp, Homo sapiens
taaaaaatgttataa

SEQ ID NO: 1449309 - DNA, 15 bp, Homo sapiens
ttaaaaaatgttata

SEQ ID NO: 1449310 - DNA, 15 bp, Homo sapiens
tttaaaaaatgttat

SEQ ID NO: 1449311 - DNA, 15 bp, Homo sapiens
ctttaaaaaatgtta

SEQ ID NO: 1449312 - DNA, 15 bp, Homo sapiens
actttaaaaaatgtt

SEQ ID NO: 1449313 - DNA, 15 bp, Homo sapiens
cactttaaaaaatgt

SEQ ID NO: 1449314 - DNA, 15 bp, Homo sapiens
gcactttaaaaaatg

SEQ ID NO: 1449315 - DNA, 15 bp, Homo sapiens
cgcactttaaaaaat

SEQ ID NO: 1449316 - DNA, 15 bp, Homo sapiens
acgcactttaaaaaa

SEQ ID NO: 1449317 - DNA, 15 bp, Homo sapiens
aacgcactttaaaaa

SEQ ID NO: 1449318 - DNA, 15 bp, Homo sapiens
caacgcactttaaaa

SEQ ID NO: 1449319 - DNA, 15 bp, Homo sapiens
acaacgcactttaaa

SEQ ID NO: 1449320 - DNA, 15 bp, Homo sapiens
aacaacgcactttaa

SEQ ID NO: 1449321 - DNA, 15 bp, Homo sapiens
caacaacgcacttta

SEQ ID NO: 1449322 - DNA, 15 bp, Homo sapiens
ccaacaacgcacttt

SEQ ID NO: 1449323 - DNA, 15 bp, Homo sapiens
accaacaacgcactt

SEQ ID NO: 1449324 - DNA, 15 bp, Homo sapiens
caccaacaacgcact

SEQ ID NO: 1449325 - DNA, 15 bp, Homo sapiens
ccaccaacaacgcac

SEQ ID NO: 1449326 - DNA, 15 bp, Homo sapiens
gccaccaacaacgca

SEQ ID NO: 1449327 - DNA, 15 bp, Homo sapiens
tgccaccaacaacgc

SEQ ID NO: 1449328 - DNA, 15 bp, Homo sapiens
ttgccaccaacaacg

SEQ ID NO: 1449329 - DNA, 15 bp, Homo sapiens
tttgccaccaacaac

SEQ ID NO: 1449330 - DNA, 15 bp, Homo sapiens
ttttgccaccaacaa

SEQ ID NO: 1449331 - DNA, 15 bp, Homo sapiens
attttgccaccaaca

SEQ ID NO: 1449332 - DNA, 15 bp, Homo sapiens
tattttgccaccaac

SEQ ID NO: 1449333 - DNA, 15 bp, Homo sapiens
ttattttgccaccaa

SEQ ID NO: 1449334 - DNA, 15 bp, Homo sapiens
attattttgccacca

SEQ ID NO: 1449335 - DNA, 15 bp, Homo sapiens
gattattttgccacc

SEQ ID NO: 1449336 - DNA, 15 bp, Homo sapiens
agattattttgccac

SEQ ID NO: 1449337 - DNA, 15 bp, Homo sapiens
cagattattttgcca

SEQ ID NO: 1449338 - DNA, 15 bp, Homo sapiens
tcagattattttgcc

SEQ ID NO: 1449339 - DNA, 15 bp, Homo sapiens
ttcagattattttgc

SEQ ID NO: 1449340 - DNA, 15 bp, Homo sapiens
tttcagattattttg

SEQ ID NO: 1449341 - DNA, 15 bp, Homo sapiens
atttcagattatttt

SEQ ID NO: 1449342 - DNA, 15 bp, Homo sapiens
catttcagattattt

SEQ ID NO: 1449343 - DNA, 15 bp, Homo sapiens
gcatttcagattatt

SEQ ID NO: 1449344 - DNA, 15 bp, Homo sapiens
ggcatttcagattat

SEQ ID NO: 1449345 - DNA, 15 bp, Homo sapiens
tggcatttcagatta

SEQ ID NO: 1449346 - DNA, 15 bp, Homo sapiens
ctggcatttcagatt

SEQ ID NO: 1449347 - DNA, 15 bp, Homo sapiens
tctggcatttcagat

SEQ ID NO: 1449348 - DNA, 15 bp, Homo sapiens
gtctggcatttcaga

SEQ ID NO: 1449349 - DNA, 15 bp, Homo sapiens
ggtctggcatttcag

SEQ ID NO: 1449350 - DNA, 15 bp, Homo sapiens
tggtctggcatttca

SEQ ID NO: 1449351 - DNA, 15 bp, Homo sapiens
ttggtctggcatttc

SEQ ID NO: 1449352 - DNA, 15 bp, Homo sapiens
tttggtctggcattt

SEQ ID NO: 1449353 - DNA, 15 bp, Homo sapiens
ctttggtctggcatt

SEQ ID NO: 1449354 - DNA, 15 bp, Homo sapiens
gctttggtctggcat

SEQ ID NO: 1449355 - DNA, 15 bp, Homo sapiens
tgctttggtctggca

SEQ ID NO: 1449356 - DNA, 15 bp, Homo sapiens
atgctttggtctggc

SEQ ID NO: 1449357 - DNA, 15 bp, Homo sapiens
aatgctttggtctgg

SEQ ID NO: 1449358 - DNA, 15 bp, Homo sapiens
aaatgctttggtctg

SEQ ID NO: 1449359 - DNA, 15 bp, Homo sapiens
caaatgctttggtct

SEQ ID NO: 1449360 - DNA, 15 bp, Homo sapiens
acaaatgctttggtc

SEQ ID NO: 1449361 - DNA, 15 bp, Homo sapiens
cacaaatgctttggt

SEQ ID NO: 1449362 - DNA, 15 bp, Homo sapiens
gcacaaatgctttgg

SEQ ID NO: 1449363 - DNA, 15 bp, Homo sapiens
agcacaaatgctttg

SEQ ID NO: 1449364 - DNA, 15 bp, Homo sapiens
cagcacaaatgcttt

SEQ ID NO: 1449365 - DNA, 15 bp, Homo sapiens
acagcacaaatgctt

SEQ ID NO: 1449366 - DNA, 15 bp, Homo sapiens
tacagcacaaatgct

SEQ ID NO: 1449367 - DNA, 15 bp, Homo sapiens
atacagcacaaatgc

SEQ ID NO: 1449368 - DNA, 15 bp, Homo sapiens
gatacagcacaaatg

SEQ ID NO: 1449369 - DNA, 15 bp, Homo sapiens
agatacagcacaaat

SEQ ID NO: 1449370 - DNA, 15 bp, Homo sapiens
aagatacagcacaaa

SEQ ID NO: 1449371 - DNA, 15 bp, Homo sapiens
gaagatacagcacaa

SEQ ID NO: 1449372 - DNA, 15 bp, Homo sapiens
agaagatacagcaca

SEQ ID NO: 1449373 - DNA, 15 bp, Homo sapiens
tagaagatacagcac

SEQ ID NO: 1449374 - DNA, 15 bp, Homo sapiens
gtagaagatacagca

SEQ ID NO: 1449375 - DNA, 15 bp, Homo sapiens
ggtagaagatacagc

SEQ ID NO: 1449376 - DNA, 15 bp, Homo sapiens
tggtagaagatacag

SEQ ID NO: 1449377 - DNA, 15 bp, Homo sapiens
ttggtagaagataca

SEQ ID NO: 1449378 - DNA, 15 bp, Homo sapiens
cttggtagaagatac

SEQ ID NO: 1449379 - DNA, 15 bp, Homo sapiens
tcttggtagaagata

SEQ ID NO: 1449380 - DNA, 15 bp, Homo sapiens
ttcttggtagaagat

SEQ ID NO: 1449381 - DNA, 15 bp, Homo sapiens
tttcttggtagaaga

SEQ ID NO: 1449382 - DNA, 15 bp, Homo sapiens
atttcttggtagaag

SEQ ID NO: 1449383 - DNA, 15 bp, Homo sapiens
aatttcttggtagaa

SEQ ID NO: 1449384 - DNA, 15 bp, Homo sapiens
gaatttcttggtaga

SEQ ID NO: 1449385 - DNA, 15 bp, Homo sapiens
agaatttcttggtag

SEQ ID NO: 1449386 - DNA, 15 bp, Homo sapiens
aagaatttcttggta

SEQ ID NO: 1449387 - DNA, 15 bp, Homo sapiens
aaagaatttcttggt

SEQ ID NO: 1449388 - DNA, 15 bp, Homo sapiens
gaaagaatttcttgg

SEQ ID NO: 1449389 - DNA, 15 bp, Homo sapiens
ggaaagaatttcttg

SEQ ID NO: 1449390 - DNA, 15 bp, Homo sapiens
gggaaagaatttctt

SEQ ID NO: 1449391 - DNA, 15 bp, Homo sapiens
ggggaaagaatttct

SEQ ID NO: 1449392 - DNA, 15 bp, Homo sapiens
tggggaaagaatttc

SEQ ID NO: 1449393 - DNA, 15 bp, Homo sapiens
atggggaaagaattt

SEQ ID NO: 1449394 - DNA, 15 bp, Homo sapiens
aatggggaaagaatt

SEQ ID NO: 1449395 - DNA, 15 bp, Homo sapiens
aaatggggaaagaat

SEQ ID NO: 1449396 - DNA, 15 bp, Homo sapiens
aaaatggggaaagaa

SEQ ID NO: 1449397 - DNA, 15 bp, Homo sapiens
aaaaatggggaaaga

SEQ ID NO: 1449398 - DNA, 15 bp, Homo sapiens
aaaaaatggggaaag

SEQ ID NO: 1449399 - DNA, 15 bp, Homo sapiens
gaaaaaatggggaaa

SEQ ID NO: 1449400 - DNA, 15 bp, Homo sapiens
tgaaaaaatggggaa

SEQ ID NO: 1449401 - DNA, 15 bp, Homo sapiens
gtgaaaaaatgggga

SEQ ID NO: 1449402 - DNA, 15 bp, Homo sapiens
ggtgaaaaaatgggg

SEQ ID NO: 1449403 - DNA, 15 bp, Homo sapiens
tggtgaaaaaatggg

SEQ ID NO: 1449404 - DNA, 15 bp, Homo sapiens
ttggtgaaaaaatgg

SEQ ID NO: 1449405 - DNA, 15 bp, Homo sapiens
tttggtgaaaaaatg

SEQ ID NO: 1449406 - DNA, 15 bp, Homo sapiens
gtttggtgaaaaaat

SEQ ID NO: 1449407 - DNA, 15 bp, Homo sapiens
agtttggtgaaaaaa

SEQ ID NO: 1449408 - DNA, 15 bp, Homo sapiens
gagtttggtgaaaaa

SEQ ID NO: 1449409 - DNA, 15 bp, Homo sapiens
agagtttggtgaaaa

SEQ ID NO: 1449410 - DNA, 15 bp, Homo sapiens
tagagtttggtgaaa

SEQ ID NO: 1449411 - DNA, 15 bp, Homo sapiens
ttagagtttggtgaa

SEQ ID NO: 1449412 - DNA, 15 bp, Homo sapiens
attagagtttggtga

SEQ ID NO: 1449413 - DNA, 15 bp, Homo sapiens
gattagagtttggtg

SEQ ID NO: 1449414 - DNA, 15 bp, Homo sapiens
agattagagtttggt

SEQ ID NO: 1449415 - DNA, 15 bp, Homo sapiens
cagattagagtttgg

SEQ ID NO: 1449416 - DNA, 15 bp, Homo sapiens
acagattagagtttg

SEQ ID NO: 1449417 - DNA, 15 bp, Homo sapiens
aacagattagagttt

SEQ ID NO: 1449418 - DNA, 15 bp, Homo sapiens
gaacagattagagtt

SEQ ID NO: 1449419 - DNA, 15 bp, Homo sapiens
agaacagattagagt

SEQ ID NO: 1449420 - DNA, 15 bp, Homo sapiens
aagaacagattagag

SEQ ID NO: 1449421 - DNA, 15 bp, Homo sapiens
aaagaacagattaga

SEQ ID NO: 1449422 - DNA, 15 bp, Homo sapiens
gaaagaacagattag

SEQ ID NO: 1449423 - DNA, 15 bp, Homo sapiens
tgaaagaacagatta

SEQ ID NO: 1449424 - DNA, 15 bp, Homo sapiens
atgaaagaacagatt

SEQ ID NO: 1449425 - DNA, 15 bp, Homo sapiens
catgaaagaacagat

SEQ ID NO: 1449426 - DNA, 15 bp, Homo sapiens
acatgaaagaacaga

SEQ ID NO: 1449427 - DNA, 15 bp, Homo sapiens
gacatgaaagaacag

SEQ ID NO: 1449428 - DNA, 15 bp, Homo sapiens
agacatgaaagaaca

SEQ ID NO: 1449429 - DNA, 15 bp, Homo sapiens
cagacatgaaagaac

SEQ ID NO: 1449430 - DNA, 15 bp, Homo sapiens
gcagacatgaaagaa

SEQ ID NO: 1449431 - DNA, 15 bp, Homo sapiens
agcagacatgaaaga

SEQ ID NO: 1449432 - DNA, 15 bp, Homo sapiens
cagcagacatgaaag

SEQ ID NO: 1449433 - DNA, 15 bp, Homo sapiens
tcagcagacatgaaa

SEQ ID NO: 1449434 - DNA, 15 bp, Homo sapiens
ttcagcagacatgaa

SEQ ID NO: 1449435 - DNA, 15 bp, Homo sapiens
tttcagcagacatga

SEQ ID NO: 1449436 - DNA, 15 bp, Homo sapiens
ttttcagcagacatg

SEQ ID NO: 1449437 - DNA, 15 bp, Homo sapiens
cttttcagcagacat

SEQ ID NO: 1449438 - DNA, 15 bp, Homo sapiens
tcttttcagcagaca

SEQ ID NO: 1449439 - DNA, 15 bp, Homo sapiens
atcttttcagcagac

SEQ ID NO: 1449440 - DNA, 15 bp, Homo sapiens
tatcttttcagcaga

SEQ ID NO: 1449441 - DNA, 15 bp, Homo sapiens
gtatcttttcagcag

SEQ ID NO: 1449442 - DNA, 15 bp, Homo sapiens
agtatcttttcagca

SEQ ID NO: 1449443 - DNA, 15 bp, Homo sapiens
aagtatcttttcagc

SEQ ID NO: 1449444 - DNA, 15 bp, Homo sapiens
gaagtatcttttcag

SEQ ID NO: 1449445 - DNA, 15 bp, Homo sapiens
ggaagtatcttttca

SEQ ID NO: 1449446 - DNA, 15 bp, Homo sapiens
aggaagtatcttttc

SEQ ID NO: 1449447 - DNA, 15 bp, Homo sapiens
aaggaagtatctttt

SEQ ID NO: 1449448 - DNA, 15 bp, Homo sapiens
aaaggaagtatcttt

SEQ ID NO: 1449449 - DNA, 15 bp, Homo sapiens
aaaaggaagtatctt

SEQ ID NO: 1449450 - DNA, 15 bp, Homo sapiens
aaaaaggaagtatct

SEQ ID NO: 1449451 - DNA, 15 bp, Homo sapiens
taaaaaggaagtatc

SEQ ID NO: 1449452 - DNA, 15 bp, Homo sapiens
ataaaaaggaagtat

SEQ ID NO: 1449453 - DNA, 15 bp, Homo sapiens
aataaaaaggaagta

SEQ ID NO: 1449454 - DNA, 15 bp, Homo sapiens
aaataaaaaggaagt

SEQ ID NO: 1449455 - DNA, 15 bp, Homo sapiens
aaaataaaaaggaag

SEQ ID NO: 1449456 - DNA, 15 bp, Homo sapiens
gaaaataaaaaggaa

SEQ ID NO: 1449457 - DNA, 15 bp, Homo sapiens
ggaaaataaaaagga

SEQ ID NO: 1449458 - DNA, 15 bp, Homo sapiens
gggaaaataaaaagg

SEQ ID NO: 1449459 - DNA, 15 bp, Homo sapiens
tgggaaaataaaaag

SEQ ID NO: 1449460 - DNA, 15 bp, Homo sapiens
ctgggaaaataaaaa

SEQ ID NO: 1449461 - DNA, 15 bp, Homo sapiens
cctgggaaaataaaa

SEQ ID NO: 1449462 - DNA, 15 bp, Homo sapiens
gcctgggaaaataaa

SEQ ID NO: 1449463 - DNA, 15 bp, Homo sapiens
tgcctgggaaaataa

SEQ ID NO: 1449464 - DNA, 15 bp, Homo sapiens
ttgcctgggaaaata

SEQ ID NO: 1449465 - DNA, 15 bp, Homo sapiens
tttgcctgggaaaat

SEQ ID NO: 1449466 - DNA, 15 bp, Homo sapiens
gtttgcctgggaaaa

SEQ ID NO: 1449467 - DNA, 15 bp, Homo sapiens
agtttgcctgggaaa

SEQ ID NO: 1449468 - DNA, 15 bp, Homo sapiens
aagtttgcctgggaa

SEQ ID NO: 1449469 - DNA, 15 bp, Homo sapiens
gaagtttgcctggga

SEQ ID NO: 1449470 - DNA, 15 bp, Homo sapiens
tgaagtttgcctggg

SEQ ID NO: 1449471 - DNA, 15 bp, Homo sapiens
ctgaagtttgcctgg

SEQ ID NO: 1449472 - DNA, 15 bp, Homo sapiens
actgaagtttgcctg

SEQ ID NO: 1449473 - DNA, 15 bp, Homo sapiens
aactgaagtttgcct

SEQ ID NO: 1449474 - DNA, 15 bp, Homo sapiens
gaactgaagtttgcc

SEQ ID NO: 1449475 - DNA, 15 bp, Homo sapiens
agaactgaagtttgc

SEQ ID NO: 1449476 - DNA, 15 bp, Homo sapiens
gagaactgaagtttg

SEQ ID NO: 1449477 - DNA, 15 bp, Homo sapiens
ggagaactgaagttt

SEQ ID NO: 1449478 - DNA, 15 bp, Homo sapiens
aggagaactgaagtt

SEQ ID NO: 1449479 - DNA, 15 bp, Homo sapiens
aaggagaactgaagt

SEQ ID NO: 1449480 - DNA, 15 bp, Homo sapiens
gaaggagaactgaag

SEQ ID NO: 1449481 - DNA, 15 bp, Homo sapiens
agaaggagaactgaa

SEQ ID NO: 1449482 - DNA, 15 bp, Homo sapiens
aagaaggagaactga

SEQ ID NO: 1449483 - DNA, 15 bp, Homo sapiens
aaagaaggagaactg

SEQ ID NO: 1449484 - DNA, 15 bp, Homo sapiens
taaagaaggagaact

SEQ ID NO: 1449485 - DNA, 15 bp, Homo sapiens
ttaaagaaggagaac

SEQ ID NO: 1449486 - DNA, 15 bp, Homo sapiens
attaaagaaggagaa

SEQ ID NO: 1449487 - DNA, 15 bp, Homo sapiens
tattaaagaaggaga

SEQ ID NO: 1449488 - DNA, 15 bp, Homo sapiens
atattaaagaaggag

SEQ ID NO: 1449489 - DNA, 15 bp, Homo sapiens
aatattaaagaagga

SEQ ID NO: 1449490 - DNA, 15 bp, Homo sapiens
taatattaaagaagg

SEQ ID NO: 1449491 - DNA, 15 bp, Homo sapiens
gtaatattaaagaag

SEQ ID NO: 1449492 - DNA, 15 bp, Homo sapiens
ggtaatattaaagaa

SEQ ID NO: 1449493 - DNA, 15 bp, Homo sapiens
aggtaatattaaaga

SEQ ID NO: 1449494 - DNA, 15 bp, Homo sapiens
gaggtaatattaaag

SEQ ID NO: 1449495 - DNA, 15 bp, Homo sapiens
agaggtaatattaaa

SEQ ID NO: 1449496 - DNA, 15 bp, Homo sapiens
cagaggtaatattaa

SEQ ID NO: 1449497 - DNA, 15 bp, Homo sapiens
gcagaggtaatatta

SEQ ID NO: 1449498 - DNA, 15 bp, Homo sapiens
tgcagaggtaatatt

SEQ ID NO: 1449499 - DNA, 15 bp, Homo sapiens
gtgcagaggtaatat

SEQ ID NO: 1449500 - DNA, 15 bp, Homo sapiens
agtgcagaggtaata

SEQ ID NO: 1449501 - DNA, 15 bp, Homo sapiens
aagtgcagaggtaat

SEQ ID NO: 1449502 - DNA, 15 bp, Homo sapiens
aaagtgcagaggtaa

SEQ ID NO: 1449503 - DNA, 15 bp, Homo sapiens
caaagtgcagaggta

SEQ ID NO: 1449504 - DNA, 15 bp, Homo sapiens
acaaagtgcagaggt

SEQ ID NO: 1449505 - DNA, 15 bp, Homo sapiens
tacaaagtgcagagg

SEQ ID NO: 1449506 - DNA, 15 bp, Homo sapiens
gtacaaagtgcagag

SEQ ID NO: 1449507 - DNA, 15 bp, Homo sapiens
tgtacaaagtgcaga

SEQ ID NO: 1449508 - DNA, 15 bp, Homo sapiens
ttgtacaaagtgcag

SEQ ID NO: 1449509 - DNA, 15 bp, Homo sapiens
tttgtacaaagtgca

SEQ ID NO: 1449510 - DNA, 15 bp, Homo sapiens
atttgtacaaagtgc

SEQ ID NO: 1449511 - DNA, 15 bp, Homo sapiens
catttgtacaaagtg

SEQ ID NO: 1449512 - DNA, 15 bp, Homo sapiens
acatttgtacaaagt

SEQ ID NO: 1449513 - DNA, 15 bp, Homo sapiens
gacatttgtacaaag

SEQ ID NO: 1449514 - DNA, 15 bp, Homo sapiens
ggacatttgtacaaa

SEQ ID NO: 1449515 - DNA, 15 bp, Homo sapiens
tggacatttgtacaa

SEQ ID NO: 1449516 - DNA, 15 bp, Homo sapiens
atggacatttgtaca

SEQ ID NO: 1449517 - DNA, 15 bp, Homo sapiens
aatggacatttgtac

SEQ ID NO: 1449518 - DNA, 15 bp, Homo sapiens
caatggacatttgta

SEQ ID NO: 1449519 - DNA, 15 bp, Homo sapiens
gcaatggacatttgt

SEQ ID NO: 1449520 - DNA, 15 bp, Homo sapiens
tgcaatggacatttg

SEQ ID NO: 1449521 - DNA, 15 bp, Homo sapiens
atgcaatggacattt

SEQ ID NO: 1449522 - DNA, 15 bp, Homo sapiens
aatgcaatggacatt

SEQ ID NO: 1449523 - DNA, 15 bp, Homo sapiens
aaatgcaatggacat

SEQ ID NO: 1449524 - DNA, 15 bp, Homo sapiens
aaaatgcaatggaca

SEQ ID NO: 1449525 - DNA, 15 bp, Homo sapiens
caaaatgcaatggac

SEQ ID NO: 1449526 - DNA, 15 bp, Homo sapiens
tcaaaatgcaatgga

SEQ ID NO: 1449527 - DNA, 15 bp, Homo sapiens
ttcaaaatgcaatgg

SEQ ID NO: 1449528 - DNA, 15 bp, Homo sapiens
tttcaaaatgcaatg

SEQ ID NO: 1449529 - DNA, 15 bp, Homo sapiens
atttcaaaatgcaat

SEQ ID NO: 1449530 - DNA, 15 bp, Homo sapiens
catttcaaaatgcaa

SEQ ID NO: 1449531 - DNA, 15 bp, Homo sapiens
ccatttcaaaatgca

SEQ ID NO: 1449532 - DNA, 15 bp, Homo sapiens
tccatttcaaaatgc

SEQ ID NO: 1449533 - DNA, 15 bp, Homo sapiens
atccatttcaaaatg

SEQ ID NO: 1449534 - DNA, 15 bp, Homo sapiens
aatccatttcaaaat

SEQ ID NO: 1449535 - DNA, 15 bp, Homo sapiens
aaatccatttcaaaa

SEQ ID NO: 1449536 - DNA, 15 bp, Homo sapiens
gaaatccatttcaaa

SEQ ID NO: 1449537 - DNA, 15 bp, Homo sapiens
tgaaatccatttcaa

SEQ ID NO: 1449538 - DNA, 15 bp, Homo sapiens
ttgaaatccatttca

SEQ ID NO: 1449539 - DNA, 15 bp, Homo sapiens
gttgaaatccatttc

SEQ ID NO: 1449540 - DNA, 15 bp, Homo sapiens
tgttgaaatccattt

SEQ ID NO: 1449541 - DNA, 15 bp, Homo sapiens
ctgttgaaatccatt

SEQ ID NO: 1449542 - DNA, 15 bp, Homo sapiens
actgttgaaatccat

SEQ ID NO: 1449543 - DNA, 15 bp, Homo sapiens
tactgttgaaatcca

SEQ ID NO: 1449544 - DNA, 15 bp, Homo sapiens
ttactgttgaaatcc

SEQ ID NO: 1449545 - DNA, 15 bp, Homo sapiens
cttactgttgaaatc

SEQ ID NO: 1449546 - DNA, 15 bp, Homo sapiens
gcttactgttgaaat

SEQ ID NO: 1449547 - DNA, 15 bp, Homo sapiens
ggcttactgttgaaa

SEQ ID NO: 1449548 - DNA, 15 bp, Homo sapiens
tggcttactgttgaa

SEQ ID NO: 1449549 - DNA, 15 bp, Homo sapiens
ttggcttactgttga

SEQ ID NO: 1449550 - DNA, 15 bp, Homo sapiens
gttggcttactgttg

SEQ ID NO: 1449551 - DNA, 15 bp, Homo sapiens
tgttggcttactgtt

SEQ ID NO: 1449552 - DNA, 15 bp, Homo sapiens
ttgttggcttactgt

SEQ ID NO: 1449553 - DNA, 15 bp, Homo sapiens
gttgttggcttactg

SEQ ID NO: 1449554 - DNA, 15 bp, Homo sapiens
tgttgttggcttact

SEQ ID NO: 1449555 - DNA, 15 bp, Homo sapiens
ttgttgttggcttac

SEQ ID NO: 1449556 - DNA, 15 bp, Homo sapiens
tttgttgttggctta

SEQ ID NO: 1449557 - DNA, 15 bp, Homo sapiens
gtttgttgttggctt

SEQ ID NO: 1449558 - DNA, 15 bp, Homo sapiens
tgtttgttgttggct

SEQ ID NO: 1449559 - DNA, 15 bp, Homo sapiens
atgtttgttgttggc

SEQ ID NO: 1449560 - DNA, 15 bp, Homo sapiens
aatgtttgttgttgg

SEQ ID NO: 1449561 - DNA, 15 bp, Homo sapiens
aaatgtttgttgttg

SEQ ID NO: 1449562 - DNA, 15 bp, Homo sapiens
taaatgtttgttgtt

SEQ ID NO: 1449563 - DNA, 15 bp, Homo sapiens
ataaatgtttgttgt

SEQ ID NO: 1449564 - DNA, 15 bp, Homo sapiens
cataaatgtttgttg

SEQ ID NO: 1449565 - DNA, 15 bp, Homo sapiens
tcataaatgtttgtt

SEQ ID NO: 1449566 - DNA, 15 bp, Homo sapiens
ctcataaatgtttgt

SEQ ID NO: 1449567 - DNA, 15 bp, Homo sapiens
gctcataaatgtttg

SEQ ID NO: 1449568 - DNA, 15 bp, Homo sapiens
tgctcataaatgttt

SEQ ID NO: 1449569 - DNA, 15 bp, Homo sapiens
gtgctcataaatgtt

SEQ ID NO: 1449570 - DNA, 15 bp, Homo sapiens
ggtgctcataaatgt

SEQ ID NO: 1449571 - DNA, 15 bp, Homo sapiens
aggtgctcataaatg

SEQ ID NO: 1449572 - DNA, 15 bp, Homo sapiens
taggtgctcataaat

SEQ ID NO: 1449573 - DNA, 15 bp, Homo sapiens
ctaggtgctcataaa

SEQ ID NO: 1449574 - DNA, 15 bp, Homo sapiens
tctaggtgctcataa

SEQ ID NO: 1449575 - DNA, 15 bp, Homo sapiens
ctctaggtgctcata

SEQ ID NO: 1449576 - DNA, 15 bp, Homo sapiens
gctctaggtgctcat

SEQ ID NO: 1449577 - DNA, 15 bp, Homo sapiens
tgctctaggtgctca

SEQ ID NO: 1449578 - DNA, 15 bp, Homo sapiens
gtgctctaggtgctc

SEQ ID NO: 1449579 - DNA, 15 bp, Homo sapiens
tgtgctctaggtgct

SEQ ID NO: 1449580 - DNA, 15 bp, Homo sapiens
atgtgctctaggtgc

SEQ ID NO: 1449581 - DNA, 15 bp, Homo sapiens
catgtgctctaggtg

SEQ ID NO: 1449582 - DNA, 15 bp, Homo sapiens
gcatgtgctctaggt

SEQ ID NO: 1449583 - DNA, 15 bp, Homo sapiens
ggcatgtgctctagg

SEQ ID NO: 1449584 - DNA, 15 bp, Homo sapiens
tggcatgtgctctag

SEQ ID NO: 1449585 - DNA, 15 bp, Homo sapiens
ttggcatgtgctcta

SEQ ID NO: 1449586 - DNA, 15 bp, Homo sapiens
cttggcatgtgctct

SEQ ID NO: 1449587 - DNA, 15 bp, Homo sapiens
gcttggcatgtgctc

SEQ ID NO: 1449588 - DNA, 15 bp, Homo sapiens
tgcttggcatgtgct

SEQ ID NO: 1449589 - DNA, 15 bp, Homo sapiens
atgcttggcatgtgc

SEQ ID NO: 1449590 - DNA, 15 bp, Homo sapiens
aatgcttggcatgtg

SEQ ID NO: 1449591 - DNA, 15 bp, Homo sapiens
taatgcttggcatgt

SEQ ID NO: 1449592 - DNA, 15 bp, Homo sapiens
ataatgcttggcatg

SEQ ID NO: 1449593 - DNA, 15 bp, Homo sapiens
aataatgcttggcat

SEQ ID NO: 1449594 - DNA, 15 bp, Homo sapiens
gaataatgcttggca

SEQ ID NO: 1449595 - DNA, 15 bp, Homo sapiens
agaataatgcttggc

SEQ ID NO: 1449596 - DNA, 15 bp, Homo sapiens
cagaataatgcttgg

SEQ ID NO: 1449597 - DNA, 15 bp, Homo sapiens
ccagaataatgcttg

SEQ ID NO: 1449598 - DNA, 15 bp, Homo sapiens
cccagaataatgctt

SEQ ID NO: 1449599 - DNA, 15 bp, Homo sapiens
acccagaataatgct

SEQ ID NO: 1449600 - DNA, 15 bp, Homo sapiens
tacccagaataatgc

SEQ ID NO: 1449601 - DNA, 15 bp, Homo sapiens
ttacccagaataatg

SEQ ID NO: 1449602 - DNA, 15 bp, Homo sapiens
attacccagaataat

SEQ ID NO: 1449603 - DNA, 15 bp, Homo sapiens
cattacccagaataa

SEQ ID NO: 1449604 - DNA, 15 bp, Homo sapiens
ccattacccagaata

SEQ ID NO: 1449605 - DNA, 15 bp, Homo sapiens
cccattacccagaat

SEQ ID NO: 1449606 - DNA, 15 bp, Homo sapiens
tcccattacccagaa

SEQ ID NO: 1449607 - DNA, 15 bp, Homo sapiens
ttcccattacccaga

SEQ ID NO: 1449608 - DNA, 15 bp, Homo sapiens
attcccattacccag

SEQ ID NO: 1449609 - DNA, 15 bp, Homo sapiens
tattcccattaccca

SEQ ID NO: 1449610 - DNA, 15 bp, Homo sapiens
atattcccattaccc

SEQ ID NO: 1449611 - DNA, 15 bp, Homo sapiens
tatattcccattacc

SEQ ID NO: 1449612 - DNA, 15 bp, Homo sapiens
ttatattcccattac

SEQ ID NO: 1449613 - DNA, 15 bp, Homo sapiens
tttatattcccatta

SEQ ID NO: 1449614 - DNA, 15 bp, Homo sapiens
gtttatattcccatt

SEQ ID NO: 1449615 - DNA, 15 bp, Homo sapiens
tgtttatattcccat

SEQ ID NO: 1449616 - DNA, 15 bp, Homo sapiens
atgtttatattccca

SEQ ID NO: 1449617 - DNA, 15 bp, Homo sapiens
catgtttatattccc

SEQ ID NO: 1449618 - DNA, 15 bp, Homo sapiens
ccatgtttatattcc

SEQ ID NO: 1449619 - DNA, 15 bp, Homo sapiens
cccatgtttatattc

SEQ ID NO: 1449620 - DNA, 15 bp, Homo sapiens
tcccatgtttatatt

SEQ ID NO: 1449621 - DNA, 15 bp, Homo sapiens
ttcccatgtttatat

SEQ ID NO: 1449622 - DNA, 15 bp, Homo sapiens
tttcccatgtttata

SEQ ID NO: 1449623 - DNA, 15 bp, Homo sapiens
ttttcccatgtttat

SEQ ID NO: 1449624 - DNA, 15 bp, Homo sapiens
attttcccatgttta

SEQ ID NO: 1449625 - DNA, 15 bp, Homo sapiens
cattttcccatgttt

SEQ ID NO: 1449626 - DNA, 15 bp, Homo sapiens
ccattttcccatgtt

SEQ ID NO: 1449627 - DNA, 15 bp, Homo sapiens
accattttcccatgt

SEQ ID NO: 1449628 - DNA, 15 bp, Homo sapiens
caccattttcccatg

SEQ ID NO: 1449629 - DNA, 15 bp, Homo sapiens
gcaccattttcccat

SEQ ID NO: 1449630 - DNA, 15 bp, Homo sapiens
agcaccattttccca

SEQ ID NO: 1449631 - DNA, 15 bp, Homo sapiens
gagcaccattttccc

SEQ ID NO: 1449632 - DNA, 15 bp, Homo sapiens
ggagcaccattttcc

SEQ ID NO: 1449633 - DNA, 15 bp, Homo sapiens
aggagcaccattttc

SEQ ID NO: 1449634 - DNA, 15 bp, Homo sapiens
caggagcaccatttt

SEQ ID NO: 1449635 - DNA, 15 bp, Homo sapiens
gcaggagcaccattt

SEQ ID NO: 1449636 - DNA, 15 bp, Homo sapiens
ggcaggagcaccatt

SEQ ID NO: 1449637 - DNA, 15 bp, Homo sapiens
gggcaggagcaccat

SEQ ID NO: 1449638 - DNA, 15 bp, Homo sapiens
agggcaggagcacca

SEQ ID NO: 1449639 - DNA, 15 bp, Homo sapiens
gagggcaggagcacc

SEQ ID NO: 1449640 - DNA, 15 bp, Homo sapiens
cgagggcaggagcac

SEQ ID NO: 1449641 - DNA, 15 bp, Homo sapiens
ccgagggcaggagca

SEQ ID NO: 1449642 - DNA, 15 bp, Homo sapiens
tccgagggcaggagc

SEQ ID NO: 1449643 - DNA, 15 bp, Homo sapiens
atccgagggcaggag

SEQ ID NO: 1449644 - DNA, 15 bp, Homo sapiens
aatccgagggcagga

SEQ ID NO: 1449645 - DNA, 15 bp, Homo sapiens
aaatccgagggcagg

SEQ ID NO: 1449646 - DNA, 15 bp, Homo sapiens
taaatccgagggcag

SEQ ID NO: 1449647 - DNA, 15 bp, Homo sapiens
gtaaatccgagggca

SEQ ID NO: 1449648 - DNA, 15 bp, Homo sapiens
tgtaaatccgagggc

SEQ ID NO: 1449649 - DNA, 15 bp, Homo sapiens
ctgtaaatccgaggg

SEQ ID NO: 1449650 - DNA, 15 bp, Homo sapiens
gctgtaaatccgagg

SEQ ID NO: 1449651 - DNA, 15 bp, Homo sapiens
agctgtaaatccgag

SEQ ID NO: 1449652 - DNA, 15 bp, Homo sapiens
cagctgtaaatccga

SEQ ID NO: 1449653 - DNA, 15 bp, Homo sapiens
tcagctgtaaatccg

SEQ ID NO: 1449654 - DNA, 15 bp, Homo sapiens
gtcagctgtaaatcc

SEQ ID NO: 1449655 - DNA, 15 bp, Homo sapiens
agtcagctgtaaatc

SEQ ID NO: 1449656 - DNA, 15 bp, Homo sapiens
tagtcagctgtaaat

SEQ ID NO: 1449657 - DNA, 15 bp, Homo sapiens
ctagtcagctgtaaa

SEQ ID NO: 1449658 - DNA, 15 bp, Homo sapiens
actagtcagctgtaa

SEQ ID NO: 1449659 - DNA, 15 bp, Homo sapiens
cactagtcagctgta

SEQ ID NO: 1449660 - DNA, 15 bp, Homo sapiens
tcactagtcagctgt

SEQ ID NO: 1449661 - DNA, 15 bp, Homo sapiens
ctcactagtcagctg

SEQ ID NO: 1449662 - DNA, 15 bp, Homo sapiens
tctcactagtcagct

SEQ ID NO: 1449663 - DNA, 15 bp, Homo sapiens
ctctcactagtcagc

SEQ ID NO: 1449664 - DNA, 15 bp, Homo sapiens
gctctcactagtcag

SEQ ID NO: 1449665 - DNA, 15 bp, Homo sapiens
ggctctcactagtca

SEQ ID NO: 1449666 - DNA, 15 bp, Homo sapiens
tggctctcactagtc

SEQ ID NO: 1449667 - DNA, 15 bp, Homo sapiens
ttggctctcactagt

SEQ ID NO: 1449668 - DNA, 15 bp, Homo sapiens
gttggctctcactag

SEQ ID NO: 1449669 - DNA, 15 bp, Homo sapiens
tgttggctctcacta

SEQ ID NO: 1449670 - DNA, 15 bp, Homo sapiens
gtgttggctctcact

SEQ ID NO: 1449671 - DNA, 15 bp, Homo sapiens
tgtgttggctctcac

SEQ ID NO: 1449672 - DNA, 15 bp, Homo sapiens
gtgtgttggctctca

SEQ ID NO: 1449673 - DNA, 15 bp, Homo sapiens
tgtgtgttggctctc

SEQ ID NO: 1449674 - DNA, 15 bp, Homo sapiens
ttgtgtgttggctct

SEQ ID NO: 1449675 - DNA, 15 bp, Homo sapiens
tttgtgtgttggctc

SEQ ID NO: 1449676 - DNA, 15 bp, Homo sapiens
atttgtgtgttggct

SEQ ID NO: 1449677 - DNA, 15 bp, Homo sapiens
tatttgtgtgttggc

SEQ ID NO: 1449678 - DNA, 15 bp, Homo sapiens
atatttgtgtgttgg

SEQ ID NO: 1449679 - DNA, 15 bp, Homo sapiens
catatttgtgtgttg

SEQ ID NO: 1449680 - DNA, 15 bp, Homo sapiens
ccatatttgtgtgtt

SEQ ID NO: 1449681 - DNA, 15 bp, Homo sapiens
gccatatttgtgtgt

SEQ ID NO: 1449682 - DNA, 15 bp, Homo sapiens
ggccatatttgtgtg

SEQ ID NO: 1449683 - DNA, 15 bp, Homo sapiens
gggccatatttgtgt

SEQ ID NO: 1449684 - DNA, 15 bp, Homo sapiens
agggccatatttgtg

SEQ ID NO: 1449685 - DNA, 15 bp, Homo sapiens
cagggccatatttgt

SEQ ID NO: 1449686 - DNA, 15 bp, Homo sapiens
ccagggccatatttg

SEQ ID NO: 1449687 - DNA, 15 bp, Homo sapiens
accagggccatattt

SEQ ID NO: 1449688 - DNA, 15 bp, Homo sapiens
gaccagggccatatt

SEQ ID NO: 1449689 - DNA, 15 bp, Homo sapiens
ggaccagggccatat

SEQ ID NO: 1449690 - DNA, 15 bp, Homo sapiens
gggaccagggccata

SEQ ID NO: 1449691 - DNA, 15 bp, Homo sapiens
agggaccagggccat

SEQ ID NO: 1449692 - DNA, 15 bp, Homo sapiens
cagggaccagggcca

SEQ ID NO: 1449693 - DNA, 15 bp, Homo sapiens
gcagggaccagggcc

SEQ ID NO: 1449694 - DNA, 15 bp, Homo sapiens
agcagggaccagggc

SEQ ID NO: 1449695 - DNA, 15 bp, Homo sapiens
tagcagggaccaggg

SEQ ID NO: 1449696 - DNA, 15 bp, Homo sapiens
gtagcagggaccagg

SEQ ID NO: 1449697 - DNA, 15 bp, Homo sapiens
tgtagcagggaccag

SEQ ID NO: 1449698 - DNA, 15 bp, Homo sapiens
atgtagcagggacca

SEQ ID NO: 1449699 - DNA, 15 bp, Homo sapiens
gatgtagcagggacc

SEQ ID NO: 1449700 - DNA, 15 bp, Homo sapiens
tgatgtagcagggac

SEQ ID NO: 1449701 - DNA, 15 bp, Homo sapiens
atgatgtagcaggga

SEQ ID NO: 1449702 - DNA, 15 bp, Homo sapiens
tatgatgtagcaggg

SEQ ID NO: 1449703 - DNA, 15 bp, Homo sapiens
ctatgatgtagcagg

SEQ ID NO: 1449704 - DNA, 15 bp, Homo sapiens
actatgatgtagcag

SEQ ID NO: 1449705 - DNA, 15 bp, Homo sapiens
aactatgatgtagca

SEQ ID NO: 1449706 - DNA, 15 bp, Homo sapiens
caactatgatgtagc

SEQ ID NO: 1449707 - DNA, 15 bp, Homo sapiens
acaactatgatgtag

SEQ ID NO: 1449708 - DNA, 15 bp, Homo sapiens
aacaactatgatgta

SEQ ID NO: 1449709 - DNA, 15 bp, Homo sapiens
gaacaactatgatgt

SEQ ID NO: 1449710 - DNA, 15 bp, Homo sapiens
agaacaactatgatg

SEQ ID NO: 1449711 - DNA, 15 bp, Homo sapiens
cagaacaactatgat

SEQ ID NO: 1449712 - DNA, 15 bp, Homo sapiens
gcagaacaactatga

SEQ ID NO: 1449713 - DNA, 15 bp, Homo sapiens
tgcagaacaactatg

SEQ ID NO: 1449714 - DNA, 15 bp, Homo sapiens
ttgcagaacaactat

SEQ ID NO: 1449715 - DNA, 15 bp, Homo sapiens
tttgcagaacaacta

SEQ ID NO: 1449716 - DNA, 15 bp, Homo sapiens
atttgcagaacaact

SEQ ID NO: 1449717 - DNA, 15 bp, Homo sapiens
tatttgcagaacaac

SEQ ID NO: 1449718 - DNA, 15 bp, Homo sapiens
atatttgcagaacaa

SEQ ID NO: 1449719 - DNA, 15 bp, Homo sapiens
gatatttgcagaaca

SEQ ID NO: 1449720 - DNA, 15 bp, Homo sapiens
tgatatttgcagaac

SEQ ID NO: 1449721 - DNA, 15 bp, Homo sapiens
gtgatatttgcagaa

SEQ ID NO: 1449722 - DNA, 15 bp, Homo sapiens
tgtgatatttgcaga

SEQ ID NO: 1449723 - DNA, 15 bp, Homo sapiens
atgtgatatttgcag

SEQ ID NO: 1449724 - DNA, 15 bp, Homo sapiens
catgtgatatttgca

SEQ ID NO: 1449725 - DNA, 15 bp, Homo sapiens
ccatgtgatatttgc

SEQ ID NO: 1449726 - DNA, 15 bp, Homo sapiens
gccatgtgatatttg

SEQ ID NO: 1449727 - DNA, 15 bp, Homo sapiens
agccatgtgatattt

SEQ ID NO: 1449728 - DNA, 15 bp, Homo sapiens
cagccatgtgatatt

SEQ ID NO: 1449729 - DNA, 15 bp, Homo sapiens
tcagccatgtgatat

SEQ ID NO: 1449730 - DNA, 15 bp, Homo sapiens
ttcagccatgtgata

SEQ ID NO: 1449731 - DNA, 15 bp, Homo sapiens
attcagccatgtgat

SEQ ID NO: 1449732 - DNA, 15 bp, Homo sapiens
cattcagccatgtga

SEQ ID NO: 1449733 - DNA, 15 bp, Homo sapiens
ccattcagccatgtg

SEQ ID NO: 1449734 - DNA, 15 bp, Homo sapiens
tccattcagccatgt

SEQ ID NO: 1449735 - DNA, 15 bp, Homo sapiens
ttccattcagccatg

SEQ ID NO: 1449736 - DNA, 15 bp, Homo sapiens
cttccattcagccat

SEQ ID NO: 1449737 - DNA, 15 bp, Homo sapiens
tcttccattcagcca

SEQ ID NO: 1449738 - DNA, 15 bp, Homo sapiens
ctcttccattcagcc

SEQ ID NO: 1449739 - DNA, 15 bp, Homo sapiens
tctcttccattcagc

SEQ ID NO: 1449740 - DNA, 15 bp, Homo sapiens
ctctcttccattcag

SEQ ID NO: 1449741 - DNA, 15 bp, Homo sapiens
gctctcttccattca

SEQ ID NO: 1449742 - DNA, 15 bp, Homo sapiens
agctctcttccattc

SEQ ID NO: 1449743 - DNA, 15 bp, Homo sapiens
cagctctcttccatt

SEQ ID NO: 1449744 - DNA, 15 bp, Homo sapiens
tcagctctcttccat

SEQ ID NO: 1449745 - DNA, 15 bp, Homo sapiens
ctcagctctcttcca

SEQ ID NO: 1449746 - DNA, 15 bp, Homo sapiens
actcagctctcttcc

SEQ ID NO: 1449747 - DNA, 15 bp, Homo sapiens
tactcagctctcttc

SEQ ID NO: 1449748 - DNA, 15 bp, Homo sapiens
gtactcagctctctt

SEQ ID NO: 1449749 - DNA, 15 bp, Homo sapiens
ggtactcagctctct

SEQ ID NO: 1449750 - DNA, 15 bp, Homo sapiens
tggtactcagctctc

SEQ ID NO: 1449751 - DNA, 15 bp, Homo sapiens
ttggtactcagctct

SEQ ID NO: 1449752 - DNA, 15 bp, Homo sapiens
cttggtactcagctc

SEQ ID NO: 1449753 - DNA, 15 bp, Homo sapiens
tcttggtactcagct

SEQ ID NO: 1449754 - DNA, 15 bp, Homo sapiens
ttcttggtactcagc

SEQ ID NO: 1449755 - DNA, 15 bp, Homo sapiens
tttcttggtactcag

SEQ ID NO: 1449756 - DNA, 15 bp, Homo sapiens
ctttcttggtactca

SEQ ID NO: 1449757 - DNA, 15 bp, Homo sapiens
actttcttggtactc

SEQ ID NO: 1449758 - DNA, 15 bp, Homo sapiens
gactttcttggtact

SEQ ID NO: 1449759 - DNA, 15 bp, Homo sapiens
agactttcttggtac

SEQ ID NO: 1449760 - DNA, 15 bp, Homo sapiens
aagactttcttggta

SEQ ID NO: 1449761 - DNA, 15 bp, Homo sapiens
aaagactttcttggt

SEQ ID NO: 1449762 - DNA, 15 bp, Homo sapiens
aaaagactttcttgg

SEQ ID NO: 1449763 - DNA, 15 bp, Homo sapiens
taaaagactttcttg

SEQ ID NO: 1449764 - DNA, 15 bp, Homo sapiens
ttaaaagactttctt

SEQ ID NO: 1449765 - DNA, 15 bp, Homo sapiens
tttaaaagactttct

SEQ ID NO: 1449766 - DNA, 15 bp, Homo sapiens
ttttaaaagactttc

SEQ ID NO: 1449767 - DNA, 15 bp, Homo sapiens
attttaaaagacttt

SEQ ID NO: 1449768 - DNA, 15 bp, Homo sapiens
cattttaaaagactt

SEQ ID NO: 1449769 - DNA, 15 bp, Homo sapiens
gcattttaaaagact

SEQ ID NO: 1449770 - DNA, 15 bp, Homo sapiens
ggcattttaaaagac

SEQ ID NO: 1449771 - DNA, 15 bp, Homo sapiens
gggcattttaaaaga

SEQ ID NO: 1449772 - DNA, 15 bp, Homo sapiens
tgggcattttaaaag

SEQ ID NO: 1449773 - DNA, 15 bp, Homo sapiens
ttgggcattttaaaa

SEQ ID NO: 1449774 - DNA, 15 bp, Homo sapiens
tttgggcattttaaa

SEQ ID NO: 1449775 - DNA, 15 bp, Homo sapiens
atttgggcattttaa

SEQ ID NO: 1449776 - DNA, 15 bp, Homo sapiens
tatttgggcatttta

SEQ ID NO: 1449777 - DNA, 15 bp, Homo sapiens
ttatttgggcatttt

SEQ ID NO: 1449778 - DNA, 15 bp, Homo sapiens
tttatttgggcattt

SEQ ID NO: 1449779 - DNA, 15 bp, Homo sapiens
gtttatttgggcatt

SEQ ID NO: 1449780 - DNA, 15 bp, Homo sapiens
tgtttatttgggcat

SEQ ID NO: 1449781 - DNA, 15 bp, Homo sapiens
atgtttatttgggca

SEQ ID NO: 1449782 - DNA, 15 bp, Homo sapiens
gatgtttatttgggc

SEQ ID NO: 1449783 - DNA, 15 bp, Homo sapiens
agatgtttatttggg

SEQ ID NO: 1449784 - DNA, 15 bp, Homo sapiens
gagatgtttatttgg

SEQ ID NO: 1449785 - DNA, 15 bp, Homo sapiens
agagatgtttatttg

SEQ ID NO: 1449786 - DNA, 15 bp, Homo sapiens
tagagatgtttattt

SEQ ID NO: 1449787 - DNA, 15 bp, Homo sapiens
ttagagatgtttatt

SEQ ID NO: 1449788 - DNA, 15 bp, Homo sapiens
tttagagatgtttat

SEQ ID NO: 1449789 - DNA, 15 bp, Homo sapiens
gtttagagatgttta

SEQ ID NO: 1449790 - DNA, 15 bp, Homo sapiens
agtttagagatgttt

SEQ ID NO: 1449791 - DNA, 15 bp, Homo sapiens
aagtttagagatgtt

SEQ ID NO: 1449792 - DNA, 15 bp, Homo sapiens
aaagtttagagatgt

SEQ ID NO: 1449793 - DNA, 15 bp, Homo sapiens
aaaagtttagagatg

SEQ ID NO: 1449794 - DNA, 15 bp, Homo sapiens
aaaaagtttagagat

SEQ ID NO: 1449795 - DNA, 15 bp, Homo sapiens
aaaaaagtttagaga

SEQ ID NO: 1449796 - DNA, 15 bp, Homo sapiens
caaaaaagtttagag

SEQ ID NO: 1449797 - DNA, 15 bp, Homo sapiens
acaaaaaagtttaga

SEQ ID NO: 1449798 - DNA, 15 bp, Homo sapiens
cacaaaaaagtttag

SEQ ID NO: 1449799 - DNA, 15 bp, Homo sapiens
gcacaaaaaagttta

SEQ ID NO: 1449800 - DNA, 15 bp, Homo sapiens
agcacaaaaaagttt

SEQ ID NO: 1449801 - DNA, 15 bp, Homo sapiens
aagcacaaaaaagtt

SEQ ID NO: 1449802 - DNA, 15 bp, Homo sapiens
aaagcacaaaaaagt

SEQ ID NO: 1449803 - DNA, 15 bp, Homo sapiens
taaagcacaaaaaag

SEQ ID NO: 1449804 - DNA, 15 bp, Homo sapiens
ctaaagcacaaaaaa

SEQ ID NO: 1449805 - DNA, 15 bp, Homo sapiens
tctaaagcacaaaaa

SEQ ID NO: 1449806 - DNA, 15 bp, Homo sapiens
atctaaagcacaaaa

SEQ ID NO: 1449807 - DNA, 15 bp, Homo sapiens
aatctaaagcacaaa

SEQ ID NO: 1449808 - DNA, 15 bp, Homo sapiens
taatctaaagcacaa

SEQ ID NO: 1449809 - DNA, 15 bp, Homo sapiens
ttaatctaaagcaca

SEQ ID NO: 1449810 - DNA, 15 bp, Homo sapiens
cttaatctaaagcac

SEQ ID NO: 1449811 - DNA, 15 bp, Homo sapiens
tcttaatctaaagca

SEQ ID NO: 1449812 - DNA, 15 bp, Homo sapiens
atcttaatctaaagc

SEQ ID NO: 1449813 - DNA, 15 bp, Homo sapiens
aatcttaatctaaag

SEQ ID NO: 1449814 - DNA, 15 bp, Homo sapiens
taatcttaatctaaa

SEQ ID NO: 1449815 - DNA, 15 bp, Homo sapiens
ataatcttaatctaa

SEQ ID NO: 1449816 - DNA, 15 bp, Homo sapiens
aataatcttaatcta

SEQ ID NO: 1449817 - DNA, 15 bp, Homo sapiens
aaataatcttaatct

SEQ ID NO: 1449818 - DNA, 15 bp, Homo sapiens
aaaataatcttaatc

SEQ ID NO: 1449819 - DNA, 15 bp, Homo sapiens
aaaaataatcttaat

SEQ ID NO: 1449820 - DNA, 15 bp, Homo sapiens
caaaaataatcttaa

SEQ ID NO: 1449821 - DNA, 15 bp, Homo sapiens
tcaaaaataatctta

SEQ ID NO: 1449822 - DNA, 15 bp, Homo sapiens
gtcaaaaataatctt

SEQ ID NO: 1449823 - DNA, 15 bp, Homo sapiens
ggtcaaaaataatct

SEQ ID NO: 1449824 - DNA, 15 bp, Homo sapiens
tggtcaaaaataatc

SEQ ID NO: 1449825 - DNA, 15 bp, Homo sapiens
atggtcaaaaataat

SEQ ID NO: 1449826 - DNA, 15 bp, Homo sapiens
gatggtcaaaaataa

SEQ ID NO: 1449827 - DNA, 15 bp, Homo sapiens
tgatggtcaaaaata

SEQ ID NO: 1449828 - DNA, 15 bp, Homo sapiens
atgatggtcaaaaat

SEQ ID NO: 1449829 - DNA, 15 bp, Homo sapiens
catgatggtcaaaaa

SEQ ID NO: 1449830 - DNA, 15 bp, Homo sapiens
ccatgatggtcaaaa

SEQ ID NO: 1449831 - DNA, 15 bp, Homo sapiens
gccatgatggtcaaa

SEQ ID NO: 1449832 - DNA, 15 bp, Homo sapiens
agccatgatggtcaa

SEQ ID NO: 1449833 - DNA, 15 bp, Homo sapiens
cagccatgatggtca

SEQ ID NO: 1449834 - DNA, 15 bp, Homo sapiens
acagccatgatggtc

SEQ ID NO: 1449835 - DNA, 15 bp, Homo sapiens
aacagccatgatggt

SEQ ID NO: 1449836 - DNA, 15 bp, Homo sapiens
aaacagccatgatgg

SEQ ID NO: 1449837 - DNA, 15 bp, Homo sapiens
gaaacagccatgatg

SEQ ID NO: 1449838 - DNA, 15 bp, Homo sapiens
ggaaacagccatgat

SEQ ID NO: 1449839 - DNA, 15 bp, Homo sapiens
aggaaacagccatga

SEQ ID NO: 1449840 - DNA, 15 bp, Homo sapiens
aaggaaacagccatg

SEQ ID NO: 1449841 - DNA, 15 bp, Homo sapiens
taaggaaacagccat

SEQ ID NO: 1449842 - DNA, 15 bp, Homo sapiens
ctaaggaaacagcca

SEQ ID NO: 1449843 - DNA, 15 bp, Homo sapiens
actaaggaaacagcc

SEQ ID NO: 1449844 - DNA, 15 bp, Homo sapiens
cactaaggaaacagc

SEQ ID NO: 1449845 - DNA, 15 bp, Homo sapiens
tcactaaggaaacag

SEQ ID NO: 1449846 - DNA, 15 bp, Homo sapiens
ttcactaaggaaaca

SEQ ID NO: 1449847 - DNA, 15 bp, Homo sapiens
tttcactaaggaaac

SEQ ID NO: 1449848 - DNA, 15 bp, Homo sapiens
gtttcactaaggaaa

SEQ ID NO: 1449849 - DNA, 15 bp, Homo sapiens
ggtttcactaaggaa

SEQ ID NO: 1449850 - DNA, 15 bp, Homo sapiens
tggtttcactaagga

SEQ ID NO: 1449851 - DNA, 15 bp, Homo sapiens
atggtttcactaagg

SEQ ID NO: 1449852 - DNA, 15 bp, Homo sapiens
aatggtttcactaag

SEQ ID NO: 1449853 - DNA, 15 bp, Homo sapiens
caatggtttcactaa

SEQ ID NO: 1449854 - DNA, 15 bp, Homo sapiens
ccaatggtttcacta

SEQ ID NO: 1449855 - DNA, 15 bp, Homo sapiens
tccaatggtttcact

SEQ ID NO: 1449856 - DNA, 15 bp, Homo sapiens
atccaatggtttcac

SEQ ID NO: 1449857 - DNA, 15 bp, Homo sapiens
gatccaatggtttca

SEQ ID NO: 1449858 - DNA, 15 bp, Homo sapiens
ggatccaatggtttc

SEQ ID NO: 1449859 - DNA, 15 bp, Homo sapiens
aggatccaatggttt

SEQ ID NO: 1449860 - DNA, 15 bp, Homo sapiens
gaggatccaatggtt

SEQ ID NO: 1449861 - DNA, 15 bp, Homo sapiens
tgaggatccaatggt

SEQ ID NO: 1449862 - DNA, 15 bp, Homo sapiens
ctgaggatccaatgg

SEQ ID NO: 1449863 - DNA, 15 bp, Homo sapiens
gctgaggatccaatg

SEQ ID NO: 1449864 - DNA, 15 bp, Homo sapiens
ggctgaggatccaat

SEQ ID NO: 1449865 - DNA, 15 bp, Homo sapiens
gggctgaggatccaa

SEQ ID NO: 1449866 - DNA, 15 bp, Homo sapiens
agggctgaggatcca

SEQ ID NO: 1449867 - DNA, 15 bp, Homo sapiens
aagggctgaggatcc

SEQ ID NO: 1449868 - DNA, 15 bp, Homo sapiens
gaagggctgaggatc

SEQ ID NO: 1449869 - DNA, 15 bp, Homo sapiens
ggaagggctgaggat

SEQ ID NO: 1449870 - DNA, 15 bp, Homo sapiens
aggaagggctgagga

SEQ ID NO: 1449871 - DNA, 15 bp, Homo sapiens
caggaagggctgagg

SEQ ID NO: 1449872 - DNA, 15 bp, Homo sapiens
ccaggaagggctgag

SEQ ID NO: 1449873 - DNA, 15 bp, Homo sapiens
accaggaagggctga

SEQ ID NO: 1449874 - DNA, 15 bp, Homo sapiens
caccaggaagggctg

SEQ ID NO: 1449875 - DNA, 15 bp, Homo sapiens
acaccaggaagggct

SEQ ID NO: 1449876 - DNA, 15 bp, Homo sapiens
cacaccaggaagggc

SEQ ID NO: 1449877 - DNA, 15 bp, Homo sapiens
acacaccaggaaggg

SEQ ID NO: 1449878 - DNA, 15 bp, Homo sapiens
cacacaccaggaagg

SEQ ID NO: 1449879 - DNA, 15 bp, Homo sapiens
acacacaccaggaag

SEQ ID NO: 1449880 - DNA, 15 bp, Homo sapiens
gacacacaccaggaa

SEQ ID NO: 1449881 - DNA, 15 bp, Homo sapiens
tgacacacaccagga

SEQ ID NO: 1449882 - DNA, 15 bp, Homo sapiens
ttgacacacaccagg

SEQ ID NO: 1449883 - DNA, 15 bp, Homo sapiens
attgacacacaccag

SEQ ID NO: 1449884 - DNA, 15 bp, Homo sapiens
cattgacacacacca

SEQ ID NO: 1449885 - DNA, 15 bp, Homo sapiens
tcattgacacacacc

SEQ ID NO: 1449886 - DNA, 15 bp, Homo sapiens
ctcattgacacacac

SEQ ID NO: 1449887 - DNA, 15 bp, Homo sapiens
gctcattgacacaca

SEQ ID NO: 1449888 - DNA, 15 bp, Homo sapiens
agctcattgacacac

SEQ ID NO: 1449889 - DNA, 15 bp, Homo sapiens
aagctcattgacaca

SEQ ID NO: 1449890 - DNA, 15 bp, Homo sapiens
taagctcattgacac

SEQ ID NO: 1449891 - DNA, 15 bp, Homo sapiens
ctaagctcattgaca

SEQ ID NO: 1449892 - DNA, 15 bp, Homo sapiens
cctaagctcattgac

SEQ ID NO: 1449893 - DNA, 15 bp, Homo sapiens
gcctaagctcattga

SEQ ID NO: 1449894 - DNA, 15 bp, Homo sapiens
agcctaagctcattg

SEQ ID NO: 1449895 - DNA, 15 bp, Homo sapiens
tagcctaagctcatt

SEQ ID NO: 1449896 - DNA, 15 bp, Homo sapiens
ttagcctaagctcat

SEQ ID NO: 1449897 - DNA, 15 bp, Homo sapiens
tttagcctaagctca

SEQ ID NO: 1449898 - DNA, 15 bp, Homo sapiens
atttagcctaagctc

SEQ ID NO: 1449899 - DNA, 15 bp, Homo sapiens
aatttagcctaagct

SEQ ID NO: 1449900 - DNA, 15 bp, Homo sapiens
taatttagcctaagc

SEQ ID NO: 1449901 - DNA, 15 bp, Homo sapiens
ctaatttagcctaag

SEQ ID NO: 1449902 - DNA, 15 bp, Homo sapiens
cctaatttagcctaa

SEQ ID NO: 1449903 - DNA, 15 bp, Homo sapiens
gcctaatttagccta

SEQ ID NO: 1449904 - DNA, 15 bp, Homo sapiens
agcctaatttagcct

SEQ ID NO: 1449905 - DNA, 15 bp, Homo sapiens
cagcctaatttagcc

SEQ ID NO: 1449906 - DNA, 15 bp, Homo sapiens
acagcctaatttagc

SEQ ID NO: 1449907 - DNA, 15 bp, Homo sapiens
cacagcctaatttag

SEQ ID NO: 1449908 - DNA, 15 bp, Homo sapiens
ccacagcctaattta

SEQ ID NO: 1449909 - DNA, 15 bp, Homo sapiens
accacagcctaattt

SEQ ID NO: 1449910 - DNA, 15 bp, Homo sapiens
taccacagcctaatt

SEQ ID NO: 1449911 - DNA, 15 bp, Homo sapiens
ttaccacagcctaat

SEQ ID NO: 1449912 - DNA, 15 bp, Homo sapiens
gttaccacagcctaa

SEQ ID NO: 1449913 - DNA, 15 bp, Homo sapiens
tgttaccacagccta

SEQ ID NO: 1449914 - DNA, 15 bp, Homo sapiens
ttgttaccacagcct

SEQ ID NO: 1449915 - DNA, 15 bp, Homo sapiens
gttgttaccacagcc

SEQ ID NO: 1449916 - DNA, 15 bp, Homo sapiens
ggttgttaccacagc

SEQ ID NO: 1449917 - DNA, 15 bp, Homo sapiens
aggttgttaccacag

SEQ ID NO: 1449918 - DNA, 15 bp, Homo sapiens
caggttgttaccaca

SEQ ID NO: 1449919 - DNA, 15 bp, Homo sapiens
tcaggttgttaccac

SEQ ID NO: 1449920 - DNA, 15 bp, Homo sapiens
ttcaggttgttacca

SEQ ID NO: 1449921 - DNA, 15 bp, Homo sapiens
tttcaggttgttacc

SEQ ID NO: 1449922 - DNA, 15 bp, Homo sapiens
ttttcaggttgttac

SEQ ID NO: 1449923 - DNA, 15 bp, Homo sapiens
attttcaggttgtta

SEQ ID NO: 1449924 - DNA, 15 bp, Homo sapiens
gattttcaggttgtt

SEQ ID NO: 1449925 - DNA, 15 bp, Homo sapiens
agattttcaggttgt

SEQ ID NO: 1449926 - DNA, 15 bp, Homo sapiens
gagattttcaggttg

SEQ ID NO: 1449927 - DNA, 15 bp, Homo sapiens
tgagattttcaggtt

SEQ ID NO: 1449928 - DNA, 15 bp, Homo sapiens
ctgagattttcaggt

SEQ ID NO: 1449929 - DNA, 15 bp, Homo sapiens
tctgagattttcagg

SEQ ID NO: 1449930 - DNA, 15 bp, Homo sapiens
ttctgagattttcag

SEQ ID NO: 1449931 - DNA, 15 bp, Homo sapiens
cttctgagattttca

SEQ ID NO: 1449932 - DNA, 15 bp, Homo sapiens
gcttctgagattttc

SEQ ID NO: 1449933 - DNA, 15 bp, Homo sapiens
agcttctgagatttt

SEQ ID NO: 1449934 - DNA, 15 bp, Homo sapiens
aagcttctgagattt

SEQ ID NO: 1449935 - DNA, 15 bp, Homo sapiens
caagcttctgagatt

SEQ ID NO: 1449936 - DNA, 15 bp, Homo sapiens
acaagcttctgagat

SEQ ID NO: 1449937 - DNA, 15 bp, Homo sapiens
tacaagcttctgaga

SEQ ID NO: 1449938 - DNA, 15 bp, Homo sapiens
ttacaagcttctgag

SEQ ID NO: 1449939 - DNA, 15 bp, Homo sapiens
gttacaagcttctga

SEQ ID NO: 1449940 - DNA, 15 bp, Homo sapiens
tgttacaagcttctg

SEQ ID NO: 1449941 - DNA, 15 bp, Homo sapiens
ttgttacaagcttct

SEQ ID NO: 1449942 - DNA, 15 bp, Homo sapiens
gttgttacaagcttc

SEQ ID NO: 1449943 - DNA, 15 bp, Homo sapiens
ggttgttacaagctt

SEQ ID NO: 1449944 - DNA, 15 bp, Homo sapiens
tggttgttacaagct

SEQ ID NO: 1449945 - DNA, 15 bp, Homo sapiens
ttggttgttacaagc

SEQ ID NO: 1449946 - DNA, 15 bp, Homo sapiens
attggttgttacaag

SEQ ID NO: 1449947 - DNA, 15 bp, Homo sapiens
cattggttgttacaa

SEQ ID NO: 1449948 - DNA, 15 bp, Homo sapiens
acattggttgttaca

SEQ ID NO: 1449949 - DNA, 15 bp, Homo sapiens
aacattggttgttac

SEQ ID NO: 1449950 - DNA, 15 bp, Homo sapiens
aaacattggttgtta

SEQ ID NO: 1449951 - DNA, 15 bp, Homo sapiens
taaacattggttgtt

SEQ ID NO: 1449952 - DNA, 15 bp, Homo sapiens
ataaacattggttgt

SEQ ID NO: 1449953 - DNA, 15 bp, Homo sapiens
aataaacattggttg

SEQ ID NO: 1449954 - DNA, 15 bp, Homo sapiens
aaataaacattggtt

SEQ ID NO: 1449955 - DNA, 15 bp, Homo sapiens
gaaataaacattggt

SEQ ID NO: 1449956 - DNA, 15 bp, Homo sapiens
ggaaataaacattgg

SEQ ID NO: 1449957 - DNA, 15 bp, Homo sapiens
aggaaataaacattg

SEQ ID NO: 1449958 - DNA, 15 bp, Homo sapiens
caggaaataaacatt

SEQ ID NO: 1449959 - DNA, 15 bp, Homo sapiens
acaggaaataaacat

SEQ ID NO: 1449960 - DNA, 15 bp, Homo sapiens
gacaggaaataaaca

SEQ ID NO: 1449961 - DNA, 15 bp, Homo sapiens
agacaggaaataaac

SEQ ID NO: 1449962 - DNA, 15 bp, Homo sapiens
tagacaggaaataaa

SEQ ID NO: 1449963 - DNA, 15 bp, Homo sapiens
ctagacaggaaataa

SEQ ID NO: 1449964 - DNA, 15 bp, Homo sapiens
cctagacaggaaata

SEQ ID NO: 1449965 - DNA, 15 bp, Homo sapiens
acctagacaggaaat

SEQ ID NO: 1449966 - DNA, 15 bp, Homo sapiens
gacctagacaggaaa

SEQ ID NO: 1449967 - DNA, 15 bp, Homo sapiens
agacctagacaggaa

SEQ ID NO: 1449968 - DNA, 15 bp, Homo sapiens
cagacctagacagga

SEQ ID NO: 1449969 - DNA, 15 bp, Homo sapiens
acagacctagacagg

SEQ ID NO: 1449970 - DNA, 15 bp, Homo sapiens
gacagacctagacag

SEQ ID NO: 1449971 - DNA, 15 bp, Homo sapiens
agacagacctagaca

SEQ ID NO: 1449972 - DNA, 15 bp, Homo sapiens
aagacagacctagac

SEQ ID NO: 1449973 - DNA, 15 bp, Homo sapiens
caagacagacctaga

SEQ ID NO: 1449974 - DNA, 15 bp, Homo sapiens
ccaagacagacctag

SEQ ID NO: 1449975 - DNA, 15 bp, Homo sapiens
cccaagacagaccta

SEQ ID NO: 1449976 - DNA, 15 bp, Homo sapiens
acccaagacagacct

SEQ ID NO: 1449977 - DNA, 15 bp, Homo sapiens
gacccaagacagacc

SEQ ID NO: 1449978 - DNA, 15 bp, Homo sapiens
cgacccaagacagac

SEQ ID NO: 1449979 - DNA, 15 bp, Homo sapiens
acgacccaagacaga

SEQ ID NO: 1449980 - DNA, 15 bp, Homo sapiens
cacgacccaagacag

SEQ ID NO: 1449981 - DNA, 15 bp, Homo sapiens
acacgacccaagaca

SEQ ID NO: 1449982 - DNA, 15 bp, Homo sapiens
cacacgacccaagac

SEQ ID NO: 1449983 - DNA, 15 bp, Homo sapiens
gcacacgacccaaga

SEQ ID NO: 1449984 - DNA, 15 bp, Homo sapiens
tgcacacgacccaag

SEQ ID NO: 1449985 - DNA, 15 bp, Homo sapiens
ctgcacacgacccaa

SEQ ID NO: 1449986 - DNA, 15 bp, Homo sapiens
gctgcacacgaccca

SEQ ID NO: 1449987 - DNA, 15 bp, Homo sapiens
agctgcacacgaccc

SEQ ID NO: 1449988 - DNA, 15 bp, Homo sapiens
gagctgcacacgacc

SEQ ID NO: 1449989 - DNA, 15 bp, Homo sapiens
agagctgcacacgac

SEQ ID NO: 1449990 - DNA, 15 bp, Homo sapiens
cagagctgcacacga

SEQ ID NO: 1449991 - DNA, 15 bp, Homo sapiens
gcagagctgcacacg

SEQ ID NO: 1449992 - DNA, 15 bp, Homo sapiens
agcagagctgcacac

SEQ ID NO: 1449993 - DNA, 15 bp, Homo sapiens
gagcagagctgcaca

SEQ ID NO: 1449994 - DNA, 15 bp, Homo sapiens
ggagcagagctgcac

SEQ ID NO: 1449995 - DNA, 15 bp, Homo sapiens
tggagcagagctgca

SEQ ID NO: 1449996 - DNA, 15 bp, Homo sapiens
atggagcagagctgc

SEQ ID NO: 1449997 - DNA, 15 bp, Homo sapiens
catggagcagagctg

SEQ ID NO: 1449998 - DNA, 15 bp, Homo sapiens
acatggagcagagct

SEQ ID NO: 1449999 - DNA, 15 bp, Homo sapiens
gacatggagcagagc

SEQ ID NO: 1450000 - DNA, 15 bp, Homo sapiens
tgacatggagcagag

SEQ ID NO: 1450001 - DNA, 15 bp, Homo sapiens
ctgacatggagcaga

SEQ ID NO: 1450002 - DNA, 15 bp, Homo sapiens
actgacatggagcag

SEQ ID NO: 1450003 - DNA, 15 bp, Homo sapiens
aactgacatggagca

SEQ ID NO: 1450004 - DNA, 15 bp, Homo sapiens
aaactgacatggagc

SEQ ID NO: 1450005 - DNA, 15 bp, Homo sapiens
gaaactgacatggag

SEQ ID NO: 1450006 - DNA, 15 bp, Homo sapiens
tgaaactgacatgga

SEQ ID NO: 1450007 - DNA, 15 bp, Homo sapiens
gtgaaactgacatgg

SEQ ID NO: 1450008 - DNA, 15 bp, Homo sapiens
agtgaaactgacatg

SEQ ID NO: 1450009 - DNA, 15 bp, Homo sapiens
tagtgaaactgacat

SEQ ID NO: 1450010 - DNA, 15 bp, Homo sapiens
atagtgaaactgaca

SEQ ID NO: 1450011 - DNA, 15 bp, Homo sapiens
catagtgaaactgac

SEQ ID NO: 1450012 - DNA, 15 bp, Homo sapiens
ccatagtgaaactga

SEQ ID NO: 1450013 - DNA, 15 bp, Homo sapiens
cccatagtgaaactg

SEQ ID NO: 1450014 - DNA, 15 bp, Homo sapiens
tcccatagtgaaact

SEQ ID NO: 1450015 - DNA, 15 bp, Homo sapiens
gtcccatagtgaaac

SEQ ID NO: 1450016 - DNA, 15 bp, Homo sapiens
ggtcccatagtgaaa

SEQ ID NO: 1450017 - DNA, 15 bp, Homo sapiens
gggtcccatagtgaa

SEQ ID NO: 1450018 - DNA, 15 bp, Homo sapiens
ggggtcccatagtga

SEQ ID NO: 1450019 - DNA, 15 bp, Homo sapiens
tggggtcccatagtg

SEQ ID NO: 1450020 - DNA, 15 bp, Homo sapiens
ctggggtcccatagt

SEQ ID NO: 1450021 - DNA, 15 bp, Homo sapiens
tctggggtcccatag

SEQ ID NO: 1450022 - DNA, 15 bp, Homo sapiens
atctggggtcccata

SEQ ID NO: 1450023 - DNA, 15 bp, Homo sapiens
catctggggtcccat

SEQ ID NO: 1450024 - DNA, 15 bp, Homo sapiens
tcatctggggtccca

SEQ ID NO: 1450025 - DNA, 15 bp, Homo sapiens
ttcatctggggtccc

SEQ ID NO: 1450026 - DNA, 15 bp, Homo sapiens
cttcatctggggtcc

SEQ ID NO: 1450027 - DNA, 15 bp, Homo sapiens
ccttcatctggggtc

SEQ ID NO: 1450028 - DNA, 15 bp, Homo sapiens
tccttcatctggggt

SEQ ID NO: 1450029 - DNA, 15 bp, Homo sapiens
ctccttcatctgggg

SEQ ID NO: 1450030 - DNA, 15 bp, Homo sapiens
cctccttcatctggg

SEQ ID NO: 1450031 - DNA, 15 bp, Homo sapiens
ccctccttcatctgg

SEQ ID NO: 1450032 - DNA, 15 bp, Homo sapiens
cccctccttcatctg

SEQ ID NO: 1450033 - DNA, 15 bp, Homo sapiens
gcccctccttcatct

SEQ ID NO: 1450034 - DNA, 15 bp, Homo sapiens
tgcccctccttcatc

SEQ ID NO: 1450035 - DNA, 15 bp, Homo sapiens
gtgcccctccttcat

SEQ ID NO: 1450036 - DNA, 15 bp, Homo sapiens
ggtgcccctccttca

SEQ ID NO: 1450037 - DNA, 15 bp, Homo sapiens
aggtgcccctccttc

SEQ ID NO: 1450038 - DNA, 15 bp, Homo sapiens
taggtgcccctcctt

SEQ ID NO: 1450039 - DNA, 15 bp, Homo sapiens
ataggtgcccctcct

SEQ ID NO: 1450040 - DNA, 15 bp, Homo sapiens
gataggtgcccctcc

SEQ ID NO: 1450041 - DNA, 15 bp, Homo sapiens
agataggtgcccctc

SEQ ID NO: 1450042 - DNA, 15 bp, Homo sapiens
cagataggtgcccct

SEQ ID NO: 1450043 - DNA, 15 bp, Homo sapiens
ccagataggtgcccc

SEQ ID NO: 1450044 - DNA, 15 bp, Homo sapiens
cccagataggtgccc

SEQ ID NO: 1450045 - DNA, 15 bp, Homo sapiens
tcccagataggtgcc

SEQ ID NO: 1450046 - DNA, 15 bp, Homo sapiens
gtcccagataggtgc

SEQ ID NO: 1450047 - DNA, 15 bp, Homo sapiens
tgtcccagataggtg

SEQ ID NO: 1450048 - DNA, 15 bp, Homo sapiens
atgtcccagataggt

SEQ ID NO: 1450049 - DNA, 15 bp, Homo sapiens
aatgtcccagatagg

SEQ ID NO: 1450050 - DNA, 15 bp, Homo sapiens
taatgtcccagatag

SEQ ID NO: 1450051 - DNA, 15 bp, Homo sapiens
ttaatgtcccagata

SEQ ID NO: 1450052 - DNA, 15 bp, Homo sapiens
attaatgtcccagat

SEQ ID NO: 1450053 - DNA, 15 bp, Homo sapiens
cattaatgtcccaga

SEQ ID NO: 1450054 - DNA, 15 bp, Homo sapiens
gcattaatgtcccag

SEQ ID NO: 1450055 - DNA, 15 bp, Homo sapiens
agcattaatgtccca

SEQ ID NO: 1450056 - DNA, 15 bp, Homo sapiens
tagcattaatgtccc

SEQ ID NO: 1450057 - DNA, 15 bp, Homo sapiens
ctagcattaatgtcc

SEQ ID NO: 1450058 - DNA, 15 bp, Homo sapiens
actagcattaatgtc

SEQ ID NO: 1450059 - DNA, 15 bp, Homo sapiens
tactagcattaatgt

SEQ ID NO: 1450060 - DNA, 15 bp, Homo sapiens
atactagcattaatg

SEQ ID NO: 1450061 - DNA, 15 bp, Homo sapiens
gatactagcattaat

SEQ ID NO: 1450062 - DNA, 15 bp, Homo sapiens
tgatactagcattaa

SEQ ID NO: 1450063 - DNA, 15 bp, Homo sapiens
ttgatactagcatta

SEQ ID NO: 1450064 - DNA, 15 bp, Homo sapiens
cttgatactagcatt

SEQ ID NO: 1450065 - DNA, 15 bp, Homo sapiens
ccttgatactagcat

SEQ ID NO: 1450066 - DNA, 15 bp, Homo sapiens
accttgatactagca

SEQ ID NO: 1450067 - DNA, 15 bp, Homo sapiens
caccttgatactagc

SEQ ID NO: 1450068 - DNA, 15 bp, Homo sapiens
tcaccttgatactag

SEQ ID NO: 1450069 - DNA, 15 bp, Homo sapiens
ttcaccttgatacta

SEQ ID NO: 1450070 - DNA, 15 bp, Homo sapiens
tttcaccttgatact

SEQ ID NO: 1450071 - DNA, 15 bp, Homo sapiens
ctttcaccttgatac

SEQ ID NO: 1450072 - DNA, 15 bp, Homo sapiens
tctttcaccttgata

SEQ ID NO: 1450073 - DNA, 15 bp, Homo sapiens
ctctttcaccttgat

SEQ ID NO: 1450074 - DNA, 15 bp, Homo sapiens
gctctttcaccttga

SEQ ID NO: 1450075 - DNA, 15 bp, Homo sapiens
tgctctttcaccttg

SEQ ID NO: 1450076 - DNA, 15 bp, Homo sapiens
ctgctctttcacctt

SEQ ID NO: 1450077 - DNA, 15 bp, Homo sapiens
tctgctctttcacct

SEQ ID NO: 1450078 - DNA, 15 bp, Homo sapiens
ttctgctctttcacc

SEQ ID NO: 1450079 - DNA, 15 bp, Homo sapiens
tttctgctctttcac

SEQ ID NO: 1450080 - DNA, 15 bp, Homo sapiens
ttttctgctctttca

SEQ ID NO: 1450081 - DNA, 15 bp, Homo sapiens
gttttctgctctttc

SEQ ID NO: 1450082 - DNA, 15 bp, Homo sapiens
tgttttctgctcttt

SEQ ID NO: 1450083 - DNA, 15 bp, Homo sapiens
ctgttttctgctctt

SEQ ID NO: 1450084 - DNA, 15 bp, Homo sapiens
cctgttttctgctct

SEQ ID NO: 1450085 - DNA, 15 bp, Homo sapiens
acctgttttctgctc

SEQ ID NO: 1450086 - DNA, 15 bp, Homo sapiens
aacctgttttctgct

SEQ ID NO: 1450087 - DNA, 15 bp, Homo sapiens
aaacctgttttctgc

SEQ ID NO: 1450088 - DNA, 15 bp, Homo sapiens
gaaacctgttttctg

SEQ ID NO: 1450089 - DNA, 15 bp, Homo sapiens
agaaacctgttttct

SEQ ID NO: 1450090 - DNA, 15 bp, Homo sapiens
cagaaacctgttttc

SEQ ID NO: 1450091 - DNA, 15 bp, Homo sapiens
acagaaacctgtttt

SEQ ID NO: 1450092 - DNA, 15 bp, Homo sapiens
tacagaaacctgttt

SEQ ID NO: 1450093 - DNA, 15 bp, Homo sapiens
ctacagaaacctgtt

SEQ ID NO: 1450094 - DNA, 15 bp, Homo sapiens
cctacagaaacctgt

SEQ ID NO: 1450095 - DNA, 15 bp, Homo sapiens
tcctacagaaacctg

SEQ ID NO: 1450096 - DNA, 15 bp, Homo sapiens
ttcctacagaaacct

SEQ ID NO: 1450097 - DNA, 15 bp, Homo sapiens
attcctacagaaacc

SEQ ID NO: 1450098 - DNA, 15 bp, Homo sapiens
tattcctacagaaac

SEQ ID NO: 1450099 - DNA, 15 bp, Homo sapiens
gtattcctacagaaa

SEQ ID NO: 1450100 - DNA, 15 bp, Homo sapiens
ggtattcctacagaa

SEQ ID NO: 1450101 - DNA, 15 bp, Homo sapiens
aggtattcctacaga

SEQ ID NO: 1450102 - DNA, 15 bp, Homo sapiens
caggtattcctacag

SEQ ID NO: 1450103 - DNA, 15 bp, Homo sapiens
acaggtattcctaca

SEQ ID NO: 1450104 - DNA, 15 bp, Homo sapiens
cacaggtattcctac

SEQ ID NO: 1450105 - DNA, 15 bp, Homo sapiens
ccacaggtattccta

SEQ ID NO: 1450106 - DNA, 15 bp, Homo sapiens
gccacaggtattcct

SEQ ID NO: 1450107 - DNA, 15 bp, Homo sapiens
agccacaggtattcc

SEQ ID NO: 1450108 - DNA, 15 bp, Homo sapiens
tagccacaggtattc

SEQ ID NO: 1450109 - DNA, 15 bp, Homo sapiens
atagccacaggtatt

SEQ ID NO: 1450110 - DNA, 15 bp, Homo sapiens
tatagccacaggtat

SEQ ID NO: 1450111 - DNA, 15 bp, Homo sapiens
gtatagccacaggta

SEQ ID NO: 1450112 - DNA, 15 bp, Homo sapiens
agtatagccacaggt

SEQ ID NO: 1450113 - DNA, 15 bp, Homo sapiens
aagtatagccacagg

SEQ ID NO: 1450114 - DNA, 15 bp, Homo sapiens
aaagtatagccacag

SEQ ID NO: 1450115 - DNA, 15 bp, Homo sapiens
aaaagtatagccaca

SEQ ID NO: 1450116 - DNA, 15 bp, Homo sapiens
aaaaagtatagccac

SEQ ID NO: 1450117 - DNA, 15 bp, Homo sapiens
taaaaagtatagcca

SEQ ID NO: 1450118 - DNA, 15 bp, Homo sapiens
ctaaaaagtatagcc

SEQ ID NO: 1450119 - DNA, 15 bp, Homo sapiens
actaaaaagtatagc

SEQ ID NO: 1450120 - DNA, 15 bp, Homo sapiens
cactaaaaagtatag

SEQ ID NO: 1450121 - DNA, 15 bp, Homo sapiens
tcactaaaaagtata

SEQ ID NO: 1450122 - DNA, 15 bp, Homo sapiens
atcactaaaaagtat

SEQ ID NO: 1450123 - DNA, 15 bp, Homo sapiens
aatcactaaaaagta

SEQ ID NO: 1450124 - DNA, 15 bp, Homo sapiens
aaatcactaaaaagt

SEQ ID NO: 1450125 - DNA, 15 bp, Homo sapiens
aaaatcactaaaaag

SEQ ID NO: 1450126 - DNA, 15 bp, Homo sapiens
gaaaatcactaaaaa

SEQ ID NO: 1450127 - DNA, 15 bp, Homo sapiens
tgaaaatcactaaaa

SEQ ID NO: 1450128 - DNA, 15 bp, Homo sapiens
ttgaaaatcactaaa

SEQ ID NO: 1450129 - DNA, 15 bp, Homo sapiens
tttgaaaatcactaa

SEQ ID NO: 1450130 - DNA, 15 bp, Homo sapiens
atttgaaaatcacta

SEQ ID NO: 1450131 - DNA, 15 bp, Homo sapiens
aatttgaaaatcact

SEQ ID NO: 1450132 - DNA, 15 bp, Homo sapiens
gaatttgaaaatcac

SEQ ID NO: 1450133 - DNA, 15 bp, Homo sapiens
agaatttgaaaatca

SEQ ID NO: 1450134 - DNA, 15 bp, Homo sapiens
aagaatttgaaaatc

SEQ ID NO: 1450135 - DNA, 15 bp, Homo sapiens
aaagaatttgaaaat

SEQ ID NO: 1450136 - DNA, 15 bp, Homo sapiens
taaagaatttgaaaa

SEQ ID NO: 1450137 - DNA, 15 bp, Homo sapiens
gtaaagaatttgaaa

SEQ ID NO: 1450138 - DNA, 15 bp, Homo sapiens
ggtaaagaatttgaa

SEQ ID NO: 1450139 - DNA, 15 bp, Homo sapiens
tggtaaagaatttga

SEQ ID NO: 1450140 - DNA, 15 bp, Homo sapiens
atggtaaagaatttg

SEQ ID NO: 1450141 - DNA, 15 bp, Homo sapiens
catggtaaagaattt

SEQ ID NO: 1450142 - DNA, 15 bp, Homo sapiens
acatggtaaagaatt

SEQ ID NO: 1450143 - DNA, 15 bp, Homo sapiens
aacatggtaaagaat

SEQ ID NO: 1450144 - DNA, 15 bp, Homo sapiens
aaacatggtaaagaa

SEQ ID NO: 1450145 - DNA, 15 bp, Homo sapiens
taaacatggtaaaga

SEQ ID NO: 1450146 - DNA, 15 bp, Homo sapiens
ataaacatggtaaag

SEQ ID NO: 1450147 - DNA, 15 bp, Homo sapiens
aataaacatggtaaa

SEQ ID NO: 1450148 - DNA, 15 bp, Homo sapiens
gaataaacatggtaa

SEQ ID NO: 1450149 - DNA, 15 bp, Homo sapiens
ggaataaacatggta

SEQ ID NO: 1450150 - DNA, 15 bp, Homo sapiens
tggaataaacatggt

SEQ ID NO: 1450151 - DNA, 15 bp, Homo sapiens
gtggaataaacatgg

SEQ ID NO: 1450152 - DNA, 15 bp, Homo sapiens
ggtggaataaacatg

SEQ ID NO: 1450153 - DNA, 15 bp, Homo sapiens
tggtggaataaacat

SEQ ID NO: 1450154 - DNA, 15 bp, Homo sapiens
ttggtggaataaaca

SEQ ID NO: 1450155 - DNA, 15 bp, Homo sapiens
attggtggaataaac

SEQ ID NO: 1450156 - DNA, 15 bp, Homo sapiens
gattggtggaataaa

SEQ ID NO: 1450157 - DNA, 15 bp, Homo sapiens
agattggtggaataa

SEQ ID NO: 1450158 - DNA, 15 bp, Homo sapiens
cagattggtggaata

SEQ ID NO: 1450159 - DNA, 15 bp, Homo sapiens
tcagattggtggaat

SEQ ID NO: 1450160 - DNA, 15 bp, Homo sapiens
gtcagattggtggaa

SEQ ID NO: 1450161 - DNA, 15 bp, Homo sapiens
tgtcagattggtgga

SEQ ID NO: 1450162 - DNA, 15 bp, Homo sapiens
ctgtcagattggtgg

SEQ ID NO: 1450163 - DNA, 15 bp, Homo sapiens
actgtcagattggtg

SEQ ID NO: 1450164 - DNA, 15 bp, Homo sapiens
aactgtcagattggt

SEQ ID NO: 1450165 - DNA, 15 bp, Homo sapiens
taactgtcagattgg

SEQ ID NO: 1450166 - DNA, 15 bp, Homo sapiens
ataactgtcagattg

SEQ ID NO: 1450167 - DNA, 15 bp, Homo sapiens
aataactgtcagatt

SEQ ID NO: 1450168 - DNA, 15 bp, Homo sapiens
aaataactgtcagat

SEQ ID NO: 1450169 - DNA, 15 bp, Homo sapiens
taaataactgtcaga

SEQ ID NO: 1450170 - DNA, 15 bp, Homo sapiens
gtaaataactgtcag

SEQ ID NO: 1450171 - DNA, 15 bp, Homo sapiens
tgtaaataactgtca

SEQ ID NO: 1450172 - DNA, 15 bp, Homo sapiens
atgtaaataactgtc

SEQ ID NO: 1450173 - DNA, 15 bp, Homo sapiens
catgtaaataactgt

SEQ ID NO: 1450174 - DNA, 15 bp, Homo sapiens
acatgtaaataactg

SEQ ID NO: 1450175 - DNA, 15 bp, Homo sapiens
cacatgtaaataact

SEQ ID NO: 1450176 - DNA, 15 bp, Homo sapiens
acacatgtaaataac

SEQ ID NO: 1450177 - DNA, 15 bp, Homo sapiens
aacacatgtaaataa

SEQ ID NO: 1450178 - DNA, 15 bp, Homo sapiens
aaacacatgtaaata

SEQ ID NO: 1450179 - DNA, 15 bp, Homo sapiens
aaaacacatgtaaat

SEQ ID NO: 1450180 - DNA, 15 bp, Homo sapiens
gaaaacacatgtaaa

SEQ ID NO: 1450181 - DNA, 15 bp, Homo sapiens
agaaaacacatgtaa

SEQ ID NO: 1450182 - DNA, 15 bp, Homo sapiens
aagaaaacacatgta

SEQ ID NO: 1450183 - DNA, 15 bp, Homo sapiens
caagaaaacacatgt

SEQ ID NO: 1450184 - DNA, 15 bp, Homo sapiens
tcaagaaaacacatg

SEQ ID NO: 1450185 - DNA, 15 bp, Homo sapiens
ttcaagaaaacacat

SEQ ID NO: 1450186 - DNA, 15 bp, Homo sapiens
attcaagaaaacaca

SEQ ID NO: 1450187 - DNA, 15 bp, Homo sapiens
aattcaagaaaacac

SEQ ID NO: 1450188 - DNA, 15 bp, Homo sapiens
aaattcaagaaaaca

SEQ ID NO: 1450189 - DNA, 15 bp, Homo sapiens
aaaattcaagaaaac

SEQ ID NO: 1450190 - DNA, 15 bp, Homo sapiens
caaaattcaagaaaa

SEQ ID NO: 1450191 - DNA, 15 bp, Homo sapiens
tcaaaattcaagaaa

SEQ ID NO: 1450192 - DNA, 15 bp, Homo sapiens
ttcaaaattcaagaa

SEQ ID NO: 1450193 - DNA, 15 bp, Homo sapiens
attcaaaattcaaga

SEQ ID NO: 1450194 - DNA, 15 bp, Homo sapiens
tattcaaaattcaag

SEQ ID NO: 1450195 - DNA, 15 bp, Homo sapiens
atattcaaaattcaa

SEQ ID NO: 1450196 - DNA, 15 bp, Homo sapiens
gatattcaaaattca

SEQ ID NO: 1450197 - DNA, 15 bp, Homo sapiens
tgatattcaaaattc

SEQ ID NO: 1450198 - DNA, 15 bp, Homo sapiens
gtgatattcaaaatt

SEQ ID NO: 1450199 - DNA, 15 bp, Homo sapiens
tgtgatattcaaaat

SEQ ID NO: 1450200 - DNA, 15 bp, Homo sapiens
atgtgatattcaaaa

SEQ ID NO: 1450201 - DNA, 15 bp, Homo sapiens
catgtgatattcaaa

SEQ ID NO: 1450202 - DNA, 15 bp, Homo sapiens
gcatgtgatattcaa

SEQ ID NO: 1450203 - DNA, 15 bp, Homo sapiens
agcatgtgatattca

SEQ ID NO: 1450204 - DNA, 15 bp, Homo sapiens
tagcatgtgatattc

SEQ ID NO: 1450205 - DNA, 15 bp, Homo sapiens
gtagcatgtgatatt

SEQ ID NO: 1450206 - DNA, 15 bp, Homo sapiens
ggtagcatgtgatat

SEQ ID NO: 1450207 - DNA, 15 bp, Homo sapiens
tggtagcatgtgata

SEQ ID NO: 1450208 - DNA, 15 bp, Homo sapiens
ctggtagcatgtgat

SEQ ID NO: 1450209 - DNA, 15 bp, Homo sapiens
cctggtagcatgtga

SEQ ID NO: 1450210 - DNA, 15 bp, Homo sapiens
tcctggtagcatgtg

SEQ ID NO: 1450211 - DNA, 15 bp, Homo sapiens
atcctggtagcatgt

SEQ ID NO: 1450212 - DNA, 15 bp, Homo sapiens
tatcctggtagcatg

SEQ ID NO: 1450213 - DNA, 15 bp, Homo sapiens
ttatcctggtagcat

SEQ ID NO: 1450214 - DNA, 15 bp, Homo sapiens
tttatcctggtagca

SEQ ID NO: 1450215 - DNA, 15 bp, Homo sapiens
ctttatcctggtagc

SEQ ID NO: 1450216 - DNA, 15 bp, Homo sapiens
actttatcctggtag

SEQ ID NO: 1450217 - DNA, 15 bp, Homo sapiens
aactttatcctggta

SEQ ID NO: 1450218 - DNA, 15 bp, Homo sapiens
taactttatcctggt

SEQ ID NO: 1450219 - DNA, 15 bp, Homo sapiens
ttaactttatcctgg

SEQ ID NO: 1450220 - DNA, 15 bp, Homo sapiens
cttaactttatcctg

SEQ ID NO: 1450221 - DNA, 15 bp, Homo sapiens
gcttaactttatcct

SEQ ID NO: 1450222 - DNA, 15 bp, Homo sapiens
agcttaactttatcc

SEQ ID NO: 1450223 - DNA, 15 bp, Homo sapiens
cagcttaactttatc

SEQ ID NO: 1450224 - DNA, 15 bp, Homo sapiens
gcagcttaactttat

SEQ ID NO: 1450225 - DNA, 15 bp, Homo sapiens
agcagcttaacttta

SEQ ID NO: 1450226 - DNA, 15 bp, Homo sapiens
cagcagcttaacttt

SEQ ID NO: 1450227 - DNA, 15 bp, Homo sapiens
ccagcagcttaactt

SEQ ID NO: 1450228 - DNA, 15 bp, Homo sapiens
gccagcagcttaact

SEQ ID NO: 1450229 - DNA, 15 bp, Homo sapiens
tgccagcagcttaac

SEQ ID NO: 1450230 - DNA, 15 bp, Homo sapiens
gtgccagcagcttaa

SEQ ID NO: 1450231 - DNA, 15 bp, Homo sapiens
tgtgccagcagctta

SEQ ID NO: 1450232 - DNA, 15 bp, Homo sapiens
atgtgccagcagctt

SEQ ID NO: 1450233 - DNA, 15 bp, Homo sapiens
gatgtgccagcagct

SEQ ID NO: 1450234 - DNA, 15 bp, Homo sapiens
agatgtgccagcagc

SEQ ID NO: 1450235 - DNA, 15 bp, Homo sapiens
tagatgtgccagcag

SEQ ID NO: 1450236 - DNA, 15 bp, Homo sapiens
ttagatgtgccagca

SEQ ID NO: 1450237 - DNA, 15 bp, Homo sapiens
cttagatgtgccagc

SEQ ID NO: 1450238 - DNA, 15 bp, Homo sapiens
tcttagatgtgccag

SEQ ID NO: 1450239 - DNA, 15 bp, Homo sapiens
ctcttagatgtgcca

SEQ ID NO: 1450240 - DNA, 15 bp, Homo sapiens
tctcttagatgtgcc

SEQ ID NO: 1450241 - DNA, 15 bp, Homo sapiens
ttctcttagatgtgc

SEQ ID NO: 1450242 - DNA, 15 bp, Homo sapiens
tttctcttagatgtg

SEQ ID NO: 1450243 - DNA, 15 bp, Homo sapiens
gtttctcttagatgt

SEQ ID NO: 1450244 - DNA, 15 bp, Homo sapiens
agtttctcttagatg

SEQ ID NO: 1450245 - DNA, 15 bp, Homo sapiens
aagtttctcttagat

SEQ ID NO: 1450246 - DNA, 15 bp, Homo sapiens
caagtttctcttaga

SEQ ID NO: 1450247 - DNA, 15 bp, Homo sapiens
tcaagtttctcttag

SEQ ID NO: 1450248 - DNA, 15 bp, Homo sapiens
ttcaagtttctctta

SEQ ID NO: 1450249 - DNA, 15 bp, Homo sapiens
cttcaagtttctctt

SEQ ID NO: 1450250 - DNA, 15 bp, Homo sapiens
tcttcaagtttctct

SEQ ID NO: 1450251 - DNA, 15 bp, Homo sapiens
gtcttcaagtttctc

SEQ ID NO: 1450252 - DNA, 15 bp, Homo sapiens
agtcttcaagtttct

SEQ ID NO: 1450253 - DNA, 15 bp, Homo sapiens
cagtcttcaagtttc

SEQ ID NO: 1450254 - DNA, 15 bp, Homo sapiens
tcagtcttcaagttt

SEQ ID NO: 1450255 - DNA, 15 bp, Homo sapiens
atcagtcttcaagtt

SEQ ID NO: 1450256 - DNA, 15 bp, Homo sapiens
tatcagtcttcaagt

SEQ ID NO: 1450257 - DNA, 15 bp, Homo sapiens
ctatcagtcttcaag

SEQ ID NO: 1450258 - DNA, 15 bp, Homo sapiens
cctatcagtcttcaa

SEQ ID NO: 1450259 - DNA, 15 bp, Homo sapiens
ccctatcagtcttca

SEQ ID NO: 1450260 - DNA, 15 bp, Homo sapiens
accctatcagtcttc

SEQ ID NO: 1450261 - DNA, 15 bp, Homo sapiens
gaccctatcagtctt

SEQ ID NO: 1450262 - DNA, 15 bp, Homo sapiens
agaccctatcagtct

SEQ ID NO: 1450263 - DNA, 15 bp, Homo sapiens
aagaccctatcagtc

SEQ ID NO: 1450264 - DNA, 15 bp, Homo sapiens
aaagaccctatcagt

SEQ ID NO: 1450265 - DNA, 15 bp, Homo sapiens
aaaagaccctatcag

SEQ ID NO: 1450266 - DNA, 15 bp, Homo sapiens
aaaaagaccctatca

SEQ ID NO: 1450267 - DNA, 15 bp, Homo sapiens
gaaaaagaccctatc

SEQ ID NO: 1450268 - DNA, 15 bp, Homo sapiens
tgaaaaagaccctat

SEQ ID NO: 1450269 - DNA, 15 bp, Homo sapiens
atgaaaaagacccta

SEQ ID NO: 1450270 - DNA, 15 bp, Homo sapiens
aatgaaaaagaccct

SEQ ID NO: 1450271 - DNA, 15 bp, Homo sapiens
taatgaaaaagaccc

SEQ ID NO: 1450272 - DNA, 15 bp, Homo sapiens
gtaatgaaaaagacc

SEQ ID NO: 1450273 - DNA, 15 bp, Homo sapiens
agtaatgaaaaagac

SEQ ID NO: 1450274 - DNA, 15 bp, Homo sapiens
gagtaatgaaaaaga

SEQ ID NO: 1450275 - DNA, 15 bp, Homo sapiens
tgagtaatgaaaaag

SEQ ID NO: 1450276 - DNA, 15 bp, Homo sapiens
ttgagtaatgaaaaa

SEQ ID NO: 1450277 - DNA, 15 bp, Homo sapiens
cttgagtaatgaaaa

SEQ ID NO: 1450278 - DNA, 15 bp, Homo sapiens
acttgagtaatgaaa

SEQ ID NO: 1450279 - DNA, 15 bp, Homo sapiens
aacttgagtaatgaa

SEQ ID NO: 1450280 - DNA, 15 bp, Homo sapiens
aaacttgagtaatga

SEQ ID NO: 1450281 - DNA, 15 bp, Homo sapiens
aaaacttgagtaatg

SEQ ID NO: 1450282 - DNA, 15 bp, Homo sapiens
taaaacttgagtaat

SEQ ID NO: 1450283 - DNA, 15 bp, Homo sapiens
ttaaaacttgagtaa

SEQ ID NO: 1450284 - DNA, 15 bp, Homo sapiens
tttaaaacttgagta

SEQ ID NO: 1450285 - DNA, 15 bp, Homo sapiens
ttttaaaacttgagt

SEQ ID NO: 1450286 - DNA, 15 bp, Homo sapiens
attttaaaacttgag

SEQ ID NO: 1450287 - DNA, 15 bp, Homo sapiens
aattttaaaacttga

SEQ ID NO: 1450288 - DNA, 15 bp, Homo sapiens
gaattttaaaacttg

SEQ ID NO: 1450289 - DNA, 15 bp, Homo sapiens
agaattttaaaactt

SEQ ID NO: 1450290 - DNA, 15 bp, Homo sapiens
tagaattttaaaact

SEQ ID NO: 1450291 - DNA, 15 bp, Homo sapiens
atagaattttaaaac

SEQ ID NO: 1450292 - DNA, 15 bp, Homo sapiens
aatagaattttaaaa

SEQ ID NO: 1450293 - DNA, 15 bp, Homo sapiens
caatagaattttaaa

SEQ ID NO: 1450294 - DNA, 15 bp, Homo sapiens
acaatagaattttaa

SEQ ID NO: 1450295 - DNA, 15 bp, Homo sapiens
aacaatagaatttta

SEQ ID NO: 1450296 - DNA, 15 bp, Homo sapiens
caacaatagaatttt

SEQ ID NO: 1450297 - DNA, 15 bp, Homo sapiens
tcaacaatagaattt

SEQ ID NO: 1450298 - DNA, 15 bp, Homo sapiens
ttcaacaatagaatt

SEQ ID NO: 1450299 - DNA, 15 bp, Homo sapiens
gttcaacaatagaat

SEQ ID NO: 1450300 - DNA, 15 bp, Homo sapiens
agttcaacaatagaa

SEQ ID NO: 1450301 - DNA, 15 bp, Homo sapiens
cagttcaacaataga

SEQ ID NO: 1450302 - DNA, 15 bp, Homo sapiens
acagttcaacaatag

SEQ ID NO: 1450303 - DNA, 15 bp, Homo sapiens
tacagttcaacaata

SEQ ID NO: 1450304 - DNA, 15 bp, Homo sapiens
ttacagttcaacaat

SEQ ID NO: 1450305 - DNA, 15 bp, Homo sapiens
cttacagttcaacaa

SEQ ID NO: 1450306 - DNA, 15 bp, Homo sapiens
acttacagttcaaca

SEQ ID NO: 1450307 - DNA, 15 bp, Homo sapiens
gacttacagttcaac

SEQ ID NO: 1450308 - DNA, 15 bp, Homo sapiens
tgacttacagttcaa

SEQ ID NO: 1450309 - DNA, 15 bp, Homo sapiens
gtgacttacagttca

SEQ ID NO: 1450310 - DNA, 15 bp, Homo sapiens
ggtgacttacagttc

SEQ ID NO: 1450311 - DNA, 15 bp, Homo sapiens
tggtgacttacagtt

SEQ ID NO: 1450312 - DNA, 15 bp, Homo sapiens
gtggtgacttacagt

SEQ ID NO: 1450313 - DNA, 15 bp, Homo sapiens
agtggtgacttacag

SEQ ID NO: 1450314 - DNA, 15 bp, Homo sapiens
aagtggtgacttaca

SEQ ID NO: 1450315 - DNA, 15 bp, Homo sapiens
aaagtggtgacttac

SEQ ID NO: 1450316 - DNA, 15 bp, Homo sapiens
taaagtggtgactta

SEQ ID NO: 1450317 - DNA, 15 bp, Homo sapiens
ttaaagtggtgactt

SEQ ID NO: 1450318 - DNA, 15 bp, Homo sapiens
attaaagtggtgact

SEQ ID NO: 1450319 - DNA, 15 bp, Homo sapiens
aattaaagtggtgac

SEQ ID NO: 1450320 - DNA, 15 bp, Homo sapiens
caattaaagtggtga

SEQ ID NO: 1450321 - DNA, 15 bp, Homo sapiens
acaattaaagtggtg

SEQ ID NO: 1450322 - DNA, 15 bp, Homo sapiens
aacaattaaagtggt

SEQ ID NO: 1450323 - DNA, 15 bp, Homo sapiens
taacaattaaagtgg

SEQ ID NO: 1450324 - DNA, 15 bp, Homo sapiens
ataacaattaaagtg

SEQ ID NO: 1450325 - DNA, 15 bp, Homo sapiens
cataacaattaaagt

SEQ ID NO: 1450326 - DNA, 15 bp, Homo sapiens
gcataacaattaaag

SEQ ID NO: 1450327 - DNA, 15 bp, Homo sapiens
tgcataacaattaaa

SEQ ID NO: 1450328 - DNA, 15 bp, Homo sapiens
atgcataacaattaa

SEQ ID NO: 1450329 - DNA, 15 bp, Homo sapiens
tatgcataacaatta

SEQ ID NO: 1450330 - DNA, 15 bp, Homo sapiens
atatgcataacaatt

SEQ ID NO: 1450331 - DNA, 15 bp, Homo sapiens
aatatgcataacaat

SEQ ID NO: 1450332 - DNA, 15 bp, Homo sapiens
aaatatgcataacaa

SEQ ID NO: 1450333 - DNA, 15 bp, Homo sapiens
gaaatatgcataaca

SEQ ID NO: 1450334 - DNA, 15 bp, Homo sapiens
agaaatatgcataac

SEQ ID NO: 1450335 - DNA, 15 bp, Homo sapiens
cagaaatatgcataa

SEQ ID NO: 1450336 - DNA, 15 bp, Homo sapiens
acagaaatatgcata

SEQ ID NO: 1450337 - DNA, 15 bp, Homo sapiens
tacagaaatatgcat

SEQ ID NO: 1450338 - DNA, 15 bp, Homo sapiens
atacagaaatatgca

SEQ ID NO: 1450339 - DNA, 15 bp, Homo sapiens
tatacagaaatatgc

SEQ ID NO: 1450340 - DNA, 15 bp, Homo sapiens
ctatacagaaatatg

SEQ ID NO: 1450341 - DNA, 15 bp, Homo sapiens
actatacagaaatat

SEQ ID NO: 1450342 - DNA, 15 bp, Homo sapiens
tactatacagaaata

SEQ ID NO: 1450343 - DNA, 15 bp, Homo sapiens
atactatacagaaat

SEQ ID NO: 1450344 - DNA, 15 bp, Homo sapiens
aatactatacagaaa

SEQ ID NO: 1450345 - DNA, 15 bp, Homo sapiens
aaatactatacagaa

SEQ ID NO: 1450346 - DNA, 15 bp, Homo sapiens
aaaatactatacaga

SEQ ID NO: 1450347 - DNA, 15 bp, Homo sapiens
aaaaatactatacag

SEQ ID NO: 1450348 - DNA, 15 bp, Homo sapiens
caaaaatactataca

SEQ ID NO: 1450349 - DNA, 15 bp, Homo sapiens
acaaaaatactatac

SEQ ID NO: 1450350 - DNA, 15 bp, Homo sapiens
aacaaaaatactata

SEQ ID NO: 1450351 - DNA, 15 bp, Homo sapiens
gaacaaaaatactat

SEQ ID NO: 1450352 - DNA, 15 bp, Homo sapiens
agaacaaaaatacta

SEQ ID NO: 1450353 - DNA, 15 bp, Homo sapiens
gagaacaaaaatact

SEQ ID NO: 1450354 - DNA, 15 bp, Homo sapiens
ggagaacaaaaatac

SEQ ID NO: 1450355 - DNA, 15 bp, Homo sapiens
tggagaacaaaaata

SEQ ID NO: 1450356 - DNA, 15 bp, Homo sapiens
ttggagaacaaaaat

SEQ ID NO: 1450357 - DNA, 15 bp, Homo sapiens
tttggagaacaaaaa

SEQ ID NO: 1450358 - DNA, 15 bp, Homo sapiens
gtttggagaacaaaa

SEQ ID NO: 1450359 - DNA, 15 bp, Homo sapiens
tgtttggagaacaaa

SEQ ID NO: 1450360 - DNA, 15 bp, Homo sapiens
atgtttggagaacaa

SEQ ID NO: 1450361 - DNA, 15 bp, Homo sapiens
tatgtttggagaaca

SEQ ID NO: 1450362 - DNA, 15 bp, Homo sapiens
atatgtttggagaac

SEQ ID NO: 1450363 - DNA, 15 bp, Homo sapiens
aatatgtttggagaa

SEQ ID NO: 1450364 - DNA, 15 bp, Homo sapiens
aaatatgtttggaga

SEQ ID NO: 1450365 - DNA, 15 bp, Homo sapiens
caaatatgtttggag

SEQ ID NO: 1450366 - DNA, 15 bp, Homo sapiens
acaaatatgtttgga

SEQ ID NO: 1450367 - DNA, 15 bp, Homo sapiens
tacaaatatgtttgg

SEQ ID NO: 1450368 - DNA, 15 bp, Homo sapiens
ttacaaatatgtttg

SEQ ID NO: 1450369 - DNA, 15 bp, Homo sapiens
attacaaatatgttt

SEQ ID NO: 1450370 - DNA, 15 bp, Homo sapiens
gattacaaatatgtt

SEQ ID NO: 1450371 - DNA, 15 bp, Homo sapiens
ggattacaaatatgt

SEQ ID NO: 1450372 - DNA, 15 bp, Homo sapiens
aggattacaaatatg

SEQ ID NO: 1450373 - DNA, 15 bp, Homo sapiens
aaggattacaaatat

SEQ ID NO: 1450374 - DNA, 15 bp, Homo sapiens
gaaggattacaaata

SEQ ID NO: 1450375 - DNA, 15 bp, Homo sapiens
tgaaggattacaaat

SEQ ID NO: 1450376 - DNA, 15 bp, Homo sapiens
atgaaggattacaaa

SEQ ID NO: 1450377 - DNA, 15 bp, Homo sapiens
aatgaaggattacaa

SEQ ID NO: 1450378 - DNA, 15 bp, Homo sapiens
aaatgaaggattaca

SEQ ID NO: 1450379 - DNA, 15 bp, Homo sapiens
taaatgaaggattac

SEQ ID NO: 1450380 - DNA, 15 bp, Homo sapiens
ctaaatgaaggatta

SEQ ID NO: 1450381 - DNA, 15 bp, Homo sapiens
cctaaatgaaggatt

SEQ ID NO: 1450382 - DNA, 15 bp, Homo sapiens
tcctaaatgaaggat

SEQ ID NO: 1450383 - DNA, 15 bp, Homo sapiens
ttcctaaatgaagga

SEQ ID NO: 1450384 - DNA, 15 bp, Homo sapiens
tttcctaaatgaagg

SEQ ID NO: 1450385 - DNA, 15 bp, Homo sapiens
ttttcctaaatgaag

SEQ ID NO: 1450386 - DNA, 15 bp, Homo sapiens
cttttcctaaatgaa

SEQ ID NO: 1450387 - DNA, 15 bp, Homo sapiens
tcttttcctaaatga

SEQ ID NO: 1450388 - DNA, 15 bp, Homo sapiens
ctcttttcctaaatg

SEQ ID NO: 1450389 - DNA, 15 bp, Homo sapiens
gctcttttcctaaat

SEQ ID NO: 1450390 - DNA, 15 bp, Homo sapiens
ggctcttttcctaaa

SEQ ID NO: 1450391 - DNA, 15 bp, Homo sapiens
aggctcttttcctaa

SEQ ID NO: 1450392 - DNA, 15 bp, Homo sapiens
gaggctcttttccta

SEQ ID NO: 1450393 - DNA, 15 bp, Homo sapiens
tgaggctcttttcct

SEQ ID NO: 1450394 - DNA, 15 bp, Homo sapiens
ttgaggctcttttcc

SEQ ID NO: 1450395 - DNA, 15 bp, Homo sapiens
tttgaggctcttttc

SEQ ID NO: 1450396 - DNA, 15 bp, Homo sapiens
ttttgaggctctttt

SEQ ID NO: 1450397 - DNA, 15 bp, Homo sapiens
attttgaggctcttt

SEQ ID NO: 1450398 - DNA, 15 bp, Homo sapiens
aattttgaggctctt

SEQ ID NO: 1450399 - DNA, 15 bp, Homo sapiens
taattttgaggctct

SEQ ID NO: 1450400 - DNA, 15 bp, Homo sapiens
ttaattttgaggctc

SEQ ID NO: 1450401 - DNA, 15 bp, Homo sapiens
attaattttgaggct

SEQ ID NO: 1450402 - DNA, 15 bp, Homo sapiens
aattaattttgaggc

SEQ ID NO: 1450403 - DNA, 15 bp, Homo sapiens
aaattaattttgagg

SEQ ID NO: 1450404 - DNA, 15 bp, Homo sapiens
taaattaattttgag

SEQ ID NO: 1450405 - DNA, 15 bp, Homo sapiens
ctaaattaattttga

SEQ ID NO: 1450406 - DNA, 15 bp, Homo sapiens
gctaaattaattttg

SEQ ID NO: 1450407 - DNA, 15 bp, Homo sapiens
agctaaattaatttt

SEQ ID NO: 1450408 - DNA, 15 bp, Homo sapiens
tagctaaattaattt

SEQ ID NO: 1450409 - DNA, 15 bp, Homo sapiens
ttagctaaattaatt

SEQ ID NO: 1450410 - DNA, 15 bp, Homo sapiens
attagctaaattaat

SEQ ID NO: 1450411 - DNA, 15 bp, Homo sapiens
aattagctaaattaa

SEQ ID NO: 1450412 - DNA, 15 bp, Homo sapiens
aaattagctaaatta

SEQ ID NO: 1450413 - DNA, 15 bp, Homo sapiens
aaaattagctaaatt

SEQ ID NO: 1450414 - DNA, 15 bp, Homo sapiens
taaaattagctaaat

SEQ ID NO: 1450415 - DNA, 15 bp, Homo sapiens
gtaaaattagctaaa

SEQ ID NO: 1450416 - DNA, 15 bp, Homo sapiens
agtaaaattagctaa

SEQ ID NO: 1450417 - DNA, 15 bp, Homo sapiens
aagtaaaattagcta

SEQ ID NO: 1450418 - DNA, 15 bp, Homo sapiens
aaagtaaaattagct

SEQ ID NO: 1450419 - DNA, 15 bp, Homo sapiens
caaagtaaaattagc

SEQ ID NO: 1450420 - DNA, 15 bp, Homo sapiens
gcaaagtaaaattag

SEQ ID NO: 1450421 - DNA, 15 bp, Homo sapiens
tgcaaagtaaaatta

SEQ ID NO: 1450422 - DNA, 15 bp, Homo sapiens
ttgcaaagtaaaatt

SEQ ID NO: 1450423 - DNA, 15 bp, Homo sapiens
tttgcaaagtaaaat

SEQ ID NO: 1450424 - DNA, 15 bp, Homo sapiens
ctttgcaaagtaaaa

SEQ ID NO: 1450425 - DNA, 15 bp, Homo sapiens
cctttgcaaagtaaa

SEQ ID NO: 1450426 - DNA, 15 bp, Homo sapiens
gcctttgcaaagtaa

SEQ ID NO: 1450427 - DNA, 15 bp, Homo sapiens
tgcctttgcaaagta

SEQ ID NO: 1450428 - DNA, 15 bp, Homo sapiens
atgcctttgcaaagt

SEQ ID NO: 1450429 - DNA, 15 bp, Homo sapiens
aatgcctttgcaaag

SEQ ID NO: 1450430 - DNA, 15 bp, Homo sapiens
aaatgcctttgcaaa

SEQ ID NO: 1450431 - DNA, 15 bp, Homo sapiens
gaaatgcctttgcaa

SEQ ID NO: 1450432 - DNA, 15 bp, Homo sapiens
tgaaatgcctttgca

SEQ ID NO: 1450433 - DNA, 15 bp, Homo sapiens
ttgaaatgcctttgc

SEQ ID NO: 1450434 - DNA, 15 bp, Homo sapiens
cttgaaatgcctttg

SEQ ID NO: 1450435 - DNA, 15 bp, Homo sapiens
tcttgaaatgccttt

SEQ ID NO: 1450436 - DNA, 15 bp, Homo sapiens
atcttgaaatgcctt

SEQ ID NO: 1450437 - DNA, 15 bp, Homo sapiens
catcttgaaatgcct

SEQ ID NO: 1450438 - DNA, 15 bp, Homo sapiens
acatcttgaaatgcc

SEQ ID NO: 1450439 - DNA, 15 bp, Homo sapiens
aacatcttgaaatgc

SEQ ID NO: 1450440 - DNA, 15 bp, Homo sapiens
aaacatcttgaaatg

SEQ ID NO: 1450441 - DNA, 15 bp, Homo sapiens
taaacatcttgaaat

SEQ ID NO: 1450442 - DNA, 15 bp, Homo sapiens
ttaaacatcttgaaa

SEQ ID NO: 1450443 - DNA, 15 bp, Homo sapiens
attaaacatcttgaa

SEQ ID NO: 1450444 - DNA, 15 bp, Homo sapiens
cattaaacatcttga

SEQ ID NO: 1450445 - DNA, 15 bp, Homo sapiens
gcattaaacatcttg

SEQ ID NO: 1450446 - DNA, 15 bp, Homo sapiens
tgcattaaacatctt

SEQ ID NO: 1450447 - DNA, 15 bp, Homo sapiens
atgcattaaacatct

SEQ ID NO: 1450448 - DNA, 15 bp, Homo sapiens
aatgcattaaacatc

SEQ ID NO: 1450449 - DNA, 15 bp, Homo sapiens
aaatgcattaaacat

SEQ ID NO: 1450450 - DNA, 15 bp, Homo sapiens
aaaatgcattaaaca

SEQ ID NO: 1450451 - DNA, 15 bp, Homo sapiens
taaaatgcattaaac

SEQ ID NO: 1450452 - DNA, 15 bp, Homo sapiens
ttaaaatgcattaaa

SEQ ID NO: 1450453 - DNA, 15 bp, Homo sapiens
gttaaaatgcattaa

SEQ ID NO: 1450454 - DNA, 15 bp, Homo sapiens
agttaaaatgcatta

SEQ ID NO: 1450455 - DNA, 15 bp, Homo sapiens
cagttaaaatgcatt

SEQ ID NO: 1450456 - DNA, 15 bp, Homo sapiens
tcagttaaaatgcat

SEQ ID NO: 1450457 - DNA, 15 bp, Homo sapiens
ctcagttaaaatgca

SEQ ID NO: 1450458 - DNA, 15 bp, Homo sapiens
tctcagttaaaatgc

SEQ ID NO: 1450459 - DNA, 15 bp, Homo sapiens
ctctcagttaaaatg

SEQ ID NO: 1450460 - DNA, 15 bp, Homo sapiens
tctctcagttaaaat

SEQ ID NO: 1450461 - DNA, 15 bp, Homo sapiens
atctctcagttaaaa

SEQ ID NO: 1450462 - DNA, 15 bp, Homo sapiens
tatctctcagttaaa

SEQ ID NO: 1450463 - DNA, 15 bp, Homo sapiens
atatctctcagttaa

SEQ ID NO: 1450464 - DNA, 15 bp, Homo sapiens
aatatctctcagtta

SEQ ID NO: 1450465 - DNA, 15 bp, Homo sapiens
caatatctctcagtt

SEQ ID NO: 1450466 - DNA, 15 bp, Homo sapiens
gcaatatctctcagt

SEQ ID NO: 1450467 - DNA, 15 bp, Homo sapiens
agcaatatctctcag

SEQ ID NO: 1450468 - DNA, 15 bp, Homo sapiens
aagcaatatctctca

SEQ ID NO: 1450469 - DNA, 15 bp, Homo sapiens
caagcaatatctctc

SEQ ID NO: 1450470 - DNA, 15 bp, Homo sapiens
tcaagcaatatctct

SEQ ID NO: 1450471 - DNA, 15 bp, Homo sapiens
gtcaagcaatatctc

SEQ ID NO: 1450472 - DNA, 15 bp, Homo sapiens
tgtcaagcaatatct

SEQ ID NO: 1450473 - DNA, 15 bp, Homo sapiens
ctgtcaagcaatatc

SEQ ID NO: 1450474 - DNA, 15 bp, Homo sapiens
tctgtcaagcaatat

SEQ ID NO: 1450475 - DNA, 15 bp, Homo sapiens
gtctgtcaagcaata

SEQ ID NO: 1450476 - DNA, 15 bp, Homo sapiens
agtctgtcaagcaat

SEQ ID NO: 1450477 - DNA, 15 bp, Homo sapiens
tagtctgtcaagcaa

SEQ ID NO: 1450478 - DNA, 15 bp, Homo sapiens
gtagtctgtcaagca

SEQ ID NO: 1450479 - DNA, 15 bp, Homo sapiens
tgtagtctgtcaagc

SEQ ID NO: 1450480 - DNA, 15 bp, Homo sapiens
ttgtagtctgtcaag

SEQ ID NO: 1450481 - DNA, 15 bp, Homo sapiens
gttgtagtctgtcaa

SEQ ID NO: 1450482 - DNA, 15 bp, Homo sapiens
tgttgtagtctgtca

SEQ ID NO: 1450483 - DNA, 15 bp, Homo sapiens
ttgttgtagtctgtc

SEQ ID NO: 1450484 - DNA, 15 bp, Homo sapiens
tttgttgtagtctgt

SEQ ID NO: 1450485 - DNA, 15 bp, Homo sapiens
ttttgttgtagtctg

SEQ ID NO: 1450486 - DNA, 15 bp, Homo sapiens
attttgttgtagtct

SEQ ID NO: 1450487 - DNA, 15 bp, Homo sapiens
aattttgttgtagtc

SEQ ID NO: 1450488 - DNA, 15 bp, Homo sapiens
caattttgttgtagt

SEQ ID NO: 1450489 - DNA, 15 bp, Homo sapiens
tcaattttgttgtag

SEQ ID NO: 1450490 - DNA, 15 bp, Homo sapiens
ttcaattttgttgta

SEQ ID NO: 1450491 - DNA, 15 bp, Homo sapiens
attcaattttgttgt

SEQ ID NO: 1450492 - DNA, 15 bp, Homo sapiens
cattcaattttgttg

SEQ ID NO: 1450493 - DNA, 15 bp, Homo sapiens
acattcaattttgtt

SEQ ID NO: 1450494 - DNA, 15 bp, Homo sapiens
tacattcaattttgt

SEQ ID NO: 1450495 - DNA, 15 bp, Homo sapiens
ttacattcaattttg

SEQ ID NO: 1450496 - DNA, 15 bp, Homo sapiens
tttacattcaatttt

SEQ ID NO: 1450497 - DNA, 15 bp, Homo sapiens
ttttacattcaattt

SEQ ID NO: 1450498 - DNA, 15 bp, Homo sapiens
tttttacattcaatt

SEQ ID NO: 1450499 - DNA, 15 bp, Homo sapiens
atttttacattcaat

SEQ ID NO: 1450500 - DNA, 15 bp, Homo sapiens
aatttttacattcaa

SEQ ID NO: 1450501 - DNA, 15 bp, Homo sapiens
caatttttacattca

SEQ ID NO: 1450502 - DNA, 15 bp, Homo sapiens
tcaatttttacattc

SEQ ID NO: 1450503 - DNA, 15 bp, Homo sapiens
ttcaatttttacatt

SEQ ID NO: 1450504 - DNA, 15 bp, Homo sapiens
attcaatttttacat

SEQ ID NO: 1450505 - DNA, 15 bp, Homo sapiens
cattcaatttttaca

SEQ ID NO: 1450506 - DNA, 15 bp, Homo sapiens
acattcaatttttac

SEQ ID NO: 1450507 - DNA, 15 bp, Homo sapiens
tacattcaattttta

SEQ ID NO: 1450508 - DNA, 15 bp, Homo sapiens
atacattcaattttt

SEQ ID NO: 1450509 - DNA, 15 bp, Homo sapiens
tatacattcaatttt

SEQ ID NO: 1450510 - DNA, 15 bp, Homo sapiens
ctatacattcaattt

SEQ ID NO: 1450511 - DNA, 15 bp, Homo sapiens
actatacattcaatt

SEQ ID NO: 1450512 - DNA, 15 bp, Homo sapiens
tactatacattcaat

SEQ ID NO: 1450513 - DNA, 15 bp, Homo sapiens
ttactatacattcaa

SEQ ID NO: 1450514 - DNA, 15 bp, Homo sapiens
tttactatacattca

SEQ ID NO: 1450515 - DNA, 15 bp, Homo sapiens
ctttactatacattc

SEQ ID NO: 1450516 - DNA, 15 bp, Homo sapiens
actttactatacatt

SEQ ID NO: 1450517 - DNA, 15 bp, Homo sapiens
tactttactatacat

SEQ ID NO: 1450518 - DNA, 15 bp, Homo sapiens
atactttactataca

SEQ ID NO: 1450519 - DNA, 15 bp, Homo sapiens
aatactttactatac

SEQ ID NO: 1450520 - DNA, 15 bp, Homo sapiens
gaatactttactata

SEQ ID NO: 1450521 - DNA, 15 bp, Homo sapiens
agaatactttactat

SEQ ID NO: 1450522 - DNA, 15 bp, Homo sapiens
aagaatactttacta

SEQ ID NO: 1450523 - DNA, 15 bp, Homo sapiens
aaagaatactttact

SEQ ID NO: 1450524 - DNA, 15 bp, Homo sapiens
taaagaatactttac

SEQ ID NO: 1450525 - DNA, 15 bp, Homo sapiens
gtaaagaatacttta

SEQ ID NO: 1450526 - DNA, 15 bp, Homo sapiens
agtaaagaatacttt

SEQ ID NO: 1450527 - DNA, 15 bp, Homo sapiens
tagtaaagaatactt

SEQ ID NO: 1450528 - DNA, 15 bp, Homo sapiens
atagtaaagaatact

SEQ ID NO: 1450529 - DNA, 15 bp, Homo sapiens
tatagtaaagaatac

SEQ ID NO: 1450530 - DNA, 15 bp, Homo sapiens
atatagtaaagaata

SEQ ID NO: 1450531 - DNA, 15 bp, Homo sapiens
tatatagtaaagaat

SEQ ID NO: 1450532 - DNA, 15 bp, Homo sapiens
ttatatagtaaagaa

SEQ ID NO: 1450533 - DNA, 15 bp, Homo sapiens
attatatagtaaaga

SEQ ID NO: 1450534 - DNA, 15 bp, Homo sapiens
aattatatagtaaag

SEQ ID NO: 1450535 - DNA, 15 bp, Homo sapiens
aaattatatagtaaa

SEQ ID NO: 1450536 - DNA, 15 bp, Homo sapiens
taaattatatagtaa

SEQ ID NO: 1450537 - DNA, 15 bp, Homo sapiens
ctaaattatatagta

SEQ ID NO: 1450538 - DNA, 15 bp, Homo sapiens
cctaaattatatagt

SEQ ID NO: 1450539 - DNA, 15 bp, Homo sapiens
ccctaaattatatag

SEQ ID NO: 1450540 - DNA, 15 bp, Homo sapiens
cccctaaattatata

SEQ ID NO: 1450541 - DNA, 15 bp, Homo sapiens
acccctaaattatat

SEQ ID NO: 1450542 - DNA, 15 bp, Homo sapiens
aacccctaaattata

SEQ ID NO: 1450543 - DNA, 15 bp, Homo sapiens
taacccctaaattat

SEQ ID NO: 1450544 - DNA, 15 bp, Homo sapiens
ctaacccctaaatta

SEQ ID NO: 1450545 - DNA, 15 bp, Homo sapiens
cctaacccctaaatt

SEQ ID NO: 1450546 - DNA, 15 bp, Homo sapiens
tcctaacccctaaat

SEQ ID NO: 1450547 - DNA, 15 bp, Homo sapiens
atcctaacccctaaa

SEQ ID NO: 1450548 - DNA, 15 bp, Homo sapiens
catcctaacccctaa

SEQ ID NO: 1450549 - DNA, 15 bp, Homo sapiens
tcatcctaaccccta

SEQ ID NO: 1450550 - DNA, 15 bp, Homo sapiens
ttcatcctaacccct

SEQ ID NO: 1450551 - DNA, 15 bp, Homo sapiens
attcatcctaacccc

SEQ ID NO: 1450552 - DNA, 15 bp, Homo sapiens
cattcatcctaaccc

SEQ ID NO: 1450553 - DNA, 15 bp, Homo sapiens
tcattcatcctaacc

SEQ ID NO: 1450554 - DNA, 15 bp, Homo sapiens
atcattcatcctaac

SEQ ID NO: 1450555 - DNA, 15 bp, Homo sapiens
aatcattcatcctaa

SEQ ID NO: 1450556 - DNA, 15 bp, Homo sapiens
gaatcattcatccta

SEQ ID NO: 1450557 - DNA, 15 bp, Homo sapiens
tgaatcattcatcct

SEQ ID NO: 1450558 - DNA, 15 bp, Homo sapiens
atgaatcattcatcc

SEQ ID NO: 1450559 - DNA, 15 bp, Homo sapiens
aatgaatcattcatc

SEQ ID NO: 1450560 - DNA, 15 bp, Homo sapiens
caatgaatcattcat

SEQ ID NO: 1450561 - DNA, 15 bp, Homo sapiens
gcaatgaatcattca

SEQ ID NO: 1450562 - DNA, 15 bp, Homo sapiens
agcaatgaatcattc

SEQ ID NO: 1450563 - DNA, 15 bp, Homo sapiens
tagcaatgaatcatt

SEQ ID NO: 1450564 - DNA, 15 bp, Homo sapiens
ctagcaatgaatcat

SEQ ID NO: 1450565 - DNA, 15 bp, Homo sapiens
gctagcaatgaatca

SEQ ID NO: 1450566 - DNA, 15 bp, Homo sapiens
ggctagcaatgaatc

SEQ ID NO: 1450567 - DNA, 15 bp, Homo sapiens
aggctagcaatgaat

SEQ ID NO: 1450568 - DNA, 15 bp, Homo sapiens
aaggctagcaatgaa

SEQ ID NO: 1450569 - DNA, 15 bp, Homo sapiens
caaggctagcaatga

SEQ ID NO: 1450570 - DNA, 15 bp, Homo sapiens
tcaaggctagcaatg

SEQ ID NO: 1450571 - DNA, 15 bp, Homo sapiens
atcaaggctagcaat

SEQ ID NO: 1450572 - DNA, 15 bp, Homo sapiens
tatcaaggctagcaa

SEQ ID NO: 1450573 - DNA, 15 bp, Homo sapiens
ctatcaaggctagca

SEQ ID NO: 1450574 - DNA, 15 bp, Homo sapiens
tctatcaaggctagc

SEQ ID NO: 1450575 - DNA, 15 bp, Homo sapiens
ttctatcaaggctag

SEQ ID NO: 1450576 - DNA, 15 bp, Homo sapiens
tttctatcaaggcta

SEQ ID NO: 1450577 - DNA, 15 bp, Homo sapiens
atttctatcaaggct

SEQ ID NO: 1450578 - DNA, 15 bp, Homo sapiens
catttctatcaaggc

SEQ ID NO: 1450579 - DNA, 15 bp, Homo sapiens
gcatttctatcaagg

SEQ ID NO: 1450580 - DNA, 15 bp, Homo sapiens
agcatttctatcaag

SEQ ID NO: 1450581 - DNA, 15 bp, Homo sapiens
tagcatttctatcaa

SEQ ID NO: 1450582 - DNA, 15 bp, Homo sapiens
ctagcatttctatca

SEQ ID NO: 1450583 - DNA, 15 bp, Homo sapiens
gctagcatttctatc

SEQ ID NO: 1450584 - DNA, 15 bp, Homo sapiens
ggctagcatttctat

SEQ ID NO: 1450585 - DNA, 15 bp, Homo sapiens
aggctagcatttcta

SEQ ID NO: 1450586 - DNA, 15 bp, Homo sapiens
taggctagcatttct

SEQ ID NO: 1450587 - DNA, 15 bp, Homo sapiens
ataggctagcatttc

SEQ ID NO: 1450588 - DNA, 15 bp, Homo sapiens
aataggctagcattt

SEQ ID NO: 1450589 - DNA, 15 bp, Homo sapiens
aaataggctagcatt

SEQ ID NO: 1450590 - DNA, 15 bp, Homo sapiens
gaaataggctagcat

SEQ ID NO: 1450591 - DNA, 15 bp, Homo sapiens
agaaataggctagca

SEQ ID NO: 1450592 - DNA, 15 bp, Homo sapiens
cagaaataggctagc

SEQ ID NO: 1450593 - DNA, 15 bp, Homo sapiens
acagaaataggctag

SEQ ID NO: 1450594 - DNA, 15 bp, Homo sapiens
gacagaaataggcta

SEQ ID NO: 1450595 - DNA, 15 bp, Homo sapiens
agacagaaataggct

SEQ ID NO: 1450596 - DNA, 15 bp, Homo sapiens
aagacagaaataggc

SEQ ID NO: 1450597 - DNA, 15 bp, Homo sapiens
gaagacagaaatagg

SEQ ID NO: 1450598 - DNA, 15 bp, Homo sapiens
ggaagacagaaatag

SEQ ID NO: 1450599 - DNA, 15 bp, Homo sapiens
aggaagacagaaata

SEQ ID NO: 1450600 - DNA, 15 bp, Homo sapiens
taggaagacagaaat

SEQ ID NO: 1450601 - DNA, 15 bp, Homo sapiens
gtaggaagacagaaa

SEQ ID NO: 1450602 - DNA, 15 bp, Homo sapiens
tgtaggaagacagaa

SEQ ID NO: 1450603 - DNA, 15 bp, Homo sapiens
ttgtaggaagacaga

SEQ ID NO: 1450604 - DNA, 15 bp, Homo sapiens
cttgtaggaagacag

SEQ ID NO: 1450605 - DNA, 15 bp, Homo sapiens
gcttgtaggaagaca

SEQ ID NO: 1450606 - DNA, 15 bp, Homo sapiens
tgcttgtaggaagac

SEQ ID NO: 1450607 - DNA, 15 bp, Homo sapiens
ttgcttgtaggaaga

SEQ ID NO: 1450608 - DNA, 15 bp, Homo sapiens
attgcttgtaggaag

SEQ ID NO: 1450609 - DNA, 15 bp, Homo sapiens
tattgcttgtaggaa

SEQ ID NO: 1450610 - DNA, 15 bp, Homo sapiens
ctattgcttgtagga

SEQ ID NO: 1450611 - DNA, 15 bp, Homo sapiens
gctattgcttgtagg

SEQ ID NO: 1450612 - DNA, 15 bp, Homo sapiens
tgctattgcttgtag

SEQ ID NO: 1450613 - DNA, 15 bp, Homo sapiens
ttgctattgcttgta

SEQ ID NO: 1450614 - DNA, 15 bp, Homo sapiens
tttgctattgcttgt

SEQ ID NO: 1450615 - DNA, 15 bp, Homo sapiens
ttttgctattgcttg

SEQ ID NO: 1450616 - DNA, 15 bp, Homo sapiens
attttgctattgctt

SEQ ID NO: 1450617 - DNA, 15 bp, Homo sapiens
tattttgctattgct

SEQ ID NO: 1450618 - DNA, 15 bp, Homo sapiens
atattttgctattgc

SEQ ID NO: 1450619 - DNA, 15 bp, Homo sapiens
tatattttgctattg

SEQ ID NO: 1450620 - DNA, 15 bp, Homo sapiens
atatattttgctatt

SEQ ID NO: 1450621 - DNA, 15 bp, Homo sapiens
tatatattttgctat

SEQ ID NO: 1450622 - DNA, 15 bp, Homo sapiens
atatatattttgcta

SEQ ID NO: 1450623 - DNA, 15 bp, Homo sapiens
tatatatattttgct

SEQ ID NO: 1450624 - DNA, 15 bp, Homo sapiens
ttatatatattttgc

SEQ ID NO: 1450625 - DNA, 15 bp, Homo sapiens
cttatatatattttg

SEQ ID NO: 1450626 - DNA, 15 bp, Homo sapiens
gcttatatatatttt

SEQ ID NO: 1450627 - DNA, 15 bp, Homo sapiens
agcttatatatattt

SEQ ID NO: 1450628 - DNA, 15 bp, Homo sapiens
cagcttatatatatt

SEQ ID NO: 1450629 - DNA, 15 bp, Homo sapiens
gcagcttatatatat

SEQ ID NO: 1450630 - DNA, 15 bp, Homo sapiens
agcagcttatatata

SEQ ID NO: 1450631 - DNA, 15 bp, Homo sapiens
tagcagcttatatat

SEQ ID NO: 1450632 - DNA, 15 bp, Homo sapiens
ttagcagcttatata

SEQ ID NO: 1450633 - DNA, 15 bp, Homo sapiens
attagcagcttatat

SEQ ID NO: 1450634 - DNA, 15 bp, Homo sapiens
aattagcagcttata

SEQ ID NO: 1450635 - DNA, 15 bp, Homo sapiens
taattagcagcttat

SEQ ID NO: 1450636 - DNA, 15 bp, Homo sapiens
ataattagcagctta

SEQ ID NO: 1450637 - DNA, 15 bp, Homo sapiens
aataattagcagctt

SEQ ID NO: 1450638 - DNA, 15 bp, Homo sapiens
aaataattagcagct

SEQ ID NO: 1450639 - DNA, 15 bp, Homo sapiens
taaataattagcagc

SEQ ID NO: 1450640 - DNA, 15 bp, Homo sapiens
ttaaataattagcag

SEQ ID NO: 1450641 - DNA, 15 bp, Homo sapiens
attaaataattagca

SEQ ID NO: 1450642 - DNA, 15 bp, Homo sapiens
aattaaataattagc

SEQ ID NO: 1450643 - DNA, 15 bp, Homo sapiens
aaattaaataattag

SEQ ID NO: 1450644 - DNA, 15 bp, Homo sapiens
taaattaaataatta

SEQ ID NO: 1450645 - DNA, 15 bp, Homo sapiens
ttaaattaaataatt

SEQ ID NO: 1450646 - DNA, 15 bp, Homo sapiens
tttaaattaaataat

SEQ ID NO: 1450647 - DNA, 15 bp, Homo sapiens
ttttaaattaaataa

SEQ ID NO: 1450648 - DNA, 15 bp, Homo sapiens
tttttaaattaaata

SEQ ID NO: 1450649 - DNA, 15 bp, Homo sapiens
ttttttaaattaaat

SEQ ID NO: 1450650 - DNA, 15 bp, Homo sapiens
tttttttaaattaaa

SEQ ID NO: 1450651 - DNA, 15 bp, Homo sapiens
gtttttttaaattaa

SEQ ID NO: 1450652 - DNA, 15 bp, Homo sapiens
ggtttttttaaatta

SEQ ID NO: 1450653 - DNA, 15 bp, Homo sapiens
cggtttttttaaatt

SEQ ID NO: 1450654 - DNA, 15 bp, Homo sapiens
ccggtttttttaaat

SEQ ID NO: 1450655 - DNA, 15 bp, Homo sapiens
accggtttttttaaa

SEQ ID NO: 1450656 - DNA, 15 bp, Homo sapiens
caccggtttttttaa

SEQ ID NO: 1450657 - DNA, 15 bp, Homo sapiens
acaccggttttttta

SEQ ID NO: 1450658 - DNA, 15 bp, Homo sapiens
cacaccggttttttt

SEQ ID NO: 1450659 - DNA, 15 bp, Homo sapiens
acacaccggtttttt

SEQ ID NO: 1450660 - DNA, 15 bp, Homo sapiens
tacacaccggttttt

SEQ ID NO: 1450661 - DNA, 15 bp, Homo sapiens
ttacacaccggtttt

SEQ ID NO: 1450662 - DNA, 15 bp, Homo sapiens
attacacaccggttt

SEQ ID NO: 1450663 - DNA, 15 bp, Homo sapiens
tattacacaccggtt

SEQ ID NO: 1450664 - DNA, 15 bp, Homo sapiens
gtattacacaccggt

SEQ ID NO: 1450665 - DNA, 15 bp, Homo sapiens
tgtattacacaccgg

SEQ ID NO: 1450666 - DNA, 15 bp, Homo sapiens
gtgtattacacaccg

SEQ ID NO: 1450667 - DNA, 15 bp, Homo sapiens
agtgtattacacacc

SEQ ID NO: 1450668 - DNA, 15 bp, Homo sapiens
aagtgtattacacac

SEQ ID NO: 1450669 - DNA, 15 bp, Homo sapiens
aaagtgtattacaca

SEQ ID NO: 1450670 - DNA, 15 bp, Homo sapiens
taaagtgtattacac

SEQ ID NO: 1450671 - DNA, 15 bp, Homo sapiens
ttaaagtgtattaca

SEQ ID NO: 1450672 - DNA, 15 bp, Homo sapiens
attaaagtgtattac

SEQ ID NO: 1450673 - DNA, 15 bp, Homo sapiens
cattaaagtgtatta

SEQ ID NO: 1450674 - DNA, 15 bp, Homo sapiens
tcattaaagtgtatt

SEQ ID NO: 1450675 - DNA, 15 bp, Homo sapiens
ttcattaaagtgtat

SEQ ID NO: 1450676 - DNA, 15 bp, Homo sapiens
tttcattaaagtgta

SEQ ID NO: 1450677 - DNA, 15 bp, Homo sapiens
atttcattaaagtgt

SEQ ID NO: 1450678 - DNA, 15 bp, Homo sapiens
tatttcattaaagtg

SEQ ID NO: 1450679 - DNA, 15 bp, Homo sapiens
ctatttcattaaagt

SEQ ID NO: 1450680 - DNA, 15 bp, Homo sapiens
cctatttcattaaag

SEQ ID NO: 1450681 - DNA, 15 bp, Homo sapiens
gcctatttcattaaa

SEQ ID NO: 1450682 - DNA, 15 bp, Homo sapiens
agcctatttcattaa

SEQ ID NO: 1450683 - DNA, 15 bp, Homo sapiens
cagcctatttcatta

SEQ ID NO: 1450684 - DNA, 15 bp, Homo sapiens
acagcctatttcatt

SEQ ID NO: 1450685 - DNA, 15 bp, Homo sapiens
aacagcctatttcat

SEQ ID NO: 1450686 - DNA, 15 bp, Homo sapiens
taacagcctatttca

SEQ ID NO: 1450687 - DNA, 15 bp, Homo sapiens
ttaacagcctatttc

SEQ ID NO: 1450688 - DNA, 15 bp, Homo sapiens
gttaacagcctattt

SEQ ID NO: 1450689 - DNA, 15 bp, Homo sapiens
tgttaacagcctatt

SEQ ID NO: 1450690 - DNA, 15 bp, Homo sapiens
ttgttaacagcctat

SEQ ID NO: 1450691 - DNA, 15 bp, Homo sapiens
attgttaacagccta

SEQ ID NO: 1450692 - DNA, 15 bp, Homo sapiens
aattgttaacagcct

SEQ ID NO: 1450693 - DNA, 15 bp, Homo sapiens
caattgttaacagcc

SEQ ID NO: 1450694 - DNA, 15 bp, Homo sapiens
ccaattgttaacagc

SEQ ID NO: 1450695 - DNA, 15 bp, Homo sapiens
cccaattgttaacag

SEQ ID NO: 1450696 - DNA, 15 bp, Homo sapiens
tcccaattgttaaca

SEQ ID NO: 1450697 - DNA, 15 bp, Homo sapiens
ttcccaattgttaac

SEQ ID NO: 1450698 - DNA, 15 bp, Homo sapiens
attcccaattgttaa

SEQ ID NO: 1450699 - DNA, 15 bp, Homo sapiens
gattcccaattgtta

SEQ ID NO: 1450700 - DNA, 15 bp, Homo sapiens
agattcccaattgtt

SEQ ID NO: 1450701 - DNA, 15 bp, Homo sapiens
aagattcccaattgt

SEQ ID NO: 1450702 - DNA, 15 bp, Homo sapiens
gaagattcccaattg

SEQ ID NO: 1450703 - DNA, 15 bp, Homo sapiens
agaagattcccaatt

SEQ ID NO: 1450704 - DNA, 15 bp, Homo sapiens
tagaagattcccaat

SEQ ID NO: 1450705 - DNA, 15 bp, Homo sapiens
ctagaagattcccaa

SEQ ID NO: 1450706 - DNA, 15 bp, Homo sapiens
tctagaagattccca

SEQ ID NO: 1450707 - DNA, 15 bp, Homo sapiens
ttctagaagattccc

SEQ ID NO: 1450708 - DNA, 15 bp, Homo sapiens
attctagaagattcc

SEQ ID NO: 1450709 - DNA, 15 bp, Homo sapiens
cattctagaagattc

SEQ ID NO: 1450710 - DNA, 15 bp, Homo sapiens
tcattctagaagatt

SEQ ID NO: 1450711 - DNA, 15 bp, Homo sapiens
atcattctagaagat

SEQ ID NO: 1450712 - DNA, 15 bp, Homo sapiens
catcattctagaaga

SEQ ID NO: 1450713 - DNA, 15 bp, Homo sapiens
tcatcattctagaag

SEQ ID NO: 1450714 - DNA, 15 bp, Homo sapiens
atcatcattctagaa

SEQ ID NO: 1450715 - DNA, 15 bp, Homo sapiens
tatcatcattctaga

SEQ ID NO: 1450716 - DNA, 15 bp, Homo sapiens
atatcatcattctag

SEQ ID NO: 1450717 - DNA, 15 bp, Homo sapiens
aatatcatcattcta

SEQ ID NO: 1450718 - DNA, 15 bp, Homo sapiens
taatatcatcattct

SEQ ID NO: 1450719 - DNA, 15 bp, Homo sapiens
ataatatcatcattc

SEQ ID NO: 1450720 - DNA, 15 bp, Homo sapiens
tataatatcatcatt

SEQ ID NO: 1450721 - DNA, 15 bp, Homo sapiens
ttataatatcatcat

SEQ ID NO: 1450722 - DNA, 15 bp, Homo sapiens
gttataatatcatca

SEQ ID NO: 1450723 - DNA, 15 bp, Homo sapiens
tgttataatatcatc

SEQ ID NO: 1450724 - DNA, 15 bp, Homo sapiens
ctgttataatatcat

SEQ ID NO: 1450725 - DNA, 15 bp, Homo sapiens
tctgttataatatca

SEQ ID NO: 1450726 - DNA, 15 bp, Homo sapiens
ttctgttataatatc

SEQ ID NO: 1450727 - DNA, 15 bp, Homo sapiens
cttctgttataatat

SEQ ID NO: 1450728 - DNA, 15 bp, Homo sapiens
ccttctgttataata

SEQ ID NO: 1450729 - DNA, 15 bp, Homo sapiens
accttctgttataat

SEQ ID NO: 1450730 - DNA, 15 bp, Homo sapiens
taccttctgttataa

SEQ ID NO: 1450731 - DNA, 15 bp, Homo sapiens
ctaccttctgttata

SEQ ID NO: 1450732 - DNA, 15 bp, Homo sapiens
gctaccttctgttat

SEQ ID NO: 1450733 - DNA, 15 bp, Homo sapiens
cgctaccttctgtta

SEQ ID NO: 1450734 - DNA, 15 bp, Homo sapiens
gcgctaccttctgtt

SEQ ID NO: 1450735 - DNA, 15 bp, Homo sapiens
agcgctaccttctgt

SEQ ID NO: 1450736 - DNA, 15 bp, Homo sapiens
aagcgctaccttctg

SEQ ID NO: 1450737 - DNA, 15 bp, Homo sapiens
aaagcgctaccttct

SEQ ID NO: 1450738 - DNA, 15 bp, Homo sapiens
gaaagcgctaccttc

SEQ ID NO: 1450739 - DNA, 15 bp, Homo sapiens
agaaagcgctacctt

SEQ ID NO: 1450740 - DNA, 15 bp, Homo sapiens
aagaaagcgctacct

SEQ ID NO: 1450741 - DNA, 15 bp, Homo sapiens
gaagaaagcgctacc

SEQ ID NO: 1450742 - DNA, 15 bp, Homo sapiens
tgaagaaagcgctac

SEQ ID NO: 1450743 - DNA, 15 bp, Homo sapiens
ctgaagaaagcgcta

SEQ ID NO: 1450744 - DNA, 15 bp, Homo sapiens
tctgaagaaagcgct

SEQ ID NO: 1450745 - DNA, 15 bp, Homo sapiens
ttctgaagaaagcgc

SEQ ID NO: 1450746 - DNA, 15 bp, Homo sapiens
tttctgaagaaagcg

SEQ ID NO: 1450747 - DNA, 15 bp, Homo sapiens
ctttctgaagaaagc

SEQ ID NO: 1450748 - DNA, 15 bp, Homo sapiens
tctttctgaagaaag

SEQ ID NO: 1450749 - DNA, 15 bp, Homo sapiens
gtctttctgaagaaa

SEQ ID NO: 1450750 - DNA, 15 bp, Homo sapiens
tgtctttctgaagaa

SEQ ID NO: 1450751 - DNA, 15 bp, Homo sapiens
atgtctttctgaaga

SEQ ID NO: 1450752 - DNA, 15 bp, Homo sapiens
catgtctttctgaag

SEQ ID NO: 1450753 - DNA, 15 bp, Homo sapiens
gcatgtctttctgaa

SEQ ID NO: 1450754 - DNA, 15 bp, Homo sapiens
tgcatgtctttctga

SEQ ID NO: 1450755 - DNA, 15 bp, Homo sapiens
ctgcatgtctttctg

SEQ ID NO: 1450756 - DNA, 15 bp, Homo sapiens
gctgcatgtctttct

SEQ ID NO: 1450757 - DNA, 15 bp, Homo sapiens
agctgcatgtctttc

SEQ ID NO: 1450758 - DNA, 15 bp, Homo sapiens
cagctgcatgtcttt

SEQ ID NO: 1450759 - DNA, 15 bp, Homo sapiens
tcagctgcatgtctt

SEQ ID NO: 1450760 - DNA, 15 bp, Homo sapiens
gtcagctgcatgtct

SEQ ID NO: 1450761 - DNA, 15 bp, Homo sapiens
agtcagctgcatgtc

SEQ ID NO: 1450762 - DNA, 15 bp, Homo sapiens
aagtcagctgcatgt

SEQ ID NO: 1450763 - DNA, 15 bp, Homo sapiens
aaagtcagctgcatg

SEQ ID NO: 1450764 - DNA, 15 bp, Homo sapiens
gaaagtcagctgcat

SEQ ID NO: 1450765 - DNA, 15 bp, Homo sapiens
ggaaagtcagctgca

SEQ ID NO: 1450766 - DNA, 15 bp, Homo sapiens
gggaaagtcagctgc

SEQ ID NO: 1450767 - DNA, 15 bp, Homo sapiens
agggaaagtcagctg

SEQ ID NO: 1450768 - DNA, 15 bp, Homo sapiens
aagggaaagtcagct

SEQ ID NO: 1450769 - DNA, 15 bp, Homo sapiens
gaagggaaagtcagc

SEQ ID NO: 1450770 - DNA, 15 bp, Homo sapiens
tgaagggaaagtcag

SEQ ID NO: 1450771 - DNA, 15 bp, Homo sapiens
gtgaagggaaagtca

SEQ ID NO: 1450772 - DNA, 15 bp, Homo sapiens
ggtgaagggaaagtc

SEQ ID NO: 1450773 - DNA, 15 bp, Homo sapiens
gggtgaagggaaagt

SEQ ID NO: 1450774 - DNA, 15 bp, Homo sapiens
tgggtgaagggaaag

SEQ ID NO: 1450775 - DNA, 15 bp, Homo sapiens
ctgggtgaagggaaa

SEQ ID NO: 1450776 - DNA, 15 bp, Homo sapiens
cctgggtgaagggaa

SEQ ID NO: 1450777 - DNA, 15 bp, Homo sapiens
tcctgggtgaaggga

SEQ ID NO: 1450778 - DNA, 15 bp, Homo sapiens
atcctgggtgaaggg

SEQ ID NO: 1450779 - DNA, 15 bp, Homo sapiens
tatcctgggtgaagg

SEQ ID NO: 1450780 - DNA, 15 bp, Homo sapiens
atatcctgggtgaag

SEQ ID NO: 1450781 - DNA, 15 bp, Homo sapiens
tatatcctgggtgaa

SEQ ID NO: 1450782 - DNA, 15 bp, Homo sapiens
atatatcctgggtga

SEQ ID NO: 1450783 - DNA, 15 bp, Homo sapiens
aatatatcctgggtg

SEQ ID NO: 1450784 - DNA, 15 bp, Homo sapiens
aaatatatcctgggt

SEQ ID NO: 1450785 - DNA, 15 bp, Homo sapiens
aaaatatatcctggg

SEQ ID NO: 1450786 - DNA, 15 bp, Homo sapiens
aaaaatatatcctgg

SEQ ID NO: 1450787 - DNA, 15 bp, Homo sapiens
gaaaaatatatcctg

SEQ ID NO: 1450788 - DNA, 15 bp, Homo sapiens
tgaaaaatatatcct

SEQ ID NO: 1450789 - DNA, 15 bp, Homo sapiens
ttgaaaaatatatcc

SEQ ID NO: 1450790 - DNA, 15 bp, Homo sapiens
tttgaaaaatatatc

SEQ ID NO: 1450791 - DNA, 15 bp, Homo sapiens
atttgaaaaatatat

SEQ ID NO: 1450792 - DNA, 15 bp, Homo sapiens
gatttgaaaaatata

SEQ ID NO: 1450793 - DNA, 15 bp, Homo sapiens
ggatttgaaaaatat

SEQ ID NO: 1450794 - DNA, 15 bp, Homo sapiens
aggatttgaaaaata

SEQ ID NO: 1450795 - DNA, 15 bp, Homo sapiens
aaggatttgaaaaat

SEQ ID NO: 1450796 - DNA, 15 bp, Homo sapiens
aaaggatttgaaaaa

SEQ ID NO: 1450797 - DNA, 15 bp, Homo sapiens
gaaaggatttgaaaa

SEQ ID NO: 1450798 - DNA, 15 bp, Homo sapiens
agaaaggatttgaaa

SEQ ID NO: 1450799 - DNA, 15 bp, Homo sapiens
gagaaaggatttgaa

SEQ ID NO: 1450800 - DNA, 15 bp, Homo sapiens
ggagaaaggatttga

SEQ ID NO: 1450801 - DNA, 15 bp, Homo sapiens
tggagaaaggatttg

SEQ ID NO: 1450802 - DNA, 15 bp, Homo sapiens
ctggagaaaggattt

SEQ ID NO: 1450803 - DNA, 15 bp, Homo sapiens
tctggagaaaggatt

SEQ ID NO: 1450804 - DNA, 15 bp, Homo sapiens
ctctggagaaaggat

SEQ ID NO: 1450805 - DNA, 15 bp, Homo sapiens
gctctggagaaagga

SEQ ID NO: 1450806 - DNA, 15 bp, Homo sapiens
agctctggagaaagg

SEQ ID NO: 1450807 - DNA, 15 bp, Homo sapiens
cagctctggagaaag

SEQ ID NO: 1450808 - DNA, 15 bp, Homo sapiens
gcagctctggagaaa

SEQ ID NO: 1450809 - DNA, 15 bp, Homo sapiens
ggcagctctggagaa

SEQ ID NO: 1450810 - DNA, 15 bp, Homo sapiens
tggcagctctggaga

SEQ ID NO: 1450811 - DNA, 15 bp, Homo sapiens
ttggcagctctggag

SEQ ID NO: 1450812 - DNA, 15 bp, Homo sapiens
tttggcagctctgga

SEQ ID NO: 1450813 - DNA, 15 bp, Homo sapiens
ttttggcagctctgg

SEQ ID NO: 1450814 - DNA, 15 bp, Homo sapiens
attttggcagctctg

SEQ ID NO: 1450815 - DNA, 15 bp, Homo sapiens
tattttggcagctct

SEQ ID NO: 1450816 - DNA, 15 bp, Homo sapiens
ttattttggcagctc

SEQ ID NO: 1450817 - DNA, 15 bp, Homo sapiens
attattttggcagct

SEQ ID NO: 1450818 - DNA, 15 bp, Homo sapiens
cattattttggcagc

SEQ ID NO: 1450819 - DNA, 15 bp, Homo sapiens
ccattattttggcag

SEQ ID NO: 1450820 - DNA, 15 bp, Homo sapiens
accattattttggca

SEQ ID NO: 1450821 - DNA, 15 bp, Homo sapiens
taccattattttggc

SEQ ID NO: 1450822 - DNA, 15 bp, Homo sapiens
gtaccattattttgg

SEQ ID NO: 1450823 - DNA, 15 bp, Homo sapiens
tgtaccattattttg

SEQ ID NO: 1450824 - DNA, 15 bp, Homo sapiens
ttgtaccattatttt

SEQ ID NO: 1450825 - DNA, 15 bp, Homo sapiens
attgtaccattattt

SEQ ID NO: 1450826 - DNA, 15 bp, Homo sapiens
tattgtaccattatt

SEQ ID NO: 1450827 - DNA, 15 bp, Homo sapiens
gtattgtaccattat

SEQ ID NO: 1450828 - DNA, 15 bp, Homo sapiens
agtattgtaccatta

SEQ ID NO: 1450829 - DNA, 15 bp, Homo sapiens
cagtattgtaccatt

SEQ ID NO: 1450830 - DNA, 15 bp, Homo sapiens
tcagtattgtaccat

SEQ ID NO: 1450831 - DNA, 15 bp, Homo sapiens
atcagtattgtacca

SEQ ID NO: 1450832 - DNA, 15 bp, Homo sapiens
catcagtattgtacc

SEQ ID NO: 1450833 - DNA, 15 bp, Homo sapiens
gcatcagtattgtac

SEQ ID NO: 1450834 - DNA, 15 bp, Homo sapiens
agcatcagtattgta

SEQ ID NO: 1450835 - DNA, 15 bp, Homo sapiens
cagcatcagtattgt

SEQ ID NO: 1450836 - DNA, 15 bp, Homo sapiens
ccagcatcagtattg

SEQ ID NO: 1450837 - DNA, 15 bp, Homo sapiens
tccagcatcagtatt

SEQ ID NO: 1450838 - DNA, 15 bp, Homo sapiens
ctccagcatcagtat

SEQ ID NO: 1450839 - DNA, 15 bp, Homo sapiens
gctccagcatcagta

SEQ ID NO: 1450840 - DNA, 15 bp, Homo sapiens
agctccagcatcagt

SEQ ID NO: 1450841 - DNA, 15 bp, Homo sapiens
tagctccagcatcag

SEQ ID NO: 1450842 - DNA, 15 bp, Homo sapiens
atagctccagcatca

SEQ ID NO: 1450843 - DNA, 15 bp, Homo sapiens
tatagctccagcatc

SEQ ID NO: 1450844 - DNA, 15 bp, Homo sapiens
ctatagctccagcat

SEQ ID NO: 1450845 - DNA, 15 bp, Homo sapiens
tctatagctccagca

SEQ ID NO: 1450846 - DNA, 15 bp, Homo sapiens
ttctatagctccagc

SEQ ID NO: 1450847 - DNA, 15 bp, Homo sapiens
tttctatagctccag

SEQ ID NO: 1450848 - DNA, 15 bp, Homo sapiens
ttttctatagctcca

SEQ ID NO: 1450849 - DNA, 15 bp, Homo sapiens
cttttctatagctcc

SEQ ID NO: 1450850 - DNA, 15 bp, Homo sapiens
tcttttctatagctc

SEQ ID NO: 1450851 - DNA, 15 bp, Homo sapiens
ttcttttctatagct

SEQ ID NO: 1450852 - DNA, 15 bp, Homo sapiens
tttcttttctatagc

SEQ ID NO: 1450853 - DNA, 15 bp, Homo sapiens
ttttcttttctatag

SEQ ID NO: 1450854 - DNA, 15 bp, Homo sapiens
attttcttttctata

SEQ ID NO: 1450855 - DNA, 15 bp, Homo sapiens
tattttcttttctat

SEQ ID NO: 1450856 - DNA, 15 bp, Homo sapiens
ttattttcttttcta

SEQ ID NO: 1450857 - DNA, 15 bp, Homo sapiens
atttattttcttttc

SEQ ID NO: 1450858 - DNA, 15 bp, Homo sapiens
acaatttattttctt

SEQ ID NO: 1450859 - DNA, 15 bp, Homo sapiens
cacaatttattttct

SEQ ID NO: 1450860 - DNA, 15 bp, Homo sapiens
ccacaatttattttc

SEQ ID NO: 1450861 - DNA, 15 bp, Homo sapiens
accacaatttatttt

SEQ ID NO: 1450862 - DNA, 15 bp, Homo sapiens
caccacaatttattt

SEQ ID NO: 1450863 - DNA, 15 bp, Homo sapiens
tcaccacaatttatt

SEQ ID NO: 1450864 - DNA, 15 bp, Homo sapiens
atcaccacaatttat

SEQ ID NO: 1450865 - DNA, 15 bp, Homo sapiens
catcaccacaattta

SEQ ID NO: 1450866 - DNA, 15 bp, Homo sapiens
ccatcaccacaattt

SEQ ID NO: 1450867 - DNA, 15 bp, Homo sapiens
cccatcaccacaatt

SEQ ID NO: 1450868 - DNA, 15 bp, Homo sapiens
acccatcaccacaat

SEQ ID NO: 1450869 - DNA, 15 bp, Homo sapiens
tacccatcaccacaa

SEQ ID NO: 1450870 - DNA, 15 bp, Homo sapiens
ctacccatcaccaca

SEQ ID NO: 1450871 - DNA, 15 bp, Homo sapiens
tctacccatcaccac

SEQ ID NO: 1450872 - DNA, 15 bp, Homo sapiens
atctacccatcacca

SEQ ID NO: 1450873 - DNA, 15 bp, Homo sapiens
aatctacccatcacc

SEQ ID NO: 1450874 - DNA, 15 bp, Homo sapiens
aaatctacccatcac

SEQ ID NO: 1450875 - DNA, 15 bp, Homo sapiens
aaaatctacccatca

SEQ ID NO: 1450876 - DNA, 15 bp, Homo sapiens
aaaaatctacccatc

SEQ ID NO: 1450877 - DNA, 15 bp, Homo sapiens
gaaaaatctacccat

SEQ ID NO: 1450878 - DNA, 15 bp, Homo sapiens
agaaaaatctaccca

SEQ ID NO: 1450879 - DNA, 15 bp, Homo sapiens
aagaaaaatctaccc

SEQ ID NO: 1450880 - DNA, 15 bp, Homo sapiens
gaagaaaaatctacc

SEQ ID NO: 1450881 - DNA, 15 bp, Homo sapiens
tgaagaaaaatctac

SEQ ID NO: 1450882 - DNA, 15 bp, Homo sapiens
gtgaagaaaaatcta

SEQ ID NO: 1450883 - DNA, 15 bp, Homo sapiens
agtgaagaaaaatct

SEQ ID NO: 1450884 - DNA, 15 bp, Homo sapiens
cagtgaagaaaaatc

SEQ ID NO: 1450885 - DNA, 15 bp, Homo sapiens
tcagtgaagaaaaat

SEQ ID NO: 1450886 - DNA, 15 bp, Homo sapiens
ctcagtgaagaaaaa

SEQ ID NO: 1450887 - DNA, 15 bp, Homo sapiens
cctcagtgaagaaaa

SEQ ID NO: 1450888 - DNA, 15 bp, Homo sapiens
tcctcagtgaagaaa

SEQ ID NO: 1450889 - DNA, 15 bp, Homo sapiens
atcctcagtgaagaa

SEQ ID NO: 1450890 - DNA, 15 bp, Homo sapiens
gatcctcagtgaaga

SEQ ID NO: 1450891 - DNA, 15 bp, Homo sapiens
agatcctcagtgaag

SEQ ID NO: 1450892 - DNA, 15 bp, Homo sapiens
tagatcctcagtgaa

SEQ ID NO: 1450893 - DNA, 15 bp, Homo sapiens
ttagatcctcagtga

SEQ ID NO: 1450894 - DNA, 15 bp, Homo sapiens
attagatcctcagtg

SEQ ID NO: 1450895 - DNA, 15 bp, Homo sapiens
aattagatcctcagt

SEQ ID NO: 1450896 - DNA, 15 bp, Homo sapiens
taattagatcctcag

SEQ ID NO: 1450897 - DNA, 15 bp, Homo sapiens
gtaattagatcctca

SEQ ID NO: 1450898 - DNA, 15 bp, Homo sapiens
tgtaattagatcctc

SEQ ID NO: 1450899 - DNA, 15 bp, Homo sapiens
ctgtaattagatcct

SEQ ID NO: 1450900 - DNA, 15 bp, Homo sapiens
cctgtaattagatcc

SEQ ID NO: 1450901 - DNA, 15 bp, Homo sapiens
ccctgtaattagatc

SEQ ID NO: 1450902 - DNA, 15 bp, Homo sapiens
tccctgtaattagat

SEQ ID NO: 1450903 - DNA, 15 bp, Homo sapiens
ttccctgtaattaga

SEQ ID NO: 1450904 - DNA, 15 bp, Homo sapiens
attccctgtaattag

SEQ ID NO: 1450905 - DNA, 15 bp, Homo sapiens
aattccctgtaatta

SEQ ID NO: 1450906 - DNA, 15 bp, Homo sapiens
caattccctgtaatt

SEQ ID NO: 1450907 - DNA, 15 bp, Homo sapiens
ccaattccctgtaat

SEQ ID NO: 1450908 - DNA, 15 bp, Homo sapiens
tccaattccctgtaa

SEQ ID NO: 1450909 - DNA, 15 bp, Homo sapiens
gtccaattccctgta

SEQ ID NO: 1450910 - DNA, 15 bp, Homo sapiens
agtccaattccctgt

SEQ ID NO: 1450911 - DNA, 15 bp, Homo sapiens
aagtccaattccctg

SEQ ID NO: 1450912 - DNA, 15 bp, Homo sapiens
taagtccaattccct

SEQ ID NO: 1450913 - DNA, 15 bp, Homo sapiens
ttaagtccaattccc

SEQ ID NO: 1450914 - DNA, 15 bp, Homo sapiens
gttaagtccaattcc

SEQ ID NO: 1450915 - DNA, 15 bp, Homo sapiens
ggttaagtccaattc

SEQ ID NO: 1450916 - DNA, 15 bp, Homo sapiens
aggttaagtccaatt

SEQ ID NO: 1450917 - DNA, 15 bp, Homo sapiens
taggttaagtccaat

SEQ ID NO: 1450918 - DNA, 15 bp, Homo sapiens
ttaggttaagtccaa

SEQ ID NO: 1450919 - DNA, 15 bp, Homo sapiens
attaggttaagtcca

SEQ ID NO: 1450920 - DNA, 15 bp, Homo sapiens
gattaggttaagtcc

SEQ ID NO: 1450921 - DNA, 15 bp, Homo sapiens
tgattaggttaagtc

SEQ ID NO: 1450922 - DNA, 15 bp, Homo sapiens
ctgattaggttaagt

SEQ ID NO: 1450923 - DNA, 15 bp, Homo sapiens
tctgattaggttaag

SEQ ID NO: 1450924 - DNA, 15 bp, Homo sapiens
gtctgattaggttaa

SEQ ID NO: 1450925 - DNA, 15 bp, Homo sapiens
agtctgattaggtta

SEQ ID NO: 1450926 - DNA, 15 bp, Homo sapiens
aagtctgattaggtt

SEQ ID NO: 1450927 - DNA, 15 bp, Homo sapiens
aaagtctgattaggt

SEQ ID NO: 1450928 - DNA, 15 bp, Homo sapiens
taaagtctgattagg

SEQ ID NO: 1450929 - DNA, 15 bp, Homo sapiens
ttaaagtctgattag

SEQ ID NO: 1450930 - DNA, 15 bp, Homo sapiens
gttaaagtctgatta

SEQ ID NO: 1450931 - DNA, 15 bp, Homo sapiens
cgttaaagtctgatt

SEQ ID NO: 1450932 - DNA, 15 bp, Homo sapiens
tcgttaaagtctgat

SEQ ID NO: 1450933 - DNA, 15 bp, Homo sapiens
gtcgttaaagtctga

SEQ ID NO: 1450934 - DNA, 15 bp, Homo sapiens
tgtcgttaaagtctg

SEQ ID NO: 1450935 - DNA, 15 bp, Homo sapiens
ttgtcgttaaagtct

SEQ ID NO: 1450936 - DNA, 15 bp, Homo sapiens
attgtcgttaaagtc

SEQ ID NO: 1450937 - DNA, 15 bp, Homo sapiens
aattgtcgttaaagt

SEQ ID NO: 1450938 - DNA, 15 bp, Homo sapiens
aaattgtcgttaaag

SEQ ID NO: 1450939 - DNA, 15 bp, Homo sapiens
gaaattgtcgttaaa

SEQ ID NO: 1450940 - DNA, 15 bp, Homo sapiens
ggaaattgtcgttaa

SEQ ID NO: 1450941 - DNA, 15 bp, Homo sapiens
aggaaattgtcgtta

SEQ ID NO: 1450942 - DNA, 15 bp, Homo sapiens
taggaaattgtcgtt

SEQ ID NO: 1450943 - DNA, 15 bp, Homo sapiens
ttaggaaattgtcgt

SEQ ID NO: 1450944 - DNA, 15 bp, Homo sapiens
cttaggaaattgtcg

SEQ ID NO: 1450945 - DNA, 15 bp, Homo sapiens
tcttaggaaattgtc

SEQ ID NO: 1450946 - DNA, 15 bp, Homo sapiens
ctcttaggaaattgt

SEQ ID NO: 1450947 - DNA, 15 bp, Homo sapiens
actcttaggaaattg

SEQ ID NO: 1450948 - DNA, 15 bp, Homo sapiens
tactcttaggaaatt

SEQ ID NO: 1450949 - DNA, 15 bp, Homo sapiens
ttactcttaggaaat

SEQ ID NO: 1450950 - DNA, 15 bp, Homo sapiens
tttactcttaggaaa

SEQ ID NO: 1450951 - DNA, 15 bp, Homo sapiens
atttactcttaggaa

SEQ ID NO: 1450952 - DNA, 15 bp, Homo sapiens
aatttactcttagga

SEQ ID NO: 1450953 - DNA, 15 bp, Homo sapiens
taatttactcttagg

SEQ ID NO: 1450954 - DNA, 15 bp, Homo sapiens
ctaatttactcttag

SEQ ID NO: 1450955 - DNA, 15 bp, Homo sapiens
cctaatttactctta

SEQ ID NO: 1450956 - DNA, 15 bp, Homo sapiens
ccctaatttactctt

SEQ ID NO: 1450957 - DNA, 15 bp, Homo sapiens
tccctaatttactct

SEQ ID NO: 1450958 - DNA, 15 bp, Homo sapiens
ttccctaatttactc

SEQ ID NO: 1450959 - DNA, 15 bp, Homo sapiens
gttccctaatttact

SEQ ID NO: 1450960 - DNA, 15 bp, Homo sapiens
tgttccctaatttac

SEQ ID NO: 1450961 - DNA, 15 bp, Homo sapiens
ttgttccctaattta

SEQ ID NO: 1450962 - DNA, 15 bp, Homo sapiens
tttgttccctaattt

SEQ ID NO: 1450963 - DNA, 15 bp, Homo sapiens
atttgttccctaatt

SEQ ID NO: 1450964 - DNA, 15 bp, Homo sapiens
aatttgttccctaat

SEQ ID NO: 1450965 - DNA, 15 bp, Homo sapiens
taatttgttccctaa

SEQ ID NO: 1450966 - DNA, 15 bp, Homo sapiens
gtaatttgttcccta

SEQ ID NO: 1450967 - DNA, 15 bp, Homo sapiens
agtaatttgttccct

SEQ ID NO: 1450968 - DNA, 15 bp, Homo sapiens
cagtaatttgttccc

SEQ ID NO: 1450969 - DNA, 15 bp, Homo sapiens
acagtaatttgttcc

SEQ ID NO: 1450970 - DNA, 15 bp, Homo sapiens
cacagtaatttgttc

SEQ ID NO: 1450971 - DNA, 15 bp, Homo sapiens
tcacagtaatttgtt

SEQ ID NO: 1450972 - DNA, 15 bp, Homo sapiens
ctcacagtaatttgt

SEQ ID NO: 1450973 - DNA, 15 bp, Homo sapiens
tctcacagtaatttg

SEQ ID NO: 1450974 - DNA, 15 bp, Homo sapiens
atctcacagtaattt

SEQ ID NO: 1450975 - DNA, 15 bp, Homo sapiens
catctcacagtaatt

SEQ ID NO: 1450976 - DNA, 15 bp, Homo sapiens
tcatctcacagtaat

SEQ ID NO: 1450977 - DNA, 15 bp, Homo sapiens
ctcatctcacagtaa

SEQ ID NO: 1450978 - DNA, 15 bp, Homo sapiens
actcatctcacagta

SEQ ID NO: 1450979 - DNA, 15 bp, Homo sapiens
aactcatctcacagt

SEQ ID NO: 1450980 - DNA, 15 bp, Homo sapiens
caactcatctcacag

SEQ ID NO: 1450981 - DNA, 15 bp, Homo sapiens
gcaactcatctcaca

SEQ ID NO: 1450982 - DNA, 15 bp, Homo sapiens
tgcaactcatctcac

SEQ ID NO: 1450983 - DNA, 15 bp, Homo sapiens
ctgcaactcatctca

SEQ ID NO: 1450984 - DNA, 15 bp, Homo sapiens
tctgcaactcatctc

SEQ ID NO: 1450985 - DNA, 15 bp, Homo sapiens
ttctgcaactcatct

SEQ ID NO: 1450986 - DNA, 15 bp, Homo sapiens
attctgcaactcatc

SEQ ID NO: 1450987 - DNA, 15 bp, Homo sapiens
gattctgcaactcat

SEQ ID NO: 1450988 - DNA, 15 bp, Homo sapiens
agattctgcaactca

SEQ ID NO: 1450989 - DNA, 15 bp, Homo sapiens
aagattctgcaactc

SEQ ID NO: 1450990 - DNA, 15 bp, Homo sapiens
aaagattctgcaact

SEQ ID NO: 1450991 - DNA, 15 bp, Homo sapiens
aaaagattctgcaac

SEQ ID NO: 1450992 - DNA, 15 bp, Homo sapiens
aaaaagattctgcaa

SEQ ID NO: 1450993 - DNA, 15 bp, Homo sapiens
gaaaaagattctgca

SEQ ID NO: 1450994 - DNA, 15 bp, Homo sapiens
tgaaaaagattctgc

SEQ ID NO: 1450995 - DNA, 15 bp, Homo sapiens
ctgaaaaagattctg

SEQ ID NO: 1450996 - DNA, 15 bp, Homo sapiens
tctgaaaaagattct

SEQ ID NO: 1450997 - DNA, 15 bp, Homo sapiens
ctctgaaaaagattc

SEQ ID NO: 1450998 - DNA, 15 bp, Homo sapiens
cctctgaaaaagatt

SEQ ID NO: 1450999 - DNA, 15 bp, Homo sapiens
acctctgaaaaagat

SEQ ID NO: 1451000 - DNA, 15 bp, Homo sapiens
aacctctgaaaaaga

SEQ ID NO: 1451001 - DNA, 15 bp, Homo sapiens
aaacctctgaaaaag

SEQ ID NO: 1451002 - DNA, 15 bp, Homo sapiens
caaacctctgaaaaa

SEQ ID NO: 1451003 - DNA, 15 bp, Homo sapiens
ccaaacctctgaaaa

SEQ ID NO: 1451004 - DNA, 15 bp, Homo sapiens
tccaaacctctgaaa

SEQ ID NO: 1451005 - DNA, 15 bp, Homo sapiens
ctccaaacctctgaa

SEQ ID NO: 1451006 - DNA, 15 bp, Homo sapiens
tctccaaacctctga

SEQ ID NO: 1451007 - DNA, 15 bp, Homo sapiens
ttctccaaacctctg

SEQ ID NO: 1451008 - DNA, 15 bp, Homo sapiens
tttctccaaacctct

SEQ ID NO: 1451009 - DNA, 15 bp, Homo sapiens
ctttctccaaacctc

SEQ ID NO: 1451010 - DNA, 15 bp, Homo sapiens
tctttctccaaacct

SEQ ID NO: 1451011 - DNA, 15 bp, Homo sapiens
gtctttctccaaacc

SEQ ID NO: 1451012 - DNA, 15 bp, Homo sapiens
tgtctttctccaaac

SEQ ID NO: 1451013 - DNA, 15 bp, Homo sapiens
ctgtctttctccaaa

SEQ ID NO: 1451014 - DNA, 15 bp, Homo sapiens
tctgtctttctccaa

SEQ ID NO: 1451015 - DNA, 15 bp, Homo sapiens
ttctgtctttctcca

SEQ ID NO: 1451016 - DNA, 15 bp, Homo sapiens
attctgtctttctcc

SEQ ID NO: 1451017 - DNA, 15 bp, Homo sapiens
cattctgtctttctc

SEQ ID NO: 1451018 - DNA, 15 bp, Homo sapiens
acattctgtctttct

SEQ ID NO: 1451019 - DNA, 15 bp, Homo sapiens
gacattctgtctttc

SEQ ID NO: 1451020 - DNA, 15 bp, Homo sapiens
agacattctgtcttt

SEQ ID NO: 1451021 - DNA, 15 bp, Homo sapiens
cagacattctgtctt

SEQ ID NO: 1451022 - DNA, 15 bp, Homo sapiens
acagacattctgtct

SEQ ID NO: 1451023 - DNA, 15 bp, Homo sapiens
aacagacattctgtc

SEQ ID NO: 1451024 - DNA, 15 bp, Homo sapiens
gaacagacattctgt

SEQ ID NO: 1451025 - DNA, 15 bp, Homo sapiens
tgaacagacattctg

SEQ ID NO: 1451026 - DNA, 15 bp, Homo sapiens
gtgaacagacattct

SEQ ID NO: 1451027 - DNA, 15 bp, Homo sapiens
ggtgaacagacattc

SEQ ID NO: 1451028 - DNA, 15 bp, Homo sapiens
aggtgaacagacatt

SEQ ID NO: 1451029 - DNA, 15 bp, Homo sapiens
caggtgaacagacat

SEQ ID NO: 1451030 - DNA, 15 bp, Homo sapiens
acaggtgaacagaca

SEQ ID NO: 1451031 - DNA, 15 bp, Homo sapiens
aacaggtgaacagac

SEQ ID NO: 1451032 - DNA, 15 bp, Homo sapiens
aaacaggtgaacaga

SEQ ID NO: 1451033 - DNA, 15 bp, Homo sapiens
caaacaggtgaacag

SEQ ID NO: 1451034 - DNA, 15 bp, Homo sapiens
ccaaacaggtgaaca

SEQ ID NO: 1451035 - DNA, 15 bp, Homo sapiens
gccaaacaggtgaac

SEQ ID NO: 1451036 - DNA, 15 bp, Homo sapiens
ggccaaacaggtgaa

SEQ ID NO: 1451037 - DNA, 15 bp, Homo sapiens
gggccaaacaggtga

SEQ ID NO: 1451038 - DNA, 15 bp, Homo sapiens
ggggccaaacaggtg

SEQ ID NO: 1451039 - DNA, 15 bp, Homo sapiens
tggggccaaacaggt

SEQ ID NO: 1451040 - DNA, 15 bp, Homo sapiens
atggggccaaacagg

SEQ ID NO: 1451041 - DNA, 15 bp, Homo sapiens
aatggggccaaacag

SEQ ID NO: 1451042 - DNA, 15 bp, Homo sapiens
aaatggggccaaaca

SEQ ID NO: 1451043 - DNA, 15 bp, Homo sapiens
taaatggggccaaac

SEQ ID NO: 1451044 - DNA, 15 bp, Homo sapiens
ctaaatggggccaaa

SEQ ID NO: 1451045 - DNA, 15 bp, Homo sapiens
actaaatggggccaa

SEQ ID NO: 1451046 - DNA, 15 bp, Homo sapiens
tactaaatggggcca

SEQ ID NO: 1451047 - DNA, 15 bp, Homo sapiens
atactaaatggggcc

SEQ ID NO: 1451048 - DNA, 15 bp, Homo sapiens
aatactaaatggggc

SEQ ID NO: 1451049 - DNA, 15 bp, Homo sapiens
caatactaaatgggg

SEQ ID NO: 1451050 - DNA, 15 bp, Homo sapiens
ccaatactaaatggg

SEQ ID NO: 1451051 - DNA, 15 bp, Homo sapiens
gccaatactaaatgg

SEQ ID NO: 1451052 - DNA, 15 bp, Homo sapiens
agccaatactaaatg

SEQ ID NO: 1451053 - DNA, 15 bp, Homo sapiens
aagccaatactaaat

SEQ ID NO: 1451054 - DNA, 15 bp, Homo sapiens
taagccaatactaaa

SEQ ID NO: 1451055 - DNA, 15 bp, Homo sapiens
ttaagccaatactaa

SEQ ID NO: 1451056 - DNA, 15 bp, Homo sapiens
gttaagccaatacta

SEQ ID NO: 1451057 - DNA, 15 bp, Homo sapiens
ggttaagccaatact

SEQ ID NO: 1451058 - DNA, 15 bp, Homo sapiens
tggttaagccaatac

SEQ ID NO: 1451059 - DNA, 15 bp, Homo sapiens
ctggttaagccaata

SEQ ID NO: 1451060 - DNA, 15 bp, Homo sapiens
cctggttaagccaat

SEQ ID NO: 1451061 - DNA, 15 bp, Homo sapiens
gcctggttaagccaa

SEQ ID NO: 1451062 - DNA, 15 bp, Homo sapiens
cgcctggttaagcca

SEQ ID NO: 1451063 - DNA, 15 bp, Homo sapiens
gcgcctggttaagcc

SEQ ID NO: 1451064 - DNA, 15 bp, Homo sapiens
agcgcctggttaagc

SEQ ID NO: 1451065 - DNA, 15 bp, Homo sapiens
cagcgcctggttaag

SEQ ID NO: 1451066 - DNA, 15 bp, Homo sapiens
ccagcgcctggttaa

SEQ ID NO: 1451067 - DNA, 15 bp, Homo sapiens
gccagcgcctggtta

SEQ ID NO: 1451068 - DNA, 15 bp, Homo sapiens
tgccagcgcctggtt

SEQ ID NO: 1451069 - DNA, 15 bp, Homo sapiens
ctgccagcgcctggt

SEQ ID NO: 1451070 - DNA, 15 bp, Homo sapiens
gctgccagcgcctgg

SEQ ID NO: 1451071 - DNA, 15 bp, Homo sapiens
tgctgccagcgcctg

SEQ ID NO: 1451072 - DNA, 15 bp, Homo sapiens
ctgctgccagcgcct

SEQ ID NO: 1451073 - DNA, 15 bp, Homo sapiens
actgctgccagcgcc

SEQ ID NO: 1451074 - DNA, 15 bp, Homo sapiens
aactgctgccagcgc

SEQ ID NO: 1451075 - DNA, 15 bp, Homo sapiens
gaactgctgccagcg

SEQ ID NO: 1451076 - DNA, 15 bp, Homo sapiens
ggaactgctgccagc

SEQ ID NO: 1451077 - DNA, 15 bp, Homo sapiens
aggaactgctgccag

SEQ ID NO: 1451078 - DNA, 15 bp, Homo sapiens
taggaactgctgcca

SEQ ID NO: 1451079 - DNA, 15 bp, Homo sapiens
ctaggaactgctgcc

SEQ ID NO: 1451080 - DNA, 15 bp, Homo sapiens
gctaggaactgctgc

SEQ ID NO: 1451081 - DNA, 15 bp, Homo sapiens
tgctaggaactgctg

SEQ ID NO: 1451082 - DNA, 15 bp, Homo sapiens
atgctaggaactgct

SEQ ID NO: 1451083 - DNA, 15 bp, Homo sapiens
catgctaggaactgc

SEQ ID NO: 1451084 - DNA, 15 bp, Homo sapiens
gcatgctaggaactg

SEQ ID NO: 1451085 - DNA, 15 bp, Homo sapiens
agcatgctaggaact

SEQ ID NO: 1451086 - DNA, 15 bp, Homo sapiens
cagcatgctaggaac

SEQ ID NO: 1451087 - DNA, 15 bp, Homo sapiens
ccagcatgctaggaa

SEQ ID NO: 1451088 - DNA, 15 bp, Homo sapiens
cccagcatgctagga

SEQ ID NO: 1451089 - DNA, 15 bp, Homo sapiens
acccagcatgctagg

SEQ ID NO: 1451090 - DNA, 15 bp, Homo sapiens
gacccagcatgctag

SEQ ID NO: 1451091 - DNA, 15 bp, Homo sapiens
agacccagcatgcta

SEQ ID NO: 1451092 - DNA, 15 bp, Homo sapiens
cagacccagcatgct

SEQ ID NO: 1451093 - DNA, 15 bp, Homo sapiens
tcagacccagcatgc

SEQ ID NO: 1451094 - DNA, 15 bp, Homo sapiens
ttcagacccagcatg

SEQ ID NO: 1451095 - DNA, 15 bp, Homo sapiens
tttcagacccagcat

SEQ ID NO: 1451096 - DNA, 15 bp, Homo sapiens
atttcagacccagca

SEQ ID NO: 1451097 - DNA, 15 bp, Homo sapiens
aatttcagacccagc

SEQ ID NO: 1451098 - DNA, 15 bp, Homo sapiens
caatttcagacccag

SEQ ID NO: 1451099 - DNA, 15 bp, Homo sapiens
acaatttcagaccca

SEQ ID NO: 1451100 - DNA, 15 bp, Homo sapiens
cacaatttcagaccc

SEQ ID NO: 1451101 - DNA, 15 bp, Homo sapiens
tcacaatttcagacc

SEQ ID NO: 1451102 - DNA, 15 bp, Homo sapiens
gtcacaatttcagac

SEQ ID NO: 1451103 - DNA, 15 bp, Homo sapiens
tgtcacaatttcaga

SEQ ID NO: 1451104 - DNA, 15 bp, Homo sapiens
atgtcacaatttcag

SEQ ID NO: 1451105 - DNA, 15 bp, Homo sapiens
catgtcacaatttca

SEQ ID NO: 1451106 - DNA, 15 bp, Homo sapiens
acatgtcacaatttc

SEQ ID NO: 1451107 - DNA, 15 bp, Homo sapiens
tacatgtcacaattt

SEQ ID NO: 1451108 - DNA, 15 bp, Homo sapiens
atacatgtcacaatt

SEQ ID NO: 1451109 - DNA, 15 bp, Homo sapiens
tatacatgtcacaat

SEQ ID NO: 1451110 - DNA, 15 bp, Homo sapiens
ctatacatgtcacaa

SEQ ID NO: 1451111 - DNA, 15 bp, Homo sapiens
cctatacatgtcaca

SEQ ID NO: 1451112 - DNA, 15 bp, Homo sapiens
tcctatacatgtcac

SEQ ID NO: 1451113 - DNA, 15 bp, Homo sapiens
ctcctatacatgtca

SEQ ID NO: 1451114 - DNA, 15 bp, Homo sapiens
gctcctatacatgtc

SEQ ID NO: 1451115 - DNA, 15 bp, Homo sapiens
tgctcctatacatgt

SEQ ID NO: 1451116 - DNA, 15 bp, Homo sapiens
ctgctcctatacatg

SEQ ID NO: 1451117 - DNA, 15 bp, Homo sapiens
gctgctcctatacat

SEQ ID NO: 1451118 - DNA, 15 bp, Homo sapiens
tgctgctcctataca

SEQ ID NO: 1451119 - DNA, 15 bp, Homo sapiens
ctgctgctcctatac

SEQ ID NO: 1451120 - DNA, 15 bp, Homo sapiens
gctgctgctcctata

SEQ ID NO: 1451121 - DNA, 15 bp, Homo sapiens
tgctgctgctcctat

SEQ ID NO: 1451122 - DNA, 15 bp, Homo sapiens
atgctgctgctccta

SEQ ID NO: 1451123 - DNA, 15 bp, Homo sapiens
aatgctgctgctcct

SEQ ID NO: 1451124 - DNA, 15 bp, Homo sapiens
caatgctgctgctcc

SEQ ID NO: 1451125 - DNA, 15 bp, Homo sapiens
ccaatgctgctgctc

SEQ ID NO: 1451126 - DNA, 15 bp, Homo sapiens
tccaatgctgctgct

SEQ ID NO: 1451127 - DNA, 15 bp, Homo sapiens
ctccaatgctgctgc

SEQ ID NO: 1451128 - DNA, 15 bp, Homo sapiens
cctccaatgctgctg

SEQ ID NO: 1451129 - DNA, 15 bp, Homo sapiens
gcctccaatgctgct

SEQ ID NO: 1451130 - DNA, 15 bp, Homo sapiens
agcctccaatgctgc

SEQ ID NO: 1451131 - DNA, 15 bp, Homo sapiens
gagcctccaatgctg

SEQ ID NO: 1451132 - DNA, 15 bp, Homo sapiens
ggagcctccaatgct

SEQ ID NO: 1451133 - DNA, 15 bp, Homo sapiens
aggagcctccaatgc

SEQ ID NO: 1451134 - DNA, 15 bp, Homo sapiens
gaggagcctccaatg

SEQ ID NO: 1451135 - DNA, 15 bp, Homo sapiens
tgaggagcctccaat

SEQ ID NO: 1451136 - DNA, 15 bp, Homo sapiens
ttgaggagcctccaa

SEQ ID NO: 1451137 - DNA, 15 bp, Homo sapiens
cttgaggagcctcca

SEQ ID NO: 1451138 - DNA, 15 bp, Homo sapiens
ccttgaggagcctcc

SEQ ID NO: 1451139 - DNA, 15 bp, Homo sapiens
tccttgaggagcctc

SEQ ID NO: 1451140 - DNA, 15 bp, Homo sapiens
ctccttgaggagcct

SEQ ID NO: 1451141 - DNA, 15 bp, Homo sapiens
cctccttgaggagcc

SEQ ID NO: 1451142 - DNA, 15 bp, Homo sapiens
tcctccttgaggagc

SEQ ID NO: 1451143 - DNA, 15 bp, Homo sapiens
gtcctccttgaggag

SEQ ID NO: 1451144 - DNA, 15 bp, Homo sapiens
tgtcctccttgagga

SEQ ID NO: 1451145 - DNA, 15 bp, Homo sapiens
ttgtcctccttgagg

SEQ ID NO: 1451146 - DNA, 15 bp, Homo sapiens
tttgtcctccttgag

SEQ ID NO: 1451147 - DNA, 15 bp, Homo sapiens
ctttgtcctccttga

SEQ ID NO: 1451148 - DNA, 15 bp, Homo sapiens
gctttgtcctccttg

SEQ ID NO: 1451149 - DNA, 15 bp, Homo sapiens
tgctttgtcctcctt

SEQ ID NO: 1451150 - DNA, 15 bp, Homo sapiens
gtgctttgtcctcct

SEQ ID NO: 1451151 - DNA, 15 bp, Homo sapiens
ggtgctttgtcctcc

SEQ ID NO: 1451152 - DNA, 15 bp, Homo sapiens
aggtgctttgtcctc

SEQ ID NO: 1451153 - DNA, 15 bp, Homo sapiens
taggtgctttgtcct

SEQ ID NO: 1451154 - DNA, 15 bp, Homo sapiens
ttaggtgctttgtcc

SEQ ID NO: 1451155 - DNA, 15 bp, Homo sapiens
tttaggtgctttgtc

SEQ ID NO: 1451156 - DNA, 15 bp, Homo sapiens
gtttaggtgctttgt

SEQ ID NO: 1451157 - DNA, 15 bp, Homo sapiens
tgtttaggtgctttg

SEQ ID NO: 1451158 - DNA, 15 bp, Homo sapiens
ctgtttaggtgcttt

SEQ ID NO: 1451159 - DNA, 15 bp, Homo sapiens
cctgtttaggtgctt

SEQ ID NO: 1451160 - DNA, 15 bp, Homo sapiens
ccctgtttaggtgct

SEQ ID NO: 1451161 - DNA, 15 bp, Homo sapiens
tccctgtttaggtgc

SEQ ID NO: 1451162 - DNA, 15 bp, Homo sapiens
atccctgtttaggtg

SEQ ID NO: 1451163 - DNA, 15 bp, Homo sapiens
catccctgtttaggt

SEQ ID NO: 1451164 - DNA, 15 bp, Homo sapiens
ccatccctgtttagg

SEQ ID NO: 1451165 - DNA, 15 bp, Homo sapiens
cccatccctgtttag

SEQ ID NO: 1451166 - DNA, 15 bp, Homo sapiens
ccccatccctgttta

SEQ ID NO: 1451167 - DNA, 15 bp, Homo sapiens
gccccatccctgttt

SEQ ID NO: 1451168 - DNA, 15 bp, Homo sapiens
tgccccatccctgtt

SEQ ID NO: 1451169 - DNA, 15 bp, Homo sapiens
ctgccccatccctgt

SEQ ID NO: 1451170 - DNA, 15 bp, Homo sapiens
cctgccccatccctg

SEQ ID NO: 1451171 - DNA, 15 bp, Homo sapiens
acctgccccatccct

SEQ ID NO: 1451172 - DNA, 15 bp, Homo sapiens
cacctgccccatccc

SEQ ID NO: 1451173 - DNA, 15 bp, Homo sapiens
tcacctgccccatcc

SEQ ID NO: 1451174 - DNA, 15 bp, Homo sapiens
ctcacctgccccatc

SEQ ID NO: 1451175 - DNA, 15 bp, Homo sapiens
actcacctgccccat

SEQ ID NO: 1451176 - DNA, 15 bp, Homo sapiens
aactcacctgcccca

SEQ ID NO: 1451177 - DNA, 15 bp, Homo sapiens
caactcacctgcccc

SEQ ID NO: 1451178 - DNA, 15 bp, Homo sapiens
tcaactcacctgccc

SEQ ID NO: 1451179 - DNA, 15 bp, Homo sapiens
ttcaactcacctgcc

SEQ ID NO: 1451180 - DNA, 15 bp, Homo sapiens
cttcaactcacctgc

SEQ ID NO: 1451181 - DNA, 15 bp, Homo sapiens
ccttcaactcacctg

SEQ ID NO: 1451182 - DNA, 15 bp, Homo sapiens
tccttcaactcacct

SEQ ID NO: 1451183 - DNA, 15 bp, Homo sapiens
ttccttcaactcacc

SEQ ID NO: 1451184 - DNA, 15 bp, Homo sapiens
gttccttcaactcac

SEQ ID NO: 1451185 - DNA, 15 bp, Homo sapiens
tgttccttcaactca

SEQ ID NO: 1451186 - DNA, 15 bp, Homo sapiens
ctgttccttcaactc

SEQ ID NO: 1451187 - DNA, 15 bp, Homo sapiens
cctgttccttcaact

SEQ ID NO: 1451188 - DNA, 15 bp, Homo sapiens
tcctgttccttcaac

SEQ ID NO: 1451189 - DNA, 15 bp, Homo sapiens
ttcctgttccttcaa

SEQ ID NO: 1451190 - DNA, 15 bp, Homo sapiens
gttcctgttccttca

SEQ ID NO: 1451191 - DNA, 15 bp, Homo sapiens
agttcctgttccttc

SEQ ID NO: 1451192 - DNA, 15 bp, Homo sapiens
cagttcctgttcctt

SEQ ID NO: 1451193 - DNA, 15 bp, Homo sapiens
gcagttcctgttcct

SEQ ID NO: 1451194 - DNA, 15 bp, Homo sapiens
agcagttcctgttcc

SEQ ID NO: 1451195 - DNA, 15 bp, Homo sapiens
aagcagttcctgttc

SEQ ID NO: 1451196 - DNA, 15 bp, Homo sapiens
caagcagttcctgtt

SEQ ID NO: 1451197 - DNA, 15 bp, Homo sapiens
acaagcagttcctgt

SEQ ID NO: 1451198 - DNA, 15 bp, Homo sapiens
cacaagcagttcctg

SEQ ID NO: 1451199 - DNA, 15 bp, Homo sapiens
tcacaagcagttcct

SEQ ID NO: 1451200 - DNA, 15 bp, Homo sapiens
gtcacaagcagttcc

SEQ ID NO: 1451201 - DNA, 15 bp, Homo sapiens
tgtcacaagcagttc

SEQ ID NO: 1451202 - DNA, 15 bp, Homo sapiens
ctgtcacaagcagtt

SEQ ID NO: 1451203 - DNA, 15 bp, Homo sapiens
actgtcacaagcagt

SEQ ID NO: 1451204 - DNA, 15 bp, Homo sapiens
aactgtcacaagcag

SEQ ID NO: 1451205 - DNA, 15 bp, Homo sapiens
caactgtcacaagca

SEQ ID NO: 1451206 - DNA, 15 bp, Homo sapiens
acaactgtcacaagc

SEQ ID NO: 1451207 - DNA, 15 bp, Homo sapiens
aacaactgtcacaag

SEQ ID NO: 1451208 - DNA, 15 bp, Homo sapiens
taacaactgtcacaa

SEQ ID NO: 1451209 - DNA, 15 bp, Homo sapiens
ataacaactgtcaca

SEQ ID NO: 1451210 - DNA, 15 bp, Homo sapiens
cataacaactgtcac

SEQ ID NO: 1451211 - DNA, 15 bp, Homo sapiens
gcataacaactgtca

SEQ ID NO: 1451212 - DNA, 15 bp, Homo sapiens
tgcataacaactgtc

SEQ ID NO: 1451213 - DNA, 15 bp, Homo sapiens
gtgcataacaactgt

SEQ ID NO: 1451214 - DNA, 15 bp, Homo sapiens
tgtgcataacaactg

SEQ ID NO: 1451215 - DNA, 15 bp, Homo sapiens
gtgtgcataacaact

SEQ ID NO: 1451216 - DNA, 15 bp, Homo sapiens
tgtgtgcataacaac

SEQ ID NO: 1451217 - DNA, 15 bp, Homo sapiens
atgtgtgcataacaa

SEQ ID NO: 1451218 - DNA, 15 bp, Homo sapiens
aatgtgtgcataaca

SEQ ID NO: 1451219 - DNA, 15 bp, Homo sapiens
caatgtgtgcataac

SEQ ID NO: 1451220 - DNA, 15 bp, Homo sapiens
ccaatgtgtgcataa

SEQ ID NO: 1451221 - DNA, 15 bp, Homo sapiens
cccaatgtgtgcata

SEQ ID NO: 1451222 - DNA, 15 bp, Homo sapiens
ccccaatgtgtgcat

SEQ ID NO: 1451223 - DNA, 15 bp, Homo sapiens
accccaatgtgtgca

SEQ ID NO: 1451224 - DNA, 15 bp, Homo sapiens
aaccccaatgtgtgc

SEQ ID NO: 1451225 - DNA, 15 bp, Homo sapiens
caaccccaatgtgtg

SEQ ID NO: 1451226 - DNA, 15 bp, Homo sapiens
ccaaccccaatgtgt

SEQ ID NO: 1451227 - DNA, 15 bp, Homo sapiens
gccaaccccaatgtg

SEQ ID NO: 1451228 - DNA, 15 bp, Homo sapiens
agccaaccccaatgt

SEQ ID NO: 1451229 - DNA, 15 bp, Homo sapiens
cagccaaccccaatg

SEQ ID NO: 1451230 - DNA, 15 bp, Homo sapiens
ccagccaaccccaat

SEQ ID NO: 1451231 - DNA, 15 bp, Homo sapiens
cccagccaaccccaa

SEQ ID NO: 1451232 - DNA, 15 bp, Homo sapiens
gcccagccaacccca

SEQ ID NO: 1451233 - DNA, 15 bp, Homo sapiens
agcccagccaacccc

SEQ ID NO: 1451234 - DNA, 15 bp, Homo sapiens
tagcccagccaaccc

SEQ ID NO: 1451235 - DNA, 15 bp, Homo sapiens
ctagcccagccaacc

SEQ ID NO: 1451236 - DNA, 15 bp, Homo sapiens
tctagcccagccaac

SEQ ID NO: 1451237 - DNA, 15 bp, Homo sapiens
atctagcccagccaa

SEQ ID NO: 1451238 - DNA, 15 bp, Homo sapiens
tatctagcccagcca

SEQ ID NO: 1451239 - DNA, 15 bp, Homo sapiens
ctatctagcccagcc

SEQ ID NO: 1451240 - DNA, 15 bp, Homo sapiens
tctatctagcccagc

SEQ ID NO: 1451241 - DNA, 15 bp, Homo sapiens
ctctatctagcccag

SEQ ID NO: 1451242 - DNA, 15 bp, Homo sapiens
tctctatctagccca

SEQ ID NO: 1451243 - DNA, 15 bp, Homo sapiens
atctctatctagccc

SEQ ID NO: 1451244 - DNA, 15 bp, Homo sapiens
gatctctatctagcc

SEQ ID NO: 1451245 - DNA, 15 bp, Homo sapiens
cgatctctatctagc

SEQ ID NO: 1451246 - DNA, 15 bp, Homo sapiens
tcgatctctatctag

SEQ ID NO: 1451247 - DNA, 15 bp, Homo sapiens
atcgatctctatcta

SEQ ID NO: 1451248 - DNA, 15 bp, Homo sapiens
aatcgatctctatct

SEQ ID NO: 1451249 - DNA, 15 bp, Homo sapiens
taatcgatctctatc

SEQ ID NO: 1451250 - DNA, 15 bp, Homo sapiens
ttaatcgatctctat

SEQ ID NO: 1451251 - DNA, 15 bp, Homo sapiens
tttaatcgatctcta

SEQ ID NO: 1451252 - DNA, 15 bp, Homo sapiens
ttttaatcgatctct

SEQ ID NO: 1451253 - DNA, 15 bp, Homo sapiens
cttttaatcgatctc

SEQ ID NO: 1451254 - DNA, 15 bp, Homo sapiens
tcttttaatcgatct

SEQ ID NO: 1451255 - DNA, 15 bp, Homo sapiens
atcttttaatcgatc

SEQ ID NO: 1451256 - DNA, 15 bp, Homo sapiens
catcttttaatcgat

SEQ ID NO: 1451257 - DNA, 15 bp, Homo sapiens
tcatcttttaatcga

SEQ ID NO: 1451258 - DNA, 15 bp, Homo sapiens
ttcatcttttaatcg

SEQ ID NO: 1451259 - DNA, 15 bp, Homo sapiens
cttcatcttttaatc

SEQ ID NO: 1451260 - DNA, 15 bp, Homo sapiens
gcttcatcttttaat

SEQ ID NO: 1451261 - DNA, 15 bp, Homo sapiens
tgcttcatcttttaa

SEQ ID NO: 1451262 - DNA, 15 bp, Homo sapiens
ctgcttcatctttta

SEQ ID NO: 1451263 - DNA, 15 bp, Homo sapiens
cctgcttcatctttt

SEQ ID NO: 1451264 - DNA, 15 bp, Homo sapiens
tcctgcttcatcttt

SEQ ID NO: 1451265 - DNA, 15 bp, Homo sapiens
ttcctgcttcatctt

SEQ ID NO: 1451266 - DNA, 15 bp, Homo sapiens
cttcctgcttcatct

SEQ ID NO: 1451267 - DNA, 15 bp, Homo sapiens
tcttcctgcttcatc

SEQ ID NO: 1451268 - DNA, 15 bp, Homo sapiens
ttcttcctgcttcat

SEQ ID NO: 1451269 - DNA, 15 bp, Homo sapiens
cttcttcctgcttca

SEQ ID NO: 1451270 - DNA, 15 bp, Homo sapiens
tcttcttcctgcttc

SEQ ID NO: 1451271 - DNA, 15 bp, Homo sapiens
ttcttcttcctgctt

SEQ ID NO: 1451272 - DNA, 15 bp, Homo sapiens
gttcttcttcctgct

SEQ ID NO: 1451273 - DNA, 15 bp, Homo sapiens
tgttcttcttcctgc

SEQ ID NO: 1451274 - DNA, 15 bp, Homo sapiens
ctgttcttcttcctg

SEQ ID NO: 1451275 - DNA, 15 bp, Homo sapiens
actgttcttcttcct

SEQ ID NO: 1451276 - DNA, 15 bp, Homo sapiens
tactgttcttcttcc

SEQ ID NO: 1451277 - DNA, 15 bp, Homo sapiens
ttactgttcttcttc

SEQ ID NO: 1451278 - DNA, 15 bp, Homo sapiens
attactgttcttctt

SEQ ID NO: 1451279 - DNA, 15 bp, Homo sapiens
cattactgttcttct

SEQ ID NO: 1451280 - DNA, 15 bp, Homo sapiens
tcattactgttcttc

SEQ ID NO: 1451281 - DNA, 15 bp, Homo sapiens
gtcattactgttctt

SEQ ID NO: 1451282 - DNA, 15 bp, Homo sapiens
tgtcattactgttct

SEQ ID NO: 1451283 - DNA, 15 bp, Homo sapiens
ctgtcattactgttc

SEQ ID NO: 1451284 - DNA, 15 bp, Homo sapiens
tctgtcattactgtt

SEQ ID NO: 1451285 - DNA, 15 bp, Homo sapiens
ttctgtcattactgt

SEQ ID NO: 1451286 - DNA, 15 bp, Homo sapiens
attctgtcattactg

SEQ ID NO: 1451287 - DNA, 15 bp, Homo sapiens
cattctgtcattact

SEQ ID NO: 1451288 - DNA, 15 bp, Homo sapiens
tcattctgtcattac

SEQ ID NO: 1451289 - DNA, 15 bp, Homo sapiens
ctcattctgtcatta

SEQ ID NO: 1451290 - DNA, 15 bp, Homo sapiens
actcattctgtcatt

SEQ ID NO: 1451291 - DNA, 15 bp, Homo sapiens
tactcattctgtcat

SEQ ID NO: 1451292 - DNA, 15 bp, Homo sapiens
ctactcattctgtca

SEQ ID NO: 1451293 - DNA, 15 bp, Homo sapiens
actactcattctgtc

SEQ ID NO: 1451294 - DNA, 15 bp, Homo sapiens
tactactcattctgt

SEQ ID NO: 1451295 - DNA, 15 bp, Homo sapiens
ttactactcattctg

SEQ ID NO: 1451296 - DNA, 15 bp, Homo sapiens
tttactactcattct

SEQ ID NO: 1451297 - DNA, 15 bp, Homo sapiens
atttactactcattc

SEQ ID NO: 1451298 - DNA, 15 bp, Homo sapiens
tatttactactcatt

SEQ ID NO: 1451299 - DNA, 15 bp, Homo sapiens
atatttactactcat

SEQ ID NO: 1451300 - DNA, 15 bp, Homo sapiens
catatttactactca

SEQ ID NO: 1451301 - DNA, 15 bp, Homo sapiens
tcatatttactactc

SEQ ID NO: 1451302 - DNA, 15 bp, Homo sapiens
atcatatttactact

SEQ ID NO: 1451303 - DNA, 15 bp, Homo sapiens
gatcatatttactac

SEQ ID NO: 1451304 - DNA, 15 bp, Homo sapiens
tgatcatatttacta

SEQ ID NO: 1451305 - DNA, 15 bp, Homo sapiens
atgatcatatttact

SEQ ID NO: 1451306 - DNA, 15 bp, Homo sapiens
aatgatcatatttac

SEQ ID NO: 1451307 - DNA, 15 bp, Homo sapiens
gaatgatcatattta

SEQ ID NO: 1451308 - DNA, 15 bp, Homo sapiens
tgaatgatcatattt

SEQ ID NO: 1451309 - DNA, 15 bp, Homo sapiens
atgaatgatcatatt

SEQ ID NO: 1451310 - DNA, 15 bp, Homo sapiens
aatgaatgatcatat

SEQ ID NO: 1451311 - DNA, 15 bp, Homo sapiens
gaatgaatgatcata

SEQ ID NO: 1451312 - DNA, 15 bp, Homo sapiens
agaatgaatgatcat

SEQ ID NO: 1451313 - DNA, 15 bp, Homo sapiens
aagaatgaatgatca

SEQ ID NO: 1451314 - DNA, 15 bp, Homo sapiens
caagaatgaatgatc

SEQ ID NO: 1451315 - DNA, 15 bp, Homo sapiens
ccaagaatgaatgat

SEQ ID NO: 1451316 - DNA, 15 bp, Homo sapiens
tccaagaatgaatga

SEQ ID NO: 1451317 - DNA, 15 bp, Homo sapiens
ttccaagaatgaatg

SEQ ID NO: 1451318 - DNA, 15 bp, Homo sapiens
tttccaagaatgaat

SEQ ID NO: 1451319 - DNA, 15 bp, Homo sapiens
atttccaagaatgaa

SEQ ID NO: 1451320 - DNA, 15 bp, Homo sapiens
aatttccaagaatga

SEQ ID NO: 1451321 - DNA, 15 bp, Homo sapiens
taatttccaagaatg

SEQ ID NO: 1451322 - DNA, 15 bp, Homo sapiens
ataatttccaagaat

SEQ ID NO: 1451323 - DNA, 15 bp, Homo sapiens
gataatttccaagaa

SEQ ID NO: 1451324 - DNA, 15 bp, Homo sapiens
agataatttccaaga

SEQ ID NO: 1451325 - DNA, 15 bp, Homo sapiens
cagataatttccaag

SEQ ID NO: 1451326 - DNA, 15 bp, Homo sapiens
tcagataatttccaa

SEQ ID NO: 1451327 - DNA, 15 bp, Homo sapiens
ttcagataatttcca

SEQ ID NO: 1451328 - DNA, 15 bp, Homo sapiens
tttcagataatttcc

SEQ ID NO: 1451329 - DNA, 15 bp, Homo sapiens
ttttcagataatttc

SEQ ID NO: 1451330 - DNA, 15 bp, Homo sapiens
attttcagataattt

SEQ ID NO: 1451331 - DNA, 15 bp, Homo sapiens
tattttcagataatt

SEQ ID NO: 1451332 - DNA, 15 bp, Homo sapiens
ctattttcagataat

SEQ ID NO: 1451333 - DNA, 15 bp, Homo sapiens
actattttcagataa

SEQ ID NO: 1451334 - DNA, 15 bp, Homo sapiens
aactattttcagata

SEQ ID NO: 1451335 - DNA, 15 bp, Homo sapiens
caactattttcagat

SEQ ID NO: 1451336 - DNA, 15 bp, Homo sapiens
ccaactattttcaga

SEQ ID NO: 1451337 - DNA, 15 bp, Homo sapiens
gccaactattttcag

SEQ ID NO: 1451338 - DNA, 15 bp, Homo sapiens
tgccaactattttca

SEQ ID NO: 1451339 - DNA, 15 bp, Homo sapiens
gtgccaactattttc

SEQ ID NO: 1451340 - DNA, 15 bp, Homo sapiens
tgtgccaactatttt

SEQ ID NO: 1451341 - DNA, 15 bp, Homo sapiens
ctgtgccaactattt

SEQ ID NO: 1451342 - DNA, 15 bp, Homo sapiens
actgtgccaactatt

SEQ ID NO: 1451343 - DNA, 15 bp, Homo sapiens
gactgtgccaactat

SEQ ID NO: 1451344 - DNA, 15 bp, Homo sapiens
agactgtgccaacta

SEQ ID NO: 1451345 - DNA, 15 bp, Homo sapiens
cagactgtgccaact

SEQ ID NO: 1451346 - DNA, 15 bp, Homo sapiens
acagactgtgccaac

SEQ ID NO: 1451347 - DNA, 15 bp, Homo sapiens
tacagactgtgccaa

SEQ ID NO: 1451348 - DNA, 15 bp, Homo sapiens
ttacagactgtgcca

SEQ ID NO: 1451349 - DNA, 15 bp, Homo sapiens
tttacagactgtgcc

SEQ ID NO: 1451350 - DNA, 15 bp, Homo sapiens
ttttacagactgtgc

SEQ ID NO: 1451351 - DNA, 15 bp, Homo sapiens
tttttacagactgtg

SEQ ID NO: 1451352 - DNA, 15 bp, Homo sapiens
gtttttacagactgt

SEQ ID NO: 1451353 - DNA, 15 bp, Homo sapiens
tgtttttacagactg

SEQ ID NO: 1451354 - DNA, 15 bp, Homo sapiens
gtgtttttacagact

SEQ ID NO: 1451355 - DNA, 15 bp, Homo sapiens
tgtgtttttacagac

SEQ ID NO: 1451356 - DNA, 15 bp, Homo sapiens
ttgtgtttttacaga

SEQ ID NO: 1451357 - DNA, 15 bp, Homo sapiens
cttgtgtttttacag

SEQ ID NO: 1451358 - DNA, 15 bp, Homo sapiens
gcttgtgtttttaca

SEQ ID NO: 1451359 - DNA, 15 bp, Homo sapiens
tgcttgtgtttttac

SEQ ID NO: 1451360 - DNA, 15 bp, Homo sapiens
ttgcttgtgttttta

SEQ ID NO: 1451361 - DNA, 15 bp, Homo sapiens
tttgcttgtgttttt

SEQ ID NO: 1451362 - DNA, 15 bp, Homo sapiens
atttgcttgtgtttt

SEQ ID NO: 1451363 - DNA, 15 bp, Homo sapiens
tatttgcttgtgttt

SEQ ID NO: 1451364 - DNA, 15 bp, Homo sapiens
gtatttgcttgtgtt

SEQ ID NO: 1451365 - DNA, 15 bp, Homo sapiens
tgtatttgcttgtgt

SEQ ID NO: 1451366 - DNA, 15 bp, Homo sapiens
gtgtatttgcttgtg

SEQ ID NO: 1451367 - DNA, 15 bp, Homo sapiens
tgtgtatttgcttgt

SEQ ID NO: 1451368 - DNA, 15 bp, Homo sapiens
atgtgtatttgcttg

SEQ ID NO: 1451369 - DNA, 15 bp, Homo sapiens
catgtgtatttgctt

SEQ ID NO: 1451370 - DNA, 15 bp, Homo sapiens
gcatgtgtatttgct

SEQ ID NO: 1451371 - DNA, 15 bp, Homo sapiens
ggcatgtgtatttgc

SEQ ID NO: 1451372 - DNA, 15 bp, Homo sapiens
aggcatgtgtatttg

SEQ ID NO: 1451373 - DNA, 15 bp, Homo sapiens
caggcatgtgtattt

SEQ ID NO: 1451374 - DNA, 15 bp, Homo sapiens
acaggcatgtgtatt

SEQ ID NO: 1451375 - DNA, 15 bp, Homo sapiens
aacaggcatgtgtat

SEQ ID NO: 1451376 - DNA, 15 bp, Homo sapiens
aaacaggcatgtgta

SEQ ID NO: 1451377 - DNA, 15 bp, Homo sapiens
taaacaggcatgtgt

SEQ ID NO: 1451378 - DNA, 15 bp, Homo sapiens
ataaacaggcatgtg

SEQ ID NO: 1451379 - DNA, 15 bp, Homo sapiens
cataaacaggcatgt

SEQ ID NO: 1451380 - DNA, 15 bp, Homo sapiens
gcataaacaggcatg

SEQ ID NO: 1451381 - DNA, 15 bp, Homo sapiens
tgcataaacaggcat

SEQ ID NO: 1451382 - DNA, 15 bp, Homo sapiens
ttgcataaacaggca

SEQ ID NO: 1451383 - DNA, 15 bp, Homo sapiens
tttgcataaacaggc

SEQ ID NO: 1451384 - DNA, 15 bp, Homo sapiens
atttgcataaacagg

SEQ ID NO: 1451385 - DNA, 15 bp, Homo sapiens
tatttgcataaacag

SEQ ID NO: 1451386 - DNA, 15 bp, Homo sapiens
gtatttgcataaaca

SEQ ID NO: 1451387 - DNA, 15 bp, Homo sapiens
tgtatttgcataaac

SEQ ID NO: 1451388 - DNA, 15 bp, Homo sapiens
atgtatttgcataaa

SEQ ID NO: 1451389 - DNA, 15 bp, Homo sapiens
gatgtatttgcataa

SEQ ID NO: 1451390 - DNA, 15 bp, Homo sapiens
ggatgtatttgcata

SEQ ID NO: 1451391 - DNA, 15 bp, Homo sapiens
tggatgtatttgcat

SEQ ID NO: 1451392 - DNA, 15 bp, Homo sapiens
atggatgtatttgca

SEQ ID NO: 1451393 - DNA, 15 bp, Homo sapiens
catggatgtatttgc

SEQ ID NO: 1451394 - DNA, 15 bp, Homo sapiens
tcatggatgtatttg

SEQ ID NO: 1451395 - DNA, 15 bp, Homo sapiens
atcatggatgtattt

SEQ ID NO: 1451396 - DNA, 15 bp, Homo sapiens
tatcatggatgtatt

SEQ ID NO: 1451397 - DNA, 15 bp, Homo sapiens
atatcatggatgtat

SEQ ID NO: 1451398 - DNA, 15 bp, Homo sapiens
aatatcatggatgta

SEQ ID NO: 1451399 - DNA, 15 bp, Homo sapiens
aaatatcatggatgt

SEQ ID NO: 1451400 - DNA, 15 bp, Homo sapiens
caaatatcatggatg

SEQ ID NO: 1451401 - DNA, 15 bp, Homo sapiens
gcaaatatcatggat

SEQ ID NO: 1451402 - DNA, 15 bp, Homo sapiens
tgcaaatatcatgga

SEQ ID NO: 1451403 - DNA, 15 bp, Homo sapiens
ttgcaaatatcatgg

SEQ ID NO: 1451404 - DNA, 15 bp, Homo sapiens
attgcaaatatcatg

SEQ ID NO: 1451405 - DNA, 15 bp, Homo sapiens
aattgcaaatatcat

SEQ ID NO: 1451406 - DNA, 15 bp, Homo sapiens
aaattgcaaatatca

SEQ ID NO: 1451407 - DNA, 15 bp, Homo sapiens
gaaattgcaaatatc

SEQ ID NO: 1451408 - DNA, 15 bp, Homo sapiens
tgaaattgcaaatat

SEQ ID NO: 1451409 - DNA, 15 bp, Homo sapiens
ttgaaattgcaaata

SEQ ID NO: 1451410 - DNA, 15 bp, Homo sapiens
tttgaaattgcaaat

SEQ ID NO: 1451411 - DNA, 15 bp, Homo sapiens
gtttgaaattgcaaa

SEQ ID NO: 1451412 - DNA, 15 bp, Homo sapiens
tgtttgaaattgcaa

SEQ ID NO: 1451413 - DNA, 15 bp, Homo sapiens
ttgtttgaaattgca

SEQ ID NO: 1451414 - DNA, 15 bp, Homo sapiens
tttgtttgaaattgc

SEQ ID NO: 1451415 - DNA, 15 bp, Homo sapiens
atttgtttgaaattg

SEQ ID NO: 1451416 - DNA, 15 bp, Homo sapiens
tatttgtttgaaatt

SEQ ID NO: 1451417 - DNA, 15 bp, Homo sapiens
atatttgtttgaaat

SEQ ID NO: 1451418 - DNA, 15 bp, Homo sapiens
tatatttgtttgaaa

SEQ ID NO: 1451419 - DNA, 15 bp, Homo sapiens
atatatttgtttgaa

SEQ ID NO: 1451420 - DNA, 15 bp, Homo sapiens
catatatttgtttga

SEQ ID NO: 1451421 - DNA, 15 bp, Homo sapiens
acatatatttgtttg

SEQ ID NO: 1451422 - DNA, 15 bp, Homo sapiens
cacatatatttgttt

SEQ ID NO: 1451423 - DNA, 15 bp, Homo sapiens
ccacatatatttgtt

SEQ ID NO: 1451424 - DNA, 15 bp, Homo sapiens
gccacatatatttgt

SEQ ID NO: 1451425 - DNA, 15 bp, Homo sapiens
ggccacatatatttg

SEQ ID NO: 1451426 - DNA, 15 bp, Homo sapiens
aggccacatatattt

SEQ ID NO: 1451427 - DNA, 15 bp, Homo sapiens
aaggccacatatatt

SEQ ID NO: 1451428 - DNA, 15 bp, Homo sapiens
aaaggccacatatat

SEQ ID NO: 1451429 - DNA, 15 bp, Homo sapiens
caaaggccacatata

SEQ ID NO: 1451430 - DNA, 15 bp, Homo sapiens
ccaaaggccacatat

SEQ ID NO: 1451431 - DNA, 15 bp, Homo sapiens
tccaaaggccacata

SEQ ID NO: 1451432 - DNA, 15 bp, Homo sapiens
ttccaaaggccacat

SEQ ID NO: 1451433 - DNA, 15 bp, Homo sapiens
tttccaaaggccaca

SEQ ID NO: 1451434 - DNA, 15 bp, Homo sapiens
ttttccaaaggccac

SEQ ID NO: 1451435 - DNA, 15 bp, Homo sapiens
tttttccaaaggcca

SEQ ID NO: 1451436 - DNA, 15 bp, Homo sapiens
ttttttccaaaggcc

SEQ ID NO: 1451437 - DNA, 15 bp, Homo sapiens
gttttttccaaaggc

SEQ ID NO: 1451438 - DNA, 15 bp, Homo sapiens
ggttttttccaaagg

SEQ ID NO: 1451439 - DNA, 15 bp, Homo sapiens
aggttttttccaaag

SEQ ID NO: 1451440 - DNA, 15 bp, Homo sapiens
gaggttttttccaaa

SEQ ID NO: 1451441 - DNA, 15 bp, Homo sapiens
ggaggttttttccaa

SEQ ID NO: 1451442 - DNA, 15 bp, Homo sapiens
tggaggttttttcca

SEQ ID NO: 1451443 - DNA, 15 bp, Homo sapiens
atggaggttttttcc

SEQ ID NO: 1451444 - DNA, 15 bp, Homo sapiens
catggaggttttttc

SEQ ID NO: 1451445 - DNA, 15 bp, Homo sapiens
tcatggaggtttttt

SEQ ID NO: 1451446 - DNA, 15 bp, Homo sapiens
ttcatggaggttttt

SEQ ID NO: 1451447 - DNA, 15 bp, Homo sapiens
tttcatggaggtttt

SEQ ID NO: 1451448 - DNA, 15 bp, Homo sapiens
atttcatggaggttt

SEQ ID NO: 1451449 - DNA, 15 bp, Homo sapiens
gatttcatggaggtt

SEQ ID NO: 1451450 - DNA, 15 bp, Homo sapiens
agatttcatggaggt

SEQ ID NO: 1451451 - DNA, 15 bp, Homo sapiens
tagatttcatggagg

SEQ ID NO: 1451452 - DNA, 15 bp, Homo sapiens
ttagatttcatggag

SEQ ID NO: 1451453 - DNA, 15 bp, Homo sapiens
cttagatttcatgga

SEQ ID NO: 1451454 - DNA, 15 bp, Homo sapiens
tcttagatttcatgg

SEQ ID NO: 1451455 - DNA, 15 bp, Homo sapiens
atcttagatttcatg

SEQ ID NO: 1451456 - DNA, 15 bp, Homo sapiens
gatcttagatttcat

SEQ ID NO: 1451457 - DNA, 15 bp, Homo sapiens
agatcttagatttca

SEQ ID NO: 1451458 - DNA, 15 bp, Homo sapiens
aagatcttagatttc

SEQ ID NO: 1451459 - DNA, 15 bp, Homo sapiens
caagatcttagattt

SEQ ID NO: 1451460 - DNA, 15 bp, Homo sapiens
acaagatcttagatt

SEQ ID NO: 1451461 - DNA, 15 bp, Homo sapiens
aacaagatcttagat

SEQ ID NO: 1451462 - DNA, 15 bp, Homo sapiens
gaacaagatcttaga

SEQ ID NO: 1451463 - DNA, 15 bp, Homo sapiens
ggaacaagatcttag

SEQ ID NO: 1451464 - DNA, 15 bp, Homo sapiens
gggaacaagatctta

SEQ ID NO: 1451465 - DNA, 15 bp, Homo sapiens
agggaacaagatctt

SEQ ID NO: 1451466 - DNA, 15 bp, Homo sapiens
cagggaacaagatct

SEQ ID NO: 1451467 - DNA, 15 bp, Homo sapiens
gcagggaacaagatc

SEQ ID NO: 1451468 - DNA, 15 bp, Homo sapiens
ggcagggaacaagat

SEQ ID NO: 1451469 - DNA, 15 bp, Homo sapiens
gggcagggaacaaga

SEQ ID NO: 1451470 - DNA, 15 bp, Homo sapiens
cgggcagggaacaag

SEQ ID NO: 1451471 - DNA, 15 bp, Homo sapiens
gcgggcagggaacaa

SEQ ID NO: 1451472 - DNA, 15 bp, Homo sapiens
agcgggcagggaaca

SEQ ID NO: 1451473 - DNA, 15 bp, Homo sapiens
tagcgggcagggaac

SEQ ID NO: 1451474 - DNA, 15 bp, Homo sapiens
gtagcgggcagggaa

SEQ ID NO: 1451475 - DNA, 15 bp, Homo sapiens
ggtagcgggcaggga

SEQ ID NO: 1451476 - DNA, 15 bp, Homo sapiens
aggtagcgggcaggg

SEQ ID NO: 1451477 - DNA, 15 bp, Homo sapiens
aaggtagcgggcagg

SEQ ID NO: 1451478 - DNA, 15 bp, Homo sapiens
taaggtagcgggcag

SEQ ID NO: 1451479 - DNA, 15 bp, Homo sapiens
ttaaggtagcgggca

SEQ ID NO: 1451480 - DNA, 15 bp, Homo sapiens
attaaggtagcgggc

SEQ ID NO: 1451481 - DNA, 15 bp, Homo sapiens
aattaaggtagcggg

SEQ ID NO: 1451482 - DNA, 15 bp, Homo sapiens
aaattaaggtagcgg

SEQ ID NO: 1451483 - DNA, 15 bp, Homo sapiens
caaattaaggtagcg

SEQ ID NO: 1451484 - DNA, 15 bp, Homo sapiens
gcaaattaaggtagc

SEQ ID NO: 1451485 - DNA, 15 bp, Homo sapiens
agcaaattaaggtag

SEQ ID NO: 1451486 - DNA, 15 bp, Homo sapiens
aagcaaattaaggta

SEQ ID NO: 1451487 - DNA, 15 bp, Homo sapiens
taagcaaattaaggt

SEQ ID NO: 1451488 - DNA, 15 bp, Homo sapiens
ttaagcaaattaagg

SEQ ID NO: 1451489 - DNA, 15 bp, Homo sapiens
gttaagcaaattaag

SEQ ID NO: 1451490 - DNA, 15 bp, Homo sapiens
agttaagcaaattaa

SEQ ID NO: 1451491 - DNA, 15 bp, Homo sapiens
cagttaagcaaatta

SEQ ID NO: 1451492 - DNA, 15 bp, Homo sapiens
tcagttaagcaaatt

SEQ ID NO: 1451493 - DNA, 15 bp, Homo sapiens
gtcagttaagcaaat

SEQ ID NO: 1451494 - DNA, 15 bp, Homo sapiens
tgtcagttaagcaaa

SEQ ID NO: 1451495 - DNA, 15 bp, Homo sapiens
gtgtcagttaagcaa

SEQ ID NO: 1451496 - DNA, 15 bp, Homo sapiens
agtgtcagttaagca

SEQ ID NO: 1451497 - DNA, 15 bp, Homo sapiens
gagtgtcagttaagc

SEQ ID NO: 1451498 - DNA, 15 bp, Homo sapiens
agagtgtcagttaag

SEQ ID NO: 1451499 - DNA, 15 bp, Homo sapiens
tagagtgtcagttaa

SEQ ID NO: 1451500 - DNA, 15 bp, Homo sapiens
atagagtgtcagtta

SEQ ID NO: 1451501 - DNA, 15 bp, Homo sapiens
catagagtgtcagtt

SEQ ID NO: 1451502 - DNA, 15 bp, Homo sapiens
ccatagagtgtcagt

SEQ ID NO: 1451503 - DNA, 15 bp, Homo sapiens
gccatagagtgtcag

SEQ ID NO: 1451504 - DNA, 15 bp, Homo sapiens
tgccatagagtgtca

SEQ ID NO: 1451505 - DNA, 15 bp, Homo sapiens
gtgccatagagtgtc

SEQ ID NO: 1451506 - DNA, 15 bp, Homo sapiens
agtgccatagagtgt

SEQ ID NO: 1451507 - DNA, 15 bp, Homo sapiens
cagtgccatagagtg

SEQ ID NO: 1451508 - DNA, 15 bp, Homo sapiens
ccagtgccatagagt

SEQ ID NO: 1451509 - DNA, 15 bp, Homo sapiens
tccagtgccatagag

SEQ ID NO: 1451510 - DNA, 15 bp, Homo sapiens
atccagtgccataga

SEQ ID NO: 1451511 - DNA, 15 bp, Homo sapiens
aatccagtgccatag

SEQ ID NO: 1451512 - DNA, 15 bp, Homo sapiens
aaatccagtgccata

SEQ ID NO: 1451513 - DNA, 15 bp, Homo sapiens
aaaatccagtgccat

SEQ ID NO: 1451514 - DNA, 15 bp, Homo sapiens
gaaaatccagtgcca

SEQ ID NO: 1451515 - DNA, 15 bp, Homo sapiens
tgaaaatccagtgcc

SEQ ID NO: 1451516 - DNA, 15 bp, Homo sapiens
gtgaaaatccagtgc

SEQ ID NO: 1451517 - DNA, 15 bp, Homo sapiens
agtgaaaatccagtg

SEQ ID NO: 1451518 - DNA, 15 bp, Homo sapiens
aagtgaaaatccagt

SEQ ID NO: 1451519 - DNA, 15 bp, Homo sapiens
aaagtgaaaatccag

SEQ ID NO: 1451520 - DNA, 15 bp, Homo sapiens
gaaagtgaaaatcca

SEQ ID NO: 1451521 - DNA, 15 bp, Homo sapiens
agaaagtgaaaatcc

SEQ ID NO: 1451522 - DNA, 15 bp, Homo sapiens
aagaaagtgaaaatc

SEQ ID NO: 1451523 - DNA, 15 bp, Homo sapiens
gaagaaagtgaaaat

SEQ ID NO: 1451524 - DNA, 15 bp, Homo sapiens
agaagaaagtgaaaa

SEQ ID NO: 1451525 - DNA, 15 bp, Homo sapiens
aagaagaaagtgaaa

SEQ ID NO: 1451526 - DNA, 15 bp, Homo sapiens
aaagaagaaagtgaa

SEQ ID NO: 1451527 - DNA, 15 bp, Homo sapiens
caaagaagaaagtga

SEQ ID NO: 1451528 - DNA, 15 bp, Homo sapiens
tcaaagaagaaagtg

SEQ ID NO: 1451529 - DNA, 15 bp, Homo sapiens
ttcaaagaagaaagt

SEQ ID NO: 1451530 - DNA, 15 bp, Homo sapiens
cttcaaagaagaaag

SEQ ID NO: 1451531 - DNA, 15 bp, Homo sapiens
acttcaaagaagaaa

SEQ ID NO: 1451532 - DNA, 15 bp, Homo sapiens
gacttcaaagaagaa

SEQ ID NO: 1451533 - DNA, 15 bp, Homo sapiens
agacttcaaagaaga

SEQ ID NO: 1451534 - DNA, 15 bp, Homo sapiens
aagacttcaaagaag

SEQ ID NO: 1451535 - DNA, 15 bp, Homo sapiens
aaagacttcaaagaa

SEQ ID NO: 1451536 - DNA, 15 bp, Homo sapiens
aaaagacttcaaaga

SEQ ID NO: 1451537 - DNA, 15 bp, Homo sapiens
gaaaagacttcaaag

SEQ ID NO: 1451538 - DNA, 15 bp, Homo sapiens
agaaaagacttcaaa

SEQ ID NO: 1451539 - DNA, 15 bp, Homo sapiens
aagaaaagacttcaa

SEQ ID NO: 1451540 - DNA, 15 bp, Homo sapiens
taagaaaagacttca

SEQ ID NO: 1451541 - DNA, 15 bp, Homo sapiens
ataagaaaagacttc

SEQ ID NO: 1451542 - DNA, 15 bp, Homo sapiens
aataagaaaagactt

SEQ ID NO: 1451543 - DNA, 15 bp, Homo sapiens
gaataagaaaagact

SEQ ID NO: 1451544 - DNA, 15 bp, Homo sapiens
ggaataagaaaagac

SEQ ID NO: 1451545 - DNA, 15 bp, Homo sapiens
tggaataagaaaaga

SEQ ID NO: 1451546 - DNA, 15 bp, Homo sapiens
gtggaataagaaaag

SEQ ID NO: 1451547 - DNA, 15 bp, Homo sapiens
agtggaataagaaaa

SEQ ID NO: 1451548 - DNA, 15 bp, Homo sapiens
tagtggaataagaaa

SEQ ID NO: 1451549 - DNA, 15 bp, Homo sapiens
ttagtggaataagaa

SEQ ID NO: 1451550 - DNA, 15 bp, Homo sapiens
gttagtggaataaga

SEQ ID NO: 1451551 - DNA, 15 bp, Homo sapiens
tgttagtggaataag

SEQ ID NO: 1451552 - DNA, 15 bp, Homo sapiens
atgttagtggaataa

SEQ ID NO: 1451553 - DNA, 15 bp, Homo sapiens
aatgttagtggaata

SEQ ID NO: 1451554 - DNA, 15 bp, Homo sapiens
aaatgttagtggaat

SEQ ID NO: 1451555 - DNA, 15 bp, Homo sapiens
taaatgttagtggaa

SEQ ID NO: 1451556 - DNA, 15 bp, Homo sapiens
gtaaatgttagtgga

SEQ ID NO: 1451557 - DNA, 15 bp, Homo sapiens
agtaaatgttagtgg

SEQ ID NO: 1451558 - DNA, 15 bp, Homo sapiens
cagtaaatgttagtg

SEQ ID NO: 1451559 - DNA, 15 bp, Homo sapiens
tcagtaaatgttagt

SEQ ID NO: 1451560 - DNA, 15 bp, Homo sapiens
ctcagtaaatgttag

SEQ ID NO: 1451561 - DNA, 15 bp, Homo sapiens
gctcagtaaatgtta

SEQ ID NO: 1451562 - DNA, 15 bp, Homo sapiens
agctcagtaaatgtt

SEQ ID NO: 1451563 - DNA, 15 bp, Homo sapiens
gagctcagtaaatgt

SEQ ID NO: 1451564 - DNA, 15 bp, Homo sapiens
agagctcagtaaatg

SEQ ID NO: 1451565 - DNA, 15 bp, Homo sapiens
gagagctcagtaaat

SEQ ID NO: 1451566 - DNA, 15 bp, Homo sapiens
tgagagctcagtaaa

SEQ ID NO: 1451567 - DNA, 15 bp, Homo sapiens
gtgagagctcagtaa

SEQ ID NO: 1451568 - DNA, 15 bp, Homo sapiens
agtgagagctcagta

SEQ ID NO: 1451569 - DNA, 15 bp, Homo sapiens
aagtgagagctcagt

SEQ ID NO: 1451570 - DNA, 15 bp, Homo sapiens
aaagtgagagctcag

SEQ ID NO: 1451571 - DNA, 15 bp, Homo sapiens
caaagtgagagctca

SEQ ID NO: 1451572 - DNA, 15 bp, Homo sapiens
tcaaagtgagagctc

SEQ ID NO: 1451573 - DNA, 15 bp, Homo sapiens
ctcaaagtgagagct

SEQ ID NO: 1451574 - DNA, 15 bp, Homo sapiens
gctcaaagtgagagc

SEQ ID NO: 1451575 - DNA, 15 bp, Homo sapiens
agctcaaagtgagag

SEQ ID NO: 1451576 - DNA, 15 bp, Homo sapiens
aagctcaaagtgaga

SEQ ID NO: 1451577 - DNA, 15 bp, Homo sapiens
taagctcaaagtgag

SEQ ID NO: 1451578 - DNA, 15 bp, Homo sapiens
ctaagctcaaagtga

SEQ ID NO: 1451579 - DNA, 15 bp, Homo sapiens
gctaagctcaaagtg

SEQ ID NO: 1451580 - DNA, 15 bp, Homo sapiens
tgctaagctcaaagt

SEQ ID NO: 1451581 - DNA, 15 bp, Homo sapiens
ctgctaagctcaaag

SEQ ID NO: 1451582 - DNA, 15 bp, Homo sapiens
cctgctaagctcaaa

SEQ ID NO: 1451583 - DNA, 15 bp, Homo sapiens
ccctgctaagctcaa

SEQ ID NO: 1451584 - DNA, 15 bp, Homo sapiens
accctgctaagctca

SEQ ID NO: 1451585 - DNA, 15 bp, Homo sapiens
caccctgctaagctc

SEQ ID NO: 1451586 - DNA, 15 bp, Homo sapiens
acaccctgctaagct

SEQ ID NO: 1451587 - DNA, 15 bp, Homo sapiens
cacaccctgctaagc

SEQ ID NO: 1451588 - DNA, 15 bp, Homo sapiens
tcacaccctgctaag

SEQ ID NO: 1451589 - DNA, 15 bp, Homo sapiens
atcacaccctgctaa

SEQ ID NO: 1451590 - DNA, 15 bp, Homo sapiens
catcacaccctgcta

SEQ ID NO: 1451591 - DNA, 15 bp, Homo sapiens
gcatcacaccctgct

SEQ ID NO: 1451592 - DNA, 15 bp, Homo sapiens
agcatcacaccctgc

SEQ ID NO: 1451593 - DNA, 15 bp, Homo sapiens
gagcatcacaccctg

SEQ ID NO: 1451594 - DNA, 15 bp, Homo sapiens
agagcatcacaccct

SEQ ID NO: 1451595 - DNA, 15 bp, Homo sapiens
aagagcatcacaccc

SEQ ID NO: 1451596 - DNA, 15 bp, Homo sapiens
gaagagcatcacacc

SEQ ID NO: 1451597 - DNA, 15 bp, Homo sapiens
agaagagcatcacac

SEQ ID NO: 1451598 - DNA, 15 bp, Homo sapiens
tagaagagcatcaca

SEQ ID NO: 1451599 - DNA, 15 bp, Homo sapiens
ctagaagagcatcac

SEQ ID NO: 1451600 - DNA, 15 bp, Homo sapiens
cctagaagagcatca

SEQ ID NO: 1451601 - DNA, 15 bp, Homo sapiens
tcctagaagagcatc

SEQ ID NO: 1451602 - DNA, 15 bp, Homo sapiens
ctcctagaagagcat

SEQ ID NO: 1451603 - DNA, 15 bp, Homo sapiens
gctcctagaagagca

SEQ ID NO: 1451604 - DNA, 15 bp, Homo sapiens
cgctcctagaagagc

SEQ ID NO: 1451605 - DNA, 15 bp, Homo sapiens
ccgctcctagaagag

SEQ ID NO: 1451606 - DNA, 15 bp, Homo sapiens
cccgctcctagaaga

SEQ ID NO: 1451607 - DNA, 15 bp, Homo sapiens
tcccgctcctagaag

SEQ ID NO: 1451608 - DNA, 15 bp, Homo sapiens
ttcccgctcctagaa

SEQ ID NO: 1451609 - DNA, 15 bp, Homo sapiens
attcccgctcctaga

SEQ ID NO: 1451610 - DNA, 15 bp, Homo sapiens
tattcccgctcctag

SEQ ID NO: 1451611 - DNA, 15 bp, Homo sapiens
gtattcccgctccta

SEQ ID NO: 1451612 - DNA, 15 bp, Homo sapiens
agtattcccgctcct

SEQ ID NO: 1451613 - DNA, 15 bp, Homo sapiens
cagtattcccgctcc

SEQ ID NO: 1451614 - DNA, 15 bp, Homo sapiens
ccagtattcccgctc

SEQ ID NO: 1451615 - DNA, 15 bp, Homo sapiens
cccagtattcccgct

SEQ ID NO: 1451616 - DNA, 15 bp, Homo sapiens
tcccagtattcccgc

SEQ ID NO: 1451617 - DNA, 15 bp, Homo sapiens
ttcccagtattcccg

SEQ ID NO: 1451618 - DNA, 15 bp, Homo sapiens
tttcccagtattccc

SEQ ID NO: 1451619 - DNA, 15 bp, Homo sapiens
ttttcccagtattcc

SEQ ID NO: 1451620 - DNA, 15 bp, Homo sapiens
tttttcccagtattc

SEQ ID NO: 1451621 - DNA, 15 bp, Homo sapiens
ttttttcccagtatt

SEQ ID NO: 1451622 - DNA, 15 bp, Homo sapiens
tttttttcccagtat

SEQ ID NO: 1451623 - DNA, 15 bp, Homo sapiens
atttttttcccagta

SEQ ID NO: 1451624 - DNA, 15 bp, Homo sapiens
gatttttttcccagt

SEQ ID NO: 1451625 - DNA, 15 bp, Homo sapiens
ggatttttttcccag

SEQ ID NO: 1451626 - DNA, 15 bp, Homo sapiens
tggatttttttccca

SEQ ID NO: 1451627 - DNA, 15 bp, Homo sapiens
ctggatttttttccc

SEQ ID NO: 1451628 - DNA, 15 bp, Homo sapiens
cctggatttttttcc

SEQ ID NO: 1451629 - DNA, 15 bp, Homo sapiens
acctggatttttttc

SEQ ID NO: 1451630 - DNA, 15 bp, Homo sapiens
aacctggattttttt

SEQ ID NO: 1451631 - DNA, 15 bp, Homo sapiens
taacctggatttttt

SEQ ID NO: 1451632 - DNA, 15 bp, Homo sapiens
ataacctggattttt

SEQ ID NO: 1451633 - DNA, 15 bp, Homo sapiens
aataacctggatttt

SEQ ID NO: 1451634 - DNA, 15 bp, Homo sapiens
caataacctggattt

SEQ ID NO: 1451635 - DNA, 15 bp, Homo sapiens
ccaataacctggatt

SEQ ID NO: 1451636 - DNA, 15 bp, Homo sapiens
cccaataacctggat

SEQ ID NO: 1451637 - DNA, 15 bp, Homo sapiens
tcccaataacctgga

SEQ ID NO: 1451638 - DNA, 15 bp, Homo sapiens
ctcccaataacctgg

SEQ ID NO: 1451639 - DNA, 15 bp, Homo sapiens
actcccaataacctg

SEQ ID NO: 1451640 - DNA, 15 bp, Homo sapiens
aactcccaataacct

SEQ ID NO: 1451641 - DNA, 15 bp, Homo sapiens
caactcccaataacc

SEQ ID NO: 1451642 - DNA, 15 bp, Homo sapiens
tcaactcccaataac

SEQ ID NO: 1451643 - DNA, 15 bp, Homo sapiens
ttcaactcccaataa

SEQ ID NO: 1451644 - DNA, 15 bp, Homo sapiens
gttcaactcccaata

SEQ ID NO: 1451645 - DNA, 15 bp, Homo sapiens
tgttcaactcccaat

SEQ ID NO: 1451646 - DNA, 15 bp, Homo sapiens
ttgttcaactcccaa

SEQ ID NO: 1451647 - DNA, 15 bp, Homo sapiens
tttgttcaactccca

SEQ ID NO: 1451648 - DNA, 15 bp, Homo sapiens
gtttgttcaactccc

SEQ ID NO: 1451649 - DNA, 15 bp, Homo sapiens
agtttgttcaactcc

SEQ ID NO: 1451650 - DNA, 15 bp, Homo sapiens
gagtttgttcaactc

SEQ ID NO: 1451651 - DNA, 15 bp, Homo sapiens
tgagtttgttcaact

SEQ ID NO: 1451652 - DNA, 15 bp, Homo sapiens
gtgagtttgttcaac

SEQ ID NO: 1451653 - DNA, 15 bp, Homo sapiens
agtgagtttgttcaa

SEQ ID NO: 1451654 - DNA, 15 bp, Homo sapiens
cagtgagtttgttca

SEQ ID NO: 1451655 - DNA, 15 bp, Homo sapiens
tcagtgagtttgttc

SEQ ID NO: 1451656 - DNA, 15 bp, Homo sapiens
ctcagtgagtttgtt

SEQ ID NO: 1451657 - DNA, 15 bp, Homo sapiens
tctcagtgagtttgt

SEQ ID NO: 1451658 - DNA, 15 bp, Homo sapiens
gtctcagtgagtttg

SEQ ID NO: 1451659 - DNA, 15 bp, Homo sapiens
ggtctcagtgagttt

SEQ ID NO: 1451660 - DNA, 15 bp, Homo sapiens
tggtctcagtgagtt

SEQ ID NO: 1451661 - DNA, 15 bp, Homo sapiens
gtggtctcagtgagt

SEQ ID NO: 1451662 - DNA, 15 bp, Homo sapiens
ggtggtctcagtgag

SEQ ID NO: 1451663 - DNA, 15 bp, Homo sapiens
cggtggtctcagtga

SEQ ID NO: 1451664 - DNA, 15 bp, Homo sapiens
tcggtggtctcagtg

SEQ ID NO: 1451665 - DNA, 15 bp, Homo sapiens
gtcggtggtctcagt

SEQ ID NO: 1451666 - DNA, 15 bp, Homo sapiens
ggtcggtggtctcag

SEQ ID NO: 1451667 - DNA, 15 bp, Homo sapiens
tggtcggtggtctca

SEQ ID NO: 1451668 - DNA, 15 bp, Homo sapiens
atggtcggtggtctc

SEQ ID NO: 1451669 - DNA, 15 bp, Homo sapiens
aatggtcggtggtct

SEQ ID NO: 1451670 - DNA, 15 bp, Homo sapiens
gaatggtcggtggtc

SEQ ID NO: 1451671 - DNA, 15 bp, Homo sapiens
agaatggtcggtggt

SEQ ID NO: 1451672 - DNA, 15 bp, Homo sapiens
aagaatggtcggtgg

SEQ ID NO: 1451673 - DNA, 15 bp, Homo sapiens
aaagaatggtcggtg

SEQ ID NO: 1451674 - DNA, 15 bp, Homo sapiens
taaagaatggtcggt

SEQ ID NO: 1451675 - DNA, 15 bp, Homo sapiens
ataaagaatggtcgg

SEQ ID NO: 1451676 - DNA, 15 bp, Homo sapiens
cataaagaatggtcg

SEQ ID NO: 1451677 - DNA, 15 bp, Homo sapiens
ccataaagaatggtc

SEQ ID NO: 1451678 - DNA, 15 bp, Homo sapiens
cccataaagaatggt

SEQ ID NO: 1451679 - DNA, 15 bp, Homo sapiens
ccccataaagaatgg

SEQ ID NO: 1451680 - DNA, 15 bp, Homo sapiens
cccccataaagaatg

SEQ ID NO: 1451681 - DNA, 15 bp, Homo sapiens
gcccccataaagaat

SEQ ID NO: 1451682 - DNA, 15 bp, Homo sapiens
tgcccccataaagaa

SEQ ID NO: 1451683 - DNA, 15 bp, Homo sapiens
atgcccccataaaga

SEQ ID NO: 1451684 - DNA, 15 bp, Homo sapiens
aatgcccccataaag

SEQ ID NO: 1451685 - DNA, 15 bp, Homo sapiens
aaatgcccccataaa

SEQ ID NO: 1451686 - DNA, 15 bp, Homo sapiens
caaatgcccccataa

SEQ ID NO: 1451687 - DNA, 15 bp, Homo sapiens
acaaatgcccccata

SEQ ID NO: 1451688 - DNA, 15 bp, Homo sapiens
cacaaatgcccccat

SEQ ID NO: 1451689 - DNA, 15 bp, Homo sapiens
ccacaaatgccccca

SEQ ID NO: 1451690 - DNA, 15 bp, Homo sapiens
accacaaatgccccc

SEQ ID NO: 1451691 - DNA, 15 bp, Homo sapiens
aaccacaaatgcccc

SEQ ID NO: 1451692 - DNA, 15 bp, Homo sapiens
caaccacaaatgccc

SEQ ID NO: 1451693 - DNA, 15 bp, Homo sapiens
tcaaccacaaatgcc

SEQ ID NO: 1451694 - DNA, 15 bp, Homo sapiens
ctcaaccacaaatgc

SEQ ID NO: 1451695 - DNA, 15 bp, Homo sapiens
gctcaaccacaaatg

SEQ ID NO: 1451696 - DNA, 15 bp, Homo sapiens
ggctcaaccacaaat

SEQ ID NO: 1451697 - DNA, 15 bp, Homo sapiens
tggctcaaccacaaa

SEQ ID NO: 1451698 - DNA, 15 bp, Homo sapiens
atggctcaaccacaa

SEQ ID NO: 1451699 - DNA, 15 bp, Homo sapiens
catggctcaaccaca

SEQ ID NO: 1451700 - DNA, 15 bp, Homo sapiens
ccatggctcaaccac

SEQ ID NO: 1451701 - DNA, 15 bp, Homo sapiens
cccatggctcaacca

SEQ ID NO: 1451702 - DNA, 15 bp, Homo sapiens
tcccatggctcaacc

SEQ ID NO: 1451703 - DNA, 15 bp, Homo sapiens
ctcccatggctcaac

SEQ ID NO: 1451704 - DNA, 15 bp, Homo sapiens
tctcccatggctcaa

SEQ ID NO: 1451705 - DNA, 15 bp, Homo sapiens
gtctcccatggctca

SEQ ID NO: 1451706 - DNA, 15 bp, Homo sapiens
agtctcccatggctc

SEQ ID NO: 1451707 - DNA, 15 bp, Homo sapiens
gagtctcccatggct

SEQ ID NO: 1451708 - DNA, 15 bp, Homo sapiens
tgagtctcccatggc

SEQ ID NO: 1451709 - DNA, 15 bp, Homo sapiens
ctgagtctcccatgg
